United States Patent Application Publication US 2018/0305689 A1 - sequence listing, part 51

SEQ ID NO: 694386 - RNA, 19 nt, Artificial Sequence
  Description of Artificial Sequence: Synthetic oligonucleotide
  Sense strand starting at position 1319 of SEQ ID NO: 586130
ccuuaucuuggucauucua

SEQ ID NO: 694387 - RNA, 19 nt, Artificial Sequence
  Description of Artificial Sequence: Synthetic oligonucleotide
  Antisense strand to SEQ ID NO: 694386
uagaaugaccaagauaagg

SEQ ID NO: 694388 - RNA, 19 nt, Artificial Sequence
  Description of Artificial Sequence: Synthetic oligonucleotide
  Sense strand starting at position 1321 of SEQ ID NO: 586130
uuaucuuggucauucuaca

SEQ ID NO: 694389 - RNA, 19 nt, Artificial Sequence
  Description of Artificial Sequence: Synthetic oligonucleotide
  Antisense strand to SEQ ID NO: 694388
uguagaaugaccaagauaa

SEQ ID NO: 694390 - RNA, 19 nt, Artificial Sequence
  Description of Artificial Sequence: Synthetic oligonucleotide
  Sense strand starting at position 1333 of SEQ ID NO: 586130
uucuacaauuaguugucaa

SEQ ID NO: 694391 - RNA, 19 nt, Artificial Sequence
  Description of Artificial Sequence: Synthetic oligonucleotide
  Antisense strand to SEQ ID NO: 694390
uugacaacuaauuguagaa

SEQ ID NO: 694392 - RNA, 19 nt, Artificial Sequence
  Description of Artificial Sequence: Synthetic oligonucleotide
  Sense strand starting at position 1340 of SEQ ID NO: 586130
auuaguugucaagaaucug

SEQ ID NO: 694393 - RNA, 19 nt, Artificial Sequence
  Description of Artificial Sequence: Synthetic oligonucleotide
  Antisense strand to SEQ ID NO: 694392
cagauucuugacaacuaau

SEQ ID NO: 694394 - RNA, 19 nt, Artificial Sequence
  Description of Artificial Sequence: Synthetic oligonucleotide
  Sense strand starting at position 1421 of SEQ ID NO: 586130
uucuaucgccuagugcuua

SEQ ID NO: 694395 - RNA, 19 nt, Artificial Sequence
  Description of Artificial Sequence: Synthetic oligonucleotide
  Antisense strand to SEQ ID NO: 694394
uaagcacuaggcgauagaa

SEQ ID NO: 694396 - RNA, 19 nt, Artificial Sequence
  Description of Artificial Sequence: Synthetic oligonucleotide
  Sense strand starting at position 1699 of SEQ ID NO: 586130
gguugcuuccauuacuaca

SEQ ID NO: 694397 - RNA, 19 nt, Artificial Sequence
  Description of Artificial Sequence: Synthetic oligonucleotide
  Antisense strand to SEQ ID NO: 694396
uguaguaauggaagcaacc

SEQ ID NO: 694398 - RNA, 19 nt, Artificial Sequence
  Description of Artificial Sequence: Synthetic oligonucleotide
  Sense strand starting at position 1719 of SEQ ID NO: 586130
aaaguaagucaaugagauc

SEQ ID NO: 694399 - RNA, 19 nt, Artificial Sequence
  Description of Artificial Sequence: Synthetic oligonucleotide
  Antisense strand to SEQ ID NO: 694398
gaucucauugacuuacuuu

SEQ ID NO: 694400 - RNA, 19 nt, Artificial Sequence
  Description of Artificial Sequence: Synthetic oligonucleotide
  Sense strand starting at position 2069 of SEQ ID NO: 586130
ccagguuguccuggaaauc

SEQ ID NO: 694401 - RNA, 19 nt, Artificial Sequence
  Description of Artificial Sequence: Synthetic oligonucleotide
  Antisense strand to SEQ ID NO: 694400
gauuuccaggacaaccugg

SEQ ID NO: 694402 - RNA, 19 nt, Artificial Sequence
  Description of Artificial Sequence: Synthetic oligonucleotide
  Sense strand starting at position 2081 of SEQ ID NO: 586130
ggaaauccuaagcaugguu

SEQ ID NO: 694403 - RNA, 19 nt, Artificial Sequence
  Description of Artificial Sequence: Synthetic oligonucleotide
  Antisense strand to SEQ ID NO: 694402
aaccaugcuuaggauuucc

SEQ ID NO: 694404 - RNA, 19 nt, Artificial Sequence
  Description of Artificial Sequence: Synthetic oligonucleotide
  Sense strand starting at position 2130 of SEQ ID NO: 586130
acguaaccuauugagaguu

SEQ ID NO: 694405 - RNA, 19 nt, Artificial Sequence
  Description of Artificial Sequence: Synthetic oligonucleotide
  Antisense strand to SEQ ID NO: 694404
aacucucaauagguuacgu

SEQ ID NO: 694406 - RNA, 19 nt, Artificial Sequence
  Description of Artificial Sequence: Synthetic oligonucleotide
  Sense strand starting at position 2143 of SEQ ID NO: 586130
agaguuuaugcuuacuucu

SEQ ID NO: 694407 - RNA, 19 nt, Artificial Sequence
  Description of Artificial Sequence: Synthetic oligonucleotide
  Antisense strand to SEQ ID NO: 694406
agaaguaagcauaaacucu

SEQ ID NO: 694408 - RNA, 19 nt, Artificial Sequence
  Description of Artificial Sequence: Synthetic oligonucleotide
  Sense strand starting at position 2206 of SEQ ID NO: 586130
gccucuaucaguuaggaug

SEQ ID NO: 694409 - RNA, 19 nt, Artificial Sequence
  Description of Artificial Sequence: Synthetic oligonucleotide
  Antisense strand to SEQ ID NO: 694408
cauccuaacugauagaggc

SEQ ID NO: 694410 - RNA, 19 nt, Artificial Sequence
  Description of Artificial Sequence: Synthetic oligonucleotide
  Sense strand starting at position 2712 of SEQ ID NO: 586130
aggacuuccugggagauuu

SEQ ID NO: 694411 - RNA, 19 nt, Artificial Sequence
  Description of Artificial Sequence: Synthetic oligonucleotide
  Antisense strand to SEQ ID NO: 694410
aaaucucccaggaaguccu

SEQ ID NO: 694412 - RNA, 19 nt, Artificial Sequence
  Description of Artificial Sequence: Synthetic oligonucleotide
  Sense strand starting at position 2916 of SEQ ID NO: 586130
cugacuguccuuggaguga

SEQ ID NO: 694413 - RNA, 19 nt, Artificial Sequence
  Description of Artificial Sequence: Synthetic oligonucleotide
  Antisense strand to SEQ ID NO: 694412
ucacuccaaggacagucag

SEQ ID NO: 694414 - RNA, 19 nt, Artificial Sequence
  Description of Artificial Sequence: Synthetic oligonucleotide
  Sense strand starting at position 2937 of SEQ ID NO: 586130
agguuuccagcucaaacaa

SEQ ID NO: 694415 - RNA, 19 nt, Artificial Sequence
  Description of Artificial Sequence: Synthetic oligonucleotide
  Antisense strand to SEQ ID NO: 694414
uuguuugagcuggaaaccu

SEQ ID NO: 694416 - RNA, 19 nt, Artificial Sequence
  Description of Artificial Sequence: Synthetic oligonucleotide
  Sense strand starting at position 2969 of SEQ ID NO: 586130
uuacuuucucaguagcuca

SEQ ID NO: 694417 - RNA, 19 nt, Artificial Sequence
  Description of Artificial Sequence: Synthetic oligonucleotide
  Antisense strand to SEQ ID NO: 694416
ugagcuacugagaaaguaa

SEQ ID NO: 694418 - RNA, 19 nt, Artificial Sequence
  Description of Artificial Sequence: Synthetic oligonucleotide
  Sense strand starting at position 3006 of SEQ ID NO: 586130
gaaacuuguuagccuugau

SEQ ID NO: 694419 - RNA, 19 nt, Artificial Sequence
  Description of Artificial Sequence: Synthetic oligonucleotide
  Antisense strand to SEQ ID NO: 694418
aucaaggcuaacaaguuuc

SEQ ID NO: 694420 - RNA, 19 nt, Artificial Sequence
  Description of Artificial Sequence: Synthetic oligonucleotide
  Sense strand starting at position 3041 of SEQ ID NO: 586130
uggauccaucgugaaauca

SEQ ID NO: 694421 - RNA, 19 nt, Artificial Sequence
  Description of Artificial Sequence: Synthetic oligonucleotide
  Antisense strand to SEQ ID NO: 694420
ugauuucacgauggaucca

SEQ ID NO: 694422 - RNA, 19 nt, Artificial Sequence
  Description of Artificial Sequence: Synthetic oligonucleotide
  Sense strand starting at position 3050 of SEQ ID NO: 586130
cgugaaaucaaucacagug

SEQ ID NO: 694423 - RNA, 19 nt, Artificial Sequence
  Description of Artificial Sequence: Synthetic oligonucleotide
  Antisense strand to SEQ ID NO: 694422
cacugugauugauuucacg

SEQ ID NO: 694424 - RNA, 19 nt, Artificial Sequence
  Description of Artificial Sequence: Synthetic oligonucleotide
  Sense strand starting at position 3299 of SEQ ID NO: 586130
cuguuaucucaugauccau

SEQ ID NO: 694425 - RNA, 19 nt, Artificial Sequence
  Description of Artificial Sequence: Synthetic oligonucleotide
  Antisense strand to SEQ ID NO: 694424
auggaucaugagauaacag

SEQ ID NO: 694426 - RNA, 19 nt, Artificial Sequence
  Description of Artificial Sequence: Synthetic oligonucleotide
  Sense strand starting at position 3301 of SEQ ID NO: 586130
guuaucucaugauccauua

SEQ ID NO: 694427 - RNA, 19 nt, Artificial Sequence
  Description of Artificial Sequence: Synthetic oligonucleotide
  Antisense strand to SEQ ID NO: 694426
uaauggaucaugagauaac

SEQ ID NO: 694428 - RNA, 19 nt, Artificial Sequence
  Description of Artificial Sequence: Synthetic oligonucleotide
  Sense strand starting at position 3557 of SEQ ID NO: 586130
caagguaauguacaaguua

SEQ ID NO: 694429 - RNA, 19 nt, Artificial Sequence
  Description of Artificial Sequence: Synthetic oligonucleotide
  Antisense strand to SEQ ID NO: 694428
uaacuuguacauuaccuug

SEQ ID NO: 694430 - RNA, 19 nt, Artificial Sequence
  Description of Artificial Sequence: Synthetic oligonucleotide
  Sense strand starting at position 3846 of SEQ ID NO: 586130
cugaguccacaaugguuaa

SEQ ID NO: 694431 - RNA, 19 nt, Artificial Sequence
  Description of Artificial Sequence: Synthetic oligonucleotide
  Antisense strand to SEQ ID NO: 694430
uuaaccauuguggacucag

SEQ ID NO: 694432 - RNA, 19 nt, Artificial Sequence
  Description of Artificial Sequence: Synthetic oligonucleotide
  Sense strand starting at position 3875 of SEQ ID NO: 586130
aguugaaacuggccaaauu

SEQ ID NO: 694433 - RNA, 19 nt, Artificial Sequence
  Description of Artificial Sequence: Synthetic oligonucleotide
  Antisense strand to SEQ ID NO: 694432
aauuuggccaguuucaacu

SEQ ID NO: 694434 - RNA, 19 nt, Artificial Sequence
  Description of Artificial Sequence: Synthetic oligonucleotide
  Sense strand starting at position 3894 of SEQ ID NO: 586130
gucccauauuuauggauuu

SEQ ID NO: 694435 - RNA, 19 nt, Artificial Sequence
  Description of Artificial Sequence: Synthetic oligonucleotide
  Antisense strand to SEQ ID NO: 694434
aaauccauaaauaugggac

SEQ ID NO: 694436 - RNA, 19 nt, Artificial Sequence
  Description of Artificial Sequence: Synthetic oligonucleotide
  Sense strand starting at position 8 of SEQ ID NO: 586131
uucugugacugcuuccuua

SEQ ID NO: 694437 - RNA, 19 nt, Artificial Sequence
  Description of Artificial Sequence: Synthetic oligonucleotide
  Antisense strand to SEQ ID NO: 694436
uaaggaagcagucacagaa

SEQ ID NO: 694438 - RNA, 19 nt, Artificial Sequence
  Description of Artificial Sequence: Synthetic oligonucleotide
  Sense strand starting at position 11 of SEQ ID NO: 586131
ugugacugcuuccuuaacu

SEQ ID NO: 694439 - RNA, 19 nt, Artificial Sequence
  Description of Artificial Sequence: Synthetic oligonucleotide
  Antisense strand to SEQ ID NO: 694438
aguuaaggaagcagucaca

SEQ ID NO: 694440 - RNA, 19 nt, Artificial Sequence
  Description of Artificial Sequence: Synthetic oligonucleotide
  Sense strand starting at position 12 of SEQ ID NO: 586131
gugacugcuuccuuaacuu

SEQ ID NO: 694441 - RNA, 19 nt, Artificial Sequence
  Description of Artificial Sequence: Synthetic oligonucleotide
  Antisense strand to SEQ ID NO: 694440
aaguuaaggaagcagucac

SEQ ID NO: 694442 - RNA, 19 nt, Artificial Sequence
  Description of Artificial Sequence: Synthetic oligonucleotide
  Sense strand starting at position 50 of SEQ ID NO: 586131
ucguccaugcuguaacaua

SEQ ID NO: 694443 - RNA, 19 nt, Artificial Sequence
  Description of Artificial Sequence: Synthetic oligonucleotide
  Antisense strand to SEQ ID NO: 694442
uauguuacagcauggacga

SEQ ID NO: 694444 - RNA, 19 nt, Artificial Sequence
  Description of Artificial Sequence: Synthetic oligonucleotide
  Sense strand starting at position 225 of SEQ ID NO: 586131
agguacgugucaccaugua

SEQ ID NO: 694445 - RNA, 19 nt, Artificial Sequence
  Description of Artificial Sequence: Synthetic oligonucleotide
  Antisense strand to SEQ ID NO: 694444
uacauggugacacguaccu

SEQ ID NO: 694446 - RNA, 19 nt, Artificial Sequence
  Description of Artificial Sequence: Synthetic oligonucleotide
  Sense strand starting at position 230 of SEQ ID NO: 586131
cgugucaccauguaugguu

SEQ ID NO: 694447 - RNA, 19 nt, Artificial Sequence
  Description of Artificial Sequence: Synthetic oligonucleotide
  Antisense strand to SEQ ID NO: 694446
aaccauacauggugacacg

SEQ ID NO: 694448 - RNA, 19 nt, Artificial Sequence
  Description of Artificial Sequence: Synthetic oligonucleotide
  Sense strand starting at position 401 of SEQ ID NO: 586131
aguauucuacuauguguau

SEQ ID NO: 694449 - RNA, 19 nt, Artificial Sequence
  Description of Artificial Sequence: Synthetic oligonucleotide
  Antisense strand to SEQ ID NO: 694448
auacacauaguagaauacu

SEQ ID NO: 694450 - RNA, 19 nt, Artificial Sequence
  Description of Artificial Sequence: Synthetic oligonucleotide
  Sense strand starting at position 433 of SEQ ID NO: 586131
uggaucaagucaucucuuu

SEQ ID NO: 694451 - RNA, 19 nt, Artificial Sequence
  Description of Artificial Sequence: Synthetic oligonucleotide
  Antisense strand to SEQ ID NO: 694450
aaagagaugacuugaucca

SEQ ID NO: 694452 - RNA, 19 nt, Artificial Sequence
  Description of Artificial Sequence: Synthetic oligonucleotide
  Sense strand starting at position 751 of SEQ ID NO: 586131
cggcccagguaucuugaua

SEQ ID NO: 694453 - RNA, 19 nt, Artificial Sequence
  Description of Artificial Sequence: Synthetic oligonucleotide
  Antisense strand to SEQ ID NO: 694452
uaucaagauaccugggccg

SEQ ID NO: 694454 - RNA, 19 nt, Artificial Sequence
  Description of Artificial Sequence: Synthetic oligonucleotide
  Sense strand starting at position 756 of SEQ ID NO: 586131
cagguaucuugauagaugc

SEQ ID NO: 694455 - RNA, 19 nt, Artificial Sequence
  Description of Artificial Sequence: Synthetic oligonucleotide
  Antisense strand to SEQ ID NO: 694454
gcaucuaucaagauaccug

SEQ ID NO: 694456 - RNA, 19 nt, Artificial Sequence
  Description of Artificial Sequence: Synthetic oligonucleotide
  Sense strand starting at position 758 of SEQ ID NO: 586131
gguaucuugauagaugcuu

SEQ ID NO: 694457 - RNA, 19 nt, Artificial Sequence
  Description of Artificial Sequence: Synthetic oligonucleotide
  Antisense strand to SEQ ID NO: 694456
aagcaucuaucaagauacc

SEQ ID NO: 694458 - RNA, 19 nt, Artificial Sequence
  Description of Artificial Sequence: Synthetic oligonucleotide
  Sense strand starting at position 763 of SEQ ID NO: 586131
cuugauagaugcuugguuu

SEQ ID NO: 694459 - RNA, 19 nt, Artificial Sequence
  Description of Artificial Sequence: Synthetic oligonucleotide
  Antisense strand to SEQ ID NO: 694458
aaaccaagcaucuaucaag

SEQ ID NO: 694460 - RNA, 19 nt, Artificial Sequence
  Description of Artificial Sequence: Synthetic oligonucleotide
  Sense strand starting at position 766 of SEQ ID NO: 586131
gauagaugcuugguuugcu

SEQ ID NO: 694461 - RNA, 19 nt, Artificial Sequence
  Description of Artificial Sequence: Synthetic oligonucleotide
  Antisense strand to SEQ ID NO: 694460
agcaaaccaagcaucuauc

SEQ ID NO: 694462 - RNA, 19 nt, Artificial Sequence
  Description of Artificial Sequence: Synthetic oligonucleotide
  Sense strand starting at position 792 of SEQ ID NO: 586131
uugggcugucaugaauaau

SEQ ID NO: 694463 - RNA, 19 nt, Artificial Sequence
  Description of Artificial Sequence: Synthetic oligonucleotide
  Antisense strand to SEQ ID NO: 694462
auuauucaugacagcccaa

SEQ ID NO: 694464 - RNA, 19 nt, Artificial Sequence
  Description of Artificial Sequence: Synthetic oligonucleotide
  Sense strand starting at position 795 of SEQ ID NO: 586131
ggcugucaugaauaauguc

SEQ ID NO: 694465 - RNA, 19 nt, Artificial Sequence
  Description of Artificial Sequence: Synthetic oligonucleotide
  Antisense strand to SEQ ID NO: 694464
gacauuauucaugacagcc

SEQ ID NO: 694466 - RNA, 19 nt, Artificial Sequence
  Description of Artificial Sequence: Synthetic oligonucleotide
  Sense strand starting at position 804 of SEQ ID NO: 586131
gaauaaugucgugaauaug

SEQ ID NO: 694467 - RNA, 19 nt, Artificial Sequence
  Description of Artificial Sequence: Synthetic oligonucleotide
  Antisense strand to SEQ ID NO: 694466
cauauucacgacauuauuc

SEQ ID NO: 694468 - RNA, 19 nt, Artificial Sequence
  Description of Artificial Sequence: Synthetic oligonucleotide
  Sense strand starting at position 807 of SEQ ID NO: 586131
uaaugucgugaauaugaac

SEQ ID NO: 694469 - RNA, 19 nt, Artificial Sequence
  Description of Artificial Sequence: Synthetic oligonucleotide
  Antisense strand to SEQ ID NO: 694468
guucauauucacgacauua

SEQ ID NO: 694470 - RNA, 19 nt, Artificial Sequence
  Description of Artificial Sequence: Synthetic oligonucleotide
  Sense strand starting at position 895 of SEQ ID NO: 586131
gcggaucauggguaauucu

SEQ ID NO: 694471 - RNA, 19 nt, Artificial Sequence
  Description of Artificial Sequence: Synthetic oligonucleotide
  Antisense strand to SEQ ID NO: 694470
agaauuacccaugauccgc

SEQ ID NO: 694472 - RNA, 19 nt, Artificial Sequence
  Description of Artificial Sequence: Synthetic oligonucleotide
  Sense strand starting at position 932 of SEQ ID NO: 586131
augccaugcuguuuccaua

SEQ ID NO: 694473 - RNA, 19 nt, Artificial Sequence
  Description of Artificial Sequence: Synthetic oligonucleotide
  Antisense strand to SEQ ID NO: 694472
uauggaaacagcauggcau

SEQ ID NO: 694474 - RNA, 19 nt, Artificial Sequence
  Description of Artificial Sequence: Synthetic oligonucleotide
  Sense strand starting at position 1143 of SEQ ID NO: 586131
gggagcaucugugaucaga

SEQ ID NO: 694475 - RNA, 19 nt, Artificial Sequence
  Description of Artificial Sequence: Synthetic oligonucleotide
  Antisense strand to SEQ ID NO: 694474
ucugaucacagaugcuccc

SEQ ID NO: 694476 - RNA, 19 nt, Artificial Sequence
  Description of Artificial Sequence: Synthetic oligonucleotide
  Sense strand starting at position 1415 of SEQ ID NO: 586131
guugcagcgauccuugagu

SEQ ID NO: 694477 - RNA, 19 nt, Artificial Sequence
  Description of Artificial Sequence: Synthetic oligonucleotide
  Antisense strand to SEQ ID NO: 694476
acucaaggaucgcugcaac

SEQ ID NO: 694478 - RNA, 19 nt, Artificial Sequence
  Description of Artificial Sequence: Synthetic oligonucleotide
  Sense strand starting at position 1439 of SEQ ID NO: 586131
uucguuaguuaacuggaau

SEQ ID NO: 694479 - RNA, 19 nt, Artificial Sequence
  Description of Artificial Sequence: Synthetic oligonucleotide
  Antisense strand to SEQ ID NO: 694478
auuccaguuaacuaacgaa

SEQ ID NO: 694480 - RNA, 19 nt, Artificial Sequence
  Description of Artificial Sequence: Synthetic oligonucleotide
  Sense strand starting at position 1440 of SEQ ID NO: 586131
ucguuaguuaacuggaauu

SEQ ID NO: 694481 - RNA, 19 nt, Artificial Sequence
  Description of Artificial Sequence: Synthetic oligonucleotide
  Antisense strand to SEQ ID NO: 694480
aauuccaguuaacuaacga

SEQ ID NO: 694482 - RNA, 19 nt, Artificial Sequence
  Description of Artificial Sequence: Synthetic oligonucleotide
  Sense strand starting at position 1627 of SEQ ID NO: 586131
cgaggugaccuguaaucga

SEQ ID NO: 694483 - RNA, 19 nt, Artificial Sequence
  Description of Artificial Sequence: Synthetic oligonucleotide
  Antisense strand to SEQ ID NO: 694482
ucgauuacaggucaccucg

SEQ ID NO: 694484 - RNA, 19 nt, Artificial Sequence
  Description of Artificial Sequence: Synthetic oligonucleotide
  Sense strand starting at position 2055 of SEQ ID NO: 586131
gcuuccuuccggucguuaa

SEQ ID NO: 694485 - RNA, 19 nt, Artificial Sequence
  Description of Artificial Sequence: Synthetic oligonucleotide
  Antisense strand to SEQ ID NO: 694484
uuaacgaccggaaggaagc

SEQ ID NO: 694486 - RNA, 19 nt, Artificial Sequence
  Description of Artificial Sequence: Synthetic oligonucleotide
  Sense strand starting at position 2274 of SEQ ID NO: 586131
uccggagucuggaguaaga

SEQ ID NO: 694487 - RNA, 19 nt, Artificial Sequence
  Description of Artificial Sequence: Synthetic oligonucleotide
  Antisense strand to SEQ ID NO: 694486
ucuuacuccagacuccgga

SEQ ID NO: 694488 - RNA, 19 nt, Artificial Sequence
  Description of Artificial Sequence: Synthetic oligonucleotide
  Sense strand starting at position 2395 of SEQ ID NO: 586131
ucggcagagugguccaaau

SEQ ID NO: 694489 - RNA, 19 nt, Artificial Sequence
  Description of Artificial Sequence: Synthetic oligonucleotide
  Antisense strand to SEQ ID NO: 694488
auuuggaccacucugccga

SEQ ID NO: 694490 - RNA, 19 nt, Artificial Sequence
  Description of Artificial Sequence: Synthetic oligonucleotide
  Sense strand starting at position 2397 of SEQ ID NO: 586131
ggcagagugguccaaaugu

SEQ ID NO: 694491 - RNA, 19 nt, Artificial Sequence
  Description of Artificial Sequence: Synthetic oligonucleotide
  Antisense strand to SEQ ID NO: 694490
acauuuggaccacucugcc

SEQ ID NO: 694492 - RNA, 19 nt, Artificial Sequence
  Description of Artificial Sequence: Synthetic oligonucleotide
  Sense strand starting at position 2406 of SEQ ID NO: 586131
guccaaaugucuucuuguu

SEQ ID NO: 694493 - RNA, 19 nt, Artificial Sequence
  Description of Artificial Sequence: Synthetic oligonucleotide
  Antisense strand to SEQ ID NO: 694492
aacaagaagacauuuggac

SEQ ID NO: 694494 - RNA, 19 nt, Artificial Sequence
  Description of Artificial Sequence: Synthetic oligonucleotide
  Sense strand starting at position 2413 of SEQ ID NO: 586131
ugucuucuuguugggagau

SEQ ID NO: 694495 - RNA, 19 nt, Artificial Sequence
  Description of Artificial Sequence: Synthetic oligonucleotide
  Antisense strand to SEQ ID NO: 694494
aucucccaacaagaagaca

SEQ ID NO: 694496 - RNA, 19 nt, Artificial Sequence
  Description of Artificial Sequence: Synthetic oligonucleotide
  Sense strand starting at position 2755 of SEQ ID NO: 586131
ugagcuaugaucgcgccua

SEQ ID NO: 694497 - RNA, 19 nt, Artificial Sequence
  Description of Artificial Sequence: Synthetic oligonucleotide
  Antisense strand to SEQ ID NO: 694496
uaggcgcgaucauagcuca

SEQ ID NO: 694498 - RNA, 19 nt, Artificial Sequence
  Description of Artificial Sequence: Synthetic oligonucleotide
  Sense strand starting at position 2831 of SEQ ID NO: 586131
gcuacacuuguacgagaaa

SEQ ID NO: 694499 - RNA, 19 nt, Artificial Sequence
  Description of Artificial Sequence: Synthetic oligonucleotide
  Antisense strand to SEQ ID NO: 694498
uuucucguacaaguguagc

SEQ ID NO: 694500 - RNA, 19 nt, Artificial Sequence
  Description of Artificial Sequence: Synthetic oligonucleotide
  Sense strand starting at position 2832 of SEQ ID NO: 586131
cuacacuuguacgagaaau

SEQ ID NO: 694501 - RNA, 19 nt, Artificial Sequence
  Description of Artificial Sequence: Synthetic oligonucleotide
  Antisense strand to SEQ ID NO: 694500
auuucucguacaaguguag

SEQ ID NO: 694502 - RNA, 19 nt, Artificial Sequence
  Description of Artificial Sequence: Synthetic oligonucleotide
  Sense strand starting at position 2834 of SEQ ID NO: 586131
acacuuguacgagaaaugu

SEQ ID NO: 694503 - RNA, 19 nt, Artificial Sequence
  Description of Artificial Sequence: Synthetic oligonucleotide
  Antisense strand to SEQ ID NO: 694502
acauuucucguacaagugu

SEQ ID NO: 694504 - RNA, 19 nt, Artificial Sequence
  Description of Artificial Sequence: Synthetic oligonucleotide
  Sense strand starting at position 3409 of SEQ ID NO: 586131
gaggauuauugugugcuua

SEQ ID NO: 694505 - RNA, 19 nt, Artificial Sequence
  Description of Artificial Sequence: Synthetic oligonucleotide
  Antisense strand to SEQ ID NO: 694504
uaagcacacaauaauccuc

SEQ ID NO: 694506 - RNA, 19 nt, Artificial Sequence
  Description of Artificial Sequence: Synthetic oligonucleotide
  Sense strand starting at position 3410 of SEQ ID NO: 586131
aggauuauugugugcuuag

SEQ ID NO: 694507 - RNA, 19 nt, Artificial Sequence
  Description of Artificial Sequence: Synthetic oligonucleotide
  Antisense strand to SEQ ID NO: 694506
cuaagcacacaauaauccu

SEQ ID NO: 694508 - RNA, 19 nt, Artificial Sequence
  Description of Artificial Sequence: Synthetic oligonucleotide
  Sense strand starting at position 3411 of SEQ ID NO: 586131
ggauuauugugugcuuagg

SEQ ID NO: 694509 - RNA, 19 nt, Artificial Sequence
  Description of Artificial Sequence: Synthetic oligonucleotide
  Antisense strand to SEQ ID NO: 694508
ccuaagcacacaauaaucc

SEQ ID NO: 694510 - RNA, 19 nt, Artificial Sequence
  Description of Artificial Sequence: Synthetic oligonucleotide
  Sense strand starting at position 3443 of SEQ ID NO: 586131
uugggagaaugauagaauu

SEQ ID NO: 694511 - RNA, 19 nt, Artificial Sequence
  Description of Artificial Sequence: Synthetic oligonucleotide
  Antisense strand to SEQ ID NO: 694510
aauucuaucauucucccaa

SEQ ID NO: 694512 - RNA, 19 nt, Artificial Sequence
  Description of Artificial Sequence: Synthetic oligonucleotide
  Sense strand starting at position 3839 of SEQ ID NO: 586131
cggccugacucuucuaagu

SEQ ID NO: 694513 - RNA, 19 nt, Artificial Sequence
  Description of Artificial Sequence: Synthetic oligonucleotide
  Antisense strand to SEQ ID NO: 694512
acuuagaagagucaggccg

SEQ ID NO: 694514 - RNA, 19 nt, Artificial Sequence
  Description of Artificial Sequence: Synthetic oligonucleotide
  Sense strand starting at position 3844 of SEQ ID NO: 586131
ugacucuucuaaguagcuu

SEQ ID NO: 694515 - RNA, 19 nt, Artificial Sequence
  Description of Artificial Sequence: Synthetic oligonucleotide
  Antisense strand to SEQ ID NO: 694514
aagcuacuuagaagaguca

SEQ ID NO: 694516 - RNA, 19 nt, Artificial Sequence
  Description of Artificial Sequence: Synthetic oligonucleotide
  Sense strand starting at position 10 of SEQ ID NO: 586132
gcuggugaccuagauuaag

SEQ ID NO: 694517 - RNA, 19 nt, Artificial Sequence
  Description of Artificial Sequence: Synthetic oligonucleotide
  Antisense strand to SEQ ID NO: 694516
cuuaaucuaggucaccagc

SEQ ID NO: 694518 - RNA, 19 nt, Artificial Sequence
  Description of Artificial Sequence: Synthetic oligonucleotide
  Sense strand starting at position 112 of SEQ ID NO: 586132
cgaagagucaaguaauuac

SEQ ID NO: 694519 - RNA, 19 nt, Artificial Sequence
  Description of Artificial Sequence: Synthetic oligonucleotide
  Antisense strand to SEQ ID NO: 694518
guaauuacuugacucuucg

SEQ ID NO: 694520 - RNA, 19 nt, Artificial Sequence
  Description of Artificial Sequence: Synthetic oligonucleotide
  Sense strand starting at position 265 of SEQ ID NO: 586132
gcaggcagccuugcuaauu

SEQ ID NO: 694521 - RNA, 19 nt, Artificial Sequence
  Description of Artificial Sequence: Synthetic oligonucleotide
  Antisense strand to SEQ ID NO: 694520
aauuagcaaggcugccugc

SEQ ID NO: 694522 - RNA, 19 nt, Artificial Sequence
  Description of Artificial Sequence: Synthetic oligonucleotide
  Sense strand starting at position 326 of SEQ ID NO: 586132
ggaugagcuuggguagaua

SEQ ID NO: 694523 - RNA, 19 nt, Artificial Sequence
  Description of Artificial Sequence: Synthetic oligonucleotide
  Antisense strand to SEQ ID NO: 694522
uaucuacccaagcucaucc

SEQ ID NO: 694524 - RNA, 19 nt, Artificial Sequence
  Description of Artificial Sequence: Synthetic oligonucleotide
  Sense strand starting at position 329 of SEQ ID NO: 586132
ugagcuuggguagauauua

SEQ ID NO: 694525 - RNA, 19 nt, Artificial Sequence
  Description of Artificial Sequence: Synthetic oligonucleotide
  Antisense strand to SEQ ID NO: 694524
uaauaucuacccaagcuca

SEQ ID NO: 694526 - RNA, 19 nt, Artificial Sequence
  Description of Artificial Sequence: Synthetic oligonucleotide
  Sense strand starting at position 492 of SEQ ID NO: 586132
gcagccugagauugagauu

SEQ ID NO: 694527 - RNA, 19 nt, Artificial Sequence
  Description of Artificial Sequence: Synthetic oligonucleotide
  Antisense strand to SEQ ID NO: 694526
aaucucaaucucaggcugc

SEQ ID NO: 694528 - RNA, 19 nt, Artificial Sequence
  Description of Artificial Sequence: Synthetic oligonucleotide
  Sense strand starting at position 661 of SEQ ID NO: 586132
gcucauuagccgguguuga

SEQ ID NO: 694529 - RNA, 19 nt, Artificial Sequence
  Description of Artificial Sequence: Synthetic oligonucleotide
  Antisense strand to SEQ ID NO: 694528
ucaacaccggcuaaugagc

SEQ ID NO: 694530 - RNA, 19 nt, Artificial Sequence
  Description of Artificial Sequence: Synthetic oligonucleotide
  Sense strand starting at position 711 of SEQ ID NO: 586132
aaggaaauguccuuugcuc

SEQ ID NO: 694531 - RNA, 19 nt, Artificial Sequence
  Description of Artificial Sequence: Synthetic oligonucleotide
  Antisense strand to SEQ ID NO: 694530
gagcaaaggacauuuccuu

SEQ ID NO: 694532 - RNA, 19 nt, Artificial Sequence
  Description of Artificial Sequence: Synthetic oligonucleotide
  Sense strand starting at position 720 of SEQ ID NO: 586132
uccuuugcucaggacacaa

SEQ ID NO: 694533 - RNA, 19 nt, Artificial Sequence
  Description of Artificial Sequence: Synthetic oligonucleotide
  Antisense strand to SEQ ID NO: 694532
uuguguccugagcaaagga

SEQ ID NO: 694534 - RNA, 19 nt, Artificial Sequence
  Description of Artificial Sequence: Synthetic oligonucleotide
  Sense strand starting at position 722 of SEQ ID NO: 586132
cuuugcucaggacacaaau

SEQ ID NO: 694535 - RNA, 19 nt, Artificial Sequence
  Description of Artificial Sequence: Synthetic oligonucleotide
  Antisense strand to SEQ ID NO: 694534
auuuguguccugagcaaag

SEQ ID NO: 694536 - RNA, 19 nt, Artificial Sequence
  Description of Artificial Sequence: Synthetic oligonucleotide
  Sense strand starting at position 884 of SEQ ID NO: 586132
aaauuacugugcgcaauuu

SEQ ID NO: 694537 - RNA, 19 nt, Artificial Sequence
  Description of Artificial Sequence: Synthetic oligonucleotide
  Antisense strand to SEQ ID NO: 694536
aaauugcgcacaguaauuu

SEQ ID NO: 694538 - RNA, 19 nt, Artificial Sequence
  Description of Artificial Sequence: Synthetic oligonucleotide
  Sense strand starting at position 885 of SEQ ID NO: 586132
aauuacugugcgcaauuua

SEQ ID NO: 694539 - RNA, 19 nt, Artificial Sequence
  Description of Artificial Sequence: Synthetic oligonucleotide
  Antisense strand to SEQ ID NO: 694538
uaaauugcgcacaguaauu

SEQ ID NO: 694540 - RNA, 19 nt, Artificial Sequence
  Description of Artificial Sequence: Synthetic oligonucleotide
  Sense strand starting at position 975 of SEQ ID NO: 586132
cuucuuugugcagaaauau

SEQ ID NO: 694541 - RNA, 19 nt, Artificial Sequence
  Description of Artificial Sequence: Synthetic oligonucleotide
  Antisense strand to SEQ ID NO: 694540
auauuucugcacaaagaag

SEQ ID NO: 694542 - RNA, 19 nt, Artificial Sequence
  Description of Artificial Sequence: Synthetic oligonucleotide
  Sense strand starting at position 1092 of SEQ ID NO: 586132
aaguguguauaucuagauc

SEQ ID NO: 694543 - RNA, 19 nt, Artificial Sequence
  Description of Artificial Sequence: Synthetic oligonucleotide
  Antisense strand to SEQ ID NO: 694542
gaucuagauauacacacuu

SEQ ID NO: 694544 - RNA, 19 nt, Artificial Sequence
  Description of Artificial Sequence: Synthetic oligonucleotide
  Sense strand starting at position 1095 of SEQ ID NO: 586132
uguguauaucuagaucucu

SEQ ID NO: 694545 - RNA, 19 nt, Artificial Sequence
  Description of Artificial Sequence: Synthetic oligonucleotide
  Antisense strand to SEQ ID NO: 694544
agagaucuagauauacaca

SEQ ID NO: 694546 - RNA, 19 nt, Artificial Sequence
  Description of Artificial Sequence: Synthetic oligonucleotide
  Sense strand starting at position 1144 of SEQ ID NO: 586132
cugugugaucacgauccua

SEQ ID NO: 694547 - RNA, 19 nt, Artificial Sequence
  Description of Artificial Sequence: Synthetic oligonucleotide
  Antisense strand to SEQ ID NO: 694546
uaggaucgugaucacacag

SEQ ID NO: 694548 - RNA, 19 nt, Artificial Sequence
  Description of Artificial Sequence: Synthetic oligonucleotide
  Sense strand starting at position 1164 of SEQ ID NO: 586132
ccuauugguccugggagau

SEQ ID NO: 694549 - RNA, 19 nt, Artificial Sequence
  Description of Artificial Sequence: Synthetic oligonucleotide
  Antisense strand to SEQ ID NO: 694548
aucucccaggaccaauagg

SEQ ID NO: 694550 - RNA, 19 nt, Artificial Sequence
  Description of Artificial Sequence: Synthetic oligonucleotide
  Sense strand starting at position 1197 of SEQ ID NO: 586132
cuguuaaaucguucguguc

SEQ ID NO: 694551 - RNA, 19 nt, Artificial Sequence
  Description of Artificial Sequence: Synthetic oligonucleotide
  Antisense strand to SEQ ID NO: 694550
gacacgaacgauuuaacag

SEQ ID NO: 694552 - RNA, 19 nt, Artificial Sequence
  Description of Artificial Sequence: Synthetic oligonucleotide
  Sense strand starting at position 1729 of SEQ ID NO: 586132
cgguugagucgcuucugga

SEQ ID NO: 694553 - RNA, 19 nt, Artificial Sequence
  Description of Artificial Sequence: Synthetic oligonucleotide
  Antisense strand to SEQ ID NO: 694552
uccagaagcgacucaaccg

SEQ ID NO: 694554 - RNA, 19 nt, Artificial Sequence
  Description of Artificial Sequence: Synthetic oligonucleotide
  Sense strand starting at position 2075 of SEQ ID NO: 586132
cagauugucuccucgauga

SEQ ID NO: 694555 - RNA, 19 nt, Artificial Sequence
  Description of Artificial Sequence: Synthetic oligonucleotide
  Antisense strand to SEQ ID NO: 694554
ucaucgaggagacaaucug

SEQ ID NO: 694556 - RNA, 19 nt, Artificial Sequence
  Description of Artificial Sequence: Synthetic oligonucleotide
  Sense strand starting at position 2077 of SEQ ID NO: 586132
gauugucuccucgaugaua

SEQ ID NO: 694557 - RNA, 19 nt, Artificial Sequence
  Description of Artificial Sequence: Synthetic oligonucleotide
  Antisense strand to SEQ ID NO: 694556
uaucaucgaggagacaauc

SEQ ID NO: 694558 - RNA, 19 nt, Artificial Sequence
  Description of Artificial Sequence: Synthetic oligonucleotide
  Sense strand starting at position 2080 of SEQ ID NO: 586132
ugucuccucgaugauagaa

SEQ ID NO: 694559 - RNA, 19 nt, Artificial Sequence
  Description of Artificial Sequence: Synthetic oligonucleotide
  Antisense strand to SEQ ID NO: 694558
uucuaucaucgaggagaca

SEQ ID NO: 694560 - RNA, 19 nt, Artificial Sequence
  Description of Artificial Sequence: Synthetic oligonucleotide
  Sense strand starting at position 2095 of SEQ ID NO: 586132
agaagaguuucgagaggag

SEQ ID NO: 694561 - RNA, 19 nt, Artificial Sequence
  Description of Artificial Sequence: Synthetic oligonucleotide
  Antisense strand to SEQ ID NO: 694560
cuccucucgaaacucuucu

SEQ ID NO: 694562 - RNA, 19 nt, Artificial Sequence
  Description of Artificial Sequence: Synthetic oligonucleotide
  Sense strand starting at position 2656 of SEQ ID NO: 586132
agaaauggugcauggaaca

SEQ ID NO: 694563 - RNA, 19 nt, Artificial Sequence
  Description of Artificial Sequence: Synthetic oligonucleotide
  Antisense strand to SEQ ID NO: 694562
uguuccaugcaccauuucu

SEQ ID NO: 694564 - RNA, 19 nt, Artificial Sequence
  Description of Artificial Sequence: Synthetic oligonucleotide
  Sense strand starting at position 2674 of SEQ ID NO: 586132
agucaagucccuuauagcu

SEQ ID NO: 694565 - RNA, 19 nt, Artificial Sequence
  Description of Artificial Sequence: Synthetic oligonucleotide
  Antisense strand to SEQ ID NO: 694564
agcuauaagggacuugacu

SEQ ID NO: 694566 - RNA, 19 nt, Artificial Sequence
  Description of Artificial Sequence: Synthetic oligonucleotide
  Sense strand starting at position 2693 of SEQ ID NO: 586132
ucgcaucaaccauggaaga

SEQ ID NO: 694567 - RNA, 19 nt, Artificial Sequence
  Description of Artificial Sequence: Synthetic oligonucleotide
  Antisense strand to SEQ ID NO: 694566
ucuuccaugguugaugcga

SEQ ID NO: 694568 - RNA, 19 nt, Artificial Sequence
  Description of Artificial Sequence: Synthetic oligonucleotide
  Sense strand starting at position 2787 of SEQ ID NO: 586132
cuuauuaaugcuugggaga

SEQ ID NO: 694569 - RNA, 19 nt, Artificial Sequence
  Description of Artificial Sequence: Synthetic oligonucleotide
  Antisense strand to SEQ ID NO: 694568
ucucccaagcauuaauaag

SEQ ID NO: 694570 - RNA, 19 nt, Artificial Sequence
  Description of Artificial Sequence: Synthetic oligonucleotide
  Sense strand starting at position 2788 of SEQ ID NO: 586132
uuauuaaugcuugggagaa

SEQ ID NO: 694571 - RNA, 19 nt, Artificial Sequence
  Description of Artificial Sequence: Synthetic oligonucleotide
  Antisense strand to SEQ ID NO: 694570
uucucccaagcauuaauaa

SEQ ID NO: 694572 - RNA, 19 nt, Artificial Sequence
  Description of Artificial Sequence: Synthetic oligonucleotide
  Sense strand starting at position 2857 of SEQ ID NO: 586132
cugaccaguggucaaacua

SEQ ID NO: 694573 - RNA, 19 nt, Artificial Sequence
  Description of Artificial Sequence: Synthetic oligonucleotide
  Antisense strand to SEQ ID NO: 694572
uaguuugaccacuggucag

SEQ ID NO: 694574 - RNA, 19 nt, Artificial Sequence
  Description of Artificial Sequence: Synthetic oligonucleotide
  Sense strand starting at position 2881 of SEQ ID NO: 586132
auuccauucucacugagag

SEQ ID NO: 694575 - RNA, 19 nt, Artificial Sequence
  Description of Artificial Sequence: Synthetic oligonucleotide
  Antisense strand to SEQ ID NO: 694574
cucucagugagaauggaau

SEQ ID NO: 694576 - RNA, 19 nt, Artificial Sequence
  Description of Artificial Sequence: Synthetic oligonucleotide
  Sense strand starting at position 2882 of SEQ ID NO: 586132
uuccauucucacugagagu

SEQ ID NO: 694577 - RNA, 19 nt, Artificial Sequence
  Description of Artificial Sequence: Synthetic oligonucleotide
  Antisense strand to SEQ ID NO: 694576
acucucagugagaauggaa

SEQ ID NO: 694578 - RNA, 19 nt, Artificial Sequence
  Description of Artificial Sequence: Synthetic oligonucleotide
  Sense strand starting at position 2957 of SEQ ID NO: 586132
cagugaauccuaugagucc

SEQ ID NO: 694579 - RNA, 19 nt, Artificial Sequence
  Description of Artificial Sequence: Synthetic oligonucleotide
  Antisense strand to SEQ ID NO: 694578
ggacucauaggauucacug

SEQ ID NO: 694580 - RNA, 19 nt, Artificial Sequence
  Description of Artificial Sequence: Synthetic oligonucleotide
  Sense strand starting at position 3010 of SEQ ID NO: 586132
guuacauugguagaccuca

SEQ ID NO: 694581 - RNA, 19 nt, Artificial Sequence
  Description of Artificial Sequence: Synthetic oligonucleotide
  Antisense strand to SEQ ID NO: 694580
ugaggucuaccaauguaac

SEQ ID NO: 694582 - RNA, 19 nt, Artificial Sequence
  Description of Artificial Sequence: Synthetic oligonucleotide
  Sense strand starting at position 3112 of SEQ ID NO: 586132
aucaauaagauguggugaa

SEQ ID NO: 694583 - RNA, 19 nt, Artificial Sequence
  Description of Artificial Sequence: Synthetic oligonucleotide
  Antisense strand to SEQ ID NO: 694582
uucaccacaucuuauugau

SEQ ID NO: 694584 - RNA, 19 nt, Artificial Sequence
  Description of Artificial Sequence: Synthetic oligonucleotide
  Sense strand starting at position 3307 of SEQ ID NO: 586132
cccugagauuacgcagaga

SEQ ID NO: 694585 - RNA, 19 nt, Artificial Sequence
  Description of Artificial Sequence: Synthetic oligonucleotide
  Antisense strand to SEQ ID NO: 694584
ucucugcguaaucucaggg

SEQ ID NO: 694586 - RNA, 19 nt, Artificial Sequence
  Description of Artificial Sequence: Synthetic oligonucleotide
  Sense strand starting at position 3461 of SEQ ID NO: 586132
ugcagaaugugagcaaaca

SEQ ID NO: 694587 - RNA, 19 nt, Artificial Sequence
  Description of Artificial Sequence: Synthetic oligonucleotide
  Antisense strand to SEQ ID NO: 694586
uguuugcucacauucugca

SEQ ID NO: 694588 - RNA, 19 nt, Artificial Sequence
  Description of Artificial Sequence: Synthetic oligonucleotide
  Sense strand starting at position 3462 of SEQ ID NO: 586132
gcagaaugugagcaaacaa

SEQ ID NO: 694589 - RNA, 19 nt, Artificial Sequence
  Description of Artificial Sequence: Synthetic oligonucleotide
  Antisense strand to SEQ ID NO: 694588
uuguuugcucacauucugc

SEQ ID NO: 694590 - RNA, 19 nt, Artificial Sequence
  Description of Artificial Sequence: Synthetic oligonucleotide
  Sense strand starting at position 3536 of SEQ ID NO: 586132
ccuggaacaccuggucuau

SEQ ID NO: 694591 - RNA, 19 nt, Artificial Sequence
  Description of Artificial Sequence: Synthetic oligonucleotide
  Antisense strand to SEQ ID NO: 694590
auagaccagguguuccagg

SEQ ID NO: 694592 - RNA, 19 nt, Artificial Sequence
  Description of Artificial Sequence: Synthetic oligonucleotide
  Sense strand starting at position 3626 of SEQ ID NO: 586132
acaggacucuuagugcuaa

SEQ ID NO: 694593 - RNA, 19 nt, Artificial Sequence
  Description of Artificial Sequence: Synthetic oligonucleotide
  Antisense strand to SEQ ID NO: 694592
uuagcacuaagaguccugu

SEQ ID NO: 694594 - RNA, 19 nt, Artificial Sequence
  Description of Artificial Sequence: Synthetic oligonucleotide
  Sense strand starting at position 3636 of SEQ ID NO: 586132
uagugcuaacagugggaaa

SEQ ID NO: 694595 - RNA, 19 nt, Artificial Sequence
  Description of Artificial Sequence: Synthetic oligonucleotide
  Antisense strand to SEQ ID NO: 694594
uuucccacuguuagcacua

SEQ ID NO: 694596 - RNA, 19 nt, Artificial Sequence
  Description of Artificial Sequence: Synthetic oligonucleotide
  Sense strand starting at position 31 of SEQ ID NO: 586133
acuggagaauggugugaca

SEQ ID NO: 694597 - RNA, 19 nt, Artificial Sequence
  Description of Artificial Sequence: Synthetic oligonucleotide
  Antisense strand to SEQ ID NO: 694596
ugucacaccauucuccagu

SEQ ID NO: 694598 - RNA, 19 nt, Artificial Sequence
  Description of Artificial Sequence: Synthetic oligonucleotide
  Sense strand starting at position 124 of SEQ ID NO: 586133
caugacgucugcccacaua

SEQ ID NO: 694599 - RNA, 19 nt, Artificial Sequence
  Description of Artificial Sequence: Synthetic oligonucleotide
  Antisense strand to SEQ ID NO: 694598
uaugugggcagacgucaug

SEQ ID NO: 694600 - RNA, 19 nt, Artificial Sequence
  Description of Artificial Sequence: Synthetic oligonucleotide
  Sense strand starting at position 127 of SEQ ID NO: 586133
gacgucugcccacauacua

SEQ ID NO: 694601 - RNA, 19 nt, Artificial Sequence
  Description of Artificial Sequence: Synthetic oligonucleotide
  Antisense strand to SEQ ID NO: 694600
uaguaugugggcagacguc

SEQ ID NO: 694602 - RNA, 19 nt, Artificial Sequence
  Description of Artificial Sequence: Synthetic oligonucleotide
  Sense strand starting at position 157 of SEQ ID NO: 586133
gaagccuuguggccacauu

SEQ ID NO: 694603 - RNA, 19 nt, Artificial Sequence
  Description of Artificial Sequence: Synthetic oligonucleotide
  Antisense strand to SEQ ID NO: 694602
aauguggccacaaggcuuc

SEQ ID NO: 694604 - RNA, 19 nt, Artificial Sequence
  Description of Artificial Sequence: Synthetic oligonucleotide
  Sense strand starting at position 173 of SEQ ID NO: 586133
auucgucuucgugggucau

SEQ ID NO: 694605 - RNA, 19 nt, Artificial Sequence
  Description of Artificial Sequence: Synthetic oligonucleotide
  Antisense strand to SEQ ID NO: 694604
augacccacgaagacgaau

SEQ ID NO: 694606 - RNA, 19 nt, Artificial Sequence
  Description of Artificial Sequence: Synthetic oligonucleotide
  Sense strand starting at position 174 of SEQ ID NO: 586133
uucgucuucgugggucauu

SEQ ID NO: 694607 - RNA, 19 nt, Artificial Sequence
  Description of Artificial Sequence: Synthetic oligonucleotide
  Antisense strand to SEQ ID NO: 694606
aaugacccacgaagacgaa

SEQ ID NO: 694608 - RNA, 19 nt, Artificial Sequence
  Description of Artificial Sequence: Synthetic oligonucleotide
  Sense strand starting at position 176 of SEQ ID NO: 586133
cgucuucgugggucauuca

SEQ ID NO: 694609 - RNA, 19 nt, Artificial Sequence
  Description of Artificial Sequence: Synthetic oligonucleotide
  Antisense strand to SEQ ID NO: 694608
ugaaugacccacgaagacg

SEQ ID NO: 694610 - RNA, 19 nt, Artificial Sequence
  Description of Artificial Sequence: Synthetic oligonucleotide
  Sense strand starting at position 245 of SEQ ID NO: 586133
ccaggucauuucugcacaa

SEQ ID NO: 694611 - RNA, 19 nt, Artificial Sequence
  Description of Artificial Sequence: Synthetic oligonucleotide
  Antisense strand to SEQ ID NO: 694610
uugugcagaaaugaccugg

SEQ ID NO: 694612 - RNA, 19 nt, Artificial Sequence
  Description of Artificial Sequence: Synthetic oligonucleotide
  Sense strand starting at position 406 of SEQ ID NO: 586133
ggagguuucucgcuguccu

SEQ ID NO: 694613 - RNA, 19 nt, Artificial Sequence
  Description of Artificial Sequence: Synthetic oligonucleotide
  Antisense strand to SEQ ID NO: 694612
aggacagcgagaaaccucc

SEQ ID NO: 694614 - RNA, 19 nt, Artificial Sequence
  Description of Artificial Sequence: Synthetic oligonucleotide
  Sense strand starting at position 407 of SEQ ID NO: 586133
gagguuucucgcuguccuu

SEQ ID NO: 694615 - RNA, 19 nt, Artificial Sequence
  Description of Artificial Sequence: Synthetic oligonucleotide
  Antisense strand to SEQ ID NO: 694614
aaggacagcgagaaaccuc

SEQ ID NO: 694616 - RNA, 19 nt, Artificial Sequence
  Description of Artificial Sequence: Synthetic oligonucleotide
  Sense strand starting at position 555 of SEQ ID NO: 586133
aacugaggcucagacguua

SEQ ID NO: 694617 - RNA, 19 nt, Artificial Sequence
  Description of Artificial Sequence: Synthetic oligonucleotide
  Antisense strand to SEQ ID NO: 694616
uaacgucugagccucaguu

SEQ ID NO: 694618 - RNA, 19 nt, Artificial Sequence
  Description of Artificial Sequence: Synthetic oligonucleotide
  Sense strand starting at position 560 of SEQ ID NO: 586133
aggcucagacguuaaguga

SEQ ID NO: 694619 - RNA, 19 nt, Artificial Sequence
  Description of Artificial Sequence: Synthetic oligonucleotide
  Antisense strand to SEQ ID NO: 694618
ucacuuaacgucugagccu

SEQ ID NO: 694620 - RNA, 19 nt, Artificial Sequence
  Description of Artificial Sequence: Synthetic oligonucleotide
  Sense strand starting at position 734 of SEQ ID NO: 586133
cuauuaauaccauggguaa

SEQ ID NO: 694621 - RNA, 19 nt, Artificial Sequence
  Description of Artificial Sequence: Synthetic oligonucleotide
  Antisense strand to SEQ ID NO: 694620
uuacccaugguauuaauag

SEQ ID NO: 694622 - RNA, 19 nt, Artificial Sequence
  Description of Artificial Sequence: Synthetic oligonucleotide
  Sense strand starting at position 746 of SEQ ID NO: 586133
uggguaaacucagacgcuu

SEQ ID NO: 694623 - RNA, 19 nt, Artificial Sequence
  Description of Artificial Sequence: Synthetic oligonucleotide
  Antisense strand to SEQ ID NO: 694622
aagcgucugaguuuaccca

SEQ ID NO: 694624 - RNA, 19 nt, Artificial Sequence
  Description of Artificial Sequence: Synthetic oligonucleotide
  Sense strand starting at position 961 of SEQ ID NO: 586133
cuggccuuugggcaagaaa

SEQ ID NO: 694625 - RNA, 19 nt, Artificial Sequence
  Description of Artificial Sequence: Synthetic oligonucleotide
  Antisense strand to SEQ ID NO: 694624
uuucuugcccaaaggccag

SEQ ID NO: 694626 - RNA, 19 nt, Artificial Sequence
  Description of Artificial Sequence: Synthetic oligonucleotide
  Sense strand starting at position 983 of SEQ ID NO: 586133
ugcucugauucucgcuauu

SEQ ID NO: 694627 - RNA, 19 nt, Artificial Sequence
  Description of Artificial Sequence: Synthetic oligonucleotide
  Antisense strand to SEQ ID NO: 694626
aauagcgagaaucagagca

SEQ ID NO: 694628 - RNA, 19 nt, Artificial Sequence
  Description of Artificial Sequence: Synthetic oligonucleotide
  Sense strand starting at position 985 of SEQ ID NO: 586133
cucugauucucgcuauucu

SEQ ID NO: 694629 - RNA, 19 nt, Artificial Sequence
  Description of Artificial Sequence: Synthetic oligonucleotide
  Antisense strand to SEQ ID NO: 694628
agaauagcgagaaucagag

SEQ ID NO: 694630 - RNA, 19 nt, Artificial Sequence
  Description of Artificial Sequence: Synthetic oligonucleotide
  Sense strand starting at position 1060 of SEQ ID NO: 586133
cggagaccuucaggcagaa

SEQ ID NO: 694631 - RNA, 19 nt, Artificial Sequence
  Description of Artificial Sequence: Synthetic oligonucleotide
  Antisense strand to SEQ ID NO: 694630
uucugccugaaggucuccg

SEQ ID NO: 694632 - RNA, 19 nt, Artificial Sequence
  Description of Artificial Sequence: Synthetic oligonucleotide
  Sense strand starting at position 1286 of SEQ ID NO: 586133
cccuguccuuuguaaaguu

SEQ ID NO: 694633 - RNA, 19 nt, Artificial Sequence
  Description of Artificial Sequence: Synthetic oligonucleotide
  Antisense strand to SEQ ID NO: 694632
aacuuuacaaaggacaggg

SEQ ID NO: 694634 - RNA, 19 nt, Artificial Sequence
  Description of Artificial Sequence: Synthetic oligonucleotide
  Sense strand starting at position 1293 of SEQ ID NO: 586133
cuuuguaaaguuugccauu

SEQ ID NO: 694635 - RNA, 19 nt, Artificial Sequence
  Description of Artificial Sequence: Synthetic oligonucleotide
  Antisense strand to SEQ ID NO: 694634
aauggcaaacuuuacaaag

SEQ ID NO: 694636 - RNA, 19 nt, Artificial Sequence
  Description of Artificial Sequence: Synthetic oligonucleotide
  Sense strand starting at position 1294 of SEQ ID NO: 586133
uuuguaaaguuugccauuu

SEQ ID NO: 694637 - RNA, 19 nt, Artificial Sequence
  Description of Artificial Sequence: Synthetic oligonucleotide
  Antisense strand to SEQ ID NO: 694636
aaauggcaaacuuuacaaa

SEQ ID NO: 694638 - RNA, 19 nt, Artificial Sequence
  Description of Artificial Sequence: Synthetic oligonucleotide
  Sense strand starting at position 1296 of SEQ ID NO: 586133
uguaaaguuugccauuucu

SEQ ID NO: 694639 - RNA, 19 nt, Artificial Sequence
  Description of Artificial Sequence: Synthetic oligonucleotide
  Antisense strand to SEQ ID NO: 694638
agaaauggcaaacuuuaca

SEQ ID NO: 694640 - RNA, 19 nt, Artificial Sequence
  Description of Artificial Sequence: Synthetic oligonucleotide
  Sense strand starting at position 1354 of SEQ ID NO: 586133
cuuacaucccugcagggau

SEQ ID NO: 694641 - RNA, 19 nt, Artificial Sequence
  Description of Artificial Sequence: Synthetic oligonucleotide
  Antisense strand to SEQ ID NO: 694640
aucccugcagggauguaag

SEQ ID NO: 694642 - RNA, 19 nt, Artificial Sequence
  Description of Artificial Sequence: Synthetic oligonucleotide
  Sense strand starting at position 1369 of SEQ ID NO: 586133
ggaucauauccacagccuu

SEQ ID NO: 694643 - RNA, 19 nt, Artificial Sequence
  Description of Artificial Sequence: Synthetic oligonucleotide
  Antisense strand to SEQ ID NO: 694642
aaggcuguggauaugaucc

SEQ ID NO: 694644 - RNA, 19 nt, Artificial Sequence
  Description of Artificial Sequence: Synthetic oligonucleotide
  Sense strand starting at position 2468 of SEQ ID NO: 586133
ggaggugaaccaggcuuau

SEQ ID NO: 694645 - RNA, 19 nt, Artificial Sequence
  Description of Artificial Sequence: Synthetic oligonucleotide
  Antisense strand to SEQ ID NO: 694644
auaagccugguucaccucc

SEQ ID NO: 694646 - RNA, 19 nt, Artificial Sequence
  Description of Artificial Sequence: Synthetic oligonucleotide
  Sense strand starting at position 2630 of SEQ ID NO: 586133
acucuaagugcggaaggau

SEQ ID NO: 694647 - RNA, 19 nt, Artificial Sequence
  Description of Artificial Sequence: Synthetic oligonucleotide
  Antisense strand to SEQ ID NO: 694646
auccuuccgcacuuagagu

SEQ ID NO: 694648 - RNA, 19 nt, Artificial Sequence
  Description of Artificial Sequence: Synthetic oligonucleotide
  Sense strand starting at position 2825 of SEQ ID NO: 586133
agggauucgucaccaucgu

SEQ ID NO: 694649 - RNA, 19 nt, Artificial Sequence
  Description of Artificial Sequence: Synthetic oligonucleotide
  Antisense strand to SEQ ID NO: 694648
acgauggugacgaaucccu

SEQ ID NO: 694650 - RNA, 19 nt, Artificial Sequence
  Description of Artificial Sequence: Synthetic oligonucleotide
  Sense strand starting at position 3006 of SEQ ID NO: 586133
ccaucauuguguccagcua

SEQ ID NO: 694651 - RNA, 19 nt, Artificial Sequence
  Description of Artificial Sequence: Synthetic oligonucleotide
  Antisense strand to SEQ ID NO: 694650
uagcuggacacaaugaugg

SEQ ID NO: 694652 - RNA, 19 nt, Artificial Sequence
  Description of Artificial Sequence: Synthetic oligonucleotide
  Sense strand starting at position 3507 of SEQ ID NO: 586133
cuagguguccggugugcaa

SEQ ID NO: 694653 - RNA, 19 nt, Artificial Sequence
  Description of Artificial Sequence: Synthetic oligonucleotide
  Antisense strand to SEQ ID NO: 694652
uugcacaccggacaccuag

SEQ ID NO: 694654 - RNA, 19 nt, Artificial Sequence
  Description of Artificial Sequence: Synthetic oligonucleotide
  Sense strand starting at position 3594 of SEQ ID NO: 586133
cucucaccuucuugucaga

SEQ ID NO: 694655 - RNA, 19 nt, Artificial Sequence
  Description of Artificial Sequence: Synthetic oligonucleotide
  Antisense strand to SEQ ID NO: 694654
ucugacaagaaggugagag

SEQ ID NO: 694656 - RNA, 19 nt, Artificial Sequence
  Description of Artificial Sequence: Synthetic oligonucleotide
  Sense strand starting at position 3596 of SEQ ID NO: 586133
cucaccuucuugucagaca

SEQ ID NO: 694657 - RNA, 19 nt, Artificial Sequence
  Description of Artificial Sequence: Synthetic oligonucleotide
  Antisense strand to SEQ ID NO: 694656
ugucugacaagaaggugag

SEQ ID NO: 694658 - RNA, 19 nt, Artificial Sequence
  Description of Artificial Sequence: Synthetic oligonucleotide
  Sense strand starting at position 3597 of SEQ ID NO: 586133
ucaccuucuugucagacau

SEQ ID NO: 694659 - RNA, 19 nt, Artificial Sequence
  Description of Artificial Sequence: Synthetic oligonucleotide
  Antisense strand to SEQ ID NO: 694658
augucugacaagaagguga

SEQ ID NO: 694660 - RNA, 19 nt, Artificial Sequence
  Description of Artificial Sequence: Synthetic oligonucleotide
  Sense strand starting at position 3697 of SEQ ID NO: 586133
gcuagaaugcacugguaua

SEQ ID NO: 694661 - RNA, 19 nt, Artificial Sequence
  Description of Artificial Sequence: Synthetic oligonucleotide
  Antisense strand to SEQ ID NO: 694660
uauaccagugcauucuagc

SEQ ID NO: 694662 - RNA, 19 nt, Artificial Sequence
  Description of Artificial Sequence: Synthetic oligonucleotide
  Sense strand starting at position 3708 of SEQ ID NO: 586133
cugguauaaacgcgaguca

SEQ ID NO: 694663 - RNA, 19 nt, Artificial Sequence
  Description of Artificial Sequence: Synthetic oligonucleotide
  Antisense strand to SEQ ID NO: 694662
ugacucgcguuuauaccag

SEQ ID NO: 694664 - RNA, 19 nt, Artificial Sequence
  Description of Artificial Sequence: Synthetic oligonucleotide
  Sense strand starting at position 419 of SEQ ID NO: 586134
ucugaaacguaguucuaag

SEQ ID NO: 694665 - RNA, 19 nt, Artificial Sequence
  Description of Artificial Sequence: Synthetic oligonucleotide
  Antisense strand to SEQ ID NO: 694664
cuuagaacuacguuucaga

SEQ ID NO: 694666 - RNA, 19 nt, Artificial Sequence
  Description of Artificial Sequence: Synthetic oligonucleotide
  Sense strand starting at position 506 of SEQ ID NO: 586134
gaagguuucugaccuggag

SEQ ID NO: 694667 - RNA, 19 nt, Artificial Sequence
  Description of Artificial Sequence: Synthetic oligonucleotide
  Antisense strand to SEQ ID NO: 694666
cuccaggucagaaaccuuc

SEQ ID NO: 694668 - RNA, 19 nt, Artificial Sequence
  Description of Artificial Sequence: Synthetic oligonucleotide
  Sense strand starting at position 637 of SEQ ID NO: 586134
auggaaaucuccucggagu

SEQ ID NO: 694669 - RNA, 19 nt, Artificial Sequence
  Description of Artificial Sequence: Synthetic oligonucleotide
  Antisense strand to SEQ ID NO: 694668
acuccgaggagauuuccau

SEQ ID NO: 694670 - RNA, 19 nt, Artificial Sequence
  Description of Artificial Sequence: Synthetic oligonucleotide
  Sense strand starting at position 638 of SEQ ID NO: 586134
uggaaaucuccucggaguc

SEQ ID NO: 694671 - RNA, 19 nt, Artificial Sequence
  Description of Artificial Sequence: Synthetic oligonucleotide
  Antisense strand to SEQ ID NO: 694670
gacuccgaggagauuucca

SEQ ID NO: 694672 - RNA, 19 nt, Artificial Sequence
  Description of Artificial Sequence: Synthetic oligonucleotide
  Sense strand starting at position 836 of SEQ ID NO: 586134
agcggcuucguccaagaga

SEQ ID NO: 694673 - RNA, 19 nt, Artificial Sequence
  Description of Artificial Sequence: Synthetic oligonucleotide
  Antisense strand to SEQ ID NO: 694672
ucucuuggacgaagccgcu

SEQ ID NO: 694674 - RNA, 19 nt, Artificial Sequence
  Description of Artificial Sequence: Synthetic oligonucleotide
  Sense strand starting at position 837 of SEQ ID NO: 586134
gcggcuucguccaagagac

SEQ ID NO: 694675 - RNA, 19 nt, Artificial Sequence
  Description of Artificial Sequence: Synthetic oligonucleotide
  Antisense strand to SEQ ID NO: 694674
gucucuuggacgaagccgc

SEQ ID NO: 694676 - RNA, 19 nt, Artificial Sequence
  Description of Artificial Sequence: Synthetic oligonucleotide
  Sense strand starting at position 1831 of SEQ ID NO: 586134
uucggugacucuuacaagu

SEQ ID NO: 694677 - RNA, 19 nt, Artificial Sequence
  Description of Artificial Sequence: Synthetic oligonucleotide
  Antisense strand to SEQ ID NO: 694676
acuuguaagagucaccgaa

SEQ ID NO: 694678 - RNA, 19 nt, Artificial Sequence
  Description of Artificial Sequence: Synthetic oligonucleotide
  Sense strand starting at position 1833 of SEQ ID NO: 586134
cggugacucuuacaaguac

SEQ ID NO: 694679 - RNA, 19 nt, Artificial Sequence
  Description of Artificial Sequence: Synthetic oligonucleotide
  Antisense strand to SEQ ID NO: 694678
guacuuguaagagucaccg

SEQ ID NO: 694680 - RNA, 19 nt, Artificial Sequence
  Description of Artificial Sequence: Synthetic oligonucleotide
  Sense strand starting at position 2327 of SEQ ID NO: 586134
agcgguuuccauggugaca

SEQ ID NO: 694681 - RNA, 19 nt, Artificial Sequence
  Description of Artificial Sequence: Synthetic oligonucleotide
  Antisense strand to SEQ ID NO: 694680
ugucaccauggaaaccgcu

SEQ ID NO: 694682 - RNA, 19 nt, Artificial Sequence
  Description of Artificial Sequence: Synthetic oligonucleotide
  Sense strand starting at position 2329 of SEQ ID NO: 586134
cgguuuccauggugacaca

SEQ ID NO: 694683 - RNA, 19 nt, Artificial Sequence
  Description of Artificial Sequence: Synthetic oligonucleotide
  Antisense strand to SEQ ID NO: 694682
ugugucaccauggaaaccg

SEQ ID NO: 694684 - RNA, 19 nt, Artificial Sequence
  Description of Artificial Sequence: Synthetic oligonucleotide
  Sense strand starting at position 2330 of SEQ ID NO: 586134
gguuuccauggugacacau

SEQ ID NO: 694685 - RNA, 19 nt, Artificial Sequence
  Description of Artificial Sequence: Synthetic oligonucleotide
  Antisense strand to SEQ ID NO: 694684
augugucaccauggaaacc

SEQ ID NO: 694686 - RNA, 19 nt, Artificial Sequence
  Description of Artificial Sequence: Synthetic oligonucleotide
  Sense strand starting at position 2547 of SEQ ID NO: 586134
ggcugacuuagucagucau

SEQ ID NO: 694687 - RNA, 19 nt, Artificial Sequence
  Description of Artificial Sequence: Synthetic oligonucleotide
  Antisense strand to SEQ ID NO: 694686
augacugacuaagucagcc

SEQ ID NO: 694688 - RNA, 19 nt, Artificial Sequence
  Description of Artificial Sequence: Synthetic oligonucleotide
  Sense strand starting at position 2549 of SEQ ID NO: 586134
cugacuuagucagucauuc

SEQ ID NO: 694689 - RNA, 19 nt, Artificial Sequence
  Description of Artificial Sequence: Synthetic oligonucleotide
  Antisense strand to SEQ ID NO: 694688
gaaugacugacuaagucag

SEQ ID NO: 694690 - RNA, 19 nt, Artificial Sequence
  Description of Artificial Sequence: Synthetic oligonucleotide
  Sense strand starting at position 2651 of SEQ ID NO: 586134
gucgaauccugaggcuaaa

SEQ ID NO: 694691 - RNA, 19 nt, Artificial Sequence
  Description of Artificial Sequence: Synthetic oligonucleotide
  Antisense strand to SEQ ID NO: 694690
uuuagccucaggauucgac

SEQ ID NO: 694692 - RNA, 19 nt, Artificial Sequence
  Description of Artificial Sequence: Synthetic oligonucleotide
  Sense strand starting at position 2773 of SEQ ID NO: 586134
ugugguagaucaguuacaa

SEQ ID NO: 694693 - RNA, 19 nt, Artificial Sequence
  Description of Artificial Sequence: Synthetic oligonucleotide
  Antisense strand to SEQ ID NO: 694692
uuguaacugaucuaccaca

SEQ ID NO: 694694 - RNA, 19 nt, Artificial Sequence
  Description of Artificial Sequence: Synthetic oligonucleotide
  Sense strand starting at position 2831 of SEQ ID NO: 586134
gcccuuugccgugugacuu

SEQ ID NO: 694695 - RNA, 19 nt, Artificial Sequence
  Description of Artificial Sequence: Synthetic oligonucleotide
  Antisense strand to SEQ ID NO: 694694
aagucacacggcaaagggc

SEQ ID NO: 694696 - RNA, 19 nt, Artificial Sequence
  Description of Artificial Sequence: Synthetic oligonucleotide
  Sense strand starting at position 2893 of SEQ ID NO: 586134
ucaaucugagccugucuua

SEQ ID NO: 694697 - RNA, 19 nt, Artificial Sequence
  Description of Artificial Sequence: Synthetic oligonucleotide
  Antisense strand to SEQ ID NO: 694696
uaagacaggcucagauuga

SEQ ID NO: 694698 - RNA, 19 nt, Artificial Sequence
  Description of Artificial Sequence: Synthetic oligonucleotide
  Sense strand starting at position 2896 of SEQ ID NO: 586134
aucugagccugucuuauga

SEQ ID NO: 694699 - RNA, 19 nt, Artificial Sequence
  Description of Artificial Sequence: Synthetic oligonucleotide
  Antisense strand to SEQ ID NO: 694698
ucauaagacaggcucagau

SEQ ID NO: 694700 - RNA, 19 nt, Artificial Sequence
  Description of Artificial Sequence: Synthetic oligonucleotide
  Sense strand starting at position 2898 of SEQ ID NO: 586134
cugagccugucuuaugacu

SEQ ID NO: 694701 - RNA, 19 nt, Artificial Sequence
  Description of Artificial Sequence: Synthetic oligonucleotide
  Antisense strand to SEQ ID NO: 694700
agucauaagacaggcucag

SEQ ID NO: 694702 - RNA, 19 nt, Artificial Sequence
  Description of Artificial Sequence: Synthetic oligonucleotide
  Sense strand starting at position 2900 of SEQ ID NO: 586134
gagccugucuuaugacuug

SEQ ID NO: 694703 - RNA, 19 nt, Artificial Sequence
  Description of Artificial Sequence: Synthetic oligonucleotide
  Antisense strand to SEQ ID NO: 694702
caagucauaagacaggcuc

SEQ ID NO: 694704 - RNA, 19 nt, Artificial Sequence
  Description of Artificial Sequence: Synthetic oligonucleotide
  Sense strand starting at position 2914 of SEQ ID NO: 586134
acuugcuguggccaauaaa

SEQ ID NO: 694705 - RNA, 19 nt, Artificial Sequence
  Description of Artificial Sequence: Synthetic oligonucleotide
  Antisense strand to SEQ ID NO: 694704
uuuauuggccacagcaagu

SEQ ID NO: 694706 - RNA, 19 nt, Artificial Sequence
  Description of Artificial Sequence: Synthetic oligonucleotide
  Sense strand starting at position 2933 of SEQ ID NO: 586134
acgugacagcaaugacauu

SEQ ID NO: 694707 - RNA, 19 nt, Artificial Sequence
  Description of Artificial Sequence: Synthetic oligonucleotide
  Antisense strand to SEQ ID NO: 694706
aaugucauugcugucacgu

SEQ ID NO: 694708 - RNA, 19 nt, Artificial Sequence
  Description of Artificial Sequence: Synthetic oligonucleotide
  Sense strand starting at position 2949 of SEQ ID NO: 586134
auucccaguucugagcuua

SEQ ID NO: 694709 - RNA, 19 nt, Artificial Sequence
  Description of Artificial Sequence: Synthetic oligonucleotide
  Antisense strand to SEQ ID NO: 694708
uaagcucagaacugggaau

SEQ ID NO: 694710 - RNA, 19 nt, Artificial Sequence
  Description of Artificial Sequence: Synthetic oligonucleotide
  Sense strand starting at position 3188 of SEQ ID NO: 586134
cuuuaauacuaaggacaug

SEQ ID NO: 694711 - RNA, 19 nt, Artificial Sequence
  Description of Artificial Sequence: Synthetic oligonucleotide
  Antisense strand to SEQ ID NO: 694710
cauguccuuaguauuaaag

SEQ ID NO: 694712 - RNA, 19 nt, Artificial Sequence
  Description of Artificial Sequence: Synthetic oligonucleotide
  Sense strand starting at position 3210 of SEQ ID NO: 586134
agucauguguuuggagcua

SEQ ID NO: 694713 - RNA, 19 nt, Artificial Sequence
  Description of Artificial Sequence: Synthetic oligonucleotide
  Antisense strand to SEQ ID NO: 694712
uagcuccaaacacaugacu

SEQ ID NO: 694714 - RNA, 19 nt, Artificial Sequence
  Description of Artificial Sequence: Synthetic oligonucleotide
  Sense strand starting at position 3215 of SEQ ID NO: 586134
uguguuuggagcuauuugu

SEQ ID NO: 694715 - RNA, 19 nt, Artificial Sequence
  Description of Artificial Sequence: Synthetic oligonucleotide
  Antisense strand to SEQ ID NO: 694714
acaaauagcuccaaacaca

SEQ ID NO: 694716 - RNA, 19 nt, Artificial Sequence
  Description of Artificial Sequence: Synthetic oligonucleotide
  Sense strand starting at position 3222 of SEQ ID NO: 586134
ggagcuauuuguuacucag

SEQ ID NO: 694717 - RNA, 19 nt, Artificial Sequence
  Description of Artificial Sequence: Synthetic oligonucleotide
  Antisense strand to SEQ ID NO: 694716
cugaguaacaaauagcucc

SEQ ID NO: 694718 - RNA, 19 nt, Artificial Sequence
  Description of Artificial Sequence: Synthetic oligonucleotide
  Sense strand starting at position 3224 of SEQ ID NO: 586134
agcuauuuguuacucagca

SEQ ID NO: 694719 - RNA, 19 nt, Artificial Sequence
  Description of Artificial Sequence: Synthetic oligonucleotide
  Antisense strand to SEQ ID NO: 694718
ugcugaguaacaaauagcu

SEQ ID NO: 694720 - RNA, 19 nt, Artificial Sequence
  Description of Artificial Sequence: Synthetic oligonucleotide
  Sense strand starting at position 3360 of SEQ ID NO: 586134
gcuggauuccgcuggcuaa

SEQ ID NO: 694721 - RNA, 19 nt, Artificial Sequence
  Description of Artificial Sequence: Synthetic oligonucleotide
  Antisense strand to SEQ ID NO: 694720
uuagccagcggaauccagc

SEQ ID NO: 694722 - RNA, 19 nt, Artificial Sequence
  Description of Artificial Sequence: Synthetic oligonucleotide
  Sense strand starting at position 3661 of SEQ ID NO: 586134
cgucacuaaucccagcuua

SEQ ID NO: 694723 - RNA, 19 nt, Artificial Sequence
  Description of Artificial Sequence: Synthetic oligonucleotide
  Antisense strand to SEQ ID NO: 694722
uaagcugggauuagugacg

SEQ ID NO: 694724 - RNA, 19 nt, Artificial Sequence
  Description of Artificial Sequence: Synthetic oligonucleotide
  Sense strand starting at position 3847 of SEQ ID NO: 586134
gcacuuacgagguaaugau

SEQ ID NO: 694725 - RNA, 19 nt, Artificial Sequence
  Description of Artificial Sequence: Synthetic oligonucleotide
  Antisense strand to SEQ ID NO: 694724
aucauuaccucguaagugc

SEQ ID NO: 694726 - RNA, 19 nt, Artificial Sequence
  Description of Artificial Sequence: Synthetic oligonucleotide
  Sense strand starting at position 3855 of SEQ ID NO: 586134
gagguaaugauugguguga

SEQ ID NO: 694727 - RNA, 19 nt, Artificial Sequence
  Description of Artificial Sequence: Synthetic oligonucleotide
  Antisense strand to SEQ ID NO: 694726
ucacaccaaucauuaccuc

SEQ ID NO: 694728 - RNA, 19 nt, Artificial Sequence
  Description of Artificial Sequence: Synthetic oligonucleotide
  Sense strand starting at position 3857 of SEQ ID NO: 586134
gguaaugauuggugugagu

SEQ ID NO: 694729 - RNA, 19 nt, Artificial Sequence
  Description of Artificial Sequence: Synthetic oligonucleotide
  Antisense strand to SEQ ID NO: 694728
acucacaccaaucauuacc

SEQ ID NO: 694730 - RNA, 19 nt, Artificial Sequence
  Description of Artificial Sequence: Synthetic oligonucleotide
  Sense strand starting at position 3859 of SEQ ID NO: 586134
uaaugauuggugugaguuu

SEQ ID NO: 694731 - RNA, 19 nt, Artificial Sequence
  Description of Artificial Sequence: Synthetic oligonucleotide
  Antisense strand to SEQ ID NO: 694730
aaacucacaccaaucauua

SEQ ID NO: 694732 - RNA, 19 nt, Artificial Sequence
  Description of Artificial Sequence: Synthetic oligonucleotide
  Sense strand starting at position 3860 of SEQ ID NO: 586134
aaugauuggugugaguuua

SEQ ID NO: 694733 - RNA, 19 nt, Artificial Sequence
  Description of Artificial Sequence: Synthetic oligonucleotide
  Antisense strand to SEQ ID NO: 694732
uaaacucacaccaaucauu

SEQ ID NO: 694734 - RNA, 19 nt, Artificial Sequence
  Description of Artificial Sequence: Synthetic oligonucleotide
  Sense strand starting at position 3870 of SEQ ID NO: 586134
gugaguuuauagucucuuu

SEQ ID NO: 694735 - RNA, 19 nt, Artificial Sequence
  Description of Artificial Sequence: Synthetic oligonucleotide
  Antisense strand to SEQ ID NO: 694734
aaagagacuauaaacucac

SEQ ID NO: 694736 - RNA, 19 nt, Artificial Sequence
  Description of Artificial Sequence: Synthetic oligonucleotide
  Sense strand starting at position 248 of SEQ ID NO: 586135
gcuacaucuccugagccua

SEQ ID NO: 694737 - RNA, 19 nt, Artificial Sequence
  Description of Artificial Sequence: Synthetic oligonucleotide
  Antisense strand to SEQ ID NO: 694736
uaggcucaggagauguagc

SEQ ID NO: 694738 - RNA, 19 nt, Artificial Sequence
  Description of Artificial Sequence: Synthetic oligonucleotide
  Sense strand starting at position 433 of SEQ ID NO: 586135
uacacaguaguuugcagaa

SEQ ID NO: 694739 - RNA, 19 nt, Artificial Sequence
  Description of Artificial Sequence: Synthetic oligonucleotide
  Antisense strand to SEQ ID NO: 694738
uucugcaaacuacugugua

SEQ ID NO: 694740 - RNA, 19 nt, Artificial Sequence
  Description of Artificial Sequence: Synthetic oligonucleotide
  Sense strand starting at position 499 of SEQ ID NO: 586135
uuccuauggugcucugaaa

SEQ ID NO: 694741 - RNA, 19 nt, Artificial Sequence
  Description of Artificial Sequence: Synthetic oligonucleotide
  Antisense strand to SEQ ID NO: 694740
uuucagagcaccauaggaa

SEQ ID NO: 694742 - RNA, 19 nt, Artificial Sequence
  Description of Artificial Sequence: Synthetic oligonucleotide
  Sense strand starting at position 543 of SEQ ID NO: 586135
agagcuauuguccaaucac

SEQ ID NO: 694743 - RNA, 19 nt, Artificial Sequence
  Description of Artificial Sequence: Synthetic oligonucleotide
  Antisense strand to SEQ ID NO: 694742
gugauuggacaauagcucu

SEQ ID NO: 694744 - RNA, 19 nt, Artificial Sequence
  Description of Artificial Sequence: Synthetic oligonucleotide
  Sense strand starting at position 719 of SEQ ID NO: 586135
gcaccaagguguguaacau

SEQ ID NO: 694745 - RNA, 19 nt, Artificial Sequence
  Description of Artificial Sequence: Synthetic oligonucleotide
  Antisense strand to SEQ ID NO: 694744
auguuacacaccuuggugc

SEQ ID NO: 694746 - RNA, 19 nt, Artificial Sequence
  Description of Artificial Sequence: Synthetic oligonucleotide
  Sense strand starting at position 728 of SEQ ID NO: 586135
uguguaacaucugugagug

SEQ ID NO: 694747 - RNA, 19 nt, Artificial Sequence
  Description of Artificial Sequence: Synthetic oligonucleotide
  Antisense strand to SEQ ID NO: 694746
cacucacagauguuacaca

SEQ ID NO: 694748 - RNA, 19 nt, Artificial Sequence
  Description of Artificial Sequence: Synthetic oligonucleotide
  Sense strand starting at position 738 of SEQ ID NO: 586135
cugugaguggcugauacaa

SEQ ID NO: 694749 - RNA, 19 nt, Artificial Sequence
  Description of Artificial Sequence: Synthetic oligonucleotide
  Antisense strand to SEQ ID NO: 694748
uuguaucagccacucacag

SEQ ID NO: 694750 - RNA, 19 nt, Artificial Sequence
  Description of Artificial Sequence: Synthetic oligonucleotide
  Sense strand starting at position 806 of SEQ ID NO: 586135
cuaauaugaucuuuaaacg

SEQ ID NO: 694751 - RNA, 19 nt, Artificial Sequence
  Description of Artificial Sequence: Synthetic oligonucleotide
  Antisense strand to SEQ ID NO: 694750
cguuuaaagaucauauuag

SEQ ID NO: 694752 - RNA, 19 nt, Artificial Sequence
  Description of Artificial Sequence: Synthetic oligonucleotide
  Sense strand starting at position 816 of SEQ ID NO: 586135
cuuuaaacgucugucucaa

SEQ ID NO: 694753 - RNA, 19 nt, Artificial Sequence
  Description of Artificial Sequence: Synthetic oligonucleotide
  Antisense strand to SEQ ID NO: 694752
uugagacagacguuuaaag

SEQ ID NO: 694754 - RNA, 19 nt, Artificial Sequence
  Description of Artificial Sequence: Synthetic oligonucleotide
  Sense strand starting at position 1002 of SEQ ID NO: 586135
acauuuaucugucagaucu

SEQ ID NO: 694755 - RNA, 19 nt, Artificial Sequence
  Description of Artificial Sequence: Synthetic oligonucleotide
  Antisense strand to SEQ ID NO: 694754
agaucugacagauaaaugu

SEQ ID NO: 694756 - RNA, 19 nt, Artificial Sequence
  Description of Artificial Sequence: Synthetic oligonucleotide
  Sense strand starting at position 1004 of SEQ ID NO: 586135
auuuaucugucagaucuac

SEQ ID NO: 694757 - RNA, 19 nt, Artificial Sequence
  Description of Artificial Sequence: Synthetic oligonucleotide
  Antisense strand to SEQ ID NO: 694756
guagaucugacagauaaau

SEQ ID NO: 694758 - RNA, 19 nt, Artificial Sequence
  Description of Artificial Sequence: Synthetic oligonucleotide
  Sense strand starting at position 1034 of SEQ ID NO: 586135
uucugaaauggucauucca

SEQ ID NO: 694759 - RNA, 19 nt, Artificial Sequence
  Description of Artificial Sequence: Synthetic oligonucleotide
  Antisense strand to SEQ ID NO: 694758
uggaaugaccauuucagaa

SEQ ID NO: 694760 - RNA, 19 nt, Artificial Sequence
  Description of Artificial Sequence: Synthetic oligonucleotide
  Sense strand starting at position 1036 of SEQ ID NO: 586135
cugaaauggucauuccaau

SEQ ID NO: 694761 - RNA, 19 nt, Artificial Sequence
  Description of Artificial Sequence: Synthetic oligonucleotide
  Antisense strand to SEQ ID NO: 694760
auuggaaugaccauuucag

SEQ ID NO: 694762 - RNA, 19 nt, Artificial Sequence
  Description of Artificial Sequence: Synthetic oligonucleotide
  Sense strand starting at position 1052 of SEQ ID NO: 586135
aauacaagauuguucgaua

SEQ ID NO: 694763 - RNA, 19 nt, Artificial Sequence
  Description of Artificial Sequence: Synthetic oligonucleotide
  Antisense strand to SEQ ID NO: 694762
uaucgaacaaucuuguauu

SEQ ID NO: 694764 - RNA, 19 nt, Artificial Sequence
  Description of Artificial Sequence: Synthetic oligonucleotide
  Sense strand starting at position 1053 of SEQ ID NO: 586135
auacaagauuguucgauau

SEQ ID NO: 694765 - RNA, 19 nt, Artificial Sequence
  Description of Artificial Sequence: Synthetic oligonucleotide
  Antisense strand to SEQ ID NO: 694764
auaucgaacaaucuuguau

SEQ ID NO: 694766 - RNA, 19 nt, Artificial Sequence
  Description of Artificial Sequence: Synthetic oligonucleotide
  Sense strand starting at position 1057 of SEQ ID NO: 586135
aagauuguucgauaugcca

SEQ ID NO: 694767 - RNA, 19 nt, Artificial Sequence
  Description of Artificial Sequence: Synthetic oligonucleotide
  Antisense strand to SEQ ID NO: 694766
uggcauaucgaacaaucuu

SEQ ID NO: 694768 - RNA, 19 nt, Artificial Sequence
  Description of Artificial Sequence: Synthetic oligonucleotide
  Sense strand starting at position 1082 of SEQ ID NO: 586135
gugaauagagcuugggaga

SEQ ID NO: 694769 - RNA, 19 nt, Artificial Sequence
  Description of Artificial Sequence: Synthetic oligonucleotide
  Antisense strand to SEQ ID NO: 694768
ucucccaagcucuauucac

SEQ ID NO: 694770 - RNA, 19 nt, Artificial Sequence
  Description of Artificial Sequence: Synthetic oligonucleotide
  Sense strand starting at position 1187 of SEQ ID NO: 586135
agcucauacauacggagaa

SEQ ID NO: 694771 - RNA, 19 nt, Artificial Sequence
  Description of Artificial Sequence: Synthetic oligonucleotide
  Antisense strand to SEQ ID NO: 694770
uucuccguauguaugagcu

SEQ ID NO: 694772 - RNA, 19 nt, Artificial Sequence
  Description of Artificial Sequence: Synthetic oligonucleotide
  Sense strand starting at position 1200 of SEQ ID NO: 586135
ggagaagaauaagaauaca

SEQ ID NO: 694773 - RNA, 19 nt, Artificial Sequence
  Description of Artificial Sequence: Synthetic oligonucleotide
  Antisense strand to SEQ ID NO: 694772
uguauucuuauucuucucc

SEQ ID NO: 694774 - RNA, 19 nt, Artificial Sequence
  Description of Artificial Sequence: Synthetic oligonucleotide
  Sense strand starting at position 1508 of SEQ ID NO: 586135
uugcaaauucgcugggaga

SEQ ID NO: 694775 - RNA, 19 nt, Artificial Sequence
  Description of Artificial Sequence: Synthetic oligonucleotide
  Antisense strand to SEQ ID NO: 694774
ucucccagcgaauuugcaa

SEQ ID NO: 694776 - RNA, 19 nt, Artificial Sequence
  Description of Artificial Sequence: Synthetic oligonucleotide
  Sense strand starting at position 1509 of SEQ ID NO: 586135
ugcaaauucgcugggagaa

SEQ ID NO: 694777 - RNA, 19 nt, Artificial Sequence
  Description of Artificial Sequence: Synthetic oligonucleotide
  Antisense strand to SEQ ID NO: 694776
uucucccagcgaauuugca

SEQ ID NO: 694778 - RNA, 19 nt, Artificial Sequence
  Description of Artificial Sequence: Synthetic oligonucleotide
  Sense strand starting at position 1510 of SEQ ID NO: 586135
gcaaauucgcugggagaaa

SEQ ID NO: 694779 - RNA, 19 nt, Artificial Sequence
  Description of Artificial Sequence: Synthetic oligonucleotide
  Antisense strand to SEQ ID NO: 694778
uuucucccagcgaauuugc

SEQ ID NO: 694780 - RNA, 19 nt, Artificial Sequence
  Description of Artificial Sequence: Synthetic oligonucleotide
  Sense strand starting at position 1701 of SEQ ID NO: 586135
gaagcugagacuuacgguu

SEQ ID NO: 694781 - RNA, 19 nt, Artificial Sequence
  Description of Artificial Sequence: Synthetic oligonucleotide
  Antisense strand to SEQ ID NO: 694780
aaccguaagucucagcuuc

SEQ ID NO: 694782 - RNA, 19 nt, Artificial Sequence
  Description of Artificial Sequence: Synthetic oligonucleotide
  Sense strand starting at position 2375 of SEQ ID NO: 586135
cguaguuucgggagagggu

SEQ ID NO: 694783 - RNA, 19 nt, Artificial Sequence
  Description of Artificial Sequence: Synthetic oligonucleotide
  Antisense strand to SEQ ID NO: 694782
acccucucccgaaacuacg

SEQ ID NO: 694784 - RNA, 19 nt, Artificial Sequence
  Description of Artificial Sequence: Synthetic oligonucleotide
  Sense strand starting at position 2862 of SEQ ID NO: 586135
gguggaaacucuuugagca

SEQ ID NO: 694785 - RNA, 19 nt, Artificial Sequence
  Description of Artificial Sequence: Synthetic oligonucleotide
  Antisense strand to SEQ ID NO: 694784
ugcucaaagaguuuccacc

SEQ ID NO: 694786 - RNA, 19 nt, Artificial Sequence
  Description of Artificial Sequence: Synthetic oligonucleotide
  Sense strand starting at position 2863 of SEQ ID NO: 586135
guggaaacucuuugagcaa

SEQ ID NO: 694787 - RNA, 19 nt, Artificial Sequence
  Description of Artificial Sequence: Synthetic oligonucleotide
  Antisense strand to SEQ ID NO: 694786
uugcucaaagaguuuccac

SEQ ID NO: 694788 - RNA, 19 nt, Artificial Sequence
  Description of Artificial Sequence: Synthetic oligonucleotide
  Sense strand starting at position 2877 of SEQ ID NO: 586135
agcaaagaggcuuacguuu

SEQ ID NO: 694789 - RNA, 19 nt, Artificial Sequence
  Description of Artificial Sequence: Synthetic oligonucleotide
  Antisense strand to SEQ ID NO: 694788
aaacguaagccucuuugcu

SEQ ID NO: 694790 - RNA, 19 nt, Artificial Sequence
  Description of Artificial Sequence: Synthetic oligonucleotide
  Sense strand starting at position 2944 of SEQ ID NO: 586135
caggcagagugauuacgua

SEQ ID NO: 694791 - RNA, 19 nt, Artificial Sequence
  Description of Artificial Sequence: Synthetic oligonucleotide
  Antisense strand to SEQ ID NO: 694790
uacguaaucacucugccug

SEQ ID NO: 694792 - RNA, 19 nt, Artificial Sequence
  Description of Artificial Sequence: Synthetic oligonucleotide
  Sense strand starting at position 3138 of SEQ ID NO: 586135
ggaucucagccucauuauu

SEQ ID NO: 694793 - RNA, 19 nt, Artificial Sequence
  Description of Artificial Sequence: Synthetic oligonucleotide
  Antisense strand to SEQ ID NO: 694792
aauaaugaggcugagaucc

SEQ ID NO: 694794 - RNA, 19 nt, Artificial Sequence
  Description of Artificial Sequence: Synthetic oligonucleotide
  Sense strand starting at position 3399 of SEQ ID NO: 586135
ggagcauauuaucauuugu

SEQ ID NO: 694795 - RNA, 19 nt, Artificial Sequence
  Description of Artificial Sequence: Synthetic oligonucleotide
  Antisense strand to SEQ ID NO: 694794
acaaaugauaauaugcucc

SEQ ID NO: 694796 - RNA, 19 nt, Artificial Sequence
  Description of Artificial Sequence: Synthetic oligonucleotide
  Sense strand starting at position 3460 of SEQ ID NO: 586135
ccacguuuccuguacuuau

SEQ ID NO: 694797 - RNA, 19 nt, Artificial Sequence
  Description of Artificial Sequence: Synthetic oligonucleotide
  Antisense strand to SEQ ID NO: 694796
auaaguacaggaaacgugg

SEQ ID NO: 694798 - RNA, 19 nt, Artificial Sequence
  Description of Artificial Sequence: Synthetic oligonucleotide
  Sense strand starting at position 3527 of SEQ ID NO: 586135
aguuauaccuuucuuguau

SEQ ID NO: 694799 - RNA, 19 nt, Artificial Sequence
  Description of Artificial Sequence: Synthetic oligonucleotide
  Antisense strand to SEQ ID NO: 694798
auacaagaaagguauaacu

SEQ ID NO: 694800 - RNA, 19 nt, Artificial Sequence
  Description of Artificial Sequence: Synthetic oligonucleotide
  Sense strand starting at position 3528 of SEQ ID NO: 586135
guuauaccuuucuuguauu

SEQ ID NO: 694801 - RNA, 19 nt, Artificial Sequence
  Description of Artificial Sequence: Synthetic oligonucleotide
  Antisense strand to SEQ ID NO: 694800
aauacaagaaagguauaac

SEQ ID NO: 694802 - RNA, 19 nt, Artificial Sequence
  Description of Artificial Sequence: Synthetic oligonucleotide
  Sense strand starting at position 3601 of SEQ ID NO: 586135
uuuaccuuccuauguuagu

SEQ ID NO: 694803 - RNA, 19 nt, Artificial Sequence
  Description of Artificial Sequence: Synthetic oligonucleotide
  Antisense strand to SEQ ID NO: 694802
acuaacauaggaagguaaa

SEQ ID NO: 694804 - RNA, 19 nt, Artificial Sequence
  Description of Artificial Sequence: Synthetic oligonucleotide
  Sense strand starting at position 3602 of SEQ ID NO: 586135
uuaccuuccuauguuaguu

SEQ ID NO: 694805 - RNA, 19 nt, Artificial Sequence
  Description of Artificial Sequence: Synthetic oligonucleotide
  Antisense strand to SEQ ID NO: 694804
aacuaacauaggaagguaa

SEQ ID NO: 694806 - RNA, 19 nt, Artificial Sequence
  Description of Artificial Sequence: Synthetic oligonucleotide
  Sense strand starting at position 3607 of SEQ ID NO: 586135
uuccuauguuaguuacuuu

SEQ ID NO: 694807 - RNA, 19 nt, Artificial Sequence
  Description of Artificial Sequence: Synthetic oligonucleotide
  Antisense strand to SEQ ID NO: 694806
aaaguaacuaacauaggaa

SEQ ID NO: 694808 - RNA, 19 nt, Artificial Sequence
  Description of Artificial Sequence: Synthetic oligonucleotide
  Sense strand starting at position 3883 of SEQ ID NO: 586135
uugacaaaguacuuugcua

SEQ ID NO: 694809 - RNA, 19 nt, Artificial Sequence
  Description of Artificial Sequence: Synthetic oligonucleotide
  Antisense strand to SEQ ID NO: 694808
uagcaaaguacuuugucaa

SEQ ID NO: 694810 - RNA, 19 nt, Artificial Sequence
  Description of Artificial Sequence: Synthetic oligonucleotide
  Sense strand starting at position 3885 of SEQ ID NO: 586135
gacaaaguacuuugcuagu

SEQ ID NO: 694811 - RNA, 19 nt, Artificial Sequence
  Description of Artificial Sequence: Synthetic oligonucleotide
  Antisense strand to SEQ ID NO: 694810
acuagcaaaguacuuuguc

SEQ ID NO: 694812 - RNA, 19 nt, Artificial Sequence
  Description of Artificial Sequence: Synthetic oligonucleotide
  Sense strand starting at position 3947 of SEQ ID NO: 586135
gcuuuaaauugucuuuaga

SEQ ID NO: 694813 - RNA, 19 nt, Artificial Sequence
  Description of Artificial Sequence: Synthetic oligonucleotide
  Antisense strand to SEQ ID NO: 694812
ucuaaagacaauuuaaagc

SEQ ID NO: 694814 - RNA, 19 nt, Artificial Sequence
  Description of Artificial Sequence: Synthetic oligonucleotide
  Sense strand starting at position 3967 of SEQ ID NO: 586135
aaguaagaguuacuugauu

SEQ ID NO: 694815 - RNA, 19 nt, Artificial Sequence
  Description of Artificial Sequence: Synthetic oligonucleotide
  Antisense strand to SEQ ID NO: 694814
aaucaaguaacucuuacuu

SEQ ID NO: 694816 - RNA, 19 nt, Artificial Sequence
  Description of Artificial Sequence: Synthetic oligonucleotide
  Sense strand starting at position 273 of SEQ ID NO: 586136
uggauugugaauugauccu

SEQ ID NO: 694817 - RNA, 19 nt, Artificial Sequence
  Description of Artificial Sequence: Synthetic oligonucleotide
  Antisense strand to SEQ ID NO: 694816
aggaucaauucacaaucca

SEQ ID NO: 694818 - RNA, 19 nt, Artificial Sequence
  Description of Artificial Sequence: Synthetic oligonucleotide
  Sense strand starting at position 422 of SEQ ID NO: 586136
ccaaauaggucagcaagaa

SEQ ID NO: 694819 - RNA, 19 nt, Artificial Sequence
  Description of Artificial Sequence: Synthetic oligonucleotide
  Antisense strand to SEQ ID NO: 694818
uucuugcugaccuauuugg

SEQ ID NO: 694820 - RNA, 19 nt, Artificial Sequence
  Description of Artificial Sequence: Synthetic oligonucleotide
  Sense strand starting at position 432 of SEQ ID NO: 586136
cagcaagaaccaugcagua

SEQ ID NO: 694821 - RNA, 19 nt, Artificial Sequence
  Description of Artificial Sequence: Synthetic oligonucleotide
  Antisense strand to SEQ ID NO: 694820
uacugcaugguucuugcug

SEQ ID NO: 694822 - RNA, 19 nt, Artificial Sequence
  Description of Artificial Sequence: Synthetic oligonucleotide
  Sense strand starting at position 512 of SEQ ID NO: 586136
uauagcugugacugacuua

SEQ ID NO: 694823 - RNA, 19 nt, Artificial Sequence
  Description of Artificial Sequence: Synthetic oligonucleotide
  Antisense strand to SEQ ID NO: 694822
uaagucagucacagcuaua

SEQ ID NO: 694824 - RNA, 19 nt, Artificial Sequence
  Description of Artificial Sequence: Synthetic oligonucleotide
  Sense strand starting at position 515 of SEQ ID NO: 586136
agcugugacugacuuagaa

SEQ ID NO: 694825 - RNA, 19 nt, Artificial Sequence
  Description of Artificial Sequence: Synthetic oligonucleotide
  Antisense strand to SEQ ID NO: 694824
uucuaagucagucacagcu

SEQ ID NO: 694826 - RNA, 19 nt, Artificial Sequence
  Description of Artificial Sequence: Synthetic oligonucleotide
  Sense strand starting at position 622 of SEQ ID NO: 586136
ugucgcuaugaagaauaaa

SEQ ID NO: 694827 - RNA, 19 nt, Artificial Sequence
  Description of Artificial Sequence: Synthetic oligonucleotide
  Antisense strand to SEQ ID NO: 694826
uuuauucuucauagcgaca

SEQ ID NO: 694828 - RNA, 19 nt, Artificial Sequence
  Description of Artificial Sequence: Synthetic oligonucleotide
  Sense strand starting at position 625 of SEQ ID NO: 586136
cgcuaugaagaauaaaucu

SEQ ID NO: 694829 - RNA, 19 nt, Artificial Sequence
  Description of Artificial Sequence: Synthetic oligonucleotide
  Antisense strand to SEQ ID NO: 694828
agauuuauucuucauagcg

SEQ ID NO: 694830 - RNA, 19 nt, Artificial Sequence
  Description of Artificial Sequence: Synthetic oligonucleotide
  Sense strand starting at position 673 of SEQ ID NO: 586136
ccuggcuacuaaguaaaua

SEQ ID NO: 694831 - RNA, 19 nt, Artificial Sequence
  Description of Artificial Sequence: Synthetic oligonucleotide
  Antisense strand to SEQ ID NO: 694830
uauuuacuuaguagccagg

SEQ ID NO: 694832 - RNA, 19 nt, Artificial Sequence
  Description of Artificial Sequence: Synthetic oligonucleotide
  Sense strand starting at position 734 of SEQ ID NO: 586136
ucugccauucgaggacaaa

SEQ ID NO: 694833 - RNA, 19 nt, Artificial Sequence
  Description of Artificial Sequence: Synthetic oligonucleotide
  Antisense strand to SEQ ID NO: 694832
uuuguccucgaauggcaga

SEQ ID NO: 694834 - RNA, 19 nt, Artificial Sequence
  Description of Artificial Sequence: Synthetic oligonucleotide
  Sense strand starting at position 737 of SEQ ID NO: 586136
gccauucgaggacaaacau

SEQ ID NO: 694835 - RNA, 19 nt, Artificial Sequence
  Description of Artificial Sequence: Synthetic oligonucleotide
  Antisense strand to SEQ ID NO: 694834
auguuuguccucgaauggc

SEQ ID NO: 694836 - RNA, 19 nt, Artificial Sequence
  Description of Artificial Sequence: Synthetic oligonucleotide
  Sense strand starting at position 746 of SEQ ID NO: 586136
ggacaaacauggcuauauu

SEQ ID NO: 694837 - RNA, 19 nt, Artificial Sequence
  Description of Artificial Sequence: Synthetic oligonucleotide
  Antisense strand to SEQ ID NO: 694836
aauauagccauguuugucc

SEQ ID NO: 694838 - RNA, 19 nt, Artificial Sequence
  Description of Artificial Sequence: Synthetic oligonucleotide
  Sense strand starting at position 1084 of SEQ ID NO: 586136
cgccaauuuccuugucucu

SEQ ID NO: 694839 - RNA, 19 nt, Artificial Sequence
  Description of Artificial Sequence: Synthetic oligonucleotide
  Antisense strand to SEQ ID NO: 694838
agagacaaggaaauuggcg

SEQ ID NO: 694840 - RNA, 19 nt, Artificial Sequence
  Description of Artificial Sequence: Synthetic oligonucleotide
  Sense strand starting at position 1160 of SEQ ID NO: 586136
gucucaaugcagcaaauua

SEQ ID NO: 694841 - RNA, 19 nt, Artificial Sequence
  Description of Artificial Sequence: Synthetic oligonucleotide
  Antisense strand to SEQ ID NO: 694840
uaauuugcugcauugagac

SEQ ID NO: 694842 - RNA, 19 nt, Artificial Sequence
  Description of Artificial Sequence: Synthetic oligonucleotide
  Sense strand starting at position 1283 of SEQ ID NO: 586136
ggaagucuaaagggucauu

SEQ ID NO: 694843 - RNA, 19 nt, Artificial Sequence
  Description of Artificial Sequence: Synthetic oligonucleotide
  Antisense strand to SEQ ID NO: 694842
aaugacccuuuagacuucc

SEQ ID NO: 694844 - RNA, 19 nt, Artificial Sequence
  Description of Artificial Sequence: Synthetic oligonucleotide
  Sense strand starting at position 1398 of SEQ ID NO: 586136
ggaagcucgcauuaaccua

SEQ ID NO: 694845 - RNA, 19 nt, Artificial Sequence
  Description of Artificial Sequence: Synthetic oligonucleotide
  Antisense strand to SEQ ID NO: 694844
uagguuaaugcgagcuucc

SEQ ID NO: 694846 - RNA, 19 nt, Artificial Sequence
  Description of Artificial Sequence: Synthetic oligonucleotide
  Sense strand starting at position 1728 of SEQ ID NO: 586136
gucagcucgccuuucuuua

SEQ ID NO: 694847 - RNA, 19 nt, Artificial Sequence
  Description of Artificial Sequence: Synthetic oligonucleotide
  Antisense strand to SEQ ID NO: 694846
uaaagaaaggcgagcugac

SEQ ID NO: 694848 - RNA, 19 nt, Artificial Sequence
  Description of Artificial Sequence: Synthetic oligonucleotide
  Sense strand starting at position 1811 of SEQ ID NO: 586136
cgaugcgucuguauuggga

SEQ ID NO: 694849 - RNA, 19 nt, Artificial Sequence
  Description of Artificial Sequence: Synthetic oligonucleotide
  Antisense strand to SEQ ID NO: 694848
ucccaauacagacgcaucg

SEQ ID NO: 694850 - RNA, 19 nt, Artificial Sequence
  Description of Artificial Sequence: Synthetic oligonucleotide
  Sense strand starting at position 2036 of SEQ ID NO: 586136
gcgagagaucgccauugga

SEQ ID NO: 694851 - RNA, 19 nt, Artificial Sequence
  Description of Artificial Sequence: Synthetic oligonucleotide
  Antisense strand to SEQ ID NO: 694850
uccaauggcgaucucucgc

SEQ ID NO: 694852 - RNA, 19 nt, Artificial Sequence
  Description of Artificial Sequence: Synthetic oligonucleotide
  Sense strand starting at position 2655 of SEQ ID NO: 586136
aucagugcccugggaugaa

SEQ ID NO: 694853 - RNA, 19 nt, Artificial Sequence
  Description of Artificial Sequence: Synthetic oligonucleotide
  Antisense strand to SEQ ID NO: 694852
uucaucccagggcacugau

SEQ ID NO: 694854 - RNA, 19 nt, Artificial Sequence
  Description of Artificial Sequence: Synthetic oligonucleotide
  Sense strand starting at position 2866 of SEQ ID NO: 586136
uagcgagucagugagaaca

SEQ ID NO: 694855 - RNA, 19 nt, Artificial Sequence
  Description of Artificial Sequence: Synthetic oligonucleotide
  Antisense strand to SEQ ID NO: 694854
uguucucacugacucgcua

SEQ ID NO: 694856 - RNA, 19 nt, Artificial Sequence
  Description of Artificial Sequence: Synthetic oligonucleotide
  Sense strand starting at position 2996 of SEQ ID NO: 586136
uguuaaagauguuuggaaa

SEQ ID NO: 694857 - RNA, 19 nt, Artificial Sequence
  Description of Artificial Sequence: Synthetic oligonucleotide
  Antisense strand to SEQ ID NO: 694856
uuuccaaacaucuuuaaca

SEQ ID NO: 694858 - RNA, 19 nt, Artificial Sequence
  Description of Artificial Sequence: Synthetic oligonucleotide
  Sense strand starting at position 2997 of SEQ ID NO: 586136
guuaaagauguuuggaaac

SEQ ID NO: 694859 - RNA, 19 nt, Artificial Sequence
  Description of Artificial Sequence: Synthetic oligonucleotide
  Antisense strand to SEQ ID NO: 694858
guuuccaaacaucuuuaac

SEQ ID NO: 694860 - RNA, 19 nt, Artificial Sequence
  Description of Artificial Sequence: Synthetic oligonucleotide
  Sense strand starting at position 3029 of SEQ ID NO: 586136
acuaauacuucguuuauga

SEQ ID NO: 694861 - RNA, 19 nt, Artificial Sequence
  Description of Artificial Sequence: Synthetic oligonucleotide
  Antisense strand to SEQ ID NO: 694860
ucauaaacgaaguauuagu

SEQ ID NO: 694862 - RNA, 19 nt, Artificial Sequence
  Description of Artificial Sequence: Synthetic oligonucleotide
  Sense strand starting at position 3031 of SEQ ID NO: 586136
uaauacuucguuuaugaga

SEQ ID NO: 694863 - RNA, 19 nt, Artificial Sequence
  Description of Artificial Sequence: Synthetic oligonucleotide
  Antisense strand to SEQ ID NO: 694862
ucucauaaacgaaguauua

SEQ ID NO: 694864 - RNA, 19 nt, Artificial Sequence
  Description of Artificial Sequence: Synthetic oligonucleotide
  Sense strand starting at position 3116 of SEQ ID NO: 586136
cucagaucuugagauuuau

SEQ ID NO: 694865 - RNA, 19 nt, Artificial Sequence
  Description of Artificial Sequence: Synthetic oligonucleotide
  Antisense strand to SEQ ID NO: 694864
auaaaucucaagaucugag

SEQ ID NO: 694866 - RNA, 19 nt, Artificial Sequence
  Description of Artificial Sequence: Synthetic oligonucleotide
  Sense strand starting at position 3122 of SEQ ID NO: 586136
ucuugagauuuauggaaau

SEQ ID NO: 694867 - RNA, 19 nt, Artificial Sequence
  Description of Artificial Sequence: Synthetic oligonucleotide
  Antisense strand to SEQ ID NO: 694866
auuuccauaaaucucaaga

SEQ ID NO: 694868 - RNA, 19 nt, Artificial Sequence
  Description of Artificial Sequence: Synthetic oligonucleotide
  Sense strand starting at position 3172 of SEQ ID NO: 586136
cggagauuaaauugguguu

SEQ ID NO: 694869 - RNA, 19 nt, Artificial Sequence
  Description of Artificial Sequence: Synthetic oligonucleotide
  Antisense strand to SEQ ID NO: 694868
aacaccaauuuaaucuccg

SEQ ID NO: 694870 - RNA, 19 nt, Artificial Sequence
  Description of Artificial Sequence: Synthetic oligonucleotide
  Sense strand starting at position 3338 of SEQ ID NO: 586136
gucauuucuccagggugca

SEQ ID NO: 694871 - RNA, 19 nt, Artificial Sequence
  Description of Artificial Sequence: Synthetic oligonucleotide
  Antisense strand to SEQ ID NO: 694870
ugcacccuggagaaaugac

SEQ ID NO: 694872 - RNA, 19 nt, Artificial Sequence
  Description of Artificial Sequence: Synthetic oligonucleotide
  Sense strand starting at position 3375 of SEQ ID NO: 586136
caaugaaaguuucuuugga

SEQ ID NO: 694873 - RNA, 19 nt, Artificial Sequence
  Description of Artificial Sequence: Synthetic oligonucleotide
  Antisense strand to SEQ ID NO: 694872
uccaaagaaacuuucauug

SEQ ID NO: 694874 - RNA, 19 nt, Artificial Sequence
  Description of Artificial Sequence: Synthetic oligonucleotide
  Sense strand starting at position 3377 of SEQ ID NO: 586136
augaaaguuucuuuggaaa

SEQ ID NO: 694875 - RNA, 19 nt, Artificial Sequence
  Description of Artificial Sequence: Synthetic oligonucleotide
  Antisense strand to SEQ ID NO: 694874
uuuccaaagaaacuuucau

SEQ ID NO: 694876 - RNA, 19 nt, Artificial Sequence
  Description of Artificial Sequence: Synthetic oligonucleotide
  Sense strand starting at position 3415 of SEQ ID NO: 586136
guuguuucccuacagagua

SEQ ID NO: 694877 - RNA, 19 nt, Artificial Sequence
  Description of Artificial Sequence: Synthetic oligonucleotide
  Antisense strand to SEQ ID NO: 694876
uacucuguagggaaacaac

SEQ ID NO: 694878 - RNA, 19 nt, Artificial Sequence
  Description of Artificial Sequence: Synthetic oligonucleotide
  Sense strand starting at position 3448 of SEQ ID NO: 586136
cucaauaugugugucaaag

SEQ ID NO: 694879 - RNA, 19 nt, Artificial Sequence
  Description of Artificial Sequence: Synthetic oligonucleotide
  Antisense strand to SEQ ID NO: 694878
cuuugacacacauauugag

SEQ ID NO: 694880 - RNA, 19 nt, Artificial Sequence
  Description of Artificial Sequence: Synthetic oligonucleotide
  Sense strand starting at position 3462 of SEQ ID NO: 586136
caaagagacguguaugugu

SEQ ID NO: 694881 - RNA, 19 nt, Artificial Sequence
  Description of Artificial Sequence: Synthetic oligonucleotide
  Antisense strand to SEQ ID NO: 694880
acacauacacgucucuuug

SEQ ID NO: 694882 - RNA, 19 nt, Artificial Sequence
  Description of Artificial Sequence: Synthetic oligonucleotide
  Sense strand starting at position 3627 of SEQ ID NO: 586136
cugaaaucuccuggaauau

SEQ ID NO: 694883 - RNA, 19 nt, Artificial Sequence
  Description of Artificial Sequence: Synthetic oligonucleotide
  Antisense strand to SEQ ID NO: 694882
auauuccaggagauuucag

SEQ ID NO: 694884 - RNA, 19 nt, Artificial Sequence
  Description of Artificial Sequence: Synthetic oligonucleotide
  Sense strand starting at position 3636 of SEQ ID NO: 586136
ccuggaauauguuuaucau

SEQ ID NO: 694885 - RNA, 19 nt, Artificial Sequence
  Description of Artificial Sequence: Synthetic oligonucleotide
  Antisense strand to SEQ ID NO: 694884
augauaaacauauuccagg

SEQ ID NO: 694886 - RNA, 19 nt, Artificial Sequence
  Description of Artificial Sequence: Synthetic oligonucleotide
  Sense strand starting at position 3720 of SEQ ID NO: 586136
auuaaagacugggacagau

SEQ ID NO: 694887 - RNA, 19 nt, Artificial Sequence
  Description of Artificial Sequence: Synthetic oligonucleotide
  Antisense strand to SEQ ID NO: 694886
aucugucccagucuuuaau

SEQ ID NO: 694888 - RNA, 19 nt, Artificial Sequence
  Description of Artificial Sequence: Synthetic oligonucleotide
  Sense strand starting at position 3808 of SEQ ID NO: 586136
guuggaugaugcuuuaaua

SEQ ID NO: 694889 - RNA, 19 nt, Artificial Sequence
  Description of Artificial Sequence: Synthetic oligonucleotide
  Antisense strand to SEQ ID NO: 694888
uauuaaagcaucauccaac

SEQ ID NO: 694890 - RNA, 19 nt, Artificial Sequence
  Description of Artificial Sequence: Synthetic oligonucleotide
  Sense strand starting at position 3856 of SEQ ID NO: 586136
gcuccugagagugaccaau

SEQ ID NO: 694891 - RNA, 19 nt, Artificial Sequence
  Description of Artificial Sequence: Synthetic oligonucleotide
  Antisense strand to SEQ ID NO: 694890
auuggucacucucaggagc

SEQ ID NO: 694892 - RNA, 19 nt, Artificial Sequence
  Description of Artificial Sequence: Synthetic oligonucleotide
  Sense strand starting at position 3919 of SEQ ID NO: 586136
uaguaucaugcggaagaaa

SEQ ID NO: 694893 - RNA, 19 nt, Artificial Sequence
  Description of Artificial Sequence: Synthetic oligonucleotide
  Antisense strand to SEQ ID NO: 694892
uuucuuccgcaugauacua

SEQ ID NO: 694894 - RNA, 19 nt, Artificial Sequence
  Description of Artificial Sequence: Synthetic oligonucleotide
  Sense strand starting at position 3964 of SEQ ID NO: 586136
ugguaaccuccuggaacau

SEQ ID NO: 694895 - RNA, 19 nt, Artificial Sequence
  Description of Artificial Sequence: Synthetic oligonucleotide
  Antisense strand to SEQ ID NO: 694894
auguuccaggagguuacca

SEQ ID NO: 694896 - RNA, 19 nt, Artificial Sequence
  Description of Artificial Sequence: Synthetic oligonucleotide
  Sense strand starting at position 72 of SEQ ID NO: 586137
ucagguauauccucacuua

SEQ ID NO: 694897 - RNA, 19 nt, Artificial Sequence
  Description of Artificial Sequence: Synthetic oligonucleotide
  Antisense strand to SEQ ID NO: 694896
uaagugaggauauaccuga

SEQ ID NO: 694898 - RNA, 19 nt, Artificial Sequence
  Description of Artificial Sequence: Synthetic oligonucleotide
  Sense strand starting at position 75 of SEQ ID NO: 586137
gguauauccucacuuagaa

SEQ ID NO: 694899 - RNA, 19 nt, Artificial Sequence
  Description of Artificial Sequence: Synthetic oligonucleotide
  Antisense strand to SEQ ID NO: 694898
uucuaagugaggauauacc

SEQ ID NO: 694900 - RNA, 19 nt, Artificial Sequence
  Description of Artificial Sequence: Synthetic oligonucleotide
  Sense strand starting at position 87 of SEQ ID NO: 586137
cuuagaaaugauugucagu

SEQ ID NO: 694901 - RNA, 19 nt, Artificial Sequence
  Description of Artificial Sequence: Synthetic oligonucleotide
  Antisense strand to SEQ ID NO: 694900
acugacaaucauuucuaag

SEQ ID NO: 694902 - RNA, 19 nt, Artificial Sequence
  Description of Artificial Sequence: Synthetic oligonucleotide
  Sense strand starting at position 89 of SEQ ID NO: 586137
uagaaaugauugucaguga

SEQ ID NO: 694903 - RNA, 19 nt, Artificial Sequence
  Description of Artificial Sequence: Synthetic oligonucleotide
  Antisense strand to SEQ ID NO: 694902
ucacugacaaucauuucua

SEQ ID NO: 694904 - RNA, 19 nt, Artificial Sequence
  Description of Artificial Sequence: Synthetic oligonucleotide
  Sense strand starting at position 92 of SEQ ID NO: 586137
aaaugauugucagugaagc

SEQ ID NO: 694905 - RNA, 19 nt, Artificial Sequence
  Description of Artificial Sequence: Synthetic oligonucleotide
  Antisense strand to SEQ ID NO: 694904
gcuucacugacaaucauuu

SEQ ID NO: 694906 - RNA, 19 nt, Artificial Sequence
  Description of Artificial Sequence: Synthetic oligonucleotide
  Sense strand starting at position 428 of SEQ ID NO: 586137
ggaguuaacuuaccugacu

SEQ ID NO: 694907 - RNA, 19 nt, Artificial Sequence
  Description of Artificial Sequence: Synthetic oligonucleotide
  Antisense strand to SEQ ID NO: 694906
agucagguaaguuaacucc

SEQ ID NO: 694908 - RNA, 19 nt, Artificial Sequence
  Description of Artificial Sequence: Synthetic oligonucleotide
  Sense strand starting at position 834 of SEQ ID NO: 586137
ugugauauuaaggguacuu

SEQ ID NO: 694909 - RNA, 19 nt, Artificial Sequence
  Description of Artificial Sequence: Synthetic oligonucleotide
  Antisense strand to SEQ ID NO: 694908
aaguacccuuaauaucaca

SEQ ID NO: 694910 - RNA, 19 nt, Artificial Sequence
  Description of Artificial Sequence: Synthetic oligonucleotide
  Sense strand starting at position 925 of SEQ ID NO: 586137
ucguauuaucagcaguaaa

SEQ ID NO: 694911 - RNA, 19 nt, Artificial Sequence
  Description of Artificial Sequence: Synthetic oligonucleotide
  Antisense strand to SEQ ID NO: 694910
uuuacugcugauaauacga

SEQ ID NO: 694912 - RNA, 19 nt, Artificial Sequence
  Description of Artificial Sequence: Synthetic oligonucleotide
  Sense strand starting at position 979 of SEQ ID NO: 586137
auauguucugucuaugauu

SEQ ID NO: 694913 - RNA, 19 nt, Artificial Sequence
  Description of Artificial Sequence: Synthetic oligonucleotide
  Antisense strand to SEQ ID NO: 694912
aaucauagacagaacauau

SEQ ID NO: 694914 - RNA, 19 nt, Artificial Sequence
  Description of Artificial Sequence: Synthetic oligonucleotide
  Sense strand starting at position 981 of SEQ ID NO: 586137
auguucugucuaugauuag

SEQ ID NO: 694915 - RNA, 19 nt, Artificial Sequence
  Description of Artificial Sequence: Synthetic oligonucleotide
  Antisense strand to SEQ ID NO: 694914
cuaaucauagacagaacau

SEQ ID NO: 694916 - RNA, 19 nt, Artificial Sequence
  Description of Artificial Sequence: Synthetic oligonucleotide
  Sense strand starting at position 985 of SEQ ID NO: 586137
ucugucuaugauuagcaga

SEQ ID NO: 694917 - RNA, 19 nt, Artificial Sequence
  Description of Artificial Sequence: Synthetic oligonucleotide
  Antisense strand to SEQ ID NO: 694916
ucugcuaaucauagacaga

SEQ ID NO: 694918 - RNA, 19 nt, Artificial Sequence
  Description of Artificial Sequence: Synthetic oligonucleotide
  Sense strand starting at position 990 of SEQ ID NO: 586137
cuaugauuagcagagcugu

SEQ ID NO: 694919 - RNA, 19 nt, Artificial Sequence
  Description of Artificial Sequence: Synthetic oligonucleotide
  Antisense strand to SEQ ID NO: 694918
acagcucugcuaaucauag

SEQ ID NO: 694920 - RNA, 19 nt, Artificial Sequence
  Description of Artificial Sequence: Synthetic oligonucleotide
  Sense strand starting at position 1005 of SEQ ID NO: 586137
cuguuugugccagcucuua

SEQ ID NO: 694921 - RNA, 19 nt, Artificial Sequence
  Description of Artificial Sequence: Synthetic oligonucleotide
  Antisense strand to SEQ ID NO: 694920
uaagagcuggcacaaacag

SEQ ID NO: 694922 - RNA, 19 nt, Artificial Sequence
  Description of Artificial Sequence: Synthetic oligonucleotide
  Sense strand starting at position 1515 of SEQ ID NO: 586137
ggagaucaucacugugggu

SEQ ID NO: 694923 - RNA, 19 nt, Artificial Sequence
  Description of Artificial Sequence: Synthetic oligonucleotide
  Antisense strand to SEQ ID NO: 694922
acccacagugaugaucucc

SEQ ID NO: 694924 - RNA, 19 nt, Artificial Sequence
  Description of Artificial Sequence: Synthetic oligonucleotide
  Sense strand starting at position 1517 of SEQ ID NO: 586137
agaucaucacuguggguau

SEQ ID NO: 694925 - RNA, 19 nt, Artificial Sequence
  Description of Artificial Sequence: Synthetic oligonucleotide
  Antisense strand to SEQ ID NO: 694924
auacccacagugaugaucu

SEQ ID NO: 694926 - RNA, 19 nt, Artificial Sequence
  Description of Artificial Sequence: Synthetic oligonucleotide
  Sense strand starting at position 1543 of SEQ ID NO: 586137
agaugacaugaauggucuu

SEQ ID NO: 694927 - RNA, 19 nt, Artificial Sequence
  Description of Artificial Sequence: Synthetic oligonucleotide
  Antisense strand to SEQ ID NO: 694926
aagaccauucaugucaucu

SEQ ID NO: 694928 - RNA, 19 nt, Artificial Sequence
  Description of Artificial Sequence: Synthetic oligonucleotide
  Sense strand starting at position 1546 of SEQ ID NO: 586137
ugacaugaauggucuucca

SEQ ID NO: 694929 - RNA, 19 nt, Artificial Sequence
  Description of Artificial Sequence: Synthetic oligonucleotide
  Antisense strand to SEQ ID NO: 694928
uggaagaccauucauguca

SEQ ID NO: 694930 - RNA, 19 nt, Artificial Sequence
  Description of Artificial Sequence: Synthetic oligonucleotide
  Sense strand starting at position 1549 of SEQ ID NO: 586137
caugaauggucuuccaguc

SEQ ID NO: 694931 - RNA, 19 nt, Artificial Sequence
  Description of Artificial Sequence: Synthetic oligonucleotide
  Antisense strand to SEQ ID NO: 694930
gacuggaagaccauucaug

SEQ ID NO: 694932 - RNA, 19 nt, Artificial Sequence
  Description of Artificial Sequence: Synthetic oligonucleotide
  Sense strand starting at position 1664 of SEQ ID NO: 586137
gcuggagucgugucucauu

SEQ ID NO: 694933 - RNA, 19 nt, Artificial Sequence
  Description of Artificial Sequence: Synthetic oligonucleotide
  Antisense strand to SEQ ID NO: 694932
aaugagacacgacuccagc

SEQ ID NO: 694934 - RNA, 19 nt, Artificial Sequence
  Description of Artificial Sequence: Synthetic oligonucleotide
  Sense strand starting at position 1778 of SEQ ID NO: 586137
gaggguaccugggucagaa

SEQ ID NO: 694935 - RNA, 19 nt, Artificial Sequence
  Description of Artificial Sequence: Synthetic oligonucleotide
  Antisense strand to SEQ ID NO: 694934
uucugacccagguacccuc

SEQ ID NO: 694936 - RNA, 19 nt, Artificial Sequence
  Description of Artificial Sequence: Synthetic oligonucleotide
  Sense strand starting at position 2057 of SEQ ID NO: 586137
ucucuuugugaugauucuu

SEQ ID NO: 694937 - RNA, 19 nt, Artificial Sequence
  Description of Artificial Sequence: Synthetic oligonucleotide
  Antisense strand to SEQ ID NO: 694936
aagaaucaucacaaagaga

SEQ ID NO: 694938 - RNA, 19 nt, Artificial Sequence
  Description of Artificial Sequence: Synthetic oligonucleotide
  Sense strand starting at position 2155 of SEQ ID NO: 586137
uccagacuuuguuccuuga

SEQ ID NO: 694939 - RNA, 19 nt, Artificial Sequence
  Description of Artificial Sequence: Synthetic oligonucleotide
  Antisense strand to SEQ ID NO: 694938
ucaaggaacaaagucugga

SEQ ID NO: 694940 - RNA, 19 nt, Artificial Sequence
  Description of Artificial Sequence: Synthetic oligonucleotide
  Sense strand starting at position 2162 of SEQ ID NO: 586137
uuuguuccuugaucauaga

SEQ ID NO: 694941 - RNA, 19 nt, Artificial Sequence
  Description of Artificial Sequence: Synthetic oligonucleotide
  Antisense strand to SEQ ID NO: 694940
ucuaugaucaaggaacaaa

SEQ ID NO: 694942 - RNA, 19 nt, Artificial Sequence
  Description of Artificial Sequence: Synthetic oligonucleotide
  Sense strand starting at position 2163 of SEQ ID NO: 586137
uuguuccuugaucauagaa

SEQ ID NO: 694943 - RNA, 19 nt, Artificial Sequence
  Description of Artificial Sequence: Synthetic oligonucleotide
  Antisense strand to SEQ ID NO: 694942
uucuaugaucaaggaacaa

SEQ ID NO: 694944 - RNA, 19 nt, Artificial Sequence
  Description of Artificial Sequence: Synthetic oligonucleotide
  Sense strand starting at position 2454 of SEQ ID NO: 586137
aauaguuugggagauguuu

SEQ ID NO: 694945 - RNA, 19 nt, Artificial Sequence
  Description of Artificial Sequence: Synthetic oligonucleotide
  Antisense strand to SEQ ID NO: 694944
aaacaucucccaaacuauu

SEQ ID NO: 694946 - RNA, 19 nt, Artificial Sequence
  Description of Artificial Sequence: Synthetic oligonucleotide
  Sense strand starting at position 2499 of SEQ ID NO: 586137
agccauuuagugugaucua

SEQ ID NO: 694947 - RNA, 19 nt, Artificial Sequence
  Description of Artificial Sequence: Synthetic oligonucleotide
  Antisense strand to SEQ ID NO: 694946
uagaucacacuaaauggcu

SEQ ID NO: 694948 - RNA, 19 nt, Artificial Sequence
  Description of Artificial Sequence: Synthetic oligonucleotide
  Sense strand starting at position 2504 of SEQ ID NO: 586137
uuuagugugaucuauuagu

SEQ ID NO: 694949 - RNA, 19 nt, Artificial Sequence
  Description of Artificial Sequence: Synthetic oligonucleotide
  Antisense strand to SEQ ID NO: 694948
acuaauagaucacacuaaa

SEQ ID NO: 694950 - RNA, 19 nt, Artificial Sequence
  Description of Artificial Sequence: Synthetic oligonucleotide
  Sense strand starting at position 2510 of SEQ ID NO: 586137
gugaucuauuaguucccaa

SEQ ID NO: 694951 - RNA, 19 nt, Artificial Sequence
  Description of Artificial Sequence: Synthetic oligonucleotide
  Antisense strand to SEQ ID NO: 694950
uugggaacuaauagaucac

SEQ ID NO: 694952 - RNA, 19 nt, Artificial Sequence
  Description of Artificial Sequence: Synthetic oligonucleotide
  Sense strand starting at position 2540 of SEQ ID NO: 586137
acauaugaguuaucuggga

SEQ ID NO: 694953 - RNA, 19 nt, Artificial Sequence
  Description of Artificial Sequence: Synthetic oligonucleotide
  Antisense strand to SEQ ID NO: 694952
ucccagauaacucauaugu

SEQ ID NO: 694954 - RNA, 19 nt, Artificial Sequence
  Description of Artificial Sequence: Synthetic oligonucleotide
  Sense strand starting at position 3058 of SEQ ID NO: 586137
guuccucacuggucaagga

SEQ ID NO: 694955 - RNA, 19 nt, Artificial Sequence
  Description of Artificial Sequence: Synthetic oligonucleotide
  Antisense strand to SEQ ID NO: 694954
uccuugaccagugaggaac

SEQ ID NO: 694956 - RNA, 19 nt, Artificial Sequence
  Description of Artificial Sequence: Synthetic oligonucleotide
  Sense strand starting at position 3143 of SEQ ID NO: 586137
gucccuuucccgcuuaagu

SEQ ID NO: 694957 - RNA, 19 nt, Artificial Sequence
  Description of Artificial Sequence: Synthetic oligonucleotide
  Antisense strand to SEQ ID NO: 694956
acuuaagcgggaaagggac

SEQ ID NO: 694958 - RNA, 19 nt, Artificial Sequence
  Description of Artificial Sequence: Synthetic oligonucleotide
  Sense strand starting at position 3198 of SEQ ID NO: 586137
ugggcugacuccucuacau

SEQ ID NO: 694959 - RNA, 19 nt, Artificial Sequence
  Description of Artificial Sequence: Synthetic oligonucleotide
  Antisense strand to SEQ ID NO: 694958
auguagaggagucagccca

SEQ ID NO: 694960 - RNA, 19 nt, Artificial Sequence
  Description of Artificial Sequence: Synthetic oligonucleotide
  Sense strand starting at position 3230 of SEQ ID NO: 586137
ugugaucuuccagguggau

SEQ ID NO: 694961 - RNA, 19 nt, Artificial Sequence
  Description of Artificial Sequence: Synthetic oligonucleotide
  Antisense strand to SEQ ID NO: 694960
auccaccuggaagaucaca

SEQ ID NO: 694962 - RNA, 19 nt, Artificial Sequence
  Description of Artificial Sequence: Synthetic oligonucleotide
  Sense strand starting at position 3232 of SEQ ID NO: 586137
ugaucuuccagguggauga

SEQ ID NO: 694963 - RNA, 19 nt, Artificial Sequence
  Description of Artificial Sequence: Synthetic oligonucleotide
  Antisense strand to SEQ ID NO: 694962
ucauccaccuggaagauca

SEQ ID NO: 694964 - RNA, 19 nt, Artificial Sequence
  Description of Artificial Sequence: Synthetic oligonucleotide
  Sense strand starting at position 3694 of SEQ ID NO: 586137
agagcuucuuggguaauga

SEQ ID NO: 694965 - RNA, 19 nt, Artificial Sequence
  Description of Artificial Sequence: Synthetic oligonucleotide
  Antisense strand to SEQ ID NO: 694964
ucauuacccaagaagcucu

SEQ ID NO: 694966 - RNA, 19 nt, Artificial Sequence
  Description of Artificial Sequence: Synthetic oligonucleotide
  Sense strand starting at position 3695 of SEQ ID NO: 586137
gagcuucuuggguaaugau

SEQ ID NO: 694967 - RNA, 19 nt, Artificial Sequence
  Description of Artificial Sequence: Synthetic oligonucleotide
  Antisense strand to SEQ ID NO: 694966
aucauuacccaagaagcuc

SEQ ID NO: 694968 - RNA, 19 nt, Artificial Sequence
  Description of Artificial Sequence: Synthetic oligonucleotide
  Sense strand starting at position 3729 of SEQ ID NO: 586137
ggaagcacuuguguacaaa

SEQ ID NO: 694969 - RNA, 19 nt, Artificial Sequence
  Description of Artificial Sequence: Synthetic oligonucleotide
  Antisense strand to SEQ ID NO: 694968
uuuguacacaagugcuucc

SEQ ID NO: 694970 - RNA, 19 nt, Artificial Sequence
  Description of Artificial Sequence: Synthetic oligonucleotide
  Sense strand starting at position 3730 of SEQ ID NO: 586137
gaagcacuuguguacaaag

SEQ ID NO: 694971 - RNA, 19 nt, Artificial Sequence
  Description of Artificial Sequence: Synthetic oligonucleotide
  Antisense strand to SEQ ID NO: 694970
cuuuguacacaagugcuuc

SEQ ID NO: 694972 - RNA, 19 nt, Artificial Sequence
  Description of Artificial Sequence: Synthetic oligonucleotide
  Sense strand starting at position 3776 of SEQ ID NO: 586137
uuagaauagccuugggacu

SEQ ID NO: 694973 - RNA, 19 nt, Artificial Sequence
  Description of Artificial Sequence: Synthetic oligonucleotide
  Antisense strand to SEQ ID NO: 694972
agucccaaggcuauucuaa

SEQ ID NO: 694974 - RNA, 19 nt, Artificial Sequence
  Description of Artificial Sequence: Synthetic oligonucleotide
  Sense strand starting at position 3777 of SEQ ID NO: 586137
uagaauagccuugggacuu

SEQ ID NO: 694975 - RNA, 19 nt, Artificial Sequence
  Description of Artificial Sequence: Synthetic oligonucleotide
  Antisense strand to SEQ ID NO: 694974
aagucccaaggcuauucua

SEQ ID NO: 694976 - RNA, 19 nt, Artificial Sequence
  Description of Artificial Sequence: Synthetic oligonucleotide
  Sense strand starting at position 20 of SEQ ID NO: 586138
ccaucuacucaaugugaag

SEQ ID NO: 694977 - RNA, 19 nt, Artificial Sequence
  Description of Artificial Sequence: Synthetic oligonucleotide
  Antisense strand to SEQ ID NO: 694976
cuucacauugaguagaugg

SEQ ID NO: 694978 - RNA, 19 nt, Artificial Sequence
  Description of Artificial Sequence: Synthetic oligonucleotide
  Sense strand starting at position 231 of SEQ ID NO: 586138
ggcuauuuauaguuaaguu

SEQ ID NO: 694979 - RNA, 19 nt, Artificial Sequence
  Description of Artificial Sequence: Synthetic oligonucleotide
  Antisense strand to SEQ ID NO: 694978
aacuuaacuauaaauagcc

SEQ ID NO: 694980 - RNA, 19 nt, Artificial Sequence
  Description of Artificial Sequence: Synthetic oligonucleotide
  Sense strand starting at position 336 of SEQ ID NO: 586138
uguauaugcucucuaugag

SEQ ID NO: 694981 - RNA, 19 nt, Artificial Sequence
  Description of Artificial Sequence: Synthetic oligonucleotide
  Antisense strand to SEQ ID NO: 694980
cucauagagagcauauaca

SEQ ID NO: 694982 - RNA, 19 nt, Artificial Sequence
  Description of Artificial Sequence: Synthetic oligonucleotide
  Sense strand starting at position 337 of SEQ ID NO: 586138
guauaugcucucuaugaga

SEQ ID NO: 694983 - RNA, 19 nt, Artificial Sequence
  Description of Artificial Sequence: Synthetic oligonucleotide
  Antisense strand to SEQ ID NO: 694982
ucucauagagagcauauac

SEQ ID NO: 694984 - RNA, 19 nt, Artificial Sequence
  Description of Artificial Sequence: Synthetic oligonucleotide
  Sense strand starting at position 472 of SEQ ID NO: 586138
aagcuaaacuggguaugaa

SEQ ID NO: 694985 - RNA, 19 nt, Artificial Sequence
  Description of Artificial Sequence: Synthetic oligonucleotide
  Antisense strand to SEQ ID NO: 694984
uucauacccaguuuagcuu

SEQ ID NO: 694986 - RNA, 19 nt, Artificial Sequence
  Description of Artificial Sequence: Synthetic oligonucleotide
  Sense strand starting at position 534 of SEQ ID NO: 586138
caacucugaguuuggagau

SEQ ID NO: 694987 - RNA, 19 nt, Artificial Sequence
  Description of Artificial Sequence: Synthetic oligonucleotide
  Antisense strand to SEQ ID NO: 694986
aucuccaaacucagaguug

SEQ ID NO: 694988 - RNA, 19 nt, Artificial Sequence
  Description of Artificial Sequence: Synthetic oligonucleotide
  Sense strand starting at position 581 of SEQ ID NO: 586138
aaguaaggacagugguuua

SEQ ID NO: 694989 - RNA, 19 nt, Artificial Sequence
  Description of Artificial Sequence: Synthetic oligonucleotide
  Antisense strand to SEQ ID NO: 694988
uaaaccacuguccuuacuu

SEQ ID NO: 694990 - RNA, 19 nt, Artificial Sequence
  Description of Artificial Sequence: Synthetic oligonucleotide
  Sense strand starting at position 584 of SEQ ID NO: 586138
uaaggacagugguuuaaca

SEQ ID NO: 694991 - RNA, 19 nt, Artificial Sequence
  Description of Artificial Sequence: Synthetic oligonucleotide
  Antisense strand to SEQ ID NO: 694990
uguuaaaccacuguccuua

SEQ ID NO: 694992 - RNA, 19 nt, Artificial Sequence
  Description of Artificial Sequence: Synthetic oligonucleotide
  Sense strand starting at position 615 of SEQ ID NO: 586138
cugauugugcugcaucaag

SEQ ID NO: 694993 - RNA, 19 nt, Artificial Sequence
  Description of Artificial Sequence: Synthetic oligonucleotide
  Antisense strand to SEQ ID NO: 694992
cuugaugcagcacaaucag

SEQ ID NO: 694994 - RNA, 19 nt, Artificial Sequence
  Description of Artificial Sequence: Synthetic oligonucleotide
  Sense strand starting at position 652 of SEQ ID NO: 586138
ggaccuuugugacuugaca

SEQ ID NO: 694995 - RNA, 19 nt, Artificial Sequence
  Description of Artificial Sequence: Synthetic oligonucleotide
  Antisense strand to SEQ ID NO: 694994
ugucaagucacaaaggucc

SEQ ID NO: 694996 - RNA, 19 nt, Artificial Sequence
  Description of Artificial Sequence: Synthetic oligonucleotide
  Sense strand starting at position 676 of SEQ ID NO: 586138
aaugguaaugagugugguu

SEQ ID NO: 694997 - RNA, 19 nt, Artificial Sequence
  Description of Artificial Sequence: Synthetic oligonucleotide
  Antisense strand to SEQ ID NO: 694996
aaccacacucauuaccauu

SEQ ID NO: 694998 - RNA, 19 nt, Artificial Sequence
  Description of Artificial Sequence: Synthetic oligonucleotide
  Sense strand starting at position 678 of SEQ ID NO: 586138
ugguaaugagugugguuaa

SEQ ID NO: 694999 - RNA, 19 nt, Artificial Sequence
  Description of Artificial Sequence: Synthetic oligonucleotide
  Antisense strand to SEQ ID NO: 694998
uuaaccacacucauuacca

SEQ ID NO: 695000 - RNA, 19 nt, Artificial Sequence
  Description of Artificial Sequence: Synthetic oligonucleotide
  Sense strand starting at position 681 of SEQ ID NO: 586138
uaaugagugugguuaauga

SEQ ID NO: 695001 - RNA, 19 nt, Artificial Sequence
  Description of Artificial Sequence: Synthetic oligonucleotide
  Antisense strand to SEQ ID NO: 695000
ucauuaaccacacucauua

SEQ ID NO: 695002 - RNA, 19 nt, Artificial Sequence
  Description of Artificial Sequence: Synthetic oligonucleotide
  Sense strand starting at position 694 of SEQ ID NO: 586138
uaaugaauaguacggcuua

SEQ ID NO: 695003 - RNA, 19 nt, Artificial Sequence
  Description of Artificial Sequence: Synthetic oligonucleotide
  Antisense strand to SEQ ID NO: 695002
uaagccguacuauucauua

SEQ ID NO: 695004 - RNA, 19 nt, Artificial Sequence
  Description of Artificial Sequence: Synthetic oligonucleotide
  Sense strand starting at position 742 of SEQ ID NO: 586138
uuuauacaguuguuacaca

SEQ ID NO: 695005 - RNA, 19 nt, Artificial Sequence
  Description of Artificial Sequence: Synthetic oligonucleotide
  Antisense strand to SEQ ID NO: 695004
uguguaacaacuguauaaa

SEQ ID NO: 695006 - RNA, 19 nt, Artificial Sequence
  Description of Artificial Sequence: Synthetic oligonucleotide
  Sense strand starting at position 815 of SEQ ID NO: 586138
auaaguaauggguagcaau

SEQ ID NO: 695007 - RNA, 19 nt, Artificial Sequence
  Description of Artificial Sequence: Synthetic oligonucleotide
  Antisense strand to SEQ ID NO: 695006
auugcuacccauuacuuau

SEQ ID NO: 695008 - RNA, 19 nt, Artificial Sequence
  Description of Artificial Sequence: Synthetic oligonucleotide
  Sense strand starting at position 860 of SEQ ID NO: 586138
uccaaauaaguuuguuaag

SEQ ID NO: 695009 - RNA, 19 nt, Artificial Sequence
  Description of Artificial Sequence: Synthetic oligonucleotide
  Antisense strand to SEQ ID NO: 695008
cuuaacaaacuuauuugga

SEQ ID NO: 695010 - RNA, 19 nt, Artificial Sequence
  Description of Artificial Sequence: Synthetic oligonucleotide
  Sense strand starting at position 861 of SEQ ID NO: 586138
ccaaauaaguuuguuaagu

SEQ ID NO: 695011 - RNA, 19 nt, Artificial Sequence
  Description of Artificial Sequence: Synthetic oligonucleotide
  Antisense strand to SEQ ID NO: 695010
acuuaacaaacuuauuugg

SEQ ID NO: 695012 - RNA, 19 nt, Artificial Sequence
  Description of Artificial Sequence: Synthetic oligonucleotide
  Sense strand starting at position 1508 of SEQ ID NO: 586138
ugccaaugguuaccagaca

SEQ ID NO: 695013 - RNA, 19 nt, Artificial Sequence
  Description of Artificial Sequence: Synthetic oligonucleotide
  Antisense strand to SEQ ID NO: 695012
ugucugguaaccauuggca

SEQ ID NO: 695014 - RNA, 19 nt, Artificial Sequence
  Description of Artificial Sequence: Synthetic oligonucleotide
  Sense strand starting at position 1527 of SEQ ID NO: 586138
aucucucuucuuugggaaa

SEQ ID NO: 695015 - RNA, 19 nt, Artificial Sequence
  Description of Artificial Sequence: Synthetic oligonucleotide
  Antisense strand to SEQ ID NO: 695014
uuucccaaagaagagagau

SEQ ID NO: 695016 - RNA, 19 nt, Artificial Sequence
  Description of Artificial Sequence: Synthetic oligonucleotide
  Sense strand starting at position 1550 of SEQ ID NO: 586138
gagugacaaucagugucaa

SEQ ID NO: 695017 - RNA, 19 nt, Artificial Sequence
  Description of Artificial Sequence: Synthetic oligonucleotide
  Antisense strand to SEQ ID NO: 695016
uugacacugauugucacuc

SEQ ID NO: 695018 - RNA, 19 nt, Artificial Sequence
  Description of Artificial Sequence: Synthetic oligonucleotide
  Sense strand starting at position 1551 of SEQ ID NO: 586138
agugacaaucagugucaaa

SEQ ID NO: 695019 - RNA, 19 nt, Artificial Sequence
  Description of Artificial Sequence: Synthetic oligonucleotide
  Antisense strand to SEQ ID NO: 695018
uuugacacugauugucacu

SEQ ID NO: 695020 - RNA, 19 nt, Artificial Sequence
  Description of Artificial Sequence: Synthetic oligonucleotide
  Sense strand starting at position 2044 of SEQ ID NO: 586138
ccugcauucucaccuagga

SEQ ID NO: 695021 - RNA, 19 nt, Artificial Sequence
  Description of Artificial Sequence: Synthetic oligonucleotide
  Antisense strand to SEQ ID NO: 695020
uccuaggugagaaugcagg

SEQ ID NO: 695022 - RNA, 19 nt, Artificial Sequence
  Description of Artificial Sequence: Synthetic oligonucleotide
  Sense strand starting at position 2102 of SEQ ID NO: 586138
ucaugaaccuuggaauaga

SEQ ID NO: 695023 - RNA, 19 nt, Artificial Sequence
  Description of Artificial Sequence: Synthetic oligonucleotide
  Antisense strand to SEQ ID NO: 695022
ucuauuccaagguucauga

SEQ ID NO: 695024 - RNA, 19 nt, Artificial Sequence
  Description of Artificial Sequence: Synthetic oligonucleotide
  Sense strand starting at position 2166 of SEQ ID NO: 586138
gaucuaagggcuugaacuc

SEQ ID NO: 695025 - RNA, 19 nt, Artificial Sequence
  Description of Artificial Sequence: Synthetic oligonucleotide
  Antisense strand to SEQ ID NO: 695024
gaguucaagcccuuagauc

SEQ ID NO: 695026 - RNA, 19 nt, Artificial Sequence
  Description of Artificial Sequence: Synthetic oligonucleotide
  Sense strand starting at position 2291 of SEQ ID NO: 586138
ugcgacaaauugucuuuau

SEQ ID NO: 695027 - RNA, 19 nt, Artificial Sequence
  Description of Artificial Sequence: Synthetic oligonucleotide
  Antisense strand to SEQ ID NO: 695026
auaaagacaauuugucgca

SEQ ID NO: 695028 - RNA, 19 nt, Artificial Sequence
  Description of Artificial Sequence: Synthetic oligonucleotide
  Sense strand starting at position 2292 of SEQ ID NO: 586138
gcgacaaauugucuuuaua

SEQ ID NO: 695029 - RNA, 19 nt, Artificial Sequence
  Description of Artificial Sequence: Synthetic oligonucleotide
  Antisense strand to SEQ ID NO: 695028
uauaaagacaauuugucgc

SEQ ID NO: 695030 - RNA, 19 nt, Artificial Sequence
  Description of Artificial Sequence: Synthetic oligonucleotide
  Sense strand starting at position 2436 of SEQ ID NO: 586138
acaguccauuagucucaua

SEQ ID NO: 695031 - RNA, 19 nt, Artificial Sequence
  Description of Artificial Sequence: Synthetic oligonucleotide
  Antisense strand to SEQ ID NO: 695030
uaugagacuaauggacugu

SEQ ID NO: 695032 - RNA, 19 nt, Artificial Sequence
  Description of Artificial Sequence: Synthetic oligonucleotide
  Sense strand starting at position 2506 of SEQ ID NO: 586138
acuaaauuccacggucaau

SEQ ID NO: 695033 - RNA, 19 nt, Artificial Sequence
  Description of Artificial Sequence: Synthetic oligonucleotide
  Antisense strand to SEQ ID NO: 695032
auugaccguggaauuuagu

SEQ ID NO: 695034 - RNA, 19 nt, Artificial Sequence
  Description of Artificial Sequence: Synthetic oligonucleotide
  Sense strand starting at position 2515 of SEQ ID NO: 586138
cacggucaaucgucauaau

SEQ ID NO: 695035 - RNA, 19 nt, Artificial Sequence
  Description of Artificial Sequence: Synthetic oligonucleotide
  Antisense strand to SEQ ID NO: 695034
auuaugacgauugaccgug

SEQ ID NO: 695036 - RNA, 19 nt, Artificial Sequence
  Description of Artificial Sequence: Synthetic oligonucleotide
  Sense strand starting at position 2516 of SEQ ID NO: 586138
acggucaaucgucauaauc

SEQ ID NO: 695037 - RNA, 19 nt, Artificial Sequence
  Description of Artificial Sequence: Synthetic oligonucleotide
  Antisense strand to SEQ ID NO: 695036
gauuaugacgauugaccgu

SEQ ID NO: 695038 - RNA, 19 nt, Artificial Sequence
  Description of Artificial Sequence: Synthetic oligonucleotide
  Sense strand starting at position 2929 of SEQ ID NO: 586138
accauucuugcauguacua

SEQ ID NO: 695039 - RNA, 19 nt, Artificial Sequence
  Description of Artificial Sequence: Synthetic oligonucleotide
  Antisense strand to SEQ ID NO: 695038
uaguacaugcaagaauggu

SEQ ID NO: 695040 - RNA, 19 nt, Artificial Sequence
  Description of Artificial Sequence: Synthetic oligonucleotide
  Sense strand starting at position 3299 of SEQ ID NO: 586138
ugucuaucacaugaaagcu

SEQ ID NO: 695041 - RNA, 19 nt, Artificial Sequence
  Description of Artificial Sequence: Synthetic oligonucleotide
  Antisense strand to SEQ ID NO: 695040
agcuuucaugugauagaca

SEQ ID NO: 695042 - RNA, 19 nt, Artificial Sequence
  Description of Artificial Sequence: Synthetic oligonucleotide
  Sense strand starting at position 3548 of SEQ ID NO: 586138
uuauaaauccuuggaggca

SEQ ID NO: 695043 - RNA, 19 nt, Artificial Sequence
  Description of Artificial Sequence: Synthetic oligonucleotide
  Antisense strand to SEQ ID NO: 695042
ugccuccaaggauuuauaa

SEQ ID NO: 695044 - RNA, 19 nt, Artificial Sequence
  Description of Artificial Sequence: Synthetic oligonucleotide
  Sense strand starting at position 3883 of SEQ ID NO: 586138
ugucuuuccuacuugagau

SEQ ID NO: 695045 - RNA, 19 nt, Artificial Sequence
  Description of Artificial Sequence: Synthetic oligonucleotide
  Antisense strand to SEQ ID NO: 695044
aucucaaguaggaaagaca

SEQ ID NO: 695046 - RNA, 19 nt, Artificial Sequence
  Description of Artificial Sequence: Synthetic oligonucleotide
  Sense strand starting at position 3890 of SEQ ID NO: 586138
ccuacuugagaucgaguaa

SEQ ID NO: 695047 - RNA, 19 nt, Artificial Sequence
  Description of Artificial Sequence: Synthetic oligonucleotide
  Antisense strand to SEQ ID NO: 695046
uuacucgaucucaaguagg

SEQ ID NO: 695048 - RNA, 19 nt, Artificial Sequence
  Description of Artificial Sequence: Synthetic oligonucleotide
  Sense strand starting at position 3891 of SEQ ID NO: 586138
cuacuugagaucgaguaac

SEQ ID NO: 695049 - RNA, 19 nt, Artificial Sequence
  Description of Artificial Sequence: Synthetic oligonucleotide
  Antisense strand to SEQ ID NO: 695048
guuacucgaucucaaguag

SEQ ID NO: 695050 - RNA, 19 nt, Artificial Sequence
  Description of Artificial Sequence: Synthetic oligonucleotide
  Sense strand starting at position 3897 of SEQ ID NO: 586138
gagaucgaguaacccuauu

SEQ ID NO: 695051 - RNA, 19 nt, Artificial Sequence
  Description of Artificial Sequence: Synthetic oligonucleotide
  Antisense strand to SEQ ID NO: 695050
aauaggguuacucgaucuc

SEQ ID NO: 695052 - RNA, 19 nt, Artificial Sequence
  Description of Artificial Sequence: Synthetic oligonucleotide
  Sense strand starting at position 3942 of SEQ ID NO: 586138
ugaugucauccuugacucu

SEQ ID NO: 695053 - RNA, 19 nt, Artificial Sequence
  Description of Artificial Sequence: Synthetic oligonucleotide
  Antisense strand to SEQ ID NO: 695052
agagucaaggaugacauca

SEQ ID NO: 695054 - RNA, 19 nt, Artificial Sequence
  Description of Artificial Sequence: Synthetic oligonucleotide
  Sense strand starting at position 3974 of SEQ ID NO: 586138
ggccacaucuaaucaguua

SEQ ID NO: 695055 - RNA, 19 nt, Artificial Sequence
  Description of Artificial Sequence: Synthetic oligonucleotide
  Antisense strand to SEQ ID NO: 695054
uaacugauuagauguggcc

SEQ ID NO: 695056 - RNA, 19 nt, Artificial Sequence
  Description of Artificial Sequence: Synthetic oligonucleotide
  Sense strand starting at position 9 of SEQ ID NO: 586139
acuuauuuccuauguuugu

SEQ ID NO: 695057 - RNA, 19 nt, Artificial Sequence
  Description of Artificial Sequence: Synthetic oligonucleotide
  Antisense strand to SEQ ID NO: 695056
acaaacauaggaaauaagu

SEQ ID NO: 695058 - RNA, 19 nt, Artificial Sequence
  Description of Artificial Sequence: Synthetic oligonucleotide
  Sense strand starting at position 10 of SEQ ID NO: 586139
cuuauuuccuauguuugua

SEQ ID NO: 695059 - RNA, 19 nt, Artificial Sequence
  Description of Artificial Sequence: Synthetic oligonucleotide
  Antisense strand to SEQ ID NO: 695058
uacaaacauaggaaauaag

SEQ ID NO: 695060 - RNA, 19 nt, Artificial Sequence
  Description of Artificial Sequence: Synthetic oligonucleotide
  Sense strand starting at position 452 of SEQ ID NO: 586139
cugucuguuacuuaggaag

SEQ ID NO: 695061 - RNA, 19 nt, Artificial Sequence
  Description of Artificial Sequence: Synthetic oligonucleotide
  Antisense strand to SEQ ID NO: 695060
cuuccuaaguaacagacag

SEQ ID NO: 695062 - RNA, 19 nt, Artificial Sequence
  Description of Artificial Sequence: Synthetic oligonucleotide
  Sense strand starting at position 470 of SEQ ID NO: 586139
gacacauagggcuaauguu

SEQ ID NO: 695063 - RNA, 19 nt, Artificial Sequence
  Description of Artificial Sequence: Synthetic oligonucleotide
  Antisense strand to SEQ ID NO: 695062
aacauuagcccuauguguc

SEQ ID NO: 695064 - RNA, 19 nt, Artificial Sequence
  Description of Artificial Sequence: Synthetic oligonucleotide
  Sense strand starting at position 498 of SEQ ID NO: 586139
cguauucuaguuuagauaa

SEQ ID NO: 695065 - RNA, 19 nt, Artificial Sequence
  Description of Artificial Sequence: Synthetic oligonucleotide
  Antisense strand to SEQ ID NO: 695064
uuaucuaaacuagaauacg

SEQ ID NO: 695066 - RNA, 19 nt, Artificial Sequence
  Description of Artificial Sequence: Synthetic oligonucleotide
  Sense strand starting at position 538 of SEQ ID NO: 586139
cucaguguaagugaaagau

SEQ ID NO: 695067 - RNA, 19 nt, Artificial Sequence
  Description of Artificial Sequence: Synthetic oligonucleotide
  Antisense strand to SEQ ID NO: 695066
aucuuucacuuacacugag

SEQ ID NO: 695068 - RNA, 19 nt, Artificial Sequence
  Description of Artificial Sequence: Synthetic oligonucleotide
  Sense strand starting at position 542 of SEQ ID NO: 586139
guguaagugaaagauacuu

SEQ ID NO: 695069 - RNA, 19 nt, Artificial Sequence
  Description of Artificial Sequence: Synthetic oligonucleotide
  Antisense strand to SEQ ID NO: 695068
aaguaucuuucacuuacac

SEQ ID NO: 695070 - RNA, 19 nt, Artificial Sequence
  Description of Artificial Sequence: Synthetic oligonucleotide
  Sense strand starting at position 548 of SEQ ID NO: 586139
gugaaagauacuuggugca

SEQ ID NO: 695071 - RNA, 19 nt, Artificial Sequence
  Description of Artificial Sequence: Synthetic oligonucleotide
  Antisense strand to SEQ ID NO: 695070
ugcaccaaguaucuuucac

SEQ ID NO: 695072 - RNA, 19 nt, Artificial Sequence
  Description of Artificial Sequence: Synthetic oligonucleotide
  Sense strand starting at position 550 of SEQ ID NO: 586139
gaaagauacuuggugcaug

SEQ ID NO: 695073 - RNA, 19 nt, Artificial Sequence
  Description of Artificial Sequence: Synthetic oligonucleotide
  Antisense strand to SEQ ID NO: 695072
caugcaccaaguaucuuuc

SEQ ID NO: 695074 - RNA, 19 nt, Artificial Sequence
  Description of Artificial Sequence: Synthetic oligonucleotide
  Sense strand starting at position 704 of SEQ ID NO: 586139
gcuugaauauaaguaaacu

SEQ ID NO: 695075 - RNA, 19 nt, Artificial Sequence
  Description of Artificial Sequence: Synthetic oligonucleotide
  Antisense strand to SEQ ID NO: 695074
aguuuacuuauauucaagc

SEQ ID NO: 695076 - RNA, 19 nt, Artificial Sequence
  Description of Artificial Sequence: Synthetic oligonucleotide
  Sense strand starting at position 715 of SEQ ID NO: 586139
aguaaacucuaauugcuga

SEQ ID NO: 695077 - RNA, 19 nt, Artificial Sequence
  Description of Artificial Sequence: Synthetic oligonucleotide
  Antisense strand to SEQ ID NO: 695076
ucagcaauuagaguuuacu

SEQ ID NO: 695078 - RNA, 19 nt, Artificial Sequence
  Description of Artificial Sequence: Synthetic oligonucleotide
  Sense strand starting at position 728 of SEQ ID NO: 586139
ugcugaaaucuguaauuaa

SEQ ID NO: 695079 - RNA, 19 nt, Artificial Sequence
  Description of Artificial Sequence: Synthetic oligonucleotide
  Antisense strand to SEQ ID NO: 695078
uuaauuacagauuucagca

SEQ ID NO: 695080 - RNA, 19 nt, Artificial Sequence
  Description of Artificial Sequence: Synthetic oligonucleotide
  Sense strand starting at position 1093 of SEQ ID NO: 586139
aguuuauuucuuugcucua

SEQ ID NO: 695081 - RNA, 19 nt, Artificial Sequence
  Description of Artificial Sequence: Synthetic oligonucleotide
  Antisense strand to SEQ ID NO: 695080
uagagcaaagaaauaaacu

SEQ ID NO: 695082 - RNA, 19 nt, Artificial Sequence
  Description of Artificial Sequence: Synthetic oligonucleotide
  Sense strand starting at position 1181 of SEQ ID NO: 586139
gaacuucuucguuaguuag

SEQ ID NO: 695083 - RNA, 19 nt, Artificial Sequence
  Description of Artificial Sequence: Synthetic oligonucleotide
  Antisense strand to SEQ ID NO: 695082
cuaacuaacgaagaaguuc

SEQ ID NO: 695084 - RNA, 19 nt, Artificial Sequence
  Description of Artificial Sequence: Synthetic oligonucleotide
  Sense strand starting at position 2453 of SEQ ID NO: 586139
uuguguuggcaggacauaa

SEQ ID NO: 695085 - RNA, 19 nt, Artificial Sequence
  Description of Artificial Sequence: Synthetic oligonucleotide
  Antisense strand to SEQ ID NO: 695084
uuauguccugccaacacaa

SEQ ID NO: 695086 - RNA, 19 nt, Artificial Sequence
  Description of Artificial Sequence: Synthetic oligonucleotide
  Sense strand starting at position 2889 of SEQ ID NO: 586139
aaauuaacagacuguguga

SEQ ID NO: 695087 - RNA, 19 nt, Artificial Sequence
  Description of Artificial Sequence: Synthetic oligonucleotide
  Antisense strand to SEQ ID NO: 695086
ucacacagucuguuaauuu

SEQ ID NO: 695088 - RNA, 19 nt, Artificial Sequence
  Description of Artificial Sequence: Synthetic oligonucleotide
  Sense strand starting at position 2955 of SEQ ID NO: 586139
aguguuagagcgggaggaa

SEQ ID NO: 695089 - RNA, 19 nt, Artificial Sequence
  Description of Artificial Sequence: Synthetic oligonucleotide
  Antisense strand to SEQ ID NO: 695088
uuccucccgcucuaacacu

SEQ ID NO: 695090 - RNA, 19 nt, Artificial Sequence
  Description of Artificial Sequence: Synthetic oligonucleotide
  Sense strand starting at position 2956 of SEQ ID NO: 586139
guguuagagcgggaggaau

SEQ ID NO: 695091 - RNA, 19 nt, Artificial Sequence
  Description of Artificial Sequence: Synthetic oligonucleotide
  Antisense strand to SEQ ID NO: 695090
auuccucccgcucuaacac

SEQ ID NO: 695092 - RNA, 19 nt, Artificial Sequence
  Description of Artificial Sequence: Synthetic oligonucleotide
  Sense strand starting at position 3125 of SEQ ID NO: 586139
uuauucuuuguagaguacu

SEQ ID NO: 695093 - RNA, 19 nt, Artificial Sequence
  Description of Artificial Sequence: Synthetic oligonucleotide
  Antisense strand to SEQ ID NO: 695092
aguacucuacaaagaauaa

SEQ ID NO: 695094 - RNA, 19 nt, Artificial Sequence
  Description of Artificial Sequence: Synthetic oligonucleotide
  Sense strand starting at position 3131 of SEQ ID NO: 586139
uuuguagaguacuccaaau

SEQ ID NO: 695095 - RNA, 19 nt, Artificial Sequence
  Description of Artificial Sequence: Synthetic oligonucleotide
  Antisense strand to SEQ ID NO: 695094
auuuggaguacucuacaaa

SEQ ID NO: 695096 - RNA, 19 nt, Artificial Sequence
  Description of Artificial Sequence: Synthetic oligonucleotide
  Sense strand starting at position 3133 of SEQ ID NO: 586139
uguagaguacuccaaauug

SEQ ID NO: 695097 - RNA, 19 nt, Artificial Sequence
  Description of Artificial Sequence: Synthetic oligonucleotide
  Antisense strand to SEQ ID NO: 695096
caauuuggaguacucuaca

SEQ ID NO: 695098 - RNA, 19 nt, Artificial Sequence
  Description of Artificial Sequence: Synthetic oligonucleotide
  Sense strand starting at position 3148 of SEQ ID NO: 586139
auuguaagauagguuacau

SEQ ID NO: 695099 - RNA, 19 nt, Artificial Sequence
  Description of Artificial Sequence: Synthetic oligonucleotide
  Antisense strand to SEQ ID NO: 695098
auguaaccuaucuuacaau

SEQ ID NO: 695100 - RNA, 19 nt, Artificial Sequence
  Description of Artificial Sequence: Synthetic oligonucleotide
  Sense strand starting at position 3254 of SEQ ID NO: 586139
gugacuguccaugagcuga

SEQ ID NO: 695101 - RNA, 19 nt, Artificial Sequence
  Description of Artificial Sequence: Synthetic oligonucleotide
  Antisense strand to SEQ ID NO: 695100
ucagcucauggacagucac

SEQ ID NO: 695102 - RNA, 19 nt, Artificial Sequence
  Description of Artificial Sequence: Synthetic oligonucleotide
  Sense strand starting at position 3259 of SEQ ID NO: 586139
uguccaugagcugaacaaa

SEQ ID NO: 695103 - RNA, 19 nt, Artificial Sequence
  Description of Artificial Sequence: Synthetic oligonucleotide
  Antisense strand to SEQ ID NO: 695102
uuuguucagcucauggaca

SEQ ID NO: 695104 - RNA, 19 nt, Artificial Sequence
  Description of Artificial Sequence: Synthetic oligonucleotide
  Sense strand starting at position 3394 of SEQ ID NO: 586139
gauaaauuguacgugacug

SEQ ID NO: 695105 - RNA, 19 nt, Artificial Sequence
  Description of Artificial Sequence: Synthetic oligonucleotide
  Antisense strand to SEQ ID NO: 695104
cagucacguacaauuuauc

SEQ ID NO: 695106 - RNA, 19 nt, Artificial Sequence
  Description of Artificial Sequence: Synthetic oligonucleotide
  Sense strand starting at position 3395 of SEQ ID NO: 586139
auaaauuguacgugacuga

SEQ ID NO: 695107 - RNA, 19 nt, Artificial Sequence
  Description of Artificial Sequence: Synthetic oligonucleotide
  Antisense strand to SEQ ID NO: 695106
ucagucacguacaauuuau

SEQ ID NO: 695108 - RNA, 19 nt, Artificial Sequence
  Description of Artificial Sequence: Synthetic oligonucleotide
  Sense strand starting at position 3396 of SEQ ID NO: 586139
uaaauuguacgugacugaa

SEQ ID NO: 695109 - RNA, 19 nt, Artificial Sequence
  Description of Artificial Sequence: Synthetic oligonucleotide
  Antisense strand to SEQ ID NO: 695108
uucagucacguacaauuua

SEQ ID NO: 695110 - RNA, 19 nt, Artificial Sequence
  Description of Artificial Sequence: Synthetic oligonucleotide
  Sense strand starting at position 3398 of SEQ ID NO: 586139
aauuguacgugacugaaau

SEQ ID NO: 695111 - RNA, 19 nt, Artificial Sequence
  Description of Artificial Sequence: Synthetic oligonucleotide
  Antisense strand to SEQ ID NO: 695110
auuucagucacguacaauu

SEQ ID NO: 695112 - RNA, 19 nt, Artificial Sequence
  Description of Artificial Sequence: Synthetic oligonucleotide
  Sense strand starting at position 3400 of SEQ ID NO: 586139
uuguacgugacugaaauca

SEQ ID NO: 695113 - RNA, 19 nt, Artificial Sequence
  Description of Artificial Sequence: Synthetic oligonucleotide
  Antisense strand to SEQ ID NO: 695112
ugauuucagucacguacaa

SEQ ID NO: 695114 - RNA, 19 nt, Artificial Sequence
  Description of Artificial Sequence: Synthetic oligonucleotide
  Sense strand starting at position 3408 of SEQ ID NO: 586139
gacugaaaucacggcaaga

SEQ ID NO: 695115 - RNA, 19 nt, Artificial Sequence
  Description of Artificial Sequence: Synthetic oligonucleotide
  Antisense strand to SEQ ID NO: 695114
ucuugccgugauuucaguc

SEQ ID NO: 695116 - RNA, 19 nt, Artificial Sequence
  Description of Artificial Sequence: Synthetic oligonucleotide
  Sense strand starting at position 3468 of SEQ ID NO: 586139
agccaaaucgguuaaccca

SEQ ID NO: 695117 - RNA, 19 nt, Artificial Sequence
  Description of Artificial Sequence: Synthetic oligonucleotide
  Antisense strand to SEQ ID NO: 695116
uggguuaaccgauuuggcu

SEQ ID NO: 695118 - RNA, 19 nt, Artificial Sequence
  Description of Artificial Sequence: Synthetic oligonucleotide
  Sense strand starting at position 3626 of SEQ ID NO: 586139
acaagaacuucugauuuag

SEQ ID NO: 695119 - RNA, 19 nt, Artificial Sequence
  Description of Artificial Sequence: Synthetic oligonucleotide
  Antisense strand to SEQ ID NO: 695118
cuaaaucagaaguucuugu

SEQ ID NO: 695120 - RNA, 19 nt, Artificial Sequence
  Description of Artificial Sequence: Synthetic oligonucleotide
  Sense strand starting at position 3635 of SEQ ID NO: 586139
ucugauuuagccuguuugu

SEQ ID NO: 695121 - RNA, 19 nt, Artificial Sequence
  Description of Artificial Sequence: Synthetic oligonucleotide
  Antisense strand to SEQ ID NO: 695120
acaaacaggcuaaaucaga

SEQ ID NO: 695122 - RNA, 19 nt, Artificial Sequence
  Description of Artificial Sequence: Synthetic oligonucleotide
  Sense strand starting at position 3638 of SEQ ID NO: 586139
gauuuagccuguuuguauu

SEQ ID NO: 695123 - RNA, 19 nt, Artificial Sequence
  Description of Artificial Sequence: Synthetic oligonucleotide
  Antisense strand to SEQ ID NO: 695122
aauacaaacaggcuaaauc

SEQ ID NO: 695124 - RNA, 19 nt, Artificial Sequence
  Description of Artificial Sequence: Synthetic oligonucleotide
  Sense strand starting at position 3769 of SEQ ID NO: 586139
guaauaagacacuguccga

SEQ ID NO: 695125 - RNA, 19 nt, Artificial Sequence
  Description of Artificial Sequence: Synthetic oligonucleotide
  Antisense strand to SEQ ID NO: 695124
ucggacagugucuuauuac

SEQ ID NO: 695126 - RNA, 19 nt, Artificial Sequence
  Description of Artificial Sequence: Synthetic oligonucleotide
  Sense strand starting at position 3786 of SEQ ID NO: 586139
gaguguguaguauauggaa

SEQ ID NO: 695127 - RNA, 19 nt, Artificial Sequence
  Description of Artificial Sequence: Synthetic oligonucleotide
  Antisense strand to SEQ ID NO: 695126
uuccauauacuacacacuc

SEQ ID NO: 695128 - RNA, 19 nt, Artificial Sequence
  Description of Artificial Sequence: Synthetic oligonucleotide
  Sense strand starting at position 3821 of SEQ ID NO: 586139
cagaauguguuacuuauga

SEQ ID NO: 695129 - RNA, 19 nt, Artificial Sequence
  Description of Artificial Sequence: Synthetic oligonucleotide
  Antisense strand to SEQ ID NO: 695128
ucauaaguaacacauucug

SEQ ID NO: 695130 - RNA, 19 nt, Artificial Sequence
  Description of Artificial Sequence: Synthetic oligonucleotide
  Sense strand starting at position 3875 of SEQ ID NO: 586139
ugacaagaaagguguguau

SEQ ID NO: 695131 - RNA, 19 nt, Artificial Sequence
  Description of Artificial Sequence: Synthetic oligonucleotide
  Antisense strand to SEQ ID NO: 695130
auacacaccuuucuuguca

SEQ ID NO: 695132 - RNA, 19 nt, Artificial Sequence
  Description of Artificial Sequence: Synthetic oligonucleotide
  Sense strand starting at position 3878 of SEQ ID NO: 586139
caagaaagguguguaugua

SEQ ID NO: 695133 - RNA, 19 nt, Artificial Sequence
  Description of Artificial Sequence: Synthetic oligonucleotide
  Antisense strand to SEQ ID NO: 695132
uacauacacaccuuucuug

SEQ ID NO: 695134 - RNA, 19 nt, Artificial Sequence
  Description of Artificial Sequence: Synthetic oligonucleotide
  Sense strand starting at position 3879 of SEQ ID NO: 586139
aagaaagguguguauguau

SEQ ID NO: 695135 - RNA, 19 nt, Artificial Sequence
  Description of Artificial Sequence: Synthetic oligonucleotide
  Antisense strand to SEQ ID NO: 695134
auacauacacaccuuucuu

SEQ ID NO: 695136 - RNA, 19 nt, Artificial Sequence
  Description of Artificial Sequence: Synthetic oligonucleotide
  Sense strand starting at position 426 of SEQ ID NO: 586140
agagaugcaucuccuaaca

SEQ ID NO: 695137 - RNA, 19 nt, Artificial Sequence
  Description of Artificial Sequence: Synthetic oligonucleotide
  Antisense strand to SEQ ID NO: 695136
uguuaggagaugcaucucu

SEQ ID NO: 695138 - RNA, 19 nt, Artificial Sequence
  Description of Artificial Sequence: Synthetic oligonucleotide
  Sense strand starting at position 498 of SEQ ID NO: 586140
uuuccauauugucuccaga

SEQ ID NO: 695139 - RNA, 19 nt, Artificial Sequence
  Description of Artificial Sequence: Synthetic oligonucleotide
  Antisense strand to SEQ ID NO: 695138
ucuggagacaauauggaaa

SEQ ID NO: 695140 - RNA, 19 nt, Artificial Sequence
  Description of Artificial Sequence: Synthetic oligonucleotide
  Sense strand starting at position 533 of SEQ ID NO: 586140
cagaaucuguguccagauu

SEQ ID NO: 695141 - RNA, 19 nt, Artificial Sequence
  Description of Artificial Sequence: Synthetic oligonucleotide
  Antisense strand to SEQ ID NO: 695140
aaucuggacacagauucug

SEQ ID NO: 695142 - RNA, 19 nt, Artificial Sequence
  Description of Artificial Sequence: Synthetic oligonucleotide
  Sense strand starting at position 601 of SEQ ID NO: 586140
ggcuucucaagcuaggauu

SEQ ID NO: 695143 - RNA, 19 nt, Artificial Sequence
  Description of Artificial Sequence: Synthetic oligonucleotide
  Antisense strand to SEQ ID NO: 695142
aauccuagcuugagaagcc

SEQ ID NO: 695144 - RNA, 19 nt, Artificial Sequence
  Description of Artificial Sequence: Synthetic oligonucleotide
  Sense strand starting at position 627 of SEQ ID NO: 586140
gaggucugcucauugaaca

SEQ ID NO: 695145 - RNA, 19 nt, Artificial Sequence
  Description of Artificial Sequence: Synthetic oligonucleotide
  Antisense strand to SEQ ID NO: 695144
uguucaaugagcagaccuc

SEQ ID NO: 695146 - RNA, 19 nt, Artificial Sequence
  Description of Artificial Sequence: Synthetic oligonucleotide
  Sense strand starting at position 628 of SEQ ID NO: 586140
aggucugcucauugaacaa

SEQ ID NO: 695147 - RNA, 19 nt, Artificial Sequence
  Description of Artificial Sequence: Synthetic oligonucleotide
  Antisense strand to SEQ ID NO: 695146
uuguucaaugagcagaccu

SEQ ID NO: 695148 - RNA, 19 nt, Artificial Sequence
  Description of Artificial Sequence: Synthetic oligonucleotide
  Sense strand starting at position 646 of SEQ ID NO: 586140
auuacuuacuacucagagu

SEQ ID NO: 695149 - RNA, 19 nt, Artificial Sequence
  Description of Artificial Sequence: Synthetic oligonucleotide
  Antisense strand to SEQ ID NO: 695148
acucugaguaguaaguaau

SEQ ID NO: 695150 - RNA, 19 nt, Artificial Sequence
  Description of Artificial Sequence: Synthetic oligonucleotide
  Sense strand starting at position 714 of SEQ ID NO: 586140
uuaugagaauucccauguu

SEQ ID NO: 695151 - RNA, 19 nt, Artificial Sequence
  Description of Artificial Sequence: Synthetic oligonucleotide
  Antisense strand to SEQ ID NO: 695150
aacaugggaauucucauaa

SEQ ID NO: 695152 - RNA, 19 nt, Artificial Sequence
  Description of Artificial Sequence: Synthetic oligonucleotide
  Sense strand starting at position 717 of SEQ ID NO: 586140
ugagaauucccauguuaug

SEQ ID NO: 695153 - RNA, 19 nt, Artificial Sequence
  Description of Artificial Sequence: Synthetic oligonucleotide
  Antisense strand to SEQ ID NO: 695152
cauaacaugggaauucuca

SEQ ID NO: 695154 - RNA, 19 nt, Artificial Sequence
  Description of Artificial Sequence: Synthetic oligonucleotide
  Sense strand starting at position 729 of SEQ ID NO: 586140
uguuaugagagcuacaaug

SEQ ID NO: 695155 - RNA, 19 nt, Artificial Sequence
  Description of Artificial Sequence: Synthetic oligonucleotide
  Antisense strand to SEQ ID NO: 695154
cauuguagcucucauaaca

SEQ ID NO: 695156 - RNA, 19 nt, Artificial Sequence
  Description of Artificial Sequence: Synthetic oligonucleotide
  Sense strand starting at position 872 of SEQ ID NO: 586140
ccaggugaucgccaaaucu

SEQ ID NO: 695157 - RNA, 19 nt, Artificial Sequence
  Description of Artificial Sequence: Synthetic oligonucleotide
  Antisense strand to SEQ ID NO: 695156
agauuuggcgaucaccugg

SEQ ID NO: 695158 - RNA, 19 nt, Artificial Sequence
  Description of Artificial Sequence: Synthetic oligonucleotide
  Sense strand starting at position 917 of SEQ ID NO: 586140
uaagaugguugaguccuua

SEQ ID NO: 695159 - RNA, 19 nt, Artificial Sequence
  Description of Artificial Sequence: Synthetic oligonucleotide
  Antisense strand to SEQ ID NO: 695158
uaaggacucaaccaucuua

SEQ ID NO: 695160 - RNA, 19 nt, Artificial Sequence
  Description of Artificial Sequence: Synthetic oligonucleotide
  Sense strand starting at position 980 of SEQ ID NO: 586140
augguaucccuaugagaug

SEQ ID NO: 695161 - RNA, 19 nt, Artificial Sequence
  Description of Artificial Sequence: Synthetic oligonucleotide
  Antisense strand to SEQ ID NO: 695160
caucucauagggauaccau

SEQ ID NO: 695162 - RNA, 19 nt, Artificial Sequence
  Description of Artificial Sequence: Synthetic oligonucleotide
  Sense strand starting at position 1103 of SEQ ID NO: 586140
ggaggagggcagugauuca

SEQ ID NO: 695163 - RNA, 19 nt, Artificial Sequence
  Description of Artificial Sequence: Synthetic oligonucleotide
  Antisense strand to SEQ ID NO: 695162
ugaaucacugcccuccucc

SEQ ID NO: 695164 - RNA, 19 nt, Artificial Sequence
  Description of Artificial Sequence: Synthetic oligonucleotide
  Sense strand starting at position 1124 of SEQ ID NO: 586140
cucagauguguuuauauga

SEQ ID NO: 695165 - RNA, 19 nt, Artificial Sequence
  Description of Artificial Sequence: Synthetic oligonucleotide
  Antisense strand to SEQ ID NO: 695164
ucauauaaacacaucugag

SEQ ID NO: 695166 - RNA, 19 nt, Artificial Sequence
  Description of Artificial Sequence: Synthetic oligonucleotide
  Sense strand starting at position 1321 of SEQ ID NO: 586140
uccacauuucucuguguca

SEQ ID NO: 695167 - RNA, 19 nt, Artificial Sequence
  Description of Artificial Sequence: Synthetic oligonucleotide
  Antisense strand to SEQ ID NO: 695166
ugacacagagaaaugugga

SEQ ID NO: 695168 - RNA, 19 nt, Artificial Sequence
  Description of Artificial Sequence: Synthetic oligonucleotide
  Sense strand starting at position 1323 of SEQ ID NO: 586140
cacauuucucugugucagu

SEQ ID NO: 695169 - RNA, 19 nt, Artificial Sequence
  Description of Artificial Sequence: Synthetic oligonucleotide
  Antisense strand to SEQ ID NO: 695168
acugacacagagaaaugug

SEQ ID NO: 695170 - RNA, 19 nt, Artificial Sequence
  Description of Artificial Sequence: Synthetic oligonucleotide
  Sense strand starting at position 1352 of SEQ ID NO: 586140
gugccuuaccuggaaucuu

SEQ ID NO: 695171 - RNA, 19 nt, Artificial Sequence
  Description of Artificial Sequence: Synthetic oligonucleotide
  Antisense strand to SEQ ID NO: 695170
aagauuccagguaaggcac

SEQ ID NO: 695172 - RNA, 19 nt, Artificial Sequence
  Description of Artificial Sequence: Synthetic oligonucleotide
  Sense strand starting at position 1395 of SEQ ID NO: 586140
gugauuuauuacgcaagca

SEQ ID NO: 695173 - RNA, 19 nt, Artificial Sequence
  Description of Artificial Sequence: Synthetic oligonucleotide
  Antisense strand to SEQ ID NO: 695172
ugcuugcguaauaaaucac

SEQ ID NO: 695174 - RNA, 19 nt, Artificial Sequence
  Description of Artificial Sequence: Synthetic oligonucleotide
  Sense strand starting at position 1418 of SEQ ID NO: 586140
acuggaucccauuguuaug

SEQ ID NO: 695175 - RNA, 19 nt, Artificial Sequence
  Description of Artificial Sequence: Synthetic oligonucleotide
  Antisense strand to SEQ ID NO: 695174
cauaacaaugggauccagu

SEQ ID NO: 695176 - RNA, 19 nt, Artificial Sequence
  Description of Artificial Sequence: Synthetic oligonucleotide
  Sense strand starting at position 1429 of SEQ ID NO: 586140
uuguuaugucuacauagaa

SEQ ID NO: 695177 - RNA, 19 nt, Artificial Sequence
  Description of Artificial Sequence: Synthetic oligonucleotide
  Antisense strand to SEQ ID NO: 695176
uucuauguagacauaacaa

SEQ ID NO: 695178 - RNA, 19 nt, Artificial Sequence
  Description of Artificial Sequence: Synthetic oligonucleotide
  Sense strand starting at position 1755 of SEQ ID NO: 586140
auaagugugaagugaauaa

SEQ ID NO: 695179 - RNA, 19 nt, Artificial Sequence
  Description of Artificial Sequence: Synthetic oligonucleotide
  Antisense strand to SEQ ID NO: 695178
uuauucacuucacacuuau

SEQ ID NO: 695180 - RNA, 19 nt, Artificial Sequence
  Description of Artificial Sequence: Synthetic oligonucleotide
  Sense strand starting at position 1810 of SEQ ID NO: 586140
cuuguuggacccugagaga

SEQ ID NO: 695181 - RNA, 19 nt, Artificial Sequence
  Description of Artificial Sequence: Synthetic oligonucleotide
  Antisense strand to SEQ ID NO: 695180
ucucucaggguccaacaag

SEQ ID NO: 695182 - RNA, 19 nt, Artificial Sequence
  Description of Artificial Sequence: Synthetic oligonucleotide
  Sense strand starting at position 1864 of SEQ ID NO: 586140
gcgguucugcugagguaaa

SEQ ID NO: 695183 - RNA, 19 nt, Artificial Sequence
  Description of Artificial Sequence: Synthetic oligonucleotide
  Antisense strand to SEQ ID NO: 695182
uuuaccucagcagaaccgc

SEQ ID NO: 695184 - RNA, 19 nt, Artificial Sequence
  Description of Artificial Sequence: Synthetic oligonucleotide
  Sense strand starting at position 1946 of SEQ ID NO: 586140
gaaguuagugugcauaaac

SEQ ID NO: 695185 - RNA, 19 nt, Artificial Sequence
  Description of Artificial Sequence: Synthetic oligonucleotide
  Antisense strand to SEQ ID NO: 695184
guuuaugcacacuaacuuc

SEQ ID NO: 695186 - RNA, 19 nt, Artificial Sequence
  Description of Artificial Sequence: Synthetic oligonucleotide
  Sense strand starting at position 2268 of SEQ ID NO: 586140
ucuggagaaauuggguuau

SEQ ID NO: 695187 - RNA, 19 nt, Artificial Sequence
  Description of Artificial Sequence: Synthetic oligonucleotide
  Antisense strand to SEQ ID NO: 695186
auaacccaauuucuccaga

SEQ ID NO: 695188 - RNA, 19 nt, Artificial Sequence
  Description of Artificial Sequence: Synthetic oligonucleotide
  Sense strand starting at position 2270 of SEQ ID NO: 586140
uggagaaauuggguuauuc

SEQ ID NO: 695189 - RNA, 19 nt, Artificial Sequence
  Description of Artificial Sequence: Synthetic oligonucleotide
  Antisense strand to SEQ ID NO: 695188
gaauaacccaauuucucca

SEQ ID NO: 695190 - RNA, 19 nt, Artificial Sequence
  Description of Artificial Sequence: Synthetic oligonucleotide
  Sense strand starting at position 2278 of SEQ ID NO: 586140
uuggguuauuccuugaagg

SEQ ID NO: 695191 - RNA, 19 nt, Artificial Sequence
  Description of Artificial Sequence: Synthetic oligonucleotide
  Antisense strand to SEQ ID NO: 695190
ccuucaaggaauaacccaa

SEQ ID NO: 695192 - RNA, 19 nt, Artificial Sequence
  Description of Artificial Sequence: Synthetic oligonucleotide
  Sense strand starting at position 2280 of SEQ ID NO: 586140
ggguuauuccuugaagggu

SEQ ID NO: 695193 - RNA, 19 nt, Artificial Sequence
  Description of Artificial Sequence: Synthetic oligonucleotide
  Antisense strand to SEQ ID NO: 695192
acccuucaaggaauaaccc

SEQ ID NO: 695194 - RNA, 19 nt, Artificial Sequence
  Description of Artificial Sequence: Synthetic oligonucleotide
  Sense strand starting at position 2722 of SEQ ID NO: 586140
gggagcuuauuacaaauuu

SEQ ID NO: 695195 - RNA, 19 nt, Artificial Sequence
  Description of Artificial Sequence: Synthetic oligonucleotide
  Antisense strand to SEQ ID NO: 695194
aaauuuguaauaagcuccc

SEQ ID NO: 695196 - RNA, 19 nt, Artificial Sequence
  Description of Artificial Sequence: Synthetic oligonucleotide
  Sense strand starting at position 2793 of SEQ ID NO: 586140
uggaguagcaggcaaaguu

SEQ ID NO: 695197 - RNA, 19 nt, Artificial Sequence
  Description of Artificial Sequence: Synthetic oligonucleotide
  Antisense strand to SEQ ID NO: 695196
aacuuugccugcuacucca

SEQ ID NO: 695198 - RNA, 19 nt, Artificial Sequence
  Description of Artificial Sequence: Synthetic oligonucleotide
  Sense strand starting at position 2863 of SEQ ID NO: 586140
aagauuucuugugcaguca

SEQ ID NO: 695199 - RNA, 19 nt, Artificial Sequence
  Description of Artificial Sequence: Synthetic oligonucleotide
  Antisense strand to SEQ ID NO: 695198
ugacugcacaagaaaucuu

SEQ ID NO: 695200 - RNA, 19 nt, Artificial Sequence
  Description of Artificial Sequence: Synthetic oligonucleotide
  Sense strand starting at position 3095 of SEQ ID NO: 586140
gggugaggccuagagaagu

SEQ ID NO: 695201 - RNA, 19 nt, Artificial Sequence
  Description of Artificial Sequence: Synthetic oligonucleotide
  Antisense strand to SEQ ID NO: 695200
acuucucuaggccucaccc

SEQ ID NO: 695202 - RNA, 19 nt, Artificial Sequence
  Description of Artificial Sequence: Synthetic oligonucleotide
  Sense strand starting at position 3175 of SEQ ID NO: 586140
gacagaaaggcucaugcuu

SEQ ID NO: 695203 - RNA, 19 nt, Artificial Sequence
  Description of Artificial Sequence: Synthetic oligonucleotide
  Antisense strand to SEQ ID NO: 695202
aagcaugagccuuucuguc

SEQ ID NO: 695204 - RNA, 19 nt, Artificial Sequence
  Description of Artificial Sequence: Synthetic oligonucleotide
  Sense strand starting at position 3226 of SEQ ID NO: 586140
auauuagaccagugaugua

SEQ ID NO: 695205 - RNA, 19 nt, Artificial Sequence
  Description of Artificial Sequence: Synthetic oligonucleotide
  Antisense strand to SEQ ID NO: 695204
uacaucacuggucuaauau

SEQ ID NO: 695206 - RNA, 19 nt, Artificial Sequence
  Description of Artificial Sequence: Synthetic oligonucleotide
  Sense strand starting at position 3468 of SEQ ID NO: 586140
acucgaauacaugauguau

SEQ ID NO: 695207 - RNA, 19 nt, Artificial Sequence
  Description of Artificial Sequence: Synthetic oligonucleotide
  Antisense strand to SEQ ID NO: 695206
auacaucauguauucgagu

SEQ ID NO: 695208 - RNA, 19 nt, Artificial Sequence
  Description of Artificial Sequence: Synthetic oligonucleotide
  Sense strand starting at position 3523 of SEQ ID NO: 586140
ugcuuagugcaucugucua

SEQ ID NO: 695209 - RNA, 19 nt, Artificial Sequence
  Description of Artificial Sequence: Synthetic oligonucleotide
  Antisense strand to SEQ ID NO: 695208
uagacagaugcacuaagca

SEQ ID NO: 695210 - RNA, 19 nt, Artificial Sequence
  Description of Artificial Sequence: Synthetic oligonucleotide
  Sense strand starting at position 3547 of SEQ ID NO: 586140
cuagcaggagugugaugaa

SEQ ID NO: 695211 - RNA, 19 nt, Artificial Sequence
  Description of Artificial Sequence: Synthetic oligonucleotide
  Antisense strand to SEQ ID NO: 695210
uucaucacacuccugcuag

SEQ ID NO: 695212 - RNA, 19 nt, Artificial Sequence
  Description of Artificial Sequence: Synthetic oligonucleotide
  Sense strand starting at position 3626 of SEQ ID NO: 586140
caugucauacaugggaaau

SEQ ID NO: 695213 - RNA, 19 nt, Artificial Sequence
  Description of Artificial Sequence: Synthetic oligonucleotide
  Antisense strand to SEQ ID NO: 695212
auuucccauguaugacaug

SEQ ID NO: 695214 - RNA, 19 nt, Artificial Sequence
  Description of Artificial Sequence: Synthetic oligonucleotide
  Sense strand starting at position 3757 of SEQ ID NO: 586140
gggcuucuggaagagcauu

SEQ ID NO: 695215 - RNA, 19 nt, Artificial Sequence
  Description of Artificial Sequence: Synthetic oligonucleotide
  Antisense strand to SEQ ID NO: 695214
aaugcucuuccagaagccc

SEQ ID NO: 695216 - RNA, 19 nt, Artificial Sequence
  Description of Artificial Sequence: Synthetic oligonucleotide
  Sense strand starting at position 2 of SEQ ID NO: 586141
cccuuagcacuuuguauuu

SEQ ID NO: 695217 - RNA, 19 nt, Artificial Sequence
  Description of Artificial Sequence: Synthetic oligonucleotide
  Antisense strand to SEQ ID NO: 695216
aaauacaaagugcuaaggg

SEQ ID NO: 695218 - RNA, 19 nt, Artificial Sequence
  Description of Artificial Sequence: Synthetic oligonucleotide
  Sense strand starting at position 15 of SEQ ID NO: 586141
guauuuaauuuguacacga

SEQ ID NO: 695219 - RNA, 19 nt, Artificial Sequence
  Description of Artificial Sequence: Synthetic oligonucleotide
  Antisense strand to SEQ ID NO: 695218
ucguguacaaauuaaauac

SEQ ID NO: 695220 - RNA, 19 nt, Artificial Sequence
  Description of Artificial Sequence: Synthetic oligonucleotide
  Sense strand starting at position 117 of SEQ ID NO: 586141
acgguaaaggcugaucuga

SEQ ID NO: 695221 - RNA, 19 nt, Artificial Sequence
  Description of Artificial Sequence: Synthetic oligonucleotide
  Antisense strand to SEQ ID NO: 695220
ucagaucagccuuuaccgu

SEQ ID NO: 695222 - RNA, 19 nt, Artificial Sequence
  Description of Artificial Sequence: Synthetic oligonucleotide
  Sense strand starting at position 119 of SEQ ID NO: 586141
gguaaaggcugaucugaga

SEQ ID NO: 695223 - RNA, 19 nt, Artificial Sequence
  Description of Artificial Sequence: Synthetic oligonucleotide
  Antisense strand to SEQ ID NO: 695222
ucucagaucagccuuuacc

SEQ ID NO: 695224 - RNA, 19 nt, Artificial Sequence
  Description of Artificial Sequence: Synthetic oligonucleotide
  Sense strand starting at position 126 of SEQ ID NO: 586141
gcugaucugagauguccuu

SEQ ID NO: 695225 - RNA, 19 nt, Artificial Sequence
  Description of Artificial Sequence: Synthetic oligonucleotide
  Antisense strand to SEQ ID NO: 695224
aaggacaucucagaucagc

SEQ ID NO: 695226 - RNA, 19 nt, Artificial Sequence
  Description of Artificial Sequence: Synthetic oligonucleotide
  Sense strand starting at position 1093 of SEQ ID NO: 586141
gcgaaagguacugagaguu

SEQ ID NO: 695227 - RNA, 19 nt, Artificial Sequence
  Description of Artificial Sequence: Synthetic oligonucleotide
  Antisense strand to SEQ ID NO: 695226
aacucucaguaccuuucgc

SEQ ID NO: 695228 - RNA, 19 nt, Artificial Sequence
  Description of Artificial Sequence: Synthetic oligonucleotide
  Sense strand starting at position 1103 of SEQ ID NO: 586141
cugagaguuucuguauacu

SEQ ID NO: 695229 - RNA, 19 nt, Artificial Sequence
  Description of Artificial Sequence: Synthetic oligonucleotide
  Antisense strand to SEQ ID NO: 695228
aguauacagaaacucucag

SEQ ID NO: 695230 - RNA, 19 nt, Artificial Sequence
  Description of Artificial Sequence: Synthetic oligonucleotide
  Sense strand starting at position 1251 of SEQ ID NO: 586141
gcauauucuauggguugga

SEQ ID NO: 695231 - RNA, 19 nt, Artificial Sequence
  Description of Artificial Sequence: Synthetic oligonucleotide
  Antisense strand to SEQ ID NO: 695230
uccaacccauagaauaugc

SEQ ID NO: 695232 - RNA, 19 nt, Artificial Sequence
  Description of Artificial Sequence: Synthetic oligonucleotide
  Sense strand starting at position 1582 of SEQ ID NO: 586141
ggaagagaccuuugcuuuc

SEQ ID NO: 695233 - RNA, 19 nt, Artificial Sequence
  Description of Artificial Sequence: Synthetic oligonucleotide
  Antisense strand to SEQ ID NO: 695232
gaaagcaaaggucucuucc

SEQ ID NO: 695234 - RNA, 19 nt, Artificial Sequence
  Description of Artificial Sequence: Synthetic oligonucleotide
  Sense strand starting at position 1885 of SEQ ID NO: 586141
cuucuugacucucccgaau

SEQ ID NO: 695235 - RNA, 19 nt, Artificial Sequence
  Description of Artificial Sequence: Synthetic oligonucleotide
  Antisense strand to SEQ ID NO: 695234
auucgggagagucaagaag

SEQ ID NO: 695236 - RNA, 19 nt, Artificial Sequence
  Description of Artificial Sequence: Synthetic oligonucleotide
  Sense strand starting at position 2093 of SEQ ID NO: 586141
cgagaguggguuugaggaa

SEQ ID NO: 695237 - RNA, 19 nt, Artificial Sequence
  Description of Artificial Sequence: Synthetic oligonucleotide
  Antisense strand to SEQ ID NO: 695236
uuccucaaacccacucucg

SEQ ID NO: 695238 - RNA, 19 nt, Artificial Sequence
  Description of Artificial Sequence: Synthetic oligonucleotide
  Sense strand starting at position 2156 of SEQ ID NO: 586141
ugccgccuuccacaagaau

SEQ ID NO: 695239 - RNA, 19 nt, Artificial Sequence
  Description of Artificial Sequence: Synthetic oligonucleotide
  Antisense strand to SEQ ID NO: 695238
auucuuguggaaggcggca

SEQ ID NO: 695240 - RNA, 19 nt, Artificial Sequence
  Description of Artificial Sequence: Synthetic oligonucleotide
  Sense strand starting at position 2216 of SEQ ID NO: 586141
cuguuaauuuagguggcau

SEQ ID NO: 695241 - RNA, 19 nt, Artificial Sequence
  Description of Artificial Sequence: Synthetic oligonucleotide
  Antisense strand to SEQ ID NO: 695240
augccaccuaaauuaacag

SEQ ID NO: 695242 - RNA, 19 nt, Artificial Sequence
  Description of Artificial Sequence: Synthetic oligonucleotide
  Sense strand starting at position 2275 of SEQ ID NO: 586141
ccgguagucuuaccugaag

SEQ ID NO: 695243 - RNA, 19 nt, Artificial Sequence
  Description of Artificial Sequence: Synthetic oligonucleotide
  Antisense strand to SEQ ID NO: 695242
cuucagguaagacuaccgg

SEQ ID NO: 695244 - RNA, 19 nt, Artificial Sequence
  Description of Artificial Sequence: Synthetic oligonucleotide
  Sense strand starting at position 2450 of SEQ ID NO: 586141
uugagacccugaccagauu

SEQ ID NO: 695245 - RNA, 19 nt, Artificial Sequence
  Description of Artificial Sequence: Synthetic oligonucleotide
  Antisense strand to SEQ ID NO: 695244
aaucuggucagggucucaa

SEQ ID NO: 695246 - RNA, 19 nt, Artificial Sequence
  Description of Artificial Sequence: Synthetic oligonucleotide
  Sense strand starting at position 2634 of SEQ ID NO: 586141
gguaacuccuaguuggaaa

SEQ ID NO: 695247 - RNA, 19 nt, Artificial Sequence
  Description of Artificial Sequence: Synthetic oligonucleotide
  Antisense strand to SEQ ID NO: 695246
uuuccaacuaggaguuacc

SEQ ID NO: 695248 - RNA, 19 nt, Artificial Sequence
  Description of Artificial Sequence: Synthetic oligonucleotide
  Sense strand starting at position 2635 of SEQ ID NO: 586141
guaacuccuaguuggaaag

SEQ ID NO: 695249 - RNA, 19 nt, Artificial Sequence
  Description of Artificial Sequence: Synthetic oligonucleotide
  Antisense strand to SEQ ID NO: 695248
cuuuccaacuaggaguuac

SEQ ID NO: 695250 - RNA, 19 nt, Artificial Sequence
  Description of Artificial Sequence: Synthetic oligonucleotide
  Sense strand starting at position 2720 of SEQ ID NO: 586141
agguuugguugcucaggga

SEQ ID NO: 695251 - RNA, 19 nt, Artificial Sequence
  Description of Artificial Sequence: Synthetic oligonucleotide
  Antisense strand to SEQ ID NO: 695250
ucccugagcaaccaaaccu

SEQ ID NO: 695252 - RNA, 19 nt, Artificial Sequence
  Description of Artificial Sequence: Synthetic oligonucleotide
  Sense strand starting at position 2985 of SEQ ID NO: 586141
guucaagaggacugugagu

SEQ ID NO: 695253 - RNA, 19 nt, Artificial Sequence
  Description of Artificial Sequence: Synthetic oligonucleotide
  Antisense strand to SEQ ID NO: 695252
acucacaguccucuugaac

SEQ ID NO: 695254 - RNA, 19 nt, Artificial Sequence
  Description of Artificial Sequence: Synthetic oligonucleotide
  Sense strand starting at position 2987 of SEQ ID NO: 586141
ucaagaggacugugaguua

SEQ ID NO: 695255 - RNA, 19 nt, Artificial Sequence
  Description of Artificial Sequence: Synthetic oligonucleotide
  Antisense strand to SEQ ID NO: 695254
uaacucacaguccucuuga

SEQ ID NO: 695256 - RNA, 19 nt, Artificial Sequence
  Description of Artificial Sequence: Synthetic oligonucleotide
  Sense strand starting at position 2992 of SEQ ID NO: 586141
aggacugugaguuauguau

SEQ ID NO: 695257 - RNA, 19 nt, Artificial Sequence
  Description of Artificial Sequence: Synthetic oligonucleotide
  Antisense strand to SEQ ID NO: 695256
auacauaacucacaguccu

SEQ ID NO: 695258 - RNA, 19 nt, Artificial Sequence
  Description of Artificial Sequence: Synthetic oligonucleotide
  Sense strand starting at position 2996 of SEQ ID NO: 586141
cugugaguuauguauucuc

SEQ ID NO: 695259 - RNA, 19 nt, Artificial Sequence
  Description of Artificial Sequence: Synthetic oligonucleotide
  Antisense strand to SEQ ID NO: 695258
gagaauacauaacucacag

SEQ ID NO: 695260 - RNA, 19 nt, Artificial Sequence
  Description of Artificial Sequence: Synthetic oligonucleotide
  Sense strand starting at position 3004 of SEQ ID NO: 586141
uauguauucucaguuaugg

SEQ ID NO: 695261 - RNA, 19 nt, Artificial Sequence
  Description of Artificial Sequence: Synthetic oligonucleotide
  Antisense strand to SEQ ID NO: 695260
ccauaacugagaauacaua

SEQ ID NO: 695262 - RNA, 19 nt, Artificial Sequence
  Description of Artificial Sequence: Synthetic oligonucleotide
  Sense strand starting at position 3014 of SEQ ID NO: 586141
caguuaugggcucaccaac

SEQ ID NO: 695263 - RNA, 19 nt, Artificial Sequence
  Description of Artificial Sequence: Synthetic oligonucleotide
  Antisense strand to SEQ ID NO: 695262
guuggugagcccauaacug

SEQ ID NO: 695264 - RNA, 19 nt, Artificial Sequence
  Description of Artificial Sequence: Synthetic oligonucleotide
  Sense strand starting at position 3027 of SEQ ID NO: 586141
accaacuccgcagagaauu

SEQ ID NO: 695265 - RNA, 19 nt, Artificial Sequence
  Description of Artificial Sequence: Synthetic oligonucleotide
  Antisense strand to SEQ ID NO: 695264
aauucucugcggaguuggu

SEQ ID NO: 695266 - RNA, 19 nt, Artificial Sequence
  Description of Artificial Sequence: Synthetic oligonucleotide
  Sense strand starting at position 3093 of SEQ ID NO: 586141
ggacuacaaucuguuucca

SEQ ID NO: 695267 - RNA, 19 nt, Artificial Sequence
  Description of Artificial Sequence: Synthetic oligonucleotide
  Antisense strand to SEQ ID NO: 695266
uggaaacagauuguagucc

SEQ ID NO: 695268 - RNA, 19 nt, Artificial Sequence
  Description of Artificial Sequence: Synthetic oligonucleotide
  Sense strand starting at position 3120 of SEQ ID NO: 586141
aggaaacugcgacaaaguu

SEQ ID NO: 695269 - RNA, 19 nt, Artificial Sequence
  Description of Artificial Sequence: Synthetic oligonucleotide
  Antisense strand to SEQ ID NO: 695268
aacuuugucgcaguuuccu

SEQ ID NO: 695270 - RNA, 19 nt, Artificial Sequence
  Description of Artificial Sequence: Synthetic oligonucleotide
  Sense strand starting at position 3134 of SEQ ID NO: 586141
aaguuaauggagugaggau

SEQ ID NO: 695271 - RNA, 19 nt, Artificial Sequence
  Description of Artificial Sequence: Synthetic oligonucleotide
  Antisense strand to SEQ ID NO: 695270
auccucacuccauuaacuu

SEQ ID NO: 695272 - RNA, 19 nt, Artificial Sequence
  Description of Artificial Sequence: Synthetic oligonucleotide
  Sense strand starting at position 3305 of SEQ ID NO: 586141
aggaguaaaucugcuugac

SEQ ID NO: 695273 - RNA, 19 nt, Artificial Sequence
  Description of Artificial Sequence: Synthetic oligonucleotide
  Antisense strand to SEQ ID NO: 695272
gucaagcagauuuacuccu

SEQ ID NO: 695274 - RNA, 19 nt, Artificial Sequence
  Description of Artificial Sequence: Synthetic oligonucleotide
  Sense strand starting at position 3307 of SEQ ID NO: 586141
gaguaaaucugcuugacuu

SEQ ID NO: 695275 - RNA, 19 nt, Artificial Sequence
  Description of Artificial Sequence: Synthetic oligonucleotide
  Antisense strand to SEQ ID NO: 695274
aagucaagcagauuuacuc

SEQ ID NO: 695276 - RNA, 19 nt, Artificial Sequence
  Description of Artificial Sequence: Synthetic oligonucleotide
  Sense strand starting at position 3308 of SEQ ID NO: 586141
aguaaaucugcuugacuuu

SEQ ID NO: 695277 - RNA, 19 nt, Artificial Sequence
  Description of Artificial Sequence: Synthetic oligonucleotide
  Antisense strand to SEQ ID NO: 695276
aaagucaagcagauuuacu

SEQ ID NO: 695278 - RNA, 19 nt, Artificial Sequence
  Description of Artificial Sequence: Synthetic oligonucleotide
  Sense strand starting at position 3309 of SEQ ID NO: 586141
guaaaucugcuugacuuua

SEQ ID NO: 695279 - RNA, 19 nt, Artificial Sequence
  Description of Artificial Sequence: Synthetic oligonucleotide
  Antisense strand to SEQ ID NO: 695278
uaaagucaagcagauuuac

SEQ ID NO: 695280 - RNA, 19 nt, Artificial Sequence
  Description of Artificial Sequence: Synthetic oligonucleotide
  Sense strand starting at position 3616 of SEQ ID NO: 586141
ggccaauaugcacauggaa

SEQ ID NO: 695281 - RNA, 19 nt, Artificial Sequence
  Description of Artificial Sequence: Synthetic oligonucleotide
  Antisense strand to SEQ ID NO: 695280
uuccaugugcauauuggcc

SEQ ID NO: 695282 - RNA, 19 nt, Artificial Sequence
  Description of Artificial Sequence: Synthetic oligonucleotide
  Sense strand starting at position 3778 of SEQ ID NO: 586141
gcaguucauggugagauga

SEQ ID NO: 695283 - RNA, 19 nt, Artificial Sequence
  Description of Artificial Sequence: Synthetic oligonucleotide
  Antisense strand to SEQ ID NO: 695282
ucaucucaccaugaacugc

SEQ ID NO: 695284 - RNA, 19 nt, Artificial Sequence
  Description of Artificial Sequence: Synthetic oligonucleotide
  Sense strand starting at position 3875 of SEQ ID NO: 586141
cuggguauaugcucaagag

SEQ ID NO: 695285 - RNA, 19 nt, Artificial Sequence
  Description of Artificial Sequence: Synthetic oligonucleotide
  Antisense strand to SEQ ID NO: 695284
cucuugagcauauacccag

SEQ ID NO: 695286 - RNA, 19 nt, Artificial Sequence
  Description of Artificial Sequence: Synthetic oligonucleotide
  Sense strand starting at position 3895 of SEQ ID NO: 586141
aaggaaagccuauguccau

SEQ ID NO: 695287 - RNA, 19 nt, Artificial Sequence
  Description of Artificial Sequence: Synthetic oligonucleotide
  Antisense strand to SEQ ID NO: 695286
auggacauaggcuuuccuu

SEQ ID NO: 695288 - RNA, 19 nt, Artificial Sequence
  Description of Artificial Sequence: Synthetic oligonucleotide
  Sense strand starting at position 3918 of SEQ ID NO: 586141
aaaccuguaccagaguguu

SEQ ID NO: 695289 - RNA, 19 nt, Artificial Sequence
  Description of Artificial Sequence: Synthetic oligonucleotide
  Antisense strand to SEQ ID NO: 695288
aacacucugguacagguuu

SEQ ID NO: 695290 - RNA, 19 nt, Artificial Sequence
  Description of Artificial Sequence: Synthetic oligonucleotide
  Sense strand starting at position 3932 of SEQ ID NO: 586141
guguuuacugcaguguuau

SEQ ID NO: 695291 - RNA, 19 nt, Artificial Sequence
  Description of Artificial Sequence: Synthetic oligonucleotide
  Antisense strand to SEQ ID NO: 695290
auaacacugcaguaaacac

SEQ ID NO: 695292 - RNA, 19 nt, Artificial Sequence
  Description of Artificial Sequence: Synthetic oligonucleotide
  Sense strand starting at position 3978 of SEQ ID NO: 586141
ucauaugucucugcauuga

SEQ ID NO: 695293 - RNA, 19 nt, Artificial Sequence
  Description of Artificial Sequence: Synthetic oligonucleotide
  Antisense strand to SEQ ID NO: 695292
ucaaugcagagacauauga

SEQ ID NO: 695294 - RNA, 19 nt, Artificial Sequence
  Description of Artificial Sequence: Synthetic oligonucleotide
  Sense strand starting at position 3982 of SEQ ID NO: 586141
augucucugcauugauaaa

SEQ ID NO: 695295 - RNA, 19 nt, Artificial Sequence
  Description of Artificial Sequence: Synthetic oligonucleotide
  Antisense strand to SEQ ID NO: 695294
uuuaucaaugcagagacau

SEQ ID NO: 695296 - RNA, 19 nt, Artificial Sequence
  Description of Artificial Sequence: Synthetic oligonucleotide
  Sense strand starting at position 82 of SEQ ID NO: 586142
acaguuguuaggugagacu

SEQ ID NO: 695297 - RNA, 19 nt, Artificial Sequence
  Description of Artificial Sequence: Synthetic oligonucleotide
  Antisense strand to SEQ ID NO: 695296
agucucaccuaacaacugu

SEQ ID NO: 695298 - RNA, 19 nt, Artificial Sequence
  Description of Artificial Sequence: Synthetic oligonucleotide
  Sense strand starting at position 85 of SEQ ID NO: 586142
guuguuaggugagacuaaa

SEQ ID NO: 695299 - RNA, 19 nt, Artificial Sequence
  Description of Artificial Sequence: Synthetic oligonucleotide
  Antisense strand to SEQ ID NO: 695298
uuuagucucaccuaacaac

SEQ ID NO: 695300 - RNA, 19 nt, Artificial Sequence
  Description of Artificial Sequence: Synthetic oligonucleotide
  Sense strand starting at position 140 of SEQ ID NO: 586142
aguauaacauguuagcuau

SEQ ID NO: 695301 - RNA, 19 nt, Artificial Sequence
  Description of Artificial Sequence: Synthetic oligonucleotide
  Antisense strand to SEQ ID NO: 695300
auagcuaacauguuauacu

SEQ ID NO: 695302 - RNA, 19 nt, Artificial Sequence
  Description of Artificial Sequence: Synthetic oligonucleotide
  Sense strand starting at position 216 of SEQ ID NO: 586142
gcgcaaucacuguucagug

SEQ ID NO: 695303 - RNA, 19 nt, Artificial Sequence
  Description of Artificial Sequence: Synthetic oligonucleotide
  Antisense strand to SEQ ID NO: 695302
cacugaacagugauugcgc

SEQ ID NO: 695304 - RNA, 19 nt, Artificial Sequence
  Description of Artificial Sequence: Synthetic oligonucleotide
  Sense strand starting at position 427 of SEQ ID NO: 586142
ggcauuaaggcaugagcca

SEQ ID NO: 695305 - RNA, 19 nt, Artificial Sequence
  Description of Artificial Sequence: Synthetic oligonucleotide
  Antisense strand to SEQ ID NO: 695304
uggcucaugccuuaaugcc

SEQ ID NO: 695306 - RNA, 19 nt, Artificial Sequence
  Description of Artificial Sequence: Synthetic oligonucleotide
  Sense strand starting at position 454 of SEQ ID NO: 586142
ggccguuaguuauuacuau

SEQ ID NO: 695307 - RNA, 19 nt, Artificial Sequence
  Description of Artificial Sequence: Synthetic oligonucleotide
  Antisense strand to SEQ ID NO: 695306
auaguaauaacuaacggcc

SEQ ID NO: 695308 - RNA, 19 nt, Artificial Sequence
  Description of Artificial Sequence: Synthetic oligonucleotide
  Sense strand starting at position 636 of SEQ ID NO: 586142
uggagaagcuaccucaauu

SEQ ID NO: 695309 - RNA, 19 nt, Artificial Sequence
  Description of Artificial Sequence: Synthetic oligonucleotide
  Antisense strand to SEQ ID NO: 695308
aauugagguagcuucucca

SEQ ID NO: 695310 - RNA, 19 nt, Artificial Sequence
  Description of Artificial Sequence: Synthetic oligonucleotide
  Sense strand starting at position 670 of SEQ ID NO: 586142
gccauaagaucuuaaugau

SEQ ID NO: 695311 - RNA, 19 nt, Artificial Sequence
  Description of Artificial Sequence: Synthetic oligonucleotide
  Antisense strand to SEQ ID NO: 695310
aucauuaagaucuuauggc

SEQ ID NO: 695312 - RNA, 19 nt, Artificial Sequence
  Description of Artificial Sequence: Synthetic oligonucleotide
  Sense strand starting at position 731 of SEQ ID NO: 586142
gguauccuccucuguagua

SEQ ID NO: 695313 - RNA, 19 nt, Artificial Sequence
  Description of Artificial Sequence: Synthetic oligonucleotide
  Antisense strand to SEQ ID NO: 695312
uacuacagaggaggauacc

SEQ ID NO: 695314 - RNA, 19 nt, Artificial Sequence
  Description of Artificial Sequence: Synthetic oligonucleotide
  Sense strand starting at position 732 of SEQ ID NO: 586142
guauccuccucuguaguau

SEQ ID NO: 695315 - RNA, 19 nt, Artificial Sequence
  Description of Artificial Sequence: Synthetic oligonucleotide
  Antisense strand to SEQ ID NO: 695314
auacuacagaggaggauac

SEQ ID NO: 695316 - RNA, 19 nt, Artificial Sequence
  Description of Artificial Sequence: Synthetic oligonucleotide
  Sense strand starting at position 813 of SEQ ID NO: 586142
ccaggcauuuggucuucga

SEQ ID NO: 695317 - RNA, 19 nt, Artificial Sequence
  Description of Artificial Sequence: Synthetic oligonucleotide
  Antisense strand to SEQ ID NO: 695316
ucgaagaccaaaugccugg

SEQ ID NO: 695318 - RNA, 19 nt, Artificial Sequence
  Description of Artificial Sequence: Synthetic oligonucleotide
  Sense strand starting at position 816 of SEQ ID NO: 586142
ggcauuuggucuucgacau

SEQ ID NO: 695319 - RNA, 19 nt, Artificial Sequence
  Description of Artificial Sequence: Synthetic oligonucleotide
  Antisense strand to SEQ ID NO: 695318
augucgaagaccaaaugcc

SEQ ID NO: 695320 - RNA, 19 nt, Artificial Sequence
  Description of Artificial Sequence: Synthetic oligonucleotide
  Sense strand starting at position 817 of SEQ ID NO: 586142
gcauuuggucuucgacauu

SEQ ID NO: 695321 - RNA, 19 nt, Artificial Sequence
  Description of Artificial Sequence: Synthetic oligonucleotide
  Antisense strand to SEQ ID NO: 695320
aaugucgaagaccaaaugc

SEQ ID NO: 695322 - RNA, 19 nt, Artificial Sequence
  Description of Artificial Sequence: Synthetic oligonucleotide
  Sense strand starting at position 2251 of SEQ ID NO: 586142
aggugaaugggacgaucau

SEQ ID NO: 695323 - RNA, 19 nt, Artificial Sequence
  Description of Artificial Sequence: Synthetic oligonucleotide
  Antisense strand to SEQ ID NO: 695322
augaucgucccauucaccu

SEQ ID NO: 695324 - RNA, 19 nt, Artificial Sequence
  Description of Artificial Sequence: Synthetic oligonucleotide
  Sense strand starting at position 2258 of SEQ ID NO: 586142
ugggacgaucauuggaguu

SEQ ID NO: 695325 - RNA, 19 nt, Artificial Sequence
  Description of Artificial Sequence: Synthetic oligonucleotide
  Antisense strand to SEQ ID NO: 695324
aacuccaaugaucguccca

SEQ ID NO: 695326 - RNA, 19 nt, Artificial Sequence
  Description of Artificial Sequence: Synthetic oligonucleotide
  Sense strand starting at position 2411 of SEQ ID NO: 586142
cugaauaucuauugaaagc

SEQ ID NO: 695327 - RNA, 19 nt, Artificial Sequence
  Description of Artificial Sequence: Synthetic oligonucleotide
  Antisense strand to SEQ ID NO: 695326
gcuuucaauagauauucag

SEQ ID NO: 695328 - RNA, 19 nt, Artificial Sequence
  Description of Artificial Sequence: Synthetic oligonucleotide
  Sense strand starting at position 2417 of SEQ ID NO: 586142
aucuauugaaagcgugaua

SEQ ID NO: 695329 - RNA, 19 nt, Artificial Sequence
  Description of Artificial Sequence: Synthetic oligonucleotide
  Antisense strand to SEQ ID NO: 695328
uaucacgcuuucaauagau

SEQ ID NO: 695330 - RNA, 19 nt, Artificial Sequence
  Description of Artificial Sequence: Synthetic oligonucleotide
  Sense strand starting at position 2420 of SEQ ID NO: 586142
uauugaaagcgugauagau

SEQ ID NO: 695331 - RNA, 19 nt, Artificial Sequence
  Description of Artificial Sequence: Synthetic oligonucleotide
  Antisense strand to SEQ ID NO: 695330
aucuaucacgcuuucaaua

SEQ ID NO: 695332 - RNA, 19 nt, Artificial Sequence
  Description of Artificial Sequence: Synthetic oligonucleotide
  Sense strand starting at position 2422 of SEQ ID NO: 586142
uugaaagcgugauagauac

SEQ ID NO: 695333 - RNA, 19 nt, Artificial Sequence
  Description of Artificial Sequence: Synthetic oligonucleotide
  Antisense strand to SEQ ID NO: 695332
guaucuaucacgcuuucaa

SEQ ID NO: 695334 - RNA, 19 nt, Artificial Sequence
  Description of Artificial Sequence: Synthetic oligonucleotide
  Sense strand starting at position 2763 of SEQ ID NO: 586142
guaagagaaauguguagaa

SEQ ID NO: 695335 - RNA, 19 nt, Artificial Sequence
  Description of Artificial Sequence: Synthetic oligonucleotide
  Antisense strand to SEQ ID NO: 695334
uucuacacauuucucuuac

SEQ ID NO: 695336 - RNA, 19 nt, Artificial Sequence
  Description of Artificial Sequence: Synthetic oligonucleotide
  Sense strand starting at position 2865 of SEQ ID NO: 586142
agaaauaaagagcgucuua

SEQ ID NO: 695337 - RNA, 19 nt, Artificial Sequence
  Description of Artificial Sequence: Synthetic oligonucleotide
  Antisense strand to SEQ ID NO: 695336
uaagacgcucuuuauuucu

SEQ ID NO: 695338 - RNA, 19 nt, Artificial Sequence
  Description of Artificial Sequence: Synthetic oligonucleotide
  Sense strand starting at position 2884 of SEQ ID NO: 586142
aaagguuaacuugggucaa

SEQ ID NO: 695339 - RNA, 19 nt, Artificial Sequence
  Description of Artificial Sequence: Synthetic oligonucleotide
  Antisense strand to SEQ ID NO: 695338
uugacccaaguuaaccuuu

SEQ ID NO: 695340 - RNA, 19 nt, Artificial Sequence
  Description of Artificial Sequence: Synthetic oligonucleotide
  Sense strand starting at position 2885 of SEQ ID NO: 586142
aagguuaacuugggucaaa

SEQ ID NO: 695341 - RNA, 19 nt, Artificial Sequence
  Description of Artificial Sequence: Synthetic oligonucleotide
  Antisense strand to SEQ ID NO: 695340
uuugacccaaguuaaccuu

SEQ ID NO: 695342 - RNA, 19 nt, Artificial Sequence
  Description of Artificial Sequence: Synthetic oligonucleotide
  Sense strand starting at position 2926 of SEQ ID NO: 586142
cccaaaucucagugugaag

SEQ ID NO: 695343 - RNA, 19 nt, Artificial Sequence
  Description of Artificial Sequence: Synthetic oligonucleotide
  Antisense strand to SEQ ID NO: 695342
cuucacacugagauuuggg

SEQ ID NO: 695344 - RNA, 19 nt, Artificial Sequence
  Description of Artificial Sequence: Synthetic oligonucleotide
  Sense strand starting at position 2928 of SEQ ID NO: 586142
caaaucucagugugaagau

SEQ ID NO: 695345 - RNA, 19 nt, Artificial Sequence
  Description of Artificial Sequence: Synthetic oligonucleotide
  Antisense strand to SEQ ID NO: 695344
aucuucacacugagauuug

SEQ ID NO: 695346 - RNA, 19 nt, Artificial Sequence
  Description of Artificial Sequence: Synthetic oligonucleotide
  Sense strand starting at position 2929 of SEQ ID NO: 586142
aaaucucagugugaagaug

SEQ ID NO: 695347 - RNA, 19 nt, Artificial Sequence
  Description of Artificial Sequence: Synthetic oligonucleotide
  Antisense strand to SEQ ID NO: 695346
caucuucacacugagauuu

SEQ ID NO: 695348 - RNA, 19 nt, Artificial Sequence
  Description of Artificial Sequence: Synthetic oligonucleotide
  Sense strand starting at position 2950 of SEQ ID NO: 586142
guggauguacguuguaaua

SEQ ID NO: 695349 - RNA, 19 nt, Artificial Sequence
  Description of Artificial Sequence: Synthetic oligonucleotide
  Antisense strand to SEQ ID NO: 695348
uauuacaacguacauccac

SEQ ID NO: 695350 - RNA, 19 nt, Artificial Sequence
  Description of Artificial Sequence: Synthetic oligonucleotide
  Sense strand starting at position 2952 of SEQ ID NO: 586142
ggauguacguuguaauaug

SEQ ID NO: 695351 - RNA, 19 nt, Artificial Sequence
  Description of Artificial Sequence: Synthetic oligonucleotide
  Antisense strand to SEQ ID NO: 695350
cauauuacaacguacaucc

SEQ ID NO: 695352 - RNA, 19 nt, Artificial Sequence
  Description of Artificial Sequence: Synthetic oligonucleotide
  Sense strand starting at position 3041 of SEQ ID NO: 586142
agagaauucuuggaucuca

SEQ ID NO: 695353 - RNA, 19 nt, Artificial Sequence
  Description of Artificial Sequence: Synthetic oligonucleotide
  Antisense strand to SEQ ID NO: 695352
ugagauccaagaauucucu

SEQ ID NO: 695354 - RNA, 19 nt, Artificial Sequence
  Description of Artificial Sequence: Synthetic oligonucleotide
  Sense strand starting at position 3084 of SEQ ID NO: 586142
cguagagugcgaugagaag

SEQ ID NO: 695355 - RNA, 19 nt, Artificial Sequence
  Description of Artificial Sequence: Synthetic oligonucleotide
  Antisense strand to SEQ ID NO: 695354
cuucucaucgcacucuacg

SEQ ID NO: 695356 - RNA, 19 nt, Artificial Sequence
  Description of Artificial Sequence: Synthetic oligonucleotide
  Sense strand starting at position 3085 of SEQ ID NO: 586142
guagagugcgaugagaaga

SEQ ID NO: 695357 - RNA, 19 nt, Artificial Sequence
  Description of Artificial Sequence: Synthetic oligonucleotide
  Antisense strand to SEQ ID NO: 695356
ucuucucaucgcacucuac

SEQ ID NO: 695358 - RNA, 19 nt, Artificial Sequence
  Description of Artificial Sequence: Synthetic oligonucleotide
  Sense strand starting at position 3159 of SEQ ID NO: 586142
agaggaacacacugucuua

SEQ ID NO: 695359 - RNA, 19 nt, Artificial Sequence
  Description of Artificial Sequence: Synthetic oligonucleotide
  Antisense strand to SEQ ID NO: 695358
uaagacaguguguuccucu

SEQ ID NO: 695360 - RNA, 19 nt, Artificial Sequence
  Description of Artificial Sequence: Synthetic oligonucleotide
  Sense strand starting at position 3162 of SEQ ID NO: 586142
ggaacacacugucuuaagu

SEQ ID NO: 695361 - RNA, 19 nt, Artificial Sequence
  Description of Artificial Sequence: Synthetic oligonucleotide
  Antisense strand to SEQ ID NO: 695360
acuuaagacaguguguucc

SEQ ID NO: 695362 - RNA, 19 nt, Artificial Sequence
  Description of Artificial Sequence: Synthetic oligonucleotide
  Sense strand starting at position 3362 of SEQ ID NO: 586142
ccagcuaauaguuguaugu

SEQ ID NO: 695363 - RNA, 19 nt, Artificial Sequence
  Description of Artificial Sequence: Synthetic oligonucleotide
  Antisense strand to SEQ ID NO: 695362
acauacaacuauuagcugg

SEQ ID NO: 695364 - RNA, 19 nt, Artificial Sequence
  Description of Artificial Sequence: Synthetic oligonucleotide
  Sense strand starting at position 3571 of SEQ ID NO: 586142
gggccaauggcaugacaaa

SEQ ID NO: 695365 - RNA, 19 nt, Artificial Sequence
  Description of Artificial Sequence: Synthetic oligonucleotide
  Antisense strand to SEQ ID NO: 695364
uuugucaugccauuggccc

SEQ ID NO: 695366 - RNA, 19 nt, Artificial Sequence
  Description of Artificial Sequence: Synthetic oligonucleotide
  Sense strand starting at position 3618 of SEQ ID NO: 586142
uugacauucuaguagguaa

SEQ ID NO: 695367 - RNA, 19 nt, Artificial Sequence
  Description of Artificial Sequence: Synthetic oligonucleotide
  Antisense strand to SEQ ID NO: 695366
uuaccuacuagaaugucaa

SEQ ID NO: 695368 - RNA, 19 nt, Artificial Sequence
  Description of Artificial Sequence: Synthetic oligonucleotide
  Sense strand starting at position 3620 of SEQ ID NO: 586142
gacauucuaguagguaagu

SEQ ID NO: 695369 - RNA, 19 nt, Artificial Sequence
  Description of Artificial Sequence: Synthetic oligonucleotide
  Antisense strand to SEQ ID NO: 695368
acuuaccuacuagaauguc

SEQ ID NO: 695370 - RNA, 19 nt, Artificial Sequence
  Description of Artificial Sequence: Synthetic oligonucleotide
  Sense strand starting at position 3621 of SEQ ID NO: 586142
acauucuaguagguaagua

SEQ ID NO: 695371 - RNA, 19 nt, Artificial Sequence
  Description of Artificial Sequence: Synthetic oligonucleotide
  Antisense strand to SEQ ID NO: 695370
uacuuaccuacuagaaugu

SEQ ID NO: 695372 - RNA, 19 nt, Artificial Sequence
  Description of Artificial Sequence: Synthetic oligonucleotide
  Sense strand starting at position 3904 of SEQ ID NO: 586142
gggucucacuacugggauu

SEQ ID NO: 695373 - RNA, 19 nt, Artificial Sequence
  Description of Artificial Sequence: Synthetic oligonucleotide
  Antisense strand to SEQ ID NO: 695372
aaucccaguagugagaccc

SEQ ID NO: 695374 - RNA, 19 nt, Artificial Sequence
  Description of Artificial Sequence: Synthetic oligonucleotide
  Sense strand starting at position 3907 of SEQ ID NO: 586142
ucucacuacugggauugua

SEQ ID NO: 695375 - RNA, 19 nt, Artificial Sequence
  Description of Artificial Sequence: Synthetic oligonucleotide
  Antisense strand to SEQ ID NO: 695374
uacaaucccaguagugaga

SEQ ID NO: 695376 - RNA, 19 nt, Artificial Sequence
  Description of Artificial Sequence: Synthetic oligonucleotide
  Sense strand starting at position 114 of SEQ ID NO: 586143
aggacagucugagugauca

SEQ ID NO: 695377 - RNA, 19 nt, Artificial Sequence
  Description of Artificial Sequence: Synthetic oligonucleotide
  Antisense strand to SEQ ID NO: 695376
ugaucacucagacuguccu

SEQ ID NO: 695378 - RNA, 19 nt, Artificial Sequence
  Description of Artificial Sequence: Synthetic oligonucleotide
  Sense strand starting at position 116 of SEQ ID NO: 586143
gacagucugagugaucagu

SEQ ID NO: 695379 - RNA, 19 nt, Artificial Sequence
  Description of Artificial Sequence: Synthetic oligonucleotide
  Antisense strand to SEQ ID NO: 695378
acugaucacucagacuguc

SEQ ID NO: 695380 - RNA, 19 nt, Artificial Sequence
  Description of Artificial Sequence: Synthetic oligonucleotide
  Sense strand starting at position 207 of SEQ ID NO: 586143
ggccgagacguaggagaau

SEQ ID NO: 695381 - RNA, 19 nt, Artificial Sequence
  Description of Artificial Sequence: Synthetic oligonucleotide
  Antisense strand to SEQ ID NO: 695380
auucuccuacgucucggcc

SEQ ID NO: 695382 - RNA, 19 nt, Artificial Sequence
  Description of Artificial Sequence: Synthetic oligonucleotide
  Sense strand starting at position 266 of SEQ ID NO: 586143
gugagacucuagucucuac

SEQ ID NO: 695383 - RNA, 19 nt, Artificial Sequence
  Description of Artificial Sequence: Synthetic oligonucleotide
  Antisense strand to SEQ ID NO: 695382
guagagacuagagucucac

SEQ ID NO: 695384 - RNA, 19 nt, Artificial Sequence
  Description of Artificial Sequence: Synthetic oligonucleotide
  Sense strand starting at position 535 of SEQ ID NO: 586143
uguugauucucaccagcac

SEQ ID NO: 695385 - RNA, 19 nt, Artificial Sequence
  Description of Artificial Sequence: Synthetic oligonucleotide
  Antisense strand to SEQ ID NO: 695384
gugcuggugagaaucaaca

SEQ ID NO: 695386 - RNA, 19 nt, Artificial Sequence
  Description of Artificial Sequence: Synthetic oligonucleotide
  Sense strand starting at position 536 of SEQ ID NO: 586143
guugauucucaccagcacu

SEQ ID NO: 695387 - RNA, 19 nt, Artificial Sequence
  Description of Artificial Sequence: Synthetic oligonucleotide
  Antisense strand to SEQ ID NO: 695386
agugcuggugagaaucaac

SEQ ID NO: 695388 - RNA, 19 nt, Artificial Sequence
  Description of Artificial Sequence: Synthetic oligonucleotide
  Sense strand starting at position 653 of SEQ ID NO: 586143
acacuuggagcguguauuu

SEQ ID NO: 695389 - RNA, 19 nt, Artificial Sequence
  Description of Artificial Sequence: Synthetic oligonucleotide
  Antisense strand to SEQ ID NO: 695388
aaauacacgcuccaagugu

SEQ ID NO: 695390 - RNA, 19 nt, Artificial Sequence
  Description of Artificial Sequence: Synthetic oligonucleotide
  Sense strand starting at position 849 of SEQ ID NO: 586143
ggagaagagaggcguuaaa

SEQ ID NO: 695391 - RNA, 19 nt, Artificial Sequence
  Description of Artificial Sequence: Synthetic oligonucleotide
  Antisense strand to SEQ ID NO: 695390
uuuaacgccucucuucucc

SEQ ID NO: 695392 - RNA, 19 nt, Artificial Sequence
  Description of Artificial Sequence: Synthetic oligonucleotide
  Sense strand starting at position 943 of SEQ ID NO: 586143
gugccuuugggagauacau

SEQ ID NO: 695393 - RNA, 19 nt, Artificial Sequence
  Description of Artificial Sequence: Synthetic oligonucleotide
  Antisense strand to SEQ ID NO: 695392
auguaucucccaaaggcac

SEQ ID NO: 695394 - RNA, 19 nt, Artificial Sequence
  Description of Artificial Sequence: Synthetic oligonucleotide
  Sense strand starting at position 977 of SEQ ID NO: 586143
ccagcuucccaauguggaa

SEQ ID NO: 695395 - RNA, 19 nt, Artificial Sequence
  Description of Artificial Sequence: Synthetic oligonucleotide
  Antisense strand to SEQ ID NO: 695394
uuccacauugggaagcugg

SEQ ID NO: 695396 - RNA, 19 nt, Artificial Sequence
  Description of Artificial Sequence: Synthetic oligonucleotide
  Sense strand starting at position 1416 of SEQ ID NO: 586143
uagcuuuauuuggcggaau

SEQ ID NO: 695397 - RNA, 19 nt, Artificial Sequence
  Description of Artificial Sequence: Synthetic oligonucleotide
  Antisense strand to SEQ ID NO: 695396
auuccgccaaauaaagcua

SEQ ID NO: 695398 - RNA, 19 nt, Artificial Sequence
  Description of Artificial Sequence: Synthetic oligonucleotide
  Sense strand starting at position 1729 of SEQ ID NO: 586143
aggauacagucuuuguaga

SEQ ID NO: 695399 - RNA, 19 nt, Artificial Sequence
  Description of Artificial Sequence: Synthetic oligonucleotide
  Antisense strand to SEQ ID NO: 695398
ucuacaaagacuguauccu

SEQ ID NO: 695400 - RNA, 19 nt, Artificial Sequence
  Description of Artificial Sequence: Synthetic oligonucleotide
  Sense strand starting at position 1730 of SEQ ID NO: 586143
ggauacagucuuuguagau

SEQ ID NO: 695401 - RNA, 19 nt, Artificial Sequence
  Description of Artificial Sequence: Synthetic oligonucleotide
  Antisense strand to SEQ ID NO: 695400
aucuacaaagacuguaucc

SEQ ID NO: 695402 - RNA, 19 nt, Artificial Sequence
  Description of Artificial Sequence: Synthetic oligonucleotide
  Sense strand starting at position 1731 of SEQ ID NO: 586143
gauacagucuuuguagaug

SEQ ID NO: 695403 - RNA, 19 nt, Artificial Sequence
  Description of Artificial Sequence: Synthetic oligonucleotide
  Antisense strand to SEQ ID NO: 695402
caucuacaaagacuguauc

SEQ ID NO: 695404 - RNA, 19 nt, Artificial Sequence
  Description of Artificial Sequence: Synthetic oligonucleotide
  Sense strand starting at position 2224 of SEQ ID NO: 586143
aggacuacgcgcuagagaa

SEQ ID NO: 695405 - RNA, 19 nt, Artificial Sequence
  Description of Artificial Sequence: Synthetic oligonucleotide
  Antisense strand to SEQ ID NO: 695404
uucucuagcgcguaguccu

SEQ ID NO: 695406 - RNA, 19 nt, Artificial Sequence
  Description of Artificial Sequence: Synthetic oligonucleotide
  Sense strand starting at position 2423 of SEQ ID NO: 586143
gccaucgauguugaagaaa

SEQ ID NO: 695407 - RNA, 19 nt, Artificial Sequence
  Description of Artificial Sequence: Synthetic oligonucleotide
  Antisense strand to SEQ ID NO: 695406
uuucuucaacaucgauggc

SEQ ID NO: 695408 - RNA, 19 nt, Artificial Sequence
  Description of Artificial Sequence: Synthetic oligonucleotide
  Sense strand starting at position 2748 of SEQ ID NO: 586143
gggagugucguguaaacag

SEQ ID NO: 695409 - RNA, 19 nt, Artificial Sequence
  Description of Artificial Sequence: Synthetic oligonucleotide
  Antisense strand to SEQ ID NO: 695408
cuguuuacacgacacuccc

SEQ ID NO: 695410 - RNA, 19 nt, Artificial Sequence
  Description of Artificial Sequence: Synthetic oligonucleotide
  Sense strand starting at position 3037 of SEQ ID NO: 586143
cggaggucccggugaaauc

SEQ ID NO: 695411 - RNA, 19 nt, Artificial Sequence
  Description of Artificial Sequence: Synthetic oligonucleotide
  Antisense strand to SEQ ID NO: 695410
gauuucaccgggaccuccg

SEQ ID NO: 695412 - RNA, 19 nt, Artificial Sequence
  Description of Artificial Sequence: Synthetic oligonucleotide
  Sense strand starting at position 3038 of SEQ ID NO: 586143
ggaggucccggugaaauca

SEQ ID NO: 695413 - RNA, 19 nt, Artificial Sequence
  Description of Artificial Sequence: Synthetic oligonucleotide
  Antisense strand to SEQ ID NO: 695412
ugauuucaccgggaccucc

SEQ ID NO: 695414 - RNA, 19 nt, Artificial Sequence
  Description of Artificial Sequence: Synthetic oligonucleotide
  Sense strand starting at position 3234 of SEQ ID NO: 586143
auucuucgcugguuagaaa

SEQ ID NO: 695415 - RNA, 19 nt, Artificial Sequence
  Description of Artificial Sequence: Synthetic oligonucleotide
  Antisense strand to SEQ ID NO: 695414
uuucuaaccagcgaagaau

SEQ ID NO: 695416 - RNA, 19 nt, Artificial Sequence
  Description of Artificial Sequence: Synthetic oligonucleotide
  Sense strand starting at position 3241 of SEQ ID NO: 586143
gcugguuagaaacagacuu

SEQ ID NO: 695417 - RNA, 19 nt, Artificial Sequence
  Description of Artificial Sequence: Synthetic oligonucleotide
  Antisense strand to SEQ ID NO: 695416
aagucuguuucuaaccagc

SEQ ID NO: 695418 - RNA, 19 nt, Artificial Sequence
  Description of Artificial Sequence: Synthetic oligonucleotide
  Sense strand starting at position 3266 of SEQ ID NO: 586143
aagaguuaugcccacuuug

SEQ ID NO: 695419 - RNA, 19 nt, Artificial Sequence
  Description of Artificial Sequence: Synthetic oligonucleotide
  Antisense strand to SEQ ID NO: 695418
caaagugggcauaacucuu

SEQ ID NO: 695420 - RNA, 19 nt, Artificial Sequence
  Description of Artificial Sequence: Synthetic oligonucleotide
  Sense strand starting at position 3285 of SEQ ID NO: 586143
gggagacuucgguagguuu

SEQ ID NO: 695421 - RNA, 19 nt, Artificial Sequence
  Description of Artificial Sequence: Synthetic oligonucleotide
  Antisense strand to SEQ ID NO: 695420
aaaccuaccgaagucuccc

SEQ ID NO: 695422 - RNA, 19 nt, Artificial Sequence
  Description of Artificial Sequence: Synthetic oligonucleotide
  Sense strand starting at position 3287 of SEQ ID NO: 586143
gagacuucgguagguuuau

SEQ ID NO: 695423 - RNA, 19 nt, Artificial Sequence
  Description of Artificial Sequence: Synthetic oligonucleotide
  Antisense strand to SEQ ID NO: 695422
auaaaccuaccgaagucuc

SEQ ID NO: 695424 - RNA, 19 nt, Artificial Sequence
  Description of Artificial Sequence: Synthetic oligonucleotide
  Sense strand starting at position 3288 of SEQ ID NO: 586143
agacuucgguagguuuauu

SEQ ID NO: 695425 - RNA, 19 nt, Artificial Sequence
  Description of Artificial Sequence: Synthetic oligonucleotide
  Antisense strand to SEQ ID NO: 695424
aauaaaccuaccgaagucu

SEQ ID NO: 695426 - RNA, 19 nt, Artificial Sequence
  Description of Artificial Sequence: Synthetic oligonucleotide
  Sense strand starting at position 3355 of SEQ ID NO: 586143
auggguaucuaagauuugu

SEQ ID NO: 695427 - RNA, 19 nt, Artificial Sequence
  Description of Artificial Sequence: Synthetic oligonucleotide
  Antisense strand to SEQ ID NO: 695426
acaaaucuuagauacccau

SEQ ID NO: 695428 - RNA, 19 nt, Artificial Sequence
  Description of Artificial Sequence: Synthetic oligonucleotide
  Sense strand starting at position 3437 of SEQ ID NO: 586143
agaguucuaccaggaugau

SEQ ID NO: 695429 - RNA, 19 nt, Artificial Sequence
  Description of Artificial Sequence: Synthetic oligonucleotide
  Antisense strand to SEQ ID NO: 695428
aucauccugguagaacucu

SEQ ID NO: 695430 - RNA, 19 nt, Artificial Sequence
  Description of Artificial Sequence: Synthetic oligonucleotide
  Sense strand starting at position 3440 of SEQ ID NO: 586143
guucuaccaggaugaugaa

SEQ ID NO: 695431 - RNA, 19 nt, Artificial Sequence
  Description of Artificial Sequence: Synthetic oligonucleotide
  Antisense strand to SEQ ID NO: 695430
uucaucauccugguagaac

SEQ ID NO: 695432 - RNA, 19 nt, Artificial Sequence
  Description of Artificial Sequence: Synthetic oligonucleotide
  Sense strand starting at position 3496 of SEQ ID NO: 586143
uaagucuaagauuggguaa

SEQ ID NO: 695433 - RNA, 19 nt, Artificial Sequence
  Description of Artificial Sequence: Synthetic oligonucleotide
  Antisense strand to SEQ ID NO: 695432
uuacccaaucuuagacuua

SEQ ID NO: 695434 - RNA, 19 nt, Artificial Sequence
  Description of Artificial Sequence: Synthetic oligonucleotide
  Sense strand starting at position 3666 of SEQ ID NO: 586143
ugaguucucagugaugcau

SEQ ID NO: 695435 - RNA, 19 nt, Artificial Sequence
  Description of Artificial Sequence: Synthetic oligonucleotide
  Antisense strand to SEQ ID NO: 695434
augcaucacugagaacuca

SEQ ID NO: 695436 - RNA, 19 nt, Artificial Sequence
  Description of Artificial Sequence: Synthetic oligonucleotide
  Sense strand starting at position 3832 of SEQ ID NO: 586143
ggacucaauuugugagaau

SEQ ID NO: 695437 - RNA, 19 nt, Artificial Sequence
  Description of Artificial Sequence: Synthetic oligonucleotide
  Antisense strand to SEQ ID NO: 695436
auucucacaaauugagucc

SEQ ID NO: 695438 - RNA, 19 nt, Artificial Sequence
  Description of Artificial Sequence: Synthetic oligonucleotide
  Sense strand starting at position 3833 of SEQ ID NO: 586143
gacucaauuugugagaaug

SEQ ID NO: 695439 - RNA, 19 nt, Artificial Sequence
  Description of Artificial Sequence: Synthetic oligonucleotide
  Antisense strand to SEQ ID NO: 695438
cauucucacaaauugaguc

SEQ ID NO: 695440 - RNA, 19 nt, Artificial Sequence
  Description of Artificial Sequence: Synthetic oligonucleotide
  Sense strand starting at position 3914 of SEQ ID NO: 586143
agggaagugagugguuaga

SEQ ID NO: 695441 - RNA, 19 nt, Artificial Sequence
  Description of Artificial Sequence: Synthetic oligonucleotide
  Antisense strand to SEQ ID NO: 695440
ucuaaccacucacuucccu

SEQ ID NO: 695442 - RNA, 19 nt, Artificial Sequence
  Description of Artificial Sequence: Synthetic oligonucleotide
  Sense strand starting at position 3916 of SEQ ID NO: 586143
ggaagugagugguuagaga

SEQ ID NO: 695443 - RNA, 19 nt, Artificial Sequence
  Description of Artificial Sequence: Synthetic oligonucleotide
  Antisense strand to SEQ ID NO: 695442
ucucuaaccacucacuucc

SEQ ID NO: 695444 - RNA, 19 nt, Artificial Sequence
  Description of Artificial Sequence: Synthetic oligonucleotide
  Sense strand starting at position 3927 of SEQ ID NO: 586143
guuagagaacaauggcaaa

SEQ ID NO: 695445 - RNA, 19 nt, Artificial Sequence
  Description of Artificial Sequence: Synthetic oligonucleotide
  Antisense strand to SEQ ID NO: 695444
uuugccauuguucucuaac

SEQ ID NO: 695446 - RNA, 19 nt, Artificial Sequence
  Description of Artificial Sequence: Synthetic oligonucleotide
  Sense strand starting at position 3955 of SEQ ID NO: 586143
aggcguuuaagcuucugua

SEQ ID NO: 695447 - RNA, 19 nt, Artificial Sequence
  Description of Artificial Sequence: Synthetic oligonucleotide
  Antisense strand to SEQ ID NO: 695446
uacagaagcuuaaacgccu

SEQ ID NO: 695448 - RNA, 19 nt, Artificial Sequence
  Description of Artificial Sequence: Synthetic oligonucleotide
  Sense strand starting at position 3956 of SEQ ID NO: 586143
ggcguuuaagcuucuguag

SEQ ID NO: 695449 - RNA, 19 nt, Artificial Sequence
  Description of Artificial Sequence: Synthetic oligonucleotide
  Antisense strand to SEQ ID NO: 695448
cuacagaagcuuaaacgcc

SEQ ID NO: 695450 - RNA, 19 nt, Artificial Sequence
  Description of Artificial Sequence: Synthetic oligonucleotide
  Sense strand starting at position 3957 of SEQ ID NO: 586143
gcguuuaagcuucuguaga

SEQ ID NO: 695451 - RNA, 19 nt, Artificial Sequence
  Description of Artificial Sequence: Synthetic oligonucleotide
  Antisense strand to SEQ ID NO: 695450
ucuacagaagcuuaaacgc

SEQ ID NO: 695452 - RNA, 19 nt, Artificial Sequence
  Description of Artificial Sequence: Synthetic oligonucleotide
  Sense strand starting at position 3959 of SEQ ID NO: 586143
guuuaagcuucuguagaga

SEQ ID NO: 695453 - RNA, 19 nt, Artificial Sequence
  Description of Artificial Sequence: Synthetic oligonucleotide
  Antisense strand to SEQ ID NO: 695452
ucucuacagaagcuuaaac

SEQ ID NO: 695454 - RNA, 19 nt, Artificial Sequence
  Description of Artificial Sequence: Synthetic oligonucleotide
  Sense strand starting at position 3972 of SEQ ID NO: 586143
uagagaggcugcucagaua

SEQ ID NO: 695455 - RNA, 19 nt, Artificial Sequence
  Description of Artificial Sequence: Synthetic oligonucleotide
  Antisense strand to SEQ ID NO: 695454
uaucugagcagccucucua

SEQ ID NO: 695456 - RNA, 19 nt, Artificial Sequence
  Description of Artificial Sequence: Synthetic oligonucleotide
  Sense strand starting at position 310 of SEQ ID NO: 586144
aguuuaugaccuugagcag

SEQ ID NO: 695457 - RNA, 19 nt, Artificial Sequence
  Description of Artificial Sequence: Synthetic oligonucleotide
  Antisense strand to SEQ ID NO: 695456
cugcucaaggucauaaacu

SEQ ID NO: 695458 - RNA, 19 nt, Artificial Sequence
  Description of Artificial Sequence: Synthetic oligonucleotide
  Sense strand starting at position 311 of SEQ ID NO: 586144
guuuaugaccuugagcaga

SEQ ID NO: 695459 - RNA, 19 nt, Artificial Sequence
  Description of Artificial Sequence: Synthetic oligonucleotide
  Antisense strand to SEQ ID NO: 695458
ucugcucaaggucauaaac

SEQ ID NO: 695460 - RNA, 19 nt, Artificial Sequence
  Description of Artificial Sequence: Synthetic oligonucleotide
  Sense strand starting at position 313 of SEQ ID NO: 586144
uuaugaccuugagcagaau

SEQ ID NO: 695461 - RNA, 19 nt, Artificial Sequence
  Description of Artificial Sequence: Synthetic oligonucleotide
  Antisense strand to SEQ ID NO: 695460
auucugcucaaggucauaa

SEQ ID NO: 695462 - RNA, 19 nt, Artificial Sequence
  Description of Artificial Sequence: Synthetic oligonucleotide
  Sense strand starting at position 324 of SEQ ID NO: 586144
agcagaaugugacugggaa

SEQ ID NO: 695463 - RNA, 19 nt, Artificial Sequence
  Description of Artificial Sequence: Synthetic oligonucleotide
  Antisense strand to SEQ ID NO: 695462
uucccagucacauucugcu

SEQ ID NO: 695464 - RNA, 19 nt, Artificial Sequence
  Description of Artificial Sequence: Synthetic oligonucleotide
  Sense strand starting at position 325 of SEQ ID NO: 586144
gcagaaugugacugggaau

SEQ ID NO: 695465 - RNA, 19 nt, Artificial Sequence
  Description of Artificial Sequence: Synthetic oligonucleotide
  Antisense strand to SEQ ID NO: 695464
auucccagucacauucugc

SEQ ID NO: 695466 - RNA, 19 nt, Artificial Sequence
  Description of Artificial Sequence: Synthetic oligonucleotide
  Sense strand starting at position 366 of SEQ ID NO: 586144
ccuugucucuuggcaagga

SEQ ID NO: 695467 - RNA, 19 nt, Artificial Sequence
  Description of Artificial Sequence: Synthetic oligonucleotide
  Antisense strand to SEQ ID NO: 695466
uccuugccaagagacaagg

SEQ ID NO: 695468 - RNA, 19 nt, Artificial Sequence
  Description of Artificial Sequence: Synthetic oligonucleotide
  Sense strand starting at position 376 of SEQ ID NO: 586144
uggcaaggaccuugggauu

SEQ ID NO: 695469 - RNA, 19 nt, Artificial Sequence
  Description of Artificial Sequence: Synthetic oligonucleotide
  Antisense strand to SEQ ID NO: 695468
aaucccaagguccuugcca

SEQ ID NO: 695470 - RNA, 19 nt, Artificial Sequence
  Description of Artificial Sequence: Synthetic oligonucleotide
  Sense strand starting at position 458 of SEQ ID NO: 586144
ugacauaucuguccaggau

SEQ ID NO: 695471 - RNA, 19 nt, Artificial Sequence
  Description of Artificial Sequence: Synthetic oligonucleotide
  Antisense strand to SEQ ID NO: 695470
auccuggacagauauguca

SEQ ID NO: 695472 - RNA, 19 nt, Artificial Sequence
  Description of Artificial Sequence: Synthetic oligonucleotide
  Sense strand starting at position 461 of SEQ ID NO: 586144
cauaucuguccaggauuga

SEQ ID NO: 695473 - RNA, 19 nt, Artificial Sequence
  Description of Artificial Sequence: Synthetic oligonucleotide
  Antisense strand to SEQ ID NO: 695472
ucaauccuggacagauaug

SEQ ID NO: 695474 - RNA, 19 nt, Artificial Sequence
  Description of Artificial Sequence: Synthetic oligonucleotide
  Sense strand starting at position 480 of SEQ ID NO: 586144
agggaagguugccuauguu

SEQ ID NO: 695475 - RNA, 19 nt, Artificial Sequence
  Description of Artificial Sequence: Synthetic oligonucleotide
  Antisense strand to SEQ ID NO: 695474
aacauaggcaaccuucccu

SEQ ID NO: 695476 - RNA, 19 nt, Artificial Sequence
  Description of Artificial Sequence: Synthetic oligonucleotide
  Sense strand starting at position 483 of SEQ ID NO: 586144
gaagguugccuauguugag

SEQ ID NO: 695477 - RNA, 19 nt, Artificial Sequence
  Description of Artificial Sequence: Synthetic oligonucleotide
  Antisense strand to SEQ ID NO: 695476
cucaacauaggcaaccuuc

SEQ ID NO: 695478 - RNA, 19 nt, Artificial Sequence
  Description of Artificial Sequence: Synthetic oligonucleotide
  Sense strand starting at position 549 of SEQ ID NO: 586144
uggacucuuaaggguuauu

SEQ ID NO: 695479 - RNA, 19 nt, Artificial Sequence
  Description of Artificial Sequence: Synthetic oligonucleotide
  Antisense strand to SEQ ID NO: 695478
aauaacccuuaagagucca

SEQ ID NO: 695480 - RNA, 19 nt, Artificial Sequence
  Description of Artificial Sequence: Synthetic oligonucleotide
  Sense strand starting at position 851 of SEQ ID NO: 586144
gcuguagugcuggcuguau

SEQ ID NO: 695481 - RNA, 19 nt, Artificial Sequence
  Description of Artificial Sequence: Synthetic oligonucleotide
  Antisense strand to SEQ ID NO: 695480
auacagccagcacuacagc

SEQ ID NO: 695482 - RNA, 19 nt, Artificial Sequence
  Description of Artificial Sequence: Synthetic oligonucleotide
  Sense strand starting at position 1367 of SEQ ID NO: 586144
ggugauuucucagccuagc

SEQ ID NO: 695483 - RNA, 19 nt, Artificial Sequence
  Description of Artificial Sequence: Synthetic oligonucleotide
  Antisense strand to SEQ ID NO: 695482
gcuaggcugagaaaucacc

SEQ ID NO: 695484 - RNA, 19 nt, Artificial Sequence
  Description of Artificial Sequence: Synthetic oligonucleotide
  Sense strand starting at position 1387 of SEQ ID NO: 586144
aauacauccgcgcaagaga

SEQ ID NO: 695485 - RNA, 19 nt, Artificial Sequence
  Description of Artificial Sequence: Synthetic oligonucleotide
  Antisense strand to SEQ ID NO: 695484
ucucuugcgcggauguauu

SEQ ID NO: 695486 - RNA, 19 nt, Artificial Sequence
  Description of Artificial Sequence: Synthetic oligonucleotide
  Sense strand starting at position 1532 of SEQ ID NO: 586144
cugugaggcacugaaaucu

SEQ ID NO: 695487 - RNA, 19 nt, Artificial Sequence
  Description of Artificial Sequence: Synthetic oligonucleotide
  Antisense strand to SEQ ID NO: 695486
agauuucagugccucacag

SEQ ID NO: 695488 - RNA, 19 nt, Artificial Sequence
  Description of Artificial Sequence: Synthetic oligonucleotide
  Sense strand starting at position 1645 of SEQ ID NO: 586144
ccaagacucugcucaagug

SEQ ID NO: 695489 - RNA, 19 nt, Artificial Sequence
  Description of Artificial Sequence: Synthetic oligonucleotide
  Antisense strand to SEQ ID NO: 695488
cacuugagcagagucuugg

SEQ ID NO: 695490 - RNA, 19 nt, Artificial Sequence
  Description of Artificial Sequence: Synthetic oligonucleotide
  Sense strand starting at position 2219 of SEQ ID NO: 586144
aaagcauuucggcggaaau

SEQ ID NO: 695491 - RNA, 19 nt, Artificial Sequence
  Description of Artificial Sequence: Synthetic oligonucleotide
  Antisense strand to SEQ ID NO: 695490
auuuccgccgaaaugcuuu

SEQ ID NO: 695492 - RNA, 19 nt, Artificial Sequence
  Description of Artificial Sequence: Synthetic oligonucleotide
  Sense strand starting at position 2220 of SEQ ID NO: 586144
aagcauuucggcggaaauu

SEQ ID NO: 695493 - RNA, 19 nt, Artificial Sequence
  Description of Artificial Sequence: Synthetic oligonucleotide
  Antisense strand to SEQ ID NO: 695492
aauuuccgccgaaaugcuu

SEQ ID NO: 695494 - RNA, 19 nt, Artificial Sequence
  Description of Artificial Sequence: Synthetic oligonucleotide
  Sense strand starting at position 2406 of SEQ ID NO: 586144
agcaguuugcaaggaauag

SEQ ID NO: 695495 - RNA, 19 nt, Artificial Sequence
  Description of Artificial Sequence: Synthetic oligonucleotide
  Antisense strand to SEQ ID NO: 695494
cuauuccuugcaaacugcu

SEQ ID NO: 695496 - RNA, 19 nt, Artificial Sequence
  Description of Artificial Sequence: Synthetic oligonucleotide
  Sense strand starting at position 2639 of SEQ ID NO: 586144
gggcccuggccauaaguuu

SEQ ID NO: 695497 - RNA, 19 nt, Artificial Sequence
  Description of Artificial Sequence: Synthetic oligonucleotide
  Antisense strand to SEQ ID NO: 695496
aaacuuauggccagggccc

SEQ ID NO: 695498 - RNA, 19 nt, Artificial Sequence
  Description of Artificial Sequence: Synthetic oligonucleotide
  Sense strand starting at position 3010 of SEQ ID NO: 586144
accaccugugauugaggaa

SEQ ID NO: 695499 - RNA, 19 nt, Artificial Sequence
  Description of Artificial Sequence: Synthetic oligonucleotide
  Antisense strand to SEQ ID NO: 695498
uuccucaaucacagguggu

SEQ ID NO: 695500 - RNA, 19 nt, Artificial Sequence
  Description of Artificial Sequence: Synthetic oligonucleotide
  Sense strand starting at position 3013 of SEQ ID NO: 586144
accugugauugaggaauuu

SEQ ID NO: 695501 - RNA, 19 nt, Artificial Sequence
  Description of Artificial Sequence: Synthetic oligonucleotide
  Antisense strand to SEQ ID NO: 695500
aaauuccucaaucacaggu

SEQ ID NO: 695502 - RNA, 19 nt, Artificial Sequence
  Description of Artificial Sequence: Synthetic oligonucleotide
  Sense strand starting at position 3140 of SEQ ID NO: 586144
guggacaagcgaugauuga

SEQ ID NO: 695503 - RNA, 19 nt, Artificial Sequence
  Description of Artificial Sequence: Synthetic oligonucleotide
  Antisense strand to SEQ ID NO: 695502
ucaaucaucgcuuguccac

SEQ ID NO: 695504 - RNA, 19 nt, Artificial Sequence
  Description of Artificial Sequence: Synthetic oligonucleotide
  Sense strand starting at position 3214 of SEQ ID NO: 586144
aucaauguugcguagauag

SEQ ID NO: 695505 - RNA, 19 nt, Artificial Sequence
  Description of Artificial Sequence: Synthetic oligonucleotide
  Antisense strand to SEQ ID NO: 695504
cuaucuacgcaacauugau

SEQ ID NO: 695506 - RNA, 19 nt, Artificial Sequence
  Description of Artificial Sequence: Synthetic oligonucleotide
  Sense strand starting at position 3307 of SEQ ID NO: 586144
gagggcuuccugcaggagu

SEQ ID NO: 695507 - RNA, 19 nt, Artificial Sequence
  Description of Artificial Sequence: Synthetic oligonucleotide
  Antisense strand to SEQ ID NO: 695506
acuccugcaggaagcccuc

SEQ ID NO: 695508 - RNA, 19 nt, Artificial Sequence
  Description of Artificial Sequence: Synthetic oligonucleotide
  Sense strand starting at position 3328 of SEQ ID NO: 586144
caaacauggcuuugagaug

SEQ ID NO: 695509 - RNA, 19 nt, Artificial Sequence
  Description of Artificial Sequence: Synthetic oligonucleotide
  Antisense strand to SEQ ID NO: 695508
caucucaaagccauguuug

SEQ ID NO: 695510 - RNA, 19 nt, Artificial Sequence
  Description of Artificial Sequence: Synthetic oligonucleotide
  Sense strand starting at position 3333 of SEQ ID NO: 586144
auggcuuugagaugcccua

SEQ ID NO: 695511 - RNA, 19 nt, Artificial Sequence
  Description of Artificial Sequence: Synthetic oligonucleotide
  Antisense strand to SEQ ID NO: 695510
uagggcaucucaaagccau

SEQ ID NO: 695512 - RNA, 19 nt, Artificial Sequence
  Description of Artificial Sequence: Synthetic oligonucleotide
  Sense strand starting at position 3489 of SEQ ID NO: 586144
gcuggugacagguagucua

SEQ ID NO: 695513 - RNA, 19 nt, Artificial Sequence
  Description of Artificial Sequence: Synthetic oligonucleotide
  Antisense strand to SEQ ID NO: 695512
uagacuaccugucaccagc

SEQ ID NO: 695514 - RNA, 19 nt, Artificial Sequence
  Description of Artificial Sequence: Synthetic oligonucleotide
  Sense strand starting at position 3496 of SEQ ID NO: 586144
acagguagucuauggaaag

SEQ ID NO: 695515 - RNA, 19 nt, Artificial Sequence
  Description of Artificial Sequence: Synthetic oligonucleotide
  Antisense strand to SEQ ID NO: 695514
cuuuccauagacuaccugu

SEQ ID NO: 695516 - RNA, 19 nt, Artificial Sequence
  Description of Artificial Sequence: Synthetic oligonucleotide
  Sense strand starting at position 3530 of SEQ ID NO: 586144
uaacguuuacuaggguaaa

SEQ ID NO: 695517 - RNA, 19 nt, Artificial Sequence
  Description of Artificial Sequence: Synthetic oligonucleotide
  Antisense strand to SEQ ID NO: 695516
uuuacccuaguaaacguua

SEQ ID NO: 695518 - RNA, 19 nt, Artificial Sequence
  Description of Artificial Sequence: Synthetic oligonucleotide
  Sense strand starting at position 3597 of SEQ ID NO: 586144
uuucuagaaaucgguggua

SEQ ID NO: 695519 - RNA, 19 nt, Artificial Sequence
  Description of Artificial Sequence: Synthetic oligonucleotide
  Antisense strand to SEQ ID NO: 695518
uaccaccgauuucuagaaa

SEQ ID NO: 695520 - RNA, 19 nt, Artificial Sequence
  Description of Artificial Sequence: Synthetic oligonucleotide
  Sense strand starting at position 3599 of SEQ ID NO: 586144
ucuagaaaucggugguaaa

SEQ ID NO: 695521 - RNA, 19 nt, Artificial Sequence
  Description of Artificial Sequence: Synthetic oligonucleotide
  Antisense strand to SEQ ID NO: 695520
uuuaccaccgauuucuaga

SEQ ID NO: 695522 - RNA, 19 nt, Artificial Sequence
  Description of Artificial Sequence: Synthetic oligonucleotide
  Sense strand starting at position 3600 of SEQ ID NO: 586144
cuagaaaucggugguaaau

SEQ ID NO: 695523 - RNA, 19 nt, Artificial Sequence
  Description of Artificial Sequence: Synthetic oligonucleotide
  Antisense strand to SEQ ID NO: 695522
auuuaccaccgauuucuag

SEQ ID NO: 695524 - RNA, 19 nt, Artificial Sequence
  Description of Artificial Sequence: Synthetic oligonucleotide
  Sense strand starting at position 3602 of SEQ ID NO: 586144
agaaaucggugguaaauuu

SEQ ID NO: 695525 - RNA, 19 nt, Artificial Sequence
  Description of Artificial Sequence: Synthetic oligonucleotide
  Antisense strand to SEQ ID NO: 695524
aaauuuaccaccgauuucu

SEQ ID NO: 695526 - RNA, 19 nt, Artificial Sequence
  Description of Artificial Sequence: Synthetic oligonucleotide
  Sense strand starting at position 3676 of SEQ ID NO: 586144
uguguuugauaauuucugu

SEQ ID NO: 695527 - RNA, 19 nt, Artificial Sequence
  Description of Artificial Sequence: Synthetic oligonucleotide
  Antisense strand to SEQ ID NO: 695526
acagaaauuaucaaacaca

SEQ ID NO: 695528 - RNA, 19 nt, Artificial Sequence
  Description of Artificial Sequence: Synthetic oligonucleotide
  Sense strand starting at position 3679 of SEQ ID NO: 586144
guuugauaauuucuguggu

SEQ ID NO: 695529 - RNA, 19 nt, Artificial Sequence
  Description of Artificial Sequence: Synthetic oligonucleotide
  Antisense strand to SEQ ID NO: 695528
accacagaaauuaucaaac

SEQ ID NO: 695530 - RNA, 19 nt, Artificial Sequence
  Description of Artificial Sequence: Synthetic oligonucleotide
  Sense strand starting at position 3895 of SEQ ID NO: 586144
uuguucguccaugaauauu

SEQ ID NO: 695531 - RNA, 19 nt, Artificial Sequence
  Description of Artificial Sequence: Synthetic oligonucleotide
  Antisense strand to SEQ ID NO: 695530
aauauucauggacgaacaa

SEQ ID NO: 695532 - RNA, 19 nt, Artificial Sequence
  Description of Artificial Sequence: Synthetic oligonucleotide
  Sense strand starting at position 3906 of SEQ ID NO: 586144
ugaauauuuggucgguuuc

SEQ ID NO: 695533 - RNA, 19 nt, Artificial Sequence
  Description of Artificial Sequence: Synthetic oligonucleotide
  Antisense strand to SEQ ID NO: 695532
gaaaccgaccaaauauuca

SEQ ID NO: 695534 - RNA, 19 nt, Artificial Sequence
  Description of Artificial Sequence: Synthetic oligonucleotide
  Sense strand starting at position 3908 of SEQ ID NO: 586144
aauauuuggucgguuucca

SEQ ID NO: 695535 - RNA, 19 nt, Artificial Sequence
  Description of Artificial Sequence: Synthetic oligonucleotide
  Antisense strand to SEQ ID NO: 695534
uggaaaccgaccaaauauu

SEQ ID NO: 695536 - RNA, 19 nt, Artificial Sequence
  Description of Artificial Sequence: Synthetic oligonucleotide
  Sense strand starting at position 145 of SEQ ID NO: 586145
cccagagaccauugucuaa

SEQ ID NO: 695537 - RNA, 19 nt, Artificial Sequence
  Description of Artificial Sequence: Synthetic oligonucleotide
  Antisense strand to SEQ ID NO: 695536
uuagacaauggucucuggg

SEQ ID NO: 695538 - RNA, 19 nt, Artificial Sequence
  Description of Artificial Sequence: Synthetic oligonucleotide
  Sense strand starting at position 147 of SEQ ID NO: 586145
cagagaccauugucuaaug

SEQ ID NO: 695539 - RNA, 19 nt, Artificial Sequence
  Description of Artificial Sequence: Synthetic oligonucleotide
  Antisense strand to SEQ ID NO: 695538
cauuagacaauggucucug

SEQ ID NO: 695540 - RNA, 19 nt, Artificial Sequence
  Description of Artificial Sequence: Synthetic oligonucleotide
  Sense strand starting at position 149 of SEQ ID NO: 586145
gagaccauugucuaaugca

SEQ ID NO: 695541 - RNA, 19 nt, Artificial Sequence
  Description of Artificial Sequence: Synthetic oligonucleotide
  Antisense strand to SEQ ID NO: 695540
ugcauuagacaauggucuc

SEQ ID NO: 695542 - RNA, 19 nt, Artificial Sequence
  Description of Artificial Sequence: Synthetic oligonucleotide
  Sense strand starting at position 152 of SEQ ID NO: 586145
accauugucuaaugcaaag

SEQ ID NO: 695543 - RNA, 19 nt, Artificial Sequence
  Description of Artificial Sequence: Synthetic oligonucleotide
  Antisense strand to SEQ ID NO: 695542
cuuugcauuagacaauggu

SEQ ID NO: 695544 - RNA, 19 nt, Artificial Sequence
  Description of Artificial Sequence: Synthetic oligonucleotide
  Sense strand starting at position 229 of SEQ ID NO: 586145
cuguguugagcucaguuua

SEQ ID NO: 695545 - RNA, 19 nt, Artificial Sequence
  Description of Artificial Sequence: Synthetic oligonucleotide
  Antisense strand to SEQ ID NO: 695544
uaaacugagcucaacacag

SEQ ID NO: 695546 - RNA, 19 nt, Artificial Sequence
  Description of Artificial Sequence: Synthetic oligonucleotide
  Sense strand starting at position 346 of SEQ ID NO: 586145
ugcgcaaggucaugcuaaa

SEQ ID NO: 695547 - RNA, 19 nt, Artificial Sequence
  Description of Artificial Sequence: Synthetic oligonucleotide
  Antisense strand to SEQ ID NO: 695546
uuuagcaugaccuugcgca

SEQ ID NO: 695548 - RNA, 19 nt, Artificial Sequence
  Description of Artificial Sequence: Synthetic oligonucleotide
  Sense strand starting at position 466 of SEQ ID NO: 586145
agagacuaggccugaaagu

SEQ ID NO: 695549 - RNA, 19 nt, Artificial Sequence
  Description of Artificial Sequence: Synthetic oligonucleotide
  Antisense strand to SEQ ID NO: 695548
acuuucaggccuagucucu

SEQ ID NO: 695550 - RNA, 19 nt, Artificial Sequence
  Description of Artificial Sequence: Synthetic oligonucleotide
  Sense strand starting at position 475 of SEQ ID NO: 586145
gccugaaagugcuggcagu

SEQ ID NO: 695551 - RNA, 19 nt, Artificial Sequence
  Description of Artificial Sequence: Synthetic oligonucleotide
  Antisense strand to SEQ ID NO: 695550
acugccagcacuuucaggc

SEQ ID NO: 695552 - RNA, 19 nt, Artificial Sequence
  Description of Artificial Sequence: Synthetic oligonucleotide
  Sense strand starting at position 521 of SEQ ID NO: 586145
aggccucaguuuccugauu

SEQ ID NO: 695553 - RNA, 19 nt, Artificial Sequence
  Description of Artificial Sequence: Synthetic oligonucleotide
  Antisense strand to SEQ ID NO: 695552
aaucaggaaacugaggccu

SEQ ID NO: 695554 - RNA, 19 nt, Artificial Sequence
  Description of Artificial Sequence: Synthetic oligonucleotide
  Sense strand starting at position 523 of SEQ ID NO: 586145
gccucaguuuccugauuuc

SEQ ID NO: 695555 - RNA, 19 nt, Artificial Sequence
  Description of Artificial Sequence: Synthetic oligonucleotide
  Antisense strand to SEQ ID NO: 695554
gaaaucaggaaacugaggc

SEQ ID NO: 695556 - RNA, 19 nt, Artificial Sequence
  Description of Artificial Sequence: Synthetic oligonucleotide
  Sense strand starting at position 601 of SEQ ID NO: 586145
ucaggcuuaccaugggaca

SEQ ID NO: 695557 - RNA, 19 nt, Artificial Sequence
  Description of Artificial Sequence: Synthetic oligonucleotide
  Antisense strand to SEQ ID NO: 695556
ugucccaugguaagccuga

SEQ ID NO: 695558 - RNA, 19 nt, Artificial Sequence
  Description of Artificial Sequence: Synthetic oligonucleotide
  Sense strand starting at position 729 of SEQ ID NO: 586145
guagucaaucugugaggga

SEQ ID NO: 695559 - RNA, 19 nt, Artificial Sequence
  Description of Artificial Sequence: Synthetic oligonucleotide
  Antisense strand to SEQ ID NO: 695558
ucccucacagauugacuac

SEQ ID NO: 695560 - RNA, 19 nt, Artificial Sequence
  Description of Artificial Sequence: Synthetic oligonucleotide
  Sense strand starting at position 730 of SEQ ID NO: 586145
uagucaaucugugagggaa

SEQ ID NO: 695561 - RNA, 19 nt, Artificial Sequence
  Description of Artificial Sequence: Synthetic oligonucleotide
  Antisense strand to SEQ ID NO: 695560
uucccucacagauugacua

SEQ ID NO: 695562 - RNA, 19 nt, Artificial Sequence
  Description of Artificial Sequence: Synthetic oligonucleotide
  Sense strand starting at position 732 of SEQ ID NO: 586145
gucaaucugugagggaaag

SEQ ID NO: 695563 - RNA, 19 nt, Artificial Sequence
  Description of Artificial Sequence: Synthetic oligonucleotide
  Antisense strand to SEQ ID NO: 695562
cuuucccucacagauugac

SEQ ID NO: 695564 - RNA, 19 nt, Artificial Sequence
  Description of Artificial Sequence: Synthetic oligonucleotide
  Sense strand starting at position 770 of SEQ ID NO: 586145
ggcagagagucauagguga

SEQ ID NO: 695565 - RNA, 19 nt, Artificial Sequence
  Description of Artificial Sequence: Synthetic oligonucleotide
  Antisense strand to SEQ ID NO: 695564
ucaccuaugacucucugcc

SEQ ID NO: 695566 - RNA, 19 nt, Artificial Sequence
  Description of Artificial Sequence: Synthetic oligonucleotide
  Sense strand starting at position 772 of SEQ ID NO: 586145
cagagagucauaggugaag

SEQ ID NO: 695567 - RNA, 19 nt, Artificial Sequence
  Description of Artificial Sequence: Synthetic oligonucleotide
  Antisense strand to SEQ ID NO: 695566
cuucaccuaugacucucug

SEQ ID NO: 695568 - RNA, 19 nt, Artificial Sequence
  Description of Artificial Sequence: Synthetic oligonucleotide
  Sense strand starting at position 1830 of SEQ ID NO: 586145
gucucuuuccuugguccaa

SEQ ID NO: 695569 - RNA, 19 nt, Artificial Sequence
  Description of Artificial Sequence: Synthetic oligonucleotide
  Antisense strand to SEQ ID NO: 695568
uuggaccaaggaaagagac

SEQ ID NO: 695570 - RNA, 19 nt, Artificial Sequence
  Description of Artificial Sequence: Synthetic oligonucleotide
  Sense strand starting at position 2303 of SEQ ID NO: 586145
gagugucuccaaggccaua

SEQ ID NO: 695571 - RNA, 19 nt, Artificial Sequence
  Description of Artificial Sequence: Synthetic oligonucleotide
  Antisense strand to SEQ ID NO: 695570
uauggccuuggagacacuc

SEQ ID NO: 695572 - RNA, 19 nt, Artificial Sequence
  Description of Artificial Sequence: Synthetic oligonucleotide
  Sense strand starting at position 2552 of SEQ ID NO: 586145
cccuuucugucccaagguu

SEQ ID NO: 695573 - RNA, 19 nt, Artificial Sequence
  Description of Artificial Sequence: Synthetic oligonucleotide
  Antisense strand to SEQ ID NO: 695572
aaccuugggacagaaaggg

SEQ ID NO: 695574 - RNA, 19 nt, Artificial Sequence
  Description of Artificial Sequence: Synthetic oligonucleotide
  Sense strand starting at position 2582 of SEQ ID NO: 586145
gcagaagcccuguguucag

SEQ ID NO: 695575 - RNA, 19 nt, Artificial Sequence
  Description of Artificial Sequence: Synthetic oligonucleotide
  Antisense strand to SEQ ID NO: 695574
cugaacacagggcuucugc

SEQ ID NO: 695576 - RNA, 19 nt, Artificial Sequence
  Description of Artificial Sequence: Synthetic oligonucleotide
  Sense strand starting at position 2600 of SEQ ID NO: 586145
gguucugacucuucuacuu

SEQ ID NO: 695577 - RNA, 19 nt, Artificial Sequence
  Description of Artificial Sequence: Synthetic oligonucleotide
  Antisense strand to SEQ ID NO: 695576
aaguagaagagucagaacc

SEQ ID NO: 695578 - RNA, 19 nt, Artificial Sequence
  Description of Artificial Sequence: Synthetic oligonucleotide
  Sense strand starting at position 2752 of SEQ ID NO: 586145
ggaaagaguugucgacgca

SEQ ID NO: 695579 - RNA, 19 nt, Artificial Sequence
  Description of Artificial Sequence: Synthetic oligonucleotide
  Antisense strand to SEQ ID NO: 695578
ugcgucgacaacucuuucc

SEQ ID NO: 695580 - RNA, 19 nt, Artificial Sequence
  Description of Artificial Sequence: Synthetic oligonucleotide
  Sense strand starting at position 2755 of SEQ ID NO: 586145
aagaguugucgacgcagga

SEQ ID NO: 695581 - RNA, 19 nt, Artificial Sequence
  Description of Artificial Sequence: Synthetic oligonucleotide
  Antisense strand to SEQ ID NO: 695580
uccugcgucgacaacucuu

SEQ ID NO: 695582 - RNA, 19 nt, Artificial Sequence
  Description of Artificial Sequence: Synthetic oligonucleotide
  Sense strand starting at position 2805 of SEQ ID NO: 586145
gguucuucucauugugugu

SEQ ID NO: 695583 - RNA, 19 nt, Artificial Sequence
  Description of Artificial Sequence: Synthetic oligonucleotide
  Antisense strand to SEQ ID NO: 695582
acacacaaugagaagaacc

SEQ ID NO: 695584 - RNA, 19 nt, Artificial Sequence
  Description of Artificial Sequence: Synthetic oligonucleotide
  Sense strand starting at position 3003 of SEQ ID NO: 586145
gcucguggcuccuucuauu

SEQ ID NO: 695585 - RNA, 19 nt, Artificial Sequence
  Description of Artificial Sequence: Synthetic oligonucleotide
  Antisense strand to SEQ ID NO: 695584
aauagaaggagccacgagc

SEQ ID NO: 695586 - RNA, 19 nt, Artificial Sequence
  Description of Artificial Sequence: Synthetic oligonucleotide
  Sense strand starting at position 3050 of SEQ ID NO: 586145
cuaauugcuagcuggcaga

SEQ ID NO: 695587 - RNA, 19 nt, Artificial Sequence
  Description of Artificial Sequence: Synthetic oligonucleotide
  Antisense strand to SEQ ID NO: 695586
ucugccagcuagcaauuag

SEQ ID NO: 695588 - RNA, 19 nt, Artificial Sequence
  Description of Artificial Sequence: Synthetic oligonucleotide
  Sense strand starting at position 3101 of SEQ ID NO: 586145
uggagucaucgcuguaagu

SEQ ID NO: 695589 - RNA, 19 nt, Artificial Sequence
  Description of Artificial Sequence: Synthetic oligonucleotide
  Antisense strand to SEQ ID NO: 695588
acuuacagcgaugacucca

SEQ ID NO: 695590 - RNA, 19 nt, Artificial Sequence
  Description of Artificial Sequence: Synthetic oligonucleotide
  Sense strand starting at position 3190 of SEQ ID NO: 586145
gguucuuaaccaggugcga

SEQ ID NO: 695591 - RNA, 19 nt, Artificial Sequence
  Description of Artificial Sequence: Synthetic oligonucleotide
  Antisense strand to SEQ ID NO: 695590
ucgcaccugguuaagaacc

SEQ ID NO: 695592 - RNA, 19 nt, Artificial Sequence
  Description of Artificial Sequence: Synthetic oligonucleotide
  Sense strand starting at position 3287 of SEQ ID NO: 586145
uacucugaguccuugggaa

SEQ ID NO: 695593 - RNA, 19 nt, Artificial Sequence
  Description of Artificial Sequence: Synthetic oligonucleotide
  Antisense strand to SEQ ID NO: 695592
uucccaaggacucagagua

SEQ ID NO: 695594 - RNA, 19 nt, Artificial Sequence
  Description of Artificial Sequence: Synthetic oligonucleotide
  Sense strand starting at position 3348 of SEQ ID NO: 586145
cuucgugacugcugagaac

SEQ ID NO: 695595 - RNA, 19 nt, Artificial Sequence
  Description of Artificial Sequence: Synthetic oligonucleotide
  Antisense strand to SEQ ID NO: 695594
guucucagcagucacgaag

SEQ ID NO: 695596 - RNA, 19 nt, Artificial Sequence
  Description of Artificial Sequence: Synthetic oligonucleotide
  Sense strand starting at position 3526 of SEQ ID NO: 586145
cacucaaaggccuguugaa

SEQ ID NO: 695597 - RNA, 19 nt, Artificial Sequence
  Description of Artificial Sequence: Synthetic oligonucleotide
  Antisense strand to SEQ ID NO: 695596
uucaacaggccuuugagug

SEQ ID NO: 695598 - RNA, 19 nt, Artificial Sequence
  Description of Artificial Sequence: Synthetic oligonucleotide
  Sense strand starting at position 3580 of SEQ ID NO: 586145
aaauguacguuacuguuua

SEQ ID NO: 695599 - RNA, 19 nt, Artificial Sequence
  Description of Artificial Sequence: Synthetic oligonucleotide
  Antisense strand to SEQ ID NO: 695598
uaaacaguaacguacauuu

SEQ ID NO: 695600 - RNA, 19 nt, Artificial Sequence
  Description of Artificial Sequence: Synthetic oligonucleotide
  Sense strand starting at position 3584 of SEQ ID NO: 586145
guacguuacuguuuacaac

SEQ ID NO: 695601 - RNA, 19 nt, Artificial Sequence
  Description of Artificial Sequence: Synthetic oligonucleotide
  Antisense strand to SEQ ID NO: 695600
guuguaaacaguaacguac

SEQ ID NO: 695602 - RNA, 19 nt, Artificial Sequence
  Description of Artificial Sequence: Synthetic oligonucleotide
  Sense strand starting at position 3633 of SEQ ID NO: 586145
gacaguucccauuguaguc

SEQ ID NO: 695603 - RNA, 19 nt, Artificial Sequence
  Description of Artificial Sequence: Synthetic oligonucleotide
  Antisense strand to SEQ ID NO: 695602
gacuacaaugggaacuguc

SEQ ID NO: 695604 - RNA, 19 nt, Artificial Sequence
  Description of Artificial Sequence: Synthetic oligonucleotide
  Sense strand starting at position 3819 of SEQ ID NO: 586145
gaaugcaaguauuaccgaa

SEQ ID NO: 695605 - RNA, 19 nt, Artificial Sequence
  Description of Artificial Sequence: Synthetic oligonucleotide
  Antisense strand to SEQ ID NO: 695604
uucgguaauacuugcauuc

SEQ ID NO: 695606 - RNA, 19 nt, Artificial Sequence
  Description of Artificial Sequence: Synthetic oligonucleotide
  Sense strand starting at position 3823 of SEQ ID NO: 586145
gcaaguauuaccgaaagaa

SEQ ID NO: 695607 - RNA, 19 nt, Artificial Sequence
  Description of Artificial Sequence: Synthetic oligonucleotide
  Antisense strand to SEQ ID NO: 695606
uucuuucgguaauacuugc

SEQ ID NO: 695608 - RNA, 19 nt, Artificial Sequence
  Description of Artificial Sequence: Synthetic oligonucleotide
  Sense strand starting at position 3848 of SEQ ID NO: 586145
acacauuucuucugaagug

SEQ ID NO: 695609 - RNA, 19 nt, Artificial Sequence
  Description of Artificial Sequence: Synthetic oligonucleotide
  Antisense strand to SEQ ID NO: 695608
cacuucagaagaaaugugu

SEQ ID NO: 695610 - RNA, 19 nt, Artificial Sequence
  Description of Artificial Sequence: Synthetic oligonucleotide
  Sense strand starting at position 3858 of SEQ ID NO: 586145
ucugaagugucagaaagau

SEQ ID NO: 695611 - RNA, 19 nt, Artificial Sequence
  Description of Artificial Sequence: Synthetic oligonucleotide
  Antisense strand to SEQ ID NO: 695610
aucuuucugacacuucaga

SEQ ID NO: 695612 - RNA, 19 nt, Artificial Sequence
  Description of Artificial Sequence: Synthetic oligonucleotide
  Sense strand starting at position 3948 of SEQ ID NO: 586145
cuagaagccuucccagauc

SEQ ID NO: 695613 - RNA, 19 nt, Artificial Sequence
  Description of Artificial Sequence: Synthetic oligonucleotide
  Antisense strand to SEQ ID NO: 695612
gaucugggaaggcuucuag

SEQ ID NO: 695614 - RNA, 19 nt, Artificial Sequence
  Description of Artificial Sequence: Synthetic oligonucleotide
  Sense strand starting at position 3960 of SEQ ID NO: 586145
ccagaucccuggcuggaau

SEQ ID NO: 695615 - RNA, 19 nt, Artificial Sequence
  Description of Artificial Sequence: Synthetic oligonucleotide
  Antisense strand to SEQ ID NO: 695614
auuccagccagggaucugg

SEQ ID NO: 695616 - RNA, 19 nt, Artificial Sequence
  Description of Artificial Sequence: Synthetic oligonucleotide
  Sense strand starting at position 90 of SEQ ID NO: 586146
ggaagcguucccuagguua

SEQ ID NO: 695617 - RNA, 19 nt, Artificial Sequence
  Description of Artificial Sequence: Synthetic oligonucleotide
  Antisense strand to SEQ ID NO: 695616
uaaccuagggaacgcuucc

SEQ ID NO: 695618 - RNA, 19 nt, Artificial Sequence
  Description of Artificial Sequence: Synthetic oligonucleotide
  Sense strand starting at position 335 of SEQ ID NO: 586146
cccagagaccauugucuaa

SEQ ID NO: 695619 - RNA, 19 nt, Artificial Sequence
  Description of Artificial Sequence: Synthetic oligonucleotide
  Antisense strand to SEQ ID NO: 695618
uuagacaauggucucuggg

SEQ ID NO: 695620 - RNA, 19 nt, Artificial Sequence
  Description of Artificial Sequence: Synthetic oligonucleotide
  Sense strand starting at position 337 of SEQ ID NO: 586146
cagagaccauugucuaaug

SEQ ID NO: 695621 - RNA, 19 nt, Artificial Sequence
  Description of Artificial Sequence: Synthetic oligonucleotide
  Antisense strand to SEQ ID NO: 695620
cauuagacaauggucucug

SEQ ID NO: 695622 - RNA, 19 nt, Artificial Sequence
  Description of Artificial Sequence: Synthetic oligonucleotide
  Sense strand starting at position 339 of SEQ ID NO: 586146
gagaccauugucuaaugca

SEQ ID NO: 695623 - RNA, 19 nt, Artificial Sequence
  Description of Artificial Sequence: Synthetic oligonucleotide
  Antisense strand to SEQ ID NO: 695622
ugcauuagacaauggucuc

SEQ ID NO: 695624 - RNA, 19 nt, Artificial Sequence
  Description of Artificial Sequence: Synthetic oligonucleotide
  Sense strand starting at position 342 of SEQ ID NO: 586146
accauugucuaaugcaaag

SEQ ID NO: 695625 - RNA, 19 nt, Artificial Sequence
  Description of Artificial Sequence: Synthetic oligonucleotide
  Antisense strand to SEQ ID NO: 695624
cuuugcauuagacaauggu

SEQ ID NO: 695626 - RNA, 19 nt, Artificial Sequence
  Description of Artificial Sequence: Synthetic oligonucleotide
  Sense strand starting at position 419 of SEQ ID NO: 586146
cuguguugagcucaguuua

SEQ ID NO: 695627 - RNA, 19 nt, Artificial Sequence
  Description of Artificial Sequence: Synthetic oligonucleotide
  Antisense strand to SEQ ID NO: 695626
uaaacugagcucaacacag

SEQ ID NO: 695628 - RNA, 19 nt, Artificial Sequence
  Description of Artificial Sequence: Synthetic oligonucleotide
  Sense strand starting at position 536 of SEQ ID NO: 586146
ugcgcaaggucaugcuaaa

SEQ ID NO: 695629 - RNA, 19 nt, Artificial Sequence
  Description of Artificial Sequence: Synthetic oligonucleotide
  Antisense strand to SEQ ID NO: 695628
uuuagcaugaccuugcgca

SEQ ID NO: 695630 - RNA, 19 nt, Artificial Sequence
  Description of Artificial Sequence: Synthetic oligonucleotide
  Sense strand starting at position 656 of SEQ ID NO: 586146
agagacuaggccugaaagu

SEQ ID NO: 695631 - RNA, 19 nt, Artificial Sequence
  Description of Artificial Sequence: Synthetic oligonucleotide
  Antisense strand to SEQ ID NO: 695630
acuuucaggccuagucucu

SEQ ID NO: 695632 - RNA, 19 nt, Artificial Sequence
  Description of Artificial Sequence: Synthetic oligonucleotide
  Sense strand starting at position 665 of SEQ ID NO: 586146
gccugaaagugcuggcagu

SEQ ID NO: 695633 - RNA, 19 nt, Artificial Sequence
  Description of Artificial Sequence: Synthetic oligonucleotide
  Antisense strand to SEQ ID NO: 695632
acugccagcacuuucaggc

SEQ ID NO: 695634 - RNA, 19 nt, Artificial Sequence
  Description of Artificial Sequence: Synthetic oligonucleotide
  Sense strand starting at position 711 of SEQ ID NO: 586146
aggccucaguuuccugauu

SEQ ID NO: 695635 - RNA, 19 nt, Artificial Sequence
  Description of Artificial Sequence: Synthetic oligonucleotide
  Antisense strand to SEQ ID NO: 695634
aaucaggaaacugaggccu

SEQ ID NO: 695636 - RNA, 19 nt, Artificial Sequence
  Description of Artificial Sequence: Synthetic oligonucleotide
  Sense strand starting at position 713 of SEQ ID NO: 586146
gccucaguuuccugauuuc

SEQ ID NO: 695637 - RNA, 19 nt, Artificial Sequence
  Description of Artificial Sequence: Synthetic oligonucleotide
  Antisense strand to SEQ ID NO: 695636
gaaaucaggaaacugaggc

SEQ ID NO: 695638 - RNA, 19 nt, Artificial Sequence
  Description of Artificial Sequence: Synthetic oligonucleotide
  Sense strand starting at position 791 of SEQ ID NO: 586146
ucaggcuuaccaugggaca

SEQ ID NO: 695639 - RNA, 19 nt, Artificial Sequence
  Description of Artificial Sequence: Synthetic oligonucleotide
  Antisense strand to SEQ ID NO: 695638
ugucccaugguaagccuga

SEQ ID NO: 695640 - RNA, 19 nt, Artificial Sequence
  Description of Artificial Sequence: Synthetic oligonucleotide
  Sense strand starting at position 919 of SEQ ID NO: 586146
guagucaaucugugaggga

SEQ ID NO: 695641 - RNA, 19 nt, Artificial Sequence
  Description of Artificial Sequence: Synthetic oligonucleotide
  Antisense strand to SEQ ID NO: 695640
ucccucacagauugacuac

SEQ ID NO: 695642 - RNA, 19 nt, Artificial Sequence
  Description of Artificial Sequence: Synthetic oligonucleotide
  Sense strand starting at position 920 of SEQ ID NO: 586146
uagucaaucugugagggaa

SEQ ID NO: 695643 - RNA, 19 nt, Artificial Sequence
  Description of Artificial Sequence: Synthetic oligonucleotide
  Antisense strand to SEQ ID NO: 695642
uucccucacagauugacua

SEQ ID NO: 695644 - RNA, 19 nt, Artificial Sequence
  Description of Artificial Sequence: Synthetic oligonucleotide
  Sense strand starting at position 922 of SEQ ID NO: 586146
gucaaucugugagggaaag

SEQ ID NO: 695645 - RNA, 19 nt, Artificial Sequence
  Description of Artificial Sequence: Synthetic oligonucleotide
  Antisense strand to SEQ ID NO: 695644
cuuucccucacagauugac

SEQ ID NO: 695646 - RNA, 19 nt, Artificial Sequence
  Description of Artificial Sequence: Synthetic oligonucleotide
  Sense strand starting at position 960 of SEQ ID NO: 586146
ggcagagagucauagguga

SEQ ID NO: 695647 - RNA, 19 nt, Artificial Sequence
  Description of Artificial Sequence: Synthetic oligonucleotide
  Antisense strand to SEQ ID NO: 695646
ucaccuaugacucucugcc

SEQ ID NO: 695648 - RNA, 19 nt, Artificial Sequence
  Description of Artificial Sequence: Synthetic oligonucleotide
  Sense strand starting at position 962 of SEQ ID NO: 586146
cagagagucauaggugaag

SEQ ID NO: 695649 - RNA, 19 nt, Artificial Sequence
  Description of Artificial Sequence: Synthetic oligonucleotide
  Antisense strand to SEQ ID NO: 695648
cuucaccuaugacucucug

SEQ ID NO: 695650 - RNA, 19 nt, Artificial Sequence
  Description of Artificial Sequence: Synthetic oligonucleotide
  Sense strand starting at position 2020 of SEQ ID NO: 586146
gucucuuuccuugguccaa

SEQ ID NO: 695651 - RNA, 19 nt, Artificial Sequence
  Description of Artificial Sequence: Synthetic oligonucleotide
  Antisense strand to SEQ ID NO: 695650
uuggaccaaggaaagagac

SEQ ID NO: 695652 - RNA, 19 nt, Artificial Sequence
  Description of Artificial Sequence: Synthetic oligonucleotide
  Sense strand starting at position 2493 of SEQ ID NO: 586146
gagugucuccaaggccaua

SEQ ID NO: 695653 - RNA, 19 nt, Artificial Sequence
  Description of Artificial Sequence: Synthetic oligonucleotide
  Antisense strand to SEQ ID NO: 695652
uauggccuuggagacacuc

SEQ ID NO: 695654 - RNA, 19 nt, Artificial Sequence
  Description of Artificial Sequence: Synthetic oligonucleotide
  Sense strand starting at position 2742 of SEQ ID NO: 586146
cccuuucugucccaagguu

SEQ ID NO: 695655 - RNA, 19 nt, Artificial Sequence
  Description of Artificial Sequence: Synthetic oligonucleotide
  Antisense strand to SEQ ID NO: 695654
aaccuugggacagaaaggg

SEQ ID NO: 695656 - RNA, 19 nt, Artificial Sequence
  Description of Artificial Sequence: Synthetic oligonucleotide
  Sense strand starting at position 2772 of SEQ ID NO: 586146
gcagaagcccuguguucag

SEQ ID NO: 695657 - RNA, 19 nt, Artificial Sequence
  Description of Artificial Sequence: Synthetic oligonucleotide
  Antisense strand to SEQ ID NO: 695656
cugaacacagggcuucugc

SEQ ID NO: 695658 - RNA, 19 nt, Artificial Sequence
  Description of Artificial Sequence: Synthetic oligonucleotide
  Sense strand starting at position 2790 of SEQ ID NO: 586146
gguucugacucuucuacuu

SEQ ID NO: 695659 - RNA, 19 nt, Artificial Sequence
  Description of Artificial Sequence: Synthetic oligonucleotide
  Antisense strand to SEQ ID NO: 695658
aaguagaagagucagaacc

SEQ ID NO: 695660 - RNA, 19 nt, Artificial Sequence
  Description of Artificial Sequence: Synthetic oligonucleotide
  Sense strand starting at position 2942 of SEQ ID NO: 586146
ggaaagaguugucgacgca

SEQ ID NO: 695661 - RNA, 19 nt, Artificial Sequence
  Description of Artificial Sequence: Synthetic oligonucleotide
  Antisense strand to SEQ ID NO: 695660
ugcgucgacaacucuuucc

SEQ ID NO: 695662 - RNA, 19 nt, Artificial Sequence
  Description of Artificial Sequence: Synthetic oligonucleotide
  Sense strand starting at position 2945 of SEQ ID NO: 586146
aagaguugucgacgcagga

SEQ ID NO: 695663 - RNA, 19 nt, Artificial Sequence
  Description of Artificial Sequence: Synthetic oligonucleotide
  Antisense strand to SEQ ID NO: 695662
uccugcgucgacaacucuu

SEQ ID NO: 695664 - RNA, 19 nt, Artificial Sequence
  Description of Artificial Sequence: Synthetic oligonucleotide
  Sense strand starting at position 2995 of SEQ ID NO: 586146
gguucuucucauugugugu

SEQ ID NO: 695665 - RNA, 19 nt, Artificial Sequence
  Description of Artificial Sequence: Synthetic oligonucleotide
  Antisense strand to SEQ ID NO: 695664
acacacaaugagaagaacc

SEQ ID NO: 695666 - RNA, 19 nt, Artificial Sequence
  Description of Artificial Sequence: Synthetic oligonucleotide
  Sense strand starting at position 3193 of SEQ ID NO: 586146
gcucguggcuccuucuauu

SEQ ID NO: 695667 - RNA, 19 nt, Artificial Sequence
  Description of Artificial Sequence: Synthetic oligonucleotide
  Antisense strand to SEQ ID NO: 695666
aauagaaggagccacgagc

SEQ ID NO: 695668 - RNA, 19 nt, Artificial Sequence
  Description of Artificial Sequence: Synthetic oligonucleotide
  Sense strand starting at position 3240 of SEQ ID NO: 586146
cuaauugcuagcuggcaga

SEQ ID NO: 695669 - RNA, 19 nt, Artificial Sequence
  Description of Artificial Sequence: Synthetic oligonucleotide
  Antisense strand to SEQ ID NO: 695668
ucugccagcuagcaauuag

SEQ ID NO: 695670 - RNA, 19 nt, Artificial Sequence
  Description of Artificial Sequence: Synthetic oligonucleotide
  Sense strand starting at position 3291 of SEQ ID NO: 586146
uggagucaucgcuguaagu

SEQ ID NO: 695671 - RNA, 19 nt, Artificial Sequence
  Description of Artificial Sequence: Synthetic oligonucleotide
  Antisense strand to SEQ ID NO: 695670
acuuacagcgaugacucca

SEQ ID NO: 695672 - RNA, 19 nt, Artificial Sequence
  Description of Artificial Sequence: Synthetic oligonucleotide
  Sense strand starting at position 3380 of SEQ ID NO: 586146
gguucuuaaccaggugcga

SEQ ID NO: 695673 - RNA, 19 nt, Artificial Sequence
  Description of Artificial Sequence: Synthetic oligonucleotide
  Antisense strand to SEQ ID NO: 695672
ucgcaccugguuaagaacc

SEQ ID NO: 695674 - RNA, 19 nt, Artificial Sequence
  Description of Artificial Sequence: Synthetic oligonucleotide
  Sense strand starting at position 3477 of SEQ ID NO: 586146
uacucugaguccuugggaa

SEQ ID NO: 695675 - RNA, 19 nt, Artificial Sequence
  Description of Artificial Sequence: Synthetic oligonucleotide
  Antisense strand to SEQ ID NO: 695674
uucccaaggacucagagua

SEQ ID NO: 695676 - RNA, 19 nt, Artificial Sequence
  Description of Artificial Sequence: Synthetic oligonucleotide
  Sense strand starting at position 3538 of SEQ ID NO: 586146
cuucgugacugcugagaac

SEQ ID NO: 695677 - RNA, 19 nt, Artificial Sequence
  Description of Artificial Sequence: Synthetic oligonucleotide
  Antisense strand to SEQ ID NO: 695676
guucucagcagucacgaag

SEQ ID NO: 695678 - RNA, 19 nt, Artificial Sequence
  Description of Artificial Sequence: Synthetic oligonucleotide
  Sense strand starting at position 3716 of SEQ ID NO: 586146
cacucaaaggccuguugaa

SEQ ID NO: 695679 - RNA, 19 nt, Artificial Sequence
  Description of Artificial Sequence: Synthetic oligonucleotide
  Antisense strand to SEQ ID NO: 695678
uucaacaggccuuugagug

SEQ ID NO: 695680 - RNA, 19 nt, Artificial Sequence
  Description of Artificial Sequence: Synthetic oligonucleotide
  Sense strand starting at position 3770 of SEQ ID NO: 586146
aaauguacguuacuguuua

SEQ ID NO: 695681 - RNA, 19 nt, Artificial Sequence
  Description of Artificial Sequence: Synthetic oligonucleotide
  Antisense strand to SEQ ID NO: 695680
uaaacaguaacguacauuu

SEQ ID NO: 695682 - RNA, 19 nt, Artificial Sequence
  Description of Artificial Sequence: Synthetic oligonucleotide
  Sense strand starting at position 3774 of SEQ ID NO: 586146
guacguuacuguuuacaac

SEQ ID NO: 695683 - RNA, 19 nt, Artificial Sequence
  Description of Artificial Sequence: Synthetic oligonucleotide
  Antisense strand to SEQ ID NO: 695682
guuguaaacaguaacguac

SEQ ID NO: 695684 - RNA, 19 nt, Artificial Sequence
  Description of Artificial Sequence: Synthetic oligonucleotide
  Sense strand starting at position 3823 of SEQ ID NO: 586146
gacaguucccauuguaguc

SEQ ID NO: 695685 - RNA, 19 nt, Artificial Sequence
  Description of Artificial Sequence: Synthetic oligonucleotide
  Antisense strand to SEQ ID NO: 695684
gacuacaaugggaacuguc

SEQ ID NO: 695686 - RNA, 19 nt, Artificial Sequence
  Description of Artificial Sequence: Synthetic oligonucleotide
  Sense strand starting at position 104 of SEQ ID NO: 586147
ggaagcguucccuagguua

SEQ ID NO: 695687 - RNA, 19 nt, Artificial Sequence
  Description of Artificial Sequence: Synthetic oligonucleotide
  Antisense strand to SEQ ID NO: 695686
uaaccuagggaacgcuucc

SEQ ID NO: 695688 - RNA, 19 nt, Artificial Sequence
  Description of Artificial Sequence: Synthetic oligonucleotide
  Sense strand starting at position 349 of SEQ ID NO: 586147
cccagagaccauugucuaa

SEQ ID NO: 695689 - RNA, 19 nt, Artificial Sequence
  Description of Artificial Sequence: Synthetic oligonucleotide
  Antisense strand to SEQ ID NO: 695688
uuagacaauggucucuggg

SEQ ID NO: 695690 - RNA, 19 nt, Artificial Sequence
  Description of Artificial Sequence: Synthetic oligonucleotide
  Sense strand starting at position 351 of SEQ ID NO: 586147
cagagaccauugucuaaug

SEQ ID NO: 695691 - RNA, 19 nt, Artificial Sequence
  Description of Artificial Sequence: Synthetic oligonucleotide
  Antisense strand to SEQ ID NO: 695690
cauuagacaauggucucug

SEQ ID NO: 695692 - RNA, 19 nt, Artificial Sequence
  Description of Artificial Sequence: Synthetic oligonucleotide
  Sense strand starting at position 353 of SEQ ID NO: 586147
gagaccauugucuaaugca

SEQ ID NO: 695693 - RNA, 19 nt, Artificial Sequence
  Description of Artificial Sequence: Synthetic oligonucleotide
  Antisense strand to SEQ ID NO: 695692
ugcauuagacaauggucuc

SEQ ID NO: 695694 - RNA, 19 nt, Artificial Sequence
  Description of Artificial Sequence: Synthetic oligonucleotide
  Sense strand starting at position 356 of SEQ ID NO: 586147
accauugucuaaugcaaag

SEQ ID NO: 695695 - RNA, 19 nt, Artificial Sequence
  Description of Artificial Sequence: Synthetic oligonucleotide
  Antisense strand to SEQ ID NO: 695694
cuuugcauuagacaauggu

SEQ ID NO: 695696 - RNA, 19 nt, Artificial Sequence
  Description of Artificial Sequence: Synthetic oligonucleotide
  Sense strand starting at position 433 of SEQ ID NO: 586147
cuguguugagcucaguuua

SEQ ID NO: 695697 - RNA, 19 nt, Artificial Sequence
  Description of Artificial Sequence: Synthetic oligonucleotide
  Antisense strand to SEQ ID NO: 695696
uaaacugagcucaacacag

SEQ ID NO: 695698 - RNA, 19 nt, Artificial Sequence
  Description of Artificial Sequence: Synthetic oligonucleotide
  Sense strand starting at position 550 of SEQ ID NO: 586147
ugcgcaaggucaugcuaaa

SEQ ID NO: 695699 - RNA, 19 nt, Artificial Sequence
  Description of Artificial Sequence: Synthetic oligonucleotide
  Antisense strand to SEQ ID NO: 695698
uuuagcaugaccuugcgca

SEQ ID NO: 695700 - RNA, 19 nt, Artificial Sequence
  Description of Artificial Sequence: Synthetic oligonucleotide
  Sense strand starting at position 670 of SEQ ID NO: 586147
agagacuaggccugaaagu

SEQ ID NO: 695701 - RNA, 19 nt, Artificial Sequence
  Description of Artificial Sequence: Synthetic oligonucleotide
  Antisense strand to SEQ ID NO: 695700
acuuucaggccuagucucu

SEQ ID NO: 695702 - RNA, 19 nt, Artificial Sequence
  Description of Artificial Sequence: Synthetic oligonucleotide
  Sense strand starting at position 679 of SEQ ID NO: 586147
gccugaaagugcuggcagu

SEQ ID NO: 695703 - RNA, 19 nt, Artificial Sequence
  Description of Artificial Sequence: Synthetic oligonucleotide
  Antisense strand to SEQ ID NO: 695702
acugccagcacuuucaggc

SEQ ID NO: 695704 - RNA, 19 nt, Artificial Sequence
  Description of Artificial Sequence: Synthetic oligonucleotide
  Sense strand starting at position 725 of SEQ ID NO: 586147
aggccucaguuuccugauu

SEQ ID NO: 695705 - RNA, 19 nt, Artificial Sequence
  Description of Artificial Sequence: Synthetic oligonucleotide
  Antisense strand to SEQ ID NO: 695704
aaucaggaaacugaggccu

SEQ ID NO: 695706 - RNA, 19 nt, Artificial Sequence
  Description of Artificial Sequence: Synthetic oligonucleotide
  Sense strand starting at position 727 of SEQ ID NO: 586147
gccucaguuuccugauuuc

SEQ ID NO: 695707 - RNA, 19 nt, Artificial Sequence
  Description of Artificial Sequence: Synthetic oligonucleotide
  Antisense strand to SEQ ID NO: 695706
gaaaucaggaaacugaggc

SEQ ID NO: 695708 - RNA, 19 nt, Artificial Sequence
  Description of Artificial Sequence: Synthetic oligonucleotide
  Sense strand starting at position 805 of SEQ ID NO: 586147
ucaggcuuaccaugggaca

SEQ ID NO: 695709 - RNA, 19 nt, Artificial Sequence
  Description of Artificial Sequence: Synthetic oligonucleotide
  Antisense strand to SEQ ID NO: 695708
ugucccaugguaagccuga

SEQ ID NO: 695710 - RNA, 19 nt, Artificial Sequence
  Description of Artificial Sequence: Synthetic oligonucleotide
  Sense strand starting at position 933 of SEQ ID NO: 586147
guagucaaucugugaggga

SEQ ID NO: 695711 - RNA, 19 nt, Artificial Sequence
  Description of Artificial Sequence: Synthetic oligonucleotide
  Antisense strand to SEQ ID NO: 695710
ucccucacagauugacuac

SEQ ID NO: 695712 - RNA, 19 nt, Artificial Sequence
  Description of Artificial Sequence: Synthetic oligonucleotide
  Sense strand starting at position 934 of SEQ ID NO: 586147
uagucaaucugugagggaa

SEQ ID NO: 695713 - RNA, 19 nt, Artificial Sequence
  Description of Artificial Sequence: Synthetic oligonucleotide
  Antisense strand to SEQ ID NO: 695712
uucccucacagauugacua

SEQ ID NO: 695714 - RNA, 19 nt, Artificial Sequence
  Description of Artificial Sequence: Synthetic oligonucleotide
  Sense strand starting at position 936 of SEQ ID NO: 586147
gucaaucugugagggaaag

SEQ ID NO: 695715 - RNA, 19 nt, Artificial Sequence
  Description of Artificial Sequence: Synthetic oligonucleotide
  Antisense strand to SEQ ID NO: 695714
cuuucccucacagauugac

SEQ ID NO: 695716 - RNA, 19 nt, Artificial Sequence
  Description of Artificial Sequence: Synthetic oligonucleotide
  Sense strand starting at position 974 of SEQ ID NO: 586147
ggcagagagucauagguga

SEQ ID NO: 695717 - RNA, 19 nt, Artificial Sequence
  Description of Artificial Sequence: Synthetic oligonucleotide
  Antisense strand to SEQ ID NO: 695716
ucaccuaugacucucugcc

SEQ ID NO: 695718 - RNA, 19 nt, Artificial Sequence
  Description of Artificial Sequence: Synthetic oligonucleotide
  Sense strand starting at position 976 of SEQ ID NO: 586147
cagagagucauaggugaag

SEQ ID NO: 695719 - RNA, 19 nt, Artificial Sequence
  Description of Artificial Sequence: Synthetic oligonucleotide
  Antisense strand to SEQ ID NO: 695718
cuucaccuaugacucucug

SEQ ID NO: 695720 - RNA, 19 nt, Artificial Sequence
  Description of Artificial Sequence: Synthetic oligonucleotide
  Sense strand starting at position 2034 of SEQ ID NO: 586147
gucucuuuccuugguccaa

SEQ ID NO: 695721 - RNA, 19 nt, Artificial Sequence
  Description of Artificial Sequence: Synthetic oligonucleotide
  Antisense strand to SEQ ID NO: 695720
uuggaccaaggaaagagac

SEQ ID NO: 695722 - RNA, 19 nt, Artificial Sequence
  Description of Artificial Sequence: Synthetic oligonucleotide
  Sense strand starting at position 2507 of SEQ ID NO: 586147
gagugucuccaaggccaua

SEQ ID NO: 695723 - RNA, 19 nt, Artificial Sequence
  Description of Artificial Sequence: Synthetic oligonucleotide
  Antisense strand to SEQ ID NO: 695722
uauggccuuggagacacuc

SEQ ID NO: 695724 - RNA, 19 nt, Artificial Sequence
  Description of Artificial Sequence: Synthetic oligonucleotide
  Sense strand starting at position 2756 of SEQ ID NO: 586147
cccuuucugucccaagguu

SEQ ID NO: 695725 - RNA, 19 nt, Artificial Sequence
  Description of Artificial Sequence: Synthetic oligonucleotide
  Antisense strand to SEQ ID NO: 695724
aaccuugggacagaaaggg

SEQ ID NO: 695726 - RNA, 19 nt, Artificial Sequence
  Description of Artificial Sequence: Synthetic oligonucleotide
  Sense strand starting at position 2786 of SEQ ID NO: 586147
gcagaagcccuguguucag

SEQ ID NO: 695727 - RNA, 19 nt, Artificial Sequence
  Description of Artificial Sequence: Synthetic oligonucleotide
  Antisense strand to SEQ ID NO: 695726
cugaacacagggcuucugc

SEQ ID NO: 695728 - RNA, 19 nt, Artificial Sequence
  Description of Artificial Sequence: Synthetic oligonucleotide
  Sense strand starting at position 2804 of SEQ ID NO: 586147
gguucugacucuucuacuu

SEQ ID NO: 695729 - RNA, 19 nt, Artificial Sequence
  Description of Artificial Sequence: Synthetic oligonucleotide
  Antisense strand to SEQ ID NO: 695728
aaguagaagagucagaacc

SEQ ID NO: 695730 - RNA, 19 nt, Artificial Sequence
  Description of Artificial Sequence: Synthetic oligonucleotide
  Sense strand starting at position 2956 of SEQ ID NO: 586147
ggaaagaguugucgacgca

SEQ ID NO: 695731 - RNA, 19 nt, Artificial Sequence
  Description of Artificial Sequence: Synthetic oligonucleotide
  Antisense strand to SEQ ID NO: 695730
ugcgucgacaacucuuucc

SEQ ID NO: 695732 - RNA, 19 nt, Artificial Sequence
  Description of Artificial Sequence: Synthetic oligonucleotide
  Sense strand starting at position 2959 of SEQ ID NO: 586147
aagaguugucgacgcagga

SEQ ID NO: 695733 - RNA, 19 nt, Artificial Sequence
  Description of Artificial Sequence: Synthetic oligonucleotide
  Antisense strand to SEQ ID NO: 695732
uccugcgucgacaacucuu

SEQ ID NO: 695734 - RNA, 19 nt, Artificial Sequence
  Description of Artificial Sequence: Synthetic oligonucleotide
  Sense strand starting at position 3009 of SEQ ID NO: 586147
gguucuucucauugugugu

SEQ ID NO: 695735 - RNA, 19 nt, Artificial Sequence
  Description of Artificial Sequence: Synthetic oligonucleotide
  Antisense strand to SEQ ID NO: 695734
acacacaaugagaagaacc

SEQ ID NO: 695736 - RNA, 19 nt, Artificial Sequence
  Description of Artificial Sequence: Synthetic oligonucleotide
  Sense strand starting at position 3207 of SEQ ID NO: 586147
gcucguggcuccuucuauu

SEQ ID NO: 695737 - RNA, 19 nt, Artificial Sequence
  Description of Artificial Sequence: Synthetic oligonucleotide
  Antisense strand to SEQ ID NO: 695736
aauagaaggagccacgagc

SEQ ID NO: 695738 - RNA, 19 nt, Artificial Sequence
  Description of Artificial Sequence: Synthetic oligonucleotide
  Sense strand starting at position 3254 of SEQ ID NO: 586147
cuaauugcuagcuggcaga

SEQ ID NO: 695739 - RNA, 19 nt, Artificial Sequence
  Description of Artificial Sequence: Synthetic oligonucleotide
  Antisense strand to SEQ ID NO: 695738
ucugccagcuagcaauuag

SEQ ID NO: 695740 - RNA, 19 nt, Artificial Sequence
  Description of Artificial Sequence: Synthetic oligonucleotide
  Sense strand starting at position 3305 of SEQ ID NO: 586147
uggagucaucgcuguaagu

SEQ ID NO: 695741 - RNA, 19 nt, Artificial Sequence
  Description of Artificial Sequence: Synthetic oligonucleotide
  Antisense strand to SEQ ID NO: 695740
acuuacagcgaugacucca

SEQ ID NO: 695742 - RNA, 19 nt, Artificial Sequence
  Description of Artificial Sequence: Synthetic oligonucleotide
  Sense strand starting at position 3394 of SEQ ID NO: 586147
gguucuuaaccaggugcga

SEQ ID NO: 695743 - RNA, 19 nt, Artificial Sequence
  Description of Artificial Sequence: Synthetic oligonucleotide
  Antisense strand to SEQ ID NO: 695742
ucgcaccugguuaagaacc

SEQ ID NO: 695744 - RNA, 19 nt, Artificial Sequence
  Description of Artificial Sequence: Synthetic oligonucleotide
  Sense strand starting at position 3491 of SEQ ID NO: 586147
uacucugaguccuugggaa

SEQ ID NO: 695745 - RNA, 19 nt, Artificial Sequence
  Description of Artificial Sequence: Synthetic oligonucleotide
  Antisense strand to SEQ ID NO: 695744
uucccaaggacucagagua

SEQ ID NO: 695746 - RNA, 19 nt, Artificial Sequence
  Description of Artificial Sequence: Synthetic oligonucleotide
  Sense strand starting at position 3552 of SEQ ID NO: 586147
cuucgugacugcugagaac

SEQ ID NO: 695747 - RNA, 19 nt, Artificial Sequence
  Description of Artificial Sequence: Synthetic oligonucleotide
  Antisense strand to SEQ ID NO: 695746
guucucagcagucacgaag

SEQ ID NO: 695748 - RNA, 19 nt, Artificial Sequence
  Description of Artificial Sequence: Synthetic oligonucleotide
  Sense strand starting at position 3730 of SEQ ID NO: 586147
cacucaaaggccuguugaa

SEQ ID NO: 695749 - RNA, 19 nt, Artificial Sequence
  Description of Artificial Sequence: Synthetic oligonucleotide
  Antisense strand to SEQ ID NO: 695748
uucaacaggccuuugagug

SEQ ID NO: 695750 - RNA, 19 nt, Artificial Sequence
  Description of Artificial Sequence: Synthetic oligonucleotide
  Sense strand starting at position 3784 of SEQ ID NO: 586147
aaauguacguuacuguuua

SEQ ID NO: 695751 - RNA, 19 nt, Artificial Sequence
  Description of Artificial Sequence: Synthetic oligonucleotide
  Antisense strand to SEQ ID NO: 695750
uaaacaguaacguacauuu

SEQ ID NO: 695752 - RNA, 19 nt, Artificial Sequence
  Description of Artificial Sequence: Synthetic oligonucleotide
  Sense strand starting at position 3788 of SEQ ID NO: 586147
guacguuacuguuuacaac

SEQ ID NO: 695753 - RNA, 19 nt, Artificial Sequence
  Description of Artificial Sequence: Synthetic oligonucleotide
  Antisense strand to SEQ ID NO: 695752
guuguaaacaguaacguac

SEQ ID NO: 695754 - RNA, 19 nt, Artificial Sequence
  Description of Artificial Sequence: Synthetic oligonucleotide
  Sense strand starting at position 3837 of SEQ ID NO: 586147
gacaguucccauuguaguc

SEQ ID NO: 695755 - RNA, 19 nt, Artificial Sequence
  Description of Artificial Sequence: Synthetic oligonucleotide
  Antisense strand to SEQ ID NO: 695754
gacuacaaugggaacuguc

SEQ ID NO: 695756 - RNA, 19 nt, Artificial Sequence
  Description of Artificial Sequence: Synthetic oligonucleotide
  Sense strand starting at position 9 of SEQ ID NO: 586148
cgucuaaacuggcuaaagu

SEQ ID NO: 695757 - RNA, 19 nt, Artificial Sequence
  Description of Artificial Sequence: Synthetic oligonucleotide
  Antisense strand to SEQ ID NO: 695756
acuuuagccaguuuagacg

SEQ ID NO: 695758 - RNA, 19 nt, Artificial Sequence
  Description of Artificial Sequence: Synthetic oligonucleotide
  Sense strand starting at position 56 of SEQ ID NO: 586148
caaucuugggccuagcaga

SEQ ID NO: 695759 - RNA, 19 nt, Artificial Sequence
  Description of Artificial Sequence: Synthetic oligonucleotide
  Antisense strand to SEQ ID NO: 695758
ucugcuaggcccaagauug

SEQ ID NO: 695760 - RNA, 19 nt, Artificial Sequence
  Description of Artificial Sequence: Synthetic oligonucleotide
  Sense strand starting at position 329 of SEQ ID NO: 586148
gccucaucucucuagacga

SEQ ID NO: 695761 - RNA, 19 nt, Artificial Sequence
  Description of Artificial Sequence: Synthetic oligonucleotide
  Antisense strand to SEQ ID NO: 695760
ucgucuagagagaugaggc

SEQ ID NO: 695762 - RNA, 19 nt, Artificial Sequence
  Description of Artificial Sequence: Synthetic oligonucleotide
  Sense strand starting at position 496 of SEQ ID NO: 586148
ugaguuugcacuugucuga

SEQ ID NO: 695763 - RNA, 19 nt, Artificial Sequence
  Description of Artificial Sequence: Synthetic oligonucleotide
  Antisense strand to SEQ ID NO: 695762
ucagacaagugcaaacuca

SEQ ID NO: 695764 - RNA, 19 nt, Artificial Sequence
  Description of Artificial Sequence: Synthetic oligonucleotide
  Sense strand starting at position 499 of SEQ ID NO: 586148
guuugcacuugucugagga

SEQ ID NO: 695765 - RNA, 19 nt, Artificial Sequence
  Description of Artificial Sequence: Synthetic oligonucleotide
  Antisense strand to SEQ ID NO: 695764
uccucagacaagugcaaac

SEQ ID NO: 695766 - RNA, 19 nt, Artificial Sequence
  Description of Artificial Sequence: Synthetic oligonucleotide
  Sense strand starting at position 560 of SEQ ID NO: 586148
gggccaauuugccaugcua

SEQ ID NO: 695767 - RNA, 19 nt, Artificial Sequence
  Description of Artificial Sequence: Synthetic oligonucleotide
  Antisense strand to SEQ ID NO: 695766
uagcauggcaaauuggccc

SEQ ID NO: 695768 - RNA, 19 nt, Artificial Sequence
  Description of Artificial Sequence: Synthetic oligonucleotide
  Sense strand starting at position 562 of SEQ ID NO: 586148
gccaauuugccaugcuaag

SEQ ID NO: 695769 - RNA, 19 nt, Artificial Sequence
  Description of Artificial Sequence: Synthetic oligonucleotide
  Antisense strand to SEQ ID NO: 695768
cuuagcauggcaaauuggc

SEQ ID NO: 695770 - RNA, 19 nt, Artificial Sequence
  Description of Artificial Sequence: Synthetic oligonucleotide
  Sense strand starting at position 622 of SEQ ID NO: 586148
ccagcaucugcuugucauu

SEQ ID NO: 695771 - RNA, 19 nt, Artificial Sequence
  Description of Artificial Sequence: Synthetic oligonucleotide
  Antisense strand to SEQ ID NO: 695770
aaugacaagcagaugcugg

SEQ ID NO: 695772 - RNA, 19 nt, Artificial Sequence
  Description of Artificial Sequence: Synthetic oligonucleotide
  Sense strand starting at position 627 of SEQ ID NO: 586148
aucugcuugucauuaguga

SEQ ID NO: 695773 - RNA, 19 nt, Artificial Sequence
  Description of Artificial Sequence: Synthetic oligonucleotide
  Antisense strand to SEQ ID NO: 695772
ucacuaaugacaagcagau

SEQ ID NO: 695774 - RNA, 19 nt, Artificial Sequence
  Description of Artificial Sequence: Synthetic oligonucleotide
  Sense strand starting at position 754 of SEQ ID NO: 586148
agagacucaugcuggcaaa

SEQ ID NO: 695775 - RNA, 19 nt, Artificial Sequence
  Description of Artificial Sequence: Synthetic oligonucleotide
  Antisense strand to SEQ ID NO: 695774
uuugccagcaugagucucu

SEQ ID NO: 695776 - RNA, 19 nt, Artificial Sequence
  Description of Artificial Sequence: Synthetic oligonucleotide
  Sense strand starting at position 976 of SEQ ID NO: 586148
gagggccuuucucuugauu

SEQ ID NO: 695777 - RNA, 19 nt, Artificial Sequence
  Description of Artificial Sequence: Synthetic oligonucleotide
  Antisense strand to SEQ ID NO: 695776
aaucaagagaaaggcccuc

SEQ ID NO: 695778 - RNA, 19 nt, Artificial Sequence
  Description of Artificial Sequence: Synthetic oligonucleotide
  Sense strand starting at position 985 of SEQ ID NO: 586148
ucucuugauuccuagaggu

SEQ ID NO: 695779 - RNA, 19 nt, Artificial Sequence
  Description of Artificial Sequence: Synthetic oligonucleotide
  Antisense strand to SEQ ID NO: 695778
accucuaggaaucaagaga

SEQ ID NO: 695780 - RNA, 19 nt, Artificial Sequence
  Description of Artificial Sequence: Synthetic oligonucleotide
  Sense strand starting at position 989 of SEQ ID NO: 586148
uugauuccuagaggugguu

SEQ ID NO: 695781 - RNA, 19 nt, Artificial Sequence
  Description of Artificial Sequence: Synthetic oligonucleotide
  Antisense strand to SEQ ID NO: 695780
aaccaccucuaggaaucaa

SEQ ID NO: 695782 - RNA, 19 nt, Artificial Sequence
  Description of Artificial Sequence: Synthetic oligonucleotide
  Sense strand starting at position 991 of SEQ ID NO: 586148
gauuccuagaggugguuua

SEQ ID NO: 695783 - RNA, 19 nt, Artificial Sequence
  Description of Artificial Sequence: Synthetic oligonucleotide
  Antisense strand to SEQ ID NO: 695782
uaaaccaccucuaggaauc

SEQ ID NO: 695784 - RNA, 19 nt, Artificial Sequence
  Description of Artificial Sequence: Synthetic oligonucleotide
  Sense strand starting at position 992 of SEQ ID NO: 586148
auuccuagaggugguuuau

SEQ ID NO: 695785 - RNA, 19 nt, Artificial Sequence
  Description of Artificial Sequence: Synthetic oligonucleotide
  Antisense strand to SEQ ID NO: 695784
auaaaccaccucuaggaau

SEQ ID NO: 695786 - RNA, 19 nt, Artificial Sequence
  Description of Artificial Sequence: Synthetic oligonucleotide
  Sense strand starting at position 1002 of SEQ ID NO: 586148
gugguuuauuuggaaacua

SEQ ID NO: 695787 - RNA, 19 nt, Artificial Sequence
  Description of Artificial Sequence: Synthetic oligonucleotide
  Antisense strand to SEQ ID NO: 695786
uaguuuccaaauaaaccac

SEQ ID NO: 695788 - RNA, 19 nt, Artificial Sequence
  Description of Artificial Sequence: Synthetic oligonucleotide
  Sense strand starting at position 1010 of SEQ ID NO: 586148
uuuggaaacuagugugaau

SEQ ID NO: 695789 - RNA, 19 nt, Artificial Sequence
  Description of Artificial Sequence: Synthetic oligonucleotide
  Antisense strand to SEQ ID NO: 695788
auucacacuaguuuccaaa

SEQ ID NO: 695790 - RNA, 19 nt, Artificial Sequence
  Description of Artificial Sequence: Synthetic oligonucleotide
  Sense strand starting at position 1012 of SEQ ID NO: 586148
uggaaacuagugugaauau

SEQ ID NO: 695791 - RNA, 19 nt, Artificial Sequence
  Description of Artificial Sequence: Synthetic oligonucleotide
  Antisense strand to SEQ ID NO: 695790
auauucacacuaguuucca

SEQ ID NO: 695792 - RNA, 19 nt, Artificial Sequence
  Description of Artificial Sequence: Synthetic oligonucleotide
  Sense strand starting at position 1013 of SEQ ID NO: 586148
ggaaacuagugugaauaug

SEQ ID NO: 695793 - RNA, 19 nt, Artificial Sequence
  Description of Artificial Sequence: Synthetic oligonucleotide
  Antisense strand to SEQ ID NO: 695792
cauauucacacuaguuucc

SEQ ID NO: 695794 - RNA, 19 nt, Artificial Sequence
  Description of Artificial Sequence: Synthetic oligonucleotide
  Sense strand starting at position 1271 of SEQ ID NO: 586148
agaccauuauucucuggau

SEQ ID NO: 695795 - RNA, 19 nt, Artificial Sequence
  Description of Artificial Sequence: Synthetic oligonucleotide
  Antisense strand to SEQ ID NO: 695794
auccagagaauaauggucu

SEQ ID NO: 695796 - RNA, 19 nt, Artificial Sequence
  Description of Artificial Sequence: Synthetic oligonucleotide
  Sense strand starting at position 2181 of SEQ ID NO: 586148
ggcagccguugcucuaaua

SEQ ID NO: 695797 - RNA, 19 nt, Artificial Sequence
  Description of Artificial Sequence: Synthetic oligonucleotide
  Antisense strand to SEQ ID NO: 695796
uauuagagcaacggcugcc

SEQ ID NO: 695798 - RNA, 19 nt, Artificial Sequence
  Description of Artificial Sequence: Synthetic oligonucleotide
  Sense strand starting at position 2193 of SEQ ID NO: 586148
ucuaauaggcuuugggaaa

SEQ ID NO: 695799 - RNA, 19 nt, Artificial Sequence
  Description of Artificial Sequence: Synthetic oligonucleotide
  Antisense strand to SEQ ID NO: 695798
uuucccaaagccuauuaga

SEQ ID NO: 695800 - RNA, 19 nt, Artificial Sequence
  Description of Artificial Sequence: Synthetic oligonucleotide
  Sense strand starting at position 2194 of SEQ ID NO: 586148
cuaauaggcuuugggaaau

SEQ ID NO: 695801 - RNA, 19 nt, Artificial Sequence
  Description of Artificial Sequence: Synthetic oligonucleotide
  Antisense strand to SEQ ID NO: 695800
auuucccaaagccuauuag

SEQ ID NO: 695802 - RNA, 19 nt, Artificial Sequence
  Description of Artificial Sequence: Synthetic oligonucleotide
  Sense strand starting at position 2206 of SEQ ID NO: 586148
gggaaauucuuccaagcug

SEQ ID NO: 695803 - RNA, 19 nt, Artificial Sequence
  Description of Artificial Sequence: Synthetic oligonucleotide
  Antisense strand to SEQ ID NO: 695802
cagcuuggaagaauuuccc

SEQ ID NO: 695804 - RNA, 19 nt, Artificial Sequence
  Description of Artificial Sequence: Synthetic oligonucleotide
  Sense strand starting at position 2241 of SEQ ID NO: 586148
cagagaaauccaggugucu

SEQ ID NO: 695805 - RNA, 19 nt, Artificial Sequence
  Description of Artificial Sequence: Synthetic oligonucleotide
  Antisense strand to SEQ ID NO: 695804
agacaccuggauuucucug

SEQ ID NO: 695806 - RNA, 19 nt, Artificial Sequence
  Description of Artificial Sequence: Synthetic oligonucleotide
  Sense strand starting at position 2281 of SEQ ID NO: 586148
gggaguuccugagggcaga

SEQ ID NO: 695807 - RNA, 19 nt, Artificial Sequence
  Description of Artificial Sequence: Synthetic oligonucleotide
  Antisense strand to SEQ ID NO: 695806
ucugcccucaggaacuccc

SEQ ID NO: 695808 - RNA, 19 nt, Artificial Sequence
  Description of Artificial Sequence: Synthetic oligonucleotide
  Sense strand starting at position 2489 of SEQ ID NO: 586148
ccauguuagggauguccca

SEQ ID NO: 695809 - RNA, 19 nt, Artificial Sequence
  Description of Artificial Sequence: Synthetic oligonucleotide
  Antisense strand to SEQ ID NO: 695808
ugggacaucccuaacaugg

SEQ ID NO: 695810 - RNA, 19 nt, Artificial Sequence
  Description of Artificial Sequence: Synthetic oligonucleotide
  Sense strand starting at position 2662 of SEQ ID NO: 586148
caaacuucucgacagcgau

SEQ ID NO: 695811 - RNA, 19 nt, Artificial Sequence
  Description of Artificial Sequence: Synthetic oligonucleotide
  Antisense strand to SEQ ID NO: 695810
aucgcugucgagaaguuug

SEQ ID NO: 695812 - RNA, 19 nt, Artificial Sequence
  Description of Artificial Sequence: Synthetic oligonucleotide
  Sense strand starting at position 2725 of SEQ ID NO: 586148
uuaggacuuuccucucaag

SEQ ID NO: 695813 - RNA, 19 nt, Artificial Sequence
  Description of Artificial Sequence: Synthetic oligonucleotide
  Antisense strand to SEQ ID NO: 695812
cuugagaggaaaguccuaa

SEQ ID NO: 695814 - RNA, 19 nt, Artificial Sequence
  Description of Artificial Sequence: Synthetic oligonucleotide
  Sense strand starting at position 2728 of SEQ ID NO: 586148
ggacuuuccucucaaggca

SEQ ID NO: 695815 - RNA, 19 nt, Artificial Sequence
  Description of Artificial Sequence: Synthetic oligonucleotide
  Antisense strand to SEQ ID NO: 695814
ugccuugagaggaaagucc

SEQ ID NO: 695816 - RNA, 19 nt, Artificial Sequence
  Description of Artificial Sequence: Synthetic oligonucleotide
  Sense strand starting at position 3408 of SEQ ID NO: 586148
guuggcaucuucccauuua

SEQ ID NO: 695817 - RNA, 19 nt, Artificial Sequence
  Description of Artificial Sequence: Synthetic oligonucleotide
  Antisense strand to SEQ ID NO: 695816
uaaaugggaagaugccaac

SEQ ID NO: 695818 - RNA, 19 nt, Artificial Sequence
  Description of Artificial Sequence: Synthetic oligonucleotide
  Sense strand starting at position 3483 of SEQ ID NO: 586148
caaggaugagugggucuua

SEQ ID NO: 695819 - RNA, 19 nt, Artificial Sequence
  Description of Artificial Sequence: Synthetic oligonucleotide
  Antisense strand to SEQ ID NO: 695818
uaagacccacucauccuug

SEQ ID NO: 695820 - RNA, 19 nt, Artificial Sequence
  Description of Artificial Sequence: Synthetic oligonucleotide
  Sense strand starting at position 3484 of SEQ ID NO: 586148
aaggaugagugggucuuau

SEQ ID NO: 695821 - RNA, 19 nt, Artificial Sequence
  Description of Artificial Sequence: Synthetic oligonucleotide
  Antisense strand to SEQ ID NO: 695820
auaagacccacucauccuu

SEQ ID NO: 695822 - RNA, 19 nt, Artificial Sequence
  Description of Artificial Sequence: Synthetic oligonucleotide
  Sense strand starting at position 3517 of SEQ ID NO: 586148
ggcuauccugcagagaaug

SEQ ID NO: 695823 - RNA, 19 nt, Artificial Sequence
  Description of Artificial Sequence: Synthetic oligonucleotide
  Antisense strand to SEQ ID NO: 695822
cauucucugcaggauagcc

SEQ ID NO: 695824 - RNA, 19 nt, Artificial Sequence
  Description of Artificial Sequence: Synthetic oligonucleotide
  Sense strand starting at position 3587 of SEQ ID NO: 586148
ggugaauugccagggacca

SEQ ID NO: 695825 - RNA, 19 nt, Artificial Sequence
  Description of Artificial Sequence: Synthetic oligonucleotide
  Antisense strand to SEQ ID NO: 695824
uggucccuggcaauucacc

SEQ ID NO: 695826 - RNA, 19 nt, Artificial Sequence
  Description of Artificial Sequence: Synthetic oligonucleotide
  Sense strand starting at position 3713 of SEQ ID NO: 586148
ggccgaaggucauaaguac

SEQ ID NO: 695827 - RNA, 19 nt, Artificial Sequence
  Description of Artificial Sequence: Synthetic oligonucleotide
  Antisense strand to SEQ ID NO: 695826
guacuuaugaccuucggcc

SEQ ID NO: 695828 - RNA, 19 nt, Artificial Sequence
  Description of Artificial Sequence: Synthetic oligonucleotide
  Sense strand starting at position 3720 of SEQ ID NO: 586148
ggucauaaguacuuucuua

SEQ ID NO: 695829 - RNA, 19 nt, Artificial Sequence
  Description of Artificial Sequence: Synthetic oligonucleotide
  Antisense strand to SEQ ID NO: 695828
uaagaaaguacuuaugacc

SEQ ID NO: 695830 - RNA, 19 nt, Artificial Sequence
  Description of Artificial Sequence: Synthetic oligonucleotide
  Sense strand starting at position 3733 of SEQ ID NO: 586148
uucuuagcuguccaggaga

SEQ ID NO: 695831 - RNA, 19 nt, Artificial Sequence
  Description of Artificial Sequence: Synthetic oligonucleotide
  Antisense strand to SEQ ID NO: 695830
ucuccuggacagcuaagaa

SEQ ID NO: 695832 - RNA, 19 nt, Artificial Sequence
  Description of Artificial Sequence: Synthetic oligonucleotide
  Sense strand starting at position 3793 of SEQ ID NO: 586148
cauccuuuccucugaggag

SEQ ID NO: 695833 - RNA, 19 nt, Artificial Sequence
  Description of Artificial Sequence: Synthetic oligonucleotide
  Antisense strand to SEQ ID NO: 695832
cuccucagaggaaaggaug

SEQ ID NO: 695834 - RNA, 19 nt, Artificial Sequence
  Description of Artificial Sequence: Synthetic oligonucleotide
  Sense strand starting at position 3907 of SEQ ID NO: 586148
ggagcucucuggucaguuu

SEQ ID NO: 695835 - RNA, 19 nt, Artificial Sequence
  Description of Artificial Sequence: Synthetic oligonucleotide
  Antisense strand to SEQ ID NO: 695834
aaacugaccagagagcucc

SEQ ID NO: 695836 - RNA, 19 nt, Artificial Sequence
  Description of Artificial Sequence: Synthetic oligonucleotide
  Sense strand starting at position 82 of SEQ ID NO: 586149
ugugucuguccacaaagaa

SEQ ID NO: 695837 - RNA, 19 nt, Artificial Sequence
  Description of Artificial Sequence: Synthetic oligonucleotide
  Antisense strand to SEQ ID NO: 695836
uucuuuguggacagacaca

SEQ ID NO: 695838 - RNA, 19 nt, Artificial Sequence
  Description of Artificial Sequence: Synthetic oligonucleotide
  Sense strand starting at position 320 of SEQ ID NO: 586149
aucacuucugccugggaca

SEQ ID NO: 695839 - RNA, 19 nt, Artificial Sequence
  Description of Artificial Sequence: Synthetic oligonucleotide
  Antisense strand to SEQ ID NO: 695838
ugucccaggcagaagugau

SEQ ID NO: 695840 - RNA, 19 nt, Artificial Sequence
  Description of Artificial Sequence: Synthetic oligonucleotide
  Sense strand starting at position 321 of SEQ ID NO: 586149
ucacuucugccugggacau

SEQ ID NO: 695841 - RNA, 19 nt, Artificial Sequence
  Description of Artificial Sequence: Synthetic oligonucleotide
  Antisense strand to SEQ ID NO: 695840
augucccaggcagaaguga

SEQ ID NO: 695842 - RNA, 19 nt, Artificial Sequence
  Description of Artificial Sequence: Synthetic oligonucleotide
  Sense strand starting at position 322 of SEQ ID NO: 586149
cacuucugccugggacaua

SEQ ID NO: 695843 - RNA, 19 nt, Artificial Sequence
  Description of Artificial Sequence: Synthetic oligonucleotide
  Antisense strand to SEQ ID NO: 695842
uaugucccaggcagaagug

SEQ ID NO: 695844 - RNA, 19 nt, Artificial Sequence
  Description of Artificial Sequence: Synthetic oligonucleotide
  Sense strand starting at position 371 of SEQ ID NO: 586149
auuuguaauugugucaauc

SEQ ID NO: 695845 - RNA, 19 nt, Artificial Sequence
  Description of Artificial Sequence: Synthetic oligonucleotide
  Antisense strand to SEQ ID NO: 695844
gauugacacaauuacaaau

SEQ ID NO: 695846 - RNA, 19 nt, Artificial Sequence
  Description of Artificial Sequence: Synthetic oligonucleotide
  Sense strand starting at position 481 of SEQ ID NO: 586149
ggaaguaguuuauccaaag

SEQ ID NO: 695847 - RNA, 19 nt, Artificial Sequence
  Description of Artificial Sequence: Synthetic oligonucleotide
  Antisense strand to SEQ ID NO: 695846
cuuuggauaaacuacuucc

SEQ ID NO: 695848 - RNA, 19 nt, Artificial Sequence
  Description of Artificial Sequence: Synthetic oligonucleotide
  Sense strand starting at position 482 of SEQ ID NO: 586149
gaaguaguuuauccaaaga

SEQ ID NO: 695849 - RNA, 19 nt, Artificial Sequence
  Description of Artificial Sequence: Synthetic oligonucleotide
  Antisense strand to SEQ ID NO: 695848
ucuuuggauaaacuacuuc

SEQ ID NO: 695850 - RNA, 19 nt, Artificial Sequence
  Description of Artificial Sequence: Synthetic oligonucleotide
  Sense strand starting at position 518 of SEQ ID NO: 586149
acauguuaugagggcuaaa

SEQ ID NO: 695851 - RNA, 19 nt, Artificial Sequence
  Description of Artificial Sequence: Synthetic oligonucleotide
  Antisense strand to SEQ ID NO: 695850
uuuagcccucauaacaugu

SEQ ID NO: 695852 - RNA, 19 nt, Artificial Sequence
  Description of Artificial Sequence: Synthetic oligonucleotide
  Sense strand starting at position 521 of SEQ ID NO: 586149
uguuaugagggcuaaauca

SEQ ID NO: 695853 - RNA, 19 nt, Artificial Sequence
  Description of Artificial Sequence: Synthetic oligonucleotide
  Antisense strand to SEQ ID NO: 695852
ugauuuagcccucauaaca

SEQ ID NO: 695854 - RNA, 19 nt, Artificial Sequence
  Description of Artificial Sequence: Synthetic oligonucleotide
  Sense strand starting at position 590 of SEQ ID NO: 586149
agacuaaggugaguucuga

SEQ ID NO: 695855 - RNA, 19 nt, Artificial Sequence
  Description of Artificial Sequence: Synthetic oligonucleotide
  Antisense strand to SEQ ID NO: 695854
ucagaacucaccuuagucu

SEQ ID NO: 695856 - RNA, 19 nt, Artificial Sequence
  Description of Artificial Sequence: Synthetic oligonucleotide
  Sense strand starting at position 598 of SEQ ID NO: 586149
gugaguucugaagagugag

SEQ ID NO: 695857 - RNA, 19 nt, Artificial Sequence
  Description of Artificial Sequence: Synthetic oligonucleotide
  Antisense strand to SEQ ID NO: 695856
cucacucuucagaacucac

SEQ ID NO: 695858 - RNA, 19 nt, Artificial Sequence
  Description of Artificial Sequence: Synthetic oligonucleotide
  Sense strand starting at position 755 of SEQ ID NO: 586149
ccaccugaguguucuggaa

SEQ ID NO: 695859 - RNA, 19 nt, Artificial Sequence
  Description of Artificial Sequence: Synthetic oligonucleotide
  Antisense strand to SEQ ID NO: 695858
uuccagaacacucaggugg

SEQ ID NO: 695860 - RNA, 19 nt, Artificial Sequence
  Description of Artificial Sequence: Synthetic oligonucleotide
  Sense strand starting at position 867 of SEQ ID NO: 586149
gccugcagauaauuggaaa

SEQ ID NO: 695861 - RNA, 19 nt, Artificial Sequence
  Description of Artificial Sequence: Synthetic oligonucleotide
  Antisense strand to SEQ ID NO: 695860
uuuccaauuaucugcaggc

SEQ ID NO: 695862 - RNA, 19 nt, Artificial Sequence
  Description of Artificial Sequence: Synthetic oligonucleotide
  Sense strand starting at position 1042 of SEQ ID NO: 586149
ccgguauccacguagagau

SEQ ID NO: 695863 - RNA, 19 nt, Artificial Sequence
  Description of Artificial Sequence: Synthetic oligonucleotide
  Antisense strand to SEQ ID NO: 695862
aucucuacguggauaccgg

SEQ ID NO: 695864 - RNA, 19 nt, Artificial Sequence
  Description of Artificial Sequence: Synthetic oligonucleotide
  Sense strand starting at position 1779 of SEQ ID NO: 586149
cugccucacccaugagaau

SEQ ID NO: 695865 - RNA, 19 nt, Artificial Sequence
  Description of Artificial Sequence: Synthetic oligonucleotide
  Antisense strand to SEQ ID NO: 695864
auucucaugggugaggcag

SEQ ID NO: 695866 - RNA, 19 nt, Artificial Sequence
  Description of Artificial Sequence: Synthetic oligonucleotide
  Sense strand starting at position 2515 of SEQ ID NO: 586149
gcagaaccaguguaagauu

SEQ ID NO: 695867 - RNA, 19 nt, Artificial Sequence
  Description of Artificial Sequence: Synthetic oligonucleotide
  Antisense strand to SEQ ID NO: 695866
aaucuuacacugguucugc

SEQ ID NO: 695868 - RNA, 19 nt, Artificial Sequence
  Description of Artificial Sequence: Synthetic oligonucleotide
  Sense strand starting at position 2714 of SEQ ID NO: 586149
ugaagaucuugacuccgua

SEQ ID NO: 695869 - RNA, 19 nt, Artificial Sequence
  Description of Artificial Sequence: Synthetic oligonucleotide
  Antisense strand to SEQ ID NO: 695868
uacggagucaagaucuuca

SEQ ID NO: 695870 - RNA, 19 nt, Artificial Sequence
  Description of Artificial Sequence: Synthetic oligonucleotide
  Sense strand starting at position 2750 of SEQ ID NO: 586149
augucauuucccugccuca

SEQ ID NO: 695871 - RNA, 19 nt, Artificial Sequence
  Description of Artificial Sequence: Synthetic oligonucleotide
  Antisense strand to SEQ ID NO: 695870
ugaggcagggaaaugacau

SEQ ID NO: 695872 - RNA, 19 nt, Artificial Sequence
  Description of Artificial Sequence: Synthetic oligonucleotide
  Sense strand starting at position 2912 of SEQ ID NO: 586149
uguuaugucuacucuggau

SEQ ID NO: 695873 - RNA, 19 nt, Artificial Sequence
  Description of Artificial Sequence: Synthetic oligonucleotide
  Antisense strand to SEQ ID NO: 695872
auccagaguagacauaaca

SEQ ID NO: 695874 - RNA, 19 nt, Artificial Sequence
  Description of Artificial Sequence: Synthetic oligonucleotide
  Sense strand starting at position 2939 of SEQ ID NO: 586149
ggcuucuaggaucaauugu

SEQ ID NO: 695875 - RNA, 19 nt, Artificial Sequence
  Description of Artificial Sequence: Synthetic oligonucleotide
  Antisense strand to SEQ ID NO: 695874
acaauugauccuagaagcc

SEQ ID NO: 695876 - RNA, 19 nt, Artificial Sequence
  Description of Artificial Sequence: Synthetic oligonucleotide
  Sense strand starting at position 2946 of SEQ ID NO: 586149
aggaucaauuguuuaugga

SEQ ID NO: 695877 - RNA, 19 nt, Artificial Sequence
  Description of Artificial Sequence: Synthetic oligonucleotide
  Antisense strand to SEQ ID NO: 695876
uccauaaacaauugauccu

SEQ ID NO: 695878 - RNA, 19 nt, Artificial Sequence
  Description of Artificial Sequence: Synthetic oligonucleotide
  Sense strand starting at position 2955 of SEQ ID NO: 586149
uguuuauggacucgaggua

SEQ ID NO: 695879 - RNA, 19 nt, Artificial Sequence
  Description of Artificial Sequence: Synthetic oligonucleotide
  Antisense strand to SEQ ID NO: 695878
uaccucgaguccauaaaca

SEQ ID NO: 695880 - RNA, 19 nt, Artificial Sequence
  Description of Artificial Sequence: Synthetic oligonucleotide
  Sense strand starting at position 2956 of SEQ ID NO: 586149
guuuauggacucgagguaa

SEQ ID NO: 695881 - RNA, 19 nt, Artificial Sequence
  Description of Artificial Sequence: Synthetic oligonucleotide
  Antisense strand to SEQ ID NO: 695880
uuaccucgaguccauaaac

SEQ ID NO: 695882 - RNA, 19 nt, Artificial Sequence
  Description of Artificial Sequence: Synthetic oligonucleotide
  Sense strand starting at position 2971 of SEQ ID NO: 586149
guaaacugagcugggaaua

SEQ ID NO: 695883 - RNA, 19 nt, Artificial Sequence
  Description of Artificial Sequence: Synthetic oligonucleotide
  Antisense strand to SEQ ID NO: 695882
uauucccagcucaguuuac

SEQ ID NO: 695884 - RNA, 19 nt, Artificial Sequence
  Description of Artificial Sequence: Synthetic oligonucleotide
  Sense strand starting at position 3091 of SEQ ID NO: 586149
gccauuucuugaggauuug

SEQ ID NO: 695885 - RNA, 19 nt, Artificial Sequence
  Description of Artificial Sequence: Synthetic oligonucleotide
  Antisense strand to SEQ ID NO: 695884
caaauccucaagaaauggc

SEQ ID NO: 695886 - RNA, 19 nt, Artificial Sequence
  Description of Artificial Sequence: Synthetic oligonucleotide
  Sense strand starting at position 3201 of SEQ ID NO: 586149
auuugauaaugugacugaa

SEQ ID NO: 695887 - RNA, 19 nt, Artificial Sequence
  Description of Artificial Sequence: Synthetic oligonucleotide
  Antisense strand to SEQ ID NO: 695886
uucagucacauuaucaaau

SEQ ID NO: 695888 - RNA, 19 nt, Artificial Sequence
  Description of Artificial Sequence: Synthetic oligonucleotide
  Sense strand starting at position 3203 of SEQ ID NO: 586149
uugauaaugugacugaaug

SEQ ID NO: 695889 - RNA, 19 nt, Artificial Sequence
  Description of Artificial Sequence: Synthetic oligonucleotide
  Antisense strand to SEQ ID NO: 695888
cauucagucacauuaucaa

SEQ ID NO: 695890 - RNA, 19 nt, Artificial Sequence
  Description of Artificial Sequence: Synthetic oligonucleotide
  Sense strand starting at position 3228 of SEQ ID NO: 586149
auaauacagcuugauguua

SEQ ID NO: 695891 - RNA, 19 nt, Artificial Sequence
  Description of Artificial Sequence: Synthetic oligonucleotide
  Antisense strand to SEQ ID NO: 695890
uaacaucaagcuguauuau

SEQ ID NO: 695892 - RNA, 19 nt, Artificial Sequence
  Description of Artificial Sequence: Synthetic oligonucleotide
  Sense strand starting at position 3294 of SEQ ID NO: 586149
ccauccugaucugcaaagu

SEQ ID NO: 695893 - RNA, 19 nt, Artificial Sequence
  Description of Artificial Sequence: Synthetic oligonucleotide
  Antisense strand to SEQ ID NO: 695892
acuuugcagaucaggaugg

SEQ ID NO: 695894 - RNA, 19 nt, Artificial Sequence
  Description of Artificial Sequence: Synthetic oligonucleotide
  Sense strand starting at position 3303 of SEQ ID NO: 586149
ucugcaaagucuguaacaa

SEQ ID NO: 695895 - RNA, 19 nt, Artificial Sequence
  Description of Artificial Sequence: Synthetic oligonucleotide
  Antisense strand to SEQ ID NO: 695894
uuguuacagacuuugcaga

SEQ ID NO: 695896 - RNA, 19 nt, Artificial Sequence
  Description of Artificial Sequence: Synthetic oligonucleotide
  Sense strand starting at position 3304 of SEQ ID NO: 586149
cugcaaagucuguaacaag

SEQ ID NO: 695897 - RNA, 19 nt, Artificial Sequence
  Description of Artificial Sequence: Synthetic oligonucleotide
  Antisense strand to SEQ ID NO: 695896
cuuguuacagacuuugcag

SEQ ID NO: 695898 - RNA, 19 nt, Artificial Sequence
  Description of Artificial Sequence: Synthetic oligonucleotide
  Sense strand starting at position 3382 of SEQ ID NO: 586149
agacuugcaucccuaagaa

SEQ ID NO: 695899 - RNA, 19 nt, Artificial Sequence
  Description of Artificial Sequence: Synthetic oligonucleotide
  Antisense strand to SEQ ID NO: 695898
uucuuagggaugcaagucu

SEQ ID NO: 695900 - RNA, 19 nt, Artificial Sequence
  Description of Artificial Sequence: Synthetic oligonucleotide
  Sense strand starting at position 3462 of SEQ ID NO: 586149
ucaccaaguuaggucaauu

SEQ ID NO: 695901 - RNA, 19 nt, Artificial Sequence
  Description of Artificial Sequence: Synthetic oligonucleotide
  Antisense strand to SEQ ID NO: 695900
aauugaccuaacuugguga

SEQ ID NO: 695902 - RNA, 19 nt, Artificial Sequence
  Description of Artificial Sequence: Synthetic oligonucleotide
  Sense strand starting at position 3637 of SEQ ID NO: 586149
ccauuagggccuuacuaua

SEQ ID NO: 695903 - RNA, 19 nt, Artificial Sequence
  Description of Artificial Sequence: Synthetic oligonucleotide
  Antisense strand to SEQ ID NO: 695902
uauaguaaggcccuaaugg

SEQ ID NO: 695904 - RNA, 19 nt, Artificial Sequence
  Description of Artificial Sequence: Synthetic oligonucleotide
  Sense strand starting at position 3764 of SEQ ID NO: 586149
gucaaacuccgauacccua

SEQ ID NO: 695905 - RNA, 19 nt, Artificial Sequence
  Description of Artificial Sequence: Synthetic oligonucleotide
  Antisense strand to SEQ ID NO: 695904
uaggguaucggaguuugac

SEQ ID NO: 695906 - RNA, 19 nt, Artificial Sequence
  Description of Artificial Sequence: Synthetic oligonucleotide
  Sense strand starting at position 3779 of SEQ ID NO: 586149
ccuacaggucuuugcauuu

SEQ ID NO: 695907 - RNA, 19 nt, Artificial Sequence
  Description of Artificial Sequence: Synthetic oligonucleotide
  Antisense strand to SEQ ID NO: 695906
aaaugcaaagaccuguagg

SEQ ID NO: 695908 - RNA, 19 nt, Artificial Sequence
  Description of Artificial Sequence: Synthetic oligonucleotide
  Sense strand starting at position 3813 of SEQ ID NO: 586149
gaaugcuaguuucccugau

SEQ ID NO: 695909 - RNA, 19 nt, Artificial Sequence
  Description of Artificial Sequence: Synthetic oligonucleotide
  Antisense strand to SEQ ID NO: 695908
aucagggaaacuagcauuc

SEQ ID NO: 695910 - RNA, 19 nt, Artificial Sequence
  Description of Artificial Sequence: Synthetic oligonucleotide
  Sense strand starting at position 3817 of SEQ ID NO: 586149
gcuaguuucccugaucucu

SEQ ID NO: 695911 - RNA, 19 nt, Artificial Sequence
  Description of Artificial Sequence: Synthetic oligonucleotide
  Antisense strand to SEQ ID NO: 695910
agagaucagggaaacuagc

SEQ ID NO: 695912 - RNA, 19 nt, Artificial Sequence
  Description of Artificial Sequence: Synthetic oligonucleotide
  Sense strand starting at position 3953 of SEQ ID NO: 586149
cccagacauacugguguga

SEQ ID NO: 695913 - RNA, 19 nt, Artificial Sequence
  Description of Artificial Sequence: Synthetic oligonucleotide
  Antisense strand to SEQ ID NO: 695912
ucacaccaguaugucuggg

SEQ ID NO: 695914 - RNA, 19 nt, Artificial Sequence
  Description of Artificial Sequence: Synthetic oligonucleotide
  Sense strand starting at position 3966 of SEQ ID NO: 586149
gugugauagcaggacauau

SEQ ID NO: 695915 - RNA, 19 nt, Artificial Sequence
  Description of Artificial Sequence: Synthetic oligonucleotide
  Antisense strand to SEQ ID NO: 695914
auauguccugcuaucacac

SEQ ID NO: 695916 - RNA, 19 nt, Artificial Sequence
  Description of Artificial Sequence: Synthetic oligonucleotide
  Sense strand starting at position 529 of SEQ ID NO: 586150
aucacuauauucuguugau

SEQ ID NO: 695917 - RNA, 19 nt, Artificial Sequence
  Description of Artificial Sequence: Synthetic oligonucleotide
  Antisense strand to SEQ ID NO: 695916
aucaacagaauauagugau

SEQ ID NO: 695918 - RNA, 19 nt, Artificial Sequence
  Description of Artificial Sequence: Synthetic oligonucleotide
  Sense strand starting at position 530 of SEQ ID NO: 586150
ucacuauauucuguugaug

SEQ ID NO: 695919 - RNA, 19 nt, Artificial Sequence
  Description of Artificial Sequence: Synthetic oligonucleotide
  Antisense strand to SEQ ID NO: 695918
caucaacagaauauaguga

SEQ ID NO: 695920 - RNA, 19 nt, Artificial Sequence
  Description of Artificial Sequence: Synthetic oligonucleotide
  Sense strand starting at position 532 of SEQ ID NO: 586150
acuauauucuguugaugag

SEQ ID NO: 695921 - RNA, 19 nt, Artificial Sequence
  Description of Artificial Sequence: Synthetic oligonucleotide
  Antisense strand to SEQ ID NO: 695920
cucaucaacagaauauagu

SEQ ID NO: 695922 - RNA, 19 nt, Artificial Sequence
  Description of Artificial Sequence: Synthetic oligonucleotide
  Sense strand starting at position 538 of SEQ ID NO: 586150
uucuguugaugagagggau

SEQ ID NO: 695923 - RNA, 19 nt, Artificial Sequence
  Description of Artificial Sequence: Synthetic oligonucleotide
  Antisense strand to SEQ ID NO: 695922
aucccucucaucaacagaa

SEQ ID NO: 695924 - RNA, 19 nt, Artificial Sequence
  Description of Artificial Sequence: Synthetic oligonucleotide
  Sense strand starting at position 903 of SEQ ID NO: 586150
ggaggaagcucgaaaggaa

SEQ ID NO: 695925 - RNA, 19 nt, Artificial Sequence
  Description of Artificial Sequence: Synthetic oligonucleotide
  Antisense strand to SEQ ID NO: 695924
uuccuuucgagcuuccucc

SEQ ID NO: 695926 - RNA, 19 nt, Artificial Sequence
  Description of Artificial Sequence: Synthetic oligonucleotide
  Sense strand starting at position 3015 of SEQ ID NO: 586150
gugcguaucucagggugua

SEQ ID NO: 695927 - RNA, 19 nt, Artificial Sequence
  Description of Artificial Sequence: Synthetic oligonucleotide
  Antisense strand to SEQ ID NO: 695926
uacacccugagauacgcac

SEQ ID NO: 695928 - RNA, 19 nt, Artificial Sequence
  Description of Artificial Sequence: Synthetic oligonucleotide
  Sense strand starting at position 3016 of SEQ ID NO: 586150
ugcguaucucaggguguau

SEQ ID NO: 695929 - RNA, 19 nt, Artificial Sequence
  Description of Artificial Sequence: Synthetic oligonucleotide
  Antisense strand to SEQ ID NO: 695928
auacacccugagauacgca

SEQ ID NO: 695930 - RNA, 19 nt, Artificial Sequence
  Description of Artificial Sequence: Synthetic oligonucleotide
  Sense strand starting at position 3161 of SEQ ID NO: 586150
uuguucuguuagucuugga

SEQ ID NO: 695931 - RNA, 19 nt, Artificial Sequence
  Description of Artificial Sequence: Synthetic oligonucleotide
  Antisense strand to SEQ ID NO: 695930
uccaagacuaacagaacaa

SEQ ID NO: 695932 - RNA, 19 nt, Artificial Sequence
  Description of Artificial Sequence: Synthetic oligonucleotide
  Sense strand starting at position 3471 of SEQ ID NO: 586150
ucuagaucacugugcccau

SEQ ID NO: 695933 - RNA, 19 nt, Artificial Sequence
  Description of Artificial Sequence: Synthetic oligonucleotide
  Antisense strand to SEQ ID NO: 695932
augggcacagugaucuaga

SEQ ID NO: 695934 - RNA, 19 nt, Artificial Sequence
  Description of Artificial Sequence: Synthetic oligonucleotide
  Sense strand starting at position 3908 of SEQ ID NO: 586150
gagcaaagugaguaaacuu

SEQ ID NO: 695935 - RNA, 19 nt, Artificial Sequence
  Description of Artificial Sequence: Synthetic oligonucleotide
  Antisense strand to SEQ ID NO: 695934
aaguuuacucacuuugcuc

SEQ ID NO: 695936 - RNA, 19 nt, Artificial Sequence
  Description of Artificial Sequence: Synthetic oligonucleotide
  Sense strand starting at position 3923 of SEQ ID NO: 586150
acuucugaucuagggcaga

SEQ ID NO: 695937 - RNA, 19 nt, Artificial Sequence
  Description of Artificial Sequence: Synthetic oligonucleotide
  Antisense strand to SEQ ID NO: 695936
ucugcccuagaucagaagu

SEQ ID NO: 695938 - RNA, 19 nt, Artificial Sequence
  Description of Artificial Sequence: Synthetic oligonucleotide
  Sense strand starting at position 23 of SEQ ID NO: 586151
gccagugaaagcuguaaua

SEQ ID NO: 695939 - RNA, 19 nt, Artificial Sequence
  Description of Artificial Sequence: Synthetic oligonucleotide
  Antisense strand to SEQ ID NO: 695938
uauuacagcuuucacuggc

SEQ ID NO: 695940 - RNA, 19 nt, Artificial Sequence
  Description of Artificial Sequence: Synthetic oligonucleotide
  Sense strand starting at position 111 of SEQ ID NO: 586151
agaacauuauuagugucaa

SEQ ID NO: 695941 - RNA, 19 nt, Artificial Sequence
  Description of Artificial Sequence: Synthetic oligonucleotide
  Antisense strand to SEQ ID NO: 695940
uugacacuaauaauguucu

SEQ ID NO: 695942 - RNA, 19 nt, Artificial Sequence
  Description of Artificial Sequence: Synthetic oligonucleotide
  Sense strand starting at position 182 of SEQ ID NO: 586151
auaacauuagugugaguga

SEQ ID NO: 695943 - RNA, 19 nt, Artificial Sequence
  Description of Artificial Sequence: Synthetic oligonucleotide
  Antisense strand to SEQ ID NO: 695942
ucacucacacuaauguuau

SEQ ID NO: 695944 - RNA, 19 nt, Artificial Sequence
  Description of Artificial Sequence: Synthetic oligonucleotide
  Sense strand starting at position 193 of SEQ ID NO: 586151
gugagugacguguuugugu

SEQ ID NO: 695945 - RNA, 19 nt, Artificial Sequence
  Description of Artificial Sequence: Synthetic oligonucleotide
  Antisense strand to SEQ ID NO: 695944
acacaaacacgucacucac

SEQ ID NO: 695946 - RNA, 19 nt, Artificial Sequence
  Description of Artificial Sequence: Synthetic oligonucleotide
  Sense strand starting at position 522 of SEQ ID NO: 586151
cguuaagggcacugauaca

SEQ ID NO: 695947 - RNA, 19 nt, Artificial Sequence
  Description of Artificial Sequence: Synthetic oligonucleotide
  Antisense strand to SEQ ID NO: 695946
uguaucagugcccuuaacg

SEQ ID NO: 695948 - RNA, 19 nt, Artificial Sequence
  Description of Artificial Sequence: Synthetic oligonucleotide
  Sense strand starting at position 606 of SEQ ID NO: 586151
gagggauuccuuugcacuc

SEQ ID NO: 695949 - RNA, 19 nt, Artificial Sequence
  Description of Artificial Sequence: Synthetic oligonucleotide
  Antisense strand to SEQ ID NO: 695948
gagugcaaaggaaucccuc

SEQ ID NO: 695950 - RNA, 19 nt, Artificial Sequence
  Description of Artificial Sequence: Synthetic oligonucleotide
  Sense strand starting at position 764 of SEQ ID NO: 586151
gcccacagauugguuaaca

SEQ ID NO: 695951 - RNA, 19 nt, Artificial Sequence
  Description of Artificial Sequence: Synthetic oligonucleotide
  Antisense strand to SEQ ID NO: 695950
uguuaaccaaucugugggc

SEQ ID NO: 695952 - RNA, 19 nt, Artificial Sequence
  Description of Artificial Sequence: Synthetic oligonucleotide
  Sense strand starting at position 765 of SEQ ID NO: 586151
cccacagauugguuaacaa

SEQ ID NO: 695953 - RNA, 19 nt, Artificial Sequence
  Description of Artificial Sequence: Synthetic oligonucleotide
  Antisense strand to SEQ ID NO: 695952
uuguuaaccaaucuguggg

SEQ ID NO: 695954 - RNA, 19 nt, Artificial Sequence
  Description of Artificial Sequence: Synthetic oligonucleotide
  Sense strand starting at position 843 of SEQ ID NO: 586151
aaacaagacgucugagaca

SEQ ID NO: 695955 - RNA, 19 nt, Artificial Sequence
  Description of Artificial Sequence: Synthetic oligonucleotide
  Antisense strand to SEQ ID NO: 695954
ugucucagacgucuuguuu

SEQ ID NO: 695956 - RNA, 19 nt, Artificial Sequence
  Description of Artificial Sequence: Synthetic oligonucleotide
  Sense strand starting at position 959 of SEQ ID NO: 586151
ggaggaagcucgaaaggaa

SEQ ID NO: 695957 - RNA, 19 nt, Artificial Sequence
  Description of Artificial Sequence: Synthetic oligonucleotide
  Antisense strand to SEQ ID NO: 695956
uuccuuucgagcuuccucc

SEQ ID NO: 695958 - RNA, 19 nt, Artificial Sequence
  Description of Artificial Sequence: Synthetic oligonucleotide
  Sense strand starting at position 987 of SEQ ID NO: 586151
cucucaucuguuugacaca

SEQ ID NO: 695959 - RNA, 19 nt, Artificial Sequence
  Description of Artificial Sequence: Synthetic oligonucleotide
  Antisense strand to SEQ ID NO: 695958
ugugucaaacagaugagag

SEQ ID NO: 695960 - RNA, 19 nt, Artificial Sequence
  Description of Artificial Sequence: Synthetic oligonucleotide
  Sense strand starting at position 1026 of SEQ ID NO: 586151
aagaguccuggccagaguu

SEQ ID NO: 695961 - RNA, 19 nt, Artificial Sequence
  Description of Artificial Sequence: Synthetic oligonucleotide
  Antisense strand to SEQ ID NO: 695960
aacucuggccaggacucuu

SEQ ID NO: 695962 - RNA, 19 nt, Artificial Sequence
  Description of Artificial Sequence: Synthetic oligonucleotide
  Sense strand starting at position 1064 of SEQ ID NO: 586151
gggcaaaucugucuuugga

SEQ ID NO: 695963 - RNA, 19 nt, Artificial Sequence
  Description of Artificial Sequence: Synthetic oligonucleotide
  Antisense strand to SEQ ID NO: 695962
uccaaagacagauuugccc

SEQ ID NO: 695964 - RNA, 19 nt, Artificial Sequence
  Description of Artificial Sequence: Synthetic oligonucleotide
  Sense strand starting at position 1066 of SEQ ID NO: 586151
gcaaaucugucuuuggaac

SEQ ID NO: 695965 - RNA, 19 nt, Artificial Sequence
  Description of Artificial Sequence: Synthetic oligonucleotide
  Antisense strand to SEQ ID NO: 695964
guuccaaagacagauuugc

SEQ ID NO: 695966 - RNA, 19 nt, Artificial Sequence
  Description of Artificial Sequence: Synthetic oligonucleotide
  Sense strand starting at position 1114 of SEQ ID NO: 586151
gagaucuggaaaugacgua

SEQ ID NO: 695967 - RNA, 19 nt, Artificial Sequence
  Description of Artificial Sequence: Synthetic oligonucleotide
  Antisense strand to SEQ ID NO: 695966
uacgucauuuccagaucuc

SEQ ID NO: 695968 - RNA, 19 nt, Artificial Sequence
  Description of Artificial Sequence: Synthetic oligonucleotide
  Sense strand starting at position 1119 of SEQ ID NO: 586151
cuggaaaugacguaguauc

SEQ ID NO: 695969 - RNA, 19 nt, Artificial Sequence
  Description of Artificial Sequence: Synthetic oligonucleotide
  Antisense strand to SEQ ID NO: 695968
gauacuacgucauuuccag

SEQ ID NO: 695970 - RNA, 19 nt, Artificial Sequence
  Description of Artificial Sequence: Synthetic oligonucleotide
  Sense strand starting at position 1372 of SEQ ID NO: 586151
uacggagcuuugguuaaca

SEQ ID NO: 695971 - RNA, 19 nt, Artificial Sequence
  Description of Artificial Sequence: Synthetic oligonucleotide
  Antisense strand to SEQ ID NO: 695970
uguuaaccaaagcuccgua

SEQ ID NO: 695972 - RNA, 19 nt, Artificial Sequence
  Description of Artificial Sequence: Synthetic oligonucleotide
  Sense strand starting at position 1380 of SEQ ID NO: 586151
uuugguuaacacggagaga

SEQ ID NO: 695973 - RNA, 19 nt, Artificial Sequence
  Description of Artificial Sequence: Synthetic oligonucleotide
  Antisense strand to SEQ ID NO: 695972
ucucuccguguuaaccaaa

SEQ ID NO: 695974 - RNA, 19 nt, Artificial Sequence
  Description of Artificial Sequence: Synthetic oligonucleotide
  Sense strand starting at position 1423 of SEQ ID NO: 586151
ugcaaauaccuauggagau

SEQ ID NO: 695975 - RNA, 19 nt, Artificial Sequence
  Description of Artificial Sequence: Synthetic oligonucleotide
  Antisense strand to SEQ ID NO: 695974
aucuccauagguauuugca

SEQ ID NO: 695976 - RNA, 19 nt, Artificial Sequence
  Description of Artificial Sequence: Synthetic oligonucleotide
  Sense strand starting at position 1515 of SEQ ID NO: 586151
aagggaaucucaguuauuc

SEQ ID NO: 695977 - RNA, 19 nt, Artificial Sequence
  Description of Artificial Sequence: Synthetic oligonucleotide
  Antisense strand to SEQ ID NO: 695976
gaauaacugagauucccuu

SEQ ID NO: 695978 - RNA, 19 nt, Artificial Sequence
  Description of Artificial Sequence: Synthetic oligonucleotide
  Sense strand starting at position 1523 of SEQ ID NO: 586151
cucaguuauuccuucugau

SEQ ID NO: 695979 - RNA, 19 nt, Artificial Sequence
  Description of Artificial Sequence: Synthetic oligonucleotide
  Antisense strand to SEQ ID NO: 695978
aucagaaggaauaacugag

SEQ ID NO: 695980 - RNA, 19 nt, Artificial Sequence
  Description of Artificial Sequence: Synthetic oligonucleotide
  Sense strand starting at position 1536 of SEQ ID NO: 586151
ucugauauggcuuagcuuu

SEQ ID NO: 695981 - RNA, 19 nt, Artificial Sequence
  Description of Artificial Sequence: Synthetic oligonucleotide
  Antisense strand to SEQ ID NO: 695980
aaagcuaagccauaucaga

SEQ ID NO: 695982 - RNA, 19 nt, Artificial Sequence
  Description of Artificial Sequence: Synthetic oligonucleotide
  Sense strand starting at position 1560 of SEQ ID NO: 586151
gggcgccuacuuugaagaa

SEQ ID NO: 695983 - RNA, 19 nt, Artificial Sequence
  Description of Artificial Sequence: Synthetic oligonucleotide
  Antisense strand to SEQ ID NO: 695982
uucuucaaaguaggcgccc

SEQ ID NO: 695984 - RNA, 19 nt, Artificial Sequence
  Description of Artificial Sequence: Synthetic oligonucleotide
  Sense strand starting at position 1784 of SEQ ID NO: 586151
ggcugaucccugggaaagg

SEQ ID NO: 695985 - RNA, 19 nt, Artificial Sequence
  Description of Artificial Sequence: Synthetic oligonucleotide
  Antisense strand to SEQ ID NO: 695984
ccuuucccagggaucagcc

SEQ ID NO: 695986 - RNA, 19 nt, Artificial Sequence
  Description of Artificial Sequence: Synthetic oligonucleotide
  Sense strand starting at position 2335 of SEQ ID NO: 586151
cgaaaucucccugcguguu

SEQ ID NO: 695987 - RNA, 19 nt, Artificial Sequence
  Description of Artificial Sequence: Synthetic oligonucleotide
  Antisense strand to SEQ ID NO: 695986
aacacgcagggagauuucg

SEQ ID NO: 695988 - RNA, 19 nt, Artificial Sequence
  Description of Artificial Sequence: Synthetic oligonucleotide
  Sense strand starting at position 2868 of SEQ ID NO: 586151
guugauuucucuuccguga

SEQ ID NO: 695989 - RNA, 19 nt, Artificial Sequence
  Description of Artificial Sequence: Synthetic oligonucleotide
  Antisense strand to SEQ ID NO: 695988
ucacggaagagaaaucaac

SEQ ID NO: 695990 - RNA, 19 nt, Artificial Sequence
  Description of Artificial Sequence: Synthetic oligonucleotide
  Sense strand starting at position 3022 of SEQ ID NO: 586151
cuacuuagggccuagaagu

SEQ ID NO: 695991 - RNA, 19 nt, Artificial Sequence
  Description of Artificial Sequence: Synthetic oligonucleotide
  Antisense strand to SEQ ID NO: 695990
acuucuaggcccuaaguag

SEQ ID NO: 695992 - RNA, 19 nt, Artificial Sequence
  Description of Artificial Sequence: Synthetic oligonucleotide
  Sense strand starting at position 3037 of SEQ ID NO: 586151
aagugugccucucugaaag

SEQ ID NO: 695993 - RNA, 19 nt, Artificial Sequence
  Description of Artificial Sequence: Synthetic oligonucleotide
  Antisense strand to SEQ ID NO: 695992
cuuucagagaggcacacuu

SEQ ID NO: 695994 - RNA, 19 nt, Artificial Sequence
  Description of Artificial Sequence: Synthetic oligonucleotide
  Sense strand starting at position 3061 of SEQ ID NO: 586151
gcccguguccuucuguauu

SEQ ID NO: 695995 - RNA, 19 nt, Artificial Sequence
  Description of Artificial Sequence: Synthetic oligonucleotide
  Antisense strand to SEQ ID NO: 695994
aauacagaaggacacgggc

SEQ ID NO: 695996 - RNA, 19 nt, Artificial Sequence
  Description of Artificial Sequence: Synthetic oligonucleotide
  Sense strand starting at position 3071 of SEQ ID NO: 586151
uucuguauucccgaguuua

SEQ ID NO: 695997 - RNA, 19 nt, Artificial Sequence
  Description of Artificial Sequence: Synthetic oligonucleotide
  Antisense strand to SEQ ID NO: 695996
uaaacucgggaauacagaa

SEQ ID NO: 695998 - RNA, 19 nt, Artificial Sequence
  Description of Artificial Sequence: Synthetic oligonucleotide
  Sense strand starting at position 3242 of SEQ ID NO: 586151
cguuguguucuguuagucu

SEQ ID NO: 695999 - RNA, 19 nt, Artificial Sequence
  Description of Artificial Sequence: Synthetic oligonucleotide
  Antisense strand to SEQ ID NO: 695998
agacuaacagaacacaacg

SEQ ID NO: 696000 - RNA, 19 nt, Artificial Sequence
  Description of Artificial Sequence: Synthetic oligonucleotide
  Sense strand starting at position 3387 of SEQ ID NO: 586151
gacagagauuucuguuauu

SEQ ID NO: 696001 - RNA, 19 nt, Artificial Sequence
  Description of Artificial Sequence: Synthetic oligonucleotide
  Antisense strand to SEQ ID NO: 696000
aauaacagaaaucucuguc

SEQ ID NO: 696002 - RNA, 19 nt, Artificial Sequence
  Description of Artificial Sequence: Synthetic oligonucleotide
  Sense strand starting at position 3460 of SEQ ID NO: 586151
ggugacauaagucaaguga

SEQ ID NO: 696003 - RNA, 19 nt, Artificial Sequence
  Description of Artificial Sequence: Synthetic oligonucleotide
  Antisense strand to SEQ ID NO: 696002
ucacuugacuuaugucacc

SEQ ID NO: 696004 - RNA, 19 nt, Artificial Sequence
  Description of Artificial Sequence: Synthetic oligonucleotide
  Sense strand starting at position 3510 of SEQ ID NO: 586151
uuaggaaugccauggucua

SEQ ID NO: 696005 - RNA, 19 nt, Artificial Sequence
  Description of Artificial Sequence: Synthetic oligonucleotide
  Antisense strand to SEQ ID NO: 696004
uagaccauggcauuccuaa

SEQ ID NO: 696006 - RNA, 19 nt, Artificial Sequence
  Description of Artificial Sequence: Synthetic oligonucleotide
  Sense strand starting at position 3583 of SEQ ID NO: 586151
gccaaugauccugguugaa

SEQ ID NO: 696007 - RNA, 19 nt, Artificial Sequence
  Description of Artificial Sequence: Synthetic oligonucleotide
  Antisense strand to SEQ ID NO: 696006
uucaaccaggaucauuggc

SEQ ID NO: 696008 - RNA, 19 nt, Artificial Sequence
  Description of Artificial Sequence: Synthetic oligonucleotide
  Sense strand starting at position 3626 of SEQ ID NO: 586151
ggcuguagaauagaaugua

SEQ ID NO: 696009 - RNA, 19 nt, Artificial Sequence
  Description of Artificial Sequence: Synthetic oligonucleotide
  Antisense strand to SEQ ID NO: 696008
uacauucuauucuacagcc

SEQ ID NO: 696010 - RNA, 19 nt, Artificial Sequence
  Description of Artificial Sequence: Synthetic oligonucleotide
  Sense strand starting at position 3704 of SEQ ID NO: 586151
gugcuacuucugccauguu

SEQ ID NO: 696011 - RNA, 19 nt, Artificial Sequence
  Description of Artificial Sequence: Synthetic oligonucleotide
  Antisense strand to SEQ ID NO: 696010
aacauggcagaaguagcac

SEQ ID NO: 696012 - RNA, 19 nt, Artificial Sequence
  Description of Artificial Sequence: Synthetic oligonucleotide
  Sense strand starting at position 3719 of SEQ ID NO: 586151
uguuacucugaaggauuaa

SEQ ID NO: 696013 - RNA, 19 nt, Artificial Sequence
  Description of Artificial Sequence: Synthetic oligonucleotide
  Antisense strand to SEQ ID NO: 696012
uuaauccuucagaguaaca

SEQ ID NO: 696014 - RNA, 19 nt, Artificial Sequence
  Description of Artificial Sequence: Synthetic oligonucleotide
  Sense strand starting at position 3857 of SEQ ID NO: 586151
guguccuaggcucagcaaa

SEQ ID NO: 696015 - RNA, 19 nt, Artificial Sequence
  Description of Artificial Sequence: Synthetic oligonucleotide
  Antisense strand to SEQ ID NO: 696014
uuugcugagccuaggacac

SEQ ID NO: 696016 - RNA, 19 nt, Artificial Sequence
  Description of Artificial Sequence: Synthetic oligonucleotide
  Sense strand starting at position 3928 of SEQ ID NO: 586151
cuacuucuaggcuggaaua

SEQ ID NO: 696017 - RNA, 19 nt, Artificial Sequence
  Description of Artificial Sequence: Synthetic oligonucleotide
  Antisense strand to SEQ ID NO: 696016
uauuccagccuagaaguag

SEQ ID NO: 696018 - RNA, 19 nt, Artificial Sequence
  Description of Artificial Sequence: Synthetic oligonucleotide
  Sense strand starting at position 682 of SEQ ID NO: 586152
auaaguuauucucccgaaa

SEQ ID NO: 696019 - RNA, 19 nt, Artificial Sequence
  Description of Artificial Sequence: Synthetic oligonucleotide
  Antisense strand to SEQ ID NO: 696018
uuucgggagaauaacuuau

SEQ ID NO: 696020 - RNA, 19 nt, Artificial Sequence
  Description of Artificial Sequence: Synthetic oligonucleotide
  Sense strand starting at position 685 of SEQ ID NO: 586152
aguuauucucccgaaauaa

SEQ ID NO: 696021 - RNA, 19 nt, Artificial Sequence
  Description of Artificial Sequence: Synthetic oligonucleotide
  Antisense strand to SEQ ID NO: 696020
uuauuucgggagaauaacu

SEQ ID NO: 696022 - RNA, 19 nt, Artificial Sequence
  Description of Artificial Sequence: Synthetic oligonucleotide
  Sense strand starting at position 787 of SEQ ID NO: 586152
cgagauaugaaacguacau

SEQ ID NO: 696023 - RNA, 19 nt, Artificial Sequence
  Description of Artificial Sequence: Synthetic oligonucleotide
  Antisense strand to SEQ ID NO: 696022
auguacguuucauaucucg

SEQ ID NO: 696024 - RNA, 19 nt, Artificial Sequence
  Description of Artificial Sequence: Synthetic oligonucleotide
  Sense strand starting at position 846 of SEQ ID NO: 586152
gauugaaauuaucugguuu

SEQ ID NO: 696025 - RNA, 19 nt, Artificial Sequence
  Description of Artificial Sequence: Synthetic oligonucleotide
  Antisense strand to SEQ ID NO: 696024
aaaccagauaauuucaauc

SEQ ID NO: 696026 - RNA, 19 nt, Artificial Sequence
  Description of Artificial Sequence: Synthetic oligonucleotide
  Sense strand starting at position 866 of SEQ ID NO: 586152
cuuaaauugcaguaauaug

SEQ ID NO: 696027 - RNA, 19 nt, Artificial Sequence
  Description of Artificial Sequence: Synthetic oligonucleotide
  Antisense strand to SEQ ID NO: 696026
cauauuacugcaauuuaag

SEQ ID NO: 696028 - RNA, 19 nt, Artificial Sequence
  Description of Artificial Sequence: Synthetic oligonucleotide
  Sense strand starting at position 943 of SEQ ID NO: 586152
accaguaucuggucuaagu

SEQ ID NO: 696029 - RNA, 19 nt, Artificial Sequence
  Description of Artificial Sequence: Synthetic oligonucleotide
  Antisense strand to SEQ ID NO: 696028
acuuagaccagauacuggu

SEQ ID NO: 696030 - RNA, 19 nt, Artificial Sequence
  Description of Artificial Sequence: Synthetic oligonucleotide
  Sense strand starting at position 1006 of SEQ ID NO: 586152
auaguccuaucuucggaau

SEQ ID NO: 696031 - RNA, 19 nt, Artificial Sequence
  Description of Artificial Sequence: Synthetic oligonucleotide
  Antisense strand to SEQ ID NO: 696030
auuccgaagauaggacuau

SEQ ID NO: 696032 - RNA, 19 nt, Artificial Sequence
  Description of Artificial Sequence: Synthetic oligonucleotide
  Sense strand starting at position 1017 of SEQ ID NO: 586152
uucggaaucuaauuccaca

SEQ ID NO: 696033 - RNA, 19 nt, Artificial Sequence
  Description of Artificial Sequence: Synthetic oligonucleotide
  Antisense strand to SEQ ID NO: 696032
uguggaauuagauuccgaa

SEQ ID NO: 696034 - RNA, 19 nt, Artificial Sequence
  Description of Artificial Sequence: Synthetic oligonucleotide
  Sense strand starting at position 2224 of SEQ ID NO: 586152
cgugauucgcgguuaggga

SEQ ID NO: 696035 - RNA, 19 nt, Artificial Sequence
  Description of Artificial Sequence: Synthetic oligonucleotide
  Antisense strand to SEQ ID NO: 696034
ucccuaaccgcgaaucacg

SEQ ID NO: 696036 - RNA, 19 nt, Artificial Sequence
  Description of Artificial Sequence: Synthetic oligonucleotide
  Sense strand starting at position 2225 of SEQ ID NO: 586152
gugauucgcgguuagggau

SEQ ID NO: 696037 - RNA, 19 nt, Artificial Sequence
  Description of Artificial Sequence: Synthetic oligonucleotide
  Antisense strand to SEQ ID NO: 696036
aucccuaaccgcgaaucac

SEQ ID NO: 696038 - RNA, 19 nt, Artificial Sequence
  Description of Artificial Sequence: Synthetic oligonucleotide
  Sense strand starting at position 2271 of SEQ ID NO: 586152
cgcguuacguauauaucga

SEQ ID NO: 696039 - RNA, 19 nt, Artificial Sequence
  Description of Artificial Sequence: Synthetic oligonucleotide
  Antisense strand to SEQ ID NO: 696038
ucgauauauacguaacgcg

SEQ ID NO: 696040 - RNA, 19 nt, Artificial Sequence
  Description of Artificial Sequence: Synthetic oligonucleotide
  Sense strand starting at position 2276 of SEQ ID NO: 586152
uacguauauaucgagguga

SEQ ID NO: 696041 - RNA, 19 nt, Artificial Sequence
  Description of Artificial Sequence: Synthetic oligonucleotide
  Antisense strand to SEQ ID NO: 696040
ucaccucgauauauacgua

SEQ ID NO: 696042 - RNA, 19 nt, Artificial Sequence
  Description of Artificial Sequence: Synthetic oligonucleotide
  Sense strand starting at position 2306 of SEQ ID NO: 586152
cccaguaguugaccuuaaa

SEQ ID NO: 696043 - RNA, 19 nt, Artificial Sequence
  Description of Artificial Sequence: Synthetic oligonucleotide
  Antisense strand to SEQ ID NO: 696042
uuuaaggucaacuacuggg

SEQ ID NO: 696044 - RNA, 19 nt, Artificial Sequence
  Description of Artificial Sequence: Synthetic oligonucleotide
  Sense strand starting at position 2388 of SEQ ID NO: 586152
gcugucucacguguuucua

SEQ ID NO: 696045 - RNA, 19 nt, Artificial Sequence
  Description of Artificial Sequence: Synthetic oligonucleotide
  Antisense strand to SEQ ID NO: 696044
uagaaacacgugagacagc

SEQ ID NO: 696046 - RNA, 19 nt, Artificial Sequence
  Description of Artificial Sequence: Synthetic oligonucleotide
  Sense strand starting at position 2585 of SEQ ID NO: 586152
uggagugagacaggaguau

SEQ ID NO: 696047 - RNA, 19 nt, Artificial Sequence
  Description of Artificial Sequence: Synthetic oligonucleotide
  Antisense strand to SEQ ID NO: 696046
auacuccugucucacucca

SEQ ID NO: 696048 - RNA, 19 nt, Artificial Sequence
  Description of Artificial Sequence: Synthetic oligonucleotide
  Sense strand starting at position 2612 of SEQ ID NO: 586152
aguguccaguucucuuuaa

SEQ ID NO: 696049 - RNA, 19 nt, Artificial Sequence
  Description of Artificial Sequence: Synthetic oligonucleotide
  Antisense strand to SEQ ID NO: 696048
uuaaagagaacuggacacu

SEQ ID NO: 696050 - RNA, 19 nt, Artificial Sequence
  Description of Artificial Sequence: Synthetic oligonucleotide
  Sense strand starting at position 2613 of SEQ ID NO: 586152
guguccaguucucuuuaaa

SEQ ID NO: 696051 - RNA, 19 nt, Artificial Sequence
  Description of Artificial Sequence: Synthetic oligonucleotide
  Antisense strand to SEQ ID NO: 696050
uuuaaagagaacuggacac

SEQ ID NO: 696052 - RNA, 19 nt, Artificial Sequence
  Description of Artificial Sequence: Synthetic oligonucleotide
  Sense strand starting at position 2634 of SEQ ID NO: 586152
uagcguuugcaguuaacga

SEQ ID NO: 696053 - RNA, 19 nt, Artificial Sequence
  Description of Artificial Sequence: Synthetic oligonucleotide
  Antisense strand to SEQ ID NO: 696052
ucguuaacugcaaacgcua

SEQ ID NO: 696054 - RNA, 19 nt, Artificial Sequence
  Description of Artificial Sequence: Synthetic oligonucleotide
  Sense strand starting at position 2723 of SEQ ID NO: 586152
uucccuuuguggccauaua

SEQ ID NO: 696055 - RNA, 19 nt, Artificial Sequence
  Description of Artificial Sequence: Synthetic oligonucleotide
  Antisense strand to SEQ ID NO: 696054
uauauggccacaaagggaa

SEQ ID NO: 696056 - RNA, 19 nt, Artificial Sequence
  Description of Artificial Sequence: Synthetic oligonucleotide
  Sense strand starting at position 2788 of SEQ ID NO: 586152
gggagaguuuaauucuuaa

SEQ ID NO: 696057 - RNA, 19 nt, Artificial Sequence
  Description of Artificial Sequence: Synthetic oligonucleotide
  Antisense strand to SEQ ID NO: 696056
uuaagaauuaaacucuccc

SEQ ID NO: 696058 - RNA, 19 nt, Artificial Sequence
  Description of Artificial Sequence: Synthetic oligonucleotide
  Sense strand starting at position 3014 of SEQ ID NO: 586152
uagaucuugcacugucgaa

SEQ ID NO: 696059 - RNA, 19 nt, Artificial Sequence
  Description of Artificial Sequence: Synthetic oligonucleotide
  Antisense strand to SEQ ID NO: 696058
uucgacagugcaagaucua

SEQ ID NO: 696060 - RNA, 19 nt, Artificial Sequence
  Description of Artificial Sequence: Synthetic oligonucleotide
  Sense strand starting at position 3042 of SEQ ID NO: 586152
ccgaaauugcugcaaugau

SEQ ID NO: 696061 - RNA, 19 nt, Artificial Sequence
  Description of Artificial Sequence: Synthetic oligonucleotide
  Antisense strand to SEQ ID NO: 696060
aucauugcagcaauuucgg

SEQ ID NO: 696062 - RNA, 19 nt, Artificial Sequence
  Description of Artificial Sequence: Synthetic oligonucleotide
  Sense strand starting at position 3056 of SEQ ID NO: 586152
augauaaguuugcugaacu

SEQ ID NO: 696063 - RNA, 19 nt, Artificial Sequence
  Description of Artificial Sequence: Synthetic oligonucleotide
  Antisense strand to SEQ ID NO: 696062
aguucagcaaacuuaucau

SEQ ID NO: 696064 - RNA, 19 nt, Artificial Sequence
  Description of Artificial Sequence: Synthetic oligonucleotide
  Sense strand starting at position 3140 of SEQ ID NO: 586152
uggccucuguugguaagaa

SEQ ID NO: 696065 - RNA, 19 nt, Artificial Sequence
  Description of Artificial Sequence: Synthetic oligonucleotide
  Antisense strand to SEQ ID NO: 696064
uucuuaccaacagaggcca

SEQ ID NO: 696066 - RNA, 19 nt, Artificial Sequence
  Description of Artificial Sequence: Synthetic oligonucleotide
  Sense strand starting at position 3347 of SEQ ID NO: 586152
gucuacuagucaucaaaug

SEQ ID NO: 696067 - RNA, 19 nt, Artificial Sequence
  Description of Artificial Sequence: Synthetic oligonucleotide
  Antisense strand to SEQ ID NO: 696066
cauuugaugacuaguagac

SEQ ID NO: 696068 - RNA, 19 nt, Artificial Sequence
  Description of Artificial Sequence: Synthetic oligonucleotide
  Sense strand starting at position 3400 of SEQ ID NO: 586152
uuugucuuugaucaauaag

SEQ ID NO: 696069 - RNA, 19 nt, Artificial Sequence
  Description of Artificial Sequence: Synthetic oligonucleotide
  Antisense strand to SEQ ID NO: 696068
cuuauugaucaaagacaaa

SEQ ID NO: 696070 - RNA, 19 nt, Artificial Sequence
  Description of Artificial Sequence: Synthetic oligonucleotide
  Sense strand starting at position 3403 of SEQ ID NO: 586152
gucuuugaucaauaaguuc

SEQ ID NO: 696071 - RNA, 19 nt, Artificial Sequence
  Description of Artificial Sequence: Synthetic oligonucleotide
  Antisense strand to SEQ ID NO: 696070
gaacuuauugaucaaagac

SEQ ID NO: 696072 - RNA, 19 nt, Artificial Sequence
  Description of Artificial Sequence: Synthetic oligonucleotide
  Sense strand starting at position 3507 of SEQ ID NO: 586152
gcccuuguggaauauugga

SEQ ID NO: 696073 - RNA, 19 nt, Artificial Sequence
  Description of Artificial Sequence: Synthetic oligonucleotide
  Antisense strand to SEQ ID NO: 696072
uccaauauuccacaagggc

SEQ ID NO: 696074 - RNA, 19 nt, Artificial Sequence
  Description of Artificial Sequence: Synthetic oligonucleotide
  Sense strand starting at position 3525 of SEQ ID NO: 586152
agucucuauggaugacuaa

SEQ ID NO: 696075 - RNA, 19 nt, Artificial Sequence
  Description of Artificial Sequence: Synthetic oligonucleotide
  Antisense strand to SEQ ID NO: 696074
uuagucauccauagagacu

SEQ ID NO: 696076 - RNA, 19 nt, Artificial Sequence
  Description of Artificial Sequence: Synthetic oligonucleotide
  Sense strand starting at position 3563 of SEQ ID NO: 586152
cgguaauuucagggugcuu

SEQ ID NO: 696077 - RNA, 19 nt, Artificial Sequence
  Description of Artificial Sequence: Synthetic oligonucleotide
  Antisense strand to SEQ ID NO: 696076
aagcacccugaaauuaccg

SEQ ID NO: 696078 - RNA, 19 nt, Artificial Sequence
  Description of Artificial Sequence: Synthetic oligonucleotide
  Sense strand starting at position 3604 of SEQ ID NO: 586152
augacuugaaguuguagga

SEQ ID NO: 696079 - RNA, 19 nt, Artificial Sequence
  Description of Artificial Sequence: Synthetic oligonucleotide
  Antisense strand to SEQ ID NO: 696078
uccuacaacuucaagucau

SEQ ID NO: 696080 - RNA, 19 nt, Artificial Sequence
  Description of Artificial Sequence: Synthetic oligonucleotide
  Sense strand starting at position 3617 of SEQ ID NO: 586152
guaggaaagcuuuaaucga

SEQ ID NO: 696081 - RNA, 19 nt, Artificial Sequence
  Description of Artificial Sequence: Synthetic oligonucleotide
  Antisense strand to SEQ ID NO: 696080
ucgauuaaagcuuuccuac

SEQ ID NO: 696082 - RNA, 19 nt, Artificial Sequence
  Description of Artificial Sequence: Synthetic oligonucleotide
  Sense strand starting at position 3624 of SEQ ID NO: 586152
agcuuuaaucgacaaacau

SEQ ID NO: 696083 - RNA, 19 nt, Artificial Sequence
  Description of Artificial Sequence: Synthetic oligonucleotide
  Antisense strand to SEQ ID NO: 696082
auguuugucgauuaaagcu

SEQ ID NO: 696084 - RNA, 19 nt, Artificial Sequence
  Description of Artificial Sequence: Synthetic oligonucleotide
  Sense strand starting at position 3646 of SEQ ID NO: 586152
uuuggugaaggcuguaaga

SEQ ID NO: 696085 - RNA, 19 nt, Artificial Sequence
  Description of Artificial Sequence: Synthetic oligonucleotide
  Antisense strand to SEQ ID NO: 696084
ucuuacagccuucaccaaa

SEQ ID NO: 696086 - RNA, 19 nt, Artificial Sequence
  Description of Artificial Sequence: Synthetic oligonucleotide
  Sense strand starting at position 3648 of SEQ ID NO: 586152
uggugaaggcuguaagacu

SEQ ID NO: 696087 - RNA, 19 nt, Artificial Sequence
  Description of Artificial Sequence: Synthetic oligonucleotide
  Antisense strand to SEQ ID NO: 696086
agucuuacagccuucacca

SEQ ID NO: 696088 - RNA, 19 nt, Artificial Sequence
  Description of Artificial Sequence: Synthetic oligonucleotide
  Sense strand starting at position 3656 of SEQ ID NO: 586152
gcuguaagacuguaacuug

SEQ ID NO: 696089 - RNA, 19 nt, Artificial Sequence
  Description of Artificial Sequence: Synthetic oligonucleotide
  Antisense strand to SEQ ID NO: 696088
caaguuacagucuuacagc

SEQ ID NO: 696090 - RNA, 19 nt, Artificial Sequence
  Description of Artificial Sequence: Synthetic oligonucleotide
  Sense strand starting at position 3659 of SEQ ID NO: 586152
guaagacuguaacuuggaa

SEQ ID NO: 696091 - RNA, 19 nt, Artificial Sequence
  Description of Artificial Sequence: Synthetic oligonucleotide
  Antisense strand to SEQ ID NO: 696090
uuccaaguuacagucuuac

SEQ ID NO: 696092 - RNA, 19 nt, Artificial Sequence
  Description of Artificial Sequence: Synthetic oligonucleotide
  Sense strand starting at position 3722 of SEQ ID NO: 586152
uuaaauauggauuggaguu

SEQ ID NO: 696093 - RNA, 19 nt, Artificial Sequence
  Description of Artificial Sequence: Synthetic oligonucleotide
  Antisense strand to SEQ ID NO: 696092
aacuccaauccauauuuaa

SEQ ID NO: 696094 - RNA, 19 nt, Artificial Sequence
  Description of Artificial Sequence: Synthetic oligonucleotide
  Sense strand starting at position 3732 of SEQ ID NO: 586152
auuggaguuuccucaagaa

SEQ ID NO: 696095 - RNA, 19 nt, Artificial Sequence
  Description of Artificial Sequence: Synthetic oligonucleotide
  Antisense strand to SEQ ID NO: 696094
uucuugaggaaacuccaau

SEQ ID NO: 696096 - RNA, 19 nt, Artificial Sequence
  Description of Artificial Sequence: Synthetic oligonucleotide
  Sense strand starting at position 3826 of SEQ ID NO: 586152
cuugucauaccggauucuu

SEQ ID NO: 696097 - RNA, 19 nt, Artificial Sequence
  Description of Artificial Sequence: Synthetic oligonucleotide
  Antisense strand to SEQ ID NO: 696096
aagaauccgguaugacaag

SEQ ID NO: 696098 - RNA, 19 nt, Artificial Sequence
  Description of Artificial Sequence: Synthetic oligonucleotide
  Sense strand starting at position 1141 of SEQ ID NO: 586153
auaaguuauucucccgaaa

SEQ ID NO: 696099 - RNA, 19 nt, Artificial Sequence
  Description of Artificial Sequence: Synthetic oligonucleotide
  Antisense strand to SEQ ID NO: 696098
uuucgggagaauaacuuau

SEQ ID NO: 696100 - RNA, 19 nt, Artificial Sequence
  Description of Artificial Sequence: Synthetic oligonucleotide
  Sense strand starting at position 1144 of SEQ ID NO: 586153
aguuauucucccgaaauaa

SEQ ID NO: 696101 - RNA, 19 nt, Artificial Sequence
  Description of Artificial Sequence: Synthetic oligonucleotide
  Antisense strand to SEQ ID NO: 696100
uuauuucgggagaauaacu

SEQ ID NO: 696102 - RNA, 19 nt, Artificial Sequence
  Description of Artificial Sequence: Synthetic oligonucleotide
  Sense strand starting at position 1206 of SEQ ID NO: 586153
cgaagaacuuacuauaacu

SEQ ID NO: 696103 - RNA, 19 nt, Artificial Sequence
  Description of Artificial Sequence: Synthetic oligonucleotide
  Antisense strand to SEQ ID NO: 696102
aguuauaguaaguucuucg

SEQ ID NO: 696104 - RNA, 19 nt, Artificial Sequence
  Description of Artificial Sequence: Synthetic oligonucleotide
  Sense strand starting at position 1246 of SEQ ID NO: 586153
cgagauaugaaacguacau

SEQ ID NO: 696105 - RNA, 19 nt, Artificial Sequence
  Description of Artificial Sequence: Synthetic oligonucleotide
  Antisense strand to SEQ ID NO: 696104
auguacguuucauaucucg

SEQ ID NO: 696106 - RNA, 19 nt, Artificial Sequence
  Description of Artificial Sequence: Synthetic oligonucleotide
  Sense strand starting at position 1305 of SEQ ID NO: 586153
gauugaaauuaucugguuu

SEQ ID NO: 696107 - RNA, 19 nt, Artificial Sequence
  Description of Artificial Sequence: Synthetic oligonucleotide
  Antisense strand to SEQ ID NO: 696106
aaaccagauaauuucaauc

SEQ ID NO: 696108 - RNA, 19 nt, Artificial Sequence
  Description of Artificial Sequence: Synthetic oligonucleotide
  Sense strand starting at position 1325 of SEQ ID NO: 586153
cuuaaauugcaguaauaug

SEQ ID NO: 696109 - RNA, 19 nt, Artificial Sequence
  Description of Artificial Sequence: Synthetic oligonucleotide
  Antisense strand to SEQ ID NO: 696108
cauauuacugcaauuuaag

SEQ ID NO: 696110 - RNA, 19 nt, Artificial Sequence
  Description of Artificial Sequence: Synthetic oligonucleotide
  Sense strand starting at position 1332 of SEQ ID NO: 586153
ugcaguaauauguacguuu

SEQ ID NO: 696111 - RNA, 19 nt, Artificial Sequence
  Description of Artificial Sequence: Synthetic oligonucleotide
  Antisense strand to SEQ ID NO: 696110
aaacguacauauuacugca

SEQ ID NO: 696112 - RNA, 19 nt, Artificial Sequence
  Description of Artificial Sequence: Synthetic oligonucleotide
  Sense strand starting at position 1375 of SEQ ID NO: 586153
agaccucauucuggaaaga

SEQ ID NO: 696113 - RNA, 19 nt, Artificial Sequence
  Description of Artificial Sequence: Synthetic oligonucleotide
  Antisense strand to SEQ ID NO: 696112
ucuuuccagaaugaggucu

SEQ ID NO: 696114 - RNA, 19 nt, Artificial Sequence
  Description of Artificial Sequence: Synthetic oligonucleotide
  Sense strand starting at position 1402 of SEQ ID NO: 586153
accaguaucuggucuaagu

SEQ ID NO: 696115 - RNA, 19 nt, Artificial Sequence
  Description of Artificial Sequence: Synthetic oligonucleotide
  Antisense strand to SEQ ID NO: 696114
acuuagaccagauacuggu

SEQ ID NO: 696116 - RNA, 19 nt, Artificial Sequence
  Description of Artificial Sequence: Synthetic oligonucleotide
  Sense strand starting at position 1465 of SEQ ID NO: 586153
auaguccuaucuucggaau

SEQ ID NO: 696117 - RNA, 19 nt, Artificial Sequence
  Description of Artificial Sequence: Synthetic oligonucleotide
  Antisense strand to SEQ ID NO: 696116
auuccgaagauaggacuau

SEQ ID NO: 696118 - RNA, 19 nt, Artificial Sequence
  Description of Artificial Sequence: Synthetic oligonucleotide
  Sense strand starting at position 1476 of SEQ ID NO: 586153
uucggaaucuaauuccaca

SEQ ID NO: 696119 - RNA, 19 nt, Artificial Sequence
  Description of Artificial Sequence: Synthetic oligonucleotide
  Antisense strand to SEQ ID NO: 696118
uguggaauuagauuccgaa

SEQ ID NO: 696120 - RNA, 19 nt, Artificial Sequence
  Description of Artificial Sequence: Synthetic oligonucleotide
  Sense strand starting at position 2683 of SEQ ID NO: 586153
cgugauucgcgguuaggga

SEQ ID NO: 696121 - RNA, 19 nt, Artificial Sequence
  Description of Artificial Sequence: Synthetic oligonucleotide
  Antisense strand to SEQ ID NO: 696120
ucccuaaccgcgaaucacg

SEQ ID NO: 696122 - RNA, 19 nt, Artificial Sequence
  Description of Artificial Sequence: Synthetic oligonucleotide
  Sense strand starting at position 2684 of SEQ ID NO: 586153
gugauucgcgguuagggau

SEQ ID NO: 696123 - RNA, 19 nt, Artificial Sequence
  Description of Artificial Sequence: Synthetic oligonucleotide
  Antisense strand to SEQ ID NO: 696122
aucccuaaccgcgaaucac

SEQ ID NO: 696124 - RNA, 19 nt, Artificial Sequence
  Description of Artificial Sequence: Synthetic oligonucleotide
  Sense strand starting at position 2727 of SEQ ID NO: 586153
acacgcguuacguauauau

SEQ ID NO: 696125 - RNA, 19 nt, Artificial Sequence
  Description of Artificial Sequence: Synthetic oligonucleotide
  Antisense strand to SEQ ID NO: 696124
auauauacguaacgcgugu

SEQ ID NO: 696126 - RNA, 19 nt, Artificial Sequence
  Description of Artificial Sequence: Synthetic oligonucleotide
  Sense strand starting at position 2730 of SEQ ID NO: 586153
cgcguuacguauauaucga

SEQ ID NO: 696127 - RNA, 19 nt, Artificial Sequence
  Description of Artificial Sequence: Synthetic oligonucleotide
  Antisense strand to SEQ ID NO: 696126
ucgauauauacguaacgcg

SEQ ID NO: 696128 - RNA, 19 nt, Artificial Sequence
  Description of Artificial Sequence: Synthetic oligonucleotide
  Sense strand starting at position 2735 of SEQ ID NO: 586153
uacguauauaucgagguga

SEQ ID NO: 696129 - RNA, 19 nt, Artificial Sequence
  Description of Artificial Sequence: Synthetic oligonucleotide
  Antisense strand to SEQ ID NO: 696128
ucaccucgauauauacgua

SEQ ID NO: 696130 - RNA, 19 nt, Artificial Sequence
  Description of Artificial Sequence: Synthetic oligonucleotide
  Sense strand starting at position 2765 of SEQ ID NO: 586153
cccaguaguugaccuuaaa

SEQ ID NO: 696131 - RNA, 19 nt, Artificial Sequence
  Description of Artificial Sequence: Synthetic oligonucleotide
  Antisense strand to SEQ ID NO: 696130
uuuaaggucaacuacuggg

SEQ ID NO: 696132 - RNA, 19 nt, Artificial Sequence
  Description of Artificial Sequence: Synthetic oligonucleotide
  Sense strand starting at position 2847 of SEQ ID NO: 586153
gcugucucacguguuucua

SEQ ID NO: 696133 - RNA, 19 nt, Artificial Sequence
  Description of Artificial Sequence: Synthetic oligonucleotide
  Antisense strand to SEQ ID NO: 696132
uagaaacacgugagacagc

SEQ ID NO: 696134 - RNA, 19 nt, Artificial Sequence
  Description of Artificial Sequence: Synthetic oligonucleotide
  Sense strand starting at position 2907 of SEQ ID NO: 586153
uuugacacauaaggaaaua

SEQ ID NO: 696135 - RNA, 19 nt, Artificial Sequence
  Description of Artificial Sequence: Synthetic oligonucleotide
  Antisense strand to SEQ ID NO: 696134
uauuuccuuaugugucaaa

SEQ ID NO: 696136 - RNA, 19 nt, Artificial Sequence
  Description of Artificial Sequence: Synthetic oligonucleotide
  Sense strand starting at position 3033 of SEQ ID NO: 586153
uuuguaugugcuggaguga

SEQ ID NO: 696137 - RNA, 19 nt, Artificial Sequence
  Description of Artificial Sequence: Synthetic oligonucleotide
  Antisense strand to SEQ ID NO: 696136
ucacuccagcacauacaaa

SEQ ID NO: 696138 - RNA, 19 nt, Artificial Sequence
  Description of Artificial Sequence: Synthetic oligonucleotide
  Sense strand starting at position 3044 of SEQ ID NO: 586153
uggagugagacaggaguau

SEQ ID NO: 696139 - RNA, 19 nt, Artificial Sequence
  Description of Artificial Sequence: Synthetic oligonucleotide
  Antisense strand to SEQ ID NO: 696138
auacuccugucucacucca

SEQ ID NO: 696140 - RNA, 19 nt, Artificial Sequence
  Description of Artificial Sequence: Synthetic oligonucleotide
  Sense strand starting at position 3071 of SEQ ID NO: 586153
aguguccaguucucuuuaa

SEQ ID NO: 696141 - RNA, 19 nt, Artificial Sequence
  Description of Artificial Sequence: Synthetic oligonucleotide
  Antisense strand to SEQ ID NO: 696140
uuaaagagaacuggacacu

SEQ ID NO: 696142 - RNA, 19 nt, Artificial Sequence
  Description of Artificial Sequence: Synthetic oligonucleotide
  Sense strand starting at position 3072 of SEQ ID NO: 586153
guguccaguucucuuuaaa

SEQ ID NO: 696143 - RNA, 19 nt, Artificial Sequence
  Description of Artificial Sequence: Synthetic oligonucleotide
  Antisense strand to SEQ ID NO: 696142
uuuaaagagaacuggacac

SEQ ID NO: 696144 - RNA, 19 nt, Artificial Sequence
  Description of Artificial Sequence: Synthetic oligonucleotide
  Sense strand starting at position 3089 of SEQ ID NO: 586153
aaacuagcguuugcaguua

SEQ ID NO: 696145 - RNA, 19 nt, Artificial Sequence
  Description of Artificial Sequence: Synthetic oligonucleotide
  Antisense strand to SEQ ID NO: 696144
uaacugcaaacgcuaguuu

SEQ ID NO: 696146 - RNA, 19 nt, Artificial Sequence
  Description of Artificial Sequence: Synthetic oligonucleotide
  Sense strand starting at position 3093 of SEQ ID NO: 586153
uagcguuugcaguuaacga

SEQ ID NO: 696147 - RNA, 19 nt, Artificial Sequence
  Description of Artificial Sequence: Synthetic oligonucleotide
  Antisense strand to SEQ ID NO: 696146
ucguuaacugcaaacgcua

SEQ ID NO: 696148 - RNA, 19 nt, Artificial Sequence
  Description of Artificial Sequence: Synthetic oligonucleotide
  Sense strand starting at position 3182 of SEQ ID NO: 586153
uucccuuuguggccauaua

SEQ ID NO: 696149 - RNA, 19 nt, Artificial Sequence
  Description of Artificial Sequence: Synthetic oligonucleotide
  Antisense strand to SEQ ID NO: 696148
uauauggccacaaagggaa

SEQ ID NO: 696150 - RNA, 19 nt, Artificial Sequence
  Description of Artificial Sequence: Synthetic oligonucleotide
  Sense strand starting at position 3247 of SEQ ID NO: 586153
gggagaguuuaauucuuaa

SEQ ID NO: 696151 - RNA, 19 nt, Artificial Sequence
  Description of Artificial Sequence: Synthetic oligonucleotide
  Antisense strand to SEQ ID NO: 696150
uuaagaauuaaacucuccc

SEQ ID NO: 696152 - RNA, 19 nt, Artificial Sequence
  Description of Artificial Sequence: Synthetic oligonucleotide
  Sense strand starting at position 3347 of SEQ ID NO: 586153
gguuaaucugcgcaagcuc

SEQ ID NO: 696153 - RNA, 19 nt, Artificial Sequence
  Description of Artificial Sequence: Synthetic oligonucleotide
  Antisense strand to SEQ ID NO: 696152
gagcuugcgcagauuaacc

SEQ ID NO: 696154 - RNA, 19 nt, Artificial Sequence
  Description of Artificial Sequence: Synthetic oligonucleotide
  Sense strand starting at position 3473 of SEQ ID NO: 586153
uagaucuugcacugucgaa

SEQ ID NO: 696155 - RNA, 19 nt, Artificial Sequence
  Description of Artificial Sequence: Synthetic oligonucleotide
  Antisense strand to SEQ ID NO: 696154
uucgacagugcaagaucua

SEQ ID NO: 696156 - RNA, 19 nt, Artificial Sequence
  Description of Artificial Sequence: Synthetic oligonucleotide
  Sense strand starting at position 3501 of SEQ ID NO: 586153
ccgaaauugcugcaaugau

SEQ ID NO: 696157 - RNA, 19 nt, Artificial Sequence
  Description of Artificial Sequence: Synthetic oligonucleotide
  Antisense strand to SEQ ID NO: 696156
aucauugcagcaauuucgg

SEQ ID NO: 696158 - RNA, 19 nt, Artificial Sequence
  Description of Artificial Sequence: Synthetic oligonucleotide
  Sense strand starting at position 3515 of SEQ ID NO: 586153
augauaaguuugcugaacu

SEQ ID NO: 696159 - RNA, 19 nt, Artificial Sequence
  Description of Artificial Sequence: Synthetic oligonucleotide
  Antisense strand to SEQ ID NO: 696158
aguucagcaaacuuaucau

SEQ ID NO: 696160 - RNA, 19 nt, Artificial Sequence
  Description of Artificial Sequence: Synthetic oligonucleotide
  Sense strand starting at position 3599 of SEQ ID NO: 586153
uggccucuguugguaagaa

SEQ ID NO: 696161 - RNA, 19 nt, Artificial Sequence
  Description of Artificial Sequence: Synthetic oligonucleotide
  Antisense strand to SEQ ID NO: 696160
uucuuaccaacagaggcca

SEQ ID NO: 696162 - RNA, 19 nt, Artificial Sequence
  Description of Artificial Sequence: Synthetic oligonucleotide
  Sense strand starting at position 3747 of SEQ ID NO: 586153
aagggauguuucuaaugac

SEQ ID NO: 696163 - RNA, 19 nt, Artificial Sequence
  Description of Artificial Sequence: Synthetic oligonucleotide
  Antisense strand to SEQ ID NO: 696162
gucauuagaaacaucccuu

SEQ ID NO: 696164 - RNA, 19 nt, Artificial Sequence
  Description of Artificial Sequence: Synthetic oligonucleotide
  Sense strand starting at position 3806 of SEQ ID NO: 586153
gucuacuagucaucaaaug

SEQ ID NO: 696165 - RNA, 19 nt, Artificial Sequence
  Description of Artificial Sequence: Synthetic oligonucleotide
  Antisense strand to SEQ ID NO: 696164
cauuugaugacuaguagac

SEQ ID NO: 696166 - RNA, 19 nt, Artificial Sequence
  Description of Artificial Sequence: Synthetic oligonucleotide
  Sense strand starting at position 3838 of SEQ ID NO: 586153
auuggaugauucugacuaa

SEQ ID NO: 696167 - RNA, 19 nt, Artificial Sequence
  Description of Artificial Sequence: Synthetic oligonucleotide
  Antisense strand to SEQ ID NO: 696166
uuagucagaaucauccaau

SEQ ID NO: 696168 - RNA, 19 nt, Artificial Sequence
  Description of Artificial Sequence: Synthetic oligonucleotide
  Sense strand starting at position 3839 of SEQ ID NO: 586153
uuggaugauucugacuaaa

SEQ ID NO: 696169 - RNA, 19 nt, Artificial Sequence
  Description of Artificial Sequence: Synthetic oligonucleotide
  Antisense strand to SEQ ID NO: 696168
uuuagucagaaucauccaa

SEQ ID NO: 696170 - RNA, 19 nt, Artificial Sequence
  Description of Artificial Sequence: Synthetic oligonucleotide
  Sense strand starting at position 3859 of SEQ ID NO: 586153
uuugucuuugaucaauaag

SEQ ID NO: 696171 - RNA, 19 nt, Artificial Sequence
  Description of Artificial Sequence: Synthetic oligonucleotide
  Antisense strand to SEQ ID NO: 696170
cuuauugaucaaagacaaa

SEQ ID NO: 696172 - RNA, 19 nt, Artificial Sequence
  Description of Artificial Sequence: Synthetic oligonucleotide
  Sense strand starting at position 3862 of SEQ ID NO: 586153
gucuuugaucaauaaguuc

SEQ ID NO: 696173 - RNA, 19 nt, Artificial Sequence
  Description of Artificial Sequence: Synthetic oligonucleotide
  Antisense strand to SEQ ID NO: 696172
gaacuuauugaucaaagac

SEQ ID NO: 696174 - RNA, 19 nt, Artificial Sequence
  Description of Artificial Sequence: Synthetic oligonucleotide
  Sense strand starting at position 3913 of SEQ ID NO: 586153
gacacaauucugugugcuu

SEQ ID NO: 696175 - RNA, 19 nt, Artificial Sequence
  Description of Artificial Sequence: Synthetic oligonucleotide
  Antisense strand to SEQ ID NO: 696174
aagcacacagaauuguguc

SEQ ID NO: 696176 - RNA, 19 nt, Artificial Sequence
  Description of Artificial Sequence: Synthetic oligonucleotide
  Sense strand starting at position 3966 of SEQ ID NO: 586153
gcccuuguggaauauugga

SEQ ID NO: 696177 - RNA, 19 nt, Artificial Sequence
  Description of Artificial Sequence: Synthetic oligonucleotide
  Antisense strand to SEQ ID NO: 696176
uccaauauuccacaagggc

SEQ ID NO: 696178 - RNA, 19 nt, Artificial Sequence
  Description of Artificial Sequence: Synthetic oligonucleotide
  Sense strand starting at position 434 of SEQ ID NO: 586154
ccuacucuuccaggaagau

SEQ ID NO: 696179 - RNA, 19 nt, Artificial Sequence
  Description of Artificial Sequence: Synthetic oligonucleotide
  Antisense strand to SEQ ID NO: 696178
aucuuccuggaagaguagg

SEQ ID NO: 696180 - RNA, 19 nt, Artificial Sequence
  Description of Artificial Sequence: Synthetic oligonucleotide
  Sense strand starting at position 643 of SEQ ID NO: 586154
uuaucuugagaacacguau

SEQ ID NO: 696181 - RNA, 19 nt, Artificial Sequence
  Description of Artificial Sequence: Synthetic oligonucleotide
  Antisense strand to SEQ ID NO: 696180
auacguguucucaagauaa

SEQ ID NO: 696182 - RNA, 19 nt, Artificial Sequence
  Description of Artificial Sequence: Synthetic oligonucleotide
  Sense strand starting at position 649 of SEQ ID NO: 586154
ugagaacacguauguaaua

SEQ ID NO: 696183 - RNA, 19 nt, Artificial Sequence
  Description of Artificial Sequence: Synthetic oligonucleotide
  Antisense strand to SEQ ID NO: 696182
uauuacauacguguucuca

SEQ ID NO: 696184 - RNA, 19 nt, Artificial Sequence
  Description of Artificial Sequence: Synthetic oligonucleotide
  Sense strand starting at position 650 of SEQ ID NO: 586154
gagaacacguauguaauau

SEQ ID NO: 696185 - RNA, 19 nt, Artificial Sequence
  Description of Artificial Sequence: Synthetic oligonucleotide
  Antisense strand to SEQ ID NO: 696184
auauuacauacguguucuc

SEQ ID NO: 696186 - RNA, 19 nt, Artificial Sequence
  Description of Artificial Sequence: Synthetic oligonucleotide
  Sense strand starting at position 741 of SEQ ID NO: 586154
ccgugaugugugaggcaau

SEQ ID NO: 696187 - RNA, 19 nt, Artificial Sequence
  Description of Artificial Sequence: Synthetic oligonucleotide
  Antisense strand to SEQ ID NO: 696186
auugccucacacaucacgg

SEQ ID NO: 696188 - RNA, 19 nt, Artificial Sequence
  Description of Artificial Sequence: Synthetic oligonucleotide
  Sense strand starting at position 755 of SEQ ID NO: 586154
gcaauuuaguuugugcuua

SEQ ID NO: 696189 - RNA, 19 nt, Artificial Sequence
  Description of Artificial Sequence: Synthetic oligonucleotide
  Antisense strand to SEQ ID NO: 696188
uaagcacaaacuaaauugc

SEQ ID NO: 696190 - RNA, 19 nt, Artificial Sequence
  Description of Artificial Sequence: Synthetic oligonucleotide
  Sense strand starting at position 818 of SEQ ID NO: 586154
gaguuucuuggauggcaga

SEQ ID NO: 696191 - RNA, 19 nt, Artificial Sequence
  Description of Artificial Sequence: Synthetic oligonucleotide
  Antisense strand to SEQ ID NO: 696190
ucugccauccaagaaacuc

SEQ ID NO: 696192 - RNA, 19 nt, Artificial Sequence
  Description of Artificial Sequence: Synthetic oligonucleotide
  Sense strand starting at position 828 of SEQ ID NO: 586154
gauggcagauaugauauuu

SEQ ID NO: 696193 - RNA, 19 nt, Artificial Sequence
  Description of Artificial Sequence: Synthetic oligonucleotide
  Antisense strand to SEQ ID NO: 696192
aaauaucauaucugccauc

SEQ ID NO: 696194 - RNA, 19 nt, Artificial Sequence
  Description of Artificial Sequence: Synthetic oligonucleotide
  Sense strand starting at position 861 of SEQ ID NO: 586154
aacagcuuccaugauguga

SEQ ID NO: 696195 - RNA, 19 nt, Artificial Sequence
  Description of Artificial Sequence: Synthetic oligonucleotide
  Antisense strand to SEQ ID NO: 696194
ucacaucauggaagcuguu

SEQ ID NO: 696196 - RNA, 19 nt, Artificial Sequence
  Description of Artificial Sequence: Synthetic oligonucleotide
  Sense strand starting at position 936 of SEQ ID NO: 586154
augcauuuguccgcuggga

SEQ ID NO: 696197 - RNA, 19 nt, Artificial Sequence
  Description of Artificial Sequence: Synthetic oligonucleotide
  Antisense strand to SEQ ID NO: 696196
ucccagcggacaaaugcau

SEQ ID NO: 696198 - RNA, 19 nt, Artificial Sequence
  Description of Artificial Sequence: Synthetic oligonucleotide
  Sense strand starting at position 956 of SEQ ID NO: 586154
ggugugucucgcgcagaca

SEQ ID NO: 696199 - RNA, 19 nt, Artificial Sequence
  Description of Artificial Sequence: Synthetic oligonucleotide
  Antisense strand to SEQ ID NO: 696198
ugucugcgcgagacacacc

SEQ ID NO: 696200 - RNA, 19 nt, Artificial Sequence
  Description of Artificial Sequence: Synthetic oligonucleotide
  Sense strand starting at position 1108 of SEQ ID NO: 586154
gcaagcagagauugaccua

SEQ ID NO: 696201 - RNA, 19 nt, Artificial Sequence
  Description of Artificial Sequence: Synthetic oligonucleotide
  Antisense strand to SEQ ID NO: 696200
uaggucaaucucugcuugc

SEQ ID NO: 696202 - RNA, 19 nt, Artificial Sequence
  Description of Artificial Sequence: Synthetic oligonucleotide
  Sense strand starting at position 1115 of SEQ ID NO: 586154
gagauugaccuauggcucu

SEQ ID NO: 696203 - RNA, 19 nt, Artificial Sequence
  Description of Artificial Sequence: Synthetic oligonucleotide
  Antisense strand to SEQ ID NO: 696202
agagccauaggucaaucuc

SEQ ID NO: 696204 - RNA, 19 nt, Artificial Sequence
  Description of Artificial Sequence: Synthetic oligonucleotide
  Sense strand starting at position 1159 of SEQ ID NO: 586154
ucgggagaaucccuuuagu

SEQ ID NO: 696205 - RNA, 19 nt, Artificial Sequence
  Description of Artificial Sequence: Synthetic oligonucleotide
  Antisense strand to SEQ ID NO: 696204
acuaaagggauucucccga

SEQ ID NO: 696206 - RNA, 19 nt, Artificial Sequence
  Description of Artificial Sequence: Synthetic oligonucleotide
  Sense strand starting at position 1290 of SEQ ID NO: 586154
auaccaguauagucagcaa

SEQ ID NO: 696207 - RNA, 19 nt, Artificial Sequence
  Description of Artificial Sequence: Synthetic oligonucleotide
  Antisense strand to SEQ ID NO: 696206
uugcugacuauacugguau

SEQ ID NO: 696208 - RNA, 19 nt, Artificial Sequence
  Description of Artificial Sequence: Synthetic oligonucleotide
  Sense strand starting at position 2360 of SEQ ID NO: 586154
gcugaagacgcugauuaga

SEQ ID NO: 696209 - RNA, 19 nt, Artificial Sequence
  Description of Artificial Sequence: Synthetic oligonucleotide
  Antisense strand to SEQ ID NO: 696208
ucuaaucagcgucuucagc

SEQ ID NO: 696210 - RNA, 19 nt, Artificial Sequence
  Description of Artificial Sequence: Synthetic oligonucleotide
  Sense strand starting at position 2362 of SEQ ID NO: 586154
ugaagacgcugauuagaga

SEQ ID NO: 696211 - RNA, 19 nt, Artificial Sequence
  Description of Artificial Sequence: Synthetic oligonucleotide
  Antisense strand to SEQ ID NO: 696210
ucucuaaucagcgucuuca

SEQ ID NO: 696212 - RNA, 19 nt, Artificial Sequence
  Description of Artificial Sequence: Synthetic oligonucleotide
  Sense strand starting at position 2554 of SEQ ID NO: 586154
gcagacuggcauuaugaag

SEQ ID NO: 696213 - RNA, 19 nt, Artificial Sequence
  Description of Artificial Sequence: Synthetic oligonucleotide
  Antisense strand to SEQ ID NO: 696212
cuucauaaugccagucugc

SEQ ID NO: 696214 - RNA, 19 nt, Artificial Sequence
  Description of Artificial Sequence: Synthetic oligonucleotide
  Sense strand starting at position 2560 of SEQ ID NO: 586154
uggcauuaugaagaauguu

SEQ ID NO: 696215 - RNA, 19 nt, Artificial Sequence
  Description of Artificial Sequence: Synthetic oligonucleotide
  Antisense strand to SEQ ID NO: 696214
aacauucuucauaaugcca

SEQ ID NO: 696216 - RNA, 19 nt, Artificial Sequence
  Description of Artificial Sequence: Synthetic oligonucleotide
  Sense strand starting at position 2568 of SEQ ID NO: 586154
ugaagaauguugucagaag

SEQ ID NO: 696217 - RNA, 19 nt, Artificial Sequence
  Description of Artificial Sequence: Synthetic oligonucleotide
  Antisense strand to SEQ ID NO: 696216
cuucugacaacauucuuca

SEQ ID NO: 696218 - RNA, 19 nt, Artificial Sequence
  Description of Artificial Sequence: Synthetic oligonucleotide
  Sense strand starting at position 2595 of SEQ ID NO: 586154
aggcacuagucaccuaaga

SEQ ID NO: 696219 - RNA, 19 nt, Artificial Sequence
  Description of Artificial Sequence: Synthetic oligonucleotide
  Antisense strand to SEQ ID NO: 696218
ucuuaggugacuagugccu

SEQ ID NO: 696220 - RNA, 19 nt, Artificial Sequence
  Description of Artificial Sequence: Synthetic oligonucleotide
  Sense strand starting at position 2710 of SEQ ID NO: 586154
gagaccuuuggucagugua

SEQ ID NO: 696221 - RNA, 19 nt, Artificial Sequence
  Description of Artificial Sequence: Synthetic oligonucleotide
  Antisense strand to SEQ ID NO: 696220
uacacugaccaaaggucuc

SEQ ID NO: 696222 - RNA, 19 nt, Artificial Sequence
  Description of Artificial Sequence: Synthetic oligonucleotide
  Sense strand starting at position 2805 of SEQ ID NO: 586154
ccguuauaagaguagggaa

SEQ ID NO: 696223 - RNA, 19 nt, Artificial Sequence
  Description of Artificial Sequence: Synthetic oligonucleotide
  Antisense strand to SEQ ID NO: 696222
uucccuacucuuauaacgg

SEQ ID NO: 696224 - RNA, 19 nt, Artificial Sequence
  Description of Artificial Sequence: Synthetic oligonucleotide
  Sense strand starting at position 2912 of SEQ ID NO: 586154
cuacaaauaguuggugaga

SEQ ID NO: 696225 - RNA, 19 nt, Artificial Sequence
  Description of Artificial Sequence: Synthetic oligonucleotide
  Antisense strand to SEQ ID NO: 696224
ucucaccaacuauuuguag

SEQ ID NO: 696226 - RNA, 19 nt, Artificial Sequence
  Description of Artificial Sequence: Synthetic oligonucleotide
  Sense strand starting at position 2913 of SEQ ID NO: 586154
uacaaauaguuggugagau

SEQ ID NO: 696227 - RNA, 19 nt, Artificial Sequence
  Description of Artificial Sequence: Synthetic oligonucleotide
  Antisense strand to SEQ ID NO: 696226
aucucaccaacuauuugua

SEQ ID NO: 696228 - RNA, 19 nt, Artificial Sequence
  Description of Artificial Sequence: Synthetic oligonucleotide
  Sense strand starting at position 2926 of SEQ ID NO: 586154
ugagauauuuaccaagaau

SEQ ID NO: 696229 - RNA, 19 nt, Artificial Sequence
  Description of Artificial Sequence: Synthetic oligonucleotide
  Antisense strand to SEQ ID NO: 696228
auucuugguaaauaucuca

SEQ ID NO: 696230 - RNA, 19 nt, Artificial Sequence
  Description of Artificial Sequence: Synthetic oligonucleotide
  Sense strand starting at position 2996 of SEQ ID NO: 586154
aagauacguuauguggaga

SEQ ID NO: 696231 - RNA, 19 nt, Artificial Sequence
  Description of Artificial Sequence: Synthetic oligonucleotide
  Antisense strand to SEQ ID NO: 696230
ucuccacauaacguaucuu

SEQ ID NO: 696232 - RNA, 19 nt, Artificial Sequence
  Description of Artificial Sequence: Synthetic oligonucleotide
  Sense strand starting at position 2997 of SEQ ID NO: 586154
agauacguuauguggagaa

SEQ ID NO: 696233 - RNA, 19 nt, Artificial Sequence
  Description of Artificial Sequence: Synthetic oligonucleotide
  Antisense strand to SEQ ID NO: 696232
uucuccacauaacguaucu

SEQ ID NO: 696234 - RNA, 19 nt, Artificial Sequence
  Description of Artificial Sequence: Synthetic oligonucleotide
  Sense strand starting at position 2999 of SEQ ID NO: 586154
auacguuauguggagaaug

SEQ ID NO: 696235 - RNA, 19 nt, Artificial Sequence
  Description of Artificial Sequence: Synthetic oligonucleotide
  Antisense strand to SEQ ID NO: 696234
cauucuccacauaacguau

SEQ ID NO: 696236 - RNA, 19 nt, Artificial Sequence
  Description of Artificial Sequence: Synthetic oligonucleotide
  Sense strand starting at position 3001 of SEQ ID NO: 586154
acguuauguggagaaugag

SEQ ID NO: 696237 - RNA, 19 nt, Artificial Sequence
  Description of Artificial Sequence: Synthetic oligonucleotide
  Antisense strand to SEQ ID NO: 696236
cucauucuccacauaacgu

SEQ ID NO: 696238 - RNA, 19 nt, Artificial Sequence
  Description of Artificial Sequence: Synthetic oligonucleotide
  Sense strand starting at position 3187 of SEQ ID NO: 586154
uuucuacuucuagggaucu

SEQ ID NO: 696239 - RNA, 19 nt, Artificial Sequence
  Description of Artificial Sequence: Synthetic oligonucleotide
  Antisense strand to SEQ ID NO: 696238
agaucccuagaaguagaaa

SEQ ID NO: 696240 - RNA, 19 nt, Artificial Sequence
  Description of Artificial Sequence: Synthetic oligonucleotide
  Sense strand starting at position 3227 of SEQ ID NO: 586154
auguguucaggaggaugua

SEQ ID NO: 696241 - RNA, 19 nt, Artificial Sequence
  Description of Artificial Sequence: Synthetic oligonucleotide
  Antisense strand to SEQ ID NO: 696240
uacauccuccugaacacau

SEQ ID NO: 696242 - RNA, 19 nt, Artificial Sequence
  Description of Artificial Sequence: Synthetic oligonucleotide
  Sense strand starting at position 3305 of SEQ ID NO: 586154
aagcgaaugaggcauuaug

SEQ ID NO: 696243 - RNA, 19 nt, Artificial Sequence
  Description of Artificial Sequence: Synthetic oligonucleotide
  Antisense strand to SEQ ID NO: 696242
cauaaugccucauucgcuu

SEQ ID NO: 696244 - RNA, 19 nt, Artificial Sequence
  Description of Artificial Sequence: Synthetic oligonucleotide
  Sense strand starting at position 3607 of SEQ ID NO: 586154
gcucuagcuguccauuuga

SEQ ID NO: 696245 - RNA, 19 nt, Artificial Sequence
  Description of Artificial Sequence: Synthetic oligonucleotide
  Antisense strand to SEQ ID NO: 696244
ucaaauggacagcuagagc

SEQ ID NO: 696246 - RNA, 19 nt, Artificial Sequence
  Description of Artificial Sequence: Synthetic oligonucleotide
  Sense strand starting at position 3676 of SEQ ID NO: 586154
gcuuuaagacaauagugca

SEQ ID NO: 696247 - RNA, 19 nt, Artificial Sequence
  Description of Artificial Sequence: Synthetic oligonucleotide
  Antisense strand to SEQ ID NO: 696246
ugcacuauugucuuaaagc

SEQ ID NO: 696248 - RNA, 19 nt, Artificial Sequence
  Description of Artificial Sequence: Synthetic oligonucleotide
  Sense strand starting at position 3726 of SEQ ID NO: 586154
agaugucuuguggaauggu

SEQ ID NO: 696249 - RNA, 19 nt, Artificial Sequence
  Description of Artificial Sequence: Synthetic oligonucleotide
  Antisense strand to SEQ ID NO: 696248
accauuccacaagacaucu

SEQ ID NO: 696250 - RNA, 19 nt, Artificial Sequence
  Description of Artificial Sequence: Synthetic oligonucleotide
  Sense strand starting at position 3825 of SEQ ID NO: 586154
guuguaccucuauacaauu

SEQ ID NO: 696251 - RNA, 19 nt, Artificial Sequence
  Description of Artificial Sequence: Synthetic oligonucleotide
  Antisense strand to SEQ ID NO: 696250
aauuguauagagguacaac

SEQ ID NO: 696252 - RNA, 19 nt, Artificial Sequence
  Description of Artificial Sequence: Synthetic oligonucleotide
  Sense strand starting at position 3862 of SEQ ID NO: 586154
ggagaaugguacccaucuu

SEQ ID NO: 696253 - RNA, 19 nt, Artificial Sequence
  Description of Artificial Sequence: Synthetic oligonucleotide
  Antisense strand to SEQ ID NO: 696252
aagauggguaccauucucc

SEQ ID NO: 696254 - RNA, 19 nt, Artificial Sequence
  Description of Artificial Sequence: Synthetic oligonucleotide
  Sense strand starting at position 3902 of SEQ ID NO: 586154
aguagcagucaguaaauca

SEQ ID NO: 696255 - RNA, 19 nt, Artificial Sequence
  Description of Artificial Sequence: Synthetic oligonucleotide
  Antisense strand to SEQ ID NO: 696254
ugauuuacugacugcuacu

SEQ ID NO: 696256 - RNA, 19 nt, Artificial Sequence
  Description of Artificial Sequence: Synthetic oligonucleotide
  Sense strand starting at position 3949 of SEQ ID NO: 586154
cuucgucugggauaggaau

SEQ ID NO: 696257 - RNA, 19 nt, Artificial Sequence
  Description of Artificial Sequence: Synthetic oligonucleotide
  Antisense strand to SEQ ID NO: 696256
auuccuaucccagacgaag

SEQ ID NO: 696258 - RNA, 19 nt, Artificial Sequence
  Description of Artificial Sequence: Synthetic oligonucleotide
  Sense strand starting at position 168 of SEQ ID NO: 586155
ccgaaauggucccuuccuu

SEQ ID NO: 696259 - RNA, 19 nt, Artificial Sequence
  Description of Artificial Sequence: Synthetic oligonucleotide
  Antisense strand to SEQ ID NO: 696258
aaggaagggaccauuucgg

SEQ ID NO: 696260 - RNA, 19 nt, Artificial Sequence
  Description of Artificial Sequence: Synthetic oligonucleotide
  Sense strand starting at position 184 of SEQ ID NO: 586155
cuuuaacugugauuaacag

SEQ ID NO: 696261 - RNA, 19 nt, Artificial Sequence
  Description of Artificial Sequence: Synthetic oligonucleotide
  Antisense strand to SEQ ID NO: 696260
cuguuaaucacaguuaaag

SEQ ID NO: 696262 - RNA, 19 nt, Artificial Sequence
  Description of Artificial Sequence: Synthetic oligonucleotide
  Sense strand starting at position 188 of SEQ ID NO: 586155
aacugugauuaacagauga

SEQ ID NO: 696263 - RNA, 19 nt, Artificial Sequence
  Description of Artificial Sequence: Synthetic oligonucleotide
  Antisense strand to SEQ ID NO: 696262
ucaucuguuaaucacaguu

SEQ ID NO: 696264 - RNA, 19 nt, Artificial Sequence
  Description of Artificial Sequence: Synthetic oligonucleotide
  Sense strand starting at position 219 of SEQ ID NO: 586155
cucugaauacuuuguggga

SEQ ID NO: 696265 - RNA, 19 nt, Artificial Sequence
  Description of Artificial Sequence: Synthetic oligonucleotide
  Antisense strand to SEQ ID NO: 696264
ucccacaaaguauucagag

SEQ ID NO: 696266 - RNA, 19 nt, Artificial Sequence
  Description of Artificial Sequence: Synthetic oligonucleotide
  Sense strand starting at position 221 of SEQ ID NO: 586155
cugaauacuuugugggaga

SEQ ID NO: 696267 - RNA, 19 nt, Artificial Sequence
  Description of Artificial Sequence: Synthetic oligonucleotide
  Antisense strand to SEQ ID NO: 696266
ucucccacaaaguauucag

SEQ ID NO: 696268 - RNA, 19 nt, Artificial Sequence
  Description of Artificial Sequence: Synthetic oligonucleotide
  Sense strand starting at position 222 of SEQ ID NO: 586155
ugaauacuuugugggagaa

SEQ ID NO: 696269 - RNA, 19 nt, Artificial Sequence
  Description of Artificial Sequence: Synthetic oligonucleotide
  Antisense strand to SEQ ID NO: 696268
uucucccacaaaguauuca

SEQ ID NO: 696270 - RNA, 19 nt, Artificial Sequence
  Description of Artificial Sequence: Synthetic oligonucleotide
  Sense strand starting at position 844 of SEQ ID NO: 586155
aauuuaagcuacgaguuga

SEQ ID NO: 696271 - RNA, 19 nt, Artificial Sequence
  Description of Artificial Sequence: Synthetic oligonucleotide
  Antisense strand to SEQ ID NO: 696270
ucaacucguagcuuaaauu

SEQ ID NO: 696272 - RNA, 19 nt, Artificial Sequence
  Description of Artificial Sequence: Synthetic oligonucleotide
  Sense strand starting at position 867 of SEQ ID NO: 586155
gacagaagguuccaaagcu

SEQ ID NO: 696273 - RNA, 19 nt, Artificial Sequence
  Description of Artificial Sequence: Synthetic oligonucleotide
  Antisense strand to SEQ ID NO: 696272
agcuuuggaaccuucuguc

SEQ ID NO: 696274 - RNA, 19 nt, Artificial Sequence
  Description of Artificial Sequence: Synthetic oligonucleotide
  Sense strand starting at position 890 of SEQ ID NO: 586155
gagaacagauggcuuuaua

SEQ ID NO: 696275 - RNA, 19 nt, Artificial Sequence
  Description of Artificial Sequence: Synthetic oligonucleotide
  Antisense strand to SEQ ID NO: 696274
uauaaagccaucuguucuc

SEQ ID NO: 696276 - RNA, 19 nt, Artificial Sequence
  Description of Artificial Sequence: Synthetic oligonucleotide
  Sense strand starting at position 898 of SEQ ID NO: 586155
auggcuuuauaaucaaaga

SEQ ID NO: 696277 - RNA, 19 nt, Artificial Sequence
  Description of Artificial Sequence: Synthetic oligonucleotide
  Antisense strand to SEQ ID NO: 696276
ucuuugauuauaaagccau

SEQ ID NO: 696278 - RNA, 19 nt, Artificial Sequence
  Description of Artificial Sequence: Synthetic oligonucleotide
  Sense strand starting at position 922 of SEQ ID NO: 586155
agcuauaacugauuaagug

SEQ ID NO: 696279 - RNA, 19 nt, Artificial Sequence
  Description of Artificial Sequence: Synthetic oligonucleotide
  Antisense strand to SEQ ID NO: 696278
cacuuaaucaguuauagcu

SEQ ID NO: 696280 - RNA, 19 nt, Artificial Sequence
  Description of Artificial Sequence: Synthetic oligonucleotide
  Sense strand starting at position 930 of SEQ ID NO: 586155
cugauuaagugccuaucau

SEQ ID NO: 696281 - RNA, 19 nt, Artificial Sequence
  Description of Artificial Sequence: Synthetic oligonucleotide
  Antisense strand to SEQ ID NO: 696280
augauaggcacuuaaucag

SEQ ID NO: 696282 - RNA, 19 nt, Artificial Sequence
  Description of Artificial Sequence: Synthetic oligonucleotide
  Sense strand starting at position 931 of SEQ ID NO: 586155
ugauuaagugccuaucaug

SEQ ID NO: 696283 - RNA, 19 nt, Artificial Sequence
  Description of Artificial Sequence: Synthetic oligonucleotide
  Antisense strand to SEQ ID NO: 696282
caugauaggcacuuaauca

SEQ ID NO: 696284 - RNA, 19 nt, Artificial Sequence
  Description of Artificial Sequence: Synthetic oligonucleotide
  Sense strand starting at position 945 of SEQ ID NO: 586155
ucauguucccagcaguguu

SEQ ID NO: 696285 - RNA, 19 nt, Artificial Sequence
  Description of Artificial Sequence: Synthetic oligonucleotide
  Antisense strand to SEQ ID NO: 696284
aacacugcugggaacauga

SEQ ID NO: 696286 - RNA, 19 nt, Artificial Sequence
  Description of Artificial Sequence: Synthetic oligonucleotide
  Sense strand starting at position 1237 of SEQ ID NO: 586155
agaagcaucuucccaggau

SEQ ID NO: 696287 - RNA, 19 nt, Artificial Sequence
  Description of Artificial Sequence: Synthetic oligonucleotide
  Antisense strand to SEQ ID NO: 696286
auccugggaagaugcuucu

SEQ ID NO: 696288 - RNA, 19 nt, Artificial Sequence
  Description of Artificial Sequence: Synthetic oligonucleotide
  Sense strand starting at position 1241 of SEQ ID NO: 586155
gcaucuucccaggaucacu

SEQ ID NO: 696289 - RNA, 19 nt, Artificial Sequence
  Description of Artificial Sequence: Synthetic oligonucleotide
  Antisense strand to SEQ ID NO: 696288
agugauccugggaagaugc

SEQ ID NO: 696290 - RNA, 19 nt, Artificial Sequence
  Description of Artificial Sequence: Synthetic oligonucleotide
  Sense strand starting at position 1315 of SEQ ID NO: 586155
cgccgagaagggugcaauu

SEQ ID NO: 696291 - RNA, 19 nt, Artificial Sequence
  Description of Artificial Sequence: Synthetic oligonucleotide
  Antisense strand to SEQ ID NO: 696290
aauugcacccuucucggcg

SEQ ID NO: 696292 - RNA, 19 nt, Artificial Sequence
  Description of Artificial Sequence: Synthetic oligonucleotide
  Sense strand starting at position 1349 of SEQ ID NO: 586155
gcgguacucaugcagggaa

SEQ ID NO: 696293 - RNA, 19 nt, Artificial Sequence
  Description of Artificial Sequence: Synthetic oligonucleotide
  Antisense strand to SEQ ID NO: 696292
uucccugcaugaguaccgc

SEQ ID NO: 696294 - RNA, 19 nt, Artificial Sequence
  Description of Artificial Sequence: Synthetic oligonucleotide
  Sense strand starting at position 1351 of SEQ ID NO: 586155
gguacucaugcagggaaau

SEQ ID NO: 696295 - RNA, 19 nt, Artificial Sequence
  Description of Artificial Sequence: Synthetic oligonucleotide
  Antisense strand to SEQ ID NO: 696294
auuucccugcaugaguacc

SEQ ID NO: 696296 - RNA, 19 nt, Artificial Sequence
  Description of Artificial Sequence: Synthetic oligonucleotide
  Sense strand starting at position 1352 of SEQ ID NO: 586155
guacucaugcagggaaauc

SEQ ID NO: 696297 - RNA, 19 nt, Artificial Sequence
  Description of Artificial Sequence: Synthetic oligonucleotide
  Antisense strand to SEQ ID NO: 696296
gauuucccugcaugaguac

SEQ ID NO: 696298 - RNA, 19 nt, Artificial Sequence
  Description of Artificial Sequence: Synthetic oligonucleotide
  Sense strand starting at position 1396 of SEQ ID NO: 586155
ucucgagaucgagaagguu

SEQ ID NO: 696299 - RNA, 19 nt, Artificial Sequence
  Description of Artificial Sequence: Synthetic oligonucleotide
  Antisense strand to SEQ ID NO: 696298
aaccuucucgaucucgaga

SEQ ID NO: 696300 - RNA, 19 nt, Artificial Sequence
  Description of Artificial Sequence: Synthetic oligonucleotide
  Sense strand starting at position 1417 of SEQ ID NO: 586155
ccauuaaccgaaggauuga

SEQ ID NO: 696301 - RNA, 19 nt, Artificial Sequence
  Description of Artificial Sequence: Synthetic oligonucleotide
  Antisense strand to SEQ ID NO: 696300
ucaauccuucgguuaaugg

SEQ ID NO: 696302 - RNA, 19 nt, Artificial Sequence
  Description of Artificial Sequence: Synthetic oligonucleotide
  Sense strand starting at position 1540 of SEQ ID NO: 586155
gggagauccuccuacuuga

SEQ ID NO: 696303 - RNA, 19 nt, Artificial Sequence
  Description of Artificial Sequence: Synthetic oligonucleotide
  Antisense strand to SEQ ID NO: 696302
ucaaguaggaggaucuccc

SEQ ID NO: 696304 - RNA, 19 nt, Artificial Sequence
  Description of Artificial Sequence: Synthetic oligonucleotide
  Sense strand starting at position 1630 of SEQ ID NO: 586155
cguuaauucgggcaucgga

SEQ ID NO: 696305 - RNA, 19 nt, Artificial Sequence
  Description of Artificial Sequence: Synthetic oligonucleotide
  Antisense strand to SEQ ID NO: 696304
uccgaugcccgaauuaacg

SEQ ID NO: 696306 - RNA, 19 nt, Artificial Sequence
  Description of Artificial Sequence: Synthetic oligonucleotide
  Sense strand starting at position 1651 of SEQ ID NO: 586155
cggcuaggagcucgaacau

SEQ ID NO: 696307 - RNA, 19 nt, Artificial Sequence
  Description of Artificial Sequence: Synthetic oligonucleotide
  Antisense strand to SEQ ID NO: 696306
auguucgagcuccuagccg

SEQ ID NO: 696308 - RNA, 19 nt, Artificial Sequence
  Description of Artificial Sequence: Synthetic oligonucleotide
  Sense strand starting at position 2270 of SEQ ID NO: 586155
uuugucaggagaugaguua

SEQ ID NO: 696309 - RNA, 19 nt, Artificial Sequence
  Description of Artificial Sequence: Synthetic oligonucleotide
  Antisense strand to SEQ ID NO: 696308
uaacucaucuccugacaaa

SEQ ID NO: 696310 - RNA, 19 nt, Artificial Sequence
  Description of Artificial Sequence: Synthetic oligonucleotide
  Sense strand starting at position 2413 of SEQ ID NO: 586155
ccgugcucccucuguggaa

SEQ ID NO: 696311 - RNA, 19 nt, Artificial Sequence
  Description of Artificial Sequence: Synthetic oligonucleotide
  Antisense strand to SEQ ID NO: 696310
uuccacagagggagcacgg

SEQ ID NO: 696312 - RNA, 19 nt, Artificial Sequence
  Description of Artificial Sequence: Synthetic oligonucleotide
  Sense strand starting at position 2414 of SEQ ID NO: 586155
cgugcucccucuguggaaa

SEQ ID NO: 696313 - RNA, 19 nt, Artificial Sequence
  Description of Artificial Sequence: Synthetic oligonucleotide
  Antisense strand to SEQ ID NO: 696312
uuuccacagagggagcacg

SEQ ID NO: 696314 - RNA, 19 nt, Artificial Sequence
  Description of Artificial Sequence: Synthetic oligonucleotide
  Sense strand starting at position 2460 of SEQ ID NO: 586155
cgacccuuccugggacaga

SEQ ID NO: 696315 - RNA, 19 nt, Artificial Sequence
  Description of Artificial Sequence: Synthetic oligonucleotide
  Antisense strand to SEQ ID NO: 696314
ucugucccaggaagggucg

SEQ ID NO: 696316 - RNA, 19 nt, Artificial Sequence
  Description of Artificial Sequence: Synthetic oligonucleotide
  Sense strand starting at position 2461 of SEQ ID NO: 586155
gacccuuccugggacagaa

SEQ ID NO: 696317 - RNA, 19 nt, Artificial Sequence
  Description of Artificial Sequence: Synthetic oligonucleotide
  Antisense strand to SEQ ID NO: 696316
uucugucccaggaaggguc

SEQ ID NO: 696318 - RNA, 19 nt, Artificial Sequence
  Description of Artificial Sequence: Synthetic oligonucleotide
  Sense strand starting at position 2588 of SEQ ID NO: 586155
agaugcagccuccaagaaa

SEQ ID NO: 696319 - RNA, 19 nt, Artificial Sequence
  Description of Artificial Sequence: Synthetic oligonucleotide
  Antisense strand to SEQ ID NO: 696318
uuucuuggaggcugcaucu

SEQ ID NO: 696320 - RNA, 19 nt, Artificial Sequence
  Description of Artificial Sequence: Synthetic oligonucleotide
  Sense strand starting at position 2638 of SEQ ID NO: 586155
gcccuugaacccuagaaau

SEQ ID NO: 696321 - RNA, 19 nt, Artificial Sequence
  Description of Artificial Sequence: Synthetic oligonucleotide
  Antisense strand to SEQ ID NO: 696320
auuucuaggguucaagggc

SEQ ID NO: 696322 - RNA, 19 nt, Artificial Sequence
  Description of Artificial Sequence: Synthetic oligonucleotide
  Sense strand starting at position 3157 of SEQ ID NO: 586155
ucuccuucccuuugguauu

SEQ ID NO: 696323 - RNA, 19 nt, Artificial Sequence
  Description of Artificial Sequence: Synthetic oligonucleotide
  Antisense strand to SEQ ID NO: 696322
aauaccaaagggaaggaga

SEQ ID NO: 696324 - RNA, 19 nt, Artificial Sequence
  Description of Artificial Sequence: Synthetic oligonucleotide
  Sense strand starting at position 3170 of SEQ ID NO: 586155
gguauuguaaggugagguu

SEQ ID NO: 696325 - RNA, 19 nt, Artificial Sequence
  Description of Artificial Sequence: Synthetic oligonucleotide
  Antisense strand to SEQ ID NO: 696324
aaccucaccuuacaauacc

SEQ ID NO: 696326 - RNA, 19 nt, Artificial Sequence
  Description of Artificial Sequence: Synthetic oligonucleotide
  Sense strand starting at position 3183 of SEQ ID NO: 586155
gagguuuauguagguauac

SEQ ID NO: 696327 - RNA, 19 nt, Artificial Sequence
  Description of Artificial Sequence: Synthetic oligonucleotide
  Antisense strand to SEQ ID NO: 696326
guauaccuacauaaaccuc

SEQ ID NO: 696328 - RNA, 19 nt, Artificial Sequence
  Description of Artificial Sequence: Synthetic oligonucleotide
  Sense strand starting at position 3528 of SEQ ID NO: 586155
ccgcuauguucuuuggagu

SEQ ID NO: 696329 - RNA, 19 nt, Artificial Sequence
  Description of Artificial Sequence: Synthetic oligonucleotide
  Antisense strand to SEQ ID NO: 696328
acuccaaagaacauagcgg

SEQ ID NO: 696330 - RNA, 19 nt, Artificial Sequence
  Description of Artificial Sequence: Synthetic oligonucleotide
  Sense strand starting at position 3529 of SEQ ID NO: 586155
cgcuauguucuuuggaguu

SEQ ID NO: 696331 - RNA, 19 nt, Artificial Sequence
  Description of Artificial Sequence: Synthetic oligonucleotide
  Antisense strand to SEQ ID NO: 696330
aacuccaaagaacauagcg

SEQ ID NO: 696332 - RNA, 19 nt, Artificial Sequence
  Description of Artificial Sequence: Synthetic oligonucleotide
  Sense strand starting at position 3535 of SEQ ID NO: 586155
guucuuuggaguuagugca

SEQ ID NO: 696333 - RNA, 19 nt, Artificial Sequence
  Description of Artificial Sequence: Synthetic oligonucleotide
  Antisense strand to SEQ ID NO: 696332
ugcacuaacuccaaagaac

SEQ ID NO: 696334 - RNA, 19 nt, Artificial Sequence
  Description of Artificial Sequence: Synthetic oligonucleotide
  Sense strand starting at position 3724 of SEQ ID NO: 586155
auuagagucucauaggaaa

SEQ ID NO: 696335 - RNA, 19 nt, Artificial Sequence
  Description of Artificial Sequence: Synthetic oligonucleotide
  Antisense strand to SEQ ID NO: 696334
uuuccuaugagacucuaau

SEQ ID NO: 696336 - RNA, 19 nt, Artificial Sequence
  Description of Artificial Sequence: Synthetic oligonucleotide
  Sense strand starting at position 3978 of SEQ ID NO: 586155
ucugaccugugguuacaaa

SEQ ID NO: 696337 - RNA, 19 nt, Artificial Sequence
  Description of Artificial Sequence: Synthetic oligonucleotide
  Antisense strand to SEQ ID NO: 696336
uuuguaaccacaggucaga

SEQ ID NO: 696338 - RNA, 19 nt, Artificial Sequence
  Description of Artificial Sequence: Synthetic oligonucleotide
  Sense strand starting at position 104 of SEQ ID NO: 586156
ucaguuuguacaggaggaa

SEQ ID NO: 696339 - RNA, 19 nt, Artificial Sequence
  Description of Artificial Sequence: Synthetic oligonucleotide
  Antisense strand to SEQ ID NO: 696338
uuccuccuguacaaacuga

SEQ ID NO: 696340 - RNA, 19 nt, Artificial Sequence
  Description of Artificial Sequence: Synthetic oligonucleotide
  Sense strand starting at position 154 of SEQ ID NO: 586156
caaagucacucggcuucua

SEQ ID NO: 696341 - RNA, 19 nt, Artificial Sequence
  Description of Artificial Sequence: Synthetic oligonucleotide
  Antisense strand to SEQ ID NO: 696340
uagaagccgagugacuuug

SEQ ID NO: 696342 - RNA, 19 nt, Artificial Sequence
  Description of Artificial Sequence: Synthetic oligonucleotide
  Sense strand starting at position 159 of SEQ ID NO: 586156
ucacucggcuucuacuaaa

SEQ ID NO: 696343 - RNA, 19 nt, Artificial Sequence
  Description of Artificial Sequence: Synthetic oligonucleotide
  Antisense strand to SEQ ID NO: 696342
uuuaguagaagccgaguga

SEQ ID NO: 696344 - RNA, 19 nt, Artificial Sequence
  Description of Artificial Sequence: Synthetic oligonucleotide
  Sense strand starting at position 162 of SEQ ID NO: 586156
cucggcuucuacuaaauga

SEQ ID NO: 696345 - RNA, 19 nt, Artificial Sequence
  Description of Artificial Sequence: Synthetic oligonucleotide
  Antisense strand to SEQ ID NO: 696344
ucauuuaguagaagccgag

SEQ ID NO: 696346 - RNA, 19 nt, Artificial Sequence
  Description of Artificial Sequence: Synthetic oligonucleotide
  Sense strand starting at position 244 of SEQ ID NO: 586156
cuaugaucaaggugagcaa

SEQ ID NO: 696347 - RNA, 19 nt, Artificial Sequence
  Description of Artificial Sequence: Synthetic oligonucleotide
  Antisense strand to SEQ ID NO: 696346
uugcucaccuugaucauag

SEQ ID NO: 696348 - RNA, 19 nt, Artificial Sequence
  Description of Artificial Sequence: Synthetic oligonucleotide
  Sense strand starting at position 259 of SEQ ID NO: 586156
gcaacaaacgcacguuuau

SEQ ID NO: 696349 - RNA, 19 nt, Artificial Sequence
  Description of Artificial Sequence: Synthetic oligonucleotide
  Antisense strand to SEQ ID NO: 696348
auaaacgugcguuuguugc

SEQ ID NO: 696350 - RNA, 19 nt, Artificial Sequence
  Description of Artificial Sequence: Synthetic oligonucleotide
  Sense strand starting at position 300 of SEQ ID NO: 586156
ccaggugucuugcaguauu

SEQ ID NO: 696351 - RNA, 19 nt, Artificial Sequence
  Description of Artificial Sequence: Synthetic oligonucleotide
  Antisense strand to SEQ ID NO: 696350
aauacugcaagacaccugg

SEQ ID NO: 696352 - RNA, 19 nt, Artificial Sequence
  Description of Artificial Sequence: Synthetic oligonucleotide
  Sense strand starting at position 303 of SEQ ID NO: 586156
ggugucuugcaguauugca

SEQ ID NO: 696353 - RNA, 19 nt, Artificial Sequence
  Description of Artificial Sequence: Synthetic oligonucleotide
  Antisense strand to SEQ ID NO: 696352
ugcaauacugcaagacacc

SEQ ID NO: 696354 - RNA, 19 nt, Artificial Sequence
  Description of Artificial Sequence: Synthetic oligonucleotide
  Sense strand starting at position 378 of SEQ ID NO: 586156
gcaggaguuggguggcuua

SEQ ID NO: 696355 - RNA, 19 nt, Artificial Sequence
  Description of Artificial Sequence: Synthetic oligonucleotide
  Antisense strand to SEQ ID NO: 696354
uaagccacccaacuccugc

SEQ ID NO: 696356 - RNA, 19 nt, Artificial Sequence
  Description of Artificial Sequence: Synthetic oligonucleotide
  Sense strand starting at position 433 of SEQ ID NO: 586156
cuaccuaggucccuaagau

SEQ ID NO: 696357 - RNA, 19 nt, Artificial Sequence
  Description of Artificial Sequence: Synthetic oligonucleotide
  Antisense strand to SEQ ID NO: 696356
aucuuagggaccuagguag

SEQ ID NO: 696358 - RNA, 19 nt, Artificial Sequence
  Description of Artificial Sequence: Synthetic oligonucleotide
  Sense strand starting at position 920 of SEQ ID NO: 586156
gagaaagggucucgcaaug

SEQ ID NO: 696359 - RNA, 19 nt, Artificial Sequence
  Description of Artificial Sequence: Synthetic oligonucleotide
  Antisense strand to SEQ ID NO: 696358
cauugcgagacccuuucuc

SEQ ID NO: 696360 - RNA, 19 nt, Artificial Sequence
  Description of Artificial Sequence: Synthetic oligonucleotide
  Sense strand starting at position 1002 of SEQ ID NO: 586156
cuaggauucuaugugugag

SEQ ID NO: 696361 - RNA, 19 nt, Artificial Sequence
  Description of Artificial Sequence: Synthetic oligonucleotide
  Antisense strand to SEQ ID NO: 696360
cucacacauagaauccuag

SEQ ID NO: 696362 - RNA, 19 nt, Artificial Sequence
  Description of Artificial Sequence: Synthetic oligonucleotide
  Sense strand starting at position 2150 of SEQ ID NO: 586156
ccgucaaugcuuuaccaau

SEQ ID NO: 696363 - RNA, 19 nt, Artificial Sequence
  Description of Artificial Sequence: Synthetic oligonucleotide
  Antisense strand to SEQ ID NO: 696362
auugguaaagcauugacgg

SEQ ID NO: 696364 - RNA, 19 nt, Artificial Sequence
  Description of Artificial Sequence: Synthetic oligonucleotide
  Sense strand starting at position 2487 of SEQ ID NO: 586156
ccguguccucgccacgaaa

SEQ ID NO: 696365 - RNA, 19 nt, Artificial Sequence
  Description of Artificial Sequence: Synthetic oligonucleotide
  Antisense strand to SEQ ID NO: 696364
uuucguggcgaggacacgg

SEQ ID NO: 696366 - RNA, 19 nt, Artificial Sequence
  Description of Artificial Sequence: Synthetic oligonucleotide
  Sense strand starting at position 2489 of SEQ ID NO: 586156
guguccucgccacgaaaca

SEQ ID NO: 696367 - RNA, 19 nt, Artificial Sequence
  Description of Artificial Sequence: Synthetic oligonucleotide
  Antisense strand to SEQ ID NO: 696366
uguuucguggcgaggacac

SEQ ID NO: 696368 - RNA, 19 nt, Artificial Sequence
  Description of Artificial Sequence: Synthetic oligonucleotide
  Sense strand starting at position 2607 of SEQ ID NO: 586156
ucuuuaaguuacccgguua

SEQ ID NO: 696369 - RNA, 19 nt, Artificial Sequence
  Description of Artificial Sequence: Synthetic oligonucleotide
  Antisense strand to SEQ ID NO: 696368
uaaccggguaacuuaaaga

SEQ ID NO: 696370 - RNA, 19 nt, Artificial Sequence
  Description of Artificial Sequence: Synthetic oligonucleotide
  Sense strand starting at position 3402 of SEQ ID NO: 586156
auugguuuguccugcagua

SEQ ID NO: 696371 - RNA, 19 nt, Artificial Sequence
  Description of Artificial Sequence: Synthetic oligonucleotide
  Antisense strand to SEQ ID NO: 696370
uacugcaggacaaaccaau

SEQ ID NO: 696372 - RNA, 19 nt, Artificial Sequence
  Description of Artificial Sequence: Synthetic oligonucleotide
  Sense strand starting at position 3526 of SEQ ID NO: 586156
gaggauuaaauguguccag

SEQ ID NO: 696373 - RNA, 19 nt, Artificial Sequence
  Description of Artificial Sequence: Synthetic oligonucleotide
  Antisense strand to SEQ ID NO: 696372
cuggacacauuuaauccuc

SEQ ID NO: 696374 - RNA, 19 nt, Artificial Sequence
  Description of Artificial Sequence: Synthetic oligonucleotide
  Sense strand starting at position 3529 of SEQ ID NO: 586156
gauuaaauguguccaggug

SEQ ID NO: 696375 - RNA, 19 nt, Artificial Sequence
  Description of Artificial Sequence: Synthetic oligonucleotide
  Antisense strand to SEQ ID NO: 696374
caccuggacacauuuaauc

SEQ ID NO: 696376 - RNA, 19 nt, Artificial Sequence
  Description of Artificial Sequence: Synthetic oligonucleotide
  Sense strand starting at position 3530 of SEQ ID NO: 586156
auuaaauguguccaggugu

SEQ ID NO: 696377 - RNA, 19 nt, Artificial Sequence
  Description of Artificial Sequence: Synthetic oligonucleotide
  Antisense strand to SEQ ID NO: 696376
acaccuggacacauuuaau

SEQ ID NO: 696378 - RNA, 19 nt, Artificial Sequence
  Description of Artificial Sequence: Synthetic oligonucleotide
  Sense strand starting at position 3536 of SEQ ID NO: 586156
uguguccaggugugugaau

SEQ ID NO: 696379 - RNA, 19 nt, Artificial Sequence
  Description of Artificial Sequence: Synthetic oligonucleotide
  Antisense strand to SEQ ID NO: 696378
auucacacaccuggacaca

SEQ ID NO: 696380 - RNA, 19 nt, Artificial Sequence
  Description of Artificial Sequence: Synthetic oligonucleotide
  Sense strand starting at position 3545 of SEQ ID NO: 586156
gugugugaaucgggucaua

SEQ ID NO: 696381 - RNA, 19 nt, Artificial Sequence
  Description of Artificial Sequence: Synthetic oligonucleotide
  Antisense strand to SEQ ID NO: 696380
uaugacccgauucacacac

SEQ ID NO: 696382 - RNA, 19 nt, Artificial Sequence
  Description of Artificial Sequence: Synthetic oligonucleotide
  Sense strand starting at position 3574 of SEQ ID NO: 586156
acaggaagugcucgaacuu

SEQ ID NO: 696383 - RNA, 19 nt, Artificial Sequence
  Description of Artificial Sequence: Synthetic oligonucleotide
  Antisense strand to SEQ ID NO: 696382
aaguucgagcacuuccugu

SEQ ID NO: 696384 - RNA, 19 nt, Artificial Sequence
  Description of Artificial Sequence: Synthetic oligonucleotide
  Sense strand starting at position 3575 of SEQ ID NO: 586156
caggaagugcucgaacuuu

SEQ ID NO: 696385 - RNA, 19 nt, Artificial Sequence
  Description of Artificial Sequence: Synthetic oligonucleotide
  Antisense strand to SEQ ID NO: 696384
aaaguucgagcacuuccug

SEQ ID NO: 696386 - RNA, 19 nt, Artificial Sequence
  Description of Artificial Sequence: Synthetic oligonucleotide
  Sense strand starting at position 3732 of SEQ ID NO: 586156
ggacaaguguaggguaacu

SEQ ID NO: 696387 - RNA, 19 nt, Artificial Sequence
  Description of Artificial Sequence: Synthetic oligonucleotide
  Antisense strand to SEQ ID NO: 696386
aguuacccuacacuugucc

SEQ ID NO: 696388 - RNA, 19 nt, Artificial Sequence
  Description of Artificial Sequence: Synthetic oligonucleotide
  Sense strand starting at position 3833 of SEQ ID NO: 586156
cccugaguggucuaaauca

SEQ ID NO: 696389 - RNA, 19 nt, Artificial Sequence
  Description of Artificial Sequence: Synthetic oligonucleotide
  Antisense strand to SEQ ID NO: 696388
ugauuuagaccacucaggg

SEQ ID NO: 696390 - RNA, 19 nt, Artificial Sequence
  Description of Artificial Sequence: Synthetic oligonucleotide
  Sense strand starting at position 3874 of SEQ ID NO: 586156
cugcacuugugaccuaaga

SEQ ID NO: 696391 - RNA, 19 nt, Artificial Sequence
  Description of Artificial Sequence: Synthetic oligonucleotide
  Antisense strand to SEQ ID NO: 696390
ucuuaggucacaagugcag

SEQ ID NO: 696392 - RNA, 19 nt, Artificial Sequence
  Description of Artificial Sequence: Synthetic oligonucleotide
  Sense strand starting at position 3966 of SEQ ID NO: 586156
ggaaucuggacucguaagu

SEQ ID NO: 696393 - RNA, 19 nt, Artificial Sequence
  Description of Artificial Sequence: Synthetic oligonucleotide
  Antisense strand to SEQ ID NO: 696392
acuuacgaguccagauucc

SEQ ID NO: 696394 - RNA, 19 nt, Artificial Sequence
  Description of Artificial Sequence: Synthetic oligonucleotide
  Sense strand starting at position 50 of SEQ ID NO: 586157
cugcuagaacacuguaaau

SEQ ID NO: 696395 - RNA, 19 nt, Artificial Sequence
  Description of Artificial Sequence: Synthetic oligonucleotide
  Antisense strand to SEQ ID NO: 696394
auuuacaguguucuagcag

SEQ ID NO: 696396 - RNA, 19 nt, Artificial Sequence
  Description of Artificial Sequence: Synthetic oligonucleotide
  Sense strand starting at position 52 of SEQ ID NO: 586157
gcuagaacacuguaaauug

SEQ ID NO: 696397 - RNA, 19 nt, Artificial Sequence
  Description of Artificial Sequence: Synthetic oligonucleotide
  Antisense strand to SEQ ID NO: 696396
caauuuacaguguucuagc

SEQ ID NO: 696398 - RNA, 19 nt, Artificial Sequence
  Description of Artificial Sequence: Synthetic oligonucleotide
  Sense strand starting at position 70 of SEQ ID NO: 586157
gcauauauggcucacauua

SEQ ID NO: 696399 - RNA, 19 nt, Artificial Sequence
  Description of Artificial Sequence: Synthetic oligonucleotide
  Antisense strand to SEQ ID NO: 696398
uaaugugagccauauaugc

SEQ ID NO: 696400 - RNA, 19 nt, Artificial Sequence
  Description of Artificial Sequence: Synthetic oligonucleotide
  Sense strand starting at position 135 of SEQ ID NO: 586157
uaugauuaagccuguggaa

SEQ ID NO: 696401 - RNA, 19 nt, Artificial Sequence
  Description of Artificial Sequence: Synthetic oligonucleotide
  Antisense strand to SEQ ID NO: 696400
uuccacaggcuuaaucaua

SEQ ID NO: 696402 - RNA, 19 nt, Artificial Sequence
  Description of Artificial Sequence: Synthetic oligonucleotide
  Sense strand starting at position 137 of SEQ ID NO: 586157
ugauuaagccuguggaauc

SEQ ID NO: 696403 - RNA, 19 nt, Artificial Sequence
  Description of Artificial Sequence: Synthetic oligonucleotide
  Antisense strand to SEQ ID NO: 696402
gauuccacaggcuuaauca

SEQ ID NO: 696404 - RNA, 19 nt, Artificial Sequence
  Description of Artificial Sequence: Synthetic oligonucleotide
  Sense strand starting at position 166 of SEQ ID NO: 586157
ugaugagauuaacaagaag

SEQ ID NO: 696405 - RNA, 19 nt, Artificial Sequence
  Description of Artificial Sequence: Synthetic oligonucleotide
  Antisense strand to SEQ ID NO: 696404
cuucuuguuaaucucauca

SEQ ID NO: 696406 - RNA, 19 nt, Artificial Sequence
  Description of Artificial Sequence: Synthetic oligonucleotide
  Sense strand starting at position 283 of SEQ ID NO: 586157
cucuauaggauguagaguu

SEQ ID NO: 696407 - RNA, 19 nt, Artificial Sequence
  Description of Artificial Sequence: Synthetic oligonucleotide
  Antisense strand to SEQ ID NO: 696406
aacucuacauccuauagag

SEQ ID NO: 696408 - RNA, 19 nt, Artificial Sequence
  Description of Artificial Sequence: Synthetic oligonucleotide
  Sense strand starting at position 311 of SEQ ID NO: 586157
aauuguaauugggauccca

SEQ ID NO: 696409 - RNA, 19 nt, Artificial Sequence
  Description of Artificial Sequence: Synthetic oligonucleotide
  Antisense strand to SEQ ID NO: 696408
ugggaucccaauuacaauu

SEQ ID NO: 696410 - RNA, 19 nt, Artificial Sequence
  Description of Artificial Sequence: Synthetic oligonucleotide
  Sense strand starting at position 399 of SEQ ID NO: 586157
augauacauuggcacauuu

SEQ ID NO: 696411 - RNA, 19 nt, Artificial Sequence
  Description of Artificial Sequence: Synthetic oligonucleotide
  Antisense strand to SEQ ID NO: 696410
aaaugugccaauguaucau

SEQ ID NO: 696412 - RNA, 19 nt, Artificial Sequence
  Description of Artificial Sequence: Synthetic oligonucleotide
  Sense strand starting at position 409 of SEQ ID NO: 586157
ggcacauuuggguguauuc

SEQ ID NO: 696413 - RNA, 19 nt, Artificial Sequence
  Description of Artificial Sequence: Synthetic oligonucleotide
  Antisense strand to SEQ ID NO: 696412
gaauacacccaaaugugcc

SEQ ID NO: 696414 - RNA, 19 nt, Artificial Sequence
  Description of Artificial Sequence: Synthetic oligonucleotide
  Sense strand starting at position 437 of SEQ ID NO: 586157
uugggaguuuaguuaguga

SEQ ID NO: 696415 - RNA, 19 nt, Artificial Sequence
  Description of Artificial Sequence: Synthetic oligonucleotide
  Antisense strand to SEQ ID NO: 696414
ucacuaacuaaacucccaa

SEQ ID NO: 696416 - RNA, 19 nt, Artificial Sequence
  Description of Artificial Sequence: Synthetic oligonucleotide
  Sense strand starting at position 440 of SEQ ID NO: 586157
ggaguuuaguuagugagag

SEQ ID NO: 696417 - RNA, 19 nt, Artificial Sequence
  Description of Artificial Sequence: Synthetic oligonucleotide
  Antisense strand to SEQ ID NO: 696416
cucucacuaacuaaacucc

SEQ ID NO: 696418 - RNA, 19 nt, Artificial Sequence
  Description of Artificial Sequence: Synthetic oligonucleotide
  Sense strand starting at position 442 of SEQ ID NO: 586157
aguuuaguuagugagaguc

SEQ ID NO: 696419 - RNA, 19 nt, Artificial Sequence
  Description of Artificial Sequence: Synthetic oligonucleotide
  Antisense strand to SEQ ID NO: 696418
gacucucacuaacuaaacu

SEQ ID NO: 696420 - RNA, 19 nt, Artificial Sequence
  Description of Artificial Sequence: Synthetic oligonucleotide
  Sense strand starting at position 669 of SEQ ID NO: 586157
aggauaagcucagaaagug

SEQ ID NO: 696421 - RNA, 19 nt, Artificial Sequence
  Description of Artificial Sequence: Synthetic oligonucleotide
  Antisense strand to SEQ ID NO: 696420
cacuuucugagcuuauccu

SEQ ID NO: 696422 - RNA, 19 nt, Artificial Sequence
  Description of Artificial Sequence: Synthetic oligonucleotide
  Sense strand starting at position 847 of SEQ ID NO: 586157
gguggauggcuugggaagu

SEQ ID NO: 696423 - RNA, 19 nt, Artificial Sequence
  Description of Artificial Sequence: Synthetic oligonucleotide
  Antisense strand to SEQ ID NO: 696422
acuucccaagccauccacc

SEQ ID NO: 696424 - RNA, 19 nt, Artificial Sequence
  Description of Artificial Sequence: Synthetic oligonucleotide
  Sense strand starting at position 905 of SEQ ID NO: 586157
gucccaggucccugacauu

SEQ ID NO: 696425 - RNA, 19 nt, Artificial Sequence
  Description of Artificial Sequence: Synthetic oligonucleotide
  Antisense strand to SEQ ID NO: 696424
aaugucagggaccugggac

SEQ ID NO: 696426 - RNA, 19 nt, Artificial Sequence
  Description of Artificial Sequence: Synthetic oligonucleotide
  Sense strand starting at position 1240 of SEQ ID NO: 586157
cuccucuucguaugucaga

SEQ ID NO: 696427 - RNA, 19 nt, Artificial Sequence
  Description of Artificial Sequence: Synthetic oligonucleotide
  Antisense strand to SEQ ID NO: 696426
ucugacauacgaagaggag

SEQ ID NO: 696428 - RNA, 19 nt, Artificial Sequence
  Description of Artificial Sequence: Synthetic oligonucleotide
  Sense strand starting at position 1247 of SEQ ID NO: 586157
ucguaugucagagaccaga

SEQ ID NO: 696429 - RNA, 19 nt, Artificial Sequence
  Description of Artificial Sequence: Synthetic oligonucleotide
  Antisense strand to SEQ ID NO: 696428
ucuggucucugacauacga

SEQ ID NO: 696430 - RNA, 19 nt, Artificial Sequence
  Description of Artificial Sequence: Synthetic oligonucleotide
  Sense strand starting at position 1433 of SEQ ID NO: 586157
ggauguugaagcggaaauc

SEQ ID NO: 696431 - RNA, 19 nt, Artificial Sequence
  Description of Artificial Sequence: Synthetic oligonucleotide
  Antisense strand to SEQ ID NO: 696430
gauuuccgcuucaacaucc

SEQ ID NO: 696432 - RNA, 19 nt, Artificial Sequence
  Description of Artificial Sequence: Synthetic oligonucleotide
  Sense strand starting at position 1470 of SEQ ID NO: 586157
gcugguaucaaagacggaa

SEQ ID NO: 696433 - RNA, 19 nt, Artificial Sequence
  Description of Artificial Sequence: Synthetic oligonucleotide
  Antisense strand to SEQ ID NO: 696432
uuccgucuuugauaccagc

SEQ ID NO: 696434 - RNA, 19 nt, Artificial Sequence
  Description of Artificial Sequence: Synthetic oligonucleotide
  Sense strand starting at position 1767 of SEQ ID NO: 586157
aggagagguauaugccaaa

SEQ ID NO: 696435 - RNA, 19 nt, Artificial Sequence
  Description of Artificial Sequence: Synthetic oligonucleotide
  Antisense strand to SEQ ID NO: 696434
uuuggcauauaccucuccu

SEQ ID NO: 696436 - RNA, 19 nt, Artificial Sequence
  Description of Artificial Sequence: Synthetic oligonucleotide
  Sense strand starting at position 1881 of SEQ ID NO: 586157
ggagcuauucugggcucca

SEQ ID NO: 696437 - RNA, 19 nt, Artificial Sequence
  Description of Artificial Sequence: Synthetic oligonucleotide
  Antisense strand to SEQ ID NO: 696436
uggagcccagaauagcucc

SEQ ID NO: 696438 - RNA, 19 nt, Artificial Sequence
  Description of Artificial Sequence: Synthetic oligonucleotide
  Sense strand starting at position 1896 of SEQ ID NO: 586157
uccacaugacuguguucuu

SEQ ID NO: 696439 - RNA, 19 nt, Artificial Sequence
  Description of Artificial Sequence: Synthetic oligonucleotide
  Antisense strand to SEQ ID NO: 696438
aagaacacagucaugugga

SEQ ID NO: 696440 - RNA, 19 nt, Artificial Sequence
  Description of Artificial Sequence: Synthetic oligonucleotide
  Sense strand starting at position 1903 of SEQ ID NO: 586157
gacuguguucuugggccaa

SEQ ID NO: 696441 - RNA, 19 nt, Artificial Sequence
  Description of Artificial Sequence: Synthetic oligonucleotide
  Antisense strand to SEQ ID NO: 696440
uuggcccaagaacacaguc

SEQ ID NO: 696442 - RNA, 19 nt, Artificial Sequence
  Description of Artificial Sequence: Synthetic oligonucleotide
  Sense strand starting at position 2577 of SEQ ID NO: 586157
guaugaccucaggguggaa

SEQ ID NO: 696443 - RNA, 19 nt, Artificial Sequence
  Description of Artificial Sequence: Synthetic oligonucleotide
  Antisense strand to SEQ ID NO: 696442
uuccacccugaggucauac

SEQ ID NO: 696444 - RNA, 19 nt, Artificial Sequence
  Description of Artificial Sequence: Synthetic oligonucleotide
  Sense strand starting at position 2623 of SEQ ID NO: 586157
uccgucaucucggcauuaa

SEQ ID NO: 696445 - RNA, 19 nt, Artificial Sequence
  Description of Artificial Sequence: Synthetic oligonucleotide
  Antisense strand to SEQ ID NO: 696444
uuaaugccgagaugacgga

SEQ ID NO: 696446 - RNA, 19 nt, Artificial Sequence
  Description of Artificial Sequence: Synthetic oligonucleotide
  Sense strand starting at position 2624 of SEQ ID NO: 586157
ccgucaucucggcauuaaa

SEQ ID NO: 696447 - RNA, 19 nt, Artificial Sequence
  Description of Artificial Sequence: Synthetic oligonucleotide
  Antisense strand to SEQ ID NO: 696446
uuuaaugccgagaugacgg

SEQ ID NO: 696448 - RNA, 19 nt, Artificial Sequence
  Description of Artificial Sequence: Synthetic oligonucleotide
  Sense strand starting at position 2775 of SEQ ID NO: 586157
gugggugccagauaauauu

SEQ ID NO: 696449 - RNA, 19 nt, Artificial Sequence
  Description of Artificial Sequence: Synthetic oligonucleotide
  Antisense strand to SEQ ID NO: 696448
aauauuaucuggcacccac

SEQ ID NO: 696450 - RNA, 19 nt, Artificial Sequence
  Description of Artificial Sequence: Synthetic oligonucleotide
  Sense strand starting at position 2802 of SEQ ID NO: 586157
uuccaaaugucaucuguua

SEQ ID NO: 696451 - RNA, 19 nt, Artificial Sequence
  Description of Artificial Sequence: Synthetic oligonucleotide
  Antisense strand to SEQ ID NO: 696450
uaacagaugacauuuggaa

SEQ ID NO: 696452 - RNA, 19 nt, Artificial Sequence
  Description of Artificial Sequence: Synthetic oligonucleotide
  Sense strand starting at position 2870 of SEQ ID NO: 586157
cacagauugcccucgcugu

SEQ ID NO: 696453 - RNA, 19 nt, Artificial Sequence
  Description of Artificial Sequence: Synthetic oligonucleotide
  Antisense strand to SEQ ID NO: 696452
acagcgagggcaaucugug

SEQ ID NO: 696454 - RNA, 19 nt, Artificial Sequence
  Description of Artificial Sequence: Synthetic oligonucleotide
  Sense strand starting at position 2918 of SEQ ID NO: 586157
acagacgugugccugagua

SEQ ID NO: 696455 - RNA, 19 nt, Artificial Sequence
  Description of Artificial Sequence: Synthetic oligonucleotide
  Antisense strand to SEQ ID NO: 696454
uacucaggcacacgucugu

SEQ ID NO: 696456 - RNA, 19 nt, Artificial Sequence
  Description of Artificial Sequence: Synthetic oligonucleotide
  Sense strand starting at position 2920 of SEQ ID NO: 586157
agacgugugccugaguaac

SEQ ID NO: 696457 - RNA, 19 nt, Artificial Sequence
  Description of Artificial Sequence: Synthetic oligonucleotide
  Antisense strand to SEQ ID NO: 696456
guuacucaggcacacgucu

SEQ ID NO: 696458 - RNA, 19 nt, Artificial Sequence
  Description of Artificial Sequence: Synthetic oligonucleotide
  Sense strand starting at position 3078 of SEQ ID NO: 586157
ggagaaaugucucugugua

SEQ ID NO: 696459 - RNA, 19 nt, Artificial Sequence
  Description of Artificial Sequence: Synthetic oligonucleotide
  Antisense strand to SEQ ID NO: 696458
uacacagagacauuucucc

SEQ ID NO: 696460 - RNA, 19 nt, Artificial Sequence
  Description of Artificial Sequence: Synthetic oligonucleotide
  Sense strand starting at position 3079 of SEQ ID NO: 586157
gagaaaugucucuguguac

SEQ ID NO: 696461 - RNA, 19 nt, Artificial Sequence
  Description of Artificial Sequence: Synthetic oligonucleotide
  Antisense strand to SEQ ID NO: 696460
guacacagagacauuucuc

SEQ ID NO: 696462 - RNA, 19 nt, Artificial Sequence
  Description of Artificial Sequence: Synthetic oligonucleotide
  Sense strand starting at position 3080 of SEQ ID NO: 586157
agaaaugucucuguguacu

SEQ ID NO: 696463 - RNA, 19 nt, Artificial Sequence
  Description of Artificial Sequence: Synthetic oligonucleotide
  Antisense strand to SEQ ID NO: 696462
aguacacagagacauuucu

SEQ ID NO: 696464 - RNA, 19 nt, Artificial Sequence
  Description of Artificial Sequence: Synthetic oligonucleotide
  Sense strand starting at position 3414 of SEQ ID NO: 586157
ccauuuaucuguggugaga

SEQ ID NO: 696465 - RNA, 19 nt, Artificial Sequence
  Description of Artificial Sequence: Synthetic oligonucleotide
  Antisense strand to SEQ ID NO: 696464
ucucaccacagauaaaugg

SEQ ID NO: 696466 - RNA, 19 nt, Artificial Sequence
  Description of Artificial Sequence: Synthetic oligonucleotide
  Sense strand starting at position 3488 of SEQ ID NO: 586157
cgccuugcugugcaauaga

SEQ ID NO: 696467 - RNA, 19 nt, Artificial Sequence
  Description of Artificial Sequence: Synthetic oligonucleotide
  Antisense strand to SEQ ID NO: 696466
ucuauugcacagcaaggcg

SEQ ID NO: 696468 - RNA, 19 nt, Artificial Sequence
  Description of Artificial Sequence: Synthetic oligonucleotide
  Sense strand starting at position 3622 of SEQ ID NO: 586157
ccuuuacuucuaugaguuu

SEQ ID NO: 696469 - RNA, 19 nt, Artificial Sequence
  Description of Artificial Sequence: Synthetic oligonucleotide
  Antisense strand to SEQ ID NO: 696468
aaacucauagaaguaaagg

SEQ ID NO: 696470 - RNA, 19 nt, Artificial Sequence
  Description of Artificial Sequence: Synthetic oligonucleotide
  Sense strand starting at position 3675 of SEQ ID NO: 586157
cgguauuugucuuucugca

SEQ ID NO: 696471 - RNA, 19 nt, Artificial Sequence
  Description of Artificial Sequence: Synthetic oligonucleotide
  Antisense strand to SEQ ID NO: 696470
ugcagaaagacaaauaccg

SEQ ID NO: 696472 - RNA, 19 nt, Artificial Sequence
  Description of Artificial Sequence: Synthetic oligonucleotide
  Sense strand starting at position 3775 of SEQ ID NO: 586157
uuuccaucucuuggcgauu

SEQ ID NO: 696473 - RNA, 19 nt, Artificial Sequence
  Description of Artificial Sequence: Synthetic oligonucleotide
  Antisense strand to SEQ ID NO: 696472
aaucgccaagagauggaaa

SEQ ID NO: 696474 - RNA, 19 nt, Artificial Sequence
  Description of Artificial Sequence: Synthetic oligonucleotide
  Sense strand starting at position 1 of SEQ ID NO: 586158
aguuuaguuagugagaguc

SEQ ID NO: 696475 - RNA, 19 nt, Artificial Sequence
  Description of Artificial Sequence: Synthetic oligonucleotide
  Antisense strand to SEQ ID NO: 696474
gacucucacuaacuaaacu

SEQ ID NO: 696476 - RNA, 19 nt, Artificial Sequence
  Description of Artificial Sequence: Synthetic oligonucleotide
  Sense strand starting at position 228 of SEQ ID NO: 586158
aggauaagcucagaaagug

SEQ ID NO: 696477 - RNA, 19 nt, Artificial Sequence
  Description of Artificial Sequence: Synthetic oligonucleotide
  Antisense strand to SEQ ID NO: 696476
cacuuucugagcuuauccu

SEQ ID NO: 696478 - RNA, 19 nt, Artificial Sequence
  Description of Artificial Sequence: Synthetic oligonucleotide
  Sense strand starting at position 406 of SEQ ID NO: 586158
gguggauggcuugggaagu

SEQ ID NO: 696479 - RNA, 19 nt, Artificial Sequence
  Description of Artificial Sequence: Synthetic oligonucleotide
  Antisense strand to SEQ ID NO: 696478
acuucccaagccauccacc

SEQ ID NO: 696480 - RNA, 19 nt, Artificial Sequence
  Description of Artificial Sequence: Synthetic oligonucleotide
  Sense strand starting at position 464 of SEQ ID NO: 586158
gucccaggucccugacauu

SEQ ID NO: 696481 - RNA, 19 nt, Artificial Sequence
  Description of Artificial Sequence: Synthetic oligonucleotide
  Antisense strand to SEQ ID NO: 696480
aaugucagggaccugggac

SEQ ID NO: 696482 - RNA, 19 nt, Artificial Sequence
  Description of Artificial Sequence: Synthetic oligonucleotide
  Sense strand starting at position 799 of SEQ ID NO: 586158
cuccucuucguaugucaga

SEQ ID NO: 696483 - RNA, 19 nt, Artificial Sequence
  Description of Artificial Sequence: Synthetic oligonucleotide
  Antisense strand to SEQ ID NO: 696482
ucugacauacgaagaggag

SEQ ID NO: 696484 - RNA, 19 nt, Artificial Sequence
  Description of Artificial Sequence: Synthetic oligonucleotide
  Sense strand starting at position 806 of SEQ ID NO: 586158
ucguaugucagagaccaga

SEQ ID NO: 696485 - RNA, 19 nt, Artificial Sequence
  Description of Artificial Sequence: Synthetic oligonucleotide
  Antisense strand to SEQ ID NO: 696484
ucuggucucugacauacga

SEQ ID NO: 696486 - RNA, 19 nt, Artificial Sequence
  Description of Artificial Sequence: Synthetic oligonucleotide
  Sense strand starting at position 992 of SEQ ID NO: 586158
ggauguugaagcggaaauc

SEQ ID NO: 696487 - RNA, 19 nt, Artificial Sequence
  Description of Artificial Sequence: Synthetic oligonucleotide
  Antisense strand to SEQ ID NO: 696486
gauuuccgcuucaacaucc

SEQ ID NO: 696488 - RNA, 19 nt, Artificial Sequence
  Description of Artificial Sequence: Synthetic oligonucleotide
  Sense strand starting at position 1029 of SEQ ID NO: 586158
gcugguaucaaagacggaa

SEQ ID NO: 696489 - RNA, 19 nt, Artificial Sequence
  Description of Artificial Sequence: Synthetic oligonucleotide
  Antisense strand to SEQ ID NO: 696488
uuccgucuuugauaccagc

SEQ ID NO: 696490 - RNA, 19 nt, Artificial Sequence
  Description of Artificial Sequence: Synthetic oligonucleotide
  Sense strand starting at position 1326 of SEQ ID NO: 586158
aggagagguauaugccaaa

SEQ ID NO: 696491 - RNA, 19 nt, Artificial Sequence
  Description of Artificial Sequence: Synthetic oligonucleotide
  Antisense strand to SEQ ID NO: 696490
uuuggcauauaccucuccu

SEQ ID NO: 696492 - RNA, 19 nt, Artificial Sequence
  Description of Artificial Sequence: Synthetic oligonucleotide
  Sense strand starting at position 1440 of SEQ ID NO: 586158
ggagcuauucugggcucca

SEQ ID NO: 696493 - RNA, 19 nt, Artificial Sequence
  Description of Artificial Sequence: Synthetic oligonucleotide
  Antisense strand to SEQ ID NO: 696492
uggagcccagaauagcucc

SEQ ID NO: 696494 - RNA, 19 nt, Artificial Sequence
  Description of Artificial Sequence: Synthetic oligonucleotide
  Sense strand starting at position 1455 of SEQ ID NO: 586158
uccacaugacuguguucuu

SEQ ID NO: 696495 - RNA, 19 nt, Artificial Sequence
  Description of Artificial Sequence: Synthetic oligonucleotide
  Antisense strand to SEQ ID NO: 696494
aagaacacagucaugugga

SEQ ID NO: 696496 - RNA, 19 nt, Artificial Sequence
  Description of Artificial Sequence: Synthetic oligonucleotide
  Sense strand starting at position 1462 of SEQ ID NO: 586158
gacuguguucuugggccaa

SEQ ID NO: 696497 - RNA, 19 nt, Artificial Sequence
  Description of Artificial Sequence: Synthetic oligonucleotide
  Antisense strand to SEQ ID NO: 696496
uuggcccaagaacacaguc

SEQ ID NO: 696498 - RNA, 19 nt, Artificial Sequence
  Description of Artificial Sequence: Synthetic oligonucleotide
  Sense strand starting at position 2136 of SEQ ID NO: 586158
guaugaccucaggguggaa

SEQ ID NO: 696499 - RNA, 19 nt, Artificial Sequence
  Description of Artificial Sequence: Synthetic oligonucleotide
  Antisense strand to SEQ ID NO: 696498
uuccacccugaggucauac

SEQ ID NO: 696500 - RNA, 19 nt, Artificial Sequence
  Description of Artificial Sequence: Synthetic oligonucleotide
  Sense strand starting at position 2182 of SEQ ID NO: 586158
uccgucaucucggcauuaa

SEQ ID NO: 696501 - RNA, 19 nt, Artificial Sequence
  Description of Artificial Sequence: Synthetic oligonucleotide
  Antisense strand to SEQ ID NO: 696500
uuaaugccgagaugacgga

SEQ ID NO: 696502 - RNA, 19 nt, Artificial Sequence
  Description of Artificial Sequence: Synthetic oligonucleotide
  Sense strand starting at position 2183 of SEQ ID NO: 586158
ccgucaucucggcauuaaa

SEQ ID NO: 696503 - RNA, 19 nt, Artificial Sequence
  Description of Artificial Sequence: Synthetic oligonucleotide
  Antisense strand to SEQ ID NO: 696502
uuuaaugccgagaugacgg

SEQ ID NO: 696504 - RNA, 19 nt, Artificial Sequence
  Description of Artificial Sequence: Synthetic oligonucleotide
  Sense strand starting at position 2334 of SEQ ID NO: 586158
gugggugccagauaauauu

SEQ ID NO: 696505 - RNA, 19 nt, Artificial Sequence
  Description of Artificial Sequence: Synthetic oligonucleotide
  Antisense strand to SEQ ID NO: 696504
aauauuaucuggcacccac

SEQ ID NO: 696506 - RNA, 19 nt, Artificial Sequence
  Description of Artificial Sequence: Synthetic oligonucleotide
  Sense strand starting at position 2361 of SEQ ID NO: 586158
uuccaaaugucaucuguua

SEQ ID NO: 696507 - RNA, 19 nt, Artificial Sequence
  Description of Artificial Sequence: Synthetic oligonucleotide
  Antisense strand to SEQ ID NO: 696506
uaacagaugacauuuggaa

SEQ ID NO: 696508 - RNA, 19 nt, Artificial Sequence
  Description of Artificial Sequence: Synthetic oligonucleotide
  Sense strand starting at position 2429 of SEQ ID NO: 586158
cacagauugcccucgcugu

SEQ ID NO: 696509 - RNA, 19 nt, Artificial Sequence
  Description of Artificial Sequence: Synthetic oligonucleotide
  Antisense strand to SEQ ID NO: 696508
acagcgagggcaaucugug

SEQ ID NO: 696510 - RNA, 19 nt, Artificial Sequence
  Description of Artificial Sequence: Synthetic oligonucleotide
  Sense strand starting at position 2477 of SEQ ID NO: 586158
acagacgugugccugagua

SEQ ID NO: 696511 - RNA, 19 nt, Artificial Sequence
  Description of Artificial Sequence: Synthetic oligonucleotide
  Antisense strand to SEQ ID NO: 696510
uacucaggcacacgucugu

SEQ ID NO: 696512 - RNA, 19 nt, Artificial Sequence
  Description of Artificial Sequence: Synthetic oligonucleotide
  Sense strand starting at position 2479 of SEQ ID NO: 586158
agacgugugccugaguaac

SEQ ID NO: 696513 - RNA, 19 nt, Artificial Sequence
  Description of Artificial Sequence: Synthetic oligonucleotide
  Antisense strand to SEQ ID NO: 696512
guuacucaggcacacgucu

SEQ ID NO: 696514 - RNA, 19 nt, Artificial Sequence
  Description of Artificial Sequence: Synthetic oligonucleotide
  Sense strand starting at position 2637 of SEQ ID NO: 586158
ggagaaaugucucugugua

SEQ ID NO: 696515 - RNA, 19 nt, Artificial Sequence
  Description of Artificial Sequence: Synthetic oligonucleotide
  Antisense strand to SEQ ID NO: 696514
uacacagagacauuucucc

SEQ ID NO: 696516 - RNA, 19 nt, Artificial Sequence
  Description of Artificial Sequence: Synthetic oligonucleotide
  Sense strand starting at position 2638 of SEQ ID NO: 586158
gagaaaugucucuguguac

SEQ ID NO: 696517 - RNA, 19 nt, Artificial Sequence
  Description of Artificial Sequence: Synthetic oligonucleotide
  Antisense strand to SEQ ID NO: 696516
guacacagagacauuucuc

SEQ ID NO: 696518 - RNA, 19 nt, Artificial Sequence
  Description of Artificial Sequence: Synthetic oligonucleotide
  Sense strand starting at position 2639 of SEQ ID NO: 586158
agaaaugucucuguguacu

SEQ ID NO: 696519 - RNA, 19 nt, Artificial Sequence
  Description of Artificial Sequence: Synthetic oligonucleotide
  Antisense strand to SEQ ID NO: 696518
aguacacagagacauuucu

SEQ ID NO: 696520 - RNA, 19 nt, Artificial Sequence
  Description of Artificial Sequence: Synthetic oligonucleotide
  Sense strand starting at position 2973 of SEQ ID NO: 586158
ccauuuaucuguggugaga

SEQ ID NO: 696521 - RNA, 19 nt, Artificial Sequence
  Description of Artificial Sequence: Synthetic oligonucleotide
  Antisense strand to SEQ ID NO: 696520
ucucaccacagauaaaugg

SEQ ID NO: 696522 - RNA, 19 nt, Artificial Sequence
  Description of Artificial Sequence: Synthetic oligonucleotide
  Sense strand starting at position 3047 of SEQ ID NO: 586158
cgccuugcugugcaauaga

SEQ ID NO: 696523 - RNA, 19 nt, Artificial Sequence
  Description of Artificial Sequence: Synthetic oligonucleotide
  Antisense strand to SEQ ID NO: 696522
ucuauugcacagcaaggcg

SEQ ID NO: 696524 - RNA, 19 nt, Artificial Sequence
  Description of Artificial Sequence: Synthetic oligonucleotide
  Sense strand starting at position 3181 of SEQ ID NO: 586158
ccuuuacuucuaugaguuu

SEQ ID NO: 696525 - RNA, 19 nt, Artificial Sequence
  Description of Artificial Sequence: Synthetic oligonucleotide
  Antisense strand to SEQ ID NO: 696524
aaacucauagaaguaaagg

SEQ ID NO: 696526 - RNA, 19 nt, Artificial Sequence
  Description of Artificial Sequence: Synthetic oligonucleotide
  Sense strand starting at position 3234 of SEQ ID NO: 586158
cgguauuugucuuucugca

SEQ ID NO: 696527 - RNA, 19 nt, Artificial Sequence
  Description of Artificial Sequence: Synthetic oligonucleotide
  Antisense strand to SEQ ID NO: 696526
ugcagaaagacaaauaccg

SEQ ID NO: 696528 - RNA, 19 nt, Artificial Sequence
  Description of Artificial Sequence: Synthetic oligonucleotide
  Sense strand starting at position 3334 of SEQ ID NO: 586158
uuuccaucucuuggcgauu

SEQ ID NO: 696529 - RNA, 19 nt, Artificial Sequence
  Description of Artificial Sequence: Synthetic oligonucleotide
  Antisense strand to SEQ ID NO: 696528
aaucgccaagagauggaaa

SEQ ID NO: 696530 - RNA, 19 nt, Artificial Sequence
  Description of Artificial Sequence: Synthetic oligonucleotide
  Sense strand starting at position 3340 of SEQ ID NO: 586158
ucucuuggcgauugugagu

SEQ ID NO: 696531 - RNA, 19 nt, Artificial Sequence
  Description of Artificial Sequence: Synthetic oligonucleotide
  Antisense strand to SEQ ID NO: 696530
acucacaaucgccaagaga

SEQ ID NO: 696532 - RNA, 19 nt, Artificial Sequence
  Description of Artificial Sequence: Synthetic oligonucleotide
  Sense strand starting at position 3594 of SEQ ID NO: 586158
cagucuaacaggugugaga

SEQ ID NO: 696533 - RNA, 19 nt, Artificial Sequence
  Description of Artificial Sequence: Synthetic oligonucleotide
  Antisense strand to SEQ ID NO: 696532
ucucacaccuguuagacug

SEQ ID NO: 696534 - RNA, 19 nt, Artificial Sequence
  Description of Artificial Sequence: Synthetic oligonucleotide
  Sense strand starting at position 3596 of SEQ ID NO: 586158
gucuaacaggugugagaua

SEQ ID NO: 696535 - RNA, 19 nt, Artificial Sequence
  Description of Artificial Sequence: Synthetic oligonucleotide
  Antisense strand to SEQ ID NO: 696534
uaucucacaccuguuagac

SEQ ID NO: 696536 - RNA, 19 nt, Artificial Sequence
  Description of Artificial Sequence: Synthetic oligonucleotide
  Sense strand starting at position 3673 of SEQ ID NO: 586158
ccaauauauguuggccauu

SEQ ID NO: 696537 - RNA, 19 nt, Artificial Sequence
  Description of Artificial Sequence: Synthetic oligonucleotide
  Antisense strand to SEQ ID NO: 696536
aauggccaacauauauugg

SEQ ID NO: 696538 - RNA, 19 nt, Artificial Sequence
  Description of Artificial Sequence: Synthetic oligonucleotide
  Sense strand starting at position 3767 of SEQ ID NO: 586158
guuauuuaguaguuugagu

SEQ ID NO: 696539 - RNA, 19 nt, Artificial Sequence
  Description of Artificial Sequence: Synthetic oligonucleotide
  Antisense strand to SEQ ID NO: 696538
acucaaacuacuaaauaac

SEQ ID NO: 696540 - RNA, 19 nt, Artificial Sequence
  Description of Artificial Sequence: Synthetic oligonucleotide
  Sense strand starting at position 3769 of SEQ ID NO: 586158
uauuuaguaguuugaguuc

SEQ ID NO: 696541 - RNA, 19 nt, Artificial Sequence
  Description of Artificial Sequence: Synthetic oligonucleotide
  Antisense strand to SEQ ID NO: 696540
gaacucaaacuacuaaaua

SEQ ID NO: 696542 - RNA, 19 nt, Artificial Sequence
  Description of Artificial Sequence: Synthetic oligonucleotide
  Sense strand starting at position 3785 of SEQ ID NO: 586158
uuccuuguguaguuuggau

SEQ ID NO: 696543 - RNA, 19 nt, Artificial Sequence
  Description of Artificial Sequence: Synthetic oligonucleotide
  Antisense strand to SEQ ID NO: 696542
auccaaacuacacaaggaa

SEQ ID NO: 696544 - RNA, 19 nt, Artificial Sequence
  Description of Artificial Sequence: Synthetic oligonucleotide
  Sense strand starting at position 3787 of SEQ ID NO: 586158
ccuuguguaguuuggauau

SEQ ID NO: 696545 - RNA, 19 nt, Artificial Sequence
  Description of Artificial Sequence: Synthetic oligonucleotide
  Antisense strand to SEQ ID NO: 696544
auauccaaacuacacaagg

SEQ ID NO: 696546 - RNA, 19 nt, Artificial Sequence
  Description of Artificial Sequence: Synthetic oligonucleotide
  Sense strand starting at position 3816 of SEQ ID NO: 586158
uccgauguuugauuugcaa

SEQ ID NO: 696547 - RNA, 19 nt, Artificial Sequence
  Description of Artificial Sequence: Synthetic oligonucleotide
  Antisense strand to SEQ ID NO: 696546
uugcaaaucaaacaucgga

SEQ ID NO: 696548 - RNA, 19 nt, Artificial Sequence
  Description of Artificial Sequence: Synthetic oligonucleotide
  Sense strand starting at position 3818 of SEQ ID NO: 586158
cgauguuugauuugcaaau

SEQ ID NO: 696549 - RNA, 19 nt, Artificial Sequence
  Description of Artificial Sequence: Synthetic oligonucleotide
  Antisense strand to SEQ ID NO: 696548
auuugcaaaucaaacaucg

SEQ ID NO: 696550 - RNA, 19 nt, Artificial Sequence
  Description of Artificial Sequence: Synthetic oligonucleotide
  Sense strand starting at position 3852 of SEQ ID NO: 586158
uguagauuguuucuccacu

SEQ ID NO: 696551 - RNA, 19 nt, Artificial Sequence
  Description of Artificial Sequence: Synthetic oligonucleotide
  Antisense strand to SEQ ID NO: 696550
aguggagaaacaaucuaca

SEQ ID NO: 696552 - RNA, 19 nt, Artificial Sequence
  Description of Artificial Sequence: Synthetic oligonucleotide
  Sense strand starting at position 3860 of SEQ ID NO: 586158
guuucuccacucugucauu

SEQ ID NO: 696553 - RNA, 19 nt, Artificial Sequence
  Description of Artificial Sequence: Synthetic oligonucleotide
  Antisense strand to SEQ ID NO: 696552
aaugacagaguggagaaac

SEQ ID NO: 696554 - RNA, 19 nt, Artificial Sequence
  Description of Artificial Sequence: Synthetic oligonucleotide
  Sense strand starting at position 287 of SEQ ID NO: 586159
gacagaggccucuauguug

SEQ ID NO: 696555 - RNA, 19 nt, Artificial Sequence
  Description of Artificial Sequence: Synthetic oligonucleotide
  Antisense strand to SEQ ID NO: 696554
caacauagaggccucuguc

SEQ ID NO: 696556 - RNA, 19 nt, Artificial Sequence
  Description of Artificial Sequence: Synthetic oligonucleotide
  Sense strand starting at position 298 of SEQ ID NO: 586159
cuauguugacauugaucca

SEQ ID NO: 696557 - RNA, 19 nt, Artificial Sequence
  Description of Artificial Sequence: Synthetic oligonucleotide
  Antisense strand to SEQ ID NO: 696556
uggaucaaugucaacauag

SEQ ID NO: 696558 - RNA, 19 nt, Artificial Sequence
  Description of Artificial Sequence: Synthetic oligonucleotide
  Sense strand starting at position 301 of SEQ ID NO: 586159
uguugacauugauccauua

SEQ ID NO: 696559 - RNA, 19 nt, Artificial Sequence
  Description of Artificial Sequence: Synthetic oligonucleotide
  Antisense strand to SEQ ID NO: 696558
uaauggaucaaugucaaca

SEQ ID NO: 696560 - RNA, 19 nt, Artificial Sequence
  Description of Artificial Sequence: Synthetic oligonucleotide
  Sense strand starting at position 603 of SEQ ID NO: 586159
gucuguuguguuccaggca

SEQ ID NO: 696561 - RNA, 19 nt, Artificial Sequence
  Description of Artificial Sequence: Synthetic oligonucleotide
  Antisense strand to SEQ ID NO: 696560
ugccuggaacacaacagac

SEQ ID NO: 696562 - RNA, 19 nt, Artificial Sequence
  Description of Artificial Sequence: Synthetic oligonucleotide
  Sense strand starting at position 719 of SEQ ID NO: 586159
cucuuuaagguuuagcaca

SEQ ID NO: 696563 - RNA, 19 nt, Artificial Sequence
  Description of Artificial Sequence: Synthetic oligonucleotide
  Antisense strand to SEQ ID NO: 696562
ugugcuaaaccuuaaagag

SEQ ID NO: 696564 - RNA, 19 nt, Artificial Sequence
  Description of Artificial Sequence: Synthetic oligonucleotide
  Sense strand starting at position 724 of SEQ ID NO: 586159
uaagguuuagcacacagua

SEQ ID NO: 696565 - RNA, 19 nt, Artificial Sequence
  Description of Artificial Sequence: Synthetic oligonucleotide
  Antisense strand to SEQ ID NO: 696564
uacugugugcuaaaccuua

SEQ ID NO: 696566 - RNA, 19 nt, Artificial Sequence
  Description of Artificial Sequence: Synthetic oligonucleotide
  Sense strand starting at position 754 of SEQ ID NO: 586159
auagcaagucuuuaauaag

SEQ ID NO: 696567 - RNA, 19 nt, Artificial Sequence
  Description of Artificial Sequence: Synthetic oligonucleotide
  Antisense strand to SEQ ID NO: 696566
cuuauuaaagacuugcuau

SEQ ID NO: 696568 - RNA, 19 nt, Artificial Sequence
  Description of Artificial Sequence: Synthetic oligonucleotide
  Sense strand starting at position 823 of SEQ ID NO: 586159
uuaccugugauagggauua

SEQ ID NO: 696569 - RNA, 19 nt, Artificial Sequence
  Description of Artificial Sequence: Synthetic oligonucleotide
  Antisense strand to SEQ ID NO: 696568
uaaucccuaucacagguaa

SEQ ID NO: 696570 - RNA, 19 nt, Artificial Sequence
  Description of Artificial Sequence: Synthetic oligonucleotide
  Sense strand starting at position 848 of SEQ ID NO: 586159
gugcauuaaauggauguca

SEQ ID NO: 696571 - RNA, 19 nt, Artificial Sequence
  Description of Artificial Sequence: Synthetic oligonucleotide
  Antisense strand to SEQ ID NO: 696570
ugacauccauuuaaugcac

SEQ ID NO: 696572 - RNA, 19 nt, Artificial Sequence
  Description of Artificial Sequence: Synthetic oligonucleotide
  Sense strand starting at position 864 of SEQ ID NO: 586159
ucacuuaacgucuaugaca

SEQ ID NO: 696573 - RNA, 19 nt, Artificial Sequence
  Description of Artificial Sequence: Synthetic oligonucleotide
  Antisense strand to SEQ ID NO: 696572
ugucauagacguuaaguga

SEQ ID NO: 696574 - RNA, 19 nt, Artificial Sequence
  Description of Artificial Sequence: Synthetic oligonucleotide
  Sense strand starting at position 921 of SEQ ID NO: 586159
cagagucauuagguaacuu

SEQ ID NO: 696575 - RNA, 19 nt, Artificial Sequence
  Description of Artificial Sequence: Synthetic oligonucleotide
  Antisense strand to SEQ ID NO: 696574
aaguuaccuaaugacucug

SEQ ID NO: 696576 - RNA, 19 nt, Artificial Sequence
  Description of Artificial Sequence: Synthetic oligonucleotide
  Sense strand starting at position 974 of SEQ ID NO: 586159
ugggauauagcccagucau

SEQ ID NO: 696577 - RNA, 19 nt, Artificial Sequence
  Description of Artificial Sequence: Synthetic oligonucleotide
  Antisense strand to SEQ ID NO: 696576
augacugggcuauauccca

SEQ ID NO: 696578 - RNA, 19 nt, Artificial Sequence
  Description of Artificial Sequence: Synthetic oligonucleotide
  Sense strand starting at position 1274 of SEQ ID NO: 586159
gcacaaagcagugauaaga

SEQ ID NO: 696579 - RNA, 19 nt, Artificial Sequence
  Description of Artificial Sequence: Synthetic oligonucleotide
  Antisense strand to SEQ ID NO: 696578
ucuuaucacugcuuugugc

SEQ ID NO: 696580 - RNA, 19 nt, Artificial Sequence
  Description of Artificial Sequence: Synthetic oligonucleotide
  Sense strand starting at position 1347 of SEQ ID NO: 586159
uagaaagcuccuuagaagu

SEQ ID NO: 696581 - RNA, 19 nt, Artificial Sequence
  Description of Artificial Sequence: Synthetic oligonucleotide
  Antisense strand to SEQ ID NO: 696580
acuucuaaggagcuuucua

SEQ ID NO: 696582 - RNA, 19 nt, Artificial Sequence
  Description of Artificial Sequence: Synthetic oligonucleotide
  Sense strand starting at position 1381 of SEQ ID NO: 586159
gaacaauaugagugacgau

SEQ ID NO: 696583 - RNA, 19 nt, Artificial Sequence
  Description of Artificial Sequence: Synthetic oligonucleotide
  Antisense strand to SEQ ID NO: 696582
aucgucacucauauuguuc

SEQ ID NO: 696584 - RNA, 19 nt, Artificial Sequence
  Description of Artificial Sequence: Synthetic oligonucleotide
  Sense strand starting at position 1741 of SEQ ID NO: 586159
ugcaauugaguugauauuc

SEQ ID NO: 696585 - RNA, 19 nt, Artificial Sequence
  Description of Artificial Sequence: Synthetic oligonucleotide
  Antisense strand to SEQ ID NO: 696584
gaauaucaacucaauugca

SEQ ID NO: 696586 - RNA, 19 nt, Artificial Sequence
  Description of Artificial Sequence: Synthetic oligonucleotide
  Sense strand starting at position 1750 of SEQ ID NO: 586159
guugauauucuauaagcaa

SEQ ID NO: 696587 - RNA, 19 nt, Artificial Sequence
  Description of Artificial Sequence: Synthetic oligonucleotide
  Antisense strand to SEQ ID NO: 696586
uugcuuauagaauaucaac

SEQ ID NO: 696588 - RNA, 19 nt, Artificial Sequence
  Description of Artificial Sequence: Synthetic oligonucleotide
  Sense strand starting at position 2026 of SEQ ID NO: 586159
caaugugugcuucugugua

SEQ ID NO: 696589 - RNA, 19 nt, Artificial Sequence
  Description of Artificial Sequence: Synthetic oligonucleotide
  Antisense strand to SEQ ID NO: 696588
uacacagaagcacacauug

SEQ ID NO: 696590 - RNA, 19 nt, Artificial Sequence
  Description of Artificial Sequence: Synthetic oligonucleotide
  Sense strand starting at position 2060 of SEQ ID NO: 586159
ccaguuggugguuaaauua

SEQ ID NO: 696591 - RNA, 19 nt, Artificial Sequence
  Description of Artificial Sequence: Synthetic oligonucleotide
  Antisense strand to SEQ ID NO: 696590
uaauuuaaccaccaacugg

SEQ ID NO: 696592 - RNA, 19 nt, Artificial Sequence
  Description of Artificial Sequence: Synthetic oligonucleotide
  Sense strand starting at position 2124 of SEQ ID NO: 586159
gguaaaguauuacccauga

SEQ ID NO: 696593 - RNA, 19 nt, Artificial Sequence
  Description of Artificial Sequence: Synthetic oligonucleotide
  Antisense strand to SEQ ID NO: 696592
ucauggguaauacuuuacc

SEQ ID NO: 696594 - RNA, 19 nt, Artificial Sequence
  Description of Artificial Sequence: Synthetic oligonucleotide
  Sense strand starting at position 2129 of SEQ ID NO: 586159
aguauuacccaugacuucu

SEQ ID NO: 696595 - RNA, 19 nt, Artificial Sequence
  Description of Artificial Sequence: Synthetic oligonucleotide
  Antisense strand to SEQ ID NO: 696594
agaagucauggguaauacu

SEQ ID NO: 696596 - RNA, 19 nt, Artificial Sequence
  Description of Artificial Sequence: Synthetic oligonucleotide
  Sense strand starting at position 2263 of SEQ ID NO: 586159
aguguugcuacugauggaa

SEQ ID NO: 696597 - RNA, 19 nt, Artificial Sequence
  Description of Artificial Sequence: Synthetic oligonucleotide
  Antisense strand to SEQ ID NO: 696596
uuccaucaguagcaacacu

SEQ ID NO: 696598 - RNA, 19 nt, Artificial Sequence
  Description of Artificial Sequence: Synthetic oligonucleotide
  Sense strand starting at position 2266 of SEQ ID NO: 586159
guugcuacugauggaacaa

SEQ ID NO: 696599 - RNA, 19 nt, Artificial Sequence
  Description of Artificial Sequence: Synthetic oligonucleotide
  Antisense strand to SEQ ID NO: 696598
uuguuccaucaguagcaac

SEQ ID NO: 696600 - RNA, 19 nt, Artificial Sequence
  Description of Artificial Sequence: Synthetic oligonucleotide
  Sense strand starting at position 2462 of SEQ ID NO: 586159
cuaauuugcugucuuugau

SEQ ID NO: 696601 - RNA, 19 nt, Artificial Sequence
  Description of Artificial Sequence: Synthetic oligonucleotide
  Antisense strand to SEQ ID NO: 696600
aucaaagacagcaaauuag

SEQ ID NO: 696602 - RNA, 19 nt, Artificial Sequence
  Description of Artificial Sequence: Synthetic oligonucleotide
  Sense strand starting at position 2530 of SEQ ID NO: 586159
agugacaucuaaucugauc

SEQ ID NO: 696603 - RNA, 19 nt, Artificial Sequence
  Description of Artificial Sequence: Synthetic oligonucleotide
  Antisense strand to SEQ ID NO: 696602
gaucagauuagaugucacu

SEQ ID NO: 696604 - RNA, 19 nt, Artificial Sequence
  Description of Artificial Sequence: Synthetic oligonucleotide
  Sense strand starting at position 2560 of SEQ ID NO: 586159
ggucaaguuauugagcaua

SEQ ID NO: 696605 - RNA, 19 nt, Artificial Sequence
  Description of Artificial Sequence: Synthetic oligonucleotide
  Antisense strand to SEQ ID NO: 696604
uaugcucaauaacuugacc

SEQ ID NO: 696606 - RNA, 19 nt, Artificial Sequence
  Description of Artificial Sequence: Synthetic oligonucleotide
  Sense strand starting at position 2562 of SEQ ID NO: 586159
ucaaguuauugagcauaua

SEQ ID NO: 696607 - RNA, 19 nt, Artificial Sequence
  Description of Artificial Sequence: Synthetic oligonucleotide
  Antisense strand to SEQ ID NO: 696606
uauaugcucaauaacuuga

SEQ ID NO: 696608 - RNA, 19 nt, Artificial Sequence
  Description of Artificial Sequence: Synthetic oligonucleotide
  Sense strand starting at position 2565 of SEQ ID NO: 586159
aguuauugagcauauauag

SEQ ID NO: 696609 - RNA, 19 nt, Artificial Sequence
  Description of Artificial Sequence: Synthetic oligonucleotide
  Antisense strand to SEQ ID NO: 696608
cuauauaugcucaauaacu

SEQ ID NO: 696610 - RNA, 19 nt, Artificial Sequence
  Description of Artificial Sequence: Synthetic oligonucleotide
  Sense strand starting at position 2735 of SEQ ID NO: 586159
acagcuauccuuggauuaa

SEQ ID NO: 696611 - RNA, 19 nt, Artificial Sequence
  Description of Artificial Sequence: Synthetic oligonucleotide
  Antisense strand to SEQ ID NO: 696610
uuaauccaaggauagcugu

SEQ ID NO: 696612 - RNA, 19 nt, Artificial Sequence
  Description of Artificial Sequence: Synthetic oligonucleotide
  Sense strand starting at position 2921 of SEQ ID NO: 586159
auuugcugccagugauucu

SEQ ID NO: 696613 - RNA, 19 nt, Artificial Sequence
  Description of Artificial Sequence: Synthetic oligonucleotide
  Antisense strand to SEQ ID NO: 696612
agaaucacuggcagcaaau

SEQ ID NO: 696614 - RNA, 19 nt, Artificial Sequence
  Description of Artificial Sequence: Synthetic oligonucleotide
  Sense strand starting at position 3040 of SEQ ID NO: 586159
ugaauauaaauacguggau

SEQ ID NO: 696615 - RNA, 19 nt, Artificial Sequence
  Description of Artificial Sequence: Synthetic oligonucleotide
  Antisense strand to SEQ ID NO: 696614
auccacguauuuauauuca

SEQ ID NO: 696616 - RNA, 19 nt, Artificial Sequence
  Description of Artificial Sequence: Synthetic oligonucleotide
  Sense strand starting at position 3041 of SEQ ID NO: 586159
gaauauaaauacguggauu

SEQ ID NO: 696617 - RNA, 19 nt, Artificial Sequence
  Description of Artificial Sequence: Synthetic oligonucleotide
  Antisense strand to SEQ ID NO: 696616
aauccacguauuuauauuc

SEQ ID NO: 696618 - RNA, 19 nt, Artificial Sequence
  Description of Artificial Sequence: Synthetic oligonucleotide
  Sense strand starting at position 3044 of SEQ ID NO: 586159
uauaaauacguggauugua

SEQ ID NO: 696619 - RNA, 19 nt, Artificial Sequence
  Description of Artificial Sequence: Synthetic oligonucleotide
  Antisense strand to SEQ ID NO: 696618
uacaauccacguauuuaua

SEQ ID NO: 696620 - RNA, 19 nt, Artificial Sequence
  Description of Artificial Sequence: Synthetic oligonucleotide
  Sense strand starting at position 3059 of SEQ ID NO: 586159
uguagugaauuugccaguu

SEQ ID NO: 696621 - RNA, 19 nt, Artificial Sequence
  Description of Artificial Sequence: Synthetic oligonucleotide
  Antisense strand to SEQ ID NO: 696620
aacuggcaaauucacuaca

SEQ ID NO: 696622 - RNA, 19 nt, Artificial Sequence
  Description of Artificial Sequence: Synthetic oligonucleotide
  Sense strand starting at position 3093 of SEQ ID NO: 586159
agaaaccguaaaugugaaa

SEQ ID NO: 696623 - RNA, 19 nt, Artificial Sequence
  Description of Artificial Sequence: Synthetic oligonucleotide
  Antisense strand to SEQ ID NO: 696622
uuucacauuuacgguuucu

SEQ ID NO: 696624 - RNA, 19 nt, Artificial Sequence
  Description of Artificial Sequence: Synthetic oligonucleotide
  Sense strand starting at position 3105 of SEQ ID NO: 586159
ugugaaaugagagguccua

SEQ ID NO: 696625 - RNA, 19 nt, Artificial Sequence
  Description of Artificial Sequence: Synthetic oligonucleotide
  Antisense strand to SEQ ID NO: 696624
uaggaccucucauuucaca

SEQ ID NO: 696626 - RNA, 19 nt, Artificial Sequence
  Description of Artificial Sequence: Synthetic oligonucleotide
  Sense strand starting at position 3219 of SEQ ID NO: 586159
ugcaauagucaaggguaaa

SEQ ID NO: 696627 - RNA, 19 nt, Artificial Sequence
  Description of Artificial Sequence: Synthetic oligonucleotide
  Antisense strand to SEQ ID NO: 696626
uuuacccuugacuauugca

SEQ ID NO: 696628 - RNA, 19 nt, Artificial Sequence
  Description of Artificial Sequence: Synthetic oligonucleotide
  Sense strand starting at position 3391 of SEQ ID NO: 586159
agcuuuagaguauaaugca

SEQ ID NO: 696629 - RNA, 19 nt, Artificial Sequence
  Description of Artificial Sequence: Synthetic oligonucleotide
  Antisense strand to SEQ ID NO: 696628
ugcauuauacucuaaagcu

SEQ ID NO: 696630 - RNA, 19 nt, Artificial Sequence
  Description of Artificial Sequence: Synthetic oligonucleotide
  Sense strand starting at position 3629 of SEQ ID NO: 586159
gacauaguccugugaacac

SEQ ID NO: 696631 - RNA, 19 nt, Artificial Sequence
  Description of Artificial Sequence: Synthetic oligonucleotide
  Antisense strand to SEQ ID NO: 696630
guguucacaggacuauguc

SEQ ID NO: 696632 - RNA, 19 nt, Artificial Sequence
  Description of Artificial Sequence: Synthetic oligonucleotide
  Sense strand starting at position 3711 of SEQ ID NO: 586159
guaguaugggagugaugau

SEQ ID NO: 696633 - RNA, 19 nt, Artificial Sequence
  Description of Artificial Sequence: Synthetic oligonucleotide
  Antisense strand to SEQ ID NO: 696632
aucaucacucccauacuac

SEQ ID NO: 696634 - RNA, 19 nt, Artificial Sequence
  Description of Artificial Sequence: Synthetic oligonucleotide
  Sense strand starting at position 326 of SEQ ID NO: 586160
cuugcuuagggucaugaaa

SEQ ID NO: 696635 - RNA, 19 nt, Artificial Sequence
  Description of Artificial Sequence: Synthetic oligonucleotide
  Antisense strand to SEQ ID NO: 696634
uuucaugacccuaagcaag

SEQ ID NO: 696636 - RNA, 19 nt, Artificial Sequence
  Description of Artificial Sequence: Synthetic oligonucleotide
  Sense strand starting at position 540 of SEQ ID NO: 586160
acagauaggcuauguuaaa

SEQ ID NO: 696637 - RNA, 19 nt, Artificial Sequence
  Description of Artificial Sequence: Synthetic oligonucleotide
  Antisense strand to SEQ ID NO: 696636
uuuaacauagccuaucugu

SEQ ID NO: 696638 - RNA, 19 nt, Artificial Sequence
  Description of Artificial Sequence: Synthetic oligonucleotide
  Sense strand starting at position 541 of SEQ ID NO: 586160
cagauaggcuauguuaaau

SEQ ID NO: 696639 - RNA, 19 nt, Artificial Sequence
  Description of Artificial Sequence: Synthetic oligonucleotide
  Antisense strand to SEQ ID NO: 696638
auuuaacauagccuaucug

SEQ ID NO: 696640 - RNA, 19 nt, Artificial Sequence
  Description of Artificial Sequence: Synthetic oligonucleotide
  Sense strand starting at position 585 of SEQ ID NO: 586160
gaacuuuggugaucaugua

SEQ ID NO: 696641 - RNA, 19 nt, Artificial Sequence
  Description of Artificial Sequence: Synthetic oligonucleotide
  Antisense strand to SEQ ID NO: 696640
uacaugaucaccaaaguuc

SEQ ID NO: 696642 - RNA, 19 nt, Artificial Sequence
  Description of Artificial Sequence: Synthetic oligonucleotide
  Sense strand starting at position 586 of SEQ ID NO: 586160
aacuuuggugaucauguaa

SEQ ID NO: 696643 - RNA, 19 nt, Artificial Sequence
  Description of Artificial Sequence: Synthetic oligonucleotide
  Antisense strand to SEQ ID NO: 696642
uuacaugaucaccaaaguu

SEQ ID NO: 696644 - RNA, 19 nt, Artificial Sequence
  Description of Artificial Sequence: Synthetic oligonucleotide
  Sense strand starting at position 767 of SEQ ID NO: 586160
ccaaaugucccagagcuaa

SEQ ID NO: 696645 - RNA, 19 nt, Artificial Sequence
  Description of Artificial Sequence: Synthetic oligonucleotide
  Antisense strand to SEQ ID NO: 696644
uuagcucugggacauuugg

SEQ ID NO: 696646 - RNA, 19 nt, Artificial Sequence
  Description of Artificial Sequence: Synthetic oligonucleotide
  Sense strand starting at position 983 of SEQ ID NO: 586160
gcaauaaggcuuuauguua

SEQ ID NO: 696647 - RNA, 19 nt, Artificial Sequence
  Description of Artificial Sequence: Synthetic oligonucleotide
  Antisense strand to SEQ ID NO: 696646
uaacauaaagccuuauugc

SEQ ID NO: 696648 - RNA, 19 nt, Artificial Sequence
  Description of Artificial Sequence: Synthetic oligonucleotide
  Sense strand starting at position 1049 of SEQ ID NO: 586160
ugccuuggagucuaaacau

SEQ ID NO: 696649 - RNA, 19 nt, Artificial Sequence
  Description of Artificial Sequence: Synthetic oligonucleotide
  Antisense strand to SEQ ID NO: 696648
auguuuagacuccaaggca

SEQ ID NO: 696650 - RNA, 19 nt, Artificial Sequence
  Description of Artificial Sequence: Synthetic oligonucleotide
  Sense strand starting at position 1116 of SEQ ID NO: 586160
uggugaggagguugguaau

SEQ ID NO: 696651 - RNA, 19 nt, Artificial Sequence
  Description of Artificial Sequence: Synthetic oligonucleotide
  Antisense strand to SEQ ID NO: 696650
auuaccaaccuccucacca

SEQ ID NO: 696652 - RNA, 19 nt, Artificial Sequence
  Description of Artificial Sequence: Synthetic oligonucleotide
  Sense strand starting at position 1141 of SEQ ID NO: 586160
aaauaugaugcaggaguga

SEQ ID NO: 696653 - RNA, 19 nt, Artificial Sequence
  Description of Artificial Sequence: Synthetic oligonucleotide
  Antisense strand to SEQ ID NO: 696652
ucacuccugcaucauauuu

SEQ ID NO: 696654 - RNA, 19 nt, Artificial Sequence
  Description of Artificial Sequence: Synthetic oligonucleotide
  Sense strand starting at position 1235 of SEQ ID NO: 586160
uguaaaggcagcugauaaa

SEQ ID NO: 696655 - RNA, 19 nt, Artificial Sequence
  Description of Artificial Sequence: Synthetic oligonucleotide
  Antisense strand to SEQ ID NO: 696654
uuuaucagcugccuuuaca

SEQ ID NO: 696656 - RNA, 19 nt, Artificial Sequence
  Description of Artificial Sequence: Synthetic oligonucleotide
  Sense strand starting at position 1266 of SEQ ID NO: 586160
gucagagcuuccuuugaaa

SEQ ID NO: 696657 - RNA, 19 nt, Artificial Sequence
  Description of Artificial Sequence: Synthetic oligonucleotide
  Antisense strand to SEQ ID NO: 696656
uuucaaaggaagcucugac

SEQ ID NO: 696658 - RNA, 19 nt, Artificial Sequence
  Description of Artificial Sequence: Synthetic oligonucleotide
  Sense strand starting at position 1422 of SEQ ID NO: 586160
cucugucuugggcauaaca

SEQ ID NO: 696659 - RNA, 19 nt, Artificial Sequence
  Description of Artificial Sequence: Synthetic oligonucleotide
  Antisense strand to SEQ ID NO: 696658
uguuaugcccaagacagag

SEQ ID NO: 696660 - RNA, 19 nt, Artificial Sequence
  Description of Artificial Sequence: Synthetic oligonucleotide
  Sense strand starting at position 1424 of SEQ ID NO: 586160
cugucuugggcauaacaaa

SEQ ID NO: 696661 - RNA, 19 nt, Artificial Sequence
  Description of Artificial Sequence: Synthetic oligonucleotide
  Antisense strand to SEQ ID NO: 696660
uuuguuaugcccaagacag

SEQ ID NO: 696662 - RNA, 19 nt, Artificial Sequence
  Description of Artificial Sequence: Synthetic oligonucleotide
  Sense strand starting at position 1525 of SEQ ID NO: 586160
gggcucugugucuauaaau

SEQ ID NO: 696663 - RNA, 19 nt, Artificial Sequence
  Description of Artificial Sequence: Synthetic oligonucleotide
  Antisense strand to SEQ ID NO: 696662
auuuauagacacagagccc

SEQ ID NO: 696664 - RNA, 19 nt, Artificial Sequence
  Description of Artificial Sequence: Synthetic oligonucleotide
  Sense strand starting at position 1568 of SEQ ID NO: 586160
acaucagugucauucuauu

SEQ ID NO: 696665 - RNA, 19 nt, Artificial Sequence
  Description of Artificial Sequence: Synthetic oligonucleotide
  Antisense strand to SEQ ID NO: 696664
aauagaaugacacugaugu

SEQ ID NO: 696666 - RNA, 19 nt, Artificial Sequence
  Description of Artificial Sequence: Synthetic oligonucleotide
  Sense strand starting at position 1595 of SEQ ID NO: 586160
aagagauucuguccuuuag

SEQ ID NO: 696667 - RNA, 19 nt, Artificial Sequence
  Description of Artificial Sequence: Synthetic oligonucleotide
  Antisense strand to SEQ ID NO: 696666
cuaaaggacagaaucucuu

SEQ ID NO: 696668 - RNA, 19 nt, Artificial Sequence
  Description of Artificial Sequence: Synthetic oligonucleotide
  Sense strand starting at position 1684 of SEQ ID NO: 586160
ccaagaugucuugggauag

SEQ ID NO: 696669 - RNA, 19 nt, Artificial Sequence
  Description of Artificial Sequence: Synthetic oligonucleotide
  Antisense strand to SEQ ID NO: 696668
cuaucccaagacaucuugg

SEQ ID NO: 696670 - RNA, 19 nt, Artificial Sequence
  Description of Artificial Sequence: Synthetic oligonucleotide
  Sense strand starting at position 1688 of SEQ ID NO: 586160
gaugucuugggauaguuac

SEQ ID NO: 696671 - RNA, 19 nt, Artificial Sequence
  Description of Artificial Sequence: Synthetic oligonucleotide
  Antisense strand to SEQ ID NO: 696670
guaacuaucccaagacauc

SEQ ID NO: 696672 - RNA, 19 nt, Artificial Sequence
  Description of Artificial Sequence: Synthetic oligonucleotide
  Sense strand starting at position 1694 of SEQ ID NO: 586160
uugggauaguuacuggagu

SEQ ID NO: 696673 - RNA, 19 nt, Artificial Sequence
  Description of Artificial Sequence: Synthetic oligonucleotide
  Antisense strand to SEQ ID NO: 696672
acuccaguaacuaucccaa

SEQ ID NO: 696674 - RNA, 19 nt, Artificial Sequence
  Description of Artificial Sequence: Synthetic oligonucleotide
  Sense strand starting at position 1696 of SEQ ID NO: 586160
gggauaguuacuggaguac

SEQ ID NO: 696675 - RNA, 19 nt, Artificial Sequence
  Description of Artificial Sequence: Synthetic oligonucleotide
  Antisense strand to SEQ ID NO: 696674
guacuccaguaacuauccc

SEQ ID NO: 696676 - RNA, 19 nt, Artificial Sequence
  Description of Artificial Sequence: Synthetic oligonucleotide
  Sense strand starting at position 1739 of SEQ ID NO: 586160
aguuuaaggcuaggaucua

SEQ ID NO: 696677 - RNA, 19 nt, Artificial Sequence
  Description of Artificial Sequence: Synthetic oligonucleotide
  Antisense strand to SEQ ID NO: 696676
uagauccuagccuuaaacu

SEQ ID NO: 696678 - RNA, 19 nt, Artificial Sequence
  Description of Artificial Sequence: Synthetic oligonucleotide
  Sense strand starting at position 1992 of SEQ ID NO: 586160
gauuuauccuaucagagga

SEQ ID NO: 696679 - RNA, 19 nt, Artificial Sequence
  Description of Artificial Sequence: Synthetic oligonucleotide
  Antisense strand to SEQ ID NO: 696678
uccucugauaggauaaauc

SEQ ID NO: 696680 - RNA, 19 nt, Artificial Sequence
  Description of Artificial Sequence: Synthetic oligonucleotide
  Sense strand starting at position 2112 of SEQ ID NO: 586160
gcacuuugaucauuuguau

SEQ ID NO: 696681 - RNA, 19 nt, Artificial Sequence
  Description of Artificial Sequence: Synthetic oligonucleotide
  Antisense strand to SEQ ID NO: 696680
auacaaaugaucaaagugc

SEQ ID NO: 696682 - RNA, 19 nt, Artificial Sequence
  Description of Artificial Sequence: Synthetic oligonucleotide
  Sense strand starting at position 2115 of SEQ ID NO: 586160
cuuugaucauuuguaugca

SEQ ID NO: 696683 - RNA, 19 nt, Artificial Sequence
  Description of Artificial Sequence: Synthetic oligonucleotide
  Antisense strand to SEQ ID NO: 696682
ugcauacaaaugaucaaag

SEQ ID NO: 696684 - RNA, 19 nt, Artificial Sequence
  Description of Artificial Sequence: Synthetic oligonucleotide
  Sense strand starting at position 2250 of SEQ ID NO: 586160
augaauggauucguuagga

SEQ ID NO: 696685 - RNA, 19 nt, Artificial Sequence
  Description of Artificial Sequence: Synthetic oligonucleotide
  Antisense strand to SEQ ID NO: 696684
uccuaacgaauccauucau

SEQ ID NO: 696686 - RNA, 19 nt, Artificial Sequence
  Description of Artificial Sequence: Synthetic oligonucleotide
  Sense strand starting at position 2636 of SEQ ID NO: 586160
ugauaucuggcaugggaua

SEQ ID NO: 696687 - RNA, 19 nt, Artificial Sequence
  Description of Artificial Sequence: Synthetic oligonucleotide
  Antisense strand to SEQ ID NO: 696686
uaucccaugccagauauca

SEQ ID NO: 696688 - RNA, 19 nt, Artificial Sequence
  Description of Artificial Sequence: Synthetic oligonucleotide
  Sense strand starting at position 2637 of SEQ ID NO: 586160
gauaucuggcaugggauaa

SEQ ID NO: 696689 - RNA, 19 nt, Artificial Sequence
  Description of Artificial Sequence: Synthetic oligonucleotide
  Antisense strand to SEQ ID NO: 696688
uuaucccaugccagauauc

SEQ ID NO: 696690 - RNA, 19 nt, Artificial Sequence
  Description of Artificial Sequence: Synthetic oligonucleotide
  Sense strand starting at position 2638 of SEQ ID NO: 586160
auaucuggcaugggauaaa

SEQ ID NO: 696691 - RNA, 19 nt, Artificial Sequence
  Description of Artificial Sequence: Synthetic oligonucleotide
  Antisense strand to SEQ ID NO: 696690
uuuaucccaugccagauau

SEQ ID NO: 696692 - RNA, 19 nt, Artificial Sequence
  Description of Artificial Sequence: Synthetic oligonucleotide
  Sense strand starting at position 2729 of SEQ ID NO: 586160
uucuuuauaggucacagau

SEQ ID NO: 696693 - RNA, 19 nt, Artificial Sequence
  Description of Artificial Sequence: Synthetic oligonucleotide
  Antisense strand to SEQ ID NO: 696692
aucugugaccuauaaagaa

SEQ ID NO: 696694 - RNA, 19 nt, Artificial Sequence
  Description of Artificial Sequence: Synthetic oligonucleotide
  Sense strand starting at position 2823 of SEQ ID NO: 586160
auagaacccguuuaguagu

SEQ ID NO: 696695 - RNA, 19 nt, Artificial Sequence
  Description of Artificial Sequence: Synthetic oligonucleotide
  Antisense strand to SEQ ID NO: 696694
acuacuaaacggguucuau

SEQ ID NO: 696696 - RNA, 19 nt, Artificial Sequence
  Description of Artificial Sequence: Synthetic oligonucleotide
  Sense strand starting at position 3216 of SEQ ID NO: 586160
guaauucuaugucuaggaa

SEQ ID NO: 696697 - RNA, 19 nt, Artificial Sequence
  Description of Artificial Sequence: Synthetic oligonucleotide
  Antisense strand to SEQ ID NO: 696696
uuccuagacauagaauuac

SEQ ID NO: 696698 - RNA, 19 nt, Artificial Sequence
  Description of Artificial Sequence: Synthetic oligonucleotide
  Sense strand starting at position 3219 of SEQ ID NO: 586160
auucuaugucuaggaagaa

SEQ ID NO: 696699 - RNA, 19 nt, Artificial Sequence
  Description of Artificial Sequence: Synthetic oligonucleotide
  Antisense strand to SEQ ID NO: 696698
uucuuccuagacauagaau

SEQ ID NO: 696700 - RNA, 19 nt, Artificial Sequence
  Description of Artificial Sequence: Synthetic oligonucleotide
  Sense strand starting at position 3578 of SEQ ID NO: 586160
augugagaauguuuaucuc

SEQ ID NO: 696701 - RNA, 19 nt, Artificial Sequence
  Description of Artificial Sequence: Synthetic oligonucleotide
  Antisense strand to SEQ ID NO: 696700
gagauaaacauucucacau

SEQ ID NO: 696702 - RNA, 19 nt, Artificial Sequence
  Description of Artificial Sequence: Synthetic oligonucleotide
  Sense strand starting at position 3582 of SEQ ID NO: 586160
gagaauguuuaucucagcu

SEQ ID NO: 696703 - RNA, 19 nt, Artificial Sequence
  Description of Artificial Sequence: Synthetic oligonucleotide
  Antisense strand to SEQ ID NO: 696702
agcugagauaaacauucuc

SEQ ID NO: 696704 - RNA, 19 nt, Artificial Sequence
  Description of Artificial Sequence: Synthetic oligonucleotide
  Sense strand starting at position 3587 of SEQ ID NO: 586160
uguuuaucucagcuguguu

SEQ ID NO: 696705 - RNA, 19 nt, Artificial Sequence
  Description of Artificial Sequence: Synthetic oligonucleotide
  Antisense strand to SEQ ID NO: 696704
aacacagcugagauaaaca

SEQ ID NO: 696706 - RNA, 19 nt, Artificial Sequence
  Description of Artificial Sequence: Synthetic oligonucleotide
  Sense strand starting at position 3797 of SEQ ID NO: 586160
aaggaacuaugauggauuu

SEQ ID NO: 696707 - RNA, 19 nt, Artificial Sequence
  Description of Artificial Sequence: Synthetic oligonucleotide
  Antisense strand to SEQ ID NO: 696706
aaauccaucauaguuccuu

SEQ ID NO: 696708 - RNA, 19 nt, Artificial Sequence
  Description of Artificial Sequence: Synthetic oligonucleotide
  Sense strand starting at position 3874 of SEQ ID NO: 586160
acaacuugauaauucgaca

SEQ ID NO: 696709 - RNA, 19 nt, Artificial Sequence
  Description of Artificial Sequence: Synthetic oligonucleotide
  Antisense strand to SEQ ID NO: 696708
ugucgaauuaucaaguugu

SEQ ID NO: 696710 - RNA, 19 nt, Artificial Sequence
  Description of Artificial Sequence: Synthetic oligonucleotide
  Sense strand starting at position 3879 of SEQ ID NO: 586160
uugauaauucgacauaugu

SEQ ID NO: 696711 - RNA, 19 nt, Artificial Sequence
  Description of Artificial Sequence: Synthetic oligonucleotide
  Antisense strand to SEQ ID NO: 696710
acauaugucgaauuaucaa

SEQ ID NO: 696712 - RNA, 19 nt, Artificial Sequence
  Description of Artificial Sequence: Synthetic oligonucleotide
  Sense strand starting at position 3940 of SEQ ID NO: 586160
uccauucuggcacauaguu

SEQ ID NO: 696713 - RNA, 19 nt, Artificial Sequence
  Description of Artificial Sequence: Synthetic oligonucleotide
  Antisense strand to SEQ ID NO: 696712
aacuaugugccagaaugga

SEQ ID NO: 696714 - RNA, 19 nt, Artificial Sequence
  Description of Artificial Sequence: Synthetic oligonucleotide
  Sense strand starting at position 88 of SEQ ID NO: 586161
gaggguguaauuugcuauc

SEQ ID NO: 696715 - RNA, 19 nt, Artificial Sequence
  Description of Artificial Sequence: Synthetic oligonucleotide
  Antisense strand to SEQ ID NO: 696714
gauagcaaauuacacccuc

SEQ ID NO: 696716 - RNA, 19 nt, Artificial Sequence
  Description of Artificial Sequence: Synthetic oligonucleotide
  Sense strand starting at position 90 of SEQ ID NO: 586161
ggguguaauuugcuaucuc

SEQ ID NO: 696717 - RNA, 19 nt, Artificial Sequence
  Description of Artificial Sequence: Synthetic oligonucleotide
  Antisense strand to SEQ ID NO: 696716
gagauagcaaauuacaccc

SEQ ID NO: 696718 - RNA, 19 nt, Artificial Sequence
  Description of Artificial Sequence: Synthetic oligonucleotide
  Sense strand starting at position 152 of SEQ ID NO: 586161
accucaauucgugggaaug

SEQ ID NO: 696719 - RNA, 19 nt, Artificial Sequence
  Description of Artificial Sequence: Synthetic oligonucleotide
  Antisense strand to SEQ ID NO: 696718
cauucccacgaauugaggu

SEQ ID NO: 696720 - RNA, 19 nt, Artificial Sequence
  Description of Artificial Sequence: Synthetic oligonucleotide
  Sense strand starting at position 153 of SEQ ID NO: 586161
ccucaauucgugggaauga

SEQ ID NO: 696721 - RNA, 19 nt, Artificial Sequence
  Description of Artificial Sequence: Synthetic oligonucleotide
  Antisense strand to SEQ ID NO: 696720
ucauucccacgaauugagg

SEQ ID NO: 696722 - RNA, 19 nt, Artificial Sequence
  Description of Artificial Sequence: Synthetic oligonucleotide
  Sense strand starting at position 387 of SEQ ID NO: 586161
agaagacagucuuugcaac

SEQ ID NO: 696723 - RNA, 19 nt, Artificial Sequence
  Description of Artificial Sequence: Synthetic oligonucleotide
  Antisense strand to SEQ ID NO: 696722
guugcaaagacugucuucu

SEQ ID NO: 696724 - RNA, 19 nt, Artificial Sequence
  Description of Artificial Sequence: Synthetic oligonucleotide
  Sense strand starting at position 388 of SEQ ID NO: 586161
gaagacagucuuugcaacu

SEQ ID NO: 696725 - RNA, 19 nt, Artificial Sequence
  Description of Artificial Sequence: Synthetic oligonucleotide
  Antisense strand to SEQ ID NO: 696724
aguugcaaagacugucuuc

SEQ ID NO: 696726 - RNA, 19 nt, Artificial Sequence
  Description of Artificial Sequence: Synthetic oligonucleotide
  Sense strand starting at position 655 of SEQ ID NO: 586161
uuauaaagcccuugaguaa

SEQ ID NO: 696727 - RNA, 19 nt, Artificial Sequence
  Description of Artificial Sequence: Synthetic oligonucleotide
  Antisense strand to SEQ ID NO: 696726
uuacucaagggcuuuauaa

SEQ ID NO: 696728 - RNA, 19 nt, Artificial Sequence
  Description of Artificial Sequence: Synthetic oligonucleotide
  Sense strand starting at position 925 of SEQ ID NO: 586161
ugcaguaugcucgccagau

SEQ ID NO: 696729 - RNA, 19 nt, Artificial Sequence
  Description of Artificial Sequence: Synthetic oligonucleotide
  Antisense strand to SEQ ID NO: 696728
aucuggcgagcauacugca

SEQ ID NO: 696730 - RNA, 19 nt, Artificial Sequence
  Description of Artificial Sequence: Synthetic oligonucleotide
  Sense strand starting at position 943 of SEQ ID NO: 586161
ugaucuaacuacucacguu

SEQ ID NO: 696731 - RNA, 19 nt, Artificial Sequence
  Description of Artificial Sequence: Synthetic oligonucleotide
  Antisense strand to SEQ ID NO: 696730
aacgugaguaguuagauca

SEQ ID NO: 696732 - RNA, 19 nt, Artificial Sequence
  Description of Artificial Sequence: Synthetic oligonucleotide
  Sense strand starting at position 972 of SEQ ID NO: 586161
accaguugauuugggaaau

SEQ ID NO: 696733 - RNA, 19 nt, Artificial Sequence
  Description of Artificial Sequence: Synthetic oligonucleotide
  Antisense strand to SEQ ID NO: 696732
auuucccaaaucaacuggu

SEQ ID NO: 696734 - RNA, 19 nt, Artificial Sequence
  Description of Artificial Sequence: Synthetic oligonucleotide
  Sense strand starting at position 1083 of SEQ ID NO: 586161
uccuuaggucguuauaaga

SEQ ID NO: 696735 - RNA, 19 nt, Artificial Sequence
  Description of Artificial Sequence: Synthetic oligonucleotide
  Antisense strand to SEQ ID NO: 696734
ucuuauaacgaccuaagga

SEQ ID NO: 696736 - RNA, 19 nt, Artificial Sequence
  Description of Artificial Sequence: Synthetic oligonucleotide
  Sense strand starting at position 1090 of SEQ ID NO: 586161
gucguuauaagacagauau

SEQ ID NO: 696737 - RNA, 19 nt, Artificial Sequence
  Description of Artificial Sequence: Synthetic oligonucleotide
  Antisense strand to SEQ ID NO: 696736
auaucugucuuauaacgac

SEQ ID NO: 696738 - RNA, 19 nt, Artificial Sequence
  Description of Artificial Sequence: Synthetic oligonucleotide
  Sense strand starting at position 1138 of SEQ ID NO: 586161
caauuauuguaguccagga

SEQ ID NO: 696739 - RNA, 19 nt, Artificial Sequence
  Description of Artificial Sequence: Synthetic oligonucleotide
  Antisense strand to SEQ ID NO: 696738
uccuggacuacaauaauug

SEQ ID NO: 696740 - RNA, 19 nt, Artificial Sequence
  Description of Artificial Sequence: Synthetic oligonucleotide
  Sense strand starting at position 1319 of SEQ ID NO: 586161
gaggauauaucuuuaagua

SEQ ID NO: 696741 - RNA, 19 nt, Artificial Sequence
  Description of Artificial Sequence: Synthetic oligonucleotide
  Antisense strand to SEQ ID NO: 696740
uacuuaaagauauauccuc

SEQ ID NO: 696742 - RNA, 19 nt, Artificial Sequence
  Description of Artificial Sequence: Synthetic oligonucleotide
  Sense strand starting at position 1335 of SEQ ID NO: 586161
guagcuguuaauggagaau

SEQ ID NO: 696743 - RNA, 19 nt, Artificial Sequence
  Description of Artificial Sequence: Synthetic oligonucleotide
  Antisense strand to SEQ ID NO: 696742
auucuccauuaacagcuac

SEQ ID NO: 696744 - RNA, 19 nt, Artificial Sequence
  Description of Artificial Sequence: Synthetic oligonucleotide
  Sense strand starting at position 1352 of SEQ ID NO: 586161
auuagcagcguguucuuaa

SEQ ID NO: 696745 - RNA, 19 nt, Artificial Sequence
  Description of Artificial Sequence: Synthetic oligonucleotide
  Antisense strand to SEQ ID NO: 696744
uuaagaacacgcugcuaau

SEQ ID NO: 696746 - RNA, 19 nt, Artificial Sequence
  Description of Artificial Sequence: Synthetic oligonucleotide
  Sense strand starting at position 1363 of SEQ ID NO: 586161
guucuuaaaccagguacau

SEQ ID NO: 696747 - RNA, 19 nt, Artificial Sequence
  Description of Artificial Sequence: Synthetic oligonucleotide
  Antisense strand to SEQ ID NO: 696746
auguaccugguuuaagaac

SEQ ID NO: 696748 - RNA, 19 nt, Artificial Sequence
  Description of Artificial Sequence: Synthetic oligonucleotide
  Sense strand starting at position 1372 of SEQ ID NO: 586161
ccagguacauugucuaaga

SEQ ID NO: 696749 - RNA, 19 nt, Artificial Sequence
  Description of Artificial Sequence: Synthetic oligonucleotide
  Antisense strand to SEQ ID NO: 696748
ucuuagacaauguaccugg

SEQ ID NO: 696750 - RNA, 19 nt, Artificial Sequence
  Description of Artificial Sequence: Synthetic oligonucleotide
  Sense strand starting at position 1373 of SEQ ID NO: 586161
cagguacauugucuaagau

SEQ ID NO: 696751 - RNA, 19 nt, Artificial Sequence
  Description of Artificial Sequence: Synthetic oligonucleotide
  Antisense strand to SEQ ID NO: 696750
aucuuagacaauguaccug

SEQ ID NO: 696752 - RNA, 19 nt, Artificial Sequence
  Description of Artificial Sequence: Synthetic oligonucleotide
  Sense strand starting at position 1476 of SEQ ID NO: 586161
gagagagugcauugcuaaa

SEQ ID NO: 696753 - RNA, 19 nt, Artificial Sequence
  Description of Artificial Sequence: Synthetic oligonucleotide
  Antisense strand to SEQ ID NO: 696752
uuuagcaaugcacucucuc

SEQ ID NO: 696754 - RNA, 19 nt, Artificial Sequence
  Description of Artificial Sequence: Synthetic oligonucleotide
  Sense strand starting at position 1660 of SEQ ID NO: 586161
uacuguuuagaguggauaa

SEQ ID NO: 696755 - RNA, 19 nt, Artificial Sequence
  Description of Artificial Sequence: Synthetic oligonucleotide
  Antisense strand to SEQ ID NO: 696754
uuauccacucuaaacagua

SEQ ID NO: 696756 - RNA, 19 nt, Artificial Sequence
  Description of Artificial Sequence: Synthetic oligonucleotide
  Sense strand starting at position 1661 of SEQ ID NO: 586161
acuguuuagaguggauaac

SEQ ID NO: 696757 - RNA, 19 nt, Artificial Sequence
  Description of Artificial Sequence: Synthetic oligonucleotide
  Antisense strand to SEQ ID NO: 696756
guuauccacucuaaacagu

SEQ ID NO: 696758 - RNA, 19 nt, Artificial Sequence
  Description of Artificial Sequence: Synthetic oligonucleotide
  Sense strand starting at position 1662 of SEQ ID NO: 586161
cuguuuagaguggauaacu

SEQ ID NO: 696759 - RNA, 19 nt, Artificial Sequence
  Description of Artificial Sequence: Synthetic oligonucleotide
  Antisense strand to SEQ ID NO: 696758
aguuauccacucuaaacag

SEQ ID NO: 696760 - RNA, 19 nt, Artificial Sequence
  Description of Artificial Sequence: Synthetic oligonucleotide
  Sense strand starting at position 2054 of SEQ ID NO: 586161
cuauuuauauagggaucau

SEQ ID NO: 696761 - RNA, 19 nt, Artificial Sequence
  Description of Artificial Sequence: Synthetic oligonucleotide
  Antisense strand to SEQ ID NO: 696760
augaucccuauauaaauag

SEQ ID NO: 696762 - RNA, 19 nt, Artificial Sequence
  Description of Artificial Sequence: Synthetic oligonucleotide
  Sense strand starting at position 2360 of SEQ ID NO: 586161
guuacaguuguggauacau

SEQ ID NO: 696763 - RNA, 19 nt, Artificial Sequence
  Description of Artificial Sequence: Synthetic oligonucleotide
  Antisense strand to SEQ ID NO: 696762
auguauccacaacuguaac

SEQ ID NO: 696764 - RNA, 19 nt, Artificial Sequence
  Description of Artificial Sequence: Synthetic oligonucleotide
  Sense strand starting at position 2433 of SEQ ID NO: 586161
ugucauacauaucugaaga

SEQ ID NO: 696765 - RNA, 19 nt, Artificial Sequence
  Description of Artificial Sequence: Synthetic oligonucleotide
  Antisense strand to SEQ ID NO: 696764
ucuucagauauguaugaca

SEQ ID NO: 696766 - RNA, 19 nt, Artificial Sequence
  Description of Artificial Sequence: Synthetic oligonucleotide
  Sense strand starting at position 2588 of SEQ ID NO: 586161
gcaacaugugaaugaacuu

SEQ ID NO: 696767 - RNA, 19 nt, Artificial Sequence
  Description of Artificial Sequence: Synthetic oligonucleotide
  Antisense strand to SEQ ID NO: 696766
aaguucauucacauguugc

SEQ ID NO: 696768 - RNA, 19 nt, Artificial Sequence
  Description of Artificial Sequence: Synthetic oligonucleotide
  Sense strand starting at position 2693 of SEQ ID NO: 586161
uguaaugauaaaugugguu

SEQ ID NO: 696769 - RNA, 19 nt, Artificial Sequence
  Description of Artificial Sequence: Synthetic oligonucleotide
  Antisense strand to SEQ ID NO: 696768
aaccacauuuaucauuaca

SEQ ID NO: 696770 - RNA, 19 nt, Artificial Sequence
  Description of Artificial Sequence: Synthetic oligonucleotide
  Sense strand starting at position 2698 of SEQ ID NO: 586161
ugauaaaugugguuaugua

SEQ ID NO: 696771 - RNA, 19 nt, Artificial Sequence
  Description of Artificial Sequence: Synthetic oligonucleotide
  Antisense strand to SEQ ID NO: 696770
uacauaaccacauuuauca

SEQ ID NO: 696772 - RNA, 19 nt, Artificial Sequence
  Description of Artificial Sequence: Synthetic oligonucleotide
  Sense strand starting at position 2699 of SEQ ID NO: 586161
gauaaaugugguuauguaa

SEQ ID NO: 696773 - RNA, 19 nt, Artificial Sequence
  Description of Artificial Sequence: Synthetic oligonucleotide
  Antisense strand to SEQ ID NO: 696772
uuacauaaccacauuuauc

SEQ ID NO: 696774 - RNA, 19 nt, Artificial Sequence
  Description of Artificial Sequence: Synthetic oligonucleotide
  Sense strand starting at position 2752 of SEQ ID NO: 586161
auaaauugucaugaugucu

SEQ ID NO: 696775 - RNA, 19 nt, Artificial Sequence
  Description of Artificial Sequence: Synthetic oligonucleotide
  Antisense strand to SEQ ID NO: 696774
agacaucaugacaauuuau

SEQ ID NO: 696776 - RNA, 19 nt, Artificial Sequence
  Description of Artificial Sequence: Synthetic oligonucleotide
  Sense strand starting at position 2989 of SEQ ID NO: 586161
acuuaaagacuuggugaau

SEQ ID NO: 696777 - RNA, 19 nt, Artificial Sequence
  Description of Artificial Sequence: Synthetic oligonucleotide
  Antisense strand to SEQ ID NO: 696776
auucaccaagucuuuaagu

SEQ ID NO: 696778 - RNA, 19 nt, Artificial Sequence
  Description of Artificial Sequence: Synthetic oligonucleotide
  Sense strand starting at position 2990 of SEQ ID NO: 586161
cuuaaagacuuggugaauc

SEQ ID NO: 696779 - RNA, 19 nt, Artificial Sequence
  Description of Artificial Sequence: Synthetic oligonucleotide
  Antisense strand to SEQ ID NO: 696778
gauucaccaagucuuuaag

SEQ ID NO: 696780 - RNA, 19 nt, Artificial Sequence
  Description of Artificial Sequence: Synthetic oligonucleotide
  Sense strand starting at position 3014 of SEQ ID NO: 586161
agggauauauugguaucca

SEQ ID NO: 696781 - RNA, 19 nt, Artificial Sequence
  Description of Artificial Sequence: Synthetic oligonucleotide
  Antisense strand to SEQ ID NO: 696780
uggauaccaauauaucccu

SEQ ID NO: 696782 - RNA, 19 nt, Artificial Sequence
  Description of Artificial Sequence: Synthetic oligonucleotide
  Sense strand starting at position 3217 of SEQ ID NO: 586161
ugcaaacuuucugcagaau

SEQ ID NO: 696783 - RNA, 19 nt, Artificial Sequence
  Description of Artificial Sequence: Synthetic oligonucleotide
  Antisense strand to SEQ ID NO: 696782
auucugcagaaaguuugca

SEQ ID NO: 696784 - RNA, 19 nt, Artificial Sequence
  Description of Artificial Sequence: Synthetic oligonucleotide
  Sense strand starting at position 3218 of SEQ ID NO: 586161
gcaaacuuucugcagaaua

SEQ ID NO: 696785 - RNA, 19 nt, Artificial Sequence
  Description of Artificial Sequence: Synthetic oligonucleotide
  Antisense strand to SEQ ID NO: 696784
uauucugcagaaaguuugc

SEQ ID NO: 696786 - RNA, 19 nt, Artificial Sequence
  Description of Artificial Sequence: Synthetic oligonucleotide
  Sense strand starting at position 3373 of SEQ ID NO: 586161
gcaaguuacagguauacag

SEQ ID NO: 696787 - RNA, 19 nt, Artificial Sequence
  Description of Artificial Sequence: Synthetic oligonucleotide
  Antisense strand to SEQ ID NO: 696786
cuguauaccuguaacuugc

SEQ ID NO: 696788 - RNA, 19 nt, Artificial Sequence
  Description of Artificial Sequence: Synthetic oligonucleotide
  Sense strand starting at position 3382 of SEQ ID NO: 586161
agguauacagcuugucaaa

SEQ ID NO: 696789 - RNA, 19 nt, Artificial Sequence
  Description of Artificial Sequence: Synthetic oligonucleotide
  Antisense strand to SEQ ID NO: 696788
uuugacaagcuguauaccu

SEQ ID NO: 696790 - RNA, 19 nt, Artificial Sequence
  Description of Artificial Sequence: Synthetic oligonucleotide
  Sense strand starting at position 3420 of SEQ ID NO: 586161
uguaaucaacauugagguu

SEQ ID NO: 696791 - RNA, 19 nt, Artificial Sequence
  Description of Artificial Sequence: Synthetic oligonucleotide
  Antisense strand to SEQ ID NO: 696790
aaccucaauguugauuaca

SEQ ID NO: 696792 - RNA, 19 nt, Artificial Sequence
  Description of Artificial Sequence: Synthetic oligonucleotide
  Sense strand starting at position 3840 of SEQ ID NO: 586161
agccacuaugccugacaau

SEQ ID NO: 696793 - RNA, 19 nt, Artificial Sequence
  Description of Artificial Sequence: Synthetic oligonucleotide
  Antisense strand to SEQ ID NO: 696792
auugucaggcauaguggcu

SEQ ID NO: 696794 - RNA, 19 nt, Artificial Sequence
  Description of Artificial Sequence: Synthetic oligonucleotide
  Sense strand starting at position 22 of SEQ ID NO: 586162
uugugugcucccuaccauu

SEQ ID NO: 696795 - RNA, 19 nt, Artificial Sequence
  Description of Artificial Sequence: Synthetic oligonucleotide
  Antisense strand to SEQ ID NO: 696794
aaugguagggagcacacaa

SEQ ID NO: 696796 - RNA, 19 nt, Artificial Sequence
  Description of Artificial Sequence: Synthetic oligonucleotide
  Sense strand starting at position 263 of SEQ ID NO: 586162
guauguuugcgucucuucu

SEQ ID NO: 696797 - RNA, 19 nt, Artificial Sequence
  Description of Artificial Sequence: Synthetic oligonucleotide
  Antisense strand to SEQ ID NO: 696796
agaagagacgcaaacauac

SEQ ID NO: 696798 - RNA, 19 nt, Artificial Sequence
  Description of Artificial Sequence: Synthetic oligonucleotide
  Sense strand starting at position 267 of SEQ ID NO: 586162
guuugcgucucuucuuuga

SEQ ID NO: 696799 - RNA, 19 nt, Artificial Sequence
  Description of Artificial Sequence: Synthetic oligonucleotide
  Antisense strand to SEQ ID NO: 696798
ucaaagaagagacgcaaac

SEQ ID NO: 696800 - RNA, 19 nt, Artificial Sequence
  Description of Artificial Sequence: Synthetic oligonucleotide
  Sense strand starting at position 269 of SEQ ID NO: 586162
uugcgucucuucuuugaau

SEQ ID NO: 696801 - RNA, 19 nt, Artificial Sequence
  Description of Artificial Sequence: Synthetic oligonucleotide
  Antisense strand to SEQ ID NO: 696800
auucaaagaagagacgcaa

SEQ ID NO: 696802 - RNA, 19 nt, Artificial Sequence
  Description of Artificial Sequence: Synthetic oligonucleotide
  Sense strand starting at position 270 of SEQ ID NO: 586162
ugcgucucuucuuugaaua

SEQ ID NO: 696803 - RNA, 19 nt, Artificial Sequence
  Description of Artificial Sequence: Synthetic oligonucleotide
  Antisense strand to SEQ ID NO: 696802
uauucaaagaagagacgca

SEQ ID NO: 696804 - RNA, 19 nt, Artificial Sequence
  Description of Artificial Sequence: Synthetic oligonucleotide
  Sense strand starting at position 271 of SEQ ID NO: 586162
gcgucucuucuuugaauac

SEQ ID NO: 696805 - RNA, 19 nt, Artificial Sequence
  Description of Artificial Sequence: Synthetic oligonucleotide
  Antisense strand to SEQ ID NO: 696804
guauucaaagaagagacgc

SEQ ID NO: 696806 - RNA, 19 nt, Artificial Sequence
  Description of Artificial Sequence: Synthetic oligonucleotide
  Sense strand starting at position 272 of SEQ ID NO: 586162
cgucucuucuuugaauacu

SEQ ID NO: 696807 - RNA, 19 nt, Artificial Sequence
  Description of Artificial Sequence: Synthetic oligonucleotide
  Antisense strand to SEQ ID NO: 696806
aguauucaaagaagagacg

SEQ ID NO: 696808 - RNA, 19 nt, Artificial Sequence
  Description of Artificial Sequence: Synthetic oligonucleotide
  Sense strand starting at position 424 of SEQ ID NO: 586162
uucuguguuucucugggaa

SEQ ID NO: 696809 - RNA, 19 nt, Artificial Sequence
  Description of Artificial Sequence: Synthetic oligonucleotide
  Antisense strand to SEQ ID NO: 696808
uucccagagaaacacagaa

SEQ ID NO: 696810 - RNA, 19 nt, Artificial Sequence
  Description of Artificial Sequence: Synthetic oligonucleotide
  Sense strand starting at position 426 of SEQ ID NO: 586162
cuguguuucucugggaacu

SEQ ID NO: 696811 - RNA, 19 nt, Artificial Sequence
  Description of Artificial Sequence: Synthetic oligonucleotide
  Antisense strand to SEQ ID NO: 696810
aguucccagagaaacacag

SEQ ID NO: 696812 - RNA, 19 nt, Artificial Sequence
  Description of Artificial Sequence: Synthetic oligonucleotide
  Sense strand starting at position 427 of SEQ ID NO: 586162
uguguuucucugggaacug

SEQ ID NO: 696813 - RNA, 19 nt, Artificial Sequence
  Description of Artificial Sequence: Synthetic oligonucleotide
  Antisense strand to SEQ ID NO: 696812
caguucccagagaaacaca

SEQ ID NO: 696814 - RNA, 19 nt, Artificial Sequence
  Description of Artificial Sequence: Synthetic oligonucleotide
  Sense strand starting at position 558 of SEQ ID NO: 586162
ccagaauggucccaccaug

SEQ ID NO: 696815 - RNA, 19 nt, Artificial Sequence
  Description of Artificial Sequence: Synthetic oligonucleotide
  Antisense strand to SEQ ID NO: 696814
cauggugggaccauucugg

SEQ ID NO: 696816 - RNA, 19 nt, Artificial Sequence
  Description of Artificial Sequence: Synthetic oligonucleotide
  Sense strand starting at position 787 of SEQ ID NO: 586162
cugugcuggcuagggaauu

SEQ ID NO: 696817 - RNA, 19 nt, Artificial Sequence
  Description of Artificial Sequence: Synthetic oligonucleotide
  Antisense strand to SEQ ID NO: 696816
aauucccuagccagcacag

SEQ ID NO: 696818 - RNA, 19 nt, Artificial Sequence
  Description of Artificial Sequence: Synthetic oligonucleotide
  Sense strand starting at position 864 of SEQ ID NO: 586162
gucagcucaccguggugaa

SEQ ID NO: 696819 - RNA, 19 nt, Artificial Sequence
  Description of Artificial Sequence: Synthetic oligonucleotide
  Antisense strand to SEQ ID NO: 696818
uucaccacggugagcugac

SEQ ID NO: 696820 - RNA, 19 nt, Artificial Sequence
  Description of Artificial Sequence: Synthetic oligonucleotide
  Sense strand starting at position 2236 of SEQ ID NO: 586162
gcccgucuguuuccuaagu

SEQ ID NO: 696821 - RNA, 19 nt, Artificial Sequence
  Description of Artificial Sequence: Synthetic oligonucleotide
  Antisense strand to SEQ ID NO: 696820
acuuaggaaacagacgggc

SEQ ID NO: 696822 - RNA, 19 nt, Artificial Sequence
  Description of Artificial Sequence: Synthetic oligonucleotide
  Sense strand starting at position 2238 of SEQ ID NO: 586162
ccgucuguuuccuaagugu

SEQ ID NO: 696823 - RNA, 19 nt, Artificial Sequence
  Description of Artificial Sequence: Synthetic oligonucleotide
  Antisense strand to SEQ ID NO: 696822
acacuuaggaaacagacgg

SEQ ID NO: 696824 - RNA, 19 nt, Artificial Sequence
  Description of Artificial Sequence: Synthetic oligonucleotide
  Sense strand starting at position 2293 of SEQ ID NO: 586162
cacucaggccucugaggau

SEQ ID NO: 696825 - RNA, 19 nt, Artificial Sequence
  Description of Artificial Sequence: Synthetic oligonucleotide
  Antisense strand to SEQ ID NO: 696824
auccucagaggccugagug

SEQ ID NO: 696826 - RNA, 19 nt, Artificial Sequence
  Description of Artificial Sequence: Synthetic oligonucleotide
  Sense strand starting at position 2309 of SEQ ID NO: 586162
gauguuggccucuacaaug

SEQ ID NO: 696827 - RNA, 19 nt, Artificial Sequence
  Description of Artificial Sequence: Synthetic oligonucleotide
  Antisense strand to SEQ ID NO: 696826
cauuguagaggccaacauc

SEQ ID NO: 696828 - RNA, 19 nt, Artificial Sequence
  Description of Artificial Sequence: Synthetic oligonucleotide
  Sense strand starting at position 2314 of SEQ ID NO: 586162
uggccucuacaaugguuau

SEQ ID NO: 696829 - RNA, 19 nt, Artificial Sequence
  Description of Artificial Sequence: Synthetic oligonucleotide
  Antisense strand to SEQ ID NO: 696828
auaaccauuguagaggcca

SEQ ID NO: 696830 - RNA, 19 nt, Artificial Sequence
  Description of Artificial Sequence: Synthetic oligonucleotide
  Sense strand starting at position 2421 of SEQ ID NO: 586162
caacauggguauucuguga

SEQ ID NO: 696831 - RNA, 19 nt, Artificial Sequence
  Description of Artificial Sequence: Synthetic oligonucleotide
  Antisense strand to SEQ ID NO: 696830
ucacagaauacccauguug

SEQ ID NO: 696832 - RNA, 19 nt, Artificial Sequence
  Description of Artificial Sequence: Synthetic oligonucleotide
  Sense strand starting at position 2443 of SEQ ID NO: 586162
cccaucuuacgcugcuaua

SEQ ID NO: 696833 - RNA, 19 nt, Artificial Sequence
  Description of Artificial Sequence: Synthetic oligonucleotide
  Antisense strand to SEQ ID NO: 696832
uauagcagcguaagauggg

SEQ ID NO: 696834 - RNA, 19 nt, Artificial Sequence
  Description of Artificial Sequence: Synthetic oligonucleotide
  Sense strand starting at position 607 of SEQ ID NO: 586163
guagaaauaucaguauugu

SEQ ID NO: 696835 - RNA, 19 nt, Artificial Sequence
  Description of Artificial Sequence: Synthetic oligonucleotide
  Antisense strand to SEQ ID NO: 696834
acaauacugauauuucuac

SEQ ID NO: 696836 - RNA, 19 nt, Artificial Sequence
  Description of Artificial Sequence: Synthetic oligonucleotide
  Sense strand starting at position 616 of SEQ ID NO: 586163
ucaguauuguugugguuag

SEQ ID NO: 696837 - RNA, 19 nt, Artificial Sequence
  Description of Artificial Sequence: Synthetic oligonucleotide
  Antisense strand to SEQ ID NO: 696836
cuaaccacaacaauacuga

SEQ ID NO: 696838 - RNA, 19 nt, Artificial Sequence
  Description of Artificial Sequence: Synthetic oligonucleotide
  Sense strand starting at position 665 of SEQ ID NO: 586163
agcccugugcuagggauuu

SEQ ID NO: 696839 - RNA, 19 nt, Artificial Sequence
  Description of Artificial Sequence: Synthetic oligonucleotide
  Antisense strand to SEQ ID NO: 696838
aaaucccuagcacagggcu

SEQ ID NO: 696840 - RNA, 19 nt, Artificial Sequence
  Description of Artificial Sequence: Synthetic oligonucleotide
  Sense strand starting at position 705 of SEQ ID NO: 586163
uuaugaggugggcaauauu

SEQ ID NO: 696841 - RNA, 19 nt, Artificial Sequence
  Description of Artificial Sequence: Synthetic oligonucleotide
  Antisense strand to SEQ ID NO: 696840
aauauugcccaccucauaa

SEQ ID NO: 696842 - RNA, 19 nt, Artificial Sequence
  Description of Artificial Sequence: Synthetic oligonucleotide
  Sense strand starting at position 751 of SEQ ID NO: 586163
guuuaaagggcucaaguga

SEQ ID NO: 696843 - RNA, 19 nt, Artificial Sequence
  Description of Artificial Sequence: Synthetic oligonucleotide
  Antisense strand to SEQ ID NO: 696842
ucacuugagcccuuuaaac

SEQ ID NO: 696844 - RNA, 19 nt, Artificial Sequence
  Description of Artificial Sequence: Synthetic oligonucleotide
  Sense strand starting at position 759 of SEQ ID NO: 586163
ggcucaagugacugguaca

SEQ ID NO: 696845 - RNA, 19 nt, Artificial Sequence
  Description of Artificial Sequence: Synthetic oligonucleotide
  Antisense strand to SEQ ID NO: 696844
uguaccagucacuugagcc

SEQ ID NO: 696846 - RNA, 19 nt, Artificial Sequence
  Description of Artificial Sequence: Synthetic oligonucleotide
  Sense strand starting at position 762 of SEQ ID NO: 586163
ucaagugacugguacagaa

SEQ ID NO: 696847 - RNA, 19 nt, Artificial Sequence
  Description of Artificial Sequence: Synthetic oligonucleotide
  Antisense strand to SEQ ID NO: 696846
uucuguaccagucacuuga

SEQ ID NO: 696848 - RNA, 19 nt, Artificial Sequence
  Description of Artificial Sequence: Synthetic oligonucleotide
  Sense strand starting at position 853 of SEQ ID NO: 586163
cuugcagggcauugagaaa

SEQ ID NO: 696849 - RNA, 19 nt, Artificial Sequence
  Description of Artificial Sequence: Synthetic oligonucleotide
  Antisense strand to SEQ ID NO: 696848
uuucucaaugcccugcaag

SEQ ID NO: 696850 - RNA, 19 nt, Artificial Sequence
  Description of Artificial Sequence: Synthetic oligonucleotide
  Sense strand starting at position 874 of SEQ ID NO: 586163
ggaagugaauugcuagcua

SEQ ID NO: 696851 - RNA, 19 nt, Artificial Sequence
  Description of Artificial Sequence: Synthetic oligonucleotide
  Antisense strand to SEQ ID NO: 696850
uagcuagcaauucacuucc

SEQ ID NO: 696852 - RNA, 19 nt, Artificial Sequence
  Description of Artificial Sequence: Synthetic oligonucleotide
  Sense strand starting at position 878 of SEQ ID NO: 586163
gugaauugcuagcuaauga

SEQ ID NO: 696853 - RNA, 19 nt, Artificial Sequence
  Description of Artificial Sequence: Synthetic oligonucleotide
  Antisense strand to SEQ ID NO: 696852
ucauuagcuagcaauucac

SEQ ID NO: 696854 - RNA, 19 nt, Artificial Sequence
  Description of Artificial Sequence: Synthetic oligonucleotide
  Sense strand starting at position 1004 of SEQ ID NO: 586163
aaucuagugccuuacagag

SEQ ID NO: 696855 - RNA, 19 nt, Artificial Sequence
  Description of Artificial Sequence: Synthetic oligonucleotide
  Antisense strand to SEQ ID NO: 696854
cucuguaaggcacuagauu

SEQ ID NO: 696856 - RNA, 19 nt, Artificial Sequence
  Description of Artificial Sequence: Synthetic oligonucleotide
  Sense strand starting at position 1020 of SEQ ID NO: 586163
gagugaggccgacagcuau

SEQ ID NO: 696857 - RNA, 19 nt, Artificial Sequence
  Description of Artificial Sequence: Synthetic oligonucleotide
  Antisense strand to SEQ ID NO: 696856
auagcugucggccucacuc

SEQ ID NO: 696858 - RNA, 19 nt, Artificial Sequence
  Description of Artificial Sequence: Synthetic oligonucleotide
  Sense strand starting at position 1094 of SEQ ID NO: 586163
cugggaauccagcaucuca

SEQ ID NO: 696859 - RNA, 19 nt, Artificial Sequence
  Description of Artificial Sequence: Synthetic oligonucleotide
  Antisense strand to SEQ ID NO: 696858
ugagaugcuggauucccag

SEQ ID NO: 696860 - RNA, 19 nt, Artificial Sequence
  Description of Artificial Sequence: Synthetic oligonucleotide
  Sense strand starting at position 1269 of SEQ ID NO: 586163
ggcugagcuuuauucuaua

SEQ ID NO: 696861 - RNA, 19 nt, Artificial Sequence
  Description of Artificial Sequence: Synthetic oligonucleotide
  Antisense strand to SEQ ID NO: 696860
uauagaauaaagcucagcc

SEQ ID NO: 696862 - RNA, 19 nt, Artificial Sequence
  Description of Artificial Sequence: Synthetic oligonucleotide
  Sense strand starting at position 1291 of SEQ ID NO: 586163
agggacaauugcucuagca

SEQ ID NO: 696863 - RNA, 19 nt, Artificial Sequence
  Description of Artificial Sequence: Synthetic oligonucleotide
  Antisense strand to SEQ ID NO: 696862
ugcuagagcaauugucccu

SEQ ID NO: 696864 - RNA, 19 nt, Artificial Sequence
  Description of Artificial Sequence: Synthetic oligonucleotide
  Sense strand starting at position 1293 of SEQ ID NO: 586163
ggacaauugcucuagcagg

SEQ ID NO: 696865 - RNA, 19 nt, Artificial Sequence
  Description of Artificial Sequence: Synthetic oligonucleotide
  Antisense strand to SEQ ID NO: 696864
ccugcuagagcaauugucc

SEQ ID NO: 696866 - RNA, 19 nt, Artificial Sequence
  Description of Artificial Sequence: Synthetic oligonucleotide
  Sense strand starting at position 1500 of SEQ ID NO: 586163
acuggugaguccugguaaa

SEQ ID NO: 696867 - RNA, 19 nt, Artificial Sequence
  Description of Artificial Sequence: Synthetic oligonucleotide
  Antisense strand to SEQ ID NO: 696866
uuuaccaggacucaccagu

SEQ ID NO: 696868 - RNA, 19 nt, Artificial Sequence
  Description of Artificial Sequence: Synthetic oligonucleotide
  Sense strand starting at position 1561 of SEQ ID NO: 586163
ggugcaggcuuccuaggua

SEQ ID NO: 696869 - RNA, 19 nt, Artificial Sequence
  Description of Artificial Sequence: Synthetic oligonucleotide
  Antisense strand to SEQ ID NO: 696868
uaccuaggaagccugcacc

SEQ ID NO: 696870 - RNA, 19 nt, Artificial Sequence
  Description of Artificial Sequence: Synthetic oligonucleotide
  Sense strand starting at position 1564 of SEQ ID NO: 586163
gcaggcuuccuagguaauu

SEQ ID NO: 696871 - RNA, 19 nt, Artificial Sequence
  Description of Artificial Sequence: Synthetic oligonucleotide
  Antisense strand to SEQ ID NO: 696870
aauuaccuaggaagccugc

SEQ ID NO: 696872 - RNA, 19 nt, Artificial Sequence
  Description of Artificial Sequence: Synthetic oligonucleotide
  Sense strand starting at position 2436 of SEQ ID NO: 586163
gaaggaccaucagaaauga

SEQ ID NO: 696873 - RNA, 19 nt, Artificial Sequence
  Description of Artificial Sequence: Synthetic oligonucleotide
  Antisense strand to SEQ ID NO: 696872
ucauuucugaugguccuuc

SEQ ID NO: 696874 - RNA, 19 nt, Artificial Sequence
  Description of Artificial Sequence: Synthetic oligonucleotide
  Sense strand starting at position 2697 of SEQ ID NO: 586163
gagcuauugugccacggca

SEQ ID NO: 696875 - RNA, 19 nt, Artificial Sequence
  Description of Artificial Sequence: Synthetic oligonucleotide
  Antisense strand to SEQ ID NO: 696874
ugccguggcacaauagcuc

SEQ ID NO: 696876 - RNA, 19 nt, Artificial Sequence
  Description of Artificial Sequence: Synthetic oligonucleotide
  Sense strand starting at position 3524 of SEQ ID NO: 586163
gggcuauguuggguacuca

SEQ ID NO: 696877 - RNA, 19 nt, Artificial Sequence
  Description of Artificial Sequence: Synthetic oligonucleotide
  Antisense strand to SEQ ID NO: 696876
ugaguacccaacauagccc

SEQ ID NO: 696878 - RNA, 19 nt, Artificial Sequence
  Description of Artificial Sequence: Synthetic oligonucleotide
  Sense strand starting at position 3544 of SEQ ID NO: 586163
ggaagagguccuugaucug

SEQ ID NO: 696879 - RNA, 19 nt, Artificial Sequence
  Description of Artificial Sequence: Synthetic oligonucleotide
  Antisense strand to SEQ ID NO: 696878
cagaucaaggaccucuucc

SEQ ID NO: 696880 - RNA, 19 nt, Artificial Sequence
  Description of Artificial Sequence: Synthetic oligonucleotide
  Sense strand starting at position 3547 of SEQ ID NO: 586163
agagguccuugaucugauu

SEQ ID NO: 696881 - RNA, 19 nt, Artificial Sequence
  Description of Artificial Sequence: Synthetic oligonucleotide
  Antisense strand to SEQ ID NO: 696880
aaucagaucaaggaccucu

SEQ ID NO: 696882 - RNA, 19 nt, Artificial Sequence
  Description of Artificial Sequence: Synthetic oligonucleotide
  Sense strand starting at position 3550 of SEQ ID NO: 586163
gguccuugaucugauuaau

SEQ ID NO: 696883 - RNA, 19 nt, Artificial Sequence
  Description of Artificial Sequence: Synthetic oligonucleotide
  Antisense strand to SEQ ID NO: 696882
auuaaucagaucaaggacc

SEQ ID NO: 696884 - RNA, 19 nt, Artificial Sequence
  Description of Artificial Sequence: Synthetic oligonucleotide
  Sense strand starting at position 3647 of SEQ ID NO: 586163
ugcauugggucuuggaaga

SEQ ID NO: 696885 - RNA, 19 nt, Artificial Sequence
  Description of Artificial Sequence: Synthetic oligonucleotide
  Antisense strand to SEQ ID NO: 696884
ucuuccaagacccaaugca

SEQ ID NO: 696886 - RNA, 19 nt, Artificial Sequence
  Description of Artificial Sequence: Synthetic oligonucleotide
  Sense strand starting at position 3732 of SEQ ID NO: 586163
augugacuggccugcuuua

SEQ ID NO: 696887 - RNA, 19 nt, Artificial Sequence
  Description of Artificial Sequence: Synthetic oligonucleotide
  Antisense strand to SEQ ID NO: 696886
uaaagcaggccagucacau

SEQ ID NO: 696888 - RNA, 19 nt, Artificial Sequence
  Description of Artificial Sequence: Synthetic oligonucleotide
  Sense strand starting at position 3852 of SEQ ID NO: 586163
gagggaguuuguucuuggu

SEQ ID NO: 696889 - RNA, 19 nt, Artificial Sequence
  Description of Artificial Sequence: Synthetic oligonucleotide
  Antisense strand to SEQ ID NO: 696888
accaagaacaaacucccuc

SEQ ID NO: 696890 - RNA, 19 nt, Artificial Sequence
  Description of Artificial Sequence: Synthetic oligonucleotide
  Sense strand starting at position 3855 of SEQ ID NO: 586163
ggaguuuguucuugguccu

SEQ ID NO: 696891 - RNA, 19 nt, Artificial Sequence
  Description of Artificial Sequence: Synthetic oligonucleotide
  Antisense strand to SEQ ID NO: 696890
aggaccaagaacaaacucc

SEQ ID NO: 696892 - RNA, 19 nt, Artificial Sequence
  Description of Artificial Sequence: Synthetic oligonucleotide
  Sense strand starting at position 3856 of SEQ ID NO: 586163
gaguuuguucuugguccua

SEQ ID NO: 696893 - RNA, 19 nt, Artificial Sequence
  Description of Artificial Sequence: Synthetic oligonucleotide
  Antisense strand to SEQ ID NO: 696892
uaggaccaagaacaaacuc

SEQ ID NO: 696894 - RNA, 19 nt, Artificial Sequence
  Description of Artificial Sequence: Synthetic oligonucleotide
  Sense strand starting at position 3858 of SEQ ID NO: 586163
guuuguucuugguccuaua

SEQ ID NO: 696895 - RNA, 19 nt, Artificial Sequence
  Description of Artificial Sequence: Synthetic oligonucleotide
  Antisense strand to SEQ ID NO: 696894
uauaggaccaagaacaaac

SEQ ID NO: 696896 - RNA, 19 nt, Artificial Sequence
  Description of Artificial Sequence: Synthetic oligonucleotide
  Sense strand starting at position 3861 of SEQ ID NO: 586163
uguucuugguccuauaggu

SEQ ID NO: 696897 - RNA, 19 nt, Artificial Sequence
  Description of Artificial Sequence: Synthetic oligonucleotide
  Antisense strand to SEQ ID NO: 696896
accuauaggaccaagaaca

SEQ ID NO: 696898 - RNA, 19 nt, Artificial Sequence
  Description of Artificial Sequence: Synthetic oligonucleotide
  Sense strand starting at position 3868 of SEQ ID NO: 586163
gguccuauaggucauagga

SEQ ID NO: 696899 - RNA, 19 nt, Artificial Sequence
  Description of Artificial Sequence: Synthetic oligonucleotide
  Antisense strand to SEQ ID NO: 696898
uccuaugaccuauaggacc

SEQ ID NO: 696900 - RNA, 19 nt, Artificial Sequence
  Description of Artificial Sequence: Synthetic oligonucleotide
  Sense strand starting at position 3870 of SEQ ID NO: 586163
uccuauaggucauaggaaa

SEQ ID NO: 696901 - RNA, 19 nt, Artificial Sequence
  Description of Artificial Sequence: Synthetic oligonucleotide
  Antisense strand to SEQ ID NO: 696900
uuuccuaugaccuauagga

SEQ ID NO: 696902 - RNA, 19 nt, Artificial Sequence
  Description of Artificial Sequence: Synthetic oligonucleotide
  Sense strand starting at position 47 of SEQ ID NO: 586164
aacaguuaaggucgaaugu

SEQ ID NO: 696903 - RNA, 19 nt, Artificial Sequence
  Description of Artificial Sequence: Synthetic oligonucleotide
  Antisense strand to SEQ ID NO: 696902
acauucgaccuuaacuguu

SEQ ID NO: 696904 - RNA, 19 nt, Artificial Sequence
  Description of Artificial Sequence: Synthetic oligonucleotide
  Sense strand starting at position 48 of SEQ ID NO: 586164
acaguuaaggucgaaugua

SEQ ID NO: 696905 - RNA, 19 nt, Artificial Sequence
  Description of Artificial Sequence: Synthetic oligonucleotide
  Antisense strand to SEQ ID NO: 696904
uacauucgaccuuaacugu

SEQ ID NO: 696906 - RNA, 19 nt, Artificial Sequence
  Description of Artificial Sequence: Synthetic oligonucleotide
  Sense strand starting at position 57 of SEQ ID NO: 586164
gucgaauguacaugggaaa

SEQ ID NO: 696907 - RNA, 19 nt, Artificial Sequence
  Description of Artificial Sequence: Synthetic oligonucleotide
  Antisense strand to SEQ ID NO: 696906
uuucccauguacauucgac

SEQ ID NO: 696908 - RNA, 19 nt, Artificial Sequence
  Description of Artificial Sequence: Synthetic oligonucleotide
  Sense strand starting at position 58 of SEQ ID NO: 586164
ucgaauguacaugggaaau

SEQ ID NO: 696909 - RNA, 19 nt, Artificial Sequence
  Description of Artificial Sequence: Synthetic oligonucleotide
  Antisense strand to SEQ ID NO: 696908
auuucccauguacauucga

SEQ ID NO: 696910 - RNA, 19 nt, Artificial Sequence
  Description of Artificial Sequence: Synthetic oligonucleotide
  Sense strand starting at position 665 of SEQ ID NO: 586164
guagaaauaucaguauugu

SEQ ID NO: 696911 - RNA, 19 nt, Artificial Sequence
  Description of Artificial Sequence: Synthetic oligonucleotide
  Antisense strand to SEQ ID NO: 696910
acaauacugauauuucuac

SEQ ID NO: 696912 - RNA, 19 nt, Artificial Sequence
  Description of Artificial Sequence: Synthetic oligonucleotide
  Sense strand starting at position 674 of SEQ ID NO: 586164
ucaguauuguugugguuag

SEQ ID NO: 696913 - RNA, 19 nt, Artificial Sequence
  Description of Artificial Sequence: Synthetic oligonucleotide
  Antisense strand to SEQ ID NO: 696912
cuaaccacaacaauacuga

SEQ ID NO: 696914 - RNA, 19 nt, Artificial Sequence
  Description of Artificial Sequence: Synthetic oligonucleotide
  Sense strand starting at position 723 of SEQ ID NO: 586164
agcccugugcuagggauuu

SEQ ID NO: 696915 - RNA, 19 nt, Artificial Sequence
  Description of Artificial Sequence: Synthetic oligonucleotide
  Antisense strand to SEQ ID NO: 696914
aaaucccuagcacagggcu

SEQ ID NO: 696916 - RNA, 19 nt, Artificial Sequence
  Description of Artificial Sequence: Synthetic oligonucleotide
  Sense strand starting at position 763 of SEQ ID NO: 586164
uuaugaggugggcaauauu

SEQ ID NO: 696917 - RNA, 19 nt, Artificial Sequence
  Description of Artificial Sequence: Synthetic oligonucleotide
  Antisense strand to SEQ ID NO: 696916
aauauugcccaccucauaa

SEQ ID NO: 696918 - RNA, 19 nt, Artificial Sequence
  Description of Artificial Sequence: Synthetic oligonucleotide
  Sense strand starting at position 809 of SEQ ID NO: 586164
guuuaaagggcucaaguga

SEQ ID NO: 696919 - RNA, 19 nt, Artificial Sequence
  Description of Artificial Sequence: Synthetic oligonucleotide
  Antisense strand to SEQ ID NO: 696918
ucacuugagcccuuuaaac

SEQ ID NO: 696920 - RNA, 19 nt, Artificial Sequence
  Description of Artificial Sequence: Synthetic oligonucleotide
  Sense strand starting at position 817 of SEQ ID NO: 586164
ggcucaagugacugguaca

SEQ ID NO: 696921 - RNA, 19 nt, Artificial Sequence
  Description of Artificial Sequence: Synthetic oligonucleotide
  Antisense strand to SEQ ID NO: 696920
uguaccagucacuugagcc

SEQ ID NO: 696922 - RNA, 19 nt, Artificial Sequence
  Description of Artificial Sequence: Synthetic oligonucleotide
  Sense strand starting at position 820 of SEQ ID NO: 586164
ucaagugacugguacagaa

SEQ ID NO: 696923 - RNA, 19 nt, Artificial Sequence
  Description of Artificial Sequence: Synthetic oligonucleotide
  Antisense strand to SEQ ID NO: 696922
uucuguaccagucacuuga

SEQ ID NO: 696924 - RNA, 19 nt, Artificial Sequence
  Description of Artificial Sequence: Synthetic oligonucleotide
  Sense strand starting at position 911 of SEQ ID NO: 586164
cuugcagggcauugagaaa

SEQ ID NO: 696925 - RNA, 19 nt, Artificial Sequence
  Description of Artificial Sequence: Synthetic oligonucleotide
  Antisense strand to SEQ ID NO: 696924
uuucucaaugcccugcaag

SEQ ID NO: 696926 - RNA, 19 nt, Artificial Sequence
  Description of Artificial Sequence: Synthetic oligonucleotide
  Sense strand starting at position 932 of SEQ ID NO: 586164
ggaagugaauugcuagcua

SEQ ID NO: 696927 - RNA, 19 nt, Artificial Sequence
  Description of Artificial Sequence: Synthetic oligonucleotide
  Antisense strand to SEQ ID NO: 696926
uagcuagcaauucacuucc

SEQ ID NO: 696928 - RNA, 19 nt, Artificial Sequence
  Description of Artificial Sequence: Synthetic oligonucleotide
  Sense strand starting at position 936 of SEQ ID NO: 586164
gugaauugcuagcuaauga

SEQ ID NO: 696929 - RNA, 19 nt, Artificial Sequence
  Description of Artificial Sequence: Synthetic oligonucleotide
  Antisense strand to SEQ ID NO: 696928
ucauuagcuagcaauucac

SEQ ID NO: 696930 - RNA, 19 nt, Artificial Sequence
  Description of Artificial Sequence: Synthetic oligonucleotide
  Sense strand starting at position 1062 of SEQ ID NO: 586164
aaucuagugccuuacagag

SEQ ID NO: 696931 - RNA, 19 nt, Artificial Sequence
  Description of Artificial Sequence: Synthetic oligonucleotide
  Antisense strand to SEQ ID NO: 696930
cucuguaaggcacuagauu

SEQ ID NO: 696932 - RNA, 19 nt, Artificial Sequence
  Description of Artificial Sequence: Synthetic oligonucleotide
  Sense strand starting at position 1078 of SEQ ID NO: 586164
gagugaggccgacagcuau

SEQ ID NO: 696933 - RNA, 19 nt, Artificial Sequence
  Description of Artificial Sequence: Synthetic oligonucleotide
  Antisense strand to SEQ ID NO: 696932
auagcugucggccucacuc

SEQ ID NO: 696934 - RNA, 19 nt, Artificial Sequence
  Description of Artificial Sequence: Synthetic oligonucleotide
  Sense strand starting at position 1152 of SEQ ID NO: 586164
cugggaauccagcaucuca

SEQ ID NO: 696935 - RNA, 19 nt, Artificial Sequence
  Description of Artificial Sequence: Synthetic oligonucleotide
  Antisense strand to SEQ ID NO: 696934
ugagaugcuggauucccag

SEQ ID NO: 696936 - RNA, 19 nt, Artificial Sequence
  Description of Artificial Sequence: Synthetic oligonucleotide
  Sense strand starting at position 1327 of SEQ ID NO: 586164
ggcugagcuuuauucuaua

SEQ ID NO: 696937 - RNA, 19 nt, Artificial Sequence
  Description of Artificial Sequence: Synthetic oligonucleotide
  Antisense strand to SEQ ID NO: 696936
uauagaauaaagcucagcc

SEQ ID NO: 696938 - RNA, 19 nt, Artificial Sequence
  Description of Artificial Sequence: Synthetic oligonucleotide
  Sense strand starting at position 1349 of SEQ ID NO: 586164
agggacaauugcucuagca

SEQ ID NO: 696939 - RNA, 19 nt, Artificial Sequence
  Description of Artificial Sequence: Synthetic oligonucleotide
  Antisense strand to SEQ ID NO: 696938
ugcuagagcaauugucccu

SEQ ID NO: 696940 - RNA, 19 nt, Artificial Sequence
  Description of Artificial Sequence: Synthetic oligonucleotide
  Sense strand starting at position 1351 of SEQ ID NO: 586164
ggacaauugcucuagcagg

SEQ ID NO: 696941 - RNA, 19 nt, Artificial Sequence
  Description of Artificial Sequence: Synthetic oligonucleotide
  Antisense strand to SEQ ID NO: 696940
ccugcuagagcaauugucc

SEQ ID NO: 696942 - RNA, 19 nt, Artificial Sequence
  Description of Artificial Sequence: Synthetic oligonucleotide
  Sense strand starting at position 1558 of SEQ ID NO: 586164
acuggugaguccugguaaa

SEQ ID NO: 696943 - RNA, 19 nt, Artificial Sequence
  Description of Artificial Sequence: Synthetic oligonucleotide
  Antisense strand to SEQ ID NO: 696942
uuuaccaggacucaccagu

SEQ ID NO: 696944 - RNA, 19 nt, Artificial Sequence
  Description of Artificial Sequence: Synthetic oligonucleotide
  Sense strand starting at position 1619 of SEQ ID NO: 586164
ggugcaggcuuccuaggua

SEQ ID NO: 696945 - RNA, 19 nt, Artificial Sequence
  Description of Artificial Sequence: Synthetic oligonucleotide
  Antisense strand to SEQ ID NO: 696944
uaccuaggaagccugcacc

SEQ ID NO: 696946 - RNA, 19 nt, Artificial Sequence
  Description of Artificial Sequence: Synthetic oligonucleotide
  Sense strand starting at position 1622 of SEQ ID NO: 586164
gcaggcuuccuagguaauu

SEQ ID NO: 696947 - RNA, 19 nt, Artificial Sequence
  Description of Artificial Sequence: Synthetic oligonucleotide
  Antisense strand to SEQ ID NO: 696946
aauuaccuaggaagccugc

SEQ ID NO: 696948 - RNA, 19 nt, Artificial Sequence
  Description of Artificial Sequence: Synthetic oligonucleotide
  Sense strand starting at position 2494 of SEQ ID NO: 586164
gaaggaccaucagaaauga

SEQ ID NO: 696949 - RNA, 19 nt, Artificial Sequence
  Description of Artificial Sequence: Synthetic oligonucleotide
  Antisense strand to SEQ ID NO: 696948
ucauuucugaugguccuuc

SEQ ID NO: 696950 - RNA, 19 nt, Artificial Sequence
  Description of Artificial Sequence: Synthetic oligonucleotide
  Sense strand starting at position 2755 of SEQ ID NO: 586164
gagcuauugugccacggca

SEQ ID NO: 696951 - RNA, 19 nt, Artificial Sequence
  Description of Artificial Sequence: Synthetic oligonucleotide
  Antisense strand to SEQ ID NO: 696950
ugccguggcacaauagcuc

SEQ ID NO: 696952 - RNA, 19 nt, Artificial Sequence
  Description of Artificial Sequence: Synthetic oligonucleotide
  Sense strand starting at position 3582 of SEQ ID NO: 586164
gggcuauguuggguacuca

SEQ ID NO: 696953 - RNA, 19 nt, Artificial Sequence
  Description of Artificial Sequence: Synthetic oligonucleotide
  Antisense strand to SEQ ID NO: 696952
ugaguacccaacauagccc

SEQ ID NO: 696954 - RNA, 19 nt, Artificial Sequence
  Description of Artificial Sequence: Synthetic oligonucleotide
  Sense strand starting at position 3602 of SEQ ID NO: 586164
ggaagagguccuugaucug

SEQ ID NO: 696955 - RNA, 19 nt, Artificial Sequence
  Description of Artificial Sequence: Synthetic oligonucleotide
  Antisense strand to SEQ ID NO: 696954
cagaucaaggaccucuucc

SEQ ID NO: 696956 - RNA, 19 nt, Artificial Sequence
  Description of Artificial Sequence: Synthetic oligonucleotide
  Sense strand starting at position 3605 of SEQ ID NO: 586164
agagguccuugaucugauu

SEQ ID NO: 696957 - RNA, 19 nt, Artificial Sequence
  Description of Artificial Sequence: Synthetic oligonucleotide
  Antisense strand to SEQ ID NO: 696956
aaucagaucaaggaccucu

SEQ ID NO: 696958 - RNA, 19 nt, Artificial Sequence
  Description of Artificial Sequence: Synthetic oligonucleotide
  Sense strand starting at position 3608 of SEQ ID NO: 586164
gguccuugaucugauuaau

SEQ ID NO: 696959 - RNA, 19 nt, Artificial Sequence
  Description of Artificial Sequence: Synthetic oligonucleotide
  Antisense strand to SEQ ID NO: 696958
auuaaucagaucaaggacc

SEQ ID NO: 696960 - RNA, 19 nt, Artificial Sequence
  Description of Artificial Sequence: Synthetic oligonucleotide
  Sense strand starting at position 3705 of SEQ ID NO: 586164
ugcauugggucuuggaaga

SEQ ID NO: 696961 - RNA, 19 nt, Artificial Sequence
  Description of Artificial Sequence: Synthetic oligonucleotide
  Antisense strand to SEQ ID NO: 696960
ucuuccaagacccaaugca

SEQ ID NO: 696962 - RNA, 19 nt, Artificial Sequence
  Description of Artificial Sequence: Synthetic oligonucleotide
  Sense strand starting at position 3790 of SEQ ID NO: 586164
augugacuggccugcuuua

SEQ ID NO: 696963 - RNA, 19 nt, Artificial Sequence
  Description of Artificial Sequence: Synthetic oligonucleotide
  Antisense strand to SEQ ID NO: 696962
uaaagcaggccagucacau

SEQ ID NO: 696964 - RNA, 19 nt, Artificial Sequence
  Description of Artificial Sequence: Synthetic oligonucleotide
  Sense strand starting at position 3910 of SEQ ID NO: 586164
gagggaguuuguucuuggu

SEQ ID NO: 696965 - RNA, 19 nt, Artificial Sequence
  Description of Artificial Sequence: Synthetic oligonucleotide
  Antisense strand to SEQ ID NO: 696964
accaagaacaaacucccuc

SEQ ID NO: 696966 - RNA, 19 nt, Artificial Sequence
  Description of Artificial Sequence: Synthetic oligonucleotide
  Sense strand starting at position 3913 of SEQ ID NO: 586164
ggaguuuguucuugguccu

SEQ ID NO: 696967 - RNA, 19 nt, Artificial Sequence
  Description of Artificial Sequence: Synthetic oligonucleotide
  Antisense strand to SEQ ID NO: 696966
aggaccaagaacaaacucc

SEQ ID NO: 696968 - RNA, 19 nt, Artificial Sequence
  Description of Artificial Sequence: Synthetic oligonucleotide
  Sense strand starting at position 3914 of SEQ ID NO: 586164
gaguuuguucuugguccua

SEQ ID NO: 696969 - RNA, 19 nt, Artificial Sequence
  Description of Artificial Sequence: Synthetic oligonucleotide
  Antisense strand to SEQ ID NO: 696968
uaggaccaagaacaaacuc

SEQ ID NO: 696970 - RNA, 19 nt, Artificial Sequence
  Description of Artificial Sequence: Synthetic oligonucleotide
  Sense strand starting at position 3916 of SEQ ID NO: 586164
guuuguucuugguccuaua

SEQ ID NO: 696971 - RNA, 19 nt, Artificial Sequence
  Description of Artificial Sequence: Synthetic oligonucleotide
  Antisense strand to SEQ ID NO: 696970
uauaggaccaagaacaaac

SEQ ID NO: 696972 - RNA, 19 nt, Artificial Sequence
  Description of Artificial Sequence: Synthetic oligonucleotide
  Sense strand starting at position 3919 of SEQ ID NO: 586164
uguucuugguccuauaggu

SEQ ID NO: 696973 - RNA, 19 nt, Artificial Sequence
  Description of Artificial Sequence: Synthetic oligonucleotide
  Antisense strand to SEQ ID NO: 696972
accuauaggaccaagaaca

SEQ ID NO: 696974 - RNA, 19 nt, Artificial Sequence
  Description of Artificial Sequence: Synthetic oligonucleotide
  Sense strand starting at position 3926 of SEQ ID NO: 586164
gguccuauaggucauagga

SEQ ID NO: 696975 - RNA, 19 nt, Artificial Sequence
  Description of Artificial Sequence: Synthetic oligonucleotide
  Antisense strand to SEQ ID NO: 696974
uccuaugaccuauaggacc

SEQ ID NO: 696976 - RNA, 19 nt, Artificial Sequence
  Description of Artificial Sequence: Synthetic oligonucleotide
  Sense strand starting at position 3928 of SEQ ID NO: 586164
uccuauaggucauaggaaa

SEQ ID NO: 696977 - RNA, 19 nt, Artificial Sequence
  Description of Artificial Sequence: Synthetic oligonucleotide
  Antisense strand to SEQ ID NO: 696976
uuuccuaugaccuauagga

SEQ ID NO: 696978 - RNA, 19 nt, Artificial Sequence
  Description of Artificial Sequence: Synthetic oligonucleotide
  Sense strand starting at position 210 of SEQ ID NO: 586165
caaguauggucaucaggga

SEQ ID NO: 696979 - RNA, 19 nt, Artificial Sequence
  Description of Artificial Sequence: Synthetic oligonucleotide
  Antisense strand to SEQ ID NO: 696978
ucccugaugaccauacuug

SEQ ID NO: 696980 - RNA, 19 nt, Artificial Sequence
  Description of Artificial Sequence: Synthetic oligonucleotide
  Sense strand starting at position 214 of SEQ ID NO: 586165
uauggucaucagggaauca

SEQ ID NO: 696981 - RNA, 19 nt, Artificial Sequence
  Description of Artificial Sequence: Synthetic oligonucleotide
  Antisense strand to SEQ ID NO: 696980
ugauucccugaugaccaua

SEQ ID NO: 696982 - RNA, 19 nt, Artificial Sequence
  Description of Artificial Sequence: Synthetic oligonucleotide
  Sense strand starting at position 225 of SEQ ID NO: 586165
gggaaucaguuaccuaagu

SEQ ID NO: 696983 - RNA, 19 nt, Artificial Sequence
  Description of Artificial Sequence: Synthetic oligonucleotide
  Antisense strand to SEQ ID NO: 696982
acuuagguaacugauuccc

SEQ ID NO: 696984 - RNA, 19 nt, Artificial Sequence
  Description of Artificial Sequence: Synthetic oligonucleotide
  Sense strand starting at position 257 of SEQ ID NO: 586165
cuuagugaaucccuguauu

SEQ ID NO: 696985 - RNA, 19 nt, Artificial Sequence
  Description of Artificial Sequence: Synthetic oligonucleotide
  Antisense strand to SEQ ID NO: 696984
aauacagggauucacuaag

SEQ ID NO: 696986 - RNA, 19 nt, Artificial Sequence
  Description of Artificial Sequence: Synthetic oligonucleotide
  Sense strand starting at position 339 of SEQ ID NO: 586165
gcauguaaaguacacuuau

SEQ ID NO: 696987 - RNA, 19 nt, Artificial Sequence
  Description of Artificial Sequence: Synthetic oligonucleotide
  Antisense strand to SEQ ID NO: 696986
auaaguguacuuuacaugc

SEQ ID NO: 696988 - RNA, 19 nt, Artificial Sequence
  Description of Artificial Sequence: Synthetic oligonucleotide
  Sense strand starting at position 409 of SEQ ID NO: 586165
gaaucagucuuauaggagg

SEQ ID NO: 696989 - RNA, 19 nt, Artificial Sequence
  Description of Artificial Sequence: Synthetic oligonucleotide
  Antisense strand to SEQ ID NO: 696988
ccuccuauaagacugauuc

SEQ ID NO: 696990 - RNA, 19 nt, Artificial Sequence
  Description of Artificial Sequence: Synthetic oligonucleotide
  Sense strand starting at position 414 of SEQ ID NO: 586165
agucuuauaggagggcaaa

SEQ ID NO: 696991 - RNA, 19 nt, Artificial Sequence
  Description of Artificial Sequence: Synthetic oligonucleotide
  Antisense strand to SEQ ID NO: 696990
uuugcccuccuauaagacu

SEQ ID NO: 696992 - RNA, 19 nt, Artificial Sequence
  Description of Artificial Sequence: Synthetic oligonucleotide
  Sense strand starting at position 493 of SEQ ID NO: 586165
agugcuguccaauaaauau

SEQ ID NO: 696993 - RNA, 19 nt, Artificial Sequence
  Description of Artificial Sequence: Synthetic oligonucleotide
  Antisense strand to SEQ ID NO: 696992
auauuuauuggacagcacu

SEQ ID NO: 696994 - RNA, 19 nt, Artificial Sequence
  Description of Artificial Sequence: Synthetic oligonucleotide
  Sense strand starting at position 512 of SEQ ID NO: 586165
auauguaagccacauaugu

SEQ ID NO: 696995 - RNA, 19 nt, Artificial Sequence
  Description of Artificial Sequence: Synthetic oligonucleotide
  Antisense strand to SEQ ID NO: 696994
acauauguggcuuacauau

SEQ ID NO: 696996 - RNA, 19 nt, Artificial Sequence
  Description of Artificial Sequence: Synthetic oligonucleotide
  Sense strand starting at position 862 of SEQ ID NO: 586165
auauuaagaucucaguaag

SEQ ID NO: 696997 - RNA, 19 nt, Artificial Sequence
  Description of Artificial Sequence: Synthetic oligonucleotide
  Antisense strand to SEQ ID NO: 696996
cuuacugagaucuuaauau

SEQ ID NO: 696998 - RNA, 19 nt, Artificial Sequence
  Description of Artificial Sequence: Synthetic oligonucleotide
  Sense strand starting at position 930 of SEQ ID NO: 586165
acagcaaugcuaugaauca

SEQ ID NO: 696999 - RNA, 19 nt, Artificial Sequence
  Description of Artificial Sequence: Synthetic oligonucleotide
  Antisense strand to SEQ ID NO: 696998
ugauucauagcauugcugu

SEQ ID NO: 697000 - RNA, 19 nt, Artificial Sequence
  Description of Artificial Sequence: Synthetic oligonucleotide
  Sense strand starting at position 937 of SEQ ID NO: 586165
ugcuaugaaucaugauuua

SEQ ID NO: 697001 - RNA, 19 nt, Artificial Sequence
  Description of Artificial Sequence: Synthetic oligonucleotide
  Antisense strand to SEQ ID NO: 697000
uaaaucaugauucauagca

SEQ ID NO: 697002 - RNA, 19 nt, Artificial Sequence
  Description of Artificial Sequence: Synthetic oligonucleotide
  Sense strand starting at position 1604 of SEQ ID NO: 586165
cugucaggugcguaacaau

SEQ ID NO: 697003 - RNA, 19 nt, Artificial Sequence
  Description of Artificial Sequence: Synthetic oligonucleotide
  Antisense strand to SEQ ID NO: 697002
auuguuacgcaccugacag

SEQ ID NO: 697004 - RNA, 19 nt, Artificial Sequence
  Description of Artificial Sequence: Synthetic oligonucleotide
  Sense strand starting at position 2055 of SEQ ID NO: 586165
gucucagugcgccuguuua

SEQ ID NO: 697005 - RNA, 19 nt, Artificial Sequence
  Description of Artificial Sequence: Synthetic oligonucleotide
  Antisense strand to SEQ ID NO: 697004
uaaacaggcgcacugagac

SEQ ID NO: 697006 - RNA, 19 nt, Artificial Sequence
  Description of Artificial Sequence: Synthetic oligonucleotide
  Sense strand starting at position 2072 of SEQ ID NO: 586165
uaaggauagccucagagcu

SEQ ID NO: 697007 - RNA, 19 nt, Artificial Sequence
  Description of Artificial Sequence: Synthetic oligonucleotide
  Antisense strand to SEQ ID NO: 697006
agcucugaggcuauccuua

SEQ ID NO: 697008 - RNA, 19 nt, Artificial Sequence
  Description of Artificial Sequence: Synthetic oligonucleotide
  Sense strand starting at position 2136 of SEQ ID NO: 586165
cuugguuuguucuucggga

SEQ ID NO: 697009 - RNA, 19 nt, Artificial Sequence
  Description of Artificial Sequence: Synthetic oligonucleotide
  Antisense strand to SEQ ID NO: 697008
ucccgaagaacaaaccaag

SEQ ID NO: 697010 - RNA, 19 nt, Artificial Sequence
  Description of Artificial Sequence: Synthetic oligonucleotide
  Sense strand starting at position 2137 of SEQ ID NO: 586165
uugguuuguucuucgggaa

SEQ ID NO: 697011 - RNA, 19 nt, Artificial Sequence
  Description of Artificial Sequence: Synthetic oligonucleotide
  Antisense strand to SEQ ID NO: 697010
uucccgaagaacaaaccaa

SEQ ID NO: 697012 - RNA, 19 nt, Artificial Sequence
  Description of Artificial Sequence: Synthetic oligonucleotide
  Sense strand starting at position 2138 of SEQ ID NO: 586165
ugguuuguucuucgggaaa

SEQ ID NO: 697013 - RNA, 19 nt, Artificial Sequence
  Description of Artificial Sequence: Synthetic oligonucleotide
  Antisense strand to SEQ ID NO: 697012
uuucccgaagaacaaacca

SEQ ID NO: 697014 - RNA, 19 nt, Artificial Sequence
  Description of Artificial Sequence: Synthetic oligonucleotide
  Sense strand starting at position 2141 of SEQ ID NO: 586165
uuuguucuucgggaaauca

SEQ ID NO: 697015 - RNA, 19 nt, Artificial Sequence
  Description of Artificial Sequence: Synthetic oligonucleotide
  Antisense strand to SEQ ID NO: 697014
ugauuucccgaagaacaaa

SEQ ID NO: 697016 - RNA, 19 nt, Artificial Sequence
  Description of Artificial Sequence: Synthetic oligonucleotide
  Sense strand starting at position 2149 of SEQ ID NO: 586165
ucgggaaaucaucaccguu

SEQ ID NO: 697017 - RNA, 19 nt, Artificial Sequence
  Description of Artificial Sequence: Synthetic oligonucleotide
  Antisense strand to SEQ ID NO: 697016
aacggugaugauuucccga

SEQ ID NO: 697018 - RNA, 19 nt, Artificial Sequence
  Description of Artificial Sequence: Synthetic oligonucleotide
  Sense strand starting at position 2173 of SEQ ID NO: 586165
guugcacugccgucugauu

SEQ ID NO: 697019 - RNA, 19 nt, Artificial Sequence
  Description of Artificial Sequence: Synthetic oligonucleotide
  Antisense strand to SEQ ID NO: 697018
aaucagacggcagugcaac

SEQ ID NO: 697020 - RNA, 19 nt, Artificial Sequence
  Description of Artificial Sequence: Synthetic oligonucleotide
  Sense strand starting at position 2175 of SEQ ID NO: 586165
ugcacugccgucugauuua

SEQ ID NO: 697021 - RNA, 19 nt, Artificial Sequence
  Description of Artificial Sequence: Synthetic oligonucleotide
  Antisense strand to SEQ ID NO: 697020
uaaaucagacggcagugca

SEQ ID NO: 697022 - RNA, 19 nt, Artificial Sequence
  Description of Artificial Sequence: Synthetic oligonucleotide
  Sense strand starting at position 2178 of SEQ ID NO: 586165
acugccgucugauuuauua

SEQ ID NO: 697023 - RNA, 19 nt, Artificial Sequence
  Description of Artificial Sequence: Synthetic oligonucleotide
  Antisense strand to SEQ ID NO: 697022
uaauaaaucagacggcagu

SEQ ID NO: 697024 - RNA, 19 nt, Artificial Sequence
  Description of Artificial Sequence: Synthetic oligonucleotide
  Sense strand starting at position 2182 of SEQ ID NO: 586165
ccgucugauuuauuaugca

SEQ ID NO: 697025 - RNA, 19 nt, Artificial Sequence
  Description of Artificial Sequence: Synthetic oligonucleotide
  Antisense strand to SEQ ID NO: 697024
ugcauaauaaaucagacgg

SEQ ID NO: 697026 - RNA, 19 nt, Artificial Sequence
  Description of Artificial Sequence: Synthetic oligonucleotide
  Sense strand starting at position 2640 of SEQ ID NO: 586165
uugccuccacaagaugauu

SEQ ID NO: 697027 - RNA, 19 nt, Artificial Sequence
  Description of Artificial Sequence: Synthetic oligonucleotide
  Antisense strand to SEQ ID NO: 697026
aaucaucuuguggaggcaa

SEQ ID NO: 697028 - RNA, 19 nt, Artificial Sequence
  Description of Artificial Sequence: Synthetic oligonucleotide
  Sense strand starting at position 2745 of SEQ ID NO: 586165
uuacaucagcaccgaaaua

SEQ ID NO: 697029 - RNA, 19 nt, Artificial Sequence
  Description of Artificial Sequence: Synthetic oligonucleotide
  Antisense strand to SEQ ID NO: 697028
uauuucggugcugauguaa

SEQ ID NO: 697030 - RNA, 19 nt, Artificial Sequence
  Description of Artificial Sequence: Synthetic oligonucleotide
  Sense strand starting at position 2857 of SEQ ID NO: 586165
acgcauuccugacuaaauc

SEQ ID NO: 697031 - RNA, 19 nt, Artificial Sequence
  Description of Artificial Sequence: Synthetic oligonucleotide
  Antisense strand to SEQ ID NO: 697030
gauuuagucaggaaugcgu

SEQ ID NO: 697032 - RNA, 19 nt, Artificial Sequence
  Description of Artificial Sequence: Synthetic oligonucleotide
  Sense strand starting at position 2858 of SEQ ID NO: 586165
cgcauuccugacuaaauca

SEQ ID NO: 697033 - RNA, 19 nt, Artificial Sequence
  Description of Artificial Sequence: Synthetic oligonucleotide
  Antisense strand to SEQ ID NO: 697032
ugauuuagucaggaaugcg

SEQ ID NO: 697034 - RNA, 19 nt, Artificial Sequence
  Description of Artificial Sequence: Synthetic oligonucleotide
  Sense strand starting at position 2926 of SEQ ID NO: 586165
uuaguaguuacaggcaaga

SEQ ID NO: 697035 - RNA, 19 nt, Artificial Sequence
  Description of Artificial Sequence: Synthetic oligonucleotide
  Antisense strand to SEQ ID NO: 697034
ucuugccuguaacuacuaa

SEQ ID NO: 697036 - RNA, 19 nt, Artificial Sequence
  Description of Artificial Sequence: Synthetic oligonucleotide
  Sense strand starting at position 2972 of SEQ ID NO: 586165
gguucauuguugcuggaaa

SEQ ID NO: 697037 - RNA, 19 nt, Artificial Sequence
  Description of Artificial Sequence: Synthetic oligonucleotide
  Antisense strand to SEQ ID NO: 697036
uuuccagcaacaaugaacc

SEQ ID NO: 697038 - RNA, 19 nt, Artificial Sequence
  Description of Artificial Sequence: Synthetic oligonucleotide
  Sense strand starting at position 3148 of SEQ ID NO: 586165
agaacugagucauaaucug

SEQ ID NO: 697039 - RNA, 19 nt, Artificial Sequence
  Description of Artificial Sequence: Synthetic oligonucleotide
  Antisense strand to SEQ ID NO: 697038
cagauuaugacucaguucu

SEQ ID NO: 697040 - RNA, 19 nt, Artificial Sequence
  Description of Artificial Sequence: Synthetic oligonucleotide
  Sense strand starting at position 3154 of SEQ ID NO: 586165
gagucauaaucuguguaaa

SEQ ID NO: 697041 - RNA, 19 nt, Artificial Sequence
  Description of Artificial Sequence: Synthetic oligonucleotide
  Antisense strand to SEQ ID NO: 697040
uuuacacagauuaugacuc

SEQ ID NO: 697042 - RNA, 19 nt, Artificial Sequence
  Description of Artificial Sequence: Synthetic oligonucleotide
  Sense strand starting at position 3155 of SEQ ID NO: 586165
agucauaaucuguguaaac

SEQ ID NO: 697043 - RNA, 19 nt, Artificial Sequence
  Description of Artificial Sequence: Synthetic oligonucleotide
  Antisense strand to SEQ ID NO: 697042
guuuacacagauuaugacu

SEQ ID NO: 697044 - RNA, 19 nt, Artificial Sequence
  Description of Artificial Sequence: Synthetic oligonucleotide
  Sense strand starting at position 3179 of SEQ ID NO: 586165
gcccauuucccguagcauc

SEQ ID NO: 697045 - RNA, 19 nt, Artificial Sequence
  Description of Artificial Sequence: Synthetic oligonucleotide
  Antisense strand to SEQ ID NO: 697044
gaugcuacgggaaaugggc

SEQ ID NO: 697046 - RNA, 19 nt, Artificial Sequence
  Description of Artificial Sequence: Synthetic oligonucleotide
  Sense strand starting at position 3280 of SEQ ID NO: 586165
cguccagagcucuacacuu

SEQ ID NO: 697047 - RNA, 19 nt, Artificial Sequence
  Description of Artificial Sequence: Synthetic oligonucleotide
  Antisense strand to SEQ ID NO: 697046
aaguguagagcucuggacg

SEQ ID NO: 697048 - RNA, 19 nt, Artificial Sequence
  Description of Artificial Sequence: Synthetic oligonucleotide
  Sense strand starting at position 3827 of SEQ ID NO: 586165
gcuguauaauuuguguacu

SEQ ID NO: 697049 - RNA, 19 nt, Artificial Sequence
  Description of Artificial Sequence: Synthetic oligonucleotide
  Antisense strand to SEQ ID NO: 697048
aguacacaaauuauacagc

SEQ ID NO: 697050 - RNA, 19 nt, Artificial Sequence
  Description of Artificial Sequence: Synthetic oligonucleotide
  Sense strand starting at position 3954 of SEQ ID NO: 586165
aagugauaaguuuagucca

SEQ ID NO: 697051 - RNA, 19 nt, Artificial Sequence
  Description of Artificial Sequence: Synthetic oligonucleotide
  Antisense strand to SEQ ID NO: 697050
uggacuaaacuuaucacuu

SEQ ID NO: 697052 - RNA, 19 nt, Artificial Sequence
  Description of Artificial Sequence: Synthetic oligonucleotide
  Sense strand starting at position 3956 of SEQ ID NO: 586165
gugauaaguuuaguccaug

SEQ ID NO: 697053 - RNA, 19 nt, Artificial Sequence
  Description of Artificial Sequence: Synthetic oligonucleotide
  Antisense strand to SEQ ID NO: 697052
cauggacuaaacuuaucac

SEQ ID NO: 697054 - RNA, 19 nt, Artificial Sequence
  Description of Artificial Sequence: Synthetic oligonucleotide
  Sense strand starting at position 3957 of SEQ ID NO: 586165
ugauaaguuuaguccauga

SEQ ID NO: 697055 - RNA, 19 nt, Artificial Sequence
  Description of Artificial Sequence: Synthetic oligonucleotide
  Antisense strand to SEQ ID NO: 697054
ucauggacuaaacuuauca

SEQ ID NO: 697056 - RNA, 19 nt, Artificial Sequence
  Description of Artificial Sequence: Synthetic oligonucleotide
  Sense strand starting at position 3962 of SEQ ID NO: 586165
aguuuaguccaugaaaucu

SEQ ID NO: 697057 - RNA, 19 nt, Artificial Sequence
  Description of Artificial Sequence: Synthetic oligonucleotide
  Antisense strand to SEQ ID NO: 697056
agauuucauggacuaaacu

SEQ ID NO: 697058 - RNA, 19 nt, Artificial Sequence
  Description of Artificial Sequence: Synthetic oligonucleotide
  Sense strand starting at position 19 of SEQ ID NO: 586166
ccuguuuggcagugaugac

SEQ ID NO: 697059 - RNA, 19 nt, Artificial Sequence
  Description of Artificial Sequence: Synthetic oligonucleotide
  Antisense strand to SEQ ID NO: 697058
gucaucacugccaaacagg

SEQ ID NO: 697060 - RNA, 19 nt, Artificial Sequence
  Description of Artificial Sequence: Synthetic oligonucleotide
  Sense strand starting at position 58 of SEQ ID NO: 586166
gagugcuacgaagauugua

SEQ ID NO: 697061 - RNA, 19 nt, Artificial Sequence
  Description of Artificial Sequence: Synthetic oligonucleotide
  Antisense strand to SEQ ID NO: 697060
uacaaucuucguagcacuc

SEQ ID NO: 697062 - RNA, 19 nt, Artificial Sequence
  Description of Artificial Sequence: Synthetic oligonucleotide
  Sense strand starting at position 214 of SEQ ID NO: 586166
gcccaaauaguuugggaua

SEQ ID NO: 697063 - RNA, 19 nt, Artificial Sequence
  Description of Artificial Sequence: Synthetic oligonucleotide
  Antisense strand to SEQ ID NO: 697062
uaucccaaacuauuugggc

SEQ ID NO: 697064 - RNA, 19 nt, Artificial Sequence
  Description of Artificial Sequence: Synthetic oligonucleotide
  Sense strand starting at position 217 of SEQ ID NO: 586166
caaauaguuugggauaaac

SEQ ID NO: 697065 - RNA, 19 nt, Artificial Sequence
  Description of Artificial Sequence: Synthetic oligonucleotide
  Antisense strand to SEQ ID NO: 697064
guuuaucccaaacuauuug

SEQ ID NO: 697066 - RNA, 19 nt, Artificial Sequence
  Description of Artificial Sequence: Synthetic oligonucleotide
  Sense strand starting at position 277 of SEQ ID NO: 586166
uugagcuauucuuugauga

SEQ ID NO: 697067 - RNA, 19 nt, Artificial Sequence
  Description of Artificial Sequence: Synthetic oligonucleotide
  Antisense strand to SEQ ID NO: 697066
ucaucaaagaauagcucaa

SEQ ID NO: 697068 - RNA, 19 nt, Artificial Sequence
  Description of Artificial Sequence: Synthetic oligonucleotide
  Sense strand starting at position 278 of SEQ ID NO: 586166
ugagcuauucuuugaugau

SEQ ID NO: 697069 - RNA, 19 nt, Artificial Sequence
  Description of Artificial Sequence: Synthetic oligonucleotide
  Antisense strand to SEQ ID NO: 697068
aucaucaaagaauagcuca

SEQ ID NO: 697070 - RNA, 19 nt, Artificial Sequence
  Description of Artificial Sequence: Synthetic oligonucleotide
  Sense strand starting at position 587 of SEQ ID NO: 586166
caaguauggucaucaggga

SEQ ID NO: 697071 - RNA, 19 nt, Artificial Sequence
  Description of Artificial Sequence: Synthetic oligonucleotide
  Antisense strand to SEQ ID NO: 697070
ucccugaugaccauacuug

SEQ ID NO: 697072 - RNA, 19 nt, Artificial Sequence
  Description of Artificial Sequence: Synthetic oligonucleotide
  Sense strand starting at position 591 of SEQ ID NO: 586166
uauggucaucagggaauca

SEQ ID NO: 697073 - RNA, 19 nt, Artificial Sequence
  Description of Artificial Sequence: Synthetic oligonucleotide
  Antisense strand to SEQ ID NO: 697072
ugauucccugaugaccaua

SEQ ID NO: 697074 - RNA, 19 nt, Artificial Sequence
  Description of Artificial Sequence: Synthetic oligonucleotide
  Sense strand starting at position 602 of SEQ ID NO: 586166
gggaaucaguuaccuaagu

SEQ ID NO: 697075 - RNA, 19 nt, Artificial Sequence
  Description of Artificial Sequence: Synthetic oligonucleotide
  Antisense strand to SEQ ID NO: 697074
acuuagguaacugauuccc

SEQ ID NO: 697076 - RNA, 19 nt, Artificial Sequence
  Description of Artificial Sequence: Synthetic oligonucleotide
  Sense strand starting at position 634 of SEQ ID NO: 586166
cuuagugaaucccuguauu

SEQ ID NO: 697077 - RNA, 19 nt, Artificial Sequence
  Description of Artificial Sequence: Synthetic oligonucleotide
  Antisense strand to SEQ ID NO: 697076
aauacagggauucacuaag

SEQ ID NO: 697078 - RNA, 19 nt, Artificial Sequence
  Description of Artificial Sequence: Synthetic oligonucleotide
  Sense strand starting at position 716 of SEQ ID NO: 586166
gcauguaaaguacacuuau

SEQ ID NO: 697079 - RNA, 19 nt, Artificial Sequence
  Description of Artificial Sequence: Synthetic oligonucleotide
  Antisense strand to SEQ ID NO: 697078
auaaguguacuuuacaugc

SEQ ID NO: 697080 - RNA, 19 nt, Artificial Sequence
  Description of Artificial Sequence: Synthetic oligonucleotide
  Sense strand starting at position 786 of SEQ ID NO: 586166
gaaucagucuuauaggagg

SEQ ID NO: 697081 - RNA, 19 nt, Artificial Sequence
  Description of Artificial Sequence: Synthetic oligonucleotide
  Antisense strand to SEQ ID NO: 697080
ccuccuauaagacugauuc

SEQ ID NO: 697082 - RNA, 19 nt, Artificial Sequence
  Description of Artificial Sequence: Synthetic oligonucleotide
  Sense strand starting at position 791 of SEQ ID NO: 586166
agucuuauaggagggcaaa

SEQ ID NO: 697083 - RNA, 19 nt, Artificial Sequence
  Description of Artificial Sequence: Synthetic oligonucleotide
  Antisense strand to SEQ ID NO: 697082
uuugcccuccuauaagacu

SEQ ID NO: 697084 - RNA, 19 nt, Artificial Sequence
  Description of Artificial Sequence: Synthetic oligonucleotide
  Sense strand starting at position 870 of SEQ ID NO: 586166
agugcuguccaauaaauau

SEQ ID NO: 697085 - RNA, 19 nt, Artificial Sequence
  Description of Artificial Sequence: Synthetic oligonucleotide
  Antisense strand to SEQ ID NO: 697084
auauuuauuggacagcacu

SEQ ID NO: 697086 - RNA, 19 nt, Artificial Sequence
  Description of Artificial Sequence: Synthetic oligonucleotide
  Sense strand starting at position 889 of SEQ ID NO: 586166
auauguaagccacauaugu

SEQ ID NO: 697087 - RNA, 19 nt, Artificial Sequence
  Description of Artificial Sequence: Synthetic oligonucleotide
  Antisense strand to SEQ ID NO: 697086
acauauguggcuuacauau

SEQ ID NO: 697088 - RNA, 19 nt, Artificial Sequence
  Description of Artificial Sequence: Synthetic oligonucleotide
  Sense strand starting at position 1239 of SEQ ID NO: 586166
auauuaagaucucaguaag

SEQ ID NO: 697089 - RNA, 19 nt, Artificial Sequence
  Description of Artificial Sequence: Synthetic oligonucleotide
  Antisense strand to SEQ ID NO: 697088
cuuacugagaucuuaauau

SEQ ID NO: 697090 - RNA, 19 nt, Artificial Sequence
  Description of Artificial Sequence: Synthetic oligonucleotide
  Sense strand starting at position 1307 of SEQ ID NO: 586166
acagcaaugcuaugaauca

SEQ ID NO: 697091 - RNA, 19 nt, Artificial Sequence
  Description of Artificial Sequence: Synthetic oligonucleotide
  Antisense strand to SEQ ID NO: 697090
ugauucauagcauugcugu

SEQ ID NO: 697092 - RNA, 19 nt, Artificial Sequence
  Description of Artificial Sequence: Synthetic oligonucleotide
  Sense strand starting at position 1314 of SEQ ID NO: 586166
ugcuaugaaucaugauuua

SEQ ID NO: 697093 - RNA, 19 nt, Artificial Sequence
  Description of Artificial Sequence: Synthetic oligonucleotide
  Antisense strand to SEQ ID NO: 697092
uaaaucaugauucauagca

SEQ ID NO: 697094 - RNA, 19 nt, Artificial Sequence
  Description of Artificial Sequence: Synthetic oligonucleotide
  Sense strand starting at position 1981 of SEQ ID NO: 586166
cugucaggugcguaacaau

SEQ ID NO: 697095 - RNA, 19 nt, Artificial Sequence
  Description of Artificial Sequence: Synthetic oligonucleotide
  Antisense strand to SEQ ID NO: 697094
auuguuacgcaccugacag

SEQ ID NO: 697096 - RNA, 19 nt, Artificial Sequence
  Description of Artificial Sequence: Synthetic oligonucleotide
  Sense strand starting at position 2432 of SEQ ID NO: 586166
gucucagugcgccuguuua

SEQ ID NO: 697097 - RNA, 19 nt, Artificial Sequence
  Description of Artificial Sequence: Synthetic oligonucleotide
  Antisense strand to SEQ ID NO: 697096
uaaacaggcgcacugagac

SEQ ID NO: 697098 - RNA, 19 nt, Artificial Sequence
  Description of Artificial Sequence: Synthetic oligonucleotide
  Sense strand starting at position 2449 of SEQ ID NO: 586166
uaaggauagccucagagcu

SEQ ID NO: 697099 - RNA, 19 nt, Artificial Sequence
  Description of Artificial Sequence: Synthetic oligonucleotide
  Antisense strand to SEQ ID NO: 697098
agcucugaggcuauccuua

SEQ ID NO: 697100 - RNA, 19 nt, Artificial Sequence
  Description of Artificial Sequence: Synthetic oligonucleotide
  Sense strand starting at position 2513 of SEQ ID NO: 586166
cuugguuuguucuucggga

SEQ ID NO: 697101 - RNA, 19 nt, Artificial Sequence
  Description of Artificial Sequence: Synthetic oligonucleotide
  Antisense strand to SEQ ID NO: 697100
ucccgaagaacaaaccaag

SEQ ID NO: 697102 - RNA, 19 nt, Artificial Sequence
  Description of Artificial Sequence: Synthetic oligonucleotide
  Sense strand starting at position 2514 of SEQ ID NO: 586166
uugguuuguucuucgggaa

SEQ ID NO: 697103 - RNA, 19 nt, Artificial Sequence
  Description of Artificial Sequence: Synthetic oligonucleotide
  Antisense strand to SEQ ID NO: 697102
uucccgaagaacaaaccaa

SEQ ID NO: 697104 - RNA, 19 nt, Artificial Sequence
  Description of Artificial Sequence: Synthetic oligonucleotide
  Sense strand starting at position 2515 of SEQ ID NO: 586166
ugguuuguucuucgggaaa

SEQ ID NO: 697105 - RNA, 19 nt, Artificial Sequence
  Description of Artificial Sequence: Synthetic oligonucleotide
  Antisense strand to SEQ ID NO: 697104
uuucccgaagaacaaacca

SEQ ID NO: 697106 - RNA, 19 nt, Artificial Sequence
  Description of Artificial Sequence: Synthetic oligonucleotide
  Sense strand starting at position 2518 of SEQ ID NO: 586166
uuuguucuucgggaaauca

SEQ ID NO: 697107 - RNA, 19 nt, Artificial Sequence
  Description of Artificial Sequence: Synthetic oligonucleotide
  Antisense strand to SEQ ID NO: 697106
ugauuucccgaagaacaaa

SEQ ID NO: 697108 - RNA, 19 nt, Artificial Sequence
  Description of Artificial Sequence: Synthetic oligonucleotide
  Sense strand starting at position 2526 of SEQ ID NO: 586166
ucgggaaaucaucaccguu

SEQ ID NO: 697109 - RNA, 19 nt, Artificial Sequence
  Description of Artificial Sequence: Synthetic oligonucleotide
  Antisense strand to SEQ ID NO: 697108
aacggugaugauuucccga

SEQ ID NO: 697110 - RNA, 19 nt, Artificial Sequence
  Description of Artificial Sequence: Synthetic oligonucleotide
  Sense strand starting at position 2550 of SEQ ID NO: 586166
guugcacugccgucugauu

SEQ ID NO: 697111 - RNA, 19 nt, Artificial Sequence
  Description of Artificial Sequence: Synthetic oligonucleotide
  Antisense strand to SEQ ID NO: 697110
aaucagacggcagugcaac

SEQ ID NO: 697112 - RNA, 19 nt, Artificial Sequence
  Description of Artificial Sequence: Synthetic oligonucleotide
  Sense strand starting at position 2552 of SEQ ID NO: 586166
ugcacugccgucugauuua

SEQ ID NO: 697113 - RNA, 19 nt, Artificial Sequence
  Description of Artificial Sequence: Synthetic oligonucleotide
  Antisense strand to SEQ ID NO: 697112
uaaaucagacggcagugca

SEQ ID NO: 697114 - RNA, 19 nt, Artificial Sequence
  Description of Artificial Sequence: Synthetic oligonucleotide
  Sense strand starting at position 2555 of SEQ ID NO: 586166
acugccgucugauuuauua

SEQ ID NO: 697115 - RNA, 19 nt, Artificial Sequence
  Description of Artificial Sequence: Synthetic oligonucleotide
  Antisense strand to SEQ ID NO: 697114
uaauaaaucagacggcagu

SEQ ID NO: 697116 - RNA, 19 nt, Artificial Sequence
  Description of Artificial Sequence: Synthetic oligonucleotide
  Sense strand starting at position 2559 of SEQ ID NO: 586166
ccgucugauuuauuaugca

SEQ ID NO: 697117 - RNA, 19 nt, Artificial Sequence
  Description of Artificial Sequence: Synthetic oligonucleotide
  Antisense strand to SEQ ID NO: 697116
ugcauaauaaaucagacgg

SEQ ID NO: 697118 - RNA, 19 nt, Artificial Sequence
  Description of Artificial Sequence: Synthetic oligonucleotide
  Sense strand starting at position 3017 of SEQ ID NO: 586166
uugccuccacaagaugauu

SEQ ID NO: 697119 - RNA, 19 nt, Artificial Sequence
  Description of Artificial Sequence: Synthetic oligonucleotide
  Antisense strand to SEQ ID NO: 697118
aaucaucuuguggaggcaa

SEQ ID NO: 697120 - RNA, 19 nt, Artificial Sequence
  Description of Artificial Sequence: Synthetic oligonucleotide
  Sense strand starting at position 3122 of SEQ ID NO: 586166
uuacaucagcaccgaaaua

SEQ ID NO: 697121 - RNA, 19 nt, Artificial Sequence
  Description of Artificial Sequence: Synthetic oligonucleotide
  Antisense strand to SEQ ID NO: 697120
uauuucggugcugauguaa

SEQ ID NO: 697122 - RNA, 19 nt, Artificial Sequence
  Description of Artificial Sequence: Synthetic oligonucleotide
  Sense strand starting at position 3234 of SEQ ID NO: 586166
acgcauuccugacuaaauc

SEQ ID NO: 697123 - RNA, 19 nt, Artificial Sequence
  Description of Artificial Sequence: Synthetic oligonucleotide
  Antisense strand to SEQ ID NO: 697122
gauuuagucaggaaugcgu

SEQ ID NO: 697124 - RNA, 19 nt, Artificial Sequence
  Description of Artificial Sequence: Synthetic oligonucleotide
  Sense strand starting at position 3235 of SEQ ID NO: 586166
cgcauuccugacuaaauca

SEQ ID NO: 697125 - RNA, 19 nt, Artificial Sequence
  Description of Artificial Sequence: Synthetic oligonucleotide
  Antisense strand to SEQ ID NO: 697124
ugauuuagucaggaaugcg

SEQ ID NO: 697126 - RNA, 19 nt, Artificial Sequence
  Description of Artificial Sequence: Synthetic oligonucleotide
  Sense strand starting at position 3303 of SEQ ID NO: 586166
uuaguaguuacaggcaaga

SEQ ID NO: 697127 - RNA, 19 nt, Artificial Sequence
  Description of Artificial Sequence: Synthetic oligonucleotide
  Antisense strand to SEQ ID NO: 697126
ucuugccuguaacuacuaa

SEQ ID NO: 697128 - RNA, 19 nt, Artificial Sequence
  Description of Artificial Sequence: Synthetic oligonucleotide
  Sense strand starting at position 3349 of SEQ ID NO: 586166
gguucauuguugcuggaaa

SEQ ID NO: 697129 - RNA, 19 nt, Artificial Sequence
  Description of Artificial Sequence: Synthetic oligonucleotide
  Antisense strand to SEQ ID NO: 697128
uuuccagcaacaaugaacc

SEQ ID NO: 697130 - RNA, 19 nt, Artificial Sequence
  Description of Artificial Sequence: Synthetic oligonucleotide
  Sense strand starting at position 3531 of SEQ ID NO: 586166
gagucauaaucuguguaaa

SEQ ID NO: 697131 - RNA, 19 nt, Artificial Sequence
  Description of Artificial Sequence: Synthetic oligonucleotide
  Antisense strand to SEQ ID NO: 697130
uuuacacagauuaugacuc

SEQ ID NO: 697132 - RNA, 19 nt, Artificial Sequence
  Description of Artificial Sequence: Synthetic oligonucleotide
  Sense strand starting at position 3532 of SEQ ID NO: 586166
agucauaaucuguguaaac

SEQ ID NO: 697133 - RNA, 19 nt, Artificial Sequence
  Description of Artificial Sequence: Synthetic oligonucleotide
  Antisense strand to SEQ ID NO: 697132
guuuacacagauuaugacu

SEQ ID NO: 697134 - RNA, 19 nt, Artificial Sequence
  Description of Artificial Sequence: Synthetic oligonucleotide
  Sense strand starting at position 3556 of SEQ ID NO: 586166
gcccauuucccguagcauc

SEQ ID NO: 697135 - RNA, 19 nt, Artificial Sequence
  Description of Artificial Sequence: Synthetic oligonucleotide
  Antisense strand to SEQ ID NO: 697134
gaugcuacgggaaaugggc

SEQ ID NO: 697136 - RNA, 19 nt, Artificial Sequence
  Description of Artificial Sequence: Synthetic oligonucleotide
  Sense strand starting at position 3657 of SEQ ID NO: 586166
cguccagagcucuacacuu

SEQ ID NO: 697137 - RNA, 19 nt, Artificial Sequence
  Description of Artificial Sequence: Synthetic oligonucleotide
  Antisense strand to SEQ ID NO: 697136
aaguguagagcucuggacg

SEQ ID NO: 697138 - RNA, 19 nt, Artificial Sequence
  Description of Artificial Sequence: Synthetic oligonucleotide
  Sense strand starting at position 75 of SEQ ID NO: 586167
acauuucuaugugaaggua

SEQ ID NO: 697139 - RNA, 19 nt, Artificial Sequence
  Description of Artificial Sequence: Synthetic oligonucleotide
  Antisense strand to SEQ ID NO: 697138
uaccuucacauagaaaugu

SEQ ID NO: 697140 - RNA, 19 nt, Artificial Sequence
  Description of Artificial Sequence: Synthetic oligonucleotide
  Sense strand starting at position 78 of SEQ ID NO: 586167
uuucuaugugaagguaauu

SEQ ID NO: 697141 - RNA, 19 nt, Artificial Sequence
  Description of Artificial Sequence: Synthetic oligonucleotide
  Antisense strand to SEQ ID NO: 697140
aauuaccuucacauagaaa

SEQ ID NO: 697142 - RNA, 19 nt, Artificial Sequence
  Description of Artificial Sequence: Synthetic oligonucleotide
  Sense strand starting at position 236 of SEQ ID NO: 586167
gugggugauuacuugaggu

SEQ ID NO: 697143 - RNA, 19 nt, Artificial Sequence
  Description of Artificial Sequence: Synthetic oligonucleotide
  Antisense strand to SEQ ID NO: 697142
accucaaguaaucacccac

SEQ ID NO: 697144 - RNA, 19 nt, Artificial Sequence
  Description of Artificial Sequence: Synthetic oligonucleotide
  Sense strand starting at position 595 of SEQ ID NO: 586167
gccucauuccaccaguaca

SEQ ID NO: 697145 - RNA, 19 nt, Artificial Sequence
  Description of Artificial Sequence: Synthetic oligonucleotide
  Antisense strand to SEQ ID NO: 697144
uguacugguggaaugaggc

SEQ ID NO: 697146 - RNA, 19 nt, Artificial Sequence
  Description of Artificial Sequence: Synthetic oligonucleotide
  Sense strand starting at position 1074 of SEQ ID NO: 586167
aggccucuugcuugaagga

SEQ ID NO: 697147 - RNA, 19 nt, Artificial Sequence
  Description of Artificial Sequence: Synthetic oligonucleotide
  Antisense strand to SEQ ID NO: 697146
uccuucaagcaagaggccu

SEQ ID NO: 697148 - RNA, 19 nt, Artificial Sequence
  Description of Artificial Sequence: Synthetic oligonucleotide
  Sense strand starting at position 1167 of SEQ ID NO: 586167
ggacucagucaacgaagau

SEQ ID NO: 697149 - RNA, 19 nt, Artificial Sequence
  Description of Artificial Sequence: Synthetic oligonucleotide
  Antisense strand to SEQ ID NO: 697148
aucuucguugacugagucc

SEQ ID NO: 697150 - RNA, 19 nt, Artificial Sequence
  Description of Artificial Sequence: Synthetic oligonucleotide
  Sense strand starting at position 1183 of SEQ ID NO: 586167
gauuaugcaggaugauaca

SEQ ID NO: 697151 - RNA, 19 nt, Artificial Sequence
  Description of Artificial Sequence: Synthetic oligonucleotide
  Antisense strand to SEQ ID NO: 697150
uguaucauccugcauaauc

SEQ ID NO: 697152 - RNA, 19 nt, Artificial Sequence
  Description of Artificial Sequence: Synthetic oligonucleotide
  Sense strand starting at position 1287 of SEQ ID NO: 586167
agaugaaacugucccuuau

SEQ ID NO: 697153 - RNA, 19 nt, Artificial Sequence
  Description of Artificial Sequence: Synthetic oligonucleotide
  Antisense strand to SEQ ID NO: 697152
auaagggacaguuucaucu

SEQ ID NO: 697154 - RNA, 19 nt, Artificial Sequence
  Description of Artificial Sequence: Synthetic oligonucleotide
  Sense strand starting at position 1340 of SEQ ID NO: 586167
aaacaucuccgauggucau

SEQ ID NO: 697155 - RNA, 19 nt, Artificial Sequence
  Description of Artificial Sequence: Synthetic oligonucleotide
  Antisense strand to SEQ ID NO: 697154
augaccaucggagauguuu

SEQ ID NO: 697156 - RNA, 19 nt, Artificial Sequence
  Description of Artificial Sequence: Synthetic oligonucleotide
  Sense strand starting at position 1341 of SEQ ID NO: 586167
aacaucuccgauggucauu

SEQ ID NO: 697157 - RNA, 19 nt, Artificial Sequence
  Description of Artificial Sequence: Synthetic oligonucleotide
  Antisense strand to SEQ ID NO: 697156
aaugaccaucggagauguu

SEQ ID NO: 697158 - RNA, 19 nt, Artificial Sequence
  Description of Artificial Sequence: Synthetic oligonucleotide
  Sense strand starting at position 1478 of SEQ ID NO: 586167
caauaauguuugguuaagu

SEQ ID NO: 697159 - RNA, 19 nt, Artificial Sequence
  Description of Artificial Sequence: Synthetic oligonucleotide
  Antisense strand to SEQ ID NO: 697158
acuuaaccaaacauuauug

SEQ ID NO: 697160 - RNA, 19 nt, Artificial Sequence
  Description of Artificial Sequence: Synthetic oligonucleotide
  Sense strand starting at position 1669 of SEQ ID NO: 586167
gaggaaauuugugcggguu

SEQ ID NO: 697161 - RNA, 19 nt, Artificial Sequence
  Description of Artificial Sequence: Synthetic oligonucleotide
  Antisense strand to SEQ ID NO: 697160
aacccgcacaaauuuccuc

SEQ ID NO: 697162 - RNA, 19 nt, Artificial Sequence
  Description of Artificial Sequence: Synthetic oligonucleotide
  Sense strand starting at position 1670 of SEQ ID NO: 586167
aggaaauuugugcggguuu

SEQ ID NO: 697163 - RNA, 19 nt, Artificial Sequence
  Description of Artificial Sequence: Synthetic oligonucleotide
  Antisense strand to SEQ ID NO: 697162
aaacccgcacaaauuuccu

SEQ ID NO: 697164 - RNA, 19 nt, Artificial Sequence
  Description of Artificial Sequence: Synthetic oligonucleotide
  Sense strand starting at position 1683 of SEQ ID NO: 586167
ggguuugcuuaaguacaaa

SEQ ID NO: 697165 - RNA, 19 nt, Artificial Sequence
  Description of Artificial Sequence: Synthetic oligonucleotide
  Antisense strand to SEQ ID NO: 697164
uuuguacuuaagcaaaccc

SEQ ID NO: 697166 - RNA, 19 nt, Artificial Sequence
  Description of Artificial Sequence: Synthetic oligonucleotide
  Sense strand starting at position 1705 of SEQ ID NO: 586167
ccguauuuccacuggguaa

SEQ ID NO: 697167 - RNA, 19 nt, Artificial Sequence
  Description of Artificial Sequence: Synthetic oligonucleotide
  Antisense strand to SEQ ID NO: 697166
uuacccaguggaaauacgg

SEQ ID NO: 697168 - RNA, 19 nt, Artificial Sequence
  Description of Artificial Sequence: Synthetic oligonucleotide
  Sense strand starting at position 2224 of SEQ ID NO: 586167
uuucgaccucuuuaaagua

SEQ ID NO: 697169 - RNA, 19 nt, Artificial Sequence
  Description of Artificial Sequence: Synthetic oligonucleotide
  Antisense strand to SEQ ID NO: 697168
uacuuuaaagaggucgaaa

SEQ ID NO: 697170 - RNA, 19 nt, Artificial Sequence
  Description of Artificial Sequence: Synthetic oligonucleotide
  Sense strand starting at position 2264 of SEQ ID NO: 586167
auucuugcucugcaaggaa

SEQ ID NO: 697171 - RNA, 19 nt, Artificial Sequence
  Description of Artificial Sequence: Synthetic oligonucleotide
  Antisense strand to SEQ ID NO: 697170
uuccuugcagagcaagaau

SEQ ID NO: 697172 - RNA, 19 nt, Artificial Sequence
  Description of Artificial Sequence: Synthetic oligonucleotide
  Sense strand starting at position 2276 of SEQ ID NO: 586167
caaggaaugccuuacuugu

SEQ ID NO: 697173 - RNA, 19 nt, Artificial Sequence
  Description of Artificial Sequence: Synthetic oligonucleotide
  Antisense strand to SEQ ID NO: 697172
acaaguaaggcauuccuug

SEQ ID NO: 697174 - RNA, 19 nt, Artificial Sequence
  Description of Artificial Sequence: Synthetic oligonucleotide
  Sense strand starting at position 2296 of SEQ ID NO: 586167
gcaggagcacacuaggauu

SEQ ID NO: 697175 - RNA, 19 nt, Artificial Sequence
  Description of Artificial Sequence: Synthetic oligonucleotide
  Antisense strand to SEQ ID NO: 697174
aauccuagugugcuccugc

SEQ ID NO: 697176 - RNA, 19 nt, Artificial Sequence
  Description of Artificial Sequence: Synthetic oligonucleotide
  Sense strand starting at position 2299 of SEQ ID NO: 586167
ggagcacacuaggauuuaa

SEQ ID NO: 697177 - RNA, 19 nt, Artificial Sequence
  Description of Artificial Sequence: Synthetic oligonucleotide
  Antisense strand to SEQ ID NO: 697176
uuaaauccuagugugcucc

SEQ ID NO: 697178 - RNA, 19 nt, Artificial Sequence
  Description of Artificial Sequence: Synthetic oligonucleotide
  Sense strand starting at position 2545 of SEQ ID NO: 586167
accuuagauuuagaagcuu

SEQ ID NO: 697179 - RNA, 19 nt, Artificial Sequence
  Description of Artificial Sequence: Synthetic oligonucleotide
  Antisense strand to SEQ ID NO: 697178
aagcuucuaaaucuaaggu

SEQ ID NO: 697180 - RNA, 19 nt, Artificial Sequence
  Description of Artificial Sequence: Synthetic oligonucleotide
  Sense strand starting at position 2741 of SEQ ID NO: 586167
cuuucuacaugguucuaga

SEQ ID NO: 697181 - RNA, 19 nt, Artificial Sequence
  Description of Artificial Sequence: Synthetic oligonucleotide
  Antisense strand to SEQ ID NO: 697180
ucuagaaccauguagaaag

SEQ ID NO: 697182 - RNA, 19 nt, Artificial Sequence
  Description of Artificial Sequence: Synthetic oligonucleotide
  Sense strand starting at position 2748 of SEQ ID NO: 586167
caugguucuagaugguaga

SEQ ID NO: 697183 - RNA, 19 nt, Artificial Sequence
  Description of Artificial Sequence: Synthetic oligonucleotide
  Antisense strand to SEQ ID NO: 697182
ucuaccaucuagaaccaug

SEQ ID NO: 697184 - RNA, 19 nt, Artificial Sequence
  Description of Artificial Sequence: Synthetic oligonucleotide
  Sense strand starting at position 2749 of SEQ ID NO: 586167
augguucuagaugguagaa

SEQ ID NO: 697185 - RNA, 19 nt, Artificial Sequence
  Description of Artificial Sequence: Synthetic oligonucleotide
  Antisense strand to SEQ ID NO: 697184
uucuaccaucuagaaccau

SEQ ID NO: 697186 - RNA, 19 nt, Artificial Sequence
  Description of Artificial Sequence: Synthetic oligonucleotide
  Sense strand starting at position 2762 of SEQ ID NO: 586167
guagaacuucuagauguug

SEQ ID NO: 697187 - RNA, 19 nt, Artificial Sequence
  Description of Artificial Sequence: Synthetic oligonucleotide
  Antisense strand to SEQ ID NO: 697186
caacaucuagaaguucuac

SEQ ID NO: 697188 - RNA, 19 nt, Artificial Sequence
  Description of Artificial Sequence: Synthetic oligonucleotide
  Sense strand starting at position 2768 of SEQ ID NO: 586167
cuucuagauguugguaaca

SEQ ID NO: 697189 - RNA, 19 nt, Artificial Sequence
  Description of Artificial Sequence: Synthetic oligonucleotide
  Antisense strand to SEQ ID NO: 697188
uguuaccaacaucuagaag

SEQ ID NO: 697190 - RNA, 19 nt, Artificial Sequence
  Description of Artificial Sequence: Synthetic oligonucleotide
  Sense strand starting at position 2855 of SEQ ID NO: 586167
agauaauagccaugcacua

SEQ ID NO: 697191 - RNA, 19 nt, Artificial Sequence
  Description of Artificial Sequence: Synthetic oligonucleotide
  Antisense strand to SEQ ID NO: 697190
uagugcauggcuauuaucu

SEQ ID NO: 697192 - RNA, 19 nt, Artificial Sequence
  Description of Artificial Sequence: Synthetic oligonucleotide
  Sense strand starting at position 2900 of SEQ ID NO: 586167
ucuugcagauucucugaua

SEQ ID NO: 697193 - RNA, 19 nt, Artificial Sequence
  Description of Artificial Sequence: Synthetic oligonucleotide
  Antisense strand to SEQ ID NO: 697192
uaucagagaaucugcaaga

SEQ ID NO: 697194 - RNA, 19 nt, Artificial Sequence
  Description of Artificial Sequence: Synthetic oligonucleotide
  Sense strand starting at position 2944 of SEQ ID NO: 586167
gaggcucagagguaaguau

SEQ ID NO: 697195 - RNA, 19 nt, Artificial Sequence
  Description of Artificial Sequence: Synthetic oligonucleotide
  Antisense strand to SEQ ID NO: 697194
auacuuaccucugagccuc

SEQ ID NO: 697196 - RNA, 19 nt, Artificial Sequence
  Description of Artificial Sequence: Synthetic oligonucleotide
  Sense strand starting at position 3304 of SEQ ID NO: 586167
guagaauggaggugaugau

SEQ ID NO: 697197 - RNA, 19 nt, Artificial Sequence
  Description of Artificial Sequence: Synthetic oligonucleotide
  Antisense strand to SEQ ID NO: 697196
aucaucaccuccauucuac

SEQ ID NO: 697198 - RNA, 19 nt, Artificial Sequence
  Description of Artificial Sequence: Synthetic oligonucleotide
  Sense strand starting at position 3373 of SEQ ID NO: 586167
agaauaaggucuuucucaa

SEQ ID NO: 697199 - RNA, 19 nt, Artificial Sequence
  Description of Artificial Sequence: Synthetic oligonucleotide
  Antisense strand to SEQ ID NO: 697198
uugagaaagaccuuauucu

SEQ ID NO: 697200 - RNA, 19 nt, Artificial Sequence
  Description of Artificial Sequence: Synthetic oligonucleotide
  Sense strand starting at position 3380 of SEQ ID NO: 586167
ggucuuucucaauguaaga

SEQ ID NO: 697201 - RNA, 19 nt, Artificial Sequence
  Description of Artificial Sequence: Synthetic oligonucleotide
  Antisense strand to SEQ ID NO: 697200
ucuuacauugagaaagacc

SEQ ID NO: 697202 - RNA, 19 nt, Artificial Sequence
  Description of Artificial Sequence: Synthetic oligonucleotide
  Sense strand starting at position 3387 of SEQ ID NO: 586167
cucaauguaagagguagau

SEQ ID NO: 697203 - RNA, 19 nt, Artificial Sequence
  Description of Artificial Sequence: Synthetic oligonucleotide
  Antisense strand to SEQ ID NO: 697202
aucuaccucuuacauugag

SEQ ID NO: 697204 - RNA, 19 nt, Artificial Sequence
  Description of Artificial Sequence: Synthetic oligonucleotide
  Sense strand starting at position 3782 of SEQ ID NO: 586167
gcaauugaacagugaaaug

SEQ ID NO: 697205 - RNA, 19 nt, Artificial Sequence
  Description of Artificial Sequence: Synthetic oligonucleotide
  Antisense strand to SEQ ID NO: 697204
cauuucacuguucaauugc

SEQ ID NO: 697206 - RNA, 19 nt, Artificial Sequence
  Description of Artificial Sequence: Synthetic oligonucleotide
  Sense strand starting at position 3827 of SEQ ID NO: 586167
ugauguguguauguauuua

SEQ ID NO: 697207 - RNA, 19 nt, Artificial Sequence
  Description of Artificial Sequence: Synthetic oligonucleotide
  Antisense strand to SEQ ID NO: 697206
uaaauacauacacacauca

SEQ ID NO: 697208 - RNA, 19 nt, Artificial Sequence
  Description of Artificial Sequence: Synthetic oligonucleotide
  Sense strand starting at position 3849 of SEQ ID NO: 586167
acacucuaggucuauugua

SEQ ID NO: 697209 - RNA, 19 nt, Artificial Sequence
  Description of Artificial Sequence: Synthetic oligonucleotide
  Antisense strand to SEQ ID NO: 697208
uacaauagaccuagagugu

SEQ ID NO: 697210 - RNA, 19 nt, Artificial Sequence
  Description of Artificial Sequence: Synthetic oligonucleotide
  Sense strand starting at position 3858 of SEQ ID NO: 586167
gucuauuguagagaagguu

SEQ ID NO: 697211 - RNA, 19 nt, Artificial Sequence
  Description of Artificial Sequence: Synthetic oligonucleotide
  Antisense strand to SEQ ID NO: 697210
aaccuucucuacaauagac

SEQ ID NO: 697212 - RNA, 19 nt, Artificial Sequence
  Description of Artificial Sequence: Synthetic oligonucleotide
  Sense strand starting at position 3895 of SEQ ID NO: 586167
cuaaguagucauugcauuu

SEQ ID NO: 697213 - RNA, 19 nt, Artificial Sequence
  Description of Artificial Sequence: Synthetic oligonucleotide
  Antisense strand to SEQ ID NO: 697212
aaaugcaaugacuacuuag

SEQ ID NO: 697214 - RNA, 19 nt, Artificial Sequence
  Description of Artificial Sequence: Synthetic oligonucleotide
  Sense strand starting at position 3933 of SEQ ID NO: 586167
aguggauaaacgugaagau

SEQ ID NO: 697215 - RNA, 19 nt, Artificial Sequence
  Description of Artificial Sequence: Synthetic oligonucleotide
  Antisense strand to SEQ ID NO: 697214
aucuucacguuuauccacu

SEQ ID NO: 697216 - RNA, 19 nt, Artificial Sequence
  Description of Artificial Sequence: Synthetic oligonucleotide
  Sense strand starting at position 3934 of SEQ ID NO: 586167
guggauaaacgugaagauu

SEQ ID NO: 697217 - RNA, 19 nt, Artificial Sequence
  Description of Artificial Sequence: Synthetic oligonucleotide
  Antisense strand to SEQ ID NO: 697216
aaucuucacguuuauccac

SEQ ID NO: 697218 - RNA, 19 nt, Artificial Sequence
  Description of Artificial Sequence: Synthetic oligonucleotide
  Sense strand starting at position 627 of SEQ ID NO: 586168
cuugguugguuggcaaaga

SEQ ID NO: 697219 - RNA, 19 nt, Artificial Sequence
  Description of Artificial Sequence: Synthetic oligonucleotide
  Antisense strand to SEQ ID NO: 697218
ucuuugccaaccaaccaag

SEQ ID NO: 697220 - RNA, 19 nt, Artificial Sequence
  Description of Artificial Sequence: Synthetic oligonucleotide
  Sense strand starting at position 651 of SEQ ID NO: 586168
uuguaauccacgcaucgaa

SEQ ID NO: 697221 - RNA, 19 nt, Artificial Sequence
  Description of Artificial Sequence: Synthetic oligonucleotide
  Antisense strand to SEQ ID NO: 697220
uucgaugcguggauuacaa

SEQ ID NO: 697222 - RNA, 19 nt, Artificial Sequence
  Description of Artificial Sequence: Synthetic oligonucleotide
  Sense strand starting at position 670 of SEQ ID NO: 586168
ggaggaagguugugaaggu

SEQ ID NO: 697223 - RNA, 19 nt, Artificial Sequence
  Description of Artificial Sequence: Synthetic oligonucleotide
  Antisense strand to SEQ ID NO: 697222
accuucacaaccuuccucc

SEQ ID NO: 697224 - RNA, 19 nt, Artificial Sequence
  Description of Artificial Sequence: Synthetic oligonucleotide
  Sense strand starting at position 679 of SEQ ID NO: 586168
uugugaaggugacaaugaa

SEQ ID NO: 697225 - RNA, 19 nt, Artificial Sequence
  Description of Artificial Sequence: Synthetic oligonucleotide
  Antisense strand to SEQ ID NO: 697224
uucauugucaccuucacaa

SEQ ID NO: 697226 - RNA, 19 nt, Artificial Sequence
  Description of Artificial Sequence: Synthetic oligonucleotide
  Sense strand starting at position 698 of SEQ ID NO: 586168
aauaaauugucugccggga

SEQ ID NO: 697227 - RNA, 19 nt, Artificial Sequence
  Description of Artificial Sequence: Synthetic oligonucleotide
  Antisense strand to SEQ ID NO: 697226
ucccggcagacaauuuauu

SEQ ID NO: 697228 - RNA, 19 nt, Artificial Sequence
  Description of Artificial Sequence: Synthetic oligonucleotide
  Sense strand starting at position 702 of SEQ ID NO: 586168
aauugucugccgggaggaa

SEQ ID NO: 697229 - RNA, 19 nt, Artificial Sequence
  Description of Artificial Sequence: Synthetic oligonucleotide
  Antisense strand to SEQ ID NO: 697228
uuccucccggcagacaauu

SEQ ID NO: 697230 - RNA, 19 nt, Artificial Sequence
  Description of Artificial Sequence: Synthetic oligonucleotide
  Sense strand starting at position 992 of SEQ ID NO: 586168
gcuggugguagcuguagau

SEQ ID NO: 697231 - RNA, 19 nt, Artificial Sequence
  Description of Artificial Sequence: Synthetic oligonucleotide
  Antisense strand to SEQ ID NO: 697230
aucuacagcuaccaccagc

SEQ ID NO: 697232 - RNA, 19 nt, Artificial Sequence
  Description of Artificial Sequence: Synthetic oligonucleotide
  Sense strand starting at position 1007 of SEQ ID NO: 586168
agauguggcugcgugucaa

SEQ ID NO: 697233 - RNA, 19 nt, Artificial Sequence
  Description of Artificial Sequence: Synthetic oligonucleotide
  Antisense strand to SEQ ID NO: 697232
uugacacgcagccacaucu

SEQ ID NO: 697234 - RNA, 19 nt, Artificial Sequence
  Description of Artificial Sequence: Synthetic oligonucleotide
  Sense strand starting at position 1181 of SEQ ID NO: 586168
aggauaucuuggugaagaa

SEQ ID NO: 697235 - RNA, 19 nt, Artificial Sequence
  Description of Artificial Sequence: Synthetic oligonucleotide
  Antisense strand to SEQ ID NO: 697234
uucuucaccaagauauccu

SEQ ID NO: 697236 - RNA, 19 nt, Artificial Sequence
  Description of Artificial Sequence: Synthetic oligonucleotide
  Sense strand starting at position 1193 of SEQ ID NO: 586168
ugaagaaacuguccagguu

SEQ ID NO: 697237 - RNA, 19 nt, Artificial Sequence
  Description of Artificial Sequence: Synthetic oligonucleotide
  Antisense strand to SEQ ID NO: 697236
aaccuggacaguuucuuca

SEQ ID NO: 697238 - RNA, 19 nt, Artificial Sequence
  Description of Artificial Sequence: Synthetic oligonucleotide
  Sense strand starting at position 1205 of SEQ ID NO: 586168
ccagguucuggaugugaug

SEQ ID NO: 697239 - RNA, 19 nt, Artificial Sequence
  Description of Artificial Sequence: Synthetic oligonucleotide
  Antisense strand to SEQ ID NO: 697238
caucacauccagaaccugg

SEQ ID NO: 697240 - RNA, 19 nt, Artificial Sequence
  Description of Artificial Sequence: Synthetic oligonucleotide
  Sense strand starting at position 1260 of SEQ ID NO: 586168
cuggcaugugaucaauucu

SEQ ID NO: 697241 - RNA, 19 nt, Artificial Sequence
  Description of Artificial Sequence: Synthetic oligonucleotide
  Antisense strand to SEQ ID NO: 697240
agaauugaucacaugccag

SEQ ID NO: 697242 - RNA, 19 nt, Artificial Sequence
  Description of Artificial Sequence: Synthetic oligonucleotide
  Sense strand starting at position 1267 of SEQ ID NO: 586168
gugaucaauucuccacguu

SEQ ID NO: 697243 - RNA, 19 nt, Artificial Sequence
  Description of Artificial Sequence: Synthetic oligonucleotide
  Antisense strand to SEQ ID NO: 697242
aacguggagaauugaucac

SEQ ID NO: 697244 - RNA, 19 nt, Artificial Sequence
  Description of Artificial Sequence: Synthetic oligonucleotide
  Sense strand starting at position 1595 of SEQ ID NO: 586168
ugcagaggcaggugucauu

SEQ ID NO: 697245 - RNA, 19 nt, Artificial Sequence
  Description of Artificial Sequence: Synthetic oligonucleotide
  Antisense strand to SEQ ID NO: 697244
aaugacaccugccucugca

SEQ ID NO: 697246 - RNA, 19 nt, Artificial Sequence
  Description of Artificial Sequence: Synthetic oligonucleotide
  Sense strand starting at position 1931 of SEQ ID NO: 586168
acggcuucuccagaaaggu

SEQ ID NO: 697247 - RNA, 19 nt, Artificial Sequence
  Description of Artificial Sequence: Synthetic oligonucleotide
  Antisense strand to SEQ ID NO: 697246
accuuucuggagaagccgu

SEQ ID NO: 697248 - RNA, 19 nt, Artificial Sequence
  Description of Artificial Sequence: Synthetic oligonucleotide
  Sense strand starting at position 1940 of SEQ ID NO: 586168
ccagaaagguuggaaggau

SEQ ID NO: 697249 - RNA, 19 nt, Artificial Sequence
  Description of Artificial Sequence: Synthetic oligonucleotide
  Antisense strand to SEQ ID NO: 697248
auccuuccaaccuuucugg

SEQ ID NO: 697250 - RNA, 19 nt, Artificial Sequence
  Description of Artificial Sequence: Synthetic oligonucleotide
  Sense strand starting at position 1963 of SEQ ID NO: 586168
gcuguuguugcuuccacaa

SEQ ID NO: 697251 - RNA, 19 nt, Artificial Sequence
  Description of Artificial Sequence: Synthetic oligonucleotide
  Antisense strand to SEQ ID NO: 697250
uuguggaagcaacaacagc

SEQ ID NO: 697252 - RNA, 19 nt, Artificial Sequence
  Description of Artificial Sequence: Synthetic oligonucleotide
  Sense strand starting at position 1975 of SEQ ID NO: 586168
uccacaaaggucugugaca

SEQ ID NO: 697253 - RNA, 19 nt, Artificial Sequence
  Description of Artificial Sequence: Synthetic oligonucleotide
  Antisense strand to SEQ ID NO: 697252
ugucacagaccuuugugga

SEQ ID NO: 697254 - RNA, 19 nt, Artificial Sequence
  Description of Artificial Sequence: Synthetic oligonucleotide
  Sense strand starting at position 1977 of SEQ ID NO: 586168
cacaaaggucugugacacu

SEQ ID NO: 697255 - RNA, 19 nt, Artificial Sequence
  Description of Artificial Sequence: Synthetic oligonucleotide
  Antisense strand to SEQ ID NO: 697254
agugucacagaccuuugug

SEQ ID NO: 697256 - RNA, 19 nt, Artificial Sequence
  Description of Artificial Sequence: Synthetic oligonucleotide
  Sense strand starting at position 2025 of SEQ ID NO: 586168
acaacauuacuaggugacu

SEQ ID NO: 697257 - RNA, 19 nt, Artificial Sequence
  Description of Artificial Sequence: Synthetic oligonucleotide
  Antisense strand to SEQ ID NO: 697256
agucaccuaguaauguugu

SEQ ID NO: 697258 - RNA, 19 nt, Artificial Sequence
  Description of Artificial Sequence: Synthetic oligonucleotide
  Sense strand starting at position 2079 of SEQ ID NO: 586168
ucaccugucugaucacuca

SEQ ID NO: 697259 - RNA, 19 nt, Artificial Sequence
  Description of Artificial Sequence: Synthetic oligonucleotide
  Antisense strand to SEQ ID NO: 697258
ugagugaucagacagguga

SEQ ID NO: 697260 - RNA, 19 nt, Artificial Sequence
  Description of Artificial Sequence: Synthetic oligonucleotide
  Sense strand starting at position 2186 of SEQ ID NO: 586168
ugagaagauuccuauuauc

SEQ ID NO: 697261 - RNA, 19 nt, Artificial Sequence
  Description of Artificial Sequence: Synthetic oligonucleotide
  Antisense strand to SEQ ID NO: 697260
gauaauaggaaucuucuca

SEQ ID NO: 697262 - RNA, 19 nt, Artificial Sequence
  Description of Artificial Sequence: Synthetic oligonucleotide
  Sense strand starting at position 2295 of SEQ ID NO: 586168
uggugaugugugcuugugu

SEQ ID NO: 697263 - RNA, 19 nt, Artificial Sequence
  Description of Artificial Sequence: Synthetic oligonucleotide
  Antisense strand to SEQ ID NO: 697262
acacaagcacacaucacca

SEQ ID NO: 697264 - RNA, 19 nt, Artificial Sequence
  Description of Artificial Sequence: Synthetic oligonucleotide
  Sense strand starting at position 2300 of SEQ ID NO: 586168
augugugcuuguguuccua

SEQ ID NO: 697265 - RNA, 19 nt, Artificial Sequence
  Description of Artificial Sequence: Synthetic oligonucleotide
  Antisense strand to SEQ ID NO: 697264
uaggaacacaagcacacau

SEQ ID NO: 697266 - RNA, 19 nt, Artificial Sequence
  Description of Artificial Sequence: Synthetic oligonucleotide
  Sense strand starting at position 2308 of SEQ ID NO: 586168
uuguguuccuagcuacuca

SEQ ID NO: 697267 - RNA, 19 nt, Artificial Sequence
  Description of Artificial Sequence: Synthetic oligonucleotide
  Antisense strand to SEQ ID NO: 697266
ugaguagcuaggaacacaa

SEQ ID NO: 697268 - RNA, 19 nt, Artificial Sequence
  Description of Artificial Sequence: Synthetic oligonucleotide
  Sense strand starting at position 2427 of SEQ ID NO: 586168
cuauuaaaggauuguagca

SEQ ID NO: 697269 - RNA, 19 nt, Artificial Sequence
  Description of Artificial Sequence: Synthetic oligonucleotide
  Antisense strand to SEQ ID NO: 697268
ugcuacaauccuuuaauag

SEQ ID NO: 697270 - RNA, 19 nt, Artificial Sequence
  Description of Artificial Sequence: Synthetic oligonucleotide
  Sense strand starting at position 2579 of SEQ ID NO: 586168
ggaccaagauguuaacuau

SEQ ID NO: 697271 - RNA, 19 nt, Artificial Sequence
  Description of Artificial Sequence: Synthetic oligonucleotide
  Antisense strand to SEQ ID NO: 697270
auaguuaacaucuuggucc

SEQ ID NO: 697272 - RNA, 19 nt, Artificial Sequence
  Description of Artificial Sequence: Synthetic oligonucleotide
  Sense strand starting at position 3273 of SEQ ID NO: 586168
gcagcuaucuuggauuuga

SEQ ID NO: 697273 - RNA, 19 nt, Artificial Sequence
  Description of Artificial Sequence: Synthetic oligonucleotide
  Antisense strand to SEQ ID NO: 697272
ucaaauccaagauagcugc

SEQ ID NO: 697274 - RNA, 19 nt, Artificial Sequence
  Description of Artificial Sequence: Synthetic oligonucleotide
  Sense strand starting at position 3278 of SEQ ID NO: 586168
uaucuuggauuugagaguu

SEQ ID NO: 697275 - RNA, 19 nt, Artificial Sequence
  Description of Artificial Sequence: Synthetic oligonucleotide
  Antisense strand to SEQ ID NO: 697274
aacucucaaauccaagaua

SEQ ID NO: 697276 - RNA, 19 nt, Artificial Sequence
  Description of Artificial Sequence: Synthetic oligonucleotide
  Sense strand starting at position 3290 of SEQ ID NO: 586168
gagaguugguuuggagaac

SEQ ID NO: 697277 - RNA, 19 nt, Artificial Sequence
  Description of Artificial Sequence: Synthetic oligonucleotide
  Antisense strand to SEQ ID NO: 697276
guucuccaaaccaacucuc

SEQ ID NO: 697278 - RNA, 19 nt, Artificial Sequence
  Description of Artificial Sequence: Synthetic oligonucleotide
  Sense strand starting at position 3291 of SEQ ID NO: 586168
agaguugguuuggagaacu

SEQ ID NO: 697279 - RNA, 19 nt, Artificial Sequence
  Description of Artificial Sequence: Synthetic oligonucleotide
  Antisense strand to SEQ ID NO: 697278
aguucuccaaaccaacucu

SEQ ID NO: 697280 - RNA, 19 nt, Artificial Sequence
  Description of Artificial Sequence: Synthetic oligonucleotide
  Sense strand starting at position 3371 of SEQ ID NO: 586168
cugugacauucucucaagu

SEQ ID NO: 697281 - RNA, 19 nt, Artificial Sequence
  Description of Artificial Sequence: Synthetic oligonucleotide
  Antisense strand to SEQ ID NO: 697280
acuugagagaaugucacag

SEQ ID NO: 697282 - RNA, 19 nt, Artificial Sequence
  Description of Artificial Sequence: Synthetic oligonucleotide
  Sense strand starting at position 3500 of SEQ ID NO: 586168
aacugaguuccuuguuguc

SEQ ID NO: 697283 - RNA, 19 nt, Artificial Sequence
  Description of Artificial Sequence: Synthetic oligonucleotide
  Antisense strand to SEQ ID NO: 697282
gacaacaaggaacucaguu

SEQ ID NO: 697284 - RNA, 19 nt, Artificial Sequence
  Description of Artificial Sequence: Synthetic oligonucleotide
  Sense strand starting at position 3611 of SEQ ID NO: 586168
gcccauuacugagauacug

SEQ ID NO: 697285 - RNA, 19 nt, Artificial Sequence
  Description of Artificial Sequence: Synthetic oligonucleotide
  Antisense strand to SEQ ID NO: 697284
caguaucucaguaaugggc

SEQ ID NO: 697286 - RNA, 19 nt, Artificial Sequence
  Description of Artificial Sequence: Synthetic oligonucleotide
  Sense strand starting at position 3716 of SEQ ID NO: 586168
cugugcuucccagauuguu

SEQ ID NO: 697287 - RNA, 19 nt, Artificial Sequence
  Description of Artificial Sequence: Synthetic oligonucleotide
  Antisense strand to SEQ ID NO: 697286
aacaaucugggaagcacag

SEQ ID NO: 697288 - RNA, 19 nt, Artificial Sequence
  Description of Artificial Sequence: Synthetic oligonucleotide
  Sense strand starting at position 3880 of SEQ ID NO: 586168
uguccuucuagagguagca

SEQ ID NO: 697289 - RNA, 19 nt, Artificial Sequence
  Description of Artificial Sequence: Synthetic oligonucleotide
  Antisense strand to SEQ ID NO: 697288
ugcuaccucuagaaggaca

SEQ ID NO: 697290 - RNA, 19 nt, Artificial Sequence
  Description of Artificial Sequence: Synthetic oligonucleotide
  Sense strand starting at position 3948 of SEQ ID NO: 586168
ugagacaucugucaagaug

SEQ ID NO: 697291 - RNA, 19 nt, Artificial Sequence
  Description of Artificial Sequence: Synthetic oligonucleotide
  Antisense strand to SEQ ID NO: 697290
caucuugacagaugucuca

SEQ ID NO: 697292 - RNA, 19 nt, Artificial Sequence
  Description of Artificial Sequence: Synthetic oligonucleotide
  Sense strand starting at position 3951 of SEQ ID NO: 586168
gacaucugucaagaugggu

SEQ ID NO: 697293 - RNA, 19 nt, Artificial Sequence
  Description of Artificial Sequence: Synthetic oligonucleotide
  Antisense strand to SEQ ID NO: 697292
acccaucuugacagauguc

SEQ ID NO: 697294 - RNA, 19 nt, Artificial Sequence
  Description of Artificial Sequence: Synthetic oligonucleotide
  Sense strand starting at position 3954 of SEQ ID NO: 586168
aucugucaagauggguuau

SEQ ID NO: 697295 - RNA, 19 nt, Artificial Sequence
  Description of Artificial Sequence: Synthetic oligonucleotide
  Antisense strand to SEQ ID NO: 697294
auaacccaucuugacagau

SEQ ID NO: 697296 - RNA, 19 nt, Artificial Sequence
  Description of Artificial Sequence: Synthetic oligonucleotide
  Sense strand starting at position 3956 of SEQ ID NO: 586168
cugucaagauggguuaugu

SEQ ID NO: 697297 - RNA, 19 nt, Artificial Sequence
  Description of Artificial Sequence: Synthetic oligonucleotide
  Antisense strand to SEQ ID NO: 697296
acauaacccaucuugacag

SEQ ID NO: 697298 - RNA, 19 nt, Artificial Sequence
  Description of Artificial Sequence: Synthetic oligonucleotide
  Sense strand starting at position 67 of SEQ ID NO: 586169
guguacgacgaaugcuauu

SEQ ID NO: 697299 - RNA, 19 nt, Artificial Sequence
  Description of Artificial Sequence: Synthetic oligonucleotide
  Antisense strand to SEQ ID NO: 697298
aauagcauucgucguacac

SEQ ID NO: 697300 - RNA, 19 nt, Artificial Sequence
  Description of Artificial Sequence: Synthetic oligonucleotide
  Sense strand starting at position 145 of SEQ ID NO: 586169
uuucucuaggcugagauua

SEQ ID NO: 697301 - RNA, 19 nt, Artificial Sequence
  Description of Artificial Sequence: Synthetic oligonucleotide
  Antisense strand to SEQ ID NO: 697300
uaaucucagccuagagaaa

SEQ ID NO: 697302 - RNA, 19 nt, Artificial Sequence
  Description of Artificial Sequence: Synthetic oligonucleotide
  Sense strand starting at position 147 of SEQ ID NO: 586169
ucucuaggcugagauuaag

SEQ ID NO: 697303 - RNA, 19 nt, Artificial Sequence
  Description of Artificial Sequence: Synthetic oligonucleotide
  Antisense strand to SEQ ID NO: 697302
cuuaaucucagccuagaga

SEQ ID NO: 697304 - RNA, 19 nt, Artificial Sequence
  Description of Artificial Sequence: Synthetic oligonucleotide
  Sense strand starting at position 153 of SEQ ID NO: 586169
ggcugagauuaagaauaca

SEQ ID NO: 697305 - RNA, 19 nt, Artificial Sequence
  Description of Artificial Sequence: Synthetic oligonucleotide
  Antisense strand to SEQ ID NO: 697304
uguauucuuaaucucagcc

SEQ ID NO: 697306 - RNA, 19 nt, Artificial Sequence
  Description of Artificial Sequence: Synthetic oligonucleotide
  Sense strand starting at position 1099 of SEQ ID NO: 586169
acacacauguguuaaucaa

SEQ ID NO: 697307 - RNA, 19 nt, Artificial Sequence
  Description of Artificial Sequence: Synthetic oligonucleotide
  Antisense strand to SEQ ID NO: 697306
uugauuaacacaugugugu

SEQ ID NO: 697308 - RNA, 19 nt, Artificial Sequence
  Description of Artificial Sequence: Synthetic oligonucleotide
  Sense strand starting at position 1160 of SEQ ID NO: 586169
ccacaucccgaacaguuau

SEQ ID NO: 697309 - RNA, 19 nt, Artificial Sequence
  Description of Artificial Sequence: Synthetic oligonucleotide
  Antisense strand to SEQ ID NO: 697308
auaacuguucgggaugugg

SEQ ID NO: 697310 - RNA, 19 nt, Artificial Sequence
  Description of Artificial Sequence: Synthetic oligonucleotide
  Sense strand starting at position 1297 of SEQ ID NO: 586169
gcgggaugaauguagcgau

SEQ ID NO: 697311 - RNA, 19 nt, Artificial Sequence
  Description of Artificial Sequence: Synthetic oligonucleotide
  Antisense strand to SEQ ID NO: 697310
aucgcuacauucaucccgc

SEQ ID NO: 697312 - RNA, 19 nt, Artificial Sequence
  Description of Artificial Sequence: Synthetic oligonucleotide
  Sense strand starting at position 1298 of SEQ ID NO: 586169
cgggaugaauguagcgauu

SEQ ID NO: 697313 - RNA, 19 nt, Artificial Sequence
  Description of Artificial Sequence: Synthetic oligonucleotide
  Antisense strand to SEQ ID NO: 697312
aaucgcuacauucaucccg

SEQ ID NO: 697314 - RNA, 19 nt, Artificial Sequence
  Description of Artificial Sequence: Synthetic oligonucleotide
  Sense strand starting at position 1300 of SEQ ID NO: 586169
ggaugaauguagcgauuua

SEQ ID NO: 697315 - RNA, 19 nt, Artificial Sequence
  Description of Artificial Sequence: Synthetic oligonucleotide
  Antisense strand to SEQ ID NO: 697314
uaaaucgcuacauucaucc

SEQ ID NO: 697316 - RNA, 19 nt, Artificial Sequence
  Description of Artificial Sequence: Synthetic oligonucleotide
  Sense strand starting at position 1311 of SEQ ID NO: 586169
gcgauuuacacaugggugu

SEQ ID NO: 697317 - RNA, 19 nt, Artificial Sequence
  Description of Artificial Sequence: Synthetic oligonucleotide
  Antisense strand to SEQ ID NO: 697316
acacccauguguaaaucgc

SEQ ID NO: 697318 - RNA, 19 nt, Artificial Sequence
  Description of Artificial Sequence: Synthetic oligonucleotide
  Sense strand starting at position 1352 of SEQ ID NO: 586169
aaggccguccuagagaaua

SEQ ID NO: 697319 - RNA, 19 nt, Artificial Sequence
  Description of Artificial Sequence: Synthetic oligonucleotide
  Antisense strand to SEQ ID NO: 697318
uauucucuaggacggccuu

SEQ ID NO: 697320 - RNA, 19 nt, Artificial Sequence
  Description of Artificial Sequence: Synthetic oligonucleotide
  Sense strand starting at position 1354 of SEQ ID NO: 586169
ggccguccuagagaauaaa

SEQ ID NO: 697321 - RNA, 19 nt, Artificial Sequence
  Description of Artificial Sequence: Synthetic oligonucleotide
  Antisense strand to SEQ ID NO: 697320
uuuauucucuaggacggcc

SEQ ID NO: 697322 - RNA, 19 nt, Artificial Sequence
  Description of Artificial Sequence: Synthetic oligonucleotide
  Sense strand starting at position 1357 of SEQ ID NO: 586169
cguccuagagaauaaaguu

SEQ ID NO: 697323 - RNA, 19 nt, Artificial Sequence
  Description of Artificial Sequence: Synthetic oligonucleotide
  Antisense strand to SEQ ID NO: 697322
aacuuuauucucuaggacg

SEQ ID NO: 697324 - RNA, 19 nt, Artificial Sequence
  Description of Artificial Sequence: Synthetic oligonucleotide
  Sense strand starting at position 1383 of SEQ ID NO: 586169
cacgaauccucagguuuga

SEQ ID NO: 697325 - RNA, 19 nt, Artificial Sequence
  Description of Artificial Sequence: Synthetic oligonucleotide
  Antisense strand to SEQ ID NO: 697324
ucaaaccugaggauucgug

SEQ ID NO: 697326 - RNA, 19 nt, Artificial Sequence
  Description of Artificial Sequence: Synthetic oligonucleotide
  Sense strand starting at position 1473 of SEQ ID NO: 586169
caucgaaccuuacauggua

SEQ ID NO: 697327 - RNA, 19 nt, Artificial Sequence
  Description of Artificial Sequence: Synthetic oligonucleotide
  Antisense strand to SEQ ID NO: 697326
uaccauguaagguucgaug

SEQ ID NO: 697328 - RNA, 19 nt, Artificial Sequence
  Description of Artificial Sequence: Synthetic oligonucleotide
  Sense strand starting at position 1535 of SEQ ID NO: 586169
gagcuuaagccuugggaaa

SEQ ID NO: 697329 - RNA, 19 nt, Artificial Sequence
  Description of Artificial Sequence: Synthetic oligonucleotide
  Antisense strand to SEQ ID NO: 697328
uuucccaaggcuuaagcuc

SEQ ID NO: 697330 - RNA, 19 nt, Artificial Sequence
  Description of Artificial Sequence: Synthetic oligonucleotide
  Sense strand starting at position 1617 of SEQ ID NO: 586169
gcggcuauuucuuagcgga

SEQ ID NO: 697331 - RNA, 19 nt, Artificial Sequence
  Description of Artificial Sequence: Synthetic oligonucleotide
  Antisense strand to SEQ ID NO: 697330
uccgcuaagaaauagccgc

SEQ ID NO: 697332 - RNA, 19 nt, Artificial Sequence
  Description of Artificial Sequence: Synthetic oligonucleotide
  Sense strand starting at position 1619 of SEQ ID NO: 586169
ggcuauuucuuagcggaaa

SEQ ID NO: 697333 - RNA, 19 nt, Artificial Sequence
  Description of Artificial Sequence: Synthetic oligonucleotide
  Antisense strand to SEQ ID NO: 697332
uuuccgcuaagaaauagcc

SEQ ID NO: 697334 - RNA, 19 nt, Artificial Sequence
  Description of Artificial Sequence: Synthetic oligonucleotide
  Sense strand starting at position 1620 of SEQ ID NO: 586169
gcuauuucuuagcggaaag

SEQ ID NO: 697335 - RNA, 19 nt, Artificial Sequence
  Description of Artificial Sequence: Synthetic oligonucleotide
  Antisense strand to SEQ ID NO: 697334
cuuuccgcuaagaaauagc

SEQ ID NO: 697336 - RNA, 19 nt, Artificial Sequence
  Description of Artificial Sequence: Synthetic oligonucleotide
  Sense strand starting at position 1796 of SEQ ID NO: 586169
uggcgaagugccugagcaa

SEQ ID NO: 697337 - RNA, 19 nt, Artificial Sequence
  Description of Artificial Sequence: Synthetic oligonucleotide
  Antisense strand to SEQ ID NO: 697336
uugcucaggcacuucgcca

SEQ ID NO: 697338 - RNA, 19 nt, Artificial Sequence
  Description of Artificial Sequence: Synthetic oligonucleotide
  Sense strand starting at position 1797 of SEQ ID NO: 586169
ggcgaagugccugagcaaa

SEQ ID NO: 697339 - RNA, 19 nt, Artificial Sequence
  Description of Artificial Sequence: Synthetic oligonucleotide
  Antisense strand to SEQ ID NO: 697338
uuugcucaggcacuucgcc

SEQ ID NO: 697340 - RNA, 19 nt, Artificial Sequence
  Description of Artificial Sequence: Synthetic oligonucleotide
  Sense strand starting at position 2434 of SEQ ID NO: 586169
ccuugaacucccggaguca

SEQ ID NO: 697341 - RNA, 19 nt, Artificial Sequence
  Description of Artificial Sequence: Synthetic oligonucleotide
  Antisense strand to SEQ ID NO: 697340
ugacuccgggaguucaagg

SEQ ID NO: 697342 - RNA, 19 nt, Artificial Sequence
  Description of Artificial Sequence: Synthetic oligonucleotide
  Sense strand starting at position 2435 of SEQ ID NO: 586169
cuugaacucccggagucaa

SEQ ID NO: 697343 - RNA, 19 nt, Artificial Sequence
  Description of Artificial Sequence: Synthetic oligonucleotide
  Antisense strand to SEQ ID NO: 697342
uugacuccgggaguucaag

SEQ ID NO: 697344 - RNA, 19 nt, Artificial Sequence
  Description of Artificial Sequence: Synthetic oligonucleotide
  Sense strand starting at position 2705 of SEQ ID NO: 586169
gaaggcgucucccuauguu

SEQ ID NO: 697345 - RNA, 19 nt, Artificial Sequence
  Description of Artificial Sequence: Synthetic oligonucleotide
  Antisense strand to SEQ ID NO: 697344
aacauagggagacgccuuc

SEQ ID NO: 697346 - RNA, 19 nt, Artificial Sequence
  Description of Artificial Sequence: Synthetic oligonucleotide
  Sense strand starting at position 2723 of SEQ ID NO: 586169
ugccuagacugcucuuaaa

SEQ ID NO: 697347 - RNA, 19 nt, Artificial Sequence
  Description of Artificial Sequence: Synthetic oligonucleotide
  Antisense strand to SEQ ID NO: 697346
uuuaagagcagucuaggca

SEQ ID NO: 697348 - RNA, 19 nt, Artificial Sequence
  Description of Artificial Sequence: Synthetic oligonucleotide
  Sense strand starting at position 3179 of SEQ ID NO: 586169
caggucuuguagucauaac

SEQ ID NO: 697349 - RNA, 19 nt, Artificial Sequence
  Description of Artificial Sequence: Synthetic oligonucleotide
  Antisense strand to SEQ ID NO: 697348
guuaugacuacaagaccug

SEQ ID NO: 697350 - RNA, 19 nt, Artificial Sequence
  Description of Artificial Sequence: Synthetic oligonucleotide
  Sense strand starting at position 3180 of SEQ ID NO: 586169
aggucuuguagucauaacu

SEQ ID NO: 697351 - RNA, 19 nt, Artificial Sequence
  Description of Artificial Sequence: Synthetic oligonucleotide
  Antisense strand to SEQ ID NO: 697350
aguuaugacuacaagaccu

SEQ ID NO: 697352 - RNA, 19 nt, Artificial Sequence
  Description of Artificial Sequence: Synthetic oligonucleotide
  Sense strand starting at position 3318 of SEQ ID NO: 586169
caauuauaggugugugaaa

SEQ ID NO: 697353 - RNA, 19 nt, Artificial Sequence
  Description of Artificial Sequence: Synthetic oligonucleotide
  Antisense strand to SEQ ID NO: 697352
uuucacacaccuauaauug

SEQ ID NO: 697354 - RNA, 19 nt, Artificial Sequence
  Description of Artificial Sequence: Synthetic oligonucleotide
  Sense strand starting at position 3319 of SEQ ID NO: 586169
aauuauaggugugugaaag

SEQ ID NO: 697355 - RNA, 19 nt, Artificial Sequence
  Description of Artificial Sequence: Synthetic oligonucleotide
  Antisense strand to SEQ ID NO: 697354
cuuucacacaccuauaauu

SEQ ID NO: 697356 - RNA, 19 nt, Artificial Sequence
  Description of Artificial Sequence: Synthetic oligonucleotide
  Sense strand starting at position 3344 of SEQ ID NO: 586169
cagcaucgccagugggaau

SEQ ID NO: 697357 - RNA, 19 nt, Artificial Sequence
  Description of Artificial Sequence: Synthetic oligonucleotide
  Antisense strand to SEQ ID NO: 697356
auucccacuggcgaugcug

SEQ ID NO: 697358 - RNA, 19 nt, Artificial Sequence
  Description of Artificial Sequence: Synthetic oligonucleotide
  Sense strand starting at position 3834 of SEQ ID NO: 586169
guagccaagcguggugaua

SEQ ID NO: 697359 - RNA, 19 nt, Artificial Sequence
  Description of Artificial Sequence: Synthetic oligonucleotide
  Antisense strand to SEQ ID NO: 697358
uaucaccacgcuuggcuac

SEQ ID NO: 697360 - RNA, 19 nt, Artificial Sequence
  Description of Artificial Sequence: Synthetic oligonucleotide
  Sense strand starting at position 3847 of SEQ ID NO: 586169
gugauaugcgccugucauu

SEQ ID NO: 697361 - RNA, 19 nt, Artificial Sequence
  Description of Artificial Sequence: Synthetic oligonucleotide
  Antisense strand to SEQ ID NO: 697360
aaugacaggcgcauaucac

SEQ ID NO: 697362 - RNA, 19 nt, Artificial Sequence
  Description of Artificial Sequence: Synthetic oligonucleotide
  Sense strand starting at position 67 of SEQ ID NO: 586170
guguacgacgaaugcuauu

SEQ ID NO: 697363 - RNA, 19 nt, Artificial Sequence
  Description of Artificial Sequence: Synthetic oligonucleotide
  Antisense strand to SEQ ID NO: 697362
aauagcauucgucguacac

SEQ ID NO: 697364 - RNA, 19 nt, Artificial Sequence
  Description of Artificial Sequence: Synthetic oligonucleotide
  Sense strand starting at position 145 of SEQ ID NO: 586170
uuucucuaggcugagauua

SEQ ID NO: 697365 - RNA, 19 nt, Artificial Sequence
  Description of Artificial Sequence: Synthetic oligonucleotide
  Antisense strand to SEQ ID NO: 697364
uaaucucagccuagagaaa

SEQ ID NO: 697366 - RNA, 19 nt, Artificial Sequence
  Description of Artificial Sequence: Synthetic oligonucleotide
  Sense strand starting at position 147 of SEQ ID NO: 586170
ucucuaggcugagauuaag

SEQ ID NO: 697367 - RNA, 19 nt, Artificial Sequence
  Description of Artificial Sequence: Synthetic oligonucleotide
  Antisense strand to SEQ ID NO: 697366
cuuaaucucagccuagaga

SEQ ID NO: 697368 - RNA, 19 nt, Artificial Sequence
  Description of Artificial Sequence: Synthetic oligonucleotide
  Sense strand starting at position 153 of SEQ ID NO: 586170
ggcugagauuaagaauaca

SEQ ID NO: 697369 - RNA, 19 nt, Artificial Sequence
  Description of Artificial Sequence: Synthetic oligonucleotide
  Antisense strand to SEQ ID NO: 697368
uguauucuuaaucucagcc

SEQ ID NO: 697370 - RNA, 19 nt, Artificial Sequence
  Description of Artificial Sequence: Synthetic oligonucleotide
  Sense strand starting at position 1099 of SEQ ID NO: 586170
acacacauguguuaaucaa

SEQ ID NO: 697371 - RNA, 19 nt, Artificial Sequence
  Description of Artificial Sequence: Synthetic oligonucleotide
  Antisense strand to SEQ ID NO: 697370
uugauuaacacaugugugu

SEQ ID NO: 697372 - RNA, 19 nt, Artificial Sequence
  Description of Artificial Sequence: Synthetic oligonucleotide
  Sense strand starting at position 1160 of SEQ ID NO: 586170
ccacaucccgaacaguuau

SEQ ID NO: 697373 - RNA, 19 nt, Artificial Sequence
  Description of Artificial Sequence: Synthetic oligonucleotide
  Antisense strand to SEQ ID NO: 697372
auaacuguucgggaugugg

SEQ ID NO: 697374 - RNA, 19 nt, Artificial Sequence
  Description of Artificial Sequence: Synthetic oligonucleotide
  Sense strand starting at position 1297 of SEQ ID NO: 586170
gcgggaugaauguagcgau

SEQ ID NO: 697375 - RNA, 19 nt, Artificial Sequence
  Description of Artificial Sequence: Synthetic oligonucleotide
  Antisense strand to SEQ ID NO: 697374
aucgcuacauucaucccgc

SEQ ID NO: 697376 - RNA, 19 nt, Artificial Sequence
  Description of Artificial Sequence: Synthetic oligonucleotide
  Sense strand starting at position 1298 of SEQ ID NO: 586170
cgggaugaauguagcgauu

SEQ ID NO: 697377 - RNA, 19 nt, Artificial Sequence
  Description of Artificial Sequence: Synthetic oligonucleotide
  Antisense strand to SEQ ID NO: 697376
aaucgcuacauucaucccg

SEQ ID NO: 697378 - RNA, 19 nt, Artificial Sequence
  Description of Artificial Sequence: Synthetic oligonucleotide
  Sense strand starting at position 1300 of SEQ ID NO: 586170
ggaugaauguagcgauuua

SEQ ID NO: 697379 - RNA, 19 nt, Artificial Sequence
  Description of Artificial Sequence: Synthetic oligonucleotide
  Antisense strand to SEQ ID NO: 697378
uaaaucgcuacauucaucc

SEQ ID NO: 697380 - RNA, 19 nt, Artificial Sequence
  Description of Artificial Sequence: Synthetic oligonucleotide
  Sense strand starting at position 1311 of SEQ ID NO: 586170
gcgauuuacacaugggugu

SEQ ID NO: 697381 - RNA, 19 nt, Artificial Sequence
  Description of Artificial Sequence: Synthetic oligonucleotide
  Antisense strand to SEQ ID NO: 697380
acacccauguguaaaucgc

SEQ ID NO: 697382 - RNA, 19 nt, Artificial Sequence
  Description of Artificial Sequence: Synthetic oligonucleotide
  Sense strand starting at position 1352 of SEQ ID NO: 586170
aaggccguccuagagaaua

SEQ ID NO: 697383 - RNA, 19 nt, Artificial Sequence
  Description of Artificial Sequence: Synthetic oligonucleotide
  Antisense strand to SEQ ID NO: 697382
uauucucuaggacggccuu

SEQ ID NO: 697384 - RNA, 19 nt, Artificial Sequence
  Description of Artificial Sequence: Synthetic oligonucleotide
  Sense strand starting at position 1354 of SEQ ID NO: 586170
ggccguccuagagaauaaa

SEQ ID NO: 697385 - RNA, 19 nt, Artificial Sequence
  Description of Artificial Sequence: Synthetic oligonucleotide
  Antisense strand to SEQ ID NO: 697384
uuuauucucuaggacggcc

SEQ ID NO: 697386 - RNA, 19 nt, Artificial Sequence
  Description of Artificial Sequence: Synthetic oligonucleotide
  Sense strand starting at position 1357 of SEQ ID NO: 586170
cguccuagagaauaaaguu

SEQ ID NO: 697387 - RNA, 19 nt, Artificial Sequence
  Description of Artificial Sequence: Synthetic oligonucleotide
  Antisense strand to SEQ ID NO: 697386
aacuuuauucucuaggacg

SEQ ID NO: 697388 - RNA, 19 nt, Artificial Sequence
  Description of Artificial Sequence: Synthetic oligonucleotide
  Sense strand starting at position 1383 of SEQ ID NO: 586170
cacgaauccucagguuuga

SEQ ID NO: 697389 - RNA, 19 nt, Artificial Sequence
  Description of Artificial Sequence: Synthetic oligonucleotide
  Antisense strand to SEQ ID NO: 697388
ucaaaccugaggauucgug

SEQ ID NO: 697390 - RNA, 19 nt, Artificial Sequence
  Description of Artificial Sequence: Synthetic oligonucleotide
  Sense strand starting at position 1473 of SEQ ID NO: 586170
caucgaaccuuacauggua

SEQ ID NO: 697391 - RNA, 19 nt, Artificial Sequence
  Description of Artificial Sequence: Synthetic oligonucleotide
  Antisense strand to SEQ ID NO: 697390
uaccauguaagguucgaug

SEQ ID NO: 697392 - RNA, 19 nt, Artificial Sequence
  Description of Artificial Sequence: Synthetic oligonucleotide
  Sense strand starting at position 1535 of SEQ ID NO: 586170
gagcuuaagccuugggaaa

SEQ ID NO: 697393 - RNA, 19 nt, Artificial Sequence
  Description of Artificial Sequence: Synthetic oligonucleotide
  Antisense strand to SEQ ID NO: 697392
uuucccaaggcuuaagcuc

SEQ ID NO: 697394 - RNA, 19 nt, Artificial Sequence
  Description of Artificial Sequence: Synthetic oligonucleotide
  Sense strand starting at position 1617 of SEQ ID NO: 586170
gcggcuauuucuuagcgga

SEQ ID NO: 697395 - RNA, 19 nt, Artificial Sequence
  Description of Artificial Sequence: Synthetic oligonucleotide
  Antisense strand to SEQ ID NO: 697394
uccgcuaagaaauagccgc

SEQ ID NO: 697396 - RNA, 19 nt, Artificial Sequence
  Description of Artificial Sequence: Synthetic oligonucleotide
  Sense strand starting at position 1619 of SEQ ID NO: 586170
ggcuauuucuuagcggaaa

SEQ ID NO: 697397 - RNA, 19 nt, Artificial Sequence
  Description of Artificial Sequence: Synthetic oligonucleotide
  Antisense strand to SEQ ID NO: 697396
uuuccgcuaagaaauagcc

SEQ ID NO: 697398 - RNA, 19 nt, Artificial Sequence
  Description of Artificial Sequence: Synthetic oligonucleotide
  Sense strand starting at position 1620 of SEQ ID NO: 586170
gcuauuucuuagcggaaag

SEQ ID NO: 697399 - RNA, 19 nt, Artificial Sequence
  Description of Artificial Sequence: Synthetic oligonucleotide
  Antisense strand to SEQ ID NO: 697398
cuuuccgcuaagaaauagc

SEQ ID NO: 697400 - RNA, 19 nt, Artificial Sequence
  Description of Artificial Sequence: Synthetic oligonucleotide
  Sense strand starting at position 1796 of SEQ ID NO: 586170
uggcgaagugccugagcaa

SEQ ID NO: 697401 - RNA, 19 nt, Artificial Sequence
  Description of Artificial Sequence: Synthetic oligonucleotide
  Antisense strand to SEQ ID NO: 697400
uugcucaggcacuucgcca

SEQ ID NO: 697402 - RNA, 19 nt, Artificial Sequence
  Description of Artificial Sequence: Synthetic oligonucleotide
  Sense strand starting at position 1797 of SEQ ID NO: 586170
ggcgaagugccugagcaaa

SEQ ID NO: 697403 - RNA, 19 nt, Artificial Sequence
  Description of Artificial Sequence: Synthetic oligonucleotide
  Antisense strand to SEQ ID NO: 697402
uuugcucaggcacuucgcc

SEQ ID NO: 697404 - RNA, 19 nt, Artificial Sequence
  Description of Artificial Sequence: Synthetic oligonucleotide
  Sense strand starting at position 2434 of SEQ ID NO: 586170
ccuugaacucccggaguca

SEQ ID NO: 697405 - RNA, 19 nt, Artificial Sequence
  Description of Artificial Sequence: Synthetic oligonucleotide
  Antisense strand to SEQ ID NO: 697404
ugacuccgggaguucaagg

SEQ ID NO: 697406 - RNA, 19 nt, Artificial Sequence
  Description of Artificial Sequence: Synthetic oligonucleotide
  Sense strand starting at position 2435 of SEQ ID NO: 586170
cuugaacucccggagucaa

SEQ ID NO: 697407 - RNA, 19 nt, Artificial Sequence
  Description of Artificial Sequence: Synthetic oligonucleotide
  Antisense strand to SEQ ID NO: 697406
uugacuccgggaguucaag

SEQ ID NO: 697408 - RNA, 19 nt, Artificial Sequence
  Description of Artificial Sequence: Synthetic oligonucleotide
  Sense strand starting at position 2705 of SEQ ID NO: 586170
gaaggcgucucccuauguu

SEQ ID NO: 697409 - RNA, 19 nt, Artificial Sequence
  Description of Artificial Sequence: Synthetic oligonucleotide
  Antisense strand to SEQ ID NO: 697408
aacauagggagacgccuuc

SEQ ID NO: 697410 - RNA, 19 nt, Artificial Sequence
  Description of Artificial Sequence: Synthetic oligonucleotide
  Sense strand starting at position 2723 of SEQ ID NO: 586170
ugccuagacugcucuuaaa

SEQ ID NO: 697411 - RNA, 19 nt, Artificial Sequence
  Description of Artificial Sequence: Synthetic oligonucleotide
  Antisense strand to SEQ ID NO: 697410
uuuaagagcagucuaggca

SEQ ID NO: 697412 - RNA, 19 nt, Artificial Sequence
  Description of Artificial Sequence: Synthetic oligonucleotide
  Sense strand starting at position 3179 of SEQ ID NO: 586170
caggucuuguagucauaac

SEQ ID NO: 697413 - RNA, 19 nt, Artificial Sequence
  Description of Artificial Sequence: Synthetic oligonucleotide
  Antisense strand to SEQ ID NO: 697412
guuaugacuacaagaccug

SEQ ID NO: 697414 - RNA, 19 nt, Artificial Sequence
  Description of Artificial Sequence: Synthetic oligonucleotide
  Sense strand starting at position 3180 of SEQ ID NO: 586170
aggucuuguagucauaacu

SEQ ID NO: 697415 - RNA, 19 nt, Artificial Sequence
  Description of Artificial Sequence: Synthetic oligonucleotide
  Antisense strand to SEQ ID NO: 697414
aguuaugacuacaagaccu

SEQ ID NO: 697416 - RNA, 19 nt, Artificial Sequence
  Description of Artificial Sequence: Synthetic oligonucleotide
  Sense strand starting at position 3318 of SEQ ID NO: 586170
caauuauaggugugugaaa

SEQ ID NO: 697417 - RNA, 19 nt, Artificial Sequence
  Description of Artificial Sequence: Synthetic oligonucleotide
  Antisense strand to SEQ ID NO: 697416
uuucacacaccuauaauug

SEQ ID NO: 697418 - RNA, 19 nt, Artificial Sequence
  Description of Artificial Sequence: Synthetic oligonucleotide
  Sense strand starting at position 3319 of SEQ ID NO: 586170
aauuauaggugugugaaag

SEQ ID NO: 697419 - RNA, 19 nt, Artificial Sequence
  Description of Artificial Sequence: Synthetic oligonucleotide
  Antisense strand to SEQ ID NO: 697418
cuuucacacaccuauaauu

SEQ ID NO: 697420 - RNA, 19 nt, Artificial Sequence
  Description of Artificial Sequence: Synthetic oligonucleotide
  Sense strand starting at position 3344 of SEQ ID NO: 586170
cagcaucgccagugggaau

SEQ ID NO: 697421 - RNA, 19 nt, Artificial Sequence
  Description of Artificial Sequence: Synthetic oligonucleotide
  Antisense strand to SEQ ID NO: 697420
auucccacuggcgaugcug

SEQ ID NO: 697422 - RNA, 19 nt, Artificial Sequence
  Description of Artificial Sequence: Synthetic oligonucleotide
  Sense strand starting at position 3834 of SEQ ID NO: 586170
guagccaagcguggugaua

SEQ ID NO: 697423 - RNA, 19 nt, Artificial Sequence
  Description of Artificial Sequence: Synthetic oligonucleotide
  Antisense strand to SEQ ID NO: 697422
uaucaccacgcuuggcuac

SEQ ID NO: 697424 - RNA, 19 nt, Artificial Sequence
  Description of Artificial Sequence: Synthetic oligonucleotide
  Sense strand starting at position 3847 of SEQ ID NO: 586170
gugauaugcgccugucauu

SEQ ID NO: 697425 - RNA, 19 nt, Artificial Sequence
  Description of Artificial Sequence: Synthetic oligonucleotide
  Antisense strand to SEQ ID NO: 697424
aaugacaggcgcauaucac

SEQ ID NO: 697426 - RNA, 19 nt, Artificial Sequence
  Description of Artificial Sequence: Synthetic oligonucleotide
  Sense strand starting at position 68 of SEQ ID NO: 586171
agugguaaugccuaaacug

SEQ ID NO: 697427 - RNA, 19 nt, Artificial Sequence
  Description of Artificial Sequence: Synthetic oligonucleotide
  Antisense strand to SEQ ID NO: 697426
caguuuaggcauuaccacu

SEQ ID NO: 697428 - RNA, 19 nt, Artificial Sequence
  Description of Artificial Sequence: Synthetic oligonucleotide
  Sense strand starting at position 258 of SEQ ID NO: 586171
uucuaugucuuuccacaga

SEQ ID NO: 697429 - RNA, 19 nt, Artificial Sequence
  Description of Artificial Sequence: Synthetic oligonucleotide
  Antisense strand to SEQ ID NO: 697428
ucuguggaaagacauagaa

SEQ ID NO: 697430 - RNA, 19 nt, Artificial Sequence
  Description of Artificial Sequence: Synthetic oligonucleotide
  Sense strand starting at position 376 of SEQ ID NO: 586171
aggugcuauuccuuugacu

SEQ ID NO: 697431 - RNA, 19 nt, Artificial Sequence
  Description of Artificial Sequence: Synthetic oligonucleotide
  Antisense strand to SEQ ID NO: 697430
agucaaaggaauagcaccu

SEQ ID NO: 697432 - RNA, 19 nt, Artificial Sequence
  Description of Artificial Sequence: Synthetic oligonucleotide
  Sense strand starting at position 450 of SEQ ID NO: 586171
gucacuuucucugugaauc

SEQ ID NO: 697433 - RNA, 19 nt, Artificial Sequence
  Description of Artificial Sequence: Synthetic oligonucleotide
  Antisense strand to SEQ ID NO: 697432
gauucacagagaaagugac

SEQ ID NO: 697434 - RNA, 19 nt, Artificial Sequence
  Description of Artificial Sequence: Synthetic oligonucleotide
  Sense strand starting at position 541 of SEQ ID NO: 586171
auuugagucuugccagguu

SEQ ID NO: 697435 - RNA, 19 nt, Artificial Sequence
  Description of Artificial Sequence: Synthetic oligonucleotide
  Antisense strand to SEQ ID NO: 697434
aaccuggcaagacucaaau

SEQ ID NO: 697436 - RNA, 19 nt, Artificial Sequence
  Description of Artificial Sequence: Synthetic oligonucleotide
  Sense strand starting at position 704 of SEQ ID NO: 586171
aaugcagagcucuagucaa

SEQ ID NO: 697437 - RNA, 19 nt, Artificial Sequence
  Description of Artificial Sequence: Synthetic oligonucleotide
  Antisense strand to SEQ ID NO: 697436
uugacuagagcucugcauu

SEQ ID NO: 697438 - RNA, 19 nt, Artificial Sequence
  Description of Artificial Sequence: Synthetic oligonucleotide
  Sense strand starting at position 1385 of SEQ ID NO: 586171
agugcuuuauccucccaag

SEQ ID NO: 697439 - RNA, 19 nt, Artificial Sequence
  Description of Artificial Sequence: Synthetic oligonucleotide
  Antisense strand to SEQ ID NO: 697438
cuugggaggauaaagcacu

SEQ ID NO: 697440 - RNA, 19 nt, Artificial Sequence
  Description of Artificial Sequence: Synthetic oligonucleotide
  Sense strand starting at position 1500 of SEQ ID NO: 586171
cagugaauauuggcccaaa

SEQ ID NO: 697441 - RNA, 19 nt, Artificial Sequence
  Description of Artificial Sequence: Synthetic oligonucleotide
  Antisense strand to SEQ ID NO: 697440
uuugggccaauauucacug

SEQ ID NO: 697442 - RNA, 19 nt, Artificial Sequence
  Description of Artificial Sequence: Synthetic oligonucleotide
  Sense strand starting at position 1501 of SEQ ID NO: 586171
agugaauauuggcccaaau

SEQ ID NO: 697443 - RNA, 19 nt, Artificial Sequence
  Description of Artificial Sequence: Synthetic oligonucleotide
  Antisense strand to SEQ ID NO: 697442
auuugggccaauauucacu

SEQ ID NO: 697444 - RNA, 19 nt, Artificial Sequence
  Description of Artificial Sequence: Synthetic oligonucleotide
  Sense strand starting at position 1612 of SEQ ID NO: 586171
cuuguuucucaauaaggac

SEQ ID NO: 697445 - RNA, 19 nt, Artificial Sequence
  Description of Artificial Sequence: Synthetic oligonucleotide
  Antisense strand to SEQ ID NO: 697444
guccuuauugagaaacaag

SEQ ID NO: 697446 - RNA, 19 nt, Artificial Sequence
  Description of Artificial Sequence: Synthetic oligonucleotide
  Sense strand starting at position 1700 of SEQ ID NO: 586171
cccuucuagagaggugaga

SEQ ID NO: 697447 - RNA, 19 nt, Artificial Sequence
  Description of Artificial Sequence: Synthetic oligonucleotide
  Antisense strand to SEQ ID NO: 697446
ucucaccucucuagaaggg

SEQ ID NO: 697448 - RNA, 19 nt, Artificial Sequence
  Description of Artificial Sequence: Synthetic oligonucleotide
  Sense strand starting at position 2183 of SEQ ID NO: 586171
gucuuagguuggccugaga

SEQ ID NO: 697449 - RNA, 19 nt, Artificial Sequence
  Description of Artificial Sequence: Synthetic oligonucleotide
  Antisense strand to SEQ ID NO: 697448
ucucaggccaaccuaagac

SEQ ID NO: 697450 - RNA, 19 nt, Artificial Sequence
  Description of Artificial Sequence: Synthetic oligonucleotide
  Sense strand starting at position 2253 of SEQ ID NO: 586171
uggccuuugccacaaagaa

SEQ ID NO: 697451 - RNA, 19 nt, Artificial Sequence
  Description of Artificial Sequence: Synthetic oligonucleotide
  Antisense strand to SEQ ID NO: 697450
uucuuuguggcaaaggcca

SEQ ID NO: 697452 - RNA, 19 nt, Artificial Sequence
  Description of Artificial Sequence: Synthetic oligonucleotide
  Sense strand starting at position 2278 of SEQ ID NO: 586171
aaguuauuugcuggagucu

SEQ ID NO: 697453 - RNA, 19 nt, Artificial Sequence
  Description of Artificial Sequence: Synthetic oligonucleotide
  Antisense strand to SEQ ID NO: 697452
agacuccagcaaauaacuu

SEQ ID NO: 697454 - RNA, 19 nt, Artificial Sequence
  Description of Artificial Sequence: Synthetic oligonucleotide
  Sense strand starting at position 2367 of SEQ ID NO: 586171
ggcugucgugcuuugcaau

SEQ ID NO: 697455 - RNA, 19 nt, Artificial Sequence
  Description of Artificial Sequence: Synthetic oligonucleotide
  Antisense strand to SEQ ID NO: 697454
auugcaaagcacgacagcc

SEQ ID NO: 697456 - RNA, 19 nt, Artificial Sequence
  Description of Artificial Sequence: Synthetic oligonucleotide
  Sense strand starting at position 2395 of SEQ ID NO: 586171
gcacauuugugucugaccu

SEQ ID NO: 697457 - RNA, 19 nt, Artificial Sequence
  Description of Artificial Sequence: Synthetic oligonucleotide
  Antisense strand to SEQ ID NO: 697456
aggucagacacaaaugugc

SEQ ID NO: 697458 - RNA, 19 nt, Artificial Sequence
  Description of Artificial Sequence: Synthetic oligonucleotide
  Sense strand starting at position 2532 of SEQ ID NO: 586171
acuggaaaugcuggguuau

SEQ ID NO: 697459 - RNA, 19 nt, Artificial Sequence
  Description of Artificial Sequence: Synthetic oligonucleotide
  Antisense strand to SEQ ID NO: 697458
auaacccagcauuuccagu

SEQ ID NO: 697460 - RNA, 19 nt, Artificial Sequence
  Description of Artificial Sequence: Synthetic oligonucleotide
  Sense strand starting at position 2533 of SEQ ID NO: 586171
cuggaaaugcuggguuauc

SEQ ID NO: 697461 - RNA, 19 nt, Artificial Sequence
  Description of Artificial Sequence: Synthetic oligonucleotide
  Antisense strand to SEQ ID NO: 697460
gauaacccagcauuuccag

SEQ ID NO: 697462 - RNA, 19 nt, Artificial Sequence
  Description of Artificial Sequence: Synthetic oligonucleotide
  Sense strand starting at position 2534 of SEQ ID NO: 586171
uggaaaugcuggguuaucu

SEQ ID NO: 697463 - RNA, 19 nt, Artificial Sequence
  Description of Artificial Sequence: Synthetic oligonucleotide
  Antisense strand to SEQ ID NO: 697462
agauaacccagcauuucca

SEQ ID NO: 697464 - RNA, 19 nt, Artificial Sequence
  Description of Artificial Sequence: Synthetic oligonucleotide
  Sense strand starting at position 2572 of SEQ ID NO: 586171
cuggaaggcugaucuacau

SEQ ID NO: 697465 - RNA, 19 nt, Artificial Sequence
  Description of Artificial Sequence: Synthetic oligonucleotide
  Antisense strand to SEQ ID NO: 697464
auguagaucagccuuccag

SEQ ID NO: 697466 - RNA, 19 nt, Artificial Sequence
  Description of Artificial Sequence: Synthetic oligonucleotide
  Sense strand starting at position 2634 of SEQ ID NO: 586171
gagggaccuugguuaccau

SEQ ID NO: 697467 - RNA, 19 nt, Artificial Sequence
  Description of Artificial Sequence: Synthetic oligonucleotide
  Antisense strand to SEQ ID NO: 697466
augguaaccaaggucccuc

SEQ ID NO: 697468 - RNA, 19 nt, Artificial Sequence
  Description of Artificial Sequence: Synthetic oligonucleotide
  Sense strand starting at position 2954 of SEQ ID NO: 586171
aaucauagugcuugucaag

SEQ ID NO: 697469 - RNA, 19 nt, Artificial Sequence
  Description of Artificial Sequence: Synthetic oligonucleotide
  Antisense strand to SEQ ID NO: 697468
cuugacaagcacuaugauu

SEQ ID NO: 697470 - RNA, 19 nt, Artificial Sequence
  Description of Artificial Sequence: Synthetic oligonucleotide
  Sense strand starting at position 2960 of SEQ ID NO: 586171
agugcuugucaagacgaau

SEQ ID NO: 697471 - RNA, 19 nt, Artificial Sequence
  Description of Artificial Sequence: Synthetic oligonucleotide
  Antisense strand to SEQ ID NO: 697470
auucgucuugacaagcacu

SEQ ID NO: 697472 - RNA, 19 nt, Artificial Sequence
  Description of Artificial Sequence: Synthetic oligonucleotide
  Sense strand starting at position 2963 of SEQ ID NO: 586171
gcuugucaagacgaauuga

SEQ ID NO: 697473 - RNA, 19 nt, Artificial Sequence
  Description of Artificial Sequence: Synthetic oligonucleotide
  Antisense strand to SEQ ID NO: 697472
ucaauucgucuugacaagc

SEQ ID NO: 697474 - RNA, 19 nt, Artificial Sequence
  Description of Artificial Sequence: Synthetic oligonucleotide
  Sense strand starting at position 3027 of SEQ ID NO: 586171
cagugaaugucagcaauua

SEQ ID NO: 697475 - RNA, 19 nt, Artificial Sequence
  Description of Artificial Sequence: Synthetic oligonucleotide
  Antisense strand to SEQ ID NO: 697474
uaauugcugacauucacug

SEQ ID NO: 697476 - RNA, 19 nt, Artificial Sequence
  Description of Artificial Sequence: Synthetic oligonucleotide
  Sense strand starting at position 3028 of SEQ ID NO: 586171
agugaaugucagcaauuau

SEQ ID NO: 697477 - RNA, 19 nt, Artificial Sequence
  Description of Artificial Sequence: Synthetic oligonucleotide
  Antisense strand to SEQ ID NO: 697476
auaauugcugacauucacu

SEQ ID NO: 697478 - RNA, 19 nt, Artificial Sequence
  Description of Artificial Sequence: Synthetic oligonucleotide
  Sense strand starting at position 3099 of SEQ ID NO: 586171
cugaguuucuuucuacuua

SEQ ID NO: 697479 - RNA, 19 nt, Artificial Sequence
  Description of Artificial Sequence: Synthetic oligonucleotide
  Antisense strand to SEQ ID NO: 697478
uaaguagaaagaaacucag

SEQ ID NO: 697480 - RNA, 19 nt, Artificial Sequence
  Description of Artificial Sequence: Synthetic oligonucleotide
  Sense strand starting at position 3265 of SEQ ID NO: 586171
ggaggagggcgauguuuaa

SEQ ID NO: 697481 - RNA, 19 nt, Artificial Sequence
  Description of Artificial Sequence: Synthetic oligonucleotide
  Antisense strand to SEQ ID NO: 697480
uuaaacaucgcccuccucc

SEQ ID NO: 697482 - RNA, 19 nt, Artificial Sequence
  Description of Artificial Sequence: Synthetic oligonucleotide
  Sense strand starting at position 3490 of SEQ ID NO: 586171
uuauuugagucauaaggaa

SEQ ID NO: 697483 - RNA, 19 nt, Artificial Sequence
  Description of Artificial Sequence: Synthetic oligonucleotide
  Antisense strand to SEQ ID NO: 697482
uuccuuaugacucaaauaa

SEQ ID NO: 697484 - RNA, 19 nt, Artificial Sequence
  Description of Artificial Sequence: Synthetic oligonucleotide
  Sense strand starting at position 3522 of SEQ ID NO: 586171
aggaaucaguuucuccaaa

SEQ ID NO: 697485 - RNA, 19 nt, Artificial Sequence
  Description of Artificial Sequence: Synthetic oligonucleotide
  Antisense strand to SEQ ID NO: 697484
uuuggagaaacugauuccu

SEQ ID NO: 697486 - RNA, 19 nt, Artificial Sequence
  Description of Artificial Sequence: Synthetic oligonucleotide
  Sense strand starting at position 3590 of SEQ ID NO: 586171
aacagauugcaucgaggca

SEQ ID NO: 697487 - RNA, 19 nt, Artificial Sequence
  Description of Artificial Sequence: Synthetic oligonucleotide
  Antisense strand to SEQ ID NO: 697486
ugccucgaugcaaucuguu

SEQ ID NO: 697488 - RNA, 19 nt, Artificial Sequence
  Description of Artificial Sequence: Synthetic oligonucleotide
  Sense strand starting at position 3591 of SEQ ID NO: 586171
acagauugcaucgaggcaa

SEQ ID NO: 697489 - RNA, 19 nt, Artificial Sequence
  Description of Artificial Sequence: Synthetic oligonucleotide
  Antisense strand to SEQ ID NO: 697488
uugccucgaugcaaucugu

SEQ ID NO: 697490 - RNA, 19 nt, Artificial Sequence
  Description of Artificial Sequence: Synthetic oligonucleotide
  Sense strand starting at position 3615 of SEQ ID NO: 586171
auacuuuaagcaggacauu

SEQ ID NO: 697491 - RNA, 19 nt, Artificial Sequence
  Description of Artificial Sequence: Synthetic oligonucleotide
  Antisense strand to SEQ ID NO: 697490
aauguccugcuuaaaguau

SEQ ID NO: 697492 - RNA, 19 nt, Artificial Sequence
  Description of Artificial Sequence: Synthetic oligonucleotide
  Sense strand starting at position 3698 of SEQ ID NO: 586171
acagcagguuucuucugaa

SEQ ID NO: 697493 - RNA, 19 nt, Artificial Sequence
  Description of Artificial Sequence: Synthetic oligonucleotide
  Antisense strand to SEQ ID NO: 697492
uucagaagaaaccugcugu

SEQ ID NO: 697494 - RNA, 19 nt, Artificial Sequence
  Description of Artificial Sequence: Synthetic oligonucleotide
  Sense strand starting at position 3850 of SEQ ID NO: 586171
uauaauuucuaggaagguu

SEQ ID NO: 697495 - RNA, 19 nt, Artificial Sequence
  Description of Artificial Sequence: Synthetic oligonucleotide
  Antisense strand to SEQ ID NO: 697494
aaccuuccuagaaauuaua

SEQ ID NO: 697496 - RNA, 19 nt, Artificial Sequence
  Description of Artificial Sequence: Synthetic oligonucleotide
  Sense strand starting at position 3858 of SEQ ID NO: 586171
cuaggaagguucuuccaau

SEQ ID NO: 697497 - RNA, 19 nt, Artificial Sequence
  Description of Artificial Sequence: Synthetic oligonucleotide
  Antisense strand to SEQ ID NO: 697496
auuggaagaaccuuccuag

SEQ ID NO: 697498 - RNA, 19 nt, Artificial Sequence
  Description of Artificial Sequence: Synthetic oligonucleotide
  Sense strand starting at position 3859 of SEQ ID NO: 586171
uaggaagguucuuccaauc

SEQ ID NO: 697499 - RNA, 19 nt, Artificial Sequence
  Description of Artificial Sequence: Synthetic oligonucleotide
  Antisense strand to SEQ ID NO: 697498
gauuggaagaaccuuccua

SEQ ID NO: 697500 - RNA, 19 nt, Artificial Sequence
  Description of Artificial Sequence: Synthetic oligonucleotide
  Sense strand starting at position 3909 of SEQ ID NO: 586171
augagcacugucuaauaau

SEQ ID NO: 697501 - RNA, 19 nt, Artificial Sequence
  Description of Artificial Sequence: Synthetic oligonucleotide
  Antisense strand to SEQ ID NO: 697500
auuauuagacagugcucau

SEQ ID NO: 697502 - RNA, 19 nt, Artificial Sequence
  Description of Artificial Sequence: Synthetic oligonucleotide
  Sense strand starting at position 3946 of SEQ ID NO: 586171
ggaaaugucccaugucuga

SEQ ID NO: 697503 - RNA, 19 nt, Artificial Sequence
  Description of Artificial Sequence: Synthetic oligonucleotide
  Antisense strand to SEQ ID NO: 697502
ucagacaugggacauuucc

SEQ ID NO: 697504 - RNA, 19 nt, Artificial Sequence
  Description of Artificial Sequence: Synthetic oligonucleotide
  Sense strand starting at position 3966 of SEQ ID NO: 586171
uggugcuuccaauauggua

SEQ ID NO: 697505 - RNA, 19 nt, Artificial Sequence
  Description of Artificial Sequence: Synthetic oligonucleotide
  Antisense strand to SEQ ID NO: 697504
uaccauauuggaagcacca

SEQ ID NO: 697506 - RNA, 19 nt, Artificial Sequence
  Description of Artificial Sequence: Synthetic oligonucleotide
  Sense strand starting at position 52 of SEQ ID NO: 586172
uugucaucagaaugagauu

SEQ ID NO: 697507 - RNA, 19 nt, Artificial Sequence
  Description of Artificial Sequence: Synthetic oligonucleotide
  Antisense strand to SEQ ID NO: 697506
aaucucauucugaugacaa

SEQ ID NO: 697508 - RNA, 19 nt, Artificial Sequence
  Description of Artificial Sequence: Synthetic oligonucleotide
  Sense strand starting at position 84 of SEQ ID NO: 586172
gcccauuggguauauccaa

SEQ ID NO: 697509 - RNA, 19 nt, Artificial Sequence
  Description of Artificial Sequence: Synthetic oligonucleotide
  Antisense strand to SEQ ID NO: 697508
uuggauauacccaaugggc

SEQ ID NO: 697510 - RNA, 19 nt, Artificial Sequence
  Description of Artificial Sequence: Synthetic oligonucleotide
  Sense strand starting at position 91 of SEQ ID NO: 586172
ggguauauccaacguuaac

SEQ ID NO: 697511 - RNA, 19 nt, Artificial Sequence
  Description of Artificial Sequence: Synthetic oligonucleotide
  Antisense strand to SEQ ID NO: 697510
guuaacguuggauauaccc

SEQ ID NO: 697512 - RNA, 19 nt, Artificial Sequence
  Description of Artificial Sequence: Synthetic oligonucleotide
  Sense strand starting at position 101 of SEQ ID NO: 586172
aacguuaacguguaaauuc

SEQ ID NO: 697513 - RNA, 19 nt, Artificial Sequence
  Description of Artificial Sequence: Synthetic oligonucleotide
  Antisense strand to SEQ ID NO: 697512
gaauuuacacguuaacguu

SEQ ID NO: 697514 - RNA, 19 nt, Artificial Sequence
  Description of Artificial Sequence: Synthetic oligonucleotide
  Sense strand starting at position 136 of SEQ ID NO: 586172
agagcaauuuaucaauguc

SEQ ID NO: 697515 - RNA, 19 nt, Artificial Sequence
  Description of Artificial Sequence: Synthetic oligonucleotide
  Antisense strand to SEQ ID NO: 697514
gacauugauaaauugcucu

SEQ ID NO: 697516 - RNA, 19 nt, Artificial Sequence
  Description of Artificial Sequence: Synthetic oligonucleotide
  Sense strand starting at position 283 of SEQ ID NO: 586172
aguaaauggcuguaaccua

SEQ ID NO: 697517 - RNA, 19 nt, Artificial Sequence
  Description of Artificial Sequence: Synthetic oligonucleotide
  Antisense strand to SEQ ID NO: 697516
uagguuacagccauuuacu

SEQ ID NO: 697518 - RNA, 19 nt, Artificial Sequence
  Description of Artificial Sequence: Synthetic oligonucleotide
  Sense strand starting at position 352 of SEQ ID NO: 586172
cugugcagucagcaggaau

SEQ ID NO: 697519 - RNA, 19 nt, Artificial Sequence
  Description of Artificial Sequence: Synthetic oligonucleotide
  Antisense strand to SEQ ID NO: 697518
auuccugcugacugcacag

SEQ ID NO: 697520 - RNA, 19 nt, Artificial Sequence
  Description of Artificial Sequence: Synthetic oligonucleotide
  Sense strand starting at position 355 of SEQ ID NO: 586172
ugcagucagcaggaauaaa

SEQ ID NO: 697521 - RNA, 19 nt, Artificial Sequence
  Description of Artificial Sequence: Synthetic oligonucleotide
  Antisense strand to SEQ ID NO: 697520
uuuauuccugcugacugca

SEQ ID NO: 697522 - RNA, 19 nt, Artificial Sequence
  Description of Artificial Sequence: Synthetic oligonucleotide
  Sense strand starting at position 382 of SEQ ID NO: 586172
guauguccuguauauggaa

SEQ ID NO: 697523 - RNA, 19 nt, Artificial Sequence
  Description of Artificial Sequence: Synthetic oligonucleotide
  Antisense strand to SEQ ID NO: 697522
uuccauauacaggacauac

SEQ ID NO: 697524 - RNA, 19 nt, Artificial Sequence
  Description of Artificial Sequence: Synthetic oligonucleotide
  Sense strand starting at position 384 of SEQ ID NO: 586172
auguccuguauauggaaga

SEQ ID NO: 697525 - RNA, 19 nt, Artificial Sequence
  Description of Artificial Sequence: Synthetic oligonucleotide
  Antisense strand to SEQ ID NO: 697524
ucuuccauauacaggacau

SEQ ID NO: 697526 - RNA, 19 nt, Artificial Sequence
  Description of Artificial Sequence: Synthetic oligonucleotide
  Sense strand starting at position 432 of SEQ ID NO: 586172
aauggugcgaguuagguua

SEQ ID NO: 697527 - RNA, 19 nt, Artificial Sequence
  Description of Artificial Sequence: Synthetic oligonucleotide
  Antisense strand to SEQ ID NO: 697526
uaaccuaacucgcaccauu

SEQ ID NO: 697528 - RNA, 19 nt, Artificial Sequence
  Description of Artificial Sequence: Synthetic oligonucleotide
  Sense strand starting at position 436 of SEQ ID NO: 586172
gugcgaguuagguuagcca

SEQ ID NO: 697529 - RNA, 19 nt, Artificial Sequence
  Description of Artificial Sequence: Synthetic oligonucleotide
  Antisense strand to SEQ ID NO: 697528
uggcuaaccuaacucgcac

SEQ ID NO: 697530 - RNA, 19 nt, Artificial Sequence
  Description of Artificial Sequence: Synthetic oligonucleotide
  Sense strand starting at position 487 of SEQ ID NO: 586172
agucauaaguguguauuga

SEQ ID NO: 697531 - RNA, 19 nt, Artificial Sequence
  Description of Artificial Sequence: Synthetic oligonucleotide
  Antisense strand to SEQ ID NO: 697530
ucaauacacacuuaugacu

SEQ ID NO: 697532 - RNA, 19 nt, Artificial Sequence
  Description of Artificial Sequence: Synthetic oligonucleotide
  Sense strand starting at position 488 of SEQ ID NO: 586172
gucauaaguguguauugac

SEQ ID NO: 697533 - RNA, 19 nt, Artificial Sequence
  Description of Artificial Sequence: Synthetic oligonucleotide
  Antisense strand to SEQ ID NO: 697532
gucaauacacacuuaugac

SEQ ID NO: 697534 - RNA, 19 nt, Artificial Sequence
  Description of Artificial Sequence: Synthetic oligonucleotide
  Sense strand starting at position 497 of SEQ ID NO: 586172
guguauugacacugcugau

SEQ ID NO: 697535 - RNA, 19 nt, Artificial Sequence
  Description of Artificial Sequence: Synthetic oligonucleotide
  Antisense strand to SEQ ID NO: 697534
aucagcagugucaauacac

SEQ ID NO: 697536 - RNA, 19 nt, Artificial Sequence
  Description of Artificial Sequence: Synthetic oligonucleotide
  Sense strand starting at position 503 of SEQ ID NO: 586172
ugacacugcugauuaaaga

SEQ ID NO: 697537 - RNA, 19 nt, Artificial Sequence
  Description of Artificial Sequence: Synthetic oligonucleotide
  Antisense strand to SEQ ID NO: 697536
ucuuuaaucagcaguguca

SEQ ID NO: 697538 - RNA, 19 nt, Artificial Sequence
  Description of Artificial Sequence: Synthetic oligonucleotide
  Sense strand starting at position 597 of SEQ ID NO: 586172
guaacagaugcauguccaa

SEQ ID NO: 697539 - RNA, 19 nt, Artificial Sequence
  Description of Artificial Sequence: Synthetic oligonucleotide
  Antisense strand to SEQ ID NO: 697538
uuggacaugcaucuguuac

SEQ ID NO: 697540 - RNA, 19 nt, Artificial Sequence
  Description of Artificial Sequence: Synthetic oligonucleotide
  Sense strand starting at position 600 of SEQ ID NO: 586172
acagaugcauguccaaagu

SEQ ID NO: 697541 - RNA, 19 nt, Artificial Sequence
  Description of Artificial Sequence: Synthetic oligonucleotide
  Antisense strand to SEQ ID NO: 697540
acuuuggacaugcaucugu

SEQ ID NO: 697542 - RNA, 19 nt, Artificial Sequence
  Description of Artificial Sequence: Synthetic oligonucleotide
  Sense strand starting at position 611 of SEQ ID NO: 586172
uccaaaguuuaacugugaa

SEQ ID NO: 697543 - RNA, 19 nt, Artificial Sequence
  Description of Artificial Sequence: Synthetic oligonucleotide
  Antisense strand to SEQ ID NO: 697542
uucacaguuaaacuuugga

SEQ ID NO: 697544 - RNA, 19 nt, Artificial Sequence
  Description of Artificial Sequence: Synthetic oligonucleotide
  Sense strand starting at position 823 of SEQ ID NO: 586172
ccuuuagugucacuuagaa

SEQ ID NO: 697545 - RNA, 19 nt, Artificial Sequence
  Description of Artificial Sequence: Synthetic oligonucleotide
  Antisense strand to SEQ ID NO: 697544
uucuaagugacacuaaagg

SEQ ID NO: 697546 - RNA, 19 nt, Artificial Sequence
  Description of Artificial Sequence: Synthetic oligonucleotide
  Sense strand starting at position 886 of SEQ ID NO: 586172
agcucuuuccaauggugaa

SEQ ID NO: 697547 - RNA, 19 nt, Artificial Sequence
  Description of Artificial Sequence: Synthetic oligonucleotide
  Antisense strand to SEQ ID NO: 697546
uucaccauuggaaagagcu

SEQ ID NO: 697548 - RNA, 19 nt, Artificial Sequence
  Description of Artificial Sequence: Synthetic oligonucleotide
  Sense strand starting at position 887 of SEQ ID NO: 586172
gcucuuuccaauggugaag

SEQ ID NO: 697549 - RNA, 19 nt, Artificial Sequence
  Description of Artificial Sequence: Synthetic oligonucleotide
  Antisense strand to SEQ ID NO: 697548
cuucaccauuggaaagagc

SEQ ID NO: 697550 - RNA, 19 nt, Artificial Sequence
  Description of Artificial Sequence: Synthetic oligonucleotide
  Sense strand starting at position 1128 of SEQ ID NO: 586172
acucuaaaguccucgagcu

SEQ ID NO: 697551 - RNA, 19 nt, Artificial Sequence
  Description of Artificial Sequence: Synthetic oligonucleotide
  Antisense strand to SEQ ID NO: 697550
agcucgaggacuuuagagu

SEQ ID NO: 697552 - RNA, 19 nt, Artificial Sequence
  Description of Artificial Sequence: Synthetic oligonucleotide
  Sense strand starting at position 1451 of SEQ ID NO: 586172
uuguuuaacugccuggauu

SEQ ID NO: 697553 - RNA, 19 nt, Artificial Sequence
  Description of Artificial Sequence: Synthetic oligonucleotide
  Antisense strand to SEQ ID NO: 697552
aauccaggcaguuaaacaa

SEQ ID NO: 697554 - RNA, 19 nt, Artificial Sequence
  Description of Artificial Sequence: Synthetic oligonucleotide
  Sense strand starting at position 1485 of SEQ ID NO: 586172
agugaaguccacgaggcua

SEQ ID NO: 697555 - RNA, 19 nt, Artificial Sequence
  Description of Artificial Sequence: Synthetic oligonucleotide
  Antisense strand to SEQ ID NO: 697554
uagccucguggacuucacu

SEQ ID NO: 697556 - RNA, 19 nt, Artificial Sequence
  Description of Artificial Sequence: Synthetic oligonucleotide
  Sense strand starting at position 1553 of SEQ ID NO: 586172
caaaguggguacuccagaa

SEQ ID NO: 697557 - RNA, 19 nt, Artificial Sequence
  Description of Artificial Sequence: Synthetic oligonucleotide
  Antisense strand to SEQ ID NO: 697556
uucuggaguacccacuuug

SEQ ID NO: 697558 - RNA, 19 nt, Artificial Sequence
  Description of Artificial Sequence: Synthetic oligonucleotide
  Sense strand starting at position 1557 of SEQ ID NO: 586172
guggguacuccagaagcaa

SEQ ID NO: 697559 - RNA, 19 nt, Artificial Sequence
  Description of Artificial Sequence: Synthetic oligonucleotide
  Antisense strand to SEQ ID NO: 697558
uugcuucuggaguacccac

SEQ ID NO: 697560 - RNA, 19 nt, Artificial Sequence
  Description of Artificial Sequence: Synthetic oligonucleotide
  Sense strand starting at position 2014 of SEQ ID NO: 586172
ccuguugugggugaagaca

SEQ ID NO: 697561 - RNA, 19 nt, Artificial Sequence
  Description of Artificial Sequence: Synthetic oligonucleotide
  Antisense strand to SEQ ID NO: 697560
ugucuucacccacaacagg

SEQ ID NO: 697562 - RNA, 19 nt, Artificial Sequence
  Description of Artificial Sequence: Synthetic oligonucleotide
  Sense strand starting at position 2170 of SEQ ID NO: 586172
aagauuccuggaggccuua

SEQ ID NO: 697563 - RNA, 19 nt, Artificial Sequence
  Description of Artificial Sequence: Synthetic oligonucleotide
  Antisense strand to SEQ ID NO: 697562
uaaggccuccaggaaucuu

SEQ ID NO: 697564 - RNA, 19 nt, Artificial Sequence
  Description of Artificial Sequence: Synthetic oligonucleotide
  Sense strand starting at position 2809 of SEQ ID NO: 586172
augcccaauggcugaaauu

SEQ ID NO: 697565 - RNA, 19 nt, Artificial Sequence
  Description of Artificial Sequence: Synthetic oligonucleotide
  Antisense strand to SEQ ID NO: 697564
aauuucagccauugggcau

SEQ ID NO: 697566 - RNA, 19 nt, Artificial Sequence
  Description of Artificial Sequence: Synthetic oligonucleotide
  Sense strand starting at position 2858 of SEQ ID NO: 586172
acagaagcauaugugauau

SEQ ID NO: 697567 - RNA, 19 nt, Artificial Sequence
  Description of Artificial Sequence: Synthetic oligonucleotide
  Antisense strand to SEQ ID NO: 697566
auaucacauaugcuucugu

SEQ ID NO: 697568 - RNA, 19 nt, Artificial Sequence
  Description of Artificial Sequence: Synthetic oligonucleotide
  Sense strand starting at position 2909 of SEQ ID NO: 586172
uccuauuucuuugacagag

SEQ ID NO: 697569 - RNA, 19 nt, Artificial Sequence
  Description of Artificial Sequence: Synthetic oligonucleotide
  Antisense strand to SEQ ID NO: 697568
cucugucaaagaaauagga

SEQ ID NO: 697570 - RNA, 19 nt, Artificial Sequence
  Description of Artificial Sequence: Synthetic oligonucleotide
  Sense strand starting at position 3002 of SEQ ID NO: 586172
guuuguuugaaugagcuuu

SEQ ID NO: 697571 - RNA, 19 nt, Artificial Sequence
  Description of Artificial Sequence: Synthetic oligonucleotide
  Antisense strand to SEQ ID NO: 697570
aaagcucauucaaacaaac

SEQ ID NO: 697572 - RNA, 19 nt, Artificial Sequence
  Description of Artificial Sequence: Synthetic oligonucleotide
  Sense strand starting at position 3295 of SEQ ID NO: 586172
uccagcagguaucucuaaa

SEQ ID NO: 697573 - RNA, 19 nt, Artificial Sequence
  Description of Artificial Sequence: Synthetic oligonucleotide
  Antisense strand to SEQ ID NO: 697572
uuuagagauaccugcugga

SEQ ID NO: 697574 - RNA, 19 nt, Artificial Sequence
  Description of Artificial Sequence: Synthetic oligonucleotide
  Sense strand starting at position 3417 of SEQ ID NO: 586172
ucaaguuuccuagauuguc

SEQ ID NO: 697575 - RNA, 19 nt, Artificial Sequence
  Description of Artificial Sequence: Synthetic oligonucleotide
  Antisense strand to SEQ ID NO: 697574
gacaaucuaggaaacuuga

SEQ ID NO: 697576 - RNA, 19 nt, Artificial Sequence
  Description of Artificial Sequence: Synthetic oligonucleotide
  Sense strand starting at position 3422 of SEQ ID NO: 586172
uuuccuagauugucuguga

SEQ ID NO: 697577 - RNA, 19 nt, Artificial Sequence
  Description of Artificial Sequence: Synthetic oligonucleotide
  Antisense strand to SEQ ID NO: 697576
ucacagacaaucuaggaaa

SEQ ID NO: 697578 - RNA, 19 nt, Artificial Sequence
  Description of Artificial Sequence: Synthetic oligonucleotide
  Sense strand starting at position 3423 of SEQ ID NO: 586172
uuccuagauugucugugau

SEQ ID NO: 697579 - RNA, 19 nt, Artificial Sequence
  Description of Artificial Sequence: Synthetic oligonucleotide
  Antisense strand to SEQ ID NO: 697578
aucacagacaaucuaggaa

SEQ ID NO: 697580 - RNA, 19 nt, Artificial Sequence
  Description of Artificial Sequence: Synthetic oligonucleotide
  Sense strand starting at position 3429 of SEQ ID NO: 586172
gauugucugugauuugcau

SEQ ID NO: 697581 - RNA, 19 nt, Artificial Sequence
  Description of Artificial Sequence: Synthetic oligonucleotide
  Antisense strand to SEQ ID NO: 697580
augcaaaucacagacaauc

SEQ ID NO: 697582 - RNA, 19 nt, Artificial Sequence
  Description of Artificial Sequence: Synthetic oligonucleotide
  Sense strand starting at position 3581 of SEQ ID NO: 586172
aggugugcaucacuaugau

SEQ ID NO: 697583 - RNA, 19 nt, Artificial Sequence
  Description of Artificial Sequence: Synthetic oligonucleotide
  Antisense strand to SEQ ID NO: 697582
aucauagugaugcacaccu

SEQ ID NO: 697584 - RNA, 19 nt, Artificial Sequence
  Description of Artificial Sequence: Synthetic oligonucleotide
  Sense strand starting at position 3591 of SEQ ID NO: 586172
cacuaugauugggcugauu

SEQ ID NO: 697585 - RNA, 19 nt, Artificial Sequence
  Description of Artificial Sequence: Synthetic oligonucleotide
  Antisense strand to SEQ ID NO: 697584
aaucagcccaaucauagug

SEQ ID NO: 697586 - RNA, 19 nt, Artificial Sequence
  Description of Artificial Sequence: Synthetic oligonucleotide
  Sense strand starting at position 51 of SEQ ID NO: 586173
gggcaaagcuaacucuaau

SEQ ID NO: 697587 - RNA, 19 nt, Artificial Sequence
  Description of Artificial Sequence: Synthetic oligonucleotide
  Antisense strand to SEQ ID NO: 697586
auuagaguuagcuuugccc

SEQ ID NO: 697588 - RNA, 19 nt, Artificial Sequence
  Description of Artificial Sequence: Synthetic oligonucleotide
  Sense strand starting at position 72 of SEQ ID NO: 586173
aaacgaggcccuugaucuu

SEQ ID NO: 697589 - RNA, 19 nt, Artificial Sequence
  Description of Artificial Sequence: Synthetic oligonucleotide
  Antisense strand to SEQ ID NO: 697588
aagaucaagggccucguuu

SEQ ID NO: 697590 - RNA, 19 nt, Artificial Sequence
  Description of Artificial Sequence: Synthetic oligonucleotide
  Sense strand starting at position 78 of SEQ ID NO: 586173
ggcccuugaucuuugaucu

SEQ ID NO: 697591 - RNA, 19 nt, Artificial Sequence
  Description of Artificial Sequence: Synthetic oligonucleotide
  Antisense strand to SEQ ID NO: 697590
agaucaaagaucaagggcc

SEQ ID NO: 697592 - RNA, 19 nt, Artificial Sequence
  Description of Artificial Sequence: Synthetic oligonucleotide
  Sense strand starting at position 79 of SEQ ID NO: 586173
gcccuugaucuuugaucua

SEQ ID NO: 697593 - RNA, 19 nt, Artificial Sequence
  Description of Artificial Sequence: Synthetic oligonucleotide
  Antisense strand to SEQ ID NO: 697592
uagaucaaagaucaagggc

SEQ ID NO: 697594 - RNA, 19 nt, Artificial Sequence
  Description of Artificial Sequence: Synthetic oligonucleotide
  Sense strand starting at position 82 of SEQ ID NO: 586173
cuugaucuuugaucuaaag

SEQ ID NO: 697595 - RNA, 19 nt, Artificial Sequence
  Description of Artificial Sequence: Synthetic oligonucleotide
  Antisense strand to SEQ ID NO: 697594
cuuuagaucaaagaucaag

SEQ ID NO: 697596 - RNA, 19 nt, Artificial Sequence
  Description of Artificial Sequence: Synthetic oligonucleotide
  Sense strand starting at position 184 of SEQ ID NO: 586173
cugaguagacaauggugaa

SEQ ID NO: 697597 - RNA, 19 nt, Artificial Sequence
  Description of Artificial Sequence: Synthetic oligonucleotide
  Antisense strand to SEQ ID NO: 697596
uucaccauugucuacucag

SEQ ID NO: 697598 - RNA, 19 nt, Artificial Sequence
  Description of Artificial Sequence: Synthetic oligonucleotide
  Sense strand starting at position 238 of SEQ ID NO: 586173
agggaagggugcuuuguaa

SEQ ID NO: 697599 - RNA, 19 nt, Artificial Sequence
  Description of Artificial Sequence: Synthetic oligonucleotide
  Antisense strand to SEQ ID NO: 697598
uuacaaagcacccuucccu

SEQ ID NO: 697600 - RNA, 19 nt, Artificial Sequence
  Description of Artificial Sequence: Synthetic oligonucleotide
  Sense strand starting at position 245 of SEQ ID NO: 586173
ggugcuuuguaacugaaga

SEQ ID NO: 697601 - RNA, 19 nt, Artificial Sequence
  Description of Artificial Sequence: Synthetic oligonucleotide
  Antisense strand to SEQ ID NO: 697600
ucuucaguuacaaagcacc

SEQ ID NO: 697602 - RNA, 19 nt, Artificial Sequence
  Description of Artificial Sequence: Synthetic oligonucleotide
  Sense strand starting at position 246 of SEQ ID NO: 586173
gugcuuuguaacugaagau

SEQ ID NO: 697603 - RNA, 19 nt, Artificial Sequence
  Description of Artificial Sequence: Synthetic oligonucleotide
  Antisense strand to SEQ ID NO: 697602
aucuucaguuacaaagcac

SEQ ID NO: 697604 - RNA, 19 nt, Artificial Sequence
  Description of Artificial Sequence: Synthetic oligonucleotide
  Sense strand starting at position 425 of SEQ ID NO: 586173
agucgacauuaucuccauu

SEQ ID NO: 697605 - RNA, 19 nt, Artificial Sequence
  Description of Artificial Sequence: Synthetic oligonucleotide
  Antisense strand to SEQ ID NO: 697604
aauggagauaaugucgacu

SEQ ID NO: 697606 - RNA, 19 nt, Artificial Sequence
  Description of Artificial Sequence: Synthetic oligonucleotide
  Sense strand starting at position 467 of SEQ ID NO: 586173
ugauauuggcucuagguca

SEQ ID NO: 697607 - RNA, 19 nt, Artificial Sequence
  Description of Artificial Sequence: Synthetic oligonucleotide
  Antisense strand to SEQ ID NO: 697606
ugaccuagagccaauauca

SEQ ID NO: 697608 - RNA, 19 nt, Artificial Sequence
  Description of Artificial Sequence: Synthetic oligonucleotide
  Sense strand starting at position 2172 of SEQ ID NO: 586173
uccguucucuaguugaaac

SEQ ID NO: 697609 - RNA, 19 nt, Artificial Sequence
  Description of Artificial Sequence: Synthetic oligonucleotide
  Antisense strand to SEQ ID NO: 697608
guuucaacuagagaacgga

SEQ ID NO: 697610 - RNA, 19 nt, Artificial Sequence
  Description of Artificial Sequence: Synthetic oligonucleotide
  Sense strand starting at position 2246 of SEQ ID NO: 586173
ccaaacuguuagguauaaa

SEQ ID NO: 697611 - RNA, 19 nt, Artificial Sequence
  Description of Artificial Sequence: Synthetic oligonucleotide
  Antisense strand to SEQ ID NO: 697610
uuuauaccuaacaguuugg

SEQ ID NO: 697612 - RNA, 19 nt, Artificial Sequence
  Description of Artificial Sequence: Synthetic oligonucleotide
  Sense strand starting at position 2285 of SEQ ID NO: 586173
ggguuucuaaaguaguuga

SEQ ID NO: 697613 - RNA, 19 nt, Artificial Sequence
  Description of Artificial Sequence: Synthetic oligonucleotide
  Antisense strand to SEQ ID NO: 697612
ucaacuacuuuagaaaccc

SEQ ID NO: 697614 - RNA, 19 nt, Artificial Sequence
  Description of Artificial Sequence: Synthetic oligonucleotide
  Sense strand starting at position 2296 of SEQ ID NO: 586173
guaguugaggagugauaua

SEQ ID NO: 697615 - RNA, 19 nt, Artificial Sequence
  Description of Artificial Sequence: Synthetic oligonucleotide
  Antisense strand to SEQ ID NO: 697614
uauaucacuccucaacuac

SEQ ID NO: 697616 - RNA, 19 nt, Artificial Sequence
  Description of Artificial Sequence: Synthetic oligonucleotide
  Sense strand starting at position 2349 of SEQ ID NO: 586173
cuaagagcccugugaucaa

SEQ ID NO: 697617 - RNA, 19 nt, Artificial Sequence
  Description of Artificial Sequence: Synthetic oligonucleotide
  Antisense strand to SEQ ID NO: 697616
uugaucacagggcucuuag

SEQ ID NO: 697618 - RNA, 19 nt, Artificial Sequence
  Description of Artificial Sequence: Synthetic oligonucleotide
  Sense strand starting at position 2352 of SEQ ID NO: 586173
agagcccugugaucaaagu

SEQ ID NO: 697619 - RNA, 19 nt, Artificial Sequence
  Description of Artificial Sequence: Synthetic oligonucleotide
  Antisense strand to SEQ ID NO: 697618
acuuugaucacagggcucu

SEQ ID NO: 697620 - RNA, 19 nt, Artificial Sequence
  Description of Artificial Sequence: Synthetic oligonucleotide
  Sense strand starting at position 2353 of SEQ ID NO: 586173
gagcccugugaucaaagua

SEQ ID NO: 697621 - RNA, 19 nt, Artificial Sequence
  Description of Artificial Sequence: Synthetic oligonucleotide
  Antisense strand to SEQ ID NO: 697620
uacuuugaucacagggcuc

SEQ ID NO: 697622 - RNA, 19 nt, Artificial Sequence
  Description of Artificial Sequence: Synthetic oligonucleotide
  Sense strand starting at position 2448 of SEQ ID NO: 586173
gauuguaaacaaugguuau

SEQ ID NO: 697623 - RNA, 19 nt, Artificial Sequence
  Description of Artificial Sequence: Synthetic oligonucleotide
  Antisense strand to SEQ ID NO: 697622
auaaccauuguuuacaauc

SEQ ID NO: 697624 - RNA, 19 nt, Artificial Sequence
  Description of Artificial Sequence: Synthetic oligonucleotide
  Sense strand starting at position 2473 of SEQ ID NO: 586173
cauccagaguguguacauu

SEQ ID NO: 697625 - RNA, 19 nt, Artificial Sequence
  Description of Artificial Sequence: Synthetic oligonucleotide
  Antisense strand to SEQ ID NO: 697624
aauguacacacucuggaug

SEQ ID NO: 697626 - RNA, 19 nt, Artificial Sequence
  Description of Artificial Sequence: Synthetic oligonucleotide
  Sense strand starting at position 2483 of SEQ ID NO: 586173
guguacauuguugagaaca

SEQ ID NO: 697627 - RNA, 19 nt, Artificial Sequence
  Description of Artificial Sequence: Synthetic oligonucleotide
  Antisense strand to SEQ ID NO: 697626
uguucucaacaauguacac

SEQ ID NO: 697628 - RNA, 19 nt, Artificial Sequence
  Description of Artificial Sequence: Synthetic oligonucleotide
  Sense strand starting at position 2520 of SEQ ID NO: 586173
gcacuuggcauccaggaga

SEQ ID NO: 697629 - RNA, 19 nt, Artificial Sequence
  Description of Artificial Sequence: Synthetic oligonucleotide
  Antisense strand to SEQ ID NO: 697628
ucuccuggaugccaagugc

SEQ ID NO: 697630 - RNA, 19 nt, Artificial Sequence
  Description of Artificial Sequence: Synthetic oligonucleotide
  Sense strand starting at position 2541 of SEQ ID NO: 586173
gaguuaagaguauguccau

SEQ ID NO: 697631 - RNA, 19 nt, Artificial Sequence
  Description of Artificial Sequence: Synthetic oligonucleotide
  Antisense strand to SEQ ID NO: 697630
auggacauacucuuaacuc

SEQ ID NO: 697632 - RNA, 19 nt, Artificial Sequence
  Description of Artificial Sequence: Synthetic oligonucleotide
  Sense strand starting at position 2542 of SEQ ID NO: 586173
aguuaagaguauguccaua

SEQ ID NO: 697633 - RNA, 19 nt, Artificial Sequence
  Description of Artificial Sequence: Synthetic oligonucleotide
  Antisense strand to SEQ ID NO: 697632
uauggacauacucuuaacu

SEQ ID NO: 697634 - RNA, 19 nt, Artificial Sequence
  Description of Artificial Sequence: Synthetic oligonucleotide
  Sense strand starting at position 2544 of SEQ ID NO: 586173
uuaagaguauguccauaca

SEQ ID NO: 697635 - RNA, 19 nt, Artificial Sequence
  Description of Artificial Sequence: Synthetic oligonucleotide
  Antisense strand to SEQ ID NO: 697634
uguauggacauacucuuaa

SEQ ID NO: 697636 - RNA, 19 nt, Artificial Sequence
  Description of Artificial Sequence: Synthetic oligonucleotide
  Sense strand starting at position 2899 of SEQ ID NO: 586173
acgaaaguucuauagcuca

SEQ ID NO: 697637 - RNA, 19 nt, Artificial Sequence
  Description of Artificial Sequence: Synthetic oligonucleotide
  Antisense strand to SEQ ID NO: 697636
ugagcuauagaacuuucgu

SEQ ID NO: 697638 - RNA, 19 nt, Artificial Sequence
  Description of Artificial Sequence: Synthetic oligonucleotide
  Sense strand starting at position 3026 of SEQ ID NO: 586173
uggcuuuggccagaaccaa

SEQ ID NO: 697639 - RNA, 19 nt, Artificial Sequence
  Description of Artificial Sequence: Synthetic oligonucleotide
  Antisense strand to SEQ ID NO: 697638
uugguucuggccaaagcca

SEQ ID NO: 697640 - RNA, 19 nt, Artificial Sequence
  Description of Artificial Sequence: Synthetic oligonucleotide
  Sense strand starting at position 3103 of SEQ ID NO: 586173
ccuuuaaugucuuugaugu

SEQ ID NO: 697641 - RNA, 19 nt, Artificial Sequence
  Description of Artificial Sequence: Synthetic oligonucleotide
  Antisense strand to SEQ ID NO: 697640
acaucaaagacauuaaagg

SEQ ID NO: 697642 - RNA, 19 nt, Artificial Sequence
  Description of Artificial Sequence: Synthetic oligonucleotide
  Sense strand starting at position 3104 of SEQ ID NO: 586173
cuuuaaugucuuugauguu

SEQ ID NO: 697643 - RNA, 19 nt, Artificial Sequence
  Description of Artificial Sequence: Synthetic oligonucleotide
  Antisense strand to SEQ ID NO: 697642
aacaucaaagacauuaaag

SEQ ID NO: 697644 - RNA, 19 nt, Artificial Sequence
  Description of Artificial Sequence: Synthetic oligonucleotide
  Sense strand starting at position 3132 of SEQ ID NO: 586173
uccuaauuugcaugugauu

SEQ ID NO: 697645 - RNA, 19 nt, Artificial Sequence
  Description of Artificial Sequence: Synthetic oligonucleotide
  Antisense strand to SEQ ID NO: 697644
aaucacaugcaaauuagga

SEQ ID NO: 697646 - RNA, 19 nt, Artificial Sequence
  Description of Artificial Sequence: Synthetic oligonucleotide
  Sense strand starting at position 3145 of SEQ ID NO: 586173
gugauugccugugucauuu

SEQ ID NO: 697647 - RNA, 19 nt, Artificial Sequence
  Description of Artificial Sequence: Synthetic oligonucleotide
  Antisense strand to SEQ ID NO: 697646
aaaugacacaggcaaucac

SEQ ID NO: 697648 - RNA, 19 nt, Artificial Sequence
  Description of Artificial Sequence: Synthetic oligonucleotide
  Sense strand starting at position 3149 of SEQ ID NO: 586173
uugccugugucauuuguuu

SEQ ID NO: 697649 - RNA, 19 nt, Artificial Sequence
  Description of Artificial Sequence: Synthetic oligonucleotide
  Antisense strand to SEQ ID NO: 697648
aaacaaaugacacaggcaa

SEQ ID NO: 697650 - RNA, 19 nt, Artificial Sequence
  Description of Artificial Sequence: Synthetic oligonucleotide
  Sense strand starting at position 3153 of SEQ ID NO: 586173
cugugucauuuguuuggca

SEQ ID NO: 697651 - RNA, 19 nt, Artificial Sequence
  Description of Artificial Sequence: Synthetic oligonucleotide
  Antisense strand to SEQ ID NO: 697650
ugccaaacaaaugacacag

SEQ ID NO: 697652 - RNA, 19 nt, Artificial Sequence
  Description of Artificial Sequence: Synthetic oligonucleotide
  Sense strand starting at position 3157 of SEQ ID NO: 586173
gucauuuguuuggcagcuu

SEQ ID NO: 697653 - RNA, 19 nt, Artificial Sequence
  Description of Artificial Sequence: Synthetic oligonucleotide
  Antisense strand to SEQ ID NO: 697652
aagcugccaaacaaaugac

SEQ ID NO: 697654 - RNA, 19 nt, Artificial Sequence
  Description of Artificial Sequence: Synthetic oligonucleotide
  Sense strand starting at position 3286 of SEQ ID NO: 586173
ggaagaugugagcagcuuu

SEQ ID NO: 697655 - RNA, 19 nt, Artificial Sequence
  Description of Artificial Sequence: Synthetic oligonucleotide
  Antisense strand to SEQ ID NO: 697654
aaagcugcucacaucuucc

SEQ ID NO: 697656 - RNA, 19 nt, Artificial Sequence
  Description of Artificial Sequence: Synthetic oligonucleotide
  Sense strand starting at position 3529 of SEQ ID NO: 586173
ggccgagacuucucccuaa

SEQ ID NO: 697657 - RNA, 19 nt, Artificial Sequence
  Description of Artificial Sequence: Synthetic oligonucleotide
  Antisense strand to SEQ ID NO: 697656
uuagggagaagucucggcc

SEQ ID NO: 697658 - RNA, 19 nt, Artificial Sequence
  Description of Artificial Sequence: Synthetic oligonucleotide
  Sense strand starting at position 3786 of SEQ ID NO: 586173
uugggugugauugacaagu

SEQ ID NO: 697659 - RNA, 19 nt, Artificial Sequence
  Description of Artificial Sequence: Synthetic oligonucleotide
  Antisense strand to SEQ ID NO: 697658
acuugucaaucacacccaa

SEQ ID NO: 697660 - RNA, 19 nt, Artificial Sequence
  Description of Artificial Sequence: Synthetic oligonucleotide
  Sense strand starting at position 3830 of SEQ ID NO: 586173
gguccugauguuggugaca

SEQ ID NO: 697661 - RNA, 19 nt, Artificial Sequence
  Description of Artificial Sequence: Synthetic oligonucleotide
  Antisense strand to SEQ ID NO: 697660
ugucaccaacaucaggacc

SEQ ID NO: 697662 - RNA, 19 nt, Artificial Sequence
  Description of Artificial Sequence: Synthetic oligonucleotide
  Sense strand starting at position 3841 of SEQ ID NO: 586173
uggugacaucucuaucguu

SEQ ID NO: 697663 - RNA, 19 nt, Artificial Sequence
  Description of Artificial Sequence: Synthetic oligonucleotide
  Antisense strand to SEQ ID NO: 697662
aacgauagagaugucacca

SEQ ID NO: 697664 - RNA, 19 nt, Artificial Sequence
  Description of Artificial Sequence: Synthetic oligonucleotide
  Sense strand starting at position 3874 of SEQ ID NO: 586173
gcugaugaauuccuagaaa

SEQ ID NO: 697665 - RNA, 19 nt, Artificial Sequence
  Description of Artificial Sequence: Synthetic oligonucleotide
  Antisense strand to SEQ ID NO: 697664
uuucuaggaauucaucagc

SEQ ID NO: 697666 - RNA, 19 nt, Artificial Sequence
  Description of Artificial Sequence: Synthetic oligonucleotide
  Sense strand starting at position 309 of SEQ ID NO: 586174
agggaaaguuuggcaugaa

SEQ ID NO: 697667 - RNA, 19 nt, Artificial Sequence
  Description of Artificial Sequence: Synthetic oligonucleotide
  Antisense strand to SEQ ID NO: 697666
uucaugccaaacuuucccu

SEQ ID NO: 697668 - RNA, 19 nt, Artificial Sequence
  Description of Artificial Sequence: Synthetic oligonucleotide
  Sense strand starting at position 312 of SEQ ID NO: 586174
gaaaguuuggcaugaacua

SEQ ID NO: 697669 - RNA, 19 nt, Artificial Sequence
  Description of Artificial Sequence: Synthetic oligonucleotide
  Antisense strand to SEQ ID NO: 697668
uaguucaugccaaacuuuc

SEQ ID NO: 697670 - RNA, 19 nt, Artificial Sequence
  Description of Artificial Sequence: Synthetic oligonucleotide
  Sense strand starting at position 565 of SEQ ID NO: 586174
ccugauuucuugggauuac

SEQ ID NO: 697671 - RNA, 19 nt, Artificial Sequence
  Description of Artificial Sequence: Synthetic oligonucleotide
  Antisense strand to SEQ ID NO: 697670
guaaucccaagaaaucagg

SEQ ID NO: 697672 - RNA, 19 nt, Artificial Sequence
  Description of Artificial Sequence: Synthetic oligonucleotide
  Sense strand starting at position 566 of SEQ ID NO: 586174
cugauuucuugggauuaca

SEQ ID NO: 697673 - RNA, 19 nt, Artificial Sequence
  Description of Artificial Sequence: Synthetic oligonucleotide
  Antisense strand to SEQ ID NO: 697672
uguaaucccaagaaaucag

SEQ ID NO: 697674 - RNA, 19 nt, Artificial Sequence
  Description of Artificial Sequence: Synthetic oligonucleotide
  Sense strand starting at position 737 of SEQ ID NO: 586174
ccagacucauucguuuauu

SEQ ID NO: 697675 - RNA, 19 nt, Artificial Sequence
  Description of Artificial Sequence: Synthetic oligonucleotide
  Antisense strand to SEQ ID NO: 697674
aauaaacgaaugagucugg

SEQ ID NO: 697676 - RNA, 19 nt, Artificial Sequence
  Description of Artificial Sequence: Synthetic oligonucleotide
  Sense strand starting at position 793 of SEQ ID NO: 586174
gccagucacuggguuagau

SEQ ID NO: 697677 - RNA, 19 nt, Artificial Sequence
  Description of Artificial Sequence: Synthetic oligonucleotide
  Antisense strand to SEQ ID NO: 697676
aucuaacccagugacuggc

SEQ ID NO: 697678 - RNA, 19 nt, Artificial Sequence
  Description of Artificial Sequence: Synthetic oligonucleotide
  Sense strand starting at position 879 of SEQ ID NO: 586174
augauaacuugggucacuu

SEQ ID NO: 697679 - RNA, 19 nt, Artificial Sequence
  Description of Artificial Sequence: Synthetic oligonucleotide
  Antisense strand to SEQ ID NO: 697678
aagugacccaaguuaucau

SEQ ID NO: 697680 - RNA, 19 nt, Artificial Sequence
  Description of Artificial Sequence: Synthetic oligonucleotide
  Sense strand starting at position 1011 of SEQ ID NO: 586174
gaaacaggugagugguuua

SEQ ID NO: 697681 - RNA, 19 nt, Artificial Sequence
  Description of Artificial Sequence: Synthetic oligonucleotide
  Antisense strand to SEQ ID NO: 697680
uaaaccacucaccuguuuc

SEQ ID NO: 697682 - RNA, 19 nt, Artificial Sequence
  Description of Artificial Sequence: Synthetic oligonucleotide
  Sense strand starting at position 1016 of SEQ ID NO: 586174
aggugagugguuuauuccu

SEQ ID NO: 697683 - RNA, 19 nt, Artificial Sequence
  Description of Artificial Sequence: Synthetic oligonucleotide
  Antisense strand to SEQ ID NO: 697682
aggaauaaaccacucaccu

SEQ ID NO: 697684 - RNA, 19 nt, Artificial Sequence
  Description of Artificial Sequence: Synthetic oligonucleotide
  Sense strand starting at position 1018 of SEQ ID NO: 586174
gugagugguuuauuccuga

SEQ ID NO: 697685 - RNA, 19 nt, Artificial Sequence
  Description of Artificial Sequence: Synthetic oligonucleotide
  Antisense strand to SEQ ID NO: 697684
ucaggaauaaaccacucac

SEQ ID NO: 697686 - RNA, 19 nt, Artificial Sequence
  Description of Artificial Sequence: Synthetic oligonucleotide
  Sense strand starting at position 1021 of SEQ ID NO: 586174
agugguuuauuccugagac

SEQ ID NO: 697687 - RNA, 19 nt, Artificial Sequence
  Description of Artificial Sequence: Synthetic oligonucleotide
  Antisense strand to SEQ ID NO: 697686
gucucaggaauaaaccacu

SEQ ID NO: 697688 - RNA, 19 nt, Artificial Sequence
  Description of Artificial Sequence: Synthetic oligonucleotide
  Sense strand starting at position 1023 of SEQ ID NO: 586174
ugguuuauuccugagacuu

SEQ ID NO: 697689 - RNA, 19 nt, Artificial Sequence
  Description of Artificial Sequence: Synthetic oligonucleotide
  Antisense strand to SEQ ID NO: 697688
aagucucaggaauaaacca

SEQ ID NO: 697690 - RNA, 19 nt, Artificial Sequence
  Description of Artificial Sequence: Synthetic oligonucleotide
  Sense strand starting at position 1080 of SEQ ID NO: 586174
ggaggcugguauccuuaau

SEQ ID NO: 697691 - RNA, 19 nt, Artificial Sequence
  Description of Artificial Sequence: Synthetic oligonucleotide
  Antisense strand to SEQ ID NO: 697690
auuaaggauaccagccucc

SEQ ID NO: 697692 - RNA, 19 nt, Artificial Sequence
  Description of Artificial Sequence: Synthetic oligonucleotide
  Sense strand starting at position 1211 of SEQ ID NO: 586174
cgacauuucugccuacugu

SEQ ID NO: 697693 - RNA, 19 nt, Artificial Sequence
  Description of Artificial Sequence: Synthetic oligonucleotide
  Antisense strand to SEQ ID NO: 697692
acaguaggcagaaaugucg

SEQ ID NO: 697694 - RNA, 19 nt, Artificial Sequence
  Description of Artificial Sequence: Synthetic oligonucleotide
  Sense strand starting at position 1221 of SEQ ID NO: 586174
gccuacugugcucaagacu

SEQ ID NO: 697695 - RNA, 19 nt, Artificial Sequence
  Description of Artificial Sequence: Synthetic oligonucleotide
  Antisense strand to SEQ ID NO: 697694
agucuugagcacaguaggc

SEQ ID NO: 697696 - RNA, 19 nt, Artificial Sequence
  Description of Artificial Sequence: Synthetic oligonucleotide
  Sense strand starting at position 1301 of SEQ ID NO: 586174
ggcagaaaggguugagauu

SEQ ID NO: 697697 - RNA, 19 nt, Artificial Sequence
  Description of Artificial Sequence: Synthetic oligonucleotide
  Antisense strand to SEQ ID NO: 697696
aaucucaacccuuucugcc

SEQ ID NO: 697698 - RNA, 19 nt, Artificial Sequence
  Description of Artificial Sequence: Synthetic oligonucleotide
  Sense strand starting at position 1310 of SEQ ID NO: 586174
gguugagauuggguucaaa

SEQ ID NO: 697699 - RNA, 19 nt, Artificial Sequence
  Description of Artificial Sequence: Synthetic oligonucleotide
  Antisense strand to SEQ ID NO: 697698
uuugaacccaaucucaacc

SEQ ID NO: 697700 - RNA, 19 nt, Artificial Sequence
  Description of Artificial Sequence: Synthetic oligonucleotide
  Sense strand starting at position 2238 of SEQ ID NO: 586174
cgcaguuacucaucucaag

SEQ ID NO: 697701 - RNA, 19 nt, Artificial Sequence
  Description of Artificial Sequence: Synthetic oligonucleotide
  Antisense strand to SEQ ID NO: 697700
cuugagaugaguaacugcg

SEQ ID NO: 697702 - RNA, 19 nt, Artificial Sequence
  Description of Artificial Sequence: Synthetic oligonucleotide
  Sense strand starting at position 2281 of SEQ ID NO: 586174
uauguauguguguaacuau

SEQ ID NO: 697703 - RNA, 19 nt, Artificial Sequence
  Description of Artificial Sequence: Synthetic oligonucleotide
  Antisense strand to SEQ ID NO: 697702
auaguuacacacauacaua

SEQ ID NO: 697704 - RNA, 19 nt, Artificial Sequence
  Description of Artificial Sequence: Synthetic oligonucleotide
  Sense strand starting at position 2356 of SEQ ID NO: 586174
ugaugauacugccuaguga

SEQ ID NO: 697705 - RNA, 19 nt, Artificial Sequence
  Description of Artificial Sequence: Synthetic oligonucleotide
  Antisense strand to SEQ ID NO: 697704
ucacuaggcaguaucauca

SEQ ID NO: 697706 - RNA, 19 nt, Artificial Sequence
  Description of Artificial Sequence: Synthetic oligonucleotide
  Sense strand starting at position 2399 of SEQ ID NO: 586174
acuacaaagcuguguguua

SEQ ID NO: 697707 - RNA, 19 nt, Artificial Sequence
  Description of Artificial Sequence: Synthetic oligonucleotide
  Antisense strand to SEQ ID NO: 697706
uaacacacagcuuuguagu

SEQ ID NO: 697708 - RNA, 19 nt, Artificial Sequence
  Description of Artificial Sequence: Synthetic oligonucleotide
  Sense strand starting at position 2400 of SEQ ID NO: 586174
cuacaaagcuguguguuaa

SEQ ID NO: 697709 - RNA, 19 nt, Artificial Sequence
  Description of Artificial Sequence: Synthetic oligonucleotide
  Antisense strand to SEQ ID NO: 697708
uuaacacacagcuuuguag

SEQ ID NO: 697710 - RNA, 19 nt, Artificial Sequence
  Description of Artificial Sequence: Synthetic oligonucleotide
  Sense strand starting at position 2410 of SEQ ID NO: 586174
guguguuaaugguuagaau

SEQ ID NO: 697711 - RNA, 19 nt, Artificial Sequence
  Description of Artificial Sequence: Synthetic oligonucleotide
  Antisense strand to SEQ ID NO: 697710
auucuaaccauuaacacac

SEQ ID NO: 697712 - RNA, 19 nt, Artificial Sequence
  Description of Artificial Sequence: Synthetic oligonucleotide
  Sense strand starting at position 2411 of SEQ ID NO: 586174
uguguuaaugguuagaaug

SEQ ID NO: 697713 - RNA, 19 nt, Artificial Sequence
  Description of Artificial Sequence: Synthetic oligonucleotide
  Antisense strand to SEQ ID NO: 697712
cauucuaaccauuaacaca

SEQ ID NO: 697714 - RNA, 19 nt, Artificial Sequence
  Description of Artificial Sequence: Synthetic oligonucleotide
  Sense strand starting at position 2446 of SEQ ID NO: 586174
gcacacauccaugguaacu

SEQ ID NO: 697715 - RNA, 19 nt, Artificial Sequence
  Description of Artificial Sequence: Synthetic oligonucleotide
  Antisense strand to SEQ ID NO: 697714
aguuaccauggaugugugc

SEQ ID NO: 697716 - RNA, 19 nt, Artificial Sequence
  Description of Artificial Sequence: Synthetic oligonucleotide
  Sense strand starting at position 2568 of SEQ ID NO: 586174
aggacaagacgguguucua

SEQ ID NO: 697717 - RNA, 19 nt, Artificial Sequence
  Description of Artificial Sequence: Synthetic oligonucleotide
  Antisense strand to SEQ ID NO: 697716
uagaacaccgucuuguccu

SEQ ID NO: 697718 - RNA, 19 nt, Artificial Sequence
  Description of Artificial Sequence: Synthetic oligonucleotide
  Sense strand starting at position 2577 of SEQ ID NO: 586174
cgguguucuaggcagagga

SEQ ID NO: 697719 - RNA, 19 nt, Artificial Sequence
  Description of Artificial Sequence: Synthetic oligonucleotide
  Antisense strand to SEQ ID NO: 697718
uccucugccuagaacaccg

SEQ ID NO: 697720 - RNA, 19 nt, Artificial Sequence
  Description of Artificial Sequence: Synthetic oligonucleotide
  Sense strand starting at position 3040 of SEQ ID NO: 586174
gggcuuacucaggaguuca

SEQ ID NO: 697721 - RNA, 19 nt, Artificial Sequence
  Description of Artificial Sequence: Synthetic oligonucleotide
  Antisense strand to SEQ ID NO: 697720
ugaacuccugaguaagccc

SEQ ID NO: 697722 - RNA, 19 nt, Artificial Sequence
  Description of Artificial Sequence: Synthetic oligonucleotide
  Sense strand starting at position 3465 of SEQ ID NO: 586174
aguuauccugaggacaguu

SEQ ID NO: 697723 - RNA, 19 nt, Artificial Sequence
  Description of Artificial Sequence: Synthetic oligonucleotide
  Antisense strand to SEQ ID NO: 697722
aacuguccucaggauaacu

SEQ ID NO: 697724 - RNA, 19 nt, Artificial Sequence
  Description of Artificial Sequence: Synthetic oligonucleotide
  Sense strand starting at position 3473 of SEQ ID NO: 586174
ugaggacaguuauccugaa

SEQ ID NO: 697725 - RNA, 19 nt, Artificial Sequence
  Description of Artificial Sequence: Synthetic oligonucleotide
  Antisense strand to SEQ ID NO: 697724
uucaggauaacuguccuca

SEQ ID NO: 697726 - RNA, 19 nt, Artificial Sequence
  Description of Artificial Sequence: Synthetic oligonucleotide
  Sense strand starting at position 3477 of SEQ ID NO: 586174
gacaguuauccugaagcug

SEQ ID NO: 697727 - RNA, 19 nt, Artificial Sequence
  Description of Artificial Sequence: Synthetic oligonucleotide
  Antisense strand to SEQ ID NO: 697726
cagcuucaggauaacuguc

SEQ ID NO: 697728 - RNA, 19 nt, Artificial Sequence
  Description of Artificial Sequence: Synthetic oligonucleotide
  Sense strand starting at position 3507 of SEQ ID NO: 586174
caaguaagagagugcuauc

SEQ ID NO: 697729 - RNA, 19 nt, Artificial Sequence
  Description of Artificial Sequence: Synthetic oligonucleotide
  Antisense strand to SEQ ID NO: 697728
gauagcacucucuuacuug

SEQ ID NO: 697730 - RNA, 19 nt, Artificial Sequence
  Description of Artificial Sequence: Synthetic oligonucleotide
  Sense strand starting at position 3516 of SEQ ID NO: 586174
gagugcuaucgccaaacuu

SEQ ID NO: 697731 - RNA, 19 nt, Artificial Sequence
  Description of Artificial Sequence: Synthetic oligonucleotide
  Antisense strand to SEQ ID NO: 697730
aaguuuggcgauagcacuc

SEQ ID NO: 697732 - RNA, 19 nt, Artificial Sequence
  Description of Artificial Sequence: Synthetic oligonucleotide
  Sense strand starting at position 3636 of SEQ ID NO: 586174
ccaggacucagguggugau

SEQ ID NO: 697733 - RNA, 19 nt, Artificial Sequence
  Description of Artificial Sequence: Synthetic oligonucleotide
  Antisense strand to SEQ ID NO: 697732
aucaccaccugaguccugg

SEQ ID NO: 697734 - RNA, 19 nt, Artificial Sequence
  Description of Artificial Sequence: Synthetic oligonucleotide
  Sense strand starting at position 3637 of SEQ ID NO: 586174
caggacucagguggugaua

SEQ ID NO: 697735 - RNA, 19 nt, Artificial Sequence
  Description of Artificial Sequence: Synthetic oligonucleotide
  Antisense strand to SEQ ID NO: 697734
uaucaccaccugaguccug

SEQ ID NO: 697736 - RNA, 19 nt, Artificial Sequence
  Description of Artificial Sequence: Synthetic oligonucleotide
  Sense strand starting at position 3673 of SEQ ID NO: 586174
guagguagagccgagagau

SEQ ID NO: 697737 - RNA, 19 nt, Artificial Sequence
  Description of Artificial Sequence: Synthetic oligonucleotide
  Antisense strand to SEQ ID NO: 697736
aucucucggcucuaccuac

SEQ ID NO: 697738 - RNA, 19 nt, Artificial Sequence
  Description of Artificial Sequence: Synthetic oligonucleotide
  Sense strand starting at position 3713 of SEQ ID NO: 586174
cugguuucagaguggaugu

SEQ ID NO: 697739 - RNA, 19 nt, Artificial Sequence
  Description of Artificial Sequence: Synthetic oligonucleotide
  Antisense strand to SEQ ID NO: 697738
acauccacucugaaaccag

SEQ ID NO: 697740 - RNA, 19 nt, Artificial Sequence
  Description of Artificial Sequence: Synthetic oligonucleotide
  Sense strand starting at position 3802 of SEQ ID NO: 586174
ggaguaacauugccaagaa

SEQ ID NO: 697741 - RNA, 19 nt, Artificial Sequence
  Description of Artificial Sequence: Synthetic oligonucleotide
  Antisense strand to SEQ ID NO: 697740
uucuuggcaauguuacucc

SEQ ID NO: 697742 - RNA, 19 nt, Artificial Sequence
  Description of Artificial Sequence: Synthetic oligonucleotide
  Sense strand starting at position 3818 of SEQ ID NO: 586174
gaaagugaccucuguaaga

SEQ ID NO: 697743 - RNA, 19 nt, Artificial Sequence
  Description of Artificial Sequence: Synthetic oligonucleotide
  Antisense strand to SEQ ID NO: 697742
ucuuacagaggucacuuuc

SEQ ID NO: 697744 - RNA, 19 nt, Artificial Sequence
  Description of Artificial Sequence: Synthetic oligonucleotide
  Sense strand starting at position 3969 of SEQ ID NO: 586174
gugugauaagcuugggauu

SEQ ID NO: 697745 - RNA, 19 nt, Artificial Sequence
  Description of Artificial Sequence: Synthetic oligonucleotide
  Antisense strand to SEQ ID NO: 697744
aaucccaagcuuaucacac

SEQ ID NO: 697746 - RNA, 19 nt, Artificial Sequence
  Description of Artificial Sequence: Synthetic oligonucleotide
  Sense strand starting at position 2 of SEQ ID NO: 586175
ucccaaagugcuuaauuag

SEQ ID NO: 697747 - RNA, 19 nt, Artificial Sequence
  Description of Artificial Sequence: Synthetic oligonucleotide
  Antisense strand to SEQ ID NO: 697746
cuaauuaagcacuuuggga

SEQ ID NO: 697748 - RNA, 19 nt, Artificial Sequence
  Description of Artificial Sequence: Synthetic oligonucleotide
  Sense strand starting at position 8 of SEQ ID NO: 586175
agugcuuaauuagcagaaa

SEQ ID NO: 697749 - RNA, 19 nt, Artificial Sequence
  Description of Artificial Sequence: Synthetic oligonucleotide
  Antisense strand to SEQ ID NO: 697748
uuucugcuaauuaagcacu

SEQ ID NO: 697750 - RNA, 19 nt, Artificial Sequence
  Description of Artificial Sequence: Synthetic oligonucleotide
  Sense strand starting at position 11 of SEQ ID NO: 586175
gcuuaauuagcagaaacau

SEQ ID NO: 697751 - RNA, 19 nt, Artificial Sequence
  Description of Artificial Sequence: Synthetic oligonucleotide
  Antisense strand to SEQ ID NO: 697750
auguuucugcuaauuaagc

SEQ ID NO: 697752 - RNA, 19 nt, Artificial Sequence
  Description of Artificial Sequence: Synthetic oligonucleotide
  Sense strand starting at position 36 of SEQ ID NO: 586175
agggaacuguccuugaaua

SEQ ID NO: 697753 - RNA, 19 nt, Artificial Sequence
  Description of Artificial Sequence: Synthetic oligonucleotide
  Antisense strand to SEQ ID NO: 697752
uauucaaggacaguucccu

SEQ ID NO: 697754 - RNA, 19 nt, Artificial Sequence
  Description of Artificial Sequence: Synthetic oligonucleotide
  Sense strand starting at position 37 of SEQ ID NO: 586175
gggaacuguccuugaauau

SEQ ID NO: 697755 - RNA, 19 nt, Artificial Sequence
  Description of Artificial Sequence: Synthetic oligonucleotide
  Antisense strand to SEQ ID NO: 697754
auauucaaggacaguuccc

SEQ ID NO: 697756 - RNA, 19 nt, Artificial Sequence
  Description of Artificial Sequence: Synthetic oligonucleotide
  Sense strand starting at position 47 of SEQ ID NO: 586175
cuugaauauguacgcauuu

SEQ ID NO: 697757 - RNA, 19 nt, Artificial Sequence
  Description of Artificial Sequence: Synthetic oligonucleotide
  Antisense strand to SEQ ID NO: 697756
aaaugcguacauauucaag

SEQ ID NO: 697758 - RNA, 19 nt, Artificial Sequence
  Description of Artificial Sequence: Synthetic oligonucleotide
  Sense strand starting at position 288 of SEQ ID NO: 586175
gcaccuauggccuacuuau

SEQ ID NO: 697759 - RNA, 19 nt, Artificial Sequence
  Description of Artificial Sequence: Synthetic oligonucleotide
  Antisense strand to SEQ ID NO: 697758
auaaguaggccauaggugc

SEQ ID NO: 697760 - RNA, 19 nt, Artificial Sequence
  Description of Artificial Sequence: Synthetic oligonucleotide
  Sense strand starting at position 373 of SEQ ID NO: 586175
agccaauuauguuuauaag

SEQ ID NO: 697761 - RNA, 19 nt, Artificial Sequence
  Description of Artificial Sequence: Synthetic oligonucleotide
  Antisense strand to SEQ ID NO: 697760
cuuauaaacauaauuggcu

SEQ ID NO: 697762 - RNA, 19 nt, Artificial Sequence
  Description of Artificial Sequence: Synthetic oligonucleotide
  Sense strand starting at position 374 of SEQ ID NO: 586175
gccaauuauguuuauaaga

SEQ ID NO: 697763 - RNA, 19 nt, Artificial Sequence
  Description of Artificial Sequence: Synthetic oligonucleotide
  Antisense strand to SEQ ID NO: 697762
ucuuauaaacauaauuggc

SEQ ID NO: 697764 - RNA, 19 nt, Artificial Sequence
  Description of Artificial Sequence: Synthetic oligonucleotide
  Sense strand starting at position 390 of SEQ ID NO: 586175
agacaucaguuagugaauc

SEQ ID NO: 697765 - RNA, 19 nt, Artificial Sequence
  Description of Artificial Sequence: Synthetic oligonucleotide
  Antisense strand to SEQ ID NO: 697764
gauucacuaacugaugucu

SEQ ID NO: 697766 - RNA, 19 nt, Artificial Sequence
  Description of Artificial Sequence: Synthetic oligonucleotide
  Sense strand starting at position 427 of SEQ ID NO: 586175
ccuauuugcuuagcagcaa

SEQ ID NO: 697767 - RNA, 19 nt, Artificial Sequence
  Description of Artificial Sequence: Synthetic oligonucleotide
  Antisense strand to SEQ ID NO: 697766
uugcugcuaagcaaauagg

SEQ ID NO: 697768 - RNA, 19 nt, Artificial Sequence
  Description of Artificial Sequence: Synthetic oligonucleotide
  Sense strand starting at position 522 of SEQ ID NO: 586175
augauuuauuuaugacgac

SEQ ID NO: 697769 - RNA, 19 nt, Artificial Sequence
  Description of Artificial Sequence: Synthetic oligonucleotide
  Antisense strand to SEQ ID NO: 697768
gucgucauaaauaaaucau

SEQ ID NO: 697770 - RNA, 19 nt, Artificial Sequence
  Description of Artificial Sequence: Synthetic oligonucleotide
  Sense strand starting at position 525 of SEQ ID NO: 586175
auuuauuuaugacgaccau

SEQ ID NO: 697771 - RNA, 19 nt, Artificial Sequence
  Description of Artificial Sequence: Synthetic oligonucleotide
  Antisense strand to SEQ ID NO: 697770
auggucgucauaaauaaau

SEQ ID NO: 697772 - RNA, 19 nt, Artificial Sequence
  Description of Artificial Sequence: Synthetic oligonucleotide
  Sense strand starting at position 591 of SEQ ID NO: 586175
cuuggucugggaugaccua

SEQ ID NO: 697773 - RNA, 19 nt, Artificial Sequence
  Description of Artificial Sequence: Synthetic oligonucleotide
  Antisense strand to SEQ ID NO: 697772
uaggucaucccagaccaag

SEQ ID NO: 697774 - RNA, 19 nt, Artificial Sequence
  Description of Artificial Sequence: Synthetic oligonucleotide
  Sense strand starting at position 767 of SEQ ID NO: 586175
agguuugccauguacaaug

SEQ ID NO: 697775 - RNA, 19 nt, Artificial Sequence
  Description of Artificial Sequence: Synthetic oligonucleotide
  Antisense strand to SEQ ID NO: 697774
cauuguacauggcaaaccu

SEQ ID NO: 697776 - RNA, 19 nt, Artificial Sequence
  Description of Artificial Sequence: Synthetic oligonucleotide
  Sense strand starting at position 789 of SEQ ID NO: 586175
uucaguggugaguggagaa

SEQ ID NO: 697777 - RNA, 19 nt, Artificial Sequence
  Description of Artificial Sequence: Synthetic oligonucleotide
  Antisense strand to SEQ ID NO: 697776
uucuccacucaccacugaa

SEQ ID NO: 697778 - RNA, 19 nt, Artificial Sequence
  Description of Artificial Sequence: Synthetic oligonucleotide
  Sense strand starting at position 940 of SEQ ID NO: 586175
ugaugcucccaaggagaau

SEQ ID NO: 697779 - RNA, 19 nt, Artificial Sequence
  Description of Artificial Sequence: Synthetic oligonucleotide
  Antisense strand to SEQ ID NO: 697778
auucuccuugggagcauca

SEQ ID NO: 697780 - RNA, 19 nt, Artificial Sequence
  Description of Artificial Sequence: Synthetic oligonucleotide
  Sense strand starting at position 957 of SEQ ID NO: 586175
auggcagauaugcaucaga

SEQ ID NO: 697781 - RNA, 19 nt, Artificial Sequence
  Description of Artificial Sequence: Synthetic oligonucleotide
  Antisense strand to SEQ ID NO: 697780
ucugaugcauaucugccau

SEQ ID NO: 697782 - RNA, 19 nt, Artificial Sequence
  Description of Artificial Sequence: Synthetic oligonucleotide
  Sense strand starting at position 996 of SEQ ID NO: 586175
acugaagugcaguaaacuu

SEQ ID NO: 697783 - RNA, 19 nt, Artificial Sequence
  Description of Artificial Sequence: Synthetic oligonucleotide
  Antisense strand to SEQ ID NO: 697782
aaguuuacugcacuucagu

SEQ ID NO: 697784 - RNA, 19 nt, Artificial Sequence
  Description of Artificial Sequence: Synthetic oligonucleotide
  Sense strand starting at position 1164 of SEQ ID NO: 586175
uucgaaauccugugaagau

SEQ ID NO: 697785 - RNA, 19 nt, Artificial Sequence
  Description of Artificial Sequence: Synthetic oligonucleotide
  Antisense strand to SEQ ID NO: 697784
aucuucacaggauuucgaa

SEQ ID NO: 697786 - RNA, 19 nt, Artificial Sequence
  Description of Artificial Sequence: Synthetic oligonucleotide
  Sense strand starting at position 1383 of SEQ ID NO: 586175
uugcaaacagaucgauaua

SEQ ID NO: 697787 - RNA, 19 nt, Artificial Sequence
  Description of Artificial Sequence: Synthetic oligonucleotide
  Antisense strand to SEQ ID NO: 697786
uauaucgaucuguuugcaa

SEQ ID NO: 697788 - RNA, 19 nt, Artificial Sequence
  Description of Artificial Sequence: Synthetic oligonucleotide
  Sense strand starting at position 1737 of SEQ ID NO: 586175
ggugaauggaaagguuaca

SEQ ID NO: 697789 - RNA, 19 nt, Artificial Sequence
  Description of Artificial Sequence: Synthetic oligonucleotide
  Antisense strand to SEQ ID NO: 697788
uguaaccuuuccauucacc

SEQ ID NO: 697790 - RNA, 19 nt, Artificial Sequence
  Description of Artificial Sequence: Synthetic oligonucleotide
  Sense strand starting at position 1865 of SEQ ID NO: 586175
gcacuuugcgauccagugu

SEQ ID NO: 697791 - RNA, 19 nt, Artificial Sequence
  Description of Artificial Sequence: Synthetic oligonucleotide
  Antisense strand to SEQ ID NO: 697790
acacuggaucgcaaagugc

SEQ ID NO: 697792 - RNA, 19 nt, Artificial Sequence
  Description of Artificial Sequence: Synthetic oligonucleotide
  Sense strand starting at position 1988 of SEQ ID NO: 586175
gacauugaguguucugaaa

SEQ ID NO: 697793 - RNA, 19 nt, Artificial Sequence
  Description of Artificial Sequence: Synthetic oligonucleotide
  Antisense strand to SEQ ID NO: 697792
uuucagaacacucaauguc

SEQ ID NO: 697794 - RNA, 19 nt, Artificial Sequence
  Description of Artificial Sequence: Synthetic oligonucleotide
  Sense strand starting at position 2347 of SEQ ID NO: 586175
guggucuuucccgcagagu

SEQ ID NO: 697795 - RNA, 19 nt, Artificial Sequence
  Description of Artificial Sequence: Synthetic oligonucleotide
  Antisense strand to SEQ ID NO: 697794
acucugcgggaaagaccac

SEQ ID NO: 697796 - RNA, 19 nt, Artificial Sequence
  Description of Artificial Sequence: Synthetic oligonucleotide
  Sense strand starting at position 2936 of SEQ ID NO: 586175
gcaaccuuuggccaggaau

SEQ ID NO: 697797 - RNA, 19 nt, Artificial Sequence
  Description of Artificial Sequence: Synthetic oligonucleotide
  Antisense strand to SEQ ID NO: 697796
auuccuggccaaagguugc

SEQ ID NO: 697798 - RNA, 19 nt, Artificial Sequence
  Description of Artificial Sequence: Synthetic oligonucleotide
  Sense strand starting at position 2989 of SEQ ID NO: 586175
gcucuagccagcuagaaag

SEQ ID NO: 697799 - RNA, 19 nt, Artificial Sequence
  Description of Artificial Sequence: Synthetic oligonucleotide
  Antisense strand to SEQ ID NO: 697798
cuuucuagcuggcuagagc

SEQ ID NO: 697800 - RNA, 19 nt, Artificial Sequence
  Description of Artificial Sequence: Synthetic oligonucleotide
  Sense strand starting at position 3011 of SEQ ID NO: 586175
gcgcuagauuuccucugga

SEQ ID NO: 697801 - RNA, 19 nt, Artificial Sequence
  Description of Artificial Sequence: Synthetic oligonucleotide
  Antisense strand to SEQ ID NO: 697800
uccagaggaaaucuagcgc

SEQ ID NO: 697802 - RNA, 19 nt, Artificial Sequence
  Description of Artificial Sequence: Synthetic oligonucleotide
  Sense strand starting at position 3373 of SEQ ID NO: 586175
cggauuugccuuuaguugu

SEQ ID NO: 697803 - RNA, 19 nt, Artificial Sequence
  Description of Artificial Sequence: Synthetic oligonucleotide
  Antisense strand to SEQ ID NO: 697802
acaacuaaaggcaaauccg

SEQ ID NO: 697804 - RNA, 19 nt, Artificial Sequence
  Description of Artificial Sequence: Synthetic oligonucleotide
  Sense strand starting at position 3384 of SEQ ID NO: 586175
uuaguugugauguuugugu

SEQ ID NO: 697805 - RNA, 19 nt, Artificial Sequence
  Description of Artificial Sequence: Synthetic oligonucleotide
  Antisense strand to SEQ ID NO: 697804
acacaaacaucacaacuaa

SEQ ID NO: 697806 - RNA, 19 nt, Artificial Sequence
  Description of Artificial Sequence: Synthetic oligonucleotide
  Sense strand starting at position 3399 of SEQ ID NO: 586175
gugugagucggcuuguuug

SEQ ID NO: 697807 - RNA, 19 nt, Artificial Sequence
  Description of Artificial Sequence: Synthetic oligonucleotide
  Antisense strand to SEQ ID NO: 697806
caaacaagccgacucacac

SEQ ID NO: 697808 - RNA, 19 nt, Artificial Sequence
  Description of Artificial Sequence: Synthetic oligonucleotide
  Sense strand starting at position 3490 of SEQ ID NO: 586175
ggugaagaauucccauugu

SEQ ID NO: 697809 - RNA, 19 nt, Artificial Sequence
  Description of Artificial Sequence: Synthetic oligonucleotide
  Antisense strand to SEQ ID NO: 697808
acaaugggaauucuucacc

SEQ ID NO: 697810 - RNA, 19 nt, Artificial Sequence
  Description of Artificial Sequence: Synthetic oligonucleotide
  Sense strand starting at position 3713 of SEQ ID NO: 586175
ucugguggucucuggaaga

SEQ ID NO: 697811 - RNA, 19 nt, Artificial Sequence
  Description of Artificial Sequence: Synthetic oligonucleotide
  Antisense strand to SEQ ID NO: 697810
ucuuccagagaccaccaga

SEQ ID NO: 697812 - RNA, 19 nt, Artificial Sequence
  Description of Artificial Sequence: Synthetic oligonucleotide
  Sense strand starting at position 3736 of SEQ ID NO: 586175
aguugugaaacuuaccgau

SEQ ID NO: 697813 - RNA, 19 nt, Artificial Sequence
  Description of Artificial Sequence: Synthetic oligonucleotide
  Antisense strand to SEQ ID NO: 697812
aucgguaaguuucacaacu

SEQ ID NO: 697814 - RNA, 19 nt, Artificial Sequence
  Description of Artificial Sequence: Synthetic oligonucleotide
  Sense strand starting at position 3738 of SEQ ID NO: 586175
uugugaaacuuaccgauuc

SEQ ID NO: 697815 - RNA, 19 nt, Artificial Sequence
  Description of Artificial Sequence: Synthetic oligonucleotide
  Antisense strand to SEQ ID NO: 697814
gaaucgguaaguuucacaa

SEQ ID NO: 697816 - RNA, 19 nt, Artificial Sequence
  Description of Artificial Sequence: Synthetic oligonucleotide
  Sense strand starting at position 3746 of SEQ ID NO: 586175
cuuaccgauuccuugggaa

SEQ ID NO: 697817 - RNA, 19 nt, Artificial Sequence
  Description of Artificial Sequence: Synthetic oligonucleotide
  Antisense strand to SEQ ID NO: 697816
uucccaaggaaucgguaag

SEQ ID NO: 697818 - RNA, 19 nt, Artificial Sequence
  Description of Artificial Sequence: Synthetic oligonucleotide
  Sense strand starting at position 3838 of SEQ ID NO: 586175
accgaaaucuaguuaggag

SEQ ID NO: 697819 - RNA, 19 nt, Artificial Sequence
  Description of Artificial Sequence: Synthetic oligonucleotide
  Antisense strand to SEQ ID NO: 697818
cuccuaacuagauuucggu

SEQ ID NO: 697820 - RNA, 19 nt, Artificial Sequence
  Description of Artificial Sequence: Synthetic oligonucleotide
  Sense strand starting at position 3839 of SEQ ID NO: 586175
ccgaaaucuaguuaggagu

SEQ ID NO: 697821 - RNA, 19 nt, Artificial Sequence
  Description of Artificial Sequence: Synthetic oligonucleotide
  Antisense strand to SEQ ID NO: 697820
acuccuaacuagauuucgg

SEQ ID NO: 697822 - RNA, 19 nt, Artificial Sequence
  Description of Artificial Sequence: Synthetic oligonucleotide
  Sense strand starting at position 3860 of SEQ ID NO: 586175
acagaaacugcguaacaga

SEQ ID NO: 697823 - RNA, 19 nt, Artificial Sequence
  Description of Artificial Sequence: Synthetic oligonucleotide
  Antisense strand to SEQ ID NO: 697822
ucuguuacgcaguuucugu

SEQ ID NO: 697824 - RNA, 19 nt, Artificial Sequence
  Description of Artificial Sequence: Synthetic oligonucleotide
  Sense strand starting at position 3982 of SEQ ID NO: 586175
ucaagcugaguauaaacau

SEQ ID NO: 697825 - RNA, 19 nt, Artificial Sequence
  Description of Artificial Sequence: Synthetic oligonucleotide
  Antisense strand to SEQ ID NO: 697824
auguuuauacucagcuuga

SEQ ID NO: 697826 - RNA, 19 nt, Artificial Sequence
  Description of Artificial Sequence: Synthetic oligonucleotide
  Sense strand starting at position 46 of SEQ ID NO: 586176
ucgggagucacuggaaaug

SEQ ID NO: 697827 - RNA, 19 nt, Artificial Sequence
  Description of Artificial Sequence: Synthetic oligonucleotide
  Antisense strand to SEQ ID NO: 697826
cauuuccagugacucccga

SEQ ID NO: 697828 - RNA, 19 nt, Artificial Sequence
  Description of Artificial Sequence: Synthetic oligonucleotide
  Sense strand starting at position 124 of SEQ ID NO: 586176
acucauuagcucugggacu

SEQ ID NO: 697829 - RNA, 19 nt, Artificial Sequence
  Description of Artificial Sequence: Synthetic oligonucleotide
  Antisense strand to SEQ ID NO: 697828
agucccagagcuaaugagu

SEQ ID NO: 697830 - RNA, 19 nt, Artificial Sequence
  Description of Artificial Sequence: Synthetic oligonucleotide
  Sense strand starting at position 472 of SEQ ID NO: 586176
augggagacgcuuaacauu

SEQ ID NO: 697831 - RNA, 19 nt, Artificial Sequence
  Description of Artificial Sequence: Synthetic oligonucleotide
  Antisense strand to SEQ ID NO: 697830
aauguuaagcgucucccau

SEQ ID NO: 697832 - RNA, 19 nt, Artificial Sequence
  Description of Artificial Sequence: Synthetic oligonucleotide
  Sense strand starting at position 614 of SEQ ID NO: 586176
augggagcacacuguuuaa

SEQ ID NO: 697833 - RNA, 19 nt, Artificial Sequence
  Description of Artificial Sequence: Synthetic oligonucleotide
  Antisense strand to SEQ ID NO: 697832
uuaaacagugugcucccau

SEQ ID NO: 697834 - RNA, 19 nt, Artificial Sequence
  Description of Artificial Sequence: Synthetic oligonucleotide
  Sense strand starting at position 617 of SEQ ID NO: 586176
ggagcacacuguuuaagga

SEQ ID NO: 697835 - RNA, 19 nt, Artificial Sequence
  Description of Artificial Sequence: Synthetic oligonucleotide
  Antisense strand to SEQ ID NO: 697834
uccuuaaacagugugcucc

SEQ ID NO: 697836 - RNA, 19 nt, Artificial Sequence
  Description of Artificial Sequence: Synthetic oligonucleotide
  Sense strand starting at position 756 of SEQ ID NO: 586176
gcucauggugucgcucaga

SEQ ID NO: 697837 - RNA, 19 nt, Artificial Sequence
  Description of Artificial Sequence: Synthetic oligonucleotide
  Antisense strand to SEQ ID NO: 697836
ucugagcgacaccaugagc

SEQ ID NO: 697838 - RNA, 19 nt, Artificial Sequence
  Description of Artificial Sequence: Synthetic oligonucleotide
  Sense strand starting at position 870 of SEQ ID NO: 586176
ggaaguugucuugaaguag

SEQ ID NO: 697839 - RNA, 19 nt, Artificial Sequence
  Description of Artificial Sequence: Synthetic oligonucleotide
  Antisense strand to SEQ ID NO: 697838
cuacuucaagacaacuucc

SEQ ID NO: 697840 - RNA, 19 nt, Artificial Sequence
  Description of Artificial Sequence: Synthetic oligonucleotide
  Sense strand starting at position 1178 of SEQ ID NO: 586176
cccuuuauuucucugggca

SEQ ID NO: 697841 - RNA, 19 nt, Artificial Sequence
  Description of Artificial Sequence: Synthetic oligonucleotide
  Antisense strand to SEQ ID NO: 697840
ugcccagagaaauaaaggg

SEQ ID NO: 697842 - RNA, 19 nt, Artificial Sequence
  Description of Artificial Sequence: Synthetic oligonucleotide
  Sense strand starting at position 1464 of SEQ ID NO: 586176
agauaagugcacugaguag

SEQ ID NO: 697843 - RNA, 19 nt, Artificial Sequence
  Description of Artificial Sequence: Synthetic oligonucleotide
  Antisense strand to SEQ ID NO: 697842
cuacucagugcacuuaucu

SEQ ID NO: 697844 - RNA, 19 nt, Artificial Sequence
  Description of Artificial Sequence: Synthetic oligonucleotide
  Sense strand starting at position 1468 of SEQ ID NO: 586176
aagugcacugaguagauaa

SEQ ID NO: 697845 - RNA, 19 nt, Artificial Sequence
  Description of Artificial Sequence: Synthetic oligonucleotide
  Antisense strand to SEQ ID NO: 697844
uuaucuacucagugcacuu

SEQ ID NO: 697846 - RNA, 19 nt, Artificial Sequence
  Description of Artificial Sequence: Synthetic oligonucleotide
  Sense strand starting at position 1479 of SEQ ID NO: 586176
guagauaauacacggacau

SEQ ID NO: 697847 - RNA, 19 nt, Artificial Sequence
  Description of Artificial Sequence: Synthetic oligonucleotide
  Antisense strand to SEQ ID NO: 697846
auguccguguauuaucuac

SEQ ID NO: 697848 - RNA, 19 nt, Artificial Sequence
  Description of Artificial Sequence: Synthetic oligonucleotide
  Sense strand starting at position 1746 of SEQ ID NO: 586176
gagagcacugucuaugcua

SEQ ID NO: 697849 - RNA, 19 nt, Artificial Sequence
  Description of Artificial Sequence: Synthetic oligonucleotide
  Antisense strand to SEQ ID NO: 697848
uagcauagacagugcucuc

SEQ ID NO: 697850 - RNA, 19 nt, Artificial Sequence
  Description of Artificial Sequence: Synthetic oligonucleotide
  Sense strand starting at position 1904 of SEQ ID NO: 586176
cugccuugccguuuggaua

SEQ ID NO: 697851 - RNA, 19 nt, Artificial Sequence
  Description of Artificial Sequence: Synthetic oligonucleotide
  Antisense strand to SEQ ID NO: 697850
uauccaaacggcaaggcag

SEQ ID NO: 697852 - RNA, 19 nt, Artificial Sequence
  Description of Artificial Sequence: Synthetic oligonucleotide
  Sense strand starting at position 1948 of SEQ ID NO: 586176
gcgacucgugguaguagau

SEQ ID NO: 697853 - RNA, 19 nt, Artificial Sequence
  Description of Artificial Sequence: Synthetic oligonucleotide
  Antisense strand to SEQ ID NO: 697852
aucuacuaccacgagucgc

SEQ ID NO: 697854 - RNA, 19 nt, Artificial Sequence
  Description of Artificial Sequence: Synthetic oligonucleotide
  Sense strand starting at position 2099 of SEQ ID NO: 586176
ggcagaugaacuuggguau

SEQ ID NO: 697855 - RNA, 19 nt, Artificial Sequence
  Description of Artificial Sequence: Synthetic oligonucleotide
  Antisense strand to SEQ ID NO: 697854
auacccaaguucaucugcc

SEQ ID NO: 697856 - RNA, 19 nt, Artificial Sequence
  Description of Artificial Sequence: Synthetic oligonucleotide
  Sense strand starting at position 2100 of SEQ ID NO: 586176
gcagaugaacuuggguauu

SEQ ID NO: 697857 - RNA, 19 nt, Artificial Sequence
  Description of Artificial Sequence: Synthetic oligonucleotide
  Antisense strand to SEQ ID NO: 697856
aauacccaaguucaucugc

SEQ ID NO: 697858 - RNA, 19 nt, Artificial Sequence
  Description of Artificial Sequence: Synthetic oligonucleotide
  Sense strand starting at position 2106 of SEQ ID NO: 586176
gaacuuggguauuccugaa

SEQ ID NO: 697859 - RNA, 19 nt, Artificial Sequence
  Description of Artificial Sequence: Synthetic oligonucleotide
  Antisense strand to SEQ ID NO: 697858
uucaggaauacccaaguuc

SEQ ID NO: 697860 - RNA, 19 nt, Artificial Sequence
  Description of Artificial Sequence: Synthetic oligonucleotide
  Sense strand starting at position 2110 of SEQ ID NO: 586176
uuggguauuccugaaccac

SEQ ID NO: 697861 - RNA, 19 nt, Artificial Sequence
  Description of Artificial Sequence: Synthetic oligonucleotide
  Antisense strand to SEQ ID NO: 697860
gugguucaggaauacccaa

SEQ ID NO: 697862 - RNA, 19 nt, Artificial Sequence
  Description of Artificial Sequence: Synthetic oligonucleotide
  Sense strand starting at position 2310 of SEQ ID NO: 586176
ccaucuugauaggcagagu

SEQ ID NO: 697863 - RNA, 19 nt, Artificial Sequence
  Description of Artificial Sequence: Synthetic oligonucleotide
  Antisense strand to SEQ ID NO: 697862
acucugccuaucaagaugg

SEQ ID NO: 697864 - RNA, 19 nt, Artificial Sequence
  Description of Artificial Sequence: Synthetic oligonucleotide
  Sense strand starting at position 2343 of SEQ ID NO: 586176
agcacuaugccuuagagag

SEQ ID NO: 697865 - RNA, 19 nt, Artificial Sequence
  Description of Artificial Sequence: Synthetic oligonucleotide
  Antisense strand to SEQ ID NO: 697864
cucucuaaggcauagugcu

SEQ ID NO: 697866 - RNA, 19 nt, Artificial Sequence
  Description of Artificial Sequence: Synthetic oligonucleotide
  Sense strand starting at position 2402 of SEQ ID NO: 586176
gguuguuggaacuauugau

SEQ ID NO: 697867 - RNA, 19 nt, Artificial Sequence
  Description of Artificial Sequence: Synthetic oligonucleotide
  Antisense strand to SEQ ID NO: 697866
aucaauaguuccaacaacc

SEQ ID NO: 697868 - RNA, 19 nt, Artificial Sequence
  Description of Artificial Sequence: Synthetic oligonucleotide
  Sense strand starting at position 2444 of SEQ ID NO: 586176
ucuggauauuuagaaaguu

SEQ ID NO: 697869 - RNA, 19 nt, Artificial Sequence
  Description of Artificial Sequence: Synthetic oligonucleotide
  Antisense strand to SEQ ID NO: 697868
aacuuucuaaauauccaga

SEQ ID NO: 697870 - RNA, 19 nt, Artificial Sequence
  Description of Artificial Sequence: Synthetic oligonucleotide
  Sense strand starting at position 2454 of SEQ ID NO: 586176
uagaaaguuuggucccuga

SEQ ID NO: 697871 - RNA, 19 nt, Artificial Sequence
  Description of Artificial Sequence: Synthetic oligonucleotide
  Antisense strand to SEQ ID NO: 697870
ucagggaccaaacuuucua

SEQ ID NO: 697872 - RNA, 19 nt, Artificial Sequence
  Description of Artificial Sequence: Synthetic oligonucleotide
  Sense strand starting at position 2467 of SEQ ID NO: 586176
cccugaucuuggccaagga

SEQ ID NO: 697873 - RNA, 19 nt, Artificial Sequence
  Description of Artificial Sequence: Synthetic oligonucleotide
  Antisense strand to SEQ ID NO: 697872
uccuuggccaagaucaggg

SEQ ID NO: 697874 - RNA, 19 nt, Artificial Sequence
  Description of Artificial Sequence: Synthetic oligonucleotide
  Sense strand starting at position 2687 of SEQ ID NO: 586176
uugugaagguacucaauac

SEQ ID NO: 697875 - RNA, 19 nt, Artificial Sequence
  Description of Artificial Sequence: Synthetic oligonucleotide
  Antisense strand to SEQ ID NO: 697874
guauugaguaccuucacaa

SEQ ID NO: 697876 - RNA, 19 nt, Artificial Sequence
  Description of Artificial Sequence: Synthetic oligonucleotide
  Sense strand starting at position 2786 of SEQ ID NO: 586176
acgcuuugcgcaucuuuau

SEQ ID NO: 697877 - RNA, 19 nt, Artificial Sequence
  Description of Artificial Sequence: Synthetic oligonucleotide
  Antisense strand to SEQ ID NO: 697876
auaaagaugcgcaaagcgu

SEQ ID NO: 697878 - RNA, 19 nt, Artificial Sequence
  Description of Artificial Sequence: Synthetic oligonucleotide
  Sense strand starting at position 2853 of SEQ ID NO: 586176
ccugguuauuaccugauga

SEQ ID NO: 697879 - RNA, 19 nt, Artificial Sequence
  Description of Artificial Sequence: Synthetic oligonucleotide
  Antisense strand to SEQ ID NO: 697878
ucaucagguaauaaccagg

SEQ ID NO: 697880 - RNA, 19 nt, Artificial Sequence
  Description of Artificial Sequence: Synthetic oligonucleotide
  Sense strand starting at position 3103 of SEQ ID NO: 586176
aaugacugccuauguaaga

SEQ ID NO: 697881 - RNA, 19 nt, Artificial Sequence
  Description of Artificial Sequence: Synthetic oligonucleotide
  Antisense strand to SEQ ID NO: 697880
ucuuacauaggcagucauu

SEQ ID NO: 697882 - RNA, 19 nt, Artificial Sequence
  Description of Artificial Sequence: Synthetic oligonucleotide
  Sense strand starting at position 3104 of SEQ ID NO: 586176
augacugccuauguaagau

SEQ ID NO: 697883 - RNA, 19 nt, Artificial Sequence
  Description of Artificial Sequence: Synthetic oligonucleotide
  Antisense strand to SEQ ID NO: 697882
aucuuacauaggcagucau

SEQ ID NO: 697884 - RNA, 19 nt, Artificial Sequence
  Description of Artificial Sequence: Synthetic oligonucleotide
  Sense strand starting at position 3258 of SEQ ID NO: 586176
uugagagaguuucuuccca

SEQ ID NO: 697885 - RNA, 19 nt, Artificial Sequence
  Description of Artificial Sequence: Synthetic oligonucleotide
  Antisense strand to SEQ ID NO: 697884
ugggaagaaacucucucaa

SEQ ID NO: 697886 - RNA, 19 nt, Artificial Sequence
  Description of Artificial Sequence: Synthetic oligonucleotide
  Sense strand starting at position 3260 of SEQ ID NO: 586176
gagagaguuucuucccaga

SEQ ID NO: 697887 - RNA, 19 nt, Artificial Sequence
  Description of Artificial Sequence: Synthetic oligonucleotide
  Antisense strand to SEQ ID NO: 697886
ucugggaagaaacucucuc

SEQ ID NO: 697888 - RNA, 19 nt, Artificial Sequence
  Description of Artificial Sequence: Synthetic oligonucleotide
  Sense strand starting at position 3262 of SEQ ID NO: 586176
gagaguuucuucccagaau

SEQ ID NO: 697889 - RNA, 19 nt, Artificial Sequence
  Description of Artificial Sequence: Synthetic oligonucleotide
  Antisense strand to SEQ ID NO: 697888
auucugggaagaaacucuc

SEQ ID NO: 697890 - RNA, 19 nt, Artificial Sequence
  Description of Artificial Sequence: Synthetic oligonucleotide
  Sense strand starting at position 3265 of SEQ ID NO: 586176
aguuucuucccagaauuga

SEQ ID NO: 697891 - RNA, 19 nt, Artificial Sequence
  Description of Artificial Sequence: Synthetic oligonucleotide
  Antisense strand to SEQ ID NO: 697890
ucaauucugggaagaaacu

SEQ ID NO: 697892 - RNA, 19 nt, Artificial Sequence
  Description of Artificial Sequence: Synthetic oligonucleotide
  Sense strand starting at position 3571 of SEQ ID NO: 586176
uguugcaaugcuuagaaga

SEQ ID NO: 697893 - RNA, 19 nt, Artificial Sequence
  Description of Artificial Sequence: Synthetic oligonucleotide
  Antisense strand to SEQ ID NO: 697892
ucuucuaagcauugcaaca

SEQ ID NO: 697894 - RNA, 19 nt, Artificial Sequence
  Description of Artificial Sequence: Synthetic oligonucleotide
  Sense strand starting at position 3622 of SEQ ID NO: 586176
gaaccugagucuuuccaga

SEQ ID NO: 697895 - RNA, 19 nt, Artificial Sequence
  Description of Artificial Sequence: Synthetic oligonucleotide
  Antisense strand to SEQ ID NO: 697894
ucuggaaagacucagguuc

SEQ ID NO: 697896 - RNA, 19 nt, Artificial Sequence
  Description of Artificial Sequence: Synthetic oligonucleotide
  Sense strand starting at position 3624 of SEQ ID NO: 586176
accugagucuuuccagaga

SEQ ID NO: 697897 - RNA, 19 nt, Artificial Sequence
  Description of Artificial Sequence: Synthetic oligonucleotide
  Antisense strand to SEQ ID NO: 697896
ucucuggaaagacucaggu

SEQ ID NO: 697898 - RNA, 19 nt, Artificial Sequence
  Description of Artificial Sequence: Synthetic oligonucleotide
  Sense strand starting at position 3660 of SEQ ID NO: 586176
ccuaguaucucugcaaaga

SEQ ID NO: 697899 - RNA, 19 nt, Artificial Sequence
  Description of Artificial Sequence: Synthetic oligonucleotide
  Antisense strand to SEQ ID NO: 697898
ucuuugcagagauacuagg

SEQ ID NO: 697900 - RNA, 19 nt, Artificial Sequence
  Description of Artificial Sequence: Synthetic oligonucleotide
  Sense strand starting at position 3661 of SEQ ID NO: 586176
cuaguaucucugcaaagag

SEQ ID NO: 697901 - RNA, 19 nt, Artificial Sequence
  Description of Artificial Sequence: Synthetic oligonucleotide
  Antisense strand to SEQ ID NO: 697900
cucuuugcagagauacuag

SEQ ID NO: 697902 - RNA, 19 nt, Artificial Sequence
  Description of Artificial Sequence: Synthetic oligonucleotide
  Sense strand starting at position 3726 of SEQ ID NO: 586176
ccagcucucccagagcaau

SEQ ID NO: 697903 - RNA, 19 nt, Artificial Sequence
  Description of Artificial Sequence: Synthetic oligonucleotide
  Antisense strand to SEQ ID NO: 697902
auugcucugggagagcugg

SEQ ID NO: 697904 - RNA, 19 nt, Artificial Sequence
  Description of Artificial Sequence: Synthetic oligonucleotide
  Sense strand starting at position 3918 of SEQ ID NO: 586176
aguuuagaaccguaacucu

SEQ ID NO: 697905 - RNA, 19 nt, Artificial Sequence
  Description of Artificial Sequence: Synthetic oligonucleotide
  Antisense strand to SEQ ID NO: 697904
agaguuacgguucuaaacu

SEQ ID NO: 697906 - RNA, 19 nt, Artificial Sequence
  Description of Artificial Sequence: Synthetic oligonucleotide
  Sense strand starting at position 38 of SEQ ID NO: 586177
gccaaucacuuagaaagaa

SEQ ID NO: 697907 - RNA, 19 nt, Artificial Sequence
  Description of Artificial Sequence: Synthetic oligonucleotide
  Antisense strand to SEQ ID NO: 697906
uucuuucuaagugauuggc

SEQ ID NO: 697908 - RNA, 19 nt, Artificial Sequence
  Description of Artificial Sequence: Synthetic oligonucleotide
  Sense strand starting at position 110 of SEQ ID NO: 586177
ucagauagcagcuaggauu

SEQ ID NO: 697909 - RNA, 19 nt, Artificial Sequence
  Description of Artificial Sequence: Synthetic oligonucleotide
  Antisense strand to SEQ ID NO: 697908
aauccuagcugcuaucuga

SEQ ID NO: 697910 - RNA, 19 nt, Artificial Sequence
  Description of Artificial Sequence: Synthetic oligonucleotide
  Sense strand starting at position 144 of SEQ ID NO: 586177
accagucuucccuggugua

SEQ ID NO: 697911 - RNA, 19 nt, Artificial Sequence
  Description of Artificial Sequence: Synthetic oligonucleotide
  Antisense strand to SEQ ID NO: 697910
uacaccagggaagacuggu

SEQ ID NO: 697912 - RNA, 19 nt, Artificial Sequence
  Description of Artificial Sequence: Synthetic oligonucleotide
  Sense strand starting at position 208 of SEQ ID NO: 586177
gugccuauguauguguaua

SEQ ID NO: 697913 - RNA, 19 nt, Artificial Sequence
  Description of Artificial Sequence: Synthetic oligonucleotide
  Antisense strand to SEQ ID NO: 697912
uauacacauacauaggcac

SEQ ID NO: 697914 - RNA, 19 nt, Artificial Sequence
  Description of Artificial Sequence: Synthetic oligonucleotide
  Sense strand starting at position 210 of SEQ ID NO: 586177
gccuauguauguguauaga

SEQ ID NO: 697915 - RNA, 19 nt, Artificial Sequence
  Description of Artificial Sequence: Synthetic oligonucleotide
  Antisense strand to SEQ ID NO: 697914
ucuauacacauacauaggc

SEQ ID NO: 697916 - RNA, 19 nt, Artificial Sequence
  Description of Artificial Sequence: Synthetic oligonucleotide
  Sense strand starting at position 2211 of SEQ ID NO: 586177
ucagucagucgaugaggaa

SEQ ID NO: 697917 - RNA, 19 nt, Artificial Sequence
  Description of Artificial Sequence: Synthetic oligonucleotide
  Antisense strand to SEQ ID NO: 697916
uuccucaucgacugacuga

SEQ ID NO: 697918 - RNA, 19 nt, Artificial Sequence
  Description of Artificial Sequence: Synthetic oligonucleotide
  Sense strand starting at position 2212 of SEQ ID NO: 586177
cagucagucgaugaggaaa

SEQ ID NO: 697919 - RNA, 19 nt, Artificial Sequence
  Description of Artificial Sequence: Synthetic oligonucleotide
  Antisense strand to SEQ ID NO: 697918
uuuccucaucgacugacug

SEQ ID NO: 697920 - RNA, 19 nt, Artificial Sequence
  Description of Artificial Sequence: Synthetic oligonucleotide
  Sense strand starting at position 2237 of SEQ ID NO: 586177
agaaaucuccagcgggaga

SEQ ID NO: 697921 - RNA, 19 nt, Artificial Sequence
  Description of Artificial Sequence: Synthetic oligonucleotide
  Antisense strand to SEQ ID NO: 697920
ucucccgcuggagauuucu

SEQ ID NO: 697922 - RNA, 19 nt, Artificial Sequence
  Description of Artificial Sequence: Synthetic oligonucleotide
  Sense strand starting at position 2734 of SEQ ID NO: 586177
aguuguagaguguguagaa

SEQ ID NO: 697923 - RNA, 19 nt, Artificial Sequence
  Description of Artificial Sequence: Synthetic oligonucleotide
  Antisense strand to SEQ ID NO: 697922
uucuacacacucuacaacu

SEQ ID NO: 697924 - RNA, 19 nt, Artificial Sequence
  Description of Artificial Sequence: Synthetic oligonucleotide
  Sense strand starting at position 2735 of SEQ ID NO: 586177
guuguagaguguguagaaa

SEQ ID NO: 697925 - RNA, 19 nt, Artificial Sequence
  Description of Artificial Sequence: Synthetic oligonucleotide
  Antisense strand to SEQ ID NO: 697924
uuucuacacacucuacaac

SEQ ID NO: 697926 - RNA, 19 nt, Artificial Sequence
  Description of Artificial Sequence: Synthetic oligonucleotide
  Sense strand starting at position 3605 of SEQ ID NO: 586177
uguggcugaugcucauaaa

SEQ ID NO: 697927 - RNA, 19 nt, Artificial Sequence
  Description of Artificial Sequence: Synthetic oligonucleotide
  Antisense strand to SEQ ID NO: 697926
uuuaugagcaucagccaca

SEQ ID NO: 697928 - RNA, 19 nt, Artificial Sequence
  Description of Artificial Sequence: Synthetic oligonucleotide
  Sense strand starting at position 3625 of SEQ ID NO: 586177
aguuguauuaaagagcuga

SEQ ID NO: 697929 - RNA, 19 nt, Artificial Sequence
  Description of Artificial Sequence: Synthetic oligonucleotide
  Antisense strand to SEQ ID NO: 697928
ucagcucuuuaauacaacu

SEQ ID NO: 697930 - RNA, 19 nt, Artificial Sequence
  Description of Artificial Sequence: Synthetic oligonucleotide
  Sense strand starting at position 3639 of SEQ ID NO: 586177
gcugacugcagccgagaau

SEQ ID NO: 697931 - RNA, 19 nt, Artificial Sequence
  Description of Artificial Sequence: Synthetic oligonucleotide
  Antisense strand to SEQ ID NO: 697930
auucucggcugcagucagc

SEQ ID NO: 697932 - RNA, 19 nt, Artificial Sequence
  Description of Artificial Sequence: Synthetic oligonucleotide
  Sense strand starting at position 3710 of SEQ ID NO: 586177
gggcacuggaauugaucua

SEQ ID NO: 697933 - RNA, 19 nt, Artificial Sequence
  Description of Artificial Sequence: Synthetic oligonucleotide
  Antisense strand to SEQ ID NO: 697932
uagaucaauuccagugccc

SEQ ID NO: 697934 - RNA, 19 nt, Artificial Sequence
  Description of Artificial Sequence: Synthetic oligonucleotide
  Sense strand starting at position 3837 of SEQ ID NO: 586177
gcccauacuuguggaggaa

SEQ ID NO: 697935 - RNA, 19 nt, Artificial Sequence
  Description of Artificial Sequence: Synthetic oligonucleotide
  Antisense strand to SEQ ID NO: 697934
uuccuccacaaguaugggc

SEQ ID NO: 697936 - RNA, 19 nt, Artificial Sequence
  Description of Artificial Sequence: Synthetic oligonucleotide
  Sense strand starting at position 3904 of SEQ ID NO: 586177
gugcuagagcgcuguguau

SEQ ID NO: 697937 - RNA, 19 nt, Artificial Sequence
  Description of Artificial Sequence: Synthetic oligonucleotide
  Antisense strand to SEQ ID NO: 697936
auacacagcgcucuagcac

SEQ ID NO: 697938 - RNA, 19 nt, Artificial Sequence
  Description of Artificial Sequence: Synthetic oligonucleotide
  Sense strand starting at position 3906 of SEQ ID NO: 586177
gcuagagcgcuguguauau

SEQ ID NO: 697939 - RNA, 19 nt, Artificial Sequence
  Description of Artificial Sequence: Synthetic oligonucleotide
  Antisense strand to SEQ ID NO: 697938
auauacacagcgcucuagc

SEQ ID NO: 697940 - RNA, 19 nt, Artificial Sequence
  Description of Artificial Sequence: Synthetic oligonucleotide
  Sense strand starting at position 3910 of SEQ ID NO: 586177
gagcgcuguguauaugauu

SEQ ID NO: 697941 - RNA, 19 nt, Artificial Sequence
  Description of Artificial Sequence: Synthetic oligonucleotide
  Antisense strand to SEQ ID NO: 697940
aaucauauacacagcgcuc

SEQ ID NO: 697942 - RNA, 19 nt, Artificial Sequence
  Description of Artificial Sequence: Synthetic oligonucleotide
  Sense strand starting at position 65 of SEQ ID NO: 586178
agaauuagguagcugauua

SEQ ID NO: 697943 - RNA, 19 nt, Artificial Sequence
  Description of Artificial Sequence: Synthetic oligonucleotide
  Antisense strand to SEQ ID NO: 697942
uaaucagcuaccuaauucu

SEQ ID NO: 697944 - RNA, 19 nt, Artificial Sequence
  Description of Artificial Sequence: Synthetic oligonucleotide
  Sense strand starting at position 69 of SEQ ID NO: 586178
uuagguagcugauuaaucu

SEQ ID NO: 697945 - RNA, 19 nt, Artificial Sequence
  Description of Artificial Sequence: Synthetic oligonucleotide
  Antisense strand to SEQ ID NO: 697944
agauuaaucagcuaccuaa

SEQ ID NO: 697946 - RNA, 19 nt, Artificial Sequence
  Description of Artificial Sequence: Synthetic oligonucleotide
  Sense strand starting at position 70 of SEQ ID NO: 586178
uagguagcugauuaaucua

SEQ ID NO: 697947 - RNA, 19 nt, Artificial Sequence
  Description of Artificial Sequence: Synthetic oligonucleotide
  Antisense strand to SEQ ID NO: 697946
uagauuaaucagcuaccua

SEQ ID NO: 697948 - RNA, 19 nt, Artificial Sequence
  Description of Artificial Sequence: Synthetic oligonucleotide
  Sense strand starting at position 453 of SEQ ID NO: 586178
aagugcugggauugagaca

SEQ ID NO: 697949 - RNA, 19 nt, Artificial Sequence
  Description of Artificial Sequence: Synthetic oligonucleotide
  Antisense strand to SEQ ID NO: 697948
ugucucaaucccagcacuu

SEQ ID NO: 697950 - RNA, 19 nt, Artificial Sequence
  Description of Artificial Sequence: Synthetic oligonucleotide
  Sense strand starting at position 585 of SEQ ID NO: 586178
cuacaagugcgcuaucaca

SEQ ID NO: 697951 - RNA, 19 nt, Artificial Sequence
  Description of Artificial Sequence: Synthetic oligonucleotide
  Antisense strand to SEQ ID NO: 697950
ugugauagcgcacuuguag

SEQ ID NO: 697952 - RNA, 19 nt, Artificial Sequence
  Description of Artificial Sequence: Synthetic oligonucleotide
  Sense strand starting at position 716 of SEQ ID NO: 586178
gcauuccaggugugaggau

SEQ ID NO: 697953 - RNA, 19 nt, Artificial Sequence
  Description of Artificial Sequence: Synthetic oligonucleotide
  Antisense strand to SEQ ID NO: 697952
auccucacaccuggaaugc

SEQ ID NO: 697954 - RNA, 19 nt, Artificial Sequence
  Description of Artificial Sequence: Synthetic oligonucleotide
  Sense strand starting at position 877 of SEQ ID NO: 586178
agugguggcaauuacuauu

SEQ ID NO: 697955 - RNA, 19 nt, Artificial Sequence
  Description of Artificial Sequence: Synthetic oligonucleotide
  Antisense strand to SEQ ID NO: 697954
aauaguaauugccaccacu

SEQ ID NO: 697956 - RNA, 19 nt, Artificial Sequence
  Description of Artificial Sequence: Synthetic oligonucleotide
  Sense strand starting at position 960 of SEQ ID NO: 586178
caguguuugcuugcucauu

SEQ ID NO: 697957 - RNA, 19 nt, Artificial Sequence
  Description of Artificial Sequence: Synthetic oligonucleotide
  Antisense strand to SEQ ID NO: 697956
aaugagcaagcaaacacug

SEQ ID NO: 697958 - RNA, 19 nt, Artificial Sequence
  Description of Artificial Sequence: Synthetic oligonucleotide
  Sense strand starting at position 1116 of SEQ ID NO: 586178
ucuuauugcgguugauaug

SEQ ID NO: 697959 - RNA, 19 nt, Artificial Sequence
  Description of Artificial Sequence: Synthetic oligonucleotide
  Antisense strand to SEQ ID NO: 697958
cauaucaaccgcaauaaga

SEQ ID NO: 697960 - RNA, 19 nt, Artificial Sequence
  Description of Artificial Sequence: Synthetic oligonucleotide
  Sense strand starting at position 1123 of SEQ ID NO: 586178
gcgguugauauggagagau

SEQ ID NO: 697961 - RNA, 19 nt, Artificial Sequence
  Description of Artificial Sequence: Synthetic oligonucleotide
  Antisense strand to SEQ ID NO: 697960
aucucuccauaucaaccgc

SEQ ID NO: 697962 - RNA, 19 nt, Artificial Sequence
  Description of Artificial Sequence: Synthetic oligonucleotide
  Sense strand starting at position 1212 of SEQ ID NO: 586178
ggcaaagucaaucgacaac

SEQ ID NO: 697963 - RNA, 19 nt, Artificial Sequence
  Description of Artificial Sequence: Synthetic oligonucleotide
  Antisense strand to SEQ ID NO: 697962
guugucgauugacuuugcc

SEQ ID NO: 697964 - RNA, 19 nt, Artificial Sequence
  Description of Artificial Sequence: Synthetic oligonucleotide
  Sense strand starting at position 1344 of SEQ ID NO: 586178
ugagccuauuaccuugaaa

SEQ ID NO: 697965 - RNA, 19 nt, Artificial Sequence
  Description of Artificial Sequence: Synthetic oligonucleotide
  Antisense strand to SEQ ID NO: 697964
uuucaagguaauaggcuca

SEQ ID NO: 697966 - RNA, 19 nt, Artificial Sequence
  Description of Artificial Sequence: Synthetic oligonucleotide
  Sense strand starting at position 1346 of SEQ ID NO: 586178
agccuauuaccuugaaagc

SEQ ID NO: 697967 - RNA, 19 nt, Artificial Sequence
  Description of Artificial Sequence: Synthetic oligonucleotide
  Antisense strand to SEQ ID NO: 697966
gcuuucaagguaauaggcu

SEQ ID NO: 697968 - RNA, 19 nt, Artificial Sequence
  Description of Artificial Sequence: Synthetic oligonucleotide
  Sense strand starting at position 1347 of SEQ ID NO: 586178
gccuauuaccuugaaagca

SEQ ID NO: 697969 - RNA, 19 nt, Artificial Sequence
  Description of Artificial Sequence: Synthetic oligonucleotide
  Antisense strand to SEQ ID NO: 697968
ugcuuucaagguaauaggc

SEQ ID NO: 697970 - RNA, 19 nt, Artificial Sequence
  Description of Artificial Sequence: Synthetic oligonucleotide
  Sense strand starting at position 1387 of SEQ ID NO: 586178
cuagacucccauuauaggu

SEQ ID NO: 697971 - RNA, 19 nt, Artificial Sequence
  Description of Artificial Sequence: Synthetic oligonucleotide
  Antisense strand to SEQ ID NO: 697970
accuauaaugggagucuag

SEQ ID NO: 697972 - RNA, 19 nt, Artificial Sequence
  Description of Artificial Sequence: Synthetic oligonucleotide
  Sense strand starting at position 2548 of SEQ ID NO: 586178
uguaguaacauggagcaua

SEQ ID NO: 697973 - RNA, 19 nt, Artificial Sequence
  Description of Artificial Sequence: Synthetic oligonucleotide
  Antisense strand to SEQ ID NO: 697972
uaugcuccauguuacuaca

SEQ ID NO: 697974 - RNA, 19 nt, Artificial Sequence
  Description of Artificial Sequence: Synthetic oligonucleotide
  Sense strand starting at position 2603 of SEQ ID NO: 586178
auuacuugcuuacucgaga

SEQ ID NO: 697975 - RNA, 19 nt, Artificial Sequence
  Description of Artificial Sequence: Synthetic oligonucleotide
  Antisense strand to SEQ ID NO: 697974
ucucgaguaagcaaguaau

SEQ ID NO: 697976 - RNA, 19 nt, Artificial Sequence
  Description of Artificial Sequence: Synthetic oligonucleotide
  Sense strand starting at position 2604 of SEQ ID NO: 586178
uuacuugcuuacucgagaa

SEQ ID NO: 697977 - RNA, 19 nt, Artificial Sequence
  Description of Artificial Sequence: Synthetic oligonucleotide
  Antisense strand to SEQ ID NO: 697976
uucucgaguaagcaaguaa

SEQ ID NO: 697978 - RNA, 19 nt, Artificial Sequence
  Description of Artificial Sequence: Synthetic oligonucleotide
  Sense strand starting at position 2606 of SEQ ID NO: 586178
acuugcuuacucgagaauu

SEQ ID NO: 697979 - RNA, 19 nt, Artificial Sequence
  Description of Artificial Sequence: Synthetic oligonucleotide
  Antisense strand to SEQ ID NO: 697978
aauucucgaguaagcaagu

SEQ ID NO: 697980 - RNA, 19 nt, Artificial Sequence
  Description of Artificial Sequence: Synthetic oligonucleotide
  Sense strand starting at position 2608 of SEQ ID NO: 586178
uugcuuacucgagaauucu

SEQ ID NO: 697981 - RNA, 19 nt, Artificial Sequence
  Description of Artificial Sequence: Synthetic oligonucleotide
  Antisense strand to SEQ ID NO: 697980
agaauucucgaguaagcaa

SEQ ID NO: 697982 - RNA, 19 nt, Artificial Sequence
  Description of Artificial Sequence: Synthetic oligonucleotide
  Sense strand starting at position 2614 of SEQ ID NO: 586178
acucgagaauucuuguuug

SEQ ID NO: 697983 - RNA, 19 nt, Artificial Sequence
  Description of Artificial Sequence: Synthetic oligonucleotide
  Antisense strand to SEQ ID NO: 697982
caaacaagaauucucgagu

SEQ ID NO: 697984 - RNA, 19 nt, Artificial Sequence
  Description of Artificial Sequence: Synthetic oligonucleotide
  Sense strand starting at position 2617 of SEQ ID NO: 586178
cgagaauucuuguuuguuu

SEQ ID NO: 697985 - RNA, 19 nt, Artificial Sequence
  Description of Artificial Sequence: Synthetic oligonucleotide
  Antisense strand to SEQ ID NO: 697984
aaacaaacaagaauucucg

SEQ ID NO: 697986 - RNA, 19 nt, Artificial Sequence
  Description of Artificial Sequence: Synthetic oligonucleotide
  Sense strand starting at position 2618 of SEQ ID NO: 586178
gagaauucuuguuuguuuc

SEQ ID NO: 697987 - RNA, 19 nt, Artificial Sequence
  Description of Artificial Sequence: Synthetic oligonucleotide
  Antisense strand to SEQ ID NO: 697986
gaaacaaacaagaauucuc

SEQ ID NO: 697988 - RNA, 19 nt, Artificial Sequence
  Description of Artificial Sequence: Synthetic oligonucleotide
  Sense strand starting at position 2626 of SEQ ID NO: 586178
uuguuuguuucuuucuaga

SEQ ID NO: 697989 - RNA, 19 nt, Artificial Sequence
  Description of Artificial Sequence: Synthetic oligonucleotide
  Antisense strand to SEQ ID NO: 697988
ucuagaaagaaacaaacaa

SEQ ID NO: 697990 - RNA, 19 nt, Artificial Sequence
  Description of Artificial Sequence: Synthetic oligonucleotide
  Sense strand starting at position 2665 of SEQ ID NO: 586178
auauuauguguaggaaucu

SEQ ID NO: 697991 - RNA, 19 nt, Artificial Sequence
  Description of Artificial Sequence: Synthetic oligonucleotide
  Antisense strand to SEQ ID NO: 697990
agauuccuacacauaauau

SEQ ID NO: 697992 - RNA, 19 nt, Artificial Sequence
  Description of Artificial Sequence: Synthetic oligonucleotide
  Sense strand starting at position 2732 of SEQ ID NO: 586178
uuuacuuggauacguguaa

SEQ ID NO: 697993 - RNA, 19 nt, Artificial Sequence
  Description of Artificial Sequence: Synthetic oligonucleotide
  Antisense strand to SEQ ID NO: 697992
uuacacguauccaaguaaa

SEQ ID NO: 697994 - RNA, 19 nt, Artificial Sequence
  Description of Artificial Sequence: Synthetic oligonucleotide
  Sense strand starting at position 2733 of SEQ ID NO: 586178
uuacuuggauacguguaaa

SEQ ID NO: 697995 - RNA, 19 nt, Artificial Sequence
  Description of Artificial Sequence: Synthetic oligonucleotide
  Antisense strand to SEQ ID NO: 697994
uuuacacguauccaaguaa

SEQ ID NO: 697996 - RNA, 19 nt, Artificial Sequence
  Description of Artificial Sequence: Synthetic oligonucleotide
  Sense strand starting at position 2810 of SEQ ID NO: 586178
gguguaguacucuggucaa

SEQ ID NO: 697997 - RNA, 19 nt, Artificial Sequence
  Description of Artificial Sequence: Synthetic oligonucleotide
  Antisense strand to SEQ ID NO: 697996
uugaccagaguacuacacc

SEQ ID NO: 697998 - RNA, 19 nt, Artificial Sequence
  Description of Artificial Sequence: Synthetic oligonucleotide
  Sense strand starting at position 2813 of SEQ ID NO: 586178
guaguacucuggucaauac

SEQ ID NO: 697999 - RNA, 19 nt, Artificial Sequence
  Description of Artificial Sequence: Synthetic oligonucleotide
  Antisense strand to SEQ ID NO: 697998
guauugaccagaguacuac

SEQ ID NO: 698000 - RNA, 19 nt, Artificial Sequence
  Description of Artificial Sequence: Synthetic oligonucleotide
  Sense strand starting at position 2870 of SEQ ID NO: 586178
uccuuuacugauuguacua

SEQ ID NO: 698001 - RNA, 19 nt, Artificial Sequence
  Description of Artificial Sequence: Synthetic oligonucleotide
  Antisense strand to SEQ ID NO: 698000
uaguacaaucaguaaagga

SEQ ID NO: 698002 - RNA, 19 nt, Artificial Sequence
  Description of Artificial Sequence: Synthetic oligonucleotide
  Sense strand starting at position 2951 of SEQ ID NO: 586178
aagucuuaucuaggacagu

SEQ ID NO: 698003 - RNA, 19 nt, Artificial Sequence
  Description of Artificial Sequence: Synthetic oligonucleotide
  Antisense strand to SEQ ID NO: 698002
acuguccuagauaagacuu

SEQ ID NO: 698004 - RNA, 19 nt, Artificial Sequence
  Description of Artificial Sequence: Synthetic oligonucleotide
  Sense strand starting at position 2985 of SEQ ID NO: 586178
aggauaggugucugcuuca

SEQ ID NO: 698005 - RNA, 19 nt, Artificial Sequence
  Description of Artificial Sequence: Synthetic oligonucleotide
  Antisense strand to SEQ ID NO: 698004
ugaagcagacaccuauccu

SEQ ID NO: 698006 - RNA, 19 nt, Artificial Sequence
  Description of Artificial Sequence: Synthetic oligonucleotide
  Sense strand starting at position 3012 of SEQ ID NO: 586178
ucgagauuacuacaguaac

SEQ ID NO: 698007 - RNA, 19 nt, Artificial Sequence
  Description of Artificial Sequence: Synthetic oligonucleotide
  Antisense strand to SEQ ID NO: 698006
guuacuguaguaaucucga

SEQ ID NO: 698008 - RNA, 19 nt, Artificial Sequence
  Description of Artificial Sequence: Synthetic oligonucleotide
  Sense strand starting at position 3015 of SEQ ID NO: 586178
agauuacuacaguaacugu

SEQ ID NO: 698009 - RNA, 19 nt, Artificial Sequence
  Description of Artificial Sequence: Synthetic oligonucleotide
  Antisense strand to SEQ ID NO: 698008
acaguuacuguaguaaucu

SEQ ID NO: 698010 - RNA, 19 nt, Artificial Sequence
  Description of Artificial Sequence: Synthetic oligonucleotide
  Sense strand starting at position 3040 of SEQ ID NO: 586178
uugcacuucuggucuugaa

SEQ ID NO: 698011 - RNA, 19 nt, Artificial Sequence
  Description of Artificial Sequence: Synthetic oligonucleotide
  Antisense strand to SEQ ID NO: 698010
uucaagaccagaagugcaa

SEQ ID NO: 698012 - RNA, 19 nt, Artificial Sequence
  Description of Artificial Sequence: Synthetic oligonucleotide
  Sense strand starting at position 3100 of SEQ ID NO: 586178
acaguaggcuuccuaaauc

SEQ ID NO: 698013 - RNA, 19 nt, Artificial Sequence
  Description of Artificial Sequence: Synthetic oligonucleotide
  Antisense strand to SEQ ID NO: 698012
gauuuaggaagccuacugu

SEQ ID NO: 698014 - RNA, 19 nt, Artificial Sequence
  Description of Artificial Sequence: Synthetic oligonucleotide
  Sense strand starting at position 3154 of SEQ ID NO: 586178
augcuaauacugcagacau

SEQ ID NO: 698015 - RNA, 19 nt, Artificial Sequence
  Description of Artificial Sequence: Synthetic oligonucleotide
  Antisense strand to SEQ ID NO: 698014
augucugcaguauuagcau

SEQ ID NO: 698016 - RNA, 19 nt, Artificial Sequence
  Description of Artificial Sequence: Synthetic oligonucleotide
  Sense strand starting at position 3217 of SEQ ID NO: 586178
auuggcauuggcuaagaaa

SEQ ID NO: 698017 - RNA, 19 nt, Artificial Sequence
  Description of Artificial Sequence: Synthetic oligonucleotide
  Antisense strand to SEQ ID NO: 698016
uuucuuagccaaugccaau

SEQ ID NO: 698018 - RNA, 19 nt, Artificial Sequence
  Description of Artificial Sequence: Synthetic oligonucleotide
  Sense strand starting at position 3247 of SEQ ID NO: 586178
cuauauugcucccuguaug

SEQ ID NO: 698019 - RNA, 19 nt, Artificial Sequence
  Description of Artificial Sequence: Synthetic oligonucleotide
  Antisense strand to SEQ ID NO: 698018
cauacagggagcaauauag

SEQ ID NO: 698020 - RNA, 19 nt, Artificial Sequence
  Description of Artificial Sequence: Synthetic oligonucleotide
  Sense strand starting at position 3371 of SEQ ID NO: 586178
ccacaauuggcauggcuaa

SEQ ID NO: 698021 - RNA, 19 nt, Artificial Sequence
  Description of Artificial Sequence: Synthetic oligonucleotide
  Antisense strand to SEQ ID NO: 698020
uuagccaugccaauugugg

SEQ ID NO: 698022 - RNA, 19 nt, Artificial Sequence
  Description of Artificial Sequence: Synthetic oligonucleotide
  Sense strand starting at position 706 of SEQ ID NO: 586179
aguagaccuugaguaaagu

SEQ ID NO: 698023 - RNA, 19 nt, Artificial Sequence
  Description of Artificial Sequence: Synthetic oligonucleotide
  Antisense strand to SEQ ID NO: 698022
acuuuacucaaggucuacu

SEQ ID NO: 698024 - RNA, 19 nt, Artificial Sequence
  Description of Artificial Sequence: Synthetic oligonucleotide
  Sense strand starting at position 712 of SEQ ID NO: 586179
ccuugaguaaaguggauua

SEQ ID NO: 698025 - RNA, 19 nt, Artificial Sequence
  Description of Artificial Sequence: Synthetic oligonucleotide
  Antisense strand to SEQ ID NO: 698024
uaauccacuuuacucaagg

SEQ ID NO: 698026 - RNA, 19 nt, Artificial Sequence
  Description of Artificial Sequence: Synthetic oligonucleotide
  Sense strand starting at position 723 of SEQ ID NO: 586179
guggauuacucuccauagu

SEQ ID NO: 698027 - RNA, 19 nt, Artificial Sequence
  Description of Artificial Sequence: Synthetic oligonucleotide
  Antisense strand to SEQ ID NO: 698026
acuauggagaguaauccac

SEQ ID NO: 698028 - RNA, 19 nt, Artificial Sequence
  Description of Artificial Sequence: Synthetic oligonucleotide
  Sense strand starting at position 724 of SEQ ID NO: 586179
uggauuacucuccauagug

SEQ ID NO: 698029 - RNA, 19 nt, Artificial Sequence
  Description of Artificial Sequence: Synthetic oligonucleotide
  Antisense strand to SEQ ID NO: 698028
cacuauggagaguaaucca

SEQ ID NO: 698030 - RNA, 19 nt, Artificial Sequence
  Description of Artificial Sequence: Synthetic oligonucleotide
  Sense strand starting at position 726 of SEQ ID NO: 586179
gauuacucuccauaguggu

SEQ ID NO: 698031 - RNA, 19 nt, Artificial Sequence
  Description of Artificial Sequence: Synthetic oligonucleotide
  Antisense strand to SEQ ID NO: 698030
accacuauggagaguaauc

SEQ ID NO: 698032 - RNA, 19 nt, Artificial Sequence
  Description of Artificial Sequence: Synthetic oligonucleotide
  Sense strand starting at position 912 of SEQ ID NO: 586179
cucccaauagugugaguca

SEQ ID NO: 698033 - RNA, 19 nt, Artificial Sequence
  Description of Artificial Sequence: Synthetic oligonucleotide
  Antisense strand to SEQ ID NO: 698032
ugacucacacuauugggag

SEQ ID NO: 698034 - RNA, 19 nt, Artificial Sequence
  Description of Artificial Sequence: Synthetic oligonucleotide
  Sense strand starting at position 913 of SEQ ID NO: 586179
ucccaauagugugagucaa

SEQ ID NO: 698035 - RNA, 19 nt, Artificial Sequence
  Description of Artificial Sequence: Synthetic oligonucleotide
  Antisense strand to SEQ ID NO: 698034
uugacucacacuauuggga

SEQ ID NO: 698036 - RNA, 19 nt, Artificial Sequence
  Description of Artificial Sequence: Synthetic oligonucleotide
  Sense strand starting at position 915 of SEQ ID NO: 586179
ccaauagugugagucaauu

SEQ ID NO: 698037 - RNA, 19 nt, Artificial Sequence
  Description of Artificial Sequence: Synthetic oligonucleotide
  Antisense strand to SEQ ID NO: 698036
aauugacucacacuauugg

SEQ ID NO: 698038 - RNA, 19 nt, Artificial Sequence
  Description of Artificial Sequence: Synthetic oligonucleotide
  Sense strand starting at position 1000 of SEQ ID NO: 586179
uguguauccauguguauac

SEQ ID NO: 698039 - RNA, 19 nt, Artificial Sequence
  Description of Artificial Sequence: Synthetic oligonucleotide
  Antisense strand to SEQ ID NO: 698038
guauacacauggauacaca

SEQ ID NO: 698040 - RNA, 19 nt, Artificial Sequence
  Description of Artificial Sequence: Synthetic oligonucleotide
  Sense strand starting at position 1001 of SEQ ID NO: 586179
guguauccauguguauaca

SEQ ID NO: 698041 - RNA, 19 nt, Artificial Sequence
  Description of Artificial Sequence: Synthetic oligonucleotide
  Antisense strand to SEQ ID NO: 698040
uguauacacauggauacac

SEQ ID NO: 698042 - RNA, 19 nt, Artificial Sequence
  Description of Artificial Sequence: Synthetic oligonucleotide
  Sense strand starting at position 1027 of SEQ ID NO: 586179
uauguauguguacguacau

SEQ ID NO: 698043 - RNA, 19 nt, Artificial Sequence
  Description of Artificial Sequence: Synthetic oligonucleotide
  Antisense strand to SEQ ID NO: 698042
auguacguacacauacaua

SEQ ID NO: 698044 - RNA, 19 nt, Artificial Sequence
  Description of Artificial Sequence: Synthetic oligonucleotide
  Sense strand starting at position 1028 of SEQ ID NO: 586179
auguauguguacguacaua

SEQ ID NO: 698045 - RNA, 19 nt, Artificial Sequence
  Description of Artificial Sequence: Synthetic oligonucleotide
  Antisense strand to SEQ ID NO: 698044
uauguacguacacauacau

SEQ ID NO: 698046 - RNA, 19 nt, Artificial Sequence
  Description of Artificial Sequence: Synthetic oligonucleotide
  Sense strand starting at position 1086 of SEQ ID NO: 586179
ggagaacccugaguaauuc

SEQ ID NO: 698047 - RNA, 19 nt, Artificial Sequence
  Description of Artificial Sequence: Synthetic oligonucleotide
  Antisense strand to SEQ ID NO: 698046
gaauuacucaggguucucc

SEQ ID NO: 698048 - RNA, 19 nt, Artificial Sequence
  Description of Artificial Sequence: Synthetic oligonucleotide
  Sense strand starting at position 1123 of SEQ ID NO: 586179
agauuaacauuccaaagug

SEQ ID NO: 698049 - RNA, 19 nt, Artificial Sequence
  Description of Artificial Sequence: Synthetic oligonucleotide
  Antisense strand to SEQ ID NO: 698048
cacuuuggaauguuaaucu

SEQ ID NO: 698050 - RNA, 19 nt, Artificial Sequence
  Description of Artificial Sequence: Synthetic oligonucleotide
  Sense strand starting at position 1131 of SEQ ID NO: 586179
auuccaaagugauuguuau

SEQ ID NO: 698051 - RNA, 19 nt, Artificial Sequence
  Description of Artificial Sequence: Synthetic oligonucleotide
  Antisense strand to SEQ ID NO: 698050
auaacaaucacuuuggaau

SEQ ID NO: 698052 - RNA, 19 nt, Artificial Sequence
  Description of Artificial Sequence: Synthetic oligonucleotide
  Sense strand starting at position 1132 of SEQ ID NO: 586179
uuccaaagugauuguuaua

SEQ ID NO: 698053 - RNA, 19 nt, Artificial Sequence
  Description of Artificial Sequence: Synthetic oligonucleotide
  Antisense strand to SEQ ID NO: 698052
uauaacaaucacuuuggaa

SEQ ID NO: 698054 - RNA, 19 nt, Artificial Sequence
  Description of Artificial Sequence: Synthetic oligonucleotide
  Sense strand starting at position 1273 of SEQ ID NO: 586179
cuucccuuauccuaggagu

SEQ ID NO: 698055 - RNA, 19 nt, Artificial Sequence
  Description of Artificial Sequence: Synthetic oligonucleotide
  Antisense strand to SEQ ID NO: 698054
acuccuaggauaagggaag

SEQ ID NO: 698056 - RNA, 19 nt, Artificial Sequence
  Description of Artificial Sequence: Synthetic oligonucleotide
  Sense strand starting at position 1275 of SEQ ID NO: 586179
ucccuuauccuaggaguga

SEQ ID NO: 698057 - RNA, 19 nt, Artificial Sequence
  Description of Artificial Sequence: Synthetic oligonucleotide
  Antisense strand to SEQ ID NO: 698056
ucacuccuaggauaaggga

SEQ ID NO: 698058 - RNA, 19 nt, Artificial Sequence
  Description of Artificial Sequence: Synthetic oligonucleotide
  Sense strand starting at position 1286 of SEQ ID NO: 586179
aggagugacucuugaucuc

SEQ ID NO: 698059 - RNA, 19 nt, Artificial Sequence
  Description of Artificial Sequence: Synthetic oligonucleotide
  Antisense strand to SEQ ID NO: 698058
gagaucaagagucacuccu

SEQ ID NO: 698060 - RNA, 19 nt, Artificial Sequence
  Description of Artificial Sequence: Synthetic oligonucleotide
  Sense strand starting at position 1940 of SEQ ID NO: 586179
cacagauauuauccugggu

SEQ ID NO: 698061 - RNA, 19 nt, Artificial Sequence
  Description of Artificial Sequence: Synthetic oligonucleotide
  Antisense strand to SEQ ID NO: 698060
acccaggauaauaucugug

SEQ ID NO: 698062 - RNA, 19 nt, Artificial Sequence
  Description of Artificial Sequence: Synthetic oligonucleotide
  Sense strand starting at position 1943 of SEQ ID NO: 586179
agauauuauccuggguccu

SEQ ID NO: 698063 - RNA, 19 nt, Artificial Sequence
  Description of Artificial Sequence: Synthetic oligonucleotide
  Antisense strand to SEQ ID NO: 698062
aggacccaggauaauaucu

SEQ ID NO: 698064 - RNA, 19 nt, Artificial Sequence
  Description of Artificial Sequence: Synthetic oligonucleotide
  Sense strand starting at position 2061 of SEQ ID NO: 586179
ggcagagguuaugaagaau

SEQ ID NO: 698065 - RNA, 19 nt, Artificial Sequence
  Description of Artificial Sequence: Synthetic oligonucleotide
  Antisense strand to SEQ ID NO: 698064
auucuucauaaccucugcc

SEQ ID NO: 698066 - RNA, 19 nt, Artificial Sequence
  Description of Artificial Sequence: Synthetic oligonucleotide
  Sense strand starting at position 2118 of SEQ ID NO: 586179
cagaguugaucucuggacu

SEQ ID NO: 698067 - RNA, 19 nt, Artificial Sequence
  Description of Artificial Sequence: Synthetic oligonucleotide
  Antisense strand to SEQ ID NO: 698066
aguccagagaucaacucug

SEQ ID NO: 698068 - RNA, 19 nt, Artificial Sequence
  Description of Artificial Sequence: Synthetic oligonucleotide
  Sense strand starting at position 2119 of SEQ ID NO: 586179
agaguugaucucuggacug

SEQ ID NO: 698069 - RNA, 19 nt, Artificial Sequence
  Description of Artificial Sequence: Synthetic oligonucleotide
  Antisense strand to SEQ ID NO: 698068
caguccagagaucaacucu

SEQ ID NO: 698070 - RNA, 19 nt, Artificial Sequence
  Description of Artificial Sequence: Synthetic oligonucleotide
  Sense strand starting at position 2432 of SEQ ID NO: 586179
ccuuucugugccuguggaa

SEQ ID NO: 698071 - RNA, 19 nt, Artificial Sequence
  Description of Artificial Sequence: Synthetic oligonucleotide
  Antisense strand to SEQ ID NO: 698070
uuccacaggcacagaaagg

SEQ ID NO: 698072 - RNA, 19 nt, Artificial Sequence
  Description of Artificial Sequence: Synthetic oligonucleotide
  Sense strand starting at position 2652 of SEQ ID NO: 586179
caguguugaugggcuauuu

SEQ ID NO: 698073 - RNA, 19 nt, Artificial Sequence
  Description of Artificial Sequence: Synthetic oligonucleotide
  Antisense strand to SEQ ID NO: 698072
aaauagcccaucaacacug

SEQ ID NO: 698074 - RNA, 19 nt, Artificial Sequence
  Description of Artificial Sequence: Synthetic oligonucleotide
  Sense strand starting at position 2674 of SEQ ID NO: 586179
gagagacccuccgaauaca

SEQ ID NO: 698075 - RNA, 19 nt, Artificial Sequence
  Description of Artificial Sequence: Synthetic oligonucleotide
  Antisense strand to SEQ ID NO: 698074
uguauucggagggucucuc

SEQ ID NO: 698076 - RNA, 19 nt, Artificial Sequence
  Description of Artificial Sequence: Synthetic oligonucleotide
  Sense strand starting at position 2695 of SEQ ID NO: 586179
gcaacaugcuauucuaaag

SEQ ID NO: 698077 - RNA, 19 nt, Artificial Sequence
  Description of Artificial Sequence: Synthetic oligonucleotide
  Antisense strand to SEQ ID NO: 698076
cuuuagaauagcauguugc

SEQ ID NO: 698078 - RNA, 19 nt, Artificial Sequence
  Description of Artificial Sequence: Synthetic oligonucleotide
  Sense strand starting at position 2996 of SEQ ID NO: 586179
gguuuacuagugugagcaa

SEQ ID NO: 698079 - RNA, 19 nt, Artificial Sequence
  Description of Artificial Sequence: Synthetic oligonucleotide
  Antisense strand to SEQ ID NO: 698078
uugcucacacuaguaaacc

SEQ ID NO: 698080 - RNA, 19 nt, Artificial Sequence
  Description of Artificial Sequence: Synthetic oligonucleotide
  Sense strand starting at position 3105 of SEQ ID NO: 586179
ggccguugugcuccaaagu

SEQ ID NO: 698081 - RNA, 19 nt, Artificial Sequence
  Description of Artificial Sequence: Synthetic oligonucleotide
  Antisense strand to SEQ ID NO: 698080
acuuuggagcacaacggcc

SEQ ID NO: 698082 - RNA, 19 nt, Artificial Sequence
  Description of Artificial Sequence: Synthetic oligonucleotide
  Sense strand starting at position 3198 of SEQ ID NO: 586179
augcucagaguuuaauuau

SEQ ID NO: 698083 - RNA, 19 nt, Artificial Sequence
  Description of Artificial Sequence: Synthetic oligonucleotide
  Antisense strand to SEQ ID NO: 698082
auaauuaaacucugagcau

SEQ ID NO: 698084 - RNA, 19 nt, Artificial Sequence
  Description of Artificial Sequence: Synthetic oligonucleotide
  Sense strand starting at position 3216 of SEQ ID NO: 586179
uuuguuagauuauguagag

SEQ ID NO: 698085 - RNA, 19 nt, Artificial Sequence
  Description of Artificial Sequence: Synthetic oligonucleotide
  Antisense strand to SEQ ID NO: 698084
cucuacauaaucuaacaaa

SEQ ID NO: 698086 - RNA, 19 nt, Artificial Sequence
  Description of Artificial Sequence: Synthetic oligonucleotide
  Sense strand starting at position 3245 of SEQ ID NO: 586179
agucauacaggcugagaca

SEQ ID NO: 698087 - RNA, 19 nt, Artificial Sequence
  Description of Artificial Sequence: Synthetic oligonucleotide
  Antisense strand to SEQ ID NO: 698086
ugucucagccuguaugacu

SEQ ID NO: 698088 - RNA, 19 nt, Artificial Sequence
  Description of Artificial Sequence: Synthetic oligonucleotide
  Sense strand starting at position 3300 of SEQ ID NO: 586179
aggcauuacuccuccuaga

SEQ ID NO: 698089 - RNA, 19 nt, Artificial Sequence
  Description of Artificial Sequence: Synthetic oligonucleotide
  Antisense strand to SEQ ID NO: 698088
ucuaggaggaguaaugccu

SEQ ID NO: 698090 - RNA, 19 nt, Artificial Sequence
  Description of Artificial Sequence: Synthetic oligonucleotide
  Sense strand starting at position 3460 of SEQ ID NO: 586179
cucauaucugaacggguga

SEQ ID NO: 698091 - RNA, 19 nt, Artificial Sequence
  Description of Artificial Sequence: Synthetic oligonucleotide
  Antisense strand to SEQ ID NO: 698090
ucacccguucagauaugag

SEQ ID NO: 698092 - RNA, 19 nt, Artificial Sequence
  Description of Artificial Sequence: Synthetic oligonucleotide
  Sense strand starting at position 3714 of SEQ ID NO: 586179
ucuuaaagguauccgcaaa

SEQ ID NO: 698093 - RNA, 19 nt, Artificial Sequence
  Description of Artificial Sequence: Synthetic oligonucleotide
  Antisense strand to SEQ ID NO: 698092
uuugcggauaccuuuaaga

SEQ ID NO: 698094 - RNA, 19 nt, Artificial Sequence
  Description of Artificial Sequence: Synthetic oligonucleotide
  Sense strand starting at position 3763 of SEQ ID NO: 586179
gccaucauugcaggacuaa

SEQ ID NO: 698095 - RNA, 19 nt, Artificial Sequence
  Description of Artificial Sequence: Synthetic oligonucleotide
  Antisense strand to SEQ ID NO: 698094
uuaguccugcaaugauggc

SEQ ID NO: 698096 - RNA, 19 nt, Artificial Sequence
  Description of Artificial Sequence: Synthetic oligonucleotide
  Sense strand starting at position 3764 of SEQ ID NO: 586179
ccaucauugcaggacuaau

SEQ ID NO: 698097 - RNA, 19 nt, Artificial Sequence
  Description of Artificial Sequence: Synthetic oligonucleotide
  Antisense strand to SEQ ID NO: 698096
auuaguccugcaaugaugg

SEQ ID NO: 698098 - RNA, 19 nt, Artificial Sequence
  Description of Artificial Sequence: Synthetic oligonucleotide
  Sense strand starting at position 3852 of SEQ ID NO: 586179
ugaauugaagcauggcaga

SEQ ID NO: 698099 - RNA, 19 nt, Artificial Sequence
  Description of Artificial Sequence: Synthetic oligonucleotide
  Antisense strand to SEQ ID NO: 698098
ucugccaugcuucaauuca

SEQ ID NO: 698100 - RNA, 19 nt, Artificial Sequence
  Description of Artificial Sequence: Synthetic oligonucleotide
  Sense strand starting at position 3952 of SEQ ID NO: 586179
uaaucuggcugggagauau

SEQ ID NO: 698101 - RNA, 19 nt, Artificial Sequence
  Description of Artificial Sequence: Synthetic oligonucleotide
  Antisense strand to SEQ ID NO: 698100
auaucucccagccagauua

SEQ ID NO: 698102 - RNA, 19 nt, Artificial Sequence
  Description of Artificial Sequence: Synthetic oligonucleotide
  Sense strand starting at position 61 of SEQ ID NO: 586180
uucuaaagaucgcccucua

SEQ ID NO: 698103 - RNA, 19 nt, Artificial Sequence
  Description of Artificial Sequence: Synthetic oligonucleotide
  Antisense strand to SEQ ID NO: 698102
uagagggcgaucuuuagaa

SEQ ID NO: 698104 - RNA, 19 nt, Artificial Sequence
  Description of Artificial Sequence: Synthetic oligonucleotide
  Sense strand starting at position 191 of SEQ ID NO: 586180
guauacacuuuguguguua

SEQ ID NO: 698105 - RNA, 19 nt, Artificial Sequence
  Description of Artificial Sequence: Synthetic oligonucleotide
  Antisense strand to SEQ ID NO: 698104
uaacacacaaaguguauac

SEQ ID NO: 698106 - RNA, 19 nt, Artificial Sequence
  Description of Artificial Sequence: Synthetic oligonucleotide
  Sense strand starting at position 193 of SEQ ID NO: 586180
auacacuuuguguguuaag

SEQ ID NO: 698107 - RNA, 19 nt, Artificial Sequence
  Description of Artificial Sequence: Synthetic oligonucleotide
  Antisense strand to SEQ ID NO: 698106
cuuaacacacaaaguguau

SEQ ID NO: 698108 - RNA, 19 nt, Artificial Sequence
  Description of Artificial Sequence: Synthetic oligonucleotide
  Sense strand starting at position 194 of SEQ ID NO: 586180
uacacuuuguguguuaaga

SEQ ID NO: 698109 - RNA, 19 nt, Artificial Sequence
  Description of Artificial Sequence: Synthetic oligonucleotide
  Antisense strand to SEQ ID NO: 698108
ucuuaacacacaaagugua

SEQ ID NO: 698110 - RNA, 19 nt, Artificial Sequence
  Description of Artificial Sequence: Synthetic oligonucleotide
  Sense strand starting at position 196 of SEQ ID NO: 586180
cacuuuguguguuaagaua

SEQ ID NO: 698111 - RNA, 19 nt, Artificial Sequence
  Description of Artificial Sequence: Synthetic oligonucleotide
  Antisense strand to SEQ ID NO: 698110
uaucuuaacacacaaagug

SEQ ID NO: 698112 - RNA, 19 nt, Artificial Sequence
  Description of Artificial Sequence: Synthetic oligonucleotide
  Sense strand starting at position 477 of SEQ ID NO: 586180
gaacuuagagaacguuaaa

SEQ ID NO: 698113 - RNA, 19 nt, Artificial Sequence
  Description of Artificial Sequence: Synthetic oligonucleotide
  Antisense strand to SEQ ID NO: 698112
uuuaacguucucuaaguuc

SEQ ID NO: 698114 - RNA, 19 nt, Artificial Sequence
  Description of Artificial Sequence: Synthetic oligonucleotide
  Sense strand starting at position 480 of SEQ ID NO: 586180
cuuagagaacguuaaaguu

SEQ ID NO: 698115 - RNA, 19 nt, Artificial Sequence
  Description of Artificial Sequence: Synthetic oligonucleotide
  Antisense strand to SEQ ID NO: 698114
aacuuuaacguucucuaag

SEQ ID NO: 698116 - RNA, 19 nt, Artificial Sequence
  Description of Artificial Sequence: Synthetic oligonucleotide
  Sense strand starting at position 488 of SEQ ID NO: 586180
acguuaaaguuucaagggu

SEQ ID NO: 698117 - RNA, 19 nt, Artificial Sequence
  Description of Artificial Sequence: Synthetic oligonucleotide
  Antisense strand to SEQ ID NO: 698116
acccuugaaacuuuaacgu

SEQ ID NO: 698118 - RNA, 19 nt, Artificial Sequence
  Description of Artificial Sequence: Synthetic oligonucleotide
  Sense strand starting at position 545 of SEQ ID NO: 586180
guguucuauuaauagcaga

SEQ ID NO: 698119 - RNA, 19 nt, Artificial Sequence
  Description of Artificial Sequence: Synthetic oligonucleotide
  Antisense strand to SEQ ID NO: 698118
ucugcuauuaauagaacac

SEQ ID NO: 698120 - RNA, 19 nt, Artificial Sequence
  Description of Artificial Sequence: Synthetic oligonucleotide
  Sense strand starting at position 548 of SEQ ID NO: 586180
uucuauuaauagcagauga

SEQ ID NO: 698121 - RNA, 19 nt, Artificial Sequence
  Description of Artificial Sequence: Synthetic oligonucleotide
  Antisense strand to SEQ ID NO: 698120
ucaucugcuauuaauagaa

SEQ ID NO: 698122 - RNA, 19 nt, Artificial Sequence
  Description of Artificial Sequence: Synthetic oligonucleotide
  Sense strand starting at position 559 of SEQ ID NO: 586180
gcagaugauuaacagauau

SEQ ID NO: 698123 - RNA, 19 nt, Artificial Sequence
  Description of Artificial Sequence: Synthetic oligonucleotide
  Antisense strand to SEQ ID NO: 698122
auaucuguuaaucaucugc

SEQ ID NO: 698124 - RNA, 19 nt, Artificial Sequence
  Description of Artificial Sequence: Synthetic oligonucleotide
  Sense strand starting at position 638 of SEQ ID NO: 586180
cucugucugugucuggaaa

SEQ ID NO: 698125 - RNA, 19 nt, Artificial Sequence
  Description of Artificial Sequence: Synthetic oligonucleotide
  Antisense strand to SEQ ID NO: 698124
uuuccagacacagacagag

SEQ ID NO: 698126 - RNA, 19 nt, Artificial Sequence
  Description of Artificial Sequence: Synthetic oligonucleotide
  Sense strand starting at position 696 of SEQ ID NO: 586180
caacgcauuccuuaagguu

SEQ ID NO: 698127 - RNA, 19 nt, Artificial Sequence
  Description of Artificial Sequence: Synthetic oligonucleotide
  Antisense strand to SEQ ID NO: 698126
aaccuuaaggaaugcguug

SEQ ID NO: 698128 - RNA, 19 nt, Artificial Sequence
  Description of Artificial Sequence: Synthetic oligonucleotide
  Sense strand starting at position 704 of SEQ ID NO: 586180
uccuuaagguuaggucaau

SEQ ID NO: 698129 - RNA, 19 nt, Artificial Sequence
  Description of Artificial Sequence: Synthetic oligonucleotide
  Antisense strand to SEQ ID NO: 698128
auugaccuaaccuuaagga

SEQ ID NO: 698130 - RNA, 19 nt, Artificial Sequence
  Description of Artificial Sequence: Synthetic oligonucleotide
  Sense strand starting at position 705 of SEQ ID NO: 586180
ccuuaagguuaggucaauu

SEQ ID NO: 698131 - RNA, 19 nt, Artificial Sequence
  Description of Artificial Sequence: Synthetic oligonucleotide
  Antisense strand to SEQ ID NO: 698130
aauugaccuaaccuuaagg

SEQ ID NO: 698132 - RNA, 19 nt, Artificial Sequence
  Description of Artificial Sequence: Synthetic oligonucleotide
  Sense strand starting at position 734 of SEQ ID NO: 586180
cucgguuguucuuugacuu

SEQ ID NO: 698133 - RNA, 19 nt, Artificial Sequence
  Description of Artificial Sequence: Synthetic oligonucleotide
  Antisense strand to SEQ ID NO: 698132
aagucaaagaacaaccgag

SEQ ID NO: 698134 - RNA, 19 nt, Artificial Sequence
  Description of Artificial Sequence: Synthetic oligonucleotide
  Sense strand starting at position 828 of SEQ ID NO: 586180
agggcguuucccgggagaa

SEQ ID NO: 698135 - RNA, 19 nt, Artificial Sequence
  Description of Artificial Sequence: Synthetic oligonucleotide
  Antisense strand to SEQ ID NO: 698134
uucucccgggaaacgcccu

SEQ ID NO: 698136 - RNA, 19 nt, Artificial Sequence
  Description of Artificial Sequence: Synthetic oligonucleotide
  Sense strand starting at position 829 of SEQ ID NO: 586180
gggcguuucccgggagaac

SEQ ID NO: 698137 - RNA, 19 nt, Artificial Sequence
  Description of Artificial Sequence: Synthetic oligonucleotide
  Antisense strand to SEQ ID NO: 698136
guucucccgggaaacgccc

SEQ ID NO: 698138 - RNA, 19 nt, Artificial Sequence
  Description of Artificial Sequence: Synthetic oligonucleotide
  Sense strand starting at position 989 of SEQ ID NO: 586180
ggucacugauuccaagaag

SEQ ID NO: 698139 - RNA, 19 nt, Artificial Sequence
  Description of Artificial Sequence: Synthetic oligonucleotide
  Antisense strand to SEQ ID NO: 698138
cuucuuggaaucagugacc

SEQ ID NO: 698140 - RNA, 19 nt, Artificial Sequence
  Description of Artificial Sequence: Synthetic oligonucleotide
  Sense strand starting at position 1607 of SEQ ID NO: 586180
guaccuucccgcguaaagu

SEQ ID NO: 698141 - RNA, 19 nt, Artificial Sequence
  Description of Artificial Sequence: Synthetic oligonucleotide
  Antisense strand to SEQ ID NO: 698140
acuuuacgcgggaagguac

SEQ ID NO: 698142 - RNA, 19 nt, Artificial Sequence
  Description of Artificial Sequence: Synthetic oligonucleotide
  Sense strand starting at position 1883 of SEQ ID NO: 586180
gcgcgucuccgcugcgaaa

SEQ ID NO: 698143 - RNA, 19 nt, Artificial Sequence
  Description of Artificial Sequence: Synthetic oligonucleotide
  Antisense strand to SEQ ID NO: 698142
uuucgcagcggagacgcgc

SEQ ID NO: 698144 - RNA, 19 nt, Artificial Sequence
  Description of Artificial Sequence: Synthetic oligonucleotide
  Sense strand starting at position 1931 of SEQ ID NO: 586180
gccuucuucgaggagcaga

SEQ ID NO: 698145 - RNA, 19 nt, Artificial Sequence
  Description of Artificial Sequence: Synthetic oligonucleotide
  Antisense strand to SEQ ID NO: 698144
ucugcuccucgaagaaggc

SEQ ID NO: 698146 - RNA, 19 nt, Artificial Sequence
  Description of Artificial Sequence: Synthetic oligonucleotide
  Sense strand starting at position 2589 of SEQ ID NO: 586180
uuugaaagcuccugauaua

SEQ ID NO: 698147 - RNA, 19 nt, Artificial Sequence
  Description of Artificial Sequence: Synthetic oligonucleotide
  Antisense strand to SEQ ID NO: 698146
uauaucaggagcuuucaaa

SEQ ID NO: 698148 - RNA, 19 nt, Artificial Sequence
  Description of Artificial Sequence: Synthetic oligonucleotide
  Sense strand starting at position 2590 of SEQ ID NO: 586180
uugaaagcuccugauauau

SEQ ID NO: 698149 - RNA, 19 nt, Artificial Sequence
  Description of Artificial Sequence: Synthetic oligonucleotide
  Antisense strand to SEQ ID NO: 698148
auauaucaggagcuuucaa

SEQ ID NO: 698150 - RNA, 19 nt, Artificial Sequence
  Description of Artificial Sequence: Synthetic oligonucleotide
  Sense strand starting at position 2617 of SEQ ID NO: 586180
uaauaaaugccagggucua

SEQ ID NO: 698151 - RNA, 19 nt, Artificial Sequence
  Description of Artificial Sequence: Synthetic oligonucleotide
  Antisense strand to SEQ ID NO: 698150
uagacccuggcauuuauua

SEQ ID NO: 698152 - RNA, 19 nt, Artificial Sequence
  Description of Artificial Sequence: Synthetic oligonucleotide
  Sense strand starting at position 2628 of SEQ ID NO: 586180
agggucuaguuaccgaaau

SEQ ID NO: 698153 - RNA, 19 nt, Artificial Sequence
  Description of Artificial Sequence: Synthetic oligonucleotide
  Antisense strand to SEQ ID NO: 698152
auuucgguaacuagacccu

SEQ ID NO: 698154 - RNA, 19 nt, Artificial Sequence
  Description of Artificial Sequence: Synthetic oligonucleotide
  Sense strand starting at position 2629 of SEQ ID NO: 586180
gggucuaguuaccgaaaug

SEQ ID NO: 698155 - RNA, 19 nt, Artificial Sequence
  Description of Artificial Sequence: Synthetic oligonucleotide
  Antisense strand to SEQ ID NO: 698154
cauuucgguaacuagaccc

SEQ ID NO: 698156 - RNA, 19 nt, Artificial Sequence
  Description of Artificial Sequence: Synthetic oligonucleotide
  Sense strand starting at position 2630 of SEQ ID NO: 586180
ggucuaguuaccgaaaugu

SEQ ID NO: 698157 - RNA, 19 nt, Artificial Sequence
  Description of Artificial Sequence: Synthetic oligonucleotide
  Antisense strand to SEQ ID NO: 698156
acauuucgguaacuagacc

SEQ ID NO: 698158 - RNA, 19 nt, Artificial Sequence
  Description of Artificial Sequence: Synthetic oligonucleotide
  Sense strand starting at position 2639 of SEQ ID NO: 586180
accgaaauguuaguacuuu

SEQ ID NO: 698159 - RNA, 19 nt, Artificial Sequence
  Description of Artificial Sequence: Synthetic oligonucleotide
  Antisense strand to SEQ ID NO: 698158
aaaguacuaacauuucggu

SEQ ID NO: 698160 - RNA, 19 nt, Artificial Sequence
  Description of Artificial Sequence: Synthetic oligonucleotide
  Sense strand starting at position 3161 of SEQ ID NO: 586180
ccaugcuacucacgagauu

SEQ ID NO: 698161 - RNA, 19 nt, Artificial Sequence
  Description of Artificial Sequence: Synthetic oligonucleotide
  Antisense strand to SEQ ID NO: 698160
aaucucgugaguagcaugg

SEQ ID NO: 698162 - RNA, 19 nt, Artificial Sequence
  Description of Artificial Sequence: Synthetic oligonucleotide
  Sense strand starting at position 3164 of SEQ ID NO: 586180
ugcuacucacgagauuguu

SEQ ID NO: 698163 - RNA, 19 nt, Artificial Sequence
  Description of Artificial Sequence: Synthetic oligonucleotide
  Antisense strand to SEQ ID NO: 698162
aacaaucucgugaguagca

SEQ ID NO: 698164 - RNA, 19 nt, Artificial Sequence
  Description of Artificial Sequence: Synthetic oligonucleotide
  Sense strand starting at position 3167 of SEQ ID NO: 586180
uacucacgagauuguugua

SEQ ID NO: 698165 - RNA, 19 nt, Artificial Sequence
  Description of Artificial Sequence: Synthetic oligonucleotide
  Antisense strand to SEQ ID NO: 698164
uacaacaaucucgugagua

SEQ ID NO: 698166 - RNA, 19 nt, Artificial Sequence
  Description of Artificial Sequence: Synthetic oligonucleotide
  Sense strand starting at position 3172 of SEQ ID NO: 586180
acgagauuguuguaggguu

SEQ ID NO: 698167 - RNA, 19 nt, Artificial Sequence
  Description of Artificial Sequence: Synthetic oligonucleotide
  Antisense strand to SEQ ID NO: 698166
aacccuacaacaaucucgu

SEQ ID NO: 698168 - RNA, 19 nt, Artificial Sequence
  Description of Artificial Sequence: Synthetic oligonucleotide
  Sense strand starting at position 3173 of SEQ ID NO: 586180
cgagauuguuguaggguuu

SEQ ID NO: 698169 - RNA, 19 nt, Artificial Sequence
  Description of Artificial Sequence: Synthetic oligonucleotide
  Antisense strand to SEQ ID NO: 698168
aaacccuacaacaaucucg

SEQ ID NO: 698170 - RNA, 19 nt, Artificial Sequence
  Description of Artificial Sequence: Synthetic oligonucleotide
  Sense strand starting at position 3336 of SEQ ID NO: 586180
gggccucucuuccaggauu

SEQ ID NO: 698171 - RNA, 19 nt, Artificial Sequence
  Description of Artificial Sequence: Synthetic oligonucleotide
  Antisense strand to SEQ ID NO: 698170
aauccuggaagagaggccc

SEQ ID NO: 698172 - RNA, 19 nt, Artificial Sequence
  Description of Artificial Sequence: Synthetic oligonucleotide
  Sense strand starting at position 3338 of SEQ ID NO: 586180
gccucucuuccaggauuau

SEQ ID NO: 698173 - RNA, 19 nt, Artificial Sequence
  Description of Artificial Sequence: Synthetic oligonucleotide
  Antisense strand to SEQ ID NO: 698172
auaauccuggaagagaggc

SEQ ID NO: 698174 - RNA, 19 nt, Artificial Sequence
  Description of Artificial Sequence: Synthetic oligonucleotide
  Sense strand starting at position 3339 of SEQ ID NO: 586180
ccucucuuccaggauuaug

SEQ ID NO: 698175 - RNA, 19 nt, Artificial Sequence
  Description of Artificial Sequence: Synthetic oligonucleotide
  Antisense strand to SEQ ID NO: 698174
cauaauccuggaagagagg

SEQ ID NO: 698176 - RNA, 19 nt, Artificial Sequence
  Description of Artificial Sequence: Synthetic oligonucleotide
  Sense strand starting at position 3847 of SEQ ID NO: 586180
acugguugagucuaggagu

SEQ ID NO: 698177 - RNA, 19 nt, Artificial Sequence
  Description of Artificial Sequence: Synthetic oligonucleotide
  Antisense strand to SEQ ID NO: 698176
acuccuagacucaaccagu

SEQ ID NO: 698178 - RNA, 19 nt, Artificial Sequence
  Description of Artificial Sequence: Synthetic oligonucleotide
  Sense strand starting at position 133 of SEQ ID NO: 586181
ccaccuucuucuguugauu

SEQ ID NO: 698179 - RNA, 19 nt, Artificial Sequence
  Description of Artificial Sequence: Synthetic oligonucleotide
  Antisense strand to SEQ ID NO: 698178
aaucaacagaagaaggugg

SEQ ID NO: 698180 - RNA, 19 nt, Artificial Sequence
  Description of Artificial Sequence: Synthetic oligonucleotide
  Sense strand starting at position 135 of SEQ ID NO: 586181
accuucuucuguugauuga

SEQ ID NO: 698181 - RNA, 19 nt, Artificial Sequence
  Description of Artificial Sequence: Synthetic oligonucleotide
  Antisense strand to SEQ ID NO: 698180
ucaaucaacagaagaaggu

SEQ ID NO: 698182 - RNA, 19 nt, Artificial Sequence
  Description of Artificial Sequence: Synthetic oligonucleotide
  Sense strand starting at position 146 of SEQ ID NO: 586181
uugauugacuuacagggau

SEQ ID NO: 698183 - RNA, 19 nt, Artificial Sequence
  Description of Artificial Sequence: Synthetic oligonucleotide
  Antisense strand to SEQ ID NO: 698182
aucccuguaagucaaucaa

SEQ ID NO: 698184 - RNA, 19 nt, Artificial Sequence
  Description of Artificial Sequence: Synthetic oligonucleotide
  Sense strand starting at position 171 of SEQ ID NO: 586181
ggaagagcgguggauucua

SEQ ID NO: 698185 - RNA, 19 nt, Artificial Sequence
  Description of Artificial Sequence: Synthetic oligonucleotide
  Antisense strand to SEQ ID NO: 698184
uagaauccaccgcucuucc

SEQ ID NO: 698186 - RNA, 19 nt, Artificial Sequence
  Description of Artificial Sequence: Synthetic oligonucleotide
  Sense strand starting at position 179 of SEQ ID NO: 586181
gguggauucuacuccucuu

SEQ ID NO: 698187 - RNA, 19 nt, Artificial Sequence
  Description of Artificial Sequence: Synthetic oligonucleotide
  Antisense strand to SEQ ID NO: 698186
aagaggaguagaauccacc

SEQ ID NO: 698188 - RNA, 19 nt, Artificial Sequence
  Description of Artificial Sequence: Synthetic oligonucleotide
  Sense strand starting at position 424 of SEQ ID NO: 586181
ucuaaaguacugcguuaaa

SEQ ID NO: 698189 - RNA, 19 nt, Artificial Sequence
  Description of Artificial Sequence: Synthetic oligonucleotide
  Antisense strand to SEQ ID NO: 698188
uuuaacgcaguacuuuaga

SEQ ID NO: 698190 - RNA, 19 nt, Artificial Sequence
  Description of Artificial Sequence: Synthetic oligonucleotide
  Sense strand starting at position 427 of SEQ ID NO: 586181
aaaguacugcguuaaagug

SEQ ID NO: 698191 - RNA, 19 nt, Artificial Sequence
  Description of Artificial Sequence: Synthetic oligonucleotide
  Antisense strand to SEQ ID NO: 698190
cacuuuaacgcaguacuuu

SEQ ID NO: 698192 - RNA, 19 nt, Artificial Sequence
  Description of Artificial Sequence: Synthetic oligonucleotide
  Sense strand starting at position 461 of SEQ ID NO: 586181
ugaaauaacucugagagac

SEQ ID NO: 698193 - RNA, 19 nt, Artificial Sequence
  Description of Artificial Sequence: Synthetic oligonucleotide
  Antisense strand to SEQ ID NO: 698192
gucucucagaguuauuuca

SEQ ID NO: 698194 - RNA, 19 nt, Artificial Sequence
  Description of Artificial Sequence: Synthetic oligonucleotide
  Sense strand starting at position 502 of SEQ ID NO: 586181
gcaagaaacugagaaauga

SEQ ID NO: 698195 - RNA, 19 nt, Artificial Sequence
  Description of Artificial Sequence: Synthetic oligonucleotide
  Antisense strand to SEQ ID NO: 698194
ucauuucucaguuucuugc

SEQ ID NO: 698196 - RNA, 19 nt, Artificial Sequence
  Description of Artificial Sequence: Synthetic oligonucleotide
  Sense strand starting at position 518 of SEQ ID NO: 586181
ugaaguccuuccgaacaga

SEQ ID NO: 698197 - RNA, 19 nt, Artificial Sequence
  Description of Artificial Sequence: Synthetic oligonucleotide
  Antisense strand to SEQ ID NO: 698196
ucuguucggaaggacuuca

SEQ ID NO: 698198 - RNA, 19 nt, Artificial Sequence
  Description of Artificial Sequence: Synthetic oligonucleotide
  Sense strand starting at position 595 of SEQ ID NO: 586181
agaaaugcuugauuccgaa

SEQ ID NO: 698199 - RNA, 19 nt, Artificial Sequence
  Description of Artificial Sequence: Synthetic oligonucleotide
  Antisense strand to SEQ ID NO: 698198
uucggaaucaagcauuucu

SEQ ID NO: 698200 - RNA, 19 nt, Artificial Sequence
  Description of Artificial Sequence: Synthetic oligonucleotide
  Sense strand starting at position 650 of SEQ ID NO: 586181
cgauucuucuggcacccau

SEQ ID NO: 698201 - RNA, 19 nt, Artificial Sequence
  Description of Artificial Sequence: Synthetic oligonucleotide
  Antisense strand to SEQ ID NO: 698200
augggugccagaagaaucg

SEQ ID NO: 698202 - RNA, 19 nt, Artificial Sequence
  Description of Artificial Sequence: Synthetic oligonucleotide
  Sense strand starting at position 709 of SEQ ID NO: 586181
agauaaugcuuaugcaaga

SEQ ID NO: 698203 - RNA, 19 nt, Artificial Sequence
  Description of Artificial Sequence: Synthetic oligonucleotide
  Antisense strand to SEQ ID NO: 698202
ucuugcauaagcauuaucu

SEQ ID NO: 698204 - RNA, 19 nt, Artificial Sequence
  Description of Artificial Sequence: Synthetic oligonucleotide
  Sense strand starting at position 714 of SEQ ID NO: 586181
augcuuaugcaagaaaucu

SEQ ID NO: 698205 - RNA, 19 nt, Artificial Sequence
  Description of Artificial Sequence: Synthetic oligonucleotide
  Antisense strand to SEQ ID NO: 698204
agauuucuugcauaagcau

SEQ ID NO: 698206 - RNA, 19 nt, Artificial Sequence
  Description of Artificial Sequence: Synthetic oligonucleotide
  Sense strand starting at position 727 of SEQ ID NO: 586181
aaaucuuagucaugacgag

SEQ ID NO: 698207 - RNA, 19 nt, Artificial Sequence
  Description of Artificial Sequence: Synthetic oligonucleotide
  Antisense strand to SEQ ID NO: 698206
cucgucaugacuaagauuu

SEQ ID NO: 698208 - RNA, 19 nt, Artificial Sequence
  Description of Artificial Sequence: Synthetic oligonucleotide
  Sense strand starting at position 744 of SEQ ID NO: 586181
agaggaugcuuccuuugua

SEQ ID NO: 698209 - RNA, 19 nt, Artificial Sequence
  Description of Artificial Sequence: Synthetic oligonucleotide
  Antisense strand to SEQ ID NO: 698208
uacaaaggaagcauccucu

SEQ ID NO: 698210 - RNA, 19 nt, Artificial Sequence
  Description of Artificial Sequence: Synthetic oligonucleotide
  Sense strand starting at position 745 of SEQ ID NO: 586181
gaggaugcuuccuuuguaa

SEQ ID NO: 698211 - RNA, 19 nt, Artificial Sequence
  Description of Artificial Sequence: Synthetic oligonucleotide
  Antisense strand to SEQ ID NO: 698210
uuacaaaggaagcauccuc

SEQ ID NO: 698212 - RNA, 19 nt, Artificial Sequence
  Description of Artificial Sequence: Synthetic oligonucleotide
  Sense strand starting at position 950 of SEQ ID NO: 586181
ggaaucucauuccuaguuu

SEQ ID NO: 698213 - RNA, 19 nt, Artificial Sequence
  Description of Artificial Sequence: Synthetic oligonucleotide
  Antisense strand to SEQ ID NO: 698212
aaacuaggaaugagauucc

SEQ ID NO: 698214 - RNA, 19 nt, Artificial Sequence
  Description of Artificial Sequence: Synthetic oligonucleotide
  Sense strand starting at position 1062 of SEQ ID NO: 586181
cgcaguugagucuugcaca

SEQ ID NO: 698215 - RNA, 19 nt, Artificial Sequence
  Description of Artificial Sequence: Synthetic oligonucleotide
  Antisense strand to SEQ ID NO: 698214
ugugcaagacucaacugcg

SEQ ID NO: 698216 - RNA, 19 nt, Artificial Sequence
  Description of Artificial Sequence: Synthetic oligonucleotide
  Sense strand starting at position 2030 of SEQ ID NO: 586181
gguggcgaaugcuccaaua

SEQ ID NO: 698217 - RNA, 19 nt, Artificial Sequence
  Description of Artificial Sequence: Synthetic oligonucleotide
  Antisense strand to SEQ ID NO: 698216
uauuggagcauucgccacc

SEQ ID NO: 698218 - RNA, 19 nt, Artificial Sequence
  Description of Artificial Sequence: Synthetic oligonucleotide
  Sense strand starting at position 2073 of SEQ ID NO: 586181
agccuauuggcucggagga

SEQ ID NO: 698219 - RNA, 19 nt, Artificial Sequence
  Description of Artificial Sequence: Synthetic oligonucleotide
  Antisense strand to SEQ ID NO: 698218
uccuccgagccaauaggcu

SEQ ID NO: 698220 - RNA, 19 nt, Artificial Sequence
  Description of Artificial Sequence: Synthetic oligonucleotide
  Sense strand starting at position 2161 of SEQ ID NO: 586181
gcagucugaagaggugaaa

SEQ ID NO: 698221 - RNA, 19 nt, Artificial Sequence
  Description of Artificial Sequence: Synthetic oligonucleotide
  Antisense strand to SEQ ID NO: 698220
uuucaccucuucagacugc

SEQ ID NO: 698222 - RNA, 19 nt, Artificial Sequence
  Description of Artificial Sequence: Synthetic oligonucleotide
  Sense strand starting at position 2187 of SEQ ID NO: 586181
uuauguaagcgcccgugau

SEQ ID NO: 698223 - RNA, 19 nt, Artificial Sequence
  Description of Artificial Sequence: Synthetic oligonucleotide
  Antisense strand to SEQ ID NO: 698222
aucacgggcgcuuacauaa

SEQ ID NO: 698224 - RNA, 19 nt, Artificial Sequence
  Description of Artificial Sequence: Synthetic oligonucleotide
  Sense strand starting at position 2188 of SEQ ID NO: 586181
uauguaagcgcccgugaua

SEQ ID NO: 698225 - RNA, 19 nt, Artificial Sequence
  Description of Artificial Sequence: Synthetic oligonucleotide
  Antisense strand to SEQ ID NO: 698224
uaucacgggcgcuuacaua

SEQ ID NO: 698226 - RNA, 19 nt, Artificial Sequence
  Description of Artificial Sequence: Synthetic oligonucleotide
  Sense strand starting at position 2596 of SEQ ID NO: 586181
gcgggagugugguugagau

SEQ ID NO: 698227 - RNA, 19 nt, Artificial Sequence
  Description of Artificial Sequence: Synthetic oligonucleotide
  Antisense strand to SEQ ID NO: 698226
aucucaaccacacucccgc

SEQ ID NO: 698228 - RNA, 19 nt, Artificial Sequence
  Description of Artificial Sequence: Synthetic oligonucleotide
  Sense strand starting at position 2598 of SEQ ID NO: 586181
gggagugugguugagaucu

SEQ ID NO: 698229 - RNA, 19 nt, Artificial Sequence
  Description of Artificial Sequence: Synthetic oligonucleotide
  Antisense strand to SEQ ID NO: 698228
agaucucaaccacacuccc

SEQ ID NO: 698230 - RNA, 19 nt, Artificial Sequence
  Description of Artificial Sequence: Synthetic oligonucleotide
  Sense strand starting at position 2604 of SEQ ID NO: 586181
gugguugagaucuggguag

SEQ ID NO: 698231 - RNA, 19 nt, Artificial Sequence
  Description of Artificial Sequence: Synthetic oligonucleotide
  Antisense strand to SEQ ID NO: 698230
cuacccagaucucaaccac

SEQ ID NO: 698232 - RNA, 19 nt, Artificial Sequence
  Description of Artificial Sequence: Synthetic oligonucleotide
  Sense strand starting at position 2606 of SEQ ID NO: 586181
gguugagaucuggguagaa

SEQ ID NO: 698233 - RNA, 19 nt, Artificial Sequence
  Description of Artificial Sequence: Synthetic oligonucleotide
  Antisense strand to SEQ ID NO: 698232
uucuacccagaucucaacc

SEQ ID NO: 698234 - RNA, 19 nt, Artificial Sequence
  Description of Artificial Sequence: Synthetic oligonucleotide
  Sense strand starting at position 2622 of SEQ ID NO: 586181
gaaguauacugcuuguuuc

SEQ ID NO: 698235 - RNA, 19 nt, Artificial Sequence
  Description of Artificial Sequence: Synthetic oligonucleotide
  Antisense strand to SEQ ID NO: 698234
gaaacaagcaguauacuuc

SEQ ID NO: 698236 - RNA, 19 nt, Artificial Sequence
  Description of Artificial Sequence: Synthetic oligonucleotide
  Sense strand starting at position 2665 of SEQ ID NO: 586181
auagaagcuucuuuggaga

SEQ ID NO: 698237 - RNA, 19 nt, Artificial Sequence
  Description of Artificial Sequence: Synthetic oligonucleotide
  Antisense strand to SEQ ID NO: 698236
ucuccaaagaagcuucuau

SEQ ID NO: 698238 - RNA, 19 nt, Artificial Sequence
  Description of Artificial Sequence: Synthetic oligonucleotide
  Sense strand starting at position 2667 of SEQ ID NO: 586181
agaagcuucuuuggagaaa

SEQ ID NO: 698239 - RNA, 19 nt, Artificial Sequence
  Description of Artificial Sequence: Synthetic oligonucleotide
  Antisense strand to SEQ ID NO: 698238
uuucuccaaagaagcuucu

SEQ ID NO: 698240 - RNA, 19 nt, Artificial Sequence
  Description of Artificial Sequence: Synthetic oligonucleotide
  Sense strand starting at position 2668 of SEQ ID NO: 586181
gaagcuucuuuggagaaau

SEQ ID NO: 698241 - RNA, 19 nt, Artificial Sequence
  Description of Artificial Sequence: Synthetic oligonucleotide
  Antisense strand to SEQ ID NO: 698240
auuucuccaaagaagcuuc

SEQ ID NO: 698242 - RNA, 19 nt, Artificial Sequence
  Description of Artificial Sequence: Synthetic oligonucleotide
  Sense strand starting at position 3327 of SEQ ID NO: 586181
gcaccuggcucggaacauu

SEQ ID NO: 698243 - RNA, 19 nt, Artificial Sequence
  Description of Artificial Sequence: Synthetic oligonucleotide
  Antisense strand to SEQ ID NO: 698242
aauguuccgagccaggugc

SEQ ID NO: 698244 - RNA, 19 nt, Artificial Sequence
  Description of Artificial Sequence: Synthetic oligonucleotide
  Sense strand starting at position 3339 of SEQ ID NO: 586181
gaacauuguaggugcuagu

SEQ ID NO: 698245 - RNA, 19 nt, Artificial Sequence
  Description of Artificial Sequence: Synthetic oligonucleotide
  Antisense strand to SEQ ID NO: 698244
acuagcaccuacaauguuc

SEQ ID NO: 698246 - RNA, 19 nt, Artificial Sequence
  Description of Artificial Sequence: Synthetic oligonucleotide
  Sense strand starting at position 3342 of SEQ ID NO: 586181
cauuguaggugcuagugaa

SEQ ID NO: 698247 - RNA, 19 nt, Artificial Sequence
  Description of Artificial Sequence: Synthetic oligonucleotide
  Antisense strand to SEQ ID NO: 698246
uucacuagcaccuacaaug

SEQ ID NO: 698248 - RNA, 19 nt, Artificial Sequence
  Description of Artificial Sequence: Synthetic oligonucleotide
  Sense strand starting at position 3346 of SEQ ID NO: 586181
guaggugcuagugaauacu

SEQ ID NO: 698249 - RNA, 19 nt, Artificial Sequence
  Description of Artificial Sequence: Synthetic oligonucleotide
  Antisense strand to SEQ ID NO: 698248
aguauucacuagcaccuac

SEQ ID NO: 698250 - RNA, 19 nt, Artificial Sequence
  Description of Artificial Sequence: Synthetic oligonucleotide
  Sense strand starting at position 3349 of SEQ ID NO: 586181
ggugcuagugaauacuauu

SEQ ID NO: 698251 - RNA, 19 nt, Artificial Sequence
  Description of Artificial Sequence: Synthetic oligonucleotide
  Antisense strand to SEQ ID NO: 698250
aauaguauucacuagcacc

SEQ ID NO: 698252 - RNA, 19 nt, Artificial Sequence
  Description of Artificial Sequence: Synthetic oligonucleotide
  Sense strand starting at position 3352 of SEQ ID NO: 586181
gcuagugaauacuauuuga

SEQ ID NO: 698253 - RNA, 19 nt, Artificial Sequence
  Description of Artificial Sequence: Synthetic oligonucleotide
  Antisense strand to SEQ ID NO: 698252
ucaaauaguauucacuagc

SEQ ID NO: 698254 - RNA, 19 nt, Artificial Sequence
  Description of Artificial Sequence: Synthetic oligonucleotide
  Sense strand starting at position 3493 of SEQ ID NO: 586181
ugagauuaggcgugaccca

SEQ ID NO: 698255 - RNA, 19 nt, Artificial Sequence
  Description of Artificial Sequence: Synthetic oligonucleotide
  Antisense strand to SEQ ID NO: 698254
ugggucacgccuaaucuca

SEQ ID NO: 698256 - RNA, 19 nt, Artificial Sequence
  Description of Artificial Sequence: Synthetic oligonucleotide
  Sense strand starting at position 3523 of SEQ ID NO: 586181
caggaugucucuuuaauag

SEQ ID NO: 698257 - RNA, 19 nt, Artificial Sequence
  Description of Artificial Sequence: Synthetic oligonucleotide
  Antisense strand to SEQ ID NO: 698256
cuauuaaagagacauccug

SEQ ID NO: 698258 - RNA, 19 nt, Artificial Sequence
  Description of Artificial Sequence: Synthetic oligonucleotide
  Sense strand starting at position 164 of SEQ ID NO: 586182
gcacuuucugaccacguua

SEQ ID NO: 698259 - RNA, 19 nt, Artificial Sequence
  Description of Artificial Sequence: Synthetic oligonucleotide
  Antisense strand to SEQ ID NO: 698258
uaacguggucagaaagugc

SEQ ID NO: 698260 - RNA, 19 nt, Artificial Sequence
  Description of Artificial Sequence: Synthetic oligonucleotide
  Sense strand starting at position 202 of SEQ ID NO: 586182
agucccuuauccucuagua

SEQ ID NO: 698261 - RNA, 19 nt, Artificial Sequence
  Description of Artificial Sequence: Synthetic oligonucleotide
  Antisense strand to SEQ ID NO: 698260
uacuagaggauaagggacu

SEQ ID NO: 698262 - RNA, 19 nt, Artificial Sequence
  Description of Artificial Sequence: Synthetic oligonucleotide
  Sense strand starting at position 223 of SEQ ID NO: 586182
ucaauuguucuagggugga

SEQ ID NO: 698263 - RNA, 19 nt, Artificial Sequence
  Description of Artificial Sequence: Synthetic oligonucleotide
  Antisense strand to SEQ ID NO: 698262
uccacccuagaacaauuga

SEQ ID NO: 698264 - RNA, 19 nt, Artificial Sequence
  Description of Artificial Sequence: Synthetic oligonucleotide
  Sense strand starting at position 271 of SEQ ID NO: 586182
guacucaauagaugucagu

SEQ ID NO: 698265 - RNA, 19 nt, Artificial Sequence
  Description of Artificial Sequence: Synthetic oligonucleotide
  Antisense strand to SEQ ID NO: 698264
acugacaucuauugaguac

SEQ ID NO: 698266 - RNA, 19 nt, Artificial Sequence
  Description of Artificial Sequence: Synthetic oligonucleotide
  Sense strand starting at position 319 of SEQ ID NO: 586182
aggagagacagugguagua

SEQ ID NO: 698267 - RNA, 19 nt, Artificial Sequence
  Description of Artificial Sequence: Synthetic oligonucleotide
  Antisense strand to SEQ ID NO: 698266
uacuaccacugucucuccu

SEQ ID NO: 698268 - RNA, 19 nt, Artificial Sequence
  Description of Artificial Sequence: Synthetic oligonucleotide
  Sense strand starting at position 334 of SEQ ID NO: 586182
aguagugguaguugaaaga

SEQ ID NO: 698269 - RNA, 19 nt, Artificial Sequence
  Description of Artificial Sequence: Synthetic oligonucleotide
  Antisense strand to SEQ ID NO: 698268
ucuuucaacuaccacuacu

SEQ ID NO: 698270 - RNA, 19 nt, Artificial Sequence
  Description of Artificial Sequence: Synthetic oligonucleotide
  Sense strand starting at position 366 of SEQ ID NO: 586182
uguucugugcaagacacaa

SEQ ID NO: 698271 - RNA, 19 nt, Artificial Sequence
  Description of Artificial Sequence: Synthetic oligonucleotide
  Antisense strand to SEQ ID NO: 698270
uugugucuugcacagaaca

SEQ ID NO: 698272 - RNA, 19 nt, Artificial Sequence
  Description of Artificial Sequence: Synthetic oligonucleotide
  Sense strand starting at position 464 of SEQ ID NO: 586182
guuauuaaccagcagggau

SEQ ID NO: 698273 - RNA, 19 nt, Artificial Sequence
  Description of Artificial Sequence: Synthetic oligonucleotide
  Antisense strand to SEQ ID NO: 698272
aucccugcugguuaauaac

SEQ ID NO: 698274 - RNA, 19 nt, Artificial Sequence
  Description of Artificial Sequence: Synthetic oligonucleotide
  Sense strand starting at position 531 of SEQ ID NO: 586182
aguauucuaaagcguaaga

SEQ ID NO: 698275 - RNA, 19 nt, Artificial Sequence
  Description of Artificial Sequence: Synthetic oligonucleotide
  Antisense strand to SEQ ID NO: 698274
ucuuacgcuuuagaauacu

SEQ ID NO: 698276 - RNA, 19 nt, Artificial Sequence
  Description of Artificial Sequence: Synthetic oligonucleotide
  Sense strand starting at position 533 of SEQ ID NO: 586182
uauucuaaagcguaagacu

SEQ ID NO: 698277 - RNA, 19 nt, Artificial Sequence
  Description of Artificial Sequence: Synthetic oligonucleotide
  Antisense strand to SEQ ID NO: 698276
agucuuacgcuuuagaaua

SEQ ID NO: 698278 - RNA, 19 nt, Artificial Sequence
  Description of Artificial Sequence: Synthetic oligonucleotide
  Sense strand starting at position 542 of SEQ ID NO: 586182
gcguaagacuuacuacauc

SEQ ID NO: 698279 - RNA, 19 nt, Artificial Sequence
  Description of Artificial Sequence: Synthetic oligonucleotide
  Antisense strand to SEQ ID NO: 698278
gauguaguaagucuuacgc

SEQ ID NO: 698280 - RNA, 19 nt, Artificial Sequence
  Description of Artificial Sequence: Synthetic oligonucleotide
  Sense strand starting at position 883 of SEQ ID NO: 586182
ucugaaugcuggccaacuu

SEQ ID NO: 698281 - RNA, 19 nt, Artificial Sequence
  Description of Artificial Sequence: Synthetic oligonucleotide
  Antisense strand to SEQ ID NO: 698280
aaguuggccagcauucaga

SEQ ID NO: 698282 - RNA, 19 nt, Artificial Sequence
  Description of Artificial Sequence: Synthetic oligonucleotide
  Sense strand starting at position 884 of SEQ ID NO: 586182
cugaaugcuggccaacuua

SEQ ID NO: 698283 - RNA, 19 nt, Artificial Sequence
  Description of Artificial Sequence: Synthetic oligonucleotide
  Antisense strand to SEQ ID NO: 698282
uaaguuggccagcauucag

SEQ ID NO: 698284 - RNA, 19 nt, Artificial Sequence
  Description of Artificial Sequence: Synthetic oligonucleotide
  Sense strand starting at position 931 of SEQ ID NO: 586182
ucaaguuguuuaucaauga

SEQ ID NO: 698285 - RNA, 19 nt, Artificial Sequence
  Description of Artificial Sequence: Synthetic oligonucleotide
  Antisense strand to SEQ ID NO: 698284
ucauugauaaacaacuuga

SEQ ID NO: 698286 - RNA, 19 nt, Artificial Sequence
  Description of Artificial Sequence: Synthetic oligonucleotide
  Sense strand starting at position 935 of SEQ ID NO: 586182
guuguuuaucaaugaggac

SEQ ID NO: 698287 - RNA, 19 nt, Artificial Sequence
  Description of Artificial Sequence: Synthetic oligonucleotide
  Antisense strand to SEQ ID NO: 698286
guccucauugauaaacaac

SEQ ID NO: 698288 - RNA, 19 nt, Artificial Sequence
  Description of Artificial Sequence: Synthetic oligonucleotide
  Sense strand starting at position 950 of SEQ ID NO: 586182
ggacauguaagauguguau

SEQ ID NO: 698289 - RNA, 19 nt, Artificial Sequence
  Description of Artificial Sequence: Synthetic oligonucleotide
  Antisense strand to SEQ ID NO: 698288
auacacaucuuacaugucc

SEQ ID NO: 698290 - RNA, 19 nt, Artificial Sequence
  Description of Artificial Sequence: Synthetic oligonucleotide
  Sense strand starting at position 952 of SEQ ID NO: 586182
acauguaagauguguauac

SEQ ID NO: 698291 - RNA, 19 nt, Artificial Sequence
  Description of Artificial Sequence: Synthetic oligonucleotide
  Antisense strand to SEQ ID NO: 698290
guauacacaucuuacaugu

SEQ ID NO: 698292 - RNA, 19 nt, Artificial Sequence
  Description of Artificial Sequence: Synthetic oligonucleotide
  Sense strand starting at position 954 of SEQ ID NO: 586182
auguaagauguguauaccu

SEQ ID NO: 698293 - RNA, 19 nt, Artificial Sequence
  Description of Artificial Sequence: Synthetic oligonucleotide
  Antisense strand to SEQ ID NO: 698292
agguauacacaucuuacau

SEQ ID NO: 698294 - RNA, 19 nt, Artificial Sequence
  Description of Artificial Sequence: Synthetic oligonucleotide
  Sense strand starting at position 956 of SEQ ID NO: 586182
guaagauguguauaccugu

SEQ ID NO: 698295 - RNA, 19 nt, Artificial Sequence
  Description of Artificial Sequence: Synthetic oligonucleotide
  Antisense strand to SEQ ID NO: 698294
acagguauacacaucuuac

SEQ ID NO: 698296 - RNA, 19 nt, Artificial Sequence
  Description of Artificial Sequence: Synthetic oligonucleotide
  Sense strand starting at position 962 of SEQ ID NO: 586182
uguguauaccuguaagaua

SEQ ID NO: 698297 - RNA, 19 nt, Artificial Sequence
  Description of Artificial Sequence: Synthetic oligonucleotide
  Antisense strand to SEQ ID NO: 698296
uaucuuacagguauacaca

SEQ ID NO: 698298 - RNA, 19 nt, Artificial Sequence
  Description of Artificial Sequence: Synthetic oligonucleotide
  Sense strand starting at position 1103 of SEQ ID NO: 586182
uguuguggucuccaaguaa

SEQ ID NO: 698299 - RNA, 19 nt, Artificial Sequence
  Description of Artificial Sequence: Synthetic oligonucleotide
  Antisense strand to SEQ ID NO: 698298
uuacuuggagaccacaaca

SEQ ID NO: 698300 - RNA, 19 nt, Artificial Sequence
  Description of Artificial Sequence: Synthetic oligonucleotide
  Sense strand starting at position 1449 of SEQ ID NO: 586182
uggaaaggguauucaugua

SEQ ID NO: 698301 - RNA, 19 nt, Artificial Sequence
  Description of Artificial Sequence: Synthetic oligonucleotide
  Antisense strand to SEQ ID NO: 698300
uacaugaauacccuuucca

SEQ ID NO: 698302 - RNA, 19 nt, Artificial Sequence
  Description of Artificial Sequence: Synthetic oligonucleotide
  Sense strand starting at position 2096 of SEQ ID NO: 586182
uuggaauuagauugcuacu

SEQ ID NO: 698303 - RNA, 19 nt, Artificial Sequence
  Description of Artificial Sequence: Synthetic oligonucleotide
  Antisense strand to SEQ ID NO: 698302
aguagcaaucuaauuccaa

SEQ ID NO: 698304 - RNA, 19 nt, Artificial Sequence
  Description of Artificial Sequence: Synthetic oligonucleotide
  Sense strand starting at position 2147 of SEQ ID NO: 586182
cucauuagcagagagugau

SEQ ID NO: 698305 - RNA, 19 nt, Artificial Sequence
  Description of Artificial Sequence: Synthetic oligonucleotide
  Antisense strand to SEQ ID NO: 698304
aucacucucugcuaaugag

SEQ ID NO: 698306 - RNA, 19 nt, Artificial Sequence
  Description of Artificial Sequence: Synthetic oligonucleotide
  Sense strand starting at position 2150 of SEQ ID NO: 586182
auuagcagagagugauaau

SEQ ID NO: 698307 - RNA, 19 nt, Artificial Sequence
  Description of Artificial Sequence: Synthetic oligonucleotide
  Antisense strand to SEQ ID NO: 698306
auuaucacucucugcuaau

SEQ ID NO: 698308 - RNA, 19 nt, Artificial Sequence
  Description of Artificial Sequence: Synthetic oligonucleotide
  Sense strand starting at position 2159 of SEQ ID NO: 586182
gagugauaauuacugcaau

SEQ ID NO: 698309 - RNA, 19 nt, Artificial Sequence
  Description of Artificial Sequence: Synthetic oligonucleotide
  Antisense strand to SEQ ID NO: 698308
auugcaguaauuaucacuc

SEQ ID NO: 698310 - RNA, 19 nt, Artificial Sequence
  Description of Artificial Sequence: Synthetic oligonucleotide
  Sense strand starting at position 2193 of SEQ ID NO: 586182
ggcagcaguuccuuaagga

SEQ ID NO: 698311 - RNA, 19 nt, Artificial Sequence
  Description of Artificial Sequence: Synthetic oligonucleotide
  Antisense strand to SEQ ID NO: 698310
uccuuaaggaacugcugcc

SEQ ID NO: 698312 - RNA, 19 nt, Artificial Sequence
  Description of Artificial Sequence: Synthetic oligonucleotide
  Sense strand starting at position 2194 of SEQ ID NO: 586182
gcagcaguuccuuaaggaa

SEQ ID NO: 698313 - RNA, 19 nt, Artificial Sequence
  Description of Artificial Sequence: Synthetic oligonucleotide
  Antisense strand to SEQ ID NO: 698312
uuccuuaaggaacugcugc

SEQ ID NO: 698314 - RNA, 19 nt, Artificial Sequence
  Description of Artificial Sequence: Synthetic oligonucleotide
  Sense strand starting at position 2620 of SEQ ID NO: 586182
uugugccugcguccugaua

SEQ ID NO: 698315 - RNA, 19 nt, Artificial Sequence
  Description of Artificial Sequence: Synthetic oligonucleotide
  Antisense strand to SEQ ID NO: 698314
uaucaggacgcaggcacaa

SEQ ID NO: 698316 - RNA, 19 nt, Artificial Sequence
  Description of Artificial Sequence: Synthetic oligonucleotide
  Sense strand starting at position 2634 of SEQ ID NO: 586182
ugauacacauguguuaaau

SEQ ID NO: 698317 - RNA, 19 nt, Artificial Sequence
  Description of Artificial Sequence: Synthetic oligonucleotide
  Antisense strand to SEQ ID NO: 698316
auuuaacacauguguauca

SEQ ID NO: 698318 - RNA, 19 nt, Artificial Sequence
  Description of Artificial Sequence: Synthetic oligonucleotide
  Sense strand starting at position 2660 of SEQ ID NO: 586182
ccguauauaccuuagagug

SEQ ID NO: 698319 - RNA, 19 nt, Artificial Sequence
  Description of Artificial Sequence: Synthetic oligonucleotide
  Antisense strand to SEQ ID NO: 698318
cacucuaagguauauacgg

SEQ ID NO: 698320 - RNA, 19 nt, Artificial Sequence
  Description of Artificial Sequence: Synthetic oligonucleotide
  Sense strand starting at position 2675 of SEQ ID NO: 586182
agugcauuuccugguauau

SEQ ID NO: 698321 - RNA, 19 nt, Artificial Sequence
  Description of Artificial Sequence: Synthetic oligonucleotide
  Antisense strand to SEQ ID NO: 698320
auauaccaggaaaugcacu

SEQ ID NO: 698322 - RNA, 19 nt, Artificial Sequence
  Description of Artificial Sequence: Synthetic oligonucleotide
  Sense strand starting at position 2687 of SEQ ID NO: 586182
gguauaugggauuggaucu

SEQ ID NO: 698323 - RNA, 19 nt, Artificial Sequence
  Description of Artificial Sequence: Synthetic oligonucleotide
  Antisense strand to SEQ ID NO: 698322
agauccaaucccauauacc

SEQ ID NO: 698324 - RNA, 19 nt, Artificial Sequence
  Description of Artificial Sequence: Synthetic oligonucleotide
  Sense strand starting at position 2688 of SEQ ID NO: 586182
guauaugggauuggaucua

SEQ ID NO: 698325 - RNA, 19 nt, Artificial Sequence
  Description of Artificial Sequence: Synthetic oligonucleotide
  Antisense strand to SEQ ID NO: 698324
uagauccaaucccauauac

SEQ ID NO: 698326 - RNA, 19 nt, Artificial Sequence
  Description of Artificial Sequence: Synthetic oligonucleotide
  Sense strand starting at position 3276 of SEQ ID NO: 586182
uguauucugcuauacagag

SEQ ID NO: 698327 - RNA, 19 nt, Artificial Sequence
  Description of Artificial Sequence: Synthetic oligonucleotide
  Antisense strand to SEQ ID NO: 698326
cucuguauagcagaauaca

SEQ ID NO: 698328 - RNA, 19 nt, Artificial Sequence
  Description of Artificial Sequence: Synthetic oligonucleotide
  Sense strand starting at position 3574 of SEQ ID NO: 586182
cugccugaucuugauuaau

SEQ ID NO: 698329 - RNA, 19 nt, Artificial Sequence
  Description of Artificial Sequence: Synthetic oligonucleotide
  Antisense strand to SEQ ID NO: 698328
auuaaucaagaucaggcag

SEQ ID NO: 698330 - RNA, 19 nt, Artificial Sequence
  Description of Artificial Sequence: Synthetic oligonucleotide
  Sense strand starting at position 3576 of SEQ ID NO: 586182
gccugaucuugauuaauag

SEQ ID NO: 698331 - RNA, 19 nt, Artificial Sequence
  Description of Artificial Sequence: Synthetic oligonucleotide
  Antisense strand to SEQ ID NO: 698330
cuauuaaucaagaucaggc

SEQ ID NO: 698332 - RNA, 19 nt, Artificial Sequence
  Description of Artificial Sequence: Synthetic oligonucleotide
  Sense strand starting at position 3577 of SEQ ID NO: 586182
ccugaucuugauuaauagu

SEQ ID NO: 698333 - RNA, 19 nt, Artificial Sequence
  Description of Artificial Sequence: Synthetic oligonucleotide
  Antisense strand to SEQ ID NO: 698332
acuauuaaucaagaucagg

SEQ ID NO: 698334 - RNA, 19 nt, Artificial Sequence
  Description of Artificial Sequence: Synthetic oligonucleotide
  Sense strand starting at position 3631 of SEQ ID NO: 586182
uuguuauauuguccauuga

SEQ ID NO: 698335 - RNA, 19 nt, Artificial Sequence
  Description of Artificial Sequence: Synthetic oligonucleotide
  Antisense strand to SEQ ID NO: 698334
ucaauggacaauauaacaa

SEQ ID NO: 698336 - RNA, 19 nt, Artificial Sequence
  Description of Artificial Sequence: Synthetic oligonucleotide
  Sense strand starting at position 3632 of SEQ ID NO: 586182
uguuauauuguccauugau

SEQ ID NO: 698337 - RNA, 19 nt, Artificial Sequence
  Description of Artificial Sequence: Synthetic oligonucleotide
  Antisense strand to SEQ ID NO: 698336
aucaauggacaauauaaca

SEQ ID NO: 698338 - RNA, 19 nt, Artificial Sequence
  Description of Artificial Sequence: Synthetic oligonucleotide
  Sense strand starting at position 2 of SEQ ID NO: 586183
agagaucucucauagggaa

SEQ ID NO: 698339 - RNA, 19 nt, Artificial Sequence
  Description of Artificial Sequence: Synthetic oligonucleotide
  Antisense strand to SEQ ID NO: 698338
uucccuaugagagaucucu

SEQ ID NO: 698340 - RNA, 19 nt, Artificial Sequence
  Description of Artificial Sequence: Synthetic oligonucleotide
  Sense strand starting at position 29 of SEQ ID NO: 586183
aguugagcaccuuaucaua

SEQ ID NO: 698341 - RNA, 19 nt, Artificial Sequence
  Description of Artificial Sequence: Synthetic oligonucleotide
  Antisense strand to SEQ ID NO: 698340
uaugauaaggugcucaacu

SEQ ID NO: 698342 - RNA, 19 nt, Artificial Sequence
  Description of Artificial Sequence: Synthetic oligonucleotide
  Sense strand starting at position 59 of SEQ ID NO: 586183
uuguguucucacuauauua

SEQ ID NO: 698343 - RNA, 19 nt, Artificial Sequence
  Description of Artificial Sequence: Synthetic oligonucleotide
  Antisense strand to SEQ ID NO: 698342
uaauauagugagaacacaa

SEQ ID NO: 698344 - RNA, 19 nt, Artificial Sequence
  Description of Artificial Sequence: Synthetic oligonucleotide
  Sense strand starting at position 61 of SEQ ID NO: 586183
guguucucacuauauuaug

SEQ ID NO: 698345 - RNA, 19 nt, Artificial Sequence
  Description of Artificial Sequence: Synthetic oligonucleotide
  Antisense strand to SEQ ID NO: 698344
cauaauauagugagaacac

SEQ ID NO: 698346 - RNA, 19 nt, Artificial Sequence
  Description of Artificial Sequence: Synthetic oligonucleotide
  Sense strand starting at position 69 of SEQ ID NO: 586183
acuauauuaugguucuaag

SEQ ID NO: 698347 - RNA, 19 nt, Artificial Sequence
  Description of Artificial Sequence: Synthetic oligonucleotide
  Antisense strand to SEQ ID NO: 698346
cuuagaaccauaauauagu

SEQ ID NO: 698348 - RNA, 19 nt, Artificial Sequence
  Description of Artificial Sequence: Synthetic oligonucleotide
  Sense strand starting at position 206 of SEQ ID NO: 586183
guuaguaacaugcaguuau

SEQ ID NO: 698349 - RNA, 19 nt, Artificial Sequence
  Description of Artificial Sequence: Synthetic oligonucleotide
  Antisense strand to SEQ ID NO: 698348
auaacugcauguuacuaac

SEQ ID NO: 698350 - RNA, 19 nt, Artificial Sequence
  Description of Artificial Sequence: Synthetic oligonucleotide
  Sense strand starting at position 210 of SEQ ID NO: 586183
guaacaugcaguuauaggu

SEQ ID NO: 698351 - RNA, 19 nt, Artificial Sequence
  Description of Artificial Sequence: Synthetic oligonucleotide
  Antisense strand to SEQ ID NO: 698350
accuauaacugcauguuac

SEQ ID NO: 698352 - RNA, 19 nt, Artificial Sequence
  Description of Artificial Sequence: Synthetic oligonucleotide
  Sense strand starting at position 217 of SEQ ID NO: 586183
gcaguuauaggugaccuga

SEQ ID NO: 698353 - RNA, 19 nt, Artificial Sequence
  Description of Artificial Sequence: Synthetic oligonucleotide
  Antisense strand to SEQ ID NO: 698352
ucaggucaccuauaacugc

SEQ ID NO: 698354 - RNA, 19 nt, Artificial Sequence
  Description of Artificial Sequence: Synthetic oligonucleotide
  Sense strand starting at position 219 of SEQ ID NO: 586183
aguuauaggugaccugauu

SEQ ID NO: 698355 - RNA, 19 nt, Artificial Sequence
  Description of Artificial Sequence: Synthetic oligonucleotide
  Antisense strand to SEQ ID NO: 698354
aaucaggucaccuauaacu

SEQ ID NO: 698356 - RNA, 19 nt, Artificial Sequence
  Description of Artificial Sequence: Synthetic oligonucleotide
  Sense strand starting at position 254 of SEQ ID NO: 586183
uaaccacuggguuauguaa

SEQ ID NO: 698357 - RNA, 19 nt, Artificial Sequence
  Description of Artificial Sequence: Synthetic oligonucleotide
  Antisense strand to SEQ ID NO: 698356
uuacauaacccagugguua

SEQ ID NO: 698358 - RNA, 19 nt, Artificial Sequence
  Description of Artificial Sequence: Synthetic oligonucleotide
  Sense strand starting at position 404 of SEQ ID NO: 586183
ucuuuauaucuguacauga

SEQ ID NO: 698359 - RNA, 19 nt, Artificial Sequence
  Description of Artificial Sequence: Synthetic oligonucleotide
  Antisense strand to SEQ ID NO: 698358
ucauguacagauauaaaga

SEQ ID NO: 698360 - RNA, 19 nt, Artificial Sequence
  Description of Artificial Sequence: Synthetic oligonucleotide
  Sense strand starting at position 467 of SEQ ID NO: 586183
auagcuacuugaucaggau

SEQ ID NO: 698361 - RNA, 19 nt, Artificial Sequence
  Description of Artificial Sequence: Synthetic oligonucleotide
  Antisense strand to SEQ ID NO: 698360
auccugaucaaguagcuau

SEQ ID NO: 698362 - RNA, 19 nt, Artificial Sequence
  Description of Artificial Sequence: Synthetic oligonucleotide
  Sense strand starting at position 529 of SEQ ID NO: 586183
aguuacagaucacucugau

SEQ ID NO: 698363 - RNA, 19 nt, Artificial Sequence
  Description of Artificial Sequence: Synthetic oligonucleotide
  Antisense strand to SEQ ID NO: 698362
aucagagugaucuguaacu

SEQ ID NO: 698364 - RNA, 19 nt, Artificial Sequence
  Description of Artificial Sequence: Synthetic oligonucleotide
  Sense strand starting at position 536 of SEQ ID NO: 586183
gaucacucugauggaguaa

SEQ ID NO: 698365 - RNA, 19 nt, Artificial Sequence
  Description of Artificial Sequence: Synthetic oligonucleotide
  Antisense strand to SEQ ID NO: 698364
uuacuccaucagagugauc

SEQ ID NO: 698366 - RNA, 19 nt, Artificial Sequence
  Description of Artificial Sequence: Synthetic oligonucleotide
  Sense strand starting at position 630 of SEQ ID NO: 586183
uuucuuucucuugaguaua

SEQ ID NO: 698367 - RNA, 19 nt, Artificial Sequence
  Description of Artificial Sequence: Synthetic oligonucleotide
  Antisense strand to SEQ ID NO: 698366
uauacucaagagaaagaaa

SEQ ID NO: 698368 - RNA, 19 nt, Artificial Sequence
  Description of Artificial Sequence: Synthetic oligonucleotide
  Sense strand starting at position 632 of SEQ ID NO: 586183
ucuuucucuugaguauaua

SEQ ID NO: 698369 - RNA, 19 nt, Artificial Sequence
  Description of Artificial Sequence: Synthetic oligonucleotide
  Antisense strand to SEQ ID NO: 698368
uauauacucaagagaaaga

SEQ ID NO: 698370 - RNA, 19 nt, Artificial Sequence
  Description of Artificial Sequence: Synthetic oligonucleotide
  Sense strand starting at position 650 of SEQ ID NO: 586183
aggauucuaucauugcaaa

SEQ ID NO: 698371 - RNA, 19 nt, Artificial Sequence
  Description of Artificial Sequence: Synthetic oligonucleotide
  Antisense strand to SEQ ID NO: 698370
uuugcaaugauagaauccu

SEQ ID NO: 698372 - RNA, 19 nt, Artificial Sequence
  Description of Artificial Sequence: Synthetic oligonucleotide
  Sense strand starting at position 651 of SEQ ID NO: 586183
ggauucuaucauugcaaau

SEQ ID NO: 698373 - RNA, 19 nt, Artificial Sequence
  Description of Artificial Sequence: Synthetic oligonucleotide
  Antisense strand to SEQ ID NO: 698372
auuugcaaugauagaaucc

SEQ ID NO: 698374 - RNA, 19 nt, Artificial Sequence
  Description of Artificial Sequence: Synthetic oligonucleotide
  Sense strand starting at position 689 of SEQ ID NO: 586183
ggguguuacugaguuugaa

SEQ ID NO: 698375 - RNA, 19 nt, Artificial Sequence
  Description of Artificial Sequence: Synthetic oligonucleotide
  Antisense strand to SEQ ID NO: 698374
uucaaacucaguaacaccc

SEQ ID NO: 698376 - RNA, 19 nt, Artificial Sequence
  Description of Artificial Sequence: Synthetic oligonucleotide
  Sense strand starting at position 692 of SEQ ID NO: 586183
uguuacugaguuugaaaca

SEQ ID NO: 698377 - RNA, 19 nt, Artificial Sequence
  Description of Artificial Sequence: Synthetic oligonucleotide
  Antisense strand to SEQ ID NO: 698376
uguuucaaacucaguaaca

SEQ ID NO: 698378 - RNA, 19 nt, Artificial Sequence
  Description of Artificial Sequence: Synthetic oligonucleotide
  Sense strand starting at position 830 of SEQ ID NO: 586183
gucucaguacgugauauau

SEQ ID NO: 698379 - RNA, 19 nt, Artificial Sequence
  Description of Artificial Sequence: Synthetic oligonucleotide
  Antisense strand to SEQ ID NO: 698378
auauaucacguacugagac

SEQ ID NO: 698380 - RNA, 19 nt, Artificial Sequence
  Description of Artificial Sequence: Synthetic oligonucleotide
  Sense strand starting at position 836 of SEQ ID NO: 586183
guacgugauauauagaaca

SEQ ID NO: 698381 - RNA, 19 nt, Artificial Sequence
  Description of Artificial Sequence: Synthetic oligonucleotide
  Antisense strand to SEQ ID NO: 698380
uguucuauauaucacguac

SEQ ID NO: 698382 - RNA, 19 nt, Artificial Sequence
  Description of Artificial Sequence: Synthetic oligonucleotide
  Sense strand starting at position 864 of SEQ ID NO: 586183
uggaucaaauaagaucaaa

SEQ ID NO: 698383 - RNA, 19 nt, Artificial Sequence
  Description of Artificial Sequence: Synthetic oligonucleotide
  Antisense strand to SEQ ID NO: 698382
uuugaucuuauuugaucca

SEQ ID NO: 698384 - RNA, 19 nt, Artificial Sequence
  Description of Artificial Sequence: Synthetic oligonucleotide
  Sense strand starting at position 993 of SEQ ID NO: 586183
caaguuaggaguugugaaa

SEQ ID NO: 698385 - RNA, 19 nt, Artificial Sequence
  Description of Artificial Sequence: Synthetic oligonucleotide
  Antisense strand to SEQ ID NO: 698384
uuucacaacuccuaacuug

SEQ ID NO: 698386 - RNA, 19 nt, Artificial Sequence
  Description of Artificial Sequence: Synthetic oligonucleotide
  Sense strand starting at position 1084 of SEQ ID NO: 586183
guggguuaucucuaggauc

SEQ ID NO: 698387 - RNA, 19 nt, Artificial Sequence
  Description of Artificial Sequence: Synthetic oligonucleotide
  Antisense strand to SEQ ID NO: 698386
gauccuagagauaacccac

SEQ ID NO: 698388 - RNA, 19 nt, Artificial Sequence
  Description of Artificial Sequence: Synthetic oligonucleotide
  Sense strand starting at position 1226 of SEQ ID NO: 586183
aguagauuacugcaagggu

SEQ ID NO: 698389 - RNA, 19 nt, Artificial Sequence
  Description of Artificial Sequence: Synthetic oligonucleotide
  Antisense strand to SEQ ID NO: 698388
acccuugcaguaaucuacu

SEQ ID NO: 698390 - RNA, 19 nt, Artificial Sequence
  Description of Artificial Sequence: Synthetic oligonucleotide
  Sense strand starting at position 1229 of SEQ ID NO: 586183
agauuacugcaaggguaaa

SEQ ID NO: 698391 - RNA, 19 nt, Artificial Sequence
  Description of Artificial Sequence: Synthetic oligonucleotide
  Antisense strand to SEQ ID NO: 698390
uuuacccuugcaguaaucu

SEQ ID NO: 698392 - RNA, 19 nt, Artificial Sequence
  Description of Artificial Sequence: Synthetic oligonucleotide
  Sense strand starting at position 1252 of SEQ ID NO: 586183
accacugcuuggcuugaaa

SEQ ID NO: 698393 - RNA, 19 nt, Artificial Sequence
  Description of Artificial Sequence: Synthetic oligonucleotide
  Antisense strand to SEQ ID NO: 698392
uuucaagccaagcaguggu

SEQ ID NO: 698394 - RNA, 19 nt, Artificial Sequence
  Description of Artificial Sequence: Synthetic oligonucleotide
  Sense strand starting at position 1294 of SEQ ID NO: 586183
cuuagaaguuccgucacua

SEQ ID NO: 698395 - RNA, 19 nt, Artificial Sequence
  Description of Artificial Sequence: Synthetic oligonucleotide
  Antisense strand to SEQ ID NO: 698394
uagugacggaacuucuaag

SEQ ID NO: 698396 - RNA, 19 nt, Artificial Sequence
  Description of Artificial Sequence: Synthetic oligonucleotide
  Sense strand starting at position 1323 of SEQ ID NO: 586183
gcuaauacaugguugugau

SEQ ID NO: 698397 - RNA, 19 nt, Artificial Sequence
  Description of Artificial Sequence: Synthetic oligonucleotide
  Antisense strand to SEQ ID NO: 698396
aucacaaccauguauuagc

SEQ ID NO: 698398 - RNA, 19 nt, Artificial Sequence
  Description of Artificial Sequence: Synthetic oligonucleotide
  Sense strand starting at position 1324 of SEQ ID NO: 586183
cuaauacaugguugugaua

SEQ ID NO: 698399 - RNA, 19 nt, Artificial Sequence
  Description of Artificial Sequence: Synthetic oligonucleotide
  Antisense strand to SEQ ID NO: 698398
uaucacaaccauguauuag

SEQ ID NO: 698400 - RNA, 19 nt, Artificial Sequence
  Description of Artificial Sequence: Synthetic oligonucleotide
  Sense strand starting at position 1481 of SEQ ID NO: 586183
guuccagugccucagugaa

SEQ ID NO: 698401 - RNA, 19 nt, Artificial Sequence
  Description of Artificial Sequence: Synthetic oligonucleotide
  Antisense strand to SEQ ID NO: 698400
uucacugaggcacuggaac

SEQ ID NO: 698402 - RNA, 19 nt, Artificial Sequence
  Description of Artificial Sequence: Synthetic oligonucleotide
  Sense strand starting at position 1770 of SEQ ID NO: 586183
uaccuaauucguuagguga

SEQ ID NO: 698403 - RNA, 19 nt, Artificial Sequence
  Description of Artificial Sequence: Synthetic oligonucleotide
  Antisense strand to SEQ ID NO: 698402
ucaccuaacgaauuaggua

SEQ ID NO: 698404 - RNA, 19 nt, Artificial Sequence
  Description of Artificial Sequence: Synthetic oligonucleotide
  Sense strand starting at position 1843 of SEQ ID NO: 586183
uuacauuaagagcgaucca

SEQ ID NO: 698405 - RNA, 19 nt, Artificial Sequence
  Description of Artificial Sequence: Synthetic oligonucleotide
  Antisense strand to SEQ ID NO: 698404
uggaucgcucuuaauguaa

SEQ ID NO: 698406 - RNA, 19 nt, Artificial Sequence
  Description of Artificial Sequence: Synthetic oligonucleotide
  Sense strand starting at position 2885 of SEQ ID NO: 586183
ggaacuguuuguguccaga

SEQ ID NO: 698407 - RNA, 19 nt, Artificial Sequence
  Description of Artificial Sequence: Synthetic oligonucleotide
  Antisense strand to SEQ ID NO: 698406
ucuggacacaaacaguucc

SEQ ID NO: 698408 - RNA, 19 nt, Artificial Sequence
  Description of Artificial Sequence: Synthetic oligonucleotide
  Sense strand starting at position 2887 of SEQ ID NO: 586183
aacuguuuguguccagaau

SEQ ID NO: 698409 - RNA, 19 nt, Artificial Sequence
  Description of Artificial Sequence: Synthetic oligonucleotide
  Antisense strand to SEQ ID NO: 698408
auucuggacacaaacaguu

SEQ ID NO: 698410 - RNA, 19 nt, Artificial Sequence
  Description of Artificial Sequence: Synthetic oligonucleotide
  Sense strand starting at position 2888 of SEQ ID NO: 586183
acuguuuguguccagaauu

SEQ ID NO: 698411 - RNA, 19 nt, Artificial Sequence
  Description of Artificial Sequence: Synthetic oligonucleotide
  Antisense strand to SEQ ID NO: 698410
aauucuggacacaaacagu

SEQ ID NO: 698412 - RNA, 19 nt, Artificial Sequence
  Description of Artificial Sequence: Synthetic oligonucleotide
  Sense strand starting at position 2970 of SEQ ID NO: 586183
ggaucaacuguaugucaca

SEQ ID NO: 698413 - RNA, 19 nt, Artificial Sequence
  Description of Artificial Sequence: Synthetic oligonucleotide
  Antisense strand to SEQ ID NO: 698412
ugugacauacaguugaucc

SEQ ID NO: 698414 - RNA, 19 nt, Artificial Sequence
  Description of Artificial Sequence: Synthetic oligonucleotide
  Sense strand starting at position 3036 of SEQ ID NO: 586183
caguaaacuuuaccgugau

SEQ ID NO: 698415 - RNA, 19 nt, Artificial Sequence
  Description of Artificial Sequence: Synthetic oligonucleotide
  Antisense strand to SEQ ID NO: 698414
aucacgguaaaguuuacug

SEQ ID NO: 698416 - RNA, 19 nt, Artificial Sequence
  Description of Artificial Sequence: Synthetic oligonucleotide
  Sense strand starting at position 3040 of SEQ ID NO: 586183
aaacuuuaccgugauguuu

SEQ ID NO: 698417 - RNA, 19 nt, Artificial Sequence
  Description of Artificial Sequence: Synthetic oligonucleotide
  Antisense strand to SEQ ID NO: 698416
aaacaucacgguaaaguuu

SEQ ID NO: 698418 - RNA, 19 nt, Artificial Sequence
  Description of Artificial Sequence: Synthetic oligonucleotide
  Sense strand starting at position 45 of SEQ ID NO: 586184
ugggucucaguacgugaua

SEQ ID NO: 698419 - RNA, 19 nt, Artificial Sequence
  Description of Artificial Sequence: Synthetic oligonucleotide
  Antisense strand to SEQ ID NO: 698418
uaucacguacugagaccca

SEQ ID NO: 698420 - RNA, 19 nt, Artificial Sequence
  Description of Artificial Sequence: Synthetic oligonucleotide
  Sense strand starting at position 46 of SEQ ID NO: 586184
gggucucaguacgugauau

SEQ ID NO: 698421 - RNA, 19 nt, Artificial Sequence
  Description of Artificial Sequence: Synthetic oligonucleotide
  Antisense strand to SEQ ID NO: 698420
auaucacguacugagaccc

SEQ ID NO: 698422 - RNA, 19 nt, Artificial Sequence
  Description of Artificial Sequence: Synthetic oligonucleotide
  Sense strand starting at position 47 of SEQ ID NO: 586184
ggucucaguacgugauaua

SEQ ID NO: 698423 - RNA, 19 nt, Artificial Sequence
  Description of Artificial Sequence: Synthetic oligonucleotide
  Antisense strand to SEQ ID NO: 698422
uauaucacguacugagacc

SEQ ID NO: 698424 - RNA, 19 nt, Artificial Sequence
  Description of Artificial Sequence: Synthetic oligonucleotide
  Sense strand starting at position 48 of SEQ ID NO: 586184
gucucaguacgugauauau

SEQ ID NO: 698425 - RNA, 19 nt, Artificial Sequence
  Description of Artificial Sequence: Synthetic oligonucleotide
  Antisense strand to SEQ ID NO: 698424
auauaucacguacugagac

SEQ ID NO: 698426 - RNA, 19 nt, Artificial Sequence
  Description of Artificial Sequence: Synthetic oligonucleotide
  Sense strand starting at position 54 of SEQ ID NO: 586184
guacgugauauauagaaca

SEQ ID NO: 698427 - RNA, 19 nt, Artificial Sequence
  Description of Artificial Sequence: Synthetic oligonucleotide
  Antisense strand to SEQ ID NO: 698426
uguucuauauaucacguac

SEQ ID NO: 698428 - RNA, 19 nt, Artificial Sequence
  Description of Artificial Sequence: Synthetic oligonucleotide
  Sense strand starting at position 82 of SEQ ID NO: 586184
uggaucaaauaagaucaaa

SEQ ID NO: 698429 - RNA, 19 nt, Artificial Sequence
  Description of Artificial Sequence: Synthetic oligonucleotide
  Antisense strand to SEQ ID NO: 698428
uuugaucuuauuugaucca

SEQ ID NO: 698430 - RNA, 19 nt, Artificial Sequence
  Description of Artificial Sequence: Synthetic oligonucleotide
  Sense strand starting at position 151 of SEQ ID NO: 586184
gagcuuagcuuagcugaua

SEQ ID NO: 698431 - RNA, 19 nt, Artificial Sequence
  Description of Artificial Sequence: Synthetic oligonucleotide
  Antisense strand to SEQ ID NO: 698430
uaucagcuaagcuaagcuc

SEQ ID NO: 698432 - RNA, 19 nt, Artificial Sequence
  Description of Artificial Sequence: Synthetic oligonucleotide
  Sense strand starting at position 211 of SEQ ID NO: 586184
caaguuaggaguugugaaa

SEQ ID NO: 698433 - RNA, 19 nt, Artificial Sequence
  Description of Artificial Sequence: Synthetic oligonucleotide
  Antisense strand to SEQ ID NO: 698432
uuucacaacuccuaacuug

SEQ ID NO: 698434 - RNA, 19 nt, Artificial Sequence
  Description of Artificial Sequence: Synthetic oligonucleotide
  Sense strand starting at position 302 of SEQ ID NO: 586184
guggguuaucucuaggauc

SEQ ID NO: 698435 - RNA, 19 nt, Artificial Sequence
  Description of Artificial Sequence: Synthetic oligonucleotide
  Antisense strand to SEQ ID NO: 698434
gauccuagagauaacccac

SEQ ID NO: 698436 - RNA, 19 nt, Artificial Sequence
  Description of Artificial Sequence: Synthetic oligonucleotide
  Sense strand starting at position 316 of SEQ ID NO: 586184
ggaucucacuuaugaaaua

SEQ ID NO: 698437 - RNA, 19 nt, Artificial Sequence
  Description of Artificial Sequence: Synthetic oligonucleotide
  Antisense strand to SEQ ID NO: 698436
uauuucauaagugagaucc

SEQ ID NO: 698438 - RNA, 19 nt, Artificial Sequence
  Description of Artificial Sequence: Synthetic oligonucleotide
  Sense strand starting at position 444 of SEQ ID NO: 586184
aguagauuacugcaagggu

SEQ ID NO: 698439 - RNA, 19 nt, Artificial Sequence
  Description of Artificial Sequence: Synthetic oligonucleotide
  Antisense strand to SEQ ID NO: 698438
acccuugcaguaaucuacu

SEQ ID NO: 698440 - RNA, 19 nt, Artificial Sequence
  Description of Artificial Sequence: Synthetic oligonucleotide
  Sense strand starting at position 447 of SEQ ID NO: 586184
agauuacugcaaggguaaa

SEQ ID NO: 698441 - RNA, 19 nt, Artificial Sequence
  Description of Artificial Sequence: Synthetic oligonucleotide
  Antisense strand to SEQ ID NO: 698440
uuuacccuugcaguaaucu

SEQ ID NO: 698442 - RNA, 19 nt, Artificial Sequence
  Description of Artificial Sequence: Synthetic oligonucleotide
  Sense strand starting at position 470 of SEQ ID NO: 586184
accacugcuuggcuugaaa

SEQ ID NO: 698443 - RNA, 19 nt, Artificial Sequence
  Description of Artificial Sequence: Synthetic oligonucleotide
  Antisense strand to SEQ ID NO: 698442
uuucaagccaagcaguggu

SEQ ID NO: 698444 - RNA, 19 nt, Artificial Sequence
  Description of Artificial Sequence: Synthetic oligonucleotide
  Sense strand starting at position 512 of SEQ ID NO: 586184
cuuagaaguuccgucacua

SEQ ID NO: 698445 - RNA, 19 nt, Artificial Sequence
  Description of Artificial Sequence: Synthetic oligonucleotide
  Antisense strand to SEQ ID NO: 698444
uagugacggaacuucuaag

SEQ ID NO: 698446 - RNA, 19 nt, Artificial Sequence
  Description of Artificial Sequence: Synthetic oligonucleotide
  Sense strand starting at position 516 of SEQ ID NO: 586184
gaaguuccgucacuaacga

SEQ ID NO: 698447 - RNA, 19 nt, Artificial Sequence
  Description of Artificial Sequence: Synthetic oligonucleotide
  Antisense strand to SEQ ID NO: 698446
ucguuagugacggaacuuc

SEQ ID NO: 698448 - RNA, 19 nt, Artificial Sequence
  Description of Artificial Sequence: Synthetic oligonucleotide
  Sense strand starting at position 541 of SEQ ID NO: 586184
gcuaauacaugguugugau

SEQ ID NO: 698449 - RNA, 19 nt, Artificial Sequence
  Description of Artificial Sequence: Synthetic oligonucleotide
  Antisense strand to SEQ ID NO: 698448
aucacaaccauguauuagc

SEQ ID NO: 698450 - RNA, 19 nt, Artificial Sequence
  Description of Artificial Sequence: Synthetic oligonucleotide
  Sense strand starting at position 542 of SEQ ID NO: 586184
cuaauacaugguugugaua

SEQ ID NO: 698451 - RNA, 19 nt, Artificial Sequence
  Description of Artificial Sequence: Synthetic oligonucleotide
  Antisense strand to SEQ ID NO: 698450
uaucacaaccauguauuag

SEQ ID NO: 698452 - RNA, 19 nt, Artificial Sequence
  Description of Artificial Sequence: Synthetic oligonucleotide
  Sense strand starting at position 699 of SEQ ID NO: 586184
guuccagugccucagugaa

SEQ ID NO: 698453 - RNA, 19 nt, Artificial Sequence
  Description of Artificial Sequence: Synthetic oligonucleotide
  Antisense strand to SEQ ID NO: 698452
uucacugaggcacuggaac

SEQ ID NO: 698454 - RNA, 19 nt, Artificial Sequence
  Description of Artificial Sequence: Synthetic oligonucleotide
  Sense strand starting at position 840 of SEQ ID NO: 586184
aaaguauaaucguugcuuu

SEQ ID NO: 698455 - RNA, 19 nt, Artificial Sequence
  Description of Artificial Sequence: Synthetic oligonucleotide
  Antisense strand to SEQ ID NO: 698454
aaagcaacgauuauacuuu

SEQ ID NO: 698456 - RNA, 19 nt, Artificial Sequence
  Description of Artificial Sequence: Synthetic oligonucleotide
  Sense strand starting at position 841 of SEQ ID NO: 586184
aaguauaaucguugcuuua

SEQ ID NO: 698457 - RNA, 19 nt, Artificial Sequence
  Description of Artificial Sequence: Synthetic oligonucleotide
  Antisense strand to SEQ ID NO: 698456
uaaagcaacgauuauacuu

SEQ ID NO: 698458 - RNA, 19 nt, Artificial Sequence
  Description of Artificial Sequence: Synthetic oligonucleotide
  Sense strand starting at position 843 of SEQ ID NO: 586184
guauaaucguugcuuuauu

SEQ ID NO: 698459 - RNA, 19 nt, Artificial Sequence
  Description of Artificial Sequence: Synthetic oligonucleotide
  Antisense strand to SEQ ID NO: 698458
aauaaagcaacgauuauac

SEQ ID NO: 698460 - RNA, 19 nt, Artificial Sequence
  Description of Artificial Sequence: Synthetic oligonucleotide
  Sense strand starting at position 988 of SEQ ID NO: 586184
uaccuaauucguuagguga

SEQ ID NO: 698461 - RNA, 19 nt, Artificial Sequence
  Description of Artificial Sequence: Synthetic oligonucleotide
  Antisense strand to SEQ ID NO: 698460
ucaccuaacgaauuaggua

SEQ ID NO: 698462 - RNA, 19 nt, Artificial Sequence
  Description of Artificial Sequence: Synthetic oligonucleotide
  Sense strand starting at position 991 of SEQ ID NO: 586184
cuaauucguuaggugaguu

SEQ ID NO: 698463 - RNA, 19 nt, Artificial Sequence
  Description of Artificial Sequence: Synthetic oligonucleotide
  Antisense strand to SEQ ID NO: 698462
aacucaccuaacgaauuag

SEQ ID NO: 698464 - RNA, 19 nt, Artificial Sequence
  Description of Artificial Sequence: Synthetic oligonucleotide
  Sense strand starting at position 992 of SEQ ID NO: 586184
uaauucguuaggugaguuu

SEQ ID NO: 698465 - RNA, 19 nt, Artificial Sequence
  Description of Artificial Sequence: Synthetic oligonucleotide
  Antisense strand to SEQ ID NO: 698464
aaacucaccuaacgaauua

SEQ ID NO: 698466 - RNA, 19 nt, Artificial Sequence
  Description of Artificial Sequence: Synthetic oligonucleotide
  Sense strand starting at position 995 of SEQ ID NO: 586184
uucguuaggugaguuuauu

SEQ ID NO: 698467 - RNA, 19 nt, Artificial Sequence
  Description of Artificial Sequence: Synthetic oligonucleotide
  Antisense strand to SEQ ID NO: 698466
aauaaacucaccuaacgaa

SEQ ID NO: 698468 - RNA, 19 nt, Artificial Sequence
  Description of Artificial Sequence: Synthetic oligonucleotide
  Sense strand starting at position 1061 of SEQ ID NO: 586184
uuacauuaagagcgaucca

SEQ ID NO: 698469 - RNA, 19 nt, Artificial Sequence
  Description of Artificial Sequence: Synthetic oligonucleotide
  Antisense strand to SEQ ID NO: 698468
uggaucgcucuuaauguaa

SEQ ID NO: 698470 - RNA, 19 nt, Artificial Sequence
  Description of Artificial Sequence: Synthetic oligonucleotide
  Sense strand starting at position 1089 of SEQ ID NO: 586184
aguuaacgauuugaagguu

SEQ ID NO: 698471 - RNA, 19 nt, Artificial Sequence
  Description of Artificial Sequence: Synthetic oligonucleotide
  Antisense strand to SEQ ID NO: 698470
aaccuucaaaucguuaacu

SEQ ID NO: 698472 - RNA, 19 nt, Artificial Sequence
  Description of Artificial Sequence: Synthetic oligonucleotide
  Sense strand starting at position 2103 of SEQ ID NO: 586184
ggaacuguuuguguccaga

SEQ ID NO: 698473 - RNA, 19 nt, Artificial Sequence
  Description of Artificial Sequence: Synthetic oligonucleotide
  Antisense strand to SEQ ID NO: 698472
ucuggacacaaacaguucc

SEQ ID NO: 698474 - RNA, 19 nt, Artificial Sequence
  Description of Artificial Sequence: Synthetic oligonucleotide
  Sense strand starting at position 2105 of SEQ ID NO: 586184
aacuguuuguguccagaau

SEQ ID NO: 698475 - RNA, 19 nt, Artificial Sequence
  Description of Artificial Sequence: Synthetic oligonucleotide
  Antisense strand to SEQ ID NO: 698474
auucuggacacaaacaguu

SEQ ID NO: 698476 - RNA, 19 nt, Artificial Sequence
  Description of Artificial Sequence: Synthetic oligonucleotide
  Sense strand starting at position 2106 of SEQ ID NO: 586184
acuguuuguguccagaauu

SEQ ID NO: 698477 - RNA, 19 nt, Artificial Sequence
  Description of Artificial Sequence: Synthetic oligonucleotide
  Antisense strand to SEQ ID NO: 698476
aauucuggacacaaacagu

SEQ ID NO: 698478 - RNA, 19 nt, Artificial Sequence
  Description of Artificial Sequence: Synthetic oligonucleotide
  Sense strand starting at position 2188 of SEQ ID NO: 586184
ggaucaacuguaugucaca

SEQ ID NO: 698479 - RNA, 19 nt, Artificial Sequence
  Description of Artificial Sequence: Synthetic oligonucleotide
  Antisense strand to SEQ ID NO: 698478
ugugacauacaguugaucc

SEQ ID NO: 698480 - RNA, 19 nt, Artificial Sequence
  Description of Artificial Sequence: Synthetic oligonucleotide
  Sense strand starting at position 2205 of SEQ ID NO: 586184
caacauauuccguaggcgu

SEQ ID NO: 698481 - RNA, 19 nt, Artificial Sequence
  Description of Artificial Sequence: Synthetic oligonucleotide
  Antisense strand to SEQ ID NO: 698480
acgccuacggaauauguug

SEQ ID NO: 698482 - RNA, 19 nt, Artificial Sequence
  Description of Artificial Sequence: Synthetic oligonucleotide
  Sense strand starting at position 2254 of SEQ ID NO: 586184
caguaaacuuuaccgugau

SEQ ID NO: 698483 - RNA, 19 nt, Artificial Sequence
  Description of Artificial Sequence: Synthetic oligonucleotide
  Antisense strand to SEQ ID NO: 698482
aucacgguaaaguuuacug

SEQ ID NO: 698484 - RNA, 19 nt, Artificial Sequence
  Description of Artificial Sequence: Synthetic oligonucleotide
  Sense strand starting at position 2257 of SEQ ID NO: 586184
uaaacuuuaccgugauguu

SEQ ID NO: 698485 - RNA, 19 nt, Artificial Sequence
  Description of Artificial Sequence: Synthetic oligonucleotide
  Antisense strand to SEQ ID NO: 698484
aacaucacgguaaaguuua

SEQ ID NO: 698486 - RNA, 19 nt, Artificial Sequence
  Description of Artificial Sequence: Synthetic oligonucleotide
  Sense strand starting at position 2258 of SEQ ID NO: 586184
aaacuuuaccgugauguuu

SEQ ID NO: 698487 - RNA, 19 nt, Artificial Sequence
  Description of Artificial Sequence: Synthetic oligonucleotide
  Antisense strand to SEQ ID NO: 698486
aaacaucacgguaaaguuu

SEQ ID NO: 698488 - RNA, 19 nt, Artificial Sequence
  Description of Artificial Sequence: Synthetic oligonucleotide
  Sense strand starting at position 2377 of SEQ ID NO: 586184
gacaacguaucaggaauuu

SEQ ID NO: 698489 - RNA, 19 nt, Artificial Sequence
  Description of Artificial Sequence: Synthetic oligonucleotide
  Antisense strand to SEQ ID NO: 698488
aaauuccugauacguuguc

SEQ ID NO: 698490 - RNA, 19 nt, Artificial Sequence
  Description of Artificial Sequence: Synthetic oligonucleotide
  Sense strand starting at position 2880 of SEQ ID NO: 586184
gcgccuagccaggaaguua

SEQ ID NO: 698491 - RNA, 19 nt, Artificial Sequence
  Description of Artificial Sequence: Synthetic oligonucleotide
  Antisense strand to SEQ ID NO: 698490
uaacuuccuggcuaggcgc

SEQ ID NO: 698492 - RNA, 19 nt, Artificial Sequence
  Description of Artificial Sequence: Synthetic oligonucleotide
  Sense strand starting at position 3242 of SEQ ID NO: 586184
cacgcugguuccuuccaaa

SEQ ID NO: 698493 - RNA, 19 nt, Artificial Sequence
  Description of Artificial Sequence: Synthetic oligonucleotide
  Antisense strand to SEQ ID NO: 698492
uuuggaaggaaccagcgug

SEQ ID NO: 698494 - RNA, 19 nt, Artificial Sequence
  Description of Artificial Sequence: Synthetic oligonucleotide
  Sense strand starting at position 3266 of SEQ ID NO: 586184
agcacauuacucuagugau

SEQ ID NO: 698495 - RNA, 19 nt, Artificial Sequence
  Description of Artificial Sequence: Synthetic oligonucleotide
  Antisense strand to SEQ ID NO: 698494
aucacuagaguaaugugcu

SEQ ID NO: 698496 - RNA, 19 nt, Artificial Sequence
  Description of Artificial Sequence: Synthetic oligonucleotide
  Sense strand starting at position 3369 of SEQ ID NO: 586184
aacagcgaguuaucuuuaa

SEQ ID NO: 698497 - RNA, 19 nt, Artificial Sequence
  Description of Artificial Sequence: Synthetic oligonucleotide
  Antisense strand to SEQ ID NO: 698496
uuaaagauaacucgcuguu

SEQ ID NO: 698498 - RNA, 19 nt, Artificial Sequence
  Description of Artificial Sequence: Synthetic oligonucleotide
  Sense strand starting at position 233 of SEQ ID NO: 586185
agcagaagcagagaguuua

SEQ ID NO: 698499 - RNA, 19 nt, Artificial Sequence
  Description of Artificial Sequence: Synthetic oligonucleotide
  Antisense strand to SEQ ID NO: 698498
uaaacucucugcuucugcu

SEQ ID NO: 698500 - RNA, 19 nt, Artificial Sequence
  Description of Artificial Sequence: Synthetic oligonucleotide
  Sense strand starting at position 264 of SEQ ID NO: 586185
uacagaguuccaggugaca

SEQ ID NO: 698501 - RNA, 19 nt, Artificial Sequence
  Description of Artificial Sequence: Synthetic oligonucleotide
  Antisense strand to SEQ ID NO: 698500
ugucaccuggaacucugua

SEQ ID NO: 698502 - RNA, 19 nt, Artificial Sequence
  Description of Artificial Sequence: Synthetic oligonucleotide
  Sense strand starting at position 346 of SEQ ID NO: 586185
guguaccuguucuuagguu

SEQ ID NO: 698503 - RNA, 19 nt, Artificial Sequence
  Description of Artificial Sequence: Synthetic oligonucleotide
  Antisense strand to SEQ ID NO: 698502
aaccuaagaacagguacac

SEQ ID NO: 698504 - RNA, 19 nt, Artificial Sequence
  Description of Artificial Sequence: Synthetic oligonucleotide
  Sense strand starting at position 404 of SEQ ID NO: 586185
ccaugaguauguuaaacua

SEQ ID NO: 698505 - RNA, 19 nt, Artificial Sequence
  Description of Artificial Sequence: Synthetic oligonucleotide
  Antisense strand to SEQ ID NO: 698504
uaguuuaacauacucaugg

SEQ ID NO: 698506 - RNA, 19 nt, Artificial Sequence
  Description of Artificial Sequence: Synthetic oligonucleotide
  Sense strand starting at position 474 of SEQ ID NO: 586185
gaaggaacuucccucuugu

SEQ ID NO: 698507 - RNA, 19 nt, Artificial Sequence
  Description of Artificial Sequence: Synthetic oligonucleotide
  Antisense strand to SEQ ID NO: 698506
acaagagggaaguuccuuc

SEQ ID NO: 698508 - RNA, 19 nt, Artificial Sequence
  Description of Artificial Sequence: Synthetic oligonucleotide
  Sense strand starting at position 593 of SEQ ID NO: 586185
gguaacaucuacuugaacu

SEQ ID NO: 698509 - RNA, 19 nt, Artificial Sequence
  Description of Artificial Sequence: Synthetic oligonucleotide
  Antisense strand to SEQ ID NO: 698508
aguucaaguagauguuacc

SEQ ID NO: 698510 - RNA, 19 nt, Artificial Sequence
  Description of Artificial Sequence: Synthetic oligonucleotide
  Sense strand starting at position 763 of SEQ ID NO: 586185
aguaguaauuggcuauaca

SEQ ID NO: 698511 - RNA, 19 nt, Artificial Sequence
  Description of Artificial Sequence: Synthetic oligonucleotide
  Antisense strand to SEQ ID NO: 698510
uguauagccaauuacuacu

SEQ ID NO: 698512 - RNA, 19 nt, Artificial Sequence
  Description of Artificial Sequence: Synthetic oligonucleotide
  Sense strand starting at position 764 of SEQ ID NO: 586185
guaguaauuggcuauacaa

SEQ ID NO: 698513 - RNA, 19 nt, Artificial Sequence
  Description of Artificial Sequence: Synthetic oligonucleotide
  Antisense strand to SEQ ID NO: 698512
uuguauagccaauuacuac

SEQ ID NO: 698514 - RNA, 19 nt, Artificial Sequence
  Description of Artificial Sequence: Synthetic oligonucleotide
  Sense strand starting at position 790 of SEQ ID NO: 586185
gacgaaguuggcugugaaa

SEQ ID NO: 698515 - RNA, 19 nt, Artificial Sequence
  Description of Artificial Sequence: Synthetic oligonucleotide
  Antisense strand to SEQ ID NO: 698514
uuucacagccaacuucguc

SEQ ID NO: 698516 - RNA, 19 nt, Artificial Sequence
  Description of Artificial Sequence: Synthetic oligonucleotide
  Sense strand starting at position 792 of SEQ ID NO: 586185
cgaaguuggcugugaaagu

SEQ ID NO: 698517 - RNA, 19 nt, Artificial Sequence
  Description of Artificial Sequence: Synthetic oligonucleotide
  Antisense strand to SEQ ID NO: 698516
acuuucacagccaacuucg

SEQ ID NO: 698518 - RNA, 19 nt, Artificial Sequence
  Description of Artificial Sequence: Synthetic oligonucleotide
  Sense strand starting at position 806 of SEQ ID NO: 586185
aaaguuuaaugugaugacu

SEQ ID NO: 698519 - RNA, 19 nt, Artificial Sequence
  Description of Artificial Sequence: Synthetic oligonucleotide
  Antisense strand to SEQ ID NO: 698518
agucaucacauuaaacuuu

SEQ ID NO: 698520 - RNA, 19 nt, Artificial Sequence
  Description of Artificial Sequence: Synthetic oligonucleotide
  Sense strand starting at position 814 of SEQ ID NO: 586185
augugaugacuccgauaca

SEQ ID NO: 698521 - RNA, 19 nt, Artificial Sequence
  Description of Artificial Sequence: Synthetic oligonucleotide
  Antisense strand to SEQ ID NO: 698520
uguaucggagucaucacau

SEQ ID NO: 698522 - RNA, 19 nt, Artificial Sequence
  Description of Artificial Sequence: Synthetic oligonucleotide
  Sense strand starting at position 815 of SEQ ID NO: 586185
ugugaugacuccgauacac

SEQ ID NO: 698523 - RNA, 19 nt, Artificial Sequence
  Description of Artificial Sequence: Synthetic oligonucleotide
  Antisense strand to SEQ ID NO: 698522
guguaucggagucaucaca

SEQ ID NO: 698524 - RNA, 19 nt, Artificial Sequence
  Description of Artificial Sequence: Synthetic oligonucleotide
  Sense strand starting at position 824 of SEQ ID NO: 586185
uccgauacacaccgauaua

SEQ ID NO: 698525 - RNA, 19 nt, Artificial Sequence
  Description of Artificial Sequence: Synthetic oligonucleotide
  Antisense strand to SEQ ID NO: 698524
uauaucgguguguaucgga

SEQ ID NO: 698526 - RNA, 19 nt, Artificial Sequence
  Description of Artificial Sequence: Synthetic oligonucleotide
  Sense strand starting at position 836 of SEQ ID NO: 586185
cgauauaguauguaucgga

SEQ ID NO: 698527 - RNA, 19 nt, Artificial Sequence
  Description of Artificial Sequence: Synthetic oligonucleotide
  Antisense strand to SEQ ID NO: 698526
uccgauacauacuauaucg

SEQ ID NO: 698528 - RNA, 19 nt, Artificial Sequence
  Description of Artificial Sequence: Synthetic oligonucleotide
  Sense strand starting at position 840 of SEQ ID NO: 586185
auaguauguaucggaguuc

SEQ ID NO: 698529 - RNA, 19 nt, Artificial Sequence
  Description of Artificial Sequence: Synthetic oligonucleotide
  Antisense strand to SEQ ID NO: 698528
gaacuccgauacauacuau

SEQ ID NO: 698530 - RNA, 19 nt, Artificial Sequence
  Description of Artificial Sequence: Synthetic oligonucleotide
  Sense strand starting at position 849 of SEQ ID NO: 586185
aucggaguuccggauacua

SEQ ID NO: 698531 - RNA, 19 nt, Artificial Sequence
  Description of Artificial Sequence: Synthetic oligonucleotide
  Antisense strand to SEQ ID NO: 698530
uaguauccggaacuccgau

SEQ ID NO: 698532 - RNA, 19 nt, Artificial Sequence
  Description of Artificial Sequence: Synthetic oligonucleotide
  Sense strand starting at position 851 of SEQ ID NO: 586185
cggaguuccggauacuaaa

SEQ ID NO: 698533 - RNA, 19 nt, Artificial Sequence
  Description of Artificial Sequence: Synthetic oligonucleotide
  Antisense strand to SEQ ID NO: 698532
uuuaguauccggaacuccg

SEQ ID NO: 698534 - RNA, 19 nt, Artificial Sequence
  Description of Artificial Sequence: Synthetic oligonucleotide
  Sense strand starting at position 882 of SEQ ID NO: 586185
cggcaucuuccaugaacau

SEQ ID NO: 698535 - RNA, 19 nt, Artificial Sequence
  Description of Artificial Sequence: Synthetic oligonucleotide
  Antisense strand to SEQ ID NO: 698534
auguucauggaagaugccg

SEQ ID NO: 698536 - RNA, 19 nt, Artificial Sequence
  Description of Artificial Sequence: Synthetic oligonucleotide
  Sense strand starting at position 883 of SEQ ID NO: 586185
ggcaucuuccaugaacauu

SEQ ID NO: 698537 - RNA, 19 nt, Artificial Sequence
  Description of Artificial Sequence: Synthetic oligonucleotide
  Antisense strand to SEQ ID NO: 698536
aauguucauggaagaugcc

SEQ ID NO: 698538 - RNA, 19 nt, Artificial Sequence
  Description of Artificial Sequence: Synthetic oligonucleotide
  Sense strand starting at position 1045 of SEQ ID NO: 586185
gcuacuuggaagugagaaa

SEQ ID NO: 698539 - RNA, 19 nt, Artificial Sequence
  Description of Artificial Sequence: Synthetic oligonucleotide
  Antisense strand to SEQ ID NO: 698538
uuucucacuuccaaguagc

SEQ ID NO: 698540 - RNA, 19 nt, Artificial Sequence
  Description of Artificial Sequence: Synthetic oligonucleotide
  Sense strand starting at position 1142 of SEQ ID NO: 586185
guacauaguuugcaaagga

SEQ ID NO: 698541 - RNA, 19 nt, Artificial Sequence
  Description of Artificial Sequence: Synthetic oligonucleotide
  Antisense strand to SEQ ID NO: 698540
uccuuugcaaacuauguac

SEQ ID NO: 698542 - RNA, 19 nt, Artificial Sequence
  Description of Artificial Sequence: Synthetic oligonucleotide
  Sense strand starting at position 1264 of SEQ ID NO: 586185
caggcuugcucccuugaca

SEQ ID NO: 698543 - RNA, 19 nt, Artificial Sequence
  Description of Artificial Sequence: Synthetic oligonucleotide
  Antisense strand to SEQ ID NO: 698542
ugucaagggagcaagccug

SEQ ID NO: 698544 - RNA, 19 nt, Artificial Sequence
  Description of Artificial Sequence: Synthetic oligonucleotide
  Sense strand starting at position 1267 of SEQ ID NO: 586185
gcuugcucccuugacagau

SEQ ID NO: 698545 - RNA, 19 nt, Artificial Sequence
  Description of Artificial Sequence: Synthetic oligonucleotide
  Antisense strand to SEQ ID NO: 698544
aucugucaagggagcaagc

SEQ ID NO: 698546 - RNA, 19 nt, Artificial Sequence
  Description of Artificial Sequence: Synthetic oligonucleotide
  Sense strand starting at position 1361 of SEQ ID NO: 586185
cagggcuacucgcuauuau

SEQ ID NO: 698547 - RNA, 19 nt, Artificial Sequence
  Description of Artificial Sequence: Synthetic oligonucleotide
  Antisense strand to SEQ ID NO: 698546
auaauagcgaguagcccug

SEQ ID NO: 698548 - RNA, 19 nt, Artificial Sequence
  Description of Artificial Sequence: Synthetic oligonucleotide
  Sense strand starting at position 1362 of SEQ ID NO: 586185
agggcuacucgcuauuauc

SEQ ID NO: 698549 - RNA, 19 nt, Artificial Sequence
  Description of Artificial Sequence: Synthetic oligonucleotide
  Antisense strand to SEQ ID NO: 698548
gauaauagcgaguagcccu

SEQ ID NO: 698550 - RNA, 19 nt, Artificial Sequence
  Description of Artificial Sequence: Synthetic oligonucleotide
  Sense strand starting at position 1870 of SEQ ID NO: 586185
gggcacugcucccaagaca

SEQ ID NO: 698551 - RNA, 19 nt, Artificial Sequence
  Description of Artificial Sequence: Synthetic oligonucleotide
  Antisense strand to SEQ ID NO: 698550
ugucuugggagcagugccc

SEQ ID NO: 698552 - RNA, 19 nt, Artificial Sequence
  Description of Artificial Sequence: Synthetic oligonucleotide
  Sense strand starting at position 2165 of SEQ ID NO: 586185
cugguucucuucccugaga

SEQ ID NO: 698553 - RNA, 19 nt, Artificial Sequence
  Description of Artificial Sequence: Synthetic oligonucleotide
  Antisense strand to SEQ ID NO: 698552
ucucagggaagagaaccag

SEQ ID NO: 698554 - RNA, 19 nt, Artificial Sequence
  Description of Artificial Sequence: Synthetic oligonucleotide
  Sense strand starting at position 2167 of SEQ ID NO: 586185
gguucucuucccugagagu

SEQ ID NO: 698555 - RNA, 19 nt, Artificial Sequence
  Description of Artificial Sequence: Synthetic oligonucleotide
  Antisense strand to SEQ ID NO: 698554
acucucagggaagagaacc

SEQ ID NO: 698556 - RNA, 19 nt, Artificial Sequence
  Description of Artificial Sequence: Synthetic oligonucleotide
  Sense strand starting at position 2168 of SEQ ID NO: 586185
guucucuucccugagaguu

SEQ ID NO: 698557 - RNA, 19 nt, Artificial Sequence
  Description of Artificial Sequence: Synthetic oligonucleotide
  Antisense strand to SEQ ID NO: 698556
aacucucagggaagagaac

SEQ ID NO: 698558 - RNA, 19 nt, Artificial Sequence
  Description of Artificial Sequence: Synthetic oligonucleotide
  Sense strand starting at position 2510 of SEQ ID NO: 586185
gcugccgucagcuaugaua

SEQ ID NO: 698559 - RNA, 19 nt, Artificial Sequence
  Description of Artificial Sequence: Synthetic oligonucleotide
  Antisense strand to SEQ ID NO: 698558
uaucauagcugacggcagc

SEQ ID NO: 698560 - RNA, 19 nt, Artificial Sequence
  Description of Artificial Sequence: Synthetic oligonucleotide
  Sense strand starting at position 2512 of SEQ ID NO: 586185
ugccgucagcuaugauaug

SEQ ID NO: 698561 - RNA, 19 nt, Artificial Sequence
  Description of Artificial Sequence: Synthetic oligonucleotide
  Antisense strand to SEQ ID NO: 698560
cauaucauagcugacggca

SEQ ID NO: 698562 - RNA, 19 nt, Artificial Sequence
  Description of Artificial Sequence: Synthetic oligonucleotide
  Sense strand starting at position 2639 of SEQ ID NO: 586185
gugcaagacucuguaccua

SEQ ID NO: 698563 - RNA, 19 nt, Artificial Sequence
  Description of Artificial Sequence: Synthetic oligonucleotide
  Antisense strand to SEQ ID NO: 698562
uagguacagagucuugcac

SEQ ID NO: 698564 - RNA, 19 nt, Artificial Sequence
  Description of Artificial Sequence: Synthetic oligonucleotide
  Sense strand starting at position 2690 of SEQ ID NO: 586185
gagcuuccaguuuguuuau

SEQ ID NO: 698565 - RNA, 19 nt, Artificial Sequence
  Description of Artificial Sequence: Synthetic oligonucleotide
  Antisense strand to SEQ ID NO: 698564
auaaacaaacuggaagcuc

SEQ ID NO: 698566 - RNA, 19 nt, Artificial Sequence
  Description of Artificial Sequence: Synthetic oligonucleotide
  Sense strand starting at position 2692 of SEQ ID NO: 586185
gcuuccaguuuguuuauuu

SEQ ID NO: 698567 - RNA, 19 nt, Artificial Sequence
  Description of Artificial Sequence: Synthetic oligonucleotide
  Antisense strand to SEQ ID NO: 698566
aaauaaacaaacuggaagc

SEQ ID NO: 698568 - RNA, 19 nt, Artificial Sequence
  Description of Artificial Sequence: Synthetic oligonucleotide
  Sense strand starting at position 3121 of SEQ ID NO: 586185
gauuauagucguccgccau

SEQ ID NO: 698569 - RNA, 19 nt, Artificial Sequence
  Description of Artificial Sequence: Synthetic oligonucleotide
  Antisense strand to SEQ ID NO: 698568
auggcggacgacuauaauc

SEQ ID NO: 698570 - RNA, 19 nt, Artificial Sequence
  Description of Artificial Sequence: Synthetic oligonucleotide
  Sense strand starting at position 3409 of SEQ ID NO: 586185
cuuccaguuuaguagaaca

SEQ ID NO: 698571 - RNA, 19 nt, Artificial Sequence
  Description of Artificial Sequence: Synthetic oligonucleotide
  Antisense strand to SEQ ID NO: 698570
uguucuacuaaacuggaag

SEQ ID NO: 698572 - RNA, 19 nt, Artificial Sequence
  Description of Artificial Sequence: Synthetic oligonucleotide
  Sense strand starting at position 3724 of SEQ ID NO: 586185
uuugauaaaugcuagccua

SEQ ID NO: 698573 - RNA, 19 nt, Artificial Sequence
  Description of Artificial Sequence: Synthetic oligonucleotide
  Antisense strand to SEQ ID NO: 698572
uaggcuagcauuuaucaaa

SEQ ID NO: 698574 - RNA, 19 nt, Artificial Sequence
  Description of Artificial Sequence: Synthetic oligonucleotide
  Sense strand starting at position 3871 of SEQ ID NO: 586185
agaauuagcugcuuggaaa

SEQ ID NO: 698575 - RNA, 19 nt, Artificial Sequence
  Description of Artificial Sequence: Synthetic oligonucleotide
  Antisense strand to SEQ ID NO: 698574
uuuccaagcagcuaauucu

SEQ ID NO: 698576 - RNA, 19 nt, Artificial Sequence
  Description of Artificial Sequence: Synthetic oligonucleotide
  Sense strand starting at position 3872 of SEQ ID NO: 586185
gaauuagcugcuuggaaag

SEQ ID NO: 698577 - RNA, 19 nt, Artificial Sequence
  Description of Artificial Sequence: Synthetic oligonucleotide
  Antisense strand to SEQ ID NO: 698576
cuuuccaagcagcuaauuc

SEQ ID NO: 698578 - RNA, 19 nt, Artificial Sequence
  Description of Artificial Sequence: Synthetic oligonucleotide
  Sense strand starting at position 26 of SEQ ID NO: 586186
auaguaguuaccuagguaa

SEQ ID NO: 698579 - RNA, 19 nt, Artificial Sequence
  Description of Artificial Sequence: Synthetic oligonucleotide
  Antisense strand to SEQ ID NO: 698578
uuaccuagguaacuacuau

SEQ ID NO: 698580 - RNA, 19 nt, Artificial Sequence
  Description of Artificial Sequence: Synthetic oligonucleotide
  Sense strand starting at position 125 of SEQ ID NO: 586186
gguagugggcucuaaauug

SEQ ID NO: 698581 - RNA, 19 nt, Artificial Sequence
  Description of Artificial Sequence: Synthetic oligonucleotide
  Antisense strand to SEQ ID NO: 698580
caauuuagagcccacuacc

SEQ ID NO: 698582 - RNA, 19 nt, Artificial Sequence
  Description of Artificial Sequence: Synthetic oligonucleotide
  Sense strand starting at position 130 of SEQ ID NO: 586186
ugggcucuaaauuggagaa

SEQ ID NO: 698583 - RNA, 19 nt, Artificial Sequence
  Description of Artificial Sequence: Synthetic oligonucleotide
  Antisense strand to SEQ ID NO: 698582
uucuccaauuuagagccca

SEQ ID NO: 698584 - RNA, 19 nt, Artificial Sequence
  Description of Artificial Sequence: Synthetic oligonucleotide
  Sense strand starting at position 231 of SEQ ID NO: 586186
ugagaaccauuacucaagu

SEQ ID NO: 698585 - RNA, 19 nt, Artificial Sequence
  Description of Artificial Sequence: Synthetic oligonucleotide
  Antisense strand to SEQ ID NO: 698584
acuugaguaaugguucuca

SEQ ID NO: 698586 - RNA, 19 nt, Artificial Sequence
  Description of Artificial Sequence: Synthetic oligonucleotide
  Sense strand starting at position 344 of SEQ ID NO: 586186
augcaaagaucuccacagu

SEQ ID NO: 698587 - RNA, 19 nt, Artificial Sequence
  Description of Artificial Sequence: Synthetic oligonucleotide
  Antisense strand to SEQ ID NO: 698586
acuguggagaucuuugcau

SEQ ID NO: 698588 - RNA, 19 nt, Artificial Sequence
  Description of Artificial Sequence: Synthetic oligonucleotide
  Sense strand starting at position 347 of SEQ ID NO: 586186
caaagaucuccacagugug

SEQ ID NO: 698589 - RNA, 19 nt, Artificial Sequence
  Description of Artificial Sequence: Synthetic oligonucleotide
  Antisense strand to SEQ ID NO: 698588
cacacuguggagaucuuug

SEQ ID NO: 698590 - RNA, 19 nt, Artificial Sequence
  Description of Artificial Sequence: Synthetic oligonucleotide
  Sense strand starting at position 530 of SEQ ID NO: 586186
agugaucuaucucugaaau

SEQ ID NO: 698591 - RNA, 19 nt, Artificial Sequence
  Description of Artificial Sequence: Synthetic oligonucleotide
  Antisense strand to SEQ ID NO: 698590
auuucagagauagaucacu

SEQ ID NO: 698592 - RNA, 19 nt, Artificial Sequence
  Description of Artificial Sequence: Synthetic oligonucleotide
  Sense strand starting at position 531 of SEQ ID NO: 586186
gugaucuaucucugaaauc

SEQ ID NO: 698593 - RNA, 19 nt, Artificial Sequence
  Description of Artificial Sequence: Synthetic oligonucleotide
  Antisense strand to SEQ ID NO: 698592
gauuucagagauagaucac

SEQ ID NO: 698594 - RNA, 19 nt, Artificial Sequence
  Description of Artificial Sequence: Synthetic oligonucleotide
  Sense strand starting at position 540 of SEQ ID NO: 586186
cucugaaaucucugagacc

SEQ ID NO: 698595 - RNA, 19 nt, Artificial Sequence
  Description of Artificial Sequence: Synthetic oligonucleotide
  Antisense strand to SEQ ID NO: 698594
ggucucagagauuucagag

SEQ ID NO: 698596 - RNA, 19 nt, Artificial Sequence
  Description of Artificial Sequence: Synthetic oligonucleotide
  Sense strand starting at position 690 of SEQ ID NO: 586186
acuguauaccuagagcuua

SEQ ID NO: 698597 - RNA, 19 nt, Artificial Sequence
  Description of Artificial Sequence: Synthetic oligonucleotide
  Antisense strand to SEQ ID NO: 698596
uaagcucuagguauacagu

SEQ ID NO: 698598 - RNA, 19 nt, Artificial Sequence
  Description of Artificial Sequence: Synthetic oligonucleotide
  Sense strand starting at position 1044 of SEQ ID NO: 586186
ugaaguauacugcacucua

SEQ ID NO: 698599 - RNA, 19 nt, Artificial Sequence
  Description of Artificial Sequence: Synthetic oligonucleotide
  Antisense strand to SEQ ID NO: 698598
uagagugcaguauacuuca

SEQ ID NO: 698600 - RNA, 19 nt, Artificial Sequence
  Description of Artificial Sequence: Synthetic oligonucleotide
  Sense strand starting at position 1135 of SEQ ID NO: 586186
aguagcugugcguuacuau

SEQ ID NO: 698601 - RNA, 19 nt, Artificial Sequence
  Description of Artificial Sequence: Synthetic oligonucleotide
  Antisense strand to SEQ ID NO: 698600
auaguaacgcacagcuacu

SEQ ID NO: 698602 - RNA, 19 nt, Artificial Sequence
  Description of Artificial Sequence: Synthetic oligonucleotide
  Sense strand starting at position 1302 of SEQ ID NO: 586186
gccuuugacccagaaguuc

SEQ ID NO: 698603 - RNA, 19 nt, Artificial Sequence
  Description of Artificial Sequence: Synthetic oligonucleotide
  Antisense strand to SEQ ID NO: 698602
gaacuucugggucaaaggc

SEQ ID NO: 698604 - RNA, 19 nt, Artificial Sequence
  Description of Artificial Sequence: Synthetic oligonucleotide
  Sense strand starting at position 1434 of SEQ ID NO: 586186
uccgcuucugaagaaacua

SEQ ID NO: 698605 - RNA, 19 nt, Artificial Sequence
  Description of Artificial Sequence: Synthetic oligonucleotide
  Antisense strand to SEQ ID NO: 698604
uaguuucuucagaagcgga

SEQ ID NO: 698606 - RNA, 19 nt, Artificial Sequence
  Description of Artificial Sequence: Synthetic oligonucleotide
  Sense strand starting at position 2096 of SEQ ID NO: 586186
gcgugaugugaacccgguu

SEQ ID NO: 698607 - RNA, 19 nt, Artificial Sequence
  Description of Artificial Sequence: Synthetic oligonucleotide
  Antisense strand to SEQ ID NO: 698606
aaccggguucacaucacgc

SEQ ID NO: 698608 - RNA, 19 nt, Artificial Sequence
  Description of Artificial Sequence: Synthetic oligonucleotide
  Sense strand starting at position 2245 of SEQ ID NO: 586186
aguuuaacccagcagaucu

SEQ ID NO: 698609 - RNA, 19 nt, Artificial Sequence
  Description of Artificial Sequence: Synthetic oligonucleotide
  Antisense strand to SEQ ID NO: 698608
agaucugcuggguuaaacu

SEQ ID NO: 698610 - RNA, 19 nt, Artificial Sequence
  Description of Artificial Sequence: Synthetic oligonucleotide
  Sense strand starting at position 2304 of SEQ ID NO: 586186
cugauuuagccucgaacuc

SEQ ID NO: 698611 - RNA, 19 nt, Artificial Sequence
  Description of Artificial Sequence: Synthetic oligonucleotide
  Antisense strand to SEQ ID NO: 698610
gaguucgaggcuaaaucag

SEQ ID NO: 698612 - RNA, 19 nt, Artificial Sequence
  Description of Artificial Sequence: Synthetic oligonucleotide
  Sense strand starting at position 2373 of SEQ ID NO: 586186
gguuucucaguuuacaaac

SEQ ID NO: 698613 - RNA, 19 nt, Artificial Sequence
  Description of Artificial Sequence: Synthetic oligonucleotide
  Antisense strand to SEQ ID NO: 698612
guuuguaaacugagaaacc

SEQ ID NO: 698614 - RNA, 19 nt, Artificial Sequence
  Description of Artificial Sequence: Synthetic oligonucleotide
  Sense strand starting at position 2431 of SEQ ID NO: 586186
uguaguauccaguaaagga

SEQ ID NO: 698615 - RNA, 19 nt, Artificial Sequence
  Description of Artificial Sequence: Synthetic oligonucleotide
  Antisense strand to SEQ ID NO: 698614
uccuuuacuggauacuaca

SEQ ID NO: 698616 - RNA, 19 nt, Artificial Sequence
  Description of Artificial Sequence: Synthetic oligonucleotide
  Sense strand starting at position 2460 of SEQ ID NO: 586186
gguuccuuugaguaggacu

SEQ ID NO: 698617 - RNA, 19 nt, Artificial Sequence
  Description of Artificial Sequence: Synthetic oligonucleotide
  Antisense strand to SEQ ID NO: 698616
aguccuacucaaaggaacc

SEQ ID NO: 698618 - RNA, 19 nt, Artificial Sequence
  Description of Artificial Sequence: Synthetic oligonucleotide
  Sense strand starting at position 2521 of SEQ ID NO: 586186
gucagaggcacugaauagu

SEQ ID NO: 698619 - RNA, 19 nt, Artificial Sequence
  Description of Artificial Sequence: Synthetic oligonucleotide
  Antisense strand to SEQ ID NO: 698618
acuauucagugccucugac

SEQ ID NO: 698620 - RNA, 19 nt, Artificial Sequence
  Description of Artificial Sequence: Synthetic oligonucleotide
  Sense strand starting at position 2736 of SEQ ID NO: 586186
uaucgagguuaauccuaga

SEQ ID NO: 698621 - RNA, 19 nt, Artificial Sequence
  Description of Artificial Sequence: Synthetic oligonucleotide
  Antisense strand to SEQ ID NO: 698620
ucuaggauuaaccucgaua

SEQ ID NO: 698622 - RNA, 19 nt, Artificial Sequence
  Description of Artificial Sequence: Synthetic oligonucleotide
  Sense strand starting at position 2782 of SEQ ID NO: 586186
gugagaauacgaugaaauc

SEQ ID NO: 698623 - RNA, 19 nt, Artificial Sequence
  Description of Artificial Sequence: Synthetic oligonucleotide
  Antisense strand to SEQ ID NO: 698622
gauuucaucguauucucac

SEQ ID NO: 698624 - RNA, 19 nt, Artificial Sequence
  Description of Artificial Sequence: Synthetic oligonucleotide
  Sense strand starting at position 2875 of SEQ ID NO: 586186
guuguugcugcuguauaua

SEQ ID NO: 698625 - RNA, 19 nt, Artificial Sequence
  Description of Artificial Sequence: Synthetic oligonucleotide
  Antisense strand to SEQ ID NO: 698624
uauauacagcagcaacaac

SEQ ID NO: 698626 - RNA, 19 nt, Artificial Sequence
  Description of Artificial Sequence: Synthetic oligonucleotide
  Sense strand starting at position 2888 of SEQ ID NO: 586186
uauauauggcaguggaauc

SEQ ID NO: 698627 - RNA, 19 nt, Artificial Sequence
  Description of Artificial Sequence: Synthetic oligonucleotide
  Antisense strand to SEQ ID NO: 698626
gauuccacugccauauaua

SEQ ID NO: 698628 - RNA, 19 nt, Artificial Sequence
  Description of Artificial Sequence: Synthetic oligonucleotide
  Sense strand starting at position 2900 of SEQ ID NO: 586186
uggaaucgucuccacacua

SEQ ID NO: 698629 - RNA, 19 nt, Artificial Sequence
  Description of Artificial Sequence: Synthetic oligonucleotide
  Antisense strand to SEQ ID NO: 698628
uaguguggagacgauucca

SEQ ID NO: 698630 - RNA, 19 nt, Artificial Sequence
  Description of Artificial Sequence: Synthetic oligonucleotide
  Sense strand starting at position 2905 of SEQ ID NO: 586186
ucgucuccacacuagagau

SEQ ID NO: 698631 - RNA, 19 nt, Artificial Sequence
  Description of Artificial Sequence: Synthetic oligonucleotide
  Antisense strand to SEQ ID NO: 698630
aucucuaguguggagacga

SEQ ID NO: 698632 - RNA, 19 nt, Artificial Sequence
  Description of Artificial Sequence: Synthetic oligonucleotide
  Sense strand starting at position 2930 of SEQ ID NO: 586186
auaugugaucuuugaucau

SEQ ID NO: 698633 - RNA, 19 nt, Artificial Sequence
  Description of Artificial Sequence: Synthetic oligonucleotide
  Antisense strand to SEQ ID NO: 698632
augaucaaagaucacauau

SEQ ID NO: 698634 - RNA, 19 nt, Artificial Sequence
  Description of Artificial Sequence: Synthetic oligonucleotide
  Sense strand starting at position 3005 of SEQ ID NO: 586186
uaagucucugcguuaaguu

SEQ ID NO: 698635 - RNA, 19 nt, Artificial Sequence
  Description of Artificial Sequence: Synthetic oligonucleotide
  Antisense strand to SEQ ID NO: 698634
aacuuaacgcagagacuua

SEQ ID NO: 698636 - RNA, 19 nt, Artificial Sequence
  Description of Artificial Sequence: Synthetic oligonucleotide
  Sense strand starting at position 3079 of SEQ ID NO: 586186
ggaggcuuuauccaauagu

SEQ ID NO: 698637 - RNA, 19 nt, Artificial Sequence
  Description of Artificial Sequence: Synthetic oligonucleotide
  Antisense strand to SEQ ID NO: 698636
acuauuggauaaagccucc

SEQ ID NO: 698638 - RNA, 19 nt, Artificial Sequence
  Description of Artificial Sequence: Synthetic oligonucleotide
  Sense strand starting at position 3162 of SEQ ID NO: 586186
gcauaauaucagggacaau

SEQ ID NO: 698639 - RNA, 19 nt, Artificial Sequence
  Description of Artificial Sequence: Synthetic oligonucleotide
  Antisense strand to SEQ ID NO: 698638
auugucccugauauuaugc

SEQ ID NO: 698640 - RNA, 19 nt, Artificial Sequence
  Description of Artificial Sequence: Synthetic oligonucleotide
  Sense strand starting at position 3211 of SEQ ID NO: 586186
aagaaaugauagcuaggua

SEQ ID NO: 698641 - RNA, 19 nt, Artificial Sequence
  Description of Artificial Sequence: Synthetic oligonucleotide
  Antisense strand to SEQ ID NO: 698640
uaccuagcuaucauuucuu

SEQ ID NO: 698642 - RNA, 19 nt, Artificial Sequence
  Description of Artificial Sequence: Synthetic oligonucleotide
  Sense strand starting at position 3322 of SEQ ID NO: 586186
ugcugauggaaauguagaa

SEQ ID NO: 698643 - RNA, 19 nt, Artificial Sequence
  Description of Artificial Sequence: Synthetic oligonucleotide
  Antisense strand to SEQ ID NO: 698642
uucuacauuuccaucagca

SEQ ID NO: 698644 - RNA, 19 nt, Artificial Sequence
  Description of Artificial Sequence: Synthetic oligonucleotide
  Sense strand starting at position 3361 of SEQ ID NO: 586186
gguaauauuuacuagaacu

SEQ ID NO: 698645 - RNA, 19 nt, Artificial Sequence
  Description of Artificial Sequence: Synthetic oligonucleotide
  Antisense strand to SEQ ID NO: 698644
aguucuaguaaauauuacc

SEQ ID NO: 698646 - RNA, 19 nt, Artificial Sequence
  Description of Artificial Sequence: Synthetic oligonucleotide
  Sense strand starting at position 3650 of SEQ ID NO: 586186
auuaaaugugaccauaguu

SEQ ID NO: 698647 - RNA, 19 nt, Artificial Sequence
  Description of Artificial Sequence: Synthetic oligonucleotide
  Antisense strand to SEQ ID NO: 698646
aacuauggucacauuuaau

SEQ ID NO: 698648 - RNA, 19 nt, Artificial Sequence
  Description of Artificial Sequence: Synthetic oligonucleotide
  Sense strand starting at position 3655 of SEQ ID NO: 586186
augugaccauaguugacau

SEQ ID NO: 698649 - RNA, 19 nt, Artificial Sequence
  Description of Artificial Sequence: Synthetic oligonucleotide
  Antisense strand to SEQ ID NO: 698648
augucaacuauggucacau

SEQ ID NO: 698650 - RNA, 19 nt, Artificial Sequence
  Description of Artificial Sequence: Synthetic oligonucleotide
  Sense strand starting at position 3657 of SEQ ID NO: 586186
gugaccauaguugacauua

SEQ ID NO: 698651 - RNA, 19 nt, Artificial Sequence
  Description of Artificial Sequence: Synthetic oligonucleotide
  Antisense strand to SEQ ID NO: 698650
uaaugucaacuauggucac

SEQ ID NO: 698652 - RNA, 19 nt, Artificial Sequence
  Description of Artificial Sequence: Synthetic oligonucleotide
  Sense strand starting at position 3662 of SEQ ID NO: 586186
cauaguugacauuagcgau

SEQ ID NO: 698653 - RNA, 19 nt, Artificial Sequence
  Description of Artificial Sequence: Synthetic oligonucleotide
  Antisense strand to SEQ ID NO: 698652
aucgcuaaugucaacuaug

SEQ ID NO: 698654 - RNA, 19 nt, Artificial Sequence
  Description of Artificial Sequence: Synthetic oligonucleotide
  Sense strand starting at position 3666 of SEQ ID NO: 586186
guugacauuagcgaucaga

SEQ ID NO: 698655 - RNA, 19 nt, Artificial Sequence
  Description of Artificial Sequence: Synthetic oligonucleotide
  Antisense strand to SEQ ID NO: 698654
ucugaucgcuaaugucaac

SEQ ID NO: 698656 - RNA, 19 nt, Artificial Sequence
  Description of Artificial Sequence: Synthetic oligonucleotide
  Sense strand starting at position 3843 of SEQ ID NO: 586186
uuuguaggucucuaggaga

SEQ ID NO: 698657 - RNA, 19 nt, Artificial Sequence
  Description of Artificial Sequence: Synthetic oligonucleotide
  Antisense strand to SEQ ID NO: 698656
ucuccuagagaccuacaaa

SEQ ID NO: 698658 - RNA, 19 nt, Artificial Sequence
  Description of Artificial Sequence: Synthetic oligonucleotide
  Sense strand starting at position 4 of SEQ ID NO: 586187
gccagauccucaggguguu

SEQ ID NO: 698659 - RNA, 19 nt, Artificial Sequence
  Description of Artificial Sequence: Synthetic oligonucleotide
  Antisense strand to SEQ ID NO: 698658
aacacccugaggaucuggc

SEQ ID NO: 698660 - RNA, 19 nt, Artificial Sequence
  Description of Artificial Sequence: Synthetic oligonucleotide
  Sense strand starting at position 5 of SEQ ID NO: 586187
ccagauccucaggguguua

SEQ ID NO: 698661 - RNA, 19 nt, Artificial Sequence
  Description of Artificial Sequence: Synthetic oligonucleotide
  Antisense strand to SEQ ID NO: 698660
uaacacccugaggaucugg

SEQ ID NO: 698662 - RNA, 19 nt, Artificial Sequence
  Description of Artificial Sequence: Synthetic oligonucleotide
  Sense strand starting at position 16 of SEQ ID NO: 586187
ggguguuaccuguguccuu

SEQ ID NO: 698663 - RNA, 19 nt, Artificial Sequence
  Description of Artificial Sequence: Synthetic oligonucleotide
  Antisense strand to SEQ ID NO: 698662
aaggacacagguaacaccc

SEQ ID NO: 698664 - RNA, 19 nt, Artificial Sequence
  Description of Artificial Sequence: Synthetic oligonucleotide
  Sense strand starting at position 17 of SEQ ID NO: 586187
gguguuaccuguguccuua

SEQ ID NO: 698665 - RNA, 19 nt, Artificial Sequence
  Description of Artificial Sequence: Synthetic oligonucleotide
  Antisense strand to SEQ ID NO: 698664
uaaggacacagguaacacc

SEQ ID NO: 698666 - RNA, 19 nt, Artificial Sequence
  Description of Artificial Sequence: Synthetic oligonucleotide
  Sense strand starting at position 174 of SEQ ID NO: 586187
ugggacaucucugggcaga

SEQ ID NO: 698667 - RNA, 19 nt, Artificial Sequence
  Description of Artificial Sequence: Synthetic oligonucleotide
  Antisense strand to SEQ ID NO: 698666
ucugcccagagauguccca

SEQ ID NO: 698668 - RNA, 19 nt, Artificial Sequence
  Description of Artificial Sequence: Synthetic oligonucleotide
  Sense strand starting at position 205 of SEQ ID NO: 586187
gggagaguccaguagccaa

SEQ ID NO: 698669 - RNA, 19 nt, Artificial Sequence
  Description of Artificial Sequence: Synthetic oligonucleotide
  Antisense strand to SEQ ID NO: 698668
uuggcuacuggacucuccc

SEQ ID NO: 698670 - RNA, 19 nt, Artificial Sequence
  Description of Artificial Sequence: Synthetic oligonucleotide
  Sense strand starting at position 418 of SEQ ID NO: 586187
gucauaauguccuacagac

SEQ ID NO: 698671 - RNA, 19 nt, Artificial Sequence
  Description of Artificial Sequence: Synthetic oligonucleotide
  Antisense strand to SEQ ID NO: 698670
gucuguaggacauuaugac

SEQ ID NO: 698672 - RNA, 19 nt, Artificial Sequence
  Description of Artificial Sequence: Synthetic oligonucleotide
  Sense strand starting at position 435 of SEQ ID NO: 586187
acagcauggugccaauuau

SEQ ID NO: 698673 - RNA, 19 nt, Artificial Sequence
  Description of Artificial Sequence: Synthetic oligonucleotide
  Antisense strand to SEQ ID NO: 698672
auaauuggcaccaugcugu

SEQ ID NO: 698674 - RNA, 19 nt, Artificial Sequence
  Description of Artificial Sequence: Synthetic oligonucleotide
  Sense strand starting at position 441 of SEQ ID NO: 586187
uggugccaauuauaugaua

SEQ ID NO: 698675 - RNA, 19 nt, Artificial Sequence
  Description of Artificial Sequence: Synthetic oligonucleotide
  Antisense strand to SEQ ID NO: 698674
uaucauauaauuggcacca

SEQ ID NO: 698676 - RNA, 19 nt, Artificial Sequence
  Description of Artificial Sequence: Synthetic oligonucleotide
  Sense strand starting at position 463 of SEQ ID NO: 586187
ccacaucagugagaauaag

SEQ ID NO: 698677 - RNA, 19 nt, Artificial Sequence
  Description of Artificial Sequence: Synthetic oligonucleotide
  Antisense strand to SEQ ID NO: 698676
cuuauucucacugaugugg

SEQ ID NO: 698678 - RNA, 19 nt, Artificial Sequence
  Description of Artificial Sequence: Synthetic oligonucleotide
  Sense strand starting at position 784 of SEQ ID NO: 586187
ggaugaauuggaggucauc

SEQ ID NO: 698679 - RNA, 19 nt, Artificial Sequence
  Description of Artificial Sequence: Synthetic oligonucleotide
  Antisense strand to SEQ ID NO: 698678
gaugaccuccaauucaucc

SEQ ID NO: 698680 - RNA, 19 nt, Artificial Sequence
  Description of Artificial Sequence: Synthetic oligonucleotide
  Sense strand starting at position 794 of SEQ ID NO: 586187
gaggucaucugauuagagu

SEQ ID NO: 698681 - RNA, 19 nt, Artificial Sequence
  Description of Artificial Sequence: Synthetic oligonucleotide
  Antisense strand to SEQ ID NO: 698680
acucuaaucagaugaccuc

SEQ ID NO: 698682 - RNA, 19 nt, Artificial Sequence
  Description of Artificial Sequence: Synthetic oligonucleotide
  Sense strand starting at position 795 of SEQ ID NO: 586187
aggucaucugauuagaguu

SEQ ID NO: 698683 - RNA, 19 nt, Artificial Sequence
  Description of Artificial Sequence: Synthetic oligonucleotide
  Antisense strand to SEQ ID NO: 698682
aacucuaaucagaugaccu

SEQ ID NO: 698684 - RNA, 19 nt, Artificial Sequence
  Description of Artificial Sequence: Synthetic oligonucleotide
  Sense strand starting at position 1218 of SEQ ID NO: 586187
agggaaguggcugaauguu

SEQ ID NO: 698685 - RNA, 19 nt, Artificial Sequence
  Description of Artificial Sequence: Synthetic oligonucleotide
  Antisense strand to SEQ ID NO: 698684
aacauucagccacuucccu

SEQ ID NO: 698686 - RNA, 19 nt, Artificial Sequence
  Description of Artificial Sequence: Synthetic oligonucleotide
  Sense strand starting at position 1989 of SEQ ID NO: 586187
ggcccuuggagcugaaauc

SEQ ID NO: 698687 - RNA, 19 nt, Artificial Sequence
  Description of Artificial Sequence: Synthetic oligonucleotide
  Antisense strand to SEQ ID NO: 698686
gauuucagcuccaagggcc

SEQ ID NO: 698688 - RNA, 19 nt, Artificial Sequence
  Description of Artificial Sequence: Synthetic oligonucleotide
  Sense strand starting at position 2079 of SEQ ID NO: 586187
ccuccuugcugacagcaau

SEQ ID NO: 698689 - RNA, 19 nt, Artificial Sequence
  Description of Artificial Sequence: Synthetic oligonucleotide
  Antisense strand to SEQ ID NO: 698688
auugcugucagcaaggagg

SEQ ID NO: 698690 - RNA, 19 nt, Artificial Sequence
  Description of Artificial Sequence: Synthetic oligonucleotide
  Sense strand starting at position 2319 of SEQ ID NO: 586187
cucggugaccuuugacacu

SEQ ID NO: 698691 - RNA, 19 nt, Artificial Sequence
  Description of Artificial Sequence: Synthetic oligonucleotide
  Antisense strand to SEQ ID NO: 698690
agugucaaaggucaccgag

SEQ ID NO: 698692 - RNA, 19 nt, Artificial Sequence
  Description of Artificial Sequence: Synthetic oligonucleotide
  Sense strand starting at position 2330 of SEQ ID NO: 586187
uugacacuuugccuagaau

SEQ ID NO: 698693 - RNA, 19 nt, Artificial Sequence
  Description of Artificial Sequence: Synthetic oligonucleotide
  Antisense strand to SEQ ID NO: 698692
auucuaggcaaagugucaa

SEQ ID NO: 698694 - RNA, 19 nt, Artificial Sequence
  Description of Artificial Sequence: Synthetic oligonucleotide
  Sense strand starting at position 2331 of SEQ ID NO: 586187
ugacacuuugccuagaaug

SEQ ID NO: 698695 - RNA, 19 nt, Artificial Sequence
  Description of Artificial Sequence: Synthetic oligonucleotide
  Antisense strand to SEQ ID NO: 698694
cauucuaggcaaaguguca

SEQ ID NO: 698696 - RNA, 19 nt, Artificial Sequence
  Description of Artificial Sequence: Synthetic oligonucleotide
  Sense strand starting at position 3828 of SEQ ID NO: 586187
gcgagaugaucucggcuca

SEQ ID NO: 698697 - RNA, 19 nt, Artificial Sequence
  Description of Artificial Sequence: Synthetic oligonucleotide
  Antisense strand to SEQ ID NO: 698696
ugagccgagaucaucucgc

SEQ ID NO: 698698 - RNA, 19 nt, Artificial Sequence
  Description of Artificial Sequence: Synthetic oligonucleotide
  Sense strand starting at position 167 of SEQ ID NO: 586188
augaucaugucaucagagu

SEQ ID NO: 698699 - RNA, 19 nt, Artificial Sequence
  Description of Artificial Sequence: Synthetic oligonucleotide
  Antisense strand to SEQ ID NO: 698698
acucugaugacaugaucau

SEQ ID NO: 698700 - RNA, 19 nt, Artificial Sequence
  Description of Artificial Sequence: Synthetic oligonucleotide
  Sense strand starting at position 168 of SEQ ID NO: 586188
ugaucaugucaucagaguc

SEQ ID NO: 698701 - RNA, 19 nt, Artificial Sequence
  Description of Artificial Sequence: Synthetic oligonucleotide
  Antisense strand to SEQ ID NO: 698700
gacucugaugacaugauca

SEQ ID NO: 698702 - RNA, 19 nt, Artificial Sequence
  Description of Artificial Sequence: Synthetic oligonucleotide
  Sense strand starting at position 284 of SEQ ID NO: 586188
cauagaagucagugcaauu

SEQ ID NO: 698703 - RNA, 19 nt, Artificial Sequence
  Description of Artificial Sequence: Synthetic oligonucleotide
  Antisense strand to SEQ ID NO: 698702
aauugcacugacuucuaug

SEQ ID NO: 698704 - RNA, 19 nt, Artificial Sequence
  Description of Artificial Sequence: Synthetic oligonucleotide
  Sense strand starting at position 344 of SEQ ID NO: 586188
gggaguaauaagcagugua

SEQ ID NO: 698705 - RNA, 19 nt, Artificial Sequence
  Description of Artificial Sequence: Synthetic oligonucleotide
  Antisense strand to SEQ ID NO: 698704
uacacugcuuauuacuccc

SEQ ID NO: 698706 - RNA, 19 nt, Artificial Sequence
  Description of Artificial Sequence: Synthetic oligonucleotide
  Sense strand starting at position 347 of SEQ ID NO: 586188
aguaauaagcaguguagau

SEQ ID NO: 698707 - RNA, 19 nt, Artificial Sequence
  Description of Artificial Sequence: Synthetic oligonucleotide
  Antisense strand to SEQ ID NO: 698706
aucuacacugcuuauuacu

SEQ ID NO: 698708 - RNA, 19 nt, Artificial Sequence
  Description of Artificial Sequence: Synthetic oligonucleotide
  Sense strand starting at position 351 of SEQ ID NO: 586188
auaagcaguguagaucaaa

SEQ ID NO: 698709 - RNA, 19 nt, Artificial Sequence
  Description of Artificial Sequence: Synthetic oligonucleotide
  Antisense strand to SEQ ID NO: 698708
uuugaucuacacugcuuau

SEQ ID NO: 698710 - RNA, 19 nt, Artificial Sequence
  Description of Artificial Sequence: Synthetic oligonucleotide
  Sense strand starting at position 418 of SEQ ID NO: 586188
aguggcaaaucuuugacuu

SEQ ID NO: 698711 - RNA, 19 nt, Artificial Sequence
  Description of Artificial Sequence: Synthetic oligonucleotide
  Antisense strand to SEQ ID NO: 698710
aagucaaagauuugccacu

SEQ ID NO: 698712 - RNA, 19 nt, Artificial Sequence
  Description of Artificial Sequence: Synthetic oligonucleotide
  Sense strand starting at position 733 of SEQ ID NO: 586188
guugaaguauaauuagaga

SEQ ID NO: 698713 - RNA, 19 nt, Artificial Sequence
  Description of Artificial Sequence: Synthetic oligonucleotide
  Antisense strand to SEQ ID NO: 698712
ucucuaauuauacuucaac

SEQ ID NO: 698714 - RNA, 19 nt, Artificial Sequence
  Description of Artificial Sequence: Synthetic oligonucleotide
  Sense strand starting at position 769 of SEQ ID NO: 586188
gcucucuggcuacagaauu

SEQ ID NO: 698715 - RNA, 19 nt, Artificial Sequence
  Description of Artificial Sequence: Synthetic oligonucleotide
  Antisense strand to SEQ ID NO: 698714
aauucuguagccagagagc

SEQ ID NO: 698716 - RNA, 19 nt, Artificial Sequence
  Description of Artificial Sequence: Synthetic oligonucleotide
  Sense strand starting at position 830 of SEQ ID NO: 586188
aaugcaucccguuaaggga

SEQ ID NO: 698717 - RNA, 19 nt, Artificial Sequence
  Description of Artificial Sequence: Synthetic oligonucleotide
  Antisense strand to SEQ ID NO: 698716
ucccuuaacgggaugcauu

SEQ ID NO: 698718 - RNA, 19 nt, Artificial Sequence
  Description of Artificial Sequence: Synthetic oligonucleotide
  Sense strand starting at position 922 of SEQ ID NO: 586188
uuuaauaucuucuugggaa

SEQ ID NO: 698719 - RNA, 19 nt, Artificial Sequence
  Description of Artificial Sequence: Synthetic oligonucleotide
  Antisense strand to SEQ ID NO: 698718
uucccaagaagauauuaaa

SEQ ID NO: 698720 - RNA, 19 nt, Artificial Sequence
  Description of Artificial Sequence: Synthetic oligonucleotide
  Sense strand starting at position 930 of SEQ ID NO: 586188
cuucuugggaaucguacua

SEQ ID NO: 698721 - RNA, 19 nt, Artificial Sequence
  Description of Artificial Sequence: Synthetic oligonucleotide
  Antisense strand to SEQ ID NO: 698720
uaguacgauucccaagaag

SEQ ID NO: 698722 - RNA, 19 nt, Artificial Sequence
  Description of Artificial Sequence: Synthetic oligonucleotide
  Sense strand starting at position 1063 of SEQ ID NO: 586188
agcuauuuauguucgcuaa

SEQ ID NO: 698723 - RNA, 19 nt, Artificial Sequence
  Description of Artificial Sequence: Synthetic oligonucleotide
  Antisense strand to SEQ ID NO: 698722
uuagcgaacauaaauagcu

SEQ ID NO: 698724 - RNA, 19 nt, Artificial Sequence
  Description of Artificial Sequence: Synthetic oligonucleotide
  Sense strand starting at position 1064 of SEQ ID NO: 586188
gcuauuuauguucgcuaag

SEQ ID NO: 698725 - RNA, 19 nt, Artificial Sequence
  Description of Artificial Sequence: Synthetic oligonucleotide
  Antisense strand to SEQ ID NO: 698724
cuuagcgaacauaaauagc

SEQ ID NO: 698726 - RNA, 19 nt, Artificial Sequence
  Description of Artificial Sequence: Synthetic oligonucleotide
  Sense strand starting at position 1065 of SEQ ID NO: 586188
cuauuuauguucgcuaagu

SEQ ID NO: 698727 - RNA, 19 nt, Artificial Sequence
  Description of Artificial Sequence: Synthetic oligonucleotide
  Antisense strand to SEQ ID NO: 698726
acuuagcgaacauaaauag

SEQ ID NO: 698728 - RNA, 19 nt, Artificial Sequence
  Description of Artificial Sequence: Synthetic oligonucleotide
  Sense strand starting at position 1066 of SEQ ID NO: 586188
uauuuauguucgcuaaguc

SEQ ID NO: 698729 - RNA, 19 nt, Artificial Sequence
  Description of Artificial Sequence: Synthetic oligonucleotide
  Antisense strand to SEQ ID NO: 698728
gacuuagcgaacauaaaua

SEQ ID NO: 698730 - RNA, 19 nt, Artificial Sequence
  Description of Artificial Sequence: Synthetic oligonucleotide
  Sense strand starting at position 1067 of SEQ ID NO: 586188
auuuauguucgcuaaguca

SEQ ID NO: 698731 - RNA, 19 nt, Artificial Sequence
  Description of Artificial Sequence: Synthetic oligonucleotide
  Antisense strand to SEQ ID NO: 698730
ugacuuagcgaacauaaau

SEQ ID NO: 698732 - RNA, 19 nt, Artificial Sequence
  Description of Artificial Sequence: Synthetic oligonucleotide
  Sense strand starting at position 1108 of SEQ ID NO: 586188
cuaaguaagcauuaugauu

SEQ ID NO: 698733 - RNA, 19 nt, Artificial Sequence
  Description of Artificial Sequence: Synthetic oligonucleotide
  Antisense strand to SEQ ID NO: 698732
aaucauaaugcuuacuuag

SEQ ID NO: 698734 - RNA, 19 nt, Artificial Sequence
  Description of Artificial Sequence: Synthetic oligonucleotide
  Sense strand starting at position 1157 of SEQ ID NO: 586188
gcaacaagagguugguuaa

SEQ ID NO: 698735 - RNA, 19 nt, Artificial Sequence
  Description of Artificial Sequence: Synthetic oligonucleotide
  Antisense strand to SEQ ID NO: 698734
uuaaccaaccucuuguugc

SEQ ID NO: 698736 - RNA, 19 nt, Artificial Sequence
  Description of Artificial Sequence: Synthetic oligonucleotide
  Sense strand starting at position 1229 of SEQ ID NO: 586188
cauaaugaacguuaaguga

SEQ ID NO: 698737 - RNA, 19 nt, Artificial Sequence
  Description of Artificial Sequence: Synthetic oligonucleotide
  Antisense strand to SEQ ID NO: 698736
ucacuuaacguucauuaug

SEQ ID NO: 698738 - RNA, 19 nt, Artificial Sequence
  Description of Artificial Sequence: Synthetic oligonucleotide
  Sense strand starting at position 1349 of SEQ ID NO: 586188
auauguagagugcacuuua

SEQ ID NO: 698739 - RNA, 19 nt, Artificial Sequence
  Description of Artificial Sequence: Synthetic oligonucleotide
  Antisense strand to SEQ ID NO: 698738
uaaagugcacucuacauau

SEQ ID NO: 698740 - RNA, 19 nt, Artificial Sequence
  Description of Artificial Sequence: Synthetic oligonucleotide
  Sense strand starting at position 1354 of SEQ ID NO: 586188
uagagugcacuuuacagaa

SEQ ID NO: 698741 - RNA, 19 nt, Artificial Sequence
  Description of Artificial Sequence: Synthetic oligonucleotide
  Antisense strand to SEQ ID NO: 698740
uucuguaaagugcacucua

SEQ ID NO: 698742 - RNA, 19 nt, Artificial Sequence
  Description of Artificial Sequence: Synthetic oligonucleotide
  Sense strand starting at position 1394 of SEQ ID NO: 586188
ccgucuacgaaauaaguga

SEQ ID NO: 698743 - RNA, 19 nt, Artificial Sequence
  Description of Artificial Sequence: Synthetic oligonucleotide
  Antisense strand to SEQ ID NO: 698742
ucacuuauuucguagacgg

SEQ ID NO: 698744 - RNA, 19 nt, Artificial Sequence
  Description of Artificial Sequence: Synthetic oligonucleotide
  Sense strand starting at position 1398 of SEQ ID NO: 586188
cuacgaaauaagugauagu

SEQ ID NO: 698745 - RNA, 19 nt, Artificial Sequence
  Description of Artificial Sequence: Synthetic oligonucleotide
  Antisense strand to SEQ ID NO: 698744
acuaucacuuauuucguag

SEQ ID NO: 698746 - RNA, 19 nt, Artificial Sequence
  Description of Artificial Sequence: Synthetic oligonucleotide
  Sense strand starting at position 1619 of SEQ ID NO: 586188
cccucuugggucuacauaa

SEQ ID NO: 698747 - RNA, 19 nt, Artificial Sequence
  Description of Artificial Sequence: Synthetic oligonucleotide
  Antisense strand to SEQ ID NO: 698746
uuauguagacccaagaggg

SEQ ID NO: 698748 - RNA, 19 nt, Artificial Sequence
  Description of Artificial Sequence: Synthetic oligonucleotide
  Sense strand starting at position 2400 of SEQ ID NO: 586188
acuggaucccauugguauu

SEQ ID NO: 698749 - RNA, 19 nt, Artificial Sequence
  Description of Artificial Sequence: Synthetic oligonucleotide
  Antisense strand to SEQ ID NO: 698748
aauaccaaugggauccagu

SEQ ID NO: 698750 - RNA, 19 nt, Artificial Sequence
  Description of Artificial Sequence: Synthetic oligonucleotide
  Sense strand starting at position 2460 of SEQ ID NO: 586188
gaguccuuccuguaaaugu

SEQ ID NO: 698751 - RNA, 19 nt, Artificial Sequence
  Description of Artificial Sequence: Synthetic oligonucleotide
  Antisense strand to SEQ ID NO: 698750
acauuuacaggaaggacuc

SEQ ID NO: 698752 - RNA, 19 nt, Artificial Sequence
  Description of Artificial Sequence: Synthetic oligonucleotide
  Sense strand starting at position 2533 of SEQ ID NO: 586188
guagcuaggaaguagugaa

SEQ ID NO: 698753 - RNA, 19 nt, Artificial Sequence
  Description of Artificial Sequence: Synthetic oligonucleotide
  Antisense strand to SEQ ID NO: 698752
uucacuacuuccuagcuac

SEQ ID NO: 698754 - RNA, 19 nt, Artificial Sequence
  Description of Artificial Sequence: Synthetic oligonucleotide
  Sense strand starting at position 2549 of SEQ ID NO: 586188
gaacguggucuagggaacu

SEQ ID NO: 698755 - RNA, 19 nt, Artificial Sequence
  Description of Artificial Sequence: Synthetic oligonucleotide
  Antisense strand to SEQ ID NO: 698754
aguucccuagaccacguuc

SEQ ID NO: 698756 - RNA, 19 nt, Artificial Sequence
  Description of Artificial Sequence: Synthetic oligonucleotide
  Sense strand starting at position 2673 of SEQ ID NO: 586188
gguggauuaggcugaagga

SEQ ID NO: 698757 - RNA, 19 nt, Artificial Sequence
  Description of Artificial Sequence: Synthetic oligonucleotide
  Antisense strand to SEQ ID NO: 698756
uccuucagccuaauccacc

SEQ ID NO: 698758 - RNA, 19 nt, Artificial Sequence
  Description of Artificial Sequence: Synthetic oligonucleotide
  Sense strand starting at position 2768 of SEQ ID NO: 586188
accguauuccaugaccuga

SEQ ID NO: 698759 - RNA, 19 nt, Artificial Sequence
  Description of Artificial Sequence: Synthetic oligonucleotide
  Antisense strand to SEQ ID NO: 698758
ucaggucauggaauacggu

SEQ ID NO: 698760 - RNA, 19 nt, Artificial Sequence
  Description of Artificial Sequence: Synthetic oligonucleotide
  Sense strand starting at position 2781 of SEQ ID NO: 586188
accugacaagccuguuuaa

SEQ ID NO: 698761 - RNA, 19 nt, Artificial Sequence
  Description of Artificial Sequence: Synthetic oligonucleotide
  Antisense strand to SEQ ID NO: 698760
uuaaacaggcuugucaggu

SEQ ID NO: 698762 - RNA, 19 nt, Artificial Sequence
  Description of Artificial Sequence: Synthetic oligonucleotide
  Sense strand starting at position 2823 of SEQ ID NO: 586188
agagaaggcuuggcuuuga

SEQ ID NO: 698763 - RNA, 19 nt, Artificial Sequence
  Description of Artificial Sequence: Synthetic oligonucleotide
  Antisense strand to SEQ ID NO: 698762
ucaaagccaagccuucucu

SEQ ID NO: 698764 - RNA, 19 nt, Artificial Sequence
  Description of Artificial Sequence: Synthetic oligonucleotide
  Sense strand starting at position 3092 of SEQ ID NO: 586188
guuggaucucccuagcaua

SEQ ID NO: 698765 - RNA, 19 nt, Artificial Sequence
  Description of Artificial Sequence: Synthetic oligonucleotide
  Antisense strand to SEQ ID NO: 698764
uaugcuagggagauccaac

SEQ ID NO: 698766 - RNA, 19 nt, Artificial Sequence
  Description of Artificial Sequence: Synthetic oligonucleotide
  Sense strand starting at position 3211 of SEQ ID NO: 586188
cagccagagugaccuuaaa

SEQ ID NO: 698767 - RNA, 19 nt, Artificial Sequence
  Description of Artificial Sequence: Synthetic oligonucleotide
  Antisense strand to SEQ ID NO: 698766
uuuaaggucacucuggcug

SEQ ID NO: 698768 - RNA, 19 nt, Artificial Sequence
  Description of Artificial Sequence: Synthetic oligonucleotide
  Sense strand starting at position 3461 of SEQ ID NO: 586188
uuuggaaugcucgacuacu

SEQ ID NO: 698769 - RNA, 19 nt, Artificial Sequence
  Description of Artificial Sequence: Synthetic oligonucleotide
  Antisense strand to SEQ ID NO: 698768
aguagucgagcauuccaaa

SEQ ID NO: 698770 - RNA, 19 nt, Artificial Sequence
  Description of Artificial Sequence: Synthetic oligonucleotide
  Sense strand starting at position 3580 of SEQ ID NO: 586188
ucuuuagcuccugacugaa

SEQ ID NO: 698771 - RNA, 19 nt, Artificial Sequence
  Description of Artificial Sequence: Synthetic oligonucleotide
  Antisense strand to SEQ ID NO: 698770
uucagucaggagcuaaaga

SEQ ID NO: 698772 - RNA, 19 nt, Artificial Sequence
  Description of Artificial Sequence: Synthetic oligonucleotide
  Sense strand starting at position 3582 of SEQ ID NO: 586188
uuuagcuccugacugaauu

SEQ ID NO: 698773 - RNA, 19 nt, Artificial Sequence
  Description of Artificial Sequence: Synthetic oligonucleotide
  Antisense strand to SEQ ID NO: 698772
aauucagucaggagcuaaa

SEQ ID NO: 698774 - RNA, 19 nt, Artificial Sequence
  Description of Artificial Sequence: Synthetic oligonucleotide
  Sense strand starting at position 3673 of SEQ ID NO: 586188
auauguccuuucucggaaa

SEQ ID NO: 698775 - RNA, 19 nt, Artificial Sequence
  Description of Artificial Sequence: Synthetic oligonucleotide
  Antisense strand to SEQ ID NO: 698774
uuuccgagaaaggacauau

SEQ ID NO: 698776 - RNA, 19 nt, Artificial Sequence
  Description of Artificial Sequence: Synthetic oligonucleotide
  Sense strand starting at position 3941 of SEQ ID NO: 586188
uguccuugagagcagaauu

SEQ ID NO: 698777 - RNA, 19 nt, Artificial Sequence
  Description of Artificial Sequence: Synthetic oligonucleotide
  Antisense strand to SEQ ID NO: 698776
aauucugcucucaaggaca

SEQ ID NO: 698778 - RNA, 19 nt, Artificial Sequence
  Description of Artificial Sequence: Synthetic oligonucleotide
  Sense strand starting at position 130 of SEQ ID NO: 586189
uuagcuuagcagcaugauu

SEQ ID NO: 698779 - RNA, 19 nt, Artificial Sequence
  Description of Artificial Sequence: Synthetic oligonucleotide
  Antisense strand to SEQ ID NO: 698778
aaucaugcugcuaagcuaa

SEQ ID NO: 698780 - RNA, 19 nt, Artificial Sequence
  Description of Artificial Sequence: Synthetic oligonucleotide
  Sense strand starting at position 316 of SEQ ID NO: 586189
gggauaaauuaucuguucu

SEQ ID NO: 698781 - RNA, 19 nt, Artificial Sequence
  Description of Artificial Sequence: Synthetic oligonucleotide
  Antisense strand to SEQ ID NO: 698780
agaacagauaauuuauccc

SEQ ID NO: 698782 - RNA, 19 nt, Artificial Sequence
  Description of Artificial Sequence: Synthetic oligonucleotide
  Sense strand starting at position 328 of SEQ ID NO: 586189
cuguucucagauggucuaa

SEQ ID NO: 698783 - RNA, 19 nt, Artificial Sequence
  Description of Artificial Sequence: Synthetic oligonucleotide
  Antisense strand to SEQ ID NO: 698782
uuagaccaucugagaacag

SEQ ID NO: 698784 - RNA, 19 nt, Artificial Sequence
  Description of Artificial Sequence: Synthetic oligonucleotide
  Sense strand starting at position 539 of SEQ ID NO: 586189
ucucgcauugucuuagguu

SEQ ID NO: 698785 - RNA, 19 nt, Artificial Sequence
  Description of Artificial Sequence: Synthetic oligonucleotide
  Antisense strand to SEQ ID NO: 698784
aaccuaagacaaugcgaga

SEQ ID NO: 698786 - RNA, 19 nt, Artificial Sequence
  Description of Artificial Sequence: Synthetic oligonucleotide
  Sense strand starting at position 546 of SEQ ID NO: 586189
uugucuuagguuuaaauca

SEQ ID NO: 698787 - RNA, 19 nt, Artificial Sequence
  Description of Artificial Sequence: Synthetic oligonucleotide
  Antisense strand to SEQ ID NO: 698786
ugauuuaaaccuaagacaa

SEQ ID NO: 698788 - RNA, 19 nt, Artificial Sequence
  Description of Artificial Sequence: Synthetic oligonucleotide
  Sense strand starting at position 635 of SEQ ID NO: 586189
gucaguaaaguauguccuu

SEQ ID NO: 698789 - RNA, 19 nt, Artificial Sequence
  Description of Artificial Sequence: Synthetic oligonucleotide
  Antisense strand to SEQ ID NO: 698788
aaggacauacuuuacugac

SEQ ID NO: 698790 - RNA, 19 nt, Artificial Sequence
  Description of Artificial Sequence: Synthetic oligonucleotide
  Sense strand starting at position 698 of SEQ ID NO: 586189
auuauauccggcuauuagu

SEQ ID NO: 698791 - RNA, 19 nt, Artificial Sequence
  Description of Artificial Sequence: Synthetic oligonucleotide
  Antisense strand to SEQ ID NO: 698790
acuaauagccggauauaau

SEQ ID NO: 698792 - RNA, 19 nt, Artificial Sequence
  Description of Artificial Sequence: Synthetic oligonucleotide
  Sense strand starting at position 2273 of SEQ ID NO: 586189
uggccuuagagauguguuc

SEQ ID NO: 698793 - RNA, 19 nt, Artificial Sequence
  Description of Artificial Sequence: Synthetic oligonucleotide
  Antisense strand to SEQ ID NO: 698792
gaacacaucucuaaggcca

SEQ ID NO: 698794 - RNA, 19 nt, Artificial Sequence
  Description of Artificial Sequence: Synthetic oligonucleotide
  Sense strand starting at position 2275 of SEQ ID NO: 586189
gccuuagagauguguucug

SEQ ID NO: 698795 - RNA, 19 nt, Artificial Sequence
  Description of Artificial Sequence: Synthetic oligonucleotide
  Antisense strand to SEQ ID NO: 698794
cagaacacaucucuaaggc

SEQ ID NO: 698796 - RNA, 19 nt, Artificial Sequence
  Description of Artificial Sequence: Synthetic oligonucleotide
  Sense strand starting at position 2412 of SEQ ID NO: 586189
cgagacuccucccuuccaa

SEQ ID NO: 698797 - RNA, 19 nt, Artificial Sequence
  Description of Artificial Sequence: Synthetic oligonucleotide
  Antisense strand to SEQ ID NO: 698796
uuggaagggaggagucucg

SEQ ID NO: 698798 - RNA, 19 nt, Artificial Sequence
  Description of Artificial Sequence: Synthetic oligonucleotide
  Sense strand starting at position 2450 of SEQ ID NO: 586189
gggaggugguguuugacua

SEQ ID NO: 698799 - RNA, 19 nt, Artificial Sequence
  Description of Artificial Sequence: Synthetic oligonucleotide
  Antisense strand to SEQ ID NO: 698798
uagucaaacaccaccuccc

SEQ ID NO: 698800 - RNA, 19 nt, Artificial Sequence
  Description of Artificial Sequence: Synthetic oligonucleotide
  Sense strand starting at position 2451 of SEQ ID NO: 586189
ggaggugguguuugacuaa

SEQ ID NO: 698801 - RNA, 19 nt, Artificial Sequence
  Description of Artificial Sequence: Synthetic oligonucleotide
  Antisense strand to SEQ ID NO: 698800
uuagucaaacaccaccucc

SEQ ID NO: 698802 - RNA, 19 nt, Artificial Sequence
  Description of Artificial Sequence: Synthetic oligonucleotide
  Sense strand starting at position 2454 of SEQ ID NO: 586189
ggugguguuugacuaauca

SEQ ID NO: 698803 - RNA, 19 nt, Artificial Sequence
  Description of Artificial Sequence: Synthetic oligonucleotide
  Antisense strand to SEQ ID NO: 698802
ugauuagucaaacaccacc

SEQ ID NO: 698804 - RNA, 19 nt, Artificial Sequence
  Description of Artificial Sequence: Synthetic oligonucleotide
  Sense strand starting at position 2690 of SEQ ID NO: 586189
ggugcaaucgcagagagau

SEQ ID NO: 698805 - RNA, 19 nt, Artificial Sequence
  Description of Artificial Sequence: Synthetic oligonucleotide
  Antisense strand to SEQ ID NO: 698804
aucucucugcgauugcacc

SEQ ID NO: 698806 - RNA, 19 nt, Artificial Sequence
  Description of Artificial Sequence: Synthetic oligonucleotide
  Sense strand starting at position 2763 of SEQ ID NO: 586189
aguguugggaccugacgau

SEQ ID NO: 698807 - RNA, 19 nt, Artificial Sequence
  Description of Artificial Sequence: Synthetic oligonucleotide
  Antisense strand to SEQ ID NO: 698806
aucgucaggucccaacacu

SEQ ID NO: 698808 - RNA, 19 nt, Artificial Sequence
  Description of Artificial Sequence: Synthetic oligonucleotide
  Sense strand starting at position 2813 of SEQ ID NO: 586189
accgacuuccucuguccaa

SEQ ID NO: 698809 - RNA, 19 nt, Artificial Sequence
  Description of Artificial Sequence: Synthetic oligonucleotide
  Antisense strand to SEQ ID NO: 698808
uuggacagaggaagucggu

SEQ ID NO: 698810 - RNA, 19 nt, Artificial Sequence
  Description of Artificial Sequence: Synthetic oligonucleotide
  Sense strand starting at position 2817 of SEQ ID NO: 586189
acuuccucuguccaagagu

SEQ ID NO: 698811 - RNA, 19 nt, Artificial Sequence
  Description of Artificial Sequence: Synthetic oligonucleotide
  Antisense strand to SEQ ID NO: 698810
acucuuggacagaggaagu

SEQ ID NO: 698812 - RNA, 19 nt, Artificial Sequence
  Description of Artificial Sequence: Synthetic oligonucleotide
  Sense strand starting at position 2820 of SEQ ID NO: 586189
uccucuguccaagaguuga

SEQ ID NO: 698813 - RNA, 19 nt, Artificial Sequence
  Description of Artificial Sequence: Synthetic oligonucleotide
  Antisense strand to SEQ ID NO: 698812
ucaacucuuggacagagga

SEQ ID NO: 698814 - RNA, 19 nt, Artificial Sequence
  Description of Artificial Sequence: Synthetic oligonucleotide
  Sense strand starting at position 2884 of SEQ ID NO: 586189
gguuguuuccauuguggaa

SEQ ID NO: 698815 - RNA, 19 nt, Artificial Sequence
  Description of Artificial Sequence: Synthetic oligonucleotide
  Antisense strand to SEQ ID NO: 698814
uuccacaauggaaacaacc

SEQ ID NO: 698816 - RNA, 19 nt, Artificial Sequence
  Description of Artificial Sequence: Synthetic oligonucleotide
  Sense strand starting at position 2888 of SEQ ID NO: 586189
guuuccauuguggaaacua

SEQ ID NO: 698817 - RNA, 19 nt, Artificial Sequence
  Description of Artificial Sequence: Synthetic oligonucleotide
  Antisense strand to SEQ ID NO: 698816
uaguuuccacaauggaaac

SEQ ID NO: 698818 - RNA, 19 nt, Artificial Sequence
  Description of Artificial Sequence: Synthetic oligonucleotide
  Sense strand starting at position 2918 of SEQ ID NO: 586189
auaaaugagucuguuugcu

SEQ ID NO: 698819 - RNA, 19 nt, Artificial Sequence
  Description of Artificial Sequence: Synthetic oligonucleotide
  Antisense strand to SEQ ID NO: 698818
agcaaacagacucauuuau

SEQ ID NO: 698820 - RNA, 19 nt, Artificial Sequence
  Description of Artificial Sequence: Synthetic oligonucleotide
  Sense strand starting at position 2920 of SEQ ID NO: 586189
aaaugagucuguuugcuga

SEQ ID NO: 698821 - RNA, 19 nt, Artificial Sequence
  Description of Artificial Sequence: Synthetic oligonucleotide
  Antisense strand to SEQ ID NO: 698820
ucagcaaacagacucauuu

SEQ ID NO: 698822 - RNA, 19 nt, Artificial Sequence
  Description of Artificial Sequence: Synthetic oligonucleotide
  Sense strand starting at position 2922 of SEQ ID NO: 586189
augagucuguuugcugaca

SEQ ID NO: 698823 - RNA, 19 nt, Artificial Sequence
  Description of Artificial Sequence: Synthetic oligonucleotide
  Antisense strand to SEQ ID NO: 698822
ugucagcaaacagacucau

SEQ ID NO: 698824 - RNA, 19 nt, Artificial Sequence
  Description of Artificial Sequence: Synthetic oligonucleotide
  Sense strand starting at position 2933 of SEQ ID NO: 586189
ugcugacagguuuaaucua

SEQ ID NO: 698825 - RNA, 19 nt, Artificial Sequence
  Description of Artificial Sequence: Synthetic oligonucleotide
  Antisense strand to SEQ ID NO: 698824
uagauuaaaccugucagca

SEQ ID NO: 698826 - RNA, 19 nt, Artificial Sequence
  Description of Artificial Sequence: Synthetic oligonucleotide
  Sense strand starting at position 2999 of SEQ ID NO: 586189
ucgagugauuuggagacuu

SEQ ID NO: 698827 - RNA, 19 nt, Artificial Sequence
  Description of Artificial Sequence: Synthetic oligonucleotide
  Antisense strand to SEQ ID NO: 698826
aagucuccaaaucacucga

SEQ ID NO: 698828 - RNA, 19 nt, Artificial Sequence
  Description of Artificial Sequence: Synthetic oligonucleotide
  Sense strand starting at position 3236 of SEQ ID NO: 586189
ccaggcagcuucucggaaa

SEQ ID NO: 698829 - RNA, 19 nt, Artificial Sequence
  Description of Artificial Sequence: Synthetic oligonucleotide
  Antisense strand to SEQ ID NO: 698828
uuuccgagaagcugccugg

SEQ ID NO: 698830 - RNA, 19 nt, Artificial Sequence
  Description of Artificial Sequence: Synthetic oligonucleotide
  Sense strand starting at position 3249 of SEQ ID NO: 586189
cggaaaccaguguguuuau

SEQ ID NO: 698831 - RNA, 19 nt, Artificial Sequence
  Description of Artificial Sequence: Synthetic oligonucleotide
  Antisense strand to SEQ ID NO: 698830
auaaacacacugguuuccg

SEQ ID NO: 698832 - RNA, 19 nt, Artificial Sequence
  Description of Artificial Sequence: Synthetic oligonucleotide
  Sense strand starting at position 3252 of SEQ ID NO: 586189
aaaccaguguguuuaugua

SEQ ID NO: 698833 - RNA, 19 nt, Artificial Sequence
  Description of Artificial Sequence: Synthetic oligonucleotide
  Antisense strand to SEQ ID NO: 698832
uacauaaacacacugguuu

SEQ ID NO: 698834 - RNA, 19 nt, Artificial Sequence
  Description of Artificial Sequence: Synthetic oligonucleotide
  Sense strand starting at position 3387 of SEQ ID NO: 586189
ccuuuauugcugcagauaa

SEQ ID NO: 698835 - RNA, 19 nt, Artificial Sequence
  Description of Artificial Sequence: Synthetic oligonucleotide
  Antisense strand to SEQ ID NO: 698834
uuaucugcagcaauaaagg

SEQ ID NO: 698836 - RNA, 19 nt, Artificial Sequence
  Description of Artificial Sequence: Synthetic oligonucleotide
  Sense strand starting at position 3389 of SEQ ID NO: 586189
uuuauugcugcagauaagu

SEQ ID NO: 698837 - RNA, 19 nt, Artificial Sequence
  Description of Artificial Sequence: Synthetic oligonucleotide
  Antisense strand to SEQ ID NO: 698836
acuuaucugcagcaauaaa

SEQ ID NO: 698838 - RNA, 19 nt, Artificial Sequence
  Description of Artificial Sequence: Synthetic oligonucleotide
  Sense strand starting at position 3403 of SEQ ID NO: 586189
uaaguacaaucaguuggaa

SEQ ID NO: 698839 - RNA, 19 nt, Artificial Sequence
  Description of Artificial Sequence: Synthetic oligonucleotide
  Antisense strand to SEQ ID NO: 698838
uuccaacugauuguacuua

SEQ ID NO: 698840 - RNA, 19 nt, Artificial Sequence
  Description of Artificial Sequence: Synthetic oligonucleotide
  Sense strand starting at position 3442 of SEQ ID NO: 586189
aaagauugucccuggauga

SEQ ID NO: 698841 - RNA, 19 nt, Artificial Sequence
  Description of Artificial Sequence: Synthetic oligonucleotide
  Antisense strand to SEQ ID NO: 698840
ucauccagggacaaucuuu

SEQ ID NO: 698842 - RNA, 19 nt, Artificial Sequence
  Description of Artificial Sequence: Synthetic oligonucleotide
  Sense strand starting at position 3443 of SEQ ID NO: 586189
aagauugucccuggaugag

SEQ ID NO: 698843 - RNA, 19 nt, Artificial Sequence
  Description of Artificial Sequence: Synthetic oligonucleotide
  Antisense strand to SEQ ID NO: 698842
cucauccagggacaaucuu

SEQ ID NO: 698844 - RNA, 19 nt, Artificial Sequence
  Description of Artificial Sequence: Synthetic oligonucleotide
  Sense strand starting at position 3542 of SEQ ID NO: 586189
agccauaaauuuggauaaa

SEQ ID NO: 698845 - RNA, 19 nt, Artificial Sequence
  Description of Artificial Sequence: Synthetic oligonucleotide
  Antisense strand to SEQ ID NO: 698844
uuuauccaaauuuauggcu

SEQ ID NO: 698846 - RNA, 19 nt, Artificial Sequence
  Description of Artificial Sequence: Synthetic oligonucleotide
  Sense strand starting at position 3543 of SEQ ID NO: 586189
gccauaaauuuggauaaau

SEQ ID NO: 698847 - RNA, 19 nt, Artificial Sequence
  Description of Artificial Sequence: Synthetic oligonucleotide
  Antisense strand to SEQ ID NO: 698846
auuuauccaaauuuauggc

SEQ ID NO: 698848 - RNA, 19 nt, Artificial Sequence
  Description of Artificial Sequence: Synthetic oligonucleotide
  Sense strand starting at position 3553 of SEQ ID NO: 586189
uggauaaaugcaugcuaug

SEQ ID NO: 698849 - RNA, 19 nt, Artificial Sequence
  Description of Artificial Sequence: Synthetic oligonucleotide
  Antisense strand to SEQ ID NO: 698848
cauagcaugcauuuaucca

SEQ ID NO: 698850 - RNA, 19 nt, Artificial Sequence
  Description of Artificial Sequence: Synthetic oligonucleotide
  Sense strand starting at position 3595 of SEQ ID NO: 586189
gugccugaguuacuuugau

SEQ ID NO: 698851 - RNA, 19 nt, Artificial Sequence
  Description of Artificial Sequence: Synthetic oligonucleotide
  Antisense strand to SEQ ID NO: 698850
aucaaaguaacucaggcac

SEQ ID NO: 698852 - RNA, 19 nt, Artificial Sequence
  Description of Artificial Sequence: Synthetic oligonucleotide
  Sense strand starting at position 3675 of SEQ ID NO: 586189
gauagaaucuagcugugug

SEQ ID NO: 698853 - RNA, 19 nt, Artificial Sequence
  Description of Artificial Sequence: Synthetic oligonucleotide
  Antisense strand to SEQ ID NO: 698852
cacacagcuagauucuauc

SEQ ID NO: 698854 - RNA, 19 nt, Artificial Sequence
  Description of Artificial Sequence: Synthetic oligonucleotide
  Sense strand starting at position 3845 of SEQ ID NO: 586189
uucuuccuguuuguuauaa

SEQ ID NO: 698855 - RNA, 19 nt, Artificial Sequence
  Description of Artificial Sequence: Synthetic oligonucleotide
  Antisense strand to SEQ ID NO: 698854
uuauaacaaacaggaagaa

SEQ ID NO: 698856 - RNA, 19 nt, Artificial Sequence
  Description of Artificial Sequence: Synthetic oligonucleotide
  Sense strand starting at position 3941 of SEQ ID NO: 586189
aggccuuaucaagauguuu

SEQ ID NO: 698857 - RNA, 19 nt, Artificial Sequence
  Description of Artificial Sequence: Synthetic oligonucleotide
  Antisense strand to SEQ ID NO: 698856
aaacaucuugauaaggccu

SEQ ID NO: 698858 - RNA, 19 nt, Artificial Sequence
  Description of Artificial Sequence: Synthetic oligonucleotide
  Sense strand starting at position 199 of SEQ ID NO: 586190
ccacuaugacacuguuuga

SEQ ID NO: 698859 - RNA, 19 nt, Artificial Sequence
  Description of Artificial Sequence: Synthetic oligonucleotide
  Antisense strand to SEQ ID NO: 698858
ucaaacagugucauagugg

SEQ ID NO: 698860 - RNA, 19 nt, Artificial Sequence
  Description of Artificial Sequence: Synthetic oligonucleotide
  Sense strand starting at position 202 of SEQ ID NO: 586190
cuaugacacuguuugaauu

SEQ ID NO: 698861 - RNA, 19 nt, Artificial Sequence
  Description of Artificial Sequence: Synthetic oligonucleotide
  Antisense strand to SEQ ID NO: 698860
aauucaaacagugucauag

SEQ ID NO: 698862 - RNA, 19 nt, Artificial Sequence
  Description of Artificial Sequence: Synthetic oligonucleotide
  Sense strand starting at position 301 of SEQ ID NO: 586190
agagcuauucccuggacuc

SEQ ID NO: 698863 - RNA, 19 nt, Artificial Sequence
  Description of Artificial Sequence: Synthetic oligonucleotide
  Antisense strand to SEQ ID NO: 698862
gaguccagggaauagcucu

SEQ ID NO: 698864 - RNA, 19 nt, Artificial Sequence
  Description of Artificial Sequence: Synthetic oligonucleotide
  Sense strand starting at position 302 of SEQ ID NO: 586190
gagcuauucccuggacuca

SEQ ID NO: 698865 - RNA, 19 nt, Artificial Sequence
  Description of Artificial Sequence: Synthetic oligonucleotide
  Antisense strand to SEQ ID NO: 698864
ugaguccagggaauagcuc

SEQ ID NO: 698866 - RNA, 19 nt, Artificial Sequence
  Description of Artificial Sequence: Synthetic oligonucleotide
  Sense strand starting at position 1082 of SEQ ID NO: 586190
gucugcauuuagucagcua

SEQ ID NO: 698867 - RNA, 19 nt, Artificial Sequence
  Description of Artificial Sequence: Synthetic oligonucleotide
  Antisense strand to SEQ ID NO: 698866
uagcugacuaaaugcagac

SEQ ID NO: 698868 - RNA, 19 nt, Artificial Sequence
  Description of Artificial Sequence: Synthetic oligonucleotide
  Sense strand starting at position 1085 of SEQ ID NO: 586190
ugcauuuagucagcuaaca

SEQ ID NO: 698869 - RNA, 19 nt, Artificial Sequence
  Description of Artificial Sequence: Synthetic oligonucleotide
  Antisense strand to SEQ ID NO: 698868
uguuagcugacuaaaugca

SEQ ID NO: 698870 - RNA, 19 nt, Artificial Sequence
  Description of Artificial Sequence: Synthetic oligonucleotide
  Sense strand starting at position 1128 of SEQ ID NO: 586190
gaucuuccguaauuugcaa

SEQ ID NO: 698871 - RNA, 19 nt, Artificial Sequence
  Description of Artificial Sequence: Synthetic oligonucleotide
  Antisense strand to SEQ ID NO: 698870
uugcaaauuacggaagauc

SEQ ID NO: 698872 - RNA, 19 nt, Artificial Sequence
  Description of Artificial Sequence: Synthetic oligonucleotide
  Sense strand starting at position 1198 of SEQ ID NO: 586190
uuuaaagcuuaacugugaa

SEQ ID NO: 698873 - RNA, 19 nt, Artificial Sequence
  Description of Artificial Sequence: Synthetic oligonucleotide
  Antisense strand to SEQ ID NO: 698872
uucacaguuaagcuuuaaa

SEQ ID NO: 698874 - RNA, 19 nt, Artificial Sequence
  Description of Artificial Sequence: Synthetic oligonucleotide
  Sense strand starting at position 1239 of SEQ ID NO: 586190
auugaccuucucuagugua

SEQ ID NO: 698875 - RNA, 19 nt, Artificial Sequence
  Description of Artificial Sequence: Synthetic oligonucleotide
  Antisense strand to SEQ ID NO: 698874
uacacuagagaaggucaau

SEQ ID NO: 698876 - RNA, 19 nt, Artificial Sequence
  Description of Artificial Sequence: Synthetic oligonucleotide
  Sense strand starting at position 2095 of SEQ ID NO: 586190
cucugauugguuuacucua

SEQ ID NO: 698877 - RNA, 19 nt, Artificial Sequence
  Description of Artificial Sequence: Synthetic oligonucleotide
  Antisense strand to SEQ ID NO: 698876
uagaguaaaccaaucagag

SEQ ID NO: 698878 - RNA, 19 nt, Artificial Sequence
  Description of Artificial Sequence: Synthetic oligonucleotide
  Sense strand starting at position 2097 of SEQ ID NO: 586190
cugauugguuuacucuaga

SEQ ID NO: 698879 - RNA, 19 nt, Artificial Sequence
  Description of Artificial Sequence: Synthetic oligonucleotide
  Antisense strand to SEQ ID NO: 698878
ucuagaguaaaccaaucag

SEQ ID NO: 698880 - RNA, 19 nt, Artificial Sequence
  Description of Artificial Sequence: Synthetic oligonucleotide
  Sense strand starting at position 2102 of SEQ ID NO: 586190
ugguuuacucuagagacga

SEQ ID NO: 698881 - RNA, 19 nt, Artificial Sequence
  Description of Artificial Sequence: Synthetic oligonucleotide
  Antisense strand to SEQ ID NO: 698880
ucgucucuagaguaaacca

SEQ ID NO: 698882 - RNA, 19 nt, Artificial Sequence
  Description of Artificial Sequence: Synthetic oligonucleotide
  Sense strand starting at position 2352 of SEQ ID NO: 586190
ugggaaauuuagggauuga

SEQ ID NO: 698883 - RNA, 19 nt, Artificial Sequence
  Description of Artificial Sequence: Synthetic oligonucleotide
  Antisense strand to SEQ ID NO: 698882
ucaaucccuaaauuuccca

SEQ ID NO: 698884 - RNA, 19 nt, Artificial Sequence
  Description of Artificial Sequence: Synthetic oligonucleotide
  Sense strand starting at position 2577 of SEQ ID NO: 586190
ugauuaauggaaugcccua

SEQ ID NO: 698885 - RNA, 19 nt, Artificial Sequence
  Description of Artificial Sequence: Synthetic oligonucleotide
  Antisense strand to SEQ ID NO: 698884
uagggcauuccauuaauca

SEQ ID NO: 698886 - RNA, 19 nt, Artificial Sequence
  Description of Artificial Sequence: Synthetic oligonucleotide
  Sense strand starting at position 2597 of SEQ ID NO: 586190
aagcuuauugcacagagga

SEQ ID NO: 698887 - RNA, 19 nt, Artificial Sequence
  Description of Artificial Sequence: Synthetic oligonucleotide
  Antisense strand to SEQ ID NO: 698886
uccucugugcaauaagcuu

SEQ ID NO: 698888 - RNA, 19 nt, Artificial Sequence
  Description of Artificial Sequence: Synthetic oligonucleotide
  Sense strand starting at position 2599 of SEQ ID NO: 586190
gcuuauugcacagaggaag

SEQ ID NO: 698889 - RNA, 19 nt, Artificial Sequence
  Description of Artificial Sequence: Synthetic oligonucleotide
  Antisense strand to SEQ ID NO: 698888
cuuccucugugcaauaagc

SEQ ID NO: 698890 - RNA, 19 nt, Artificial Sequence
  Description of Artificial Sequence: Synthetic oligonucleotide
  Sense strand starting at position 2754 of SEQ ID NO: 586190
ugaagcauaugugucagaa

SEQ ID NO: 698891 - RNA, 19 nt, Artificial Sequence
  Description of Artificial Sequence: Synthetic oligonucleotide
  Antisense strand to SEQ ID NO: 698890
uucugacacauaugcuuca

SEQ ID NO: 698892 - RNA, 19 nt, Artificial Sequence
  Description of Artificial Sequence: Synthetic oligonucleotide
  Sense strand starting at position 2805 of SEQ ID NO: 586190
augggagauucccuucuua

SEQ ID NO: 698893 - RNA, 19 nt, Artificial Sequence
  Description of Artificial Sequence: Synthetic oligonucleotide
  Antisense strand to SEQ ID NO: 698892
uaagaagggaaucucccau

SEQ ID NO: 698894 - RNA, 19 nt, Artificial Sequence
  Description of Artificial Sequence: Synthetic oligonucleotide
  Sense strand starting at position 2845 of SEQ ID NO: 586190
ucguguccuccugugaguu

SEQ ID NO: 698895 - RNA, 19 nt, Artificial Sequence
  Description of Artificial Sequence: Synthetic oligonucleotide
  Antisense strand to SEQ ID NO: 698894
aacucacaggaggacacga

SEQ ID NO: 698896 - RNA, 19 nt, Artificial Sequence
  Description of Artificial Sequence: Synthetic oligonucleotide
  Sense strand starting at position 2964 of SEQ ID NO: 586190
uuugaaauucugugacaca

SEQ ID NO: 698897 - RNA, 19 nt, Artificial Sequence
  Description of Artificial Sequence: Synthetic oligonucleotide
  Antisense strand to SEQ ID NO: 698896
ugugucacagaauuucaaa

SEQ ID NO: 698898 - RNA, 19 nt, Artificial Sequence
  Description of Artificial Sequence: Synthetic oligonucleotide
  Sense strand starting at position 2975 of SEQ ID NO: 586190
gugacacacucuuuauuga

SEQ ID NO: 698899 - RNA, 19 nt, Artificial Sequence
  Description of Artificial Sequence: Synthetic oligonucleotide
  Antisense strand to SEQ ID NO: 698898
ucaauaaagagugugucac

SEQ ID NO: 698900 - RNA, 19 nt, Artificial Sequence
  Description of Artificial Sequence: Synthetic oligonucleotide
  Sense strand starting at position 3009 of SEQ ID NO: 586190
aucguagccaguucuguau

SEQ ID NO: 698901 - RNA, 19 nt, Artificial Sequence
  Description of Artificial Sequence: Synthetic oligonucleotide
  Antisense strand to SEQ ID NO: 698900
auacagaacuggcuacgau

SEQ ID NO: 698902 - RNA, 19 nt, Artificial Sequence
  Description of Artificial Sequence: Synthetic oligonucleotide
  Sense strand starting at position 3016 of SEQ ID NO: 586190
ccaguucuguaucucauuu

SEQ ID NO: 698903 - RNA, 19 nt, Artificial Sequence
  Description of Artificial Sequence: Synthetic oligonucleotide
  Antisense strand to SEQ ID NO: 698902
aaaugagauacagaacugg

SEQ ID NO: 698904 - RNA, 19 nt, Artificial Sequence
  Description of Artificial Sequence: Synthetic oligonucleotide
  Sense strand starting at position 3039 of SEQ ID NO: 586190
auguuagagcaugacaguu

SEQ ID NO: 698905 - RNA, 19 nt, Artificial Sequence
  Description of Artificial Sequence: Synthetic oligonucleotide
  Antisense strand to SEQ ID NO: 698904
aacugucaugcucuaacau

SEQ ID NO: 698906 - RNA, 19 nt, Artificial Sequence
  Description of Artificial Sequence: Synthetic oligonucleotide
  Sense strand starting at position 3052 of SEQ ID NO: 586190
acaguuccuccugggauau

SEQ ID NO: 698907 - RNA, 19 nt, Artificial Sequence
  Description of Artificial Sequence: Synthetic oligonucleotide
  Antisense strand to SEQ ID NO: 698906
auaucccaggaggaacugu

SEQ ID NO: 698908 - RNA, 19 nt, Artificial Sequence
  Description of Artificial Sequence: Synthetic oligonucleotide
  Sense strand starting at position 3165 of SEQ ID NO: 586190
gcacaagauuaacuagagu

SEQ ID NO: 698909 - RNA, 19 nt, Artificial Sequence
  Description of Artificial Sequence: Synthetic oligonucleotide
  Antisense strand to SEQ ID NO: 698908
acucuaguuaaucuugugc

SEQ ID NO: 698910 - RNA, 19 nt, Artificial Sequence
  Description of Artificial Sequence: Synthetic oligonucleotide
  Sense strand starting at position 3285 of SEQ ID NO: 586190
ucuucuacaguguaauaaa

SEQ ID NO: 698911 - RNA, 19 nt, Artificial Sequence
  Description of Artificial Sequence: Synthetic oligonucleotide
  Antisense strand to SEQ ID NO: 698910
uuuauuacacuguagaaga

SEQ ID NO: 698912 - RNA, 19 nt, Artificial Sequence
  Description of Artificial Sequence: Synthetic oligonucleotide
  Sense strand starting at position 3393 of SEQ ID NO: 586190
cuacuuagucuggacuuaa

SEQ ID NO: 698913 - RNA, 19 nt, Artificial Sequence
  Description of Artificial Sequence: Synthetic oligonucleotide
  Antisense strand to SEQ ID NO: 698912
uuaaguccagacuaaguag

SEQ ID NO: 698914 - RNA, 19 nt, Artificial Sequence
  Description of Artificial Sequence: Synthetic oligonucleotide
  Sense strand starting at position 3414 of SEQ ID NO: 586190
gcgccuacucauuggauuu

SEQ ID NO: 698915 - RNA, 19 nt, Artificial Sequence
  Description of Artificial Sequence: Synthetic oligonucleotide
  Antisense strand to SEQ ID NO: 698914
aaauccaaugaguaggcgc

SEQ ID NO: 698916 - RNA, 19 nt, Artificial Sequence
  Description of Artificial Sequence: Synthetic oligonucleotide
  Sense strand starting at position 3510 of SEQ ID NO: 586190
uuagaaucauucgcaagag

SEQ ID NO: 698917 - RNA, 19 nt, Artificial Sequence
  Description of Artificial Sequence: Synthetic oligonucleotide
  Antisense strand to SEQ ID NO: 698916
cucuugcgaaugauucuaa

SEQ ID NO: 698918 - RNA, 19 nt, Artificial Sequence
  Description of Artificial Sequence: Synthetic oligonucleotide
  Sense strand starting at position 3514 of SEQ ID NO: 586190
aaucauucgcaagaguaug

SEQ ID NO: 698919 - RNA, 19 nt, Artificial Sequence
  Description of Artificial Sequence: Synthetic oligonucleotide
  Antisense strand to SEQ ID NO: 698918
cauacucuugcgaaugauu

SEQ ID NO: 698920 - RNA, 19 nt, Artificial Sequence
  Description of Artificial Sequence: Synthetic oligonucleotide
  Sense strand starting at position 3526 of SEQ ID NO: 586190
gaguauguggcuuaugaau

SEQ ID NO: 698921 - RNA, 19 nt, Artificial Sequence
  Description of Artificial Sequence: Synthetic oligonucleotide
  Antisense strand to SEQ ID NO: 698920
auucauaagccacauacuc

SEQ ID NO: 698922 - RNA, 19 nt, Artificial Sequence
  Description of Artificial Sequence: Synthetic oligonucleotide
  Sense strand starting at position 3533 of SEQ ID NO: 586190
uggcuuaugaaugagucau

SEQ ID NO: 698923 - RNA, 19 nt, Artificial Sequence
  Description of Artificial Sequence: Synthetic oligonucleotide
  Antisense strand to SEQ ID NO: 698922
augacucauucauaagcca

SEQ ID NO: 698924 - RNA, 19 nt, Artificial Sequence
  Description of Artificial Sequence: Synthetic oligonucleotide
  Sense strand starting at position 3575 of SEQ ID NO: 586190
aucagugauucugucuaga

SEQ ID NO: 698925 - RNA, 19 nt, Artificial Sequence
  Description of Artificial Sequence: Synthetic oligonucleotide
  Antisense strand to SEQ ID NO: 698924
ucuagacagaaucacugau

SEQ ID NO: 698926 - RNA, 19 nt, Artificial Sequence
  Description of Artificial Sequence: Synthetic oligonucleotide
  Sense strand starting at position 3577 of SEQ ID NO: 586190
cagugauucugucuagaag

SEQ ID NO: 698927 - RNA, 19 nt, Artificial Sequence
  Description of Artificial Sequence: Synthetic oligonucleotide
  Antisense strand to SEQ ID NO: 698926
cuucuagacagaaucacug

SEQ ID NO: 698928 - RNA, 19 nt, Artificial Sequence
  Description of Artificial Sequence: Synthetic oligonucleotide
  Sense strand starting at position 3578 of SEQ ID NO: 586190
agugauucugucuagaagg

SEQ ID NO: 698929 - RNA, 19 nt, Artificial Sequence
  Description of Artificial Sequence: Synthetic oligonucleotide
  Antisense strand to SEQ ID NO: 698928
ccuucuagacagaaucacu

SEQ ID NO: 698930 - RNA, 19 nt, Artificial Sequence
  Description of Artificial Sequence: Synthetic oligonucleotide
  Sense strand starting at position 3583 of SEQ ID NO: 586190
uucugucuagaaggaauua

SEQ ID NO: 698931 - RNA, 19 nt, Artificial Sequence
  Description of Artificial Sequence: Synthetic oligonucleotide
  Antisense strand to SEQ ID NO: 698930
uaauuccuucuagacagaa

SEQ ID NO: 698932 - RNA, 19 nt, Artificial Sequence
  Description of Artificial Sequence: Synthetic oligonucleotide
  Sense strand starting at position 3908 of SEQ ID NO: 586190
cuccuuguuguacagauaa

SEQ ID NO: 698933 - RNA, 19 nt, Artificial Sequence
  Description of Artificial Sequence: Synthetic oligonucleotide
  Antisense strand to SEQ ID NO: 698932
uuaucuguacaacaaggag

SEQ ID NO: 698934 - RNA, 19 nt, Artificial Sequence
  Description of Artificial Sequence: Synthetic oligonucleotide
  Sense strand starting at position 3941 of SEQ ID NO: 586190
aagugaugugcucagaauu

SEQ ID NO: 698935 - RNA, 19 nt, Artificial Sequence
  Description of Artificial Sequence: Synthetic oligonucleotide
  Antisense strand to SEQ ID NO: 698934
aauucugagcacaucacuu

SEQ ID NO: 698936 - RNA, 19 nt, Artificial Sequence
  Description of Artificial Sequence: Synthetic oligonucleotide
  Sense strand starting at position 3971 of SEQ ID NO: 586190
gacaaauccugggcuagga

SEQ ID NO: 698937 - RNA, 19 nt, Artificial Sequence
  Description of Artificial Sequence: Synthetic oligonucleotide
  Antisense strand to SEQ ID NO: 698936
uccuagcccaggauuuguc

SEQ ID NO: 698938 - RNA, 19 nt, Artificial Sequence
  Description of Artificial Sequence: Synthetic oligonucleotide
  Sense strand starting at position 138 of SEQ ID NO: 586191
agaauaaacuaggaaauug

SEQ ID NO: 698939 - RNA, 19 nt, Artificial Sequence
  Description of Artificial Sequence: Synthetic oligonucleotide
  Antisense strand to SEQ ID NO: 698938
caauuuccuaguuuauucu

SEQ ID NO: 698940 - RNA, 19 nt, Artificial Sequence
  Description of Artificial Sequence: Synthetic oligonucleotide
  Sense strand starting at position 166 of SEQ ID NO: 586191
agagcuuucuccuuagaaa

SEQ ID NO: 698941 - RNA, 19 nt, Artificial Sequence
  Description of Artificial Sequence: Synthetic oligonucleotide
  Antisense strand to SEQ ID NO: 698940
uuucuaaggagaaagcucu

SEQ ID NO: 698942 - RNA, 19 nt, Artificial Sequence
  Description of Artificial Sequence: Synthetic oligonucleotide
  Sense strand starting at position 444 of SEQ ID NO: 586191
cagagagaaugagauguua

SEQ ID NO: 698943 - RNA, 19 nt, Artificial Sequence
  Description of Artificial Sequence: Synthetic oligonucleotide
  Antisense strand to SEQ ID NO: 698942
uaacaucucauucucucug

SEQ ID NO: 698944 - RNA, 19 nt, Artificial Sequence
  Description of Artificial Sequence: Synthetic oligonucleotide
  Sense strand starting at position 452 of SEQ ID NO: 586191
augagauguuaugagaauu

SEQ ID NO: 698945 - RNA, 19 nt, Artificial Sequence
  Description of Artificial Sequence: Synthetic oligonucleotide
  Antisense strand to SEQ ID NO: 698944
aauucucauaacaucucau

SEQ ID NO: 698946 - RNA, 19 nt, Artificial Sequence
  Description of Artificial Sequence: Synthetic oligonucleotide
  Sense strand starting at position 482 of SEQ ID NO: 586191
uguuaauaguaaguagcaa

SEQ ID NO: 698947 - RNA, 19 nt, Artificial Sequence
  Description of Artificial Sequence: Synthetic oligonucleotide
  Antisense strand to SEQ ID NO: 698946
uugcuacuuacuauuaaca

SEQ ID NO: 698948 - RNA, 19 nt, Artificial Sequence
  Description of Artificial Sequence: Synthetic oligonucleotide
  Sense strand starting at position 498 of SEQ ID NO: 586191
caaagagaacuucgagcaa

SEQ ID NO: 698949 - RNA, 19 nt, Artificial Sequence
  Description of Artificial Sequence: Synthetic oligonucleotide
  Antisense strand to SEQ ID NO: 698948
uugcucgaaguucucuuug

SEQ ID NO: 698950 - RNA, 19 nt, Artificial Sequence
  Description of Artificial Sequence: Synthetic oligonucleotide
  Sense strand starting at position 678 of SEQ ID NO: 586191
gugcuaagaggcugacuaa

SEQ ID NO: 698951 - RNA, 19 nt, Artificial Sequence
  Description of Artificial Sequence: Synthetic oligonucleotide
  Antisense strand to SEQ ID NO: 698950
uuagucagccucuuagcac

SEQ ID NO: 698952 - RNA, 19 nt, Artificial Sequence
  Description of Artificial Sequence: Synthetic oligonucleotide
  Sense strand starting at position 883 of SEQ ID NO: 586191
gugaaaccugauggaaucu

SEQ ID NO: 698953 - RNA, 19 nt, Artificial Sequence
  Description of Artificial Sequence: Synthetic oligonucleotide
  Antisense strand to SEQ ID NO: 698952
agauuccaucagguuucac

SEQ ID NO: 698954 - RNA, 19 nt, Artificial Sequence
  Description of Artificial Sequence: Synthetic oligonucleotide
  Sense strand starting at position 903 of SEQ ID NO: 586191
gacagcuucugggcucaga

SEQ ID NO: 698955 - RNA, 19 nt, Artificial Sequence
  Description of Artificial Sequence: Synthetic oligonucleotide
  Antisense strand to SEQ ID NO: 698954
ucugagcccagaagcuguc

SEQ ID NO: 698956 - RNA, 19 nt, Artificial Sequence
  Description of Artificial Sequence: Synthetic oligonucleotide
  Sense strand starting at position 1127 of SEQ ID NO: 586191
guuaccaaucagcgacaga

SEQ ID NO: 698957 - RNA, 19 nt, Artificial Sequence
  Description of Artificial Sequence: Synthetic oligonucleotide
  Antisense strand to SEQ ID NO: 698956
ucugucgcugauugguaac

SEQ ID NO: 698958 - RNA, 19 nt, Artificial Sequence
  Description of Artificial Sequence: Synthetic oligonucleotide
  Sense strand starting at position 1367 of SEQ ID NO: 586191
guaagaauuacacgcgaca

SEQ ID NO: 698959 - RNA, 19 nt, Artificial Sequence
  Description of Artificial Sequence: Synthetic oligonucleotide
  Antisense strand to SEQ ID NO: 698958
ugucgcguguaauucuuac

SEQ ID NO: 698960 - RNA, 19 nt, Artificial Sequence
  Description of Artificial Sequence: Synthetic oligonucleotide
  Sense strand starting at position 1370 of SEQ ID NO: 586191
agaauuacacgcgacagua

SEQ ID NO: 698961 - RNA, 19 nt, Artificial Sequence
  Description of Artificial Sequence: Synthetic oligonucleotide
  Antisense strand to SEQ ID NO: 698960
uacugucgcguguaauucu

SEQ ID NO: 698962 - RNA, 19 nt, Artificial Sequence
  Description of Artificial Sequence: Synthetic oligonucleotide
  Sense strand starting at position 1611 of SEQ ID NO: 586191
guguguuuacguaggaagg

SEQ ID NO: 698963 - RNA, 19 nt, Artificial Sequence
  Description of Artificial Sequence: Synthetic oligonucleotide
  Antisense strand to SEQ ID NO: 698962
ccuuccuacguaaacacac

SEQ ID NO: 698964 - RNA, 19 nt, Artificial Sequence
  Description of Artificial Sequence: Synthetic oligonucleotide
  Sense strand starting at position 2215 of SEQ ID NO: 586191
cgagaagucgccgcggcaa

SEQ ID NO: 698965 - RNA, 19 nt, Artificial Sequence
  Description of Artificial Sequence: Synthetic oligonucleotide
  Antisense strand to SEQ ID NO: 698964
uugccgcggcgacuucucg

SEQ ID NO: 698966 - RNA, 19 nt, Artificial Sequence
  Description of Artificial Sequence: Synthetic oligonucleotide
  Sense strand starting at position 2413 of SEQ ID NO: 586191
guccucagccuguucugua

SEQ ID NO: 698967 - RNA, 19 nt, Artificial Sequence
  Description of Artificial Sequence: Synthetic oligonucleotide
  Antisense strand to SEQ ID NO: 698966
uacagaacaggcugaggac

SEQ ID NO: 698968 - RNA, 19 nt, Artificial Sequence
  Description of Artificial Sequence: Synthetic oligonucleotide
  Sense strand starting at position 2423 of SEQ ID NO: 586191
uguucuguaaugugggauu

SEQ ID NO: 698969 - RNA, 19 nt, Artificial Sequence
  Description of Artificial Sequence: Synthetic oligonucleotide
  Antisense strand to SEQ ID NO: 698968
aaucccacauuacagaaca

SEQ ID NO: 698970 - RNA, 19 nt, Artificial Sequence
  Description of Artificial Sequence: Synthetic oligonucleotide
  Sense strand starting at position 2426 of SEQ ID NO: 586191
ucuguaaugugggauuuac

SEQ ID NO: 698971 - RNA, 19 nt, Artificial Sequence
  Description of Artificial Sequence: Synthetic oligonucleotide
  Antisense strand to SEQ ID NO: 698970
guaaaucccacauuacaga

SEQ ID NO: 698972 - RNA, 19 nt, Artificial Sequence
  Description of Artificial Sequence: Synthetic oligonucleotide
  Sense strand starting at position 2458 of SEQ ID NO: 586191
cugguguucgaggaggaga

SEQ ID NO: 698973 - RNA, 19 nt, Artificial Sequence
  Description of Artificial Sequence: Synthetic oligonucleotide
  Antisense strand to SEQ ID NO: 698972
ucuccuccucgaacaccag

SEQ ID NO: 698974 - RNA, 19 nt, Artificial Sequence
  Description of Artificial Sequence: Synthetic oligonucleotide
  Sense strand starting at position 2521 of SEQ ID NO: 586191
ugcuauuuccacugcaaug

SEQ ID NO: 698975 - RNA, 19 nt, Artificial Sequence
  Description of Artificial Sequence: Synthetic oligonucleotide
  Antisense strand to SEQ ID NO: 698974
cauugcaguggaaauagca

SEQ ID NO: 698976 - RNA, 19 nt, Artificial Sequence
  Description of Artificial Sequence: Synthetic oligonucleotide
  Sense strand starting at position 2591 of SEQ ID NO: 586191
caagcagaauuugauggaa

SEQ ID NO: 698977 - RNA, 19 nt, Artificial Sequence
  Description of Artificial Sequence: Synthetic oligonucleotide
  Antisense strand to SEQ ID NO: 698976
uuccaucaaauucugcuug

SEQ ID NO: 698978 - RNA, 19 nt, Artificial Sequence
  Description of Artificial Sequence: Synthetic oligonucleotide
  Sense strand starting at position 2593 of SEQ ID NO: 586191
agcagaauuugauggaaau

SEQ ID NO: 698979 - RNA, 19 nt, Artificial Sequence
  Description of Artificial Sequence: Synthetic oligonucleotide
  Antisense strand to SEQ ID NO: 698978
auuuccaucaaauucugcu

SEQ ID NO: 698980 - RNA, 19 nt, Artificial Sequence
  Description of Artificial Sequence: Synthetic oligonucleotide
  Sense strand starting at position 2969 of SEQ ID NO: 586191
agaggucaauuaucuuuga

SEQ ID NO: 698981 - RNA, 19 nt, Artificial Sequence
  Description of Artificial Sequence: Synthetic oligonucleotide
  Antisense strand to SEQ ID NO: 698980
ucaaagauaauugaccucu

SEQ ID NO: 698982 - RNA, 19 nt, Artificial Sequence
  Description of Artificial Sequence: Synthetic oligonucleotide
  Sense strand starting at position 2972 of SEQ ID NO: 586191
ggucaauuaucuuugagaa

SEQ ID NO: 698983 - RNA, 19 nt, Artificial Sequence
  Description of Artificial Sequence: Synthetic oligonucleotide
  Antisense strand to SEQ ID NO: 698982
uucucaaagauaauugacc

SEQ ID NO: 698984 - RNA, 19 nt, Artificial Sequence
  Description of Artificial Sequence: Synthetic oligonucleotide
  Sense strand starting at position 2973 of SEQ ID NO: 586191
gucaauuaucuuugagaag

SEQ ID NO: 698985 - RNA, 19 nt, Artificial Sequence
  Description of Artificial Sequence: Synthetic oligonucleotide
  Antisense strand to SEQ ID NO: 698984
cuucucaaagauaauugac

SEQ ID NO: 698986 - RNA, 19 nt, Artificial Sequence
  Description of Artificial Sequence: Synthetic oligonucleotide
  Sense strand starting at position 3125 of SEQ ID NO: 586191
uggagugaaucaccaaagu

SEQ ID NO: 698987 - RNA, 19 nt, Artificial Sequence
  Description of Artificial Sequence: Synthetic oligonucleotide
  Antisense strand to SEQ ID NO: 698986
acuuuggugauucacucca

SEQ ID NO: 698988 - RNA, 19 nt, Artificial Sequence
  Description of Artificial Sequence: Synthetic oligonucleotide
  Sense strand starting at position 3216 of SEQ ID NO: 586191
cagcgaccuccuuacugua

SEQ ID NO: 698989 - RNA, 19 nt, Artificial Sequence
  Description of Artificial Sequence: Synthetic oligonucleotide
  Antisense strand to SEQ ID NO: 698988
uacaguaaggaggucgcug

SEQ ID NO: 698990 - RNA, 19 nt, Artificial Sequence
  Description of Artificial Sequence: Synthetic oligonucleotide
  Sense strand starting at position 3261 of SEQ ID NO: 586191
guguccuacugacuucuga

SEQ ID NO: 698991 - RNA, 19 nt, Artificial Sequence
  Description of Artificial Sequence: Synthetic oligonucleotide
  Antisense strand to SEQ ID NO: 698990
ucagaagucaguaggacac

SEQ ID NO: 698992 - RNA, 19 nt, Artificial Sequence
  Description of Artificial Sequence: Synthetic oligonucleotide
  Sense strand starting at position 3296 of SEQ ID NO: 586191
auugauuagggucaccgua

SEQ ID NO: 698993 - RNA, 19 nt, Artificial Sequence
  Description of Artificial Sequence: Synthetic oligonucleotide
  Antisense strand to SEQ ID NO: 698992
uacggugacccuaaucaau

SEQ ID NO: 698994 - RNA, 19 nt, Artificial Sequence
  Description of Artificial Sequence: Synthetic oligonucleotide
  Sense strand starting at position 3362 of SEQ ID NO: 586191
cugcuugaugaaugagaau

SEQ ID NO: 698995 - RNA, 19 nt, Artificial Sequence
  Description of Artificial Sequence: Synthetic oligonucleotide
  Antisense strand to SEQ ID NO: 698994
auucucauucaucaagcag

SEQ ID NO: 698996 - RNA, 19 nt, Artificial Sequence
  Description of Artificial Sequence: Synthetic oligonucleotide
  Sense strand starting at position 3365 of SEQ ID NO: 586191
cuugaugaaugagaauacu

SEQ ID NO: 698997 - RNA, 19 nt, Artificial Sequence
  Description of Artificial Sequence: Synthetic oligonucleotide
  Antisense strand to SEQ ID NO: 698996
aguauucucauucaucaag

SEQ ID NO: 698998 - RNA, 19 nt, Artificial Sequence
  Description of Artificial Sequence: Synthetic oligonucleotide
  Sense strand starting at position 3735 of SEQ ID NO: 586191
caugguaugcuuuguuaac

SEQ ID NO: 698999 - RNA, 19 nt, Artificial Sequence
  Description of Artificial Sequence: Synthetic oligonucleotide
  Antisense strand to SEQ ID NO: 698998
guuaacaaagcauaccaug

SEQ ID NO: 699000 - RNA, 19 nt, Artificial Sequence
  Description of Artificial Sequence: Synthetic oligonucleotide
  Sense strand starting at position 3736 of SEQ ID NO: 586191
augguaugcuuuguuaacu

SEQ ID NO: 699001 - RNA, 19 nt, Artificial Sequence
  Description of Artificial Sequence: Synthetic oligonucleotide
  Antisense strand to SEQ ID NO: 699000
aguuaacaaagcauaccau

SEQ ID NO: 699002 - RNA, 19 nt, Artificial Sequence
  Description of Artificial Sequence: Synthetic oligonucleotide
  Sense strand starting at position 3737 of SEQ ID NO: 586191
ugguaugcuuuguuaacuu

SEQ ID NO: 699003 - RNA, 19 nt, Artificial Sequence
  Description of Artificial Sequence: Synthetic oligonucleotide
  Antisense strand to SEQ ID NO: 699002
aaguuaacaaagcauacca

SEQ ID NO: 699004 - RNA, 19 nt, Artificial Sequence
  Description of Artificial Sequence: Synthetic oligonucleotide
  Sense strand starting at position 3759 of SEQ ID NO: 586191
uguacauucuccuccaagu

SEQ ID NO: 699005 - RNA, 19 nt, Artificial Sequence
  Description of Artificial Sequence: Synthetic oligonucleotide
  Antisense strand to SEQ ID NO: 699004
acuuggaggagaauguaca

SEQ ID NO: 699006 - RNA, 19 nt, Artificial Sequence
  Description of Artificial Sequence: Synthetic oligonucleotide
  Sense strand starting at position 3776 of SEQ ID NO: 586191
guaggaaaguuucuaugag

SEQ ID NO: 699007 - RNA, 19 nt, Artificial Sequence
  Description of Artificial Sequence: Synthetic oligonucleotide
  Antisense strand to SEQ ID NO: 699006
cucauagaaacuuuccuac

SEQ ID NO: 699008 - RNA, 19 nt, Artificial Sequence
  Description of Artificial Sequence: Synthetic oligonucleotide
  Sense strand starting at position 3780 of SEQ ID NO: 586191
gaaaguuucuaugaggaaa

SEQ ID NO: 699009 - RNA, 19 nt, Artificial Sequence
  Description of Artificial Sequence: Synthetic oligonucleotide
  Antisense strand to SEQ ID NO: 699008
uuuccucauagaaacuuuc

SEQ ID NO: 699010 - RNA, 19 nt, Artificial Sequence
  Description of Artificial Sequence: Synthetic oligonucleotide
  Sense strand starting at position 3821 of SEQ ID NO: 586191
uuggcaaauguagaguaaa

SEQ ID NO: 699011 - RNA, 19 nt, Artificial Sequence
  Description of Artificial Sequence: Synthetic oligonucleotide
  Antisense strand to SEQ ID NO: 699010
uuuacucuacauuugccaa

SEQ ID NO: 699012 - RNA, 19 nt, Artificial Sequence
  Description of Artificial Sequence: Synthetic oligonucleotide
  Sense strand starting at position 3834 of SEQ ID NO: 586191
aguaaaugaucacaaggga

SEQ ID NO: 699013 - RNA, 19 nt, Artificial Sequence
  Description of Artificial Sequence: Synthetic oligonucleotide
  Antisense strand to SEQ ID NO: 699012
ucccuugugaucauuuacu

SEQ ID NO: 699014 - RNA, 19 nt, Artificial Sequence
  Description of Artificial Sequence: Synthetic oligonucleotide
  Sense strand starting at position 3847 of SEQ ID NO: 586191
aagggaugaugucaucaag

SEQ ID NO: 699015 - RNA, 19 nt, Artificial Sequence
  Description of Artificial Sequence: Synthetic oligonucleotide
  Antisense strand to SEQ ID NO: 699014
cuugaugacaucaucccuu

SEQ ID NO: 699016 - RNA, 19 nt, Artificial Sequence
  Description of Artificial Sequence: Synthetic oligonucleotide
  Sense strand starting at position 3850 of SEQ ID NO: 586191
ggaugaugucaucaagcua

SEQ ID NO: 699017 - RNA, 19 nt, Artificial Sequence
  Description of Artificial Sequence: Synthetic oligonucleotide
  Antisense strand to SEQ ID NO: 699016
uagcuugaugacaucaucc

SEQ ID NO: 699018 - RNA, 19 nt, Artificial Sequence
  Description of Artificial Sequence: Synthetic oligonucleotide
  Sense strand starting at position 77 of SEQ ID NO: 586192
gacgucucgcuauguugga

SEQ ID NO: 699019 - RNA, 19 nt, Artificial Sequence
  Description of Artificial Sequence: Synthetic oligonucleotide
  Antisense strand to SEQ ID NO: 699018
uccaacauagcgagacguc

SEQ ID NO: 699020 - RNA, 19 nt, Artificial Sequence
  Description of Artificial Sequence: Synthetic oligonucleotide
  Sense strand starting at position 272 of SEQ ID NO: 586192
ucacgccuucuguagaacu

SEQ ID NO: 699021 - RNA, 19 nt, Artificial Sequence
  Description of Artificial Sequence: Synthetic oligonucleotide
  Antisense strand to SEQ ID NO: 699020
aguucuacagaaggcguga

SEQ ID NO: 699022 - RNA, 19 nt, Artificial Sequence
  Description of Artificial Sequence: Synthetic oligonucleotide
  Sense strand starting at position 274 of SEQ ID NO: 586192
acgccuucuguagaacuga

SEQ ID NO: 699023 - RNA, 19 nt, Artificial Sequence
  Description of Artificial Sequence: Synthetic oligonucleotide
  Antisense strand to SEQ ID NO: 699022
ucaguucuacagaaggcgu

SEQ ID NO: 699024 - RNA, 19 nt, Artificial Sequence
  Description of Artificial Sequence: Synthetic oligonucleotide
  Sense strand starting at position 304 of SEQ ID NO: 586192
cccugaucguggcucaacu

SEQ ID NO: 699025 - RNA, 19 nt, Artificial Sequence
  Description of Artificial Sequence: Synthetic oligonucleotide
  Antisense strand to SEQ ID NO: 699024
aguugagccacgaucaggg

SEQ ID NO: 699026 - RNA, 19 nt, Artificial Sequence
  Description of Artificial Sequence: Synthetic oligonucleotide
  Sense strand starting at position 335 of SEQ ID NO: 586192
ggcucuaacucuccagauc

SEQ ID NO: 699027 - RNA, 19 nt, Artificial Sequence
  Description of Artificial Sequence: Synthetic oligonucleotide
  Antisense strand to SEQ ID NO: 699026
gaucuggagaguuagagcc

SEQ ID NO: 699028 - RNA, 19 nt, Artificial Sequence
  Description of Artificial Sequence: Synthetic oligonucleotide
  Sense strand starting at position 380 of SEQ ID NO: 586192
cccucagucugccacagau

SEQ ID NO: 699029 - RNA, 19 nt, Artificial Sequence
  Description of Artificial Sequence: Synthetic oligonucleotide
  Antisense strand to SEQ ID NO: 699028
aucuguggcagacugaggg

SEQ ID NO: 699030 - RNA, 19 nt, Artificial Sequence
  Description of Artificial Sequence: Synthetic oligonucleotide
  Sense strand starting at position 382 of SEQ ID NO: 586192
cucagucugccacagauaa

SEQ ID NO: 699031 - RNA, 19 nt, Artificial Sequence
  Description of Artificial Sequence: Synthetic oligonucleotide
  Antisense strand to SEQ ID NO: 699030
uuaucuguggcagacugag

SEQ ID NO: 699032 - RNA, 19 nt, Artificial Sequence
  Description of Artificial Sequence: Synthetic oligonucleotide
  Sense strand starting at position 395 of SEQ ID NO: 586192
agauaauccuuaggaagug

SEQ ID NO: 699033 - RNA, 19 nt, Artificial Sequence
  Description of Artificial Sequence: Synthetic oligonucleotide
  Antisense strand to SEQ ID NO: 699032
cacuuccuaaggauuaucu

SEQ ID NO: 699034 - RNA, 19 nt, Artificial Sequence
  Description of Artificial Sequence: Synthetic oligonucleotide
  Sense strand starting at position 396 of SEQ ID NO: 586192
gauaauccuuaggaaguga

SEQ ID NO: 699035 - RNA, 19 nt, Artificial Sequence
  Description of Artificial Sequence: Synthetic oligonucleotide
  Antisense strand to SEQ ID NO: 699034
ucacuuccuaaggauuauc

SEQ ID NO: 699036 - RNA, 19 nt, Artificial Sequence
  Description of Artificial Sequence: Synthetic oligonucleotide
  Sense strand starting at position 419 of SEQ ID NO: 586192
aagacaucugauuggcagu

SEQ ID NO: 699037 - RNA, 19 nt, Artificial Sequence
  Description of Artificial Sequence: Synthetic oligonucleotide
  Antisense strand to SEQ ID NO: 699036
acugccaaucagaugucuu

SEQ ID NO: 699038 - RNA, 19 nt, Artificial Sequence
  Description of Artificial Sequence: Synthetic oligonucleotide
  Sense strand starting at position 420 of SEQ ID NO: 586192
agacaucugauuggcaguu

SEQ ID NO: 699039 - RNA, 19 nt, Artificial Sequence
  Description of Artificial Sequence: Synthetic oligonucleotide
  Antisense strand to SEQ ID NO: 699038
aacugccaaucagaugucu

SEQ ID NO: 699040 - RNA, 19 nt, Artificial Sequence
  Description of Artificial Sequence: Synthetic oligonucleotide
  Sense strand starting at position 421 of SEQ ID NO: 586192
gacaucugauuggcaguuu

SEQ ID NO: 699041 - RNA, 19 nt, Artificial Sequence
  Description of Artificial Sequence: Synthetic oligonucleotide
  Antisense strand to SEQ ID NO: 699040
aaacugccaaucagauguc

SEQ ID NO: 699042 - RNA, 19 nt, Artificial Sequence
  Description of Artificial Sequence: Synthetic oligonucleotide
  Sense strand starting at position 499 of SEQ ID NO: 586192
ugcgucuggucucuggaua

SEQ ID NO: 699043 - RNA, 19 nt, Artificial Sequence
  Description of Artificial Sequence: Synthetic oligonucleotide
  Antisense strand to SEQ ID NO: 699042
uauccagagaccagacgca

SEQ ID NO: 699044 - RNA, 19 nt, Artificial Sequence
  Description of Artificial Sequence: Synthetic oligonucleotide
  Sense strand starting at position 574 of SEQ ID NO: 586192
ccaggagcuucuccaaaca

SEQ ID NO: 699045 - RNA, 19 nt, Artificial Sequence
  Description of Artificial Sequence: Synthetic oligonucleotide
  Antisense strand to SEQ ID NO: 699044
uguuuggagaagcuccugg

SEQ ID NO: 699046 - RNA, 19 nt, Artificial Sequence
  Description of Artificial Sequence: Synthetic oligonucleotide
  Sense strand starting at position 857 of SEQ ID NO: 586192
gaugcaaagcuuuggucua

SEQ ID NO: 699047 - RNA, 19 nt, Artificial Sequence
  Description of Artificial Sequence: Synthetic oligonucleotide
  Antisense strand to SEQ ID NO: 699046
uagaccaaagcuuugcauc

SEQ ID NO: 699048 - RNA, 19 nt, Artificial Sequence
  Description of Artificial Sequence: Synthetic oligonucleotide
  Sense strand starting at position 1053 of SEQ ID NO: 586192
gggucagccaugugugcaa

SEQ ID NO: 699049 - RNA, 19 nt, Artificial Sequence
  Description of Artificial Sequence: Synthetic oligonucleotide
  Antisense strand to SEQ ID NO: 699048
uugcacacauggcugaccc

SEQ ID NO: 699050 - RNA, 19 nt, Artificial Sequence
  Description of Artificial Sequence: Synthetic oligonucleotide
  Sense strand starting at position 2114 of SEQ ID NO: 586192
aaacuaugugccggagaga

SEQ ID NO: 699051 - RNA, 19 nt, Artificial Sequence
  Description of Artificial Sequence: Synthetic oligonucleotide
  Antisense strand to SEQ ID NO: 699050
ucucuccggcacauaguuu

SEQ ID NO: 699052 - RNA, 19 nt, Artificial Sequence
  Description of Artificial Sequence: Synthetic oligonucleotide
  Sense strand starting at position 2137 of SEQ ID NO: 586192
uccugauccgugcaccaaa

SEQ ID NO: 699053 - RNA, 19 nt, Artificial Sequence
  Description of Artificial Sequence: Synthetic oligonucleotide
  Antisense strand to SEQ ID NO: 699052
uuuggugcacggaucagga

SEQ ID NO: 699054 - RNA, 19 nt, Artificial Sequence
  Description of Artificial Sequence: Synthetic oligonucleotide
  Sense strand starting at position 2150 of SEQ ID NO: 586192
accaaagcccuuggucauu

SEQ ID NO: 699055 - RNA, 19 nt, Artificial Sequence
  Description of Artificial Sequence: Synthetic oligonucleotide
  Antisense strand to SEQ ID NO: 699054
aaugaccaagggcuuuggu

SEQ ID NO: 699056 - RNA, 19 nt, Artificial Sequence
  Description of Artificial Sequence: Synthetic oligonucleotide
  Sense strand starting at position 2447 of SEQ ID NO: 586192
ggcgaaaucccgucucguc

SEQ ID NO: 699057 - RNA, 19 nt, Artificial Sequence
  Description of Artificial Sequence: Synthetic oligonucleotide
  Antisense strand to SEQ ID NO: 699056
gacgagacgggauuucgcc

SEQ ID NO: 699058 - RNA, 19 nt, Artificial Sequence
  Description of Artificial Sequence: Synthetic oligonucleotide
  Sense strand starting at position 2448 of SEQ ID NO: 586192
gcgaaaucccgucucgucu

SEQ ID NO: 699059 - RNA, 19 nt, Artificial Sequence
  Description of Artificial Sequence: Synthetic oligonucleotide
  Antisense strand to SEQ ID NO: 699058
agacgagacgggauuucgc

SEQ ID NO: 699060 - RNA, 19 nt, Artificial Sequence
  Description of Artificial Sequence: Synthetic oligonucleotide
  Sense strand starting at position 2454 of SEQ ID NO: 586192
ucccgucucgucucuaauu

SEQ ID NO: 699061 - RNA, 19 nt, Artificial Sequence
  Description of Artificial Sequence: Synthetic oligonucleotide
  Antisense strand to SEQ ID NO: 699060
aauuagagacgagacggga

SEQ ID NO: 699062 - RNA, 19 nt, Artificial Sequence
  Description of Artificial Sequence: Synthetic oligonucleotide
  Sense strand starting at position 2455 of SEQ ID NO: 586192
cccgucucgucucuaauuu

SEQ ID NO: 699063 - RNA, 19 nt, Artificial Sequence
  Description of Artificial Sequence: Synthetic oligonucleotide
  Antisense strand to SEQ ID NO: 699062
aaauuagagacgagacggg

SEQ ID NO: 699064 - RNA, 19 nt, Artificial Sequence
  Description of Artificial Sequence: Synthetic oligonucleotide
  Sense strand starting at position 2862 of SEQ ID NO: 586192
acacuaacuguguguucga

SEQ ID NO: 699065 - RNA, 19 nt, Artificial Sequence
  Description of Artificial Sequence: Synthetic oligonucleotide
  Antisense strand to SEQ ID NO: 699064
ucgaacacacaguuagugu

SEQ ID NO: 699066 - RNA, 19 nt, Artificial Sequence
  Description of Artificial Sequence: Synthetic oligonucleotide
  Sense strand starting at position 2865 of SEQ ID NO: 586192
cuaacuguguguucgagag

SEQ ID NO: 699067 - RNA, 19 nt, Artificial Sequence
  Description of Artificial Sequence: Synthetic oligonucleotide
  Antisense strand to SEQ ID NO: 699066
cucucgaacacacaguuag

SEQ ID NO: 699068 - RNA, 19 nt, Artificial Sequence
  Description of Artificial Sequence: Synthetic oligonucleotide
  Sense strand starting at position 2907 of SEQ ID NO: 586192
ggcucauguucccaaagca

SEQ ID NO: 699069 - RNA, 19 nt, Artificial Sequence
  Description of Artificial Sequence: Synthetic oligonucleotide
  Antisense strand to SEQ ID NO: 699068
ugcuuugggaacaugagcc

SEQ ID NO: 699070 - RNA, 19 nt, Artificial Sequence
  Description of Artificial Sequence: Synthetic oligonucleotide
  Sense strand starting at position 2936 of SEQ ID NO: 586192
gcaagauuguugggagcca

SEQ ID NO: 699071 - RNA, 19 nt, Artificial Sequence
  Description of Artificial Sequence: Synthetic oligonucleotide
  Antisense strand to SEQ ID NO: 699070
uggcucccaacaaucuugc

SEQ ID NO: 699072 - RNA, 19 nt, Artificial Sequence
  Description of Artificial Sequence: Synthetic oligonucleotide
  Sense strand starting at position 2937 of SEQ ID NO: 586192
caagauuguugggagccaa

SEQ ID NO: 699073 - RNA, 19 nt, Artificial Sequence
  Description of Artificial Sequence: Synthetic oligonucleotide
  Antisense strand to SEQ ID NO: 699072
uuggcucccaacaaucuug

SEQ ID NO: 699074 - RNA, 19 nt, Artificial Sequence
  Description of Artificial Sequence: Synthetic oligonucleotide
  Sense strand starting at position 2976 of SEQ ID NO: 586192
gcagaauuccuauggauau

SEQ ID NO: 699075 - RNA, 19 nt, Artificial Sequence
  Description of Artificial Sequence: Synthetic oligonucleotide
  Antisense strand to SEQ ID NO: 699074
auauccauaggaauucugc

SEQ ID NO: 699076 - RNA, 19 nt, Artificial Sequence
  Description of Artificial Sequence: Synthetic oligonucleotide
  Sense strand starting at position 3404 of SEQ ID NO: 586192
acacguacauccuuagaac

SEQ ID NO: 699077 - RNA, 19 nt, Artificial Sequence
  Description of Artificial Sequence: Synthetic oligonucleotide
  Antisense strand to SEQ ID NO: 699076
guucuaaggauguacgugu

SEQ ID NO: 699078 - RNA, 19 nt, Artificial Sequence
  Description of Artificial Sequence: Synthetic oligonucleotide
  Sense strand starting at position 3438 of SEQ ID NO: 586192
guuugaaaugcacaguuau

SEQ ID NO: 699079 - RNA, 19 nt, Artificial Sequence
  Description of Artificial Sequence: Synthetic oligonucleotide
  Antisense strand to SEQ ID NO: 699078
auaacugugcauuucaaac

SEQ ID NO: 699080 - RNA, 19 nt, Artificial Sequence
  Description of Artificial Sequence: Synthetic oligonucleotide
  Sense strand starting at position 3469 of SEQ ID NO: 586192
uugguuccucauugugaaa

SEQ ID NO: 699081 - RNA, 19 nt, Artificial Sequence
  Description of Artificial Sequence: Synthetic oligonucleotide
  Antisense strand to SEQ ID NO: 699080
uuucacaaugaggaaccaa

SEQ ID NO: 699082 - RNA, 19 nt, Artificial Sequence
  Description of Artificial Sequence: Synthetic oligonucleotide
  Sense strand starting at position 3472 of SEQ ID NO: 586192
guuccucauugugaaauga

SEQ ID NO: 699083 - RNA, 19 nt, Artificial Sequence
  Description of Artificial Sequence: Synthetic oligonucleotide
  Antisense strand to SEQ ID NO: 699082
ucauuucacaaugaggaac

SEQ ID NO: 699084 - RNA, 19 nt, Artificial Sequence
  Description of Artificial Sequence: Synthetic oligonucleotide
  Sense strand starting at position 3510 of SEQ ID NO: 586192
uuagguaauuguggaguaa

SEQ ID NO: 699085 - RNA, 19 nt, Artificial Sequence
  Description of Artificial Sequence: Synthetic oligonucleotide
  Antisense strand to SEQ ID NO: 699084
uuacuccacaauuaccuaa

SEQ ID NO: 699086 - RNA, 19 nt, Artificial Sequence
  Description of Artificial Sequence: Synthetic oligonucleotide
  Sense strand starting at position 3511 of SEQ ID NO: 586192
uagguaauuguggaguaaa

SEQ ID NO: 699087 - RNA, 19 nt, Artificial Sequence
  Description of Artificial Sequence: Synthetic oligonucleotide
  Antisense strand to SEQ ID NO: 699086
uuuacuccacaauuaccua

SEQ ID NO: 699088 - RNA, 19 nt, Artificial Sequence
  Description of Artificial Sequence: Synthetic oligonucleotide
  Sense strand starting at position 3568 of SEQ ID NO: 586192
acuguaaacuuguaugauu

SEQ ID NO: 699089 - RNA, 19 nt, Artificial Sequence
  Description of Artificial Sequence: Synthetic oligonucleotide
  Antisense strand to SEQ ID NO: 699088
aaucauacaaguuuacagu

SEQ ID NO: 699090 - RNA, 19 nt, Artificial Sequence
  Description of Artificial Sequence: Synthetic oligonucleotide
  Sense strand starting at position 3570 of SEQ ID NO: 586192
uguaaacuuguaugauucu

SEQ ID NO: 699091 - RNA, 19 nt, Artificial Sequence
  Description of Artificial Sequence: Synthetic oligonucleotide
  Antisense strand to SEQ ID NO: 699090
agaaucauacaaguuuaca

SEQ ID NO: 699092 - RNA, 19 nt, Artificial Sequence
  Description of Artificial Sequence: Synthetic oligonucleotide
  Sense strand starting at position 3571 of SEQ ID NO: 586192
guaaacuuguaugauucua

SEQ ID NO: 699093 - RNA, 19 nt, Artificial Sequence
  Description of Artificial Sequence: Synthetic oligonucleotide
  Antisense strand to SEQ ID NO: 699092
uagaaucauacaaguuuac

SEQ ID NO: 699094 - RNA, 19 nt, Artificial Sequence
  Description of Artificial Sequence: Synthetic oligonucleotide
  Sense strand starting at position 3576 of SEQ ID NO: 586192
cuuguaugauucuacagca

SEQ ID NO: 699095 - RNA, 19 nt, Artificial Sequence
  Description of Artificial Sequence: Synthetic oligonucleotide
  Antisense strand to SEQ ID NO: 699094
ugcuguagaaucauacaag

SEQ ID NO: 699096 - RNA, 19 nt, Artificial Sequence
  Description of Artificial Sequence: Synthetic oligonucleotide
  Sense strand starting at position 3714 of SEQ ID NO: 586192
ggcuccagauuugaauauu

SEQ ID NO: 699097 - RNA, 19 nt, Artificial Sequence
  Description of Artificial Sequence: Synthetic oligonucleotide
  Antisense strand to SEQ ID NO: 699096
aauauucaaaucuggagcc

SEQ ID NO: 699098 - RNA, 19 nt, Artificial Sequence
  Description of Artificial Sequence: Synthetic oligonucleotide
  Sense strand starting at position 89 of SEQ ID NO: 586193
gaacuaugucccgaaggca

SEQ ID NO: 699099 - RNA, 19 nt, Artificial Sequence
  Description of Artificial Sequence: Synthetic oligonucleotide
  Antisense strand to SEQ ID NO: 699098
ugccuucgggacauaguuc

SEQ ID NO: 699100 - RNA, 19 nt, Artificial Sequence
  Description of Artificial Sequence: Synthetic oligonucleotide
  Sense strand starting at position 169 of SEQ ID NO: 586193
ggugaccaacugugucaaa

SEQ ID NO: 699101 - RNA, 19 nt, Artificial Sequence
  Description of Artificial Sequence: Synthetic oligonucleotide
  Antisense strand to SEQ ID NO: 699100
uuugacacaguuggucacc

SEQ ID NO: 699102 - RNA, 19 nt, Artificial Sequence
  Description of Artificial Sequence: Synthetic oligonucleotide
  Sense strand starting at position 296 of SEQ ID NO: 586193
ccaggaaguugccugcuaa

SEQ ID NO: 699103 - RNA, 19 nt, Artificial Sequence
  Description of Artificial Sequence: Synthetic oligonucleotide
  Antisense strand to SEQ ID NO: 699102
uuagcaggcaacuuccugg

SEQ ID NO: 699104 - RNA, 19 nt, Artificial Sequence
  Description of Artificial Sequence: Synthetic oligonucleotide
  Sense strand starting at position 297 of SEQ ID NO: 586193
caggaaguugccugcuaag

SEQ ID NO: 699105 - RNA, 19 nt, Artificial Sequence
  Description of Artificial Sequence: Synthetic oligonucleotide
  Antisense strand to SEQ ID NO: 699104
cuuagcaggcaacuuccug

SEQ ID NO: 699106 - RNA, 19 nt, Artificial Sequence
  Description of Artificial Sequence: Synthetic oligonucleotide
  Sense strand starting at position 308 of SEQ ID NO: 586193
cugcuaaggcucugaaauc

SEQ ID NO: 699107 - RNA, 19 nt, Artificial Sequence
  Description of Artificial Sequence: Synthetic oligonucleotide
  Antisense strand to SEQ ID NO: 699106
gauuucagagccuuagcag

SEQ ID NO: 699108 - RNA, 19 nt, Artificial Sequence
  Description of Artificial Sequence: Synthetic oligonucleotide
  Sense strand starting at position 309 of SEQ ID NO: 586193
ugcuaaggcucugaaauca

SEQ ID NO: 699109 - RNA, 19 nt, Artificial Sequence
  Description of Artificial Sequence: Synthetic oligonucleotide
  Antisense strand to SEQ ID NO: 699108
ugauuucagagccuuagca

SEQ ID NO: 699110 - RNA, 19 nt, Artificial Sequence
  Description of Artificial Sequence: Synthetic oligonucleotide
  Sense strand starting at position 424 of SEQ ID NO: 586193
ucaacuuccuccuccgaga

SEQ ID NO: 699111 - RNA, 19 nt, Artificial Sequence
  Description of Artificial Sequence: Synthetic oligonucleotide
  Antisense strand to SEQ ID NO: 699110
ucucggaggaggaaguuga

SEQ ID NO: 699112 - RNA, 19 nt, Artificial Sequence
  Description of Artificial Sequence: Synthetic oligonucleotide
  Sense strand starting at position 622 of SEQ ID NO: 586193
gguccaaugcgaggauaug

SEQ ID NO: 699113 - RNA, 19 nt, Artificial Sequence
  Description of Artificial Sequence: Synthetic oligonucleotide
  Antisense strand to SEQ ID NO: 699112
cauauccucgcauuggacc

SEQ ID NO: 699114 - RNA, 19 nt, Artificial Sequence
  Description of Artificial Sequence: Synthetic oligonucleotide
  Sense strand starting at position 623 of SEQ ID NO: 586193
guccaaugcgaggauauga

SEQ ID NO: 699115 - RNA, 19 nt, Artificial Sequence
  Description of Artificial Sequence: Synthetic oligonucleotide
  Antisense strand to SEQ ID NO: 699114
ucauauccucgcauuggac

SEQ ID NO: 699116 - RNA, 19 nt, Artificial Sequence
  Description of Artificial Sequence: Synthetic oligonucleotide
  Sense strand starting at position 712 of SEQ ID NO: 586193
gccaacuuuggauaaagca

SEQ ID NO: 699117 - RNA, 19 nt, Artificial Sequence
  Description of Artificial Sequence: Synthetic oligonucleotide
  Antisense strand to SEQ ID NO: 699116
ugcuuuauccaaaguuggc

SEQ ID NO: 699118 - RNA, 19 nt, Artificial Sequence
  Description of Artificial Sequence: Synthetic oligonucleotide
  Sense strand starting at position 830 of SEQ ID NO: 586193
cgaucaacugcagaguaaa

SEQ ID NO: 699119 - RNA, 19 nt, Artificial Sequence
  Description of Artificial Sequence: Synthetic oligonucleotide
  Antisense strand to SEQ ID NO: 699118
uuuacucugcaguugaucg

SEQ ID NO: 699120 - RNA, 19 nt, Artificial Sequence
  Description of Artificial Sequence: Synthetic oligonucleotide
  Sense strand starting at position 841 of SEQ ID NO: 586193
agaguaaacuugcggaaag

SEQ ID NO: 699121 - RNA, 19 nt, Artificial Sequence
  Description of Artificial Sequence: Synthetic oligonucleotide
  Antisense strand to SEQ ID NO: 699120
cuuuccgcaaguuuacucu

SEQ ID NO: 699122 - RNA, 19 nt, Artificial Sequence
  Description of Artificial Sequence: Synthetic oligonucleotide
  Sense strand starting at position 842 of SEQ ID NO: 586193
gaguaaacuugcggaaagu

SEQ ID NO: 699123 - RNA, 19 nt, Artificial Sequence
  Description of Artificial Sequence: Synthetic oligonucleotide
  Antisense strand to SEQ ID NO: 699122
acuuuccgcaaguuuacuc

SEQ ID NO: 699124 - RNA, 19 nt, Artificial Sequence
  Description of Artificial Sequence: Synthetic oligonucleotide
  Sense strand starting at position 887 of SEQ ID NO: 586193
uugcaagucccagaacaaa

SEQ ID NO: 699125 - RNA, 19 nt, Artificial Sequence
  Description of Artificial Sequence: Synthetic oligonucleotide
  Antisense strand to SEQ ID NO: 699124
uuuguucugggacuugcaa

SEQ ID NO: 699126 - RNA, 19 nt, Artificial Sequence
  Description of Artificial Sequence: Synthetic oligonucleotide
  Sense strand starting at position 916 of SEQ ID NO: 586193
ccacgagucccguuguuac

SEQ ID NO: 699127 - RNA, 19 nt, Artificial Sequence
  Description of Artificial Sequence: Synthetic oligonucleotide
  Antisense strand to SEQ ID NO: 699126
guaacaacgggacucgugg

SEQ ID NO: 699128 - RNA, 19 nt, Artificial Sequence
  Description of Artificial Sequence: Synthetic oligonucleotide
  Sense strand starting at position 1091 of SEQ ID NO: 586193
ggcucuggucaagauccaa

SEQ ID NO: 699129 - RNA, 19 nt, Artificial Sequence
  Description of Artificial Sequence: Synthetic oligonucleotide
  Antisense strand to SEQ ID NO: 699128
uuggaucuugaccagagcc

SEQ ID NO: 699130 - RNA, 19 nt, Artificial Sequence
  Description of Artificial Sequence: Synthetic oligonucleotide
  Sense strand starting at position 1454 of SEQ ID NO: 586193
gggccugauucggcgcuaa

SEQ ID NO: 699131 - RNA, 19 nt, Artificial Sequence
  Description of Artificial Sequence: Synthetic oligonucleotide
  Antisense strand to SEQ ID NO: 699130
uuagcgccgaaucaggccc

SEQ ID NO: 699132 - RNA, 19 nt, Artificial Sequence
  Description of Artificial Sequence: Synthetic oligonucleotide
  Sense strand starting at position 1456 of SEQ ID NO: 586193
gccugauucggcgcuaauc

SEQ ID NO: 699133 - RNA, 19 nt, Artificial Sequence
  Description of Artificial Sequence: Synthetic oligonucleotide
  Antisense strand to SEQ ID NO: 699132
gauuagcgccgaaucaggc

SEQ ID NO: 699134 - RNA, 19 nt, Artificial Sequence
  Description of Artificial Sequence: Synthetic oligonucleotide
  Sense strand starting at position 1457 of SEQ ID NO: 586193
ccugauucggcgcuaaucu

SEQ ID NO: 699135 - RNA, 19 nt, Artificial Sequence
  Description of Artificial Sequence: Synthetic oligonucleotide
  Antisense strand to SEQ ID NO: 699134
agauuagcgccgaaucagg

SEQ ID NO: 699136 - RNA, 19 nt, Artificial Sequence
  Description of Artificial Sequence: Synthetic oligonucleotide
  Sense strand starting at position 2531 of SEQ ID NO: 586193
uuuggacaauuaggugauu

SEQ ID NO: 699137 - RNA, 19 nt, Artificial Sequence
  Description of Artificial Sequence: Synthetic oligonucleotide
  Antisense strand to SEQ ID NO: 699136
aaucaccuaauuguccaaa

SEQ ID NO: 699138 - RNA, 19 nt, Artificial Sequence
  Description of Artificial Sequence: Synthetic oligonucleotide
  Sense strand starting at position 2559 of SEQ ID NO: 586193
aguagccagugcuuacaaa

SEQ ID NO: 699139 - RNA, 19 nt, Artificial Sequence
  Description of Artificial Sequence: Synthetic oligonucleotide
  Antisense strand to SEQ ID NO: 699138
uuuguaagcacuggcuacu

SEQ ID NO: 699140 - RNA, 19 nt, Artificial Sequence
  Description of Artificial Sequence: Synthetic oligonucleotide
  Sense strand starting at position 2560 of SEQ ID NO: 586193
guagccagugcuuacaaau

SEQ ID NO: 699141 - RNA, 19 nt, Artificial Sequence
  Description of Artificial Sequence: Synthetic oligonucleotide
  Antisense strand to SEQ ID NO: 699140
auuuguaagcacuggcuac

SEQ ID NO: 699142 - RNA, 19 nt, Artificial Sequence
  Description of Artificial Sequence: Synthetic oligonucleotide
  Sense strand starting at position 2750 of SEQ ID NO: 586193
guaucuaaaccuggguguu

SEQ ID NO: 699143 - RNA, 19 nt, Artificial Sequence
  Description of Artificial Sequence: Synthetic oligonucleotide
  Antisense strand to SEQ ID NO: 699142
aacacccagguuuagauac

SEQ ID NO: 699144 - RNA, 19 nt, Artificial Sequence
  Description of Artificial Sequence: Synthetic oligonucleotide
  Sense strand starting at position 2751 of SEQ ID NO: 586193
uaucuaaaccuggguguuu

SEQ ID NO: 699145 - RNA, 19 nt, Artificial Sequence
  Description of Artificial Sequence: Synthetic oligonucleotide
  Antisense strand to SEQ ID NO: 699144
aaacacccagguuuagaua

SEQ ID NO: 699146 - RNA, 19 nt, Artificial Sequence
  Description of Artificial Sequence: Synthetic oligonucleotide
  Sense strand starting at position 2792 of SEQ ID NO: 586193
ggcgcccucguugaaacau

SEQ ID NO: 699147 - RNA, 19 nt, Artificial Sequence
  Description of Artificial Sequence: Synthetic oligonucleotide
  Antisense strand to SEQ ID NO: 699146
auguuucaacgagggcgcc

SEQ ID NO: 699148 - RNA, 19 nt, Artificial Sequence
  Description of Artificial Sequence: Synthetic oligonucleotide
  Sense strand starting at position 2873 of SEQ ID NO: 586193
aggauugcuugcguccuua

SEQ ID NO: 699149 - RNA, 19 nt, Artificial Sequence
  Description of Artificial Sequence: Synthetic oligonucleotide
  Antisense strand to SEQ ID NO: 699148
uaaggacgcaagcaauccu

SEQ ID NO: 699150 - RNA, 19 nt, Artificial Sequence
  Description of Artificial Sequence: Synthetic oligonucleotide
  Sense strand starting at position 2916 of SEQ ID NO: 586193
accuguauccguuacugua

SEQ ID NO: 699151 - RNA, 19 nt, Artificial Sequence
  Description of Artificial Sequence: Synthetic oligonucleotide
  Antisense strand to SEQ ID NO: 699150
uacaguaacggauacaggu

SEQ ID NO: 699152 - RNA, 19 nt, Artificial Sequence
  Description of Artificial Sequence: Synthetic oligonucleotide
  Sense strand starting at position 2918 of SEQ ID NO: 586193
cuguauccguuacuguauu

SEQ ID NO: 699153 - RNA, 19 nt, Artificial Sequence
  Description of Artificial Sequence: Synthetic oligonucleotide
  Antisense strand to SEQ ID NO: 699152
aauacaguaacggauacag

SEQ ID NO: 699154 - RNA, 19 nt, Artificial Sequence
  Description of Artificial Sequence: Synthetic oligonucleotide
  Sense strand starting at position 2929 of SEQ ID NO: 586193
acuguauucugucuccagu

SEQ ID NO: 699155 - RNA, 19 nt, Artificial Sequence
  Description of Artificial Sequence: Synthetic oligonucleotide
  Antisense strand to SEQ ID NO: 699154
acuggagacagaauacagu

SEQ ID NO: 699156 - RNA, 19 nt, Artificial Sequence
  Description of Artificial Sequence: Synthetic oligonucleotide
  Sense strand starting at position 2964 of SEQ ID NO: 586193
ugauaucaccugcacugua

SEQ ID NO: 699157 - RNA, 19 nt, Artificial Sequence
  Description of Artificial Sequence: Synthetic oligonucleotide
  Antisense strand to SEQ ID NO: 699156
uacagugcaggugauauca

SEQ ID NO: 699158 - RNA, 19 nt, Artificial Sequence
  Description of Artificial Sequence: Synthetic oligonucleotide
  Sense strand starting at position 3089 of SEQ ID NO: 586193
aguagagugacacagucau

SEQ ID NO: 699159 - RNA, 19 nt, Artificial Sequence
  Description of Artificial Sequence: Synthetic oligonucleotide
  Antisense strand to SEQ ID NO: 699158
augacugugucacucuacu

SEQ ID NO: 699160 - RNA, 19 nt, Artificial Sequence
  Description of Artificial Sequence: Synthetic oligonucleotide
  Sense strand starting at position 3096 of SEQ ID NO: 586193
ugacacagucauugcucaa

SEQ ID NO: 699161 - RNA, 19 nt, Artificial Sequence
  Description of Artificial Sequence: Synthetic oligonucleotide
  Antisense strand to SEQ ID NO: 699160
uugagcaaugacuguguca

SEQ ID NO: 699162 - RNA, 19 nt, Artificial Sequence
  Description of Artificial Sequence: Synthetic oligonucleotide
  Sense strand starting at position 3100 of SEQ ID NO: 586193
acagucauugcucaaugca

SEQ ID NO: 699163 - RNA, 19 nt, Artificial Sequence
  Description of Artificial Sequence: Synthetic oligonucleotide
  Antisense strand to SEQ ID NO: 699162
ugcauugagcaaugacugu

SEQ ID NO: 699164 - RNA, 19 nt, Artificial Sequence
  Description of Artificial Sequence: Synthetic oligonucleotide
  Sense strand starting at position 3762 of SEQ ID NO: 586193
gcccauucccaucgaucuu

SEQ ID NO: 699165 - RNA, 19 nt, Artificial Sequence
  Description of Artificial Sequence: Synthetic oligonucleotide
  Antisense strand to SEQ ID NO: 699164
aagaucgaugggaaugggc

SEQ ID NO: 699166 - RNA, 19 nt, Artificial Sequence
  Description of Artificial Sequence: Synthetic oligonucleotide
  Sense strand starting at position 3786 of SEQ ID NO: 586193
ugcuguccuagucaucgua

SEQ ID NO: 699167 - RNA, 19 nt, Artificial Sequence
  Description of Artificial Sequence: Synthetic oligonucleotide
  Antisense strand to SEQ ID NO: 699166
uacgaugacuaggacagca

SEQ ID NO: 699168 - RNA, 19 nt, Artificial Sequence
  Description of Artificial Sequence: Synthetic oligonucleotide
  Sense strand starting at position 69 of SEQ ID NO: 586194
gcuacuuacccgcugugau

SEQ ID NO: 699169 - RNA, 19 nt, Artificial Sequence
  Description of Artificial Sequence: Synthetic oligonucleotide
  Antisense strand to SEQ ID NO: 699168
aucacagcggguaaguagc

SEQ ID NO: 699170 - RNA, 19 nt, Artificial Sequence
  Description of Artificial Sequence: Synthetic oligonucleotide
  Sense strand starting at position 79 of SEQ ID NO: 586194
cgcugugaucuucagaaag

SEQ ID NO: 699171 - RNA, 19 nt, Artificial Sequence
  Description of Artificial Sequence: Synthetic oligonucleotide
  Antisense strand to SEQ ID NO: 699170
cuuucugaagaucacagcg

SEQ ID NO: 699172 - RNA, 19 nt, Artificial Sequence
  Description of Artificial Sequence: Synthetic oligonucleotide
  Sense strand starting at position 90 of SEQ ID NO: 586194
ucagaaagguacuuaaccu

SEQ ID NO: 699173 - RNA, 19 nt, Artificial Sequence
  Description of Artificial Sequence: Synthetic oligonucleotide
  Antisense strand to SEQ ID NO: 699172
agguuaaguaccuuucuga

SEQ ID NO: 699174 - RNA, 19 nt, Artificial Sequence
  Description of Artificial Sequence: Synthetic oligonucleotide
  Sense strand starting at position 156 of SEQ ID NO: 586194
accuuauguggucauugca

SEQ ID NO: 699175 - RNA, 19 nt, Artificial Sequence
  Description of Artificial Sequence: Synthetic oligonucleotide
  Antisense strand to SEQ ID NO: 699174
ugcaaugaccacauaaggu

SEQ ID NO: 699176 - RNA, 19 nt, Artificial Sequence
  Description of Artificial Sequence: Synthetic oligonucleotide
  Sense strand starting at position 159 of SEQ ID NO: 586194
uuauguggucauugcaaag

SEQ ID NO: 699177 - RNA, 19 nt, Artificial Sequence
  Description of Artificial Sequence: Synthetic oligonucleotide
  Antisense strand to SEQ ID NO: 699176
cuuugcaaugaccacauaa

SEQ ID NO: 699178 - RNA, 19 nt, Artificial Sequence
  Description of Artificial Sequence: Synthetic oligonucleotide
  Sense strand starting at position 194 of SEQ ID NO: 586194
aucuaucaugccuggugua

SEQ ID NO: 699179 - RNA, 19 nt, Artificial Sequence
  Description of Artificial Sequence: Synthetic oligonucleotide
  Antisense strand to SEQ ID NO: 699178
uacaccaggcaugauagau

SEQ ID NO: 699180 - RNA, 19 nt, Artificial Sequence
  Description of Artificial Sequence: Synthetic oligonucleotide
  Sense strand starting at position 209 of SEQ ID NO: 586194
uguauaaugugugccuaag

SEQ ID NO: 699181 - RNA, 19 nt, Artificial Sequence
  Description of Artificial Sequence: Synthetic oligonucleotide
  Antisense strand to SEQ ID NO: 699180
cuuaggcacacauuauaca

SEQ ID NO: 699182 - RNA, 19 nt, Artificial Sequence
  Description of Artificial Sequence: Synthetic oligonucleotide
  Sense strand starting at position 211 of SEQ ID NO: 586194
uauaaugugugccuaagag

SEQ ID NO: 699183 - RNA, 19 nt, Artificial Sequence
  Description of Artificial Sequence: Synthetic oligonucleotide
  Antisense strand to SEQ ID NO: 699182
cucuuaggcacacauuaua

SEQ ID NO: 699184 - RNA, 19 nt, Artificial Sequence
  Description of Artificial Sequence: Synthetic oligonucleotide
  Sense strand starting at position 235 of SEQ ID NO: 586194
ugcuguugucauuagcuaa

SEQ ID NO: 699185 - RNA, 19 nt, Artificial Sequence
  Description of Artificial Sequence: Synthetic oligonucleotide
  Antisense strand to SEQ ID NO: 699184
uuagcuaaugacaacagca

SEQ ID NO: 699186 - RNA, 19 nt, Artificial Sequence
  Description of Artificial Sequence: Synthetic oligonucleotide
  Sense strand starting at position 238 of SEQ ID NO: 586194
uguugucauuagcuaacuu

SEQ ID NO: 699187 - RNA, 19 nt, Artificial Sequence
  Description of Artificial Sequence: Synthetic oligonucleotide
  Antisense strand to SEQ ID NO: 699186
aaguuagcuaaugacaaca

SEQ ID NO: 699188 - RNA, 19 nt, Artificial Sequence
  Description of Artificial Sequence: Synthetic oligonucleotide
  Sense strand starting at position 531 of SEQ ID NO: 586194
agaccagucugagcaauga

SEQ ID NO: 699189 - RNA, 19 nt, Artificial Sequence
  Description of Artificial Sequence: Synthetic oligonucleotide
  Antisense strand to SEQ ID NO: 699188
ucauugcucagacuggucu

SEQ ID NO: 699190 - RNA, 19 nt, Artificial Sequence
  Description of Artificial Sequence: Synthetic oligonucleotide
  Sense strand starting at position 1286 of SEQ ID NO: 586194
gggucacacagcugagaau

SEQ ID NO: 699191 - RNA, 19 nt, Artificial Sequence
  Description of Artificial Sequence: Synthetic oligonucleotide
  Antisense strand to SEQ ID NO: 699190
auucucagcugugugaccc

SEQ ID NO: 699192 - RNA, 19 nt, Artificial Sequence
  Description of Artificial Sequence: Synthetic oligonucleotide
  Sense strand starting at position 1287 of SEQ ID NO: 586194
ggucacacagcugagaauu

SEQ ID NO: 699193 - RNA, 19 nt, Artificial Sequence
  Description of Artificial Sequence: Synthetic oligonucleotide
  Antisense strand to SEQ ID NO: 699192
aauucucagcugugugacc

SEQ ID NO: 699194 - RNA, 19 nt, Artificial Sequence
  Description of Artificial Sequence: Synthetic oligonucleotide
  Sense strand starting at position 1335 of SEQ ID NO: 586194
cucccaaaucaguggucuu

SEQ ID NO: 699195 - RNA, 19 nt, Artificial Sequence
  Description of Artificial Sequence: Synthetic oligonucleotide
  Antisense strand to SEQ ID NO: 699194
aagaccacugauuugggag

SEQ ID NO: 699196 - RNA, 19 nt, Artificial Sequence
  Description of Artificial Sequence: Synthetic oligonucleotide
  Sense strand starting at position 1427 of SEQ ID NO: 586194
acaagagaaugaucgcuuu

SEQ ID NO: 699197 - RNA, 19 nt, Artificial Sequence
  Description of Artificial Sequence: Synthetic oligonucleotide
  Antisense strand to SEQ ID NO: 699196
aaagcgaucauucucuugu

SEQ ID NO: 699198 - RNA, 19 nt, Artificial Sequence
  Description of Artificial Sequence: Synthetic oligonucleotide
  Sense strand starting at position 1497 of SEQ ID NO: 586194
aggccucucggaggugaaa

SEQ ID NO: 699199 - RNA, 19 nt, Artificial Sequence
  Description of Artificial Sequence: Synthetic oligonucleotide
  Antisense strand to SEQ ID NO: 699198
uuucaccuccgagaggccu

SEQ ID NO: 699200 - RNA, 19 nt, Artificial Sequence
  Description of Artificial Sequence: Synthetic oligonucleotide
  Sense strand starting at position 1575 of SEQ ID NO: 586194
gaaagaugugccgggaggu

SEQ ID NO: 699201 - RNA, 19 nt, Artificial Sequence
  Description of Artificial Sequence: Synthetic oligonucleotide
  Antisense strand to SEQ ID NO: 699200
accucccggcacaucuuuc

SEQ ID NO: 699202 - RNA, 19 nt, Artificial Sequence
  Description of Artificial Sequence: Synthetic oligonucleotide
  Sense strand starting at position 1641 of SEQ ID NO: 586194
gaagauagugcaggauugu

SEQ ID NO: 699203 - RNA, 19 nt, Artificial Sequence
  Description of Artificial Sequence: Synthetic oligonucleotide
  Antisense strand to SEQ ID NO: 699202
acaauccugcacuaucuuc

SEQ ID NO: 699204 - RNA, 19 nt, Artificial Sequence
  Description of Artificial Sequence: Synthetic oligonucleotide
  Sense strand starting at position 1642 of SEQ ID NO: 586194
aagauagugcaggauugua

SEQ ID NO: 699205 - RNA, 19 nt, Artificial Sequence
  Description of Artificial Sequence: Synthetic oligonucleotide
  Antisense strand to SEQ ID NO: 699204
uacaauccugcacuaucuu

SEQ ID NO: 699206 - RNA, 19 nt, Artificial Sequence
  Description of Artificial Sequence: Synthetic oligonucleotide
  Sense strand starting at position 2078 of SEQ ID NO: 586194
cggagauugcgucaucuua

SEQ ID NO: 699207 - RNA, 19 nt, Artificial Sequence
  Description of Artificial Sequence: Synthetic oligonucleotide
  Antisense strand to SEQ ID NO: 699206
uaagaugacgcaaucuccg

SEQ ID NO: 699208 - RNA, 19 nt, Artificial Sequence
  Description of Artificial Sequence: Synthetic oligonucleotide
  Sense strand starting at position 2080 of SEQ ID NO: 586194
gagauugcgucaucuuagg

SEQ ID NO: 699209 - RNA, 19 nt, Artificial Sequence
  Description of Artificial Sequence: Synthetic oligonucleotide
  Antisense strand to SEQ ID NO: 699208
ccuaagaugacgcaaucuc

SEQ ID NO: 699210 - RNA, 19 nt, Artificial Sequence
  Description of Artificial Sequence: Synthetic oligonucleotide
  Sense strand starting at position 2105 of SEQ ID NO: 586194
cagcaaugccuguauagaa

SEQ ID NO: 699211 - RNA, 19 nt, Artificial Sequence
  Description of Artificial Sequence: Synthetic oligonucleotide
  Antisense strand to SEQ ID NO: 699210
uucuauacaggcauugcug

SEQ ID NO: 699212 - RNA, 19 nt, Artificial Sequence
  Description of Artificial Sequence: Synthetic oligonucleotide
  Sense strand starting at position 2984 of SEQ ID NO: 586194
gggaauaacgauuguaccu

SEQ ID NO: 699213 - RNA, 19 nt, Artificial Sequence
  Description of Artificial Sequence: Synthetic oligonucleotide
  Antisense strand to SEQ ID NO: 699212
agguacaaucguuauuccc

SEQ ID NO: 699214 - RNA, 19 nt, Artificial Sequence
  Description of Artificial Sequence: Synthetic oligonucleotide
  Sense strand starting at position 3033 of SEQ ID NO: 586194
agguaauccacguggagug

SEQ ID NO: 699215 - RNA, 19 nt, Artificial Sequence
  Description of Artificial Sequence: Synthetic oligonucleotide
  Antisense strand to SEQ ID NO: 699214
cacuccacguggauuaccu

SEQ ID NO: 699216 - RNA, 19 nt, Artificial Sequence
  Description of Artificial Sequence: Synthetic oligonucleotide
  Sense strand starting at position 3248 of SEQ ID NO: 586194
cuaugucacgucuaauucu

SEQ ID NO: 699217 - RNA, 19 nt, Artificial Sequence
  Description of Artificial Sequence: Synthetic oligonucleotide
  Antisense strand to SEQ ID NO: 699216
agaauuagacgugacauag

SEQ ID NO: 699218 - RNA, 19 nt, Artificial Sequence
  Description of Artificial Sequence: Synthetic oligonucleotide
  Sense strand starting at position 3259 of SEQ ID NO: 586194
cuaauucuguggcccugaa

SEQ ID NO: 699219 - RNA, 19 nt, Artificial Sequence
  Description of Artificial Sequence: Synthetic oligonucleotide
  Antisense strand to SEQ ID NO: 699218
uucagggccacagaauuag

SEQ ID NO: 699220 - RNA, 19 nt, Artificial Sequence
  Description of Artificial Sequence: Synthetic oligonucleotide
  Sense strand starting at position 3314 of SEQ ID NO: 586194
auccuuagcuuguugaauu

SEQ ID NO: 699221 - RNA, 19 nt, Artificial Sequence
  Description of Artificial Sequence: Synthetic oligonucleotide
  Antisense strand to SEQ ID NO: 699220
aauucaacaagcuaaggau

SEQ ID NO: 699222 - RNA, 19 nt, Artificial Sequence
  Description of Artificial Sequence: Synthetic oligonucleotide
  Sense strand starting at position 3418 of SEQ ID NO: 586194
uguguuauauugguuaaug

SEQ ID NO: 699223 - RNA, 19 nt, Artificial Sequence
  Description of Artificial Sequence: Synthetic oligonucleotide
  Antisense strand to SEQ ID NO: 699222
cauuaaccaauauaacaca

SEQ ID NO: 699224 - RNA, 19 nt, Artificial Sequence
  Description of Artificial Sequence: Synthetic oligonucleotide
  Sense strand starting at position 3420 of SEQ ID NO: 586194
uguuauauugguuaaugca

SEQ ID NO: 699225 - RNA, 19 nt, Artificial Sequence
  Description of Artificial Sequence: Synthetic oligonucleotide
  Antisense strand to SEQ ID NO: 699224
ugcauuaaccaauauaaca

SEQ ID NO: 699226 - RNA, 19 nt, Artificial Sequence
  Description of Artificial Sequence: Synthetic oligonucleotide
  Sense strand starting at position 3447 of SEQ ID NO: 586194
acagaaacaucugccugua

SEQ ID NO: 699227 - RNA, 19 nt, Artificial Sequence
  Description of Artificial Sequence: Synthetic oligonucleotide
  Antisense strand to SEQ ID NO: 699226
uacaggcagauguuucugu

SEQ ID NO: 699228 - RNA, 19 nt, Artificial Sequence
  Description of Artificial Sequence: Synthetic oligonucleotide
  Sense strand starting at position 3485 of SEQ ID NO: 586194
gcuuccugacuccagagau

SEQ ID NO: 699229 - RNA, 19 nt, Artificial Sequence
  Description of Artificial Sequence: Synthetic oligonucleotide
  Antisense strand to SEQ ID NO: 699228
aucucuggagucaggaagc

SEQ ID NO: 699230 - RNA, 19 nt, Artificial Sequence
  Description of Artificial Sequence: Synthetic oligonucleotide
  Sense strand starting at position 3495 of SEQ ID NO: 586194
uccagagauaauugggcau

SEQ ID NO: 699231 - RNA, 19 nt, Artificial Sequence
  Description of Artificial Sequence: Synthetic oligonucleotide
  Antisense strand to SEQ ID NO: 699230
augcccaauuaucucugga

SEQ ID NO: 699232 - RNA, 19 nt, Artificial Sequence
  Description of Artificial Sequence: Synthetic oligonucleotide
  Sense strand starting at position 3517 of SEQ ID NO: 586194
agagcuaaauguguuuaaa

SEQ ID NO: 699233 - RNA, 19 nt, Artificial Sequence
  Description of Artificial Sequence: Synthetic oligonucleotide
  Antisense strand to SEQ ID NO: 699232
uuuaaacacauuuagcucu

SEQ ID NO: 699234 - RNA, 19 nt, Artificial Sequence
  Description of Artificial Sequence: Synthetic oligonucleotide
  Sense strand starting at position 3520 of SEQ ID NO: 586194
gcuaaauguguuuaaaccu

SEQ ID NO: 699235 - RNA, 19 nt, Artificial Sequence
  Description of Artificial Sequence: Synthetic oligonucleotide
  Antisense strand to SEQ ID NO: 699234
agguuuaaacacauuuagc

SEQ ID NO: 699236 - RNA, 19 nt, Artificial Sequence
  Description of Artificial Sequence: Synthetic oligonucleotide
  Sense strand starting at position 3552 of SEQ ID NO: 586194
uuuauucuguggcuggaaa

SEQ ID NO: 699237 - RNA, 19 nt, Artificial Sequence
  Description of Artificial Sequence: Synthetic oligonucleotide
  Antisense strand to SEQ ID NO: 699236
uuuccagccacagaauaaa

SEQ ID NO: 699238 - RNA, 19 nt, Artificial Sequence
  Description of Artificial Sequence: Synthetic oligonucleotide
  Sense strand starting at position 3715 of SEQ ID NO: 586194
gcuaaauggucuuugggcu

SEQ ID NO: 699239 - RNA, 19 nt, Artificial Sequence
  Description of Artificial Sequence: Synthetic oligonucleotide
  Antisense strand to SEQ ID NO: 699238
agcccaaagaccauuuagc

SEQ ID NO: 699240 - RNA, 19 nt, Artificial Sequence
  Description of Artificial Sequence: Synthetic oligonucleotide
  Sense strand starting at position 3722 of SEQ ID NO: 586194
ggucuuugggcuugugaaa

SEQ ID NO: 699241 - RNA, 19 nt, Artificial Sequence
  Description of Artificial Sequence: Synthetic oligonucleotide
  Antisense strand to SEQ ID NO: 699240
uuucacaagcccaaagacc

SEQ ID NO: 699242 - RNA, 19 nt, Artificial Sequence
  Description of Artificial Sequence: Synthetic oligonucleotide
  Sense strand starting at position 3841 of SEQ ID NO: 586194
gaccaacgcuuguuuccau

SEQ ID NO: 699243 - RNA, 19 nt, Artificial Sequence
  Description of Artificial Sequence: Synthetic oligonucleotide
  Antisense strand to SEQ ID NO: 699242
auggaaacaagcguugguc

SEQ ID NO: 699244 - RNA, 19 nt, Artificial Sequence
  Description of Artificial Sequence: Synthetic oligonucleotide
  Sense strand starting at position 3848 of SEQ ID NO: 586194
gcuuguuuccauuauguua

SEQ ID NO: 699245 - RNA, 19 nt, Artificial Sequence
  Description of Artificial Sequence: Synthetic oligonucleotide
  Antisense strand to SEQ ID NO: 699244
uaacauaauggaaacaagc

SEQ ID NO: 699246 - RNA, 19 nt, Artificial Sequence
  Description of Artificial Sequence: Synthetic oligonucleotide
  Sense strand starting at position 3856 of SEQ ID NO: 586194
ccauuauguuaagugcaaa

SEQ ID NO: 699247 - RNA, 19 nt, Artificial Sequence
  Description of Artificial Sequence: Synthetic oligonucleotide
  Antisense strand to SEQ ID NO: 699246
uuugcacuuaacauaaugg

SEQ ID NO: 699248 - RNA, 19 nt, Artificial Sequence
  Description of Artificial Sequence: Synthetic oligonucleotide
  Sense strand starting at position 20 of SEQ ID NO: 586195
uuaugaaucuguuucuaga

SEQ ID NO: 699249 - RNA, 19 nt, Artificial Sequence
  Description of Artificial Sequence: Synthetic oligonucleotide
  Antisense strand to SEQ ID NO: 699248
ucuagaaacagauucauaa

SEQ ID NO: 699250 - RNA, 19 nt, Artificial Sequence
  Description of Artificial Sequence: Synthetic oligonucleotide
  Sense strand starting at position 22 of SEQ ID NO: 586195
augaaucuguuucuagaaa

SEQ ID NO: 699251 - RNA, 19 nt, Artificial Sequence
  Description of Artificial Sequence: Synthetic oligonucleotide
  Antisense strand to SEQ ID NO: 699250
uuucuagaaacagauucau

SEQ ID NO: 699252 - RNA, 19 nt, Artificial Sequence
  Description of Artificial Sequence: Synthetic oligonucleotide
  Sense strand starting at position 67 of SEQ ID NO: 586195
uuucuagguagauguuaga

SEQ ID NO: 699253 - RNA, 19 nt, Artificial Sequence
  Description of Artificial Sequence: Synthetic oligonucleotide
  Antisense strand to SEQ ID NO: 699252
ucuaacaucuaccuagaaa

SEQ ID NO: 699254 - RNA, 19 nt, Artificial Sequence
  Description of Artificial Sequence: Synthetic oligonucleotide
  Sense strand starting at position 186 of SEQ ID NO: 586195
gcugcuauccucgaggaac

SEQ ID NO: 699255 - RNA, 19 nt, Artificial Sequence
  Description of Artificial Sequence: Synthetic oligonucleotide
  Antisense strand to SEQ ID NO: 699254
guuccucgaggauagcagc

SEQ ID NO: 699256 - RNA, 19 nt, Artificial Sequence
  Description of Artificial Sequence: Synthetic oligonucleotide
  Sense strand starting at position 294 of SEQ ID NO: 586195
cccaauuauguguaugcau

SEQ ID NO: 699257 - RNA, 19 nt, Artificial Sequence
  Description of Artificial Sequence: Synthetic oligonucleotide
  Antisense strand to SEQ ID NO: 699256
augcauacacauaauuggg

SEQ ID NO: 699258 - RNA, 19 nt, Artificial Sequence
  Description of Artificial Sequence: Synthetic oligonucleotide
  Sense strand starting at position 332 of SEQ ID NO: 586195
ucacauguuccaggagguu

SEQ ID NO: 699259 - RNA, 19 nt, Artificial Sequence
  Description of Artificial Sequence: Synthetic oligonucleotide
  Antisense strand to SEQ ID NO: 699258
aaccuccuggaacauguga

SEQ ID NO: 699260 - RNA, 19 nt, Artificial Sequence
  Description of Artificial Sequence: Synthetic oligonucleotide
  Sense strand starting at position 378 of SEQ ID NO: 586195
ggguuucuuccgcaugaua

SEQ ID NO: 699261 - RNA, 19 nt, Artificial Sequence
  Description of Artificial Sequence: Synthetic oligonucleotide
  Antisense strand to SEQ ID NO: 699260
uaucaugcggaagaaaccc

SEQ ID NO: 699262 - RNA, 19 nt, Artificial Sequence
  Description of Artificial Sequence: Synthetic oligonucleotide
  Sense strand starting at position 381 of SEQ ID NO: 586195
uuucuuccgcaugauacua

SEQ ID NO: 699263 - RNA, 19 nt, Artificial Sequence
  Description of Artificial Sequence: Synthetic oligonucleotide
  Antisense strand to SEQ ID NO: 699262
uaguaucaugcggaagaaa

SEQ ID NO: 699264 - RNA, 19 nt, Artificial Sequence
  Description of Artificial Sequence: Synthetic oligonucleotide
  Sense strand starting at position 389 of SEQ ID NO: 586195
gcaugauacuauguuauaa

SEQ ID NO: 699265 - RNA, 19 nt, Artificial Sequence
  Description of Artificial Sequence: Synthetic oligonucleotide
  Antisense strand to SEQ ID NO: 699264
uuauaacauaguaucaugc

SEQ ID NO: 699266 - RNA, 19 nt, Artificial Sequence
  Description of Artificial Sequence: Synthetic oligonucleotide
  Sense strand starting at position 464 of SEQ ID NO: 586195
uuacuacuugcuugaacag

SEQ ID NO: 699267 - RNA, 19 nt, Artificial Sequence
  Description of Artificial Sequence: Synthetic oligonucleotide
  Antisense strand to SEQ ID NO: 699266
cuguucaagcaaguaguaa

SEQ ID NO: 699268 - RNA, 19 nt, Artificial Sequence
  Description of Artificial Sequence: Synthetic oligonucleotide
  Sense strand starting at position 520 of SEQ ID NO: 586195
uuuguuauacacugagaug

SEQ ID NO: 699269 - RNA, 19 nt, Artificial Sequence
  Description of Artificial Sequence: Synthetic oligonucleotide
  Antisense strand to SEQ ID NO: 699268
caucucaguguauaacaaa

SEQ ID NO: 699270 - RNA, 19 nt, Artificial Sequence
  Description of Artificial Sequence: Synthetic oligonucleotide
  Sense strand starting at position 645 of SEQ ID NO: 586195
uugcuaaaggcaggaaaua

SEQ ID NO: 699271 - RNA, 19 nt, Artificial Sequence
  Description of Artificial Sequence: Synthetic oligonucleotide
  Antisense strand to SEQ ID NO: 699270
uauuuccugccuuuagcaa

SEQ ID NO: 699272 - RNA, 19 nt, Artificial Sequence
  Description of Artificial Sequence: Synthetic oligonucleotide
  Sense strand starting at position 688 of SEQ ID NO: 586195
ucagauguuagugaaagcu

SEQ ID NO: 699273 - RNA, 19 nt, Artificial Sequence
  Description of Artificial Sequence: Synthetic oligonucleotide
  Antisense strand to SEQ ID NO: 699272
agcuuucacuaacaucuga

SEQ ID NO: 699274 - RNA, 19 nt, Artificial Sequence
  Description of Artificial Sequence: Synthetic oligonucleotide
  Sense strand starting at position 879 of SEQ ID NO: 586195
caauacuacucuguaggga

SEQ ID NO: 699275 - RNA, 19 nt, Artificial Sequence
  Description of Artificial Sequence: Synthetic oligonucleotide
  Antisense strand to SEQ ID NO: 699274
ucccuacagaguaguauug

SEQ ID NO: 699276 - RNA, 19 nt, Artificial Sequence
  Description of Artificial Sequence: Synthetic oligonucleotide
  Sense strand starting at position 1088 of SEQ ID NO: 586195
guuggauuaagaggcuaau

SEQ ID NO: 699277 - RNA, 19 nt, Artificial Sequence
  Description of Artificial Sequence: Synthetic oligonucleotide
  Antisense strand to SEQ ID NO: 699276
auuagccucuuaauccaac

SEQ ID NO: 699278 - RNA, 19 nt, Artificial Sequence
  Description of Artificial Sequence: Synthetic oligonucleotide
  Sense strand starting at position 1293 of SEQ ID NO: 586195
aguguaaauuguuuccaaa

SEQ ID NO: 699279 - RNA, 19 nt, Artificial Sequence
  Description of Artificial Sequence: Synthetic oligonucleotide
  Antisense strand to SEQ ID NO: 699278
uuuggaaacaauuuacacu

SEQ ID NO: 699280 - RNA, 19 nt, Artificial Sequence
  Description of Artificial Sequence: Synthetic oligonucleotide
  Sense strand starting at position 1295 of SEQ ID NO: 586195
uguaaauuguuuccaaaca

SEQ ID NO: 699281 - RNA, 19 nt, Artificial Sequence
  Description of Artificial Sequence: Synthetic oligonucleotide
  Antisense strand to SEQ ID NO: 699280
uguuuggaaacaauuuaca

SEQ ID NO: 699282 - RNA, 19 nt, Artificial Sequence
  Description of Artificial Sequence: Synthetic oligonucleotide
  Sense strand starting at position 2128 of SEQ ID NO: 586195
aacugccagcuguagaauu

SEQ ID NO: 699283 - RNA, 19 nt, Artificial Sequence
  Description of Artificial Sequence: Synthetic oligonucleotide
  Antisense strand to SEQ ID NO: 699282
aauucuacagcuggcaguu

SEQ ID NO: 699284 - RNA, 19 nt, Artificial Sequence
  Description of Artificial Sequence: Synthetic oligonucleotide
  Sense strand starting at position 2153 of SEQ ID NO: 586195
auuacauguggcgaaauau

SEQ ID NO: 699285 - RNA, 19 nt, Artificial Sequence
  Description of Artificial Sequence: Synthetic oligonucleotide
  Antisense strand to SEQ ID NO: 699284
auauuucgccacauguaau

SEQ ID NO: 699286 - RNA, 19 nt, Artificial Sequence
  Description of Artificial Sequence: Synthetic oligonucleotide
  Sense strand starting at position 2478 of SEQ ID NO: 586195
gcggcuggcguucccaaua

SEQ ID NO: 699287 - RNA, 19 nt, Artificial Sequence
  Description of Artificial Sequence: Synthetic oligonucleotide
  Antisense strand to SEQ ID NO: 699286
uauugggaacgccagccgc

SEQ ID NO: 699288 - RNA, 19 nt, Artificial Sequence
  Description of Artificial Sequence: Synthetic oligonucleotide
  Sense strand starting at position 2609 of SEQ ID NO: 586195
acuggaagucaucgggaaa

SEQ ID NO: 699289 - RNA, 19 nt, Artificial Sequence
  Description of Artificial Sequence: Synthetic oligonucleotide
  Antisense strand to SEQ ID NO: 699288
uuucccgaugacuuccagu

SEQ ID NO: 699290 - RNA, 19 nt, Artificial Sequence
  Description of Artificial Sequence: Synthetic oligonucleotide
  Sense strand starting at position 2610 of SEQ ID NO: 586195
cuggaagucaucgggaaag

SEQ ID NO: 699291 - RNA, 19 nt, Artificial Sequence
  Description of Artificial Sequence: Synthetic oligonucleotide
  Antisense strand to SEQ ID NO: 699290
cuuucccgaugacuuccag

SEQ ID NO: 699292 - RNA, 19 nt, Artificial Sequence
  Description of Artificial Sequence: Synthetic oligonucleotide
  Sense strand starting at position 2767 of SEQ ID NO: 586195
cucccuuuggucugggaaa

SEQ ID NO: 699293 - RNA, 19 nt, Artificial Sequence
  Description of Artificial Sequence: Synthetic oligonucleotide
  Antisense strand to SEQ ID NO: 699292
uuucccagaccaaagggag

SEQ ID NO: 699294 - RNA, 19 nt, Artificial Sequence
  Description of Artificial Sequence: Synthetic oligonucleotide
  Sense strand starting at position 2976 of SEQ ID NO: 586195
cggucaguccugguaguuu

SEQ ID NO: 699295 - RNA, 19 nt, Artificial Sequence
  Description of Artificial Sequence: Synthetic oligonucleotide
  Antisense strand to SEQ ID NO: 699294
aaacuaccaggacugaccg

SEQ ID NO: 699296 - RNA, 19 nt, Artificial Sequence
  Description of Artificial Sequence: Synthetic oligonucleotide
  Sense strand starting at position 3010 of SEQ ID NO: 586195
gugucuaaaugacccuuua

SEQ ID NO: 699297 - RNA, 19 nt, Artificial Sequence
  Description of Artificial Sequence: Synthetic oligonucleotide
  Antisense strand to SEQ ID NO: 699296
uaaagggucauuuagacac

SEQ ID NO: 699298 - RNA, 19 nt, Artificial Sequence
  Description of Artificial Sequence: Synthetic oligonucleotide
  Sense strand starting at position 3041 of SEQ ID NO: 586195
ccgaaugaucuggauccuu

SEQ ID NO: 699299 - RNA, 19 nt, Artificial Sequence
  Description of Artificial Sequence: Synthetic oligonucleotide
  Antisense strand to SEQ ID NO: 699298
aaggauccagaucauucgg

SEQ ID NO: 699300 - RNA, 19 nt, Artificial Sequence
  Description of Artificial Sequence: Synthetic oligonucleotide
  Sense strand starting at position 3126 of SEQ ID NO: 586195
cagaacuaggucuguaauu

SEQ ID NO: 699301 - RNA, 19 nt, Artificial Sequence
  Description of Artificial Sequence: Synthetic oligonucleotide
  Antisense strand to SEQ ID NO: 699300
aauuacagaccuaguucug

SEQ ID NO: 699302 - RNA, 19 nt, Artificial Sequence
  Description of Artificial Sequence: Synthetic oligonucleotide
  Sense strand starting at position 3135 of SEQ ID NO: 586195
gucuguaauuugcugcauu

SEQ ID NO: 699303 - RNA, 19 nt, Artificial Sequence
  Description of Artificial Sequence: Synthetic oligonucleotide
  Antisense strand to SEQ ID NO: 699302
aaugcagcaaauuacagac

SEQ ID NO: 699304 - RNA, 19 nt, Artificial Sequence
  Description of Artificial Sequence: Synthetic oligonucleotide
  Sense strand starting at position 3152 of SEQ ID NO: 586195
uugagacuuccguauccag

SEQ ID NO: 699305 - RNA, 19 nt, Artificial Sequence
  Description of Artificial Sequence: Synthetic oligonucleotide
  Antisense strand to SEQ ID NO: 699304
cuggauacggaagucucaa

SEQ ID NO: 699306 - RNA, 19 nt, Artificial Sequence
  Description of Artificial Sequence: Synthetic oligonucleotide
  Sense strand starting at position 3520 of SEQ ID NO: 586195
gggcaauuaauguggugau

SEQ ID NO: 699307 - RNA, 19 nt, Artificial Sequence
  Description of Artificial Sequence: Synthetic oligonucleotide
  Antisense strand to SEQ ID NO: 699306
aucaccacauuaauugccc

SEQ ID NO: 699308 - RNA, 19 nt, Artificial Sequence
  Description of Artificial Sequence: Synthetic oligonucleotide
  Sense strand starting at position 3582 of SEQ ID NO: 586195
agagaugccagucauugca

SEQ ID NO: 699309 - RNA, 19 nt, Artificial Sequence
  Description of Artificial Sequence: Synthetic oligonucleotide
  Antisense strand to SEQ ID NO: 699308
ugcaaugacuggcaucucu

SEQ ID NO: 699310 - RNA, 19 nt, Artificial Sequence
  Description of Artificial Sequence: Synthetic oligonucleotide
  Sense strand starting at position 3644 of SEQ ID NO: 586195
ggcugaaauguggaauccu

SEQ ID NO: 699311 - RNA, 19 nt, Artificial Sequence
  Description of Artificial Sequence: Synthetic oligonucleotide
  Antisense strand to SEQ ID NO: 699310
aggauuccacauuucagcc

SEQ ID NO: 699312 - RNA, 19 nt, Artificial Sequence
  Description of Artificial Sequence: Synthetic oligonucleotide
  Sense strand starting at position 3820 of SEQ ID NO: 586195
uguucuuugccuggaauuu

SEQ ID NO: 699313 - RNA, 19 nt, Artificial Sequence
  Description of Artificial Sequence: Synthetic oligonucleotide
  Antisense strand to SEQ ID NO: 699312
aaauuccaggcaaagaaca

SEQ ID NO: 699314 - RNA, 19 nt, Artificial Sequence
  Description of Artificial Sequence: Synthetic oligonucleotide
  Sense strand starting at position 3841 of SEQ ID NO: 586195
ggauuuggguuagaguuua

SEQ ID NO: 699315 - RNA, 19 nt, Artificial Sequence
  Description of Artificial Sequence: Synthetic oligonucleotide
  Antisense strand to SEQ ID NO: 699314
uaaacucuaacccaaaucc

SEQ ID NO: 699316 - RNA, 19 nt, Artificial Sequence
  Description of Artificial Sequence: Synthetic oligonucleotide
  Sense strand starting at position 3851 of SEQ ID NO: 586195
uagaguuuagauuguugua

SEQ ID NO: 699317 - RNA, 19 nt, Artificial Sequence
  Description of Artificial Sequence: Synthetic oligonucleotide
  Antisense strand to SEQ ID NO: 699316
uacaacaaucuaaacucua

SEQ ID NO: 699318 - RNA, 19 nt, Artificial Sequence
  Description of Artificial Sequence: Synthetic oligonucleotide
  Sense strand starting at position 3876 of SEQ ID NO: 586195
gguucuugcugaccuauuu

SEQ ID NO: 699319 - RNA, 19 nt, Artificial Sequence
  Description of Artificial Sequence: Synthetic oligonucleotide
  Antisense strand to SEQ ID NO: 699318
aaauaggucagcaagaacc

SEQ ID NO: 699320 - RNA, 19 nt, Artificial Sequence
  Description of Artificial Sequence: Synthetic oligonucleotide
  Sense strand starting at position 3914 of SEQ ID NO: 586195
ucuuccugucucuagguaa

SEQ ID NO: 699321 - RNA, 19 nt, Artificial Sequence
  Description of Artificial Sequence: Synthetic oligonucleotide
  Antisense strand to SEQ ID NO: 699320
uuaccuagagacaggaaga

SEQ ID NO: 699322 - RNA, 19 nt, Artificial Sequence
  Description of Artificial Sequence: Synthetic oligonucleotide
  Sense strand starting at position 3917 of SEQ ID NO: 586195
uccugucucuagguaauuu

SEQ ID NO: 699323 - RNA, 19 nt, Artificial Sequence
  Description of Artificial Sequence: Synthetic oligonucleotide
  Antisense strand to SEQ ID NO: 699322
aaauuaccuagagacagga

SEQ ID NO: 699324 - RNA, 19 nt, Artificial Sequence
  Description of Artificial Sequence: Synthetic oligonucleotide
  Sense strand starting at position 3928 of SEQ ID NO: 586195
gguaauuucucccugccuu

SEQ ID NO: 699325 - RNA, 19 nt, Artificial Sequence
  Description of Artificial Sequence: Synthetic oligonucleotide
  Antisense strand to SEQ ID NO: 699324
aaggcagggagaaauuacc

SEQ ID NO: 699326 - RNA, 19 nt, Artificial Sequence
  Description of Artificial Sequence: Synthetic oligonucleotide
  Sense strand starting at position 3944 of SEQ ID NO: 586195
cuuugauggcucugggauu

SEQ ID NO: 699327 - RNA, 19 nt, Artificial Sequence
  Description of Artificial Sequence: Synthetic oligonucleotide
  Antisense strand to SEQ ID NO: 699326
aaucccagagccaucaaag

SEQ ID NO: 699328 - RNA, 19 nt, Artificial Sequence
  Description of Artificial Sequence: Synthetic oligonucleotide
  Sense strand starting at position 90 of SEQ ID NO: 586196
acaagaacucauuaugugu

SEQ ID NO: 699329 - RNA, 19 nt, Artificial Sequence
  Description of Artificial Sequence: Synthetic oligonucleotide
  Antisense strand to SEQ ID NO: 699328
acacauaaugaguucuugu

SEQ ID NO: 699330 - RNA, 19 nt, Artificial Sequence
  Description of Artificial Sequence: Synthetic oligonucleotide
  Sense strand starting at position 101 of SEQ ID NO: 586196
uuauguguacccugaaaua

SEQ ID NO: 699331 - RNA, 19 nt, Artificial Sequence
  Description of Artificial Sequence: Synthetic oligonucleotide
  Antisense strand to SEQ ID NO: 699330
uauuucaggguacacauaa

SEQ ID NO: 699332 - RNA, 19 nt, Artificial Sequence
  Description of Artificial Sequence: Synthetic oligonucleotide
  Sense strand starting at position 398 of SEQ ID NO: 586196
agaguuaacuguuugcuaa

SEQ ID NO: 699333 - RNA, 19 nt, Artificial Sequence
  Description of Artificial Sequence: Synthetic oligonucleotide
  Antisense strand to SEQ ID NO: 699332
uuagcaaacaguuaacucu

SEQ ID NO: 699334 - RNA, 19 nt, Artificial Sequence
  Description of Artificial Sequence: Synthetic oligonucleotide
  Sense strand starting at position 405 of SEQ ID NO: 586196
acuguuugcuaacuugaaa

SEQ ID NO: 699335 - RNA, 19 nt, Artificial Sequence
  Description of Artificial Sequence: Synthetic oligonucleotide
  Antisense strand to SEQ ID NO: 699334
uuucaaguuagcaaacagu

SEQ ID NO: 699336 - RNA, 19 nt, Artificial Sequence
  Description of Artificial Sequence: Synthetic oligonucleotide
  Sense strand starting at position 408 of SEQ ID NO: 586196
guuugcuaacuugaaacuu

SEQ ID NO: 699337 - RNA, 19 nt, Artificial Sequence
  Description of Artificial Sequence: Synthetic oligonucleotide
  Antisense strand to SEQ ID NO: 699336
aaguuucaaguuagcaaac

SEQ ID NO: 699338 - RNA, 19 nt, Artificial Sequence
  Description of Artificial Sequence: Synthetic oligonucleotide
  Sense strand starting at position 468 of SEQ ID NO: 586196
gaaaguauaguguacuaua

SEQ ID NO: 699339 - RNA, 19 nt, Artificial Sequence
  Description of Artificial Sequence: Synthetic oligonucleotide
  Antisense strand to SEQ ID NO: 699338
uauaguacacuauacuuuc

SEQ ID NO: 699340 - RNA, 19 nt, Artificial Sequence
  Description of Artificial Sequence: Synthetic oligonucleotide
  Sense strand starting at position 700 of SEQ ID NO: 586196
uuacacaucggccaauuau

SEQ ID NO: 699341 - RNA, 19 nt, Artificial Sequence
  Description of Artificial Sequence: Synthetic oligonucleotide
  Antisense strand to SEQ ID NO: 699340
auaauuggccgauguguaa

SEQ ID NO: 699342 - RNA, 19 nt, Artificial Sequence
  Description of Artificial Sequence: Synthetic oligonucleotide
  Sense strand starting at position 766 of SEQ ID NO: 586196
gaaaucaauccaugguuag

SEQ ID NO: 699343 - RNA, 19 nt, Artificial Sequence
  Description of Artificial Sequence: Synthetic oligonucleotide
  Antisense strand to SEQ ID NO: 699342
cuaaccauggauugauuuc

SEQ ID NO: 699344 - RNA, 19 nt, Artificial Sequence
  Description of Artificial Sequence: Synthetic oligonucleotide
  Sense strand starting at position 829 of SEQ ID NO: 586196
uaguauguacaauggauau

SEQ ID NO: 699345 - RNA, 19 nt, Artificial Sequence
  Description of Artificial Sequence: Synthetic oligonucleotide
  Antisense strand to SEQ ID NO: 699344
auauccauuguacauacua

SEQ ID NO: 699346 - RNA, 19 nt, Artificial Sequence
  Description of Artificial Sequence: Synthetic oligonucleotide
  Sense strand starting at position 984 of SEQ ID NO: 586196
gcuaaauuauggucaucuu

SEQ ID NO: 699347 - RNA, 19 nt, Artificial Sequence
  Description of Artificial Sequence: Synthetic oligonucleotide
  Antisense strand to SEQ ID NO: 699346
aagaugaccauaauuuagc

SEQ ID NO: 699348 - RNA, 19 nt, Artificial Sequence
  Description of Artificial Sequence: Synthetic oligonucleotide
  Sense strand starting at position 1009 of SEQ ID NO: 586196
guguacgacuuacccaaau

SEQ ID NO: 699349 - RNA, 19 nt, Artificial Sequence
  Description of Artificial Sequence: Synthetic oligonucleotide
  Antisense strand to SEQ ID NO: 699348
auuuggguaagucguacac

SEQ ID NO: 699350 - RNA, 19 nt, Artificial Sequence
  Description of Artificial Sequence: Synthetic oligonucleotide
  Sense strand starting at position 1534 of SEQ ID NO: 586196
gaggguacauguccacaaa

SEQ ID NO: 699351 - RNA, 19 nt, Artificial Sequence
  Description of Artificial Sequence: Synthetic oligonucleotide
  Antisense strand to SEQ ID NO: 699350
uuuguggacauguacccuc

SEQ ID NO: 699352 - RNA, 19 nt, Artificial Sequence
  Description of Artificial Sequence: Synthetic oligonucleotide
  Sense strand starting at position 2374 of SEQ ID NO: 586196
aggaccuuugucugaggua

SEQ ID NO: 699353 - RNA, 19 nt, Artificial Sequence
  Description of Artificial Sequence: Synthetic oligonucleotide
  Antisense strand to SEQ ID NO: 699352
uaccucagacaaagguccu

SEQ ID NO: 699354 - RNA, 19 nt, Artificial Sequence
  Description of Artificial Sequence: Synthetic oligonucleotide
  Sense strand starting at position 2421 of SEQ ID NO: 586196
gccuguagccugcucuuaa

SEQ ID NO: 699355 - RNA, 19 nt, Artificial Sequence
  Description of Artificial Sequence: Synthetic oligonucleotide
  Antisense strand to SEQ ID NO: 699354
uuaagagcaggcuacaggc

SEQ ID NO: 699356 - RNA, 19 nt, Artificial Sequence
  Description of Artificial Sequence: Synthetic oligonucleotide
  Sense strand starting at position 2485 of SEQ ID NO: 586196
aguaucucucugggcuuaa

SEQ ID NO: 699357 - RNA, 19 nt, Artificial Sequence
  Description of Artificial Sequence: Synthetic oligonucleotide
  Antisense strand to SEQ ID NO: 699356
uuaagcccagagagauacu

SEQ ID NO: 699358 - RNA, 19 nt, Artificial Sequence
  Description of Artificial Sequence: Synthetic oligonucleotide
  Sense strand starting at position 2489 of SEQ ID NO: 586196
ucucucugggcuuaauaaa

SEQ ID NO: 699359 - RNA, 19 nt, Artificial Sequence
  Description of Artificial Sequence: Synthetic oligonucleotide
  Antisense strand to SEQ ID NO: 699358
uuuauuaagcccagagaga

SEQ ID NO: 699360 - RNA, 19 nt, Artificial Sequence
  Description of Artificial Sequence: Synthetic oligonucleotide
  Sense strand starting at position 2542 of SEQ ID NO: 586196
ugggucaucaugugagaac

SEQ ID NO: 699361 - RNA, 19 nt, Artificial Sequence
  Description of Artificial Sequence: Synthetic oligonucleotide
  Antisense strand to SEQ ID NO: 699360
guucucacaugaugaccca

SEQ ID NO: 699362 - RNA, 19 nt, Artificial Sequence
  Description of Artificial Sequence: Synthetic oligonucleotide
  Sense strand starting at position 2566 of SEQ ID NO: 586196
agagcugagaaccgagaua

SEQ ID NO: 699363 - RNA, 19 nt, Artificial Sequence
  Description of Artificial Sequence: Synthetic oligonucleotide
  Antisense strand to SEQ ID NO: 699362
uaucucgguucucagcucu

SEQ ID NO: 699364 - RNA, 19 nt, Artificial Sequence
  Description of Artificial Sequence: Synthetic oligonucleotide
  Sense strand starting at position 2580 of SEQ ID NO: 586196
agauaaugauaccagaaag

SEQ ID NO: 699365 - RNA, 19 nt, Artificial Sequence
  Description of Artificial Sequence: Synthetic oligonucleotide
  Antisense strand to SEQ ID NO: 699364
cuuucugguaucauuaucu

SEQ ID NO: 699366 - RNA, 19 nt, Artificial Sequence
  Description of Artificial Sequence: Synthetic oligonucleotide
  Sense strand starting at position 2591 of SEQ ID NO: 586196
ccagaaagcuuucuauagg

SEQ ID NO: 699367 - RNA, 19 nt, Artificial Sequence
  Description of Artificial Sequence: Synthetic oligonucleotide
  Antisense strand to SEQ ID NO: 699366
ccuauagaaagcuuucugg

SEQ ID NO: 699368 - RNA, 19 nt, Artificial Sequence
  Description of Artificial Sequence: Synthetic oligonucleotide
  Sense strand starting at position 2717 of SEQ ID NO: 586196
uaaggaaguugucuuugga

SEQ ID NO: 699369 - RNA, 19 nt, Artificial Sequence
  Description of Artificial Sequence: Synthetic oligonucleotide
  Antisense strand to SEQ ID NO: 699368
uccaaagacaacuuccuua

SEQ ID NO: 699370 - RNA, 19 nt, Artificial Sequence
  Description of Artificial Sequence: Synthetic oligonucleotide
  Sense strand starting at position 2720 of SEQ ID NO: 586196
ggaaguugucuuuggaaua

SEQ ID NO: 699371 - RNA, 19 nt, Artificial Sequence
  Description of Artificial Sequence: Synthetic oligonucleotide
  Antisense strand to SEQ ID NO: 699370
uauuccaaagacaacuucc

SEQ ID NO: 699372 - RNA, 19 nt, Artificial Sequence
  Description of Artificial Sequence: Synthetic oligonucleotide
  Sense strand starting at position 2789 of SEQ ID NO: 586196
gaggguaagguuuagucuu

SEQ ID NO: 699373 - RNA, 19 nt, Artificial Sequence
  Description of Artificial Sequence: Synthetic oligonucleotide
  Antisense strand to SEQ ID NO: 699372
aagacuaaaccuuacccuc

SEQ ID NO: 699374 - RNA, 19 nt, Artificial Sequence
  Description of Artificial Sequence: Synthetic oligonucleotide
  Sense strand starting at position 2791 of SEQ ID NO: 586196
ggguaagguuuagucuuua

SEQ ID NO: 699375 - RNA, 19 nt, Artificial Sequence
  Description of Artificial Sequence: Synthetic oligonucleotide
  Antisense strand to SEQ ID NO: 699374
uaaagacuaaaccuuaccc

SEQ ID NO: 699376 - RNA, 19 nt, Artificial Sequence
  Description of Artificial Sequence: Synthetic oligonucleotide
  Sense strand starting at position 2805 of SEQ ID NO: 586196
cuuuacuggcguuaaccau

SEQ ID NO: 699377 - RNA, 19 nt, Artificial Sequence
  Description of Artificial Sequence: Synthetic oligonucleotide
  Antisense strand to SEQ ID NO: 699376
augguuaacgccaguaaag

SEQ ID NO: 699378 - RNA, 19 nt, Artificial Sequence
  Description of Artificial Sequence: Synthetic oligonucleotide
  Sense strand starting at position 2812 of SEQ ID NO: 586196
ggcguuaaccauuaucuac

SEQ ID NO: 699379 - RNA, 19 nt, Artificial Sequence
  Description of Artificial Sequence: Synthetic oligonucleotide
  Antisense strand to SEQ ID NO: 699378
guagauaaugguuaacgcc

SEQ ID NO: 699380 - RNA, 19 nt, Artificial Sequence
  Description of Artificial Sequence: Synthetic oligonucleotide
  Sense strand starting at position 2892 of SEQ ID NO: 586196
ucuuuaguacucuacagca

SEQ ID NO: 699381 - RNA, 19 nt, Artificial Sequence
  Description of Artificial Sequence: Synthetic oligonucleotide
  Antisense strand to SEQ ID NO: 699380
ugcuguagaguacuaaaga

SEQ ID NO: 699382 - RNA, 19 nt, Artificial Sequence
  Description of Artificial Sequence: Synthetic oligonucleotide
  Sense strand starting at position 2905 of SEQ ID NO: 586196
acagcaugguuguuaaaga

SEQ ID NO: 699383 - RNA, 19 nt, Artificial Sequence
  Description of Artificial Sequence: Synthetic oligonucleotide
  Antisense strand to SEQ ID NO: 699382
ucuuuaacaaccaugcugu

SEQ ID NO: 699384 - RNA, 19 nt, Artificial Sequence
  Description of Artificial Sequence: Synthetic oligonucleotide
  Sense strand starting at position 2977 of SEQ ID NO: 586196
uuggcaaguuacuuagaau

SEQ ID NO: 699385 - RNA, 19 nt, Artificial Sequence
  Description of Artificial Sequence: Synthetic oligonucleotide
  Antisense strand to SEQ ID NO: 699384
auucuaaguaacuugccaa

SEQ ID NO: 699386 - RNA, 19 nt, Artificial Sequence
  Description of Artificial Sequence: Synthetic oligonucleotide
  Sense strand starting at position 2978 of SEQ ID NO: 586196
uggcaaguuacuuagaaug

SEQ ID NO: 699387 - RNA, 19 nt, Artificial Sequence
  Description of Artificial Sequence: Synthetic oligonucleotide
  Antisense strand to SEQ ID NO: 699386
cauucuaaguaacuugcca

SEQ ID NO: 699388 - RNA, 19 nt, Artificial Sequence
  Description of Artificial Sequence: Synthetic oligonucleotide
  Sense strand starting at position 3038 of SEQ ID NO: 586196
ccuuuaauuugcuuagguu

SEQ ID NO: 699389 - RNA, 19 nt, Artificial Sequence
  Description of Artificial Sequence: Synthetic oligonucleotide
  Antisense strand to SEQ ID NO: 699388
aaccuaagcaaauuaaagg

SEQ ID NO: 699390 - RNA, 19 nt, Artificial Sequence
  Description of Artificial Sequence: Synthetic oligonucleotide
  Sense strand starting at position 3067 of SEQ ID NO: 586196
guaguuucucaggacauug

SEQ ID NO: 699391 - RNA, 19 nt, Artificial Sequence
  Description of Artificial Sequence: Synthetic oligonucleotide
  Antisense strand to SEQ ID NO: 699390
caauguccugagaaacuac

SEQ ID NO: 699392 - RNA, 19 nt, Artificial Sequence
  Description of Artificial Sequence: Synthetic oligonucleotide
  Sense strand starting at position 3186 of SEQ ID NO: 586196
aacugauagguccauguua

SEQ ID NO: 699393 - RNA, 19 nt, Artificial Sequence
  Description of Artificial Sequence: Synthetic oligonucleotide
  Antisense strand to SEQ ID NO: 699392
uaacauggaccuaucaguu

SEQ ID NO: 699394 - RNA, 19 nt, Artificial Sequence
  Description of Artificial Sequence: Synthetic oligonucleotide
  Sense strand starting at position 3188 of SEQ ID NO: 586196
cugauagguccauguuaga

SEQ ID NO: 699395 - RNA, 19 nt, Artificial Sequence
  Description of Artificial Sequence: Synthetic oligonucleotide
  Antisense strand to SEQ ID NO: 699394
ucuaacauggaccuaucag

SEQ ID NO: 699396 - RNA, 19 nt, Artificial Sequence
  Description of Artificial Sequence: Synthetic oligonucleotide
  Sense strand starting at position 3222 of SEQ ID NO: 586196
uccugauguccagguuauu

SEQ ID NO: 699397 - RNA, 19 nt, Artificial Sequence
  Description of Artificial Sequence: Synthetic oligonucleotide
  Antisense strand to SEQ ID NO: 699396
aauaaccuggacaucagga

SEQ ID NO: 699398 - RNA, 19 nt, Artificial Sequence
  Description of Artificial Sequence: Synthetic oligonucleotide
  Sense strand starting at position 3252 of SEQ ID NO: 586196
ggcucauggguccagacuu

SEQ ID NO: 699399 - RNA, 19 nt, Artificial Sequence
  Description of Artificial Sequence: Synthetic oligonucleotide
  Antisense strand to SEQ ID NO: 699398
aagucuggacccaugagcc

SEQ ID NO: 699400 - RNA, 19 nt, Artificial Sequence
  Description of Artificial Sequence: Synthetic oligonucleotide
  Sense strand starting at position 3278 of SEQ ID NO: 586196
uuacaugauuacguccauu

SEQ ID NO: 699401 - RNA, 19 nt, Artificial Sequence
  Description of Artificial Sequence: Synthetic oligonucleotide
  Antisense strand to SEQ ID NO: 699400
aauggacguaaucauguaa

SEQ ID NO: 699402 - RNA, 19 nt, Artificial Sequence
  Description of Artificial Sequence: Synthetic oligonucleotide
  Sense strand starting at position 3427 of SEQ ID NO: 586196
cuugccauccauugugaaa

SEQ ID NO: 699403 - RNA, 19 nt, Artificial Sequence
  Description of Artificial Sequence: Synthetic oligonucleotide
  Antisense strand to SEQ ID NO: 699402
uuucacaauggauggcaag

SEQ ID NO: 699404 - RNA, 19 nt, Artificial Sequence
  Description of Artificial Sequence: Synthetic oligonucleotide
  Sense strand starting at position 3763 of SEQ ID NO: 586196
gugaucuuggcacacaaca

SEQ ID NO: 699405 - RNA, 19 nt, Artificial Sequence
  Description of Artificial Sequence: Synthetic oligonucleotide
  Antisense strand to SEQ ID NO: 699404
uguugugugccaagaucac

SEQ ID NO: 699406 - RNA, 19 nt, Artificial Sequence
  Description of Artificial Sequence: Synthetic oligonucleotide
  Sense strand starting at position 3784 of SEQ ID NO: 586196
cucgaauaacugggcugaa

SEQ ID NO: 699407 - RNA, 19 nt, Artificial Sequence
  Description of Artificial Sequence: Synthetic oligonucleotide
  Antisense strand to SEQ ID NO: 699406
uucagcccaguuauucgag

SEQ ID NO: 699408 - RNA, 19 nt, Artificial Sequence
  Description of Artificial Sequence: Synthetic oligonucleotide
  Sense strand starting at position 28 of SEQ ID NO: 586197
ggcagauacauaugugauu

SEQ ID NO: 699409 - RNA, 19 nt, Artificial Sequence
  Description of Artificial Sequence: Synthetic oligonucleotide
  Antisense strand to SEQ ID NO: 699408
aaucacauauguaucugcc

SEQ ID NO: 699410 - RNA, 19 nt, Artificial Sequence
  Description of Artificial Sequence: Synthetic oligonucleotide
  Sense strand starting at position 29 of SEQ ID NO: 586197
gcagauacauaugugauua

SEQ ID NO: 699411 - RNA, 19 nt, Artificial Sequence
  Description of Artificial Sequence: Synthetic oligonucleotide
  Antisense strand to SEQ ID NO: 699410
uaaucacauauguaucugc

SEQ ID NO: 699412 - RNA, 19 nt, Artificial Sequence
  Description of Artificial Sequence: Synthetic oligonucleotide
  Sense strand starting at position 161 of SEQ ID NO: 586197
gggcccucaucaucugauu

SEQ ID NO: 699413 - RNA, 19 nt, Artificial Sequence
  Description of Artificial Sequence: Synthetic oligonucleotide
  Antisense strand to SEQ ID NO: 699412
aaucagaugaugagggccc

SEQ ID NO: 699414 - RNA, 19 nt, Artificial Sequence
  Description of Artificial Sequence: Synthetic oligonucleotide
  Sense strand starting at position 207 of SEQ ID NO: 586197
ggugaucuaacagagcguu

SEQ ID NO: 699415 - RNA, 19 nt, Artificial Sequence
  Description of Artificial Sequence: Synthetic oligonucleotide
  Antisense strand to SEQ ID NO: 699414
aacgcucuguuagaucacc

SEQ ID NO: 699416 - RNA, 19 nt, Artificial Sequence
  Description of Artificial Sequence: Synthetic oligonucleotide
  Sense strand starting at position 513 of SEQ ID NO: 586197
cuccuaagguaucuguaua

SEQ ID NO: 699417 - RNA, 19 nt, Artificial Sequence
  Description of Artificial Sequence: Synthetic oligonucleotide
  Antisense strand to SEQ ID NO: 699416
uauacagauaccuuaggag

SEQ ID NO: 699418 - RNA, 19 nt, Artificial Sequence
  Description of Artificial Sequence: Synthetic oligonucleotide
  Sense strand starting at position 521 of SEQ ID NO: 586197
guaucuguauaaccaaaga

SEQ ID NO: 699419 - RNA, 19 nt, Artificial Sequence
  Description of Artificial Sequence: Synthetic oligonucleotide
  Antisense strand to SEQ ID NO: 699418
ucuuugguuauacagauac

SEQ ID NO: 699420 - RNA, 19 nt, Artificial Sequence
  Description of Artificial Sequence: Synthetic oligonucleotide
  Sense strand starting at position 607 of SEQ ID NO: 586197
guuagugcucuguaaauga

SEQ ID NO: 699421 - RNA, 19 nt, Artificial Sequence
  Description of Artificial Sequence: Synthetic oligonucleotide
  Antisense strand to SEQ ID NO: 699420
ucauuuacagagcacuaac

SEQ ID NO: 699422 - RNA, 19 nt, Artificial Sequence
  Description of Artificial Sequence: Synthetic oligonucleotide
  Sense strand starting at position 733 of SEQ ID NO: 586197
ucuagaaagugauucugcu

SEQ ID NO: 699423 - RNA, 19 nt, Artificial Sequence
  Description of Artificial Sequence: Synthetic oligonucleotide
  Antisense strand to SEQ ID NO: 699422
agcagaaucacuuucuaga

SEQ ID NO: 699424 - RNA, 19 nt, Artificial Sequence
  Description of Artificial Sequence: Synthetic oligonucleotide
  Sense strand starting at position 737 of SEQ ID NO: 586197
gaaagugauucugcucucu

SEQ ID NO: 699425 - RNA, 19 nt, Artificial Sequence
  Description of Artificial Sequence: Synthetic oligonucleotide
  Antisense strand to SEQ ID NO: 699424
agagagcagaaucacuuuc

SEQ ID NO: 699426 - RNA, 19 nt, Artificial Sequence
  Description of Artificial Sequence: Synthetic oligonucleotide
  Sense strand starting at position 769 of SEQ ID NO: 586197
ggcuauggcgauucguuca

SEQ ID NO: 699427 - RNA, 19 nt, Artificial Sequence
  Description of Artificial Sequence: Synthetic oligonucleotide
  Antisense strand to SEQ ID NO: 699426
ugaacgaaucgccauagcc

SEQ ID NO: 699428 - RNA, 19 nt, Artificial Sequence
  Description of Artificial Sequence: Synthetic oligonucleotide
  Sense strand starting at position 807 of SEQ ID NO: 586197
acaugcugucagcauuauu

SEQ ID NO: 699429 - RNA, 19 nt, Artificial Sequence
  Description of Artificial Sequence: Synthetic oligonucleotide
  Antisense strand to SEQ ID NO: 699428
aauaaugcugacagcaugu

SEQ ID NO: 699430 - RNA, 19 nt, Artificial Sequence
  Description of Artificial Sequence: Synthetic oligonucleotide
  Sense strand starting at position 820 of SEQ ID NO: 586197
auuauuccuuuccuaggga

SEQ ID NO: 699431 - RNA, 19 nt, Artificial Sequence
  Description of Artificial Sequence: Synthetic oligonucleotide
  Antisense strand to SEQ ID NO: 699430
ucccuaggaaaggaauaau

SEQ ID NO: 699432 - RNA, 19 nt, Artificial Sequence
  Description of Artificial Sequence: Synthetic oligonucleotide
  Sense strand starting at position 823 of SEQ ID NO: 586197
auuccuuuccuagggaaag

SEQ ID NO: 699433 - RNA, 19 nt, Artificial Sequence
  Description of Artificial Sequence: Synthetic oligonucleotide
  Antisense strand to SEQ ID NO: 699432
cuuucccuaggaaaggaau

SEQ ID NO: 699434 - RNA, 19 nt, Artificial Sequence
  Description of Artificial Sequence: Synthetic oligonucleotide
  Sense strand starting at position 1023 of SEQ ID NO: 586197
uugaacucuucuuuaggua

SEQ ID NO: 699435 - RNA, 19 nt, Artificial Sequence
  Description of Artificial Sequence: Synthetic oligonucleotide
  Antisense strand to SEQ ID NO: 699434
uaccuaaagaagaguucaa

SEQ ID NO: 699436 - RNA, 19 nt, Artificial Sequence
  Description of Artificial Sequence: Synthetic oligonucleotide
  Sense strand starting at position 1118 of SEQ ID NO: 586197
aaugcaagaguugggcaau

SEQ ID NO: 699437 - RNA, 19 nt, Artificial Sequence
  Description of Artificial Sequence: Synthetic oligonucleotide
  Antisense strand to SEQ ID NO: 699436
auugcccaacucuugcauu

SEQ ID NO: 699438 - RNA, 19 nt, Artificial Sequence
  Description of Artificial Sequence: Synthetic oligonucleotide
  Sense strand starting at position 1121 of SEQ ID NO: 586197
gcaagaguugggcaaucug

SEQ ID NO: 699439 - RNA, 19 nt, Artificial Sequence
  Description of Artificial Sequence: Synthetic oligonucleotide
  Antisense strand to SEQ ID NO: 699438
cagauugcccaacucuugc

SEQ ID NO: 699440 - RNA, 19 nt, Artificial Sequence
  Description of Artificial Sequence: Synthetic oligonucleotide
  Sense strand starting at position 1131 of SEQ ID NO: 586197
ggcaaucugcuauauaaau

SEQ ID NO: 699441 - RNA, 19 nt, Artificial Sequence
  Description of Artificial Sequence: Synthetic oligonucleotide
  Antisense strand to SEQ ID NO: 699440
auuuauauagcagauugcc

SEQ ID NO: 699442 - RNA, 19 nt, Artificial Sequence
  Description of Artificial Sequence: Synthetic oligonucleotide
  Sense strand starting at position 1175 of SEQ ID NO: 586197
uguuuaacugcugagaaau

SEQ ID NO: 699443 - RNA, 19 nt, Artificial Sequence
  Description of Artificial Sequence: Synthetic oligonucleotide
  Antisense strand to SEQ ID NO: 699442
auuucucagcaguuaaaca

SEQ ID NO: 699444 - RNA, 19 nt, Artificial Sequence
  Description of Artificial Sequence: Synthetic oligonucleotide
  Sense strand starting at position 1414 of SEQ ID NO: 586197
gacgucaacccagacuauu

SEQ ID NO: 699445 - RNA, 19 nt, Artificial Sequence
  Description of Artificial Sequence: Synthetic oligonucleotide
  Antisense strand to SEQ ID NO: 699444
aauagucuggguugacguc

SEQ ID NO: 699446 - RNA, 19 nt, Artificial Sequence
  Description of Artificial Sequence: Synthetic oligonucleotide
  Sense strand starting at position 2252 of SEQ ID NO: 586197
gcuggagaagcuugucaga

SEQ ID NO: 699447 - RNA, 19 nt, Artificial Sequence
  Description of Artificial Sequence: Synthetic oligonucleotide
  Antisense strand to SEQ ID NO: 699446
ucugacaagcuucuccagc

SEQ ID NO: 699448 - RNA, 19 nt, Artificial Sequence
  Description of Artificial Sequence: Synthetic oligonucleotide
  Sense strand starting at position 2452 of SEQ ID NO: 586197
aaagauuagggcuguaaga

SEQ ID NO: 699449 - RNA, 19 nt, Artificial Sequence
  Description of Artificial Sequence: Synthetic oligonucleotide
  Antisense strand to SEQ ID NO: 699448
ucuuacagcccuaaucuuu

SEQ ID NO: 699450 - RNA, 19 nt, Artificial Sequence
  Description of Artificial Sequence: Synthetic oligonucleotide
  Sense strand starting at position 2699 of SEQ ID NO: 586197
cagcgugacagacauuguu

SEQ ID NO: 699451 - RNA, 19 nt, Artificial Sequence
  Description of Artificial Sequence: Synthetic oligonucleotide
  Antisense strand to SEQ ID NO: 699450
aacaaugucugucacgcug

SEQ ID NO: 699452 - RNA, 19 nt, Artificial Sequence
  Description of Artificial Sequence: Synthetic oligonucleotide
  Sense strand starting at position 2763 of SEQ ID NO: 586197
uagagauauuaaguaugcu

SEQ ID NO: 699453 - RNA, 19 nt, Artificial Sequence
  Description of Artificial Sequence: Synthetic oligonucleotide
  Antisense strand to SEQ ID NO: 699452
agcauacuuaauaucucua

SEQ ID NO: 699454 - RNA, 19 nt, Artificial Sequence
  Description of Artificial Sequence: Synthetic oligonucleotide
  Sense strand starting at position 2771 of SEQ ID NO: 586197
uuaaguaugcuuuacagau

SEQ ID NO: 699455 - RNA, 19 nt, Artificial Sequence
  Description of Artificial Sequence: Synthetic oligonucleotide
  Antisense strand to SEQ ID NO: 699454
aucuguaaagcauacuuaa

SEQ ID NO: 699456 - RNA, 19 nt, Artificial Sequence
  Description of Artificial Sequence: Synthetic oligonucleotide
  Sense strand starting at position 2854 of SEQ ID NO: 586197
gagcaaacugcuuguagaa

SEQ ID NO: 699457 - RNA, 19 nt, Artificial Sequence
  Description of Artificial Sequence: Synthetic oligonucleotide
  Antisense strand to SEQ ID NO: 699456
uucuacaagcaguuugcuc

SEQ ID NO: 699458 - RNA, 19 nt, Artificial Sequence
  Description of Artificial Sequence: Synthetic oligonucleotide
  Sense strand starting at position 2961 of SEQ ID NO: 586197
gcagaagacuaguuuaaga

SEQ ID NO: 699459 - RNA, 19 nt, Artificial Sequence
  Description of Artificial Sequence: Synthetic oligonucleotide
  Antisense strand to SEQ ID NO: 699458
ucuuaaacuagucuucugc

SEQ ID NO: 699460 - RNA, 19 nt, Artificial Sequence
  Description of Artificial Sequence: Synthetic oligonucleotide
  Sense strand starting at position 3185 of SEQ ID NO: 586197
agagaaauggcucggcaau

SEQ ID NO: 699461 - RNA, 19 nt, Artificial Sequence
  Description of Artificial Sequence: Synthetic oligonucleotide
  Antisense strand to SEQ ID NO: 699460
auugccgagccauuucucu

SEQ ID NO: 699462 - RNA, 19 nt, Artificial Sequence
  Description of Artificial Sequence: Synthetic oligonucleotide
  Sense strand starting at position 3186 of SEQ ID NO: 586197
gagaaauggcucggcaaua

SEQ ID NO: 699463 - RNA, 19 nt, Artificial Sequence
  Description of Artificial Sequence: Synthetic oligonucleotide
  Antisense strand to SEQ ID NO: 699462
uauugccgagccauuucuc

SEQ ID NO: 699464 - RNA, 19 nt, Artificial Sequence
  Description of Artificial Sequence: Synthetic oligonucleotide
  Sense strand starting at position 3187 of SEQ ID NO: 586197
agaaauggcucggcaauac

SEQ ID NO: 699465 - RNA, 19 nt, Artificial Sequence
  Description of Artificial Sequence: Synthetic oligonucleotide
  Antisense strand to SEQ ID NO: 699464
guauugccgagccauuucu

SEQ ID NO: 699466 - RNA, 19 nt, Artificial Sequence
  Description of Artificial Sequence: Synthetic oligonucleotide
  Sense strand starting at position 3392 of SEQ ID NO: 586197
aggaaaugguucuucugua

SEQ ID NO: 699467 - RNA, 19 nt, Artificial Sequence
  Description of Artificial Sequence: Synthetic oligonucleotide
  Antisense strand to SEQ ID NO: 699466
uacagaagaaccauuuccu

SEQ ID NO: 699468 - RNA, 19 nt, Artificial Sequence
  Description of Artificial Sequence: Synthetic oligonucleotide
  Sense strand starting at position 3393 of SEQ ID NO: 586197
ggaaaugguucuucuguag

SEQ ID NO: 699469 - RNA, 19 nt, Artificial Sequence
  Description of Artificial Sequence: Synthetic oligonucleotide
  Antisense strand to SEQ ID NO: 699468
cuacagaagaaccauuucc

SEQ ID NO: 699470 - RNA, 19 nt, Artificial Sequence
  Description of Artificial Sequence: Synthetic oligonucleotide
  Sense strand starting at position 3397 of SEQ ID NO: 586197
augguucuucuguaguaaa

SEQ ID NO: 699471 - RNA, 19 nt, Artificial Sequence
  Description of Artificial Sequence: Synthetic oligonucleotide
  Antisense strand to SEQ ID NO: 699470
uuuacuacagaagaaccau

SEQ ID NO: 699472 - RNA, 19 nt, Artificial Sequence
  Description of Artificial Sequence: Synthetic oligonucleotide
  Sense strand starting at position 3616 of SEQ ID NO: 586197
cugagugcucaccacaaug

SEQ ID NO: 699473 - RNA, 19 nt, Artificial Sequence
  Description of Artificial Sequence: Synthetic oligonucleotide
  Antisense strand to SEQ ID NO: 699472
cauuguggugagcacucag

SEQ ID NO: 699474 - RNA, 19 nt, Artificial Sequence
  Description of Artificial Sequence: Synthetic oligonucleotide
  Sense strand starting at position 3742 of SEQ ID NO: 586197
ucacauacgcaauaguauu

SEQ ID NO: 699475 - RNA, 19 nt, Artificial Sequence
  Description of Artificial Sequence: Synthetic oligonucleotide
  Antisense strand to SEQ ID NO: 699474
aauacuauugcguauguga

SEQ ID NO: 699476 - RNA, 19 nt, Artificial Sequence
  Description of Artificial Sequence: Synthetic oligonucleotide
  Sense strand starting at position 3935 of SEQ ID NO: 586197
agagaaacuucucugaggu

SEQ ID NO: 699477 - RNA, 19 nt, Artificial Sequence
  Description of Artificial Sequence: Synthetic oligonucleotide
  Antisense strand to SEQ ID NO: 699476
accucagagaaguuucucu

SEQ ID NO: 699478 - RNA, 19 nt, Artificial Sequence
  Description of Artificial Sequence: Synthetic oligonucleotide
  Sense strand starting at position 3936 of SEQ ID NO: 586197
gagaaacuucucugaggug

SEQ ID NO: 699479 - RNA, 19 nt, Artificial Sequence
  Description of Artificial Sequence: Synthetic oligonucleotide
  Antisense strand to SEQ ID NO: 699478
caccucagagaaguuucuc

SEQ ID NO: 699480 - RNA, 19 nt, Artificial Sequence
  Description of Artificial Sequence: Synthetic oligonucleotide
  Sense strand starting at position 3969 of SEQ ID NO: 586197
gauacagagugccugauau

SEQ ID NO: 699481 - RNA, 19 nt, Artificial Sequence
  Description of Artificial Sequence: Synthetic oligonucleotide
  Antisense strand to SEQ ID NO: 699480
auaucaggcacucuguauc

SEQ ID NO: 699482 - RNA, 19 nt, Artificial Sequence
  Description of Artificial Sequence: Synthetic oligonucleotide
  Sense strand starting at position 3971 of SEQ ID NO: 586197
uacagagugccugauaucu

SEQ ID NO: 699483 - RNA, 19 nt, Artificial Sequence
  Description of Artificial Sequence: Synthetic oligonucleotide
  Antisense strand to SEQ ID NO: 699482
agauaucaggcacucugua

SEQ ID NO: 699484 - RNA, 19 nt, Artificial Sequence
  Description of Artificial Sequence: Synthetic oligonucleotide
  Sense strand starting at position 3977 of SEQ ID NO: 586197
gugccugauaucugacuga

SEQ ID NO: 699485 - RNA, 19 nt, Artificial Sequence
  Description of Artificial Sequence: Synthetic oligonucleotide
  Antisense strand to SEQ ID NO: 699484
ucagucagauaucaggcac

SEQ ID NO: 699486 - RNA, 19 nt, Artificial Sequence
  Description of Artificial Sequence: Synthetic oligonucleotide
  Sense strand starting at position 3980 of SEQ ID NO: 586197
ccugauaucugacugauga

SEQ ID NO: 699487 - RNA, 19 nt, Artificial Sequence
  Description of Artificial Sequence: Synthetic oligonucleotide
  Antisense strand to SEQ ID NO: 699486
ucaucagucagauaucagg

SEQ ID NO: 699488 - RNA, 19 nt, Artificial Sequence
  Description of Artificial Sequence: Synthetic oligonucleotide
  Sense strand starting at position 52 of SEQ ID NO: 586198
aaaugagaauuccgaacag

SEQ ID NO: 699489 - RNA, 19 nt, Artificial Sequence
  Description of Artificial Sequence: Synthetic oligonucleotide
  Antisense strand to SEQ ID NO: 699488
cuguucggaauucucauuu

SEQ ID NO: 699490 - RNA, 19 nt, Artificial Sequence
  Description of Artificial Sequence: Synthetic oligonucleotide
  Sense strand starting at position 666 of SEQ ID NO: 586198
uaagaaauguggcuguaac

SEQ ID NO: 699491 - RNA, 19 nt, Artificial Sequence
  Description of Artificial Sequence: Synthetic oligonucleotide
  Antisense strand to SEQ ID NO: 699490
guuacagccacauuucuua

SEQ ID NO: 699492 - RNA, 19 nt, Artificial Sequence
  Description of Artificial Sequence: Synthetic oligonucleotide
  Sense strand starting at position 674 of SEQ ID NO: 586198
guggcuguaacguacuuau

SEQ ID NO: 699493 - RNA, 19 nt, Artificial Sequence
  Description of Artificial Sequence: Synthetic oligonucleotide
  Antisense strand to SEQ ID NO: 699492
auaaguacguuacagccac

SEQ ID NO: 699494 - RNA, 19 nt, Artificial Sequence
  Description of Artificial Sequence: Synthetic oligonucleotide
  Sense strand starting at position 677 of SEQ ID NO: 586198
gcuguaacguacuuauuaa

SEQ ID NO: 699495 - RNA, 19 nt, Artificial Sequence
  Description of Artificial Sequence: Synthetic oligonucleotide
  Antisense strand to SEQ ID NO: 699494
uuaauaaguacguuacagc

SEQ ID NO: 699496 - RNA, 19 nt, Artificial Sequence
  Description of Artificial Sequence: Synthetic oligonucleotide
  Sense strand starting at position 905 of SEQ ID NO: 586198
gcaggaaucucgcuugaac

SEQ ID NO: 699497 - RNA, 19 nt, Artificial Sequence
  Description of Artificial Sequence: Synthetic oligonucleotide
  Antisense strand to SEQ ID NO: 699496
guucaagcgagauuccugc

SEQ ID NO: 699498 - RNA, 19 nt, Artificial Sequence
  Description of Artificial Sequence: Synthetic oligonucleotide
  Sense strand starting at position 907 of SEQ ID NO: 586198
aggaaucucgcuugaaccu

SEQ ID NO: 699499 - RNA, 19 nt, Artificial Sequence
  Description of Artificial Sequence: Synthetic oligonucleotide
  Antisense strand to SEQ ID NO: 699498
agguucaagcgagauuccu

SEQ ID NO: 699500 - RNA, 19 nt, Artificial Sequence
  Description of Artificial Sequence: Synthetic oligonucleotide
  Sense strand starting at position 1061 of SEQ ID NO: 586198
uucguaaaguucccguaga

SEQ ID NO: 699501 - RNA, 19 nt, Artificial Sequence
  Description of Artificial Sequence: Synthetic oligonucleotide
  Antisense strand to SEQ ID NO: 699500
ucuacgggaacuuuacgaa

SEQ ID NO: 699502 - RNA, 19 nt, Artificial Sequence
  Description of Artificial Sequence: Synthetic oligonucleotide
  Sense strand starting at position 1066 of SEQ ID NO: 586198
aaaguucccguagaacuuu

SEQ ID NO: 699503 - RNA, 19 nt, Artificial Sequence
  Description of Artificial Sequence: Synthetic oligonucleotide
  Antisense strand to SEQ ID NO: 699502
aaaguucuacgggaacuuu

SEQ ID NO: 699504 - RNA, 19 nt, Artificial Sequence
  Description of Artificial Sequence: Synthetic oligonucleotide
  Sense strand starting at position 1109 of SEQ ID NO: 586198
cagggagaucuuugcuguu

SEQ ID NO: 699505 - RNA, 19 nt, Artificial Sequence
  Description of Artificial Sequence: Synthetic oligonucleotide
  Antisense strand to SEQ ID NO: 699504
aacagcaaagaucucccug

SEQ ID NO: 699506 - RNA, 19 nt, Artificial Sequence
  Description of Artificial Sequence: Synthetic oligonucleotide
  Sense strand starting at position 1111 of SEQ ID NO: 586198
gggagaucuuugcuguuga

SEQ ID NO: 699507 - RNA, 19 nt, Artificial Sequence
  Description of Artificial Sequence: Synthetic oligonucleotide
  Antisense strand to SEQ ID NO: 699506
ucaacagcaaagaucuccc

SEQ ID NO: 699508 - RNA, 19 nt, Artificial Sequence
  Description of Artificial Sequence: Synthetic oligonucleotide
  Sense strand starting at position 1112 of SEQ ID NO: 586198
ggagaucuuugcuguugau

SEQ ID NO: 699509 - RNA, 19 nt, Artificial Sequence
  Description of Artificial Sequence: Synthetic oligonucleotide
  Antisense strand to SEQ ID NO: 699508
aucaacagcaaagaucucc

SEQ ID NO: 699510 - RNA, 19 nt, Artificial Sequence
  Description of Artificial Sequence: Synthetic oligonucleotide
  Sense strand starting at position 1206 of SEQ ID NO: 586198
gaaucuugagcccaggagu

SEQ ID NO: 699511 - RNA, 19 nt, Artificial Sequence
  Description of Artificial Sequence: Synthetic oligonucleotide
  Antisense strand to SEQ ID NO: 699510
acuccugggcucaagauuc

SEQ ID NO: 699512 - RNA, 19 nt, Artificial Sequence
  Description of Artificial Sequence: Synthetic oligonucleotide
  Sense strand starting at position 1569 of SEQ ID NO: 586198
gccaguuugucccuuuaac

SEQ ID NO: 699513 - RNA, 19 nt, Artificial Sequence
  Description of Artificial Sequence: Synthetic oligonucleotide
  Antisense strand to SEQ ID NO: 699512
guuaaagggacaaacuggc

SEQ ID NO: 699514 - RNA, 19 nt, Artificial Sequence
  Description of Artificial Sequence: Synthetic oligonucleotide
  Sense strand starting at position 2495 of SEQ ID NO: 586198
gcuuuccaccagcaagaau

SEQ ID NO: 699515 - RNA, 19 nt, Artificial Sequence
  Description of Artificial Sequence: Synthetic oligonucleotide
  Antisense strand to SEQ ID NO: 699514
auucuugcugguggaaagc

SEQ ID NO: 699516 - RNA, 19 nt, Artificial Sequence
  Description of Artificial Sequence: Synthetic oligonucleotide
  Sense strand starting at position 2771 of SEQ ID NO: 586198
gcagucaugucuccucuga

SEQ ID NO: 699517 - RNA, 19 nt, Artificial Sequence
  Description of Artificial Sequence: Synthetic oligonucleotide
  Antisense strand to SEQ ID NO: 699516
ucagaggagacaugacugc

SEQ ID NO: 699518 - RNA, 19 nt, Artificial Sequence
  Description of Artificial Sequence: Synthetic oligonucleotide
  Sense strand starting at position 2773 of SEQ ID NO: 586198
agucaugucuccucugaaa

SEQ ID NO: 699519 - RNA, 19 nt, Artificial Sequence
  Description of Artificial Sequence: Synthetic oligonucleotide
  Antisense strand to SEQ ID NO: 699518
uuucagaggagacaugacu

SEQ ID NO: 699520 - RNA, 19 nt, Artificial Sequence
  Description of Artificial Sequence: Synthetic oligonucleotide
  Sense strand starting at position 2784 of SEQ ID NO: 586198
cucugaaauagguggcagu

SEQ ID NO: 699521 - RNA, 19 nt, Artificial Sequence
  Description of Artificial Sequence: Synthetic oligonucleotide
  Antisense strand to SEQ ID NO: 699520
acugccaccuauuucagag

SEQ ID NO: 699522 - RNA, 19 nt, Artificial Sequence
  Description of Artificial Sequence: Synthetic oligonucleotide
  Sense strand starting at position 2837 of SEQ ID NO: 586198
cuugaauguggcuagagga

SEQ ID NO: 699523 - RNA, 19 nt, Artificial Sequence
  Description of Artificial Sequence: Synthetic oligonucleotide
  Antisense strand to SEQ ID NO: 699522
uccucuagccacauucaag

SEQ ID NO: 699524 - RNA, 19 nt, Artificial Sequence
  Description of Artificial Sequence: Synthetic oligonucleotide
  Sense strand starting at position 2879 of SEQ ID NO: 586198
caggaaggugccugaugua

SEQ ID NO: 699525 - RNA, 19 nt, Artificial Sequence
  Description of Artificial Sequence: Synthetic oligonucleotide
  Antisense strand to SEQ ID NO: 699524
uacaucaggcaccuuccug

SEQ ID NO: 699526 - RNA, 19 nt, Artificial Sequence
  Description of Artificial Sequence: Synthetic oligonucleotide
  Sense strand starting at position 2882 of SEQ ID NO: 586198
gaaggugccugauguacaa

SEQ ID NO: 699527 - RNA, 19 nt, Artificial Sequence
  Description of Artificial Sequence: Synthetic oligonucleotide
  Antisense strand to SEQ ID NO: 699526
uuguacaucaggcaccuuc

SEQ ID NO: 699528 - RNA, 19 nt, Artificial Sequence
  Description of Artificial Sequence: Synthetic oligonucleotide
  Sense strand starting at position 2936 of SEQ ID NO: 586198
cacucuguuguugagauga

SEQ ID NO: 699529 - RNA, 19 nt, Artificial Sequence
  Description of Artificial Sequence: Synthetic oligonucleotide
  Antisense strand to SEQ ID NO: 699528
ucaucucaacaacagagug

SEQ ID NO: 699530 - RNA, 19 nt, Artificial Sequence
  Description of Artificial Sequence: Synthetic oligonucleotide
  Sense strand starting at position 2938 of SEQ ID NO: 586198
cucuguuguugagaugaaa

SEQ ID NO: 699531 - RNA, 19 nt, Artificial Sequence
  Description of Artificial Sequence: Synthetic oligonucleotide
  Antisense strand to SEQ ID NO: 699530
uuucaucucaacaacagag

SEQ ID NO: 699532 - RNA, 19 nt, Artificial Sequence
  Description of Artificial Sequence: Synthetic oligonucleotide
  Sense strand starting at position 3089 of SEQ ID NO: 586198
uccacaugcccagaguuua

SEQ ID NO: 699533 - RNA, 19 nt, Artificial Sequence
  Description of Artificial Sequence: Synthetic oligonucleotide
  Antisense strand to SEQ ID NO: 699532
uaaacucugggcaugugga

SEQ ID NO: 699534 - RNA, 19 nt, Artificial Sequence
  Description of Artificial Sequence: Synthetic oligonucleotide
  Sense strand starting at position 3131 of SEQ ID NO: 586198
ccuagaaccucugagaagu

SEQ ID NO: 699535 - RNA, 19 nt, Artificial Sequence
  Description of Artificial Sequence: Synthetic oligonucleotide
  Antisense strand to SEQ ID NO: 699534
acuucucagagguucuagg

SEQ ID NO: 699536 - RNA, 19 nt, Artificial Sequence
  Description of Artificial Sequence: Synthetic oligonucleotide
  Sense strand starting at position 3262 of SEQ ID NO: 586198
gaaagugauuuauaagcac

SEQ ID NO: 699537 - RNA, 19 nt, Artificial Sequence
  Description of Artificial Sequence: Synthetic oligonucleotide
  Antisense strand to SEQ ID NO: 699536
gugcuuauaaaucacuuuc

SEQ ID NO: 699538 - RNA, 19 nt, Artificial Sequence
  Description of Artificial Sequence: Synthetic oligonucleotide
  Sense strand starting at position 3701 of SEQ ID NO: 586198
gcuggacugugacauccau

SEQ ID NO: 699539 - RNA, 19 nt, Artificial Sequence
  Description of Artificial Sequence: Synthetic oligonucleotide
  Antisense strand to SEQ ID NO: 699538
auggaugucacaguccagc

SEQ ID NO: 699540 - RNA, 19 nt, Artificial Sequence
  Description of Artificial Sequence: Synthetic oligonucleotide
  Sense strand starting at position 3707 of SEQ ID NO: 586198
cugugacauccaugagagu

SEQ ID NO: 699541 - RNA, 19 nt, Artificial Sequence
  Description of Artificial Sequence: Synthetic oligonucleotide
  Antisense strand to SEQ ID NO: 699540
acucucauggaugucacag

SEQ ID NO: 699542 - RNA, 19 nt, Artificial Sequence
  Description of Artificial Sequence: Synthetic oligonucleotide
  Sense strand starting at position 3710 of SEQ ID NO: 586198
ugacauccaugagagugaa

SEQ ID NO: 699543 - RNA, 19 nt, Artificial Sequence
  Description of Artificial Sequence: Synthetic oligonucleotide
  Antisense strand to SEQ ID NO: 699542
uucacucucauggauguca

SEQ ID NO: 699544 - RNA, 19 nt, Artificial Sequence
  Description of Artificial Sequence: Synthetic oligonucleotide
  Sense strand starting at position 3778 of SEQ ID NO: 586198
ccaccuacuuguguccaga

SEQ ID NO: 699545 - RNA, 19 nt, Artificial Sequence
  Description of Artificial Sequence: Synthetic oligonucleotide
  Antisense strand to SEQ ID NO: 699544
ucuggacacaaguaggugg

SEQ ID NO: 699546 - RNA, 19 nt, Artificial Sequence
  Description of Artificial Sequence: Synthetic oligonucleotide
  Sense strand starting at position 3781 of SEQ ID NO: 586198
ccuacuuguguccagaugu

SEQ ID NO: 699547 - RNA, 19 nt, Artificial Sequence
  Description of Artificial Sequence: Synthetic oligonucleotide
  Antisense strand to SEQ ID NO: 699546
acaucuggacacaaguagg

SEQ ID NO: 699548 - RNA, 19 nt, Artificial Sequence
  Description of Artificial Sequence: Synthetic oligonucleotide
  Sense strand starting at position 3787 of SEQ ID NO: 586198
uguguccagaugugacaaa

SEQ ID NO: 699549 - RNA, 19 nt, Artificial Sequence
  Description of Artificial Sequence: Synthetic oligonucleotide
  Antisense strand to SEQ ID NO: 699548
uuugucacaucuggacaca

SEQ ID NO: 699550 - RNA, 19 nt, Artificial Sequence
  Description of Artificial Sequence: Synthetic oligonucleotide
  Sense strand starting at position 3854 of SEQ ID NO: 586198
acaagaguuuccuguggga

SEQ ID NO: 699551 - RNA, 19 nt, Artificial Sequence
  Description of Artificial Sequence: Synthetic oligonucleotide
  Antisense strand to SEQ ID NO: 699550
ucccacaggaaacucuugu

SEQ ID NO: 699552 - RNA, 19 nt, Artificial Sequence
  Description of Artificial Sequence: Synthetic oligonucleotide
  Sense strand starting at position 3856 of SEQ ID NO: 586198
aagaguuuccugugggaug

SEQ ID NO: 699553 - RNA, 19 nt, Artificial Sequence
  Description of Artificial Sequence: Synthetic oligonucleotide
  Antisense strand to SEQ ID NO: 699552
caucccacaggaaacucuu

SEQ ID NO: 699554 - RNA, 19 nt, Artificial Sequence
  Description of Artificial Sequence: Synthetic oligonucleotide
  Sense strand starting at position 3857 of SEQ ID NO: 586198
agaguuuccugugggauga

SEQ ID NO: 699555 - RNA, 19 nt, Artificial Sequence
  Description of Artificial Sequence: Synthetic oligonucleotide
  Antisense strand to SEQ ID NO: 699554
ucaucccacaggaaacucu

SEQ ID NO: 699556 - RNA, 19 nt, Artificial Sequence
  Description of Artificial Sequence: Synthetic oligonucleotide
  Sense strand starting at position 3859 of SEQ ID NO: 586198
aguuuccugugggaugaau

SEQ ID NO: 699557 - RNA, 19 nt, Artificial Sequence
  Description of Artificial Sequence: Synthetic oligonucleotide
  Antisense strand to SEQ ID NO: 699556
auucaucccacaggaaacu

SEQ ID NO: 699558 - RNA, 19 nt, Artificial Sequence
  Description of Artificial Sequence: Synthetic oligonucleotide
  Sense strand starting at position 3861 of SEQ ID NO: 586198
uuuccugugggaugaauga

SEQ ID NO: 699559 - RNA, 19 nt, Artificial Sequence
  Description of Artificial Sequence: Synthetic oligonucleotide
  Antisense strand to SEQ ID NO: 699558
ucauucaucccacaggaaa

SEQ ID NO: 699560 - RNA, 19 nt, Artificial Sequence
  Description of Artificial Sequence: Synthetic oligonucleotide
  Sense strand starting at position 3904 of SEQ ID NO: 586198
aaaguuuacuuaggaaaug

SEQ ID NO: 699561 - RNA, 19 nt, Artificial Sequence
  Description of Artificial Sequence: Synthetic oligonucleotide
  Antisense strand to SEQ ID NO: 699560
cauuuccuaaguaaacuuu

SEQ ID NO: 699562 - RNA, 19 nt, Artificial Sequence
  Description of Artificial Sequence: Synthetic oligonucleotide
  Sense strand starting at position 3905 of SEQ ID NO: 586198
aaguuuacuuaggaaaugu

SEQ ID NO: 699563 - RNA, 19 nt, Artificial Sequence
  Description of Artificial Sequence: Synthetic oligonucleotide
  Antisense strand to SEQ ID NO: 699562
acauuuccuaaguaaacuu

SEQ ID NO: 699564 - RNA, 19 nt, Artificial Sequence
  Description of Artificial Sequence: Synthetic oligonucleotide
  Sense strand starting at position 3914 of SEQ ID NO: 586198
uaggaaaugugcuauucca

SEQ ID NO: 699565 - RNA, 19 nt, Artificial Sequence
  Description of Artificial Sequence: Synthetic oligonucleotide
  Antisense strand to SEQ ID NO: 699564
uggaauagcacauuuccua

SEQ ID NO: 699566 - RNA, 19 nt, Artificial Sequence
  Description of Artificial Sequence: Synthetic oligonucleotide
  Sense strand starting at position 3921 of SEQ ID NO: 586198
ugugcuauuccaguuagcu

SEQ ID NO: 699567 - RNA, 19 nt, Artificial Sequence
  Description of Artificial Sequence: Synthetic oligonucleotide
  Antisense strand to SEQ ID NO: 699566
agcuaacuggaauagcaca

SEQ ID NO: 699568 - RNA, 19 nt, Artificial Sequence
  Description of Artificial Sequence: Synthetic oligonucleotide
  Sense strand starting at position 56 of SEQ ID NO: 586199
ugcugugaugaacauacuu

SEQ ID NO: 699569 - RNA, 19 nt, Artificial Sequence
  Description of Artificial Sequence: Synthetic oligonucleotide
  Antisense strand to SEQ ID NO: 699568
aaguauguucaucacagca

SEQ ID NO: 699570 - RNA, 19 nt, Artificial Sequence
  Description of Artificial Sequence: Synthetic oligonucleotide
  Sense strand starting at position 140 of SEQ ID NO: 586199
agaauccaauaaugggauu

SEQ ID NO: 699571 - RNA, 19 nt, Artificial Sequence
  Description of Artificial Sequence: Synthetic oligonucleotide
  Antisense strand to SEQ ID NO: 699570
aaucccauuauuggauucu

SEQ ID NO: 699572 - RNA, 19 nt, Artificial Sequence
  Description of Artificial Sequence: Synthetic oligonucleotide
  Sense strand starting at position 251 of SEQ ID NO: 586199
cagggaauuuggugaagca

SEQ ID NO: 699573 - RNA, 19 nt, Artificial Sequence
  Description of Artificial Sequence: Synthetic oligonucleotide
  Antisense strand to SEQ ID NO: 699572
ugcuucaccaaauucccug

SEQ ID NO: 699574 - RNA, 19 nt, Artificial Sequence
  Description of Artificial Sequence: Synthetic oligonucleotide
  Sense strand starting at position 290 of SEQ ID NO: 586199
cagcaaauucugggaguau

SEQ ID NO: 699575 - RNA, 19 nt, Artificial Sequence
  Description of Artificial Sequence: Synthetic oligonucleotide
  Antisense strand to SEQ ID NO: 699574
auacucccagaauuugcug

SEQ ID NO: 699576 - RNA, 19 nt, Artificial Sequence
  Description of Artificial Sequence: Synthetic oligonucleotide
  Sense strand starting at position 421 of SEQ ID NO: 586199
uuagaauguaguggaugaa

SEQ ID NO: 699577 - RNA, 19 nt, Artificial Sequence
  Description of Artificial Sequence: Synthetic oligonucleotide
  Antisense strand to SEQ ID NO: 699576
uucauccacuacauucuaa

SEQ ID NO: 699578 - RNA, 19 nt, Artificial Sequence
  Description of Artificial Sequence: Synthetic oligonucleotide
  Sense strand starting at position 437 of SEQ ID NO: 586199
gaauuugauguguggcuuu

SEQ ID NO: 699579 - RNA, 19 nt, Artificial Sequence
  Description of Artificial Sequence: Synthetic oligonucleotide
  Antisense strand to SEQ ID NO: 699578
aaagccacacaucaaauuc

SEQ ID NO: 699580 - RNA, 19 nt, Artificial Sequence
  Description of Artificial Sequence: Synthetic oligonucleotide
  Sense strand starting at position 467 of SEQ ID NO: 586199
gccacuuacuucucgaguu

SEQ ID NO: 699581 - RNA, 19 nt, Artificial Sequence
  Description of Artificial Sequence: Synthetic oligonucleotide
  Antisense strand to SEQ ID NO: 699580
aacucgagaaguaaguggc

SEQ ID NO: 699582 - RNA, 19 nt, Artificial Sequence
  Description of Artificial Sequence: Synthetic oligonucleotide
  Sense strand starting at position 477 of SEQ ID NO: 586199
ucucgaguuccuuacagac

SEQ ID NO: 699583 - RNA, 19 nt, Artificial Sequence
  Description of Artificial Sequence: Synthetic oligonucleotide
  Antisense strand to SEQ ID NO: 699582
gucuguaaggaacucgaga

SEQ ID NO: 699584 - RNA, 19 nt, Artificial Sequence
  Description of Artificial Sequence: Synthetic oligonucleotide
  Sense strand starting at position 1049 of SEQ ID NO: 586199
gacaguaugucagcuccuu

SEQ ID NO: 699585 - RNA, 19 nt, Artificial Sequence
  Description of Artificial Sequence: Synthetic oligonucleotide
  Antisense strand to SEQ ID NO: 699584
aaggagcugacauacuguc

SEQ ID NO: 699586 - RNA, 19 nt, Artificial Sequence
  Description of Artificial Sequence: Synthetic oligonucleotide
  Sense strand starting at position 1252 of SEQ ID NO: 586199
acugaaagccgucaaauca

SEQ ID NO: 699587 - RNA, 19 nt, Artificial Sequence
  Description of Artificial Sequence: Synthetic oligonucleotide
  Antisense strand to SEQ ID NO: 699586
ugauuugacggcuuucagu

SEQ ID NO: 699588 - RNA, 19 nt, Artificial Sequence
  Description of Artificial Sequence: Synthetic oligonucleotide
  Sense strand starting at position 1259 of SEQ ID NO: 586199
gccgucaaaucaguaauaa

SEQ ID NO: 699589 - RNA, 19 nt, Artificial Sequence
  Description of Artificial Sequence: Synthetic oligonucleotide
  Antisense strand to SEQ ID NO: 699588
uuauuacugauuugacggc

SEQ ID NO: 699590 - RNA, 19 nt, Artificial Sequence
  Description of Artificial Sequence: Synthetic oligonucleotide
  Sense strand starting at position 1260 of SEQ ID NO: 586199
ccgucaaaucaguaauaaa

SEQ ID NO: 699591 - RNA, 19 nt, Artificial Sequence
  Description of Artificial Sequence: Synthetic oligonucleotide
  Antisense strand to SEQ ID NO: 699590
uuuauuacugauuugacgg

SEQ ID NO: 699592 - RNA, 19 nt, Artificial Sequence
  Description of Artificial Sequence: Synthetic oligonucleotide
  Sense strand starting at position 1286 of SEQ ID NO: 586199
cuaaauaaguucuauggaa

SEQ ID NO: 699593 - RNA, 19 nt, Artificial Sequence
  Description of Artificial Sequence: Synthetic oligonucleotide
  Antisense strand to SEQ ID NO: 699592
uuccauagaacuuauuuag

SEQ ID NO: 699594 - RNA, 19 nt, Artificial Sequence
  Description of Artificial Sequence: Synthetic oligonucleotide
  Sense strand starting at position 1358 of SEQ ID NO: 586199
ccagaaugaucauccagua

SEQ ID NO: 699595 - RNA, 19 nt, Artificial Sequence
  Description of Artificial Sequence: Synthetic oligonucleotide
  Antisense strand to SEQ ID NO: 699594
uacuggaugaucauucugg

SEQ ID NO: 699596 - RNA, 19 nt, Artificial Sequence
  Description of Artificial Sequence: Synthetic oligonucleotide
  Sense strand starting at position 1392 of SEQ ID NO: 586199
gcuacuuuguggccaucaa

SEQ ID NO: 699597 - RNA, 19 nt, Artificial Sequence
  Description of Artificial Sequence: Synthetic oligonucleotide
  Antisense strand to SEQ ID NO: 699596
uugauggccacaaaguagc

SEQ ID NO: 699598 - RNA, 19 nt, Artificial Sequence
  Description of Artificial Sequence: Synthetic oligonucleotide
  Sense strand starting at position 1549 of SEQ ID NO: 586199
ggacaagaaucccuuugca

SEQ ID NO: 699599 - RNA, 19 nt, Artificial Sequence
  Description of Artificial Sequence: Synthetic oligonucleotide
  Antisense strand to SEQ ID NO: 699598
ugcaaagggauucuugucc

SEQ ID NO: 699600 - RNA, 19 nt, Artificial Sequence
  Description of Artificial Sequence: Synthetic oligonucleotide
  Sense strand starting at position 1765 of SEQ ID NO: 586199
ggacauaccugggacauga

SEQ ID NO: 699601 - RNA, 19 nt, Artificial Sequence
  Description of Artificial Sequence: Synthetic oligonucleotide
  Antisense strand to SEQ ID NO: 699600
ucaugucccagguaugucc

SEQ ID NO: 699602 - RNA, 19 nt, Artificial Sequence
  Description of Artificial Sequence: Synthetic oligonucleotide
  Sense strand starting at position 2487 of SEQ ID NO: 586199
ggguggagucugcaggauu

SEQ ID NO: 699603 - RNA, 19 nt, Artificial Sequence
  Description of Artificial Sequence: Synthetic oligonucleotide
  Antisense strand to SEQ ID NO: 699602
aauccugcagacuccaccc

SEQ ID NO: 699604 - RNA, 19 nt, Artificial Sequence
  Description of Artificial Sequence: Synthetic oligonucleotide
  Sense strand starting at position 2572 of SEQ ID NO: 586199
auggcaaaguccuuuacuu

SEQ ID NO: 699605 - RNA, 19 nt, Artificial Sequence
  Description of Artificial Sequence: Synthetic oligonucleotide
  Antisense strand to SEQ ID NO: 699604
aaguaaaggacuuugccau

SEQ ID NO: 699606 - RNA, 19 nt, Artificial Sequence
  Description of Artificial Sequence: Synthetic oligonucleotide
  Sense strand starting at position 2644 of SEQ ID NO: 586199
auacaaaugugagccauga

SEQ ID NO: 699607 - RNA, 19 nt, Artificial Sequence
  Description of Artificial Sequence: Synthetic oligonucleotide
  Antisense strand to SEQ ID NO: 699606
ucauggcucacauuuguau

SEQ ID NO: 699608 - RNA, 19 nt, Artificial Sequence
  Description of Artificial Sequence: Synthetic oligonucleotide
  Sense strand starting at position 2648 of SEQ ID NO: 586199
aaaugugagccaugaaucu

SEQ ID NO: 699609 - RNA, 19 nt, Artificial Sequence
  Description of Artificial Sequence: Synthetic oligonucleotide
  Antisense strand to SEQ ID NO: 699608
agauucauggcucacauuu

SEQ ID NO: 699610 - RNA, 19 nt, Artificial Sequence
  Description of Artificial Sequence: Synthetic oligonucleotide
  Sense strand starting at position 2687 of SEQ ID NO: 586199
uccugugauggcugacaau

SEQ ID NO: 699611 - RNA, 19 nt, Artificial Sequence
  Description of Artificial Sequence: Synthetic oligonucleotide
  Antisense strand to SEQ ID NO: 699610
auugucagccaucacagga

SEQ ID NO: 699612 - RNA, 19 nt, Artificial Sequence
  Description of Artificial Sequence: Synthetic oligonucleotide
  Sense strand starting at position 2763 of SEQ ID NO: 586199
agguuagguuguguguaua

SEQ ID NO: 699613 - RNA, 19 nt, Artificial Sequence
  Description of Artificial Sequence: Synthetic oligonucleotide
  Antisense strand to SEQ ID NO: 699612
uauacacacaaccuaaccu

SEQ ID NO: 699614 - RNA, 19 nt, Artificial Sequence
  Description of Artificial Sequence: Synthetic oligonucleotide
  Sense strand starting at position 2848 of SEQ ID NO: 586199
ccgcuugucaaaggagaga

SEQ ID NO: 699615 - RNA, 19 nt, Artificial Sequence
  Description of Artificial Sequence: Synthetic oligonucleotide
  Antisense strand to SEQ ID NO: 699614
ucucuccuuugacaagcgg

SEQ ID NO: 699616 - RNA, 19 nt, Artificial Sequence
  Description of Artificial Sequence: Synthetic oligonucleotide
  Sense strand starting at position 2913 of SEQ ID NO: 586199
ucucguaauagcgagugaa

SEQ ID NO: 699617 - RNA, 19 nt, Artificial Sequence
  Description of Artificial Sequence: Synthetic oligonucleotide
  Antisense strand to SEQ ID NO: 699616
uucacucgcuauuacgaga

SEQ ID NO: 699618 - RNA, 19 nt, Artificial Sequence
  Description of Artificial Sequence: Synthetic oligonucleotide
  Sense strand starting at position 2916 of SEQ ID NO: 586199
cguaauagcgagugaauuc

SEQ ID NO: 699619 - RNA, 19 nt, Artificial Sequence
  Description of Artificial Sequence: Synthetic oligonucleotide
  Antisense strand to SEQ ID NO: 699618
gaauucacucgcuauuacg

SEQ ID NO: 699620 - RNA, 19 nt, Artificial Sequence
  Description of Artificial Sequence: Synthetic oligonucleotide
  Sense strand starting at position 3074 of SEQ ID NO: 586199
gugagauugugagucaacu

SEQ ID NO: 699621 - RNA, 19 nt, Artificial Sequence
  Description of Artificial Sequence: Synthetic oligonucleotide
  Antisense strand to SEQ ID NO: 699620
aguugacucacaaucucac

SEQ ID NO: 699622 - RNA, 19 nt, Artificial Sequence
  Description of Artificial Sequence: Synthetic oligonucleotide
  Sense strand starting at position 3175 of SEQ ID NO: 586199
uagaaaugagccugcagga

SEQ ID NO: 699623 - RNA, 19 nt, Artificial Sequence
  Description of Artificial Sequence: Synthetic oligonucleotide
  Antisense strand to SEQ ID NO: 699622
uccugcaggcucauuucua

SEQ ID NO: 699624 - RNA, 19 nt, Artificial Sequence
  Description of Artificial Sequence: Synthetic oligonucleotide
  Sense strand starting at position 3228 of SEQ ID NO: 586199
gaagaagggcguugaaacu

SEQ ID NO: 699625 - RNA, 19 nt, Artificial Sequence
  Description of Artificial Sequence: Synthetic oligonucleotide
  Antisense strand to SEQ ID NO: 699624
aguuucaacgcccuucuuc

SEQ ID NO: 699626 - RNA, 19 nt, Artificial Sequence
  Description of Artificial Sequence: Synthetic oligonucleotide
  Sense strand starting at position 3238 of SEQ ID NO: 586199
guugaaacugugugccaaa

SEQ ID NO: 699627 - RNA, 19 nt, Artificial Sequence
  Description of Artificial Sequence: Synthetic oligonucleotide
  Antisense strand to SEQ ID NO: 699626
uuuggcacacaguuucaac

SEQ ID NO: 699628 - RNA, 19 nt, Artificial Sequence
  Description of Artificial Sequence: Synthetic oligonucleotide
  Sense strand starting at position 3245 of SEQ ID NO: 586199
cugugugccaaagaguuaa

SEQ ID NO: 699629 - RNA, 19 nt, Artificial Sequence
  Description of Artificial Sequence: Synthetic oligonucleotide
  Antisense strand to SEQ ID NO: 699628
uuaacucuuuggcacacag

SEQ ID NO: 699630 - RNA, 19 nt, Artificial Sequence
  Description of Artificial Sequence: Synthetic oligonucleotide
  Sense strand starting at position 3331 of SEQ ID NO: 586199
ugaaaugccugggcuugua

SEQ ID NO: 699631 - RNA, 19 nt, Artificial Sequence
  Description of Artificial Sequence: Synthetic oligonucleotide
  Antisense strand to SEQ ID NO: 699630
uacaagcccaggcauuuca

SEQ ID NO: 699632 - RNA, 19 nt, Artificial Sequence
  Description of Artificial Sequence: Synthetic oligonucleotide
  Sense strand starting at position 3339 of SEQ ID NO: 586199
cugggcuuguagguuaaua

SEQ ID NO: 699633 - RNA, 19 nt, Artificial Sequence
  Description of Artificial Sequence: Synthetic oligonucleotide
  Antisense strand to SEQ ID NO: 699632
uauuaaccuacaagcccag

SEQ ID NO: 699634 - RNA, 19 nt, Artificial Sequence
  Description of Artificial Sequence: Synthetic oligonucleotide
  Sense strand starting at position 3341 of SEQ ID NO: 586199
gggcuuguagguuaauaaa

SEQ ID NO: 699635 - RNA, 19 nt, Artificial Sequence
  Description of Artificial Sequence: Synthetic oligonucleotide
  Antisense strand to SEQ ID NO: 699634
uuuauuaaccuacaagccc

SEQ ID NO: 699636 - RNA, 19 nt, Artificial Sequence
  Description of Artificial Sequence: Synthetic oligonucleotide
  Sense strand starting at position 3364 of SEQ ID NO: 586199
gcugaaauccacuggaaca

SEQ ID NO: 699637 - RNA, 19 nt, Artificial Sequence
  Description of Artificial Sequence: Synthetic oligonucleotide
  Antisense strand to SEQ ID NO: 699636
uguuccaguggauuucagc

SEQ ID NO: 699638 - RNA, 19 nt, Artificial Sequence
  Description of Artificial Sequence: Synthetic oligonucleotide
  Sense strand starting at position 3654 of SEQ ID NO: 586199
uuucuuuguugguugacau

SEQ ID NO: 699639 - RNA, 19 nt, Artificial Sequence
  Description of Artificial Sequence: Synthetic oligonucleotide
  Antisense strand to SEQ ID NO: 699638
augucaaccaacaaagaaa

SEQ ID NO: 699640 - RNA, 19 nt, Artificial Sequence
  Description of Artificial Sequence: Synthetic oligonucleotide
  Sense strand starting at position 3743 of SEQ ID NO: 586199
ccuccuuugcuugguaaca

SEQ ID NO: 699641 - RNA, 19 nt, Artificial Sequence
  Description of Artificial Sequence: Synthetic oligonucleotide
  Antisense strand to SEQ ID NO: 699640
uguuaccaagcaaaggagg

SEQ ID NO: 699642 - RNA, 19 nt, Artificial Sequence
  Description of Artificial Sequence: Synthetic oligonucleotide
  Sense strand starting at position 3850 of SEQ ID NO: 586199
gugaguguuaccuggagug

SEQ ID NO: 699643 - RNA, 19 nt, Artificial Sequence
  Description of Artificial Sequence: Synthetic oligonucleotide
  Antisense strand to SEQ ID NO: 699642
cacuccagguaacacucac

SEQ ID NO: 699644 - RNA, 19 nt, Artificial Sequence
  Description of Artificial Sequence: Synthetic oligonucleotide
  Sense strand starting at position 3912 of SEQ ID NO: 586199
agucuugguuuauuucuua

SEQ ID NO: 699645 - RNA, 19 nt, Artificial Sequence
  Description of Artificial Sequence: Synthetic oligonucleotide
  Antisense strand to SEQ ID NO: 699644
uaagaaauaaaccaagacu

SEQ ID NO: 699646 - RNA, 19 nt, Artificial Sequence
  Description of Artificial Sequence: Synthetic oligonucleotide
  Sense strand starting at position 3915 of SEQ ID NO: 586199
cuugguuuauuucuuaguu

SEQ ID NO: 699647 - RNA, 19 nt, Artificial Sequence
  Description of Artificial Sequence: Synthetic oligonucleotide
  Antisense strand to SEQ ID NO: 699646
aacuaagaaauaaaccaag

SEQ ID NO: 699648 - RNA, 19 nt, Artificial Sequence
  Description of Artificial Sequence: Synthetic oligonucleotide
  Sense strand starting at position 103 of SEQ ID NO: 586200
agguuuaggcagugauaau

SEQ ID NO: 699649 - RNA, 19 nt, Artificial Sequence
  Description of Artificial Sequence: Synthetic oligonucleotide
  Antisense strand to SEQ ID NO: 699648
auuaucacugccuaaaccu

SEQ ID NO: 699650 - RNA, 19 nt, Artificial Sequence
  Description of Artificial Sequence: Synthetic oligonucleotide
  Sense strand starting at position 104 of SEQ ID NO: 586200
gguuuaggcagugauaauc

SEQ ID NO: 699651 - RNA, 19 nt, Artificial Sequence
  Description of Artificial Sequence: Synthetic oligonucleotide
  Antisense strand to SEQ ID NO: 699650
gauuaucacugccuaaacc

SEQ ID NO: 699652 - RNA, 19 nt, Artificial Sequence
  Description of Artificial Sequence: Synthetic oligonucleotide
  Sense strand starting at position 142 of SEQ ID NO: 586200
gcacauauacgucauugau

SEQ ID NO: 699653 - RNA, 19 nt, Artificial Sequence
  Description of Artificial Sequence: Synthetic oligonucleotide
  Antisense strand to SEQ ID NO: 699652
aucaaugacguauaugugc

SEQ ID NO: 699654 - RNA, 19 nt, Artificial Sequence
  Description of Artificial Sequence: Synthetic oligonucleotide
  Sense strand starting at position 144 of SEQ ID NO: 586200
acauauacgucauugauua

SEQ ID NO: 699655 - RNA, 19 nt, Artificial Sequence
  Description of Artificial Sequence: Synthetic oligonucleotide
  Antisense strand to SEQ ID NO: 699654
uaaucaaugacguauaugu

SEQ ID NO: 699656 - RNA, 19 nt, Artificial Sequence
  Description of Artificial Sequence: Synthetic oligonucleotide
  Sense strand starting at position 148 of SEQ ID NO: 586200
auacgucauugauuaucau

SEQ ID NO: 699657 - RNA, 19 nt, Artificial Sequence
  Description of Artificial Sequence: Synthetic oligonucleotide
  Antisense strand to SEQ ID NO: 699656
augauaaucaaugacguau

SEQ ID NO: 699658 - RNA, 19 nt, Artificial Sequence
  Description of Artificial Sequence: Synthetic oligonucleotide
  Sense strand starting at position 261 of SEQ ID NO: 586200
augggcuuucccugacaug

SEQ ID NO: 699659 - RNA, 19 nt, Artificial Sequence
  Description of Artificial Sequence: Synthetic oligonucleotide
  Antisense strand to SEQ ID NO: 699658
caugucagggaaagcccau

SEQ ID NO: 699660 - RNA, 19 nt, Artificial Sequence
  Description of Artificial Sequence: Synthetic oligonucleotide
  Sense strand starting at position 346 of SEQ ID NO: 586200
gcuguucucagggaaaggu

SEQ ID NO: 699661 - RNA, 19 nt, Artificial Sequence
  Description of Artificial Sequence: Synthetic oligonucleotide
  Antisense strand to SEQ ID NO: 699660
accuuucccugagaacagc

SEQ ID NO: 699662 - RNA, 19 nt, Artificial Sequence
  Description of Artificial Sequence: Synthetic oligonucleotide
  Sense strand starting at position 383 of SEQ ID NO: 586200
cucgaaugaccagagucau

SEQ ID NO: 699663 - RNA, 19 nt, Artificial Sequence
  Description of Artificial Sequence: Synthetic oligonucleotide
  Antisense strand to SEQ ID NO: 699662
augacucuggucauucgag

SEQ ID NO: 699664 - RNA, 19 nt, Artificial Sequence
  Description of Artificial Sequence: Synthetic oligonucleotide
  Sense strand starting at position 649 of SEQ ID NO: 586200
gggaucaggaggugucaaa

SEQ ID NO: 699665 - RNA, 19 nt, Artificial Sequence
  Description of Artificial Sequence: Synthetic oligonucleotide
  Antisense strand to SEQ ID NO: 699664
uuugacaccuccugauccc

SEQ ID NO: 699666 - RNA, 19 nt, Artificial Sequence
  Description of Artificial Sequence: Synthetic oligonucleotide
  Sense strand starting at position 685 of SEQ ID NO: 586200
gaguuaaggauccaggucu

SEQ ID NO: 699667 - RNA, 19 nt, Artificial Sequence
  Description of Artificial Sequence: Synthetic oligonucleotide
  Antisense strand to SEQ ID NO: 699666
agaccuggauccuuaacuc

SEQ ID NO: 699668 - RNA, 19 nt, Artificial Sequence
  Description of Artificial Sequence: Synthetic oligonucleotide
  Sense strand starting at position 989 of SEQ ID NO: 586200
uggucuuuaaagcgagaga

SEQ ID NO: 699669 - RNA, 19 nt, Artificial Sequence
  Description of Artificial Sequence: Synthetic oligonucleotide
  Antisense strand to SEQ ID NO: 699668
ucucucgcuuuaaagacca

SEQ ID NO: 699670 - RNA, 19 nt, Artificial Sequence
  Description of Artificial Sequence: Synthetic oligonucleotide
  Sense strand starting at position 990 of SEQ ID NO: 586200
ggucuuuaaagcgagagaa

SEQ ID NO: 699671 - RNA, 19 nt, Artificial Sequence
  Description of Artificial Sequence: Synthetic oligonucleotide
  Antisense strand to SEQ ID NO: 699670
uucucucgcuuuaaagacc

SEQ ID NO: 699672 - RNA, 19 nt, Artificial Sequence
  Description of Artificial Sequence: Synthetic oligonucleotide
  Sense strand starting at position 1134 of SEQ ID NO: 586200
ucuaccacacugugugaaa

SEQ ID NO: 699673 - RNA, 19 nt, Artificial Sequence
  Description of Artificial Sequence: Synthetic oligonucleotide
  Antisense strand to SEQ ID NO: 699672
uuucacacagugugguaga

SEQ ID NO: 699674 - RNA, 19 nt, Artificial Sequence
  Description of Artificial Sequence: Synthetic oligonucleotide
  Sense strand starting at position 1206 of SEQ ID NO: 586200
caagaauacucaguggagu

SEQ ID NO: 699675 - RNA, 19 nt, Artificial Sequence
  Description of Artificial Sequence: Synthetic oligonucleotide
  Antisense strand to SEQ ID NO: 699674
acuccacugaguauucuug

SEQ ID NO: 699676 - RNA, 19 nt, Artificial Sequence
  Description of Artificial Sequence: Synthetic oligonucleotide
  Sense strand starting at position 1208 of SEQ ID NO: 586200
agaauacucaguggagugu

SEQ ID NO: 699677 - RNA, 19 nt, Artificial Sequence
  Description of Artificial Sequence: Synthetic oligonucleotide
  Antisense strand to SEQ ID NO: 699676
acacuccacugaguauucu

SEQ ID NO: 699678 - RNA, 19 nt, Artificial Sequence
  Description of Artificial Sequence: Synthetic oligonucleotide
  Sense strand starting at position 1209 of SEQ ID NO: 586200
gaauacucaguggaguguu

SEQ ID NO: 699679 - RNA, 19 nt, Artificial Sequence
  Description of Artificial Sequence: Synthetic oligonucleotide
  Antisense strand to SEQ ID NO: 699678
aacacuccacugaguauuc

SEQ ID NO: 699680 - RNA, 19 nt, Artificial Sequence
  Description of Artificial Sequence: Synthetic oligonucleotide
  Sense strand starting at position 1998 of SEQ ID NO: 586200
gcucuuagguacucaaaua

SEQ ID NO: 699681 - RNA, 19 nt, Artificial Sequence
  Description of Artificial Sequence: Synthetic oligonucleotide
  Antisense strand to SEQ ID NO: 699680
uauuugaguaccuaagagc

SEQ ID NO: 699682 - RNA, 19 nt, Artificial Sequence
  Description of Artificial Sequence: Synthetic oligonucleotide
  Sense strand starting at position 2150 of SEQ ID NO: 586200
cagaauuaaugucucaggu

SEQ ID NO: 699683 - RNA, 19 nt, Artificial Sequence
  Description of Artificial Sequence: Synthetic oligonucleotide
  Antisense strand to SEQ ID NO: 699682
accugagacauuaauucug

SEQ ID NO: 699684 - RNA, 19 nt, Artificial Sequence
  Description of Artificial Sequence: Synthetic oligonucleotide
  Sense strand starting at position 2370 of SEQ ID NO: 586200
uuggaauugucacuuaauu

SEQ ID NO: 699685 - RNA, 19 nt, Artificial Sequence
  Description of Artificial Sequence: Synthetic oligonucleotide
  Antisense strand to SEQ ID NO: 699684
aauuaagugacaauuccaa

SEQ ID NO: 699686 - RNA, 19 nt, Artificial Sequence
  Description of Artificial Sequence: Synthetic oligonucleotide
  Sense strand starting at position 2380 of SEQ ID NO: 586200
cacuuaauuggaugaguuu

SEQ ID NO: 699687 - RNA, 19 nt, Artificial Sequence
  Description of Artificial Sequence: Synthetic oligonucleotide
  Antisense strand to SEQ ID NO: 699686
aaacucauccaauuaagug

SEQ ID NO: 699688 - RNA, 19 nt, Artificial Sequence
  Description of Artificial Sequence: Synthetic oligonucleotide
  Sense strand starting at position 2534 of SEQ ID NO: 586200
ugcuauuuguugucaggag

SEQ ID NO: 699689 - RNA, 19 nt, Artificial Sequence
  Description of Artificial Sequence: Synthetic oligonucleotide
  Antisense strand to SEQ ID NO: 699688
cuccugacaacaaauagca

SEQ ID NO: 699690 - RNA, 19 nt, Artificial Sequence
  Description of Artificial Sequence: Synthetic oligonucleotide
  Sense strand starting at position 2574 of SEQ ID NO: 586200
cucuuaagauuaguuaaag

SEQ ID NO: 699691 - RNA, 19 nt, Artificial Sequence
  Description of Artificial Sequence: Synthetic oligonucleotide
  Antisense strand to SEQ ID NO: 699690
cuuuaacuaaucuuaagag

SEQ ID NO: 699692 - RNA, 19 nt, Artificial Sequence
  Description of Artificial Sequence: Synthetic oligonucleotide
  Sense strand starting at position 2582 of SEQ ID NO: 586200
auuaguuaaagugguagaa

SEQ ID NO: 699693 - RNA, 19 nt, Artificial Sequence
  Description of Artificial Sequence: Synthetic oligonucleotide
  Antisense strand to SEQ ID NO: 699692
uucuaccacuuuaacuaau

SEQ ID NO: 699694 - RNA, 19 nt, Artificial Sequence
  Description of Artificial Sequence: Synthetic oligonucleotide
  Sense strand starting at position 2586 of SEQ ID NO: 586200
guuaaagugguagaaaugu

SEQ ID NO: 699695 - RNA, 19 nt, Artificial Sequence
  Description of Artificial Sequence: Synthetic oligonucleotide
  Antisense strand to SEQ ID NO: 699694
acauuucuaccacuuuaac

SEQ ID NO: 699696 - RNA, 19 nt, Artificial Sequence
  Description of Artificial Sequence: Synthetic oligonucleotide
  Sense strand starting at position 2601 of SEQ ID NO: 586200
auguuagcauuucugggua

SEQ ID NO: 699697 - RNA, 19 nt, Artificial Sequence
  Description of Artificial Sequence: Synthetic oligonucleotide
  Antisense strand to SEQ ID NO: 699696
uacccagaaaugcuaacau

SEQ ID NO: 699698 - RNA, 19 nt, Artificial Sequence
  Description of Artificial Sequence: Synthetic oligonucleotide
  Sense strand starting at position 2616 of SEQ ID NO: 586200
gguaaugccaaacagguua

SEQ ID NO: 699699 - RNA, 19 nt, Artificial Sequence
  Description of Artificial Sequence: Synthetic oligonucleotide
  Antisense strand to SEQ ID NO: 699698
uaaccuguuuggcauuacc

SEQ ID NO: 699700 - RNA, 19 nt, Artificial Sequence
  Description of Artificial Sequence: Synthetic oligonucleotide
  Sense strand starting at position 2675 of SEQ ID NO: 586200
aagacaagguugcuguaaa

SEQ ID NO: 699701 - RNA, 19 nt, Artificial Sequence
  Description of Artificial Sequence: Synthetic oligonucleotide
  Antisense strand to SEQ ID NO: 699700
uuuacagcaaccuugucuu

SEQ ID NO: 699702 - RNA, 19 nt, Artificial Sequence
  Description of Artificial Sequence: Synthetic oligonucleotide
  Sense strand starting at position 2766 of SEQ ID NO: 586200
gggucauguggugaagcau

SEQ ID NO: 699703 - RNA, 19 nt, Artificial Sequence
  Description of Artificial Sequence: Synthetic oligonucleotide
  Antisense strand to SEQ ID NO: 699702
augcuucaccacaugaccc

SEQ ID NO: 699704 - RNA, 19 nt, Artificial Sequence
  Description of Artificial Sequence: Synthetic oligonucleotide
  Sense strand starting at position 2772 of SEQ ID NO: 586200
uguggugaagcauaaggaa

SEQ ID NO: 699705 - RNA, 19 nt, Artificial Sequence
  Description of Artificial Sequence: Synthetic oligonucleotide
  Antisense strand to SEQ ID NO: 699704
uuccuuaugcuucaccaca

SEQ ID NO: 699706 - RNA, 19 nt, Artificial Sequence
  Description of Artificial Sequence: Synthetic oligonucleotide
  Sense strand starting at position 2826 of SEQ ID NO: 586200
aagauuacucuguguacug

SEQ ID NO: 699707 - RNA, 19 nt, Artificial Sequence
  Description of Artificial Sequence: Synthetic oligonucleotide
  Antisense strand to SEQ ID NO: 699706
caguacacagaguaaucuu

SEQ ID NO: 699708 - RNA, 19 nt, Artificial Sequence
  Description of Artificial Sequence: Synthetic oligonucleotide
  Sense strand starting at position 2936 of SEQ ID NO: 586200
ucaugauucccugaggcag

SEQ ID NO: 699709 - RNA, 19 nt, Artificial Sequence
  Description of Artificial Sequence: Synthetic oligonucleotide
  Antisense strand to SEQ ID NO: 699708
cugccucagggaaucauga

SEQ ID NO: 699710 - RNA, 19 nt, Artificial Sequence
  Description of Artificial Sequence: Synthetic oligonucleotide
  Sense strand starting at position 3070 of SEQ ID NO: 586200
ccaagaacuuggccuggaa

SEQ ID NO: 699711 - RNA, 19 nt, Artificial Sequence
  Description of Artificial Sequence: Synthetic oligonucleotide
  Antisense strand to SEQ ID NO: 699710
uuccaggccaaguucuugg

SEQ ID NO: 699712 - RNA, 19 nt, Artificial Sequence
  Description of Artificial Sequence: Synthetic oligonucleotide
  Sense strand starting at position 3073 of SEQ ID NO: 586200
agaacuuggccuggaaucu

SEQ ID NO: 699713 - RNA, 19 nt, Artificial Sequence
  Description of Artificial Sequence: Synthetic oligonucleotide
  Antisense strand to SEQ ID NO: 699712
agauuccaggccaaguucu

SEQ ID NO: 699714 - RNA, 19 nt, Artificial Sequence
  Description of Artificial Sequence: Synthetic oligonucleotide
  Sense strand starting at position 3074 of SEQ ID NO: 586200
gaacuuggccuggaaucuu

SEQ ID NO: 699715 - RNA, 19 nt, Artificial Sequence
  Description of Artificial Sequence: Synthetic oligonucleotide
  Antisense strand to SEQ ID NO: 699714
aagauuccaggccaaguuc

SEQ ID NO: 699716 - RNA, 19 nt, Artificial Sequence
  Description of Artificial Sequence: Synthetic oligonucleotide
  Sense strand starting at position 3134 of SEQ ID NO: 586200
acuuaucugucuuugacca

SEQ ID NO: 699717 - RNA, 19 nt, Artificial Sequence
  Description of Artificial Sequence: Synthetic oligonucleotide
  Antisense strand to SEQ ID NO: 699716
uggucaaagacagauaagu

SEQ ID NO: 699718 - RNA, 19 nt, Artificial Sequence
  Description of Artificial Sequence: Synthetic oligonucleotide
  Sense strand starting at position 3294 of SEQ ID NO: 586200
aaguuauuccuagacaacg

SEQ ID NO: 699719 - RNA, 19 nt, Artificial Sequence
  Description of Artificial Sequence: Synthetic oligonucleotide
  Antisense strand to SEQ ID NO: 699718
cguugucuaggaauaacuu

SEQ ID NO: 699720 - RNA, 19 nt, Artificial Sequence
  Description of Artificial Sequence: Synthetic oligonucleotide
  Sense strand starting at position 3428 of SEQ ID NO: 586200
ggaguaccugugcaauucu

SEQ ID NO: 699721 - RNA, 19 nt, Artificial Sequence
  Description of Artificial Sequence: Synthetic oligonucleotide
  Antisense strand to SEQ ID NO: 699720
agaauugcacagguacucc

SEQ ID NO: 699722 - RNA, 19 nt, Artificial Sequence
  Description of Artificial Sequence: Synthetic oligonucleotide
  Sense strand starting at position 3466 of SEQ ID NO: 586200
gugagauuuccgcacguug

SEQ ID NO: 699723 - RNA, 19 nt, Artificial Sequence
  Description of Artificial Sequence: Synthetic oligonucleotide
  Antisense strand to SEQ ID NO: 699722
caacgugcggaaaucucac

SEQ ID NO: 699724 - RNA, 19 nt, Artificial Sequence
  Description of Artificial Sequence: Synthetic oligonucleotide
  Sense strand starting at position 3737 of SEQ ID NO: 586200
uccugaaauccacgaacaa

SEQ ID NO: 699725 - RNA, 19 nt, Artificial Sequence
  Description of Artificial Sequence: Synthetic oligonucleotide
  Antisense strand to SEQ ID NO: 699724
uuguucguggauuucagga

SEQ ID NO: 699726 - RNA, 19 nt, Artificial Sequence
  Description of Artificial Sequence: Synthetic oligonucleotide
  Sense strand starting at position 3856 of SEQ ID NO: 586200
auugauucuguuugugaaa

SEQ ID NO: 699727 - RNA, 19 nt, Artificial Sequence
  Description of Artificial Sequence: Synthetic oligonucleotide
  Antisense strand to SEQ ID NO: 699726
uuucacaaacagaaucaau

SEQ ID NO: 699728 - RNA, 19 nt, Artificial Sequence
  Description of Artificial Sequence: Synthetic oligonucleotide
  Sense strand starting at position 182 of SEQ ID NO: 586201
cagccuuugccagguauuu

SEQ ID NO: 699729 - RNA, 19 nt, Artificial Sequence
  Description of Artificial Sequence: Synthetic oligonucleotide
  Antisense strand to SEQ ID NO: 699728
aaauaccuggcaaaggcug

SEQ ID NO: 699730 - RNA, 19 nt, Artificial Sequence
  Description of Artificial Sequence: Synthetic oligonucleotide
  Sense strand starting at position 249 of SEQ ID NO: 586201
cugguaacuugguuaccaa

SEQ ID NO: 699731 - RNA, 19 nt, Artificial Sequence
  Description of Artificial Sequence: Synthetic oligonucleotide
  Antisense strand to SEQ ID NO: 699730
uugguaaccaaguuaccag

SEQ ID NO: 699732 - RNA, 19 nt, Artificial Sequence
  Description of Artificial Sequence: Synthetic oligonucleotide
  Sense strand starting at position 250 of SEQ ID NO: 586201
ugguaacuugguuaccaaa

SEQ ID NO: 699733 - RNA, 19 nt, Artificial Sequence
  Description of Artificial Sequence: Synthetic oligonucleotide
  Antisense strand to SEQ ID NO: 699732
uuugguaaccaaguuacca

SEQ ID NO: 699734 - RNA, 19 nt, Artificial Sequence
  Description of Artificial Sequence: Synthetic oligonucleotide
  Sense strand starting at position 252 of SEQ ID NO: 586201
guaacuugguuaccaaaga

SEQ ID NO: 699735 - RNA, 19 nt, Artificial Sequence
  Description of Artificial Sequence: Synthetic oligonucleotide
  Antisense strand to SEQ ID NO: 699734
ucuuugguaaccaaguuac

SEQ ID NO: 699736 - RNA, 19 nt, Artificial Sequence
  Description of Artificial Sequence: Synthetic oligonucleotide
  Sense strand starting at position 305 of SEQ ID NO: 586201
uggucacauccauggaauc

SEQ ID NO: 699737 - RNA, 19 nt, Artificial Sequence
  Description of Artificial Sequence: Synthetic oligonucleotide
  Antisense strand to SEQ ID NO: 699736
gauuccauggaugugacca

SEQ ID NO: 699738 - RNA, 19 nt, Artificial Sequence
  Description of Artificial Sequence: Synthetic oligonucleotide
  Sense strand starting at position 306 of SEQ ID NO: 586201
ggucacauccauggaauca

SEQ ID NO: 699739 - RNA, 19 nt, Artificial Sequence
  Description of Artificial Sequence: Synthetic oligonucleotide
  Antisense strand to SEQ ID NO: 699738
ugauuccauggaugugacc

SEQ ID NO: 699740 - RNA, 19 nt, Artificial Sequence
  Description of Artificial Sequence: Synthetic oligonucleotide
  Sense strand starting at position 411 of SEQ ID NO: 586201
guucuaugccuggaaguca

SEQ ID NO: 699741 - RNA, 19 nt, Artificial Sequence
  Description of Artificial Sequence: Synthetic oligonucleotide
  Antisense strand to SEQ ID NO: 699740
ugacuuccaggcauagaac

SEQ ID NO: 699742 - RNA, 19 nt, Artificial Sequence
  Description of Artificial Sequence: Synthetic oligonucleotide
  Sense strand starting at position 419 of SEQ ID NO: 586201
ccuggaagucauuaacugu

SEQ ID NO: 699743 - RNA, 19 nt, Artificial Sequence
  Description of Artificial Sequence: Synthetic oligonucleotide
  Antisense strand to SEQ ID NO: 699742
acaguuaaugacuuccagg

SEQ ID NO: 699744 - RNA, 19 nt, Artificial Sequence
  Description of Artificial Sequence: Synthetic oligonucleotide
  Sense strand starting at position 425 of SEQ ID NO: 586201
agucauuaacuguacggga

SEQ ID NO: 699745 - RNA, 19 nt, Artificial Sequence
  Description of Artificial Sequence: Synthetic oligonucleotide
  Antisense strand to SEQ ID NO: 699744
ucccguacaguuaaugacu

SEQ ID NO: 699746 - RNA, 19 nt, Artificial Sequence
  Description of Artificial Sequence: Synthetic oligonucleotide
  Sense strand starting at position 427 of SEQ ID NO: 586201
ucauuaacuguacgggaga

SEQ ID NO: 699747 - RNA, 19 nt, Artificial Sequence
  Description of Artificial Sequence: Synthetic oligonucleotide
  Antisense strand to SEQ ID NO: 699746
ucucccguacaguuaauga

SEQ ID NO: 699748 - RNA, 19 nt, Artificial Sequence
  Description of Artificial Sequence: Synthetic oligonucleotide
  Sense strand starting at position 429 of SEQ ID NO: 586201
auuaacuguacgggagaaa

SEQ ID NO: 699749 - RNA, 19 nt, Artificial Sequence
  Description of Artificial Sequence: Synthetic oligonucleotide
  Antisense strand to SEQ ID NO: 699748
uuucucccguacaguuaau

SEQ ID NO: 699750 - RNA, 19 nt, Artificial Sequence
  Description of Artificial Sequence: Synthetic oligonucleotide
  Sense strand starting at position 580 of SEQ ID NO: 586201
aaagcagucuaguuggaga

SEQ ID NO: 699751 - RNA, 19 nt, Artificial Sequence
  Description of Artificial Sequence: Synthetic oligonucleotide
  Antisense strand to SEQ ID NO: 699750
ucuccaacuagacugcuuu

SEQ ID NO: 699752 - RNA, 19 nt, Artificial Sequence
  Description of Artificial Sequence: Synthetic oligonucleotide
  Sense strand starting at position 598 of SEQ ID NO: 586201
acgagaagggcuuggauua

SEQ ID NO: 699753 - RNA, 19 nt, Artificial Sequence
  Description of Artificial Sequence: Synthetic oligonucleotide
  Antisense strand to SEQ ID NO: 699752
uaauccaagcccuucucgu

SEQ ID NO: 699754 - RNA, 19 nt, Artificial Sequence
  Description of Artificial Sequence: Synthetic oligonucleotide
  Sense strand starting at position 599 of SEQ ID NO: 586201
cgagaagggcuuggauuaa

SEQ ID NO: 699755 - RNA, 19 nt, Artificial Sequence
  Description of Artificial Sequence: Synthetic oligonucleotide
  Antisense strand to SEQ ID NO: 699754
uuaauccaagcccuucucg

SEQ ID NO: 699756 - RNA, 19 nt, Artificial Sequence
  Description of Artificial Sequence: Synthetic oligonucleotide
  Sense strand starting at position 611 of SEQ ID NO: 586201
ggauuaaguaucggaaagc

SEQ ID NO: 699757 - RNA, 19 nt, Artificial Sequence
  Description of Artificial Sequence: Synthetic oligonucleotide
  Antisense strand to SEQ ID NO: 699756
gcuuuccgauacuuaaucc

SEQ ID NO: 699758 - RNA, 19 nt, Artificial Sequence
  Description of Artificial Sequence: Synthetic oligonucleotide
  Sense strand starting at position 633 of SEQ ID NO: 586201
ucccaauuguucucaggau

SEQ ID NO: 699759 - RNA, 19 nt, Artificial Sequence
  Description of Artificial Sequence: Synthetic oligonucleotide
  Antisense strand to SEQ ID NO: 699758
auccugagaacaauuggga

SEQ ID NO: 699760 - RNA, 19 nt, Artificial Sequence
  Description of Artificial Sequence: Synthetic oligonucleotide
  Sense strand starting at position 1143 of SEQ ID NO: 586201
ucuugauucuggucuggaa

SEQ ID NO: 699761 - RNA, 19 nt, Artificial Sequence
  Description of Artificial Sequence: Synthetic oligonucleotide
  Antisense strand to SEQ ID NO: 699760
uuccagaccagaaucaaga

SEQ ID NO: 699762 - RNA, 19 nt, Artificial Sequence
  Description of Artificial Sequence: Synthetic oligonucleotide
  Sense strand starting at position 1145 of SEQ ID NO: 586201
uugauucuggucuggaaca

SEQ ID NO: 699763 - RNA, 19 nt, Artificial Sequence
  Description of Artificial Sequence: Synthetic oligonucleotide
  Antisense strand to SEQ ID NO: 699762
uguuccagaccagaaucaa

SEQ ID NO: 699764 - RNA, 19 nt, Artificial Sequence
  Description of Artificial Sequence: Synthetic oligonucleotide
  Sense strand starting at position 1295 of SEQ ID NO: 586201
augcucuuucuagagguuu

SEQ ID NO: 699765 - RNA, 19 nt, Artificial Sequence
  Description of Artificial Sequence: Synthetic oligonucleotide
  Antisense strand to SEQ ID NO: 699764
aaaccucuagaaagagcau

SEQ ID NO: 699766 - RNA, 19 nt, Artificial Sequence
  Description of Artificial Sequence: Synthetic oligonucleotide
  Sense strand starting at position 1537 of SEQ ID NO: 586201
gugagccgacacuauuauu

SEQ ID NO: 699767 - RNA, 19 nt, Artificial Sequence
  Description of Artificial Sequence: Synthetic oligonucleotide
  Antisense strand to SEQ ID NO: 699766
aauaauagugucggcucac

SEQ ID NO: 699768 - RNA, 19 nt, Artificial Sequence
  Description of Artificial Sequence: Synthetic oligonucleotide
  Sense strand starting at position 2155 of SEQ ID NO: 586201
gugggucauucuguauuua

SEQ ID NO: 699769 - RNA, 19 nt, Artificial Sequence
  Description of Artificial Sequence: Synthetic oligonucleotide
  Antisense strand to SEQ ID NO: 699768
uaaauacagaaugacccac

SEQ ID NO: 699770 - RNA, 19 nt, Artificial Sequence
  Description of Artificial Sequence: Synthetic oligonucleotide
  Sense strand starting at position 2220 of SEQ ID NO: 586201
ccauuagauccacguagaa

SEQ ID NO: 699771 - RNA, 19 nt, Artificial Sequence
  Description of Artificial Sequence: Synthetic oligonucleotide
  Antisense strand to SEQ ID NO: 699770
uucuacguggaucuaaugg

SEQ ID NO: 699772 - RNA, 19 nt, Artificial Sequence
  Description of Artificial Sequence: Synthetic oligonucleotide
  Sense strand starting at position 2253 of SEQ ID NO: 586201
aucauaguguucucauauc

SEQ ID NO: 699773 - RNA, 19 nt, Artificial Sequence
  Description of Artificial Sequence: Synthetic oligonucleotide
  Antisense strand to SEQ ID NO: 699772
gauaugagaacacuaugau

SEQ ID NO: 699774 - RNA, 19 nt, Artificial Sequence
  Description of Artificial Sequence: Synthetic oligonucleotide
  Sense strand starting at position 2418 of SEQ ID NO: 586201
uaacaagagugguuugcau

SEQ ID NO: 699775 - RNA, 19 nt, Artificial Sequence
  Description of Artificial Sequence: Synthetic oligonucleotide
  Antisense strand to SEQ ID NO: 699774
augcaaaccacucuuguua

SEQ ID NO: 699776 - RNA, 19 nt, Artificial Sequence
  Description of Artificial Sequence: Synthetic oligonucleotide
  Sense strand starting at position 2420 of SEQ ID NO: 586201
acaagagugguuugcauag

SEQ ID NO: 699777 - RNA, 19 nt, Artificial Sequence
  Description of Artificial Sequence: Synthetic oligonucleotide
  Antisense strand to SEQ ID NO: 699776
cuaugcaaaccacucuugu

SEQ ID NO: 699778 - RNA, 19 nt, Artificial Sequence
  Description of Artificial Sequence: Synthetic oligonucleotide
  Sense strand starting at position 2508 of SEQ ID NO: 586201
aagcaugggucugccagaa

SEQ ID NO: 699779 - RNA, 19 nt, Artificial Sequence
  Description of Artificial Sequence: Synthetic oligonucleotide
  Antisense strand to SEQ ID NO: 699778
uucuggcagacccaugcuu

SEQ ID NO: 699780 - RNA, 19 nt, Artificial Sequence
  Description of Artificial Sequence: Synthetic oligonucleotide
  Sense strand starting at position 2892 of SEQ ID NO: 586201
accuuucuguacucuuaga

SEQ ID NO: 699781 - RNA, 19 nt, Artificial Sequence
  Description of Artificial Sequence: Synthetic oligonucleotide
  Antisense strand to SEQ ID NO: 699780
ucuaagaguacagaaaggu

SEQ ID NO: 699782 - RNA, 19 nt, Artificial Sequence
  Description of Artificial Sequence: Synthetic oligonucleotide
  Sense strand starting at position 2925 of SEQ ID NO: 586201
guuagaggcucaucuccaa

SEQ ID NO: 699783 - RNA, 19 nt, Artificial Sequence
  Description of Artificial Sequence: Synthetic oligonucleotide
  Antisense strand to SEQ ID NO: 699782
uuggagaugagccucuaac

SEQ ID NO: 699784 - RNA, 19 nt, Artificial Sequence
  Description of Artificial Sequence: Synthetic oligonucleotide
  Sense strand starting at position 2963 of SEQ ID NO: 586201
gaguuagagucugcagaga

SEQ ID NO: 699785 - RNA, 19 nt, Artificial Sequence
  Description of Artificial Sequence: Synthetic oligonucleotide
  Antisense strand to SEQ ID NO: 699784
ucucugcagacucuaacuc

SEQ ID NO: 699786 - RNA, 19 nt, Artificial Sequence
  Description of Artificial Sequence: Synthetic oligonucleotide
  Sense strand starting at position 3027 of SEQ ID NO: 586201
ggagaauccugccucagua

SEQ ID NO: 699787 - RNA, 19 nt, Artificial Sequence
  Description of Artificial Sequence: Synthetic oligonucleotide
  Antisense strand to SEQ ID NO: 699786
uacugaggcaggauucucc

SEQ ID NO: 699788 - RNA, 19 nt, Artificial Sequence
  Description of Artificial Sequence: Synthetic oligonucleotide
  Sense strand starting at position 3081 of SEQ ID NO: 586201
acagaucuguuggcaguaa

SEQ ID NO: 699789 - RNA, 19 nt, Artificial Sequence
  Description of Artificial Sequence: Synthetic oligonucleotide
  Antisense strand to SEQ ID NO: 699788
uuacugccaacagaucugu

SEQ ID NO: 699790 - RNA, 19 nt, Artificial Sequence
  Description of Artificial Sequence: Synthetic oligonucleotide
  Sense strand starting at position 3123 of SEQ ID NO: 586201
acugcuucuugggcagaga

SEQ ID NO: 699791 - RNA, 19 nt, Artificial Sequence
  Description of Artificial Sequence: Synthetic oligonucleotide
  Antisense strand to SEQ ID NO: 699790
ucucugcccaagaagcagu

SEQ ID NO: 699792 - RNA, 19 nt, Artificial Sequence
  Description of Artificial Sequence: Synthetic oligonucleotide
  Sense strand starting at position 3124 of SEQ ID NO: 586201
cugcuucuugggcagagau

SEQ ID NO: 699793 - RNA, 19 nt, Artificial Sequence
  Description of Artificial Sequence: Synthetic oligonucleotide
  Antisense strand to SEQ ID NO: 699792
aucucugcccaagaagcag

SEQ ID NO: 699794 - RNA, 19 nt, Artificial Sequence
  Description of Artificial Sequence: Synthetic oligonucleotide
  Sense strand starting at position 3230 of SEQ ID NO: 586201
gcugcuaagacagguaaga

SEQ ID NO: 699795 - RNA, 19 nt, Artificial Sequence
  Description of Artificial Sequence: Synthetic oligonucleotide
  Antisense strand to SEQ ID NO: 699794
ucuuaccugucuuagcagc

SEQ ID NO: 699796 - RNA, 19 nt, Artificial Sequence
  Description of Artificial Sequence: Synthetic oligonucleotide
  Sense strand starting at position 3251 of SEQ ID NO: 586201
agacuuuagucacuccuga

SEQ ID NO: 699797 - RNA, 19 nt, Artificial Sequence
  Description of Artificial Sequence: Synthetic oligonucleotide
  Antisense strand to SEQ ID NO: 699796
ucaggagugacuaaagucu

SEQ ID NO: 699798 - RNA, 19 nt, Artificial Sequence
  Description of Artificial Sequence: Synthetic oligonucleotide
  Sense strand starting at position 3406 of SEQ ID NO: 586201
agagaugcuuucccacaga

SEQ ID NO: 699799 - RNA, 19 nt, Artificial Sequence
  Description of Artificial Sequence: Synthetic oligonucleotide
  Antisense strand to SEQ ID NO: 699798
ucugugggaaagcaucucu

SEQ ID NO: 699800 - RNA, 19 nt, Artificial Sequence
  Description of Artificial Sequence: Synthetic oligonucleotide
  Sense strand starting at position 3409 of SEQ ID NO: 586201
gaugcuuucccacagaguu

SEQ ID NO: 699801 - RNA, 19 nt, Artificial Sequence
  Description of Artificial Sequence: Synthetic oligonucleotide
  Antisense strand to SEQ ID NO: 699800
aacucugugggaaagcauc

SEQ ID NO: 699802 - RNA, 19 nt, Artificial Sequence
  Description of Artificial Sequence: Synthetic oligonucleotide
  Sense strand starting at position 3728 of SEQ ID NO: 586201
uccagcucugugggaauga

SEQ ID NO: 699803 - RNA, 19 nt, Artificial Sequence
  Description of Artificial Sequence: Synthetic oligonucleotide
  Antisense strand to SEQ ID NO: 699802
ucauucccacagagcugga

SEQ ID NO: 699804 - RNA, 19 nt, Artificial Sequence
  Description of Artificial Sequence: Synthetic oligonucleotide
  Sense strand starting at position 3783 of SEQ ID NO: 586201
gcaggcuugaguggaaaua

SEQ ID NO: 699805 - RNA, 19 nt, Artificial Sequence
  Description of Artificial Sequence: Synthetic oligonucleotide
  Antisense strand to SEQ ID NO: 699804
uauuuccacucaagccugc

SEQ ID NO: 699806 - RNA, 19 nt, Artificial Sequence
  Description of Artificial Sequence: Synthetic oligonucleotide
  Sense strand starting at position 3799 of SEQ ID NO: 586201
auaacugaguuguuuccau

SEQ ID NO: 699807 - RNA, 19 nt, Artificial Sequence
  Description of Artificial Sequence: Synthetic oligonucleotide
  Antisense strand to SEQ ID NO: 699806
auggaaacaacucaguuau

SEQ ID NO: 699808 - RNA, 19 nt, Artificial Sequence
  Description of Artificial Sequence: Synthetic oligonucleotide
  Sense strand starting at position 219 of SEQ ID NO: 586202
uguguuccuccagggcauu

SEQ ID NO: 699809 - RNA, 19 nt, Artificial Sequence
  Description of Artificial Sequence: Synthetic oligonucleotide
  Antisense strand to SEQ ID NO: 699808
aaugcccuggaggaacaca

SEQ ID NO: 699810 - RNA, 19 nt, Artificial Sequence
  Description of Artificial Sequence: Synthetic oligonucleotide
  Sense strand starting at position 306 of SEQ ID NO: 586202
acuggugacuagcucagaa

SEQ ID NO: 699811 - RNA, 19 nt, Artificial Sequence
  Description of Artificial Sequence: Synthetic oligonucleotide
  Antisense strand to SEQ ID NO: 699810
uucugagcuagucaccagu

SEQ ID NO: 699812 - RNA, 19 nt, Artificial Sequence
  Description of Artificial Sequence: Synthetic oligonucleotide
  Sense strand starting at position 458 of SEQ ID NO: 586202
guagauaacuggcguugaa

SEQ ID NO: 699813 - RNA, 19 nt, Artificial Sequence
  Description of Artificial Sequence: Synthetic oligonucleotide
  Antisense strand to SEQ ID NO: 699812
uucaacgccaguuaucuac

SEQ ID NO: 699814 - RNA, 19 nt, Artificial Sequence
  Description of Artificial Sequence: Synthetic oligonucleotide
  Sense strand starting at position 461 of SEQ ID NO: 586202
gauaacuggcguugaaguu

SEQ ID NO: 699815 - RNA, 19 nt, Artificial Sequence
  Description of Artificial Sequence: Synthetic oligonucleotide
  Antisense strand to SEQ ID NO: 699814
aacuucaacgccaguuauc

SEQ ID NO: 699816 - RNA, 19 nt, Artificial Sequence
  Description of Artificial Sequence: Synthetic oligonucleotide
  Sense strand starting at position 505 of SEQ ID NO: 586202
gagauuuccuccugagagg

SEQ ID NO: 699817 - RNA, 19 nt, Artificial Sequence
  Description of Artificial Sequence: Synthetic oligonucleotide
  Antisense strand to SEQ ID NO: 699816
ccucucaggaggaaaucuc

SEQ ID NO: 699818 - RNA, 19 nt, Artificial Sequence
  Description of Artificial Sequence: Synthetic oligonucleotide
  Sense strand starting at position 548 of SEQ ID NO: 586202
accagcuuggcucagaaua

SEQ ID NO: 699819 - RNA, 19 nt, Artificial Sequence
  Description of Artificial Sequence: Synthetic oligonucleotide
  Antisense strand to SEQ ID NO: 699818
uauucugagccaagcuggu

SEQ ID NO: 699820 - RNA, 19 nt, Artificial Sequence
  Description of Artificial Sequence: Synthetic oligonucleotide
  Sense strand starting at position 1134 of SEQ ID NO: 586202
ggacaauagcuccacucuu

SEQ ID NO: 699821 - RNA, 19 nt, Artificial Sequence
  Description of Artificial Sequence: Synthetic oligonucleotide
  Antisense strand to SEQ ID NO: 699820
aagaguggagcuauugucc

SEQ ID NO: 699822 - RNA, 19 nt, Artificial Sequence
  Description of Artificial Sequence: Synthetic oligonucleotide
  Sense strand starting at position 1188 of SEQ ID NO: 586202
cagucuauccagugaaacg

SEQ ID NO: 699823 - RNA, 19 nt, Artificial Sequence
  Description of Artificial Sequence: Synthetic oligonucleotide
  Antisense strand to SEQ ID NO: 699822
cguuucacuggauagacug

SEQ ID NO: 699824 - RNA, 19 nt, Artificial Sequence
  Description of Artificial Sequence: Synthetic oligonucleotide
  Sense strand starting at position 1221 of SEQ ID NO: 586202
gaccucaucuguggacaca

SEQ ID NO: 699825 - RNA, 19 nt, Artificial Sequence
  Description of Artificial Sequence: Synthetic oligonucleotide
  Antisense strand to SEQ ID NO: 699824
uguguccacagaugagguc

SEQ ID NO: 699826 - RNA, 19 nt, Artificial Sequence
  Description of Artificial Sequence: Synthetic oligonucleotide
  Sense strand starting at position 2016 of SEQ ID NO: 586202
agccgaaugacuggagaga

SEQ ID NO: 699827 - RNA, 19 nt, Artificial Sequence
  Description of Artificial Sequence: Synthetic oligonucleotide
  Antisense strand to SEQ ID NO: 699826
ucucuccagucauucggcu

SEQ ID NO: 699828 - RNA, 19 nt, Artificial Sequence
  Description of Artificial Sequence: Synthetic oligonucleotide
  Sense strand starting at position 2156 of SEQ ID NO: 586202
cggccaggcuucuuggaaa

SEQ ID NO: 699829 - RNA, 19 nt, Artificial Sequence
  Description of Artificial Sequence: Synthetic oligonucleotide
  Antisense strand to SEQ ID NO: 699828
uuuccaagaagccuggccg

SEQ ID NO: 699830 - RNA, 19 nt, Artificial Sequence
  Description of Artificial Sequence: Synthetic oligonucleotide
  Sense strand starting at position 2461 of SEQ ID NO: 586202
gugagaucuugucucggaa

SEQ ID NO: 699831 - RNA, 19 nt, Artificial Sequence
  Description of Artificial Sequence: Synthetic oligonucleotide
  Antisense strand to SEQ ID NO: 699830
uuccgagacaagaucucac

SEQ ID NO: 699832 - RNA, 19 nt, Artificial Sequence
  Description of Artificial Sequence: Synthetic oligonucleotide
  Sense strand starting at position 2507 of SEQ ID NO: 586202
ccacuucucccaggaagau

SEQ ID NO: 699833 - RNA, 19 nt, Artificial Sequence
  Description of Artificial Sequence: Synthetic oligonucleotide
  Antisense strand to SEQ ID NO: 699832
aucuuccugggagaagugg

SEQ ID NO: 699834 - RNA, 19 nt, Artificial Sequence
  Description of Artificial Sequence: Synthetic oligonucleotide
  Sense strand starting at position 2591 of SEQ ID NO: 586202
acaaacaugucagagagaa

SEQ ID NO: 699835 - RNA, 19 nt, Artificial Sequence
  Description of Artificial Sequence: Synthetic oligonucleotide
  Antisense strand to SEQ ID NO: 699834
uucucucugacauguuugu

SEQ ID NO: 699836 - RNA, 19 nt, Artificial Sequence
  Description of Artificial Sequence: Synthetic oligonucleotide
  Sense strand starting at position 2611 of SEQ ID NO: 586202
ugaacagucuaguagcaaa

SEQ ID NO: 699837 - RNA, 19 nt, Artificial Sequence
  Description of Artificial Sequence: Synthetic oligonucleotide
  Antisense strand to SEQ ID NO: 699836
uuugcuacuagacuguuca

SEQ ID NO: 699838 - RNA, 19 nt, Artificial Sequence
  Description of Artificial Sequence: Synthetic oligonucleotide
  Sense strand starting at position 2614 of SEQ ID NO: 586202
acagucuaguagcaaauau

SEQ ID NO: 699839 - RNA, 19 nt, Artificial Sequence
  Description of Artificial Sequence: Synthetic oligonucleotide
  Antisense strand to SEQ ID NO: 699838
auauuugcuacuagacugu

SEQ ID NO: 699840 - RNA, 19 nt, Artificial Sequence
  Description of Artificial Sequence: Synthetic oligonucleotide
  Sense strand starting at position 2637 of SEQ ID NO: 586202
uagagaaauggacguauca

SEQ ID NO: 699841 - RNA, 19 nt, Artificial Sequence
  Description of Artificial Sequence: Synthetic oligonucleotide
  Antisense strand to SEQ ID NO: 699840
ugauacguccauuucucua

SEQ ID NO: 699842 - RNA, 19 nt, Artificial Sequence
  Description of Artificial Sequence: Synthetic oligonucleotide
  Sense strand starting at position 2714 of SEQ ID NO: 586202
gagcuucggugauguggau

SEQ ID NO: 699843 - RNA, 19 nt, Artificial Sequence
  Description of Artificial Sequence: Synthetic oligonucleotide
  Antisense strand to SEQ ID NO: 699842
auccacaucaccgaagcuc

SEQ ID NO: 699844 - RNA, 19 nt, Artificial Sequence
  Description of Artificial Sequence: Synthetic oligonucleotide
  Sense strand starting at position 2804 of SEQ ID NO: 586202
gaggcagagucauguggau

SEQ ID NO: 699845 - RNA, 19 nt, Artificial Sequence
  Description of Artificial Sequence: Synthetic oligonucleotide
  Antisense strand to SEQ ID NO: 699844
auccacaugacucugccuc

SEQ ID NO: 699846 - RNA, 19 nt, Artificial Sequence
  Description of Artificial Sequence: Synthetic oligonucleotide
  Sense strand starting at position 2806 of SEQ ID NO: 586202
ggcagagucauguggauca

SEQ ID NO: 699847 - RNA, 19 nt, Artificial Sequence
  Description of Artificial Sequence: Synthetic oligonucleotide
  Antisense strand to SEQ ID NO: 699846
ugauccacaugacucugcc

SEQ ID NO: 699848 - RNA, 19 nt, Artificial Sequence
  Description of Artificial Sequence: Synthetic oligonucleotide
  Sense strand starting at position 3123 of SEQ ID NO: 586202
gggcuugcaucgggacaaa

SEQ ID NO: 699849 - RNA, 19 nt, Artificial Sequence
  Description of Artificial Sequence: Synthetic oligonucleotide
  Antisense strand to SEQ ID NO: 699848
uuugucccgaugcaagccc

SEQ ID NO: 699850 - RNA, 19 nt, Artificial Sequence
  Description of Artificial Sequence: Synthetic oligonucleotide
  Sense strand starting at position 3143 of SEQ ID NO: 586202
acucaucccuucugggaga

SEQ ID NO: 699851 - RNA, 19 nt, Artificial Sequence
  Description of Artificial Sequence: Synthetic oligonucleotide
  Antisense strand to SEQ ID NO: 699850
ucucccagaagggaugagu

SEQ ID NO: 699852 - RNA, 19 nt, Artificial Sequence
  Description of Artificial Sequence: Synthetic oligonucleotide
  Sense strand starting at position 3229 of SEQ ID NO: 586202
cuaaaucuguagucugaug

SEQ ID NO: 699853 - RNA, 19 nt, Artificial Sequence
  Description of Artificial Sequence: Synthetic oligonucleotide
  Antisense strand to SEQ ID NO: 699852
caucagacuacagauuuag

SEQ ID NO: 699854 - RNA, 19 nt, Artificial Sequence
  Description of Artificial Sequence: Synthetic oligonucleotide
  Sense strand starting at position 3231 of SEQ ID NO: 586202
aaaucuguagucugauguu

SEQ ID NO: 699855 - RNA, 19 nt, Artificial Sequence
  Description of Artificial Sequence: Synthetic oligonucleotide
  Antisense strand to SEQ ID NO: 699854
aacaucagacuacagauuu

SEQ ID NO: 699856 - RNA, 19 nt, Artificial Sequence
  Description of Artificial Sequence: Synthetic oligonucleotide
  Sense strand starting at position 3234 of SEQ ID NO: 586202
ucuguagucugauguuuau

SEQ ID NO: 699857 - RNA, 19 nt, Artificial Sequence
  Description of Artificial Sequence: Synthetic oligonucleotide
  Antisense strand to SEQ ID NO: 699856
auaaacaucagacuacaga

SEQ ID NO: 699858 - RNA, 19 nt, Artificial Sequence
  Description of Artificial Sequence: Synthetic oligonucleotide
  Sense strand starting at position 3256 of SEQ ID NO: 586202
gagaguggccuugaagucu

SEQ ID NO: 699859 - RNA, 19 nt, Artificial Sequence
  Description of Artificial Sequence: Synthetic oligonucleotide
  Antisense strand to SEQ ID NO: 699858
agacuucaaggccacucuc

SEQ ID NO: 699860 - RNA, 19 nt, Artificial Sequence
  Description of Artificial Sequence: Synthetic oligonucleotide
  Sense strand starting at position 3343 of SEQ ID NO: 586202
guagcuaggcgcucacauu

SEQ ID NO: 699861 - RNA, 19 nt, Artificial Sequence
  Description of Artificial Sequence: Synthetic oligonucleotide
  Antisense strand to SEQ ID NO: 699860
aaugugagcgccuagcuac

SEQ ID NO: 699862 - RNA, 19 nt, Artificial Sequence
  Description of Artificial Sequence: Synthetic oligonucleotide
  Sense strand starting at position 3380 of SEQ ID NO: 586202
ucaauccacuccgaaguau

SEQ ID NO: 699863 - RNA, 19 nt, Artificial Sequence
  Description of Artificial Sequence: Synthetic oligonucleotide
  Antisense strand to SEQ ID NO: 699862
auacuucggaguggauuga

SEQ ID NO: 699864 - RNA, 19 nt, Artificial Sequence
  Description of Artificial Sequence: Synthetic oligonucleotide
  Sense strand starting at position 3440 of SEQ ID NO: 586202
accggcgaucagugaugua

SEQ ID NO: 699865 - RNA, 19 nt, Artificial Sequence
  Description of Artificial Sequence: Synthetic oligonucleotide
  Antisense strand to SEQ ID NO: 699864
uacaucacugaucgccggu

SEQ ID NO: 699866 - RNA, 19 nt, Artificial Sequence
  Description of Artificial Sequence: Synthetic oligonucleotide
  Sense strand starting at position 3443 of SEQ ID NO: 586202
ggcgaucagugauguauuu

SEQ ID NO: 699867 - RNA, 19 nt, Artificial Sequence
  Description of Artificial Sequence: Synthetic oligonucleotide
  Antisense strand to SEQ ID NO: 699866
aaauacaucacugaucgcc

SEQ ID NO: 699868 - RNA, 19 nt, Artificial Sequence
  Description of Artificial Sequence: Synthetic oligonucleotide
  Sense strand starting at position 3555 of SEQ ID NO: 586202
gccguauuucucuauccgu

SEQ ID NO: 699869 - RNA, 19 nt, Artificial Sequence
  Description of Artificial Sequence: Synthetic oligonucleotide
  Antisense strand to SEQ ID NO: 699868
acggauagagaaauacggc

SEQ ID NO: 699870 - RNA, 19 nt, Artificial Sequence
  Description of Artificial Sequence: Synthetic oligonucleotide
  Sense strand starting at position 3584 of SEQ ID NO: 586202
ugcgguugaaguggacaua

SEQ ID NO: 699871 - RNA, 19 nt, Artificial Sequence
  Description of Artificial Sequence: Synthetic oligonucleotide
  Antisense strand to SEQ ID NO: 699870
uauguccacuucaaccgca

SEQ ID NO: 699872 - RNA, 19 nt, Artificial Sequence
  Description of Artificial Sequence: Synthetic oligonucleotide
  Sense strand starting at position 3668 of SEQ ID NO: 586202
guccacuguugcugacagu

SEQ ID NO: 699873 - RNA, 19 nt, Artificial Sequence
  Description of Artificial Sequence: Synthetic oligonucleotide
  Antisense strand to SEQ ID NO: 699872
acugucagcaacaguggac

SEQ ID NO: 699874 - RNA, 19 nt, Artificial Sequence
  Description of Artificial Sequence: Synthetic oligonucleotide
  Sense strand starting at position 3775 of SEQ ID NO: 586202
accaaugacucaucgaagu

SEQ ID NO: 699875 - RNA, 19 nt, Artificial Sequence
  Description of Artificial Sequence: Synthetic oligonucleotide
  Antisense strand to SEQ ID NO: 699874
acuucgaugagucauuggu

SEQ ID NO: 699876 - RNA, 19 nt, Artificial Sequence
  Description of Artificial Sequence: Synthetic oligonucleotide
  Sense strand starting at position 3800 of SEQ ID NO: 586202
ccaccaugaccaggucaaa

SEQ ID NO: 699877 - RNA, 19 nt, Artificial Sequence
  Description of Artificial Sequence: Synthetic oligonucleotide
  Antisense strand to SEQ ID NO: 699876
uuugaccuggucauggugg

SEQ ID NO: 699878 - RNA, 19 nt, Artificial Sequence
  Description of Artificial Sequence: Synthetic oligonucleotide
  Sense strand starting at position 3886 of SEQ ID NO: 586202
cuugauaucuggcugcgau

SEQ ID NO: 699879 - RNA, 19 nt, Artificial Sequence
  Description of Artificial Sequence: Synthetic oligonucleotide
  Antisense strand to SEQ ID NO: 699878
aucgcagccagauaucaag

SEQ ID NO: 699880 - RNA, 19 nt, Artificial Sequence
  Description of Artificial Sequence: Synthetic oligonucleotide
  Sense strand starting at position 3887 of SEQ ID NO: 586202
uugauaucuggcugcgaug

SEQ ID NO: 699881 - RNA, 19 nt, Artificial Sequence
  Description of Artificial Sequence: Synthetic oligonucleotide
  Antisense strand to SEQ ID NO: 699880
caucgcagccagauaucaa

SEQ ID NO: 699882 - RNA, 19 nt, Artificial Sequence
  Description of Artificial Sequence: Synthetic oligonucleotide
  Sense strand starting at position 3889 of SEQ ID NO: 586202
gauaucuggcugcgaugau

SEQ ID NO: 699883 - RNA, 19 nt, Artificial Sequence
  Description of Artificial Sequence: Synthetic oligonucleotide
  Antisense strand to SEQ ID NO: 699882
aucaucgcagccagauauc

SEQ ID NO: 699884 - RNA, 19 nt, Artificial Sequence
  Description of Artificial Sequence: Synthetic oligonucleotide
  Sense strand starting at position 3899 of SEQ ID NO: 586202
ugcgaugaucaguaacagu

SEQ ID NO: 699885 - RNA, 19 nt, Artificial Sequence
  Description of Artificial Sequence: Synthetic oligonucleotide
  Antisense strand to SEQ ID NO: 699884
acuguuacugaucaucgca

SEQ ID NO: 699886 - RNA, 19 nt, Artificial Sequence
  Description of Artificial Sequence: Synthetic oligonucleotide
  Sense strand starting at position 3929 of SEQ ID NO: 586202
ggaugagggcauugggauu

SEQ ID NO: 699887 - RNA, 19 nt, Artificial Sequence
  Description of Artificial Sequence: Synthetic oligonucleotide
  Antisense strand to SEQ ID NO: 699886
aaucccaaugcccucaucc

SEQ ID NO: 699888 - RNA, 19 nt, Artificial Sequence
  Description of Artificial Sequence: Synthetic oligonucleotide
  Sense strand starting at position 40 of SEQ ID NO: 586203
ggcugucagccaugaggga

SEQ ID NO: 699889 - RNA, 19 nt, Artificial Sequence
  Description of Artificial Sequence: Synthetic oligonucleotide
  Antisense strand to SEQ ID NO: 699888
ucccucauggcugacagcc

SEQ ID NO: 699890 - RNA, 19 nt, Artificial Sequence
  Description of Artificial Sequence: Synthetic oligonucleotide
  Sense strand starting at position 41 of SEQ ID NO: 586203
gcugucagccaugagggaa

SEQ ID NO: 699891 - RNA, 19 nt, Artificial Sequence
  Description of Artificial Sequence: Synthetic oligonucleotide
  Antisense strand to SEQ ID NO: 699890
uucccucauggcugacagc

SEQ ID NO: 699892 - RNA, 19 nt, Artificial Sequence
  Description of Artificial Sequence: Synthetic oligonucleotide
  Sense strand starting at position 161 of SEQ ID NO: 586203
agguaaaucucguucucuc

SEQ ID NO: 699893 - RNA, 19 nt, Artificial Sequence
  Description of Artificial Sequence: Synthetic oligonucleotide
  Antisense strand to SEQ ID NO: 699892
gagagaacgagauuuaccu

SEQ ID NO: 699894 - RNA, 19 nt, Artificial Sequence
  Description of Artificial Sequence: Synthetic oligonucleotide
  Sense strand starting at position 186 of SEQ ID NO: 586203
cccggaauuacagguccau

SEQ ID NO: 699895 - RNA, 19 nt, Artificial Sequence
  Description of Artificial Sequence: Synthetic oligonucleotide
  Antisense strand to SEQ ID NO: 699894
auggaccuguaauuccggg

SEQ ID NO: 699896 - RNA, 19 nt, Artificial Sequence
  Description of Artificial Sequence: Synthetic oligonucleotide
  Sense strand starting at position 203 of SEQ ID NO: 586203
auuuguccucagugggagu

SEQ ID NO: 699897 - RNA, 19 nt, Artificial Sequence
  Description of Artificial Sequence: Synthetic oligonucleotide
  Antisense strand to SEQ ID NO: 699896
acucccacugaggacaaau

SEQ ID NO: 699898 - RNA, 19 nt, Artificial Sequence
  Description of Artificial Sequence: Synthetic oligonucleotide
  Sense strand starting at position 210 of SEQ ID NO: 586203
cucagugggaguugaucuu

SEQ ID NO: 699899 - RNA, 19 nt, Artificial Sequence
  Description of Artificial Sequence: Synthetic oligonucleotide
  Antisense strand to SEQ ID NO: 699898
aagaucaacucccacugag

SEQ ID NO: 699900 - RNA, 19 nt, Artificial Sequence
  Description of Artificial Sequence: Synthetic oligonucleotide
  Sense strand starting at position 216 of SEQ ID NO: 586203
gggaguugaucuuugauuc

SEQ ID NO: 699901 - RNA, 19 nt, Artificial Sequence
  Description of Artificial Sequence: Synthetic oligonucleotide
  Antisense strand to SEQ ID NO: 699900
gaaucaaagaucaacuccc

SEQ ID NO: 699902 - RNA, 19 nt, Artificial Sequence
  Description of Artificial Sequence: Synthetic oligonucleotide
  Sense strand starting at position 246 of SEQ ID NO: 586203
aauaaaguccggugaauuc

SEQ ID NO: 699903 - RNA, 19 nt, Artificial Sequence
  Description of Artificial Sequence: Synthetic oligonucleotide
  Antisense strand to SEQ ID NO: 699902
gaauucaccggacuuuauu

SEQ ID NO: 699904 - RNA, 19 nt, Artificial Sequence
  Description of Artificial Sequence: Synthetic oligonucleotide
  Sense strand starting at position 368 of SEQ ID NO: 586203
ugugauugugggcaggaca

SEQ ID NO: 699905 - RNA, 19 nt, Artificial Sequence
  Description of Artificial Sequence: Synthetic oligonucleotide
  Antisense strand to SEQ ID NO: 699904
uguccugcccacaaucaca

SEQ ID NO: 699906 - RNA, 19 nt, Artificial Sequence
  Description of Artificial Sequence: Synthetic oligonucleotide
  Sense strand starting at position 645 of SEQ ID NO: 586203
uaugguggcucaguuaaau

SEQ ID NO: 699907 - RNA, 19 nt, Artificial Sequence
  Description of Artificial Sequence: Synthetic oligonucleotide
  Antisense strand to SEQ ID NO: 699906
auuuaacugagccaccaua

SEQ ID NO: 699908 - RNA, 19 nt, Artificial Sequence
  Description of Artificial Sequence: Synthetic oligonucleotide
  Sense strand starting at position 721 of SEQ ID NO: 586203
agcuaaagauacuucugau

SEQ ID NO: 699909 - RNA, 19 nt, Artificial Sequence
  Description of Artificial Sequence: Synthetic oligonucleotide
  Antisense strand to SEQ ID NO: 699908
aucagaaguaucuuuagcu

SEQ ID NO: 699910 - RNA, 19 nt, Artificial Sequence
  Description of Artificial Sequence: Synthetic oligonucleotide
  Sense strand starting at position 727 of SEQ ID NO: 586203
agauacuucugauugguca

SEQ ID NO: 699911 - RNA, 19 nt, Artificial Sequence
  Description of Artificial Sequence: Synthetic oligonucleotide
  Antisense strand to SEQ ID NO: 699910
ugaccaaucagaaguaucu

SEQ ID NO: 699912 - RNA, 19 nt, Artificial Sequence
  Description of Artificial Sequence: Synthetic oligonucleotide
  Sense strand starting at position 728 of SEQ ID NO: 586203
gauacuucugauuggucaa

SEQ ID NO: 699913 - RNA, 19 nt, Artificial Sequence
  Description of Artificial Sequence: Synthetic oligonucleotide
  Antisense strand to SEQ ID NO: 699912
uugaccaaucagaaguauc

SEQ ID NO: 699914 - RNA, 19 nt, Artificial Sequence
  Description of Artificial Sequence: Synthetic oligonucleotide
  Sense strand starting at position 899 of SEQ ID NO: 586203
gagagauggaguugugacu

SEQ ID NO: 699915 - RNA, 19 nt, Artificial Sequence
  Description of Artificial Sequence: Synthetic oligonucleotide
  Antisense strand to SEQ ID NO: 699914
agucacaacuccaucucuc

SEQ ID NO: 699916 - RNA, 19 nt, Artificial Sequence
  Description of Artificial Sequence: Synthetic oligonucleotide
  Sense strand starting at position 992 of SEQ ID NO: 586203
aagaguagucagcgauagu

SEQ ID NO: 699917 - RNA, 19 nt, Artificial Sequence
  Description of Artificial Sequence: Synthetic oligonucleotide
  Antisense strand to SEQ ID NO: 699916
acuaucgcugacuacucuu

SEQ ID NO: 699918 - RNA, 19 nt, Artificial Sequence
  Description of Artificial Sequence: Synthetic oligonucleotide
  Sense strand starting at position 993 of SEQ ID NO: 586203
agaguagucagcgauaguc

SEQ ID NO: 699919 - RNA, 19 nt, Artificial Sequence
  Description of Artificial Sequence: Synthetic oligonucleotide
  Antisense strand to SEQ ID NO: 699918
gacuaucgcugacuacucu

SEQ ID NO: 699920 - RNA, 19 nt, Artificial Sequence
  Description of Artificial Sequence: Synthetic oligonucleotide
  Sense strand starting at position 1001 of SEQ ID NO: 586203
cagcgauaguccucucuga

SEQ ID NO: 699921 - RNA, 19 nt, Artificial Sequence
  Description of Artificial Sequence: Synthetic oligonucleotide
  Antisense strand to SEQ ID NO: 699920
ucagagaggacuaucgcug

SEQ ID NO: 699922 - RNA, 19 nt, Artificial Sequence
  Description of Artificial Sequence: Synthetic oligonucleotide
  Sense strand starting at position 1028 of SEQ ID NO: 586203
uugauaaugcauugcucau

SEQ ID NO: 699923 - RNA, 19 nt, Artificial Sequence
  Description of Artificial Sequence: Synthetic oligonucleotide
  Antisense strand to SEQ ID NO: 699922
augagcaaugcauuaucaa

SEQ ID NO: 699924 - RNA, 19 nt, Artificial Sequence
  Description of Artificial Sequence: Synthetic oligonucleotide
  Sense strand starting at position 1034 of SEQ ID NO: 586203
augcauugcucauccagau

SEQ ID NO: 699925 - RNA, 19 nt, Artificial Sequence
  Description of Artificial Sequence: Synthetic oligonucleotide
  Antisense strand to SEQ ID NO: 699924
aucuggaugagcaaugcau

SEQ ID NO: 699926 - RNA, 19 nt, Artificial Sequence
  Description of Artificial Sequence: Synthetic oligonucleotide
  Sense strand starting at position 1047 of SEQ ID NO: 586203
ccagauggcuguuuacaau

SEQ ID NO: 699927 - RNA, 19 nt, Artificial Sequence
  Description of Artificial Sequence: Synthetic oligonucleotide
  Antisense strand to SEQ ID NO: 699926
auuguaaacagccaucugg

SEQ ID NO: 699928 - RNA, 19 nt, Artificial Sequence
  Description of Artificial Sequence: Synthetic oligonucleotide
  Sense strand starting at position 1050 of SEQ ID NO: 586203
gauggcuguuuacaauuua

SEQ ID NO: 699929 - RNA, 19 nt, Artificial Sequence
  Description of Artificial Sequence: Synthetic oligonucleotide
  Antisense strand to SEQ ID NO: 699928
uaaauuguaaacagccauc

SEQ ID NO: 699930 - RNA, 19 nt, Artificial Sequence
  Description of Artificial Sequence: Synthetic oligonucleotide
  Sense strand starting at position 1205 of SEQ ID NO: 586203
gcagucugugcggacaaau

SEQ ID NO: 699931 - RNA, 19 nt, Artificial Sequence
  Description of Artificial Sequence: Synthetic oligonucleotide
  Antisense strand to SEQ ID NO: 699930
auuuguccgcacagacugc

SEQ ID NO: 699932 - RNA, 19 nt, Artificial Sequence
  Description of Artificial Sequence: Synthetic oligonucleotide
  Sense strand starting at position 1280 of SEQ ID NO: 586203
aguuaacuugcagaagauc

SEQ ID NO: 699933 - RNA, 19 nt, Artificial Sequence
  Description of Artificial Sequence: Synthetic oligonucleotide
  Antisense strand to SEQ ID NO: 699932
gaucuucugcaaguuaacu

SEQ ID NO: 699934 - RNA, 19 nt, Artificial Sequence
  Description of Artificial Sequence: Synthetic oligonucleotide
  Sense strand starting at position 1309 of SEQ ID NO: 586203
uugaaaucagcugguugga

SEQ ID NO: 699935 - RNA, 19 nt, Artificial Sequence
  Description of Artificial Sequence: Synthetic oligonucleotide
  Antisense strand to SEQ ID NO: 699934
uccaaccagcugauuucaa

SEQ ID NO: 699936 - RNA, 19 nt, Artificial Sequence
  Description of Artificial Sequence: Synthetic oligonucleotide
  Sense strand starting at position 2198 of SEQ ID NO: 586203
ggaauucccucagaaacca

SEQ ID NO: 699937 - RNA, 19 nt, Artificial Sequence
  Description of Artificial Sequence: Synthetic oligonucleotide
  Antisense strand to SEQ ID NO: 699936
ugguuucugagggaauucc

SEQ ID NO: 699938 - RNA, 19 nt, Artificial Sequence
  Description of Artificial Sequence: Synthetic oligonucleotide
  Sense strand starting at position 2277 of SEQ ID NO: 586203
cucgguuuguuauccuaau

SEQ ID NO: 699939 - RNA, 19 nt, Artificial Sequence
  Description of Artificial Sequence: Synthetic oligonucleotide
  Antisense strand to SEQ ID NO: 699938
auuaggauaacaaaccgag

SEQ ID NO: 699940 - RNA, 19 nt, Artificial Sequence
  Description of Artificial Sequence: Synthetic oligonucleotide
  Sense strand starting at position 2278 of SEQ ID NO: 586203
ucgguuuguuauccuaauu

SEQ ID NO: 699941 - RNA, 19 nt, Artificial Sequence
  Description of Artificial Sequence: Synthetic oligonucleotide
  Antisense strand to SEQ ID NO: 699940
aauuaggauaacaaaccga

SEQ ID NO: 699942 - RNA, 19 nt, Artificial Sequence
  Description of Artificial Sequence: Synthetic oligonucleotide
  Sense strand starting at position 2283 of SEQ ID NO: 586203
uuguuauccuaauuaagug

SEQ ID NO: 699943 - RNA, 19 nt, Artificial Sequence
  Description of Artificial Sequence: Synthetic oligonucleotide
  Antisense strand to SEQ ID NO: 699942
cacuuaauuaggauaacaa

SEQ ID NO: 699944 - RNA, 19 nt, Artificial Sequence
  Description of Artificial Sequence: Synthetic oligonucleotide
  Sense strand starting at position 2317 of SEQ ID NO: 586203
aauagaauagcguaaguac

SEQ ID NO: 699945 - RNA, 19 nt, Artificial Sequence
  Description of Artificial Sequence: Synthetic oligonucleotide
  Antisense strand to SEQ ID NO: 699944
guacuuacgcuauucuauu

SEQ ID NO: 699946 - RNA, 19 nt, Artificial Sequence
  Description of Artificial Sequence: Synthetic oligonucleotide
  Sense strand starting at position 2320 of SEQ ID NO: 586203
agaauagcguaaguacuaa

SEQ ID NO: 699947 - RNA, 19 nt, Artificial Sequence
  Description of Artificial Sequence: Synthetic oligonucleotide
  Antisense strand to SEQ ID NO: 699946
uuaguacuuacgcuauucu

SEQ ID NO: 699948 - RNA, 19 nt, Artificial Sequence
  Description of Artificial Sequence: Synthetic oligonucleotide
  Sense strand starting at position 2377 of SEQ ID NO: 586203
uggaaugaauugcuguauu

SEQ ID NO: 699949 - RNA, 19 nt, Artificial Sequence
  Description of Artificial Sequence: Synthetic oligonucleotide
  Antisense strand to SEQ ID NO: 699948
aauacagcaauucauucca

SEQ ID NO: 699950 - RNA, 19 nt, Artificial Sequence
  Description of Artificial Sequence: Synthetic oligonucleotide
  Sense strand starting at position 3067 of SEQ ID NO: 586203
gcaggcucccgagaaggau

SEQ ID NO: 699951 - RNA, 19 nt, Artificial Sequence
  Description of Artificial Sequence: Synthetic oligonucleotide
  Antisense strand to SEQ ID NO: 699950
auccuucucgggagccugc

SEQ ID NO: 699952 - RNA, 19 nt, Artificial Sequence
  Description of Artificial Sequence: Synthetic oligonucleotide
  Sense strand starting at position 3080 of SEQ ID NO: 586203
aaggauuaacacuggcuga

SEQ ID NO: 699953 - RNA, 19 nt, Artificial Sequence
  Description of Artificial Sequence: Synthetic oligonucleotide
  Antisense strand to SEQ ID NO: 699952
ucagccaguguuaauccuu

SEQ ID NO: 699954 - RNA, 19 nt, Artificial Sequence
  Description of Artificial Sequence: Synthetic oligonucleotide
  Sense strand starting at position 3116 of SEQ ID NO: 586203
gcacuugaaguccagacau

SEQ ID NO: 699955 - RNA, 19 nt, Artificial Sequence
  Description of Artificial Sequence: Synthetic oligonucleotide
  Antisense strand to SEQ ID NO: 699954
augucuggacuucaagugc

SEQ ID NO: 699956 - RNA, 19 nt, Artificial Sequence
  Description of Artificial Sequence: Synthetic oligonucleotide
  Sense strand starting at position 3133 of SEQ ID NO: 586203
aucugaagcuugucaagac

SEQ ID NO: 699957 - RNA, 19 nt, Artificial Sequence
  Description of Artificial Sequence: Synthetic oligonucleotide
  Antisense strand to SEQ ID NO: 699956
gucuugacaagcuucagau

SEQ ID NO: 699958 - RNA, 19 nt, Artificial Sequence
  Description of Artificial Sequence: Synthetic oligonucleotide
  Sense strand starting at position 3137 of SEQ ID NO: 586203
gaagcuugucaagacuagu

SEQ ID NO: 699959 - RNA, 19 nt, Artificial Sequence
  Description of Artificial Sequence: Synthetic oligonucleotide
  Antisense strand to SEQ ID NO: 699958
acuagucuugacaagcuuc

SEQ ID NO: 699960 - RNA, 19 nt, Artificial Sequence
  Description of Artificial Sequence: Synthetic oligonucleotide
  Sense strand starting at position 3397 of SEQ ID NO: 586203
cacuccaucugaguggaaa

SEQ ID NO: 699961 - RNA, 19 nt, Artificial Sequence
  Description of Artificial Sequence: Synthetic oligonucleotide
  Antisense strand to SEQ ID NO: 699960
uuuccacucagauggagug

SEQ ID NO: 699962 - RNA, 19 nt, Artificial Sequence
  Description of Artificial Sequence: Synthetic oligonucleotide
  Sense strand starting at position 3398 of SEQ ID NO: 586203
acuccaucugaguggaaac

SEQ ID NO: 699963 - RNA, 19 nt, Artificial Sequence
  Description of Artificial Sequence: Synthetic oligonucleotide
  Antisense strand to SEQ ID NO: 699962
guuuccacucagauggagu

SEQ ID NO: 699964 - RNA, 19 nt, Artificial Sequence
  Description of Artificial Sequence: Synthetic oligonucleotide
  Sense strand starting at position 3409 of SEQ ID NO: 586203
guggaaacguggccugauc

SEQ ID NO: 699965 - RNA, 19 nt, Artificial Sequence
  Description of Artificial Sequence: Synthetic oligonucleotide
  Antisense strand to SEQ ID NO: 699964
gaucaggccacguuuccac

SEQ ID NO: 699966 - RNA, 19 nt, Artificial Sequence
  Description of Artificial Sequence: Synthetic oligonucleotide
  Sense strand starting at position 3737 of SEQ ID NO: 586203
aggagauuacgguguuagu

SEQ ID NO: 699967 - RNA, 19 nt, Artificial Sequence
  Description of Artificial Sequence: Synthetic oligonucleotide
  Antisense strand to SEQ ID NO: 699966
acuaacaccguaaucuccu

SEQ ID NO: 699968 - RNA, 19 nt, Artificial Sequence
  Description of Artificial Sequence: Synthetic oligonucleotide
  Sense strand starting at position 132 of SEQ ID NO: 586204
aagagaugaucagacugaa

SEQ ID NO: 699969 - RNA, 19 nt, Artificial Sequence
  Description of Artificial Sequence: Synthetic oligonucleotide
  Antisense strand to SEQ ID NO: 699968
uucagucugaucaucucuu

SEQ ID NO: 699970 - RNA, 19 nt, Artificial Sequence
  Description of Artificial Sequence: Synthetic oligonucleotide
  Sense strand starting at position 224 of SEQ ID NO: 586204
ccagauucgcaggagucuu

SEQ ID NO: 699971 - RNA, 19 nt, Artificial Sequence
  Description of Artificial Sequence: Synthetic oligonucleotide
  Antisense strand to SEQ ID NO: 699970
aagacuccugcgaaucugg

SEQ ID NO: 699972 - RNA, 19 nt, Artificial Sequence
  Description of Artificial Sequence: Synthetic oligonucleotide
  Sense strand starting at position 236 of SEQ ID NO: 586204
gagucuucugaccagagcu

SEQ ID NO: 699973 - RNA, 19 nt, Artificial Sequence
  Description of Artificial Sequence: Synthetic oligonucleotide
  Antisense strand to SEQ ID NO: 699972
agcucuggucagaagacuc

SEQ ID NO: 699974 - RNA, 19 nt, Artificial Sequence
  Description of Artificial Sequence: Synthetic oligonucleotide
  Sense strand starting at position 342 of SEQ ID NO: 586204
ggcugucagccaugaggga

SEQ ID NO: 699975 - RNA, 19 nt, Artificial Sequence
  Description of Artificial Sequence: Synthetic oligonucleotide
  Antisense strand to SEQ ID NO: 699974
ucccucauggcugacagcc

SEQ ID NO: 699976 - RNA, 19 nt, Artificial Sequence
  Description of Artificial Sequence: Synthetic oligonucleotide
  Sense strand starting at position 343 of SEQ ID NO: 586204
gcugucagccaugagggaa

SEQ ID NO: 699977 - RNA, 19 nt, Artificial Sequence
  Description of Artificial Sequence: Synthetic oligonucleotide
  Antisense strand to SEQ ID NO: 699976
uucccucauggcugacagc

SEQ ID NO: 699978 - RNA, 19 nt, Artificial Sequence
  Description of Artificial Sequence: Synthetic oligonucleotide
  Sense strand starting at position 463 of SEQ ID NO: 586204
agguaaaucucguucucuc

SEQ ID NO: 699979 - RNA, 19 nt, Artificial Sequence
  Description of Artificial Sequence: Synthetic oligonucleotide
  Antisense strand to SEQ ID NO: 699978
gagagaacgagauuuaccu

SEQ ID NO: 699980 - RNA, 19 nt, Artificial Sequence
  Description of Artificial Sequence: Synthetic oligonucleotide
  Sense strand starting at position 488 of SEQ ID NO: 586204
cccggaauuacagguccau

SEQ ID NO: 699981 - RNA, 19 nt, Artificial Sequence
  Description of Artificial Sequence: Synthetic oligonucleotide
  Antisense strand to SEQ ID NO: 699980
auggaccuguaauuccggg

SEQ ID NO: 699982 - RNA, 19 nt, Artificial Sequence
  Description of Artificial Sequence: Synthetic oligonucleotide
  Sense strand starting at position 505 of SEQ ID NO: 586204
auuuguccucagugggagu

SEQ ID NO: 699983 - RNA, 19 nt, Artificial Sequence
  Description of Artificial Sequence: Synthetic oligonucleotide
  Antisense strand to SEQ ID NO: 699982
acucccacugaggacaaau

SEQ ID NO: 699984 - RNA, 19 nt, Artificial Sequence
  Description of Artificial Sequence: Synthetic oligonucleotide
  Sense strand starting at position 512 of SEQ ID NO: 586204
cucagugggaguugaucuu

SEQ ID NO: 699985 - RNA, 19 nt, Artificial Sequence
  Description of Artificial Sequence: Synthetic oligonucleotide
  Antisense strand to SEQ ID NO: 699984
aagaucaacucccacugag

SEQ ID NO: 699986 - RNA, 19 nt, Artificial Sequence
  Description of Artificial Sequence: Synthetic oligonucleotide
  Sense strand starting at position 518 of SEQ ID NO: 586204
gggaguugaucuuugauuc

SEQ ID NO: 699987 - RNA, 19 nt, Artificial Sequence
  Description of Artificial Sequence: Synthetic oligonucleotide
  Antisense strand to SEQ ID NO: 699986
gaaucaaagaucaacuccc

SEQ ID NO: 699988 - RNA, 19 nt, Artificial Sequence
  Description of Artificial Sequence: Synthetic oligonucleotide
  Sense strand starting at position 548 of SEQ ID NO: 586204
aauaaaguccggugaauuc

SEQ ID NO: 699989 - RNA, 19 nt, Artificial Sequence
  Description of Artificial Sequence: Synthetic oligonucleotide
  Antisense strand to SEQ ID NO: 699988
gaauucaccggacuuuauu

SEQ ID NO: 699990 - RNA, 19 nt, Artificial Sequence
  Description of Artificial Sequence: Synthetic oligonucleotide
  Sense strand starting at position 670 of SEQ ID NO: 586204
ugugauugugggcaggaca

SEQ ID NO: 699991 - RNA, 19 nt, Artificial Sequence
  Description of Artificial Sequence: Synthetic oligonucleotide
  Antisense strand to SEQ ID NO: 699990
uguccugcccacaaucaca

SEQ ID NO: 699992 - RNA, 19 nt, Artificial Sequence
  Description of Artificial Sequence: Synthetic oligonucleotide
  Sense strand starting at position 947 of SEQ ID NO: 586204
uaugguggcucaguuaaau

SEQ ID NO: 699993 - RNA, 19 nt, Artificial Sequence
  Description of Artificial Sequence: Synthetic oligonucleotide
  Antisense strand to SEQ ID NO: 699992
auuuaacugagccaccaua

SEQ ID NO: 699994 - RNA, 19 nt, Artificial Sequence
  Description of Artificial Sequence: Synthetic oligonucleotide
  Sense strand starting at position 1023 of SEQ ID NO: 586204
agcuaaagauacuucugau

SEQ ID NO: 699995 - RNA, 19 nt, Artificial Sequence
  Description of Artificial Sequence: Synthetic oligonucleotide
  Antisense strand to SEQ ID NO: 699994
aucagaaguaucuuuagcu

SEQ ID NO: 699996 - RNA, 19 nt, Artificial Sequence
  Description of Artificial Sequence: Synthetic oligonucleotide
  Sense strand starting at position 1029 of SEQ ID NO: 586204
agauacuucugauugguca

SEQ ID NO: 699997 - RNA, 19 nt, Artificial Sequence
  Description of Artificial Sequence: Synthetic oligonucleotide
  Antisense strand to SEQ ID NO: 699996
ugaccaaucagaaguaucu

SEQ ID NO: 699998 - RNA, 19 nt, Artificial Sequence
  Description of Artificial Sequence: Synthetic oligonucleotide
  Sense strand starting at position 1030 of SEQ ID NO: 586204
gauacuucugauuggucaa

SEQ ID NO: 699999 - RNA, 19 nt, Artificial Sequence
  Description of Artificial Sequence: Synthetic oligonucleotide
  Antisense strand to SEQ ID NO: 699998
uugaccaaucagaaguauc

SEQ ID NO: 700000 - RNA, 19 nt, Artificial Sequence
  Description of Artificial Sequence: Synthetic oligonucleotide
  Sense strand starting at position 1201 of SEQ ID NO: 586204
gagagauggaguugugacu

SEQ ID NO: 700001 - RNA, 19 nt, Artificial Sequence
  Description of Artificial Sequence: Synthetic oligonucleotide
  Antisense strand to SEQ ID NO: 700000
agucacaacuccaucucuc

SEQ ID NO: 700002 - RNA, 19 nt, Artificial Sequence
  Description of Artificial Sequence: Synthetic oligonucleotide
  Sense strand starting at position 1294 of SEQ ID NO: 586204
aagaguagucagcgauagu

SEQ ID NO: 700003 - RNA, 19 nt, Artificial Sequence
  Description of Artificial Sequence: Synthetic oligonucleotide
  Antisense strand to SEQ ID NO: 700002
acuaucgcugacuacucuu

SEQ ID NO: 700004 - RNA, 19 nt, Artificial Sequence
  Description of Artificial Sequence: Synthetic oligonucleotide
  Sense strand starting at position 1295 of SEQ ID NO: 586204
agaguagucagcgauaguc

SEQ ID NO: 700005 - RNA, 19 nt, Artificial Sequence
  Description of Artificial Sequence: Synthetic oligonucleotide
  Antisense strand to SEQ ID NO: 700004
gacuaucgcugacuacucu

SEQ ID NO: 700006 - RNA, 19 nt, Artificial Sequence
  Description of Artificial Sequence: Synthetic oligonucleotide
  Sense strand starting at position 1303 of SEQ ID NO: 586204
cagcgauaguccucucuga

SEQ ID NO: 700007 - RNA, 19 nt, Artificial Sequence
  Description of Artificial Sequence: Synthetic oligonucleotide
  Antisense strand to SEQ ID NO: 700006
ucagagaggacuaucgcug

SEQ ID NO: 700008 - RNA, 19 nt, Artificial Sequence
  Description of Artificial Sequence: Synthetic oligonucleotide
  Sense strand starting at position 1330 of SEQ ID NO: 586204
uugauaaugcauugcucau

SEQ ID NO: 700009 - RNA, 19 nt, Artificial Sequence
  Description of Artificial Sequence: Synthetic oligonucleotide
  Antisense strand to SEQ ID NO: 700008
augagcaaugcauuaucaa

SEQ ID NO: 700010 - RNA, 19 nt, Artificial Sequence
  Description of Artificial Sequence: Synthetic oligonucleotide
  Sense strand starting at position 1336 of SEQ ID NO: 586204
augcauugcucauccagau

SEQ ID NO: 700011 - RNA, 19 nt, Artificial Sequence
  Description of Artificial Sequence: Synthetic oligonucleotide
  Antisense strand to SEQ ID NO: 700010
aucuggaugagcaaugcau

SEQ ID NO: 700012 - RNA, 19 nt, Artificial Sequence
  Description of Artificial Sequence: Synthetic oligonucleotide
  Sense strand starting at position 1349 of SEQ ID NO: 586204
ccagauggcuguuuacaau

SEQ ID NO: 700013 - RNA, 19 nt, Artificial Sequence
  Description of Artificial Sequence: Synthetic oligonucleotide
  Antisense strand to SEQ ID NO: 700012
auuguaaacagccaucugg

SEQ ID NO: 700014 - RNA, 19 nt, Artificial Sequence
  Description of Artificial Sequence: Synthetic oligonucleotide
  Sense strand starting at position 1352 of SEQ ID NO: 586204
gauggcuguuuacaauuua

SEQ ID NO: 700015 - RNA, 19 nt, Artificial Sequence
  Description of Artificial Sequence: Synthetic oligonucleotide
  Antisense strand to SEQ ID NO: 700014
uaaauuguaaacagccauc

SEQ ID NO: 700016 - RNA, 19 nt, Artificial Sequence
  Description of Artificial Sequence: Synthetic oligonucleotide
  Sense strand starting at position 1507 of SEQ ID NO: 586204
gcagucugugcggacaaau

SEQ ID NO: 700017 - RNA, 19 nt, Artificial Sequence
  Description of Artificial Sequence: Synthetic oligonucleotide
  Antisense strand to SEQ ID NO: 700016
auuuguccgcacagacugc

SEQ ID NO: 700018 - RNA, 19 nt, Artificial Sequence
  Description of Artificial Sequence: Synthetic oligonucleotide
  Sense strand starting at position 1582 of SEQ ID NO: 586204
aguuaacuugcagaagauc

SEQ ID NO: 700019 - RNA, 19 nt, Artificial Sequence
  Description of Artificial Sequence: Synthetic oligonucleotide
  Antisense strand to SEQ ID NO: 700018
gaucuucugcaaguuaacu

SEQ ID NO: 700020 - RNA, 19 nt, Artificial Sequence
  Description of Artificial Sequence: Synthetic oligonucleotide
  Sense strand starting at position 1611 of SEQ ID NO: 586204
uugaaaucagcugguugga

SEQ ID NO: 700021 - RNA, 19 nt, Artificial Sequence
  Description of Artificial Sequence: Synthetic oligonucleotide
  Antisense strand to SEQ ID NO: 700020
uccaaccagcugauuucaa

SEQ ID NO: 700022 - RNA, 19 nt, Artificial Sequence
  Description of Artificial Sequence: Synthetic oligonucleotide
  Sense strand starting at position 2500 of SEQ ID NO: 586204
ggaauucccucagaaacca

SEQ ID NO: 700023 - RNA, 19 nt, Artificial Sequence
  Description of Artificial Sequence: Synthetic oligonucleotide
  Antisense strand to SEQ ID NO: 700022
ugguuucugagggaauucc

SEQ ID NO: 700024 - RNA, 19 nt, Artificial Sequence
  Description of Artificial Sequence: Synthetic oligonucleotide
  Sense strand starting at position 2585 of SEQ ID NO: 586204
uuguuauccuaauuaagug

SEQ ID NO: 700025 - RNA, 19 nt, Artificial Sequence
  Description of Artificial Sequence: Synthetic oligonucleotide
  Antisense strand to SEQ ID NO: 700024
cacuuaauuaggauaacaa

SEQ ID NO: 700026 - RNA, 19 nt, Artificial Sequence
  Description of Artificial Sequence: Synthetic oligonucleotide
  Sense strand starting at position 2619 of SEQ ID NO: 586204
aauagaauagcguaaguac

SEQ ID NO: 700027 - RNA, 19 nt, Artificial Sequence
  Description of Artificial Sequence: Synthetic oligonucleotide
  Antisense strand to SEQ ID NO: 700026
guacuuacgcuauucuauu

SEQ ID NO: 700028 - RNA, 19 nt, Artificial Sequence
  Description of Artificial Sequence: Synthetic oligonucleotide
  Sense strand starting at position 2622 of SEQ ID NO: 586204
agaauagcguaaguacuaa

SEQ ID NO: 700029 - RNA, 19 nt, Artificial Sequence
  Description of Artificial Sequence: Synthetic oligonucleotide
  Antisense strand to SEQ ID NO: 700028
uuaguacuuacgcuauucu

SEQ ID NO: 700030 - RNA, 19 nt, Artificial Sequence
  Description of Artificial Sequence: Synthetic oligonucleotide
  Sense strand starting at position 2679 of SEQ ID NO: 586204
uggaaugaauugcuguauu

SEQ ID NO: 700031 - RNA, 19 nt, Artificial Sequence
  Description of Artificial Sequence: Synthetic oligonucleotide
  Antisense strand to SEQ ID NO: 700030
aauacagcaauucauucca

SEQ ID NO: 700032 - RNA, 19 nt, Artificial Sequence
  Description of Artificial Sequence: Synthetic oligonucleotide
  Sense strand starting at position 3369 of SEQ ID NO: 586204
gcaggcucccgagaaggau

SEQ ID NO: 700033 - RNA, 19 nt, Artificial Sequence
  Description of Artificial Sequence: Synthetic oligonucleotide
  Antisense strand to SEQ ID NO: 700032
auccuucucgggagccugc

SEQ ID NO: 700034 - RNA, 19 nt, Artificial Sequence
  Description of Artificial Sequence: Synthetic oligonucleotide
  Sense strand starting at position 3382 of SEQ ID NO: 586204
aaggauuaacacuggcuga

SEQ ID NO: 700035 - RNA, 19 nt, Artificial Sequence
  Description of Artificial Sequence: Synthetic oligonucleotide
  Antisense strand to SEQ ID NO: 700034
ucagccaguguuaauccuu

SEQ ID NO: 700036 - RNA, 19 nt, Artificial Sequence
  Description of Artificial Sequence: Synthetic oligonucleotide
  Sense strand starting at position 3418 of SEQ ID NO: 586204
gcacuugaaguccagacau

SEQ ID NO: 700037 - RNA, 19 nt, Artificial Sequence
  Description of Artificial Sequence: Synthetic oligonucleotide
  Antisense strand to SEQ ID NO: 700036
augucuggacuucaagugc

SEQ ID NO: 700038 - RNA, 19 nt, Artificial Sequence
  Description of Artificial Sequence: Synthetic oligonucleotide
  Sense strand starting at position 3435 of SEQ ID NO: 586204
aucugaagcuugucaagac

SEQ ID NO: 700039 - RNA, 19 nt, Artificial Sequence
  Description of Artificial Sequence: Synthetic oligonucleotide
  Antisense strand to SEQ ID NO: 700038
gucuugacaagcuucagau

SEQ ID NO: 700040 - RNA, 19 nt, Artificial Sequence
  Description of Artificial Sequence: Synthetic oligonucleotide
  Sense strand starting at position 3439 of SEQ ID NO: 586204
gaagcuugucaagacuagu

SEQ ID NO: 700041 - RNA, 19 nt, Artificial Sequence
  Description of Artificial Sequence: Synthetic oligonucleotide
  Antisense strand to SEQ ID NO: 700040
acuagucuugacaagcuuc

SEQ ID NO: 700042 - RNA, 19 nt, Artificial Sequence
  Description of Artificial Sequence: Synthetic oligonucleotide
  Sense strand starting at position 3699 of SEQ ID NO: 586204
cacuccaucugaguggaaa

SEQ ID NO: 700043 - RNA, 19 nt, Artificial Sequence
  Description of Artificial Sequence: Synthetic oligonucleotide
  Antisense strand to SEQ ID NO: 700042
uuuccacucagauggagug

SEQ ID NO: 700044 - RNA, 19 nt, Artificial Sequence
  Description of Artificial Sequence: Synthetic oligonucleotide
  Sense strand starting at position 3700 of SEQ ID NO: 586204
acuccaucugaguggaaac

SEQ ID NO: 700045 - RNA, 19 nt, Artificial Sequence
  Description of Artificial Sequence: Synthetic oligonucleotide
  Antisense strand to SEQ ID NO: 700044
guuuccacucagauggagu

SEQ ID NO: 700046 - RNA, 19 nt, Artificial Sequence
  Description of Artificial Sequence: Synthetic oligonucleotide
  Sense strand starting at position 3711 of SEQ ID NO: 586204
guggaaacguggccugauc

SEQ ID NO: 700047 - RNA, 19 nt, Artificial Sequence
  Description of Artificial Sequence: Synthetic oligonucleotide
  Antisense strand to SEQ ID NO: 700046
gaucaggccacguuuccac

SEQ ID NO: 700048 - RNA, 19 nt, Artificial Sequence
  Description of Artificial Sequence: Synthetic oligonucleotide
  Sense strand starting at position 47 of SEQ ID NO: 586205
ccaggcuucuagccucaaa

SEQ ID NO: 700049 - RNA, 19 nt, Artificial Sequence
  Description of Artificial Sequence: Synthetic oligonucleotide
  Antisense strand to SEQ ID NO: 700048
uuugaggcuagaagccugg

SEQ ID NO: 700050 - RNA, 19 nt, Artificial Sequence
  Description of Artificial Sequence: Synthetic oligonucleotide
  Sense strand starting at position 105 of SEQ ID NO: 586205
ggcagcauggccgagauaa

SEQ ID NO: 700051 - RNA, 19 nt, Artificial Sequence
  Description of Artificial Sequence: Synthetic oligonucleotide
  Antisense strand to SEQ ID NO: 700050
uuaucucggccaugcugcc

SEQ ID NO: 700052 - RNA, 19 nt, Artificial Sequence
  Description of Artificial Sequence: Synthetic oligonucleotide
  Sense strand starting at position 107 of SEQ ID NO: 586205
cagcauggccgagauaaga

SEQ ID NO: 700053 - RNA, 19 nt, Artificial Sequence
  Description of Artificial Sequence: Synthetic oligonucleotide
  Antisense strand to SEQ ID NO: 700052
ucuuaucucggccaugcug

SEQ ID NO: 700054 - RNA, 19 nt, Artificial Sequence
  Description of Artificial Sequence: Synthetic oligonucleotide
  Sense strand starting at position 217 of SEQ ID NO: 586205
cagaguuucuggucaugag

SEQ ID NO: 700055 - RNA, 19 nt, Artificial Sequence
  Description of Artificial Sequence: Synthetic oligonucleotide
  Antisense strand to SEQ ID NO: 700054
cucaugaccagaaacucug

SEQ ID NO: 700056 - RNA, 19 nt, Artificial Sequence
  Description of Artificial Sequence: Synthetic oligonucleotide
  Sense strand starting at position 218 of SEQ ID NO: 586205
agaguuucuggucaugagu

SEQ ID NO: 700057 - RNA, 19 nt, Artificial Sequence
  Description of Artificial Sequence: Synthetic oligonucleotide
  Antisense strand to SEQ ID NO: 700056
acucaugaccagaaacucu

SEQ ID NO: 700058 - RNA, 19 nt, Artificial Sequence
  Description of Artificial Sequence: Synthetic oligonucleotide
  Sense strand starting at position 221 of SEQ ID NO: 586205
guuucuggucaugaguaag

SEQ ID NO: 700059 - RNA, 19 nt, Artificial Sequence
  Description of Artificial Sequence: Synthetic oligonucleotide
  Antisense strand to SEQ ID NO: 700058
cuuacucaugaccagaaac

SEQ ID NO: 700060 - RNA, 19 nt, Artificial Sequence
  Description of Artificial Sequence: Synthetic oligonucleotide
  Sense strand starting at position 233 of SEQ ID NO: 586205
gaguaagaggcuugucuga

SEQ ID NO: 700061 - RNA, 19 nt, Artificial Sequence
  Description of Artificial Sequence: Synthetic oligonucleotide
  Antisense strand to SEQ ID NO: 700060
ucagacaagccucuuacuc

SEQ ID NO: 700062 - RNA, 19 nt, Artificial Sequence
  Description of Artificial Sequence: Synthetic oligonucleotide
  Sense strand starting at position 235 of SEQ ID NO: 586205
guaagaggcuugucugacu

SEQ ID NO: 700063 - RNA, 19 nt, Artificial Sequence
  Description of Artificial Sequence: Synthetic oligonucleotide
  Antisense strand to SEQ ID NO: 700062
agucagacaagccucuuac

SEQ ID NO: 700064 - RNA, 19 nt, Artificial Sequence
  Description of Artificial Sequence: Synthetic oligonucleotide
  Sense strand starting at position 315 of SEQ ID NO: 586205
aguccuugucgcagggagu

SEQ ID NO: 700065 - RNA, 19 nt, Artificial Sequence
  Description of Artificial Sequence: Synthetic oligonucleotide
  Antisense strand to SEQ ID NO: 700064
acucccugcgacaaggacu

SEQ ID NO: 700066 - RNA, 19 nt, Artificial Sequence
  Description of Artificial Sequence: Synthetic oligonucleotide
  Sense strand starting at position 918 of SEQ ID NO: 586205
cccuaaaggucuguccaca

SEQ ID NO: 700067 - RNA, 19 nt, Artificial Sequence
  Description of Artificial Sequence: Synthetic oligonucleotide
  Antisense strand to SEQ ID NO: 700066
uguggacagaccuuuaggg

SEQ ID NO: 700068 - RNA, 19 nt, Artificial Sequence
  Description of Artificial Sequence: Synthetic oligonucleotide
  Sense strand starting at position 968 of SEQ ID NO: 586205
acugaucuugcccaucuga

SEQ ID NO: 700069 - RNA, 19 nt, Artificial Sequence
  Description of Artificial Sequence: Synthetic oligonucleotide
  Antisense strand to SEQ ID NO: 700068
ucagaugggcaagaucagu

SEQ ID NO: 700070 - RNA, 19 nt, Artificial Sequence
  Description of Artificial Sequence: Synthetic oligonucleotide
  Sense strand starting at position 989 of SEQ ID NO: 586205
uuaccauguuuguuguaaa

SEQ ID NO: 700071 - RNA, 19 nt, Artificial Sequence
  Description of Artificial Sequence: Synthetic oligonucleotide
  Antisense strand to SEQ ID NO: 700070
uuuacaacaaacaugguaa

SEQ ID NO: 700072 - RNA, 19 nt, Artificial Sequence
  Description of Artificial Sequence: Synthetic oligonucleotide
  Sense strand starting at position 1182 of SEQ ID NO: 586205
aagagaugaucagacugaa

SEQ ID NO: 700073 - RNA, 19 nt, Artificial Sequence
  Description of Artificial Sequence: Synthetic oligonucleotide
  Antisense strand to SEQ ID NO: 700072
uucagucugaucaucucuu

SEQ ID NO: 700074 - RNA, 19 nt, Artificial Sequence
  Description of Artificial Sequence: Synthetic oligonucleotide
  Sense strand starting at position 1274 of SEQ ID NO: 586205
ccagauucgcaggagucuu

SEQ ID NO: 700075 - RNA, 19 nt, Artificial Sequence
  Description of Artificial Sequence: Synthetic oligonucleotide
  Antisense strand to SEQ ID NO: 700074
aagacuccugcgaaucugg

SEQ ID NO: 700076 - RNA, 19 nt, Artificial Sequence
  Description of Artificial Sequence: Synthetic oligonucleotide
  Sense strand starting at position 1286 of SEQ ID NO: 586205
gagucuucugaccagagcu

SEQ ID NO: 700077 - RNA, 19 nt, Artificial Sequence
  Description of Artificial Sequence: Synthetic oligonucleotide
  Antisense strand to SEQ ID NO: 700076
agcucuggucagaagacuc

SEQ ID NO: 700078 - RNA, 19 nt, Artificial Sequence
  Description of Artificial Sequence: Synthetic oligonucleotide
  Sense strand starting at position 1392 of SEQ ID NO: 586205
ggcugucagccaugaggga

SEQ ID NO: 700079 - RNA, 19 nt, Artificial Sequence
  Description of Artificial Sequence: Synthetic oligonucleotide
  Antisense strand to SEQ ID NO: 700078
ucccucauggcugacagcc

SEQ ID NO: 700080 - RNA, 19 nt, Artificial Sequence
  Description of Artificial Sequence: Synthetic oligonucleotide
  Sense strand starting at position 1393 of SEQ ID NO: 586205
gcugucagccaugagggaa

SEQ ID NO: 700081 - RNA, 19 nt, Artificial Sequence
  Description of Artificial Sequence: Synthetic oligonucleotide
  Antisense strand to SEQ ID NO: 700080
uucccucauggcugacagc

SEQ ID NO: 700082 - RNA, 19 nt, Artificial Sequence
  Description of Artificial Sequence: Synthetic oligonucleotide
  Sense strand starting at position 1538 of SEQ ID NO: 586205
cccggaauuacagguccau

SEQ ID NO: 700083 - RNA, 19 nt, Artificial Sequence
  Description of Artificial Sequence: Synthetic oligonucleotide
  Antisense strand to SEQ ID NO: 700082
auggaccuguaauuccggg

SEQ ID NO: 700084 - RNA, 19 nt, Artificial Sequence
  Description of Artificial Sequence: Synthetic oligonucleotide
  Sense strand starting at position 1555 of SEQ ID NO: 586205
auuuguccucagugggagu

SEQ ID NO: 700085 - RNA, 19 nt, Artificial Sequence
  Description of Artificial Sequence: Synthetic oligonucleotide
  Antisense strand to SEQ ID NO: 700084
acucccacugaggacaaau

SEQ ID NO: 700086 - RNA, 19 nt, Artificial Sequence
  Description of Artificial Sequence: Synthetic oligonucleotide
  Sense strand starting at position 1562 of SEQ ID NO: 586205
cucagugggaguugaucuu

SEQ ID NO: 700087 - RNA, 19 nt, Artificial Sequence
  Description of Artificial Sequence: Synthetic oligonucleotide
  Antisense strand to SEQ ID NO: 700086
aagaucaacucccacugag

SEQ ID NO: 700088 - RNA, 19 nt, Artificial Sequence
  Description of Artificial Sequence: Synthetic oligonucleotide
  Sense strand starting at position 1568 of SEQ ID NO: 586205
gggaguugaucuuugauuc

SEQ ID NO: 700089 - RNA, 19 nt, Artificial Sequence
  Description of Artificial Sequence: Synthetic oligonucleotide
  Antisense strand to SEQ ID NO: 700088
gaaucaaagaucaacuccc

SEQ ID NO: 700090 - RNA, 19 nt, Artificial Sequence
  Description of Artificial Sequence: Synthetic oligonucleotide
  Sense strand starting at position 1598 of SEQ ID NO: 586205
aauaaaguccggugaauuc

SEQ ID NO: 700091 - RNA, 19 nt, Artificial Sequence
  Description of Artificial Sequence: Synthetic oligonucleotide
  Antisense strand to SEQ ID NO: 700090
gaauucaccggacuuuauu

SEQ ID NO: 700092 - RNA, 19 nt, Artificial Sequence
  Description of Artificial Sequence: Synthetic oligonucleotide
  Sense strand starting at position 1720 of SEQ ID NO: 586205
ugugauugugggcaggaca

SEQ ID NO: 700093 - RNA, 19 nt, Artificial Sequence
  Description of Artificial Sequence: Synthetic oligonucleotide
  Antisense strand to SEQ ID NO: 700092
uguccugcccacaaucaca

SEQ ID NO: 700094 - RNA, 19 nt, Artificial Sequence
  Description of Artificial Sequence: Synthetic oligonucleotide
  Sense strand starting at position 1997 of SEQ ID NO: 586205
uaugguggcucaguuaaau

SEQ ID NO: 700095 - RNA, 19 nt, Artificial Sequence
  Description of Artificial Sequence: Synthetic oligonucleotide
  Antisense strand to SEQ ID NO: 700094
auuuaacugagccaccaua

SEQ ID NO: 700096 - RNA, 19 nt, Artificial Sequence
  Description of Artificial Sequence: Synthetic oligonucleotide
  Sense strand starting at position 2073 of SEQ ID NO: 586205
agcuaaagauacuucugau

SEQ ID NO: 700097 - RNA, 19 nt, Artificial Sequence
  Description of Artificial Sequence: Synthetic oligonucleotide
  Antisense strand to SEQ ID NO: 700096
aucagaaguaucuuuagcu

SEQ ID NO: 700098 - RNA, 19 nt, Artificial Sequence
  Description of Artificial Sequence: Synthetic oligonucleotide
  Sense strand starting at position 2079 of SEQ ID NO: 586205
agauacuucugauugguca

SEQ ID NO: 700099 - RNA, 19 nt, Artificial Sequence
  Description of Artificial Sequence: Synthetic oligonucleotide
  Antisense strand to SEQ ID NO: 700098
ugaccaaucagaaguaucu

SEQ ID NO: 700100 - RNA, 19 nt, Artificial Sequence
  Description of Artificial Sequence: Synthetic oligonucleotide
  Sense strand starting at position 2080 of SEQ ID NO: 586205
gauacuucugauuggucaa

SEQ ID NO: 700101 - RNA, 19 nt, Artificial Sequence
  Description of Artificial Sequence: Synthetic oligonucleotide
  Antisense strand to SEQ ID NO: 700100
uugaccaaucagaaguauc

SEQ ID NO: 700102 - RNA, 19 nt, Artificial Sequence
  Description of Artificial Sequence: Synthetic oligonucleotide
  Sense strand starting at position 2251 of SEQ ID NO: 586205
gagagauggaguugugacu

SEQ ID NO: 700103 - RNA, 19 nt, Artificial Sequence
  Description of Artificial Sequence: Synthetic oligonucleotide
  Antisense strand to SEQ ID NO: 700102
agucacaacuccaucucuc

SEQ ID NO: 700104 - RNA, 19 nt, Artificial Sequence
  Description of Artificial Sequence: Synthetic oligonucleotide
  Sense strand starting at position 2344 of SEQ ID NO: 586205
aagaguagucagcgauagu

SEQ ID NO: 700105 - RNA, 19 nt, Artificial Sequence
  Description of Artificial Sequence: Synthetic oligonucleotide
  Antisense strand to SEQ ID NO: 700104
acuaucgcugacuacucuu

SEQ ID NO: 700106 - RNA, 19 nt, Artificial Sequence
  Description of Artificial Sequence: Synthetic oligonucleotide
  Sense strand starting at position 2345 of SEQ ID NO: 586205
agaguagucagcgauaguc

SEQ ID NO: 700107 - RNA, 19 nt, Artificial Sequence
  Description of Artificial Sequence: Synthetic oligonucleotide
  Antisense strand to SEQ ID NO: 700106
gacuaucgcugacuacucu

SEQ ID NO: 700108 - RNA, 19 nt, Artificial Sequence
  Description of Artificial Sequence: Synthetic oligonucleotide
  Sense strand starting at position 2380 of SEQ ID NO: 586205
uugauaaugcauugcucau

SEQ ID NO: 700109 - RNA, 19 nt, Artificial Sequence
  Description of Artificial Sequence: Synthetic oligonucleotide
  Antisense strand to SEQ ID NO: 700108
augagcaaugcauuaucaa

SEQ ID NO: 700110 - RNA, 19 nt, Artificial Sequence
  Description of Artificial Sequence: Synthetic oligonucleotide
  Sense strand starting at position 2386 of SEQ ID NO: 586205
augcauugcucauccagau

SEQ ID NO: 700111 - RNA, 19 nt, Artificial Sequence
  Description of Artificial Sequence: Synthetic oligonucleotide
  Antisense strand to SEQ ID NO: 700110
aucuggaugagcaaugcau

SEQ ID NO: 700112 - RNA, 19 nt, Artificial Sequence
  Description of Artificial Sequence: Synthetic oligonucleotide
  Sense strand starting at position 2399 of SEQ ID NO: 586205
ccagauggcuguuuacaau

SEQ ID NO: 700113 - RNA, 19 nt, Artificial Sequence
  Description of Artificial Sequence: Synthetic oligonucleotide
  Antisense strand to SEQ ID NO: 700112
auuguaaacagccaucugg

SEQ ID NO: 700114 - RNA, 19 nt, Artificial Sequence
  Description of Artificial Sequence: Synthetic oligonucleotide
  Sense strand starting at position 2402 of SEQ ID NO: 586205
gauggcuguuuacaauuua

SEQ ID NO: 700115 - RNA, 19 nt, Artificial Sequence
  Description of Artificial Sequence: Synthetic oligonucleotide
  Antisense strand to SEQ ID NO: 700114
uaaauuguaaacagccauc

SEQ ID NO: 700116 - RNA, 19 nt, Artificial Sequence
  Description of Artificial Sequence: Synthetic oligonucleotide
  Sense strand starting at position 2632 of SEQ ID NO: 586205
aguuaacuugcagaagauc

SEQ ID NO: 700117 - RNA, 19 nt, Artificial Sequence
  Description of Artificial Sequence: Synthetic oligonucleotide
  Antisense strand to SEQ ID NO: 700116
gaucuucugcaaguuaacu

SEQ ID NO: 700118 - RNA, 19 nt, Artificial Sequence
  Description of Artificial Sequence: Synthetic oligonucleotide
  Sense strand starting at position 2661 of SEQ ID NO: 586205
uugaaaucagcugguugga

SEQ ID NO: 700119 - RNA, 19 nt, Artificial Sequence
  Description of Artificial Sequence: Synthetic oligonucleotide
  Antisense strand to SEQ ID NO: 700118
uccaaccagcugauuucaa

SEQ ID NO: 700120 - RNA, 19 nt, Artificial Sequence
  Description of Artificial Sequence: Synthetic oligonucleotide
  Sense strand starting at position 3635 of SEQ ID NO: 586205
uuguuauccuaauuaagug

SEQ ID NO: 700121 - RNA, 19 nt, Artificial Sequence
  Description of Artificial Sequence: Synthetic oligonucleotide
  Antisense strand to SEQ ID NO: 700120
cacuuaauuaggauaacaa

SEQ ID NO: 700122 - RNA, 19 nt, Artificial Sequence
  Description of Artificial Sequence: Synthetic oligonucleotide
  Sense strand starting at position 3669 of SEQ ID NO: 586205
aauagaauagcguaaguac

SEQ ID NO: 700123 - RNA, 19 nt, Artificial Sequence
  Description of Artificial Sequence: Synthetic oligonucleotide
  Antisense strand to SEQ ID NO: 700122
guacuuacgcuauucuauu

SEQ ID NO: 700124 - RNA, 19 nt, Artificial Sequence
  Description of Artificial Sequence: Synthetic oligonucleotide
  Sense strand starting at position 3672 of SEQ ID NO: 586205
agaauagcguaaguacuaa

SEQ ID NO: 700125 - RNA, 19 nt, Artificial Sequence
  Description of Artificial Sequence: Synthetic oligonucleotide
  Antisense strand to SEQ ID NO: 700124
uuaguacuuacgcuauucu

SEQ ID NO: 700126 - RNA, 19 nt, Artificial Sequence
  Description of Artificial Sequence: Synthetic oligonucleotide
  Sense strand starting at position 3729 of SEQ ID NO: 586205
uggaaugaauugcuguauu

SEQ ID NO: 700127 - RNA, 19 nt, Artificial Sequence
  Description of Artificial Sequence: Synthetic oligonucleotide
  Antisense strand to SEQ ID NO: 700126
aauacagcaauucauucca

SEQ ID NO: 700128 - RNA, 19 nt, Artificial Sequence
  Description of Artificial Sequence: Synthetic oligonucleotide
  Sense strand starting at position 382 of SEQ ID NO: 586206
ugcggauguguguauaaac

SEQ ID NO: 700129 - RNA, 19 nt, Artificial Sequence
  Description of Artificial Sequence: Synthetic oligonucleotide
  Antisense strand to SEQ ID NO: 700128
guuuauacacacauccgca

SEQ ID NO: 700130 - RNA, 19 nt, Artificial Sequence
  Description of Artificial Sequence: Synthetic oligonucleotide
  Sense strand starting at position 389 of SEQ ID NO: 586206
guguguauaaacuguguau

SEQ ID NO: 700131 - RNA, 19 nt, Artificial Sequence
  Description of Artificial Sequence: Synthetic oligonucleotide
  Antisense strand to SEQ ID NO: 700130
auacacaguuuauacacac

SEQ ID NO: 700132 - RNA, 19 nt, Artificial Sequence
  Description of Artificial Sequence: Synthetic oligonucleotide
  Sense strand starting at position 391 of SEQ ID NO: 586206
guguauaaacuguguauau

SEQ ID NO: 700133 - RNA, 19 nt, Artificial Sequence
  Description of Artificial Sequence: Synthetic oligonucleotide
  Antisense strand to SEQ ID NO: 700132
auauacacaguuuauacac

SEQ ID NO: 700134 - RNA, 19 nt, Artificial Sequence
  Description of Artificial Sequence: Synthetic oligonucleotide
  Sense strand starting at position 475 of SEQ ID NO: 586206
gcuuaagaauucguaauca

SEQ ID NO: 700135 - RNA, 19 nt, Artificial Sequence
  Description of Artificial Sequence: Synthetic oligonucleotide
  Antisense strand to SEQ ID NO: 700134
ugauuacgaauucuuaagc

SEQ ID NO: 700136 - RNA, 19 nt, Artificial Sequence
  Description of Artificial Sequence: Synthetic oligonucleotide
  Sense strand starting at position 550 of SEQ ID NO: 586206
acauccaucugaugagguu

SEQ ID NO: 700137 - RNA, 19 nt, Artificial Sequence
  Description of Artificial Sequence: Synthetic oligonucleotide
  Antisense strand to SEQ ID NO: 700136
aaccucaucagauggaugu

SEQ ID NO: 700138 - RNA, 19 nt, Artificial Sequence
  Description of Artificial Sequence: Synthetic oligonucleotide
  Sense strand starting at position 643 of SEQ ID NO: 586206
acaaacuccuguugguuua

SEQ ID NO: 700139 - RNA, 19 nt, Artificial Sequence
  Description of Artificial Sequence: Synthetic oligonucleotide
  Antisense strand to SEQ ID NO: 700138
uaaaccaacaggaguuugu

SEQ ID NO: 700140 - RNA, 19 nt, Artificial Sequence
  Description of Artificial Sequence: Synthetic oligonucleotide
  Sense strand starting at position 654 of SEQ ID NO: 586206
uugguuuaccacugaaaua

SEQ ID NO: 700141 - RNA, 19 nt, Artificial Sequence
  Description of Artificial Sequence: Synthetic oligonucleotide
  Antisense strand to SEQ ID NO: 700140
uauuucagugguaaaccaa

SEQ ID NO: 700142 - RNA, 19 nt, Artificial Sequence
  Description of Artificial Sequence: Synthetic oligonucleotide
  Sense strand starting at position 679 of SEQ ID NO: 586206
gaaugugacucccuuaaga

SEQ ID NO: 700143 - RNA, 19 nt, Artificial Sequence
  Description of Artificial Sequence: Synthetic oligonucleotide
  Antisense strand to SEQ ID NO: 700142
ucuuaagggagucacauuc

SEQ ID NO: 700144 - RNA, 19 nt, Artificial Sequence
  Description of Artificial Sequence: Synthetic oligonucleotide
  Sense strand starting at position 681 of SEQ ID NO: 586206
augugacucccuuaagauc

SEQ ID NO: 700145 - RNA, 19 nt, Artificial Sequence
  Description of Artificial Sequence: Synthetic oligonucleotide
  Antisense strand to SEQ ID NO: 700144
gaucuuaagggagucacau

SEQ ID NO: 700146 - RNA, 19 nt, Artificial Sequence
  Description of Artificial Sequence: Synthetic oligonucleotide
  Sense strand starting at position 689 of SEQ ID NO: 586206
cccuuaagaucccauaggu

SEQ ID NO: 700147 - RNA, 19 nt, Artificial Sequence
  Description of Artificial Sequence: Synthetic oligonucleotide
  Antisense strand to SEQ ID NO: 700146
accuaugggaucuuaaggg

SEQ ID NO: 700148 - RNA, 19 nt, Artificial Sequence
  Description of Artificial Sequence: Synthetic oligonucleotide
  Sense strand starting at position 751 of SEQ ID NO: 586206
uaaaucagaugguguguca

SEQ ID NO: 700149 - RNA, 19 nt, Artificial Sequence
  Description of Artificial Sequence: Synthetic oligonucleotide
  Antisense strand to SEQ ID NO: 700148
ugacacaccaucugauuua

SEQ ID NO: 700150 - RNA, 19 nt, Artificial Sequence
  Description of Artificial Sequence: Synthetic oligonucleotide
  Sense strand starting at position 762 of SEQ ID NO: 586206
gugugucaccuccacucaa

SEQ ID NO: 700151 - RNA, 19 nt, Artificial Sequence
  Description of Artificial Sequence: Synthetic oligonucleotide
  Antisense strand to SEQ ID NO: 700150
uugaguggaggugacacac

SEQ ID NO: 700152 - RNA, 19 nt, Artificial Sequence
  Description of Artificial Sequence: Synthetic oligonucleotide
  Sense strand starting at position 1233 of SEQ ID NO: 586206
cggaaagcaugcuuaugau

SEQ ID NO: 700153 - RNA, 19 nt, Artificial Sequence
  Description of Artificial Sequence: Synthetic oligonucleotide
  Antisense strand to SEQ ID NO: 700152
aucauaagcaugcuuuccg

SEQ ID NO: 700154 - RNA, 19 nt, Artificial Sequence
  Description of Artificial Sequence: Synthetic oligonucleotide
  Sense strand starting at position 1236 of SEQ ID NO: 586206
aaagcaugcuuaugaugga

SEQ ID NO: 700155 - RNA, 19 nt, Artificial Sequence
  Description of Artificial Sequence: Synthetic oligonucleotide
  Antisense strand to SEQ ID NO: 700154
uccaucauaagcaugcuuu

SEQ ID NO: 700156 - RNA, 19 nt, Artificial Sequence
  Description of Artificial Sequence: Synthetic oligonucleotide
  Sense strand starting at position 1237 of SEQ ID NO: 586206
aagcaugcuuaugauggaa

SEQ ID NO: 700157 - RNA, 19 nt, Artificial Sequence
  Description of Artificial Sequence: Synthetic oligonucleotide
  Antisense strand to SEQ ID NO: 700156
uuccaucauaagcaugcuu

SEQ ID NO: 700158 - RNA, 19 nt, Artificial Sequence
  Description of Artificial Sequence: Synthetic oligonucleotide
  Sense strand starting at position 1239 of SEQ ID NO: 586206
gcaugcuuaugauggaaag

SEQ ID NO: 700159 - RNA, 19 nt, Artificial Sequence
  Description of Artificial Sequence: Synthetic oligonucleotide
  Antisense strand to SEQ ID NO: 700158
cuuuccaucauaagcaugc

SEQ ID NO: 700160 - RNA, 19 nt, Artificial Sequence
  Description of Artificial Sequence: Synthetic oligonucleotide
  Sense strand starting at position 1240 of SEQ ID NO: 586206
caugcuuaugauggaaagu

SEQ ID NO: 700161 - RNA, 19 nt, Artificial Sequence
  Description of Artificial Sequence: Synthetic oligonucleotide
  Antisense strand to SEQ ID NO: 700160
acuuuccaucauaagcaug

SEQ ID NO: 700162 - RNA, 19 nt, Artificial Sequence
  Description of Artificial Sequence: Synthetic oligonucleotide
  Sense strand starting at position 2153 of SEQ ID NO: 586206
ucucuagaggccuagaguu

SEQ ID NO: 700163 - RNA, 19 nt, Artificial Sequence
  Description of Artificial Sequence: Synthetic oligonucleotide
  Antisense strand to SEQ ID NO: 700162
aacucuaggccucuagaga

SEQ ID NO: 700164 - RNA, 19 nt, Artificial Sequence
  Description of Artificial Sequence: Synthetic oligonucleotide
  Sense strand starting at position 2163 of SEQ ID NO: 586206
ccuagaguugcuuggagag

SEQ ID NO: 700165 - RNA, 19 nt, Artificial Sequence
  Description of Artificial Sequence: Synthetic oligonucleotide
  Antisense strand to SEQ ID NO: 700164
cucuccaagcaacucuagg

SEQ ID NO: 700166 - RNA, 19 nt, Artificial Sequence
  Description of Artificial Sequence: Synthetic oligonucleotide
  Sense strand starting at position 2165 of SEQ ID NO: 586206
uagaguugcuuggagagga

SEQ ID NO: 700167 - RNA, 19 nt, Artificial Sequence
  Description of Artificial Sequence: Synthetic oligonucleotide
  Antisense strand to SEQ ID NO: 700166
uccucuccaagcaacucua

SEQ ID NO: 700168 - RNA, 19 nt, Artificial Sequence
  Description of Artificial Sequence: Synthetic oligonucleotide
  Sense strand starting at position 2342 of SEQ ID NO: 586206
agucgaaauggaugagcua

SEQ ID NO: 700169 - RNA, 19 nt, Artificial Sequence
  Description of Artificial Sequence: Synthetic oligonucleotide
  Antisense strand to SEQ ID NO: 700168
uagcucauccauuucgacu

SEQ ID NO: 700170 - RNA, 19 nt, Artificial Sequence
  Description of Artificial Sequence: Synthetic oligonucleotide
  Sense strand starting at position 2386 of SEQ ID NO: 586206
gacuuaaacuucgugcuga

SEQ ID NO: 700171 - RNA, 19 nt, Artificial Sequence
  Description of Artificial Sequence: Synthetic oligonucleotide
  Antisense strand to SEQ ID NO: 700170
ucagcacgaaguuuaaguc

SEQ ID NO: 700172 - RNA, 19 nt, Artificial Sequence
  Description of Artificial Sequence: Synthetic oligonucleotide
  Sense strand starting at position 2390 of SEQ ID NO: 586206
uaaacuucgugcugaauuu

SEQ ID NO: 700173 - RNA, 19 nt, Artificial Sequence
  Description of Artificial Sequence: Synthetic oligonucleotide
  Antisense strand to SEQ ID NO: 700172
aaauucagcacgaaguuua

SEQ ID NO: 700174 - RNA, 19 nt, Artificial Sequence
  Description of Artificial Sequence: Synthetic oligonucleotide
  Sense strand starting at position 2444 of SEQ ID NO: 586206
uggguaguguuauaauaau

SEQ ID NO: 700175 - RNA, 19 nt, Artificial Sequence
  Description of Artificial Sequence: Synthetic oligonucleotide
  Antisense strand to SEQ ID NO: 700174
auuauuauaacacuaccca

SEQ ID NO: 700176 - RNA, 19 nt, Artificial Sequence
  Description of Artificial Sequence: Synthetic oligonucleotide
  Sense strand starting at position 2998 of SEQ ID NO: 586206
agccguaucaaguaugaug

SEQ ID NO: 700177 - RNA, 19 nt, Artificial Sequence
  Description of Artificial Sequence: Synthetic oligonucleotide
  Antisense strand to SEQ ID NO: 700176
caucauacuugauacggcu

SEQ ID NO: 700178 - RNA, 19 nt, Artificial Sequence
  Description of Artificial Sequence: Synthetic oligonucleotide
  Sense strand starting at position 3000 of SEQ ID NO: 586206
ccguaucaaguaugaugua

SEQ ID NO: 700179 - RNA, 19 nt, Artificial Sequence
  Description of Artificial Sequence: Synthetic oligonucleotide
  Antisense strand to SEQ ID NO: 700178
uacaucauacuugauacgg

SEQ ID NO: 700180 - RNA, 19 nt, Artificial Sequence
  Description of Artificial Sequence: Synthetic oligonucleotide
  Sense strand starting at position 3060 of SEQ ID NO: 586206
acucuuccuuacugguaga

SEQ ID NO: 700181 - RNA, 19 nt, Artificial Sequence
  Description of Artificial Sequence: Synthetic oligonucleotide
  Antisense strand to SEQ ID NO: 700180
ucuaccaguaaggaagagu

SEQ ID NO: 700182 - RNA, 19 nt, Artificial Sequence
  Description of Artificial Sequence: Synthetic oligonucleotide
  Sense strand starting at position 3063 of SEQ ID NO: 586206
cuuccuuacugguagaaga

SEQ ID NO: 700183 - RNA, 19 nt, Artificial Sequence
  Description of Artificial Sequence: Synthetic oligonucleotide
  Antisense strand to SEQ ID NO: 700182
ucuucuaccaguaaggaag

SEQ ID NO: 700184 - RNA, 19 nt, Artificial Sequence
  Description of Artificial Sequence: Synthetic oligonucleotide
  Sense strand starting at position 3080 of SEQ ID NO: 586206
gauuguauuugguuccuuu

SEQ ID NO: 700185 - RNA, 19 nt, Artificial Sequence
  Description of Artificial Sequence: Synthetic oligonucleotide
  Antisense strand to SEQ ID NO: 700184
aaaggaaccaaauacaauc

SEQ ID NO: 700186 - RNA, 19 nt, Artificial Sequence
  Description of Artificial Sequence: Synthetic oligonucleotide
  Sense strand starting at position 3258 of SEQ ID NO: 586206
ucggaaagcuuaucuggaa

SEQ ID NO: 700187 - RNA, 19 nt, Artificial Sequence
  Description of Artificial Sequence: Synthetic oligonucleotide
  Antisense strand to SEQ ID NO: 700186
uuccagauaagcuuuccga

SEQ ID NO: 700188 - RNA, 19 nt, Artificial Sequence
  Description of Artificial Sequence: Synthetic oligonucleotide
  Sense strand starting at position 3259 of SEQ ID NO: 586206
cggaaagcuuaucuggaau

SEQ ID NO: 700189 - RNA, 19 nt, Artificial Sequence
  Description of Artificial Sequence: Synthetic oligonucleotide
  Antisense strand to SEQ ID NO: 700188
auuccagauaagcuuuccg

SEQ ID NO: 700190 - RNA, 19 nt, Artificial Sequence
  Description of Artificial Sequence: Synthetic oligonucleotide
  Sense strand starting at position 3265 of SEQ ID NO: 586206
gcuuaucuggaaugaucca

SEQ ID NO: 700191 - RNA, 19 nt, Artificial Sequence
  Description of Artificial Sequence: Synthetic oligonucleotide
  Antisense strand to SEQ ID NO: 700190
uggaucauuccagauaagc

SEQ ID NO: 700192 - RNA, 19 nt, Artificial Sequence
  Description of Artificial Sequence: Synthetic oligonucleotide
  Sense strand starting at position 3302 of SEQ ID NO: 586206
cggauauuguaaggacuca

SEQ ID NO: 700193 - RNA, 19 nt, Artificial Sequence
  Description of Artificial Sequence: Synthetic oligonucleotide
  Antisense strand to SEQ ID NO: 700192
ugaguccuuacaauauccg

SEQ ID NO: 700194 - RNA, 19 nt, Artificial Sequence
  Description of Artificial Sequence: Synthetic oligonucleotide
  Sense strand starting at position 3318 of SEQ ID NO: 586206
ucaguccuccaaggucauu

SEQ ID NO: 700195 - RNA, 19 nt, Artificial Sequence
  Description of Artificial Sequence: Synthetic oligonucleotide
  Antisense strand to SEQ ID NO: 700194
aaugaccuuggaggacuga

SEQ ID NO: 700196 - RNA, 19 nt, Artificial Sequence
  Description of Artificial Sequence: Synthetic oligonucleotide
  Sense strand starting at position 3323 of SEQ ID NO: 586206
ccuccaaggucauuagaga

SEQ ID NO: 700197 - RNA, 19 nt, Artificial Sequence
  Description of Artificial Sequence: Synthetic oligonucleotide
  Antisense strand to SEQ ID NO: 700196
ucucuaaugaccuuggagg

SEQ ID NO: 700198 - RNA, 19 nt, Artificial Sequence
  Description of Artificial Sequence: Synthetic oligonucleotide
  Sense strand starting at position 3378 of SEQ ID NO: 586206
cccucaguuccuugguaca

SEQ ID NO: 700199 - RNA, 19 nt, Artificial Sequence
  Description of Artificial Sequence: Synthetic oligonucleotide
  Antisense strand to SEQ ID NO: 700198
uguaccaaggaacugaggg

SEQ ID NO: 700200 - RNA, 19 nt, Artificial Sequence
  Description of Artificial Sequence: Synthetic oligonucleotide
  Sense strand starting at position 3502 of SEQ ID NO: 586206
gcacccuaaucucagaagu

SEQ ID NO: 700201 - RNA, 19 nt, Artificial Sequence
  Description of Artificial Sequence: Synthetic oligonucleotide
  Antisense strand to SEQ ID NO: 700200
acuucugagauuagggugc

SEQ ID NO: 700202 - RNA, 19 nt, Artificial Sequence
  Description of Artificial Sequence: Synthetic oligonucleotide
  Sense strand starting at position 3504 of SEQ ID NO: 586206
acccuaaucucagaaguga

SEQ ID NO: 700203 - RNA, 19 nt, Artificial Sequence
  Description of Artificial Sequence: Synthetic oligonucleotide
  Antisense strand to SEQ ID NO: 700202
ucacuucugagauuagggu

SEQ ID NO: 700204 - RNA, 19 nt, Artificial Sequence
  Description of Artificial Sequence: Synthetic oligonucleotide
  Sense strand starting at position 3517 of SEQ ID NO: 586206
aagugacuucccuaggcuu

SEQ ID NO: 700205 - RNA, 19 nt, Artificial Sequence
  Description of Artificial Sequence: Synthetic oligonucleotide
  Antisense strand to SEQ ID NO: 700204
aagccuagggaagucacuu

SEQ ID NO: 700206 - RNA, 19 nt, Artificial Sequence
  Description of Artificial Sequence: Synthetic oligonucleotide
  Sense strand starting at position 3971 of SEQ ID NO: 586206
acaguaagaccucaugucu

SEQ ID NO: 700207 - RNA, 19 nt, Artificial Sequence
  Description of Artificial Sequence: Synthetic oligonucleotide
  Antisense strand to SEQ ID NO: 700206
agacaugaggucuuacugu

SEQ ID NO: 700208 - RNA, 19 nt, Artificial Sequence
  Description of Artificial Sequence: Synthetic oligonucleotide
  Sense strand starting at position 1 of SEQ ID NO: 586207
ucgguugagccugaaucau

SEQ ID NO: 700209 - RNA, 19 nt, Artificial Sequence
  Description of Artificial Sequence: Synthetic oligonucleotide
  Antisense strand to SEQ ID NO: 700208
augauucaggcucaaccga

SEQ ID NO: 700210 - RNA, 19 nt, Artificial Sequence
  Description of Artificial Sequence: Synthetic oligonucleotide
  Sense strand starting at position 119 of SEQ ID NO: 586207
aaggguagguuucucccua

SEQ ID NO: 700211 - RNA, 19 nt, Artificial Sequence
  Description of Artificial Sequence: Synthetic oligonucleotide
  Antisense strand to SEQ ID NO: 700210
uagggagaaaccuacccuu

SEQ ID NO: 700212 - RNA, 19 nt, Artificial Sequence
  Description of Artificial Sequence: Synthetic oligonucleotide
  Sense strand starting at position 120 of SEQ ID NO: 586207
aggguagguuucucccuaa

SEQ ID NO: 700213 - RNA, 19 nt, Artificial Sequence
  Description of Artificial Sequence: Synthetic oligonucleotide
  Antisense strand to SEQ ID NO: 700212
uuagggagaaaccuacccu

SEQ ID NO: 700214 - RNA, 19 nt, Artificial Sequence
  Description of Artificial Sequence: Synthetic oligonucleotide
  Sense strand starting at position 123 of SEQ ID NO: 586207
guagguuucucccuaauag

SEQ ID NO: 700215 - RNA, 19 nt, Artificial Sequence
  Description of Artificial Sequence: Synthetic oligonucleotide
  Antisense strand to SEQ ID NO: 700214
cuauuagggagaaaccuac

SEQ ID NO: 700216 - RNA, 19 nt, Artificial Sequence
  Description of Artificial Sequence: Synthetic oligonucleotide
  Sense strand starting at position 174 of SEQ ID NO: 586207
augggaugguuauucaguu

SEQ ID NO: 700217 - RNA, 19 nt, Artificial Sequence
  Description of Artificial Sequence: Synthetic oligonucleotide
  Antisense strand to SEQ ID NO: 700216
aacugaauaaccaucccau

SEQ ID NO: 700218 - RNA, 19 nt, Artificial Sequence
  Description of Artificial Sequence: Synthetic oligonucleotide
  Sense strand starting at position 175 of SEQ ID NO: 586207
ugggaugguuauucaguua

SEQ ID NO: 700219 - RNA, 19 nt, Artificial Sequence
  Description of Artificial Sequence: Synthetic oligonucleotide
  Antisense strand to SEQ ID NO: 700218
uaacugaauaaccauccca

SEQ ID NO: 700220 - RNA, 19 nt, Artificial Sequence
  Description of Artificial Sequence: Synthetic oligonucleotide
  Sense strand starting at position 193 of SEQ ID NO: 586207
agcugugagccugaaggaa

SEQ ID NO: 700221 - RNA, 19 nt, Artificial Sequence
  Description of Artificial Sequence: Synthetic oligonucleotide
  Antisense strand to SEQ ID NO: 700220
uuccuucaggcucacagcu

SEQ ID NO: 700222 - RNA, 19 nt, Artificial Sequence
  Description of Artificial Sequence: Synthetic oligonucleotide
  Sense strand starting at position 239 of SEQ ID NO: 586207
ugcauuccagagugguauu

SEQ ID NO: 700223 - RNA, 19 nt, Artificial Sequence
  Description of Artificial Sequence: Synthetic oligonucleotide
  Antisense strand to SEQ ID NO: 700222
aauaccacucuggaaugca

SEQ ID NO: 700224 - RNA, 19 nt, Artificial Sequence
  Description of Artificial Sequence: Synthetic oligonucleotide
  Sense strand starting at position 240 of SEQ ID NO: 586207
gcauuccagagugguauuu

SEQ ID NO: 700225 - RNA, 19 nt, Artificial Sequence
  Description of Artificial Sequence: Synthetic oligonucleotide
  Antisense strand to SEQ ID NO: 700224
aaauaccacucuggaaugc

SEQ ID NO: 700226 - RNA, 19 nt, Artificial Sequence
  Description of Artificial Sequence: Synthetic oligonucleotide
  Sense strand starting at position 877 of SEQ ID NO: 586207
gcacuuauuuauccucagu

SEQ ID NO: 700227 - RNA, 19 nt, Artificial Sequence
  Description of Artificial Sequence: Synthetic oligonucleotide
  Antisense strand to SEQ ID NO: 700226
acugaggauaaauaagugc

SEQ ID NO: 700228 - RNA, 19 nt, Artificial Sequence
  Description of Artificial Sequence: Synthetic oligonucleotide
  Sense strand starting at position 955 of SEQ ID NO: 586207
aucugauucuuccuguuua

SEQ ID NO: 700229 - RNA, 19 nt, Artificial Sequence
  Description of Artificial Sequence: Synthetic oligonucleotide
  Antisense strand to SEQ ID NO: 700228
uaaacaggaagaaucagau

SEQ ID NO: 700230 - RNA, 19 nt, Artificial Sequence
  Description of Artificial Sequence: Synthetic oligonucleotide
  Sense strand starting at position 1025 of SEQ ID NO: 586207
gaauuugaguucuaagauu

SEQ ID NO: 700231 - RNA, 19 nt, Artificial Sequence
  Description of Artificial Sequence: Synthetic oligonucleotide
  Antisense strand to SEQ ID NO: 700230
aaucuuagaacucaaauuc

SEQ ID NO: 700232 - RNA, 19 nt, Artificial Sequence
  Description of Artificial Sequence: Synthetic oligonucleotide
  Sense strand starting at position 1062 of SEQ ID NO: 586207
ggcucagaaauucgacagu

SEQ ID NO: 700233 - RNA, 19 nt, Artificial Sequence
  Description of Artificial Sequence: Synthetic oligonucleotide
  Antisense strand to SEQ ID NO: 700232
acugucgaauuucugagcc

SEQ ID NO: 700234 - RNA, 19 nt, Artificial Sequence
  Description of Artificial Sequence: Synthetic oligonucleotide
  Sense strand starting at position 1201 of SEQ ID NO: 586207
gaggaaauuguuggccaga

SEQ ID NO: 700235 - RNA, 19 nt, Artificial Sequence
  Description of Artificial Sequence: Synthetic oligonucleotide
  Antisense strand to SEQ ID NO: 700234
ucuggccaacaauuuccuc

SEQ ID NO: 700236 - RNA, 19 nt, Artificial Sequence
  Description of Artificial Sequence: Synthetic oligonucleotide
  Sense strand starting at position 1202 of SEQ ID NO: 586207
aggaaauuguuggccagau

SEQ ID NO: 700237 - RNA, 19 nt, Artificial Sequence
  Description of Artificial Sequence: Synthetic oligonucleotide
  Antisense strand to SEQ ID NO: 700236
aucuggccaacaauuuccu

SEQ ID NO: 700238 - RNA, 19 nt, Artificial Sequence
  Description of Artificial Sequence: Synthetic oligonucleotide
  Sense strand starting at position 1203 of SEQ ID NO: 586207
ggaaauuguuggccagaug

SEQ ID NO: 700239 - RNA, 19 nt, Artificial Sequence
  Description of Artificial Sequence: Synthetic oligonucleotide
  Antisense strand to SEQ ID NO: 700238
caucuggccaacaauuucc

SEQ ID NO: 700240 - RNA, 19 nt, Artificial Sequence
  Description of Artificial Sequence: Synthetic oligonucleotide
  Sense strand starting at position 1435 of SEQ ID NO: 586207
gaguuuaugccagagcaug

SEQ ID NO: 700241 - RNA, 19 nt, Artificial Sequence
  Description of Artificial Sequence: Synthetic oligonucleotide
  Antisense strand to SEQ ID NO: 700240
caugcucuggcauaaacuc

SEQ ID NO: 700242 - RNA, 19 nt, Artificial Sequence
  Description of Artificial Sequence: Synthetic oligonucleotide
  Sense strand starting at position 1466 of SEQ ID NO: 586207
uggguugguuuggucagaa

SEQ ID NO: 700243 - RNA, 19 nt, Artificial Sequence
  Description of Artificial Sequence: Synthetic oligonucleotide
  Antisense strand to SEQ ID NO: 700242
uucugaccaaaccaaccca

SEQ ID NO: 700244 - RNA, 19 nt, Artificial Sequence
  Description of Artificial Sequence: Synthetic oligonucleotide
  Sense strand starting at position 1499 of SEQ ID NO: 586207
gaggguuggccucagaaau

SEQ ID NO: 700245 - RNA, 19 nt, Artificial Sequence
  Description of Artificial Sequence: Synthetic oligonucleotide
  Antisense strand to SEQ ID NO: 700244
auuucugaggccaacccuc

SEQ ID NO: 700246 - RNA, 19 nt, Artificial Sequence
  Description of Artificial Sequence: Synthetic oligonucleotide
  Sense strand starting at position 1509 of SEQ ID NO: 586207
cucagaaaugcaggaauua

SEQ ID NO: 700247 - RNA, 19 nt, Artificial Sequence
  Description of Artificial Sequence: Synthetic oligonucleotide
  Antisense strand to SEQ ID NO: 700246
uaauuccugcauuucugag

SEQ ID NO: 700248 - RNA, 19 nt, Artificial Sequence
  Description of Artificial Sequence: Synthetic oligonucleotide
  Sense strand starting at position 2299 of SEQ ID NO: 586207
aaaguaaaguuggcauauu

SEQ ID NO: 700249 - RNA, 19 nt, Artificial Sequence
  Description of Artificial Sequence: Synthetic oligonucleotide
  Antisense strand to SEQ ID NO: 700248
aauaugccaacuuuacuuu

SEQ ID NO: 700250 - RNA, 19 nt, Artificial Sequence
  Description of Artificial Sequence: Synthetic oligonucleotide
  Sense strand starting at position 2300 of SEQ ID NO: 586207
aaguaaaguuggcauauuu

SEQ ID NO: 700251 - RNA, 19 nt, Artificial Sequence
  Description of Artificial Sequence: Synthetic oligonucleotide
  Antisense strand to SEQ ID NO: 700250
aaauaugccaacuuuacuu

SEQ ID NO: 700252 - RNA, 19 nt, Artificial Sequence
  Description of Artificial Sequence: Synthetic oligonucleotide
  Sense strand starting at position 2309 of SEQ ID NO: 586207
uggcauauuucgcuuuguu

SEQ ID NO: 700253 - RNA, 19 nt, Artificial Sequence
  Description of Artificial Sequence: Synthetic oligonucleotide
  Antisense strand to SEQ ID NO: 700252
aacaaagcgaaauaugcca

SEQ ID NO: 700254 - RNA, 19 nt, Artificial Sequence
  Description of Artificial Sequence: Synthetic oligonucleotide
  Sense strand starting at position 2312 of SEQ ID NO: 586207
cauauuucgcuuuguuuag

SEQ ID NO: 700255 - RNA, 19 nt, Artificial Sequence
  Description of Artificial Sequence: Synthetic oligonucleotide
  Antisense strand to SEQ ID NO: 700254
cuaaacaaagcgaaauaug

SEQ ID NO: 700256 - RNA, 19 nt, Artificial Sequence
  Description of Artificial Sequence: Synthetic oligonucleotide
  Sense strand starting at position 2313 of SEQ ID NO: 586207
auauuucgcuuuguuuaga

SEQ ID NO: 700257 - RNA, 19 nt, Artificial Sequence
  Description of Artificial Sequence: Synthetic oligonucleotide
  Antisense strand to SEQ ID NO: 700256
ucuaaacaaagcgaaauau

SEQ ID NO: 700258 - RNA, 19 nt, Artificial Sequence
  Description of Artificial Sequence: Synthetic oligonucleotide
  Sense strand starting at position 2314 of SEQ ID NO: 586207
uauuucgcuuuguuuagaa

SEQ ID NO: 700259 - RNA, 19 nt, Artificial Sequence
  Description of Artificial Sequence: Synthetic oligonucleotide
  Antisense strand to SEQ ID NO: 700258
uucuaaacaaagcgaaaua

SEQ ID NO: 700260 - RNA, 19 nt, Artificial Sequence
  Description of Artificial Sequence: Synthetic oligonucleotide
  Sense strand starting at position 2316 of SEQ ID NO: 586207
uuucgcuuuguuuagaaag

SEQ ID NO: 700261 - RNA, 19 nt, Artificial Sequence
  Description of Artificial Sequence: Synthetic oligonucleotide
  Antisense strand to SEQ ID NO: 700260
cuuucuaaacaaagcgaaa

SEQ ID NO: 700262 - RNA, 19 nt, Artificial Sequence
  Description of Artificial Sequence: Synthetic oligonucleotide
  Sense strand starting at position 3264 of SEQ ID NO: 586207
ugaauuggugcgucagcga

SEQ ID NO: 700263 - RNA, 19 nt, Artificial Sequence
  Description of Artificial Sequence: Synthetic oligonucleotide
  Antisense strand to SEQ ID NO: 700262
ucgcugacgcaccaauuca

SEQ ID NO: 700264 - RNA, 19 nt, Artificial Sequence
  Description of Artificial Sequence: Synthetic oligonucleotide
  Sense strand starting at position 3304 of SEQ ID NO: 586207
guaauaguacauugauuag

SEQ ID NO: 700265 - RNA, 19 nt, Artificial Sequence
  Description of Artificial Sequence: Synthetic oligonucleotide
  Antisense strand to SEQ ID NO: 700264
cuaaucaauguacuauuac

SEQ ID NO: 700266 - RNA, 19 nt, Artificial Sequence
  Description of Artificial Sequence: Synthetic oligonucleotide
  Sense strand starting at position 3358 of SEQ ID NO: 586207
uucuguuccuaauuguaua

SEQ ID NO: 700267 - RNA, 19 nt, Artificial Sequence
  Description of Artificial Sequence: Synthetic oligonucleotide
  Antisense strand to SEQ ID NO: 700266
uauacaauuaggaacagaa

SEQ ID NO: 700268 - RNA, 19 nt, Artificial Sequence
  Description of Artificial Sequence: Synthetic oligonucleotide
  Sense strand starting at position 3363 of SEQ ID NO: 586207
uuccuaauuguauaacgaa

SEQ ID NO: 700269 - RNA, 19 nt, Artificial Sequence
  Description of Artificial Sequence: Synthetic oligonucleotide
  Antisense strand to SEQ ID NO: 700268
uucguuauacaauuaggaa

SEQ ID NO: 700270 - RNA, 19 nt, Artificial Sequence
  Description of Artificial Sequence: Synthetic oligonucleotide
  Sense strand starting at position 3575 of SEQ ID NO: 586207
ugauauucccucugccuga

SEQ ID NO: 700271 - RNA, 19 nt, Artificial Sequence
  Description of Artificial Sequence: Synthetic oligonucleotide
  Antisense strand to SEQ ID NO: 700270
ucaggcagagggaauauca

SEQ ID NO: 700272 - RNA, 19 nt, Artificial Sequence
  Description of Artificial Sequence: Synthetic oligonucleotide
  Sense strand starting at position 3644 of SEQ ID NO: 586207
acuccagaagucuagguua

SEQ ID NO: 700273 - RNA, 19 nt, Artificial Sequence
  Description of Artificial Sequence: Synthetic oligonucleotide
  Antisense strand to SEQ ID NO: 700272
uaaccuagacuucuggagu

SEQ ID NO: 700274 - RNA, 19 nt, Artificial Sequence
  Description of Artificial Sequence: Synthetic oligonucleotide
  Sense strand starting at position 3646 of SEQ ID NO: 586207
uccagaagucuagguuaga

SEQ ID NO: 700275 - RNA, 19 nt, Artificial Sequence
  Description of Artificial Sequence: Synthetic oligonucleotide
  Antisense strand to SEQ ID NO: 700274
ucuaaccuagacuucugga

SEQ ID NO: 700276 - RNA, 19 nt, Artificial Sequence
  Description of Artificial Sequence: Synthetic oligonucleotide
  Sense strand starting at position 3647 of SEQ ID NO: 586207
ccagaagucuagguuagac

SEQ ID NO: 700277 - RNA, 19 nt, Artificial Sequence
  Description of Artificial Sequence: Synthetic oligonucleotide
  Antisense strand to SEQ ID NO: 700276
gucuaaccuagacuucugg

SEQ ID NO: 700278 - RNA, 19 nt, Artificial Sequence
  Description of Artificial Sequence: Synthetic oligonucleotide
  Sense strand starting at position 3764 of SEQ ID NO: 586207
acucuuaauguagguacau

SEQ ID NO: 700279 - RNA, 19 nt, Artificial Sequence
  Description of Artificial Sequence: Synthetic oligonucleotide
  Antisense strand to SEQ ID NO: 700278
auguaccuacauuaagagu

SEQ ID NO: 700280 - RNA, 19 nt, Artificial Sequence
  Description of Artificial Sequence: Synthetic oligonucleotide
  Sense strand starting at position 3784 of SEQ ID NO: 586207
gccacuacuccauacugua

SEQ ID NO: 700281 - RNA, 19 nt, Artificial Sequence
  Description of Artificial Sequence: Synthetic oligonucleotide
  Antisense strand to SEQ ID NO: 700280
uacaguauggaguaguggc

SEQ ID NO: 700282 - RNA, 19 nt, Artificial Sequence
  Description of Artificial Sequence: Synthetic oligonucleotide
  Sense strand starting at position 3828 of SEQ ID NO: 586207
ggaaauuguucagcuccga

SEQ ID NO: 700283 - RNA, 19 nt, Artificial Sequence
  Description of Artificial Sequence: Synthetic oligonucleotide
  Antisense strand to SEQ ID NO: 700282
ucggagcugaacaauuucc

SEQ ID NO: 700284 - RNA, 19 nt, Artificial Sequence
  Description of Artificial Sequence: Synthetic oligonucleotide
  Sense strand starting at position 3882 of SEQ ID NO: 586207
ccaggcuuauuccuuggua

SEQ ID NO: 700285 - RNA, 19 nt, Artificial Sequence
  Description of Artificial Sequence: Synthetic oligonucleotide
  Antisense strand to SEQ ID NO: 700284
uaccaaggaauaagccugg

SEQ ID NO: 700286 - RNA, 19 nt, Artificial Sequence
  Description of Artificial Sequence: Synthetic oligonucleotide
  Sense strand starting at position 3895 of SEQ ID NO: 586207
uugguagcauagucauaac

SEQ ID NO: 700287 - RNA, 19 nt, Artificial Sequence
  Description of Artificial Sequence: Synthetic oligonucleotide
  Antisense strand to SEQ ID NO: 700286
guuaugacuaugcuaccaa

SEQ ID NO: 700288 - RNA, 19 nt, Artificial Sequence
  Description of Artificial Sequence: Synthetic oligonucleotide
  Sense strand starting at position 1 of SEQ ID NO: 586208
ucgguugagccugaaucau

SEQ ID NO: 700289 - RNA, 19 nt, Artificial Sequence
  Description of Artificial Sequence: Synthetic oligonucleotide
  Antisense strand to SEQ ID NO: 700288
augauucaggcucaaccga

SEQ ID NO: 700290 - RNA, 19 nt, Artificial Sequence
  Description of Artificial Sequence: Synthetic oligonucleotide
  Sense strand starting at position 119 of SEQ ID NO: 586208
aaggguagguuucucccua

SEQ ID NO: 700291 - RNA, 19 nt, Artificial Sequence
  Description of Artificial Sequence: Synthetic oligonucleotide
  Antisense strand to SEQ ID NO: 700290
uagggagaaaccuacccuu

SEQ ID NO: 700292 - RNA, 19 nt, Artificial Sequence
  Description of Artificial Sequence: Synthetic oligonucleotide
  Sense strand starting at position 120 of SEQ ID NO: 586208
aggguagguuucucccuaa

SEQ ID NO: 700293 - RNA, 19 nt, Artificial Sequence
  Description of Artificial Sequence: Synthetic oligonucleotide
  Antisense strand to SEQ ID NO: 700292
uuagggagaaaccuacccu

SEQ ID NO: 700294 - RNA, 19 nt, Artificial Sequence
  Description of Artificial Sequence: Synthetic oligonucleotide
  Sense strand starting at position 123 of SEQ ID NO: 586208
guagguuucucccuaauag

SEQ ID NO: 700295 - RNA, 19 nt, Artificial Sequence
  Description of Artificial Sequence: Synthetic oligonucleotide
  Antisense strand to SEQ ID NO: 700294
cuauuagggagaaaccuac

SEQ ID NO: 700296 - RNA, 19 nt, Artificial Sequence
  Description of Artificial Sequence: Synthetic oligonucleotide
  Sense strand starting at position 174 of SEQ ID NO: 586208
augggaugguuauucaguu

SEQ ID NO: 700297 - RNA, 19 nt, Artificial Sequence
  Description of Artificial Sequence: Synthetic oligonucleotide
  Antisense strand to SEQ ID NO: 700296
aacugaauaaccaucccau

SEQ ID NO: 700298 - RNA, 19 nt, Artificial Sequence
  Description of Artificial Sequence: Synthetic oligonucleotide
  Sense strand starting at position 175 of SEQ ID NO: 586208
ugggaugguuauucaguua

SEQ ID NO: 700299 - RNA, 19 nt, Artificial Sequence
  Description of Artificial Sequence: Synthetic oligonucleotide
  Antisense strand to SEQ ID NO: 700298
uaacugaauaaccauccca

SEQ ID NO: 700300 - RNA, 19 nt, Artificial Sequence
  Description of Artificial Sequence: Synthetic oligonucleotide
  Sense strand starting at position 193 of SEQ ID NO: 586208
agcugugagccugaaggaa

SEQ ID NO: 700301 - RNA, 19 nt, Artificial Sequence
  Description of Artificial Sequence: Synthetic oligonucleotide
  Antisense strand to SEQ ID NO: 700300
uuccuucaggcucacagcu

SEQ ID NO: 700302 - RNA, 19 nt, Artificial Sequence
  Description of Artificial Sequence: Synthetic oligonucleotide
  Sense strand starting at position 239 of SEQ ID NO: 586208
ugcauuccagagugguauu

SEQ ID NO: 700303 - RNA, 19 nt, Artificial Sequence
  Description of Artificial Sequence: Synthetic oligonucleotide
  Antisense strand to SEQ ID NO: 700302
aauaccacucuggaaugca

SEQ ID NO: 700304 - RNA, 19 nt, Artificial Sequence
  Description of Artificial Sequence: Synthetic oligonucleotide
  Sense strand starting at position 240 of SEQ ID NO: 586208
gcauuccagagugguauuu

SEQ ID NO: 700305 - RNA, 19 nt, Artificial Sequence
  Description of Artificial Sequence: Synthetic oligonucleotide
  Antisense strand to SEQ ID NO: 700304
aaauaccacucuggaaugc

SEQ ID NO: 700306 - RNA, 19 nt, Artificial Sequence
  Description of Artificial Sequence: Synthetic oligonucleotide
  Sense strand starting at position 877 of SEQ ID NO: 586208
gcacuuauuuauccucagu

SEQ ID NO: 700307 - RNA, 19 nt, Artificial Sequence
  Description of Artificial Sequence: Synthetic oligonucleotide
  Antisense strand to SEQ ID NO: 700306
acugaggauaaauaagugc

SEQ ID NO: 700308 - RNA, 19 nt, Artificial Sequence
  Description of Artificial Sequence: Synthetic oligonucleotide
  Sense strand starting at position 955 of SEQ ID NO: 586208
aucugauucuuccuguuua

SEQ ID NO: 700309 - RNA, 19 nt, Artificial Sequence
  Description of Artificial Sequence: Synthetic oligonucleotide
  Antisense strand to SEQ ID NO: 700308
uaaacaggaagaaucagau

SEQ ID NO: 700310 - RNA, 19 nt, Artificial Sequence
  Description of Artificial Sequence: Synthetic oligonucleotide
  Sense strand starting at position 1025 of SEQ ID NO: 586208
gaauuugaguucuaagauu

SEQ ID NO: 700311 - RNA, 19 nt, Artificial Sequence
  Description of Artificial Sequence: Synthetic oligonucleotide
  Antisense strand to SEQ ID NO: 700310
aaucuuagaacucaaauuc

SEQ ID NO: 700312 - RNA, 19 nt, Artificial Sequence
  Description of Artificial Sequence: Synthetic oligonucleotide
  Sense strand starting at position 1062 of SEQ ID NO: 586208
ggcucagaaauucgacagu

SEQ ID NO: 700313 - RNA, 19 nt, Artificial Sequence
  Description of Artificial Sequence: Synthetic oligonucleotide
  Antisense strand to SEQ ID NO: 700312
acugucgaauuucugagcc

SEQ ID NO: 700314 - RNA, 19 nt, Artificial Sequence
  Description of Artificial Sequence: Synthetic oligonucleotide
  Sense strand starting at position 1201 of SEQ ID NO: 586208
gaggaaauuguuggccaga

SEQ ID NO: 700315 - RNA, 19 nt, Artificial Sequence
  Description of Artificial Sequence: Synthetic oligonucleotide
  Antisense strand to SEQ ID NO: 700314
ucuggccaacaauuuccuc

SEQ ID NO: 700316 - RNA, 19 nt, Artificial Sequence
  Description of Artificial Sequence: Synthetic oligonucleotide
  Sense strand starting at position 1202 of SEQ ID NO: 586208
aggaaauuguuggccagau

SEQ ID NO: 700317 - RNA, 19 nt, Artificial Sequence
  Description of Artificial Sequence: Synthetic oligonucleotide
  Antisense strand to SEQ ID NO: 700316
aucuggccaacaauuuccu

SEQ ID NO: 700318 - RNA, 19 nt, Artificial Sequence
  Description of Artificial Sequence: Synthetic oligonucleotide
  Sense strand starting at position 1203 of SEQ ID NO: 586208
ggaaauuguuggccagaug

SEQ ID NO: 700319 - RNA, 19 nt, Artificial Sequence
  Description of Artificial Sequence: Synthetic oligonucleotide
  Antisense strand to SEQ ID NO: 700318
caucuggccaacaauuucc

SEQ ID NO: 700320 - RNA, 19 nt, Artificial Sequence
  Description of Artificial Sequence: Synthetic oligonucleotide
  Sense strand starting at position 1435 of SEQ ID NO: 586208
gaguuuaugccagagcaug

SEQ ID NO: 700321 - RNA, 19 nt, Artificial Sequence
  Description of Artificial Sequence: Synthetic oligonucleotide
  Antisense strand to SEQ ID NO: 700320
caugcucuggcauaaacuc

SEQ ID NO: 700322 - RNA, 19 nt, Artificial Sequence
  Description of Artificial Sequence: Synthetic oligonucleotide
  Sense strand starting at position 1466 of SEQ ID NO: 586208
uggguugguuuggucagaa

SEQ ID NO: 700323 - RNA, 19 nt, Artificial Sequence
  Description of Artificial Sequence: Synthetic oligonucleotide
  Antisense strand to SEQ ID NO: 700322
uucugaccaaaccaaccca

SEQ ID NO: 700324 - RNA, 19 nt, Artificial Sequence
  Description of Artificial Sequence: Synthetic oligonucleotide
  Sense strand starting at position 1499 of SEQ ID NO: 586208
gaggguuggccucagaaau

SEQ ID NO: 700325 - RNA, 19 nt, Artificial Sequence
  Description of Artificial Sequence: Synthetic oligonucleotide
  Antisense strand to SEQ ID NO: 700324
auuucugaggccaacccuc

SEQ ID NO: 700326 - RNA, 19 nt, Artificial Sequence
  Description of Artificial Sequence: Synthetic oligonucleotide
  Sense strand starting at position 1509 of SEQ ID NO: 586208
cucagaaaugcaggaauua

SEQ ID NO: 700327 - RNA, 19 nt, Artificial Sequence
  Description of Artificial Sequence: Synthetic oligonucleotide
  Antisense strand to SEQ ID NO: 700326
uaauuccugcauuucugag

SEQ ID NO: 700328 - RNA, 19 nt, Artificial Sequence
  Description of Artificial Sequence: Synthetic oligonucleotide
  Sense strand starting at position 2299 of SEQ ID NO: 586208
aaaguaaaguuggcauauu

SEQ ID NO: 700329 - RNA, 19 nt, Artificial Sequence
  Description of Artificial Sequence: Synthetic oligonucleotide
  Antisense strand to SEQ ID NO: 700328
aauaugccaacuuuacuuu

SEQ ID NO: 700330 - RNA, 19 nt, Artificial Sequence
  Description of Artificial Sequence: Synthetic oligonucleotide
  Sense strand starting at position 2300 of SEQ ID NO: 586208
aaguaaaguuggcauauuu

SEQ ID NO: 700331 - RNA, 19 nt, Artificial Sequence
  Description of Artificial Sequence: Synthetic oligonucleotide
  Antisense strand to SEQ ID NO: 700330
aaauaugccaacuuuacuu

SEQ ID NO: 700332 - RNA, 19 nt, Artificial Sequence
  Description of Artificial Sequence: Synthetic oligonucleotide
  Sense strand starting at position 2309 of SEQ ID NO: 586208
uggcauauuucgcuuuguu

SEQ ID NO: 700333 - RNA, 19 nt, Artificial Sequence
  Description of Artificial Sequence: Synthetic oligonucleotide
  Antisense strand to SEQ ID NO: 700332
aacaaagcgaaauaugcca

SEQ ID NO: 700334 - RNA, 19 nt, Artificial Sequence
  Description of Artificial Sequence: Synthetic oligonucleotide
  Sense strand starting at position 2312 of SEQ ID NO: 586208
cauauuucgcuuuguuuag

SEQ ID NO: 700335 - RNA, 19 nt, Artificial Sequence
  Description of Artificial Sequence: Synthetic oligonucleotide
  Antisense strand to SEQ ID NO: 700334
cuaaacaaagcgaaauaug

SEQ ID NO: 700336 - RNA, 19 nt, Artificial Sequence
  Description of Artificial Sequence: Synthetic oligonucleotide
  Sense strand starting at position 2313 of SEQ ID NO: 586208
auauuucgcuuuguuuaga

SEQ ID NO: 700337 - RNA, 19 nt, Artificial Sequence
  Description of Artificial Sequence: Synthetic oligonucleotide
  Antisense strand to SEQ ID NO: 700336
ucuaaacaaagcgaaauau

SEQ ID NO: 700338 - RNA, 19 nt, Artificial Sequence
  Description of Artificial Sequence: Synthetic oligonucleotide
  Sense strand starting at position 2314 of SEQ ID NO: 586208
uauuucgcuuuguuuagaa

SEQ ID NO: 700339 - RNA, 19 nt, Artificial Sequence
  Description of Artificial Sequence: Synthetic oligonucleotide
  Antisense strand to SEQ ID NO: 700338
uucuaaacaaagcgaaaua

SEQ ID NO: 700340 - RNA, 19 nt, Artificial Sequence
  Description of Artificial Sequence: Synthetic oligonucleotide
  Sense strand starting at position 2316 of SEQ ID NO: 586208
uuucgcuuuguuuagaaag

SEQ ID NO: 700341 - RNA, 19 nt, Artificial Sequence
  Description of Artificial Sequence: Synthetic oligonucleotide
  Antisense strand to SEQ ID NO: 700340
cuuucuaaacaaagcgaaa

SEQ ID NO: 700342 - RNA, 19 nt, Artificial Sequence
  Description of Artificial Sequence: Synthetic oligonucleotide
  Sense strand starting at position 3264 of SEQ ID NO: 586208
ugaauuggugcgucagcga

SEQ ID NO: 700343 - RNA, 19 nt, Artificial Sequence
  Description of Artificial Sequence: Synthetic oligonucleotide
  Antisense strand to SEQ ID NO: 700342
ucgcugacgcaccaauuca

SEQ ID NO: 700344 - RNA, 19 nt, Artificial Sequence
  Description of Artificial Sequence: Synthetic oligonucleotide
  Sense strand starting at position 3304 of SEQ ID NO: 586208
guaauaguacauugauuag

SEQ ID NO: 700345 - RNA, 19 nt, Artificial Sequence
  Description of Artificial Sequence: Synthetic oligonucleotide
  Antisense strand to SEQ ID NO: 700344
cuaaucaauguacuauuac

SEQ ID NO: 700346 - RNA, 19 nt, Artificial Sequence
  Description of Artificial Sequence: Synthetic oligonucleotide
  Sense strand starting at position 3358 of SEQ ID NO: 586208
uucuguuccuaauuguaua

SEQ ID NO: 700347 - RNA, 19 nt, Artificial Sequence
  Description of Artificial Sequence: Synthetic oligonucleotide
  Antisense strand to SEQ ID NO: 700346
uauacaauuaggaacagaa

SEQ ID NO: 700348 - RNA, 19 nt, Artificial Sequence
  Description of Artificial Sequence: Synthetic oligonucleotide
  Sense strand starting at position 3363 of SEQ ID NO: 586208
uuccuaauuguauaacgaa

SEQ ID NO: 700349 - RNA, 19 nt, Artificial Sequence
  Description of Artificial Sequence: Synthetic oligonucleotide
  Antisense strand to SEQ ID NO: 700348
uucguuauacaauuaggaa

SEQ ID NO: 700350 - RNA, 19 nt, Artificial Sequence
  Description of Artificial Sequence: Synthetic oligonucleotide
  Sense strand starting at position 3575 of SEQ ID NO: 586208
ugauauucccucugccuga

SEQ ID NO: 700351 - RNA, 19 nt, Artificial Sequence
  Description of Artificial Sequence: Synthetic oligonucleotide
  Antisense strand to SEQ ID NO: 700350
ucaggcagagggaauauca

SEQ ID NO: 700352 - RNA, 19 nt, Artificial Sequence
  Description of Artificial Sequence: Synthetic oligonucleotide
  Sense strand starting at position 3644 of SEQ ID NO: 586208
acuccagaagucuagguua

SEQ ID NO: 700353 - RNA, 19 nt, Artificial Sequence
  Description of Artificial Sequence: Synthetic oligonucleotide
  Antisense strand to SEQ ID NO: 700352
uaaccuagacuucuggagu

SEQ ID NO: 700354 - RNA, 19 nt, Artificial Sequence
  Description of Artificial Sequence: Synthetic oligonucleotide
  Sense strand starting at position 3646 of SEQ ID NO: 586208
uccagaagucuagguuaga

SEQ ID NO: 700355 - RNA, 19 nt, Artificial Sequence
  Description of Artificial Sequence: Synthetic oligonucleotide
  Antisense strand to SEQ ID NO: 700354
ucuaaccuagacuucugga

SEQ ID NO: 700356 - RNA, 19 nt, Artificial Sequence
  Description of Artificial Sequence: Synthetic oligonucleotide
  Sense strand starting at position 3647 of SEQ ID NO: 586208
ccagaagucuagguuagac

SEQ ID NO: 700357 - RNA, 19 nt, Artificial Sequence
  Description of Artificial Sequence: Synthetic oligonucleotide
  Antisense strand to SEQ ID NO: 700356
gucuaaccuagacuucugg

SEQ ID NO: 700358 - RNA, 19 nt, Artificial Sequence
  Description of Artificial Sequence: Synthetic oligonucleotide
  Sense strand starting at position 3764 of SEQ ID NO: 586208
acucuuaauguagguacau

SEQ ID NO: 700359 - RNA, 19 nt, Artificial Sequence
  Description of Artificial Sequence: Synthetic oligonucleotide
  Antisense strand to SEQ ID NO: 700358
auguaccuacauuaagagu

SEQ ID NO: 700360 - RNA, 19 nt, Artificial Sequence
  Description of Artificial Sequence: Synthetic oligonucleotide
  Sense strand starting at position 3784 of SEQ ID NO: 586208
gccacuacuccauacugua

SEQ ID NO: 700361 - RNA, 19 nt, Artificial Sequence
  Description of Artificial Sequence: Synthetic oligonucleotide
  Antisense strand to SEQ ID NO: 700360
uacaguauggaguaguggc

SEQ ID NO: 700362 - RNA, 19 nt, Artificial Sequence
  Description of Artificial Sequence: Synthetic oligonucleotide
  Sense strand starting at position 3828 of SEQ ID NO: 586208
ggaaauuguucagcuccga

SEQ ID NO: 700363 - RNA, 19 nt, Artificial Sequence
  Description of Artificial Sequence: Synthetic oligonucleotide
  Antisense strand to SEQ ID NO: 700362
ucggagcugaacaauuucc

SEQ ID NO: 700364 - RNA, 19 nt, Artificial Sequence
  Description of Artificial Sequence: Synthetic oligonucleotide
  Sense strand starting at position 3882 of SEQ ID NO: 586208
ccaggcuuauuccuuggua

SEQ ID NO: 700365 - RNA, 19 nt, Artificial Sequence
  Description of Artificial Sequence: Synthetic oligonucleotide
  Antisense strand to SEQ ID NO: 700364
uaccaaggaauaagccugg

SEQ ID NO: 700366 - RNA, 19 nt, Artificial Sequence
  Description of Artificial Sequence: Synthetic oligonucleotide
  Sense strand starting at position 3895 of SEQ ID NO: 586208
uugguagcauagucauaac

SEQ ID NO: 700367 - RNA, 19 nt, Artificial Sequence
  Description of Artificial Sequence: Synthetic oligonucleotide
  Antisense strand to SEQ ID NO: 700366
guuaugacuaugcuaccaa

SEQ ID NO: 700368 - RNA, 19 nt, Artificial Sequence
  Description of Artificial Sequence: Synthetic oligonucleotide
  Sense strand starting at position 133 of SEQ ID NO: 586209
ggguaauguuaccuuguag

SEQ ID NO: 700369 - RNA, 19 nt, Artificial Sequence
  Description of Artificial Sequence: Synthetic oligonucleotide
  Antisense strand to SEQ ID NO: 700368
cuacaagguaacauuaccc

SEQ ID NO: 700370 - RNA, 19 nt, Artificial Sequence
  Description of Artificial Sequence: Synthetic oligonucleotide
  Sense strand starting at position 163 of SEQ ID NO: 586209
gguuaaaugaguuagugua

SEQ ID NO: 700371 - RNA, 19 nt, Artificial Sequence
  Description of Artificial Sequence: Synthetic oligonucleotide
  Antisense strand to SEQ ID NO: 700370
uacacuaacucauuuaacc

SEQ ID NO: 700372 - RNA, 19 nt, Artificial Sequence
  Description of Artificial Sequence: Synthetic oligonucleotide
  Sense strand starting at position 213 of SEQ ID NO: 586209
gcaguuguuaguguuccuu

SEQ ID NO: 700373 - RNA, 19 nt, Artificial Sequence
  Description of Artificial Sequence: Synthetic oligonucleotide
  Antisense strand to SEQ ID NO: 700372
aaggaacacuaacaacugc

SEQ ID NO: 700374 - RNA, 19 nt, Artificial Sequence
  Description of Artificial Sequence: Synthetic oligonucleotide
  Sense strand starting at position 383 of SEQ ID NO: 586209
aagguagagcucugggcua

SEQ ID NO: 700375 - RNA, 19 nt, Artificial Sequence
  Description of Artificial Sequence: Synthetic oligonucleotide
  Antisense strand to SEQ ID NO: 700374
uagcccagagcucuaccuu

SEQ ID NO: 700376 - RNA, 19 nt, Artificial Sequence
  Description of Artificial Sequence: Synthetic oligonucleotide
  Sense strand starting at position 405 of SEQ ID NO: 586209
gcauguuuagaguaugaag

SEQ ID NO: 700377 - RNA, 19 nt, Artificial Sequence
  Description of Artificial Sequence: Synthetic oligonucleotide
  Antisense strand to SEQ ID NO: 700376
cuucauacucuaaacaugc

SEQ ID NO: 700378 - RNA, 19 nt, Artificial Sequence
  Description of Artificial Sequence: Synthetic oligonucleotide
  Sense strand starting at position 407 of SEQ ID NO: 586209
auguuuagaguaugaagaa

SEQ ID NO: 700379 - RNA, 19 nt, Artificial Sequence
  Description of Artificial Sequence: Synthetic oligonucleotide
  Antisense strand to SEQ ID NO: 700378
uucuucauacucuaaacau

SEQ ID NO: 700380 - RNA, 19 nt, Artificial Sequence
  Description of Artificial Sequence: Synthetic oligonucleotide
  Sense strand starting at position 785 of SEQ ID NO: 586209
agaaacuucccaggucaac

SEQ ID NO: 700381 - RNA, 19 nt, Artificial Sequence
  Description of Artificial Sequence: Synthetic oligonucleotide
  Antisense strand to SEQ ID NO: 700380
guugaccugggaaguuucu

SEQ ID NO: 700382 - RNA, 19 nt, Artificial Sequence
  Description of Artificial Sequence: Synthetic oligonucleotide
  Sense strand starting at position 816 of SEQ ID NO: 586209
aguugugagaauuguauag

SEQ ID NO: 700383 - RNA, 19 nt, Artificial Sequence
  Description of Artificial Sequence: Synthetic oligonucleotide
  Antisense strand to SEQ ID NO: 700382
cuauacaauucucacaacu

SEQ ID NO: 700384 - RNA, 19 nt, Artificial Sequence
  Description of Artificial Sequence: Synthetic oligonucleotide
  Sense strand starting at position 820 of SEQ ID NO: 586209
gugagaauuguauaggguu

SEQ ID NO: 700385 - RNA, 19 nt, Artificial Sequence
  Description of Artificial Sequence: Synthetic oligonucleotide
  Antisense strand to SEQ ID NO: 700384
aacccuauacaauucucac

SEQ ID NO: 700386 - RNA, 19 nt, Artificial Sequence
  Description of Artificial Sequence: Synthetic oligonucleotide
  Sense strand starting at position 822 of SEQ ID NO: 586209
gagaauuguauaggguuga

SEQ ID NO: 700387 - RNA, 19 nt, Artificial Sequence
  Description of Artificial Sequence: Synthetic oligonucleotide
  Antisense strand to SEQ ID NO: 700386
ucaacccuauacaauucuc

SEQ ID NO: 700388 - RNA, 19 nt, Artificial Sequence
  Description of Artificial Sequence: Synthetic oligonucleotide
  Sense strand starting at position 826 of SEQ ID NO: 586209
auuguauaggguugaacua

SEQ ID NO: 700389 - RNA, 19 nt, Artificial Sequence
  Description of Artificial Sequence: Synthetic oligonucleotide
  Antisense strand to SEQ ID NO: 700388
uaguucaacccuauacaau

SEQ ID NO: 700390 - RNA, 19 nt, Artificial Sequence
  Description of Artificial Sequence: Synthetic oligonucleotide
  Sense strand starting at position 827 of SEQ ID NO: 586209
uuguauaggguugaacuau

SEQ ID NO: 700391 - RNA, 19 nt, Artificial Sequence
  Description of Artificial Sequence: Synthetic oligonucleotide
  Antisense strand to SEQ ID NO: 700390
auaguucaacccuauacaa

SEQ ID NO: 700392 - RNA, 19 nt, Artificial Sequence
  Description of Artificial Sequence: Synthetic oligonucleotide
  Sense strand starting at position 865 of SEQ ID NO: 586209
ggauccuguugcuccagau

SEQ ID NO: 700393 - RNA, 19 nt, Artificial Sequence
  Description of Artificial Sequence: Synthetic oligonucleotide
  Antisense strand to SEQ ID NO: 700392
aucuggagcaacaggaucc

SEQ ID NO: 700394 - RNA, 19 nt, Artificial Sequence
  Description of Artificial Sequence: Synthetic oligonucleotide
  Sense strand starting at position 869 of SEQ ID NO: 586209
ccuguugcuccagauugaa

SEQ ID NO: 700395 - RNA, 19 nt, Artificial Sequence
  Description of Artificial Sequence: Synthetic oligonucleotide
  Antisense strand to SEQ ID NO: 700394
uucaaucuggagcaacagg

SEQ ID NO: 700396 - RNA, 19 nt, Artificial Sequence
  Description of Artificial Sequence: Synthetic oligonucleotide
  Sense strand starting at position 2048 of SEQ ID NO: 586209
ggagcacugucagccaaua

SEQ ID NO: 700397 - RNA, 19 nt, Artificial Sequence
  Description of Artificial Sequence: Synthetic oligonucleotide
  Antisense strand to SEQ ID NO: 700396
uauuggcugacagugcucc

SEQ ID NO: 700398 - RNA, 19 nt, Artificial Sequence
  Description of Artificial Sequence: Synthetic oligonucleotide
  Sense strand starting at position 2451 of SEQ ID NO: 586209
agaauuuacuaaugagaug

SEQ ID NO: 700399 - RNA, 19 nt, Artificial Sequence
  Description of Artificial Sequence: Synthetic oligonucleotide
  Antisense strand to SEQ ID NO: 700398
caucucauuaguaaauucu

SEQ ID NO: 700400 - RNA, 19 nt, Artificial Sequence
  Description of Artificial Sequence: Synthetic oligonucleotide
  Sense strand starting at position 2456 of SEQ ID NO: 586209
uuacuaaugagaugcagga

SEQ ID NO: 700401 - RNA, 19 nt, Artificial Sequence
  Description of Artificial Sequence: Synthetic oligonucleotide
  Antisense strand to SEQ ID NO: 700400
uccugcaucucauuaguaa

SEQ ID NO: 700402 - RNA, 19 nt, Artificial Sequence
  Description of Artificial Sequence: Synthetic oligonucleotide
  Sense strand starting at position 2460 of SEQ ID NO: 586209
uaaugagaugcaggaguaa

SEQ ID NO: 700403 - RNA, 19 nt, Artificial Sequence
  Description of Artificial Sequence: Synthetic oligonucleotide
  Antisense strand to SEQ ID NO: 700402
uuacuccugcaucucauua

SEQ ID NO: 700404 - RNA, 19 nt, Artificial Sequence
  Description of Artificial Sequence: Synthetic oligonucleotide
  Sense strand starting at position 2564 of SEQ ID NO: 586209
guauuuggaaauugugugu

SEQ ID NO: 700405 - RNA, 19 nt, Artificial Sequence
  Description of Artificial Sequence: Synthetic oligonucleotide
  Antisense strand to SEQ ID NO: 700404
acacacaauuuccaaauac

SEQ ID NO: 700406 - RNA, 19 nt, Artificial Sequence
  Description of Artificial Sequence: Synthetic oligonucleotide
  Sense strand starting at position 2691 of SEQ ID NO: 586209
uggaaucgcguuuagaacu

SEQ ID NO: 700407 - RNA, 19 nt, Artificial Sequence
  Description of Artificial Sequence: Synthetic oligonucleotide
  Antisense strand to SEQ ID NO: 700406
aguucuaaacgcgauucca

SEQ ID NO: 700408 - RNA, 19 nt, Artificial Sequence
  Description of Artificial Sequence: Synthetic oligonucleotide
  Sense strand starting at position 2718 of SEQ ID NO: 586209
uuggcuuaaguguaaacuu

SEQ ID NO: 700409 - RNA, 19 nt, Artificial Sequence
  Description of Artificial Sequence: Synthetic oligonucleotide
  Antisense strand to SEQ ID NO: 700408
aaguuuacacuuaagccaa

SEQ ID NO: 700410 - RNA, 19 nt, Artificial Sequence
  Description of Artificial Sequence: Synthetic oligonucleotide
  Sense strand starting at position 2763 of SEQ ID NO: 586209
cagaaaguacaaugaguau

SEQ ID NO: 700411 - RNA, 19 nt, Artificial Sequence
  Description of Artificial Sequence: Synthetic oligonucleotide
  Antisense strand to SEQ ID NO: 700410
auacucauuguacuuucug

SEQ ID NO: 700412 - RNA, 19 nt, Artificial Sequence
  Description of Artificial Sequence: Synthetic oligonucleotide
  Sense strand starting at position 3112 of SEQ ID NO: 586209
ugaacaugagucuguuucu

SEQ ID NO: 700413 - RNA, 19 nt, Artificial Sequence
  Description of Artificial Sequence: Synthetic oligonucleotide
  Antisense strand to SEQ ID NO: 700412
agaaacagacucauguuca

SEQ ID NO: 700414 - RNA, 19 nt, Artificial Sequence
  Description of Artificial Sequence: Synthetic oligonucleotide
  Sense strand starting at position 3134 of SEQ ID NO: 586209
acacgaguauagccuuaga

SEQ ID NO: 700415 - RNA, 19 nt, Artificial Sequence
  Description of Artificial Sequence: Synthetic oligonucleotide
  Antisense strand to SEQ ID NO: 700414
ucuaaggcuauacucgugu

SEQ ID NO: 700416 - RNA, 19 nt, Artificial Sequence
  Description of Artificial Sequence: Synthetic oligonucleotide
  Sense strand starting at position 3137 of SEQ ID NO: 586209
cgaguauagccuuagaaau

SEQ ID NO: 700417 - RNA, 19 nt, Artificial Sequence
  Description of Artificial Sequence: Synthetic oligonucleotide
  Antisense strand to SEQ ID NO: 700416
auuucuaaggcuauacucg

SEQ ID NO: 700418 - RNA, 19 nt, Artificial Sequence
  Description of Artificial Sequence: Synthetic oligonucleotide
  Sense strand starting at position 3218 of SEQ ID NO: 586209
acucuaauucugugguuua

SEQ ID NO: 700419 - RNA, 19 nt, Artificial Sequence
  Description of Artificial Sequence: Synthetic oligonucleotide
  Antisense strand to SEQ ID NO: 700418
uaaaccacagaauuagagu

SEQ ID NO: 700420 - RNA, 19 nt, Artificial Sequence
  Description of Artificial Sequence: Synthetic oligonucleotide
  Sense strand starting at position 3281 of SEQ ID NO: 586209
ugguccagucaugaguaau

SEQ ID NO: 700421 - RNA, 19 nt, Artificial Sequence
  Description of Artificial Sequence: Synthetic oligonucleotide
  Antisense strand to SEQ ID NO: 700420
auuacucaugacuggacca

SEQ ID NO: 700422 - RNA, 19 nt, Artificial Sequence
  Description of Artificial Sequence: Synthetic oligonucleotide
  Sense strand starting at position 3284 of SEQ ID NO: 586209
uccagucaugaguaaucaa

SEQ ID NO: 700423 - RNA, 19 nt, Artificial Sequence
  Description of Artificial Sequence: Synthetic oligonucleotide
  Antisense strand to SEQ ID NO: 700422
uugauuacucaugacugga

SEQ ID NO: 700424 - RNA, 19 nt, Artificial Sequence
  Description of Artificial Sequence: Synthetic oligonucleotide
  Sense strand starting at position 3287 of SEQ ID NO: 586209
agucaugaguaaucaagac

SEQ ID NO: 700425 - RNA, 19 nt, Artificial Sequence
  Description of Artificial Sequence: Synthetic oligonucleotide
  Antisense strand to SEQ ID NO: 700424
gucuugauuacucaugacu

SEQ ID NO: 700426 - RNA, 19 nt, Artificial Sequence
  Description of Artificial Sequence: Synthetic oligonucleotide
  Sense strand starting at position 3415 of SEQ ID NO: 586209
gggauuguauggucaagag

SEQ ID NO: 700427 - RNA, 19 nt, Artificial Sequence
  Description of Artificial Sequence: Synthetic oligonucleotide
  Antisense strand to SEQ ID NO: 700426
cucuugaccauacaauccc

SEQ ID NO: 700428 - RNA, 19 nt, Artificial Sequence
  Description of Artificial Sequence: Synthetic oligonucleotide
  Sense strand starting at position 3419 of SEQ ID NO: 586209
uuguauggucaagagaagu

SEQ ID NO: 700429 - RNA, 19 nt, Artificial Sequence
  Description of Artificial Sequence: Synthetic oligonucleotide
  Antisense strand to SEQ ID NO: 700428
acuucucuugaccauacaa

SEQ ID NO: 700430 - RNA, 19 nt, Artificial Sequence
  Description of Artificial Sequence: Synthetic oligonucleotide
  Sense strand starting at position 3729 of SEQ ID NO: 586209
gugccuagucaagaagguu

SEQ ID NO: 700431 - RNA, 19 nt, Artificial Sequence
  Description of Artificial Sequence: Synthetic oligonucleotide
  Antisense strand to SEQ ID NO: 700430
aaccuucuugacuaggcac

SEQ ID NO: 700432 - RNA, 19 nt, Artificial Sequence
  Description of Artificial Sequence: Synthetic oligonucleotide
  Sense strand starting at position 3732 of SEQ ID NO: 586209
ccuagucaagaagguuauu

SEQ ID NO: 700433 - RNA, 19 nt, Artificial Sequence
  Description of Artificial Sequence: Synthetic oligonucleotide
  Antisense strand to SEQ ID NO: 700432
aauaaccuucuugacuagg

SEQ ID NO: 700434 - RNA, 19 nt, Artificial Sequence
  Description of Artificial Sequence: Synthetic oligonucleotide
  Sense strand starting at position 3735 of SEQ ID NO: 586209
agucaagaagguuauucuu

SEQ ID NO: 700435 - RNA, 19 nt, Artificial Sequence
  Description of Artificial Sequence: Synthetic oligonucleotide
  Antisense strand to SEQ ID NO: 700434
aagaauaaccuucuugacu

SEQ ID NO: 700436 - RNA, 19 nt, Artificial Sequence
  Description of Artificial Sequence: Synthetic oligonucleotide
  Sense strand starting at position 3778 of SEQ ID NO: 586209
uggagcugucaugaccaaa

SEQ ID NO: 700437 - RNA, 19 nt, Artificial Sequence
  Description of Artificial Sequence: Synthetic oligonucleotide
  Antisense strand to SEQ ID NO: 700436
uuuggucaugacagcucca

SEQ ID NO: 700438 - RNA, 19 nt, Artificial Sequence
  Description of Artificial Sequence: Synthetic oligonucleotide
  Sense strand starting at position 3859 of SEQ ID NO: 586209
ucuugacuggcugaaauca

SEQ ID NO: 700439 - RNA, 19 nt, Artificial Sequence
  Description of Artificial Sequence: Synthetic oligonucleotide
  Antisense strand to SEQ ID NO: 700438
ugauuucagccagucaaga

SEQ ID NO: 700440 - RNA, 19 nt, Artificial Sequence
  Description of Artificial Sequence: Synthetic oligonucleotide
  Sense strand starting at position 3886 of SEQ ID NO: 586209
gugauaaugaaguguuauc

SEQ ID NO: 700441 - RNA, 19 nt, Artificial Sequence
  Description of Artificial Sequence: Synthetic oligonucleotide
  Antisense strand to SEQ ID NO: 700440
gauaacacuucauuaucac

SEQ ID NO: 700442 - RNA, 19 nt, Artificial Sequence
  Description of Artificial Sequence: Synthetic oligonucleotide
  Sense strand starting at position 3897 of SEQ ID NO: 586209
guguuaucauuccuuagaa

SEQ ID NO: 700443 - RNA, 19 nt, Artificial Sequence
  Description of Artificial Sequence: Synthetic oligonucleotide
  Antisense strand to SEQ ID NO: 700442
uucuaaggaaugauaacac

SEQ ID NO: 700444 - RNA, 19 nt, Artificial Sequence
  Description of Artificial Sequence: Synthetic oligonucleotide
  Sense strand starting at position 3898 of SEQ ID NO: 586209
uguuaucauuccuuagaag

SEQ ID NO: 700445 - RNA, 19 nt, Artificial Sequence
  Description of Artificial Sequence: Synthetic oligonucleotide
  Antisense strand to SEQ ID NO: 700444
cuucuaaggaaugauaaca

SEQ ID NO: 700446 - RNA, 19 nt, Artificial Sequence
  Description of Artificial Sequence: Synthetic oligonucleotide
  Sense strand starting at position 3983 of SEQ ID NO: 586209
aaggcauuagugugaucau

SEQ ID NO: 700447 - RNA, 19 nt, Artificial Sequence
  Description of Artificial Sequence: Synthetic oligonucleotide
  Antisense strand to SEQ ID NO: 700446
augaucacacuaaugccuu

SEQ ID NO: 700448 - RNA, 19 nt, Artificial Sequence
  Description of Artificial Sequence: Synthetic oligonucleotide
  Sense strand starting at position 46 of SEQ ID NO: 586210
ccacauuaguguguuaauu

SEQ ID NO: 700449 - RNA, 19 nt, Artificial Sequence
  Description of Artificial Sequence: Synthetic oligonucleotide
  Antisense strand to SEQ ID NO: 700448
aauuaacacacuaaugugg

SEQ ID NO: 700450 - RNA, 19 nt, Artificial Sequence
  Description of Artificial Sequence: Synthetic oligonucleotide
  Sense strand starting at position 127 of SEQ ID NO: 586210
aauggaauucuaugcuagu

SEQ ID NO: 700451 - RNA, 19 nt, Artificial Sequence
  Description of Artificial Sequence: Synthetic oligonucleotide
  Antisense strand to SEQ ID NO: 700450
acuagcauagaauuccauu

SEQ ID NO: 700452 - RNA, 19 nt, Artificial Sequence
  Description of Artificial Sequence: Synthetic oligonucleotide
  Sense strand starting at position 128 of SEQ ID NO: 586210
auggaauucuaugcuaguc

SEQ ID NO: 700453 - RNA, 19 nt, Artificial Sequence
  Description of Artificial Sequence: Synthetic oligonucleotide
  Antisense strand to SEQ ID NO: 700452
gacuagcauagaauuccau

SEQ ID NO: 700454 - RNA, 19 nt, Artificial Sequence
  Description of Artificial Sequence: Synthetic oligonucleotide
  Sense strand starting at position 255 of SEQ ID NO: 586210
agugaauuccauuauguaa

SEQ ID NO: 700455 - RNA, 19 nt, Artificial Sequence
  Description of Artificial Sequence: Synthetic oligonucleotide
  Antisense strand to SEQ ID NO: 700454
uuacauaauggaauucacu

SEQ ID NO: 700456 - RNA, 19 nt, Artificial Sequence
  Description of Artificial Sequence: Synthetic oligonucleotide
  Sense strand starting at position 270 of SEQ ID NO: 586210
guaagagcauucuuugaau

SEQ ID NO: 700457 - RNA, 19 nt, Artificial Sequence
  Description of Artificial Sequence: Synthetic oligonucleotide
  Antisense strand to SEQ ID NO: 700456
auucaaagaaugcucuuac

SEQ ID NO: 700458 - RNA, 19 nt, Artificial Sequence
  Description of Artificial Sequence: Synthetic oligonucleotide
  Sense strand starting at position 276 of SEQ ID NO: 586210
gcauucuuugaauaucaag

SEQ ID NO: 700459 - RNA, 19 nt, Artificial Sequence
  Description of Artificial Sequence: Synthetic oligonucleotide
  Antisense strand to SEQ ID NO: 700458
cuugauauucaaagaaugc

SEQ ID NO: 700460 - RNA, 19 nt, Artificial Sequence
  Description of Artificial Sequence: Synthetic oligonucleotide
  Sense strand starting at position 290 of SEQ ID NO: 586210
ucaagaaugaugcaguugu

SEQ ID NO: 700461 - RNA, 19 nt, Artificial Sequence
  Description of Artificial Sequence: Synthetic oligonucleotide
  Antisense strand to SEQ ID NO: 700460
acaacugcaucauucuuga

SEQ ID NO: 700462 - RNA, 19 nt, Artificial Sequence
  Description of Artificial Sequence: Synthetic oligonucleotide
  Sense strand starting at position 477 of SEQ ID NO: 586210
agcuaagcuugauuugcua

SEQ ID NO: 700463 - RNA, 19 nt, Artificial Sequence
  Description of Artificial Sequence: Synthetic oligonucleotide
  Antisense strand to SEQ ID NO: 700462
uagcaaaucaagcuuagcu

SEQ ID NO: 700464 - RNA, 19 nt, Artificial Sequence
  Description of Artificial Sequence: Synthetic oligonucleotide
  Sense strand starting at position 485 of SEQ ID NO: 586210
uugauuugcuaaggaaaga

SEQ ID NO: 700465 - RNA, 19 nt, Artificial Sequence
  Description of Artificial Sequence: Synthetic oligonucleotide
  Antisense strand to SEQ ID NO: 700464
ucuuuccuuagcaaaucaa

SEQ ID NO: 700466 - RNA, 19 nt, Artificial Sequence
  Description of Artificial Sequence: Synthetic oligonucleotide
  Sense strand starting at position 567 of SEQ ID NO: 586210
uuuaacuuucuagaguagu

SEQ ID NO: 700467 - RNA, 19 nt, Artificial Sequence
  Description of Artificial Sequence: Synthetic oligonucleotide
  Antisense strand to SEQ ID NO: 700466
acuacucuagaaaguuaaa

SEQ ID NO: 700468 - RNA, 19 nt, Artificial Sequence
  Description of Artificial Sequence: Synthetic oligonucleotide
  Sense strand starting at position 570 of SEQ ID NO: 586210
aacuuucuagaguaguuga

SEQ ID NO: 700469 - RNA, 19 nt, Artificial Sequence
  Description of Artificial Sequence: Synthetic oligonucleotide
  Antisense strand to SEQ ID NO: 700468
ucaacuacucuagaaaguu

SEQ ID NO: 700470 - RNA, 19 nt, Artificial Sequence
  Description of Artificial Sequence: Synthetic oligonucleotide
  Sense strand starting at position 573 of SEQ ID NO: 586210
uuucuagaguaguugaaac

SEQ ID NO: 700471 - RNA, 19 nt, Artificial Sequence
  Description of Artificial Sequence: Synthetic oligonucleotide
  Antisense strand to SEQ ID NO: 700470
guuucaacuacucuagaaa

SEQ ID NO: 700472 - RNA, 19 nt, Artificial Sequence
  Description of Artificial Sequence: Synthetic oligonucleotide
  Sense strand starting at position 585 of SEQ ID NO: 586210
uugaaacguguguauaaau

SEQ ID NO: 700473 - RNA, 19 nt, Artificial Sequence
  Description of Artificial Sequence: Synthetic oligonucleotide
  Antisense strand to SEQ ID NO: 700472
auuuauacacacguuucaa

SEQ ID NO: 700474 - RNA, 19 nt, Artificial Sequence
  Description of Artificial Sequence: Synthetic oligonucleotide
  Sense strand starting at position 592 of SEQ ID NO: 586210
guguguauaaaucaacagu

SEQ ID NO: 700475 - RNA, 19 nt, Artificial Sequence
  Description of Artificial Sequence: Synthetic oligonucleotide
  Antisense strand to SEQ ID NO: 700474
acuguugauuuauacacac

SEQ ID NO: 700476 - RNA, 19 nt, Artificial Sequence
  Description of Artificial Sequence: Synthetic oligonucleotide
  Sense strand starting at position 744 of SEQ ID NO: 586210
guggaaagcuuuccucauu

SEQ ID NO: 700477 - RNA, 19 nt, Artificial Sequence
  Description of Artificial Sequence: Synthetic oligonucleotide
  Antisense strand to SEQ ID NO: 700476
aaugaggaaagcuuuccac

SEQ ID NO: 700478 - RNA, 19 nt, Artificial Sequence
  Description of Artificial Sequence: Synthetic oligonucleotide
  Sense strand starting at position 1280 of SEQ ID NO: 586210
guaggucaagcguaaagga

SEQ ID NO: 700479 - RNA, 19 nt, Artificial Sequence
  Description of Artificial Sequence: Synthetic oligonucleotide
  Antisense strand to SEQ ID NO: 700478
uccuuuacgcuugaccuac

SEQ ID NO: 700480 - RNA, 19 nt, Artificial Sequence
  Description of Artificial Sequence: Synthetic oligonucleotide
  Sense strand starting at position 1472 of SEQ ID NO: 586210
gggacucaauuccuuuaca

SEQ ID NO: 700481 - RNA, 19 nt, Artificial Sequence
  Description of Artificial Sequence: Synthetic oligonucleotide
  Antisense strand to SEQ ID NO: 700480
uguaaaggaauugaguccc

SEQ ID NO: 700482 - RNA, 19 nt, Artificial Sequence
  Description of Artificial Sequence: Synthetic oligonucleotide
  Sense strand starting at position 1473 of SEQ ID NO: 586210
ggacucaauuccuuuacag

SEQ ID NO: 700483 - RNA, 19 nt, Artificial Sequence
  Description of Artificial Sequence: Synthetic oligonucleotide
  Antisense strand to SEQ ID NO: 700482
cuguaaaggaauugagucc

SEQ ID NO: 700484 - RNA, 19 nt, Artificial Sequence
  Description of Artificial Sequence: Synthetic oligonucleotide
  Sense strand starting at position 1705 of SEQ ID NO: 586210
gcuguuuaccuucucggua

SEQ ID NO: 700485 - RNA, 19 nt, Artificial Sequence
  Description of Artificial Sequence: Synthetic oligonucleotide
  Antisense strand to SEQ ID NO: 700484
uaccgagaagguaaacagc

SEQ ID NO: 700486 - RNA, 19 nt, Artificial Sequence
  Description of Artificial Sequence: Synthetic oligonucleotide
  Sense strand starting at position 2029 of SEQ ID NO: 586210
gcaaacugauugguggauu

SEQ ID NO: 700487 - RNA, 19 nt, Artificial Sequence
  Description of Artificial Sequence: Synthetic oligonucleotide
  Antisense strand to SEQ ID NO: 700486
aauccaccaaucaguuugc

SEQ ID NO: 700488 - RNA, 19 nt, Artificial Sequence
  Description of Artificial Sequence: Synthetic oligonucleotide
  Sense strand starting at position 2030 of SEQ ID NO: 586210
caaacugauugguggauuu

SEQ ID NO: 700489 - RNA, 19 nt, Artificial Sequence
  Description of Artificial Sequence: Synthetic oligonucleotide
  Antisense strand to SEQ ID NO: 700488
aaauccaccaaucaguuug

SEQ ID NO: 700490 - RNA, 19 nt, Artificial Sequence
  Description of Artificial Sequence: Synthetic oligonucleotide
  Sense strand starting at position 2422 of SEQ ID NO: 586210
guagguucccuuuaguuac

SEQ ID NO: 700491 - RNA, 19 nt, Artificial Sequence
  Description of Artificial Sequence: Synthetic oligonucleotide
  Antisense strand to SEQ ID NO: 700490
guaacuaaagggaaccuac

SEQ ID NO: 700492 - RNA, 19 nt, Artificial Sequence
  Description of Artificial Sequence: Synthetic oligonucleotide
  Sense strand starting at position 2448 of SEQ ID NO: 586210
uugagaugacguuacacuu

SEQ ID NO: 700493 - RNA, 19 nt, Artificial Sequence
  Description of Artificial Sequence: Synthetic oligonucleotide
  Antisense strand to SEQ ID NO: 700492
aaguguaacgucaucucaa

SEQ ID NO: 700494 - RNA, 19 nt, Artificial Sequence
  Description of Artificial Sequence: Synthetic oligonucleotide
  Sense strand starting at position 2531 of SEQ ID NO: 586210
uaauucucaggucgacaau

SEQ ID NO: 700495 - RNA, 19 nt, Artificial Sequence
  Description of Artificial Sequence: Synthetic oligonucleotide
  Antisense strand to SEQ ID NO: 700494
auugucgaccugagaauua

SEQ ID NO: 700496 - RNA, 19 nt, Artificial Sequence
  Description of Artificial Sequence: Synthetic oligonucleotide
  Sense strand starting at position 2537 of SEQ ID NO: 586210
ucaggucgacaaugguuua

SEQ ID NO: 700497 - RNA, 19 nt, Artificial Sequence
  Description of Artificial Sequence: Synthetic oligonucleotide
  Antisense strand to SEQ ID NO: 700496
uaaaccauugucgaccuga

SEQ ID NO: 700498 - RNA, 19 nt, Artificial Sequence
  Description of Artificial Sequence: Synthetic oligonucleotide
  Sense strand starting at position 2563 of SEQ ID NO: 586210
aguacuacugcugggcaaa

SEQ ID NO: 700499 - RNA, 19 nt, Artificial Sequence
  Description of Artificial Sequence: Synthetic oligonucleotide
  Antisense strand to SEQ ID NO: 700498
uuugcccagcaguaguacu

SEQ ID NO: 700500 - RNA, 19 nt, Artificial Sequence
  Description of Artificial Sequence: Synthetic oligonucleotide
  Sense strand starting at position 2665 of SEQ ID NO: 586210
agcagaugcccucaagaac

SEQ ID NO: 700501 - RNA, 19 nt, Artificial Sequence
  Description of Artificial Sequence: Synthetic oligonucleotide
  Antisense strand to SEQ ID NO: 700500
guucuugagggcaucugcu

SEQ ID NO: 700502 - RNA, 19 nt, Artificial Sequence
  Description of Artificial Sequence: Synthetic oligonucleotide
  Sense strand starting at position 2710 of SEQ ID NO: 586210
gcagccuucccugaucuua

SEQ ID NO: 700503 - RNA, 19 nt, Artificial Sequence
  Description of Artificial Sequence: Synthetic oligonucleotide
  Antisense strand to SEQ ID NO: 700502
uaagaucagggaaggcugc

SEQ ID NO: 700504 - RNA, 19 nt, Artificial Sequence
  Description of Artificial Sequence: Synthetic oligonucleotide
  Sense strand starting at position 2777 of SEQ ID NO: 586210
uccuuuaauuuggagaguu

SEQ ID NO: 700505 - RNA, 19 nt, Artificial Sequence
  Description of Artificial Sequence: Synthetic oligonucleotide
  Antisense strand to SEQ ID NO: 700504
aacucuccaaauuaaagga

SEQ ID NO: 700506 - RNA, 19 nt, Artificial Sequence
  Description of Artificial Sequence: Synthetic oligonucleotide
  Sense strand starting at position 2785 of SEQ ID NO: 586210
uuuggagaguuagucuaug

SEQ ID NO: 700507 - RNA, 19 nt, Artificial Sequence
  Description of Artificial Sequence: Synthetic oligonucleotide
  Antisense strand to SEQ ID NO: 700506
cauagacuaacucuccaaa

SEQ ID NO: 700508 - RNA, 19 nt, Artificial Sequence
  Description of Artificial Sequence: Synthetic oligonucleotide
  Sense strand starting at position 2879 of SEQ ID NO: 586210
guugacuucugucccagaa

SEQ ID NO: 700509 - RNA, 19 nt, Artificial Sequence
  Description of Artificial Sequence: Synthetic oligonucleotide
  Antisense strand to SEQ ID NO: 700508
uucugggacagaagucaac

SEQ ID NO: 700510 - RNA, 19 nt, Artificial Sequence
  Description of Artificial Sequence: Synthetic oligonucleotide
  Sense strand starting at position 2883 of SEQ ID NO: 586210
acuucugucccagaaaggu

SEQ ID NO: 700511 - RNA, 19 nt, Artificial Sequence
  Description of Artificial Sequence: Synthetic oligonucleotide
  Antisense strand to SEQ ID NO: 700510
accuuucugggacagaagu

SEQ ID NO: 700512 - RNA, 19 nt, Artificial Sequence
  Description of Artificial Sequence: Synthetic oligonucleotide
  Sense strand starting at position 2903 of SEQ ID NO: 586210
gaacacugcucucuggaga

SEQ ID NO: 700513 - RNA, 19 nt, Artificial Sequence
  Description of Artificial Sequence: Synthetic oligonucleotide
  Antisense strand to SEQ ID NO: 700512
ucuccagagagcaguguuc

SEQ ID NO: 700514 - RNA, 19 nt, Artificial Sequence
  Description of Artificial Sequence: Synthetic oligonucleotide
  Sense strand starting at position 2966 of SEQ ID NO: 586210
agugucagagauugaauag

SEQ ID NO: 700515 - RNA, 19 nt, Artificial Sequence
  Description of Artificial Sequence: Synthetic oligonucleotide
  Antisense strand to SEQ ID NO: 700514
cuauucaaucucugacacu

SEQ ID NO: 700516 - RNA, 19 nt, Artificial Sequence
  Description of Artificial Sequence: Synthetic oligonucleotide
  Sense strand starting at position 3048 of SEQ ID NO: 586210
cgugacagucuauggaaau

SEQ ID NO: 700517 - RNA, 19 nt, Artificial Sequence
  Description of Artificial Sequence: Synthetic oligonucleotide
  Antisense strand to SEQ ID NO: 700516
auuuccauagacugucacg

SEQ ID NO: 700518 - RNA, 19 nt, Artificial Sequence
  Description of Artificial Sequence: Synthetic oligonucleotide
  Sense strand starting at position 3105 of SEQ ID NO: 586210
acgaauaaagcuugcauua

SEQ ID NO: 700519 - RNA, 19 nt, Artificial Sequence
  Description of Artificial Sequence: Synthetic oligonucleotide
  Antisense strand to SEQ ID NO: 700518
uaaugcaagcuuuauucgu

SEQ ID NO: 700520 - RNA, 19 nt, Artificial Sequence
  Description of Artificial Sequence: Synthetic oligonucleotide
  Sense strand starting at position 3344 of SEQ ID NO: 586210
agcggaagugccuaauaaa

SEQ ID NO: 700521 - RNA, 19 nt, Artificial Sequence
  Description of Artificial Sequence: Synthetic oligonucleotide
  Antisense strand to SEQ ID NO: 700520
uuuauuaggcacuuccgcu

SEQ ID NO: 700522 - RNA, 19 nt, Artificial Sequence
  Description of Artificial Sequence: Synthetic oligonucleotide
  Sense strand starting at position 3411 of SEQ ID NO: 586210
gggagcuugaauuacaugu

SEQ ID NO: 700523 - RNA, 19 nt, Artificial Sequence
  Description of Artificial Sequence: Synthetic oligonucleotide
  Antisense strand to SEQ ID NO: 700522
acauguaauucaagcuccc

SEQ ID NO: 700524 - RNA, 19 nt, Artificial Sequence
  Description of Artificial Sequence: Synthetic oligonucleotide
  Sense strand starting at position 3477 of SEQ ID NO: 586210
ggugcagauauucgaaaga

SEQ ID NO: 700525 - RNA, 19 nt, Artificial Sequence
  Description of Artificial Sequence: Synthetic oligonucleotide
  Antisense strand to SEQ ID NO: 700524
ucuuucgaauaucugcacc

SEQ ID NO: 700526 - RNA, 19 nt, Artificial Sequence
  Description of Artificial Sequence: Synthetic oligonucleotide
  Sense strand starting at position 3763 of SEQ ID NO: 586210
guaugaauagccuacuauu

SEQ ID NO: 700527 - RNA, 19 nt, Artificial Sequence
  Description of Artificial Sequence: Synthetic oligonucleotide
  Antisense strand to SEQ ID NO: 700526
aauaguaggcuauucauac

SEQ ID NO: 700528 - RNA, 19 nt, Artificial Sequence
  Description of Artificial Sequence: Synthetic oligonucleotide
  Sense strand starting at position 1004 of SEQ ID NO: 586211
ggaaacaauuguugaacaa

SEQ ID NO: 700529 - RNA, 19 nt, Artificial Sequence
  Description of Artificial Sequence: Synthetic oligonucleotide
  Antisense strand to SEQ ID NO: 700528
uuguucaacaauuguuucc

SEQ ID NO: 700530 - RNA, 19 nt, Artificial Sequence
  Description of Artificial Sequence: Synthetic oligonucleotide
  Sense strand starting at position 1219 of SEQ ID NO: 586211
ucuguagucuuggccaaca

SEQ ID NO: 700531 - RNA, 19 nt, Artificial Sequence
  Description of Artificial Sequence: Synthetic oligonucleotide
  Antisense strand to SEQ ID NO: 700530
uguuggccaagacuacaga

SEQ ID NO: 700532 - RNA, 19 nt, Artificial Sequence
  Description of Artificial Sequence: Synthetic oligonucleotide
  Sense strand starting at position 1322 of SEQ ID NO: 586211
ccuggagagucuucuccau

SEQ ID NO: 700533 - RNA, 19 nt, Artificial Sequence
  Description of Artificial Sequence: Synthetic oligonucleotide
  Antisense strand to SEQ ID NO: 700532
auggagaagacucuccagg

SEQ ID NO: 700534 - RNA, 19 nt, Artificial Sequence
  Description of Artificial Sequence: Synthetic oligonucleotide
  Sense strand starting at position 1324 of SEQ ID NO: 586211
uggagagucuucuccaucu

SEQ ID NO: 700535 - RNA, 19 nt, Artificial Sequence
  Description of Artificial Sequence: Synthetic oligonucleotide
  Antisense strand to SEQ ID NO: 700534
agauggagaagacucucca

SEQ ID NO: 700536 - RNA, 19 nt, Artificial Sequence
  Description of Artificial Sequence: Synthetic oligonucleotide
  Sense strand starting at position 1347 of SEQ ID NO: 586211
caaugaguguuucuuggag

SEQ ID NO: 700537 - RNA, 19 nt, Artificial Sequence
  Description of Artificial Sequence: Synthetic oligonucleotide
  Antisense strand to SEQ ID NO: 700536
cuccaagaaacacucauug

SEQ ID NO: 700538 - RNA, 19 nt, Artificial Sequence
  Description of Artificial Sequence: Synthetic oligonucleotide
  Sense strand starting at position 1374 of SEQ ID NO: 586211
uccugagaugguugguuua

SEQ ID NO: 700539 - RNA, 19 nt, Artificial Sequence
  Description of Artificial Sequence: Synthetic oligonucleotide
  Antisense strand to SEQ ID NO: 700538
uaaaccaaccaucucagga

SEQ ID NO: 700540 - RNA, 19 nt, Artificial Sequence
  Description of Artificial Sequence: Synthetic oligonucleotide
  Sense strand starting at position 1376 of SEQ ID NO: 586211
cugagaugguugguuuaau

SEQ ID NO: 700541 - RNA, 19 nt, Artificial Sequence
  Description of Artificial Sequence: Synthetic oligonucleotide
  Antisense strand to SEQ ID NO: 700540
auuaaaccaaccaucucag

SEQ ID NO: 700542 - RNA, 19 nt, Artificial Sequence
  Description of Artificial Sequence: Synthetic oligonucleotide
  Sense strand starting at position 1377 of SEQ ID NO: 586211
ugagaugguugguuuaauu

SEQ ID NO: 700543 - RNA, 19 nt, Artificial Sequence
  Description of Artificial Sequence: Synthetic oligonucleotide
  Antisense strand to SEQ ID NO: 700542
aauuaaaccaaccaucuca

SEQ ID NO: 700544 - RNA, 19 nt, Artificial Sequence
  Description of Artificial Sequence: Synthetic oligonucleotide
  Sense strand starting at position 1499 of SEQ ID NO: 586211
gggauggagcagugaguuu

SEQ ID NO: 700545 - RNA, 19 nt, Artificial Sequence
  Description of Artificial Sequence: Synthetic oligonucleotide
  Antisense strand to SEQ ID NO: 700544
aaacucacugcuccauccc

SEQ ID NO: 700546 - RNA, 19 nt, Artificial Sequence
  Description of Artificial Sequence: Synthetic oligonucleotide
  Sense strand starting at position 1666 of SEQ ID NO: 586211
aggacagaguggucucaga

SEQ ID NO: 700547 - RNA, 19 nt, Artificial Sequence
  Description of Artificial Sequence: Synthetic oligonucleotide
  Antisense strand to SEQ ID NO: 700546
ucugagaccacucuguccu

SEQ ID NO: 700548 - RNA, 19 nt, Artificial Sequence
  Description of Artificial Sequence: Synthetic oligonucleotide
  Sense strand starting at position 1694 of SEQ ID NO: 586211
aggaaauaauccuuugcca

SEQ ID NO: 700549 - RNA, 19 nt, Artificial Sequence
  Description of Artificial Sequence: Synthetic oligonucleotide
  Antisense strand to SEQ ID NO: 700548
uggcaaaggauuauuuccu

SEQ ID NO: 700550 - RNA, 19 nt, Artificial Sequence
  Description of Artificial Sequence: Synthetic oligonucleotide
  Sense strand starting at position 1717 of SEQ ID NO: 586211
cgucuaacccaucggaaga

SEQ ID NO: 700551 - RNA, 19 nt, Artificial Sequence
  Description of Artificial Sequence: Synthetic oligonucleotide
  Antisense strand to SEQ ID NO: 700550
ucuuccgauggguuagacg

SEQ ID NO: 700552 - RNA, 19 nt, Artificial Sequence
  Description of Artificial Sequence: Synthetic oligonucleotide
  Sense strand starting at position 1718 of SEQ ID NO: 586211
gucuaacccaucggaagaa

SEQ ID NO: 700553 - RNA, 19 nt, Artificial Sequence
  Description of Artificial Sequence: Synthetic oligonucleotide
  Antisense strand to SEQ ID NO: 700552
uucuuccgauggguuagac

SEQ ID NO: 700554 - RNA, 19 nt, Artificial Sequence
  Description of Artificial Sequence: Synthetic oligonucleotide
  Sense strand starting at position 2004 of SEQ ID NO: 586211
gagggagaguucuagacca

SEQ ID NO: 700555 - RNA, 19 nt, Artificial Sequence
  Description of Artificial Sequence: Synthetic oligonucleotide
  Antisense strand to SEQ ID NO: 700554
uggucuagaacucucccuc

SEQ ID NO: 700556 - RNA, 19 nt, Artificial Sequence
  Description of Artificial Sequence: Synthetic oligonucleotide
  Sense strand starting at position 2096 of SEQ ID NO: 586211
uggcucuucuucgcucaga

SEQ ID NO: 700557 - RNA, 19 nt, Artificial Sequence
  Description of Artificial Sequence: Synthetic oligonucleotide
  Antisense strand to SEQ ID NO: 700556
ucugagcgaagaagagcca

SEQ ID NO: 700558 - RNA, 19 nt, Artificial Sequence
  Description of Artificial Sequence: Synthetic oligonucleotide
  Sense strand starting at position 2097 of SEQ ID NO: 586211
ggcucuucuucgcucagau

SEQ ID NO: 700559 - RNA, 19 nt, Artificial Sequence
  Description of Artificial Sequence: Synthetic oligonucleotide
  Antisense strand to SEQ ID NO: 700558
aucugagcgaagaagagcc

SEQ ID NO: 700560 - RNA, 19 nt, Artificial Sequence
  Description of Artificial Sequence: Synthetic oligonucleotide
  Sense strand starting at position 2197 of SEQ ID NO: 586211
caagauagguauuauuguu

SEQ ID NO: 700561 - RNA, 19 nt, Artificial Sequence
  Description of Artificial Sequence: Synthetic oligonucleotide
  Antisense strand to SEQ ID NO: 700560
aacaauaauaccuaucuug

SEQ ID NO: 700562 - RNA, 19 nt, Artificial Sequence
  Description of Artificial Sequence: Synthetic oligonucleotide
  Sense strand starting at position 2409 of SEQ ID NO: 586211
gaguuuaaaucaguuggga

SEQ ID NO: 700563 - RNA, 19 nt, Artificial Sequence
  Description of Artificial Sequence: Synthetic oligonucleotide
  Antisense strand to SEQ ID NO: 700562
ucccaacugauuuaaacuc

SEQ ID NO: 700564 - RNA, 19 nt, Artificial Sequence
  Description of Artificial Sequence: Synthetic oligonucleotide
  Sense strand starting at position 2411 of SEQ ID NO: 586211
guuuaaaucaguugggagu

SEQ ID NO: 700565 - RNA, 19 nt, Artificial Sequence
  Description of Artificial Sequence: Synthetic oligonucleotide
  Antisense strand to SEQ ID NO: 700564
acucccaacugauuuaaac

SEQ ID NO: 700566 - RNA, 19 nt, Artificial Sequence
  Description of Artificial Sequence: Synthetic oligonucleotide
  Sense strand starting at position 2893 of SEQ ID NO: 586211
gcgagauggucucuaccaa

SEQ ID NO: 700567 - RNA, 19 nt, Artificial Sequence
  Description of Artificial Sequence: Synthetic oligonucleotide
  Antisense strand to SEQ ID NO: 700566
uugguagagaccaucucgc

SEQ ID NO: 700568 - RNA, 19 nt, Artificial Sequence
  Description of Artificial Sequence: Synthetic oligonucleotide
  Sense strand starting at position 2894 of SEQ ID NO: 586211
cgagauggucucuaccaaa

SEQ ID NO: 700569 - RNA, 19 nt, Artificial Sequence
  Description of Artificial Sequence: Synthetic oligonucleotide
  Antisense strand to SEQ ID NO: 700568
uuugguagagaccaucucg

SEQ ID NO: 700570 - RNA, 19 nt, Artificial Sequence
  Description of Artificial Sequence: Synthetic oligonucleotide
  Sense strand starting at position 2972 of SEQ ID NO: 586211
uaggcagauuacuugaguu

SEQ ID NO: 700571 - RNA, 19 nt, Artificial Sequence
  Description of Artificial Sequence: Synthetic oligonucleotide
  Antisense strand to SEQ ID NO: 700570
aacucaaguaaucugccua

SEQ ID NO: 700572 - RNA, 19 nt, Artificial Sequence
  Description of Artificial Sequence: Synthetic oligonucleotide
  Sense strand starting at position 3196 of SEQ ID NO: 586211
gagcgaaacuucgacucua

SEQ ID NO: 700573 - RNA, 19 nt, Artificial Sequence
  Description of Artificial Sequence: Synthetic oligonucleotide
  Antisense strand to SEQ ID NO: 700572
uagagucgaaguuucgcuc

SEQ ID NO: 700574 - RNA, 19 nt, Artificial Sequence
  Description of Artificial Sequence: Synthetic oligonucleotide
  Sense strand starting at position 3289 of SEQ ID NO: 586211
aguugaagacugcagugau

SEQ ID NO: 700575 - RNA, 19 nt, Artificial Sequence
  Description of Artificial Sequence: Synthetic oligonucleotide
  Antisense strand to SEQ ID NO: 700574
aucacugcagucuucaacu

SEQ ID NO: 700576 - RNA, 19 nt, Artificial Sequence
  Description of Artificial Sequence: Synthetic oligonucleotide
  Sense strand starting at position 3292 of SEQ ID NO: 586211
ugaagacugcagugaucua

SEQ ID NO: 700577 - RNA, 19 nt, Artificial Sequence
  Description of Artificial Sequence: Synthetic oligonucleotide
  Antisense strand to SEQ ID NO: 700576
uagaucacugcagucuuca

SEQ ID NO: 700578 - RNA, 19 nt, Artificial Sequence
  Description of Artificial Sequence: Synthetic oligonucleotide
  Sense strand starting at position 3555 of SEQ ID NO: 586211
aaagaaguugcccaagguu

SEQ ID NO: 700579 - RNA, 19 nt, Artificial Sequence
  Description of Artificial Sequence: Synthetic oligonucleotide
  Antisense strand to SEQ ID NO: 700578
aaccuugggcaacuucuuu

SEQ ID NO: 700580 - RNA, 19 nt, Artificial Sequence
  Description of Artificial Sequence: Synthetic oligonucleotide
  Sense strand starting at position 455 of SEQ ID NO: 586212
cucucaauccuagaaacgu

SEQ ID NO: 700581 - RNA, 19 nt, Artificial Sequence
  Description of Artificial Sequence: Synthetic oligonucleotide
  Antisense strand to SEQ ID NO: 700580
acguuucuaggauugagag

SEQ ID NO: 700582 - RNA, 19 nt, Artificial Sequence
  Description of Artificial Sequence: Synthetic oligonucleotide
  Sense strand starting at position 503 of SEQ ID NO: 586212
cagagugauguguaugggu

SEQ ID NO: 700583 - RNA, 19 nt, Artificial Sequence
  Description of Artificial Sequence: Synthetic oligonucleotide
  Antisense strand to SEQ ID NO: 700582
acccauacacaucacucug

SEQ ID NO: 700584 - RNA, 19 nt, Artificial Sequence
  Description of Artificial Sequence: Synthetic oligonucleotide
  Sense strand starting at position 572 of SEQ ID NO: 586212
gcacaaguacuuuaugauu

SEQ ID NO: 700585 - RNA, 19 nt, Artificial Sequence
  Description of Artificial Sequence: Synthetic oligonucleotide
  Antisense strand to SEQ ID NO: 700584
aaucauaaaguacuugugc

SEQ ID NO: 700586 - RNA, 19 nt, Artificial Sequence
  Description of Artificial Sequence: Synthetic oligonucleotide
  Sense strand starting at position 623 of SEQ ID NO: 586212
guguaaguuaucgccuggu

SEQ ID NO: 700587 - RNA, 19 nt, Artificial Sequence
  Description of Artificial Sequence: Synthetic oligonucleotide
  Antisense strand to SEQ ID NO: 700586
accaggcgauaacuuacac

SEQ ID NO: 700588 - RNA, 19 nt, Artificial Sequence
  Description of Artificial Sequence: Synthetic oligonucleotide
  Sense strand starting at position 742 of SEQ ID NO: 586212
ucacaucgucgagauacau

SEQ ID NO: 700589 - RNA, 19 nt, Artificial Sequence
  Description of Artificial Sequence: Synthetic oligonucleotide
  Antisense strand to SEQ ID NO: 700588
auguaucucgacgauguga

SEQ ID NO: 700590 - RNA, 19 nt, Artificial Sequence
  Description of Artificial Sequence: Synthetic oligonucleotide
  Sense strand starting at position 922 of SEQ ID NO: 586212
acucgaggauaugcagaau

SEQ ID NO: 700591 - RNA, 19 nt, Artificial Sequence
  Description of Artificial Sequence: Synthetic oligonucleotide
  Antisense strand to SEQ ID NO: 700590
auucugcauauccucgagu

SEQ ID NO: 700592 - RNA, 19 nt, Artificial Sequence
  Description of Artificial Sequence: Synthetic oligonucleotide
  Sense strand starting at position 934 of SEQ ID NO: 586212
gcagaauggaagugggaua

SEQ ID NO: 700593 - RNA, 19 nt, Artificial Sequence
  Description of Artificial Sequence: Synthetic oligonucleotide
  Antisense strand to SEQ ID NO: 700592
uaucccacuuccauucugc

SEQ ID NO: 700594 - RNA, 19 nt, Artificial Sequence
  Description of Artificial Sequence: Synthetic oligonucleotide
  Sense strand starting at position 1044 of SEQ ID NO: 586212
ucuacauuugcuuguaucu

SEQ ID NO: 700595 - RNA, 19 nt, Artificial Sequence
  Description of Artificial Sequence: Synthetic oligonucleotide
  Antisense strand to SEQ ID NO: 700594
agauacaagcaaauguaga

SEQ ID NO: 700596 - RNA, 19 nt, Artificial Sequence
  Description of Artificial Sequence: Synthetic oligonucleotide
  Sense strand starting at position 1055 of SEQ ID NO: 586212
uuguaucuuggccacuaga

SEQ ID NO: 700597 - RNA, 19 nt, Artificial Sequence
  Description of Artificial Sequence: Synthetic oligonucleotide
  Antisense strand to SEQ ID NO: 700596
ucuaguggccaagauacaa

SEQ ID NO: 700598 - RNA, 19 nt, Artificial Sequence
  Description of Artificial Sequence: Synthetic oligonucleotide
  Sense strand starting at position 1114 of SEQ ID NO: 586212
guuucucuucuugaaagug

SEQ ID NO: 700599 - RNA, 19 nt, Artificial Sequence
  Description of Artificial Sequence: Synthetic oligonucleotide
  Antisense strand to SEQ ID NO: 700598
cacuuucaagaagagaaac

SEQ ID NO: 700600 - RNA, 19 nt, Artificial Sequence
  Description of Artificial Sequence: Synthetic oligonucleotide
  Sense strand starting at position 1143 of SEQ ID NO: 586212
cuacgugggacuuggagaa

SEQ ID NO: 700601 - RNA, 19 nt, Artificial Sequence
  Description of Artificial Sequence: Synthetic oligonucleotide
  Antisense strand to SEQ ID NO: 700600
uucuccaagucccacguag

SEQ ID NO: 700602 - RNA, 19 nt, Artificial Sequence
  Description of Artificial Sequence: Synthetic oligonucleotide
  Sense strand starting at position 1289 of SEQ ID NO: 586212
caggguaccucuuuacuga

SEQ ID NO: 700603 - RNA, 19 nt, Artificial Sequence
  Description of Artificial Sequence: Synthetic oligonucleotide
  Antisense strand to SEQ ID NO: 700602
ucaguaaagagguacccug

SEQ ID NO: 700604 - RNA, 19 nt, Artificial Sequence
  Description of Artificial Sequence: Synthetic oligonucleotide
  Sense strand starting at position 1290 of SEQ ID NO: 586212
aggguaccucuuuacugau

SEQ ID NO: 700605 - RNA, 19 nt, Artificial Sequence
  Description of Artificial Sequence: Synthetic oligonucleotide
  Antisense strand to SEQ ID NO: 700604
aucaguaaagagguacccu

SEQ ID NO: 700606 - RNA, 19 nt, Artificial Sequence
  Description of Artificial Sequence: Synthetic oligonucleotide
  Sense strand starting at position 1292 of SEQ ID NO: 586212
gguaccucuuuacugauga

SEQ ID NO: 700607 - RNA, 19 nt, Artificial Sequence
  Description of Artificial Sequence: Synthetic oligonucleotide
  Antisense strand to SEQ ID NO: 700606
ucaucaguaaagagguacc

SEQ ID NO: 700608 - RNA, 19 nt, Artificial Sequence
  Description of Artificial Sequence: Synthetic oligonucleotide
  Sense strand starting at position 1527 of SEQ ID NO: 586212
ucauguaauggugauuaca

SEQ ID NO: 700609 - RNA, 19 nt, Artificial Sequence
  Description of Artificial Sequence: Synthetic oligonucleotide
  Antisense strand to SEQ ID NO: 700608
uguaaucaccauuacauga

SEQ ID NO: 700610 - RNA, 19 nt, Artificial Sequence
  Description of Artificial Sequence: Synthetic oligonucleotide
  Sense strand starting at position 1529 of SEQ ID NO: 586212
auguaauggugauuacaga

SEQ ID NO: 700611 - RNA, 19 nt, Artificial Sequence
  Description of Artificial Sequence: Synthetic oligonucleotide
  Antisense strand to SEQ ID NO: 700610
ucuguaaucaccauuacau

SEQ ID NO: 700612 - RNA, 19 nt, Artificial Sequence
  Description of Artificial Sequence: Synthetic oligonucleotide
  Sense strand starting at position 1540 of SEQ ID NO: 586212
auuacagauuguccuuuau

SEQ ID NO: 700613 - RNA, 19 nt, Artificial Sequence
  Description of Artificial Sequence: Synthetic oligonucleotide
  Antisense strand to SEQ ID NO: 700612
auaaaggacaaucuguaau

SEQ ID NO: 700614 - RNA, 19 nt, Artificial Sequence
  Description of Artificial Sequence: Synthetic oligonucleotide
  Sense strand starting at position 1673 of SEQ ID NO: 586212
uuauguaaccuuuagucau

SEQ ID NO: 700615 - RNA, 19 nt, Artificial Sequence
  Description of Artificial Sequence: Synthetic oligonucleotide
  Antisense strand to SEQ ID NO: 700614
augacuaaagguuacauaa

SEQ ID NO: 700616 - RNA, 19 nt, Artificial Sequence
  Description of Artificial Sequence: Synthetic oligonucleotide
  Sense strand starting at position 1684 of SEQ ID NO: 586212
uuagucaugucacuaauag

SEQ ID NO: 700617 - RNA, 19 nt, Artificial Sequence
  Description of Artificial Sequence: Synthetic oligonucleotide
  Antisense strand to SEQ ID NO: 700616
cuauuagugacaugacuaa

SEQ ID NO: 700618 - RNA, 19 nt, Artificial Sequence
  Description of Artificial Sequence: Synthetic oligonucleotide
  Sense strand starting at position 1701 of SEQ ID NO: 586212
aguuaauaauguuccuuga

SEQ ID NO: 700619 - RNA, 19 nt, Artificial Sequence
  Description of Artificial Sequence: Synthetic oligonucleotide
  Antisense strand to SEQ ID NO: 700618
ucaaggaacauuauuaacu

SEQ ID NO: 700620 - RNA, 19 nt, Artificial Sequence
  Description of Artificial Sequence: Synthetic oligonucleotide
  Sense strand starting at position 1836 of SEQ ID NO: 586212
uguuguaagggcuacauga

SEQ ID NO: 700621 - RNA, 19 nt, Artificial Sequence
  Description of Artificial Sequence: Synthetic oligonucleotide
  Antisense strand to SEQ ID NO: 700620
ucauguagcccuuacaaca

SEQ ID NO: 700622 - RNA, 19 nt, Artificial Sequence
  Description of Artificial Sequence: Synthetic oligonucleotide
  Sense strand starting at position 1849 of SEQ ID NO: 586212
acaugaaaguauucugcua

SEQ ID NO: 700623 - RNA, 19 nt, Artificial Sequence
  Description of Artificial Sequence: Synthetic oligonucleotide
  Antisense strand to SEQ ID NO: 700622
uagcagaauacuuucaugu

SEQ ID NO: 700624 - RNA, 19 nt, Artificial Sequence
  Description of Artificial Sequence: Synthetic oligonucleotide
  Sense strand starting at position 2046 of SEQ ID NO: 586212
cgggcauacgugagucaga

SEQ ID NO: 700625 - RNA, 19 nt, Artificial Sequence
  Description of Artificial Sequence: Synthetic oligonucleotide
  Antisense strand to SEQ ID NO: 700624
ucugacucacguaugcccg

SEQ ID NO: 700626 - RNA, 19 nt, Artificial Sequence
  Description of Artificial Sequence: Synthetic oligonucleotide
  Sense strand starting at position 2060 of SEQ ID NO: 586212
ucagaaugucagcaccauu

SEQ ID NO: 700627 - RNA, 19 nt, Artificial Sequence
  Description of Artificial Sequence: Synthetic oligonucleotide
  Antisense strand to SEQ ID NO: 700626
aauggugcugacauucuga

SEQ ID NO: 700628 - RNA, 19 nt, Artificial Sequence
  Description of Artificial Sequence: Synthetic oligonucleotide
  Sense strand starting at position 2108 of SEQ ID NO: 586212
cggguaucucgacaaacac

SEQ ID NO: 700629 - RNA, 19 nt, Artificial Sequence
  Description of Artificial Sequence: Synthetic oligonucleotide
  Antisense strand to SEQ ID NO: 700628
guguuugucgagauacccg

SEQ ID NO: 700630 - RNA, 19 nt, Artificial Sequence
  Description of Artificial Sequence: Synthetic oligonucleotide
  Sense strand starting at position 2188 of SEQ ID NO: 586212
gugcauuuguaagucagac

SEQ ID NO: 700631 - RNA, 19 nt, Artificial Sequence
  Description of Artificial Sequence: Synthetic oligonucleotide
  Antisense strand to SEQ ID NO: 700630
gucugacuuacaaaugcac

SEQ ID NO: 700632 - RNA, 19 nt, Artificial Sequence
  Description of Artificial Sequence: Synthetic oligonucleotide
  Sense strand starting at position 2425 of SEQ ID NO: 586212
ugugucuuaagagaugcau

SEQ ID NO: 700633 - RNA, 19 nt, Artificial Sequence
  Description of Artificial Sequence: Synthetic oligonucleotide
  Antisense strand to SEQ ID NO: 700632
augcaucucuuaagacaca

SEQ ID NO: 700634 - RNA, 19 nt, Artificial Sequence
  Description of Artificial Sequence: Synthetic oligonucleotide
  Sense strand starting at position 2619 of SEQ ID NO: 586212
aaggcagagaggugacuua

SEQ ID NO: 700635 - RNA, 19 nt, Artificial Sequence
  Description of Artificial Sequence: Synthetic oligonucleotide
  Antisense strand to SEQ ID NO: 700634
uaagucaccucucugccuu

SEQ ID NO: 700636 - RNA, 19 nt, Artificial Sequence
  Description of Artificial Sequence: Synthetic oligonucleotide
  Sense strand starting at position 2669 of SEQ ID NO: 586212
ggacuauucuuccucauug

SEQ ID NO: 700637 - RNA, 19 nt, Artificial Sequence
  Description of Artificial Sequence: Synthetic oligonucleotide
  Antisense strand to SEQ ID NO: 700636
caaugaggaagaauagucc

SEQ ID NO: 700638 - RNA, 19 nt, Artificial Sequence
  Description of Artificial Sequence: Synthetic oligonucleotide
  Sense strand starting at position 2809 of SEQ ID NO: 586212
ggaagaaaguguccauguu

SEQ ID NO: 700639 - RNA, 19 nt, Artificial Sequence
  Description of Artificial Sequence: Synthetic oligonucleotide
  Antisense strand to SEQ ID NO: 700638
aacauggacacuuucuucc

SEQ ID NO: 700640 - RNA, 19 nt, Artificial Sequence
  Description of Artificial Sequence: Synthetic oligonucleotide
  Sense strand starting at position 2810 of SEQ ID NO: 586212
gaagaaaguguccauguug

SEQ ID NO: 700641 - RNA, 19 nt, Artificial Sequence
  Description of Artificial Sequence: Synthetic oligonucleotide
  Antisense strand to SEQ ID NO: 700640
caacauggacacuuucuuc

SEQ ID NO: 700642 - RNA, 19 nt, Artificial Sequence
  Description of Artificial Sequence: Synthetic oligonucleotide
  Sense strand starting at position 2897 of SEQ ID NO: 586212
uucuaaaucucuguaugag

SEQ ID NO: 700643 - RNA, 19 nt, Artificial Sequence
  Description of Artificial Sequence: Synthetic oligonucleotide
  Antisense strand to SEQ ID NO: 700642
cucauacagagauuuagaa

SEQ ID NO: 700644 - RNA, 19 nt, Artificial Sequence
  Description of Artificial Sequence: Synthetic oligonucleotide
  Sense strand starting at position 3092 of SEQ ID NO: 586212
acguuugaaauuggaaauu

SEQ ID NO: 700645 - RNA, 19 nt, Artificial Sequence
  Description of Artificial Sequence: Synthetic oligonucleotide
  Antisense strand to SEQ ID NO: 700644
aauuuccaauuucaaacgu

SEQ ID NO: 700646 - RNA, 19 nt, Artificial Sequence
  Description of Artificial Sequence: Synthetic oligonucleotide
  Sense strand starting at position 3132 of SEQ ID NO: 586212
agcuuaccuguggacuaaa

SEQ ID NO: 700647 - RNA, 19 nt, Artificial Sequence
  Description of Artificial Sequence: Synthetic oligonucleotide
  Antisense strand to SEQ ID NO: 700646
uuuaguccacagguaagcu

SEQ ID NO: 700648 - RNA, 19 nt, Artificial Sequence
  Description of Artificial Sequence: Synthetic oligonucleotide
  Sense strand starting at position 3387 of SEQ ID NO: 586212
cccacuugugucuaaauua

SEQ ID NO: 700649 - RNA, 19 nt, Artificial Sequence
  Description of Artificial Sequence: Synthetic oligonucleotide
  Antisense strand to SEQ ID NO: 700648
uaauuuagacacaaguggg

SEQ ID NO: 700650 - RNA, 19 nt, Artificial Sequence
  Description of Artificial Sequence: Synthetic oligonucleotide
  Sense strand starting at position 3517 of SEQ ID NO: 586212
uuuaauaugccuuaagggu

SEQ ID NO: 700651 - RNA, 19 nt, Artificial Sequence
  Description of Artificial Sequence: Synthetic oligonucleotide
  Antisense strand to SEQ ID NO: 700650
acccuuaaggcauauuaaa

SEQ ID NO: 700652 - RNA, 19 nt, Artificial Sequence
  Description of Artificial Sequence: Synthetic oligonucleotide
  Sense strand starting at position 3592 of SEQ ID NO: 586212
ggucucuacccacaguauu

SEQ ID NO: 700653 - RNA, 19 nt, Artificial Sequence
  Description of Artificial Sequence: Synthetic oligonucleotide
  Antisense strand to SEQ ID NO: 700652
aauacuguggguagagacc

SEQ ID NO: 700654 - RNA, 19 nt, Artificial Sequence
  Description of Artificial Sequence: Synthetic oligonucleotide
  Sense strand starting at position 3846 of SEQ ID NO: 586212
uggugugauuuguuaccua

SEQ ID NO: 700655 - RNA, 19 nt, Artificial Sequence
  Description of Artificial Sequence: Synthetic oligonucleotide
  Antisense strand to SEQ ID NO: 700654
uagguaacaaaucacacca

SEQ ID NO: 700656 - RNA, 19 nt, Artificial Sequence
  Description of Artificial Sequence: Synthetic oligonucleotide
  Sense strand starting at position 3889 of SEQ ID NO: 586212
aggagaauuuaugagguac

SEQ ID NO: 700657 - RNA, 19 nt, Artificial Sequence
  Description of Artificial Sequence: Synthetic oligonucleotide
  Antisense strand to SEQ ID NO: 700656
guaccucauaaauucuccu

SEQ ID NO: 700658 - RNA, 19 nt, Artificial Sequence
  Description of Artificial Sequence: Synthetic oligonucleotide
  Sense strand starting at position 3983 of SEQ ID NO: 586212
ugaaacuguuccuuacuga

SEQ ID NO: 700659 - RNA, 19 nt, Artificial Sequence
  Description of Artificial Sequence: Synthetic oligonucleotide
  Antisense strand to SEQ ID NO: 700658
ucaguaaggaacaguuuca

SEQ ID NO: 700660 - RNA, 19 nt, Artificial Sequence
  Description of Artificial Sequence: Synthetic oligonucleotide
  Sense strand starting at position 65 of SEQ ID NO: 586213
gcucaagugcaugugugua

SEQ ID NO: 700661 - RNA, 19 nt, Artificial Sequence
  Description of Artificial Sequence: Synthetic oligonucleotide
  Antisense strand to SEQ ID NO: 700660
uacacacaugcacuugagc

SEQ ID NO: 700662 - RNA, 19 nt, Artificial Sequence
  Description of Artificial Sequence: Synthetic oligonucleotide
  Sense strand starting at position 70 of SEQ ID NO: 586213
agugcauguguguacagaa

SEQ ID NO: 700663 - RNA, 19 nt, Artificial Sequence
  Description of Artificial Sequence: Synthetic oligonucleotide
  Antisense strand to SEQ ID NO: 700662
uucuguacacacaugcacu

SEQ ID NO: 700664 - RNA, 19 nt, Artificial Sequence
  Description of Artificial Sequence: Synthetic oligonucleotide
  Sense strand starting at position 760 of SEQ ID NO: 586213
gacagaaaucuccguguuu

SEQ ID NO: 700665 - RNA, 19 nt, Artificial Sequence
  Description of Artificial Sequence: Synthetic oligonucleotide
  Antisense strand to SEQ ID NO: 700664
aaacacggagauuucuguc

SEQ ID NO: 700666 - RNA, 19 nt, Artificial Sequence
  Description of Artificial Sequence: Synthetic oligonucleotide
  Sense strand starting at position 761 of SEQ ID NO: 586213
acagaaaucuccguguuuc

SEQ ID NO: 700667 - RNA, 19 nt, Artificial Sequence
  Description of Artificial Sequence: Synthetic oligonucleotide
  Antisense strand to SEQ ID NO: 700666
gaaacacggagauuucugu

SEQ ID NO: 700668 - RNA, 19 nt, Artificial Sequence
  Description of Artificial Sequence: Synthetic oligonucleotide
  Sense strand starting at position 762 of SEQ ID NO: 586213
cagaaaucuccguguuucu

SEQ ID NO: 700669 - RNA, 19 nt, Artificial Sequence
  Description of Artificial Sequence: Synthetic oligonucleotide
  Antisense strand to SEQ ID NO: 700668
agaaacacggagauuucug

SEQ ID NO: 700670 - RNA, 19 nt, Artificial Sequence
  Description of Artificial Sequence: Synthetic oligonucleotide
  Sense strand starting at position 784 of SEQ ID NO: 586213
uguucuggucuugacugaa

SEQ ID NO: 700671 - RNA, 19 nt, Artificial Sequence
  Description of Artificial Sequence: Synthetic oligonucleotide
  Antisense strand to SEQ ID NO: 700670
uucagucaagaccagaaca

SEQ ID NO: 700672 - RNA, 19 nt, Artificial Sequence
  Description of Artificial Sequence: Synthetic oligonucleotide
  Sense strand starting at position 787 of SEQ ID NO: 586213
ucuggucuugacugaaucu

SEQ ID NO: 700673 - RNA, 19 nt, Artificial Sequence
  Description of Artificial Sequence: Synthetic oligonucleotide
  Antisense strand to SEQ ID NO: 700672
agauucagucaagaccaga

SEQ ID NO: 700674 - RNA, 19 nt, Artificial Sequence
  Description of Artificial Sequence: Synthetic oligonucleotide
  Sense strand starting at position 893 of SEQ ID NO: 586213
uguuaauuguggccaauaa

SEQ ID NO: 700675 - RNA, 19 nt, Artificial Sequence
  Description of Artificial Sequence: Synthetic oligonucleotide
  Antisense strand to SEQ ID NO: 700674
uuauuggccacaauuaaca

SEQ ID NO: 700676 - RNA, 19 nt, Artificial Sequence
  Description of Artificial Sequence: Synthetic oligonucleotide
  Sense strand starting at position 894 of SEQ ID NO: 586213
guuaauuguggccaauaaa

SEQ ID NO: 700677 - RNA, 19 nt, Artificial Sequence
  Description of Artificial Sequence: Synthetic oligonucleotide
  Antisense strand to SEQ ID NO: 700676
uuuauuggccacaauuaac

SEQ ID NO: 700678 - RNA, 19 nt, Artificial Sequence
  Description of Artificial Sequence: Synthetic oligonucleotide
  Sense strand starting at position 1346 of SEQ ID NO: 586213
gagugcuuacugggaggau

SEQ ID NO: 700679 - RNA, 19 nt, Artificial Sequence
  Description of Artificial Sequence: Synthetic oligonucleotide
  Antisense strand to SEQ ID NO: 700678
auccucccaguaagcacuc

SEQ ID NO: 700680 - RNA, 19 nt, Artificial Sequence
  Description of Artificial Sequence: Synthetic oligonucleotide
  Sense strand starting at position 2137 of SEQ ID NO: 586213
gcucucaugacgggugaau

SEQ ID NO: 700681 - RNA, 19 nt, Artificial Sequence
  Description of Artificial Sequence: Synthetic oligonucleotide
  Antisense strand to SEQ ID NO: 700680
auucacccgucaugagagc

SEQ ID NO: 700682 - RNA, 19 nt, Artificial Sequence
  Description of Artificial Sequence: Synthetic oligonucleotide
  Sense strand starting at position 2311 of SEQ ID NO: 586213
cugcucagaauguggaaau

SEQ ID NO: 700683 - RNA, 19 nt, Artificial Sequence
  Description of Artificial Sequence: Synthetic oligonucleotide
  Antisense strand to SEQ ID NO: 700682
auuuccacauucugagcag

SEQ ID NO: 700684 - RNA, 19 nt, Artificial Sequence
  Description of Artificial Sequence: Synthetic oligonucleotide
  Sense strand starting at position 2323 of SEQ ID NO: 586213
uggaaaugcagaugugguu

SEQ ID NO: 700685 - RNA, 19 nt, Artificial Sequence
  Description of Artificial Sequence: Synthetic oligonucleotide
  Antisense strand to SEQ ID NO: 700684
aaccacaucugcauuucca

SEQ ID NO: 700686 - RNA, 19 nt, Artificial Sequence
  Description of Artificial Sequence: Synthetic oligonucleotide
  Sense strand starting at position 2352 of SEQ ID NO: 586213
gccauuguucucgugagcu

SEQ ID NO: 700687 - RNA, 19 nt, Artificial Sequence
  Description of Artificial Sequence: Synthetic oligonucleotide
  Antisense strand to SEQ ID NO: 700686
agcucacgagaacaauggc

SEQ ID NO: 700688 - RNA, 19 nt, Artificial Sequence
  Description of Artificial Sequence: Synthetic oligonucleotide
  Sense strand starting at position 2368 of SEQ ID NO: 586213
gcuguaaggcagugauuac

SEQ ID NO: 700689 - RNA, 19 nt, Artificial Sequence
  Description of Artificial Sequence: Synthetic oligonucleotide
  Antisense strand to SEQ ID NO: 700688
guaaucacugccuuacagc

SEQ ID NO: 700690 - RNA, 19 nt, Artificial Sequence
  Description of Artificial Sequence: Synthetic oligonucleotide
  Sense strand starting at position 2369 of SEQ ID NO: 586213
cuguaaggcagugauuaca

SEQ ID NO: 700691 - RNA, 19 nt, Artificial Sequence
  Description of Artificial Sequence: Synthetic oligonucleotide
  Antisense strand to SEQ ID NO: 700690
uguaaucacugccuuacag

SEQ ID NO: 700692 - RNA, 19 nt, Artificial Sequence
  Description of Artificial Sequence: Synthetic oligonucleotide
  Sense strand starting at position 2426 of SEQ ID NO: 586213
ggcacauucuuagcuuauu

SEQ ID NO: 700693 - RNA, 19 nt, Artificial Sequence
  Description of Artificial Sequence: Synthetic oligonucleotide
  Antisense strand to SEQ ID NO: 700692
aauaagcuaagaaugugcc

SEQ ID NO: 700694 - RNA, 19 nt, Artificial Sequence
  Description of Artificial Sequence: Synthetic oligonucleotide
  Sense strand starting at position 2473 of SEQ ID NO: 586213
uccugugccuucccauuua

SEQ ID NO: 700695 - RNA, 19 nt, Artificial Sequence
  Description of Artificial Sequence: Synthetic oligonucleotide
  Antisense strand to SEQ ID NO: 700694
uaaaugggaaggcacagga

SEQ ID NO: 700696 - RNA, 19 nt, Artificial Sequence
  Description of Artificial Sequence: Synthetic oligonucleotide
  Sense strand starting at position 2556 of SEQ ID NO: 586213
gagaaaucauuugaaagug

SEQ ID NO: 700697 - RNA, 19 nt, Artificial Sequence
  Description of Artificial Sequence: Synthetic oligonucleotide
  Antisense strand to SEQ ID NO: 700696
cacuuucaaaugauuucuc

SEQ ID NO: 700698 - RNA, 19 nt, Artificial Sequence
  Description of Artificial Sequence: Synthetic oligonucleotide
  Sense strand starting at position 2564 of SEQ ID NO: 586213
auuugaaagugugaggaau

SEQ ID NO: 700699 - RNA, 19 nt, Artificial Sequence
  Description of Artificial Sequence: Synthetic oligonucleotide
  Antisense strand to SEQ ID NO: 700698
auuccucacacuuucaaau

SEQ ID NO: 700700 - RNA, 19 nt, Artificial Sequence
  Description of Artificial Sequence: Synthetic oligonucleotide
  Sense strand starting at position 3194 of SEQ ID NO: 586213
ggagaagguuaaucacuuc

SEQ ID NO: 700701 - RNA, 19 nt, Artificial Sequence
  Description of Artificial Sequence: Synthetic oligonucleotide
  Antisense strand to SEQ ID NO: 700700
gaagugauuaaccuucucc

SEQ ID NO: 700702 - RNA, 19 nt, Artificial Sequence
  Description of Artificial Sequence: Synthetic oligonucleotide
  Sense strand starting at position 3197 of SEQ ID NO: 586213
gaagguuaaucacuucgau

SEQ ID NO: 700703 - RNA, 19 nt, Artificial Sequence
  Description of Artificial Sequence: Synthetic oligonucleotide
  Antisense strand to SEQ ID NO: 700702
aucgaagugauuaaccuuc

SEQ ID NO: 700704 - RNA, 19 nt, Artificial Sequence
  Description of Artificial Sequence: Synthetic oligonucleotide
  Sense strand starting at position 3200 of SEQ ID NO: 586213
gguuaaucacuucgaucua

SEQ ID NO: 700705 - RNA, 19 nt, Artificial Sequence
  Description of Artificial Sequence: Synthetic oligonucleotide
  Antisense strand to SEQ ID NO: 700704
uagaucgaagugauuaacc

SEQ ID NO: 700706 - RNA, 19 nt, Artificial Sequence
  Description of Artificial Sequence: Synthetic oligonucleotide
  Sense strand starting at position 3252 of SEQ ID NO: 586213
gucaguuuaaaggauguga

SEQ ID NO: 700707 - RNA, 19 nt, Artificial Sequence
  Description of Artificial Sequence: Synthetic oligonucleotide
  Antisense strand to SEQ ID NO: 700706
ucacauccuuuaaacugac

SEQ ID NO: 700708 - RNA, 19 nt, Artificial Sequence
  Description of Artificial Sequence: Synthetic oligonucleotide
  Sense strand starting at position 3254 of SEQ ID NO: 586213
caguuuaaaggaugugaca

SEQ ID NO: 700709 - RNA, 19 nt, Artificial Sequence
  Description of Artificial Sequence: Synthetic oligonucleotide
  Antisense strand to SEQ ID NO: 700708
ugucacauccuuuaaacug

SEQ ID NO: 700710 - RNA, 19 nt, Artificial Sequence
  Description of Artificial Sequence: Synthetic oligonucleotide
  Sense strand starting at position 3256 of SEQ ID NO: 586213
guuuaaaggaugugacauu

SEQ ID NO: 700711 - RNA, 19 nt, Artificial Sequence
  Description of Artificial Sequence: Synthetic oligonucleotide
  Antisense strand to SEQ ID NO: 700710
aaugucacauccuuuaaac

SEQ ID NO: 700712 - RNA, 19 nt, Artificial Sequence
  Description of Artificial Sequence: Synthetic oligonucleotide
  Sense strand starting at position 3303 of SEQ ID NO: 586213
ggagguugaggucguaaca

SEQ ID NO: 700713 - RNA, 19 nt, Artificial Sequence
  Description of Artificial Sequence: Synthetic oligonucleotide
  Antisense strand to SEQ ID NO: 700712
uguuacgaccucaaccucc

SEQ ID NO: 700714 - RNA, 19 nt, Artificial Sequence
  Description of Artificial Sequence: Synthetic oligonucleotide
  Sense strand starting at position 3446 of SEQ ID NO: 586213
gagaguuugugagucuaaa

SEQ ID NO: 700715 - RNA, 19 nt, Artificial Sequence
  Description of Artificial Sequence: Synthetic oligonucleotide
  Antisense strand to SEQ ID NO: 700714
uuuagacucacaaacucuc

SEQ ID NO: 700716 - RNA, 19 nt, Artificial Sequence
  Description of Artificial Sequence: Synthetic oligonucleotide
  Sense strand starting at position 3532 of SEQ ID NO: 586213
guggaaugaguguguuaga

SEQ ID NO: 700717 - RNA, 19 nt, Artificial Sequence
  Description of Artificial Sequence: Synthetic oligonucleotide
  Antisense strand to SEQ ID NO: 700716
ucuaacacacucauuccac

SEQ ID NO: 700718 - RNA, 19 nt, Artificial Sequence
  Description of Artificial Sequence: Synthetic oligonucleotide
  Sense strand starting at position 3596 of SEQ ID NO: 586213
aguacauguguccaguaga

SEQ ID NO: 700719 - RNA, 19 nt, Artificial Sequence
  Description of Artificial Sequence: Synthetic oligonucleotide
  Antisense strand to SEQ ID NO: 700718
ucuacuggacacauguacu

SEQ ID NO: 700720 - RNA, 19 nt, Artificial Sequence
  Description of Artificial Sequence: Synthetic oligonucleotide
  Sense strand starting at position 3709 of SEQ ID NO: 586213
gacugagaggcaugaaguu

SEQ ID NO: 700721 - RNA, 19 nt, Artificial Sequence
  Description of Artificial Sequence: Synthetic oligonucleotide
  Antisense strand to SEQ ID NO: 700720
aacuucaugccucucaguc

SEQ ID NO: 700722 - RNA, 19 nt, Artificial Sequence
  Description of Artificial Sequence: Synthetic oligonucleotide
  Sense strand starting at position 3715 of SEQ ID NO: 586213
gaggcaugaaguuggaaau

SEQ ID NO: 700723 - RNA, 19 nt, Artificial Sequence
  Description of Artificial Sequence: Synthetic oligonucleotide
  Antisense strand to SEQ ID NO: 700722
auuuccaacuucaugccuc

SEQ ID NO: 700724 - RNA, 19 nt, Artificial Sequence
  Description of Artificial Sequence: Synthetic oligonucleotide
  Sense strand starting at position 3716 of SEQ ID NO: 586213
aggcaugaaguuggaaaua

SEQ ID NO: 700725 - RNA, 19 nt, Artificial Sequence
  Description of Artificial Sequence: Synthetic oligonucleotide
  Antisense strand to SEQ ID NO: 700724
uauuuccaacuucaugccu

SEQ ID NO: 700726 - RNA, 19 nt, Artificial Sequence
  Description of Artificial Sequence: Synthetic oligonucleotide
  Sense strand starting at position 3755 of SEQ ID NO: 586213
gagagaaguauggguuguu

SEQ ID NO: 700727 - RNA, 19 nt, Artificial Sequence
  Description of Artificial Sequence: Synthetic oligonucleotide
  Antisense strand to SEQ ID NO: 700726
aacaacccauacuucucuc

SEQ ID NO: 700728 - RNA, 19 nt, Artificial Sequence
  Description of Artificial Sequence: Synthetic oligonucleotide
  Sense strand starting at position 3756 of SEQ ID NO: 586213
agagaaguauggguuguuu

SEQ ID NO: 700729 - RNA, 19 nt, Artificial Sequence
  Description of Artificial Sequence: Synthetic oligonucleotide
  Antisense strand to SEQ ID NO: 700728
aaacaacccauacuucucu

SEQ ID NO: 700730 - RNA, 19 nt, Artificial Sequence
  Description of Artificial Sequence: Synthetic oligonucleotide
  Sense strand starting at position 3777 of SEQ ID NO: 586213
cauggacuaugccugauau

SEQ ID NO: 700731 - RNA, 19 nt, Artificial Sequence
  Description of Artificial Sequence: Synthetic oligonucleotide
  Antisense strand to SEQ ID NO: 700730
auaucaggcauaguccaug

SEQ ID NO: 700732 - RNA, 19 nt, Artificial Sequence
  Description of Artificial Sequence: Synthetic oligonucleotide
  Sense strand starting at position 3778 of SEQ ID NO: 586213
auggacuaugccugauauu

SEQ ID NO: 700733 - RNA, 19 nt, Artificial Sequence
  Description of Artificial Sequence: Synthetic oligonucleotide
  Antisense strand to SEQ ID NO: 700732
aauaucaggcauaguccau

SEQ ID NO: 700734 - RNA, 19 nt, Artificial Sequence
  Description of Artificial Sequence: Synthetic oligonucleotide
  Sense strand starting at position 3779 of SEQ ID NO: 586213
uggacuaugccugauauuc

SEQ ID NO: 700735 - RNA, 19 nt, Artificial Sequence
  Description of Artificial Sequence: Synthetic oligonucleotide
  Antisense strand to SEQ ID NO: 700734
gaauaucaggcauagucca

SEQ ID NO: 700736 - RNA, 19 nt, Artificial Sequence
  Description of Artificial Sequence: Synthetic oligonucleotide
  Sense strand starting at position 3860 of SEQ ID NO: 586213
ggaguacaaguguaacuuu

SEQ ID NO: 700737 - RNA, 19 nt, Artificial Sequence
  Description of Artificial Sequence: Synthetic oligonucleotide
  Antisense strand to SEQ ID NO: 700736
aaaguuacacuuguacucc

SEQ ID NO: 700738 - RNA, 19 nt, Artificial Sequence
  Description of Artificial Sequence: Synthetic oligonucleotide
  Sense strand starting at position 3868 of SEQ ID NO: 586213
aguguaacuuuguuacaua

SEQ ID NO: 700739 - RNA, 19 nt, Artificial Sequence
  Description of Artificial Sequence: Synthetic oligonucleotide
  Antisense strand to SEQ ID NO: 700738
uauguaacaaaguuacacu

SEQ ID NO: 700740 - RNA, 19 nt, Artificial Sequence
  Description of Artificial Sequence: Synthetic oligonucleotide
  Sense strand starting at position 3 of SEQ ID NO: 586214
uauggaagugugggaauau

SEQ ID NO: 700741 - RNA, 19 nt, Artificial Sequence
  Description of Artificial Sequence: Synthetic oligonucleotide
  Antisense strand to SEQ ID NO: 700740
auauucccacacuuccaua

SEQ ID NO: 700742 - RNA, 19 nt, Artificial Sequence
  Description of Artificial Sequence: Synthetic oligonucleotide
  Sense strand starting at position 47 of SEQ ID NO: 586214
gcuugaaauaaauaguggu

SEQ ID NO: 700743 - RNA, 19 nt, Artificial Sequence
  Description of Artificial Sequence: Synthetic oligonucleotide
  Antisense strand to SEQ ID NO: 700742
accacuauuuauuucaagc

SEQ ID NO: 700744 - RNA, 19 nt, Artificial Sequence
  Description of Artificial Sequence: Synthetic oligonucleotide
  Sense strand starting at position 89 of SEQ ID NO: 586214
gcuauaaggcauugauuag

SEQ ID NO: 700745 - RNA, 19 nt, Artificial Sequence
  Description of Artificial Sequence: Synthetic oligonucleotide
  Antisense strand to SEQ ID NO: 700744
cuaaucaaugccuuauagc

SEQ ID NO: 700746 - RNA, 19 nt, Artificial Sequence
  Description of Artificial Sequence: Synthetic oligonucleotide
  Sense strand starting at position 280 of SEQ ID NO: 586214
guaauuacaugauccugaa

SEQ ID NO: 700747 - RNA, 19 nt, Artificial Sequence
  Description of Artificial Sequence: Synthetic oligonucleotide
  Antisense strand to SEQ ID NO: 700746
uucaggaucauguaauuac

SEQ ID NO: 700748 - RNA, 19 nt, Artificial Sequence
  Description of Artificial Sequence: Synthetic oligonucleotide
  Sense strand starting at position 360 of SEQ ID NO: 586214
agugaaucuggaugaguug

SEQ ID NO: 700749 - RNA, 19 nt, Artificial Sequence
  Description of Artificial Sequence: Synthetic oligonucleotide
  Antisense strand to SEQ ID NO: 700748
caacucauccagauucacu

SEQ ID NO: 700750 - RNA, 19 nt, Artificial Sequence
  Description of Artificial Sequence: Synthetic oligonucleotide
  Sense strand starting at position 637 of SEQ ID NO: 586214
auggucuuugcagaugaaa

SEQ ID NO: 700751 - RNA, 19 nt, Artificial Sequence
  Description of Artificial Sequence: Synthetic oligonucleotide
  Antisense strand to SEQ ID NO: 700750
uuucaucugcaaagaccau

SEQ ID NO: 700752 - RNA, 19 nt, Artificial Sequence
  Description of Artificial Sequence: Synthetic oligonucleotide
  Sense strand starting at position 693 of SEQ ID NO: 586214
uccuaaaucgagugacaag

SEQ ID NO: 700753 - RNA, 19 nt, Artificial Sequence
  Description of Artificial Sequence: Synthetic oligonucleotide
  Antisense strand to SEQ ID NO: 700752
cuugucacucgauuuagga

SEQ ID NO: 700754 - RNA, 19 nt, Artificial Sequence
  Description of Artificial Sequence: Synthetic oligonucleotide
  Sense strand starting at position 694 of SEQ ID NO: 586214
ccuaaaucgagugacaagu

SEQ ID NO: 700755 - RNA, 19 nt, Artificial Sequence
  Description of Artificial Sequence: Synthetic oligonucleotide
  Antisense strand to SEQ ID NO: 700754
acuugucacucgauuuagg

SEQ ID NO: 700756 - RNA, 19 nt, Artificial Sequence
  Description of Artificial Sequence: Synthetic oligonucleotide
  Sense strand starting at position 705 of SEQ ID NO: 586214
ugacaagugucaucauaag

SEQ ID NO: 700757 - RNA, 19 nt, Artificial Sequence
  Description of Artificial Sequence: Synthetic oligonucleotide
  Antisense strand to SEQ ID NO: 700756
cuuaugaugacacuuguca

SEQ ID NO: 700758 - RNA, 19 nt, Artificial Sequence
  Description of Artificial Sequence: Synthetic oligonucleotide
  Sense strand starting at position 1062 of SEQ ID NO: 586214
gagauacucugccucauga

SEQ ID NO: 700759 - RNA, 19 nt, Artificial Sequence
  Description of Artificial Sequence: Synthetic oligonucleotide
  Antisense strand to SEQ ID NO: 700758
ucaugaggcagaguaucuc

SEQ ID NO: 700760 - RNA, 19 nt, Artificial Sequence
  Description of Artificial Sequence: Synthetic oligonucleotide
  Sense strand starting at position 1107 of SEQ ID NO: 586214
auccuugugucaccaaaga

SEQ ID NO: 700761 - RNA, 19 nt, Artificial Sequence
  Description of Artificial Sequence: Synthetic oligonucleotide
  Antisense strand to SEQ ID NO: 700760
ucuuuggugacacaaggau

SEQ ID NO: 700762 - RNA, 19 nt, Artificial Sequence
  Description of Artificial Sequence: Synthetic oligonucleotide
  Sense strand starting at position 1141 of SEQ ID NO: 586214
uaggucacagcuugaacau

SEQ ID NO: 700763 - RNA, 19 nt, Artificial Sequence
  Description of Artificial Sequence: Synthetic oligonucleotide
  Antisense strand to SEQ ID NO: 700762
auguucaagcugugaccua

SEQ ID NO: 700764 - RNA, 19 nt, Artificial Sequence
  Description of Artificial Sequence: Synthetic oligonucleotide
  Sense strand starting at position 1179 of SEQ ID NO: 586214
ccuuucuguacggaagaaa

SEQ ID NO: 700765 - RNA, 19 nt, Artificial Sequence
  Description of Artificial Sequence: Synthetic oligonucleotide
  Antisense strand to SEQ ID NO: 700764
uuucuuccguacagaaagg

SEQ ID NO: 700766 - RNA, 19 nt, Artificial Sequence
  Description of Artificial Sequence: Synthetic oligonucleotide
  Sense strand starting at position 1209 of SEQ ID NO: 586214
ugaagaauguuucccaccu

SEQ ID NO: 700767 - RNA, 19 nt, Artificial Sequence
  Description of Artificial Sequence: Synthetic oligonucleotide
  Antisense strand to SEQ ID NO: 700766
aggugggaaacauucuuca

SEQ ID NO: 700768 - RNA, 19 nt, Artificial Sequence
  Description of Artificial Sequence: Synthetic oligonucleotide
  Sense strand starting at position 1229 of SEQ ID NO: 586214
uugauaaguuaugcaaacu

SEQ ID NO: 700769 - RNA, 19 nt, Artificial Sequence
  Description of Artificial Sequence: Synthetic oligonucleotide
  Antisense strand to SEQ ID NO: 700768
aguuugcauaacuuaucaa

SEQ ID NO: 700770 - RNA, 19 nt, Artificial Sequence
  Description of Artificial Sequence: Synthetic oligonucleotide
  Sense strand starting at position 1470 of SEQ ID NO: 586214
uguggacaauccguagaua

SEQ ID NO: 700771 - RNA, 19 nt, Artificial Sequence
  Description of Artificial Sequence: Synthetic oligonucleotide
  Antisense strand to SEQ ID NO: 700770
uaucuacggauuguccaca

SEQ ID NO: 700772 - RNA, 19 nt, Artificial Sequence
  Description of Artificial Sequence: Synthetic oligonucleotide
  Sense strand starting at position 1471 of SEQ ID NO: 586214
guggacaauccguagauau

SEQ ID NO: 700773 - RNA, 19 nt, Artificial Sequence
  Description of Artificial Sequence: Synthetic oligonucleotide
  Antisense strand to SEQ ID NO: 700772
auaucuacggauuguccac

SEQ ID NO: 700774 - RNA, 19 nt, Artificial Sequence
  Description of Artificial Sequence: Synthetic oligonucleotide
  Sense strand starting at position 1502 of SEQ ID NO: 586214
ugagauauguaucccucau

SEQ ID NO: 700775 - RNA, 19 nt, Artificial Sequence
  Description of Artificial Sequence: Synthetic oligonucleotide
  Antisense strand to SEQ ID NO: 700774
augagggauacauaucuca

SEQ ID NO: 700776 - RNA, 19 nt, Artificial Sequence
  Description of Artificial Sequence: Synthetic oligonucleotide
  Sense strand starting at position 1504 of SEQ ID NO: 586214
agauauguaucccucauga

SEQ ID NO: 700777 - RNA, 19 nt, Artificial Sequence
  Description of Artificial Sequence: Synthetic oligonucleotide
  Antisense strand to SEQ ID NO: 700776
ucaugagggauacauaucu

SEQ ID NO: 700778 - RNA, 19 nt, Artificial Sequence
  Description of Artificial Sequence: Synthetic oligonucleotide
  Sense strand starting at position 1541 of SEQ ID NO: 586214
ugauccaucaugugacgau

SEQ ID NO: 700779 - RNA, 19 nt, Artificial Sequence
  Description of Artificial Sequence: Synthetic oligonucleotide
  Antisense strand to SEQ ID NO: 700778
aucgucacaugauggauca

SEQ ID NO: 700780 - RNA, 19 nt, Artificial Sequence
  Description of Artificial Sequence: Synthetic oligonucleotide
  Sense strand starting at position 1553 of SEQ ID NO: 586214
ugacgauauugagcugaga

SEQ ID NO: 700781 - RNA, 19 nt, Artificial Sequence
  Description of Artificial Sequence: Synthetic oligonucleotide
  Antisense strand to SEQ ID NO: 700780
ucucagcucaauaucguca

SEQ ID NO: 700782 - RNA, 19 nt, Artificial Sequence
  Description of Artificial Sequence: Synthetic oligonucleotide
  Sense strand starting at position 1555 of SEQ ID NO: 586214
acgauauugagcugagaau

SEQ ID NO: 700783 - RNA, 19 nt, Artificial Sequence
  Description of Artificial Sequence: Synthetic oligonucleotide
  Antisense strand to SEQ ID NO: 700782
auucucagcucaauaucgu

SEQ ID NO: 700784 - RNA, 19 nt, Artificial Sequence
  Description of Artificial Sequence: Synthetic oligonucleotide
  Sense strand starting at position 1556 of SEQ ID NO: 586214
cgauauugagcugagaauu

SEQ ID NO: 700785 - RNA, 19 nt, Artificial Sequence
  Description of Artificial Sequence: Synthetic oligonucleotide
  Antisense strand to SEQ ID NO: 700784
aauucucagcucaauaucg

SEQ ID NO: 700786 - RNA, 19 nt, Artificial Sequence
  Description of Artificial Sequence: Synthetic oligonucleotide
  Sense strand starting at position 1567 of SEQ ID NO: 586214
ugagaauuccucugacauc

SEQ ID NO: 700787 - RNA, 19 nt, Artificial Sequence
  Description of Artificial Sequence: Synthetic oligonucleotide
  Antisense strand to SEQ ID NO: 700786
gaugucagaggaauucuca

SEQ ID NO: 700788 - RNA, 19 nt, Artificial Sequence
  Description of Artificial Sequence: Synthetic oligonucleotide
  Sense strand starting at position 1876 of SEQ ID NO: 586214
gucucugaugagugagaug

SEQ ID NO: 700789 - RNA, 19 nt, Artificial Sequence
  Description of Artificial Sequence: Synthetic oligonucleotide
  Antisense strand to SEQ ID NO: 700788
caucucacucaucagagac

SEQ ID NO: 700790 - RNA, 19 nt, Artificial Sequence
  Description of Artificial Sequence: Synthetic oligonucleotide
  Sense strand starting at position 1881 of SEQ ID NO: 586214
ugaugagugagaugaggua

SEQ ID NO: 700791 - RNA, 19 nt, Artificial Sequence
  Description of Artificial Sequence: Synthetic oligonucleotide
  Antisense strand to SEQ ID NO: 700790
uaccucaucucacucauca

SEQ ID NO: 700792 - RNA, 19 nt, Artificial Sequence
  Description of Artificial Sequence: Synthetic oligonucleotide
  Sense strand starting at position 2128 of SEQ ID NO: 586214
uacauauuagcauggagca

SEQ ID NO: 700793 - RNA, 19 nt, Artificial Sequence
  Description of Artificial Sequence: Synthetic oligonucleotide
  Antisense strand to SEQ ID NO: 700792
ugcuccaugcuaauaugua

SEQ ID NO: 700794 - RNA, 19 nt, Artificial Sequence
  Description of Artificial Sequence: Synthetic oligonucleotide
  Sense strand starting at position 2324 of SEQ ID NO: 586214
uugugagcauauuuguagu

SEQ ID NO: 700795 - RNA, 19 nt, Artificial Sequence
  Description of Artificial Sequence: Synthetic oligonucleotide
  Antisense strand to SEQ ID NO: 700794
acuacaaauaugcucacaa

SEQ ID NO: 700796 - RNA, 19 nt, Artificial Sequence
  Description of Artificial Sequence: Synthetic oligonucleotide
  Sense strand starting at position 2326 of SEQ ID NO: 586214
gugagcauauuuguaguuu

SEQ ID NO: 700797 - RNA, 19 nt, Artificial Sequence
  Description of Artificial Sequence: Synthetic oligonucleotide
  Antisense strand to SEQ ID NO: 700796
aaacuacaaauaugcucac

SEQ ID NO: 700798 - RNA, 19 nt, Artificial Sequence
  Description of Artificial Sequence: Synthetic oligonucleotide
  Sense strand starting at position 2330 of SEQ ID NO: 586214
gcauauuuguaguuucuaa

SEQ ID NO: 700799 - RNA, 19 nt, Artificial Sequence
  Description of Artificial Sequence: Synthetic oligonucleotide
  Antisense strand to SEQ ID NO: 700798
uuagaaacuacaaauaugc

SEQ ID NO: 700800 - RNA, 19 nt, Artificial Sequence
  Description of Artificial Sequence: Synthetic oligonucleotide
  Sense strand starting at position 2377 of SEQ ID NO: 586214
cauuguuggguuugaaaga

SEQ ID NO: 700801 - RNA, 19 nt, Artificial Sequence
  Description of Artificial Sequence: Synthetic oligonucleotide
  Antisense strand to SEQ ID NO: 700800
ucuuucaaacccaacaaug

SEQ ID NO: 700802 - RNA, 19 nt, Artificial Sequence
  Description of Artificial Sequence: Synthetic oligonucleotide
  Sense strand starting at position 3077 of SEQ ID NO: 586214
accggcugugaagauaaua

SEQ ID NO: 700803 - RNA, 19 nt, Artificial Sequence
  Description of Artificial Sequence: Synthetic oligonucleotide
  Antisense strand to SEQ ID NO: 700802
uauuaucuucacagccggu

SEQ ID NO: 700804 - RNA, 19 nt, Artificial Sequence
  Description of Artificial Sequence: Synthetic oligonucleotide
  Sense strand starting at position 3082 of SEQ ID NO: 586214
cugugaagauaauacauuu

SEQ ID NO: 700805 - RNA, 19 nt, Artificial Sequence
  Description of Artificial Sequence: Synthetic oligonucleotide
  Antisense strand to SEQ ID NO: 700804
aaauguauuaucuucacag

SEQ ID NO: 700806 - RNA, 19 nt, Artificial Sequence
  Description of Artificial Sequence: Synthetic oligonucleotide
  Sense strand starting at position 3255 of SEQ ID NO: 586214
gggacacuacucuagugua

SEQ ID NO: 700807 - RNA, 19 nt, Artificial Sequence
  Description of Artificial Sequence: Synthetic oligonucleotide
  Antisense strand to SEQ ID NO: 700806
uacacuagaguaguguccc

SEQ ID NO: 700808 - RNA, 19 nt, Artificial Sequence
  Description of Artificial Sequence: Synthetic oligonucleotide
  Sense strand starting at position 3374 of SEQ ID NO: 586214
accuguuguuaaccagaaa

SEQ ID NO: 700809 - RNA, 19 nt, Artificial Sequence
  Description of Artificial Sequence: Synthetic oligonucleotide
  Antisense strand to SEQ ID NO: 700808
uuucugguuaacaacaggu

SEQ ID NO: 700810 - RNA, 19 nt, Artificial Sequence
  Description of Artificial Sequence: Synthetic oligonucleotide
  Sense strand starting at position 3377 of SEQ ID NO: 586214
uguuguuaaccagaaauca

SEQ ID NO: 700811 - RNA, 19 nt, Artificial Sequence
  Description of Artificial Sequence: Synthetic oligonucleotide
  Antisense strand to SEQ ID NO: 700810
ugauuucugguuaacaaca

SEQ ID NO: 700812 - RNA, 19 nt, Artificial Sequence
  Description of Artificial Sequence: Synthetic oligonucleotide
  Sense strand starting at position 3410 of SEQ ID NO: 586214
aauauuagggaguaguguu

SEQ ID NO: 700813 - RNA, 19 nt, Artificial Sequence
  Description of Artificial Sequence: Synthetic oligonucleotide
  Antisense strand to SEQ ID NO: 700812
aacacuacucccuaauauu

SEQ ID NO: 700814 - RNA, 19 nt, Artificial Sequence
  Description of Artificial Sequence: Synthetic oligonucleotide
  Sense strand starting at position 3662 of SEQ ID NO: 586214
uaggguauguuuccauaug

SEQ ID NO: 700815 - RNA, 19 nt, Artificial Sequence
  Description of Artificial Sequence: Synthetic oligonucleotide
  Antisense strand to SEQ ID NO: 700814
cauauggaaacauacccua

SEQ ID NO: 700816 - RNA, 19 nt, Artificial Sequence
  Description of Artificial Sequence: Synthetic oligonucleotide
  Sense strand starting at position 3905 of SEQ ID NO: 586214
acacaaugacuguggcaaa

SEQ ID NO: 700817 - RNA, 19 nt, Artificial Sequence
  Description of Artificial Sequence: Synthetic oligonucleotide
  Antisense strand to SEQ ID NO: 700816
uuugccacagucauugugu

SEQ ID NO: 700818 - RNA, 19 nt, Artificial Sequence
  Description of Artificial Sequence: Synthetic oligonucleotide
  Sense strand starting at position 3934 of SEQ ID NO: 586214
gugaaauuauaaguggaua

SEQ ID NO: 700819 - RNA, 19 nt, Artificial Sequence
  Description of Artificial Sequence: Synthetic oligonucleotide
  Antisense strand to SEQ ID NO: 700818
uauccacuuauaauuucac

SEQ ID NO: 700820 - RNA, 19 nt, Artificial Sequence
  Description of Artificial Sequence: Synthetic oligonucleotide
  Sense strand starting at position 183 of SEQ ID NO: 586215
auaacauuaucagugggua

SEQ ID NO: 700821 - RNA, 19 nt, Artificial Sequence
  Description of Artificial Sequence: Synthetic oligonucleotide
  Antisense strand to SEQ ID NO: 700820
uacccacugauaauguuau

SEQ ID NO: 700822 - RNA, 19 nt, Artificial Sequence
  Description of Artificial Sequence: Synthetic oligonucleotide
  Sense strand starting at position 184 of SEQ ID NO: 586215
uaacauuaucaguggguaa

SEQ ID NO: 700823 - RNA, 19 nt, Artificial Sequence
  Description of Artificial Sequence: Synthetic oligonucleotide
  Antisense strand to SEQ ID NO: 700822
uuacccacugauaauguua

SEQ ID NO: 700824 - RNA, 19 nt, Artificial Sequence
  Description of Artificial Sequence: Synthetic oligonucleotide
  Sense strand starting at position 186 of SEQ ID NO: 586215
acauuaucaguggguaaca

SEQ ID NO: 700825 - RNA, 19 nt, Artificial Sequence
  Description of Artificial Sequence: Synthetic oligonucleotide
  Antisense strand to SEQ ID NO: 700824
uguuacccacugauaaugu

SEQ ID NO: 700826 - RNA, 19 nt, Artificial Sequence
  Description of Artificial Sequence: Synthetic oligonucleotide
  Sense strand starting at position 459 of SEQ ID NO: 586215
uuuguaauuuaggagagac

SEQ ID NO: 700827 - RNA, 19 nt, Artificial Sequence
  Description of Artificial Sequence: Synthetic oligonucleotide
  Antisense strand to SEQ ID NO: 700826
gucucuccuaaauuacaaa

SEQ ID NO: 700828 - RNA, 19 nt, Artificial Sequence
  Description of Artificial Sequence: Synthetic oligonucleotide
  Sense strand starting at position 583 of SEQ ID NO: 586215
agcccuguuuggguuauuu

SEQ ID NO: 700829 - RNA, 19 nt, Artificial Sequence
  Description of Artificial Sequence: Synthetic oligonucleotide
  Antisense strand to SEQ ID NO: 700828
aaauaacccaaacagggcu

SEQ ID NO: 700830 - RNA, 19 nt, Artificial Sequence
  Description of Artificial Sequence: Synthetic oligonucleotide
  Sense strand starting at position 627 of SEQ ID NO: 586215
ucgaguuuguuaccaguag

SEQ ID NO: 700831 - RNA, 19 nt, Artificial Sequence
  Description of Artificial Sequence: Synthetic oligonucleotide
  Antisense strand to SEQ ID NO: 700830
cuacugguaacaaacucga

SEQ ID NO: 700832 - RNA, 19 nt, Artificial Sequence
  Description of Artificial Sequence: Synthetic oligonucleotide
  Sense strand starting at position 631 of SEQ ID NO: 586215
guuuguuaccaguaggcuu

SEQ ID NO: 700833 - RNA, 19 nt, Artificial Sequence
  Description of Artificial Sequence: Synthetic oligonucleotide
  Antisense strand to SEQ ID NO: 700832
aagccuacugguaacaaac

SEQ ID NO: 700834 - RNA, 19 nt, Artificial Sequence
  Description of Artificial Sequence: Synthetic oligonucleotide
  Sense strand starting at position 856 of SEQ ID NO: 586215
caugcacaucgcguugaua

SEQ ID NO: 700835 - RNA, 19 nt, Artificial Sequence
  Description of Artificial Sequence: Synthetic oligonucleotide
  Antisense strand to SEQ ID NO: 700834
uaucaacgcgaugugcaug

SEQ ID NO: 700836 - RNA, 19 nt, Artificial Sequence
  Description of Artificial Sequence: Synthetic oligonucleotide
  Sense strand starting at position 859 of SEQ ID NO: 586215
gcacaucgcguugauaauc

SEQ ID NO: 700837 - RNA, 19 nt, Artificial Sequence
  Description of Artificial Sequence: Synthetic oligonucleotide
  Antisense strand to SEQ ID NO: 700836
gauuaucaacgcgaugugc

SEQ ID NO: 700838 - RNA, 19 nt, Artificial Sequence
  Description of Artificial Sequence: Synthetic oligonucleotide
  Sense strand starting at position 1054 of SEQ ID NO: 586215
aucuccauugcauaguuua

SEQ ID NO: 700839 - RNA, 19 nt, Artificial Sequence
  Description of Artificial Sequence: Synthetic oligonucleotide
  Antisense strand to SEQ ID NO: 700838
uaaacuaugcaauggagau

SEQ ID NO: 700840 - RNA, 19 nt, Artificial Sequence
  Description of Artificial Sequence: Synthetic oligonucleotide
  Sense strand starting at position 1067 of SEQ ID NO: 586215
aguuuaucacguuaacaaa

SEQ ID NO: 700841 - RNA, 19 nt, Artificial Sequence
  Description of Artificial Sequence: Synthetic oligonucleotide
  Antisense strand to SEQ ID NO: 700840
uuuguuaacgugauaaacu

SEQ ID NO: 700842 - RNA, 19 nt, Artificial Sequence
  Description of Artificial Sequence: Synthetic oligonucleotide
  Sense strand starting at position 1213 of SEQ ID NO: 586215
agaugucacugcuuauaug

SEQ ID NO: 700843 - RNA, 19 nt, Artificial Sequence
  Description of Artificial Sequence: Synthetic oligonucleotide
  Antisense strand to SEQ ID NO: 700842
cauauaagcagugacaucu

SEQ ID NO: 700844 - RNA, 19 nt, Artificial Sequence
  Description of Artificial Sequence: Synthetic oligonucleotide
  Sense strand starting at position 1214 of SEQ ID NO: 586215
gaugucacugcuuauaugu

SEQ ID NO: 700845 - RNA, 19 nt, Artificial Sequence
  Description of Artificial Sequence: Synthetic oligonucleotide
  Antisense strand to SEQ ID NO: 700844
acauauaagcagugacauc

SEQ ID NO: 700846 - RNA, 19 nt, Artificial Sequence
  Description of Artificial Sequence: Synthetic oligonucleotide
  Sense strand starting at position 1220 of SEQ ID NO: 586215
acugcuuauaugugggaaa

SEQ ID NO: 700847 - RNA, 19 nt, Artificial Sequence
  Description of Artificial Sequence: Synthetic oligonucleotide
  Antisense strand to SEQ ID NO: 700846
uuucccacauauaagcagu

SEQ ID NO: 700848 - RNA, 19 nt, Artificial Sequence
  Description of Artificial Sequence: Synthetic oligonucleotide
  Sense strand starting at position 1245 of SEQ ID NO: 586215
ucaccuuucugagacugga

SEQ ID NO: 700849 - RNA, 19 nt, Artificial Sequence
  Description of Artificial Sequence: Synthetic oligonucleotide
  Antisense strand to SEQ ID NO: 700848
uccagucucagaaagguga

SEQ ID NO: 700850 - RNA, 19 nt, Artificial Sequence
  Description of Artificial Sequence: Synthetic oligonucleotide
  Sense strand starting at position 1276 of SEQ ID NO: 586215
ggaagaggcugagaugguu

SEQ ID NO: 700851 - RNA, 19 nt, Artificial Sequence
  Description of Artificial Sequence: Synthetic oligonucleotide
  Antisense strand to SEQ ID NO: 700850
aaccaucucagccucuucc

SEQ ID NO: 700852 - RNA, 19 nt, Artificial Sequence
  Description of Artificial Sequence: Synthetic oligonucleotide
  Sense strand starting at position 1282 of SEQ ID NO: 586215
ggcugagaugguugagaau

SEQ ID NO: 700853 - RNA, 19 nt, Artificial Sequence
  Description of Artificial Sequence: Synthetic oligonucleotide
  Antisense strand to SEQ ID NO: 700852
auucucaaccaucucagcc

SEQ ID NO: 700854 - RNA, 19 nt, Artificial Sequence
  Description of Artificial Sequence: Synthetic oligonucleotide
  Sense strand starting at position 1289 of SEQ ID NO: 586215
augguugagaaucacguaa

SEQ ID NO: 700855 - RNA, 19 nt, Artificial Sequence
  Description of Artificial Sequence: Synthetic oligonucleotide
  Antisense strand to SEQ ID NO: 700854
uuacgugauucucaaccau

SEQ ID NO: 700856 - RNA, 19 nt, Artificial Sequence
  Description of Artificial Sequence: Synthetic oligonucleotide
  Sense strand starting at position 1293 of SEQ ID NO: 586215
uugagaaucacguaagcug

SEQ ID NO: 700857 - RNA, 19 nt, Artificial Sequence
  Description of Artificial Sequence: Synthetic oligonucleotide
  Antisense strand to SEQ ID NO: 700856
cagcuuacgugauucucaa

SEQ ID NO: 700858 - RNA, 19 nt, Artificial Sequence
  Description of Artificial Sequence: Synthetic oligonucleotide
  Sense strand starting at position 1300 of SEQ ID NO: 586215
ucacguaagcugugagauc

SEQ ID NO: 700859 - RNA, 19 nt, Artificial Sequence
  Description of Artificial Sequence: Synthetic oligonucleotide
  Antisense strand to SEQ ID NO: 700858
gaucucacagcuuacguga

SEQ ID NO: 700860 - RNA, 19 nt, Artificial Sequence
  Description of Artificial Sequence: Synthetic oligonucleotide
  Sense strand starting at position 1309 of SEQ ID NO: 586215
cugugagaucuuggauuac

SEQ ID NO: 700861 - RNA, 19 nt, Artificial Sequence
  Description of Artificial Sequence: Synthetic oligonucleotide
  Antisense strand to SEQ ID NO: 700860
guaauccaagaucucacag

SEQ ID NO: 700862 - RNA, 19 nt, Artificial Sequence
  Description of Artificial Sequence: Synthetic oligonucleotide
  Sense strand starting at position 1319 of SEQ ID NO: 586215
uuggauuacugagcaugau

SEQ ID NO: 700863 - RNA, 19 nt, Artificial Sequence
  Description of Artificial Sequence: Synthetic oligonucleotide
  Antisense strand to SEQ ID NO: 700862
aucaugcucaguaauccaa

SEQ ID NO: 700864 - RNA, 19 nt, Artificial Sequence
  Description of Artificial Sequence: Synthetic oligonucleotide
  Sense strand starting at position 1383 of SEQ ID NO: 586215
guuaucaaagcaugaguau

SEQ ID NO: 700865 - RNA, 19 nt, Artificial Sequence
  Description of Artificial Sequence: Synthetic oligonucleotide
  Antisense strand to SEQ ID NO: 700864
auacucaugcuuugauaac

SEQ ID NO: 700866 - RNA, 19 nt, Artificial Sequence
  Description of Artificial Sequence: Synthetic oligonucleotide
  Sense strand starting at position 1392 of SEQ ID NO: 586215
gcaugaguauguuuccaug

SEQ ID NO: 700867 - RNA, 19 nt, Artificial Sequence
  Description of Artificial Sequence: Synthetic oligonucleotide
  Antisense strand to SEQ ID NO: 700866
cauggaaacauacucaugc

SEQ ID NO: 700868 - RNA, 19 nt, Artificial Sequence
  Description of Artificial Sequence: Synthetic oligonucleotide
  Sense strand starting at position 1410 of SEQ ID NO: 586215
gccaaaucuccuugcaaag

SEQ ID NO: 700869 - RNA, 19 nt, Artificial Sequence
  Description of Artificial Sequence: Synthetic oligonucleotide
  Antisense strand to SEQ ID NO: 700868
cuuugcaaggagauuuggc

SEQ ID NO: 700870 - RNA, 19 nt, Artificial Sequence
  Description of Artificial Sequence: Synthetic oligonucleotide
  Sense strand starting at position 1526 of SEQ ID NO: 586215
ucacuauauccuuauagug

SEQ ID NO: 700871 - RNA, 19 nt, Artificial Sequence
  Description of Artificial Sequence: Synthetic oligonucleotide
  Antisense strand to SEQ ID NO: 700870
cacuauaaggauauaguga

SEQ ID NO: 700872 - RNA, 19 nt, Artificial Sequence
  Description of Artificial Sequence: Synthetic oligonucleotide
  Sense strand starting at position 1528 of SEQ ID NO: 586215
acuauauccuuauagugac

SEQ ID NO: 700873 - RNA, 19 nt, Artificial Sequence
  Description of Artificial Sequence: Synthetic oligonucleotide
  Antisense strand to SEQ ID NO: 700872
gucacuauaaggauauagu

SEQ ID NO: 700874 - RNA, 19 nt, Artificial Sequence
  Description of Artificial Sequence: Synthetic oligonucleotide
  Sense strand starting at position 1538 of SEQ ID NO: 586215
uauagugaccuguacaguu

SEQ ID NO: 700875 - RNA, 19 nt, Artificial Sequence
  Description of Artificial Sequence: Synthetic oligonucleotide
  Antisense strand to SEQ ID NO: 700874
aacuguacaggucacuaua

SEQ ID NO: 700876 - RNA, 19 nt, Artificial Sequence
  Description of Artificial Sequence: Synthetic oligonucleotide
  Sense strand starting at position 1545 of SEQ ID NO: 586215
accuguacaguuggaaaga

SEQ ID NO: 700877 - RNA, 19 nt, Artificial Sequence
  Description of Artificial Sequence: Synthetic oligonucleotide
  Antisense strand to SEQ ID NO: 700876
ucuuuccaacuguacaggu

SEQ ID NO: 700878 - RNA, 19 nt, Artificial Sequence
  Description of Artificial Sequence: Synthetic oligonucleotide
  Sense strand starting at position 1612 of SEQ ID NO: 586215
cugaguuagucauuugcuu

SEQ ID NO: 700879 - RNA, 19 nt, Artificial Sequence
  Description of Artificial Sequence: Synthetic oligonucleotide
  Antisense strand to SEQ ID NO: 700878
aagcaaaugacuaacucag

SEQ ID NO: 700880 - RNA, 19 nt, Artificial Sequence
  Description of Artificial Sequence: Synthetic oligonucleotide
  Sense strand starting at position 1704 of SEQ ID NO: 586215
cccagacaugcauguaaac

SEQ ID NO: 700881 - RNA, 19 nt, Artificial Sequence
  Description of Artificial Sequence: Synthetic oligonucleotide
  Antisense strand to SEQ ID NO: 700880
guuuacaugcaugucuggg

SEQ ID NO: 700882 - RNA, 19 nt, Artificial Sequence
  Description of Artificial Sequence: Synthetic oligonucleotide
  Sense strand starting at position 1768 of SEQ ID NO: 586215
gcugauauauuaguuuguu

SEQ ID NO: 700883 - RNA, 19 nt, Artificial Sequence
  Description of Artificial Sequence: Synthetic oligonucleotide
  Antisense strand to SEQ ID NO: 700882
aacaaacuaauauaucagc

SEQ ID NO: 700884 - RNA, 19 nt, Artificial Sequence
  Description of Artificial Sequence: Synthetic oligonucleotide
  Sense strand starting at position 2076 of SEQ ID NO: 586215
gagauauaauucuaguuga

SEQ ID NO: 700885 - RNA, 19 nt, Artificial Sequence
  Description of Artificial Sequence: Synthetic oligonucleotide
  Antisense strand to SEQ ID NO: 700884
ucaacuagaauuauaucuc

SEQ ID NO: 700886 - RNA, 19 nt, Artificial Sequence
  Description of Artificial Sequence: Synthetic oligonucleotide
  Sense strand starting at position 2083 of SEQ ID NO: 586215
aauucuaguugagauuuga

SEQ ID NO: 700887 - RNA, 19 nt, Artificial Sequence
  Description of Artificial Sequence: Synthetic oligonucleotide
  Antisense strand to SEQ ID NO: 700886
ucaaaucucaacuagaauu

SEQ ID NO: 700888 - RNA, 19 nt, Artificial Sequence
  Description of Artificial Sequence: Synthetic oligonucleotide
  Sense strand starting at position 3048 of SEQ ID NO: 586215
gaaggucucugacaugacu

SEQ ID NO: 700889 - RNA, 19 nt, Artificial Sequence
  Description of Artificial Sequence: Synthetic oligonucleotide
  Antisense strand to SEQ ID NO: 700888
agucaugucagagaccuuc

SEQ ID NO: 700890 - RNA, 19 nt, Artificial Sequence
  Description of Artificial Sequence: Synthetic oligonucleotide
  Sense strand starting at position 3056 of SEQ ID NO: 586215
cugacaugacuuggcgaca

SEQ ID NO: 700891 - RNA, 19 nt, Artificial Sequence
  Description of Artificial Sequence: Synthetic oligonucleotide
  Antisense strand to SEQ ID NO: 700890
ugucgccaagucaugucag

SEQ ID NO: 700892 - RNA, 19 nt, Artificial Sequence
  Description of Artificial Sequence: Synthetic oligonucleotide
  Sense strand starting at position 3057 of SEQ ID NO: 586215
ugacaugacuuggcgacau

SEQ ID NO: 700893 - RNA, 19 nt, Artificial Sequence
  Description of Artificial Sequence: Synthetic oligonucleotide
  Antisense strand to SEQ ID NO: 700892
augucgccaagucauguca

SEQ ID NO: 700894 - RNA, 19 nt, Artificial Sequence
  Description of Artificial Sequence: Synthetic oligonucleotide
  Sense strand starting at position 3486 of SEQ ID NO: 586215
uugucagagucauuccaca

SEQ ID NO: 700895 - RNA, 19 nt, Artificial Sequence
  Description of Artificial Sequence: Synthetic oligonucleotide
  Antisense strand to SEQ ID NO: 700894
uguggaaugacucugacaa

SEQ ID NO: 700896 - RNA, 19 nt, Artificial Sequence
  Description of Artificial Sequence: Synthetic oligonucleotide
  Sense strand starting at position 3491 of SEQ ID NO: 586215
agagucauuccacaagucu

SEQ ID NO: 700897 - RNA, 19 nt, Artificial Sequence
  Description of Artificial Sequence: Synthetic oligonucleotide
  Antisense strand to SEQ ID NO: 700896
agacuuguggaaugacucu

SEQ ID NO: 700898 - RNA, 19 nt, Artificial Sequence
  Description of Artificial Sequence: Synthetic oligonucleotide
  Sense strand starting at position 3830 of SEQ ID NO: 586215
agcggaaacaccugauaag

SEQ ID NO: 700899 - RNA, 19 nt, Artificial Sequence
  Description of Artificial Sequence: Synthetic oligonucleotide
  Antisense strand to SEQ ID NO: 700898
cuuaucagguguuuccgcu

SEQ ID NO: 700900 - RNA, 19 nt, Artificial Sequence
  Description of Artificial Sequence: Synthetic oligonucleotide
  Sense strand starting at position 1373 of SEQ ID NO: 586216
cauaccuacgauuggguaa

SEQ ID NO: 700901 - RNA, 19 nt, Artificial Sequence
  Description of Artificial Sequence: Synthetic oligonucleotide
  Antisense strand to SEQ ID NO: 700900
uuacccaaucguagguaug

SEQ ID NO: 700902 - RNA, 19 nt, Artificial Sequence
  Description of Artificial Sequence: Synthetic oligonucleotide
  Sense strand starting at position 1374 of SEQ ID NO: 586216
auaccuacgauuggguaau

SEQ ID NO: 700903 - RNA, 19 nt, Artificial Sequence
  Description of Artificial Sequence: Synthetic oligonucleotide
  Antisense strand to SEQ ID NO: 700902
auuacccaaucguagguau

SEQ ID NO: 700904 - RNA, 19 nt, Artificial Sequence
  Description of Artificial Sequence: Synthetic oligonucleotide
  Sense strand starting at position 1708 of SEQ ID NO: 586216
ucaggaacuuaugugauua

SEQ ID NO: 700905 - RNA, 19 nt, Artificial Sequence
  Description of Artificial Sequence: Synthetic oligonucleotide
  Antisense strand to SEQ ID NO: 700904
uaaucacauaaguuccuga

SEQ ID NO: 700906 - RNA, 19 nt, Artificial Sequence
  Description of Artificial Sequence: Synthetic oligonucleotide
  Sense strand starting at position 1712 of SEQ ID NO: 586216
gaacuuaugugauuaagca

SEQ ID NO: 700907 - RNA, 19 nt, Artificial Sequence
  Description of Artificial Sequence: Synthetic oligonucleotide
  Antisense strand to SEQ ID NO: 700906
ugcuuaaucacauaaguuc

SEQ ID NO: 700908 - RNA, 19 nt, Artificial Sequence
  Description of Artificial Sequence: Synthetic oligonucleotide
  Sense strand starting at position 1713 of SEQ ID NO: 586216
aacuuaugugauuaagcag

SEQ ID NO: 700909 - RNA, 19 nt, Artificial Sequence
  Description of Artificial Sequence: Synthetic oligonucleotide
  Antisense strand to SEQ ID NO: 700908
cugcuuaaucacauaaguu

SEQ ID NO: 700910 - RNA, 19 nt, Artificial Sequence
  Description of Artificial Sequence: Synthetic oligonucleotide
  Sense strand starting at position 1768 of SEQ ID NO: 586216
agaugcuucccagagcuuu

SEQ ID NO: 700911 - RNA, 19 nt, Artificial Sequence
  Description of Artificial Sequence: Synthetic oligonucleotide
  Antisense strand to SEQ ID NO: 700910
aaagcucugggaagcaucu

SEQ ID NO: 700912 - RNA, 19 nt, Artificial Sequence
  Description of Artificial Sequence: Synthetic oligonucleotide
  Sense strand starting at position 1797 of SEQ ID NO: 586216
gcauucugacaucaacgua

SEQ ID NO: 700913 - RNA, 19 nt, Artificial Sequence
  Description of Artificial Sequence: Synthetic oligonucleotide
  Antisense strand to SEQ ID NO: 700912
uacguugaugucagaaugc

SEQ ID NO: 700914 - RNA, 19 nt, Artificial Sequence
  Description of Artificial Sequence: Synthetic oligonucleotide
  Sense strand starting at position 1810 of SEQ ID NO: 586216
aacguaggguuucuaucaa

SEQ ID NO: 700915 - RNA, 19 nt, Artificial Sequence
  Description of Artificial Sequence: Synthetic oligonucleotide
  Antisense strand to SEQ ID NO: 700914
uugauagaaacccuacguu

SEQ ID NO: 700916 - RNA, 19 nt, Artificial Sequence
  Description of Artificial Sequence: Synthetic oligonucleotide
  Sense strand starting at position 1869 of SEQ ID NO: 586216
cccucuaaaggcugauaga

SEQ ID NO: 700917 - RNA, 19 nt, Artificial Sequence
  Description of Artificial Sequence: Synthetic oligonucleotide
  Antisense strand to SEQ ID NO: 700916
ucuaucagccuuuagaggg

SEQ ID NO: 700918 - RNA, 19 nt, Artificial Sequence
  Description of Artificial Sequence: Synthetic oligonucleotide
  Sense strand starting at position 2016 of SEQ ID NO: 586216
gugacuuugugaccucaua

SEQ ID NO: 700919 - RNA, 19 nt, Artificial Sequence
  Description of Artificial Sequence: Synthetic oligonucleotide
  Antisense strand to SEQ ID NO: 700918
uaugaggucacaaagucac

SEQ ID NO: 700920 - RNA, 19 nt, Artificial Sequence
  Description of Artificial Sequence: Synthetic oligonucleotide
  Sense strand starting at position 2058 of SEQ ID NO: 586216
cucuuuccucgugaaggaa

SEQ ID NO: 700921 - RNA, 19 nt, Artificial Sequence
  Description of Artificial Sequence: Synthetic oligonucleotide
  Antisense strand to SEQ ID NO: 700920
uuccuucacgaggaaagag

SEQ ID NO: 700922 - RNA, 19 nt, Artificial Sequence
  Description of Artificial Sequence: Synthetic oligonucleotide
  Sense strand starting at position 2075 of SEQ ID NO: 586216
aaaugaugaaagugagugu

SEQ ID NO: 700923 - RNA, 19 nt, Artificial Sequence
  Description of Artificial Sequence: Synthetic oligonucleotide
  Antisense strand to SEQ ID NO: 700922
acacucacuuucaucauuu

SEQ ID NO: 700924 - RNA, 19 nt, Artificial Sequence
  Description of Artificial Sequence: Synthetic oligonucleotide
  Sense strand starting at position 2079 of SEQ ID NO: 586216
gaugaaagugaguguugga

SEQ ID NO: 700925 - RNA, 19 nt, Artificial Sequence
  Description of Artificial Sequence: Synthetic oligonucleotide
  Antisense strand to SEQ ID NO: 700924
uccaacacucacuuucauc

SEQ ID NO: 700926 - RNA, 19 nt, Artificial Sequence
  Description of Artificial Sequence: Synthetic oligonucleotide
  Sense strand starting at position 2093 of SEQ ID NO: 586216
uuggaacaaucugugauac

SEQ ID NO: 700927 - RNA, 19 nt, Artificial Sequence
  Description of Artificial Sequence: Synthetic oligonucleotide
  Antisense strand to SEQ ID NO: 700926
guaucacagauuguuccaa

SEQ ID NO: 700928 - RNA, 19 nt, Artificial Sequence
  Description of Artificial Sequence: Synthetic oligonucleotide
  Sense strand starting at position 2094 of SEQ ID NO: 586216
uggaacaaucugugauacu

SEQ ID NO: 700929 - RNA, 19 nt, Artificial Sequence
  Description of Artificial Sequence: Synthetic oligonucleotide
  Antisense strand to SEQ ID NO: 700928
aguaucacagauuguucca

SEQ ID NO: 700930 - RNA, 19 nt, Artificial Sequence
  Description of Artificial Sequence: Synthetic oligonucleotide
  Sense strand starting at position 2138 of SEQ ID NO: 586216
ggcugaaaucugcauacau

SEQ ID NO: 700931 - RNA, 19 nt, Artificial Sequence
  Description of Artificial Sequence: Synthetic oligonucleotide
  Antisense strand to SEQ ID NO: 700930
auguaugcagauuucagcc

SEQ ID NO: 700932 - RNA, 19 nt, Artificial Sequence
  Description of Artificial Sequence: Synthetic oligonucleotide
  Sense strand starting at position 2388 of SEQ ID NO: 586216
ggaaauuaacaucggcaca

SEQ ID NO: 700933 - RNA, 19 nt, Artificial Sequence
  Description of Artificial Sequence: Synthetic oligonucleotide
  Antisense strand to SEQ ID NO: 700932
ugugccgauguuaauuucc

SEQ ID NO: 700934 - RNA, 19 nt, Artificial Sequence
  Description of Artificial Sequence: Synthetic oligonucleotide
  Sense strand starting at position 2600 of SEQ ID NO: 586216
aucgguuccacaggagaau

SEQ ID NO: 700935 - RNA, 19 nt, Artificial Sequence
  Description of Artificial Sequence: Synthetic oligonucleotide
  Antisense strand to SEQ ID NO: 700934
auucuccuguggaaccgau

SEQ ID NO: 700936 - RNA, 19 nt, Artificial Sequence
  Description of Artificial Sequence: Synthetic oligonucleotide
  Sense strand starting at position 2611 of SEQ ID NO: 586216
aggagaauaucccucaguu

SEQ ID NO: 700937 - RNA, 19 nt, Artificial Sequence
  Description of Artificial Sequence: Synthetic oligonucleotide
  Antisense strand to SEQ ID NO: 700936
aacugagggauauucuccu

SEQ ID NO: 700938 - RNA, 19 nt, Artificial Sequence
  Description of Artificial Sequence: Synthetic oligonucleotide
  Sense strand starting at position 2733 of SEQ ID NO: 586216
ucaugagagccacaucuua

SEQ ID NO: 700939 - RNA, 19 nt, Artificial Sequence
  Description of Artificial Sequence: Synthetic oligonucleotide
  Antisense strand to SEQ ID NO: 700938
uaagauguggcucucauga

SEQ ID NO: 700940 - RNA, 19 nt, Artificial Sequence
  Description of Artificial Sequence: Synthetic oligonucleotide
  Sense strand starting at position 2756 of SEQ ID NO: 586216
uggugacauugaucuuggu

SEQ ID NO: 700941 - RNA, 19 nt, Artificial Sequence
  Description of Artificial Sequence: Synthetic oligonucleotide
  Antisense strand to SEQ ID NO: 700940
accaagaucaaugucacca

SEQ ID NO: 700942 - RNA, 19 nt, Artificial Sequence
  Description of Artificial Sequence: Synthetic oligonucleotide
  Sense strand starting at position 2760 of SEQ ID NO: 586216
gacauugaucuuggucacu

SEQ ID NO: 700943 - RNA, 19 nt, Artificial Sequence
  Description of Artificial Sequence: Synthetic oligonucleotide
  Antisense strand to SEQ ID NO: 700942
agugaccaagaucaauguc

SEQ ID NO: 700944 - RNA, 19 nt, Artificial Sequence
  Description of Artificial Sequence: Synthetic oligonucleotide
  Sense strand starting at position 2762 of SEQ ID NO: 586216
cauugaucuuggucacuug

SEQ ID NO: 700945 - RNA, 19 nt, Artificial Sequence
  Description of Artificial Sequence: Synthetic oligonucleotide
  Antisense strand to SEQ ID NO: 700944
caagugaccaagaucaaug

SEQ ID NO: 700946 - RNA, 19 nt, Artificial Sequence
  Description of Artificial Sequence: Synthetic oligonucleotide
  Sense strand starting at position 2765 of SEQ ID NO: 586216
ugaucuuggucacuugauu

SEQ ID NO: 700947 - RNA, 19 nt, Artificial Sequence
  Description of Artificial Sequence: Synthetic oligonucleotide
  Antisense strand to SEQ ID NO: 700946
aaucaagugaccaagauca

SEQ ID NO: 700948 - RNA, 19 nt, Artificial Sequence
  Description of Artificial Sequence: Synthetic oligonucleotide
  Sense strand starting at position 2798 of SEQ ID NO: 586216
uggguuucucacugucaag

SEQ ID NO: 700949 - RNA, 19 nt, Artificial Sequence
  Description of Artificial Sequence: Synthetic oligonucleotide
  Antisense strand to SEQ ID NO: 700948
cuugacagugagaaaccca

SEQ ID NO: 700950 - RNA, 19 nt, Artificial Sequence
  Description of Artificial Sequence: Synthetic oligonucleotide
  Sense strand starting at position 2808 of SEQ ID NO: 586216
acugucaaguuauuaucuu

SEQ ID NO: 700951 - RNA, 19 nt, Artificial Sequence
  Description of Artificial Sequence: Synthetic oligonucleotide
  Antisense strand to SEQ ID NO: 700950
aagauaauaacuugacagu

SEQ ID NO: 700952 - RNA, 19 nt, Artificial Sequence
  Description of Artificial Sequence: Synthetic oligonucleotide
  Sense strand starting at position 2830 of SEQ ID NO: 586216
cuuugcaguggauaaguau

SEQ ID NO: 700953 - RNA, 19 nt, Artificial Sequence
  Description of Artificial Sequence: Synthetic oligonucleotide
  Antisense strand to SEQ ID NO: 700952
auacuuauccacugcaaag

SEQ ID NO: 700954 - RNA, 19 nt, Artificial Sequence
  Description of Artificial Sequence: Synthetic oligonucleotide
  Sense strand starting at position 2857 of SEQ ID NO: 586216
acgcuuugagacuaggcau

SEQ ID NO: 700955 - RNA, 19 nt, Artificial Sequence
  Description of Artificial Sequence: Synthetic oligonucleotide
  Antisense strand to SEQ ID NO: 700954
augccuagucucaaagcgu

SEQ ID NO: 700956 - RNA, 19 nt, Artificial Sequence
  Description of Artificial Sequence: Synthetic oligonucleotide
  Sense strand starting at position 2987 of SEQ ID NO: 586216
uggcguuccacugugcaga

SEQ ID NO: 700957 - RNA, 19 nt, Artificial Sequence
  Description of Artificial Sequence: Synthetic oligonucleotide
  Antisense strand to SEQ ID NO: 700956
ucugcacaguggaacgcca

SEQ ID NO: 700958 - RNA, 19 nt, Artificial Sequence
  Description of Artificial Sequence: Synthetic oligonucleotide
  Sense strand starting at position 3060 of SEQ ID NO: 586216
caguguggauguuuaauua

SEQ ID NO: 700959 - RNA, 19 nt, Artificial Sequence
  Description of Artificial Sequence: Synthetic oligonucleotide
  Antisense strand to SEQ ID NO: 700958
uaauuaaacauccacacug

SEQ ID NO: 700960 - RNA, 19 nt, Artificial Sequence
  Description of Artificial Sequence: Synthetic oligonucleotide
  Sense strand starting at position 3337 of SEQ ID NO: 586216
gaccaagaucuauguugua

SEQ ID NO: 700961 - RNA, 19 nt, Artificial Sequence
  Description of Artificial Sequence: Synthetic oligonucleotide
  Antisense strand to SEQ ID NO: 700960
uacaacauagaucuugguc

SEQ ID NO: 700962 - RNA, 19 nt, Artificial Sequence
  Description of Artificial Sequence: Synthetic oligonucleotide
  Sense strand starting at position 3352 of SEQ ID NO: 586216
uguagauggguccauuguu

SEQ ID NO: 700963 - RNA, 19 nt, Artificial Sequence
  Description of Artificial Sequence: Synthetic oligonucleotide
  Antisense strand to SEQ ID NO: 700962
aacaauggacccaucuaca

SEQ ID NO: 700964 - RNA, 19 nt, Artificial Sequence
  Description of Artificial Sequence: Synthetic oligonucleotide
  Sense strand starting at position 3360 of SEQ ID NO: 586216
gguccauuguuauuggaau

SEQ ID NO: 700965 - RNA, 19 nt, Artificial Sequence
  Description of Artificial Sequence: Synthetic oligonucleotide
  Antisense strand to SEQ ID NO: 700964
auuccaauaacaauggacc

SEQ ID NO: 700966 - RNA, 19 nt, Artificial Sequence
  Description of Artificial Sequence: Synthetic oligonucleotide
  Sense strand starting at position 3366 of SEQ ID NO: 586216
uuguuauuggaaugguauu

SEQ ID NO: 700967 - RNA, 19 nt, Artificial Sequence
  Description of Artificial Sequence: Synthetic oligonucleotide
  Antisense strand to SEQ ID NO: 700966
aauaccauuccaauaacaa

SEQ ID NO: 700968 - RNA, 19 nt, Artificial Sequence
  Description of Artificial Sequence: Synthetic oligonucleotide
  Sense strand starting at position 3401 of SEQ ID NO: 586216
aacagagggcuagguauau

SEQ ID NO: 700969 - RNA, 19 nt, Artificial Sequence
  Description of Artificial Sequence: Synthetic oligonucleotide
  Antisense strand to SEQ ID NO: 700968
auauaccuagcccucuguu

SEQ ID NO: 700970 - RNA, 19 nt, Artificial Sequence
  Description of Artificial Sequence: Synthetic oligonucleotide
  Sense strand starting at position 3697 of SEQ ID NO: 586216
gccaaaguucgugcauacu

SEQ ID NO: 700971 - RNA, 19 nt, Artificial Sequence
  Description of Artificial Sequence: Synthetic oligonucleotide
  Antisense strand to SEQ ID NO: 700970
aguaugcacgaacuuuggc

SEQ ID NO: 700972 - RNA, 19 nt, Artificial Sequence
  Description of Artificial Sequence: Synthetic oligonucleotide
  Sense strand starting at position 3700 of SEQ ID NO: 586216
aaaguucgugcauacucaa

SEQ ID NO: 700973 - RNA, 19 nt, Artificial Sequence
  Description of Artificial Sequence: Synthetic oligonucleotide
  Antisense strand to SEQ ID NO: 700972
uugaguaugcacgaacuuu

SEQ ID NO: 700974 - RNA, 19 nt, Artificial Sequence
  Description of Artificial Sequence: Synthetic oligonucleotide
  Sense strand starting at position 3723 of SEQ ID NO: 586216
cgaagucagaccugggcaa

SEQ ID NO: 700975 - RNA, 19 nt, Artificial Sequence
  Description of Artificial Sequence: Synthetic oligonucleotide
  Antisense strand to SEQ ID NO: 700974
uugcccaggucugacuucg

SEQ ID NO: 700976 - RNA, 19 nt, Artificial Sequence
  Description of Artificial Sequence: Synthetic oligonucleotide
  Sense strand starting at position 3871 of SEQ ID NO: 586216
ggucaacuguaucuauaua

SEQ ID NO: 700977 - RNA, 19 nt, Artificial Sequence
  Description of Artificial Sequence: Synthetic oligonucleotide
  Antisense strand to SEQ ID NO: 700976
uauauagauacaguugacc

SEQ ID NO: 700978 - RNA, 19 nt, Artificial Sequence
  Description of Artificial Sequence: Synthetic oligonucleotide
  Sense strand starting at position 3910 of SEQ ID NO: 586216
cucauacugccaugagaaa

SEQ ID NO: 700979 - RNA, 19 nt, Artificial Sequence
  Description of Artificial Sequence: Synthetic oligonucleotide
  Antisense strand to SEQ ID NO: 700978
uuucucauggcaguaugag

SEQ ID NO: 700980 - RNA, 19 nt, Artificial Sequence
  Description of Artificial Sequence: Synthetic oligonucleotide
  Sense strand starting at position 180 of SEQ ID NO: 586217
ggguuccuaaucuggaguu

SEQ ID NO: 700981 - RNA, 19 nt, Artificial Sequence
  Description of Artificial Sequence: Synthetic oligonucleotide
  Antisense strand to SEQ ID NO: 700980
aacuccagauuaggaaccc

SEQ ID NO: 700982 - RNA, 19 nt, Artificial Sequence
  Description of Artificial Sequence: Synthetic oligonucleotide
  Sense strand starting at position 379 of SEQ ID NO: 586217
cucagauucuggcugugga

SEQ ID NO: 700983 - RNA, 19 nt, Artificial Sequence
  Description of Artificial Sequence: Synthetic oligonucleotide
  Antisense strand to SEQ ID NO: 700982
uccacagccagaaucugag

SEQ ID NO: 700984 - RNA, 19 nt, Artificial Sequence
  Description of Artificial Sequence: Synthetic oligonucleotide
  Sense strand starting at position 380 of SEQ ID NO: 586217
ucagauucuggcuguggaa

SEQ ID NO: 700985 - RNA, 19 nt, Artificial Sequence
  Description of Artificial Sequence: Synthetic oligonucleotide
  Antisense strand to SEQ ID NO: 700984
uuccacagccagaaucuga

SEQ ID NO: 700986 - RNA, 19 nt, Artificial Sequence
  Description of Artificial Sequence: Synthetic oligonucleotide
  Sense strand starting at position 476 of SEQ ID NO: 586217
gcaggaggcagcuaucuua

SEQ ID NO: 700987 - RNA, 19 nt, Artificial Sequence
  Description of Artificial Sequence: Synthetic oligonucleotide
  Antisense strand to SEQ ID NO: 700986
uaagauagcugccuccugc

SEQ ID NO: 700988 - RNA, 19 nt, Artificial Sequence
  Description of Artificial Sequence: Synthetic oligonucleotide
  Sense strand starting at position 565 of SEQ ID NO: 586217
ggaacuuguagauguagca

SEQ ID NO: 700989 - RNA, 19 nt, Artificial Sequence
  Description of Artificial Sequence: Synthetic oligonucleotide
  Antisense strand to SEQ ID NO: 700988
ugcuacaucuacaaguucc

SEQ ID NO: 700990 - RNA, 19 nt, Artificial Sequence
  Description of Artificial Sequence: Synthetic oligonucleotide
  Sense strand starting at position 586 of SEQ ID NO: 586217
cgugguggccuugacuauu

SEQ ID NO: 700991 - RNA, 19 nt, Artificial Sequence
  Description of Artificial Sequence: Synthetic oligonucleotide
  Antisense strand to SEQ ID NO: 700990
aauagucaaggccaccacg

SEQ ID NO: 700992 - RNA, 19 nt, Artificial Sequence
  Description of Artificial Sequence: Synthetic oligonucleotide
  Sense strand starting at position 794 of SEQ ID NO: 586217
ccauguuuccacuguuacu

SEQ ID NO: 700993 - RNA, 19 nt, Artificial Sequence
  Description of Artificial Sequence: Synthetic oligonucleotide
  Antisense strand to SEQ ID NO: 700992
aguaacaguggaaacaugg

SEQ ID NO: 700994 - RNA, 19 nt, Artificial Sequence
  Description of Artificial Sequence: Synthetic oligonucleotide
  Sense strand starting at position 947 of SEQ ID NO: 586217
uguguauaugcaugcaaug

SEQ ID NO: 700995 - RNA, 19 nt, Artificial Sequence
  Description of Artificial Sequence: Synthetic oligonucleotide
  Antisense strand to SEQ ID NO: 700994
cauugcaugcauauacaca

SEQ ID NO: 700996 - RNA, 19 nt, Artificial Sequence
  Description of Artificial Sequence: Synthetic oligonucleotide
  Sense strand starting at position 992 of SEQ ID NO: 586217
gggugugaauaugcuucua

SEQ ID NO: 700997 - RNA, 19 nt, Artificial Sequence
  Description of Artificial Sequence: Synthetic oligonucleotide
  Antisense strand to SEQ ID NO: 700996
uagaagcauauucacaccc

SEQ ID NO: 700998 - RNA, 19 nt, Artificial Sequence
  Description of Artificial Sequence: Synthetic oligonucleotide
  Sense strand starting at position 994 of SEQ ID NO: 586217
gugugaauaugcuucuaug

SEQ ID NO: 700999 - RNA, 19 nt, Artificial Sequence
  Description of Artificial Sequence: Synthetic oligonucleotide
  Antisense strand to SEQ ID NO: 700998
cauagaagcauauucacac

SEQ ID NO: 701000 - RNA, 19 nt, Artificial Sequence
  Description of Artificial Sequence: Synthetic oligonucleotide
  Sense strand starting at position 1043 of SEQ ID NO: 586217
gggugccuaugugugauau

SEQ ID NO: 701001 - RNA, 19 nt, Artificial Sequence
  Description of Artificial Sequence: Synthetic oligonucleotide
  Antisense strand to SEQ ID NO: 701000
auaucacacauaggcaccc

SEQ ID NO: 701002 - RNA, 19 nt, Artificial Sequence
  Description of Artificial Sequence: Synthetic oligonucleotide
  Sense strand starting at position 1049 of SEQ ID NO: 586217
cuaugugugauauguaugu

SEQ ID NO: 701003 - RNA, 19 nt, Artificial Sequence
  Description of Artificial Sequence: Synthetic oligonucleotide
  Antisense strand to SEQ ID NO: 701002
acauacauaucacacauag

SEQ ID NO: 701004 - RNA, 19 nt, Artificial Sequence
  Description of Artificial Sequence: Synthetic oligonucleotide
  Sense strand starting at position 1297 of SEQ ID NO: 586217
uuguguaugauaugugcau

SEQ ID NO: 701005 - RNA, 19 nt, Artificial Sequence
  Description of Artificial Sequence: Synthetic oligonucleotide
  Antisense strand to SEQ ID NO: 701004
augcacauaucauacacaa

SEQ ID NO: 701006 - RNA, 19 nt, Artificial Sequence
  Description of Artificial Sequence: Synthetic oligonucleotide
  Sense strand starting at position 2587 of SEQ ID NO: 586217
cauaccuacgauuggguaa

SEQ ID NO: 701007 - RNA, 19 nt, Artificial Sequence
  Description of Artificial Sequence: Synthetic oligonucleotide
  Antisense strand to SEQ ID NO: 701006
uuacccaaucguagguaug

SEQ ID NO: 701008 - RNA, 19 nt, Artificial Sequence
  Description of Artificial Sequence: Synthetic oligonucleotide
  Sense strand starting at position 2588 of SEQ ID NO: 586217
auaccuacgauuggguaau

SEQ ID NO: 701009 - RNA, 19 nt, Artificial Sequence
  Description of Artificial Sequence: Synthetic oligonucleotide
  Antisense strand to SEQ ID NO: 701008
auuacccaaucguagguau

SEQ ID NO: 701010 - RNA, 19 nt, Artificial Sequence
  Description of Artificial Sequence: Synthetic oligonucleotide
  Sense strand starting at position 2922 of SEQ ID NO: 586217
ucaggaacuuaugugauua

SEQ ID NO: 701011 - RNA, 19 nt, Artificial Sequence
  Description of Artificial Sequence: Synthetic oligonucleotide
  Antisense strand to SEQ ID NO: 701010
uaaucacauaaguuccuga

SEQ ID NO: 701012 - RNA, 19 nt, Artificial Sequence
  Description of Artificial Sequence: Synthetic oligonucleotide
  Sense strand starting at position 2924 of SEQ ID NO: 586217
aggaacuuaugugauuaag

SEQ ID NO: 701013 - RNA, 19 nt, Artificial Sequence
  Description of Artificial Sequence: Synthetic oligonucleotide
  Antisense strand to SEQ ID NO: 701012
cuuaaucacauaaguuccu

SEQ ID NO: 701014 - RNA, 19 nt, Artificial Sequence
  Description of Artificial Sequence: Synthetic oligonucleotide
  Sense strand starting at position 2926 of SEQ ID NO: 586217
gaacuuaugugauuaagca

SEQ ID NO: 701015 - RNA, 19 nt, Artificial Sequence
  Description of Artificial Sequence: Synthetic oligonucleotide
  Antisense strand to SEQ ID NO: 701014
ugcuuaaucacauaaguuc

SEQ ID NO: 701016 - RNA, 19 nt, Artificial Sequence
  Description of Artificial Sequence: Synthetic oligonucleotide
  Sense strand starting at position 2927 of SEQ ID NO: 586217
aacuuaugugauuaagcag

SEQ ID NO: 701017 - RNA, 19 nt, Artificial Sequence
  Description of Artificial Sequence: Synthetic oligonucleotide
  Antisense strand to SEQ ID NO: 701016
cugcuuaaucacauaaguu

SEQ ID NO: 701018 - RNA, 19 nt, Artificial Sequence
  Description of Artificial Sequence: Synthetic oligonucleotide
  Sense strand starting at position 2982 of SEQ ID NO: 586217
agaugcuucccagagcuuu

SEQ ID NO: 701019 - RNA, 19 nt, Artificial Sequence
  Description of Artificial Sequence: Synthetic oligonucleotide
  Antisense strand to SEQ ID NO: 701018
aaagcucugggaagcaucu

SEQ ID NO: 701020 - RNA, 19 nt, Artificial Sequence
  Description of Artificial Sequence: Synthetic oligonucleotide
  Sense strand starting at position 3011 of SEQ ID NO: 586217
gcauucugacaucaacgua

SEQ ID NO: 701021 - RNA, 19 nt, Artificial Sequence
  Description of Artificial Sequence: Synthetic oligonucleotide
  Antisense strand to SEQ ID NO: 701020
uacguugaugucagaaugc

SEQ ID NO: 701022 - RNA, 19 nt, Artificial Sequence
  Description of Artificial Sequence: Synthetic oligonucleotide
  Sense strand starting at position 3024 of SEQ ID NO: 586217
aacguaggguuucuaucaa

SEQ ID NO: 701023 - RNA, 19 nt, Artificial Sequence
  Description of Artificial Sequence: Synthetic oligonucleotide
  Antisense strand to SEQ ID NO: 701022
uugauagaaacccuacguu

SEQ ID NO: 701024 - RNA, 19 nt, Artificial Sequence
  Description of Artificial Sequence: Synthetic oligonucleotide
  Sense strand starting at position 3083 of SEQ ID NO: 586217
cccucuaaaggcugauaga

SEQ ID NO: 701025 - RNA, 19 nt, Artificial Sequence
  Description of Artificial Sequence: Synthetic oligonucleotide
  Antisense strand to SEQ ID NO: 701024
ucuaucagccuuuagaggg

SEQ ID NO: 701026 - RNA, 19 nt, Artificial Sequence
  Description of Artificial Sequence: Synthetic oligonucleotide
  Sense strand starting at position 3120 of SEQ ID NO: 586217
gguagcucuucccuuuaca

SEQ ID NO: 701027 - RNA, 19 nt, Artificial Sequence
  Description of Artificial Sequence: Synthetic oligonucleotide
  Antisense strand to SEQ ID NO: 701026
uguaaagggaagagcuacc

SEQ ID NO: 701028 - RNA, 19 nt, Artificial Sequence
  Description of Artificial Sequence: Synthetic oligonucleotide
  Sense strand starting at position 3230 of SEQ ID NO: 586217
gugacuuugugaccucaua

SEQ ID NO: 701029 - RNA, 19 nt, Artificial Sequence
  Description of Artificial Sequence: Synthetic oligonucleotide
  Antisense strand to SEQ ID NO: 701028
uaugaggucacaaagucac

SEQ ID NO: 701030 - RNA, 19 nt, Artificial Sequence
  Description of Artificial Sequence: Synthetic oligonucleotide
  Sense strand starting at position 3268 of SEQ ID NO: 586217
gggccucuuuccucgugaa

SEQ ID NO: 701031 - RNA, 19 nt, Artificial Sequence
  Description of Artificial Sequence: Synthetic oligonucleotide
  Antisense strand to SEQ ID NO: 701030
uucacgaggaaagaggccc

SEQ ID NO: 701032 - RNA, 19 nt, Artificial Sequence
  Description of Artificial Sequence: Synthetic oligonucleotide
  Sense strand starting at position 3272 of SEQ ID NO: 586217
cucuuuccucgugaaggaa

SEQ ID NO: 701033 - RNA, 19 nt, Artificial Sequence
  Description of Artificial Sequence: Synthetic oligonucleotide
  Antisense strand to SEQ ID NO: 701032
uuccuucacgaggaaagag

SEQ ID NO: 701034 - RNA, 19 nt, Artificial Sequence
  Description of Artificial Sequence: Synthetic oligonucleotide
  Sense strand starting at position 3289 of SEQ ID NO: 586217
aaaugaugaaagugagugu

SEQ ID NO: 701035 - RNA, 19 nt, Artificial Sequence
  Description of Artificial Sequence: Synthetic oligonucleotide
  Antisense strand to SEQ ID NO: 701034
acacucacuuucaucauuu

SEQ ID NO: 701036 - RNA, 19 nt, Artificial Sequence
  Description of Artificial Sequence: Synthetic oligonucleotide
  Sense strand starting at position 3293 of SEQ ID NO: 586217
gaugaaagugaguguugga

SEQ ID NO: 701037 - RNA, 19 nt, Artificial Sequence
  Description of Artificial Sequence: Synthetic oligonucleotide
  Antisense strand to SEQ ID NO: 701036
uccaacacucacuuucauc

SEQ ID NO: 701038 - RNA, 19 nt, Artificial Sequence
  Description of Artificial Sequence: Synthetic oligonucleotide
  Sense strand starting at position 3307 of SEQ ID NO: 586217
uuggaacaaucugugauac

SEQ ID NO: 701039 - RNA, 19 nt, Artificial Sequence
  Description of Artificial Sequence: Synthetic oligonucleotide
  Antisense strand to SEQ ID NO: 701038
guaucacagauuguuccaa

SEQ ID NO: 701040 - RNA, 19 nt, Artificial Sequence
  Description of Artificial Sequence: Synthetic oligonucleotide
  Sense strand starting at position 3308 of SEQ ID NO: 586217
uggaacaaucugugauacu

SEQ ID NO: 701041 - RNA, 19 nt, Artificial Sequence
  Description of Artificial Sequence: Synthetic oligonucleotide
  Antisense strand to SEQ ID NO: 701040
aguaucacagauuguucca

SEQ ID NO: 701042 - RNA, 19 nt, Artificial Sequence
  Description of Artificial Sequence: Synthetic oligonucleotide
  Sense strand starting at position 3352 of SEQ ID NO: 586217
ggcugaaaucugcauacau

SEQ ID NO: 701043 - RNA, 19 nt, Artificial Sequence
  Description of Artificial Sequence: Synthetic oligonucleotide
  Antisense strand to SEQ ID NO: 701042
auguaugcagauuucagcc

SEQ ID NO: 701044 - RNA, 19 nt, Artificial Sequence
  Description of Artificial Sequence: Synthetic oligonucleotide
  Sense strand starting at position 3602 of SEQ ID NO: 586217
ggaaauuaacaucggcaca

SEQ ID NO: 701045 - RNA, 19 nt, Artificial Sequence
  Description of Artificial Sequence: Synthetic oligonucleotide
  Antisense strand to SEQ ID NO: 701044
ugugccgauguuaauuucc

SEQ ID NO: 701046 - RNA, 19 nt, Artificial Sequence
  Description of Artificial Sequence: Synthetic oligonucleotide
  Sense strand starting at position 3814 of SEQ ID NO: 586217
aucgguuccacaggagaau

SEQ ID NO: 701047 - RNA, 19 nt, Artificial Sequence
  Description of Artificial Sequence: Synthetic oligonucleotide
  Antisense strand to SEQ ID NO: 701046
auucuccuguggaaccgau

SEQ ID NO: 701048 - RNA, 19 nt, Artificial Sequence
  Description of Artificial Sequence: Synthetic oligonucleotide
  Sense strand starting at position 3825 of SEQ ID NO: 586217
aggagaauaucccucaguu

SEQ ID NO: 701049 - RNA, 19 nt, Artificial Sequence
  Description of Artificial Sequence: Synthetic oligonucleotide
  Antisense strand to SEQ ID NO: 701048
aacugagggauauucuccu

SEQ ID NO: 701050 - RNA, 19 nt, Artificial Sequence
  Description of Artificial Sequence: Synthetic oligonucleotide
  Sense strand starting at position 3947 of SEQ ID NO: 586217
ucaugagagccacaucuua

SEQ ID NO: 701051 - RNA, 19 nt, Artificial Sequence
  Description of Artificial Sequence: Synthetic oligonucleotide
  Antisense strand to SEQ ID NO: 701050
uaagauguggcucucauga

SEQ ID NO: 701052 - RNA, 19 nt, Artificial Sequence
  Description of Artificial Sequence: Synthetic oligonucleotide
  Sense strand starting at position 3970 of SEQ ID NO: 586217
uggugacauugaucuuggu

SEQ ID NO: 701053 - RNA, 19 nt, Artificial Sequence
  Description of Artificial Sequence: Synthetic oligonucleotide
  Antisense strand to SEQ ID NO: 701052
accaagaucaaugucacca

SEQ ID NO: 701054 - RNA, 19 nt, Artificial Sequence
  Description of Artificial Sequence: Synthetic oligonucleotide
  Sense strand starting at position 3974 of SEQ ID NO: 586217
gacauugaucuuggucacu

SEQ ID NO: 701055 - RNA, 19 nt, Artificial Sequence
  Description of Artificial Sequence: Synthetic oligonucleotide
  Antisense strand to SEQ ID NO: 701054
agugaccaagaucaauguc

SEQ ID NO: 701056 - RNA, 19 nt, Artificial Sequence
  Description of Artificial Sequence: Synthetic oligonucleotide
  Sense strand starting at position 3976 of SEQ ID NO: 586217
cauugaucuuggucacuug

SEQ ID NO: 701057 - RNA, 19 nt, Artificial Sequence
  Description of Artificial Sequence: Synthetic oligonucleotide
  Antisense strand to SEQ ID NO: 701056
caagugaccaagaucaaug

SEQ ID NO: 701058 - RNA, 19 nt, Artificial Sequence
  Description of Artificial Sequence: Synthetic oligonucleotide
  Sense strand starting at position 3979 of SEQ ID NO: 586217
ugaucuuggucacuugauu

SEQ ID NO: 701059 - RNA, 19 nt, Artificial Sequence
  Description of Artificial Sequence: Synthetic oligonucleotide
  Antisense strand to SEQ ID NO: 701058
aaucaagugaccaagauca

SEQ ID NO: 701060 - RNA, 19 nt, Artificial Sequence
  Description of Artificial Sequence: Synthetic oligonucleotide
  Sense strand starting at position 9 of SEQ ID NO: 586218
uuguuacauccugaaagua

SEQ ID NO: 701061 - RNA, 19 nt, Artificial Sequence
  Description of Artificial Sequence: Synthetic oligonucleotide
  Antisense strand to SEQ ID NO: 701060
uacuuucaggauguaacaa

SEQ ID NO: 701062 - RNA, 19 nt, Artificial Sequence
  Description of Artificial Sequence: Synthetic oligonucleotide
  Sense strand starting at position 44 of SEQ ID NO: 586218
aauuguuuccaggauguac

SEQ ID NO: 701063 - RNA, 19 nt, Artificial Sequence
  Description of Artificial Sequence: Synthetic oligonucleotide
  Antisense strand to SEQ ID NO: 701062
guacauccuggaaacaauu

SEQ ID NO: 701064 - RNA, 19 nt, Artificial Sequence
  Description of Artificial Sequence: Synthetic oligonucleotide
  Sense strand starting at position 46 of SEQ ID NO: 586218
uuguuuccaggauguacaa

SEQ ID NO: 701065 - RNA, 19 nt, Artificial Sequence
  Description of Artificial Sequence: Synthetic oligonucleotide
  Antisense strand to SEQ ID NO: 701064
uuguacauccuggaaacaa

SEQ ID NO: 701066 - RNA, 19 nt, Artificial Sequence
  Description of Artificial Sequence: Synthetic oligonucleotide
  Sense strand starting at position 58 of SEQ ID NO: 586218
uguacaaagucauugaaag

SEQ ID NO: 701067 - RNA, 19 nt, Artificial Sequence
  Description of Artificial Sequence: Synthetic oligonucleotide
  Antisense strand to SEQ ID NO: 701066
cuuucaaugacuuuguaca

SEQ ID NO: 701068 - RNA, 19 nt, Artificial Sequence
  Description of Artificial Sequence: Synthetic oligonucleotide
  Sense strand starting at position 59 of SEQ ID NO: 586218
guacaaagucauugaaagc

SEQ ID NO: 701069 - RNA, 19 nt, Artificial Sequence
  Description of Artificial Sequence: Synthetic oligonucleotide
  Antisense strand to SEQ ID NO: 701068
gcuuucaaugacuuuguac

SEQ ID NO: 701070 - RNA, 19 nt, Artificial Sequence
  Description of Artificial Sequence: Synthetic oligonucleotide
  Sense strand starting at position 543 of SEQ ID NO: 586218
cagacagucugagucuaaa

SEQ ID NO: 701071 - RNA, 19 nt, Artificial Sequence
  Description of Artificial Sequence: Synthetic oligonucleotide
  Antisense strand to SEQ ID NO: 701070
uuuagacucagacugucug

SEQ ID NO: 701072 - RNA, 19 nt, Artificial Sequence
  Description of Artificial Sequence: Synthetic oligonucleotide
  Sense strand starting at position 615 of SEQ ID NO: 586218
acagaugagcucuauacuu

SEQ ID NO: 701073 - RNA, 19 nt, Artificial Sequence
  Description of Artificial Sequence: Synthetic oligonucleotide
  Antisense strand to SEQ ID NO: 701072
aaguauagagcucaucugu

SEQ ID NO: 701074 - RNA, 19 nt, Artificial Sequence
  Description of Artificial Sequence: Synthetic oligonucleotide
  Sense strand starting at position 636 of SEQ ID NO: 586218
uucugacuuggugguacaa

SEQ ID NO: 701075 - RNA, 19 nt, Artificial Sequence
  Description of Artificial Sequence: Synthetic oligonucleotide
  Antisense strand to SEQ ID NO: 701074
uuguaccaccaagucagaa

SEQ ID NO: 701076 - RNA, 19 nt, Artificial Sequence
  Description of Artificial Sequence: Synthetic oligonucleotide
  Sense strand starting at position 648 of SEQ ID NO: 586218
gguacaaagucuguuaaca

SEQ ID NO: 701077 - RNA, 19 nt, Artificial Sequence
  Description of Artificial Sequence: Synthetic oligonucleotide
  Antisense strand to SEQ ID NO: 701076
uguuaacagacuuuguacc

SEQ ID NO: 701078 - RNA, 19 nt, Artificial Sequence
  Description of Artificial Sequence: Synthetic oligonucleotide
  Sense strand starting at position 738 of SEQ ID NO: 586218
guauucuuccuauagcauu

SEQ ID NO: 701079 - RNA, 19 nt, Artificial Sequence
  Description of Artificial Sequence: Synthetic oligonucleotide
  Antisense strand to SEQ ID NO: 701078
aaugcuauaggaagaauac

SEQ ID NO: 701080 - RNA, 19 nt, Artificial Sequence
  Description of Artificial Sequence: Synthetic oligonucleotide
  Sense strand starting at position 919 of SEQ ID NO: 586218
ugcagaugucaguaagagg

SEQ ID NO: 701081 - RNA, 19 nt, Artificial Sequence
  Description of Artificial Sequence: Synthetic oligonucleotide
  Antisense strand to SEQ ID NO: 701080
ccucuuacugacaucugca

SEQ ID NO: 701082 - RNA, 19 nt, Artificial Sequence
  Description of Artificial Sequence: Synthetic oligonucleotide
  Sense strand starting at position 1220 of SEQ ID NO: 586218
uuguguuaaucacuaauga

SEQ ID NO: 701083 - RNA, 19 nt, Artificial Sequence
  Description of Artificial Sequence: Synthetic oligonucleotide
  Antisense strand to SEQ ID NO: 701082
ucauuagugauuaacacaa

SEQ ID NO: 701084 - RNA, 19 nt, Artificial Sequence
  Description of Artificial Sequence: Synthetic oligonucleotide
  Sense strand starting at position 1221 of SEQ ID NO: 586218
uguguuaaucacuaaugaa

SEQ ID NO: 701085 - RNA, 19 nt, Artificial Sequence
  Description of Artificial Sequence: Synthetic oligonucleotide
  Antisense strand to SEQ ID NO: 701084
uucauuagugauuaacaca

SEQ ID NO: 701086 - RNA, 19 nt, Artificial Sequence
  Description of Artificial Sequence: Synthetic oligonucleotide
  Sense strand starting at position 2087 of SEQ ID NO: 586218
acuaaagaucuguguuaaa

SEQ ID NO: 701087 - RNA, 19 nt, Artificial Sequence
  Description of Artificial Sequence: Synthetic oligonucleotide
  Antisense strand to SEQ ID NO: 701086
uuuaacacagaucuuuagu

SEQ ID NO: 701088 - RNA, 19 nt, Artificial Sequence
  Description of Artificial Sequence: Synthetic oligonucleotide
  Sense strand starting at position 2118 of SEQ ID NO: 586218
ugacacagcuuucuaaaug

SEQ ID NO: 701089 - RNA, 19 nt, Artificial Sequence
  Description of Artificial Sequence: Synthetic oligonucleotide
  Antisense strand to SEQ ID NO: 701088
cauuuagaaagcuguguca

SEQ ID NO: 701090 - RNA, 19 nt, Artificial Sequence
  Description of Artificial Sequence: Synthetic oligonucleotide
  Sense strand starting at position 2127 of SEQ ID NO: 586218
uuucuaaauguuggcagau

SEQ ID NO: 701091 - RNA, 19 nt, Artificial Sequence
  Description of Artificial Sequence: Synthetic oligonucleotide
  Antisense strand to SEQ ID NO: 701090
aucugccaacauuuagaaa

SEQ ID NO: 701092 - RNA, 19 nt, Artificial Sequence
  Description of Artificial Sequence: Synthetic oligonucleotide
  Sense strand starting at position 2128 of SEQ ID NO: 586218
uucuaaauguuggcagaua

SEQ ID NO: 701093 - RNA, 19 nt, Artificial Sequence
  Description of Artificial Sequence: Synthetic oligonucleotide
  Antisense strand to SEQ ID NO: 701092
uaucugccaacauuuagaa

SEQ ID NO: 701094 - RNA, 19 nt, Artificial Sequence
  Description of Artificial Sequence: Synthetic oligonucleotide
  Sense strand starting at position 2247 of SEQ ID NO: 586218
ccuggcaacggcuagaauu

SEQ ID NO: 701095 - RNA, 19 nt, Artificial Sequence
  Description of Artificial Sequence: Synthetic oligonucleotide
  Antisense strand to SEQ ID NO: 701094
aauucuagccguugccagg

SEQ ID NO: 701096 - RNA, 19 nt, Artificial Sequence
  Description of Artificial Sequence: Synthetic oligonucleotide
  Sense strand starting at position 2255 of SEQ ID NO: 586218
cggcuagaauucuuaacac

SEQ ID NO: 701097 - RNA, 19 nt, Artificial Sequence
  Description of Artificial Sequence: Synthetic oligonucleotide
  Antisense strand to SEQ ID NO: 701096
guguuaagaauucuagccg

SEQ ID NO: 701098 - RNA, 19 nt, Artificial Sequence
  Description of Artificial Sequence: Synthetic oligonucleotide
  Sense strand starting at position 2489 of SEQ ID NO: 586218
guauauaugugacuacaau

SEQ ID NO: 701099 - RNA, 19 nt, Artificial Sequence
  Description of Artificial Sequence: Synthetic oligonucleotide
  Antisense strand to SEQ ID NO: 701098
auuguagucacauauauac

SEQ ID NO: 701100 - RNA, 19 nt, Artificial Sequence
  Description of Artificial Sequence: Synthetic oligonucleotide
  Sense strand starting at position 2586 of SEQ ID NO: 586218
guuaaauugguacaucuaa

SEQ ID NO: 701101 - RNA, 19 nt, Artificial Sequence
  Description of Artificial Sequence: Synthetic oligonucleotide
  Antisense strand to SEQ ID NO: 701100
uuagauguaccaauuuaac

SEQ ID NO: 701102 - RNA, 19 nt, Artificial Sequence
  Description of Artificial Sequence: Synthetic oligonucleotide
  Sense strand starting at position 3048 of SEQ ID NO: 586218
auggguaucaguuaacugu

SEQ ID NO: 701103 - RNA, 19 nt, Artificial Sequence
  Description of Artificial Sequence: Synthetic oligonucleotide
  Antisense strand to SEQ ID NO: 701102
acaguuaacugauacccau

SEQ ID NO: 701104 - RNA, 19 nt, Artificial Sequence
  Description of Artificial Sequence: Synthetic oligonucleotide
  Sense strand starting at position 3055 of SEQ ID NO: 586218
ucaguuaacugucuacaca

SEQ ID NO: 701105 - RNA, 19 nt, Artificial Sequence
  Description of Artificial Sequence: Synthetic oligonucleotide
  Antisense strand to SEQ ID NO: 701104
uguguagacaguuaacuga

SEQ ID NO: 701106 - RNA, 19 nt, Artificial Sequence
  Description of Artificial Sequence: Synthetic oligonucleotide
  Sense strand starting at position 3058 of SEQ ID NO: 586218
guuaacugucuacacacaa

SEQ ID NO: 701107 - RNA, 19 nt, Artificial Sequence
  Description of Artificial Sequence: Synthetic oligonucleotide
  Antisense strand to SEQ ID NO: 701106
uuguguguagacaguuaac

SEQ ID NO: 701108 - RNA, 19 nt, Artificial Sequence
  Description of Artificial Sequence: Synthetic oligonucleotide
  Sense strand starting at position 3231 of SEQ ID NO: 586218
gcaagauucuagcuuugaa

SEQ ID NO: 701109 - RNA, 19 nt, Artificial Sequence
  Description of Artificial Sequence: Synthetic oligonucleotide
  Antisense strand to SEQ ID NO: 701108
uucaaagcuagaaucuugc

SEQ ID NO: 701110 - RNA, 19 nt, Artificial Sequence
  Description of Artificial Sequence: Synthetic oligonucleotide
  Sense strand starting at position 3234 of SEQ ID NO: 586218
agauucuagcuuugaagag

SEQ ID NO: 701111 - RNA, 19 nt, Artificial Sequence
  Description of Artificial Sequence: Synthetic oligonucleotide
  Antisense strand to SEQ ID NO: 701110
cucuucaaagcuagaaucu

SEQ ID NO: 701112 - RNA, 19 nt, Artificial Sequence
  Description of Artificial Sequence: Synthetic oligonucleotide
  Sense strand starting at position 3257 of SEQ ID NO: 586218
gcacauaaucguuaaucag

SEQ ID NO: 701113 - RNA, 19 nt, Artificial Sequence
  Description of Artificial Sequence: Synthetic oligonucleotide
  Antisense strand to SEQ ID NO: 701112
cugauuaacgauuaugugc

SEQ ID NO: 701114 - RNA, 19 nt, Artificial Sequence
  Description of Artificial Sequence: Synthetic oligonucleotide
  Sense strand starting at position 3277 of SEQ ID NO: 586218
ccaacugucaagggugaua

SEQ ID NO: 701115 - RNA, 19 nt, Artificial Sequence
  Description of Artificial Sequence: Synthetic oligonucleotide
  Antisense strand to SEQ ID NO: 701114
uaucacccuugacaguugg

SEQ ID NO: 701116 - RNA, 19 nt, Artificial Sequence
  Description of Artificial Sequence: Synthetic oligonucleotide
  Sense strand starting at position 3288 of SEQ ID NO: 586218
gggugauauguuugguaca

SEQ ID NO: 701117 - RNA, 19 nt, Artificial Sequence
  Description of Artificial Sequence: Synthetic oligonucleotide
  Antisense strand to SEQ ID NO: 701116
uguaccaaacauaucaccc

SEQ ID NO: 701118 - RNA, 19 nt, Artificial Sequence
  Description of Artificial Sequence: Synthetic oligonucleotide
  Sense strand starting at position 3290 of SEQ ID NO: 586218
gugauauguuugguacaau

SEQ ID NO: 701119 - RNA, 19 nt, Artificial Sequence
  Description of Artificial Sequence: Synthetic oligonucleotide
  Antisense strand to SEQ ID NO: 701118
auuguaccaaacauaucac

SEQ ID NO: 701120 - RNA, 19 nt, Artificial Sequence
  Description of Artificial Sequence: Synthetic oligonucleotide
  Sense strand starting at position 3302 of SEQ ID NO: 586218
guacaaucagaaugccuau

SEQ ID NO: 701121 - RNA, 19 nt, Artificial Sequence
  Description of Artificial Sequence: Synthetic oligonucleotide
  Antisense strand to SEQ ID NO: 701120
auaggcauucugauuguac

SEQ ID NO: 701122 - RNA, 19 nt, Artificial Sequence
  Description of Artificial Sequence: Synthetic oligonucleotide
  Sense strand starting at position 3369 of SEQ ID NO: 586218
agauuaaauuaggugguua

SEQ ID NO: 701123 - RNA, 19 nt, Artificial Sequence
  Description of Artificial Sequence: Synthetic oligonucleotide
  Antisense strand to SEQ ID NO: 701122
uaaccaccuaauuuaaucu

SEQ ID NO: 701124 - RNA, 19 nt, Artificial Sequence
  Description of Artificial Sequence: Synthetic oligonucleotide
  Sense strand starting at position 3370 of SEQ ID NO: 586218
gauuaaauuaggugguuag

SEQ ID NO: 701125 - RNA, 19 nt, Artificial Sequence
  Description of Artificial Sequence: Synthetic oligonucleotide
  Antisense strand to SEQ ID NO: 701124
cuaaccaccuaauuuaauc

SEQ ID NO: 701126 - RNA, 19 nt, Artificial Sequence
  Description of Artificial Sequence: Synthetic oligonucleotide
  Sense strand starting at position 3381 of SEQ ID NO: 586218
gugguuaggcugucaguuu

SEQ ID NO: 701127 - RNA, 19 nt, Artificial Sequence
  Description of Artificial Sequence: Synthetic oligonucleotide
  Antisense strand to SEQ ID NO: 701126
aaacugacagccuaaccac

SEQ ID NO: 701128 - RNA, 19 nt, Artificial Sequence
  Description of Artificial Sequence: Synthetic oligonucleotide
  Sense strand starting at position 3478 of SEQ ID NO: 586218
agugauaacucacuuguaa

SEQ ID NO: 701129 - RNA, 19 nt, Artificial Sequence
  Description of Artificial Sequence: Synthetic oligonucleotide
  Antisense strand to SEQ ID NO: 701128
uuacaagugaguuaucacu

SEQ ID NO: 701130 - RNA, 19 nt, Artificial Sequence
  Description of Artificial Sequence: Synthetic oligonucleotide
  Sense strand starting at position 3659 of SEQ ID NO: 586218
agcuauaaauggccucuua

SEQ ID NO: 701131 - RNA, 19 nt, Artificial Sequence
  Description of Artificial Sequence: Synthetic oligonucleotide
  Antisense strand to SEQ ID NO: 701130
uaagaggccauuuauagcu

SEQ ID NO: 701132 - RNA, 19 nt, Artificial Sequence
  Description of Artificial Sequence: Synthetic oligonucleotide
  Sense strand starting at position 3675 of SEQ ID NO: 586218
uuaggcuguguaugggaaa

SEQ ID NO: 701133 - RNA, 19 nt, Artificial Sequence
  Description of Artificial Sequence: Synthetic oligonucleotide
  Antisense strand to SEQ ID NO: 701132
uuucccauacacagccuaa

SEQ ID NO: 701134 - RNA, 19 nt, Artificial Sequence
  Description of Artificial Sequence: Synthetic oligonucleotide
  Sense strand starting at position 3781 of SEQ ID NO: 586218
ucauuuauauaugaggaac

SEQ ID NO: 701135 - RNA, 19 nt, Artificial Sequence
  Description of Artificial Sequence: Synthetic oligonucleotide
  Antisense strand to SEQ ID NO: 701134
guuccucauauauaaauga

SEQ ID NO: 701136 - RNA, 19 nt, Artificial Sequence
  Description of Artificial Sequence: Synthetic oligonucleotide
  Sense strand starting at position 3822 of SEQ ID NO: 586218
aaagaagcgucuuugaauu

SEQ ID NO: 701137 - RNA, 19 nt, Artificial Sequence
  Description of Artificial Sequence: Synthetic oligonucleotide
  Antisense strand to SEQ ID NO: 701136
aauucaaagacgcuucuuu

SEQ ID NO: 701138 - RNA, 19 nt, Artificial Sequence
  Description of Artificial Sequence: Synthetic oligonucleotide
  Sense strand starting at position 3835 of SEQ ID NO: 586218
ugaauuccagcuuguauag

SEQ ID NO: 701139 - RNA, 19 nt, Artificial Sequence
  Description of Artificial Sequence: Synthetic oligonucleotide
  Antisense strand to SEQ ID NO: 701138
cuauacaagcuggaauuca

SEQ ID NO: 701140 - RNA, 19 nt, Artificial Sequence
  Description of Artificial Sequence: Synthetic oligonucleotide
  Sense strand starting at position 192 of SEQ ID NO: 586219
aguuaacuguaauugaauc

SEQ ID NO: 701141 - RNA, 19 nt, Artificial Sequence
  Description of Artificial Sequence: Synthetic oligonucleotide
  Antisense strand to SEQ ID NO: 701140
gauucaauuacaguuaacu

SEQ ID NO: 701142 - RNA, 19 nt, Artificial Sequence
  Description of Artificial Sequence: Synthetic oligonucleotide
  Sense strand starting at position 205 of SEQ ID NO: 586219
ugaaucauguccucucagu

SEQ ID NO: 701143 - RNA, 19 nt, Artificial Sequence
  Description of Artificial Sequence: Synthetic oligonucleotide
  Antisense strand to SEQ ID NO: 701142
acugagaggacaugauuca

SEQ ID NO: 701144 - RNA, 19 nt, Artificial Sequence
  Description of Artificial Sequence: Synthetic oligonucleotide
  Sense strand starting at position 213 of SEQ ID NO: 586219
guccucucaguuuaucaau

SEQ ID NO: 701145 - RNA, 19 nt, Artificial Sequence
  Description of Artificial Sequence: Synthetic oligonucleotide
  Antisense strand to SEQ ID NO: 701144
auugauaaacugagaggac

SEQ ID NO: 701146 - RNA, 19 nt, Artificial Sequence
  Description of Artificial Sequence: Synthetic oligonucleotide
  Sense strand starting at position 219 of SEQ ID NO: 586219
ucaguuuaucaaugagcaa

SEQ ID NO: 701147 - RNA, 19 nt, Artificial Sequence
  Description of Artificial Sequence: Synthetic oligonucleotide
  Antisense strand to SEQ ID NO: 701146
uugcucauugauaaacuga

SEQ ID NO: 701148 - RNA, 19 nt, Artificial Sequence
  Description of Artificial Sequence: Synthetic oligonucleotide
  Sense strand starting at position 267 of SEQ ID NO: 586219
uucuauacucuggagcuaa

SEQ ID NO: 701149 - RNA, 19 nt, Artificial Sequence
  Description of Artificial Sequence: Synthetic oligonucleotide
  Antisense strand to SEQ ID NO: 701148
uuagcuccagaguauagaa

SEQ ID NO: 701150 - RNA, 19 nt, Artificial Sequence
  Description of Artificial Sequence: Synthetic oligonucleotide
  Sense strand starting at position 404 of SEQ ID NO: 586219
gucuuagcugggcagauua

SEQ ID NO: 701151 - RNA, 19 nt, Artificial Sequence
  Description of Artificial Sequence: Synthetic oligonucleotide
  Antisense strand to SEQ ID NO: 701150
uaaucugcccagcuaagac

SEQ ID NO: 701152 - RNA, 19 nt, Artificial Sequence
  Description of Artificial Sequence: Synthetic oligonucleotide
  Sense strand starting at position 1140 of SEQ ID NO: 586219
gguugaaagcaucaaguuu

SEQ ID NO: 701153 - RNA, 19 nt, Artificial Sequence
  Description of Artificial Sequence: Synthetic oligonucleotide
  Antisense strand to SEQ ID NO: 701152
aaacuugaugcuuucaacc

SEQ ID NO: 701154 - RNA, 19 nt, Artificial Sequence
  Description of Artificial Sequence: Synthetic oligonucleotide
  Sense strand starting at position 1163 of SEQ ID NO: 586219
ugcacaauagcuuggcaga

SEQ ID NO: 701155 - RNA, 19 nt, Artificial Sequence
  Description of Artificial Sequence: Synthetic oligonucleotide
  Antisense strand to SEQ ID NO: 701154
ucugccaagcuauugugca

SEQ ID NO: 701156 - RNA, 19 nt, Artificial Sequence
  Description of Artificial Sequence: Synthetic oligonucleotide
  Sense strand starting at position 1164 of SEQ ID NO: 586219
gcacaauagcuuggcagaa

SEQ ID NO: 701157 - RNA, 19 nt, Artificial Sequence
  Description of Artificial Sequence: Synthetic oligonucleotide
  Antisense strand to SEQ ID NO: 701156
uucugccaagcuauugugc

SEQ ID NO: 701158 - RNA, 19 nt, Artificial Sequence
  Description of Artificial Sequence: Synthetic oligonucleotide
  Sense strand starting at position 1293 of SEQ ID NO: 586219
agagaaauagucugcuuac

SEQ ID NO: 701159 - RNA, 19 nt, Artificial Sequence
  Description of Artificial Sequence: Synthetic oligonucleotide
  Antisense strand to SEQ ID NO: 701158
guaagcagacuauuucucu

SEQ ID NO: 701160 - RNA, 19 nt, Artificial Sequence
  Description of Artificial Sequence: Synthetic oligonucleotide
  Sense strand starting at position 1294 of SEQ ID NO: 586219
gagaaauagucugcuuacu

SEQ ID NO: 701161 - RNA, 19 nt, Artificial Sequence
  Description of Artificial Sequence: Synthetic oligonucleotide
  Antisense strand to SEQ ID NO: 701160
aguaagcagacuauuucuc

SEQ ID NO: 701162 - RNA, 19 nt, Artificial Sequence
  Description of Artificial Sequence: Synthetic oligonucleotide
  Sense strand starting at position 1372 of SEQ ID NO: 586219
cucugaaaggucugaugag

SEQ ID NO: 701163 - RNA, 19 nt, Artificial Sequence
  Description of Artificial Sequence: Synthetic oligonucleotide
  Antisense strand to SEQ ID NO: 701162
cucaucagaccuuucagag

SEQ ID NO: 701164 - RNA, 19 nt, Artificial Sequence
  Description of Artificial Sequence: Synthetic oligonucleotide
  Sense strand starting at position 2273 of SEQ ID NO: 586219
agggcucucuaaccuagaa

SEQ ID NO: 701165 - RNA, 19 nt, Artificial Sequence
  Description of Artificial Sequence: Synthetic oligonucleotide
  Antisense strand to SEQ ID NO: 701164
uucuagguuagagagcccu

SEQ ID NO: 701166 - RNA, 19 nt, Artificial Sequence
  Description of Artificial Sequence: Synthetic oligonucleotide
  Sense strand starting at position 2395 of SEQ ID NO: 586219
ggaggcuuguagcucucaa

SEQ ID NO: 701167 - RNA, 19 nt, Artificial Sequence
  Description of Artificial Sequence: Synthetic oligonucleotide
  Antisense strand to SEQ ID NO: 701166
uugagagcuacaagccucc

SEQ ID NO: 701168 - RNA, 19 nt, Artificial Sequence
  Description of Artificial Sequence: Synthetic oligonucleotide
  Sense strand starting at position 2430 of SEQ ID NO: 586219
uguguaaucagcguugugu

SEQ ID NO: 701169 - RNA, 19 nt, Artificial Sequence
  Description of Artificial Sequence: Synthetic oligonucleotide
  Antisense strand to SEQ ID NO: 701168
acacaacgcugauuacaca

SEQ ID NO: 701170 - RNA, 19 nt, Artificial Sequence
  Description of Artificial Sequence: Synthetic oligonucleotide
  Sense strand starting at position 2431 of SEQ ID NO: 586219
guguaaucagcguugugua

SEQ ID NO: 701171 - RNA, 19 nt, Artificial Sequence
  Description of Artificial Sequence: Synthetic oligonucleotide
  Antisense strand to SEQ ID NO: 701170
uacacaacgcugauuacac

SEQ ID NO: 701172 - RNA, 19 nt, Artificial Sequence
  Description of Artificial Sequence: Synthetic oligonucleotide
  Sense strand starting at position 2433 of SEQ ID NO: 586219
guaaucagcguuguguaau

SEQ ID NO: 701173 - RNA, 19 nt, Artificial Sequence
  Description of Artificial Sequence: Synthetic oligonucleotide
  Antisense strand to SEQ ID NO: 701172
auuacacaacgcugauuac

SEQ ID NO: 701174 - RNA, 19 nt, Artificial Sequence
  Description of Artificial Sequence: Synthetic oligonucleotide
  Sense strand starting at position 2445 of SEQ ID NO: 586219
guguaaucagguguugugu

SEQ ID NO: 701175 - RNA, 19 nt, Artificial Sequence
  Description of Artificial Sequence: Synthetic oligonucleotide
  Antisense strand to SEQ ID NO: 701174
acacaacaccugauuacac

SEQ ID NO: 701176 - RNA, 19 nt, Artificial Sequence
  Description of Artificial Sequence: Synthetic oligonucleotide
  Sense strand starting at position 2451 of SEQ ID NO: 586219
ucagguguuguguaaucaa

SEQ ID NO: 701177 - RNA, 19 nt, Artificial Sequence
  Description of Artificial Sequence: Synthetic oligonucleotide
  Antisense strand to SEQ ID NO: 701176
uugauuacacaacaccuga

SEQ ID NO: 701178 - RNA, 19 nt, Artificial Sequence
  Description of Artificial Sequence: Synthetic oligonucleotide
  Sense strand starting at position 2458 of SEQ ID NO: 586219
uuguguaaucaagguagag

SEQ ID NO: 701179 - RNA, 19 nt, Artificial Sequence
  Description of Artificial Sequence: Synthetic oligonucleotide
  Antisense strand to SEQ ID NO: 701178
cucuaccuugauuacacaa

SEQ ID NO: 701180 - RNA, 19 nt, Artificial Sequence
  Description of Artificial Sequence: Synthetic oligonucleotide
  Sense strand starting at position 2515 of SEQ ID NO: 586219
acgccagucacugagauga

SEQ ID NO: 701181 - RNA, 19 nt, Artificial Sequence
  Description of Artificial Sequence: Synthetic oligonucleotide
  Antisense strand to SEQ ID NO: 701180
ucaucucagugacuggcgu

SEQ ID NO: 701182 - RNA, 19 nt, Artificial Sequence
  Description of Artificial Sequence: Synthetic oligonucleotide
  Sense strand starting at position 2696 of SEQ ID NO: 586219
aaaguuuggcaauggguua

SEQ ID NO: 701183 - RNA, 19 nt, Artificial Sequence
  Description of Artificial Sequence: Synthetic oligonucleotide
  Antisense strand to SEQ ID NO: 701182
uaacccauugccaaacuuu

SEQ ID NO: 701184 - RNA, 19 nt, Artificial Sequence
  Description of Artificial Sequence: Synthetic oligonucleotide
  Sense strand starting at position 2768 of SEQ ID NO: 586219
augacauccuuagcaugau

SEQ ID NO: 701185 - RNA, 19 nt, Artificial Sequence
  Description of Artificial Sequence: Synthetic oligonucleotide
  Antisense strand to SEQ ID NO: 701184
aucaugcuaaggaugucau

SEQ ID NO: 701186 - RNA, 19 nt, Artificial Sequence
  Description of Artificial Sequence: Synthetic oligonucleotide
  Sense strand starting at position 2774 of SEQ ID NO: 586219
uccuuagcaugaucugagu

SEQ ID NO: 701187 - RNA, 19 nt, Artificial Sequence
  Description of Artificial Sequence: Synthetic oligonucleotide
  Antisense strand to SEQ ID NO: 701186
acucagaucaugcuaagga

SEQ ID NO: 701188 - RNA, 19 nt, Artificial Sequence
  Description of Artificial Sequence: Synthetic oligonucleotide
  Sense strand starting at position 2780 of SEQ ID NO: 586219
gcaugaucugaguguggag

SEQ ID NO: 701189 - RNA, 19 nt, Artificial Sequence
  Description of Artificial Sequence: Synthetic oligonucleotide
  Antisense strand to SEQ ID NO: 701188
cuccacacucagaucaugc

SEQ ID NO: 701190 - RNA, 19 nt, Artificial Sequence
  Description of Artificial Sequence: Synthetic oligonucleotide
  Sense strand starting at position 2856 of SEQ ID NO: 586219
agagguuggugguuuaaac

SEQ ID NO: 701191 - RNA, 19 nt, Artificial Sequence
  Description of Artificial Sequence: Synthetic oligonucleotide
  Antisense strand to SEQ ID NO: 701190
guuuaaaccaccaaccucu

SEQ ID NO: 701192 - RNA, 19 nt, Artificial Sequence
  Description of Artificial Sequence: Synthetic oligonucleotide
  Sense strand starting at position 2863 of SEQ ID NO: 586219
ggugguuuaaacuguacaa

SEQ ID NO: 701193 - RNA, 19 nt, Artificial Sequence
  Description of Artificial Sequence: Synthetic oligonucleotide
  Antisense strand to SEQ ID NO: 701192
uuguacaguuuaaaccacc

SEQ ID NO: 701194 - RNA, 19 nt, Artificial Sequence
  Description of Artificial Sequence: Synthetic oligonucleotide
  Sense strand starting at position 2931 of SEQ ID NO: 586219
agaugucagagauguuauc

SEQ ID NO: 701195 - RNA, 19 nt, Artificial Sequence
  Description of Artificial Sequence: Synthetic oligonucleotide
  Antisense strand to SEQ ID NO: 701194
gauaacaucucugacaucu

SEQ ID NO: 701196 - RNA, 19 nt, Artificial Sequence
  Description of Artificial Sequence: Synthetic oligonucleotide
  Sense strand starting at position 2937 of SEQ ID NO: 586219
cagagauguuauccauaag

SEQ ID NO: 701197 - RNA, 19 nt, Artificial Sequence
  Description of Artificial Sequence: Synthetic oligonucleotide
  Antisense strand to SEQ ID NO: 701196
cuuauggauaacaucucug

SEQ ID NO: 701198 - RNA, 19 nt, Artificial Sequence
  Description of Artificial Sequence: Synthetic oligonucleotide
  Sense strand starting at position 3108 of SEQ ID NO: 586219
cuggguuucuugccuggga

SEQ ID NO: 701199 - RNA, 19 nt, Artificial Sequence
  Description of Artificial Sequence: Synthetic oligonucleotide
  Antisense strand to SEQ ID NO: 701198
ucccaggcaagaaacccag

SEQ ID NO: 701200 - RNA, 19 nt, Artificial Sequence
  Description of Artificial Sequence: Synthetic oligonucleotide
  Sense strand starting at position 3109 of SEQ ID NO: 586219
uggguuucuugccugggau

SEQ ID NO: 701201 - RNA, 19 nt, Artificial Sequence
  Description of Artificial Sequence: Synthetic oligonucleotide
  Antisense strand to SEQ ID NO: 701200
aucccaggcaagaaaccca

SEQ ID NO: 701202 - RNA, 19 nt, Artificial Sequence
  Description of Artificial Sequence: Synthetic oligonucleotide
  Sense strand starting at position 3110 of SEQ ID NO: 586219
ggguuucuugccugggaug

SEQ ID NO: 701203 - RNA, 19 nt, Artificial Sequence
  Description of Artificial Sequence: Synthetic oligonucleotide
  Antisense strand to SEQ ID NO: 701202
caucccaggcaagaaaccc

SEQ ID NO: 701204 - RNA, 19 nt, Artificial Sequence
  Description of Artificial Sequence: Synthetic oligonucleotide
  Sense strand starting at position 3132 of SEQ ID NO: 586219
auagguccuguugacaauu

SEQ ID NO: 701205 - RNA, 19 nt, Artificial Sequence
  Description of Artificial Sequence: Synthetic oligonucleotide
  Antisense strand to SEQ ID NO: 701204
aauugucaacaggaccuau

SEQ ID NO: 701206 - RNA, 19 nt, Artificial Sequence
  Description of Artificial Sequence: Synthetic oligonucleotide
  Sense strand starting at position 3141 of SEQ ID NO: 586219
guugacaauuuguaucauc

SEQ ID NO: 701207 - RNA, 19 nt, Artificial Sequence
  Description of Artificial Sequence: Synthetic oligonucleotide
  Antisense strand to SEQ ID NO: 701206
gaugauacaaauugucaac

SEQ ID NO: 701208 - RNA, 19 nt, Artificial Sequence
  Description of Artificial Sequence: Synthetic oligonucleotide
  Sense strand starting at position 3149 of SEQ ID NO: 586219
uuuguaucaucgccacaaa

SEQ ID NO: 701209 - RNA, 19 nt, Artificial Sequence
  Description of Artificial Sequence: Synthetic oligonucleotide
  Antisense strand to SEQ ID NO: 701208
uuuguggcgaugauacaaa

SEQ ID NO: 701210 - RNA, 19 nt, Artificial Sequence
  Description of Artificial Sequence: Synthetic oligonucleotide
  Sense strand starting at position 3150 of SEQ ID NO: 586219
uuguaucaucgccacaaag

SEQ ID NO: 701211 - RNA, 19 nt, Artificial Sequence
  Description of Artificial Sequence: Synthetic oligonucleotide
  Antisense strand to SEQ ID NO: 701210
cuuuguggcgaugauacaa

SEQ ID NO: 701212 - RNA, 19 nt, Artificial Sequence
  Description of Artificial Sequence: Synthetic oligonucleotide
  Sense strand starting at position 3152 of SEQ ID NO: 586219
guaucaucgccacaaagag

SEQ ID NO: 701213 - RNA, 19 nt, Artificial Sequence
  Description of Artificial Sequence: Synthetic oligonucleotide
  Antisense strand to SEQ ID NO: 701212
cucuuuguggcgaugauac

SEQ ID NO: 701214 - RNA, 19 nt, Artificial Sequence
  Description of Artificial Sequence: Synthetic oligonucleotide
  Sense strand starting at position 3181 of SEQ ID NO: 586219
cagucuuccggucugugua

SEQ ID NO: 701215 - RNA, 19 nt, Artificial Sequence
  Description of Artificial Sequence: Synthetic oligonucleotide
  Antisense strand to SEQ ID NO: 701214
uacacagaccggaagacug

SEQ ID NO: 701216 - RNA, 19 nt, Artificial Sequence
  Description of Artificial Sequence: Synthetic oligonucleotide
  Sense strand starting at position 3478 of SEQ ID NO: 586219
uguccuaaauuauuaggua

SEQ ID NO: 701217 - RNA, 19 nt, Artificial Sequence
  Description of Artificial Sequence: Synthetic oligonucleotide
  Antisense strand to SEQ ID NO: 701216
uaccuaauaauuuaggaca

SEQ ID NO: 701218 - RNA, 19 nt, Artificial Sequence
  Description of Artificial Sequence: Synthetic oligonucleotide
  Sense strand starting at position 3482 of SEQ ID NO: 586219
cuaaauuauuagguacgaa

SEQ ID NO: 701219 - RNA, 19 nt, Artificial Sequence
  Description of Artificial Sequence: Synthetic oligonucleotide
  Antisense strand to SEQ ID NO: 701218
uucguaccuaauaauuuag

SEQ ID NO: 701220 - RNA, 19 nt, Artificial Sequence
  Description of Artificial Sequence: Synthetic oligonucleotide
  Sense strand starting at position 68 of SEQ ID NO: 586220
ugucauugagcacacugaa

SEQ ID NO: 701221 - RNA, 19 nt, Artificial Sequence
  Description of Artificial Sequence: Synthetic oligonucleotide
  Antisense strand to SEQ ID NO: 701220
uucagugugcucaaugaca

SEQ ID NO: 701222 - RNA, 19 nt, Artificial Sequence
  Description of Artificial Sequence: Synthetic oligonucleotide
  Sense strand starting at position 555 of SEQ ID NO: 586220
agaguauucccaugaugua

SEQ ID NO: 701223 - RNA, 19 nt, Artificial Sequence
  Description of Artificial Sequence: Synthetic oligonucleotide
  Antisense strand to SEQ ID NO: 701222
uacaucaugggaauacucu

SEQ ID NO: 701224 - RNA, 19 nt, Artificial Sequence
  Description of Artificial Sequence: Synthetic oligonucleotide
  Sense strand starting at position 556 of SEQ ID NO: 586220
gaguauucccaugauguac

SEQ ID NO: 701225 - RNA, 19 nt, Artificial Sequence
  Description of Artificial Sequence: Synthetic oligonucleotide
  Antisense strand to SEQ ID NO: 701224
guacaucaugggaauacuc

SEQ ID NO: 701226 - RNA, 19 nt, Artificial Sequence
  Description of Artificial Sequence: Synthetic oligonucleotide
  Sense strand starting at position 654 of SEQ ID NO: 586220
uuaucuccaguuuaaagua

SEQ ID NO: 701227 - RNA, 19 nt, Artificial Sequence
  Description of Artificial Sequence: Synthetic oligonucleotide
  Antisense strand to SEQ ID NO: 701226
uacuuuaaacuggagauaa

SEQ ID NO: 701228 - RNA, 19 nt, Artificial Sequence
  Description of Artificial Sequence: Synthetic oligonucleotide
  Sense strand starting at position 662 of SEQ ID NO: 586220
aguuuaaaguaagcuuaga

SEQ ID NO: 701229 - RNA, 19 nt, Artificial Sequence
  Description of Artificial Sequence: Synthetic oligonucleotide
  Antisense strand to SEQ ID NO: 701228
ucuaagcuuacuuuaaacu

SEQ ID NO: 701230 - RNA, 19 nt, Artificial Sequence
  Description of Artificial Sequence: Synthetic oligonucleotide
  Sense strand starting at position 697 of SEQ ID NO: 586220
ggaucauuaguagagccau

SEQ ID NO: 701231 - RNA, 19 nt, Artificial Sequence
  Description of Artificial Sequence: Synthetic oligonucleotide
  Antisense strand to SEQ ID NO: 701230
auggcucuacuaaugaucc

SEQ ID NO: 701232 - RNA, 19 nt, Artificial Sequence
  Description of Artificial Sequence: Synthetic oligonucleotide
  Sense strand starting at position 703 of SEQ ID NO: 586220
uuaguagagccauaaauca

SEQ ID NO: 701233 - RNA, 19 nt, Artificial Sequence
  Description of Artificial Sequence: Synthetic oligonucleotide
  Antisense strand to SEQ ID NO: 701232
ugauuuauggcucuacuaa

SEQ ID NO: 701234 - RNA, 19 nt, Artificial Sequence
  Description of Artificial Sequence: Synthetic oligonucleotide
  Sense strand starting at position 745 of SEQ ID NO: 586220
ucuauaccacuguaguaua

SEQ ID NO: 701235 - RNA, 19 nt, Artificial Sequence
  Description of Artificial Sequence: Synthetic oligonucleotide
  Antisense strand to SEQ ID NO: 701234
uauacuacagugguauaga

SEQ ID NO: 701236 - RNA, 19 nt, Artificial Sequence
  Description of Artificial Sequence: Synthetic oligonucleotide
  Sense strand starting at position 839 of SEQ ID NO: 586220
guucauuugcuguggauag

SEQ ID NO: 701237 - RNA, 19 nt, Artificial Sequence
  Description of Artificial Sequence: Synthetic oligonucleotide
  Antisense strand to SEQ ID NO: 701236
cuauccacagcaaaugaac

SEQ ID NO: 701238 - RNA, 19 nt, Artificial Sequence
  Description of Artificial Sequence: Synthetic oligonucleotide
  Sense strand starting at position 867 of SEQ ID NO: 586220
gucugaaacacugguaaag

SEQ ID NO: 701239 - RNA, 19 nt, Artificial Sequence
  Description of Artificial Sequence: Synthetic oligonucleotide
  Antisense strand to SEQ ID NO: 701238
cuuuaccaguguuucagac

SEQ ID NO: 701240 - RNA, 19 nt, Artificial Sequence
  Description of Artificial Sequence: Synthetic oligonucleotide
  Sense strand starting at position 895 of SEQ ID NO: 586220
ccuggugugagucagacua

SEQ ID NO: 701241 - RNA, 19 nt, Artificial Sequence
  Description of Artificial Sequence: Synthetic oligonucleotide
  Antisense strand to SEQ ID NO: 701240
uagucugacucacaccagg

SEQ ID NO: 701242 - RNA, 19 nt, Artificial Sequence
  Description of Artificial Sequence: Synthetic oligonucleotide
  Sense strand starting at position 903 of SEQ ID NO: 586220
gagucagacuagguuugau

SEQ ID NO: 701243 - RNA, 19 nt, Artificial Sequence
  Description of Artificial Sequence: Synthetic oligonucleotide
  Antisense strand to SEQ ID NO: 701242
aucaaaccuagucugacuc

SEQ ID NO: 701244 - RNA, 19 nt, Artificial Sequence
  Description of Artificial Sequence: Synthetic oligonucleotide
  Sense strand starting at position 1317 of SEQ ID NO: 586220
gccaaaugaauguggacaa

SEQ ID NO: 701245 - RNA, 19 nt, Artificial Sequence
  Description of Artificial Sequence: Synthetic oligonucleotide
  Antisense strand to SEQ ID NO: 701244
uuguccacauucauuuggc

SEQ ID NO: 701246 - RNA, 19 nt, Artificial Sequence
  Description of Artificial Sequence: Synthetic oligonucleotide
  Sense strand starting at position 1394 of SEQ ID NO: 586220
ugagaaauggcuuggaucu

SEQ ID NO: 701247 - RNA, 19 nt, Artificial Sequence
  Description of Artificial Sequence: Synthetic oligonucleotide
  Antisense strand to SEQ ID NO: 701246
agauccaagccauuucuca

SEQ ID NO: 701248 - RNA, 19 nt, Artificial Sequence
  Description of Artificial Sequence: Synthetic oligonucleotide
  Sense strand starting at position 1395 of SEQ ID NO: 586220
gagaaauggcuuggaucuc

SEQ ID NO: 701249 - RNA, 19 nt, Artificial Sequence
  Description of Artificial Sequence: Synthetic oligonucleotide
  Antisense strand to SEQ ID NO: 701248
gagauccaagccauuucuc

SEQ ID NO: 701250 - RNA, 19 nt, Artificial Sequence
  Description of Artificial Sequence: Synthetic oligonucleotide
  Sense strand starting at position 1476 of SEQ ID NO: 586220
cuuaaauaaugauuggcaa

SEQ ID NO: 701251 - RNA, 19 nt, Artificial Sequence
  Description of Artificial Sequence: Synthetic oligonucleotide
  Antisense strand to SEQ ID NO: 701250
uugccaaucauuauuuaag

SEQ ID NO: 701252 - RNA, 19 nt, Artificial Sequence
  Description of Artificial Sequence: Synthetic oligonucleotide
  Sense strand starting at position 1557 of SEQ ID NO: 586220
agaauacacuggucauuau

SEQ ID NO: 701253 - RNA, 19 nt, Artificial Sequence
  Description of Artificial Sequence: Synthetic oligonucleotide
  Antisense strand to SEQ ID NO: 701252
auaaugaccaguguauucu

SEQ ID NO: 701254 - RNA, 19 nt, Artificial Sequence
  Description of Artificial Sequence: Synthetic oligonucleotide
  Sense strand starting at position 1580 of SEQ ID NO: 586220
cuacuagaagcauaagcuu

SEQ ID NO: 701255 - RNA, 19 nt, Artificial Sequence
  Description of Artificial Sequence: Synthetic oligonucleotide
  Antisense strand to SEQ ID NO: 701254
aagcuuaugcuucuaguag

SEQ ID NO: 701256 - RNA, 19 nt, Artificial Sequence
  Description of Artificial Sequence: Synthetic oligonucleotide
  Sense strand starting at position 1656 of SEQ ID NO: 586220
ugccuauuuagugaguugu

SEQ ID NO: 701257 - RNA, 19 nt, Artificial Sequence
  Description of Artificial Sequence: Synthetic oligonucleotide
  Antisense strand to SEQ ID NO: 701256
acaacucacuaaauaggca

SEQ ID NO: 701258 - RNA, 19 nt, Artificial Sequence
  Description of Artificial Sequence: Synthetic oligonucleotide
  Sense strand starting at position 1658 of SEQ ID NO: 586220
ccuauuuagugaguuguua

SEQ ID NO: 701259 - RNA, 19 nt, Artificial Sequence
  Description of Artificial Sequence: Synthetic oligonucleotide
  Antisense strand to SEQ ID NO: 701258
uaacaacucacuaaauagg

SEQ ID NO: 701260 - RNA, 19 nt, Artificial Sequence
  Description of Artificial Sequence: Synthetic oligonucleotide
  Sense strand starting at position 1773 of SEQ ID NO: 586220
aucugagagcucuggaacu

SEQ ID NO: 701261 - RNA, 19 nt, Artificial Sequence
  Description of Artificial Sequence: Synthetic oligonucleotide
  Antisense strand to SEQ ID NO: 701260
aguuccagagcucucagau

SEQ ID NO: 701262 - RNA, 19 nt, Artificial Sequence
  Description of Artificial Sequence: Synthetic oligonucleotide
  Sense strand starting at position 1985 of SEQ ID NO: 586220
gcauaucgugaauugcgua

SEQ ID NO: 701263 - RNA, 19 nt, Artificial Sequence
  Description of Artificial Sequence: Synthetic oligonucleotide
  Antisense strand to SEQ ID NO: 701262
uacgcaauucacgauaugc

SEQ ID NO: 701264 - RNA, 19 nt, Artificial Sequence
  Description of Artificial Sequence: Synthetic oligonucleotide
  Sense strand starting at position 2038 of SEQ ID NO: 586220
aaucaaugucccuggaagu

SEQ ID NO: 701265 - RNA, 19 nt, Artificial Sequence
  Description of Artificial Sequence: Synthetic oligonucleotide
  Antisense strand to SEQ ID NO: 701264
acuuccagggacauugauu

SEQ ID NO: 701266 - RNA, 19 nt, Artificial Sequence
  Description of Artificial Sequence: Synthetic oligonucleotide
  Sense strand starting at position 2191 of SEQ ID NO: 586220
gccaauagauauucugaac

SEQ ID NO: 701267 - RNA, 19 nt, Artificial Sequence
  Description of Artificial Sequence: Synthetic oligonucleotide
  Antisense strand to SEQ ID NO: 701266
guucagaauaucuauuggc

SEQ ID NO: 701268 - RNA, 19 nt, Artificial Sequence
  Description of Artificial Sequence: Synthetic oligonucleotide
  Sense strand starting at position 2449 of SEQ ID NO: 586220
cauggaacccauggguaua

SEQ ID NO: 701269 - RNA, 19 nt, Artificial Sequence
  Description of Artificial Sequence: Synthetic oligonucleotide
  Antisense strand to SEQ ID NO: 701268
uauacccauggguuccaug

SEQ ID NO: 701270 - RNA, 19 nt, Artificial Sequence
  Description of Artificial Sequence: Synthetic oligonucleotide
  Sense strand starting at position 2522 of SEQ ID NO: 586220
aggaaaggguucccuuuaa

SEQ ID NO: 701271 - RNA, 19 nt, Artificial Sequence
  Description of Artificial Sequence: Synthetic oligonucleotide
  Antisense strand to SEQ ID NO: 701270
uuaaagggaacccuuuccu

SEQ ID NO: 701272 - RNA, 19 nt, Artificial Sequence
  Description of Artificial Sequence: Synthetic oligonucleotide
  Sense strand starting at position 2534 of SEQ ID NO: 586220
ccuuuaagggucugaugaa

SEQ ID NO: 701273 - RNA, 19 nt, Artificial Sequence
  Description of Artificial Sequence: Synthetic oligonucleotide
  Antisense strand to SEQ ID NO: 701272
uucaucagacccuuaaagg

SEQ ID NO: 701274 - RNA, 19 nt, Artificial Sequence
  Description of Artificial Sequence: Synthetic oligonucleotide
  Sense strand starting at position 2572 of SEQ ID NO: 586220
gaaauaugcgcauauggag

SEQ ID NO: 701275 - RNA, 19 nt, Artificial Sequence
  Description of Artificial Sequence: Synthetic oligonucleotide
  Antisense strand to SEQ ID NO: 701274
cuccauaugcgcauauuuc

SEQ ID NO: 701276 - RNA, 19 nt, Artificial Sequence
  Description of Artificial Sequence: Synthetic oligonucleotide
  Sense strand starting at position 2584 of SEQ ID NO: 586220
uauggagaauaucuugagu

SEQ ID NO: 701277 - RNA, 19 nt, Artificial Sequence
  Description of Artificial Sequence: Synthetic oligonucleotide
  Antisense strand to SEQ ID NO: 701276
acucaagauauucuccaua

SEQ ID NO: 701278 - RNA, 19 nt, Artificial Sequence
  Description of Artificial Sequence: Synthetic oligonucleotide
  Sense strand starting at position 2617 of SEQ ID NO: 586220
uuugaagacuuucugaagu

SEQ ID NO: 701279 - RNA, 19 nt, Artificial Sequence
  Description of Artificial Sequence: Synthetic oligonucleotide
  Antisense strand to SEQ ID NO: 701278
acuucagaaagucuucaaa

SEQ ID NO: 701280 - RNA, 19 nt, Artificial Sequence
  Description of Artificial Sequence: Synthetic oligonucleotide
  Sense strand starting at position 2685 of SEQ ID NO: 586220
caaguacaguuucuggaau

SEQ ID NO: 701281 - RNA, 19 nt, Artificial Sequence
  Description of Artificial Sequence: Synthetic oligonucleotide
  Antisense strand to SEQ ID NO: 701280
auuccagaaacuguacuug

SEQ ID NO: 701282 - RNA, 19 nt, Artificial Sequence
  Description of Artificial Sequence: Synthetic oligonucleotide
  Sense strand starting at position 2763 of SEQ ID NO: 586220
cuggaacucuugucuuaga

SEQ ID NO: 701283 - RNA, 19 nt, Artificial Sequence
  Description of Artificial Sequence: Synthetic oligonucleotide
  Antisense strand to SEQ ID NO: 701282
ucuaagacaagaguuccag

SEQ ID NO: 701284 - RNA, 19 nt, Artificial Sequence
  Description of Artificial Sequence: Synthetic oligonucleotide
  Sense strand starting at position 3013 of SEQ ID NO: 586220
guuacugaaguaugacaua

SEQ ID NO: 701285 - RNA, 19 nt, Artificial Sequence
  Description of Artificial Sequence: Synthetic oligonucleotide
  Antisense strand to SEQ ID NO: 701284
uaugucauacuucaguaac

SEQ ID NO: 701286 - RNA, 19 nt, Artificial Sequence
  Description of Artificial Sequence: Synthetic oligonucleotide
  Sense strand starting at position 3156 of SEQ ID NO: 586220
cgagcaauuccucauauca

SEQ ID NO: 701287 - RNA, 19 nt, Artificial Sequence
  Description of Artificial Sequence: Synthetic oligonucleotide
  Antisense strand to SEQ ID NO: 701286
ugauaugaggaauugcucg

SEQ ID NO: 701288 - RNA, 19 nt, Artificial Sequence
  Description of Artificial Sequence: Synthetic oligonucleotide
  Sense strand starting at position 3376 of SEQ ID NO: 586220
auagaaucuccuugaguug

SEQ ID NO: 701289 - RNA, 19 nt, Artificial Sequence
  Description of Artificial Sequence: Synthetic oligonucleotide
  Antisense strand to SEQ ID NO: 701288
caacucaaggagauucuau

SEQ ID NO: 701290 - RNA, 19 nt, Artificial Sequence
  Description of Artificial Sequence: Synthetic oligonucleotide
  Sense strand starting at position 3426 of SEQ ID NO: 586220
cuuaguauauuucuugcau

SEQ ID NO: 701291 - RNA, 19 nt, Artificial Sequence
  Description of Artificial Sequence: Synthetic oligonucleotide
  Antisense strand to SEQ ID NO: 701290
augcaagaaauauacuaag

SEQ ID NO: 701292 - RNA, 19 nt, Artificial Sequence
  Description of Artificial Sequence: Synthetic oligonucleotide
  Sense strand starting at position 3500 of SEQ ID NO: 586220
ggauuuaaguuugauuugu

SEQ ID NO: 701293 - RNA, 19 nt, Artificial Sequence
  Description of Artificial Sequence: Synthetic oligonucleotide
  Antisense strand to SEQ ID NO: 701292
acaaaucaaacuuaaaucc

SEQ ID NO: 701294 - RNA, 19 nt, Artificial Sequence
  Description of Artificial Sequence: Synthetic oligonucleotide
  Sense strand starting at position 3508 of SEQ ID NO: 586220
guuugauuuguuuguugag

SEQ ID NO: 701295 - RNA, 19 nt, Artificial Sequence
  Description of Artificial Sequence: Synthetic oligonucleotide
  Antisense strand to SEQ ID NO: 701294
cucaacaaacaaaucaaac

SEQ ID NO: 701296 - RNA, 19 nt, Artificial Sequence
  Description of Artificial Sequence: Synthetic oligonucleotide
  Sense strand starting at position 3543 of SEQ ID NO: 586220
ggugguuuguauuucuauc

SEQ ID NO: 701297 - RNA, 19 nt, Artificial Sequence
  Description of Artificial Sequence: Synthetic oligonucleotide
  Antisense strand to SEQ ID NO: 701296
gauagaaauacaaaccacc

SEQ ID NO: 701298 - RNA, 19 nt, Artificial Sequence
  Description of Artificial Sequence: Synthetic oligonucleotide
  Sense strand starting at position 3876 of SEQ ID NO: 586220
uggccuuauaaggaguuau

SEQ ID NO: 701299 - RNA, 19 nt, Artificial Sequence
  Description of Artificial Sequence: Synthetic oligonucleotide
  Antisense strand to SEQ ID NO: 701298
auaacuccuuauaaggcca

SEQ ID NO: 701300 - RNA, 19 nt, Artificial Sequence
  Description of Artificial Sequence: Synthetic oligonucleotide
  Sense strand starting at position 9 of SEQ ID NO: 586221
gcaagcgacucauuugagu

SEQ ID NO: 701301 - RNA, 19 nt, Artificial Sequence
  Description of Artificial Sequence: Synthetic oligonucleotide
  Antisense strand to SEQ ID NO: 701300
acucaaaugagucgcuugc

SEQ ID NO: 701302 - RNA, 19 nt, Artificial Sequence
  Description of Artificial Sequence: Synthetic oligonucleotide
  Sense strand starting at position 66 of SEQ ID NO: 586221
auuaaauggaagugugaug

SEQ ID NO: 701303 - RNA, 19 nt, Artificial Sequence
  Description of Artificial Sequence: Synthetic oligonucleotide
  Antisense strand to SEQ ID NO: 701302
caucacacuuccauuuaau

SEQ ID NO: 701304 - RNA, 19 nt, Artificial Sequence
  Description of Artificial Sequence: Synthetic oligonucleotide
  Sense strand starting at position 111 of SEQ ID NO: 586221
gcauccuuagggugauucu

SEQ ID NO: 701305 - RNA, 19 nt, Artificial Sequence
  Description of Artificial Sequence: Synthetic oligonucleotide
  Antisense strand to SEQ ID NO: 701304
agaaucacccuaaggaugc

SEQ ID NO: 701306 - RNA, 19 nt, Artificial Sequence
  Description of Artificial Sequence: Synthetic oligonucleotide
  Sense strand starting at position 180 of SEQ ID NO: 586221
cgaagaucuccagauggca

SEQ ID NO: 701307 - RNA, 19 nt, Artificial Sequence
  Description of Artificial Sequence: Synthetic oligonucleotide
  Antisense strand to SEQ ID NO: 701306
ugccaucuggagaucuucg

SEQ ID NO: 701308 - RNA, 19 nt, Artificial Sequence
  Description of Artificial Sequence: Synthetic oligonucleotide
  Sense strand starting at position 319 of SEQ ID NO: 586221
gaaugugcauccuccagau

SEQ ID NO: 701309 - RNA, 19 nt, Artificial Sequence
  Description of Artificial Sequence: Synthetic oligonucleotide
  Antisense strand to SEQ ID NO: 701308
aucuggaggaugcacauuc

SEQ ID NO: 701310 - RNA, 19 nt, Artificial Sequence
  Description of Artificial Sequence: Synthetic oligonucleotide
  Sense strand starting at position 323 of SEQ ID NO: 586221
gugcauccuccagauucuu

SEQ ID NO: 701311 - RNA, 19 nt, Artificial Sequence
  Description of Artificial Sequence: Synthetic oligonucleotide
  Antisense strand to SEQ ID NO: 701310
aagaaucuggaggaugcac

SEQ ID NO: 701312 - RNA, 19 nt, Artificial Sequence
  Description of Artificial Sequence: Synthetic oligonucleotide
  Sense strand starting at position 383 of SEQ ID NO: 586221
aaauaauagccgcaggauu

SEQ ID NO: 701313 - RNA, 19 nt, Artificial Sequence
  Description of Artificial Sequence: Synthetic oligonucleotide
  Antisense strand to SEQ ID NO: 701312
aauccugcggcuauuauuu

SEQ ID NO: 701314 - RNA, 19 nt, Artificial Sequence
  Description of Artificial Sequence: Synthetic oligonucleotide
  Sense strand starting at position 476 of SEQ ID NO: 586221
aguaauucccagcagcaua

SEQ ID NO: 701315 - RNA, 19 nt, Artificial Sequence
  Description of Artificial Sequence: Synthetic oligonucleotide
  Antisense strand to SEQ ID NO: 701314
uaugcugcugggaauuacu

SEQ ID NO: 701316 - RNA, 19 nt, Artificial Sequence
  Description of Artificial Sequence: Synthetic oligonucleotide
  Sense strand starting at position 636 of SEQ ID NO: 586221
ggcuauucggugcauuaaa

SEQ ID NO: 701317 - RNA, 19 nt, Artificial Sequence
  Description of Artificial Sequence: Synthetic oligonucleotide
  Antisense strand to SEQ ID NO: 701316
uuuaaugcaccgaauagcc

SEQ ID NO: 701318 - RNA, 19 nt, Artificial Sequence
  Description of Artificial Sequence: Synthetic oligonucleotide
  Sense strand starting at position 676 of SEQ ID NO: 586221
ugccauugaguuugauucu

SEQ ID NO: 701319 - RNA, 19 nt, Artificial Sequence
  Description of Artificial Sequence: Synthetic oligonucleotide
  Antisense strand to SEQ ID NO: 701318
agaaucaaacucaauggca

SEQ ID NO: 701320 - RNA, 19 nt, Artificial Sequence
  Description of Artificial Sequence: Synthetic oligonucleotide
  Sense strand starting at position 743 of SEQ ID NO: 586221
gugugacuauagcuaccua

SEQ ID NO: 701321 - RNA, 19 nt, Artificial Sequence
  Description of Artificial Sequence: Synthetic oligonucleotide
  Antisense strand to SEQ ID NO: 701320
uagguagcuauagucacac

SEQ ID NO: 701322 - RNA, 19 nt, Artificial Sequence
  Description of Artificial Sequence: Synthetic oligonucleotide
  Sense strand starting at position 1019 of SEQ ID NO: 586221
cgucuaaucggaaggcugu

SEQ ID NO: 701323 - RNA, 19 nt, Artificial Sequence
  Description of Artificial Sequence: Synthetic oligonucleotide
  Antisense strand to SEQ ID NO: 701322
acagccuuccgauuagacg

SEQ ID NO: 701324 - RNA, 19 nt, Artificial Sequence
  Description of Artificial Sequence: Synthetic oligonucleotide
  Sense strand starting at position 1044 of SEQ ID NO: 586221
cauccaguaacgugggaua

SEQ ID NO: 701325 - RNA, 19 nt, Artificial Sequence
  Description of Artificial Sequence: Synthetic oligonucleotide
  Antisense strand to SEQ ID NO: 701324
uaucccacguuacuggaug

SEQ ID NO: 701326 - RNA, 19 nt, Artificial Sequence
  Description of Artificial Sequence: Synthetic oligonucleotide
  Sense strand starting at position 1046 of SEQ ID NO: 586221
uccaguaacgugggauaaa

SEQ ID NO: 701327 - RNA, 19 nt, Artificial Sequence
  Description of Artificial Sequence: Synthetic oligonucleotide
  Antisense strand to SEQ ID NO: 701326
uuuaucccacguuacugga

SEQ ID NO: 701328 - RNA, 19 nt, Artificial Sequence
  Description of Artificial Sequence: Synthetic oligonucleotide
  Sense strand starting at position 1132 of SEQ ID NO: 586221
cucggcaagccugaaauua

SEQ ID NO: 701329 - RNA, 19 nt, Artificial Sequence
  Description of Artificial Sequence: Synthetic oligonucleotide
  Antisense strand to SEQ ID NO: 701328
uaauuucaggcuugccgag

SEQ ID NO: 701330 - RNA, 19 nt, Artificial Sequence
  Description of Artificial Sequence: Synthetic oligonucleotide
  Sense strand starting at position 1185 of SEQ ID NO: 586221
uuuauugaacuggguugaa

SEQ ID NO: 701331 - RNA, 19 nt, Artificial Sequence
  Description of Artificial Sequence: Synthetic oligonucleotide
  Antisense strand to SEQ ID NO: 701330
uucaacccaguucaauaaa

SEQ ID NO: 701332 - RNA, 19 nt, Artificial Sequence
  Description of Artificial Sequence: Synthetic oligonucleotide
  Sense strand starting at position 1213 of SEQ ID NO: 586221
gugagcuggcuggaaacuu

SEQ ID NO: 701333 - RNA, 19 nt, Artificial Sequence
  Description of Artificial Sequence: Synthetic oligonucleotide
  Antisense strand to SEQ ID NO: 701332
aaguuuccagccagcucac

SEQ ID NO: 701334 - RNA, 19 nt, Artificial Sequence
  Description of Artificial Sequence: Synthetic oligonucleotide
  Sense strand starting at position 1979 of SEQ ID NO: 586221
ucgguuuccucccugauuu

SEQ ID NO: 701335 - RNA, 19 nt, Artificial Sequence
  Description of Artificial Sequence: Synthetic oligonucleotide
  Antisense strand to SEQ ID NO: 701334
aaaucagggaggaaaccga

SEQ ID NO: 701336 - RNA, 19 nt, Artificial Sequence
  Description of Artificial Sequence: Synthetic oligonucleotide
  Sense strand starting at position 1980 of SEQ ID NO: 586221
cgguuuccucccugauuua

SEQ ID NO: 701337 - RNA, 19 nt, Artificial Sequence
  Description of Artificial Sequence: Synthetic oligonucleotide
  Antisense strand to SEQ ID NO: 701336
uaaaucagggaggaaaccg

SEQ ID NO: 701338 - RNA, 19 nt, Artificial Sequence
  Description of Artificial Sequence: Synthetic oligonucleotide
  Sense strand starting at position 2099 of SEQ ID NO: 586221
ggcagagagacuuguggaa

SEQ ID NO: 701339 - RNA, 19 nt, Artificial Sequence
  Description of Artificial Sequence: Synthetic oligonucleotide
  Antisense strand to SEQ ID NO: 701338
uuccacaagucucucugcc

SEQ ID NO: 701340 - RNA, 19 nt, Artificial Sequence
  Description of Artificial Sequence: Synthetic oligonucleotide
  Sense strand starting at position 2219 of SEQ ID NO: 586221
ggagcagcccuccauacaa

SEQ ID NO: 701341 - RNA, 19 nt, Artificial Sequence
  Description of Artificial Sequence: Synthetic oligonucleotide
  Antisense strand to SEQ ID NO: 701340
uuguauggagggcugcucc

SEQ ID NO: 701342 - RNA, 19 nt, Artificial Sequence
  Description of Artificial Sequence: Synthetic oligonucleotide
  Sense strand starting at position 2756 of SEQ ID NO: 586221
ggacgaauucugcaucuag

SEQ ID NO: 701343 - RNA, 19 nt, Artificial Sequence
  Description of Artificial Sequence: Synthetic oligonucleotide
  Antisense strand to SEQ ID NO: 701342
cuagaugcagaauucgucc

SEQ ID NO: 701344 - RNA, 19 nt, Artificial Sequence
  Description of Artificial Sequence: Synthetic oligonucleotide
  Sense strand starting at position 2775 of SEQ ID NO: 586221
ggaggacaguaguaagaga

SEQ ID NO: 701345 - RNA, 19 nt, Artificial Sequence
  Description of Artificial Sequence: Synthetic oligonucleotide
  Antisense strand to SEQ ID NO: 701344
ucucuuacuacuguccucc

SEQ ID NO: 701346 - RNA, 19 nt, Artificial Sequence
  Description of Artificial Sequence: Synthetic oligonucleotide
  Sense strand starting at position 2954 of SEQ ID NO: 586221
gagaaaugcgccugaaaug

SEQ ID NO: 701347 - RNA, 19 nt, Artificial Sequence
  Description of Artificial Sequence: Synthetic oligonucleotide
  Antisense strand to SEQ ID NO: 701346
cauuucaggcgcauuucuc

SEQ ID NO: 701348 - RNA, 19 nt, Artificial Sequence
  Description of Artificial Sequence: Synthetic oligonucleotide
  Sense strand starting at position 2955 of SEQ ID NO: 586221
agaaaugcgccugaaaugu

SEQ ID NO: 701349 - RNA, 19 nt, Artificial Sequence
  Description of Artificial Sequence: Synthetic oligonucleotide
  Antisense strand to SEQ ID NO: 701348
acauuucaggcgcauuucu

SEQ ID NO: 701350 - RNA, 19 nt, Artificial Sequence
  Description of Artificial Sequence: Synthetic oligonucleotide
  Sense strand starting at position 3186 of SEQ ID NO: 586221
ccucuaguaguguaugaga

SEQ ID NO: 701351 - RNA, 19 nt, Artificial Sequence
  Description of Artificial Sequence: Synthetic oligonucleotide
  Antisense strand to SEQ ID NO: 701350
ucucauacacuacuagagg

SEQ ID NO: 701352 - RNA, 19 nt, Artificial Sequence
  Description of Artificial Sequence: Synthetic oligonucleotide
  Sense strand starting at position 3188 of SEQ ID NO: 586221
ucuaguaguguaugagaau

SEQ ID NO: 701353 - RNA, 19 nt, Artificial Sequence
  Description of Artificial Sequence: Synthetic oligonucleotide
  Antisense strand to SEQ ID NO: 701352
auucucauacacuacuaga

SEQ ID NO: 701354 - RNA, 19 nt, Artificial Sequence
  Description of Artificial Sequence: Synthetic oligonucleotide
  Sense strand starting at position 3212 of SEQ ID NO: 586221
ugacaugacgugcagagaa

SEQ ID NO: 701355 - RNA, 19 nt, Artificial Sequence
  Description of Artificial Sequence: Synthetic oligonucleotide
  Antisense strand to SEQ ID NO: 701354
uucucugcacgucauguca

SEQ ID NO: 701356 - RNA, 19 nt, Artificial Sequence
  Description of Artificial Sequence: Synthetic oligonucleotide
  Sense strand starting at position 3214 of SEQ ID NO: 586221
acaugacgugcagagaaua

SEQ ID NO: 701357 - RNA, 19 nt, Artificial Sequence
  Description of Artificial Sequence: Synthetic oligonucleotide
  Antisense strand to SEQ ID NO: 701356
uauucucugcacgucaugu

SEQ ID NO: 701358 - RNA, 19 nt, Artificial Sequence
  Description of Artificial Sequence: Synthetic oligonucleotide
  Sense strand starting at position 3228 of SEQ ID NO: 586221
gaauacaauuugugaugac

SEQ ID NO: 701359 - RNA, 19 nt, Artificial Sequence
  Description of Artificial Sequence: Synthetic oligonucleotide
  Antisense strand to SEQ ID NO: 701358
gucaucacaaauuguauuc

SEQ ID NO: 701360 - RNA, 19 nt, Artificial Sequence
  Description of Artificial Sequence: Synthetic oligonucleotide
  Sense strand starting at position 3238 of SEQ ID NO: 586221
ugugaugacuauccugcau

SEQ ID NO: 701361 - RNA, 19 nt, Artificial Sequence
  Description of Artificial Sequence: Synthetic oligonucleotide
  Antisense strand to SEQ ID NO: 701360
augcaggauagucaucaca

SEQ ID NO: 701362 - RNA, 19 nt, Artificial Sequence
  Description of Artificial Sequence: Synthetic oligonucleotide
  Sense strand starting at position 3443 of SEQ ID NO: 586221
uuaagagcgugugugauuu

SEQ ID NO: 701363 - RNA, 19 nt, Artificial Sequence
  Description of Artificial Sequence: Synthetic oligonucleotide
  Antisense strand to SEQ ID NO: 701362
aaaucacacacgcucuuaa

SEQ ID NO: 701364 - RNA, 19 nt, Artificial Sequence
  Description of Artificial Sequence: Synthetic oligonucleotide
  Sense strand starting at position 3611 of SEQ ID NO: 586221
ugacuuaacuuaguuuguu

SEQ ID NO: 701365 - RNA, 19 nt, Artificial Sequence
  Description of Artificial Sequence: Synthetic oligonucleotide
  Antisense strand to SEQ ID NO: 701364
aacaaacuaaguuaaguca

SEQ ID NO: 701366 - RNA, 19 nt, Artificial Sequence
  Description of Artificial Sequence: Synthetic oligonucleotide
  Sense strand starting at position 3677 of SEQ ID NO: 586221
gaugaagugggauguaaug

SEQ ID NO: 701367 - RNA, 19 nt, Artificial Sequence
  Description of Artificial Sequence: Synthetic oligonucleotide
  Antisense strand to SEQ ID NO: 701366
cauuacaucccacuucauc

SEQ ID NO: 701368 - RNA, 19 nt, Artificial Sequence
  Description of Artificial Sequence: Synthetic oligonucleotide
  Sense strand starting at position 3708 of SEQ ID NO: 586221
acagcucaggagggauauu

SEQ ID NO: 701369 - RNA, 19 nt, Artificial Sequence
  Description of Artificial Sequence: Synthetic oligonucleotide
  Antisense strand to SEQ ID NO: 701368
aauaucccuccugagcugu

SEQ ID NO: 701370 - RNA, 19 nt, Artificial Sequence
  Description of Artificial Sequence: Synthetic oligonucleotide
  Sense strand starting at position 3854 of SEQ ID NO: 586221
auuagagaugcccauuauu

SEQ ID NO: 701371 - RNA, 19 nt, Artificial Sequence
  Description of Artificial Sequence: Synthetic oligonucleotide
  Antisense strand to SEQ ID NO: 701370
aauaaugggcaucucuaau

SEQ ID NO: 701372 - RNA, 19 nt, Artificial Sequence
  Description of Artificial Sequence: Synthetic oligonucleotide
  Sense strand starting at position 3864 of SEQ ID NO: 586221
cccauuauugucuauguga

SEQ ID NO: 701373 - RNA, 19 nt, Artificial Sequence
  Description of Artificial Sequence: Synthetic oligonucleotide
  Antisense strand to SEQ ID NO: 701372
ucacauagacaauaauggg

SEQ ID NO: 701374 - RNA, 19 nt, Artificial Sequence
  Description of Artificial Sequence: Synthetic oligonucleotide
  Sense strand starting at position 3877 of SEQ ID NO: 586221
augugauauguugguauca

SEQ ID NO: 701375 - RNA, 19 nt, Artificial Sequence
  Description of Artificial Sequence: Synthetic oligonucleotide
  Antisense strand to SEQ ID NO: 701374
ugauaccaacauaucacau

SEQ ID NO: 701376 - RNA, 19 nt, Artificial Sequence
  Description of Artificial Sequence: Synthetic oligonucleotide
  Sense strand starting at position 3878 of SEQ ID NO: 586221
ugugauauguugguaucaa

SEQ ID NO: 701377 - RNA, 19 nt, Artificial Sequence
  Description of Artificial Sequence: Synthetic oligonucleotide
  Antisense strand to SEQ ID NO: 701376
uugauaccaacauaucaca

SEQ ID NO: 701378 - RNA, 19 nt, Artificial Sequence
  Description of Artificial Sequence: Synthetic oligonucleotide
  Sense strand starting at position 3971 of SEQ ID NO: 586221
augguacacuguuuccaau

SEQ ID NO: 701379 - RNA, 19 nt, Artificial Sequence
  Description of Artificial Sequence: Synthetic oligonucleotide
  Antisense strand to SEQ ID NO: 701378
auuggaaacaguguaccau

SEQ ID NO: 701380 - RNA, 19 nt, Artificial Sequence
  Description of Artificial Sequence: Synthetic oligonucleotide
  Sense strand starting at position 134 of SEQ ID NO: 586222
acaguuauaguugaaguca

SEQ ID NO: 701381 - RNA, 19 nt, Artificial Sequence
  Description of Artificial Sequence: Synthetic oligonucleotide
  Antisense strand to SEQ ID NO: 701380
ugacuucaacuauaacugu

SEQ ID NO: 701382 - RNA, 19 nt, Artificial Sequence
  Description of Artificial Sequence: Synthetic oligonucleotide
  Sense strand starting at position 234 of SEQ ID NO: 586222
uagguaugccuugagcaga

SEQ ID NO: 701383 - RNA, 19 nt, Artificial Sequence
  Description of Artificial Sequence: Synthetic oligonucleotide
  Antisense strand to SEQ ID NO: 701382
ucugcucaaggcauaccua

SEQ ID NO: 701384 - RNA, 19 nt, Artificial Sequence
  Description of Artificial Sequence: Synthetic oligonucleotide
  Sense strand starting at position 383 of SEQ ID NO: 586222
uuaggacaauuugagucau

SEQ ID NO: 701385 - RNA, 19 nt, Artificial Sequence
  Description of Artificial Sequence: Synthetic oligonucleotide
  Antisense strand to SEQ ID NO: 701384
augacucaaauuguccuaa

SEQ ID NO: 701386 - RNA, 19 nt, Artificial Sequence
  Description of Artificial Sequence: Synthetic oligonucleotide
  Sense strand starting at position 543 of SEQ ID NO: 586222
uuguuaugaagugaucaug

SEQ ID NO: 701387 - RNA, 19 nt, Artificial Sequence
  Description of Artificial Sequence: Synthetic oligonucleotide
  Antisense strand to SEQ ID NO: 701386
caugaucacuucauaacaa

SEQ ID NO: 701388 - RNA, 19 nt, Artificial Sequence
  Description of Artificial Sequence: Synthetic oligonucleotide
  Sense strand starting at position 677 of SEQ ID NO: 586222
auuugauguccugguugua

SEQ ID NO: 701389 - RNA, 19 nt, Artificial Sequence
  Description of Artificial Sequence: Synthetic oligonucleotide
  Antisense strand to SEQ ID NO: 701388
uacaaccaggacaucaaau

SEQ ID NO: 701390 - RNA, 19 nt, Artificial Sequence
  Description of Artificial Sequence: Synthetic oligonucleotide
  Sense strand starting at position 896 of SEQ ID NO: 586222
gcuguuggaaauuaaaguu

SEQ ID NO: 701391 - RNA, 19 nt, Artificial Sequence
  Description of Artificial Sequence: Synthetic oligonucleotide
  Antisense strand to SEQ ID NO: 701390
aacuuuaauuuccaacagc

SEQ ID NO: 701392 - RNA, 19 nt, Artificial Sequence
  Description of Artificial Sequence: Synthetic oligonucleotide
  Sense strand starting at position 906 of SEQ ID NO: 586222
auuaaaguugaugggaguu

SEQ ID NO: 701393 - RNA, 19 nt, Artificial Sequence
  Description of Artificial Sequence: Synthetic oligonucleotide
  Antisense strand to SEQ ID NO: 701392
aacucccaucaacuuuaau

SEQ ID NO: 701394 - RNA, 19 nt, Artificial Sequence
  Description of Artificial Sequence: Synthetic oligonucleotide
  Sense strand starting at position 1173 of SEQ ID NO: 586222
cagagcucucccgggagaa

SEQ ID NO: 701395 - RNA, 19 nt, Artificial Sequence
  Description of Artificial Sequence: Synthetic oligonucleotide
  Antisense strand to SEQ ID NO: 701394
uucucccgggagagcucug

SEQ ID NO: 701396 - RNA, 19 nt, Artificial Sequence
  Description of Artificial Sequence: Synthetic oligonucleotide
  Sense strand starting at position 1174 of SEQ ID NO: 586222
agagcucucccgggagaaa

SEQ ID NO: 701397 - RNA, 19 nt, Artificial Sequence
  Description of Artificial Sequence: Synthetic oligonucleotide
  Antisense strand to SEQ ID NO: 701396
uuucucccgggagagcucu

SEQ ID NO: 701398 - RNA, 19 nt, Artificial Sequence
  Description of Artificial Sequence: Synthetic oligonucleotide
  Sense strand starting at position 1819 of SEQ ID NO: 586222
gacugaauaggcggaguua

SEQ ID NO: 701399 - RNA, 19 nt, Artificial Sequence
  Description of Artificial Sequence: Synthetic oligonucleotide
  Antisense strand to SEQ ID NO: 701398
uaacuccgccuauucaguc

SEQ ID NO: 701400 - RNA, 19 nt, Artificial Sequence
  Description of Artificial Sequence: Synthetic oligonucleotide
  Sense strand starting at position 1988 of SEQ ID NO: 586222
cguggaauugaauguugaa

SEQ ID NO: 701401 - RNA, 19 nt, Artificial Sequence
  Description of Artificial Sequence: Synthetic oligonucleotide
  Antisense strand to SEQ ID NO: 701400
uucaacauucaauuccacg

SEQ ID NO: 701402 - RNA, 19 nt, Artificial Sequence
  Description of Artificial Sequence: Synthetic oligonucleotide
  Sense strand starting at position 2211 of SEQ ID NO: 586222
agggacuguucccuagcaa

SEQ ID NO: 701403 - RNA, 19 nt, Artificial Sequence
  Description of Artificial Sequence: Synthetic oligonucleotide
  Antisense strand to SEQ ID NO: 701402
uugcuagggaacagucccu

SEQ ID NO: 701404 - RNA, 19 nt, Artificial Sequence
  Description of Artificial Sequence: Synthetic oligonucleotide
  Sense strand starting at position 2212 of SEQ ID NO: 586222
gggacuguucccuagcaag

SEQ ID NO: 701405 - RNA, 19 nt, Artificial Sequence
  Description of Artificial Sequence: Synthetic oligonucleotide
  Antisense strand to SEQ ID NO: 701404
cuugcuagggaacaguccc

SEQ ID NO: 701406 - RNA, 19 nt, Artificial Sequence
  Description of Artificial Sequence: Synthetic oligonucleotide
  Sense strand starting at position 2330 of SEQ ID NO: 586222
guaucuuugcgacaagacu

SEQ ID NO: 701407 - RNA, 19 nt, Artificial Sequence
  Description of Artificial Sequence: Synthetic oligonucleotide
  Antisense strand to SEQ ID NO: 701406
agucuugucgcaaagauac

SEQ ID NO: 701408 - RNA, 19 nt, Artificial Sequence
  Description of Artificial Sequence: Synthetic oligonucleotide
  Sense strand starting at position 2465 of SEQ ID NO: 586222
ucuaguccugcagacucaa

SEQ ID NO: 701409 - RNA, 19 nt, Artificial Sequence
  Description of Artificial Sequence: Synthetic oligonucleotide
  Antisense strand to SEQ ID NO: 701408
uugagucugcaggacuaga

SEQ ID NO: 701410 - RNA, 19 nt, Artificial Sequence
  Description of Artificial Sequence: Synthetic oligonucleotide
  Sense strand starting at position 2736 of SEQ ID NO: 586222
gccuuaucugcgcagauuu

SEQ ID NO: 701411 - RNA, 19 nt, Artificial Sequence
  Description of Artificial Sequence: Synthetic oligonucleotide
  Antisense strand to SEQ ID NO: 701410
aaaucugcgcagauaaggc

SEQ ID NO: 701412 - RNA, 19 nt, Artificial Sequence
  Description of Artificial Sequence: Synthetic oligonucleotide
  Sense strand starting at position 2811 of SEQ ID NO: 586222
guccuaaguccugacagag

SEQ ID NO: 701413 - RNA, 19 nt, Artificial Sequence
  Description of Artificial Sequence: Synthetic oligonucleotide
  Antisense strand to SEQ ID NO: 701412
cucugucaggacuuaggac

SEQ ID NO: 701414 - RNA, 19 nt, Artificial Sequence
  Description of Artificial Sequence: Synthetic oligonucleotide
  Sense strand starting at position 2897 of SEQ ID NO: 586222
ugaugaaguucaguggaaa

SEQ ID NO: 701415 - RNA, 19 nt, Artificial Sequence
  Description of Artificial Sequence: Synthetic oligonucleotide
  Antisense strand to SEQ ID NO: 701414
uuuccacugaacuucauca

SEQ ID NO: 701416 - RNA, 19 nt, Artificial Sequence
  Description of Artificial Sequence: Synthetic oligonucleotide
  Sense strand starting at position 2998 of SEQ ID NO: 586222
ucauauaguuagguacaca

SEQ ID NO: 701417 - RNA, 19 nt, Artificial Sequence
  Description of Artificial Sequence: Synthetic oligonucleotide
  Antisense strand to SEQ ID NO: 701416
uguguaccuaacuauauga

SEQ ID NO: 701418 - RNA, 19 nt, Artificial Sequence
  Description of Artificial Sequence: Synthetic oligonucleotide
  Sense strand starting at position 3018 of SEQ ID NO: 586222
gagagacuucugcacuuac

SEQ ID NO: 701419 - RNA, 19 nt, Artificial Sequence
  Description of Artificial Sequence: Synthetic oligonucleotide
  Antisense strand to SEQ ID NO: 701418
guaagugcagaagucucuc

SEQ ID NO: 701420 - RNA, 19 nt, Artificial Sequence
  Description of Artificial Sequence: Synthetic oligonucleotide
  Sense strand starting at position 3036 of SEQ ID NO: 586222
cugacauucucucuagaug

SEQ ID NO: 701421 - RNA, 19 nt, Artificial Sequence
  Description of Artificial Sequence: Synthetic oligonucleotide
  Antisense strand to SEQ ID NO: 701420
caucuagagagaaugucag

SEQ ID NO: 701422 - RNA, 19 nt, Artificial Sequence
  Description of Artificial Sequence: Synthetic oligonucleotide
  Sense strand starting at position 3042 of SEQ ID NO: 586222
uucucucuagauggguaaa

SEQ ID NO: 701423 - RNA, 19 nt, Artificial Sequence
  Description of Artificial Sequence: Synthetic oligonucleotide
  Antisense strand to SEQ ID NO: 701422
uuuacccaucuagagagaa

SEQ ID NO: 701424 - RNA, 19 nt, Artificial Sequence
  Description of Artificial Sequence: Synthetic oligonucleotide
  Sense strand starting at position 3288 of SEQ ID NO: 586222
uugcaaagaucugugaaau

SEQ ID NO: 701425 - RNA, 19 nt, Artificial Sequence
  Description of Artificial Sequence: Synthetic oligonucleotide
  Antisense strand to SEQ ID NO: 701424
auuucacagaucuuugcaa

SEQ ID NO: 701426 - RNA, 19 nt, Artificial Sequence
  Description of Artificial Sequence: Synthetic oligonucleotide
  Sense strand starting at position 3298 of SEQ ID NO: 586222
cugugaaauuguuuaauac

SEQ ID NO: 701427 - RNA, 19 nt, Artificial Sequence
  Description of Artificial Sequence: Synthetic oligonucleotide
  Antisense strand to SEQ ID NO: 701426
guauuaaacaauuucacag

SEQ ID NO: 701428 - RNA, 19 nt, Artificial Sequence
  Description of Artificial Sequence: Synthetic oligonucleotide
  Sense strand starting at position 3299 of SEQ ID NO: 586222
ugugaaauuguuuaauacc

SEQ ID NO: 701429 - RNA, 19 nt, Artificial Sequence
  Description of Artificial Sequence: Synthetic oligonucleotide
  Antisense strand to SEQ ID NO: 701428
gguauuaaacaauuucaca

SEQ ID NO: 701430 - RNA, 19 nt, Artificial Sequence
  Description of Artificial Sequence: Synthetic oligonucleotide
  Sense strand starting at position 3336 of SEQ ID NO: 586222
uucugaggcagguaguauu

SEQ ID NO: 701431 - RNA, 19 nt, Artificial Sequence
  Description of Artificial Sequence: Synthetic oligonucleotide
  Antisense strand to SEQ ID NO: 701430
aauacuaccugccucagaa

SEQ ID NO: 701432 - RNA, 19 nt, Artificial Sequence
  Description of Artificial Sequence: Synthetic oligonucleotide
  Sense strand starting at position 3344 of SEQ ID NO: 586222
cagguaguauuauuauuga

SEQ ID NO: 701433 - RNA, 19 nt, Artificial Sequence
  Description of Artificial Sequence: Synthetic oligonucleotide
  Antisense strand to SEQ ID NO: 701432
ucaauaauaauacuaccug

SEQ ID NO: 701434 - RNA, 19 nt, Artificial Sequence
  Description of Artificial Sequence: Synthetic oligonucleotide
  Sense strand starting at position 3452 of SEQ ID NO: 586222
guugaagaauccuuuccuu

SEQ ID NO: 701435 - RNA, 19 nt, Artificial Sequence
  Description of Artificial Sequence: Synthetic oligonucleotide
  Antisense strand to SEQ ID NO: 701434
aaggaaaggauucuucaac

SEQ ID NO: 701436 - RNA, 19 nt, Artificial Sequence
  Description of Artificial Sequence: Synthetic oligonucleotide
  Sense strand starting at position 3458 of SEQ ID NO: 586222
gaauccuuuccuuagggua

SEQ ID NO: 701437 - RNA, 19 nt, Artificial Sequence
  Description of Artificial Sequence: Synthetic oligonucleotide
  Antisense strand to SEQ ID NO: 701436
uacccuaaggaaaggauuc

SEQ ID NO: 701438 - RNA, 19 nt, Artificial Sequence
  Description of Artificial Sequence: Synthetic oligonucleotide
  Sense strand starting at position 3545 of SEQ ID NO: 586222
ugcaauuugccuugauaau

SEQ ID NO: 701439 - RNA, 19 nt, Artificial Sequence
  Description of Artificial Sequence: Synthetic oligonucleotide
  Antisense strand to SEQ ID NO: 701438
auuaucaaggcaaauugca

SEQ ID NO: 701440 - RNA, 19 nt, Artificial Sequence
  Description of Artificial Sequence: Synthetic oligonucleotide
  Sense strand starting at position 3581 of SEQ ID NO: 586222
guaugagguuuacuaaacu

SEQ ID NO: 701441 - RNA, 19 nt, Artificial Sequence
  Description of Artificial Sequence: Synthetic oligonucleotide
  Antisense strand to SEQ ID NO: 701440
aguuuaguaaaccucauac

SEQ ID NO: 701442 - RNA, 19 nt, Artificial Sequence
  Description of Artificial Sequence: Synthetic oligonucleotide
  Sense strand starting at position 3708 of SEQ ID NO: 586222
acuugaugugaucacuuau

SEQ ID NO: 701443 - RNA, 19 nt, Artificial Sequence
  Description of Artificial Sequence: Synthetic oligonucleotide
  Antisense strand to SEQ ID NO: 701442
auaagugaucacaucaagu

SEQ ID NO: 701444 - RNA, 19 nt, Artificial Sequence
  Description of Artificial Sequence: Synthetic oligonucleotide
  Sense strand starting at position 3733 of SEQ ID NO: 586222
cccauuaaaggugguuauu

SEQ ID NO: 701445 - RNA, 19 nt, Artificial Sequence
  Description of Artificial Sequence: Synthetic oligonucleotide
  Antisense strand to SEQ ID NO: 701444
aauaaccaccuuuaauggg

SEQ ID NO: 701446 - RNA, 19 nt, Artificial Sequence
  Description of Artificial Sequence: Synthetic oligonucleotide
  Sense strand starting at position 3735 of SEQ ID NO: 586222
cauuaaaggugguuauuaa

SEQ ID NO: 701447 - RNA, 19 nt, Artificial Sequence
  Description of Artificial Sequence: Synthetic oligonucleotide
  Antisense strand to SEQ ID NO: 701446
uuaauaaccaccuuuaaug

SEQ ID NO: 701448 - RNA, 19 nt, Artificial Sequence
  Description of Artificial Sequence: Synthetic oligonucleotide
  Sense strand starting at position 3742 of SEQ ID NO: 586222
ggugguuauuaagucaaag

SEQ ID NO: 701449 - RNA, 19 nt, Artificial Sequence
  Description of Artificial Sequence: Synthetic oligonucleotide
  Antisense strand to SEQ ID NO: 701448
cuuugacuuaauaaccacc

SEQ ID NO: 701450 - RNA, 19 nt, Artificial Sequence
  Description of Artificial Sequence: Synthetic oligonucleotide
  Sense strand starting at position 3754 of SEQ ID NO: 586222
gucaaagaucuccaagccu

SEQ ID NO: 701451 - RNA, 19 nt, Artificial Sequence
  Description of Artificial Sequence: Synthetic oligonucleotide
  Antisense strand to SEQ ID NO: 701450
aggcuuggagaucuuugac

SEQ ID NO: 701452 - RNA, 19 nt, Artificial Sequence
  Description of Artificial Sequence: Synthetic oligonucleotide
  Sense strand starting at position 3761 of SEQ ID NO: 586222
aucuccaagccuugaggau

SEQ ID NO: 701453 - RNA, 19 nt, Artificial Sequence
  Description of Artificial Sequence: Synthetic oligonucleotide
  Antisense strand to SEQ ID NO: 701452
auccucaaggcuuggagau

SEQ ID NO: 701454 - RNA, 19 nt, Artificial Sequence
  Description of Artificial Sequence: Synthetic oligonucleotide
  Sense strand starting at position 3891 of SEQ ID NO: 586222
gagaauguuuaagcaucau

SEQ ID NO: 701455 - RNA, 19 nt, Artificial Sequence
  Description of Artificial Sequence: Synthetic oligonucleotide
  Antisense strand to SEQ ID NO: 701454
augaugcuuaaacauucuc

SEQ ID NO: 701456 - RNA, 19 nt, Artificial Sequence
  Description of Artificial Sequence: Synthetic oligonucleotide
  Sense strand starting at position 3972 of SEQ ID NO: 586222
caagauauaggccguaaga

SEQ ID NO: 701457 - RNA, 19 nt, Artificial Sequence
  Description of Artificial Sequence: Synthetic oligonucleotide
  Antisense strand to SEQ ID NO: 701456
ucuuacggccuauaucuug

SEQ ID NO: 701458 - RNA, 19 nt, Artificial Sequence
  Description of Artificial Sequence: Synthetic oligonucleotide
  Sense strand starting at position 3983 of SEQ ID NO: 586222
ccguaagaaguuuaucagu

SEQ ID NO: 701459 - RNA, 19 nt, Artificial Sequence
  Description of Artificial Sequence: Synthetic oligonucleotide
  Antisense strand to SEQ ID NO: 701458
acugauaaacuucuuacgg

SEQ ID NO: 701460 - RNA, 19 nt, Artificial Sequence
  Description of Artificial Sequence: Synthetic oligonucleotide
  Sense strand starting at position 138 of SEQ ID NO: 586223
uguugauguagccaaugaa

SEQ ID NO: 701461 - RNA, 19 nt, Artificial Sequence
  Description of Artificial Sequence: Synthetic oligonucleotide
  Antisense strand to SEQ ID NO: 701460
uucauuggcuacaucaaca

SEQ ID NO: 701462 - RNA, 19 nt, Artificial Sequence
  Description of Artificial Sequence: Synthetic oligonucleotide
  Sense strand starting at position 141 of SEQ ID NO: 586223
ugauguagccaaugaauaa

SEQ ID NO: 701463 - RNA, 19 nt, Artificial Sequence
  Description of Artificial Sequence: Synthetic oligonucleotide
  Antisense strand to SEQ ID NO: 701462
uuauucauuggcuacauca

SEQ ID NO: 701464 - RNA, 19 nt, Artificial Sequence
  Description of Artificial Sequence: Synthetic oligonucleotide
  Sense strand starting at position 184 of SEQ ID NO: 586223
cagauauuauucuugggcu

SEQ ID NO: 701465 - RNA, 19 nt, Artificial Sequence
  Description of Artificial Sequence: Synthetic oligonucleotide
  Antisense strand to SEQ ID NO: 701464
agcccaagaauaauaucug

SEQ ID NO: 701466 - RNA, 19 nt, Artificial Sequence
  Description of Artificial Sequence: Synthetic oligonucleotide
  Sense strand starting at position 186 of SEQ ID NO: 586223
gauauuauucuugggcuau

SEQ ID NO: 701467 - RNA, 19 nt, Artificial Sequence
  Description of Artificial Sequence: Synthetic oligonucleotide
  Antisense strand to SEQ ID NO: 701466
auagcccaagaauaauauc

SEQ ID NO: 701468 - RNA, 19 nt, Artificial Sequence
  Description of Artificial Sequence: Synthetic oligonucleotide
  Sense strand starting at position 190 of SEQ ID NO: 586223
uuauucuugggcuauaguu

SEQ ID NO: 701469 - RNA, 19 nt, Artificial Sequence
  Description of Artificial Sequence: Synthetic oligonucleotide
  Antisense strand to SEQ ID NO: 701468
aacuauagcccaagaauaa

SEQ ID NO: 701470 - RNA, 19 nt, Artificial Sequence
  Description of Artificial Sequence: Synthetic oligonucleotide
  Sense strand starting at position 243 of SEQ ID NO: 586223
agaacaaauccuggcugau

SEQ ID NO: 701471 - RNA, 19 nt, Artificial Sequence
  Description of Artificial Sequence: Synthetic oligonucleotide
  Antisense strand to SEQ ID NO: 701470
aucagccaggauuuguucu

SEQ ID NO: 701472 - RNA, 19 nt, Artificial Sequence
  Description of Artificial Sequence: Synthetic oligonucleotide
  Sense strand starting at position 297 of SEQ ID NO: 586223
augaguauccacugagaau

SEQ ID NO: 701473 - RNA, 19 nt, Artificial Sequence
  Description of Artificial Sequence: Synthetic oligonucleotide
  Antisense strand to SEQ ID NO: 701472
auucucaguggauacucau

SEQ ID NO: 701474 - RNA, 19 nt, Artificial Sequence
  Description of Artificial Sequence: Synthetic oligonucleotide
  Sense strand starting at position 493 of SEQ ID NO: 586223
cuacuuuguccuuaauggu

SEQ ID NO: 701475 - RNA, 19 nt, Artificial Sequence
  Description of Artificial Sequence: Synthetic oligonucleotide
  Antisense strand to SEQ ID NO: 701474
accauuaaggacaaaguag

SEQ ID NO: 701476 - RNA, 19 nt, Artificial Sequence
  Description of Artificial Sequence: Synthetic oligonucleotide
  Sense strand starting at position 502 of SEQ ID NO: 586223
ccuuaaugguaagucaacu

SEQ ID NO: 701477 - RNA, 19 nt, Artificial Sequence
  Description of Artificial Sequence: Synthetic oligonucleotide
  Antisense strand to SEQ ID NO: 701476
aguugacuuaccauuaagg

SEQ ID NO: 701478 - RNA, 19 nt, Artificial Sequence
  Description of Artificial Sequence: Synthetic oligonucleotide
  Sense strand starting at position 574 of SEQ ID NO: 586223
cucggacgcucuguaauuu

SEQ ID NO: 701479 - RNA, 19 nt, Artificial Sequence
  Description of Artificial Sequence: Synthetic oligonucleotide
  Antisense strand to SEQ ID NO: 701478
aaauuacagagcguccgag

SEQ ID NO: 701480 - RNA, 19 nt, Artificial Sequence
  Description of Artificial Sequence: Synthetic oligonucleotide
  Sense strand starting at position 575 of SEQ ID NO: 586223
ucggacgcucuguaauuua

SEQ ID NO: 701481 - RNA, 19 nt, Artificial Sequence
  Description of Artificial Sequence: Synthetic oligonucleotide
  Antisense strand to SEQ ID NO: 701480
uaaauuacagagcguccga

SEQ ID NO: 701482 - RNA, 19 nt, Artificial Sequence
  Description of Artificial Sequence: Synthetic oligonucleotide
  Sense strand starting at position 734 of SEQ ID NO: 586223
ccuuaagaucggcaaguga

SEQ ID NO: 701483 - RNA, 19 nt, Artificial Sequence
  Description of Artificial Sequence: Synthetic oligonucleotide
  Antisense strand to SEQ ID NO: 701482
ucacuugccgaucuuaagg

SEQ ID NO: 701484 - RNA, 19 nt, Artificial Sequence
  Description of Artificial Sequence: Synthetic oligonucleotide
  Sense strand starting at position 757 of SEQ ID NO: 586223
cugcguucucuucuugcau

SEQ ID NO: 701485 - RNA, 19 nt, Artificial Sequence
  Description of Artificial Sequence: Synthetic oligonucleotide
  Antisense strand to SEQ ID NO: 701484
augcaagaagagaacgcag

SEQ ID NO: 701486 - RNA, 19 nt, Artificial Sequence
  Description of Artificial Sequence: Synthetic oligonucleotide
  Sense strand starting at position 783 of SEQ ID NO: 586223
auaguauuagguuaaagcu

SEQ ID NO: 701487 - RNA, 19 nt, Artificial Sequence
  Description of Artificial Sequence: Synthetic oligonucleotide
  Antisense strand to SEQ ID NO: 701486
agcuuuaaccuaauacuau

SEQ ID NO: 701488 - RNA, 19 nt, Artificial Sequence
  Description of Artificial Sequence: Synthetic oligonucleotide
  Sense strand starting at position 832 of SEQ ID NO: 586223
ccaaauaaagucuguauga

SEQ ID NO: 701489 - RNA, 19 nt, Artificial Sequence
  Description of Artificial Sequence: Synthetic oligonucleotide
  Antisense strand to SEQ ID NO: 701488
ucauacagacuuuauuugg

SEQ ID NO: 701490 - RNA, 19 nt, Artificial Sequence
  Description of Artificial Sequence: Synthetic oligonucleotide
  Sense strand starting at position 842 of SEQ ID NO: 586223
ucuguaugauaguuuacua

SEQ ID NO: 701491 - RNA, 19 nt, Artificial Sequence
  Description of Artificial Sequence: Synthetic oligonucleotide
  Antisense strand to SEQ ID NO: 701490
uaguaaacuaucauacaga

SEQ ID NO: 701492 - RNA, 19 nt, Artificial Sequence
  Description of Artificial Sequence: Synthetic oligonucleotide
  Sense strand starting at position 1023 of SEQ ID NO: 586223
uuuccuaauaggugugaag

SEQ ID NO: 701493 - RNA, 19 nt, Artificial Sequence
  Description of Artificial Sequence: Synthetic oligonucleotide
  Antisense strand to SEQ ID NO: 701492
cuucacaccuauuaggaaa

SEQ ID NO: 701494 - RNA, 19 nt, Artificial Sequence
  Description of Artificial Sequence: Synthetic oligonucleotide
  Sense strand starting at position 1025 of SEQ ID NO: 586223
uccuaauaggugugaagaa

SEQ ID NO: 701495 - RNA, 19 nt, Artificial Sequence
  Description of Artificial Sequence: Synthetic oligonucleotide
  Antisense strand to SEQ ID NO: 701494
uucuucacaccuauuagga

SEQ ID NO: 701496 - RNA, 19 nt, Artificial Sequence
  Description of Artificial Sequence: Synthetic oligonucleotide
  Sense strand starting at position 1045 of SEQ ID NO: 586223
ggcugcuaugcauaaauga

SEQ ID NO: 701497 - RNA, 19 nt, Artificial Sequence
  Description of Artificial Sequence: Synthetic oligonucleotide
  Antisense strand to SEQ ID NO: 701496
ucauuuaugcauagcagcc

SEQ ID NO: 701498 - RNA, 19 nt, Artificial Sequence
  Description of Artificial Sequence: Synthetic oligonucleotide
  Sense strand starting at position 1053 of SEQ ID NO: 586223
ugcauaaaugauuguugga

SEQ ID NO: 701499 - RNA, 19 nt, Artificial Sequence
  Description of Artificial Sequence: Synthetic oligonucleotide
  Antisense strand to SEQ ID NO: 701498
uccaacaaucauuuaugca

SEQ ID NO: 701500 - RNA, 19 nt, Artificial Sequence
  Description of Artificial Sequence: Synthetic oligonucleotide
  Sense strand starting at position 1376 of SEQ ID NO: 586223
uuucuuugacaaggguaaa

SEQ ID NO: 701501 - RNA, 19 nt, Artificial Sequence
  Description of Artificial Sequence: Synthetic oligonucleotide
  Antisense strand to SEQ ID NO: 701500
uuuacccuugucaaagaaa

SEQ ID NO: 701502 - RNA, 19 nt, Artificial Sequence
  Description of Artificial Sequence: Synthetic oligonucleotide
  Sense strand starting at position 1377 of SEQ ID NO: 586223
uucuuugacaaggguaaag

SEQ ID NO: 701503 - RNA, 19 nt, Artificial Sequence
  Description of Artificial Sequence: Synthetic oligonucleotide
  Antisense strand to SEQ ID NO: 701502
cuuuacccuugucaaagaa

SEQ ID NO: 701504 - RNA, 19 nt, Artificial Sequence
  Description of Artificial Sequence: Synthetic oligonucleotide
  Sense strand starting at position 1524 of SEQ ID NO: 586223
ucguuaagucccgcucauu

SEQ ID NO: 701505 - RNA, 19 nt, Artificial Sequence
  Description of Artificial Sequence: Synthetic oligonucleotide
  Antisense strand to SEQ ID NO: 701504
aaugagcgggacuuaacga

SEQ ID NO: 701506 - RNA, 19 nt, Artificial Sequence
  Description of Artificial Sequence: Synthetic oligonucleotide
  Sense strand starting at position 1550 of SEQ ID NO: 586223
gcuccuuaccuggaauucu

SEQ ID NO: 701507 - RNA, 19 nt, Artificial Sequence
  Description of Artificial Sequence: Synthetic oligonucleotide
  Antisense strand to SEQ ID NO: 701506
agaauuccagguaaggagc

SEQ ID NO: 701508 - RNA, 19 nt, Artificial Sequence
  Description of Artificial Sequence: Synthetic oligonucleotide
  Sense strand starting at position 1873 of SEQ ID NO: 586223
gacccaagucuagguugua

SEQ ID NO: 701509 - RNA, 19 nt, Artificial Sequence
  Description of Artificial Sequence: Synthetic oligonucleotide
  Antisense strand to SEQ ID NO: 701508
uacaaccuagacuuggguc

SEQ ID NO: 701510 - RNA, 19 nt, Artificial Sequence
  Description of Artificial Sequence: Synthetic oligonucleotide
  Sense strand starting at position 2283 of SEQ ID NO: 586223
cugcgaguccgggagacua

SEQ ID NO: 701511 - RNA, 19 nt, Artificial Sequence
  Description of Artificial Sequence: Synthetic oligonucleotide
  Antisense strand to SEQ ID NO: 701510
uagucucccggacucgcag

SEQ ID NO: 701512 - RNA, 19 nt, Artificial Sequence
  Description of Artificial Sequence: Synthetic oligonucleotide
  Sense strand starting at position 2338 of SEQ ID NO: 586223
cgaguuagaccuugaguag

SEQ ID NO: 701513 - RNA, 19 nt, Artificial Sequence
  Description of Artificial Sequence: Synthetic oligonucleotide
  Antisense strand to SEQ ID NO: 701512
cuacucaaggucuaacucg

SEQ ID NO: 701514 - RNA, 19 nt, Artificial Sequence
  Description of Artificial Sequence: Synthetic oligonucleotide
  Sense strand starting at position 2441 of SEQ ID NO: 586223
ggaggugaguuuccacaag

SEQ ID NO: 701515 - RNA, 19 nt, Artificial Sequence
  Description of Artificial Sequence: Synthetic oligonucleotide
  Antisense strand to SEQ ID NO: 701514
cuuguggaaacucaccucc

SEQ ID NO: 701516 - RNA, 19 nt, Artificial Sequence
  Description of Artificial Sequence: Synthetic oligonucleotide
  Sense strand starting at position 2716 of SEQ ID NO: 586223
uaacuuggauuuggagaaa

SEQ ID NO: 701517 - RNA, 19 nt, Artificial Sequence
  Description of Artificial Sequence: Synthetic oligonucleotide
  Antisense strand to SEQ ID NO: 701516
uuucuccaaauccaaguua

SEQ ID NO: 701518 - RNA, 19 nt, Artificial Sequence
  Description of Artificial Sequence: Synthetic oligonucleotide
  Sense strand starting at position 2888 of SEQ ID NO: 586223
gcaggaguccgggacaauc

SEQ ID NO: 701519 - RNA, 19 nt, Artificial Sequence
  Description of Artificial Sequence: Synthetic oligonucleotide
  Antisense strand to SEQ ID NO: 701518
gauugucccggacuccugc

SEQ ID NO: 701520 - RNA, 19 nt, Artificial Sequence
  Description of Artificial Sequence: Synthetic oligonucleotide
  Sense strand starting at position 2962 of SEQ ID NO: 586223
guugauuccaaggacgagu

SEQ ID NO: 701521 - RNA, 19 nt, Artificial Sequence
  Description of Artificial Sequence: Synthetic oligonucleotide
  Antisense strand to SEQ ID NO: 701520
acucguccuuggaaucaac

SEQ ID NO: 701522 - RNA, 19 nt, Artificial Sequence
  Description of Artificial Sequence: Synthetic oligonucleotide
  Sense strand starting at position 3115 of SEQ ID NO: 586223
caccgucgagguuacuaaa

SEQ ID NO: 701523 - RNA, 19 nt, Artificial Sequence
  Description of Artificial Sequence: Synthetic oligonucleotide
  Antisense strand to SEQ ID NO: 701522
uuuaguaaccucgacggug

SEQ ID NO: 701524 - RNA, 19 nt, Artificial Sequence
  Description of Artificial Sequence: Synthetic oligonucleotide
  Sense strand starting at position 3215 of SEQ ID NO: 586223
uggugaucuuagguucuca

SEQ ID NO: 701525 - RNA, 19 nt, Artificial Sequence
  Description of Artificial Sequence: Synthetic oligonucleotide
  Antisense strand to SEQ ID NO: 701524
ugagaaccuaagaucacca

SEQ ID NO: 701526 - RNA, 19 nt, Artificial Sequence
  Description of Artificial Sequence: Synthetic oligonucleotide
  Sense strand starting at position 3219 of SEQ ID NO: 586223
gaucuuagguucucauaag

SEQ ID NO: 701527 - RNA, 19 nt, Artificial Sequence
  Description of Artificial Sequence: Synthetic oligonucleotide
  Antisense strand to SEQ ID NO: 701526
cuuaugagaaccuaagauc

SEQ ID NO: 701528 - RNA, 19 nt, Artificial Sequence
  Description of Artificial Sequence: Synthetic oligonucleotide
  Sense strand starting at position 3267 of SEQ ID NO: 586223
ggagguguccugugaaugg

SEQ ID NO: 701529 - RNA, 19 nt, Artificial Sequence
  Description of Artificial Sequence: Synthetic oligonucleotide
  Antisense strand to SEQ ID NO: 701528
ccauucacaggacaccucc

SEQ ID NO: 701530 - RNA, 19 nt, Artificial Sequence
  Description of Artificial Sequence: Synthetic oligonucleotide
  Sense strand starting at position 3313 of SEQ ID NO: 586223
ggagcucuuccauggaaac

SEQ ID NO: 701531 - RNA, 19 nt, Artificial Sequence
  Description of Artificial Sequence: Synthetic oligonucleotide
  Antisense strand to SEQ ID NO: 701530
guuuccauggaagagcucc

SEQ ID NO: 701532 - RNA, 19 nt, Artificial Sequence
  Description of Artificial Sequence: Synthetic oligonucleotide
  Sense strand starting at position 3325 of SEQ ID NO: 586223
uggaaacaucagugacugu

SEQ ID NO: 701533 - RNA, 19 nt, Artificial Sequence
  Description of Artificial Sequence: Synthetic oligonucleotide
  Antisense strand to SEQ ID NO: 701532
acagucacugauguuucca

SEQ ID NO: 701534 - RNA, 19 nt, Artificial Sequence
  Description of Artificial Sequence: Synthetic oligonucleotide
  Sense strand starting at position 3428 of SEQ ID NO: 586223
cccuaauuugugugguuga

SEQ ID NO: 701535 - RNA, 19 nt, Artificial Sequence
  Description of Artificial Sequence: Synthetic oligonucleotide
  Antisense strand to SEQ ID NO: 701534
ucaaccacacaaauuaggg

SEQ ID NO: 701536 - RNA, 19 nt, Artificial Sequence
  Description of Artificial Sequence: Synthetic oligonucleotide
  Sense strand starting at position 3686 of SEQ ID NO: 586223
uguuguuagcaguaagaaa

SEQ ID NO: 701537 - RNA, 19 nt, Artificial Sequence
  Description of Artificial Sequence: Synthetic oligonucleotide
  Antisense strand to SEQ ID NO: 701536
uuucuuacugcuaacaaca

SEQ ID NO: 701538 - RNA, 19 nt, Artificial Sequence
  Description of Artificial Sequence: Synthetic oligonucleotide
  Sense strand starting at position 3693 of SEQ ID NO: 586223
agcaguaagaaaugugacu

SEQ ID NO: 701539 - RNA, 19 nt, Artificial Sequence
  Description of Artificial Sequence: Synthetic oligonucleotide
  Antisense strand to SEQ ID NO: 701538
agucacauuucuuacugcu

SEQ ID NO: 701540 - RNA, 19 nt, Artificial Sequence
  Description of Artificial Sequence: Synthetic oligonucleotide
  Sense strand starting at position 191 of SEQ ID NO: 586224
agaggcuuucagggaaaug

SEQ ID NO: 701541 - RNA, 19 nt, Artificial Sequence
  Description of Artificial Sequence: Synthetic oligonucleotide
  Antisense strand to SEQ ID NO: 701540
cauuucccugaaagccucu

SEQ ID NO: 701542 - RNA, 19 nt, Artificial Sequence
  Description of Artificial Sequence: Synthetic oligonucleotide
  Sense strand starting at position 208 of SEQ ID NO: 586224
ugucgccuugucuuuauua

SEQ ID NO: 701543 - RNA, 19 nt, Artificial Sequence
  Description of Artificial Sequence: Synthetic oligonucleotide
  Antisense strand to SEQ ID NO: 701542
uaauaaagacaaggcgaca

SEQ ID NO: 701544 - RNA, 19 nt, Artificial Sequence
  Description of Artificial Sequence: Synthetic oligonucleotide
  Sense strand starting at position 261 of SEQ ID NO: 586224
cacucaauauaggugaguu

SEQ ID NO: 701545 - RNA, 19 nt, Artificial Sequence
  Description of Artificial Sequence: Synthetic oligonucleotide
  Antisense strand to SEQ ID NO: 701544
aacucaccuauauugagug

SEQ ID NO: 701546 - RNA, 19 nt, Artificial Sequence
  Description of Artificial Sequence: Synthetic oligonucleotide
  Sense strand starting at position 262 of SEQ ID NO: 586224
acucaauauaggugaguug

SEQ ID NO: 701547 - RNA, 19 nt, Artificial Sequence
  Description of Artificial Sequence: Synthetic oligonucleotide
  Antisense strand to SEQ ID NO: 701546
caacucaccuauauugagu

SEQ ID NO: 701548 - RNA, 19 nt, Artificial Sequence
  Description of Artificial Sequence: Synthetic oligonucleotide
  Sense strand starting at position 265 of SEQ ID NO: 586224
caauauaggugaguugaau

SEQ ID NO: 701549 - RNA, 19 nt, Artificial Sequence
  Description of Artificial Sequence: Synthetic oligonucleotide
  Antisense strand to SEQ ID NO: 701548
auucaacucaccuauauug

SEQ ID NO: 701550 - RNA, 19 nt, Artificial Sequence
  Description of Artificial Sequence: Synthetic oligonucleotide
  Sense strand starting at position 502 of SEQ ID NO: 586224
aguaguuauauugguagaa

SEQ ID NO: 701551 - RNA, 19 nt, Artificial Sequence
  Description of Artificial Sequence: Synthetic oligonucleotide
  Antisense strand to SEQ ID NO: 701550
uucuaccaauauaacuacu

SEQ ID NO: 701552 - RNA, 19 nt, Artificial Sequence
  Description of Artificial Sequence: Synthetic oligonucleotide
  Sense strand starting at position 503 of SEQ ID NO: 586224
guaguuauauugguagaau

SEQ ID NO: 701553 - RNA, 19 nt, Artificial Sequence
  Description of Artificial Sequence: Synthetic oligonucleotide
  Antisense strand to SEQ ID NO: 701552
auucuaccaauauaacuac

SEQ ID NO: 701554 - RNA, 19 nt, Artificial Sequence
  Description of Artificial Sequence: Synthetic oligonucleotide
  Sense strand starting at position 506 of SEQ ID NO: 586224
guuauauugguagaaucuu

SEQ ID NO: 701555 - RNA, 19 nt, Artificial Sequence
  Description of Artificial Sequence: Synthetic oligonucleotide
  Antisense strand to SEQ ID NO: 701554
aagauucuaccaauauaac

SEQ ID NO: 701556 - RNA, 19 nt, Artificial Sequence
  Description of Artificial Sequence: Synthetic oligonucleotide
  Sense strand starting at position 635 of SEQ ID NO: 586224
caccuuuagugaguuagaa

SEQ ID NO: 701557 - RNA, 19 nt, Artificial Sequence
  Description of Artificial Sequence: Synthetic oligonucleotide
  Antisense strand to SEQ ID NO: 701556
uucuaacucacuaaaggug

SEQ ID NO: 701558 - RNA, 19 nt, Artificial Sequence
  Description of Artificial Sequence: Synthetic oligonucleotide
  Sense strand starting at position 645 of SEQ ID NO: 586224
gaguuagaagaaugccauu

SEQ ID NO: 701559 - RNA, 19 nt, Artificial Sequence
  Description of Artificial Sequence: Synthetic oligonucleotide
  Antisense strand to SEQ ID NO: 701558
aauggcauucuucuaacuc

SEQ ID NO: 701560 - RNA, 19 nt, Artificial Sequence
  Description of Artificial Sequence: Synthetic oligonucleotide
  Sense strand starting at position 648 of SEQ ID NO: 586224
uuagaagaaugccauuuga

SEQ ID NO: 701561 - RNA, 19 nt, Artificial Sequence
  Description of Artificial Sequence: Synthetic oligonucleotide
  Antisense strand to SEQ ID NO: 701560
ucaaauggcauucuucuaa

SEQ ID NO: 701562 - RNA, 19 nt, Artificial Sequence
  Description of Artificial Sequence: Synthetic oligonucleotide
  Sense strand starting at position 685 of SEQ ID NO: 586224
guuucucuguauuucucaa

SEQ ID NO: 701563 - RNA, 19 nt, Artificial Sequence
  Description of Artificial Sequence: Synthetic oligonucleotide
  Antisense strand to SEQ ID NO: 701562
uugagaaauacagagaaac

SEQ ID NO: 701564 - RNA, 19 nt, Artificial Sequence
  Description of Artificial Sequence: Synthetic oligonucleotide
  Sense strand starting at position 909 of SEQ ID NO: 586224
auggguagugaugaagcaa

SEQ ID NO: 701565 - RNA, 19 nt, Artificial Sequence
  Description of Artificial Sequence: Synthetic oligonucleotide
  Antisense strand to SEQ ID NO: 701564
uugcuucaucacuacccau

SEQ ID NO: 701566 - RNA, 19 nt, Artificial Sequence
  Description of Artificial Sequence: Synthetic oligonucleotide
  Sense strand starting at position 953 of SEQ ID NO: 586224
ccucuugaacuguggaaac

SEQ ID NO: 701567 - RNA, 19 nt, Artificial Sequence
  Description of Artificial Sequence: Synthetic oligonucleotide
  Antisense strand to SEQ ID NO: 701566
guuuccacaguucaagagg

SEQ ID NO: 701568 - RNA, 19 nt, Artificial Sequence
  Description of Artificial Sequence: Synthetic oligonucleotide
  Sense strand starting at position 1019 of SEQ ID NO: 586224
gcuugauagcuugaccaac

SEQ ID NO: 701569 - RNA, 19 nt, Artificial Sequence
  Description of Artificial Sequence: Synthetic oligonucleotide
  Antisense strand to SEQ ID NO: 701568
guuggucaagcuaucaagc

SEQ ID NO: 701570 - RNA, 19 nt, Artificial Sequence
  Description of Artificial Sequence: Synthetic oligonucleotide
  Sense strand starting at position 1161 of SEQ ID NO: 586224
ugcugauuaaagugagaaa

SEQ ID NO: 701571 - RNA, 19 nt, Artificial Sequence
  Description of Artificial Sequence: Synthetic oligonucleotide
  Antisense strand to SEQ ID NO: 701570
uuucucacuuuaaucagca

SEQ ID NO: 701572 - RNA, 19 nt, Artificial Sequence
  Description of Artificial Sequence: Synthetic oligonucleotide
  Sense strand starting at position 1521 of SEQ ID NO: 586224
acacaucaguuuccaugau

SEQ ID NO: 701573 - RNA, 19 nt, Artificial Sequence
  Description of Artificial Sequence: Synthetic oligonucleotide
  Antisense strand to SEQ ID NO: 701572
aucauggaaacugaugugu

SEQ ID NO: 701574 - RNA, 19 nt, Artificial Sequence
  Description of Artificial Sequence: Synthetic oligonucleotide
  Sense strand starting at position 1641 of SEQ ID NO: 586224
uguggcuuagcagaaugau

SEQ ID NO: 701575 - RNA, 19 nt, Artificial Sequence
  Description of Artificial Sequence: Synthetic oligonucleotide
  Antisense strand to SEQ ID NO: 701574
aucauucugcuaagccaca

SEQ ID NO: 701576 - RNA, 19 nt, Artificial Sequence
  Description of Artificial Sequence: Synthetic oligonucleotide
  Sense strand starting at position 1660 of SEQ ID NO: 586224
uuauuugugucauuaguca

SEQ ID NO: 701577 - RNA, 19 nt, Artificial Sequence
  Description of Artificial Sequence: Synthetic oligonucleotide
  Antisense strand to SEQ ID NO: 701576
ugacuaaugacacaaauaa

SEQ ID NO: 701578 - RNA, 19 nt, Artificial Sequence
  Description of Artificial Sequence: Synthetic oligonucleotide
  Sense strand starting at position 1852 of SEQ ID NO: 586224
agcuaaucuucuuugaaga

SEQ ID NO: 701579 - RNA, 19 nt, Artificial Sequence
  Description of Artificial Sequence: Synthetic oligonucleotide
  Antisense strand to SEQ ID NO: 701578
ucuucaaagaagauuagcu

SEQ ID NO: 701580 - RNA, 19 nt, Artificial Sequence
  Description of Artificial Sequence: Synthetic oligonucleotide
  Sense strand starting at position 1853 of SEQ ID NO: 586224
gcuaaucuucuuugaagaa

SEQ ID NO: 701581 - RNA, 19 nt, Artificial Sequence
  Description of Artificial Sequence: Synthetic oligonucleotide
  Antisense strand to SEQ ID NO: 701580
uucuucaaagaagauuagc

SEQ ID NO: 701582 - RNA, 19 nt, Artificial Sequence
  Description of Artificial Sequence: Synthetic oligonucleotide
  Sense strand starting at position 1877 of SEQ ID NO: 586224
ucggucuuugaccauaaau

SEQ ID NO: 701583 - RNA, 19 nt, Artificial Sequence
  Description of Artificial Sequence: Synthetic oligonucleotide
  Antisense strand to SEQ ID NO: 701582
auuuauggucaaagaccga

SEQ ID NO: 701584 - RNA, 19 nt, Artificial Sequence
  Description of Artificial Sequence: Synthetic oligonucleotide
  Sense strand starting at position 2000 of SEQ ID NO: 586224
ucaacuucccuuuggagau

SEQ ID NO: 701585 - RNA, 19 nt, Artificial Sequence
  Description of Artificial Sequence: Synthetic oligonucleotide
  Antisense strand to SEQ ID NO: 701584
aucuccaaagggaaguuga

SEQ ID NO: 701586 - RNA, 19 nt, Artificial Sequence
  Description of Artificial Sequence: Synthetic oligonucleotide
  Sense strand starting at position 2253 of SEQ ID NO: 586224
gacccuaaugaguauguua

SEQ ID NO: 701587 - RNA, 19 nt, Artificial Sequence
  Description of Artificial Sequence: Synthetic oligonucleotide
  Antisense strand to SEQ ID NO: 701586
uaacauacucauuaggguc

SEQ ID NO: 701588 - RNA, 19 nt, Artificial Sequence
  Description of Artificial Sequence: Synthetic oligonucleotide
  Sense strand starting at position 2255 of SEQ ID NO: 586224
cccuaaugaguauguuaca

SEQ ID NO: 701589 - RNA, 19 nt, Artificial Sequence
  Description of Artificial Sequence: Synthetic oligonucleotide
  Antisense strand to SEQ ID NO: 701588
uguaacauacucauuaggg

SEQ ID NO: 701590 - RNA, 19 nt, Artificial Sequence
  Description of Artificial Sequence: Synthetic oligonucleotide
  Sense strand starting at position 2345 of SEQ ID NO: 586224
aggacugaacuaugucaua

SEQ ID NO: 701591 - RNA, 19 nt, Artificial Sequence
  Description of Artificial Sequence: Synthetic oligonucleotide
  Antisense strand to SEQ ID NO: 701590
uaugacauaguucaguccu

SEQ ID NO: 701592 - RNA, 19 nt, Artificial Sequence
  Description of Artificial Sequence: Synthetic oligonucleotide
  Sense strand starting at position 2490 of SEQ ID NO: 586224
ugcucuacccuagagagau

SEQ ID NO: 701593 - RNA, 19 nt, Artificial Sequence
  Description of Artificial Sequence: Synthetic oligonucleotide
  Antisense strand to SEQ ID NO: 701592
aucucucuaggguagagca

SEQ ID NO: 701594 - RNA, 19 nt, Artificial Sequence
  Description of Artificial Sequence: Synthetic oligonucleotide
  Sense strand starting at position 2509 of SEQ ID NO: 586224
gacgucacucucuagguaa

SEQ ID NO: 701595 - RNA, 19 nt, Artificial Sequence
  Description of Artificial Sequence: Synthetic oligonucleotide
  Antisense strand to SEQ ID NO: 701594
uuaccuagagagugacguc

SEQ ID NO: 701596 - RNA, 19 nt, Artificial Sequence
  Description of Artificial Sequence: Synthetic oligonucleotide
  Sense strand starting at position 2612 of SEQ ID NO: 586224
ccuauuauacaaugaggua

SEQ ID NO: 701597 - RNA, 19 nt, Artificial Sequence
  Description of Artificial Sequence: Synthetic oligonucleotide
  Antisense strand to SEQ ID NO: 701596
uaccucauuguauaauagg

SEQ ID NO: 701598 - RNA, 19 nt, Artificial Sequence
  Description of Artificial Sequence: Synthetic oligonucleotide
  Sense strand starting at position 2782 of SEQ ID NO: 586224
uggcuugauauguacaaug

SEQ ID NO: 701599 - RNA, 19 nt, Artificial Sequence
  Description of Artificial Sequence: Synthetic oligonucleotide
  Antisense strand to SEQ ID NO: 701598
cauuguacauaucaagcca

SEQ ID NO: 701600 - RNA, 19 nt, Artificial Sequence
  Description of Artificial Sequence: Synthetic oligonucleotide
  Sense strand starting at position 2784 of SEQ ID NO: 586224
gcuugauauguacaaugaa

SEQ ID NO: 701601 - RNA, 19 nt, Artificial Sequence
  Description of Artificial Sequence: Synthetic oligonucleotide
  Antisense strand to SEQ ID NO: 701600
uucauuguacauaucaagc

SEQ ID NO: 701602 - RNA, 19 nt, Artificial Sequence
  Description of Artificial Sequence: Synthetic oligonucleotide
  Sense strand starting at position 2838 of SEQ ID NO: 586224
guuuauuugcugugaccau

SEQ ID NO: 701603 - RNA, 19 nt, Artificial Sequence
  Description of Artificial Sequence: Synthetic oligonucleotide
  Antisense strand to SEQ ID NO: 701602
auggucacagcaaauaaac

SEQ ID NO: 701604 - RNA, 19 nt, Artificial Sequence
  Description of Artificial Sequence: Synthetic oligonucleotide
  Sense strand starting at position 2906 of SEQ ID NO: 586224
uggcauuucucagcuucua

SEQ ID NO: 701605 - RNA, 19 nt, Artificial Sequence
  Description of Artificial Sequence: Synthetic oligonucleotide
  Antisense strand to SEQ ID NO: 701604
uagaagcugagaaaugcca

SEQ ID NO: 701606 - RNA, 19 nt, Artificial Sequence
  Description of Artificial Sequence: Synthetic oligonucleotide
  Sense strand starting at position 2939 of SEQ ID NO: 586224
uguggugugggauagugaa

SEQ ID NO: 701607 - RNA, 19 nt, Artificial Sequence
  Description of Artificial Sequence: Synthetic oligonucleotide
  Antisense strand to SEQ ID NO: 701606
uucacuaucccacaccaca

SEQ ID NO: 701608 - RNA, 19 nt, Artificial Sequence
  Description of Artificial Sequence: Synthetic oligonucleotide
  Sense strand starting at position 2960 of SEQ ID NO: 586224
uaaaguuugggaugcauau

SEQ ID NO: 701609 - RNA, 19 nt, Artificial Sequence
  Description of Artificial Sequence: Synthetic oligonucleotide
  Antisense strand to SEQ ID NO: 701608
auaugcaucccaaacuuua

SEQ ID NO: 701610 - RNA, 19 nt, Artificial Sequence
  Description of Artificial Sequence: Synthetic oligonucleotide
  Sense strand starting at position 2978 of SEQ ID NO: 586224
uagaauugugggugaggga

SEQ ID NO: 701611 - RNA, 19 nt, Artificial Sequence
  Description of Artificial Sequence: Synthetic oligonucleotide
  Antisense strand to SEQ ID NO: 701610
ucccucacccacaauucua

SEQ ID NO: 701612 - RNA, 19 nt, Artificial Sequence
  Description of Artificial Sequence: Synthetic oligonucleotide
  Sense strand starting at position 3162 of SEQ ID NO: 586224
gcuauaugccuugugccau

SEQ ID NO: 701613 - RNA, 19 nt, Artificial Sequence
  Description of Artificial Sequence: Synthetic oligonucleotide
  Antisense strand to SEQ ID NO: 701612
auggcacaaggcauauagc

SEQ ID NO: 701614 - RNA, 19 nt, Artificial Sequence
  Description of Artificial Sequence: Synthetic oligonucleotide
  Sense strand starting at position 3303 of SEQ ID NO: 586224
uguuguauuuccuuucugu

SEQ ID NO: 701615 - RNA, 19 nt, Artificial Sequence
  Description of Artificial Sequence: Synthetic oligonucleotide
  Antisense strand to SEQ ID NO: 701614
acagaaaggaaauacaaca

SEQ ID NO: 701616 - RNA, 19 nt, Artificial Sequence
  Description of Artificial Sequence: Synthetic oligonucleotide
  Sense strand starting at position 3400 of SEQ ID NO: 586224
gcacaugacucagucaaag

SEQ ID NO: 701617 - RNA, 19 nt, Artificial Sequence
  Description of Artificial Sequence: Synthetic oligonucleotide
  Antisense strand to SEQ ID NO: 701616
cuuugacugagucaugugc

SEQ ID NO: 701618 - RNA, 19 nt, Artificial Sequence
  Description of Artificial Sequence: Synthetic oligonucleotide
  Sense strand starting at position 3552 of SEQ ID NO: 586224
aggcuuaaucuuggacacu

SEQ ID NO: 701619 - RNA, 19 nt, Artificial Sequence
  Description of Artificial Sequence: Synthetic oligonucleotide
  Antisense strand to SEQ ID NO: 701618
aguguccaagauuaagccu

SEQ ID NO: 701620 - RNA, 19 nt, Artificial Sequence
  Description of Artificial Sequence: Synthetic oligonucleotide
  Sense strand starting at position 27 of SEQ ID NO: 586225
ucuggagagaguggucaua

SEQ ID NO: 701621 - RNA, 19 nt, Artificial Sequence
  Description of Artificial Sequence: Synthetic oligonucleotide
  Antisense strand to SEQ ID NO: 701620
uaugaccacucucuccaga

SEQ ID NO: 701622 - RNA, 19 nt, Artificial Sequence
  Description of Artificial Sequence: Synthetic oligonucleotide
  Sense strand starting at position 226 of SEQ ID NO: 586225
acuugaucucuucgaggga

SEQ ID NO: 701623 - RNA, 19 nt, Artificial Sequence
  Description of Artificial Sequence: Synthetic oligonucleotide
  Antisense strand to SEQ ID NO: 701622
ucccucgaagagaucaagu

SEQ ID NO: 701624 - RNA, 19 nt, Artificial Sequence
  Description of Artificial Sequence: Synthetic oligonucleotide
  Sense strand starting at position 230 of SEQ ID NO: 586225
gaucucuucgagggaagga

SEQ ID NO: 701625 - RNA, 19 nt, Artificial Sequence
  Description of Artificial Sequence: Synthetic oligonucleotide
  Antisense strand to SEQ ID NO: 701624
uccuucccucgaagagauc

SEQ ID NO: 701626 - RNA, 19 nt, Artificial Sequence
  Description of Artificial Sequence: Synthetic oligonucleotide
  Sense strand starting at position 328 of SEQ ID NO: 586225
ggaauucuguucucauaua

SEQ ID NO: 701627 - RNA, 19 nt, Artificial Sequence
  Description of Artificial Sequence: Synthetic oligonucleotide
  Antisense strand to SEQ ID NO: 701626
uauaugagaacagaauucc

SEQ ID NO: 701628 - RNA, 19 nt, Artificial Sequence
  Description of Artificial Sequence: Synthetic oligonucleotide
  Sense strand starting at position 871 of SEQ ID NO: 586225
aucgacaucucuuuagauu

SEQ ID NO: 701629 - RNA, 19 nt, Artificial Sequence
  Description of Artificial Sequence: Synthetic oligonucleotide
  Antisense strand to SEQ ID NO: 701628
aaucuaaagagaugucgau

SEQ ID NO: 701630 - RNA, 19 nt, Artificial Sequence
  Description of Artificial Sequence: Synthetic oligonucleotide
  Sense strand starting at position 872 of SEQ ID NO: 586225
ucgacaucucuuuagauuc

SEQ ID NO: 701631 - RNA, 19 nt, Artificial Sequence
  Description of Artificial Sequence: Synthetic oligonucleotide
  Antisense strand to SEQ ID NO: 701630
gaaucuaaagagaugucga

SEQ ID NO: 701632 - RNA, 19 nt, Artificial Sequence
  Description of Artificial Sequence: Synthetic oligonucleotide
  Sense strand starting at position 1060 of SEQ ID NO: 586225
auaucccaucagugacauu

SEQ ID NO: 701633 - RNA, 19 nt, Artificial Sequence
  Description of Artificial Sequence: Synthetic oligonucleotide
  Antisense strand to SEQ ID NO: 701632
aaugucacugaugggauau

SEQ ID NO: 701634 - RNA, 19 nt, Artificial Sequence
  Description of Artificial Sequence: Synthetic oligonucleotide
  Sense strand starting at position 1119 of SEQ ID NO: 586225
gaccguauuuccuugcaac

SEQ ID NO: 701635 - RNA, 19 nt, Artificial Sequence
  Description of Artificial Sequence: Synthetic oligonucleotide
  Antisense strand to SEQ ID NO: 701634
guugcaaggaaauacgguc

SEQ ID NO: 701636 - RNA, 19 nt, Artificial Sequence
  Description of Artificial Sequence: Synthetic oligonucleotide
  Sense strand starting at position 1120 of SEQ ID NO: 586225
accguauuuccuugcaacu

SEQ ID NO: 701637 - RNA, 19 nt, Artificial Sequence
  Description of Artificial Sequence: Synthetic oligonucleotide
  Antisense strand to SEQ ID NO: 701636
aguugcaaggaaauacggu

SEQ ID NO: 701638 - RNA, 19 nt, Artificial Sequence
  Description of Artificial Sequence: Synthetic oligonucleotide
  Sense strand starting at position 1224 of SEQ ID NO: 586225
aaccuaaaggauuguugau

SEQ ID NO: 701639 - RNA, 19 nt, Artificial Sequence
  Description of Artificial Sequence: Synthetic oligonucleotide
  Antisense strand to SEQ ID NO: 701638
aucaacaauccuuuagguu

SEQ ID NO: 701640 - RNA, 19 nt, Artificial Sequence
  Description of Artificial Sequence: Synthetic oligonucleotide
  Sense strand starting at position 1383 of SEQ ID NO: 586225
aggcuauccuaaucaaagu

SEQ ID NO: 701641 - RNA, 19 nt, Artificial Sequence
  Description of Artificial Sequence: Synthetic oligonucleotide
  Antisense strand to SEQ ID NO: 701640
acuuugauuaggauagccu

SEQ ID NO: 701642 - RNA, 19 nt, Artificial Sequence
  Description of Artificial Sequence: Synthetic oligonucleotide
  Sense strand starting at position 1468 of SEQ ID NO: 586225
cuggaaaucucauccuguu

SEQ ID NO: 701643 - RNA, 19 nt, Artificial Sequence
  Description of Artificial Sequence: Synthetic oligonucleotide
  Antisense strand to SEQ ID NO: 701642
aacaggaugagauuuccag

SEQ ID NO: 701644 - RNA, 19 nt, Artificial Sequence
  Description of Artificial Sequence: Synthetic oligonucleotide
  Sense strand starting at position 1530 of SEQ ID NO: 586225
ucgggaguuugcaugguuu

SEQ ID NO: 701645 - RNA, 19 nt, Artificial Sequence
  Description of Artificial Sequence: Synthetic oligonucleotide
  Antisense strand to SEQ ID NO: 701644
aaaccaugcaaacucccga

SEQ ID NO: 701646 - RNA, 19 nt, Artificial Sequence
  Description of Artificial Sequence: Synthetic oligonucleotide
  Sense strand starting at position 1578 of SEQ ID NO: 586225
uaccuuagccaggaauguu

SEQ ID NO: 701647 - RNA, 19 nt, Artificial Sequence
  Description of Artificial Sequence: Synthetic oligonucleotide
  Antisense strand to SEQ ID NO: 701646
aacauuccuggcuaaggua

SEQ ID NO: 701648 - RNA, 19 nt, Artificial Sequence
  Description of Artificial Sequence: Synthetic oligonucleotide
  Sense strand starting at position 1618 of SEQ ID NO: 586225
cccagauucucucuagaag

SEQ ID NO: 701649 - RNA, 19 nt, Artificial Sequence
  Description of Artificial Sequence: Synthetic oligonucleotide
  Antisense strand to SEQ ID NO: 701648
cuucuagagagaaucuggg

SEQ ID NO: 701650 - RNA, 19 nt, Artificial Sequence
  Description of Artificial Sequence: Synthetic oligonucleotide
  Sense strand starting at position 2100 of SEQ ID NO: 586225
aagugaauccauugucagg

SEQ ID NO: 701651 - RNA, 19 nt, Artificial Sequence
  Description of Artificial Sequence: Synthetic oligonucleotide
  Antisense strand to SEQ ID NO: 701650
ccugacaauggauucacuu

SEQ ID NO: 701652 - RNA, 19 nt, Artificial Sequence
  Description of Artificial Sequence: Synthetic oligonucleotide
  Sense strand starting at position 2153 of SEQ ID NO: 586225
ggcugucuuguagaacaca

SEQ ID NO: 701653 - RNA, 19 nt, Artificial Sequence
  Description of Artificial Sequence: Synthetic oligonucleotide
  Antisense strand to SEQ ID NO: 701652
uguguucuacaagacagcc

SEQ ID NO: 701654 - RNA, 19 nt, Artificial Sequence
  Description of Artificial Sequence: Synthetic oligonucleotide
  Sense strand starting at position 2156 of SEQ ID NO: 586225
ugucuuguagaacacaaau

SEQ ID NO: 701655 - RNA, 19 nt, Artificial Sequence
  Description of Artificial Sequence: Synthetic oligonucleotide
  Antisense strand to SEQ ID NO: 701654
auuuguguucuacaagaca

SEQ ID NO: 701656 - RNA, 19 nt, Artificial Sequence
  Description of Artificial Sequence: Synthetic oligonucleotide
  Sense strand starting at position 2213 of SEQ ID NO: 586225
guuaacagaucaguuuauu

SEQ ID NO: 701657 - RNA, 19 nt, Artificial Sequence
  Description of Artificial Sequence: Synthetic oligonucleotide
  Antisense strand to SEQ ID NO: 701656
aauaaacugaucuguuaac

SEQ ID NO: 701658 - RNA, 19 nt, Artificial Sequence
  Description of Artificial Sequence: Synthetic oligonucleotide
  Sense strand starting at position 2412 of SEQ ID NO: 586225
auacgucugcauguguuau

SEQ ID NO: 701659 - RNA, 19 nt, Artificial Sequence
  Description of Artificial Sequence: Synthetic oligonucleotide
  Antisense strand to SEQ ID NO: 701658
auaacacaugcagacguau

SEQ ID NO: 701660 - RNA, 19 nt, Artificial Sequence
  Description of Artificial Sequence: Synthetic oligonucleotide
  Sense strand starting at position 2478 of SEQ ID NO: 586225
agguaauacuggccagaau

SEQ ID NO: 701661 - RNA, 19 nt, Artificial Sequence
  Description of Artificial Sequence: Synthetic oligonucleotide
  Antisense strand to SEQ ID NO: 701660
auucuggccaguauuaccu

SEQ ID NO: 701662 - RNA, 19 nt, Artificial Sequence
  Description of Artificial Sequence: Synthetic oligonucleotide
  Sense strand starting at position 2574 of SEQ ID NO: 586225
uggugauguggagauagua

SEQ ID NO: 701663 - RNA, 19 nt, Artificial Sequence
  Description of Artificial Sequence: Synthetic oligonucleotide
  Antisense strand to SEQ ID NO: 701662
uacuaucuccacaucacca

SEQ ID NO: 701664 - RNA, 19 nt, Artificial Sequence
  Description of Artificial Sequence: Synthetic oligonucleotide
  Sense strand starting at position 2704 of SEQ ID NO: 586225
aggugacgucuugaaagug

SEQ ID NO: 701665 - RNA, 19 nt, Artificial Sequence
  Description of Artificial Sequence: Synthetic oligonucleotide
  Antisense strand to SEQ ID NO: 701664
cacuuucaagacgucaccu

SEQ ID NO: 701666 - RNA, 19 nt, Artificial Sequence
  Description of Artificial Sequence: Synthetic oligonucleotide
  Sense strand starting at position 2746 of SEQ ID NO: 586225
ggaugugugcuauaagagg

SEQ ID NO: 701667 - RNA, 19 nt, Artificial Sequence
  Description of Artificial Sequence: Synthetic oligonucleotide
  Antisense strand to SEQ ID NO: 701666
ccucuuauagcacacaucc

SEQ ID NO: 701668 - RNA, 19 nt, Artificial Sequence
  Description of Artificial Sequence: Synthetic oligonucleotide
  Sense strand starting at position 2763 of SEQ ID NO: 586225
gggucagaauuaguagaug

SEQ ID NO: 701669 - RNA, 19 nt, Artificial Sequence
  Description of Artificial Sequence: Synthetic oligonucleotide
  Antisense strand to SEQ ID NO: 701668
caucuacuaauucugaccc

SEQ ID NO: 701670 - RNA, 19 nt, Artificial Sequence
  Description of Artificial Sequence: Synthetic oligonucleotide
  Sense strand starting at position 2766 of SEQ ID NO: 586225
ucagaauuaguagaugcua

SEQ ID NO: 701671 - RNA, 19 nt, Artificial Sequence
  Description of Artificial Sequence: Synthetic oligonucleotide
  Antisense strand to SEQ ID NO: 701670
uagcaucuacuaauucuga

SEQ ID NO: 701672 - RNA, 19 nt, Artificial Sequence
  Description of Artificial Sequence: Synthetic oligonucleotide
  Sense strand starting at position 2913 of SEQ ID NO: 586225
aggugcaagaucuaugucu

SEQ ID NO: 701673 - RNA, 19 nt, Artificial Sequence
  Description of Artificial Sequence: Synthetic oligonucleotide
  Antisense strand to SEQ ID NO: 701672
agacauagaucuugcaccu

SEQ ID NO: 701674 - RNA, 19 nt, Artificial Sequence
  Description of Artificial Sequence: Synthetic oligonucleotide
  Sense strand starting at position 3005 of SEQ ID NO: 586225
uccagauacuggucuuuaa

SEQ ID NO: 701675 - RNA, 19 nt, Artificial Sequence
  Description of Artificial Sequence: Synthetic oligonucleotide
  Antisense strand to SEQ ID NO: 701674
uuaaagaccaguaucugga

SEQ ID NO: 701676 - RNA, 19 nt, Artificial Sequence
  Description of Artificial Sequence: Synthetic oligonucleotide
  Sense strand starting at position 3052 of SEQ ID NO: 586225
ccuguuuaugaagauguga

SEQ ID NO: 701677 - RNA, 19 nt, Artificial Sequence
  Description of Artificial Sequence: Synthetic oligonucleotide
  Antisense strand to SEQ ID NO: 701676
ucacaucuucauaaacagg

SEQ ID NO: 701678 - RNA, 19 nt, Artificial Sequence
  Description of Artificial Sequence: Synthetic oligonucleotide
  Sense strand starting at position 3054 of SEQ ID NO: 586225
uguuuaugaagaugugacu

SEQ ID NO: 701679 - RNA, 19 nt, Artificial Sequence
  Description of Artificial Sequence: Synthetic oligonucleotide
  Antisense strand to SEQ ID NO: 701678
agucacaucuucauaaaca

SEQ ID NO: 701680 - RNA, 19 nt, Artificial Sequence
  Description of Artificial Sequence: Synthetic oligonucleotide
  Sense strand starting at position 3074 of SEQ ID NO: 586225
agaaaugaucucuguuuac

SEQ ID NO: 701681 - RNA, 19 nt, Artificial Sequence
  Description of Artificial Sequence: Synthetic oligonucleotide
  Antisense strand to SEQ ID NO: 701680
guaaacagagaucauuucu

SEQ ID NO: 701682 - RNA, 19 nt, Artificial Sequence
  Description of Artificial Sequence: Synthetic oligonucleotide
  Sense strand starting at position 3077 of SEQ ID NO: 586225
aaugaucucuguuuacgaa

SEQ ID NO: 701683 - RNA, 19 nt, Artificial Sequence
  Description of Artificial Sequence: Synthetic oligonucleotide
  Antisense strand to SEQ ID NO: 701682
uucguaaacagagaucauu

SEQ ID NO: 701684 - RNA, 19 nt, Artificial Sequence
  Description of Artificial Sequence: Synthetic oligonucleotide
  Sense strand starting at position 3078 of SEQ ID NO: 586225
augaucucuguuuacgaaa

SEQ ID NO: 701685 - RNA, 19 nt, Artificial Sequence
  Description of Artificial Sequence: Synthetic oligonucleotide
  Antisense strand to SEQ ID NO: 701684
uuucguaaacagagaucau

SEQ ID NO: 701686 - RNA, 19 nt, Artificial Sequence
  Description of Artificial Sequence: Synthetic oligonucleotide
  Sense strand starting at position 3184 of SEQ ID NO: 586225
acaaguuacccagaggcau

SEQ ID NO: 701687 - RNA, 19 nt, Artificial Sequence
  Description of Artificial Sequence: Synthetic oligonucleotide
  Antisense strand to SEQ ID NO: 701686
augccucuggguaacuugu

SEQ ID NO: 701688 - RNA, 19 nt, Artificial Sequence
  Description of Artificial Sequence: Synthetic oligonucleotide
  Sense strand starting at position 3318 of SEQ ID NO: 586225
agagaugagccucaggcau

SEQ ID NO: 701689 - RNA, 19 nt, Artificial Sequence
  Description of Artificial Sequence: Synthetic oligonucleotide
  Antisense strand to SEQ ID NO: 701688
augccugaggcucaucucu

SEQ ID NO: 701690 - RNA, 19 nt, Artificial Sequence
  Description of Artificial Sequence: Synthetic oligonucleotide
  Sense strand starting at position 3608 of SEQ ID NO: 586225
ugggcuugaacauauugua

SEQ ID NO: 701691 - RNA, 19 nt, Artificial Sequence
  Description of Artificial Sequence: Synthetic oligonucleotide
  Antisense strand to SEQ ID NO: 701690
uacaauauguucaagccca

SEQ ID NO: 701692 - RNA, 19 nt, Artificial Sequence
  Description of Artificial Sequence: Synthetic oligonucleotide
  Sense strand starting at position 3615 of SEQ ID NO: 586225
gaacauauuguagggcaga

SEQ ID NO: 701693 - RNA, 19 nt, Artificial Sequence
  Description of Artificial Sequence: Synthetic oligonucleotide
  Antisense strand to SEQ ID NO: 701692
ucugcccuacaauauguuc

SEQ ID NO: 701694 - RNA, 19 nt, Artificial Sequence
  Description of Artificial Sequence: Synthetic oligonucleotide
  Sense strand starting at position 3618 of SEQ ID NO: 586225
cauauuguagggcagacau

SEQ ID NO: 701695 - RNA, 19 nt, Artificial Sequence
  Description of Artificial Sequence: Synthetic oligonucleotide
  Antisense strand to SEQ ID NO: 701694
augucugcccuacaauaug

SEQ ID NO: 701696 - RNA, 19 nt, Artificial Sequence
  Description of Artificial Sequence: Synthetic oligonucleotide
  Sense strand starting at position 3723 of SEQ ID NO: 586225
ggugguauucuccauaacu

SEQ ID NO: 701697 - RNA, 19 nt, Artificial Sequence
  Description of Artificial Sequence: Synthetic oligonucleotide
  Antisense strand to SEQ ID NO: 701696
aguuauggagaauaccacc

SEQ ID NO: 701698 - RNA, 19 nt, Artificial Sequence
  Description of Artificial Sequence: Synthetic oligonucleotide
  Sense strand starting at position 3840 of SEQ ID NO: 586225
acagcaucaggguauaauu

SEQ ID NO: 701699 - RNA, 19 nt, Artificial Sequence
  Description of Artificial Sequence: Synthetic oligonucleotide
  Antisense strand to SEQ ID NO: 701698
aauuauacccugaugcugu

SEQ ID NO: 701700 - RNA, 19 nt, Artificial Sequence
  Description of Artificial Sequence: Synthetic oligonucleotide
  Sense strand starting at position 47 of SEQ ID NO: 586226
aggcauguuguggagaaau

SEQ ID NO: 701701 - RNA, 19 nt, Artificial Sequence
  Description of Artificial Sequence: Synthetic oligonucleotide
  Antisense strand to SEQ ID NO: 701700
auuucuccacaacaugccu

SEQ ID NO: 701702 - RNA, 19 nt, Artificial Sequence
  Description of Artificial Sequence: Synthetic oligonucleotide
  Sense strand starting at position 175 of SEQ ID NO: 586226
gacaaccaucccggugaga

SEQ ID NO: 701703 - RNA, 19 nt, Artificial Sequence
  Description of Artificial Sequence: Synthetic oligonucleotide
  Antisense strand to SEQ ID NO: 701702
ucucaccgggaugguuguc

SEQ ID NO: 701704 - RNA, 19 nt, Artificial Sequence
  Description of Artificial Sequence: Synthetic oligonucleotide
  Sense strand starting at position 191 of SEQ ID NO: 586226
agagguaauagcuguugaa

SEQ ID NO: 701705 - RNA, 19 nt, Artificial Sequence
  Description of Artificial Sequence: Synthetic oligonucleotide
  Antisense strand to SEQ ID NO: 701704
uucaacagcuauuaccucu

SEQ ID NO: 701706 - RNA, 19 nt, Artificial Sequence
  Description of Artificial Sequence: Synthetic oligonucleotide
  Sense strand starting at position 252 of SEQ ID NO: 586226
aaaggagacugauagaauc

SEQ ID NO: 701707 - RNA, 19 nt, Artificial Sequence
  Description of Artificial Sequence: Synthetic oligonucleotide
  Antisense strand to SEQ ID NO: 701706
gauucuaucagucuccuuu

SEQ ID NO: 701708 - RNA, 19 nt, Artificial Sequence
  Description of Artificial Sequence: Synthetic oligonucleotide
  Sense strand starting at position 441 of SEQ ID NO: 586226
ugagaucagugguuucuga

SEQ ID NO: 701709 - RNA, 19 nt, Artificial Sequence
  Description of Artificial Sequence: Synthetic oligonucleotide
  Antisense strand to SEQ ID NO: 701708
ucagaaaccacugaucuca

SEQ ID NO: 701710 - RNA, 19 nt, Artificial Sequence
  Description of Artificial Sequence: Synthetic oligonucleotide
  Sense strand starting at position 476 of SEQ ID NO: 586226
cuaggauuccaaggaaguu

SEQ ID NO: 701711 - RNA, 19 nt, Artificial Sequence
  Description of Artificial Sequence: Synthetic oligonucleotide
  Antisense strand to SEQ ID NO: 701710
aacuuccuuggaauccuag

SEQ ID NO: 701712 - RNA, 19 nt, Artificial Sequence
  Description of Artificial Sequence: Synthetic oligonucleotide
  Sense strand starting at position 558 of SEQ ID NO: 586226
gggcuaugacugcagagua

SEQ ID NO: 701713 - RNA, 19 nt, Artificial Sequence
  Description of Artificial Sequence: Synthetic oligonucleotide
  Antisense strand to SEQ ID NO: 701712
uacucugcagucauagccc

SEQ ID NO: 701714 - RNA, 19 nt, Artificial Sequence
  Description of Artificial Sequence: Synthetic oligonucleotide
  Sense strand starting at position 680 of SEQ ID NO: 586226
uuugauaagcacuggacua

SEQ ID NO: 701715 - RNA, 19 nt, Artificial Sequence
  Description of Artificial Sequence: Synthetic oligonucleotide
  Antisense strand to SEQ ID NO: 701714
uaguccagugcuuaucaaa

SEQ ID NO: 701716 - RNA, 19 nt, Artificial Sequence
  Description of Artificial Sequence: Synthetic oligonucleotide
  Sense strand starting at position 700 of SEQ ID NO: 586226
acagauaacgucuaaaguc

SEQ ID NO: 701717 - RNA, 19 nt, Artificial Sequence
  Description of Artificial Sequence: Synthetic oligonucleotide
  Antisense strand to SEQ ID NO: 701716
gacuuuagacguuaucugu

SEQ ID NO: 701718 - RNA, 19 nt, Artificial Sequence
  Description of Artificial Sequence: Synthetic oligonucleotide
  Sense strand starting at position 763 of SEQ ID NO: 586226
cuagcucuccaagagaucu

SEQ ID NO: 701719 - RNA, 19 nt, Artificial Sequence
  Description of Artificial Sequence: Synthetic oligonucleotide
  Antisense strand to SEQ ID NO: 701718
agaucucuuggagagcuag

SEQ ID NO: 701720 - RNA, 19 nt, Artificial Sequence
  Description of Artificial Sequence: Synthetic oligonucleotide
  Sense strand starting at position 823 of SEQ ID NO: 586226
gaguuucucuguuuauuug

SEQ ID NO: 701721 - RNA, 19 nt, Artificial Sequence
  Description of Artificial Sequence: Synthetic oligonucleotide
  Antisense strand to SEQ ID NO: 701720
caaauaaacagagaaacuc

SEQ ID NO: 701722 - RNA, 19 nt, Artificial Sequence
  Description of Artificial Sequence: Synthetic oligonucleotide
  Sense strand starting at position 937 of SEQ ID NO: 586226
gccauuugguguucuaauu

SEQ ID NO: 701723 - RNA, 19 nt, Artificial Sequence
  Description of Artificial Sequence: Synthetic oligonucleotide
  Antisense strand to SEQ ID NO: 701722
aauuagaacaccaaauggc

SEQ ID NO: 701724 - RNA, 19 nt, Artificial Sequence
  Description of Artificial Sequence: Synthetic oligonucleotide
  Sense strand starting at position 947 of SEQ ID NO: 586226
guucuaauucuugugcggu

SEQ ID NO: 701725 - RNA, 19 nt, Artificial Sequence
  Description of Artificial Sequence: Synthetic oligonucleotide
  Antisense strand to SEQ ID NO: 701724
accgcacaagaauuagaac

SEQ ID NO: 701726 - RNA, 19 nt, Artificial Sequence
  Description of Artificial Sequence: Synthetic oligonucleotide
  Sense strand starting at position 1264 of SEQ ID NO: 586226
uagucagauggucaguaua

SEQ ID NO: 701727 - RNA, 19 nt, Artificial Sequence
  Description of Artificial Sequence: Synthetic oligonucleotide
  Antisense strand to SEQ ID NO: 701726
uauacugaccaucugacua

SEQ ID NO: 701728 - RNA, 19 nt, Artificial Sequence
  Description of Artificial Sequence: Synthetic oligonucleotide
  Sense strand starting at position 1267 of SEQ ID NO: 586226
ucagauggucaguauauug

SEQ ID NO: 701729 - RNA, 19 nt, Artificial Sequence
  Description of Artificial Sequence: Synthetic oligonucleotide
  Antisense strand to SEQ ID NO: 701728
caauauacugaccaucuga

SEQ ID NO: 701730 - RNA, 19 nt, Artificial Sequence
  Description of Artificial Sequence: Synthetic oligonucleotide
  Sense strand starting at position 1294 of SEQ ID NO: 586226
ggcuguuuacucuaaggau

SEQ ID NO: 701731 - RNA, 19 nt, Artificial Sequence
  Description of Artificial Sequence: Synthetic oligonucleotide
  Antisense strand to SEQ ID NO: 701730
auccuuagaguaaacagcc

SEQ ID NO: 701732 - RNA, 19 nt, Artificial Sequence
  Description of Artificial Sequence: Synthetic oligonucleotide
  Sense strand starting at position 1350 of SEQ ID NO: 586226
gcaaauggaucauucugaa

SEQ ID NO: 701733 - RNA, 19 nt, Artificial Sequence
  Description of Artificial Sequence: Synthetic oligonucleotide
  Antisense strand to SEQ ID NO: 701732
uucagaaugauccauuugc

SEQ ID NO: 701734 - RNA, 19 nt, Artificial Sequence
  Description of Artificial Sequence: Synthetic oligonucleotide
  Sense strand starting at position 1457 of SEQ ID NO: 586226
guauaaacuccuggcaaau

SEQ ID NO: 701735 - RNA, 19 nt, Artificial Sequence
  Description of Artificial Sequence: Synthetic oligonucleotide
  Antisense strand to SEQ ID NO: 701734
auuugccaggaguuuauac

SEQ ID NO: 701736 - RNA, 19 nt, Artificial Sequence
  Description of Artificial Sequence: Synthetic oligonucleotide
  Sense strand starting at position 2016 of SEQ ID NO: 586226
ucaucagagagcugauugu

SEQ ID NO: 701737 - RNA, 19 nt, Artificial Sequence
  Description of Artificial Sequence: Synthetic oligonucleotide
  Antisense strand to SEQ ID NO: 701736
acaaucagcucucugauga

SEQ ID NO: 701738 - RNA, 19 nt, Artificial Sequence
  Description of Artificial Sequence: Synthetic oligonucleotide
  Sense strand starting at position 2058 of SEQ ID NO: 586226
auagaagcccaucauguuu

SEQ ID NO: 701739 - RNA, 19 nt, Artificial Sequence
  Description of Artificial Sequence: Synthetic oligonucleotide
  Antisense strand to SEQ ID NO: 701738
aaacaugaugggcuucuau

SEQ ID NO: 701740 - RNA, 19 nt, Artificial Sequence
  Description of Artificial Sequence: Synthetic oligonucleotide
  Sense strand starting at position 2071 of SEQ ID NO: 586226
auguuuagcgaucagagag

SEQ ID NO: 701741 - RNA, 19 nt, Artificial Sequence
  Description of Artificial Sequence: Synthetic oligonucleotide
  Antisense strand to SEQ ID NO: 701740
cucucugaucgcuaaacau

SEQ ID NO: 701742 - RNA, 19 nt, Artificial Sequence
  Description of Artificial Sequence: Synthetic oligonucleotide
  Sense strand starting at position 2101 of SEQ ID NO: 586226
ucgggaguuccagaaaugu

SEQ ID NO: 701743 - RNA, 19 nt, Artificial Sequence
  Description of Artificial Sequence: Synthetic oligonucleotide
  Antisense strand to SEQ ID NO: 701742
acauuucuggaacucccga

SEQ ID NO: 701744 - RNA, 19 nt, Artificial Sequence
  Description of Artificial Sequence: Synthetic oligonucleotide
  Sense strand starting at position 2202 of SEQ ID NO: 586226
agguaaguaacuggucaaa

SEQ ID NO: 701745 - RNA, 19 nt, Artificial Sequence
  Description of Artificial Sequence: Synthetic oligonucleotide
  Antisense strand to SEQ ID NO: 701744
uuugaccaguuacuuaccu

SEQ ID NO: 701746 - RNA, 19 nt, Artificial Sequence
  Description of Artificial Sequence: Synthetic oligonucleotide
  Sense strand starting at position 2204 of SEQ ID NO: 586226
guaaguaacuggucaaagg

SEQ ID NO: 701747 - RNA, 19 nt, Artificial Sequence
  Description of Artificial Sequence: Synthetic oligonucleotide
  Antisense strand to SEQ ID NO: 701746
ccuuugaccaguuacuuac

SEQ ID NO: 701748 - RNA, 19 nt, Artificial Sequence
  Description of Artificial Sequence: Synthetic oligonucleotide
  Sense strand starting at position 2234 of SEQ ID NO: 586226
gaugcauuugcucagccuu

SEQ ID NO: 701749 - RNA, 19 nt, Artificial Sequence
  Description of Artificial Sequence: Synthetic oligonucleotide
  Antisense strand to SEQ ID NO: 701748
aaggcugagcaaaugcauc

SEQ ID NO: 701750 - RNA, 19 nt, Artificial Sequence
  Description of Artificial Sequence: Synthetic oligonucleotide
  Sense strand starting at position 2260 of SEQ ID NO: 586226
auaguugaucaugguauua

SEQ ID NO: 701751 - RNA, 19 nt, Artificial Sequence
  Description of Artificial Sequence: Synthetic oligonucleotide
  Antisense strand to SEQ ID NO: 701750
uaauaccaugaucaacuau

SEQ ID NO: 701752 - RNA, 19 nt, Artificial Sequence
  Description of Artificial Sequence: Synthetic oligonucleotide
  Sense strand starting at position 2575 of SEQ ID NO: 586226
ccaagaaaugugggcaaga

SEQ ID NO: 701753 - RNA, 19 nt, Artificial Sequence
  Description of Artificial Sequence: Synthetic oligonucleotide
  Antisense strand to SEQ ID NO: 701752
ucuugcccacauuucuugg

SEQ ID NO: 701754 - RNA, 19 nt, Artificial Sequence
  Description of Artificial Sequence: Synthetic oligonucleotide
  Sense strand starting at position 2877 of SEQ ID NO: 586226
auccgaucuccacaaugua

SEQ ID NO: 701755 - RNA, 19 nt, Artificial Sequence
  Description of Artificial Sequence: Synthetic oligonucleotide
  Antisense strand to SEQ ID NO: 701754
uacauuguggagaucggau

SEQ ID NO: 701756 - RNA, 19 nt, Artificial Sequence
  Description of Artificial Sequence: Synthetic oligonucleotide
  Sense strand starting at position 3099 of SEQ ID NO: 586226
guuuaauuggguuagguua

SEQ ID NO: 701757 - RNA, 19 nt, Artificial Sequence
  Description of Artificial Sequence: Synthetic oligonucleotide
  Antisense strand to SEQ ID NO: 701756
uaaccuaacccaauuaaac

SEQ ID NO: 701758 - RNA, 19 nt, Artificial Sequence
  Description of Artificial Sequence: Synthetic oligonucleotide
  Sense strand starting at position 3115 of SEQ ID NO: 586226
uuaaguggucuccacuuua

SEQ ID NO: 701759 - RNA, 19 nt, Artificial Sequence
  Description of Artificial Sequence: Synthetic oligonucleotide
  Antisense strand to SEQ ID NO: 701758
uaaaguggagaccacuuaa

SEQ ID NO: 701760 - RNA, 19 nt, Artificial Sequence
  Description of Artificial Sequence: Synthetic oligonucleotide
  Sense strand starting at position 3165 of SEQ ID NO: 586226
auacuaugcggucaucaga

SEQ ID NO: 701761 - RNA, 19 nt, Artificial Sequence
  Description of Artificial Sequence: Synthetic oligonucleotide
  Antisense strand to SEQ ID NO: 701760
ucugaugaccgcauaguau

SEQ ID NO: 701762 - RNA, 19 nt, Artificial Sequence
  Description of Artificial Sequence: Synthetic oligonucleotide
  Sense strand starting at position 3604 of SEQ ID NO: 586226
acauaugaucaccgaacau

SEQ ID NO: 701763 - RNA, 19 nt, Artificial Sequence
  Description of Artificial Sequence: Synthetic oligonucleotide
  Antisense strand to SEQ ID NO: 701762
auguucggugaucauaugu

SEQ ID NO: 701764 - RNA, 19 nt, Artificial Sequence
  Description of Artificial Sequence: Synthetic oligonucleotide
  Sense strand starting at position 3721 of SEQ ID NO: 586226
ucgcucuagaacugagaca

SEQ ID NO: 701765 - RNA, 19 nt, Artificial Sequence
  Description of Artificial Sequence: Synthetic oligonucleotide
  Antisense strand to SEQ ID NO: 701764
ugucucaguucuagagcga

SEQ ID NO: 701766 - RNA, 19 nt, Artificial Sequence
  Description of Artificial Sequence: Synthetic oligonucleotide
  Sense strand starting at position 3832 of SEQ ID NO: 586226
uuucuaugguagguggaau

SEQ ID NO: 701767 - RNA, 19 nt, Artificial Sequence
  Description of Artificial Sequence: Synthetic oligonucleotide
  Antisense strand to SEQ ID NO: 701766
auuccaccuaccauagaaa

SEQ ID NO: 701768 - RNA, 19 nt, Artificial Sequence
  Description of Artificial Sequence: Synthetic oligonucleotide
  Sense strand starting at position 3833 of SEQ ID NO: 586226
uucuaugguagguggaaua

SEQ ID NO: 701769 - RNA, 19 nt, Artificial Sequence
  Description of Artificial Sequence: Synthetic oligonucleotide
  Antisense strand to SEQ ID NO: 701768
uauuccaccuaccauagaa

SEQ ID NO: 701770 - RNA, 19 nt, Artificial Sequence
  Description of Artificial Sequence: Synthetic oligonucleotide
  Sense strand starting at position 3876 of SEQ ID NO: 586226
cugagaacauguuaauuug

SEQ ID NO: 701771 - RNA, 19 nt, Artificial Sequence
  Description of Artificial Sequence: Synthetic oligonucleotide
  Antisense strand to SEQ ID NO: 701770
caaauuaacauguucucag

SEQ ID NO: 701772 - RNA, 19 nt, Artificial Sequence
  Description of Artificial Sequence: Synthetic oligonucleotide
  Sense strand starting at position 3884 of SEQ ID NO: 586226
auguuaauuugcguggcaa

SEQ ID NO: 701773 - RNA, 19 nt, Artificial Sequence
  Description of Artificial Sequence: Synthetic oligonucleotide
  Antisense strand to SEQ ID NO: 701772
uugccacgcaaauuaacau

SEQ ID NO: 701774 - RNA, 19 nt, Artificial Sequence
  Description of Artificial Sequence: Synthetic oligonucleotide
  Sense strand starting at position 3906 of SEQ ID NO: 586226
ggaccuugucgauaugaug

SEQ ID NO: 701775 - RNA, 19 nt, Artificial Sequence
  Description of Artificial Sequence: Synthetic oligonucleotide
  Antisense strand to SEQ ID NO: 701774
caucauaucgacaaggucc

SEQ ID NO: 701776 - RNA, 19 nt, Artificial Sequence
  Description of Artificial Sequence: Synthetic oligonucleotide
  Sense strand starting at position 3965 of SEQ ID NO: 586226
ccaggugugcuggaaugaa

SEQ ID NO: 701777 - RNA, 19 nt, Artificial Sequence
  Description of Artificial Sequence: Synthetic oligonucleotide
  Antisense strand to SEQ ID NO: 701776
uucauuccagcacaccugg

SEQ ID NO: 701778 - RNA, 19 nt, Artificial Sequence
  Description of Artificial Sequence: Synthetic oligonucleotide
  Sense strand starting at position 3980 of SEQ ID NO: 586226
ugaaucacauggcucuuua

SEQ ID NO: 701779 - RNA, 19 nt, Artificial Sequence
  Description of Artificial Sequence: Synthetic oligonucleotide
  Antisense strand to SEQ ID NO: 701778
uaaagagccaugugauuca

SEQ ID NO: 701780 - RNA, 19 nt, Artificial Sequence
  Description of Artificial Sequence: Synthetic oligonucleotide
  Sense strand starting at position 17 of SEQ ID NO: 586227
cuguucuagccucaagaca

SEQ ID NO: 701781 - RNA, 19 nt, Artificial Sequence
  Description of Artificial Sequence: Synthetic oligonucleotide
  Antisense strand to SEQ ID NO: 701780
ugucuugaggcuagaacag

SEQ ID NO: 701782 - RNA, 19 nt, Artificial Sequence
  Description of Artificial Sequence: Synthetic oligonucleotide
  Sense strand starting at position 150 of SEQ ID NO: 586227
aggagcucaugaguucuau

SEQ ID NO: 701783 - RNA, 19 nt, Artificial Sequence
  Description of Artificial Sequence: Synthetic oligonucleotide
  Antisense strand to SEQ ID NO: 701782
auagaacucaugagcuccu

SEQ ID NO: 701784 - RNA, 19 nt, Artificial Sequence
  Description of Artificial Sequence: Synthetic oligonucleotide
  Sense strand starting at position 156 of SEQ ID NO: 586227
ucaugaguucuaugugcac

SEQ ID NO: 701785 - RNA, 19 nt, Artificial Sequence
  Description of Artificial Sequence: Synthetic oligonucleotide
  Antisense strand to SEQ ID NO: 701784
gugcacauagaacucauga

SEQ ID NO: 701786 - RNA, 19 nt, Artificial Sequence
  Description of Artificial Sequence: Synthetic oligonucleotide
  Sense strand starting at position 158 of SEQ ID NO: 586227
augaguucuaugugcacga

SEQ ID NO: 701787 - RNA, 19 nt, Artificial Sequence
  Description of Artificial Sequence: Synthetic oligonucleotide
  Antisense strand to SEQ ID NO: 701786
ucgugcacauagaacucau

SEQ ID NO: 701788 - RNA, 19 nt, Artificial Sequence
  Description of Artificial Sequence: Synthetic oligonucleotide
  Sense strand starting at position 159 of SEQ ID NO: 586227
ugaguucuaugugcacgaa

SEQ ID NO: 701789 - RNA, 19 nt, Artificial Sequence
  Description of Artificial Sequence: Synthetic oligonucleotide
  Antisense strand to SEQ ID NO: 701788
uucgugcacauagaacuca

SEQ ID NO: 701790 - RNA, 19 nt, Artificial Sequence
  Description of Artificial Sequence: Synthetic oligonucleotide
  Sense strand starting at position 160 of SEQ ID NO: 586227
gaguucuaugugcacgaau

SEQ ID NO: 701791 - RNA, 19 nt, Artificial Sequence
  Description of Artificial Sequence: Synthetic oligonucleotide
  Antisense strand to SEQ ID NO: 701790
auucgugcacauagaacuc

SEQ ID NO: 701792 - RNA, 19 nt, Artificial Sequence
  Description of Artificial Sequence: Synthetic oligonucleotide
  Sense strand starting at position 162 of SEQ ID NO: 586227
guucuaugugcacgaaugu

SEQ ID NO: 701793 - RNA, 19 nt, Artificial Sequence
  Description of Artificial Sequence: Synthetic oligonucleotide
  Antisense strand to SEQ ID NO: 701792
acauucgugcacauagaac

SEQ ID NO: 701794 - RNA, 19 nt, Artificial Sequence
  Description of Artificial Sequence: Synthetic oligonucleotide
  Sense strand starting at position 163 of SEQ ID NO: 586227
uucuaugugcacgaauguu

SEQ ID NO: 701795 - RNA, 19 nt, Artificial Sequence
  Description of Artificial Sequence: Synthetic oligonucleotide
  Antisense strand to SEQ ID NO: 701794
aacauucgugcacauagaa

SEQ ID NO: 701796 - RNA, 19 nt, Artificial Sequence
  Description of Artificial Sequence: Synthetic oligonucleotide
  Sense strand starting at position 175 of SEQ ID NO: 586227
gaauguugcgugugucuca

SEQ ID NO: 701797 - RNA, 19 nt, Artificial Sequence
  Description of Artificial Sequence: Synthetic oligonucleotide
  Antisense strand to SEQ ID NO: 701796
ugagacacacgcaacauuc

SEQ ID NO: 701798 - RNA, 19 nt, Artificial Sequence
  Description of Artificial Sequence: Synthetic oligonucleotide
  Sense strand starting at position 215 of SEQ ID NO: 586227
acccauucuuucugagaag

SEQ ID NO: 701799 - RNA, 19 nt, Artificial Sequence
  Description of Artificial Sequence: Synthetic oligonucleotide
  Antisense strand to SEQ ID NO: 701798
cuucucagaaagaaugggu

SEQ ID NO: 701800 - RNA, 19 nt, Artificial Sequence
  Description of Artificial Sequence: Synthetic oligonucleotide
  Sense strand starting at position 264 of SEQ ID NO: 586227
ugggucacucuagaaugua

SEQ ID NO: 701801 - RNA, 19 nt, Artificial Sequence
  Description of Artificial Sequence: Synthetic oligonucleotide
  Antisense strand to SEQ ID NO: 701800
uacauucuagagugaccca

SEQ ID NO: 701802 - RNA, 19 nt, Artificial Sequence
  Description of Artificial Sequence: Synthetic oligonucleotide
  Sense strand starting at position 267 of SEQ ID NO: 586227
gucacucuagaauguaguu

SEQ ID NO: 701803 - RNA, 19 nt, Artificial Sequence
  Description of Artificial Sequence: Synthetic oligonucleotide
  Antisense strand to SEQ ID NO: 701802
aacuacauucuagagugac

SEQ ID NO: 701804 - RNA, 19 nt, Artificial Sequence
  Description of Artificial Sequence: Synthetic oligonucleotide
  Sense strand starting at position 336 of SEQ ID NO: 586227
gcuauucccugagcccaaa

SEQ ID NO: 701805 - RNA, 19 nt, Artificial Sequence
  Description of Artificial Sequence: Synthetic oligonucleotide
  Antisense strand to SEQ ID NO: 701804
uuugggcucagggaauagc

SEQ ID NO: 701806 - RNA, 19 nt, Artificial Sequence
  Description of Artificial Sequence: Synthetic oligonucleotide
  Sense strand starting at position 410 of SEQ ID NO: 586227
agucuuggcacucagggaa

SEQ ID NO: 701807 - RNA, 19 nt, Artificial Sequence
  Description of Artificial Sequence: Synthetic oligonucleotide
  Antisense strand to SEQ ID NO: 701806
uucccugagugccaagacu

SEQ ID NO: 701808 - RNA, 19 nt, Artificial Sequence
  Description of Artificial Sequence: Synthetic oligonucleotide
  Sense strand starting at position 496 of SEQ ID NO: 586227
acaagccucguccaagaaa

SEQ ID NO: 701809 - RNA, 19 nt, Artificial Sequence
  Description of Artificial Sequence: Synthetic oligonucleotide
  Antisense strand to SEQ ID NO: 701808
uuucuuggacgaggcuugu

SEQ ID NO: 701810 - RNA, 19 nt, Artificial Sequence
  Description of Artificial Sequence: Synthetic oligonucleotide
  Sense strand starting at position 694 of SEQ ID NO: 586227
ggaccaagucucgggaagu

SEQ ID NO: 701811 - RNA, 19 nt, Artificial Sequence
  Description of Artificial Sequence: Synthetic oligonucleotide
  Antisense strand to SEQ ID NO: 701810
acuucccgagacuuggucc

SEQ ID NO: 701812 - RNA, 19 nt, Artificial Sequence
  Description of Artificial Sequence: Synthetic oligonucleotide
  Sense strand starting at position 695 of SEQ ID NO: 586227
gaccaagucucgggaaguu

SEQ ID NO: 701813 - RNA, 19 nt, Artificial Sequence
  Description of Artificial Sequence: Synthetic oligonucleotide
  Antisense strand to SEQ ID NO: 701812
aacuucccgagacuugguc

SEQ ID NO: 701814 - RNA, 19 nt, Artificial Sequence
  Description of Artificial Sequence: Synthetic oligonucleotide
  Sense strand starting at position 725 of SEQ ID NO: 586227
gcgcuaguccggagaaacu

SEQ ID NO: 701815 - RNA, 19 nt, Artificial Sequence
  Description of Artificial Sequence: Synthetic oligonucleotide
  Antisense strand to SEQ ID NO: 701814
aguuucuccggacuagcgc

SEQ ID NO: 701816 - RNA, 19 nt, Artificial Sequence
  Description of Artificial Sequence: Synthetic oligonucleotide
  Sense strand starting at position 1917 of SEQ ID NO: 586227
ggaguugcgcgcccuagaa

SEQ ID NO: 701817 - RNA, 19 nt, Artificial Sequence
  Description of Artificial Sequence: Synthetic oligonucleotide
  Antisense strand to SEQ ID NO: 701816
uucuagggcgcgcaacucc

SEQ ID NO: 701818 - RNA, 19 nt, Artificial Sequence
  Description of Artificial Sequence: Synthetic oligonucleotide
  Sense strand starting at position 2313 of SEQ ID NO: 586227
ccacguuaacuccggcaaa

SEQ ID NO: 701819 - RNA, 19 nt, Artificial Sequence
  Description of Artificial Sequence: Synthetic oligonucleotide
  Antisense strand to SEQ ID NO: 701818
uuugccggaguuaacgugg

SEQ ID NO: 701820 - RNA, 19 nt, Artificial Sequence
  Description of Artificial Sequence: Synthetic oligonucleotide
  Sense strand starting at position 2607 of SEQ ID NO: 586227
cuuccaaggucauagaaug

SEQ ID NO: 701821 - RNA, 19 nt, Artificial Sequence
  Description of Artificial Sequence: Synthetic oligonucleotide
  Antisense strand to SEQ ID NO: 701820
cauucuaugaccuuggaag

SEQ ID NO: 701822 - RNA, 19 nt, Artificial Sequence
  Description of Artificial Sequence: Synthetic oligonucleotide
  Sense strand starting at position 2656 of SEQ ID NO: 586227
agaggugugagcuacaaau

SEQ ID NO: 701823 - RNA, 19 nt, Artificial Sequence
  Description of Artificial Sequence: Synthetic oligonucleotide
  Antisense strand to SEQ ID NO: 701822
auuuguagcucacaccucu

SEQ ID NO: 701824 - RNA, 19 nt, Artificial Sequence
  Description of Artificial Sequence: Synthetic oligonucleotide
  Sense strand starting at position 2658 of SEQ ID NO: 586227
aggugugagcuacaaauuc

SEQ ID NO: 701825 - RNA, 19 nt, Artificial Sequence
  Description of Artificial Sequence: Synthetic oligonucleotide
  Antisense strand to SEQ ID NO: 701824
gaauuuguagcucacaccu

SEQ ID NO: 701826 - RNA, 19 nt, Artificial Sequence
  Description of Artificial Sequence: Synthetic oligonucleotide
  Sense strand starting at position 2842 of SEQ ID NO: 586227
caagguuugucuuggcaag

SEQ ID NO: 701827 - RNA, 19 nt, Artificial Sequence
  Description of Artificial Sequence: Synthetic oligonucleotide
  Antisense strand to SEQ ID NO: 701826
cuugccaagacaaaccuug

SEQ ID NO: 701828 - RNA, 19 nt, Artificial Sequence
  Description of Artificial Sequence: Synthetic oligonucleotide
  Sense strand starting at position 2843 of SEQ ID NO: 586227
aagguuugucuuggcaaga

SEQ ID NO: 701829 - RNA, 19 nt, Artificial Sequence
  Description of Artificial Sequence: Synthetic oligonucleotide
  Antisense strand to SEQ ID NO: 701828
ucuugccaagacaaaccuu

SEQ ID NO: 701830 - RNA, 19 nt, Artificial Sequence
  Description of Artificial Sequence: Synthetic oligonucleotide
  Sense strand starting at position 2844 of SEQ ID NO: 586227
agguuugucuuggcaagaa

SEQ ID NO: 701831 - RNA, 19 nt, Artificial Sequence
  Description of Artificial Sequence: Synthetic oligonucleotide
  Antisense strand to SEQ ID NO: 701830
uucuugccaagacaaaccu

SEQ ID NO: 701832 - RNA, 19 nt, Artificial Sequence
  Description of Artificial Sequence: Synthetic oligonucleotide
  Sense strand starting at position 2892 of SEQ ID NO: 586227
gacugucccguagacagau

SEQ ID NO: 701833 - RNA, 19 nt, Artificial Sequence
  Description of Artificial Sequence: Synthetic oligonucleotide
  Antisense strand to SEQ ID NO: 701832
aucugucuacgggacaguc

SEQ ID NO: 701834 - RNA, 19 nt, Artificial Sequence
  Description of Artificial Sequence: Synthetic oligonucleotide
  Sense strand starting at position 2907 of SEQ ID NO: 586227
agauuagacgcuugccagu

SEQ ID NO: 701835 - RNA, 19 nt, Artificial Sequence
  Description of Artificial Sequence: Synthetic oligonucleotide
  Antisense strand to SEQ ID NO: 701834
acuggcaagcgucuaaucu

SEQ ID NO: 701836 - RNA, 19 nt, Artificial Sequence
  Description of Artificial Sequence: Synthetic oligonucleotide
  Sense strand starting at position 2984 of SEQ ID NO: 586227
gcaggcuaguccuuccuua

SEQ ID NO: 701837 - RNA, 19 nt, Artificial Sequence
  Description of Artificial Sequence: Synthetic oligonucleotide
  Antisense strand to SEQ ID NO: 701836
uaaggaaggacuagccugc

SEQ ID NO: 701838 - RNA, 19 nt, Artificial Sequence
  Description of Artificial Sequence: Synthetic oligonucleotide
  Sense strand starting at position 3390 of SEQ ID NO: 586227
auuacuaucuuguauagac

SEQ ID NO: 701839 - RNA, 19 nt, Artificial Sequence
  Description of Artificial Sequence: Synthetic oligonucleotide
  Antisense strand to SEQ ID NO: 701838
gucuauacaagauaguaau

SEQ ID NO: 701840 - RNA, 19 nt, Artificial Sequence
  Description of Artificial Sequence: Synthetic oligonucleotide
  Sense strand starting at position 3523 of SEQ ID NO: 586227
auaagcucaucauggagaa

SEQ ID NO: 701841 - RNA, 19 nt, Artificial Sequence
  Description of Artificial Sequence: Synthetic oligonucleotide
  Antisense strand to SEQ ID NO: 701840
uucuccaugaugagcuuau

SEQ ID NO: 701842 - RNA, 19 nt, Artificial Sequence
  Description of Artificial Sequence: Synthetic oligonucleotide
  Sense strand starting at position 3535 of SEQ ID NO: 586227
uggagaaccggguagcauu

SEQ ID NO: 701843 - RNA, 19 nt, Artificial Sequence
  Description of Artificial Sequence: Synthetic oligonucleotide
  Antisense strand to SEQ ID NO: 701842
aaugcuacccgguucucca

SEQ ID NO: 701844 - RNA, 19 nt, Artificial Sequence
  Description of Artificial Sequence: Synthetic oligonucleotide
  Sense strand starting at position 3543 of SEQ ID NO: 586227
cggguagcauucccucaaa

SEQ ID NO: 701845 - RNA, 19 nt, Artificial Sequence
  Description of Artificial Sequence: Synthetic oligonucleotide
  Antisense strand to SEQ ID NO: 701844
uuugagggaaugcuacccg

SEQ ID NO: 701846 - RNA, 19 nt, Artificial Sequence
  Description of Artificial Sequence: Synthetic oligonucleotide
  Sense strand starting at position 3616 of SEQ ID NO: 586227
augaguuauugacuauagu

SEQ ID NO: 701847 - RNA, 19 nt, Artificial Sequence
  Description of Artificial Sequence: Synthetic oligonucleotide
  Antisense strand to SEQ ID NO: 701846
acuauagucaauaacucau

SEQ ID NO: 701848 - RNA, 19 nt, Artificial Sequence
  Description of Artificial Sequence: Synthetic oligonucleotide
  Sense strand starting at position 3617 of SEQ ID NO: 586227
ugaguuauugacuauaguc

SEQ ID NO: 701849 - RNA, 19 nt, Artificial Sequence
  Description of Artificial Sequence: Synthetic oligonucleotide
  Antisense strand to SEQ ID NO: 701848
gacuauagucaauaacuca

SEQ ID NO: 701850 - RNA, 19 nt, Artificial Sequence
  Description of Artificial Sequence: Synthetic oligonucleotide
  Sense strand starting at position 3763 of SEQ ID NO: 586227
ucugguaaccacugguaga

SEQ ID NO: 701851 - RNA, 19 nt, Artificial Sequence
  Description of Artificial Sequence: Synthetic oligonucleotide
  Antisense strand to SEQ ID NO: 701850
ucuaccagugguuaccaga

SEQ ID NO: 701852 - RNA, 19 nt, Artificial Sequence
  Description of Artificial Sequence: Synthetic oligonucleotide
  Sense strand starting at position 3764 of SEQ ID NO: 586227
cugguaaccacugguagau

SEQ ID NO: 701853 - RNA, 19 nt, Artificial Sequence
  Description of Artificial Sequence: Synthetic oligonucleotide
  Antisense strand to SEQ ID NO: 701852
aucuaccagugguuaccag

SEQ ID NO: 701854 - RNA, 19 nt, Artificial Sequence
  Description of Artificial Sequence: Synthetic oligonucleotide
  Sense strand starting at position 3773 of SEQ ID NO: 586227
acugguagauucucuaugu

SEQ ID NO: 701855 - RNA, 19 nt, Artificial Sequence
  Description of Artificial Sequence: Synthetic oligonucleotide
  Antisense strand to SEQ ID NO: 701854
acauagagaaucuaccagu

SEQ ID NO: 701856 - RNA, 19 nt, Artificial Sequence
  Description of Artificial Sequence: Synthetic oligonucleotide
  Sense strand starting at position 3777 of SEQ ID NO: 586227
guagauucucuauguccau

SEQ ID NO: 701857 - RNA, 19 nt, Artificial Sequence
  Description of Artificial Sequence: Synthetic oligonucleotide
  Antisense strand to SEQ ID NO: 701856
auggacauagagaaucuac

SEQ ID NO: 701858 - RNA, 19 nt, Artificial Sequence
  Description of Artificial Sequence: Synthetic oligonucleotide
  Sense strand starting at position 3910 of SEQ ID NO: 586227
guuacaaaucacuggaucu

SEQ ID NO: 701859 - RNA, 19 nt, Artificial Sequence
  Description of Artificial Sequence: Synthetic oligonucleotide
  Antisense strand to SEQ ID NO: 701858
agauccagugauuuguaac

SEQ ID NO: 701860 - RNA, 19 nt, Artificial Sequence
  Description of Artificial Sequence: Synthetic oligonucleotide
  Sense strand starting at position 105 of SEQ ID NO: 586228
ccaauuagauaucacggaa

SEQ ID NO: 701861 - RNA, 19 nt, Artificial Sequence
  Description of Artificial Sequence: Synthetic oligonucleotide
  Antisense strand to SEQ ID NO: 701860
uuccgugauaucuaauugg

SEQ ID NO: 701862 - RNA, 19 nt, Artificial Sequence
  Description of Artificial Sequence: Synthetic oligonucleotide
  Sense strand starting at position 198 of SEQ ID NO: 586228
ucaauucuucugcaaguga

SEQ ID NO: 701863 - RNA, 19 nt, Artificial Sequence
  Description of Artificial Sequence: Synthetic oligonucleotide
  Antisense strand to SEQ ID NO: 701862
ucacuugcagaagaauuga

SEQ ID NO: 701864 - RNA, 19 nt, Artificial Sequence
  Description of Artificial Sequence: Synthetic oligonucleotide
  Sense strand starting at position 254 of SEQ ID NO: 586228
cuuaaauucgcauaagcaa

SEQ ID NO: 701865 - RNA, 19 nt, Artificial Sequence
  Description of Artificial Sequence: Synthetic oligonucleotide
  Antisense strand to SEQ ID NO: 701864
uugcuuaugcgaauuuaag

SEQ ID NO: 701866 - RNA, 19 nt, Artificial Sequence
  Description of Artificial Sequence: Synthetic oligonucleotide
  Sense strand starting at position 314 of SEQ ID NO: 586228
cuaugaacggcucacaauu

SEQ ID NO: 701867 - RNA, 19 nt, Artificial Sequence
  Description of Artificial Sequence: Synthetic oligonucleotide
  Antisense strand to SEQ ID NO: 701866
aauugugagccguucauag

SEQ ID NO: 701868 - RNA, 19 nt, Artificial Sequence
  Description of Artificial Sequence: Synthetic oligonucleotide
  Sense strand starting at position 492 of SEQ ID NO: 586228
guuuacuaucucugcuacu

SEQ ID NO: 701869 - RNA, 19 nt, Artificial Sequence
  Description of Artificial Sequence: Synthetic oligonucleotide
  Antisense strand to SEQ ID NO: 701868
aguagcagagauaguaaac

SEQ ID NO: 701870 - RNA, 19 nt, Artificial Sequence
  Description of Artificial Sequence: Synthetic oligonucleotide
  Sense strand starting at position 509 of SEQ ID NO: 586228
cuauuaacacuguauugua

SEQ ID NO: 701871 - RNA, 19 nt, Artificial Sequence
  Description of Artificial Sequence: Synthetic oligonucleotide
  Antisense strand to SEQ ID NO: 701870
uacaauacaguguuaauag

SEQ ID NO: 701872 - RNA, 19 nt, Artificial Sequence
  Description of Artificial Sequence: Synthetic oligonucleotide
  Sense strand starting at position 516 of SEQ ID NO: 586228
cacuguauuguaggcauua

SEQ ID NO: 701873 - RNA, 19 nt, Artificial Sequence
  Description of Artificial Sequence: Synthetic oligonucleotide
  Antisense strand to SEQ ID NO: 701872
uaaugccuacaauacagug

SEQ ID NO: 701874 - RNA, 19 nt, Artificial Sequence
  Description of Artificial Sequence: Synthetic oligonucleotide
  Sense strand starting at position 517 of SEQ ID NO: 586228
acuguauuguaggcauuaa

SEQ ID NO: 701875 - RNA, 19 nt, Artificial Sequence
  Description of Artificial Sequence: Synthetic oligonucleotide
  Antisense strand to SEQ ID NO: 701874
uuaaugccuacaauacagu

SEQ ID NO: 701876 - RNA, 19 nt, Artificial Sequence
  Description of Artificial Sequence: Synthetic oligonucleotide
  Sense strand starting at position 655 of SEQ ID NO: 586228
aggugaauuuaguaaagca

SEQ ID NO: 701877 - RNA, 19 nt, Artificial Sequence
  Description of Artificial Sequence: Synthetic oligonucleotide
  Antisense strand to SEQ ID NO: 701876
ugcuuuacuaaauucaccu

SEQ ID NO: 701878 - RNA, 19 nt, Artificial Sequence
  Description of Artificial Sequence: Synthetic oligonucleotide
  Sense strand starting at position 723 of SEQ ID NO: 586228
aagauaauguaugagcaga

SEQ ID NO: 701879 - RNA, 19 nt, Artificial Sequence
  Description of Artificial Sequence: Synthetic oligonucleotide
  Antisense strand to SEQ ID NO: 701878
ucugcucauacauuaucuu

SEQ ID NO: 701880 - RNA, 19 nt, Artificial Sequence
  Description of Artificial Sequence: Synthetic oligonucleotide
  Sense strand starting at position 742 of SEQ ID NO: 586228
gccuauuuauaagagcaaa

SEQ ID NO: 701881 - RNA, 19 nt, Artificial Sequence
  Description of Artificial Sequence: Synthetic oligonucleotide
  Antisense strand to SEQ ID NO: 701880
uuugcucuuauaaauaggc

SEQ ID NO: 701882 - RNA, 19 nt, Artificial Sequence
  Description of Artificial Sequence: Synthetic oligonucleotide
  Sense strand starting at position 861 of SEQ ID NO: 586228
ucaaguuaauggcuuaacu

SEQ ID NO: 701883 - RNA, 19 nt, Artificial Sequence
  Description of Artificial Sequence: Synthetic oligonucleotide
  Antisense strand to SEQ ID NO: 701882
aguuaagccauuaacuuga

SEQ ID NO: 701884 - RNA, 19 nt, Artificial Sequence
  Description of Artificial Sequence: Synthetic oligonucleotide
  Sense strand starting at position 928 of SEQ ID NO: 586228
cugagcuuuccacgugaga

SEQ ID NO: 701885 - RNA, 19 nt, Artificial Sequence
  Description of Artificial Sequence: Synthetic oligonucleotide
  Antisense strand to SEQ ID NO: 701884
ucucacguggaaagcucag

SEQ ID NO: 701886 - RNA, 19 nt, Artificial Sequence
  Description of Artificial Sequence: Synthetic oligonucleotide
  Sense strand starting at position 944 of SEQ ID NO: 586228
agaccuaagucucaggaca

SEQ ID NO: 701887 - RNA, 19 nt, Artificial Sequence
  Description of Artificial Sequence: Synthetic oligonucleotide
  Antisense strand to SEQ ID NO: 701886
uguccugagacuuaggucu

SEQ ID NO: 701888 - RNA, 19 nt, Artificial Sequence
  Description of Artificial Sequence: Synthetic oligonucleotide
  Sense strand starting at position 1079 of SEQ ID NO: 586228
ucugaaaucuaguuugaau

SEQ ID NO: 701889 - RNA, 19 nt, Artificial Sequence
  Description of Artificial Sequence: Synthetic oligonucleotide
  Antisense strand to SEQ ID NO: 701888
auucaaacuagauuucaga

SEQ ID NO: 701890 - RNA, 19 nt, Artificial Sequence
  Description of Artificial Sequence: Synthetic oligonucleotide
  Sense strand starting at position 1145 of SEQ ID NO: 586228
ggacguaucaguuguguca

SEQ ID NO: 701891 - RNA, 19 nt, Artificial Sequence
  Description of Artificial Sequence: Synthetic oligonucleotide
  Antisense strand to SEQ ID NO: 701890
ugacacaacugauacgucc

SEQ ID NO: 701892 - RNA, 19 nt, Artificial Sequence
  Description of Artificial Sequence: Synthetic oligonucleotide
  Sense strand starting at position 1204 of SEQ ID NO: 586228
cucaaauuguagucucaaa

SEQ ID NO: 701893 - RNA, 19 nt, Artificial Sequence
  Description of Artificial Sequence: Synthetic oligonucleotide
  Antisense strand to SEQ ID NO: 701892
uuugagacuacaauuugag

SEQ ID NO: 701894 - RNA, 19 nt, Artificial Sequence
  Description of Artificial Sequence: Synthetic oligonucleotide
  Sense strand starting at position 1225 of SEQ ID NO: 586228
accacuuccggcuaaguaa

SEQ ID NO: 701895 - RNA, 19 nt, Artificial Sequence
  Description of Artificial Sequence: Synthetic oligonucleotide
  Antisense strand to SEQ ID NO: 701894
uuacuuagccggaaguggu

SEQ ID NO: 701896 - RNA, 19 nt, Artificial Sequence
  Description of Artificial Sequence: Synthetic oligonucleotide
  Sense strand starting at position 1289 of SEQ ID NO: 586228
guggauaaguucucaauga

SEQ ID NO: 701897 - RNA, 19 nt, Artificial Sequence
  Description of Artificial Sequence: Synthetic oligonucleotide
  Antisense strand to SEQ ID NO: 701896
ucauugagaacuuauccac

SEQ ID NO: 701898 - RNA, 19 nt, Artificial Sequence
  Description of Artificial Sequence: Synthetic oligonucleotide
  Sense strand starting at position 1384 of SEQ ID NO: 586228
acaugaauguaauugcuaa

SEQ ID NO: 701899 - RNA, 19 nt, Artificial Sequence
  Description of Artificial Sequence: Synthetic oligonucleotide
  Antisense strand to SEQ ID NO: 701898
uuagcaauuacauucaugu

SEQ ID NO: 701900 - RNA, 19 nt, Artificial Sequence
  Description of Artificial Sequence: Synthetic oligonucleotide
  Sense strand starting at position 1574 of SEQ ID NO: 586228
uccggaacuugucuccaga

SEQ ID NO: 701901 - RNA, 19 nt, Artificial Sequence
  Description of Artificial Sequence: Synthetic oligonucleotide
  Antisense strand to SEQ ID NO: 701900
ucuggagacaaguuccgga

SEQ ID NO: 701902 - RNA, 19 nt, Artificial Sequence
  Description of Artificial Sequence: Synthetic oligonucleotide
  Sense strand starting at position 1576 of SEQ ID NO: 586228
cggaacuugucuccagacu

SEQ ID NO: 701903 - RNA, 19 nt, Artificial Sequence
  Description of Artificial Sequence: Synthetic oligonucleotide
  Antisense strand to SEQ ID NO: 701902
agucuggagacaaguuccg

SEQ ID NO: 701904 - RNA, 19 nt, Artificial Sequence
  Description of Artificial Sequence: Synthetic oligonucleotide
  Sense strand starting at position 1584 of SEQ ID NO: 586228
gucuccagacuaugaaagu

SEQ ID NO: 701905 - RNA, 19 nt, Artificial Sequence
  Description of Artificial Sequence: Synthetic oligonucleotide
  Antisense strand to SEQ ID NO: 701904
acuuucauagucuggagac

SEQ ID NO: 701906 - RNA, 19 nt, Artificial Sequence
  Description of Artificial Sequence: Synthetic oligonucleotide
  Sense strand starting at position 1585 of SEQ ID NO: 586228
ucuccagacuaugaaagua

SEQ ID NO: 701907 - RNA, 19 nt, Artificial Sequence
  Description of Artificial Sequence: Synthetic oligonucleotide
  Antisense strand to SEQ ID NO: 701906
uacuuucauagucuggaga

SEQ ID NO: 701908 - RNA, 19 nt, Artificial Sequence
  Description of Artificial Sequence: Synthetic oligonucleotide
  Sense strand starting at position 1654 of SEQ ID NO: 586228
ccaccaugcucuuuaguuu

SEQ ID NO: 701909 - RNA, 19 nt, Artificial Sequence
  Description of Artificial Sequence: Synthetic oligonucleotide
  Antisense strand to SEQ ID NO: 701908
aaacuaaagagcauggugg

SEQ ID NO: 701910 - RNA, 19 nt, Artificial Sequence
  Description of Artificial Sequence: Synthetic oligonucleotide
  Sense strand starting at position 1720 of SEQ ID NO: 586228
ucucgccgacuuuaagaau

SEQ ID NO: 701911 - RNA, 19 nt, Artificial Sequence
  Description of Artificial Sequence: Synthetic oligonucleotide
  Antisense strand to SEQ ID NO: 701910
auucuuaaagucggcgaga

SEQ ID NO: 701912 - RNA, 19 nt, Artificial Sequence
  Description of Artificial Sequence: Synthetic oligonucleotide
  Sense strand starting at position 1856 of SEQ ID NO: 586228
ggccgugagcuuuaaaggu

SEQ ID NO: 701913 - RNA, 19 nt, Artificial Sequence
  Description of Artificial Sequence: Synthetic oligonucleotide
  Antisense strand to SEQ ID NO: 701912
accuuuaaagcucacggcc

SEQ ID NO: 701914 - RNA, 19 nt, Artificial Sequence
  Description of Artificial Sequence: Synthetic oligonucleotide
  Sense strand starting at position 1885 of SEQ ID NO: 586228
cagaguaagcaguaagcuu

SEQ ID NO: 701915 - RNA, 19 nt, Artificial Sequence
  Description of Artificial Sequence: Synthetic oligonucleotide
  Antisense strand to SEQ ID NO: 701914
aagcuuacugcuuacucug

SEQ ID NO: 701916 - RNA, 19 nt, Artificial Sequence
  Description of Artificial Sequence: Synthetic oligonucleotide
  Sense strand starting at position 1892 of SEQ ID NO: 586228
agcaguaagcuuuauuaag

SEQ ID NO: 701917 - RNA, 19 nt, Artificial Sequence
  Description of Artificial Sequence: Synthetic oligonucleotide
  Antisense strand to SEQ ID NO: 701916
cuuaauaaagcuuacugcu

SEQ ID NO: 701918 - RNA, 19 nt, Artificial Sequence
  Description of Artificial Sequence: Synthetic oligonucleotide
  Sense strand starting at position 2447 of SEQ ID NO: 586228
ccagcucucccuggagaau

SEQ ID NO: 701919 - RNA, 19 nt, Artificial Sequence
  Description of Artificial Sequence: Synthetic oligonucleotide
  Antisense strand to SEQ ID NO: 701918
auucuccagggagagcugg

SEQ ID NO: 701920 - RNA, 19 nt, Artificial Sequence
  Description of Artificial Sequence: Synthetic oligonucleotide
  Sense strand starting at position 2520 of SEQ ID NO: 586228
ccuggcuuuccugguagga

SEQ ID NO: 701921 - RNA, 19 nt, Artificial Sequence
  Description of Artificial Sequence: Synthetic oligonucleotide
  Antisense strand to SEQ ID NO: 701920
uccuaccaggaaagccagg

SEQ ID NO: 701922 - RNA, 19 nt, Artificial Sequence
  Description of Artificial Sequence: Synthetic oligonucleotide
  Sense strand starting at position 2524 of SEQ ID NO: 586228
gcuuuccugguaggauaau

SEQ ID NO: 701923 - RNA, 19 nt, Artificial Sequence
  Description of Artificial Sequence: Synthetic oligonucleotide
  Antisense strand to SEQ ID NO: 701922
auuauccuaccaggaaagc

SEQ ID NO: 701924 - RNA, 19 nt, Artificial Sequence
  Description of Artificial Sequence: Synthetic oligonucleotide
  Sense strand starting at position 2536 of SEQ ID NO: 586228
ggauaauauuuaggguuac

SEQ ID NO: 701925 - RNA, 19 nt, Artificial Sequence
  Description of Artificial Sequence: Synthetic oligonucleotide
  Antisense strand to SEQ ID NO: 701924
guaacccuaaauauuaucc

SEQ ID NO: 701926 - RNA, 19 nt, Artificial Sequence
  Description of Artificial Sequence: Synthetic oligonucleotide
  Sense strand starting at position 2585 of SEQ ID NO: 586228
ccgagaagguucucugaug

SEQ ID NO: 701927 - RNA, 19 nt, Artificial Sequence
  Description of Artificial Sequence: Synthetic oligonucleotide
  Antisense strand to SEQ ID NO: 701926
caucagagaaccuucucgg

SEQ ID NO: 701928 - RNA, 19 nt, Artificial Sequence
  Description of Artificial Sequence: Synthetic oligonucleotide
  Sense strand starting at position 2756 of SEQ ID NO: 586228
uuacacguaugcucacuua

SEQ ID NO: 701929 - RNA, 19 nt, Artificial Sequence
  Description of Artificial Sequence: Synthetic oligonucleotide
  Antisense strand to SEQ ID NO: 701928
uaagugagcauacguguaa

SEQ ID NO: 701930 - RNA, 19 nt, Artificial Sequence
  Description of Artificial Sequence: Synthetic oligonucleotide
  Sense strand starting at position 3574 of SEQ ID NO: 586228
uuccuucuguuuccaugau

SEQ ID NO: 701931 - RNA, 19 nt, Artificial Sequence
  Description of Artificial Sequence: Synthetic oligonucleotide
  Antisense strand to SEQ ID NO: 701930
aucauggaaacagaaggaa

SEQ ID NO: 701932 - RNA, 19 nt, Artificial Sequence
  Description of Artificial Sequence: Synthetic oligonucleotide
  Sense strand starting at position 3578 of SEQ ID NO: 586228
uucuguuuccaugaugucu

SEQ ID NO: 701933 - RNA, 19 nt, Artificial Sequence
  Description of Artificial Sequence: Synthetic oligonucleotide
  Antisense strand to SEQ ID NO: 701932
agacaucauggaaacagaa

SEQ ID NO: 701934 - RNA, 19 nt, Artificial Sequence
  Description of Artificial Sequence: Synthetic oligonucleotide
  Sense strand starting at position 3735 of SEQ ID NO: 586228
gagguaugagacggauuca

SEQ ID NO: 701935 - RNA, 19 nt, Artificial Sequence
  Description of Artificial Sequence: Synthetic oligonucleotide
  Antisense strand to SEQ ID NO: 701934
ugaauccgucucauaccuc

SEQ ID NO: 701936 - RNA, 19 nt, Artificial Sequence
  Description of Artificial Sequence: Synthetic oligonucleotide
  Sense strand starting at position 3890 of SEQ ID NO: 586228
agagcaguguccuuaacca

SEQ ID NO: 701937 - RNA, 19 nt, Artificial Sequence
  Description of Artificial Sequence: Synthetic oligonucleotide
  Antisense strand to SEQ ID NO: 701936
ugguuaaggacacugcucu

SEQ ID NO: 701938 - RNA, 19 nt, Artificial Sequence
  Description of Artificial Sequence: Synthetic oligonucleotide
  Sense strand starting at position 3898 of SEQ ID NO: 586228
guccuuaaccagggcuuaa

SEQ ID NO: 701939 - RNA, 19 nt, Artificial Sequence
  Description of Artificial Sequence: Synthetic oligonucleotide
  Antisense strand to SEQ ID NO: 701938
uuaagcccugguuaaggac

SEQ ID NO: 701940 - RNA, 19 nt, Artificial Sequence
  Description of Artificial Sequence: Synthetic oligonucleotide
  Sense strand starting at position 27 of SEQ ID NO: 586229
guuuacuggaucuggcaau

SEQ ID NO: 701941 - RNA, 19 nt, Artificial Sequence
  Description of Artificial Sequence: Synthetic oligonucleotide
  Antisense strand to SEQ ID NO: 701940
auugccagauccaguaaac

SEQ ID NO: 701942 - RNA, 19 nt, Artificial Sequence
  Description of Artificial Sequence: Synthetic oligonucleotide
  Sense strand starting at position 167 of SEQ ID NO: 586229
uagcauuuccaguggcuau

SEQ ID NO: 701943 - RNA, 19 nt, Artificial Sequence
  Description of Artificial Sequence: Synthetic oligonucleotide
  Antisense strand to SEQ ID NO: 701942
auagccacuggaaaugcua

SEQ ID NO: 701944 - RNA, 19 nt, Artificial Sequence
  Description of Artificial Sequence: Synthetic oligonucleotide
  Sense strand starting at position 220 of SEQ ID NO: 586229
guauaccuacguuacagaa

SEQ ID NO: 701945 - RNA, 19 nt, Artificial Sequence
  Description of Artificial Sequence: Synthetic oligonucleotide
  Antisense strand to SEQ ID NO: 701944
uucuguaacguagguauac

SEQ ID NO: 701946 - RNA, 19 nt, Artificial Sequence
  Description of Artificial Sequence: Synthetic oligonucleotide
  Sense strand starting at position 242 of SEQ ID NO: 586229
cuguguuaacaccaaugua

SEQ ID NO: 701947 - RNA, 19 nt, Artificial Sequence
  Description of Artificial Sequence: Synthetic oligonucleotide
  Antisense strand to SEQ ID NO: 701946
uacauugguguuaacacag

SEQ ID NO: 701948 - RNA, 19 nt, Artificial Sequence
  Description of Artificial Sequence: Synthetic oligonucleotide
  Sense strand starting at position 245 of SEQ ID NO: 586229
uguuaacaccaauguacua

SEQ ID NO: 701949 - RNA, 19 nt, Artificial Sequence
  Description of Artificial Sequence: Synthetic oligonucleotide
  Antisense strand to SEQ ID NO: 701948
uaguacauugguguuaaca

SEQ ID NO: 701950 - RNA, 19 nt, Artificial Sequence
  Description of Artificial Sequence: Synthetic oligonucleotide
  Sense strand starting at position 273 of SEQ ID NO: 586229
guuauauaccucuagucuc

SEQ ID NO: 701951 - RNA, 19 nt, Artificial Sequence
  Description of Artificial Sequence: Synthetic oligonucleotide
  Antisense strand to SEQ ID NO: 701950
gagacuagagguauauaac

SEQ ID NO: 701952 - RNA, 19 nt, Artificial Sequence
  Description of Artificial Sequence: Synthetic oligonucleotide
  Sense strand starting at position 420 of SEQ ID NO: 586229
ccaauacugcucuaaugga

SEQ ID NO: 701953 - RNA, 19 nt, Artificial Sequence
  Description of Artificial Sequence: Synthetic oligonucleotide
  Antisense strand to SEQ ID NO: 701952
uccauuagagcaguauugg

SEQ ID NO: 701954 - RNA, 19 nt, Artificial Sequence
  Description of Artificial Sequence: Synthetic oligonucleotide
  Sense strand starting at position 433 of SEQ ID NO: 586229
aauggauauuaagugcuau

SEQ ID NO: 701955 - RNA, 19 nt, Artificial Sequence
  Description of Artificial Sequence: Synthetic oligonucleotide
  Antisense strand to SEQ ID NO: 701954
auagcacuuaauauccauu

SEQ ID NO: 701956 - RNA, 19 nt, Artificial Sequence
  Description of Artificial Sequence: Synthetic oligonucleotide
  Sense strand starting at position 495 of SEQ ID NO: 586229
caaugauuacauugagagu

SEQ ID NO: 701957 - RNA, 19 nt, Artificial Sequence
  Description of Artificial Sequence: Synthetic oligonucleotide
  Antisense strand to SEQ ID NO: 701956
acucucaauguaaucauug

SEQ ID NO: 701958 - RNA, 19 nt, Artificial Sequence
  Description of Artificial Sequence: Synthetic oligonucleotide
  Sense strand starting at position 501 of SEQ ID NO: 586229
uuacauugagagugacaau

SEQ ID NO: 701959 - RNA, 19 nt, Artificial Sequence
  Description of Artificial Sequence: Synthetic oligonucleotide
  Antisense strand to SEQ ID NO: 701958
auugucacucucaauguaa

SEQ ID NO: 701960 - RNA, 19 nt, Artificial Sequence
  Description of Artificial Sequence: Synthetic oligonucleotide
  Sense strand starting at position 510 of SEQ ID NO: 586229
gagugacaaugaguugguu

SEQ ID NO: 701961 - RNA, 19 nt, Artificial Sequence
  Description of Artificial Sequence: Synthetic oligonucleotide
  Antisense strand to SEQ ID NO: 701960
aaccaacucauugucacuc

SEQ ID NO: 701962 - RNA, 19 nt, Artificial Sequence
  Description of Artificial Sequence: Synthetic oligonucleotide
  Sense strand starting at position 533 of SEQ ID NO: 586229
agcuauauugaguacuauu

SEQ ID NO: 701963 - RNA, 19 nt, Artificial Sequence
  Description of Artificial Sequence: Synthetic oligonucleotide
  Antisense strand to SEQ ID NO: 701962
aauaguacucaauauagcu

SEQ ID NO: 701964 - RNA, 19 nt, Artificial Sequence
  Description of Artificial Sequence: Synthetic oligonucleotide
  Sense strand starting at position 659 of SEQ ID NO: 586229
agauuaggucuuggcaaac

SEQ ID NO: 701965 - RNA, 19 nt, Artificial Sequence
  Description of Artificial Sequence: Synthetic oligonucleotide
  Antisense strand to SEQ ID NO: 701964
guuugccaagaccuaaucu

SEQ ID NO: 701966 - RNA, 19 nt, Artificial Sequence
  Description of Artificial Sequence: Synthetic oligonucleotide
  Sense strand starting at position 751 of SEQ ID NO: 586229
gugauuacugucguuuggu

SEQ ID NO: 701967 - RNA, 19 nt, Artificial Sequence
  Description of Artificial Sequence: Synthetic oligonucleotide
  Antisense strand to SEQ ID NO: 701966
accaaacgacaguaaucac

SEQ ID NO: 701968 - RNA, 19 nt, Artificial Sequence
  Description of Artificial Sequence: Synthetic oligonucleotide
  Sense strand starting at position 760 of SEQ ID NO: 586229
gucguuugguauuugguua

SEQ ID NO: 701969 - RNA, 19 nt, Artificial Sequence
  Description of Artificial Sequence: Synthetic oligonucleotide
  Antisense strand to SEQ ID NO: 701968
uaaccaaauaccaaacgac

SEQ ID NO: 701970 - RNA, 19 nt, Artificial Sequence
  Description of Artificial Sequence: Synthetic oligonucleotide
  Sense strand starting at position 761 of SEQ ID NO: 586229
ucguuugguauuugguuaa

SEQ ID NO: 701971 - RNA, 19 nt, Artificial Sequence
  Description of Artificial Sequence: Synthetic oligonucleotide
  Antisense strand to SEQ ID NO: 701970
uuaaccaaauaccaaacga

SEQ ID NO: 701972 - RNA, 19 nt, Artificial Sequence
  Description of Artificial Sequence: Synthetic oligonucleotide
  Sense strand starting at position 824 of SEQ ID NO: 586229
aguuccauucuauggcaga

SEQ ID NO: 701973 - RNA, 19 nt, Artificial Sequence
  Description of Artificial Sequence: Synthetic oligonucleotide
  Antisense strand to SEQ ID NO: 701972
ucugccauagaauggaacu

SEQ ID NO: 701974 - RNA, 19 nt, Artificial Sequence
  Description of Artificial Sequence: Synthetic oligonucleotide
  Sense strand starting at position 972 of SEQ ID NO: 586229
gcaacucaauucucgaaga

SEQ ID NO: 701975 - RNA, 19 nt, Artificial Sequence
  Description of Artificial Sequence: Synthetic oligonucleotide
  Antisense strand to SEQ ID NO: 701974
ucuucgagaauugaguugc

SEQ ID NO: 701976 - RNA, 19 nt, Artificial Sequence
  Description of Artificial Sequence: Synthetic oligonucleotide
  Sense strand starting at position 1126 of SEQ ID NO: 586229
gcuauagggaauuaaguuu

SEQ ID NO: 701977 - RNA, 19 nt, Artificial Sequence
  Description of Artificial Sequence: Synthetic oligonucleotide
  Antisense strand to SEQ ID NO: 701976
aaacuuaauucccuauagc

SEQ ID NO: 701978 - RNA, 19 nt, Artificial Sequence
  Description of Artificial Sequence: Synthetic oligonucleotide
  Sense strand starting at position 1360 of SEQ ID NO: 586229
cacccuuuaggugagugaa

SEQ ID NO: 701979 - RNA, 19 nt, Artificial Sequence
  Description of Artificial Sequence: Synthetic oligonucleotide
  Antisense strand to SEQ ID NO: 701978
uucacucaccuaaagggug

SEQ ID NO: 701980 - RNA, 19 nt, Artificial Sequence
  Description of Artificial Sequence: Synthetic oligonucleotide
  Sense strand starting at position 1362 of SEQ ID NO: 586229
cccuuuaggugagugaaca

SEQ ID NO: 701981 - RNA, 19 nt, Artificial Sequence
  Description of Artificial Sequence: Synthetic oligonucleotide
  Antisense strand to SEQ ID NO: 701980
uguucacucaccuaaaggg

SEQ ID NO: 701982 - RNA, 19 nt, Artificial Sequence
  Description of Artificial Sequence: Synthetic oligonucleotide
  Sense strand starting at position 1550 of SEQ ID NO: 586229
aguggcgugaccuagagau

SEQ ID NO: 701983 - RNA, 19 nt, Artificial Sequence
  Description of Artificial Sequence: Synthetic oligonucleotide
  Antisense strand to SEQ ID NO: 701982
aucucuaggucacgccacu

SEQ ID NO: 701984 - RNA, 19 nt, Artificial Sequence
  Description of Artificial Sequence: Synthetic oligonucleotide
  Sense strand starting at position 1992 of SEQ ID NO: 586229
ccgaccaaucaucagcaaa

SEQ ID NO: 701985 - RNA, 19 nt, Artificial Sequence
  Description of Artificial Sequence: Synthetic oligonucleotide
  Antisense strand to SEQ ID NO: 701984
uuugcugaugauuggucgg

SEQ ID NO: 701986 - RNA, 19 nt, Artificial Sequence
  Description of Artificial Sequence: Synthetic oligonucleotide
  Sense strand starting at position 2318 of SEQ ID NO: 586229
gcggaauuaauccgacuga

SEQ ID NO: 701987 - RNA, 19 nt, Artificial Sequence
  Description of Artificial Sequence: Synthetic oligonucleotide
  Antisense strand to SEQ ID NO: 701986
ucagucggauuaauuccgc

SEQ ID NO: 701988 - RNA, 19 nt, Artificial Sequence
  Description of Artificial Sequence: Synthetic oligonucleotide
  Sense strand starting at position 2548 of SEQ ID NO: 586229
cuuccucugccaggaauaa

SEQ ID NO: 701989 - RNA, 19 nt, Artificial Sequence
  Description of Artificial Sequence: Synthetic oligonucleotide
  Antisense strand to SEQ ID NO: 701988
uuauuccuggcagaggaag

SEQ ID NO: 701990 - RNA, 19 nt, Artificial Sequence
  Description of Artificial Sequence: Synthetic oligonucleotide
  Sense strand starting at position 2585 of SEQ ID NO: 586229
cugccuugccaauagaagu

SEQ ID NO: 701991 - RNA, 19 nt, Artificial Sequence
  Description of Artificial Sequence: Synthetic oligonucleotide
  Antisense strand to SEQ ID NO: 701990
acuucuauuggcaaggcag

SEQ ID NO: 701992 - RNA, 19 nt, Artificial Sequence
  Description of Artificial Sequence: Synthetic oligonucleotide
  Sense strand starting at position 2612 of SEQ ID NO: 586229
agauguuagcucuagaagc

SEQ ID NO: 701993 - RNA, 19 nt, Artificial Sequence
  Description of Artificial Sequence: Synthetic oligonucleotide
  Antisense strand to SEQ ID NO: 701992
gcuucuagagcuaacaucu

SEQ ID NO: 701994 - RNA, 19 nt, Artificial Sequence
  Description of Artificial Sequence: Synthetic oligonucleotide
  Sense strand starting at position 2737 of SEQ ID NO: 586229
uguccucuucuagaguaag

SEQ ID NO: 701995 - RNA, 19 nt, Artificial Sequence
  Description of Artificial Sequence: Synthetic oligonucleotide
  Antisense strand to SEQ ID NO: 701994
cuuacucuagaagaggaca

SEQ ID NO: 701996 - RNA, 19 nt, Artificial Sequence
  Description of Artificial Sequence: Synthetic oligonucleotide
  Sense strand starting at position 3018 of SEQ ID NO: 586229
aguuaagcucaugaaagca

SEQ ID NO: 701997 - RNA, 19 nt, Artificial Sequence
  Description of Artificial Sequence: Synthetic oligonucleotide
  Antisense strand to SEQ ID NO: 701996
ugcuuucaugagcuuaacu

SEQ ID NO: 701998 - RNA, 19 nt, Artificial Sequence
  Description of Artificial Sequence: Synthetic oligonucleotide
  Sense strand starting at position 3052 of SEQ ID NO: 586229
acgugaaagguuuacaacu

SEQ ID NO: 701999 - RNA, 19 nt, Artificial Sequence
  Description of Artificial Sequence: Synthetic oligonucleotide
  Antisense strand to SEQ ID NO: 701998
aguuguaaaccuuucacgu

SEQ ID NO: 702000 - RNA, 19 nt, Artificial Sequence
  Description of Artificial Sequence: Synthetic oligonucleotide
  Sense strand starting at position 3183 of SEQ ID NO: 586229
caagaagaguaauaggaau

SEQ ID NO: 702001 - RNA, 19 nt, Artificial Sequence
  Description of Artificial Sequence: Synthetic oligonucleotide
  Antisense strand to SEQ ID NO: 702000
auuccuauuacucuucuug

SEQ ID NO: 702002 - RNA, 19 nt, Artificial Sequence
  Description of Artificial Sequence: Synthetic oligonucleotide
  Sense strand starting at position 3216 of SEQ ID NO: 586229
ggcagagugggagguaaau

SEQ ID NO: 702003 - RNA, 19 nt, Artificial Sequence
  Description of Artificial Sequence: Synthetic oligonucleotide
  Antisense strand to SEQ ID NO: 702002
auuuaccucccacucugcc

SEQ ID NO: 702004 - RNA, 19 nt, Artificial Sequence
  Description of Artificial Sequence: Synthetic oligonucleotide
  Sense strand starting at position 3309 of SEQ ID NO: 586229
uaaguuuggagagguaaug

SEQ ID NO: 702005 - RNA, 19 nt, Artificial Sequence
  Description of Artificial Sequence: Synthetic oligonucleotide
  Antisense strand to SEQ ID NO: 702004
cauuaccucuccaaacuua

SEQ ID NO: 702006 - RNA, 19 nt, Artificial Sequence
  Description of Artificial Sequence: Synthetic oligonucleotide
  Sense strand starting at position 3327 of SEQ ID NO: 586229
ggaagaucuugucaauuug

SEQ ID NO: 702007 - RNA, 19 nt, Artificial Sequence
  Description of Artificial Sequence: Synthetic oligonucleotide
  Antisense strand to SEQ ID NO: 702006
caaauugacaagaucuucc

SEQ ID NO: 702008 - RNA, 19 nt, Artificial Sequence
  Description of Artificial Sequence: Synthetic oligonucleotide
  Sense strand starting at position 3376 of SEQ ID NO: 586229
ugggucuuccugggaaagu

SEQ ID NO: 702009 - RNA, 19 nt, Artificial Sequence
  Description of Artificial Sequence: Synthetic oligonucleotide
  Antisense strand to SEQ ID NO: 702008
acuuucccaggaagaccca

SEQ ID NO: 702010 - RNA, 19 nt, Artificial Sequence
  Description of Artificial Sequence: Synthetic oligonucleotide
  Sense strand starting at position 3385 of SEQ ID NO: 586229
cugggaaaguuucuaagcu

SEQ ID NO: 702011 - RNA, 19 nt, Artificial Sequence
  Description of Artificial Sequence: Synthetic oligonucleotide
  Antisense strand to SEQ ID NO: 702010
agcuuagaaacuuucccag

SEQ ID NO: 702012 - RNA, 19 nt, Artificial Sequence
  Description of Artificial Sequence: Synthetic oligonucleotide
  Sense strand starting at position 3419 of SEQ ID NO: 586229
gccaucuaauggguauuaa

SEQ ID NO: 702013 - RNA, 19 nt, Artificial Sequence
  Description of Artificial Sequence: Synthetic oligonucleotide
  Antisense strand to SEQ ID NO: 702012
uuaauacccauuagauggc

SEQ ID NO: 702014 - RNA, 19 nt, Artificial Sequence
  Description of Artificial Sequence: Synthetic oligonucleotide
  Sense strand starting at position 3756 of SEQ ID NO: 586229
cuguguuaugugcugguga

SEQ ID NO: 702015 - RNA, 19 nt, Artificial Sequence
  Description of Artificial Sequence: Synthetic oligonucleotide
  Antisense strand to SEQ ID NO: 702014
ucaccagcacauaacacag

SEQ ID NO: 702016 - RNA, 19 nt, Artificial Sequence
  Description of Artificial Sequence: Synthetic oligonucleotide
  Sense strand starting at position 3795 of SEQ ID NO: 586229
cgucccuguccucaaggaa

SEQ ID NO: 702017 - RNA, 19 nt, Artificial Sequence
  Description of Artificial Sequence: Synthetic oligonucleotide
  Antisense strand to SEQ ID NO: 702016
uuccuugaggacagggacg

SEQ ID NO: 702018 - RNA, 19 nt, Artificial Sequence
  Description of Artificial Sequence: Synthetic oligonucleotide
  Sense strand starting at position 3831 of SEQ ID NO: 586229
ccauccauccuggaauugu

SEQ ID NO: 702019 - RNA, 19 nt, Artificial Sequence
  Description of Artificial Sequence: Synthetic oligonucleotide
  Antisense strand to SEQ ID NO: 702018
acaauuccaggauggaugg

SEQ ID NO: 702020 - RNA, 19 nt, Artificial Sequence
  Description of Artificial Sequence: Synthetic oligonucleotide
  Sense strand starting at position 17 of SEQ ID NO: 586230
ucuugaaaguggcuucuuu

SEQ ID NO: 702021 - RNA, 19 nt, Artificial Sequence
  Description of Artificial Sequence: Synthetic oligonucleotide
  Antisense strand to SEQ ID NO: 702020
aaagaagccacuuucaaga

SEQ ID NO: 702022 - RNA, 19 nt, Artificial Sequence
  Description of Artificial Sequence: Synthetic oligonucleotide
  Sense strand starting at position 25 of SEQ ID NO: 586230
guggcuucuuuggagaaga

SEQ ID NO: 702023 - RNA, 19 nt, Artificial Sequence
  Description of Artificial Sequence: Synthetic oligonucleotide
  Antisense strand to SEQ ID NO: 702022
ucuucuccaaagaagccac

SEQ ID NO: 702024 - RNA, 19 nt, Artificial Sequence
  Description of Artificial Sequence: Synthetic oligonucleotide
  Sense strand starting at position 100 of SEQ ID NO: 586230
caagaaggcuccugaggaa

SEQ ID NO: 702025 - RNA, 19 nt, Artificial Sequence
  Description of Artificial Sequence: Synthetic oligonucleotide
  Antisense strand to SEQ ID NO: 702024
uuccucaggagccuucuug

SEQ ID NO: 702026 - RNA, 19 nt, Artificial Sequence
  Description of Artificial Sequence: Synthetic oligonucleotide
  Sense strand starting at position 103 of SEQ ID NO: 586230
gaaggcuccugaggaaaga

SEQ ID NO: 702027 - RNA, 19 nt, Artificial Sequence
  Description of Artificial Sequence: Synthetic oligonucleotide
  Antisense strand to SEQ ID NO: 702026
ucuuuccucaggagccuuc

SEQ ID NO: 702028 - RNA, 19 nt, Artificial Sequence
  Description of Artificial Sequence: Synthetic oligonucleotide
  Sense strand starting at position 136 of SEQ ID NO: 586230
uugcucucuuccucagaga

SEQ ID NO: 702029 - RNA, 19 nt, Artificial Sequence
  Description of Artificial Sequence: Synthetic oligonucleotide
  Antisense strand to SEQ ID NO: 702028
ucucugaggaagagagcaa

SEQ ID NO: 702030 - RNA, 19 nt, Artificial Sequence
  Description of Artificial Sequence: Synthetic oligonucleotide
  Sense strand starting at position 230 of SEQ ID NO: 586230
gguagaucggugcaucuga

SEQ ID NO: 702031 - RNA, 19 nt, Artificial Sequence
  Description of Artificial Sequence: Synthetic oligonucleotide
  Antisense strand to SEQ ID NO: 702030
ucagaugcaccgaucuacc

SEQ ID NO: 702032 - RNA, 19 nt, Artificial Sequence
  Description of Artificial Sequence: Synthetic oligonucleotide
  Sense strand starting at position 569 of SEQ ID NO: 586230
acacuuauuuaguaaagga

SEQ ID NO: 702033 - RNA, 19 nt, Artificial Sequence
  Description of Artificial Sequence: Synthetic oligonucleotide
  Antisense strand to SEQ ID NO: 702032
uccuuuacuaaauaagugu

SEQ ID NO: 702034 - RNA, 19 nt, Artificial Sequence
  Description of Artificial Sequence: Synthetic oligonucleotide
  Sense strand starting at position 597 of SEQ ID NO: 586230
ucuguugcuggauguguaa

SEQ ID NO: 702035 - RNA, 19 nt, Artificial Sequence
  Description of Artificial Sequence: Synthetic oligonucleotide
  Antisense strand to SEQ ID NO: 702034
uuacacauccagcaacaga

SEQ ID NO: 702036 - RNA, 19 nt, Artificial Sequence
  Description of Artificial Sequence: Synthetic oligonucleotide
  Sense strand starting at position 599 of SEQ ID NO: 586230
uguugcuggauguguaaga

SEQ ID NO: 702037 - RNA, 19 nt, Artificial Sequence
  Description of Artificial Sequence: Synthetic oligonucleotide
  Antisense strand to SEQ ID NO: 702036
ucuuacacauccagcaaca

SEQ ID NO: 702038 - RNA, 19 nt, Artificial Sequence
  Description of Artificial Sequence: Synthetic oligonucleotide
  Sense strand starting at position 604 of SEQ ID NO: 586230
cuggauguguaagaggaaa

SEQ ID NO: 702039 - RNA, 19 nt, Artificial Sequence
  Description of Artificial Sequence: Synthetic oligonucleotide
  Antisense strand to SEQ ID NO: 702038
uuuccucuuacacauccag

SEQ ID NO: 702040 - RNA, 19 nt, Artificial Sequence
  Description of Artificial Sequence: Synthetic oligonucleotide
  Sense strand starting at position 606 of SEQ ID NO: 586230
ggauguguaagaggaaauc

SEQ ID NO: 702041 - RNA, 19 nt, Artificial Sequence
  Description of Artificial Sequence: Synthetic oligonucleotide
  Antisense strand to SEQ ID NO: 702040
gauuuccucuuacacaucc

SEQ ID NO: 702042 - RNA, 19 nt, Artificial Sequence
  Description of Artificial Sequence: Synthetic oligonucleotide
  Sense strand starting at position 616 of SEQ ID NO: 586230
gaggaaaucucgccagcac

SEQ ID NO: 702043 - RNA, 19 nt, Artificial Sequence
  Description of Artificial Sequence: Synthetic oligonucleotide
  Antisense strand to SEQ ID NO: 702042
gugcuggcgagauuuccuc

SEQ ID NO: 702044 - RNA, 19 nt, Artificial Sequence
  Description of Artificial Sequence: Synthetic oligonucleotide
  Sense strand starting at position 708 of SEQ ID NO: 586230
cccagucaggcuggagauu

SEQ ID NO: 702045 - RNA, 19 nt, Artificial Sequence
  Description of Artificial Sequence: Synthetic oligonucleotide
  Antisense strand to SEQ ID NO: 702044
aaucuccagccugacuggg

SEQ ID NO: 702046 - RNA, 19 nt, Artificial Sequence
  Description of Artificial Sequence: Synthetic oligonucleotide
  Sense strand starting at position 1018 of SEQ ID NO: 586230
ccucgaugacccugaaauu

SEQ ID NO: 702047 - RNA, 19 nt, Artificial Sequence
  Description of Artificial Sequence: Synthetic oligonucleotide
  Antisense strand to SEQ ID NO: 702046
aauuucagggucaucgagg

SEQ ID NO: 702048 - RNA, 19 nt, Artificial Sequence
  Description of Artificial Sequence: Synthetic oligonucleotide
  Sense strand starting at position 1726 of SEQ ID NO: 586230
uugccaauauccucguaga

SEQ ID NO: 702049 - RNA, 19 nt, Artificial Sequence
  Description of Artificial Sequence: Synthetic oligonucleotide
  Antisense strand to SEQ ID NO: 702048
ucuacgaggauauuggcaa

SEQ ID NO: 702050 - RNA, 19 nt, Artificial Sequence
  Description of Artificial Sequence: Synthetic oligonucleotide
  Sense strand starting at position 1727 of SEQ ID NO: 586230
ugccaauauccucguagag

SEQ ID NO: 702051 - RNA, 19 nt, Artificial Sequence
  Description of Artificial Sequence: Synthetic oligonucleotide
  Antisense strand to SEQ ID NO: 702050
cucuacgaggauauuggca

SEQ ID NO: 702052 - RNA, 19 nt, Artificial Sequence
  Description of Artificial Sequence: Synthetic oligonucleotide
  Sense strand starting at position 1729 of SEQ ID NO: 586230
ccaauauccucguagagcu

SEQ ID NO: 702053 - RNA, 19 nt, Artificial Sequence
  Description of Artificial Sequence: Synthetic oligonucleotide
  Antisense strand to SEQ ID NO: 702052
agcucuacgaggauauugg

SEQ ID NO: 702054 - RNA, 19 nt, Artificial Sequence
  Description of Artificial Sequence: Synthetic oligonucleotide
  Sense strand starting at position 1745 of SEQ ID NO: 586230
gcugguacucgucggugaa

SEQ ID NO: 702055 - RNA, 19 nt, Artificial Sequence
  Description of Artificial Sequence: Synthetic oligonucleotide
  Antisense strand to SEQ ID NO: 702054
uucaccgacgaguaccagc

SEQ ID NO: 702056 - RNA, 19 nt, Artificial Sequence
  Description of Artificial Sequence: Synthetic oligonucleotide
  Sense strand starting at position 1746 of SEQ ID NO: 586230
cugguacucgucggugaag

SEQ ID NO: 702057 - RNA, 19 nt, Artificial Sequence
  Description of Artificial Sequence: Synthetic oligonucleotide
  Antisense strand to SEQ ID NO: 702056
cuucaccgacgaguaccag

SEQ ID NO: 702058 - RNA, 19 nt, Artificial Sequence
  Description of Artificial Sequence: Synthetic oligonucleotide
  Sense strand starting at position 2598 of SEQ ID NO: 586230
cugggucacuagcaugaga

SEQ ID NO: 702059 - RNA, 19 nt, Artificial Sequence
  Description of Artificial Sequence: Synthetic oligonucleotide
  Antisense strand to SEQ ID NO: 702058
ucucaugcuagugacccag

SEQ ID NO: 702060 - RNA, 19 nt, Artificial Sequence
  Description of Artificial Sequence: Synthetic oligonucleotide
  Sense strand starting at position 2600 of SEQ ID NO: 586230
gggucacuagcaugagaaa

SEQ ID NO: 702061 - RNA, 19 nt, Artificial Sequence
  Description of Artificial Sequence: Synthetic oligonucleotide
  Antisense strand to SEQ ID NO: 702060
uuucucaugcuagugaccc

SEQ ID NO: 702062 - RNA, 19 nt, Artificial Sequence
  Description of Artificial Sequence: Synthetic oligonucleotide
  Sense strand starting at position 2695 of SEQ ID NO: 586230
uggguugucuggaauggag

SEQ ID NO: 702063 - RNA, 19 nt, Artificial Sequence
  Description of Artificial Sequence: Synthetic oligonucleotide
  Antisense strand to SEQ ID NO: 702062
cuccauuccagacaaccca

SEQ ID NO: 702064 - RNA, 19 nt, Artificial Sequence
  Description of Artificial Sequence: Synthetic oligonucleotide
  Sense strand starting at position 3145 of SEQ ID NO: 586230
cgcugcugcccugauauga

SEQ ID NO: 702065 - RNA, 19 nt, Artificial Sequence
  Description of Artificial Sequence: Synthetic oligonucleotide
  Antisense strand to SEQ ID NO: 702064
ucauaucagggcagcagcg

SEQ ID NO: 702066 - RNA, 19 nt, Artificial Sequence
  Description of Artificial Sequence: Synthetic oligonucleotide
  Sense strand starting at position 3183 of SEQ ID NO: 586230
ggaccaauucugggccuau

SEQ ID NO: 702067 - RNA, 19 nt, Artificial Sequence
  Description of Artificial Sequence: Synthetic oligonucleotide
  Antisense strand to SEQ ID NO: 702066
auaggcccagaauuggucc

SEQ ID NO: 702068 - RNA, 19 nt, Artificial Sequence
  Description of Artificial Sequence: Synthetic oligonucleotide
  Sense strand starting at position 3327 of SEQ ID NO: 586230
ggaugcauuuggcauggga

SEQ ID NO: 702069 - RNA, 19 nt, Artificial Sequence
  Description of Artificial Sequence: Synthetic oligonucleotide
  Antisense strand to SEQ ID NO: 702068
ucccaugccaaaugcaucc

SEQ ID NO: 702070 - RNA, 19 nt, Artificial Sequence
  Description of Artificial Sequence: Synthetic oligonucleotide
  Sense strand starting at position 3341 of SEQ ID NO: 586230
ugggacugcugggcaauua

SEQ ID NO: 702071 - RNA, 19 nt, Artificial Sequence
  Description of Artificial Sequence: Synthetic oligonucleotide
  Antisense strand to SEQ ID NO: 702070
uaauugcccagcaguccca

SEQ ID NO: 702072 - RNA, 19 nt, Artificial Sequence
  Description of Artificial Sequence: Synthetic oligonucleotide
  Sense strand starting at position 3421 of SEQ ID NO: 586230
acgagaaauucucaggcca

SEQ ID NO: 702073 - RNA, 19 nt, Artificial Sequence
  Description of Artificial Sequence: Synthetic oligonucleotide
  Antisense strand to SEQ ID NO: 702072
uggccugagaauuucucgu

SEQ ID NO: 702074 - RNA, 19 nt, Artificial Sequence
  Description of Artificial Sequence: Synthetic oligonucleotide
  Sense strand starting at position 3557 of SEQ ID NO: 586230
cagagaauccugggccauc

SEQ ID NO: 702075 - RNA, 19 nt, Artificial Sequence
  Description of Artificial Sequence: Synthetic oligonucleotide
  Antisense strand to SEQ ID NO: 702074
gauggcccaggauucucug

SEQ ID NO: 702076 - RNA, 19 nt, Artificial Sequence
  Description of Artificial Sequence: Synthetic oligonucleotide
  Sense strand starting at position 3588 of SEQ ID NO: 586230
cuggcaugggcucgagaaa

SEQ ID NO: 702077 - RNA, 19 nt, Artificial Sequence
  Description of Artificial Sequence: Synthetic oligonucleotide
  Antisense strand to SEQ ID NO: 702076
uuucucgagcccaugccag

SEQ ID NO: 702078 - RNA, 19 nt, Artificial Sequence
  Description of Artificial Sequence: Synthetic oligonucleotide
  Sense strand starting at position 3625 of SEQ ID NO: 586230
gagguuuguucuuggcguu

SEQ ID NO: 702079 - RNA, 19 nt, Artificial Sequence
  Description of Artificial Sequence: Synthetic oligonucleotide
  Antisense strand to SEQ ID NO: 702078
aacgccaagaacaaaccuc

SEQ ID NO: 702080 - RNA, 19 nt, Artificial Sequence
  Description of Artificial Sequence: Synthetic oligonucleotide
  Sense strand starting at position 3632 of SEQ ID NO: 586230
guucuuggcguuguguuua

SEQ ID NO: 702081 - RNA, 19 nt, Artificial Sequence
  Description of Artificial Sequence: Synthetic oligonucleotide
  Antisense strand to SEQ ID NO: 702080
uaaacacaacgccaagaac

SEQ ID NO: 702082 - RNA, 19 nt, Artificial Sequence
  Description of Artificial Sequence: Synthetic oligonucleotide
  Sense strand starting at position 3656 of SEQ ID NO: 586230
acaggaguuucuuccagca

SEQ ID NO: 702083 - RNA, 19 nt, Artificial Sequence
  Description of Artificial Sequence: Synthetic oligonucleotide
  Antisense strand to SEQ ID NO: 702082
ugcuggaagaaacuccugu

SEQ ID NO: 702084 - RNA, 19 nt, Artificial Sequence
  Description of Artificial Sequence: Synthetic oligonucleotide
  Sense strand starting at position 3700 of SEQ ID NO: 586230
cuuucugagcucuggaaag

SEQ ID NO: 702085 - RNA, 19 nt, Artificial Sequence
  Description of Artificial Sequence: Synthetic oligonucleotide
  Antisense strand to SEQ ID NO: 702084
cuuuccagagcucagaaag

SEQ ID NO: 702086 - RNA, 19 nt, Artificial Sequence
  Description of Artificial Sequence: Synthetic oligonucleotide
  Sense strand starting at position 214 of SEQ ID NO: 586231
auggcaggucuauauuaac

SEQ ID NO: 702087 - RNA, 19 nt, Artificial Sequence
  Description of Artificial Sequence: Synthetic oligonucleotide
  Antisense strand to SEQ ID NO: 702086
guuaauauagaccugccau

SEQ ID NO: 702088 - RNA, 19 nt, Artificial Sequence
  Description of Artificial Sequence: Synthetic oligonucleotide
  Sense strand starting at position 572 of SEQ ID NO: 586231
agaugaggcugacuucuga

SEQ ID NO: 702089 - RNA, 19 nt, Artificial Sequence
  Description of Artificial Sequence: Synthetic oligonucleotide
  Antisense strand to SEQ ID NO: 702088
ucagaagucagccucaucu

SEQ ID NO: 702090 - RNA, 19 nt, Artificial Sequence
  Description of Artificial Sequence: Synthetic oligonucleotide
  Sense strand starting at position 618 of SEQ ID NO: 586231
cuucuauuucggugcaaga

SEQ ID NO: 702091 - RNA, 19 nt, Artificial Sequence
  Description of Artificial Sequence: Synthetic oligonucleotide
  Antisense strand to SEQ ID NO: 702090
ucuugcaccgaaauagaag

SEQ ID NO: 702092 - RNA, 19 nt, Artificial Sequence
  Description of Artificial Sequence: Synthetic oligonucleotide
  Sense strand starting at position 724 of SEQ ID NO: 586231
accuaaauguaccuguauu

SEQ ID NO: 702093 - RNA, 19 nt, Artificial Sequence
  Description of Artificial Sequence: Synthetic oligonucleotide
  Antisense strand to SEQ ID NO: 702092
aauacagguacauuuaggu

SEQ ID NO: 702094 - RNA, 19 nt, Artificial Sequence
  Description of Artificial Sequence: Synthetic oligonucleotide
  Sense strand starting at position 771 of SEQ ID NO: 586231
ugaagcacucuuuaacgaa

SEQ ID NO: 702095 - RNA, 19 nt, Artificial Sequence
  Description of Artificial Sequence: Synthetic oligonucleotide
  Antisense strand to SEQ ID NO: 702094
uucguuaaagagugcuuca

SEQ ID NO: 702096 - RNA, 19 nt, Artificial Sequence
  Description of Artificial Sequence: Synthetic oligonucleotide
  Sense strand starting at position 775 of SEQ ID NO: 586231
gcacucuuuaacgaagagu

SEQ ID NO: 702097 - RNA, 19 nt, Artificial Sequence
  Description of Artificial Sequence: Synthetic oligonucleotide
  Antisense strand to SEQ ID NO: 702096
acucuucguuaaagagugc

SEQ ID NO: 702098 - RNA, 19 nt, Artificial Sequence
  Description of Artificial Sequence: Synthetic oligonucleotide
  Sense strand starting at position 830 of SEQ ID NO: 586231
uucugucaguuacuucuaa

SEQ ID NO: 702099 - RNA, 19 nt, Artificial Sequence
  Description of Artificial Sequence: Synthetic oligonucleotide
  Antisense strand to SEQ ID NO: 702098
uuagaaguaacugacagaa

SEQ ID NO: 702100 - RNA, 19 nt, Artificial Sequence
  Description of Artificial Sequence: Synthetic oligonucleotide
  Sense strand starting at position 850 of SEQ ID NO: 586231
gguccuuuccgagaaacag

SEQ ID NO: 702101 - RNA, 19 nt, Artificial Sequence
  Description of Artificial Sequence: Synthetic oligonucleotide
  Antisense strand to SEQ ID NO: 702100
cuguuucucggaaaggacc

SEQ ID NO: 702102 - RNA, 19 nt, Artificial Sequence
  Description of Artificial Sequence: Synthetic oligonucleotide
  Sense strand starting at position 1373 of SEQ ID NO: 586231
ucugcuuccuaagcgauuu

SEQ ID NO: 702103 - RNA, 19 nt, Artificial Sequence
  Description of Artificial Sequence: Synthetic oligonucleotide
  Antisense strand to SEQ ID NO: 702102
aaaucgcuuaggaagcaga

SEQ ID NO: 702104 - RNA, 19 nt, Artificial Sequence
  Description of Artificial Sequence: Synthetic oligonucleotide
  Sense strand starting at position 2322 of SEQ ID NO: 586231
agagaagauaguuggcuuu

SEQ ID NO: 702105 - RNA, 19 nt, Artificial Sequence
  Description of Artificial Sequence: Synthetic oligonucleotide
  Antisense strand to SEQ ID NO: 702104
aaagccaacuaucuucucu

SEQ ID NO: 702106 - RNA, 19 nt, Artificial Sequence
  Description of Artificial Sequence: Synthetic oligonucleotide
  Sense strand starting at position 2358 of SEQ ID NO: 586231
cgacccucuccauaauuga

SEQ ID NO: 702107 - RNA, 19 nt, Artificial Sequence
  Description of Artificial Sequence: Synthetic oligonucleotide
  Antisense strand to SEQ ID NO: 702106
ucaauuauggagagggucg

SEQ ID NO: 702108 - RNA, 19 nt, Artificial Sequence
  Description of Artificial Sequence: Synthetic oligonucleotide
  Sense strand starting at position 2372 of SEQ ID NO: 586231
auugaaagauugcucuuga

SEQ ID NO: 702109 - RNA, 19 nt, Artificial Sequence
  Description of Artificial Sequence: Synthetic oligonucleotide
  Antisense strand to SEQ ID NO: 702108
ucaagagcaaucuuucaau

SEQ ID NO: 702110 - RNA, 19 nt, Artificial Sequence
  Description of Artificial Sequence: Synthetic oligonucleotide
  Sense strand starting at position 2373 of SEQ ID NO: 586231
uugaaagauugcucuugau

SEQ ID NO: 702111 - RNA, 19 nt, Artificial Sequence
  Description of Artificial Sequence: Synthetic oligonucleotide
  Antisense strand to SEQ ID NO: 702110
aucaagagcaaucuuucaa

SEQ ID NO: 702112 - RNA, 19 nt, Artificial Sequence
  Description of Artificial Sequence: Synthetic oligonucleotide
  Sense strand starting at position 2578 of SEQ ID NO: 586231
agagcaaauguggguauau

SEQ ID NO: 702113 - RNA, 19 nt, Artificial Sequence
  Description of Artificial Sequence: Synthetic oligonucleotide
  Antisense strand to SEQ ID NO: 702112
auauacccacauuugcucu

SEQ ID NO: 702114 - RNA, 19 nt, Artificial Sequence
  Description of Artificial Sequence: Synthetic oligonucleotide
  Sense strand starting at position 2579 of SEQ ID NO: 586231
gagcaaauguggguauaua

SEQ ID NO: 702115 - RNA, 19 nt, Artificial Sequence
  Description of Artificial Sequence: Synthetic oligonucleotide
  Antisense strand to SEQ ID NO: 702114
uauauacccacauuugcuc

SEQ ID NO: 702116 - RNA, 19 nt, Artificial Sequence
  Description of Artificial Sequence: Synthetic oligonucleotide
  Sense strand starting at position 2580 of SEQ ID NO: 586231
agcaaauguggguauauac

SEQ ID NO: 702117 - RNA, 19 nt, Artificial Sequence
  Description of Artificial Sequence: Synthetic oligonucleotide
  Antisense strand to SEQ ID NO: 702116
guauauacccacauuugcu

SEQ ID NO: 702118 - RNA, 19 nt, Artificial Sequence
  Description of Artificial Sequence: Synthetic oligonucleotide
  Sense strand starting at position 2803 of SEQ ID NO: 586231
gauaaauuacuacguauug

SEQ ID NO: 702119 - RNA, 19 nt, Artificial Sequence
  Description of Artificial Sequence: Synthetic oligonucleotide
  Antisense strand to SEQ ID NO: 702118
caauacguaguaauuuauc

SEQ ID NO: 702120 - RNA, 19 nt, Artificial Sequence
  Description of Artificial Sequence: Synthetic oligonucleotide
  Sense strand starting at position 2865 of SEQ ID NO: 586231
agaaguuaccgcuaaagga

SEQ ID NO: 702121 - RNA, 19 nt, Artificial Sequence
  Description of Artificial Sequence: Synthetic oligonucleotide
  Antisense strand to SEQ ID NO: 702120
uccuuuagcgguaacuucu

SEQ ID NO: 702122 - RNA, 19 nt, Artificial Sequence
  Description of Artificial Sequence: Synthetic oligonucleotide
  Sense strand starting at position 3191 of SEQ ID NO: 586231
aggagaguugcagaaguca

SEQ ID NO: 702123 - RNA, 19 nt, Artificial Sequence
  Description of Artificial Sequence: Synthetic oligonucleotide
  Antisense strand to SEQ ID NO: 702122
ugacuucugcaacucuccu

SEQ ID NO: 702124 - RNA, 19 nt, Artificial Sequence
  Description of Artificial Sequence: Synthetic oligonucleotide
  Sense strand starting at position 3393 of SEQ ID NO: 586231
agcuauguuagacauggau

SEQ ID NO: 702125 - RNA, 19 nt, Artificial Sequence
  Description of Artificial Sequence: Synthetic oligonucleotide
  Antisense strand to SEQ ID NO: 702124
auccaugucuaacauagcu

SEQ ID NO: 702126 - RNA, 19 nt, Artificial Sequence
  Description of Artificial Sequence: Synthetic oligonucleotide
  Sense strand starting at position 3420 of SEQ ID NO: 586231
ccugaauagguuugccaua

SEQ ID NO: 702127 - RNA, 19 nt, Artificial Sequence
  Description of Artificial Sequence: Synthetic oligonucleotide
  Antisense strand to SEQ ID NO: 702126
uauggcaaaccuauucagg

SEQ ID NO: 702128 - RNA, 19 nt, Artificial Sequence
  Description of Artificial Sequence: Synthetic oligonucleotide
  Sense strand starting at position 3421 of SEQ ID NO: 586231
cugaauagguuugccauau

SEQ ID NO: 702129 - RNA, 19 nt, Artificial Sequence
  Description of Artificial Sequence: Synthetic oligonucleotide
  Antisense strand to SEQ ID NO: 702128
auauggcaaaccuauucag

SEQ ID NO: 702130 - RNA, 19 nt, Artificial Sequence
  Description of Artificial Sequence: Synthetic oligonucleotide
  Sense strand starting at position 3422 of SEQ ID NO: 586231
ugaauagguuugccauauu

SEQ ID NO: 702131 - RNA, 19 nt, Artificial Sequence
  Description of Artificial Sequence: Synthetic oligonucleotide
  Antisense strand to SEQ ID NO: 702130
aauauggcaaaccuauuca

SEQ ID NO: 702132 - RNA, 19 nt, Artificial Sequence
  Description of Artificial Sequence: Synthetic oligonucleotide
  Sense strand starting at position 3425 of SEQ ID NO: 586231
auagguuugccauauuaaa

SEQ ID NO: 702133 - RNA, 19 nt, Artificial Sequence
  Description of Artificial Sequence: Synthetic oligonucleotide
  Antisense strand to SEQ ID NO: 702132
uuuaauauggcaaaccuau

SEQ ID NO: 702134 - RNA, 19 nt, Artificial Sequence
  Description of Artificial Sequence: Synthetic oligonucleotide
  Sense strand starting at position 3464 of SEQ ID NO: 586231
gugaauugcagauaagcaa

SEQ ID NO: 702135 - RNA, 19 nt, Artificial Sequence
  Description of Artificial Sequence: Synthetic oligonucleotide
  Antisense strand to SEQ ID NO: 702134
uugcuuaucugcaauucac

SEQ ID NO: 702136 - RNA, 19 nt, Artificial Sequence
  Description of Artificial Sequence: Synthetic oligonucleotide
  Sense strand starting at position 3492 of SEQ ID NO: 586231
aaguaugucccaugaagca

SEQ ID NO: 702137 - RNA, 19 nt, Artificial Sequence
  Description of Artificial Sequence: Synthetic oligonucleotide
  Antisense strand to SEQ ID NO: 702136
ugcuucaugggacauacuu

SEQ ID NO: 702138 - RNA, 19 nt, Artificial Sequence
  Description of Artificial Sequence: Synthetic oligonucleotide
  Sense strand starting at position 3638 of SEQ ID NO: 586231
aaucaaagcugcguagaua

SEQ ID NO: 702139 - RNA, 19 nt, Artificial Sequence
  Description of Artificial Sequence: Synthetic oligonucleotide
  Antisense strand to SEQ ID NO: 702138
uaucuacgcagcuuugauu

SEQ ID NO: 702140 - RNA, 19 nt, Artificial Sequence
  Description of Artificial Sequence: Synthetic oligonucleotide
  Sense strand starting at position 3639 of SEQ ID NO: 586231
aucaaagcugcguagauau

SEQ ID NO: 702141 - RNA, 19 nt, Artificial Sequence
  Description of Artificial Sequence: Synthetic oligonucleotide
  Antisense strand to SEQ ID NO: 702140
auaucuacgcagcuuugau

SEQ ID NO: 702142 - RNA, 19 nt, Artificial Sequence
  Description of Artificial Sequence: Synthetic oligonucleotide
  Sense strand starting at position 3641 of SEQ ID NO: 586231
caaagcugcguagauauga

SEQ ID NO: 702143 - RNA, 19 nt, Artificial Sequence
  Description of Artificial Sequence: Synthetic oligonucleotide
  Antisense strand to SEQ ID NO: 702142
ucauaucuacgcagcuuug

SEQ ID NO: 702144 - RNA, 19 nt, Artificial Sequence
  Description of Artificial Sequence: Synthetic oligonucleotide
  Sense strand starting at position 3699 of SEQ ID NO: 586231
auagauguggcaugagacu

SEQ ID NO: 702145 - RNA, 19 nt, Artificial Sequence
  Description of Artificial Sequence: Synthetic oligonucleotide
  Antisense strand to SEQ ID NO: 702144
agucucaugccacaucuau

SEQ ID NO: 702146 - RNA, 19 nt, Artificial Sequence
  Description of Artificial Sequence: Synthetic oligonucleotide
  Sense strand starting at position 3705 of SEQ ID NO: 586231
guggcaugagacuggagaa

SEQ ID NO: 702147 - RNA, 19 nt, Artificial Sequence
  Description of Artificial Sequence: Synthetic oligonucleotide
  Antisense strand to SEQ ID NO: 702146
uucuccagucucaugccac

SEQ ID NO: 702148 - RNA, 19 nt, Artificial Sequence
  Description of Artificial Sequence: Synthetic oligonucleotide
  Sense strand starting at position 3706 of SEQ ID NO: 586231
uggcaugagacuggagaau

SEQ ID NO: 702149 - RNA, 19 nt, Artificial Sequence
  Description of Artificial Sequence: Synthetic oligonucleotide
  Antisense strand to SEQ ID NO: 702148
auucuccagucucaugcca

SEQ ID NO: 702150 - RNA, 19 nt, Artificial Sequence
  Description of Artificial Sequence: Synthetic oligonucleotide
  Sense strand starting at position 3715 of SEQ ID NO: 586231
acuggagaaucuguauucu

SEQ ID NO: 702151 - RNA, 19 nt, Artificial Sequence
  Description of Artificial Sequence: Synthetic oligonucleotide
  Antisense strand to SEQ ID NO: 702150
agaauacagauucuccagu

SEQ ID NO: 702152 - RNA, 19 nt, Artificial Sequence
  Description of Artificial Sequence: Synthetic oligonucleotide
  Sense strand starting at position 3735 of SEQ ID NO: 586231
cagaauacagccuguagaa

SEQ ID NO: 702153 - RNA, 19 nt, Artificial Sequence
  Description of Artificial Sequence: Synthetic oligonucleotide
  Antisense strand to SEQ ID NO: 702152
uucuacaggcuguauucug

SEQ ID NO: 702154 - RNA, 19 nt, Artificial Sequence
  Description of Artificial Sequence: Synthetic oligonucleotide
  Sense strand starting at position 3806 of SEQ ID NO: 586231
gugguaaggccuuaggguu

SEQ ID NO: 702155 - RNA, 19 nt, Artificial Sequence
  Description of Artificial Sequence: Synthetic oligonucleotide
  Antisense strand to SEQ ID NO: 702154
aacccuaaggccuuaccac

SEQ ID NO: 702156 - RNA, 19 nt, Artificial Sequence
  Description of Artificial Sequence: Synthetic oligonucleotide
  Sense strand starting at position 3813 of SEQ ID NO: 586231
ggccuuaggguuuaagaua

SEQ ID NO: 702157 - RNA, 19 nt, Artificial Sequence
  Description of Artificial Sequence: Synthetic oligonucleotide
  Antisense strand to SEQ ID NO: 702156
uaucuuaaacccuaaggcc

SEQ ID NO: 702158 - RNA, 19 nt, Artificial Sequence
  Description of Artificial Sequence: Synthetic oligonucleotide
  Sense strand starting at position 3836 of SEQ ID NO: 586231
uucagauuccgugaggaac

SEQ ID NO: 702159 - RNA, 19 nt, Artificial Sequence
  Description of Artificial Sequence: Synthetic oligonucleotide
  Antisense strand to SEQ ID NO: 702158
guuccucacggaaucugaa

SEQ ID NO: 702160 - RNA, 19 nt, Artificial Sequence
  Description of Artificial Sequence: Synthetic oligonucleotide
  Sense strand starting at position 3879 of SEQ ID NO: 586231
augacaugaucagaaauau

SEQ ID NO: 702161 - RNA, 19 nt, Artificial Sequence
  Description of Artificial Sequence: Synthetic oligonucleotide
  Antisense strand to SEQ ID NO: 702160
auauuucugaucaugucau

SEQ ID NO: 702162 - RNA, 19 nt, Artificial Sequence
  Description of Artificial Sequence: Synthetic oligonucleotide
  Sense strand starting at position 3892 of SEQ ID NO: 586231
aaauaugugcagcaagaug

SEQ ID NO: 702163 - RNA, 19 nt, Artificial Sequence
  Description of Artificial Sequence: Synthetic oligonucleotide
  Antisense strand to SEQ ID NO: 702162
caucuugcugcacauauuu

SEQ ID NO: 702164 - RNA, 19 nt, Artificial Sequence
  Description of Artificial Sequence: Synthetic oligonucleotide
  Sense strand starting at position 3914 of SEQ ID NO: 586231
cugacagcugcacauaaau

SEQ ID NO: 702165 - RNA, 19 nt, Artificial Sequence
  Description of Artificial Sequence: Synthetic oligonucleotide
  Antisense strand to SEQ ID NO: 702164
auuuaugugcagcugucag

SEQ ID NO: 702166 - RNA, 19 nt, Artificial Sequence
  Description of Artificial Sequence: Synthetic oligonucleotide
  Sense strand starting at position 64 of SEQ ID NO: 586232
ggacgugaggcucagagaa

SEQ ID NO: 702167 - RNA, 19 nt, Artificial Sequence
  Description of Artificial Sequence: Synthetic oligonucleotide
  Antisense strand to SEQ ID NO: 702166
uucucugagccucacgucc

SEQ ID NO: 702168 - RNA, 19 nt, Artificial Sequence
  Description of Artificial Sequence: Synthetic oligonucleotide
  Sense strand starting at position 134 of SEQ ID NO: 586232
ucccgaaagucaucagauu

SEQ ID NO: 702169 - RNA, 19 nt, Artificial Sequence
  Description of Artificial Sequence: Synthetic oligonucleotide
  Antisense strand to SEQ ID NO: 702168
aaucugaugacuuucggga

SEQ ID NO: 702170 - RNA, 19 nt, Artificial Sequence
  Description of Artificial Sequence: Synthetic oligonucleotide
  Sense strand starting at position 135 of SEQ ID NO: 586232
cccgaaagucaucagauuc

SEQ ID NO: 702171 - RNA, 19 nt, Artificial Sequence
  Description of Artificial Sequence: Synthetic oligonucleotide
  Antisense strand to SEQ ID NO: 702170
gaaucugaugacuuucggg

SEQ ID NO: 702172 - RNA, 19 nt, Artificial Sequence
  Description of Artificial Sequence: Synthetic oligonucleotide
  Sense strand starting at position 142 of SEQ ID NO: 586232
gucaucagauuccuagaga

SEQ ID NO: 702173 - RNA, 19 nt, Artificial Sequence
  Description of Artificial Sequence: Synthetic oligonucleotide
  Antisense strand to SEQ ID NO: 702172
ucucuaggaaucugaugac

SEQ ID NO: 702174 - RNA, 19 nt, Artificial Sequence
  Description of Artificial Sequence: Synthetic oligonucleotide
  Sense strand starting at position 143 of SEQ ID NO: 586232
ucaucagauuccuagagac

SEQ ID NO: 702175 - RNA, 19 nt, Artificial Sequence
  Description of Artificial Sequence: Synthetic oligonucleotide
  Antisense strand to SEQ ID NO: 702174
gucucuaggaaucugauga

SEQ ID NO: 702176 - RNA, 19 nt, Artificial Sequence
  Description of Artificial Sequence: Synthetic oligonucleotide
  Sense strand starting at position 257 of SEQ ID NO: 586232
uggugauggccgcaagaua

SEQ ID NO: 702177 - RNA, 19 nt, Artificial Sequence
  Description of Artificial Sequence: Synthetic oligonucleotide
  Antisense strand to SEQ ID NO: 702176
uaucuugcggccaucacca

SEQ ID NO: 702178 - RNA, 19 nt, Artificial Sequence
  Description of Artificial Sequence: Synthetic oligonucleotide
  Sense strand starting at position 316 of SEQ ID NO: 586232
gugguucagcgagcucauu

SEQ ID NO: 702179 - RNA, 19 nt, Artificial Sequence
  Description of Artificial Sequence: Synthetic oligonucleotide
  Antisense strand to SEQ ID NO: 702178
aaugagcucgcugaaccac

SEQ ID NO: 702180 - RNA, 19 nt, Artificial Sequence
  Description of Artificial Sequence: Synthetic oligonucleotide
  Sense strand starting at position 437 of SEQ ID NO: 586232
aucugauacccaggcaagu

SEQ ID NO: 702181 - RNA, 19 nt, Artificial Sequence
  Description of Artificial Sequence: Synthetic oligonucleotide
  Antisense strand to SEQ ID NO: 702180
acuugccuggguaucagau

SEQ ID NO: 702182 - RNA, 19 nt, Artificial Sequence
  Description of Artificial Sequence: Synthetic oligonucleotide
  Sense strand starting at position 477 of SEQ ID NO: 586232
auucccuggccuugaauua

SEQ ID NO: 702183 - RNA, 19 nt, Artificial Sequence
  Description of Artificial Sequence: Synthetic oligonucleotide
  Antisense strand to SEQ ID NO: 702182
uaauucaaggccagggaau

SEQ ID NO: 702184 - RNA, 19 nt, Artificial Sequence
  Description of Artificial Sequence: Synthetic oligonucleotide
  Sense strand starting at position 550 of SEQ ID NO: 586232
ggugucaucucuuuacaga

SEQ ID NO: 702185 - RNA, 19 nt, Artificial Sequence
  Description of Artificial Sequence: Synthetic oligonucleotide
  Antisense strand to SEQ ID NO: 702184
ucuguaaagagaugacacc

SEQ ID NO: 702186 - RNA, 19 nt, Artificial Sequence
  Description of Artificial Sequence: Synthetic oligonucleotide
  Sense strand starting at position 551 of SEQ ID NO: 586232
gugucaucucuuuacagau

SEQ ID NO: 702187 - RNA, 19 nt, Artificial Sequence
  Description of Artificial Sequence: Synthetic oligonucleotide
  Antisense strand to SEQ ID NO: 702186
aucuguaaagagaugacac

SEQ ID NO: 702188 - RNA, 19 nt, Artificial Sequence
  Description of Artificial Sequence: Synthetic oligonucleotide
  Sense strand starting at position 587 of SEQ ID NO: 586232
accggaguuuccgcgaaag

SEQ ID NO: 702189 - RNA, 19 nt, Artificial Sequence
  Description of Artificial Sequence: Synthetic oligonucleotide
  Antisense strand to SEQ ID NO: 702188
cuuucgcggaaacuccggu

SEQ ID NO: 702190 - RNA, 19 nt, Artificial Sequence
  Description of Artificial Sequence: Synthetic oligonucleotide
  Sense strand starting at position 661 of SEQ ID NO: 586232
cgggauuuccggcacgcau

SEQ ID NO: 702191 - RNA, 19 nt, Artificial Sequence
  Description of Artificial Sequence: Synthetic oligonucleotide
  Antisense strand to SEQ ID NO: 702190
augcgugccggaaaucccg

SEQ ID NO: 702192 - RNA, 19 nt, Artificial Sequence
  Description of Artificial Sequence: Synthetic oligonucleotide
  Sense strand starting at position 663 of SEQ ID NO: 586232
ggauuuccggcacgcauua

SEQ ID NO: 702193 - RNA, 19 nt, Artificial Sequence
  Description of Artificial Sequence: Synthetic oligonucleotide
  Antisense strand to SEQ ID NO: 702192
uaaugcgugccggaaaucc

SEQ ID NO: 702194 - RNA, 19 nt, Artificial Sequence
  Description of Artificial Sequence: Synthetic oligonucleotide
  Sense strand starting at position 690 of SEQ ID NO: 586232
cugagcgcucaauaaaugu

SEQ ID NO: 702195 - RNA, 19 nt, Artificial Sequence
  Description of Artificial Sequence: Synthetic oligonucleotide
  Antisense strand to SEQ ID NO: 702194
acauuuauugagcgcucag

SEQ ID NO: 702196 - RNA, 19 nt, Artificial Sequence
  Description of Artificial Sequence: Synthetic oligonucleotide
  Sense strand starting at position 744 of SEQ ID NO: 586232
guagguugguaaccuuaua

SEQ ID NO: 702197 - RNA, 19 nt, Artificial Sequence
  Description of Artificial Sequence: Synthetic oligonucleotide
  Antisense strand to SEQ ID NO: 702196
uauaagguuaccaaccuac

SEQ ID NO: 702198 - RNA, 19 nt, Artificial Sequence
  Description of Artificial Sequence: Synthetic oligonucleotide
  Sense strand starting at position 774 of SEQ ID NO: 586232
agucauaaauauuaggaga

SEQ ID NO: 702199 - RNA, 19 nt, Artificial Sequence
  Description of Artificial Sequence: Synthetic oligonucleotide
  Antisense strand to SEQ ID NO: 702198
ucuccuaauauuuaugacu

SEQ ID NO: 702200 - RNA, 19 nt, Artificial Sequence
  Description of Artificial Sequence: Synthetic oligonucleotide
  Sense strand starting at position 844 of SEQ ID NO: 586232
aggucaguuugguccaaga

SEQ ID NO: 702201 - RNA, 19 nt, Artificial Sequence
  Description of Artificial Sequence: Synthetic oligonucleotide
  Antisense strand to SEQ ID NO: 702200
ucuuggaccaaacugaccu

SEQ ID NO: 702202 - RNA, 19 nt, Artificial Sequence
  Description of Artificial Sequence: Synthetic oligonucleotide
  Sense strand starting at position 894 of SEQ ID NO: 586232
agcugagaccacuguccau

SEQ ID NO: 702203 - RNA, 19 nt, Artificial Sequence
  Description of Artificial Sequence: Synthetic oligonucleotide
  Antisense strand to SEQ ID NO: 702202
auggacaguggucucagcu

SEQ ID NO: 702204 - RNA, 19 nt, Artificial Sequence
  Description of Artificial Sequence: Synthetic oligonucleotide
  Sense strand starting at position 1262 of SEQ ID NO: 586232
ggcuguggucugcaaacuu

SEQ ID NO: 702205 - RNA, 19 nt, Artificial Sequence
  Description of Artificial Sequence: Synthetic oligonucleotide
  Antisense strand to SEQ ID NO: 702204
aaguuugcagaccacagcc

SEQ ID NO: 702206 - RNA, 19 nt, Artificial Sequence
  Description of Artificial Sequence: Synthetic oligonucleotide
  Sense strand starting at position 2321 of SEQ ID NO: 586232
agcugaauuucugaagaaa

SEQ ID NO: 702207 - RNA, 19 nt, Artificial Sequence
  Description of Artificial Sequence: Synthetic oligonucleotide
  Antisense strand to SEQ ID NO: 702206
uuucuucagaaauucagcu

SEQ ID NO: 702208 - RNA, 19 nt, Artificial Sequence
  Description of Artificial Sequence: Synthetic oligonucleotide
  Sense strand starting at position 2542 of SEQ ID NO: 586232
cgauguuccggugaaguau

SEQ ID NO: 702209 - RNA, 19 nt, Artificial Sequence
  Description of Artificial Sequence: Synthetic oligonucleotide
  Antisense strand to SEQ ID NO: 702208
auacuucaccggaacaucg

SEQ ID NO: 702210 - RNA, 19 nt, Artificial Sequence
  Description of Artificial Sequence: Synthetic oligonucleotide
  Sense strand starting at position 2551 of SEQ ID NO: 586232
ggugaaguauacuuguaag

SEQ ID NO: 702211 - RNA, 19 nt, Artificial Sequence
  Description of Artificial Sequence: Synthetic oligonucleotide
  Antisense strand to SEQ ID NO: 702210
cuuacaaguauacuucacc

SEQ ID NO: 702212 - RNA, 19 nt, Artificial Sequence
  Description of Artificial Sequence: Synthetic oligonucleotide
  Sense strand starting at position 2554 of SEQ ID NO: 586232
gaaguauacuuguaagaga

SEQ ID NO: 702213 - RNA, 19 nt, Artificial Sequence
  Description of Artificial Sequence: Synthetic oligonucleotide
  Antisense strand to SEQ ID NO: 702212
ucucuuacaaguauacuuc

SEQ ID NO: 702214 - RNA, 19 nt, Artificial Sequence
  Description of Artificial Sequence: Synthetic oligonucleotide
  Sense strand starting at position 2578 of SEQ ID NO: 586232
ugauuuggaugucaucauu

SEQ ID NO: 702215 - RNA, 19 nt, Artificial Sequence
  Description of Artificial Sequence: Synthetic oligonucleotide
  Antisense strand to SEQ ID NO: 702214
aaugaugacauccaaauca

SEQ ID NO: 702216 - RNA, 19 nt, Artificial Sequence
  Description of Artificial Sequence: Synthetic oligonucleotide
  Sense strand starting at position 3267 of SEQ ID NO: 586232
ggguacaauguauacugua

SEQ ID NO: 702217 - RNA, 19 nt, Artificial Sequence
  Description of Artificial Sequence: Synthetic oligonucleotide
  Antisense strand to SEQ ID NO: 702216
uacaguauacauuguaccc

SEQ ID NO: 702218 - RNA, 19 nt, Artificial Sequence
  Description of Artificial Sequence: Synthetic oligonucleotide
  Sense strand starting at position 3292 of SEQ ID NO: 586232
gcacuauuccagugacuga

SEQ ID NO: 702219 - RNA, 19 nt, Artificial Sequence
  Description of Artificial Sequence: Synthetic oligonucleotide
  Antisense strand to SEQ ID NO: 702218
ucagucacuggaauagugc

SEQ ID NO: 702220 - RNA, 19 nt, Artificial Sequence
  Description of Artificial Sequence: Synthetic oligonucleotide
  Sense strand starting at position 3508 of SEQ ID NO: 586232
ucuacucugccucaguuua

SEQ ID NO: 702221 - RNA, 19 nt, Artificial Sequence
  Description of Artificial Sequence: Synthetic oligonucleotide
  Antisense strand to SEQ ID NO: 702220
uaaacugaggcagaguaga

SEQ ID NO: 702222 - RNA, 19 nt, Artificial Sequence
  Description of Artificial Sequence: Synthetic oligonucleotide
  Sense strand starting at position 3563 of SEQ ID NO: 586232
cccucauuauggcuagaga

SEQ ID NO: 702223 - RNA, 19 nt, Artificial Sequence
  Description of Artificial Sequence: Synthetic oligonucleotide
  Antisense strand to SEQ ID NO: 702222
ucucuagccauaaugaggg

SEQ ID NO: 702224 - RNA, 19 nt, Artificial Sequence
  Description of Artificial Sequence: Synthetic oligonucleotide
  Sense strand starting at position 3699 of SEQ ID NO: 586232
gguccaagcacggaagaau

SEQ ID NO: 702225 - RNA, 19 nt, Artificial Sequence
  Description of Artificial Sequence: Synthetic oligonucleotide
  Antisense strand to SEQ ID NO: 702224
auucuuccgugcuuggacc

SEQ ID NO: 702226 - RNA, 19 nt, Artificial Sequence
  Description of Artificial Sequence: Synthetic oligonucleotide
  Sense strand starting at position 3708 of SEQ ID NO: 586232
acggaagaaucugaaauac

SEQ ID NO: 702227 - RNA, 19 nt, Artificial Sequence
  Description of Artificial Sequence: Synthetic oligonucleotide
  Antisense strand to SEQ ID NO: 702226
guauuucagauucuuccgu

SEQ ID NO: 702228 - RNA, 19 nt, Artificial Sequence
  Description of Artificial Sequence: Synthetic oligonucleotide
  Sense strand starting at position 3730 of SEQ ID NO: 586232
ugaggagucuguuugcacu

SEQ ID NO: 702229 - RNA, 19 nt, Artificial Sequence
  Description of Artificial Sequence: Synthetic oligonucleotide
  Antisense strand to SEQ ID NO: 702228
agugcaaacagacuccuca

SEQ ID NO: 702230 - RNA, 19 nt, Artificial Sequence
  Description of Artificial Sequence: Synthetic oligonucleotide
  Sense strand starting at position 3732 of SEQ ID NO: 586232
aggagucuguuugcacuga

SEQ ID NO: 702231 - RNA, 19 nt, Artificial Sequence
  Description of Artificial Sequence: Synthetic oligonucleotide
  Antisense strand to SEQ ID NO: 702230
ucagugcaaacagacuccu

SEQ ID NO: 702232 - RNA, 19 nt, Artificial Sequence
  Description of Artificial Sequence: Synthetic oligonucleotide
  Sense strand starting at position 3752 of SEQ ID NO: 586232
gcacaugugcuagggauga

SEQ ID NO: 702233 - RNA, 19 nt, Artificial Sequence
  Description of Artificial Sequence: Synthetic oligonucleotide
  Antisense strand to SEQ ID NO: 702232
ucaucccuagcacaugugc

SEQ ID NO: 702234 - RNA, 19 nt, Artificial Sequence
  Description of Artificial Sequence: Synthetic oligonucleotide
  Sense strand starting at position 3793 of SEQ ID NO: 586232
uguaaagcguguucagaaa

SEQ ID NO: 702235 - RNA, 19 nt, Artificial Sequence
  Description of Artificial Sequence: Synthetic oligonucleotide
  Antisense strand to SEQ ID NO: 702234
uuucugaacacgcuuuaca

SEQ ID NO: 702236 - RNA, 19 nt, Artificial Sequence
  Description of Artificial Sequence: Synthetic oligonucleotide
  Sense strand starting at position 3893 of SEQ ID NO: 586232
aggccuuggucccuaagga

SEQ ID NO: 702237 - RNA, 19 nt, Artificial Sequence
  Description of Artificial Sequence: Synthetic oligonucleotide
  Antisense strand to SEQ ID NO: 702236
uccuuagggaccaaggccu

SEQ ID NO: 702238 - RNA, 19 nt, Artificial Sequence
  Description of Artificial Sequence: Synthetic oligonucleotide
  Sense strand starting at position 3894 of SEQ ID NO: 586232
ggccuuggucccuaaggau

SEQ ID NO: 702239 - RNA, 19 nt, Artificial Sequence
  Description of Artificial Sequence: Synthetic oligonucleotide
  Antisense strand to SEQ ID NO: 702238
auccuuagggaccaaggcc

SEQ ID NO: 702240 - RNA, 19 nt, Artificial Sequence
  Description of Artificial Sequence: Synthetic oligonucleotide
  Sense strand starting at position 3909 of SEQ ID NO: 586232
ggauacaucucacugccua

SEQ ID NO: 702241 - RNA, 19 nt, Artificial Sequence
  Description of Artificial Sequence: Synthetic oligonucleotide
  Antisense strand to SEQ ID NO: 702240
uaggcagugagauguaucc

SEQ ID NO: 702242 - RNA, 19 nt, Artificial Sequence
  Description of Artificial Sequence: Synthetic oligonucleotide
  Sense strand starting at position 3944 of SEQ ID NO: 586232
cugcuuguacuccaugaaa

SEQ ID NO: 702243 - RNA, 19 nt, Artificial Sequence
  Description of Artificial Sequence: Synthetic oligonucleotide
  Antisense strand to SEQ ID NO: 702242
uuucauggaguacaagcag

SEQ ID NO: 702244 - RNA, 19 nt, Artificial Sequence
  Description of Artificial Sequence: Synthetic oligonucleotide
  Sense strand starting at position 3946 of SEQ ID NO: 586232
gcuuguacuccaugaaacc

SEQ ID NO: 702245 - RNA, 19 nt, Artificial Sequence
  Description of Artificial Sequence: Synthetic oligonucleotide
  Antisense strand to SEQ ID NO: 702244
gguuucauggaguacaagc

SEQ ID NO: 702246 - RNA, 19 nt, Artificial Sequence
  Description of Artificial Sequence: Synthetic oligonucleotide
  Sense strand starting at position 47 of SEQ ID NO: 586233
auaauaguaguccaagguu

SEQ ID NO: 702247 - RNA, 19 nt, Artificial Sequence
  Description of Artificial Sequence: Synthetic oligonucleotide
  Antisense strand to SEQ ID NO: 702246
aaccuuggacuacuauuau

SEQ ID NO: 702248 - RNA, 19 nt, Artificial Sequence
  Description of Artificial Sequence: Synthetic oligonucleotide
  Sense strand starting at position 53 of SEQ ID NO: 586233
guaguccaagguuaucaaa

SEQ ID NO: 702249 - RNA, 19 nt, Artificial Sequence
  Description of Artificial Sequence: Synthetic oligonucleotide
  Antisense strand to SEQ ID NO: 702248
uuugauaaccuuggacuac

SEQ ID NO: 702250 - RNA, 19 nt, Artificial Sequence
  Description of Artificial Sequence: Synthetic oligonucleotide
  Sense strand starting at position 128 of SEQ ID NO: 586233
acaauaguacuguaguuau

SEQ ID NO: 702251 - RNA, 19 nt, Artificial Sequence
  Description of Artificial Sequence: Synthetic oligonucleotide
  Antisense strand to SEQ ID NO: 702250
auaacuacaguacuauugu

SEQ ID NO: 702252 - RNA, 19 nt, Artificial Sequence
  Description of Artificial Sequence: Synthetic oligonucleotide
  Sense strand starting at position 320 of SEQ ID NO: 586233
ggucguauggcugugaucu

SEQ ID NO: 702253 - RNA, 19 nt, Artificial Sequence
  Description of Artificial Sequence: Synthetic oligonucleotide
  Antisense strand to SEQ ID NO: 702252
agaucacagccauacgacc

SEQ ID NO: 702254 - RNA, 19 nt, Artificial Sequence
  Description of Artificial Sequence: Synthetic oligonucleotide
  Sense strand starting at position 330 of SEQ ID NO: 586233
cugugaucuggagagagcu

SEQ ID NO: 702255 - RNA, 19 nt, Artificial Sequence
  Description of Artificial Sequence: Synthetic oligonucleotide
  Antisense strand to SEQ ID NO: 702254
agcucucuccagaucacag

SEQ ID NO: 702256 - RNA, 19 nt, Artificial Sequence
  Description of Artificial Sequence: Synthetic oligonucleotide
  Sense strand starting at position 418 of SEQ ID NO: 586233
ccaguauggcucuagagua

SEQ ID NO: 702257 - RNA, 19 nt, Artificial Sequence
  Description of Artificial Sequence: Synthetic oligonucleotide
  Antisense strand to SEQ ID NO: 702256
uacucuagagccauacugg

SEQ ID NO: 702258 - RNA, 19 nt, Artificial Sequence
  Description of Artificial Sequence: Synthetic oligonucleotide
  Sense strand starting at position 423 of SEQ ID NO: 586233
auggcucuagaguacaaua

SEQ ID NO: 702259 - RNA, 19 nt, Artificial Sequence
  Description of Artificial Sequence: Synthetic oligonucleotide
  Antisense strand to SEQ ID NO: 702258
uauuguacucuagagccau

SEQ ID NO: 702260 - RNA, 19 nt, Artificial Sequence
  Description of Artificial Sequence: Synthetic oligonucleotide
  Sense strand starting at position 425 of SEQ ID NO: 586233
ggcucuagaguacaauauu

SEQ ID NO: 702261 - RNA, 19 nt, Artificial Sequence
  Description of Artificial Sequence: Synthetic oligonucleotide
  Antisense strand to SEQ ID NO: 702260
aauauuguacucuagagcc

SEQ ID NO: 702262 - RNA, 19 nt, Artificial Sequence
  Description of Artificial Sequence: Synthetic oligonucleotide
  Sense strand starting at position 530 of SEQ ID NO: 586233
caacaacccguuuauggau

SEQ ID NO: 702263 - RNA, 19 nt, Artificial Sequence
  Description of Artificial Sequence: Synthetic oligonucleotide
  Antisense strand to SEQ ID NO: 702262
auccauaaacggguuguug

SEQ ID NO: 702264 - RNA, 19 nt, Artificial Sequence
  Description of Artificial Sequence: Synthetic oligonucleotide
  Sense strand starting at position 643 of SEQ ID NO: 586233
ccaagagcuggccagauaa

SEQ ID NO: 702265 - RNA, 19 nt, Artificial Sequence
  Description of Artificial Sequence: Synthetic oligonucleotide
  Antisense strand to SEQ ID NO: 702264
uuaucuggccagcucuugg

SEQ ID NO: 702266 - RNA, 19 nt, Artificial Sequence
  Description of Artificial Sequence: Synthetic oligonucleotide
  Sense strand starting at position 656 of SEQ ID NO: 586233
agauaauggcuuugauagu

SEQ ID NO: 702267 - RNA, 19 nt, Artificial Sequence
  Description of Artificial Sequence: Synthetic oligonucleotide
  Antisense strand to SEQ ID NO: 702266
acuaucaaagccauuaucu

SEQ ID NO: 702268 - RNA, 19 nt, Artificial Sequence
  Description of Artificial Sequence: Synthetic oligonucleotide
  Sense strand starting at position 2291 of SEQ ID NO: 586233
acuacaguuccgggagaaa

SEQ ID NO: 702269 - RNA, 19 nt, Artificial Sequence
  Description of Artificial Sequence: Synthetic oligonucleotide
  Antisense strand to SEQ ID NO: 702268
uuucucccggaacuguagu

SEQ ID NO: 702270 - RNA, 19 nt, Artificial Sequence
  Description of Artificial Sequence: Synthetic oligonucleotide
  Sense strand starting at position 2479 of SEQ ID NO: 586233
gauggauccaguugauggu

SEQ ID NO: 702271 - RNA, 19 nt, Artificial Sequence
  Description of Artificial Sequence: Synthetic oligonucleotide
  Antisense strand to SEQ ID NO: 702270
accaucaacuggauccauc

SEQ ID NO: 702272 - RNA, 19 nt, Artificial Sequence
  Description of Artificial Sequence: Synthetic oligonucleotide
  Sense strand starting at position 2622 of SEQ ID NO: 586233
gcgaaaguacaccaaaguu

SEQ ID NO: 702273 - RNA, 19 nt, Artificial Sequence
  Description of Artificial Sequence: Synthetic oligonucleotide
  Antisense strand to SEQ ID NO: 702272
aacuuugguguacuuucgc

SEQ ID NO: 702274 - RNA, 19 nt, Artificial Sequence
  Description of Artificial Sequence: Synthetic oligonucleotide
  Sense strand starting at position 2672 of SEQ ID NO: 586233
aguguagguguugaugaga

SEQ ID NO: 702275 - RNA, 19 nt, Artificial Sequence
  Description of Artificial Sequence: Synthetic oligonucleotide
  Antisense strand to SEQ ID NO: 702274
ucucaucaacaccuacacu

SEQ ID NO: 702276 - RNA, 19 nt, Artificial Sequence
  Description of Artificial Sequence: Synthetic oligonucleotide
  Sense strand starting at position 2707 of SEQ ID NO: 586233
acuuguauuuacgcaaguu

SEQ ID NO: 702277 - RNA, 19 nt, Artificial Sequence
  Description of Artificial Sequence: Synthetic oligonucleotide
  Antisense strand to SEQ ID NO: 702276
aacuugcguaaauacaagu

SEQ ID NO: 702278 - RNA, 19 nt, Artificial Sequence
  Description of Artificial Sequence: Synthetic oligonucleotide
  Sense strand starting at position 2719 of SEQ ID NO: 586233
gcaaguuuggcuaggucga

SEQ ID NO: 702279 - RNA, 19 nt, Artificial Sequence
  Description of Artificial Sequence: Synthetic oligonucleotide
  Antisense strand to SEQ ID NO: 702278
ucgaccuagccaaacuugc

SEQ ID NO: 702280 - RNA, 19 nt, Artificial Sequence
  Description of Artificial Sequence: Synthetic oligonucleotide
  Sense strand starting at position 3057 of SEQ ID NO: 586233
ucuuaaugugcuuaugaca

SEQ ID NO: 702281 - RNA, 19 nt, Artificial Sequence
  Description of Artificial Sequence: Synthetic oligonucleotide
  Antisense strand to SEQ ID NO: 702280
ugucauaagcacauuaaga

SEQ ID NO: 702282 - RNA, 19 nt, Artificial Sequence
  Description of Artificial Sequence: Synthetic oligonucleotide
  Sense strand starting at position 3083 of SEQ ID NO: 586233
ccgcuacuaacguugguua

SEQ ID NO: 702283 - RNA, 19 nt, Artificial Sequence
  Description of Artificial Sequence: Synthetic oligonucleotide
  Antisense strand to SEQ ID NO: 702282
uaaccaacguuaguagcgg

SEQ ID NO: 702284 - RNA, 19 nt, Artificial Sequence
  Description of Artificial Sequence: Synthetic oligonucleotide
  Sense strand starting at position 3209 of SEQ ID NO: 586233
uugccuuccagaugggaau

SEQ ID NO: 702285 - RNA, 19 nt, Artificial Sequence
  Description of Artificial Sequence: Synthetic oligonucleotide
  Antisense strand to SEQ ID NO: 702284
auucccaucuggaaggcaa

SEQ ID NO: 702286 - RNA, 19 nt, Artificial Sequence
  Description of Artificial Sequence: Synthetic oligonucleotide
  Sense strand starting at position 3215 of SEQ ID NO: 586233
uccagaugggaaugguuau

SEQ ID NO: 702287 - RNA, 19 nt, Artificial Sequence
  Description of Artificial Sequence: Synthetic oligonucleotide
  Antisense strand to SEQ ID NO: 702286
auaaccauucccaucugga

SEQ ID NO: 702288 - RNA, 19 nt, Artificial Sequence
  Description of Artificial Sequence: Synthetic oligonucleotide
  Sense strand starting at position 3216 of SEQ ID NO: 586233
ccagaugggaaugguuauu

SEQ ID NO: 702289 - RNA, 19 nt, Artificial Sequence
  Description of Artificial Sequence: Synthetic oligonucleotide
  Antisense strand to SEQ ID NO: 702288
aauaaccauucccaucugg

SEQ ID NO: 702290 - RNA, 19 nt, Artificial Sequence
  Description of Artificial Sequence: Synthetic oligonucleotide
  Sense strand starting at position 3264 of SEQ ID NO: 586233
cuuguuuagagugagucau

SEQ ID NO: 702291 - RNA, 19 nt, Artificial Sequence
  Description of Artificial Sequence: Synthetic oligonucleotide
  Antisense strand to SEQ ID NO: 702290
augacucacucuaaacaag

SEQ ID NO: 702292 - RNA, 19 nt, Artificial Sequence
  Description of Artificial Sequence: Synthetic oligonucleotide
  Sense strand starting at position 3268 of SEQ ID NO: 586233
uuuagagugagucauuguu

SEQ ID NO: 702293 - RNA, 19 nt, Artificial Sequence
  Description of Artificial Sequence: Synthetic oligonucleotide
  Antisense strand to SEQ ID NO: 702292
aacaaugacucacucuaaa

SEQ ID NO: 702294 - RNA, 19 nt, Artificial Sequence
  Description of Artificial Sequence: Synthetic oligonucleotide
  Sense strand starting at position 3299 of SEQ ID NO: 586233
ugucaaguauucuuuacaa

SEQ ID NO: 702295 - RNA, 19 nt, Artificial Sequence
  Description of Artificial Sequence: Synthetic oligonucleotide
  Antisense strand to SEQ ID NO: 702294
uuguaaagaauacuugaca

SEQ ID NO: 702296 - RNA, 19 nt, Artificial Sequence
  Description of Artificial Sequence: Synthetic oligonucleotide
  Sense strand starting at position 3397 of SEQ ID NO: 586233
agagaucuugucuacucau

SEQ ID NO: 702297 - RNA, 19 nt, Artificial Sequence
  Description of Artificial Sequence: Synthetic oligonucleotide
  Antisense strand to SEQ ID NO: 702296
augaguagacaagaucucu

SEQ ID NO: 702298 - RNA, 19 nt, Artificial Sequence
  Description of Artificial Sequence: Synthetic oligonucleotide
  Sense strand starting at position 3507 of SEQ ID NO: 586233
caucacugucauggaugua

SEQ ID NO: 702299 - RNA, 19 nt, Artificial Sequence
  Description of Artificial Sequence: Synthetic oligonucleotide
  Antisense strand to SEQ ID NO: 702298
uacauccaugacagugaug

SEQ ID NO: 702300 - RNA, 19 nt, Artificial Sequence
  Description of Artificial Sequence: Synthetic oligonucleotide
  Sense strand starting at position 3510 of SEQ ID NO: 586233
cacugucauggauguaaug

SEQ ID NO: 702301 - RNA, 19 nt, Artificial Sequence
  Description of Artificial Sequence: Synthetic oligonucleotide
  Antisense strand to SEQ ID NO: 702300
cauuacauccaugacagug

SEQ ID NO: 702302 - RNA, 19 nt, Artificial Sequence
  Description of Artificial Sequence: Synthetic oligonucleotide
  Sense strand starting at position 3528 of SEQ ID NO: 586233
gcuaauaagcaauaaaguu

SEQ ID NO: 702303 - RNA, 19 nt, Artificial Sequence
  Description of Artificial Sequence: Synthetic oligonucleotide
  Antisense strand to SEQ ID NO: 702302
aacuuuauugcuuauuagc

SEQ ID NO: 702304 - RNA, 19 nt, Artificial Sequence
  Description of Artificial Sequence: Synthetic oligonucleotide
  Sense strand starting at position 3544 of SEQ ID NO: 586233
guuaaauaaguguacaaac

SEQ ID NO: 702305 - RNA, 19 nt, Artificial Sequence
  Description of Artificial Sequence: Synthetic oligonucleotide
  Antisense strand to SEQ ID NO: 702304
guuuguacacuuauuuaac

SEQ ID NO: 702306 - RNA, 19 nt, Artificial Sequence
  Description of Artificial Sequence: Synthetic oligonucleotide
  Sense strand starting at position 3603 of SEQ ID NO: 586233
cugucauucugaucagagg

SEQ ID NO: 702307 - RNA, 19 nt, Artificial Sequence
  Description of Artificial Sequence: Synthetic oligonucleotide
  Antisense strand to SEQ ID NO: 702306
ccucugaucagaaugacag

SEQ ID NO: 702308 - RNA, 19 nt, Artificial Sequence
  Description of Artificial Sequence: Synthetic oligonucleotide
  Sense strand starting at position 3604 of SEQ ID NO: 586233
ugucauucugaucagaggu

SEQ ID NO: 702309 - RNA, 19 nt, Artificial Sequence
  Description of Artificial Sequence: Synthetic oligonucleotide
  Antisense strand to SEQ ID NO: 702308
accucugaucagaaugaca

SEQ ID NO: 702310 - RNA, 19 nt, Artificial Sequence
  Description of Artificial Sequence: Synthetic oligonucleotide
  Sense strand starting at position 3614 of SEQ ID NO: 586233
aucagagguugaucacaug

SEQ ID NO: 702311 - RNA, 19 nt, Artificial Sequence
  Description of Artificial Sequence: Synthetic oligonucleotide
  Antisense strand to SEQ ID NO: 702310
caugugaucaaccucugau

SEQ ID NO: 702312 - RNA, 19 nt, Artificial Sequence
  Description of Artificial Sequence: Synthetic oligonucleotide
  Sense strand starting at position 3635 of SEQ ID NO: 586233
guaagaauuggguauugua

SEQ ID NO: 702313 - RNA, 19 nt, Artificial Sequence
  Description of Artificial Sequence: Synthetic oligonucleotide
  Antisense strand to SEQ ID NO: 702312
uacaauacccaauucuuac

SEQ ID NO: 702314 - RNA, 19 nt, Artificial Sequence
  Description of Artificial Sequence: Synthetic oligonucleotide
  Sense strand starting at position 3699 of SEQ ID NO: 586233
ccuagacauuucuaugaug

SEQ ID NO: 702315 - RNA, 19 nt, Artificial Sequence
  Description of Artificial Sequence: Synthetic oligonucleotide
  Antisense strand to SEQ ID NO: 702314
caucauagaaaugucuagg

SEQ ID NO: 702316 - RNA, 19 nt, Artificial Sequence
  Description of Artificial Sequence: Synthetic oligonucleotide
  Sense strand starting at position 3702 of SEQ ID NO: 586233
agacauuucuaugauguca

SEQ ID NO: 702317 - RNA, 19 nt, Artificial Sequence
  Description of Artificial Sequence: Synthetic oligonucleotide
  Antisense strand to SEQ ID NO: 702316
ugacaucauagaaaugucu

SEQ ID NO: 702318 - RNA, 19 nt, Artificial Sequence
  Description of Artificial Sequence: Synthetic oligonucleotide
  Sense strand starting at position 3767 of SEQ ID NO: 586233
aacccaaaggguugaguua

SEQ ID NO: 702319 - RNA, 19 nt, Artificial Sequence
  Description of Artificial Sequence: Synthetic oligonucleotide
  Antisense strand to SEQ ID NO: 702318
uaacucaacccuuuggguu

SEQ ID NO: 702320 - RNA, 19 nt, Artificial Sequence
  Description of Artificial Sequence: Synthetic oligonucleotide
  Sense strand starting at position 3833 of SEQ ID NO: 586233
ccagaaggcuuucuuaaau

SEQ ID NO: 702321 - RNA, 19 nt, Artificial Sequence
  Description of Artificial Sequence: Synthetic oligonucleotide
  Antisense strand to SEQ ID NO: 702320
auuuaagaaagccuucugg

SEQ ID NO: 702322 - RNA, 19 nt, Artificial Sequence
  Description of Artificial Sequence: Synthetic oligonucleotide
  Sense strand starting at position 3951 of SEQ ID NO: 586233
uguugauuccuccaucagu

SEQ ID NO: 702323 - RNA, 19 nt, Artificial Sequence
  Description of Artificial Sequence: Synthetic oligonucleotide
  Antisense strand to SEQ ID NO: 702322
acugauggaggaaucaaca

SEQ ID NO: 702324 - RNA, 19 nt, Artificial Sequence
  Description of Artificial Sequence: Synthetic oligonucleotide
  Sense strand starting at position 3954 of SEQ ID NO: 586233
ugauuccuccaucaguuau

SEQ ID NO: 702325 - RNA, 19 nt, Artificial Sequence
  Description of Artificial Sequence: Synthetic oligonucleotide
  Antisense strand to SEQ ID NO: 702324
auaacugauggaggaauca

SEQ ID NO: 702326 - RNA, 19 nt, Artificial Sequence
  Description of Artificial Sequence: Synthetic oligonucleotide
  Sense strand starting at position 83 of SEQ ID NO: 586234
gucacaauuugacacagaa

SEQ ID NO: 702327 - RNA, 19 nt, Artificial Sequence
  Description of Artificial Sequence: Synthetic oligonucleotide
  Antisense strand to SEQ ID NO: 702326
uucugugucaaauugugac

SEQ ID NO: 702328 - RNA, 19 nt, Artificial Sequence
  Description of Artificial Sequence: Synthetic oligonucleotide
  Sense strand starting at position 109 of SEQ ID NO: 586234
guggaagaggcaugaauag

SEQ ID NO: 702329 - RNA, 19 nt, Artificial Sequence
  Description of Artificial Sequence: Synthetic oligonucleotide
  Antisense strand to SEQ ID NO: 702328
cuauucaugccucuuccac

SEQ ID NO: 702330 - RNA, 19 nt, Artificial Sequence
  Description of Artificial Sequence: Synthetic oligonucleotide
  Sense strand starting at position 175 of SEQ ID NO: 586234
ucuuaaaucugguuaaagc

SEQ ID NO: 702331 - RNA, 19 nt, Artificial Sequence
  Description of Artificial Sequence: Synthetic oligonucleotide
  Antisense strand to SEQ ID NO: 702330
gcuuuaaccagauuuaaga

SEQ ID NO: 702332 - RNA, 19 nt, Artificial Sequence
  Description of Artificial Sequence: Synthetic oligonucleotide
  Sense strand starting at position 176 of SEQ ID NO: 586234
cuuaaaucugguuaaagca

SEQ ID NO: 702333 - RNA, 19 nt, Artificial Sequence
  Description of Artificial Sequence: Synthetic oligonucleotide
  Antisense strand to SEQ ID NO: 702332
ugcuuuaaccagauuuaag

SEQ ID NO: 702334 - RNA, 19 nt, Artificial Sequence
  Description of Artificial Sequence: Synthetic oligonucleotide
  Sense strand starting at position 207 of SEQ ID NO: 586234
gcaggaacacauugaucau

SEQ ID NO: 702335 - RNA, 19 nt, Artificial Sequence
  Description of Artificial Sequence: Synthetic oligonucleotide
  Antisense strand to SEQ ID NO: 702334
augaucaauguguuccugc

SEQ ID NO: 702336 - RNA, 19 nt, Artificial Sequence
  Description of Artificial Sequence: Synthetic oligonucleotide
  Sense strand starting at position 236 of SEQ ID NO: 586234
ugucuaauuccuuaugguu

SEQ ID NO: 702337 - RNA, 19 nt, Artificial Sequence
  Description of Artificial Sequence: Synthetic oligonucleotide
  Antisense strand to SEQ ID NO: 702336
aaccauaaggaauuagaca

SEQ ID NO: 702338 - RNA, 19 nt, Artificial Sequence
  Description of Artificial Sequence: Synthetic oligonucleotide
  Sense strand starting at position 275 of SEQ ID NO: 586234
ugagaugaauggucugacu

SEQ ID NO: 702339 - RNA, 19 nt, Artificial Sequence
  Description of Artificial Sequence: Synthetic oligonucleotide
  Antisense strand to SEQ ID NO: 702338
agucagaccauucaucuca

SEQ ID NO: 702340 - RNA, 19 nt, Artificial Sequence
  Description of Artificial Sequence: Synthetic oligonucleotide
  Sense strand starting at position 299 of SEQ ID NO: 586234
agggaaauaucugucuuaa

SEQ ID NO: 702341 - RNA, 19 nt, Artificial Sequence
  Description of Artificial Sequence: Synthetic oligonucleotide
  Antisense strand to SEQ ID NO: 702340
uuaagacagauauuucccu

SEQ ID NO: 702342 - RNA, 19 nt, Artificial Sequence
  Description of Artificial Sequence: Synthetic oligonucleotide
  Sense strand starting at position 301 of SEQ ID NO: 586234
ggaaauaucugucuuaagc

SEQ ID NO: 702343 - RNA, 19 nt, Artificial Sequence
  Description of Artificial Sequence: Synthetic oligonucleotide
  Antisense strand to SEQ ID NO: 702342
gcuuaagacagauauuucc

SEQ ID NO: 702344 - RNA, 19 nt, Artificial Sequence
  Description of Artificial Sequence: Synthetic oligonucleotide
  Sense strand starting at position 414 of SEQ ID NO: 586234
auuaucuaagcuggugaaa

SEQ ID NO: 702345 - RNA, 19 nt, Artificial Sequence
  Description of Artificial Sequence: Synthetic oligonucleotide
  Antisense strand to SEQ ID NO: 702344
uuucaccagcuuagauaau

SEQ ID NO: 702346 - RNA, 19 nt, Artificial Sequence
  Description of Artificial Sequence: Synthetic oligonucleotide
  Sense strand starting at position 423 of SEQ ID NO: 586234
gcuggugaaagugauguaa

SEQ ID NO: 702347 - RNA, 19 nt, Artificial Sequence
  Description of Artificial Sequence: Synthetic oligonucleotide
  Antisense strand to SEQ ID NO: 702346
uuacaucacuuucaccagc

SEQ ID NO: 702348 - RNA, 19 nt, Artificial Sequence
  Description of Artificial Sequence: Synthetic oligonucleotide
  Sense strand starting at position 427 of SEQ ID NO: 586234
gugaaagugauguaaguuu

SEQ ID NO: 702349 - RNA, 19 nt, Artificial Sequence
  Description of Artificial Sequence: Synthetic oligonucleotide
  Antisense strand to SEQ ID NO: 702348
aaacuuacaucacuuucac

SEQ ID NO: 702350 - RNA, 19 nt, Artificial Sequence
  Description of Artificial Sequence: Synthetic oligonucleotide
  Sense strand starting at position 490 of SEQ ID NO: 586234
agccaauggcuuuaacaga

SEQ ID NO: 702351 - RNA, 19 nt, Artificial Sequence
  Description of Artificial Sequence: Synthetic oligonucleotide
  Antisense strand to SEQ ID NO: 702350
ucuguuaaagccauuggcu

SEQ ID NO: 702352 - RNA, 19 nt, Artificial Sequence
  Description of Artificial Sequence: Synthetic oligonucleotide
  Sense strand starting at position 608 of SEQ ID NO: 586234
ccuguuaagauguggauaa

SEQ ID NO: 702353 - RNA, 19 nt, Artificial Sequence
  Description of Artificial Sequence: Synthetic oligonucleotide
  Antisense strand to SEQ ID NO: 702352
uuauccacaucuuaacagg

SEQ ID NO: 702354 - RNA, 19 nt, Artificial Sequence
  Description of Artificial Sequence: Synthetic oligonucleotide
  Sense strand starting at position 1495 of SEQ ID NO: 586234
agcaaagacuccguccaaa

SEQ ID NO: 702355 - RNA, 19 nt, Artificial Sequence
  Description of Artificial Sequence: Synthetic oligonucleotide
  Antisense strand to SEQ ID NO: 702354
uuuggacggagucuuugcu

SEQ ID NO: 702356 - RNA, 19 nt, Artificial Sequence
  Description of Artificial Sequence: Synthetic oligonucleotide
  Sense strand starting at position 1550 of SEQ ID NO: 586234
guaucuuagagucagugaa

SEQ ID NO: 702357 - RNA, 19 nt, Artificial Sequence
  Description of Artificial Sequence: Synthetic oligonucleotide
  Antisense strand to SEQ ID NO: 702356
uucacugacucuaagauac

SEQ ID NO: 702358 - RNA, 19 nt, Artificial Sequence
  Description of Artificial Sequence: Synthetic oligonucleotide
  Sense strand starting at position 1607 of SEQ ID NO: 586234
gaugcuauugggugagaga

SEQ ID NO: 702359 - RNA, 19 nt, Artificial Sequence
  Description of Artificial Sequence: Synthetic oligonucleotide
  Antisense strand to SEQ ID NO: 702358
ucucucacccaauagcauc

SEQ ID NO: 702360 - RNA, 19 nt, Artificial Sequence
  Description of Artificial Sequence: Synthetic oligonucleotide
  Sense strand starting at position 1608 of SEQ ID NO: 586234
augcuauugggugagagau

SEQ ID NO: 702361 - RNA, 19 nt, Artificial Sequence
  Description of Artificial Sequence: Synthetic oligonucleotide
  Antisense strand to SEQ ID NO: 702360
aucucucacccaauagcau

SEQ ID NO: 702362 - RNA, 19 nt, Artificial Sequence
  Description of Artificial Sequence: Synthetic oligonucleotide
  Sense strand starting at position 1618 of SEQ ID NO: 586234
gugagagauuuauaguuag

SEQ ID NO: 702363 - RNA, 19 nt, Artificial Sequence
  Description of Artificial Sequence: Synthetic oligonucleotide
  Antisense strand to SEQ ID NO: 702362
cuaacuauaaaucucucac

SEQ ID NO: 702364 - RNA, 19 nt, Artificial Sequence
  Description of Artificial Sequence: Synthetic oligonucleotide
  Sense strand starting at position 1624 of SEQ ID NO: 586234
gauuuauaguuagaagagg

SEQ ID NO: 702365 - RNA, 19 nt, Artificial Sequence
  Description of Artificial Sequence: Synthetic oligonucleotide
  Antisense strand to SEQ ID NO: 702364
ccucuucuaacuauaaauc

SEQ ID NO: 702366 - RNA, 19 nt, Artificial Sequence
  Description of Artificial Sequence: Synthetic oligonucleotide
  Sense strand starting at position 1721 of SEQ ID NO: 586234
agccaaugaaucugagguu

SEQ ID NO: 702367 - RNA, 19 nt, Artificial Sequence
  Description of Artificial Sequence: Synthetic oligonucleotide
  Antisense strand to SEQ ID NO: 702366
aaccucagauucauuggcu

SEQ ID NO: 702368 - RNA, 19 nt, Artificial Sequence
  Description of Artificial Sequence: Synthetic oligonucleotide
  Sense strand starting at position 1868 of SEQ ID NO: 586234
aucacuuucgaauacguca

SEQ ID NO: 702369 - RNA, 19 nt, Artificial Sequence
  Description of Artificial Sequence: Synthetic oligonucleotide
  Antisense strand to SEQ ID NO: 702368
ugacguauucgaaagugau

SEQ ID NO: 702370 - RNA, 19 nt, Artificial Sequence
  Description of Artificial Sequence: Synthetic oligonucleotide
  Sense strand starting at position 1873 of SEQ ID NO: 586234
uuucgaauacgucaaagca

SEQ ID NO: 702371 - RNA, 19 nt, Artificial Sequence
  Description of Artificial Sequence: Synthetic oligonucleotide
  Antisense strand to SEQ ID NO: 702370
ugcuuugacguauucgaaa

SEQ ID NO: 702372 - RNA, 19 nt, Artificial Sequence
  Description of Artificial Sequence: Synthetic oligonucleotide
  Sense strand starting at position 1881 of SEQ ID NO: 586234
acgucaaagcaguaauaac

SEQ ID NO: 702373 - RNA, 19 nt, Artificial Sequence
  Description of Artificial Sequence: Synthetic oligonucleotide
  Antisense strand to SEQ ID NO: 702372
guuauuacugcuuugacgu

SEQ ID NO: 702374 - RNA, 19 nt, Artificial Sequence
  Description of Artificial Sequence: Synthetic oligonucleotide
  Sense strand starting at position 1924 of SEQ ID NO: 586234
gauacuaaccaguggugca

SEQ ID NO: 702375 - RNA, 19 nt, Artificial Sequence
  Description of Artificial Sequence: Synthetic oligonucleotide
  Antisense strand to SEQ ID NO: 702374
ugcaccacugguuaguauc

SEQ ID NO: 702376 - RNA, 19 nt, Artificial Sequence
  Description of Artificial Sequence: Synthetic oligonucleotide
  Sense strand starting at position 2011 of SEQ ID NO: 586234
gacagcauucuuugggagu

SEQ ID NO: 702377 - RNA, 19 nt, Artificial Sequence
  Description of Artificial Sequence: Synthetic oligonucleotide
  Antisense strand to SEQ ID NO: 702376
acucccaaagaaugcuguc

SEQ ID NO: 702378 - RNA, 19 nt, Artificial Sequence
  Description of Artificial Sequence: Synthetic oligonucleotide
  Sense strand starting at position 2118 of SEQ ID NO: 586234
agagccuuucccuagacaa

SEQ ID NO: 702379 - RNA, 19 nt, Artificial Sequence
  Description of Artificial Sequence: Synthetic oligonucleotide
  Antisense strand to SEQ ID NO: 702378
uugucuagggaaaggcucu

SEQ ID NO: 702380 - RNA, 19 nt, Artificial Sequence
  Description of Artificial Sequence: Synthetic oligonucleotide
  Sense strand starting at position 2151 of SEQ ID NO: 586234
gcaacuuacugacuuauag

SEQ ID NO: 702381 - RNA, 19 nt, Artificial Sequence
  Description of Artificial Sequence: Synthetic oligonucleotide
  Antisense strand to SEQ ID NO: 702380
cuauaagucaguaaguugc

SEQ ID NO: 702382 - RNA, 19 nt, Artificial Sequence
  Description of Artificial Sequence: Synthetic oligonucleotide
  Sense strand starting at position 2180 of SEQ ID NO: 586234
ucucgaguuccagacuuga

SEQ ID NO: 702383 - RNA, 19 nt, Artificial Sequence
  Description of Artificial Sequence: Synthetic oligonucleotide
  Antisense strand to SEQ ID NO: 702382
ucaagucuggaacucgaga

SEQ ID NO: 702384 - RNA, 19 nt, Artificial Sequence
  Description of Artificial Sequence: Synthetic oligonucleotide
  Sense strand starting at position 2264 of SEQ ID NO: 586234
uacucuguaguaugagagu

SEQ ID NO: 702385 - RNA, 19 nt, Artificial Sequence
  Description of Artificial Sequence: Synthetic oligonucleotide
  Antisense strand to SEQ ID NO: 702384
acucucauacuacagagua

SEQ ID NO: 702386 - RNA, 19 nt, Artificial Sequence
  Description of Artificial Sequence: Synthetic oligonucleotide
  Sense strand starting at position 2280 of SEQ ID NO: 586234
agucuuaaacgugaacauu

SEQ ID NO: 702387 - RNA, 19 nt, Artificial Sequence
  Description of Artificial Sequence: Synthetic oligonucleotide
  Antisense strand to SEQ ID NO: 702386
aauguucacguuuaagacu

SEQ ID NO: 702388 - RNA, 19 nt, Artificial Sequence
  Description of Artificial Sequence: Synthetic oligonucleotide
  Sense strand starting at position 2410 of SEQ ID NO: 586234
uugcgaagaccuuaaucuu

SEQ ID NO: 702389 - RNA, 19 nt, Artificial Sequence
  Description of Artificial Sequence: Synthetic oligonucleotide
  Antisense strand to SEQ ID NO: 702388
aagauuaaggucuucgcaa

SEQ ID NO: 702390 - RNA, 19 nt, Artificial Sequence
  Description of Artificial Sequence: Synthetic oligonucleotide
  Sense strand starting at position 2466 of SEQ ID NO: 586234
ugaugacugccaugaaaug

SEQ ID NO: 702391 - RNA, 19 nt, Artificial Sequence
  Description of Artificial Sequence: Synthetic oligonucleotide
  Antisense strand to SEQ ID NO: 702390
cauuucauggcagucauca

SEQ ID NO: 702392 - RNA, 19 nt, Artificial Sequence
  Description of Artificial Sequence: Synthetic oligonucleotide
  Sense strand starting at position 2565 of SEQ ID NO: 586234
uguauugacuucuuugaaa

SEQ ID NO: 702393 - RNA, 19 nt, Artificial Sequence
  Description of Artificial Sequence: Synthetic oligonucleotide
  Antisense strand to SEQ ID NO: 702392
uuucaaagaagucaauaca

SEQ ID NO: 702394 - RNA, 19 nt, Artificial Sequence
  Description of Artificial Sequence: Synthetic oligonucleotide
  Sense strand starting at position 2586 of SEQ ID NO: 586234
cuggucauucuaugcaaag

SEQ ID NO: 702395 - RNA, 19 nt, Artificial Sequence
  Description of Artificial Sequence: Synthetic oligonucleotide
  Antisense strand to SEQ ID NO: 702394
cuuugcauagaaugaccag

SEQ ID NO: 702396 - RNA, 19 nt, Artificial Sequence
  Description of Artificial Sequence: Synthetic oligonucleotide
  Sense strand starting at position 2603 of SEQ ID NO: 586234
agccaugcagaucaugaua

SEQ ID NO: 702397 - RNA, 19 nt, Artificial Sequence
  Description of Artificial Sequence: Synthetic oligonucleotide
  Antisense strand to SEQ ID NO: 702396
uaucaugaucugcauggcu

SEQ ID NO: 702398 - RNA, 19 nt, Artificial Sequence
  Description of Artificial Sequence: Synthetic oligonucleotide
  Sense strand starting at position 3445 of SEQ ID NO: 586234
ugggaauccgauugguuau

SEQ ID NO: 702399 - RNA, 19 nt, Artificial Sequence
  Description of Artificial Sequence: Synthetic oligonucleotide
  Antisense strand to SEQ ID NO: 702398
auaaccaaucggauuccca

SEQ ID NO: 702400 - RNA, 19 nt, Artificial Sequence
  Description of Artificial Sequence: Synthetic oligonucleotide
  Sense strand starting at position 3446 of SEQ ID NO: 586234
gggaauccgauugguuauc

SEQ ID NO: 702401 - RNA, 19 nt, Artificial Sequence
  Description of Artificial Sequence: Synthetic oligonucleotide
  Antisense strand to SEQ ID NO: 702400
gauaaccaaucggauuccc

SEQ ID NO: 702402 - RNA, 19 nt, Artificial Sequence
  Description of Artificial Sequence: Synthetic oligonucleotide
  Sense strand starting at position 3448 of SEQ ID NO: 586234
gaauccgauugguuaucga

SEQ ID NO: 702403 - RNA, 19 nt, Artificial Sequence
  Description of Artificial Sequence: Synthetic oligonucleotide
  Antisense strand to SEQ ID NO: 702402
ucgauaaccaaucggauuc

SEQ ID NO: 702404 - RNA, 19 nt, Artificial Sequence
  Description of Artificial Sequence: Synthetic oligonucleotide
  Sense strand starting at position 3509 of SEQ ID NO: 586234
ggccuauggcgauaacuuc

SEQ ID NO: 702405 - RNA, 19 nt, Artificial Sequence
  Description of Artificial Sequence: Synthetic oligonucleotide
  Antisense strand to SEQ ID NO: 702404
gaaguuaucgccauaggcc

SEQ ID NO: 702406 - RNA, 19 nt, Artificial Sequence
  Description of Artificial Sequence: Synthetic oligonucleotide
  Sense strand starting at position 122 of SEQ ID NO: 586235
agcaaagacuccguccaaa

SEQ ID NO: 702407 - RNA, 19 nt, Artificial Sequence
  Description of Artificial Sequence: Synthetic oligonucleotide
  Antisense strand to SEQ ID NO: 702406
uuuggacggagucuuugcu

SEQ ID NO: 702408 - RNA, 19 nt, Artificial Sequence
  Description of Artificial Sequence: Synthetic oligonucleotide
  Sense strand starting at position 177 of SEQ ID NO: 586235
guaucuuagagucagugaa

SEQ ID NO: 702409 - RNA, 19 nt, Artificial Sequence
  Description of Artificial Sequence: Synthetic oligonucleotide
  Antisense strand to SEQ ID NO: 702408
uucacugacucuaagauac

SEQ ID NO: 702410 - RNA, 19 nt, Artificial Sequence
  Description of Artificial Sequence: Synthetic oligonucleotide
  Sense strand starting at position 234 of SEQ ID NO: 586235
gaugcuauugggugagaga

SEQ ID NO: 702411 - RNA, 19 nt, Artificial Sequence
  Description of Artificial Sequence: Synthetic oligonucleotide
  Antisense strand to SEQ ID NO: 702410
ucucucacccaauagcauc

SEQ ID NO: 702412 - RNA, 19 nt, Artificial Sequence
  Description of Artificial Sequence: Synthetic oligonucleotide
  Sense strand starting at position 235 of SEQ ID NO: 586235
augcuauugggugagagau

SEQ ID NO: 702413 - RNA, 19 nt, Artificial Sequence
  Description of Artificial Sequence: Synthetic oligonucleotide
  Antisense strand to SEQ ID NO: 702412
aucucucacccaauagcau

SEQ ID NO: 702414 - RNA, 19 nt, Artificial Sequence
  Description of Artificial Sequence: Synthetic oligonucleotide
  Sense strand starting at position 237 of SEQ ID NO: 586235
gcuauugggugagagauuu

SEQ ID NO: 702415 - RNA, 19 nt, Artificial Sequence
  Description of Artificial Sequence: Synthetic oligonucleotide
  Antisense strand to SEQ ID NO: 702414
aaaucucucacccaauagc

SEQ ID NO: 702416 - RNA, 19 nt, Artificial Sequence
  Description of Artificial Sequence: Synthetic oligonucleotide
  Sense strand starting at position 245 of SEQ ID NO: 586235
gugagagauuuauaguuag

SEQ ID NO: 702417 - RNA, 19 nt, Artificial Sequence
  Description of Artificial Sequence: Synthetic oligonucleotide
  Antisense strand to SEQ ID NO: 702416
cuaacuauaaaucucucac

SEQ ID NO: 702418 - RNA, 19 nt, Artificial Sequence
  Description of Artificial Sequence: Synthetic oligonucleotide
  Sense strand starting at position 251 of SEQ ID NO: 586235
gauuuauaguuagaagagg

SEQ ID NO: 702419 - RNA, 19 nt, Artificial Sequence
  Description of Artificial Sequence: Synthetic oligonucleotide
  Antisense strand to SEQ ID NO: 702418
ccucuucuaacuauaaauc

SEQ ID NO: 702420 - RNA, 19 nt, Artificial Sequence
  Description of Artificial Sequence: Synthetic oligonucleotide
  Sense strand starting at position 348 of SEQ ID NO: 586235
agccaaugaaucugagguu

SEQ ID NO: 702421 - RNA, 19 nt, Artificial Sequence
  Description of Artificial Sequence: Synthetic oligonucleotide
  Antisense strand to SEQ ID NO: 702420
aaccucagauucauuggcu

SEQ ID NO: 702422 - RNA, 19 nt, Artificial Sequence
  Description of Artificial Sequence: Synthetic oligonucleotide
  Sense strand starting at position 495 of SEQ ID NO: 586235
aucacuuucgaauacguca

SEQ ID NO: 702423 - RNA, 19 nt, Artificial Sequence
  Description of Artificial Sequence: Synthetic oligonucleotide
  Antisense strand to SEQ ID NO: 702422
ugacguauucgaaagugau

SEQ ID NO: 702424 - RNA, 19 nt, Artificial Sequence
  Description of Artificial Sequence: Synthetic oligonucleotide
  Sense strand starting at position 500 of SEQ ID NO: 586235
uuucgaauacgucaaagca

SEQ ID NO: 702425 - RNA, 19 nt, Artificial Sequence
  Description of Artificial Sequence: Synthetic oligonucleotide
  Antisense strand to SEQ ID NO: 702424
ugcuuugacguauucgaaa

SEQ ID NO: 702426 - RNA, 19 nt, Artificial Sequence
  Description of Artificial Sequence: Synthetic oligonucleotide
  Sense strand starting at position 508 of SEQ ID NO: 586235
acgucaaagcaguaauaac

SEQ ID NO: 702427 - RNA, 19 nt, Artificial Sequence
  Description of Artificial Sequence: Synthetic oligonucleotide
  Antisense strand to SEQ ID NO: 702426
guuauuacugcuuugacgu

SEQ ID NO: 702428 - RNA, 19 nt, Artificial Sequence
  Description of Artificial Sequence: Synthetic oligonucleotide
  Sense strand starting at position 551 of SEQ ID NO: 586235
gauacuaaccaguggugca

SEQ ID NO: 702429 - RNA, 19 nt, Artificial Sequence
  Description of Artificial Sequence: Synthetic oligonucleotide
  Antisense strand to SEQ ID NO: 702428
ugcaccacugguuaguauc

SEQ ID NO: 702430 - RNA, 19 nt, Artificial Sequence
  Description of Artificial Sequence: Synthetic oligonucleotide
  Sense strand starting at position 638 of SEQ ID NO: 586235
gacagcauucuuugggagu

SEQ ID NO: 702431 - RNA, 19 nt, Artificial Sequence
  Description of Artificial Sequence: Synthetic oligonucleotide
  Antisense strand to SEQ ID NO: 702430
acucccaaagaaugcuguc

SEQ ID NO: 702432 - RNA, 19 nt, Artificial Sequence
  Description of Artificial Sequence: Synthetic oligonucleotide
  Sense strand starting at position 652 of SEQ ID NO: 586235
ggagucuucucucugccua

SEQ ID NO: 702433 - RNA, 19 nt, Artificial Sequence
  Description of Artificial Sequence: Synthetic oligonucleotide
  Antisense strand to SEQ ID NO: 702432
uaggcagagagaagacucc

SEQ ID NO: 702434 - RNA, 19 nt, Artificial Sequence
  Description of Artificial Sequence: Synthetic oligonucleotide
  Sense strand starting at position 699 of SEQ ID NO: 586235
uuggccugcccuuaauauu

SEQ ID NO: 702435 - RNA, 19 nt, Artificial Sequence
  Description of Artificial Sequence: Synthetic oligonucleotide
  Antisense strand to SEQ ID NO: 702434
aauauuaagggcaggccaa

SEQ ID NO: 702436 - RNA, 19 nt, Artificial Sequence
  Description of Artificial Sequence: Synthetic oligonucleotide
  Sense strand starting at position 745 of SEQ ID NO: 586235
agagccuuucccuagacaa

SEQ ID NO: 702437 - RNA, 19 nt, Artificial Sequence
  Description of Artificial Sequence: Synthetic oligonucleotide
  Antisense strand to SEQ ID NO: 702436
uugucuagggaaaggcucu

SEQ ID NO: 702438 - RNA, 19 nt, Artificial Sequence
  Description of Artificial Sequence: Synthetic oligonucleotide
  Sense strand starting at position 778 of SEQ ID NO: 586235
gcaacuuacugacuuauag

SEQ ID NO: 702439 - RNA, 19 nt, Artificial Sequence
  Description of Artificial Sequence: Synthetic oligonucleotide
  Antisense strand to SEQ ID NO: 702438
cuauaagucaguaaguugc

SEQ ID NO: 702440 - RNA, 19 nt, Artificial Sequence
  Description of Artificial Sequence: Synthetic oligonucleotide
  Sense strand starting at position 796 of SEQ ID NO: 586235
guucuuaacucucucgagu

SEQ ID NO: 702441 - RNA, 19 nt, Artificial Sequence
  Description of Artificial Sequence: Synthetic oligonucleotide
  Antisense strand to SEQ ID NO: 702440
acucgagagaguuaagaac

SEQ ID NO: 702442 - RNA, 19 nt, Artificial Sequence
  Description of Artificial Sequence: Synthetic oligonucleotide
  Sense strand starting at position 807 of SEQ ID NO: 586235
ucucgaguuccagacuuga

SEQ ID NO: 702443 - RNA, 19 nt, Artificial Sequence
  Description of Artificial Sequence: Synthetic oligonucleotide
  Antisense strand to SEQ ID NO: 702442
ucaagucuggaacucgaga

SEQ ID NO: 702444 - RNA, 19 nt, Artificial Sequence
  Description of Artificial Sequence: Synthetic oligonucleotide
  Sense strand starting at position 884 of SEQ ID NO: 586235
cuuccucuacucuguagua

SEQ ID NO: 702445 - RNA, 19 nt, Artificial Sequence
  Description of Artificial Sequence: Synthetic oligonucleotide
  Antisense strand to SEQ ID NO: 702444
uacuacagaguagaggaag

SEQ ID NO: 702446 - RNA, 19 nt, Artificial Sequence
  Description of Artificial Sequence: Synthetic oligonucleotide
  Sense strand starting at position 891 of SEQ ID NO: 586235
uacucuguaguaugagagu

SEQ ID NO: 702447 - RNA, 19 nt, Artificial Sequence
  Description of Artificial Sequence: Synthetic oligonucleotide
  Antisense strand to SEQ ID NO: 702446
acucucauacuacagagua

SEQ ID NO: 702448 - RNA, 19 nt, Artificial Sequence
  Description of Artificial Sequence: Synthetic oligonucleotide
  Sense strand starting at position 907 of SEQ ID NO: 586235
agucuuaaacgugaacauu

SEQ ID NO: 702449 - RNA, 19 nt, Artificial Sequence
  Description of Artificial Sequence: Synthetic oligonucleotide
  Antisense strand to SEQ ID NO: 702448
aauguucacguuuaagacu

SEQ ID NO: 702450 - RNA, 19 nt, Artificial Sequence
  Description of Artificial Sequence: Synthetic oligonucleotide
  Sense strand starting at position 993 of SEQ ID NO: 586235
cggaguuccuacgucuuaa

SEQ ID NO: 702451 - RNA, 19 nt, Artificial Sequence
  Description of Artificial Sequence: Synthetic oligonucleotide
  Antisense strand to SEQ ID NO: 702450
uuaagacguaggaacuccg

SEQ ID NO: 702452 - RNA, 19 nt, Artificial Sequence
  Description of Artificial Sequence: Synthetic oligonucleotide
  Sense strand starting at position 1005 of SEQ ID NO: 586235
gucuuaauucuguguccuu

SEQ ID NO: 702453 - RNA, 19 nt, Artificial Sequence
  Description of Artificial Sequence: Synthetic oligonucleotide
  Antisense strand to SEQ ID NO: 702452
aaggacacagaauuaagac

SEQ ID NO: 702454 - RNA, 19 nt, Artificial Sequence
  Description of Artificial Sequence: Synthetic oligonucleotide
  Sense strand starting at position 1026 of SEQ ID NO: 586235
gcagguucccuuugcgaag

SEQ ID NO: 702455 - RNA, 19 nt, Artificial Sequence
  Description of Artificial Sequence: Synthetic oligonucleotide
  Antisense strand to SEQ ID NO: 702454
cuucgcaaagggaaccugc

SEQ ID NO: 702456 - RNA, 19 nt, Artificial Sequence
  Description of Artificial Sequence: Synthetic oligonucleotide
  Sense strand starting at position 1027 of SEQ ID NO: 586235
cagguucccuuugcgaaga

SEQ ID NO: 702457 - RNA, 19 nt, Artificial Sequence
  Description of Artificial Sequence: Synthetic oligonucleotide
  Antisense strand to SEQ ID NO: 702456
ucuucgcaaagggaaccug

SEQ ID NO: 702458 - RNA, 19 nt, Artificial Sequence
  Description of Artificial Sequence: Synthetic oligonucleotide
  Sense strand starting at position 1037 of SEQ ID NO: 586235
uugcgaagaccuuaaucuu

SEQ ID NO: 702459 - RNA, 19 nt, Artificial Sequence
  Description of Artificial Sequence: Synthetic oligonucleotide
  Antisense strand to SEQ ID NO: 702458
aagauuaaggucuucgcaa

SEQ ID NO: 702460 - RNA, 19 nt, Artificial Sequence
  Description of Artificial Sequence: Synthetic oligonucleotide
  Sense strand starting at position 1078 of SEQ ID NO: 586235
caauguucuccugggugau

SEQ ID NO: 702461 - RNA, 19 nt, Artificial Sequence
  Description of Artificial Sequence: Synthetic oligonucleotide
  Antisense strand to SEQ ID NO: 702460
aucacccaggagaacauug

SEQ ID NO: 702462 - RNA, 19 nt, Artificial Sequence
  Description of Artificial Sequence: Synthetic oligonucleotide
  Sense strand starting at position 1093 of SEQ ID NO: 586235
ugaugacugccaugaaaug

SEQ ID NO: 702463 - RNA, 19 nt, Artificial Sequence
  Description of Artificial Sequence: Synthetic oligonucleotide
  Antisense strand to SEQ ID NO: 702462
cauuucauggcagucauca

SEQ ID NO: 702464 - RNA, 19 nt, Artificial Sequence
  Description of Artificial Sequence: Synthetic oligonucleotide
  Sense strand starting at position 1192 of SEQ ID NO: 586235
uguauugacuucuuugaaa

SEQ ID NO: 702465 - RNA, 19 nt, Artificial Sequence
  Description of Artificial Sequence: Synthetic oligonucleotide
  Antisense strand to SEQ ID NO: 702464
uuucaaagaagucaauaca

SEQ ID NO: 702466 - RNA, 19 nt, Artificial Sequence
  Description of Artificial Sequence: Synthetic oligonucleotide
  Sense strand starting at position 1213 of SEQ ID NO: 586235
cuggucauucuaugcaaag

SEQ ID NO: 702467 - RNA, 19 nt, Artificial Sequence
  Description of Artificial Sequence: Synthetic oligonucleotide
  Antisense strand to SEQ ID NO: 702466
cuuugcauagaaugaccag

SEQ ID NO: 702468 - RNA, 19 nt, Artificial Sequence
  Description of Artificial Sequence: Synthetic oligonucleotide
  Sense strand starting at position 1230 of SEQ ID NO: 586235
agccaugcagaucaugaua

SEQ ID NO: 702469 - RNA, 19 nt, Artificial Sequence
  Description of Artificial Sequence: Synthetic oligonucleotide
  Antisense strand to SEQ ID NO: 702468
uaucaugaucugcauggcu

SEQ ID NO: 702470 - RNA, 19 nt, Artificial Sequence
  Description of Artificial Sequence: Synthetic oligonucleotide
  Sense strand starting at position 2072 of SEQ ID NO: 586235
ugggaauccgauugguuau

SEQ ID NO: 702471 - RNA, 19 nt, Artificial Sequence
  Description of Artificial Sequence: Synthetic oligonucleotide
  Antisense strand to SEQ ID NO: 702470
auaaccaaucggauuccca

SEQ ID NO: 702472 - RNA, 19 nt, Artificial Sequence
  Description of Artificial Sequence: Synthetic oligonucleotide
  Sense strand starting at position 2073 of SEQ ID NO: 586235
gggaauccgauugguuauc

SEQ ID NO: 702473 - RNA, 19 nt, Artificial Sequence
  Description of Artificial Sequence: Synthetic oligonucleotide
  Antisense strand to SEQ ID NO: 702472
gauaaccaaucggauuccc

SEQ ID NO: 702474 - RNA, 19 nt, Artificial Sequence
  Description of Artificial Sequence: Synthetic oligonucleotide
  Sense strand starting at position 2075 of SEQ ID NO: 586235
gaauccgauugguuaucga

SEQ ID NO: 702475 - RNA, 19 nt, Artificial Sequence
  Description of Artificial Sequence: Synthetic oligonucleotide
  Antisense strand to SEQ ID NO: 702474
ucgauaaccaaucggauuc

SEQ ID NO: 702476 - RNA, 19 nt, Artificial Sequence
  Description of Artificial Sequence: Synthetic oligonucleotide
  Sense strand starting at position 2078 of SEQ ID NO: 586235
uccgauugguuaucgauuc

SEQ ID NO: 702477 - RNA, 19 nt, Artificial Sequence
  Description of Artificial Sequence: Synthetic oligonucleotide
  Antisense strand to SEQ ID NO: 702476
gaaucgauaaccaaucgga

SEQ ID NO: 702478 - RNA, 19 nt, Artificial Sequence
  Description of Artificial Sequence: Synthetic oligonucleotide
  Sense strand starting at position 2088 of SEQ ID NO: 586235
uaucgauucccgcggaaau

SEQ ID NO: 702479 - RNA, 19 nt, Artificial Sequence
  Description of Artificial Sequence: Synthetic oligonucleotide
  Antisense strand to SEQ ID NO: 702478
auuuccgcgggaaucgaua

SEQ ID NO: 702480 - RNA, 19 nt, Artificial Sequence
  Description of Artificial Sequence: Synthetic oligonucleotide
  Sense strand starting at position 2089 of SEQ ID NO: 586235
aucgauucccgcggaaauc

SEQ ID NO: 702481 - RNA, 19 nt, Artificial Sequence
  Description of Artificial Sequence: Synthetic oligonucleotide
  Antisense strand to SEQ ID NO: 702480
gauuuccgcgggaaucgau

SEQ ID NO: 702482 - RNA, 19 nt, Artificial Sequence
  Description of Artificial Sequence: Synthetic oligonucleotide
  Sense strand starting at position 2090 of SEQ ID NO: 586235
ucgauucccgcggaaauca

SEQ ID NO: 702483 - RNA, 19 nt, Artificial Sequence
  Description of Artificial Sequence: Synthetic oligonucleotide
  Antisense strand to SEQ ID NO: 702482
ugauuuccgcgggaaucga

SEQ ID NO: 702484 - RNA, 19 nt, Artificial Sequence
  Description of Artificial Sequence: Synthetic oligonucleotide
  Sense strand starting at position 2136 of SEQ ID NO: 586235
ggccuauggcgauaacuuc

SEQ ID NO: 702485 - RNA, 19 nt, Artificial Sequence
  Description of Artificial Sequence: Synthetic oligonucleotide
  Antisense strand to SEQ ID NO: 702484
gaaguuaucgccauaggcc

SEQ ID NO: 702486 - RNA, 19 nt, Artificial Sequence
  Description of Artificial Sequence: Synthetic oligonucleotide
  Sense strand starting at position 29 of SEQ ID NO: 586236
aggcucauuugcuaggaua

SEQ ID NO: 702487 - RNA, 19 nt, Artificial Sequence
  Description of Artificial Sequence: Synthetic oligonucleotide
  Antisense strand to SEQ ID NO: 702486
uauccuagcaaaugagccu

SEQ ID NO: 702488 - RNA, 19 nt, Artificial Sequence
  Description of Artificial Sequence: Synthetic oligonucleotide
  Sense strand starting at position 50 of SEQ ID NO: 586236
aguguaguuauaggaacuu

SEQ ID NO: 702489 - RNA, 19 nt, Artificial Sequence
  Description of Artificial Sequence: Synthetic oligonucleotide
  Antisense strand to SEQ ID NO: 702488
aaguuccuauaacuacacu

SEQ ID NO: 702490 - RNA, 19 nt, Artificial Sequence
  Description of Artificial Sequence: Synthetic oligonucleotide
  Sense strand starting at position 1006 of SEQ ID NO: 586236
cguggaauguucccuuuau

SEQ ID NO: 702491 - RNA, 19 nt, Artificial Sequence
  Description of Artificial Sequence: Synthetic oligonucleotide
  Antisense strand to SEQ ID NO: 702490
auaaagggaacauuccacg

SEQ ID NO: 702492 - RNA, 19 nt, Artificial Sequence
  Description of Artificial Sequence: Synthetic oligonucleotide
  Sense strand starting at position 1007 of SEQ ID NO: 586236
guggaauguucccuuuauc

SEQ ID NO: 702493 - RNA, 19 nt, Artificial Sequence
  Description of Artificial Sequence: Synthetic oligonucleotide
  Antisense strand to SEQ ID NO: 702492
gauaaagggaacauuccac

SEQ ID NO: 702494 - RNA, 19 nt, Artificial Sequence
  Description of Artificial Sequence: Synthetic oligonucleotide
  Sense strand starting at position 1010 of SEQ ID NO: 586236
gaauguucccuuuaucgcu

SEQ ID NO: 702495 - RNA, 19 nt, Artificial Sequence
  Description of Artificial Sequence: Synthetic oligonucleotide
  Antisense strand to SEQ ID NO: 702494
agcgauaaagggaacauuc

SEQ ID NO: 702496 - RNA, 19 nt, Artificial Sequence
  Description of Artificial Sequence: Synthetic oligonucleotide
  Sense strand starting at position 1111 of SEQ ID NO: 586236
gcucaauccgccgugauga

SEQ ID NO: 702497 - RNA, 19 nt, Artificial Sequence
  Description of Artificial Sequence: Synthetic oligonucleotide
  Antisense strand to SEQ ID NO: 702496
ucaucacggcggauugagc

SEQ ID NO: 702498 - RNA, 19 nt, Artificial Sequence
  Description of Artificial Sequence: Synthetic oligonucleotide
  Sense strand starting at position 1112 of SEQ ID NO: 586236
cucaauccgccgugaugau

SEQ ID NO: 702499 - RNA, 19 nt, Artificial Sequence
  Description of Artificial Sequence: Synthetic oligonucleotide
  Antisense strand to SEQ ID NO: 702498
aucaucacggcggauugag

SEQ ID NO: 702500 - RNA, 19 nt, Artificial Sequence
  Description of Artificial Sequence: Synthetic oligonucleotide
  Sense strand starting at position 2233 of SEQ ID NO: 586236
ggugcuugggcagauuauu

SEQ ID NO: 702501 - RNA, 19 nt, Artificial Sequence
  Description of Artificial Sequence: Synthetic oligonucleotide
  Antisense strand to SEQ ID NO: 702500
aauaaucugcccaagcacc

SEQ ID NO: 702502 - RNA, 19 nt, Artificial Sequence
  Description of Artificial Sequence: Synthetic oligonucleotide
  Sense strand starting at position 2556 of SEQ ID NO: 586236
acaucuaaacuuuguggau

SEQ ID NO: 702503 - RNA, 19 nt, Artificial Sequence
  Description of Artificial Sequence: Synthetic oligonucleotide
  Antisense strand to SEQ ID NO: 702502
auccacaaaguuuagaugu

SEQ ID NO: 702504 - RNA, 19 nt, Artificial Sequence
  Description of Artificial Sequence: Synthetic oligonucleotide
  Sense strand starting at position 2617 of SEQ ID NO: 586236
uggugacacucguuuacau

SEQ ID NO: 702505 - RNA, 19 nt, Artificial Sequence
  Description of Artificial Sequence: Synthetic oligonucleotide
  Antisense strand to SEQ ID NO: 702504
auguaaacgagugucacca

SEQ ID NO: 702506 - RNA, 19 nt, Artificial Sequence
  Description of Artificial Sequence: Synthetic oligonucleotide
  Sense strand starting at position 2619 of SEQ ID NO: 586236
gugacacucguuuacaucu

SEQ ID NO: 702507 - RNA, 19 nt, Artificial Sequence
  Description of Artificial Sequence: Synthetic oligonucleotide
  Antisense strand to SEQ ID NO: 702506
agauguaaacgagugucac

SEQ ID NO: 702508 - RNA, 19 nt, Artificial Sequence
  Description of Artificial Sequence: Synthetic oligonucleotide
  Sense strand starting at position 2632 of SEQ ID NO: 586236
acaucuagucgguguggau

SEQ ID NO: 702509 - RNA, 19 nt, Artificial Sequence
  Description of Artificial Sequence: Synthetic oligonucleotide
  Antisense strand to SEQ ID NO: 702508
auccacaccgacuagaugu

SEQ ID NO: 702510 - RNA, 19 nt, Artificial Sequence
  Description of Artificial Sequence: Synthetic oligonucleotide
  Sense strand starting at position 2641 of SEQ ID NO: 586236
cgguguggauggaaacuua

SEQ ID NO: 702511 - RNA, 19 nt, Artificial Sequence
  Description of Artificial Sequence: Synthetic oligonucleotide
  Antisense strand to SEQ ID NO: 702510
uaaguuuccauccacaccg

SEQ ID NO: 702512 - RNA, 19 nt, Artificial Sequence
  Description of Artificial Sequence: Synthetic oligonucleotide
  Sense strand starting at position 2684 of SEQ ID NO: 586236
ucccauccguuucugaaau

SEQ ID NO: 702513 - RNA, 19 nt, Artificial Sequence
  Description of Artificial Sequence: Synthetic oligonucleotide
  Antisense strand to SEQ ID NO: 702512
auuucagaaacggauggga

SEQ ID NO: 702514 - RNA, 19 nt, Artificial Sequence
  Description of Artificial Sequence: Synthetic oligonucleotide
  Sense strand starting at position 2706 of SEQ ID NO: 586236
ucccaaacgcuucgaaaua

SEQ ID NO: 702515 - RNA, 19 nt, Artificial Sequence
  Description of Artificial Sequence: Synthetic oligonucleotide
  Antisense strand to SEQ ID NO: 702514
uauuucgaagcguuuggga

SEQ ID NO: 702516 - RNA, 19 nt, Artificial Sequence
  Description of Artificial Sequence: Synthetic oligonucleotide
  Sense strand starting at position 2858 of SEQ ID NO: 586236
ucaaguuuauuaccagaga

SEQ ID NO: 702517 - RNA, 19 nt, Artificial Sequence
  Description of Artificial Sequence: Synthetic oligonucleotide
  Antisense strand to SEQ ID NO: 702516
ucucugguaauaaacuuga

SEQ ID NO: 702518 - RNA, 19 nt, Artificial Sequence
  Description of Artificial Sequence: Synthetic oligonucleotide
  Sense strand starting at position 2891 of SEQ ID NO: 586236
ugugcuuggcugugaggaa

SEQ ID NO: 702519 - RNA, 19 nt, Artificial Sequence
  Description of Artificial Sequence: Synthetic oligonucleotide
  Antisense strand to SEQ ID NO: 702518
uuccucacagccaagcaca

SEQ ID NO: 702520 - RNA, 19 nt, Artificial Sequence
  Description of Artificial Sequence: Synthetic oligonucleotide
  Sense strand starting at position 2895 of SEQ ID NO: 586236
cuuggcugugaggaaagau

SEQ ID NO: 702521 - RNA, 19 nt, Artificial Sequence
  Description of Artificial Sequence: Synthetic oligonucleotide
  Antisense strand to SEQ ID NO: 702520
aucuuuccucacagccaag

SEQ ID NO: 702522 - RNA, 19 nt, Artificial Sequence
  Description of Artificial Sequence: Synthetic oligonucleotide
  Sense strand starting at position 2947 of SEQ ID NO: 586236
ugugauagcgauuaaagua

SEQ ID NO: 702523 - RNA, 19 nt, Artificial Sequence
  Description of Artificial Sequence: Synthetic oligonucleotide
  Antisense strand to SEQ ID NO: 702522
uacuuuaaucgcuaucaca

SEQ ID NO: 702524 - RNA, 19 nt, Artificial Sequence
  Description of Artificial Sequence: Synthetic oligonucleotide
  Sense strand starting at position 2987 of SEQ ID NO: 586236
gggcuucugucuuuacuuu

SEQ ID NO: 702525 - RNA, 19 nt, Artificial Sequence
  Description of Artificial Sequence: Synthetic oligonucleotide
  Antisense strand to SEQ ID NO: 702524
aaaguaaagacagaagccc

SEQ ID NO: 702526 - RNA, 19 nt, Artificial Sequence
  Description of Artificial Sequence: Synthetic oligonucleotide
  Sense strand starting at position 2988 of SEQ ID NO: 586236
ggcuucugucuuuacuuua

SEQ ID NO: 702527 - RNA, 19 nt, Artificial Sequence
  Description of Artificial Sequence: Synthetic oligonucleotide
  Antisense strand to SEQ ID NO: 702526
uaaaguaaagacagaagcc

SEQ ID NO: 702528 - RNA, 19 nt, Artificial Sequence
  Description of Artificial Sequence: Synthetic oligonucleotide
  Sense strand starting at position 2993 of SEQ ID NO: 586236
cugucuuuacuuuauugua

SEQ ID NO: 702529 - RNA, 19 nt, Artificial Sequence
  Description of Artificial Sequence: Synthetic oligonucleotide
  Antisense strand to SEQ ID NO: 702528
uacaauaaaguaaagacag

SEQ ID NO: 702530 - RNA, 19 nt, Artificial Sequence
  Description of Artificial Sequence: Synthetic oligonucleotide
  Sense strand starting at position 3051 of SEQ ID NO: 586236
acucuugagcuguaauuaa

SEQ ID NO: 702531 - RNA, 19 nt, Artificial Sequence
  Description of Artificial Sequence: Synthetic oligonucleotide
  Antisense strand to SEQ ID NO: 702530
uuaauuacagcucaagagu

SEQ ID NO: 702532 - RNA, 19 nt, Artificial Sequence
  Description of Artificial Sequence: Synthetic oligonucleotide
  Sense strand starting at position 3058 of SEQ ID NO: 586236
agcuguaauuaaucaggaa

SEQ ID NO: 702533 - RNA, 19 nt, Artificial Sequence
  Description of Artificial Sequence: Synthetic oligonucleotide
  Antisense strand to SEQ ID NO: 702532
uuccugauuaauuacagcu

SEQ ID NO: 702534 - RNA, 19 nt, Artificial Sequence
  Description of Artificial Sequence: Synthetic oligonucleotide
  Sense strand starting at position 3061 of SEQ ID NO: 586236
uguaauuaaucaggaaacu

SEQ ID NO: 702535 - RNA, 19 nt, Artificial Sequence
  Description of Artificial Sequence: Synthetic oligonucleotide
  Antisense strand to SEQ ID NO: 702534
aguuuccugauuaauuaca

SEQ ID NO: 702536 - RNA, 19 nt, Artificial Sequence
  Description of Artificial Sequence: Synthetic oligonucleotide
  Sense strand starting at position 3103 of SEQ ID NO: 586236
uguuacuuaugcuuccaua

SEQ ID NO: 702537 - RNA, 19 nt, Artificial Sequence
  Description of Artificial Sequence: Synthetic oligonucleotide
  Antisense strand to SEQ ID NO: 702536
uauggaagcauaaguaaca

SEQ ID NO: 702538 - RNA, 19 nt, Artificial Sequence
  Description of Artificial Sequence: Synthetic oligonucleotide
  Sense strand starting at position 3263 of SEQ ID NO: 586236
ugcugaaagaguugauuau

SEQ ID NO: 702539 - RNA, 19 nt, Artificial Sequence
  Description of Artificial Sequence: Synthetic oligonucleotide
  Antisense strand to SEQ ID NO: 702538
auaaucaacucuuucagca

SEQ ID NO: 702540 - RNA, 19 nt, Artificial Sequence
  Description of Artificial Sequence: Synthetic oligonucleotide
  Sense strand starting at position 3264 of SEQ ID NO: 586236
gcugaaagaguugauuauu

SEQ ID NO: 702541 - RNA, 19 nt, Artificial Sequence
  Description of Artificial Sequence: Synthetic oligonucleotide
  Antisense strand to SEQ ID NO: 702540
aauaaucaacucuuucagc

SEQ ID NO: 702542 - RNA, 19 nt, Artificial Sequence
  Description of Artificial Sequence: Synthetic oligonucleotide
  Sense strand starting at position 3327 of SEQ ID NO: 586236
aggcuauuguugguagcaa

SEQ ID NO: 702543 - RNA, 19 nt, Artificial Sequence
  Description of Artificial Sequence: Synthetic oligonucleotide
  Antisense strand to SEQ ID NO: 702542
uugcuaccaacaauagccu

SEQ ID NO: 702544 - RNA, 19 nt, Artificial Sequence
  Description of Artificial Sequence: Synthetic oligonucleotide
  Sense strand starting at position 3385 of SEQ ID NO: 586236
cagggaaagugucacaaug

SEQ ID NO: 702545 - RNA, 19 nt, Artificial Sequence
  Description of Artificial Sequence: Synthetic oligonucleotide
  Antisense strand to SEQ ID NO: 702544
cauugugacacuuucccug

SEQ ID NO: 702546 - RNA, 19 nt, Artificial Sequence
  Description of Artificial Sequence: Synthetic oligonucleotide
  Sense strand starting at position 3413 of SEQ ID NO: 586236
uuggcaugccuguaauuau

SEQ ID NO: 702547 - RNA, 19 nt, Artificial Sequence
  Description of Artificial Sequence: Synthetic oligonucleotide
  Antisense strand to SEQ ID NO: 702546
auaauuacaggcaugccaa

SEQ ID NO: 702548 - RNA, 19 nt, Artificial Sequence
  Description of Artificial Sequence: Synthetic oligonucleotide
  Sense strand starting at position 3416 of SEQ ID NO: 586236
gcaugccuguaauuauguu

SEQ ID NO: 702549 - RNA, 19 nt, Artificial Sequence
  Description of Artificial Sequence: Synthetic oligonucleotide
  Antisense strand to SEQ ID NO: 702548
aacauaauuacaggcaugc

SEQ ID NO: 702550 - RNA, 19 nt, Artificial Sequence
  Description of Artificial Sequence: Synthetic oligonucleotide
  Sense strand starting at position 3423 of SEQ ID NO: 586236
uguaauuauguuggccauu

SEQ ID NO: 702551 - RNA, 19 nt, Artificial Sequence
  Description of Artificial Sequence: Synthetic oligonucleotide
  Antisense strand to SEQ ID NO: 702550
aauggccaacauaauuaca

SEQ ID NO: 702552 - RNA, 19 nt, Artificial Sequence
  Description of Artificial Sequence: Synthetic oligonucleotide
  Sense strand starting at position 3489 of SEQ ID NO: 586236
accacauuagugggagcua

SEQ ID NO: 702553 - RNA, 19 nt, Artificial Sequence
  Description of Artificial Sequence: Synthetic oligonucleotide
  Antisense strand to SEQ ID NO: 702552
uagcucccacuaauguggu

SEQ ID NO: 702554 - RNA, 19 nt, Artificial Sequence
  Description of Artificial Sequence: Synthetic oligonucleotide
  Sense strand starting at position 3610 of SEQ ID NO: 586236
gggaguaggcuuuguagcu

SEQ ID NO: 702555 - RNA, 19 nt, Artificial Sequence
  Description of Artificial Sequence: Synthetic oligonucleotide
  Antisense strand to SEQ ID NO: 702554
agcuacaaagccuacuccc

SEQ ID NO: 702556 - RNA, 19 nt, Artificial Sequence
  Description of Artificial Sequence: Synthetic oligonucleotide
  Sense strand starting at position 3617 of SEQ ID NO: 586236
ggcuuuguagcugggugau

SEQ ID NO: 702557 - RNA, 19 nt, Artificial Sequence
  Description of Artificial Sequence: Synthetic oligonucleotide
  Antisense strand to SEQ ID NO: 702556
aucacccagcuacaaagcc

SEQ ID NO: 702558 - RNA, 19 nt, Artificial Sequence
  Description of Artificial Sequence: Synthetic oligonucleotide
  Sense strand starting at position 3619 of SEQ ID NO: 586236
cuuuguagcugggugauga

SEQ ID NO: 702559 - RNA, 19 nt, Artificial Sequence
  Description of Artificial Sequence: Synthetic oligonucleotide
  Antisense strand to SEQ ID NO: 702558
ucaucacccagcuacaaag

SEQ ID NO: 702560 - RNA, 19 nt, Artificial Sequence
  Description of Artificial Sequence: Synthetic oligonucleotide
  Sense strand starting at position 3620 of SEQ ID NO: 586236
uuuguagcugggugaugaa

SEQ ID NO: 702561 - RNA, 19 nt, Artificial Sequence
  Description of Artificial Sequence: Synthetic oligonucleotide
  Antisense strand to SEQ ID NO: 702560
uucaucacccagcuacaaa

SEQ ID NO: 702562 - RNA, 19 nt, Artificial Sequence
  Description of Artificial Sequence: Synthetic oligonucleotide
  Sense strand starting at position 3650 of SEQ ID NO: 586236
aacgaaucccugugacaca

SEQ ID NO: 702563 - RNA, 19 nt, Artificial Sequence
  Description of Artificial Sequence: Synthetic oligonucleotide
  Antisense strand to SEQ ID NO: 702562
ugugucacagggauucguu

SEQ ID NO: 702564 - RNA, 19 nt, Artificial Sequence
  Description of Artificial Sequence: Synthetic oligonucleotide
  Sense strand starting at position 3651 of SEQ ID NO: 586236
acgaaucccugugacacaa

SEQ ID NO: 702565 - RNA, 19 nt, Artificial Sequence
  Description of Artificial Sequence: Synthetic oligonucleotide
  Antisense strand to SEQ ID NO: 702564
uugugucacagggauucgu

SEQ ID NO: 702566 - RNA, 19 nt, Artificial Sequence
  Description of Artificial Sequence: Synthetic oligonucleotide
  Sense strand starting at position 58 of SEQ ID NO: 586237
cugacucaucccgggagau

SEQ ID NO: 702567 - RNA, 19 nt, Artificial Sequence
  Description of Artificial Sequence: Synthetic oligonucleotide
  Antisense strand to SEQ ID NO: 702566
aucucccgggaugagucag

SEQ ID NO: 702568 - RNA, 19 nt, Artificial Sequence
  Description of Artificial Sequence: Synthetic oligonucleotide
  Sense strand starting at position 59 of SEQ ID NO: 586237
ugacucaucccgggagauu

SEQ ID NO: 702569 - RNA, 19 nt, Artificial Sequence
  Description of Artificial Sequence: Synthetic oligonucleotide
  Antisense strand to SEQ ID NO: 702568
aaucucccgggaugaguca

SEQ ID NO: 702570 - RNA, 19 nt, Artificial Sequence
  Description of Artificial Sequence: Synthetic oligonucleotide
  Sense strand starting at position 75 of SEQ ID NO: 586237
auucgcuugcuccagggaa

SEQ ID NO: 702571 - RNA, 19 nt, Artificial Sequence
  Description of Artificial Sequence: Synthetic oligonucleotide
  Antisense strand to SEQ ID NO: 702570
uucccuggagcaagcgaau

SEQ ID NO: 702572 - RNA, 19 nt, Artificial Sequence
  Description of Artificial Sequence: Synthetic oligonucleotide
  Sense strand starting at position 477 of SEQ ID NO: 586237
auguaaacgguuugugaac

SEQ ID NO: 702573 - RNA, 19 nt, Artificial Sequence
  Description of Artificial Sequence: Synthetic oligonucleotide
  Antisense strand to SEQ ID NO: 702572
guucacaaaccguuuacau

SEQ ID NO: 702574 - RNA, 19 nt, Artificial Sequence
  Description of Artificial Sequence: Synthetic oligonucleotide
  Sense strand starting at position 484 of SEQ ID NO: 586237
cgguuugugaacuauagcu

SEQ ID NO: 702575 - RNA, 19 nt, Artificial Sequence
  Description of Artificial Sequence: Synthetic oligonucleotide
  Antisense strand to SEQ ID NO: 702574
agcuauaguucacaaaccg

SEQ ID NO: 702576 - RNA, 19 nt, Artificial Sequence
  Description of Artificial Sequence: Synthetic oligonucleotide
  Sense strand starting at position 522 of SEQ ID NO: 586237
aggcgugguggguggaaau

SEQ ID NO: 702577 - RNA, 19 nt, Artificial Sequence
  Description of Artificial Sequence: Synthetic oligonucleotide
  Antisense strand to SEQ ID NO: 702576
auuuccacccaccacgccu

SEQ ID NO: 702578 - RNA, 19 nt, Artificial Sequence
  Description of Artificial Sequence: Synthetic oligonucleotide
  Sense strand starting at position 542 of SEQ ID NO: 586237
gcucauccgccucauugau

SEQ ID NO: 702579 - RNA, 19 nt, Artificial Sequence
  Description of Artificial Sequence: Synthetic oligonucleotide
  Antisense strand to SEQ ID NO: 702578
aucaaugaggcggaugagc

SEQ ID NO: 702580 - RNA, 19 nt, Artificial Sequence
  Description of Artificial Sequence: Synthetic oligonucleotide
  Sense strand starting at position 569 of SEQ ID NO: 586237
guuguauaggaguagaucu

SEQ ID NO: 702581 - RNA, 19 nt, Artificial Sequence
  Description of Artificial Sequence: Synthetic oligonucleotide
  Antisense strand to SEQ ID NO: 702580
agaucuacuccuauacaac

SEQ ID NO: 702582 - RNA, 19 nt, Artificial Sequence
  Description of Artificial Sequence: Synthetic oligonucleotide
  Sense strand starting at position 658 of SEQ ID NO: 586237
auggcucuagcccaugaua

SEQ ID NO: 702583 - RNA, 19 nt, Artificial Sequence
  Description of Artificial Sequence: Synthetic oligonucleotide
  Antisense strand to SEQ ID NO: 702582
uaucaugggcuagagccau

SEQ ID NO: 702584 - RNA, 19 nt, Artificial Sequence
  Description of Artificial Sequence: Synthetic oligonucleotide
  Sense strand starting at position 660 of SEQ ID NO: 586237
ggcucuagcccaugauauc

SEQ ID NO: 702585 - RNA, 19 nt, Artificial Sequence
  Description of Artificial Sequence: Synthetic oligonucleotide
  Antisense strand to SEQ ID NO: 702584
gauaucaugggcuagagcc

SEQ ID NO: 702586 - RNA, 19 nt, Artificial Sequence
  Description of Artificial Sequence: Synthetic oligonucleotide
  Sense strand starting at position 683 of SEQ ID NO: 586237
uccagauguguuuaggcaa

SEQ ID NO: 702587 - RNA, 19 nt, Artificial Sequence
  Description of Artificial Sequence: Synthetic oligonucleotide
  Antisense strand to SEQ ID NO: 702586
uugccuaaacacaucugga

SEQ ID NO: 702588 - RNA, 19 nt, Artificial Sequence
  Description of Artificial Sequence: Synthetic oligonucleotide
  Sense strand starting at position 686 of SEQ ID NO: 586237
agauguguuuaggcaauaa

SEQ ID NO: 702589 - RNA, 19 nt, Artificial Sequence
  Description of Artificial Sequence: Synthetic oligonucleotide
  Antisense strand to SEQ ID NO: 702588
uuauugccuaaacacaucu

SEQ ID NO: 702590 - RNA, 19 nt, Artificial Sequence
  Description of Artificial Sequence: Synthetic oligonucleotide
  Sense strand starting at position 690 of SEQ ID NO: 586237
guguuuaggcaauaaauuc

SEQ ID NO: 702591 - RNA, 19 nt, Artificial Sequence
  Description of Artificial Sequence: Synthetic oligonucleotide
  Antisense strand to SEQ ID NO: 702590
gaauuuauugccuaaacac

SEQ ID NO: 702592 - RNA, 19 nt, Artificial Sequence
  Description of Artificial Sequence: Synthetic oligonucleotide
  Sense strand starting at position 779 of SEQ ID NO: 586237
aucuaagucuggccaauaa

SEQ ID NO: 702593 - RNA, 19 nt, Artificial Sequence
  Description of Artificial Sequence: Synthetic oligonucleotide
  Antisense strand to SEQ ID NO: 702592
uuauuggccagacuuagau

SEQ ID NO: 702594 - RNA, 19 nt, Artificial Sequence
  Description of Artificial Sequence: Synthetic oligonucleotide
  Sense strand starting at position 928 of SEQ ID NO: 586237
agugcagguguccauagau

SEQ ID NO: 702595 - RNA, 19 nt, Artificial Sequence
  Description of Artificial Sequence: Synthetic oligonucleotide
  Antisense strand to SEQ ID NO: 702594
aucuauggacaccugcacu

SEQ ID NO: 702596 - RNA, 19 nt, Artificial Sequence
  Description of Artificial Sequence: Synthetic oligonucleotide
  Sense strand starting at position 981 of SEQ ID NO: 586237
uuguaaauuugcuuaguug

SEQ ID NO: 702597 - RNA, 19 nt, Artificial Sequence
  Description of Artificial Sequence: Synthetic oligonucleotide
  Antisense strand to SEQ ID NO: 702596
caacuaagcaaauuuacaa

SEQ ID NO: 702598 - RNA, 19 nt, Artificial Sequence
  Description of Artificial Sequence: Synthetic oligonucleotide
  Sense strand starting at position 982 of SEQ ID NO: 586237
uguaaauuugcuuaguugu

SEQ ID NO: 702599 - RNA, 19 nt, Artificial Sequence
  Description of Artificial Sequence: Synthetic oligonucleotide
  Antisense strand to SEQ ID NO: 702598
acaacuaagcaaauuuaca

SEQ ID NO: 702600 - RNA, 19 nt, Artificial Sequence
  Description of Artificial Sequence: Synthetic oligonucleotide
  Sense strand starting at position 992 of SEQ ID NO: 586237
cuuaguugugcacaaguga

SEQ ID NO: 702601 - RNA, 19 nt, Artificial Sequence
  Description of Artificial Sequence: Synthetic oligonucleotide
  Antisense strand to SEQ ID NO: 702600
ucacuugugcacaacuaag

SEQ ID NO: 702602 - RNA, 19 nt, Artificial Sequence
  Description of Artificial Sequence: Synthetic oligonucleotide
  Sense strand starting at position 999 of SEQ ID NO: 586237
gugcacaagugacuuguua

SEQ ID NO: 702603 - RNA, 19 nt, Artificial Sequence
  Description of Artificial Sequence: Synthetic oligonucleotide
  Antisense strand to SEQ ID NO: 702602
uaacaagucacuugugcac

SEQ ID NO: 702604 - RNA, 19 nt, Artificial Sequence
  Description of Artificial Sequence: Synthetic oligonucleotide
  Sense strand starting at position 1001 of SEQ ID NO: 586237
gcacaagugacuuguuagu

SEQ ID NO: 702605 - RNA, 19 nt, Artificial Sequence
  Description of Artificial Sequence: Synthetic oligonucleotide
  Antisense strand to SEQ ID NO: 702604
acuaacaagucacuugugc

SEQ ID NO: 702606 - RNA, 19 nt, Artificial Sequence
  Description of Artificial Sequence: Synthetic oligonucleotide
  Sense strand starting at position 1003 of SEQ ID NO: 586237
acaagugacuuguuagucu

SEQ ID NO: 702607 - RNA, 19 nt, Artificial Sequence
  Description of Artificial Sequence: Synthetic oligonucleotide
  Antisense strand to SEQ ID NO: 702606
agacuaacaagucacuugu

SEQ ID NO: 702608 - RNA, 19 nt, Artificial Sequence
  Description of Artificial Sequence: Synthetic oligonucleotide
  Sense strand starting at position 1006 of SEQ ID NO: 586237
agugacuuguuagucuagu

SEQ ID NO: 702609 - RNA, 19 nt, Artificial Sequence
  Description of Artificial Sequence: Synthetic oligonucleotide
  Antisense strand to SEQ ID NO: 702608
acuagacuaacaagucacu

SEQ ID NO: 702610 - RNA, 19 nt, Artificial Sequence
  Description of Artificial Sequence: Synthetic oligonucleotide
  Sense strand starting at position 1012 of SEQ ID NO: 586237
uuguuagucuaguuaaagu

SEQ ID NO: 702611 - RNA, 19 nt, Artificial Sequence
  Description of Artificial Sequence: Synthetic oligonucleotide
  Antisense strand to SEQ ID NO: 702610
acuuuaacuagacuaacaa

SEQ ID NO: 702612 - RNA, 19 nt, Artificial Sequence
  Description of Artificial Sequence: Synthetic oligonucleotide
  Sense strand starting at position 1042 of SEQ ID NO: 586237
guauaugaauaaguacgua

SEQ ID NO: 702613 - RNA, 19 nt, Artificial Sequence
  Description of Artificial Sequence: Synthetic oligonucleotide
  Antisense strand to SEQ ID NO: 702612
uacguacuuauucauauac

SEQ ID NO: 702614 - RNA, 19 nt, Artificial Sequence
  Description of Artificial Sequence: Synthetic oligonucleotide
  Sense strand starting at position 1070 of SEQ ID NO: 586237
ucuuuaguccuaggcauuu

SEQ ID NO: 702615 - RNA, 19 nt, Artificial Sequence
  Description of Artificial Sequence: Synthetic oligonucleotide
  Antisense strand to SEQ ID NO: 702614
aaaugccuaggacuaaaga

SEQ ID NO: 702616 - RNA, 19 nt, Artificial Sequence
  Description of Artificial Sequence: Synthetic oligonucleotide
  Sense strand starting at position 1087 of SEQ ID NO: 586237
uuccauccacuguaguauu

SEQ ID NO: 702617 - RNA, 19 nt, Artificial Sequence
  Description of Artificial Sequence: Synthetic oligonucleotide
  Antisense strand to SEQ ID NO: 702616
aauacuacaguggauggaa

SEQ ID NO: 702618 - RNA, 19 nt, Artificial Sequence
  Description of Artificial Sequence: Synthetic oligonucleotide
  Sense strand starting at position 1193 of SEQ ID NO: 586237
uuaucugacugucuuaaug

SEQ ID NO: 702619 - RNA, 19 nt, Artificial Sequence
  Description of Artificial Sequence: Synthetic oligonucleotide
  Antisense strand to SEQ ID NO: 702618
cauuaagacagucagauaa

SEQ ID NO: 702620 - RNA, 19 nt, Artificial Sequence
  Description of Artificial Sequence: Synthetic oligonucleotide
  Sense strand starting at position 1313 of SEQ ID NO: 586237
aggcucauuugcuaggaua

SEQ ID NO: 702621 - RNA, 19 nt, Artificial Sequence
  Description of Artificial Sequence: Synthetic oligonucleotide
  Antisense strand to SEQ ID NO: 702620
uauccuagcaaaugagccu

SEQ ID NO: 702622 - RNA, 19 nt, Artificial Sequence
  Description of Artificial Sequence: Synthetic oligonucleotide
  Sense strand starting at position 1334 of SEQ ID NO: 586237
aguguaguuauaggaacuu

SEQ ID NO: 702623 - RNA, 19 nt, Artificial Sequence
  Description of Artificial Sequence: Synthetic oligonucleotide
  Antisense strand to SEQ ID NO: 702622
aaguuccuauaacuacacu

SEQ ID NO: 702624 - RNA, 19 nt, Artificial Sequence
  Description of Artificial Sequence: Synthetic oligonucleotide
  Sense strand starting at position 2290 of SEQ ID NO: 586237
cguggaauguucccuuuau

SEQ ID NO: 702625 - RNA, 19 nt, Artificial Sequence
  Description of Artificial Sequence: Synthetic oligonucleotide
  Antisense strand to SEQ ID NO: 702624
auaaagggaacauuccacg

SEQ ID NO: 702626 - RNA, 19 nt, Artificial Sequence
  Description of Artificial Sequence: Synthetic oligonucleotide
  Sense strand starting at position 2291 of SEQ ID NO: 586237
guggaauguucccuuuauc

SEQ ID NO: 702627 - RNA, 19 nt, Artificial Sequence
  Description of Artificial Sequence: Synthetic oligonucleotide
  Antisense strand to SEQ ID NO: 702626
gauaaagggaacauuccac

SEQ ID NO: 702628 - RNA, 19 nt, Artificial Sequence
  Description of Artificial Sequence: Synthetic oligonucleotide
  Sense strand starting at position 2294 of SEQ ID NO: 586237
gaauguucccuuuaucgcu

SEQ ID NO: 702629 - RNA, 19 nt, Artificial Sequence
  Description of Artificial Sequence: Synthetic oligonucleotide
  Antisense strand to SEQ ID NO: 702628
agcgauaaagggaacauuc

SEQ ID NO: 702630 - RNA, 19 nt, Artificial Sequence
  Description of Artificial Sequence: Synthetic oligonucleotide
  Sense strand starting at position 2395 of SEQ ID NO: 586237
gcucaauccgccgugauga

SEQ ID NO: 702631 - RNA, 19 nt, Artificial Sequence
  Description of Artificial Sequence: Synthetic oligonucleotide
  Antisense strand to SEQ ID NO: 702630
ucaucacggcggauugagc

SEQ ID NO: 702632 - RNA, 19 nt, Artificial Sequence
  Description of Artificial Sequence: Synthetic oligonucleotide
  Sense strand starting at position 3517 of SEQ ID NO: 586237
ggugcuugggcagauuauu

SEQ ID NO: 702633 - RNA, 19 nt, Artificial Sequence
  Description of Artificial Sequence: Synthetic oligonucleotide
  Antisense strand to SEQ ID NO: 702632
aauaaucugcccaagcacc

SEQ ID NO: 702634 - RNA, 19 nt, Artificial Sequence
  Description of Artificial Sequence: Synthetic oligonucleotide
  Sense strand starting at position 3840 of SEQ ID NO: 586237
acaucuaaacuuuguggau

SEQ ID NO: 702635 - RNA, 19 nt, Artificial Sequence
  Description of Artificial Sequence: Synthetic oligonucleotide
  Antisense strand to SEQ ID NO: 702634
auccacaaaguuuagaugu

SEQ ID NO: 702636 - RNA, 19 nt, Artificial Sequence
  Description of Artificial Sequence: Synthetic oligonucleotide
  Sense strand starting at position 3901 of SEQ ID NO: 586237
uggugacacucguuuacau

SEQ ID NO: 702637 - RNA, 19 nt, Artificial Sequence
  Description of Artificial Sequence: Synthetic oligonucleotide
  Antisense strand to SEQ ID NO: 702636
auguaaacgagugucacca

SEQ ID NO: 702638 - RNA, 19 nt, Artificial Sequence
  Description of Artificial Sequence: Synthetic oligonucleotide
  Sense strand starting at position 3903 of SEQ ID NO: 586237
gugacacucguuuacaucu

SEQ ID NO: 702639 - RNA, 19 nt, Artificial Sequence
  Description of Artificial Sequence: Synthetic oligonucleotide
  Antisense strand to SEQ ID NO: 702638
agauguaaacgagugucac

SEQ ID NO: 702640 - RNA, 19 nt, Artificial Sequence
  Description of Artificial Sequence: Synthetic oligonucleotide
  Sense strand starting at position 3916 of SEQ ID NO: 586237
acaucuagucgguguggau

SEQ ID NO: 702641 - RNA, 19 nt, Artificial Sequence
  Description of Artificial Sequence: Synthetic oligonucleotide
  Antisense strand to SEQ ID NO: 702640
auccacaccgacuagaugu

SEQ ID NO: 702642 - RNA, 19 nt, Artificial Sequence
  Description of Artificial Sequence: Synthetic oligonucleotide
  Sense strand starting at position 3925 of SEQ ID NO: 586237
cgguguggauggaaacuua

SEQ ID NO: 702643 - RNA, 19 nt, Artificial Sequence
  Description of Artificial Sequence: Synthetic oligonucleotide
  Antisense strand to SEQ ID NO: 702642
uaaguuuccauccacaccg

SEQ ID NO: 702644 - RNA, 19 nt, Artificial Sequence
  Description of Artificial Sequence: Synthetic oligonucleotide
  Sense strand starting at position 3968 of SEQ ID NO: 586237
ucccauccguuucugaaau

SEQ ID NO: 702645 - RNA, 19 nt, Artificial Sequence
  Description of Artificial Sequence: Synthetic oligonucleotide
  Antisense strand to SEQ ID NO: 702644
auuucagaaacggauggga

SEQ ID NO: 702646 - RNA, 19 nt, Artificial Sequence
  Description of Artificial Sequence: Synthetic oligonucleotide
  Sense strand starting at position 59 of SEQ ID NO: 586238
gggccuuucuuucucaacu

SEQ ID NO: 702647 - RNA, 19 nt, Artificial Sequence
  Description of Artificial Sequence: Synthetic oligonucleotide
  Antisense strand to SEQ ID NO: 702646
aguugagaaagaaaggccc

SEQ ID NO: 702648 - RNA, 19 nt, Artificial Sequence
  Description of Artificial Sequence: Synthetic oligonucleotide
  Sense strand starting at position 123 of SEQ ID NO: 586238
cugacucaucccgggagau

SEQ ID NO: 702649 - RNA, 19 nt, Artificial Sequence
  Description of Artificial Sequence: Synthetic oligonucleotide
  Antisense strand to SEQ ID NO: 702648
aucucccgggaugagucag

SEQ ID NO: 702650 - RNA, 19 nt, Artificial Sequence
  Description of Artificial Sequence: Synthetic oligonucleotide
  Sense strand starting at position 124 of SEQ ID NO: 586238
ugacucaucccgggagauu

SEQ ID NO: 702651 - RNA, 19 nt, Artificial Sequence
  Description of Artificial Sequence: Synthetic oligonucleotide
  Antisense strand to SEQ ID NO: 702650
aaucucccgggaugaguca

SEQ ID NO: 702652 - RNA, 19 nt, Artificial Sequence
  Description of Artificial Sequence: Synthetic oligonucleotide
  Sense strand starting at position 135 of SEQ ID NO: 586238
gggagauucgcuugcucca

SEQ ID NO: 702653 - RNA, 19 nt, Artificial Sequence
  Description of Artificial Sequence: Synthetic oligonucleotide
  Antisense strand to SEQ ID NO: 702652
uggagcaagcgaaucuccc

SEQ ID NO: 702654 - RNA, 19 nt, Artificial Sequence
  Description of Artificial Sequence: Synthetic oligonucleotide
  Sense strand starting at position 140 of SEQ ID NO: 586238
auucgcuugcuccagggaa

SEQ ID NO: 702655 - RNA, 19 nt, Artificial Sequence
  Description of Artificial Sequence: Synthetic oligonucleotide
  Antisense strand to SEQ ID NO: 702654
uucccuggagcaagcgaau

SEQ ID NO: 702656 - RNA, 19 nt, Artificial Sequence
  Description of Artificial Sequence: Synthetic oligonucleotide
  Sense strand starting at position 542 of SEQ ID NO: 586238
auguaaacgguuugugaac

SEQ ID NO: 702657 - RNA, 19 nt, Artificial Sequence
  Description of Artificial Sequence: Synthetic oligonucleotide
  Antisense strand to SEQ ID NO: 702656
guucacaaaccguuuacau

SEQ ID NO: 702658 - RNA, 19 nt, Artificial Sequence
  Description of Artificial Sequence: Synthetic oligonucleotide
  Sense strand starting at position 549 of SEQ ID NO: 586238
cgguuugugaacuauagcu

SEQ ID NO: 702659 - RNA, 19 nt, Artificial Sequence
  Description of Artificial Sequence: Synthetic oligonucleotide
  Antisense strand to SEQ ID NO: 702658
agcuauaguucacaaaccg

SEQ ID NO: 702660 - RNA, 19 nt, Artificial Sequence
  Description of Artificial Sequence: Synthetic oligonucleotide
  Sense strand starting at position 587 of SEQ ID NO: 586238
aggcgugguggguggaaau

SEQ ID NO: 702661 - RNA, 19 nt, Artificial Sequence
  Description of Artificial Sequence: Synthetic oligonucleotide
  Antisense strand to SEQ ID NO: 702660
auuuccacccaccacgccu

SEQ ID NO: 702662 - RNA, 19 nt, Artificial Sequence
  Description of Artificial Sequence: Synthetic oligonucleotide
  Sense strand starting at position 607 of SEQ ID NO: 586238
gcucauccgccucauugau

SEQ ID NO: 702663 - RNA, 19 nt, Artificial Sequence
  Description of Artificial Sequence: Synthetic oligonucleotide
  Antisense strand to SEQ ID NO: 702662
aucaaugaggcggaugagc

SEQ ID NO: 702664 - RNA, 19 nt, Artificial Sequence
  Description of Artificial Sequence: Synthetic oligonucleotide
  Sense strand starting at position 634 of SEQ ID NO: 586238
guuguauaggaguagaucu

SEQ ID NO: 702665 - RNA, 19 nt, Artificial Sequence
  Description of Artificial Sequence: Synthetic oligonucleotide
  Antisense strand to SEQ ID NO: 702664
agaucuacuccuauacaac

SEQ ID NO: 702666 - RNA, 19 nt, Artificial Sequence
  Description of Artificial Sequence: Synthetic oligonucleotide
  Sense strand starting at position 723 of SEQ ID NO: 586238
auggcucuagcccaugaua

SEQ ID NO: 702667 - RNA, 19 nt, Artificial Sequence
  Description of Artificial Sequence: Synthetic oligonucleotide
  Antisense strand to SEQ ID NO: 702666
uaucaugggcuagagccau

SEQ ID NO: 702668 - RNA, 19 nt, Artificial Sequence
  Description of Artificial Sequence: Synthetic oligonucleotide
  Sense strand starting at position 725 of SEQ ID NO: 586238
ggcucuagcccaugauauc

SEQ ID NO: 702669 - RNA, 19 nt, Artificial Sequence
  Description of Artificial Sequence: Synthetic oligonucleotide
  Antisense strand to SEQ ID NO: 702668
gauaucaugggcuagagcc

SEQ ID NO: 702670 - RNA, 19 nt, Artificial Sequence
  Description of Artificial Sequence: Synthetic oligonucleotide
  Sense strand starting at position 748 of SEQ ID NO: 586238
uccagauguguuuaggcaa

SEQ ID NO: 702671 - RNA, 19 nt, Artificial Sequence
  Description of Artificial Sequence: Synthetic oligonucleotide
  Antisense strand to SEQ ID NO: 702670
uugccuaaacacaucugga

SEQ ID NO: 702672 - RNA, 19 nt, Artificial Sequence
  Description of Artificial Sequence: Synthetic oligonucleotide
  Sense strand starting at position 751 of SEQ ID NO: 586238
agauguguuuaggcaauaa

SEQ ID NO: 702673 - RNA, 19 nt, Artificial Sequence
  Description of Artificial Sequence: Synthetic oligonucleotide
  Antisense strand to SEQ ID NO: 702672
uuauugccuaaacacaucu

SEQ ID NO: 702674 - RNA, 19 nt, Artificial Sequence
  Description of Artificial Sequence: Synthetic oligonucleotide
  Sense strand starting at position 755 of SEQ ID NO: 586238
guguuuaggcaauaaauuc

SEQ ID NO: 702675 - RNA, 19 nt, Artificial Sequence
  Description of Artificial Sequence: Synthetic oligonucleotide
  Antisense strand to SEQ ID NO: 702674
gaauuuauugccuaaacac

SEQ ID NO: 702676 - RNA, 19 nt, Artificial Sequence
  Description of Artificial Sequence: Synthetic oligonucleotide
  Sense strand starting at position 844 of SEQ ID NO: 586238
aucuaagucuggccaauaa

SEQ ID NO: 702677 - RNA, 19 nt, Artificial Sequence
  Description of Artificial Sequence: Synthetic oligonucleotide
  Antisense strand to SEQ ID NO: 702676
uuauuggccagacuuagau

SEQ ID NO: 702678 - RNA, 19 nt, Artificial Sequence
  Description of Artificial Sequence: Synthetic oligonucleotide
  Sense strand starting at position 993 of SEQ ID NO: 586238
agugcagguguccauagau

SEQ ID NO: 702679 - RNA, 19 nt, Artificial Sequence
  Description of Artificial Sequence: Synthetic oligonucleotide
  Antisense strand to SEQ ID NO: 702678
aucuauggacaccugcacu

SEQ ID NO: 702680 - RNA, 19 nt, Artificial Sequence
  Description of Artificial Sequence: Synthetic oligonucleotide
  Sense strand starting at position 1046 of SEQ ID NO: 586238
uuguaaauuugcuuaguug

SEQ ID NO: 702681 - RNA, 19 nt, Artificial Sequence
  Description of Artificial Sequence: Synthetic oligonucleotide
  Antisense strand to SEQ ID NO: 702680
caacuaagcaaauuuacaa

SEQ ID NO: 702682 - RNA, 19 nt, Artificial Sequence
  Description of Artificial Sequence: Synthetic oligonucleotide
  Sense strand starting at position 1047 of SEQ ID NO: 586238
uguaaauuugcuuaguugu

SEQ ID NO: 702683 - RNA, 19 nt, Artificial Sequence
  Description of Artificial Sequence: Synthetic oligonucleotide
  Antisense strand to SEQ ID NO: 702682
acaacuaagcaaauuuaca

SEQ ID NO: 702684 - RNA, 19 nt, Artificial Sequence
  Description of Artificial Sequence: Synthetic oligonucleotide
  Sense strand starting at position 1057 of SEQ ID NO: 586238
cuuaguugugcacaaguga

SEQ ID NO: 702685 - RNA, 19 nt, Artificial Sequence
  Description of Artificial Sequence: Synthetic oligonucleotide
  Antisense strand to SEQ ID NO: 702684
ucacuugugcacaacuaag

SEQ ID NO: 702686 - RNA, 19 nt, Artificial Sequence
  Description of Artificial Sequence: Synthetic oligonucleotide
  Sense strand starting at position 1064 of SEQ ID NO: 586238
gugcacaagugacuuguua

SEQ ID NO: 702687 - RNA, 19 nt, Artificial Sequence
  Description of Artificial Sequence: Synthetic oligonucleotide
  Antisense strand to SEQ ID NO: 702686
uaacaagucacuugugcac

SEQ ID NO: 702688 - RNA, 19 nt, Artificial Sequence
  Description of Artificial Sequence: Synthetic oligonucleotide
  Sense strand starting at position 1066 of SEQ ID NO: 586238
gcacaagugacuuguuagu

SEQ ID NO: 702689 - RNA, 19 nt, Artificial Sequence
  Description of Artificial Sequence: Synthetic oligonucleotide
  Antisense strand to SEQ ID NO: 702688
acuaacaagucacuugugc

SEQ ID NO: 702690 - RNA, 19 nt, Artificial Sequence
  Description of Artificial Sequence: Synthetic oligonucleotide
  Sense strand starting at position 1068 of SEQ ID NO: 586238
acaagugacuuguuagucu

SEQ ID NO: 702691 - RNA, 19 nt, Artificial Sequence
  Description of Artificial Sequence: Synthetic oligonucleotide
  Antisense strand to SEQ ID NO: 702690
agacuaacaagucacuugu

SEQ ID NO: 702692 - RNA, 19 nt, Artificial Sequence
  Description of Artificial Sequence: Synthetic oligonucleotide
  Sense strand starting at position 1071 of SEQ ID NO: 586238
agugacuuguuagucuagu

SEQ ID NO: 702693 - RNA, 19 nt, Artificial Sequence
  Description of Artificial Sequence: Synthetic oligonucleotide
  Antisense strand to SEQ ID NO: 702692
acuagacuaacaagucacu

SEQ ID NO: 702694 - RNA, 19 nt, Artificial Sequence
  Description of Artificial Sequence: Synthetic oligonucleotide
  Sense strand starting at position 1077 of SEQ ID NO: 586238
uuguuagucuaguuaaagu

SEQ ID NO: 702695 - RNA, 19 nt, Artificial Sequence
  Description of Artificial Sequence: Synthetic oligonucleotide
  Antisense strand to SEQ ID NO: 702694
acuuuaacuagacuaacaa

SEQ ID NO: 702696 - RNA, 19 nt, Artificial Sequence
  Description of Artificial Sequence: Synthetic oligonucleotide
  Sense strand starting at position 1107 of SEQ ID NO: 586238
guauaugaauaaguacgua

SEQ ID NO: 702697 - RNA, 19 nt, Artificial Sequence
  Description of Artificial Sequence: Synthetic oligonucleotide
  Antisense strand to SEQ ID NO: 702696
uacguacuuauucauauac

SEQ ID NO: 702698 - RNA, 19 nt, Artificial Sequence
  Description of Artificial Sequence: Synthetic oligonucleotide
  Sense strand starting at position 1135 of SEQ ID NO: 586238
ucuuuaguccuaggcauuu

SEQ ID NO: 702699 - RNA, 19 nt, Artificial Sequence
  Description of Artificial Sequence: Synthetic oligonucleotide
  Antisense strand to SEQ ID NO: 702698
aaaugccuaggacuaaaga

SEQ ID NO: 702700 - RNA, 19 nt, Artificial Sequence
  Description of Artificial Sequence: Synthetic oligonucleotide
  Sense strand starting at position 1152 of SEQ ID NO: 586238
uuccauccacuguaguauu

SEQ ID NO: 702701 - RNA, 19 nt, Artificial Sequence
  Description of Artificial Sequence: Synthetic oligonucleotide
  Antisense strand to SEQ ID NO: 702700
aauacuacaguggauggaa

SEQ ID NO: 702702 - RNA, 19 nt, Artificial Sequence
  Description of Artificial Sequence: Synthetic oligonucleotide
  Sense strand starting at position 1258 of SEQ ID NO: 586238
uuaucugacugucuuaaug

SEQ ID NO: 702703 - RNA, 19 nt, Artificial Sequence
  Description of Artificial Sequence: Synthetic oligonucleotide
  Antisense strand to SEQ ID NO: 702702
cauuaagacagucagauaa

SEQ ID NO: 702704 - RNA, 19 nt, Artificial Sequence
  Description of Artificial Sequence: Synthetic oligonucleotide
  Sense strand starting at position 1378 of SEQ ID NO: 586238
aggcucauuugcuaggaua

SEQ ID NO: 702705 - RNA, 19 nt, Artificial Sequence
  Description of Artificial Sequence: Synthetic oligonucleotide
  Antisense strand to SEQ ID NO: 702704
uauccuagcaaaugagccu

SEQ ID NO: 702706 - RNA, 19 nt, Artificial Sequence
  Description of Artificial Sequence: Synthetic oligonucleotide
  Sense strand starting at position 1399 of SEQ ID NO: 586238
aguguaguuauaggaacuu

SEQ ID NO: 702707 - RNA, 19 nt, Artificial Sequence
  Description of Artificial Sequence: Synthetic oligonucleotide
  Antisense strand to SEQ ID NO: 702706
aaguuccuauaacuacacu

SEQ ID NO: 702708 - RNA, 19 nt, Artificial Sequence
  Description of Artificial Sequence: Synthetic oligonucleotide
  Sense strand starting at position 2355 of SEQ ID NO: 586238
cguggaauguucccuuuau

SEQ ID NO: 702709 - RNA, 19 nt, Artificial Sequence
  Description of Artificial Sequence: Synthetic oligonucleotide
  Antisense strand to SEQ ID NO: 702708
auaaagggaacauuccacg

SEQ ID NO: 702710 - RNA, 19 nt, Artificial Sequence
  Description of Artificial Sequence: Synthetic oligonucleotide
  Sense strand starting at position 2356 of SEQ ID NO: 586238
guggaauguucccuuuauc

SEQ ID NO: 702711 - RNA, 19 nt, Artificial Sequence
  Description of Artificial Sequence: Synthetic oligonucleotide
  Antisense strand to SEQ ID NO: 702710
gauaaagggaacauuccac

SEQ ID NO: 702712 - RNA, 19 nt, Artificial Sequence
  Description of Artificial Sequence: Synthetic oligonucleotide
  Sense strand starting at position 2359 of SEQ ID NO: 586238
gaauguucccuuuaucgcu

SEQ ID NO: 702713 - RNA, 19 nt, Artificial Sequence
  Description of Artificial Sequence: Synthetic oligonucleotide
  Antisense strand to SEQ ID NO: 702712
agcgauaaagggaacauuc

SEQ ID NO: 702714 - RNA, 19 nt, Artificial Sequence
  Description of Artificial Sequence: Synthetic oligonucleotide
  Sense strand starting at position 2460 of SEQ ID NO: 586238
gcucaauccgccgugauga

SEQ ID NO: 702715 - RNA, 19 nt, Artificial Sequence
  Description of Artificial Sequence: Synthetic oligonucleotide
  Antisense strand to SEQ ID NO: 702714
ucaucacggcggauugagc

SEQ ID NO: 702716 - RNA, 19 nt, Artificial Sequence
  Description of Artificial Sequence: Synthetic oligonucleotide
  Sense strand starting at position 3582 of SEQ ID NO: 586238
ggugcuugggcagauuauu

SEQ ID NO: 702717 - RNA, 19 nt, Artificial Sequence
  Description of Artificial Sequence: Synthetic oligonucleotide
  Antisense strand to SEQ ID NO: 702716
aauaaucugcccaagcacc

SEQ ID NO: 702718 - RNA, 19 nt, Artificial Sequence
  Description of Artificial Sequence: Synthetic oligonucleotide
  Sense strand starting at position 3905 of SEQ ID NO: 586238
acaucuaaacuuuguggau

SEQ ID NO: 702719 - RNA, 19 nt, Artificial Sequence
  Description of Artificial Sequence: Synthetic oligonucleotide
  Antisense strand to SEQ ID NO: 702718
auccacaaaguuuagaugu

SEQ ID NO: 702720 - RNA, 19 nt, Artificial Sequence
  Description of Artificial Sequence: Synthetic oligonucleotide
  Sense strand starting at position 3966 of SEQ ID NO: 586238
uggugacacucguuuacau

SEQ ID NO: 702721 - RNA, 19 nt, Artificial Sequence
  Description of Artificial Sequence: Synthetic oligonucleotide
  Antisense strand to SEQ ID NO: 702720
auguaaacgagugucacca

SEQ ID NO: 702722 - RNA, 19 nt, Artificial Sequence
  Description of Artificial Sequence: Synthetic oligonucleotide
  Sense strand starting at position 3968 of SEQ ID NO: 586238
gugacacucguuuacaucu

SEQ ID NO: 702723 - RNA, 19 nt, Artificial Sequence
  Description of Artificial Sequence: Synthetic oligonucleotide
  Antisense strand to SEQ ID NO: 702722
agauguaaacgagugucac

SEQ ID NO: 702724 - RNA, 19 nt, Artificial Sequence
  Description of Artificial Sequence: Synthetic oligonucleotide
  Sense strand starting at position 3981 of SEQ ID NO: 586238
acaucuagucgguguggau

SEQ ID NO: 702725 - RNA, 19 nt, Artificial Sequence
  Description of Artificial Sequence: Synthetic oligonucleotide
  Antisense strand to SEQ ID NO: 702724
auccacaccgacuagaugu

SEQ ID NO: 702726 - RNA, 19 nt, Artificial Sequence
  Description of Artificial Sequence: Synthetic oligonucleotide
  Sense strand starting at position 782 of SEQ ID NO: 586239
cguggaauguucccuuuau

SEQ ID NO: 702727 - RNA, 19 nt, Artificial Sequence
  Description of Artificial Sequence: Synthetic oligonucleotide
  Antisense strand to SEQ ID NO: 702726
auaaagggaacauuccacg

SEQ ID NO: 702728 - RNA, 19 nt, Artificial Sequence
  Description of Artificial Sequence: Synthetic oligonucleotide
  Sense strand starting at position 783 of SEQ ID NO: 586239
guggaauguucccuuuauc

SEQ ID NO: 702729 - RNA, 19 nt, Artificial Sequence
  Description of Artificial Sequence: Synthetic oligonucleotide
  Antisense strand to SEQ ID NO: 702728
gauaaagggaacauuccac

SEQ ID NO: 702730 - RNA, 19 nt, Artificial Sequence
  Description of Artificial Sequence: Synthetic oligonucleotide
  Sense strand starting at position 786 of SEQ ID NO: 586239
gaauguucccuuuaucgcu

SEQ ID NO: 702731 - RNA, 19 nt, Artificial Sequence
  Description of Artificial Sequence: Synthetic oligonucleotide
  Antisense strand to SEQ ID NO: 702730
agcgauaaagggaacauuc

SEQ ID NO: 702732 - RNA, 19 nt, Artificial Sequence
  Description of Artificial Sequence: Synthetic oligonucleotide
  Sense strand starting at position 887 of SEQ ID NO: 586239
gcucaauccgccgugauga

SEQ ID NO: 702733 - RNA, 19 nt, Artificial Sequence
  Description of Artificial Sequence: Synthetic oligonucleotide
  Antisense strand to SEQ ID NO: 702732
ucaucacggcggauugagc

SEQ ID NO: 702734 - RNA, 19 nt, Artificial Sequence
  Description of Artificial Sequence: Synthetic oligonucleotide
  Sense strand starting at position 888 of SEQ ID NO: 586239
cucaauccgccgugaugau

SEQ ID NO: 702735 - RNA, 19 nt, Artificial Sequence
  Description of Artificial Sequence: Synthetic oligonucleotide
  Antisense strand to SEQ ID NO: 702734
aucaucacggcggauugag

SEQ ID NO: 702736 - RNA, 19 nt, Artificial Sequence
  Description of Artificial Sequence: Synthetic oligonucleotide
  Sense strand starting at position 2009 of SEQ ID NO: 586239
ggugcuugggcagauuauu

SEQ ID NO: 702737 - RNA, 19 nt, Artificial Sequence
  Description of Artificial Sequence: Synthetic oligonucleotide
  Antisense strand to SEQ ID NO: 702736
aauaaucugcccaagcacc

SEQ ID NO: 702738 - RNA, 19 nt, Artificial Sequence
  Description of Artificial Sequence: Synthetic oligonucleotide
  Sense strand starting at position 2332 of SEQ ID NO: 586239
acaucuaaacuuuguggau

SEQ ID NO: 702739 - RNA, 19 nt, Artificial Sequence
  Description of Artificial Sequence: Synthetic oligonucleotide
  Antisense strand to SEQ ID NO: 702738
auccacaaaguuuagaugu

SEQ ID NO: 702740 - RNA, 19 nt, Artificial Sequence
  Description of Artificial Sequence: Synthetic oligonucleotide
  Sense strand starting at position 2393 of SEQ ID NO: 586239
uggugacacucguuuacau

SEQ ID NO: 702741 - RNA, 19 nt, Artificial Sequence
  Description of Artificial Sequence: Synthetic oligonucleotide
  Antisense strand to SEQ ID NO: 702740
auguaaacgagugucacca

SEQ ID NO: 702742 - RNA, 19 nt, Artificial Sequence
  Description of Artificial Sequence: Synthetic oligonucleotide
  Sense strand starting at position 2395 of SEQ ID NO: 586239
gugacacucguuuacaucu

SEQ ID NO: 702743 - RNA, 19 nt, Artificial Sequence
  Description of Artificial Sequence: Synthetic oligonucleotide
  Antisense strand to SEQ ID NO: 702742
agauguaaacgagugucac

SEQ ID NO: 702744 - RNA, 19 nt, Artificial Sequence
  Description of Artificial Sequence: Synthetic oligonucleotide
  Sense strand starting at position 2408 of SEQ ID NO: 586239
acaucuagucgguguggau

SEQ ID NO: 702745 - RNA, 19 nt, Artificial Sequence
  Description of Artificial Sequence: Synthetic oligonucleotide
  Antisense strand to SEQ ID NO: 702744
auccacaccgacuagaugu

SEQ ID NO: 702746 - RNA, 19 nt, Artificial Sequence
  Description of Artificial Sequence: Synthetic oligonucleotide
  Sense strand starting at position 2417 of SEQ ID NO: 586239
cgguguggauggaaacuua

SEQ ID NO: 702747 - RNA, 19 nt, Artificial Sequence
  Description of Artificial Sequence: Synthetic oligonucleotide
  Antisense strand to SEQ ID NO: 702746
uaaguuuccauccacaccg

SEQ ID NO: 702748 - RNA, 19 nt, Artificial Sequence
  Description of Artificial Sequence: Synthetic oligonucleotide
  Sense strand starting at position 2460 of SEQ ID NO: 586239
ucccauccguuucugaaau

SEQ ID NO: 702749 - RNA, 19 nt, Artificial Sequence
  Description of Artificial Sequence: Synthetic oligonucleotide
  Antisense strand to SEQ ID NO: 702748
auuucagaaacggauggga

SEQ ID NO: 702750 - RNA, 19 nt, Artificial Sequence
  Description of Artificial Sequence: Synthetic oligonucleotide
  Sense strand starting at position 2482 of SEQ ID NO: 586239
ucccaaacgcuucgaaaua

SEQ ID NO: 702751 - RNA, 19 nt, Artificial Sequence
  Description of Artificial Sequence: Synthetic oligonucleotide
  Antisense strand to SEQ ID NO: 702750
uauuucgaagcguuuggga

SEQ ID NO: 702752 - RNA, 19 nt, Artificial Sequence
  Description of Artificial Sequence: Synthetic oligonucleotide
  Sense strand starting at position 2634 of SEQ ID NO: 586239
ucaaguuuauuaccagaga

SEQ ID NO: 702753 - RNA, 19 nt, Artificial Sequence
  Description of Artificial Sequence: Synthetic oligonucleotide
  Antisense strand to SEQ ID NO: 702752
ucucugguaauaaacuuga

SEQ ID NO: 702754 - RNA, 19 nt, Artificial Sequence
  Description of Artificial Sequence: Synthetic oligonucleotide
  Sense strand starting at position 2667 of SEQ ID NO: 586239
ugugcuuggcugugaggaa

SEQ ID NO: 702755 - RNA, 19 nt, Artificial Sequence
  Description of Artificial Sequence: Synthetic oligonucleotide
  Antisense strand to SEQ ID NO: 702754
uuccucacagccaagcaca

SEQ ID NO: 702756 - RNA, 19 nt, Artificial Sequence
  Description of Artificial Sequence: Synthetic oligonucleotide
  Sense strand starting at position 2671 of SEQ ID NO: 586239
cuuggcugugaggaaagau

SEQ ID NO: 702757 - RNA, 19 nt, Artificial Sequence
  Description of Artificial Sequence: Synthetic oligonucleotide
  Antisense strand to SEQ ID NO: 702756
aucuuuccucacagccaag

SEQ ID NO: 702758 - RNA, 19 nt, Artificial Sequence
  Description of Artificial Sequence: Synthetic oligonucleotide
  Sense strand starting at position 2723 of SEQ ID NO: 586239
ugugauagcgauuaaagua

SEQ ID NO: 702759 - RNA, 19 nt, Artificial Sequence
  Description of Artificial Sequence: Synthetic oligonucleotide
  Antisense strand to SEQ ID NO: 702758
uacuuuaaucgcuaucaca

SEQ ID NO: 702760 - RNA, 19 nt, Artificial Sequence
  Description of Artificial Sequence: Synthetic oligonucleotide
  Sense strand starting at position 2763 of SEQ ID NO: 586239
gggcuucugucuuuacuuu

SEQ ID NO: 702761 - RNA, 19 nt, Artificial Sequence
  Description of Artificial Sequence: Synthetic oligonucleotide
  Antisense strand to SEQ ID NO: 702760
aaaguaaagacagaagccc

SEQ ID NO: 702762 - RNA, 19 nt, Artificial Sequence
  Description of Artificial Sequence: Synthetic oligonucleotide
  Sense strand starting at position 2764 of SEQ ID NO: 586239
ggcuucugucuuuacuuua

SEQ ID NO: 702763 - RNA, 19 nt, Artificial Sequence
  Description of Artificial Sequence: Synthetic oligonucleotide
  Antisense strand to SEQ ID NO: 702762
uaaaguaaagacagaagcc

SEQ ID NO: 702764 - RNA, 19 nt, Artificial Sequence
  Description of Artificial Sequence: Synthetic oligonucleotide
  Sense strand starting at position 2769 of SEQ ID NO: 586239
cugucuuuacuuuauugua

SEQ ID NO: 702765 - RNA, 19 nt, Artificial Sequence
  Description of Artificial Sequence: Synthetic oligonucleotide
  Antisense strand to SEQ ID NO: 702764
uacaauaaaguaaagacag

SEQ ID NO: 702766 - RNA, 19 nt, Artificial Sequence
  Description of Artificial Sequence: Synthetic oligonucleotide
  Sense strand starting at position 2827 of SEQ ID NO: 586239
acucuugagcuguaauuaa

SEQ ID NO: 702767 - RNA, 19 nt, Artificial Sequence
  Description of Artificial Sequence: Synthetic oligonucleotide
  Antisense strand to SEQ ID NO: 702766
uuaauuacagcucaagagu

SEQ ID NO: 702768 - RNA, 19 nt, Artificial Sequence
  Description of Artificial Sequence: Synthetic oligonucleotide
  Sense strand starting at position 2834 of SEQ ID NO: 586239
agcuguaauuaaucaggaa

SEQ ID NO: 702769 - RNA, 19 nt, Artificial Sequence
  Description of Artificial Sequence: Synthetic oligonucleotide
  Antisense strand to SEQ ID NO: 702768
uuccugauuaauuacagcu

SEQ ID NO: 702770 - RNA, 19 nt, Artificial Sequence
  Description of Artificial Sequence: Synthetic oligonucleotide
  Sense strand starting at position 2837 of SEQ ID NO: 586239
uguaauuaaucaggaaacu

SEQ ID NO: 702771 - RNA, 19 nt, Artificial Sequence
  Description of Artificial Sequence: Synthetic oligonucleotide
  Antisense strand to SEQ ID NO: 702770
aguuuccugauuaauuaca

SEQ ID NO: 702772 - RNA, 19 nt, Artificial Sequence
  Description of Artificial Sequence: Synthetic oligonucleotide
  Sense strand starting at position 2879 of SEQ ID NO: 586239
uguuacuuaugcuuccaua

SEQ ID NO: 702773 - RNA, 19 nt, Artificial Sequence
  Description of Artificial Sequence: Synthetic oligonucleotide
  Antisense strand to SEQ ID NO: 702772
uauggaagcauaaguaaca

SEQ ID NO: 702774 - RNA, 19 nt, Artificial Sequence
  Description of Artificial Sequence: Synthetic oligonucleotide
  Sense strand starting at position 3039 of SEQ ID NO: 586239
ugcugaaagaguugauuau

SEQ ID NO: 702775 - RNA, 19 nt, Artificial Sequence
  Description of Artificial Sequence: Synthetic oligonucleotide
  Antisense strand to SEQ ID NO: 702774
auaaucaacucuuucagca

SEQ ID NO: 702776 - RNA, 19 nt, Artificial Sequence
  Description of Artificial Sequence: Synthetic oligonucleotide
  Sense strand starting at position 3040 of SEQ ID NO: 586239
gcugaaagaguugauuauu

SEQ ID NO: 702777 - RNA, 19 nt, Artificial Sequence
  Description of Artificial Sequence: Synthetic oligonucleotide
  Antisense strand to SEQ ID NO: 702776
aauaaucaacucuuucagc

SEQ ID NO: 702778 - RNA, 19 nt, Artificial Sequence
  Description of Artificial Sequence: Synthetic oligonucleotide
  Sense strand starting at position 3103 of SEQ ID NO: 586239
aggcuauuguugguagcaa

SEQ ID NO: 702779 - RNA, 19 nt, Artificial Sequence
  Description of Artificial Sequence: Synthetic oligonucleotide
  Antisense strand to SEQ ID NO: 702778
uugcuaccaacaauagccu

SEQ ID NO: 702780 - RNA, 19 nt, Artificial Sequence
  Description of Artificial Sequence: Synthetic oligonucleotide
  Sense strand starting at position 3161 of SEQ ID NO: 586239
cagggaaagugucacaaug

SEQ ID NO: 702781 - RNA, 19 nt, Artificial Sequence
  Description of Artificial Sequence: Synthetic oligonucleotide
  Antisense strand to SEQ ID NO: 702780
cauugugacacuuucccug

SEQ ID NO: 702782 - RNA, 19 nt, Artificial Sequence
  Description of Artificial Sequence: Synthetic oligonucleotide
  Sense strand starting at position 3189 of SEQ ID NO: 586239
uuggcaugccuguaauuau

SEQ ID NO: 702783 - RNA, 19 nt, Artificial Sequence
  Description of Artificial Sequence: Synthetic oligonucleotide
  Antisense strand to SEQ ID NO: 702782
auaauuacaggcaugccaa

SEQ ID NO: 702784 - RNA, 19 nt, Artificial Sequence
  Description of Artificial Sequence: Synthetic oligonucleotide
  Sense strand starting at position 3192 of SEQ ID NO: 586239
gcaugccuguaauuauguu

SEQ ID NO: 702785 - RNA, 19 nt, Artificial Sequence
  Description of Artificial Sequence: Synthetic oligonucleotide
  Antisense strand to SEQ ID NO: 702784
aacauaauuacaggcaugc

SEQ ID NO: 702786 - RNA, 19 nt, Artificial Sequence
  Description of Artificial Sequence: Synthetic oligonucleotide
  Sense strand starting at position 3199 of SEQ ID NO: 586239
uguaauuauguuggccauu

SEQ ID NO: 702787 - RNA, 19 nt, Artificial Sequence
  Description of Artificial Sequence: Synthetic oligonucleotide
  Antisense strand to SEQ ID NO: 702786
aauggccaacauaauuaca

SEQ ID NO: 702788 - RNA, 19 nt, Artificial Sequence
  Description of Artificial Sequence: Synthetic oligonucleotide
  Sense strand starting at position 3265 of SEQ ID NO: 586239
accacauuagugggagcua

SEQ ID NO: 702789 - RNA, 19 nt, Artificial Sequence
  Description of Artificial Sequence: Synthetic oligonucleotide
  Antisense strand to SEQ ID NO: 702788
uagcucccacuaauguggu

SEQ ID NO: 702790 - RNA, 19 nt, Artificial Sequence
  Description of Artificial Sequence: Synthetic oligonucleotide
  Sense strand starting at position 3266 of SEQ ID NO: 586239
ccacauuagugggagcuaa

SEQ ID NO: 702791 - RNA, 19 nt, Artificial Sequence
  Description of Artificial Sequence: Synthetic oligonucleotide
  Antisense strand to SEQ ID NO: 702790
uuagcucccacuaaugugg

SEQ ID NO: 702792 - RNA, 19 nt, Artificial Sequence
  Description of Artificial Sequence: Synthetic oligonucleotide
  Sense strand starting at position 3386 of SEQ ID NO: 586239
gggaguaggcuuuguagcu

SEQ ID NO: 702793 - RNA, 19 nt, Artificial Sequence
  Description of Artificial Sequence: Synthetic oligonucleotide
  Antisense strand to SEQ ID NO: 702792
agcuacaaagccuacuccc

SEQ ID NO: 702794 - RNA, 19 nt, Artificial Sequence
  Description of Artificial Sequence: Synthetic oligonucleotide
  Sense strand starting at position 3393 of SEQ ID NO: 586239
ggcuuuguagcugggugau

SEQ ID NO: 702795 - RNA, 19 nt, Artificial Sequence
  Description of Artificial Sequence: Synthetic oligonucleotide
  Antisense strand to SEQ ID NO: 702794
aucacccagcuacaaagcc

SEQ ID NO: 702796 - RNA, 19 nt, Artificial Sequence
  Description of Artificial Sequence: Synthetic oligonucleotide
  Sense strand starting at position 3395 of SEQ ID NO: 586239
cuuuguagcugggugauga

SEQ ID NO: 702797 - RNA, 19 nt, Artificial Sequence
  Description of Artificial Sequence: Synthetic oligonucleotide
  Antisense strand to SEQ ID NO: 702796
ucaucacccagcuacaaag

SEQ ID NO: 702798 - RNA, 19 nt, Artificial Sequence
  Description of Artificial Sequence: Synthetic oligonucleotide
  Sense strand starting at position 3396 of SEQ ID NO: 586239
uuuguagcugggugaugaa

SEQ ID NO: 702799 - RNA, 19 nt, Artificial Sequence
  Description of Artificial Sequence: Synthetic oligonucleotide
  Antisense strand to SEQ ID NO: 702798
uucaucacccagcuacaaa

SEQ ID NO: 702800 - RNA, 19 nt, Artificial Sequence
  Description of Artificial Sequence: Synthetic oligonucleotide
  Sense strand starting at position 3426 of SEQ ID NO: 586239
aacgaaucccugugacaca

SEQ ID NO: 702801 - RNA, 19 nt, Artificial Sequence
  Description of Artificial Sequence: Synthetic oligonucleotide
  Antisense strand to SEQ ID NO: 702800
ugugucacagggauucguu

SEQ ID NO: 702802 - RNA, 19 nt, Artificial Sequence
  Description of Artificial Sequence: Synthetic oligonucleotide
  Sense strand starting at position 3427 of SEQ ID NO: 586239
acgaaucccugugacacaa

SEQ ID NO: 702803 - RNA, 19 nt, Artificial Sequence
  Description of Artificial Sequence: Synthetic oligonucleotide
  Antisense strand to SEQ ID NO: 702802
uugugucacagggauucgu

SEQ ID NO: 702804 - RNA, 19 nt, Artificial Sequence
  Description of Artificial Sequence: Synthetic oligonucleotide
  Sense strand starting at position 3833 of SEQ ID NO: 586239
ucaguuuccugauagaaug

SEQ ID NO: 702805 - RNA, 19 nt, Artificial Sequence
  Description of Artificial Sequence: Synthetic oligonucleotide
  Antisense strand to SEQ ID NO: 702804
cauucuaucaggaaacuga

SEQ ID NO: 702806 - RNA, 19 nt, Artificial Sequence
  Description of Artificial Sequence: Synthetic oligonucleotide
  Sense strand starting at position 158 of SEQ ID NO: 586240
uauuuaucaggguguggca

SEQ ID NO: 702807 - RNA, 19 nt, Artificial Sequence
  Description of Artificial Sequence: Synthetic oligonucleotide
  Antisense strand to SEQ ID NO: 702806
ugccacacccugauaaaua

SEQ ID NO: 702808 - RNA, 19 nt, Artificial Sequence
  Description of Artificial Sequence: Synthetic oligonucleotide
  Sense strand starting at position 380 of SEQ ID NO: 586240
uuaagaaaguucucuacag

SEQ ID NO: 702809 - RNA, 19 nt, Artificial Sequence
  Description of Artificial Sequence: Synthetic oligonucleotide
  Antisense strand to SEQ ID NO: 702808
cuguagagaacuuucuuaa

SEQ ID NO: 702810 - RNA, 19 nt, Artificial Sequence
  Description of Artificial Sequence: Synthetic oligonucleotide
  Sense strand starting at position 722 of SEQ ID NO: 586240
cggcauucugcucagagau

SEQ ID NO: 702811 - RNA, 19 nt, Artificial Sequence
  Description of Artificial Sequence: Synthetic oligonucleotide
  Antisense strand to SEQ ID NO: 702810
aucucugagcagaaugccg

SEQ ID NO: 702812 - RNA, 19 nt, Artificial Sequence
  Description of Artificial Sequence: Synthetic oligonucleotide
  Sense strand starting at position 817 of SEQ ID NO: 586240
gcagguacgagucacaaca

SEQ ID NO: 702813 - RNA, 19 nt, Artificial Sequence
  Description of Artificial Sequence: Synthetic oligonucleotide
  Antisense strand to SEQ ID NO: 702812
uguugugacucguaccugc

SEQ ID NO: 702814 - RNA, 19 nt, Artificial Sequence
  Description of Artificial Sequence: Synthetic oligonucleotide
  Sense strand starting at position 900 of SEQ ID NO: 586240
agccuuauguaugcaagga

SEQ ID NO: 702815 - RNA, 19 nt, Artificial Sequence
  Description of Artificial Sequence: Synthetic oligonucleotide
  Antisense strand to SEQ ID NO: 702814
uccuugcauacauaaggcu

SEQ ID NO: 702816 - RNA, 19 nt, Artificial Sequence
  Description of Artificial Sequence: Synthetic oligonucleotide
  Sense strand starting at position 901 of SEQ ID NO: 586240
gccuuauguaugcaaggaa

SEQ ID NO: 702817 - RNA, 19 nt, Artificial Sequence
  Description of Artificial Sequence: Synthetic oligonucleotide
  Antisense strand to SEQ ID NO: 702816
uuccuugcauacauaaggc

SEQ ID NO: 702818 - RNA, 19 nt, Artificial Sequence
  Description of Artificial Sequence: Synthetic oligonucleotide
  Sense strand starting at position 1020 of SEQ ID NO: 586240
ucuuccuacugcuugggaa

SEQ ID NO: 702819 - RNA, 19 nt, Artificial Sequence
  Description of Artificial Sequence: Synthetic oligonucleotide
  Antisense strand to SEQ ID NO: 702818
uucccaagcaguaggaaga

SEQ ID NO: 702820 - RNA, 19 nt, Artificial Sequence
  Description of Artificial Sequence: Synthetic oligonucleotide
  Sense strand starting at position 1100 of SEQ ID NO: 586240
cggagaauaugcccauguu

SEQ ID NO: 702821 - RNA, 19 nt, Artificial Sequence
  Description of Artificial Sequence: Synthetic oligonucleotide
  Antisense strand to SEQ ID NO: 702820
aacaugggcauauucuccg

SEQ ID NO: 702822 - RNA, 19 nt, Artificial Sequence
  Description of Artificial Sequence: Synthetic oligonucleotide
  Sense strand starting at position 1101 of SEQ ID NO: 586240
ggagaauaugcccauguuu

SEQ ID NO: 702823 - RNA, 19 nt, Artificial Sequence
  Description of Artificial Sequence: Synthetic oligonucleotide
  Antisense strand to SEQ ID NO: 702822
aaacaugggcauauucucc

SEQ ID NO: 702824 - RNA, 19 nt, Artificial Sequence
  Description of Artificial Sequence: Synthetic oligonucleotide
  Sense strand starting at position 1661 of SEQ ID NO: 586240
cgggcuucaccuugagaug

SEQ ID NO: 702825 - RNA, 19 nt, Artificial Sequence
  Description of Artificial Sequence: Synthetic oligonucleotide
  Antisense strand to SEQ ID NO: 702824
caucucaaggugaagcccg

SEQ ID NO: 702826 - RNA, 19 nt, Artificial Sequence
  Description of Artificial Sequence: Synthetic oligonucleotide
  Sense strand starting at position 2173 of SEQ ID NO: 586240
caagucgucccagggaaga

SEQ ID NO: 702827 - RNA, 19 nt, Artificial Sequence
  Description of Artificial Sequence: Synthetic oligonucleotide
  Antisense strand to SEQ ID NO: 702826
ucuucccugggacgacuug

SEQ ID NO: 702828 - RNA, 19 nt, Artificial Sequence
  Description of Artificial Sequence: Synthetic oligonucleotide
  Sense strand starting at position 2372 of SEQ ID NO: 586240
guccgugagaauuaaaugu

SEQ ID NO: 702829 - RNA, 19 nt, Artificial Sequence
  Description of Artificial Sequence: Synthetic oligonucleotide
  Antisense strand to SEQ ID NO: 702828
acauuuaauucucacggac

SEQ ID NO: 702830 - RNA, 19 nt, Artificial Sequence
  Description of Artificial Sequence: Synthetic oligonucleotide
  Sense strand starting at position 2427 of SEQ ID NO: 586240
gcccguaacacacagugau

SEQ ID NO: 702831 - RNA, 19 nt, Artificial Sequence
  Description of Artificial Sequence: Synthetic oligonucleotide
  Antisense strand to SEQ ID NO: 702830
aucacuguguguuacgggc

SEQ ID NO: 702832 - RNA, 19 nt, Artificial Sequence
  Description of Artificial Sequence: Synthetic oligonucleotide
  Sense strand starting at position 2430 of SEQ ID NO: 586240
cguaacacacagugauaaa

SEQ ID NO: 702833 - RNA, 19 nt, Artificial Sequence
  Description of Artificial Sequence: Synthetic oligonucleotide
  Antisense strand to SEQ ID NO: 702832
uuuaucacuguguguuacg

SEQ ID NO: 702834 - RNA, 19 nt, Artificial Sequence
  Description of Artificial Sequence: Synthetic oligonucleotide
  Sense strand starting at position 2467 of SEQ ID NO: 586240
gcugcugucgugagaggua

SEQ ID NO: 702835 - RNA, 19 nt, Artificial Sequence
  Description of Artificial Sequence: Synthetic oligonucleotide
  Antisense strand to SEQ ID NO: 702834
uaccucucacgacagcagc

SEQ ID NO: 702836 - RNA, 19 nt, Artificial Sequence
  Description of Artificial Sequence: Synthetic oligonucleotide
  Sense strand starting at position 2992 of SEQ ID NO: 586240
gaaccagacugucuugaaa

SEQ ID NO: 702837 - RNA, 19 nt, Artificial Sequence
  Description of Artificial Sequence: Synthetic oligonucleotide
  Antisense strand to SEQ ID NO: 702836
uuucaagacagucugguuc

SEQ ID NO: 702838 - RNA, 19 nt, Artificial Sequence
  Description of Artificial Sequence: Synthetic oligonucleotide
  Sense strand starting at position 3031 of SEQ ID NO: 586240
gcagucacaucugugauua

SEQ ID NO: 702839 - RNA, 19 nt, Artificial Sequence
  Description of Artificial Sequence: Synthetic oligonucleotide
  Antisense strand to SEQ ID NO: 702838
uaaucacagaugugacugc

SEQ ID NO: 702840 - RNA, 19 nt, Artificial Sequence
  Description of Artificial Sequence: Synthetic oligonucleotide
  Sense strand starting at position 3035 of SEQ ID NO: 586240
ucacaucugugauuaucuu

SEQ ID NO: 702841 - RNA, 19 nt, Artificial Sequence
  Description of Artificial Sequence: Synthetic oligonucleotide
  Antisense strand to SEQ ID NO: 702840
aagauaaucacagauguga

SEQ ID NO: 702842 - RNA, 19 nt, Artificial Sequence
  Description of Artificial Sequence: Synthetic oligonucleotide
  Sense strand starting at position 3087 of SEQ ID NO: 586240
gccacauugcaauggauga

SEQ ID NO: 702843 - RNA, 19 nt, Artificial Sequence
  Description of Artificial Sequence: Synthetic oligonucleotide
  Antisense strand to SEQ ID NO: 702842
ucauccauugcaauguggc

SEQ ID NO: 702844 - RNA, 19 nt, Artificial Sequence
  Description of Artificial Sequence: Synthetic oligonucleotide
  Sense strand starting at position 3101 of SEQ ID NO: 586240
gaugaauuagccugcugac

SEQ ID NO: 702845 - RNA, 19 nt, Artificial Sequence
  Description of Artificial Sequence: Synthetic oligonucleotide
  Antisense strand to SEQ ID NO: 702844
gucagcaggcuaauucauc

SEQ ID NO: 702846 - RNA, 19 nt, Artificial Sequence
  Description of Artificial Sequence: Synthetic oligonucleotide
  Sense strand starting at position 3168 of SEQ ID NO: 586240
ggcuuuagggucugguaga

SEQ ID NO: 702847 - RNA, 19 nt, Artificial Sequence
  Description of Artificial Sequence: Synthetic oligonucleotide
  Antisense strand to SEQ ID NO: 702846
ucuaccagacccuaaagcc

SEQ ID NO: 702848 - RNA, 19 nt, Artificial Sequence
  Description of Artificial Sequence: Synthetic oligonucleotide
  Sense strand starting at position 3173 of SEQ ID NO: 586240
uagggucugguagacauau

SEQ ID NO: 702849 - RNA, 19 nt, Artificial Sequence
  Description of Artificial Sequence: Synthetic oligonucleotide
  Antisense strand to SEQ ID NO: 702848
auaugucuaccagacccua

SEQ ID NO: 702850 - RNA, 19 nt, Artificial Sequence
  Description of Artificial Sequence: Synthetic oligonucleotide
  Sense strand starting at position 3243 of SEQ ID NO: 586240
caaugagaacuaggcuuga

SEQ ID NO: 702851 - RNA, 19 nt, Artificial Sequence
  Description of Artificial Sequence: Synthetic oligonucleotide
  Antisense strand to SEQ ID NO: 702850
ucaagccuaguucucauug

SEQ ID NO: 702852 - RNA, 19 nt, Artificial Sequence
  Description of Artificial Sequence: Synthetic oligonucleotide
  Sense strand starting at position 3270 of SEQ ID NO: 586240
uugcucagagcucaaagua

SEQ ID NO: 702853 - RNA, 19 nt, Artificial Sequence
  Description of Artificial Sequence: Synthetic oligonucleotide
  Antisense strand to SEQ ID NO: 702852
uacuuugagcucugagcaa

SEQ ID NO: 702854 - RNA, 19 nt, Artificial Sequence
  Description of Artificial Sequence: Synthetic oligonucleotide
  Sense strand starting at position 3297 of SEQ ID NO: 586240
guagguauugcuggauaca

SEQ ID NO: 702855 - RNA, 19 nt, Artificial Sequence
  Description of Artificial Sequence: Synthetic oligonucleotide
  Antisense strand to SEQ ID NO: 702854
uguauccagcaauaccuac

SEQ ID NO: 702856 - RNA, 19 nt, Artificial Sequence
  Description of Artificial Sequence: Synthetic oligonucleotide
  Sense strand starting at position 3298 of SEQ ID NO: 586240
uagguauugcuggauacag

SEQ ID NO: 702857 - RNA, 19 nt, Artificial Sequence
  Description of Artificial Sequence: Synthetic oligonucleotide
  Antisense strand to SEQ ID NO: 702856
cuguauccagcaauaccua

SEQ ID NO: 702858 - RNA, 19 nt, Artificial Sequence
  Description of Artificial Sequence: Synthetic oligonucleotide
  Sense strand starting at position 3318 of SEQ ID NO: 586240
guauuuggagcuuguugaa

SEQ ID NO: 702859 - RNA, 19 nt, Artificial Sequence
  Description of Artificial Sequence: Synthetic oligonucleotide
  Antisense strand to SEQ ID NO: 702858
uucaacaagcuccaaauac

SEQ ID NO: 702860 - RNA, 19 nt, Artificial Sequence
  Description of Artificial Sequence: Synthetic oligonucleotide
  Sense strand starting at position 3325 of SEQ ID NO: 586240
gagcuuguugaacauauca

SEQ ID NO: 702861 - RNA, 19 nt, Artificial Sequence
  Description of Artificial Sequence: Synthetic oligonucleotide
  Antisense strand to SEQ ID NO: 702860
ugauauguucaacaagcuc

SEQ ID NO: 702862 - RNA, 19 nt, Artificial Sequence
  Description of Artificial Sequence: Synthetic oligonucleotide
  Sense strand starting at position 3370 of SEQ ID NO: 586240
agaauugcuucuuccgaaa

SEQ ID NO: 702863 - RNA, 19 nt, Artificial Sequence
  Description of Artificial Sequence: Synthetic oligonucleotide
  Antisense strand to SEQ ID NO: 702862
uuucggaagaagcaauucu

SEQ ID NO: 702864 - RNA, 19 nt, Artificial Sequence
  Description of Artificial Sequence: Synthetic oligonucleotide
  Sense strand starting at position 3513 of SEQ ID NO: 586240
cugcuaccucaguauauga

SEQ ID NO: 702865 - RNA, 19 nt, Artificial Sequence
  Description of Artificial Sequence: Synthetic oligonucleotide
  Antisense strand to SEQ ID NO: 702864
ucauauacugagguagcag

SEQ ID NO: 702866 - RNA, 19 nt, Artificial Sequence
  Description of Artificial Sequence: Synthetic oligonucleotide
  Sense strand starting at position 3552 of SEQ ID NO: 586240
uaggguguuacagaguuga

SEQ ID NO: 702867 - RNA, 19 nt, Artificial Sequence
  Description of Artificial Sequence: Synthetic oligonucleotide
  Antisense strand to SEQ ID NO: 702866
ucaacucuguaacacccua

SEQ ID NO: 702868 - RNA, 19 nt, Artificial Sequence
  Description of Artificial Sequence: Synthetic oligonucleotide
  Sense strand starting at position 3634 of SEQ ID NO: 586240
uuacguaucuuucucauuu

SEQ ID NO: 702869 - RNA, 19 nt, Artificial Sequence
  Description of Artificial Sequence: Synthetic oligonucleotide
  Antisense strand to SEQ ID NO: 702868
aaaugagaaagauacguaa

SEQ ID NO: 702870 - RNA, 19 nt, Artificial Sequence
  Description of Artificial Sequence: Synthetic oligonucleotide
  Sense strand starting at position 3728 of SEQ ID NO: 586240
guccauucuccugaugaga

SEQ ID NO: 702871 - RNA, 19 nt, Artificial Sequence
  Description of Artificial Sequence: Synthetic oligonucleotide
  Antisense strand to SEQ ID NO: 702870
ucucaucaggagaauggac

SEQ ID NO: 702872 - RNA, 19 nt, Artificial Sequence
  Description of Artificial Sequence: Synthetic oligonucleotide
  Sense strand starting at position 3759 of SEQ ID NO: 586240
cuagaauuguugcccaaca

SEQ ID NO: 702873 - RNA, 19 nt, Artificial Sequence
  Description of Artificial Sequence: Synthetic oligonucleotide
  Antisense strand to SEQ ID NO: 702872
uguugggcaacaauucuag

SEQ ID NO: 702874 - RNA, 19 nt, Artificial Sequence
  Description of Artificial Sequence: Synthetic oligonucleotide
  Sense strand starting at position 3761 of SEQ ID NO: 586240
agaauuguugcccaacaac

SEQ ID NO: 702875 - RNA, 19 nt, Artificial Sequence
  Description of Artificial Sequence: Synthetic oligonucleotide
  Antisense strand to SEQ ID NO: 702874
guuguugggcaacaauucu

SEQ ID NO: 702876 - RNA, 19 nt, Artificial Sequence
  Description of Artificial Sequence: Synthetic oligonucleotide
  Sense strand starting at position 3816 of SEQ ID NO: 586240
gggaauccauaauaucaac

SEQ ID NO: 702877 - RNA, 19 nt, Artificial Sequence
  Description of Artificial Sequence: Synthetic oligonucleotide
  Antisense strand to SEQ ID NO: 702876
guugauauuauggauuccc

SEQ ID NO: 702878 - RNA, 19 nt, Artificial Sequence
  Description of Artificial Sequence: Synthetic oligonucleotide
  Sense strand starting at position 3856 of SEQ ID NO: 586240
ggagauaauuuacagccaa

SEQ ID NO: 702879 - RNA, 19 nt, Artificial Sequence
  Description of Artificial Sequence: Synthetic oligonucleotide
  Antisense strand to SEQ ID NO: 702878
uuggcuguaaauuaucucc

SEQ ID NO: 702880 - RNA, 19 nt, Artificial Sequence
  Description of Artificial Sequence: Synthetic oligonucleotide
  Sense strand starting at position 3934 of SEQ ID NO: 586240
gaagaaagucacugcccua

SEQ ID NO: 702881 - RNA, 19 nt, Artificial Sequence
  Description of Artificial Sequence: Synthetic oligonucleotide
  Antisense strand to SEQ ID NO: 702880
uagggcagugacuuucuuc

SEQ ID NO: 702882 - RNA, 19 nt, Artificial Sequence
  Description of Artificial Sequence: Synthetic oligonucleotide
  Sense strand starting at position 3937 of SEQ ID NO: 586240
gaaagucacugcccuagua

SEQ ID NO: 702883 - RNA, 19 nt, Artificial Sequence
  Description of Artificial Sequence: Synthetic oligonucleotide
  Antisense strand to SEQ ID NO: 702882
uacuagggcagugacuuuc

SEQ ID NO: 702884 - RNA, 19 nt, Artificial Sequence
  Description of Artificial Sequence: Synthetic oligonucleotide
  Sense strand starting at position 3964 of SEQ ID NO: 586240
ggcuuauguaguggguaaa

SEQ ID NO: 702885 - RNA, 19 nt, Artificial Sequence
  Description of Artificial Sequence: Synthetic oligonucleotide
  Antisense strand to SEQ ID NO: 702884
uuuacccacuacauaagcc

SEQ ID NO: 702886 - RNA, 19 nt, Artificial Sequence
  Description of Artificial Sequence: Synthetic oligonucleotide
  Sense strand starting at position 29 of SEQ ID NO: 586241
gagguuagaugauuaguuu

SEQ ID NO: 702887 - RNA, 19 nt, Artificial Sequence
  Description of Artificial Sequence: Synthetic oligonucleotide
  Antisense strand to SEQ ID NO: 702886
aaacuaaucaucuaaccuc

SEQ ID NO: 702888 - RNA, 19 nt, Artificial Sequence
  Description of Artificial Sequence: Synthetic oligonucleotide
  Sense strand starting at position 75 of SEQ ID NO: 586241
gugccaacucagggaucuu

SEQ ID NO: 702889 - RNA, 19 nt, Artificial Sequence
  Description of Artificial Sequence: Synthetic oligonucleotide
  Antisense strand to SEQ ID NO: 702888
aagaucccugaguuggcac

SEQ ID NO: 702890 - RNA, 19 nt, Artificial Sequence
  Description of Artificial Sequence: Synthetic oligonucleotide
  Sense strand starting at position 142 of SEQ ID NO: 586241
ucaugaagcugaucaugua

SEQ ID NO: 702891 - RNA, 19 nt, Artificial Sequence
  Description of Artificial Sequence: Synthetic oligonucleotide
  Antisense strand to SEQ ID NO: 702890
uacaugaucagcuucauga

SEQ ID NO: 702892 - RNA, 19 nt, Artificial Sequence
  Description of Artificial Sequence: Synthetic oligonucleotide
  Sense strand starting at position 217 of SEQ ID NO: 586241
guuuacaaccuuuagugau

SEQ ID NO: 702893 - RNA, 19 nt, Artificial Sequence
  Description of Artificial Sequence: Synthetic oligonucleotide
  Antisense strand to SEQ ID NO: 702892
aucacuaaagguuguaaac

SEQ ID NO: 702894 - RNA, 19 nt, Artificial Sequence
  Description of Artificial Sequence: Synthetic oligonucleotide
  Sense strand starting at position 263 of SEQ ID NO: 586241
ccuuuacguauuuggugaa

SEQ ID NO: 702895 - RNA, 19 nt, Artificial Sequence
  Description of Artificial Sequence: Synthetic oligonucleotide
  Antisense strand to SEQ ID NO: 702894
uucaccaaauacguaaagg

SEQ ID NO: 702896 - RNA, 19 nt, Artificial Sequence
  Description of Artificial Sequence: Synthetic oligonucleotide
  Sense strand starting at position 266 of SEQ ID NO: 586241
uuacguauuuggugaauuu

SEQ ID NO: 702897 - RNA, 19 nt, Artificial Sequence
  Description of Artificial Sequence: Synthetic oligonucleotide
  Antisense strand to SEQ ID NO: 702896
aaauucaccaaauacguaa

SEQ ID NO: 702898 - RNA, 19 nt, Artificial Sequence
  Description of Artificial Sequence: Synthetic oligonucleotide
  Sense strand starting at position 346 of SEQ ID NO: 586241
cccucuuugucaguugacu

SEQ ID NO: 702899 - RNA, 19 nt, Artificial Sequence
  Description of Artificial Sequence: Synthetic oligonucleotide
  Antisense strand to SEQ ID NO: 702898
agucaacugacaaagaggg

SEQ ID NO: 702900 - RNA, 19 nt, Artificial Sequence
  Description of Artificial Sequence: Synthetic oligonucleotide
  Sense strand starting at position 403 of SEQ ID NO: 586241
cccugauaaggcugugagu

SEQ ID NO: 702901 - RNA, 19 nt, Artificial Sequence
  Description of Artificial Sequence: Synthetic oligonucleotide
  Antisense strand to SEQ ID NO: 702900
acucacagccuuaucaggg

SEQ ID NO: 702902 - RNA, 19 nt, Artificial Sequence
  Description of Artificial Sequence: Synthetic oligonucleotide
  Sense strand starting at position 405 of SEQ ID NO: 586241
cugauaaggcugugaguaa

SEQ ID NO: 702903 - RNA, 19 nt, Artificial Sequence
  Description of Artificial Sequence: Synthetic oligonucleotide
  Antisense strand to SEQ ID NO: 702902
uuacucacagccuuaucag

SEQ ID NO: 702904 - RNA, 19 nt, Artificial Sequence
  Description of Artificial Sequence: Synthetic oligonucleotide
  Sense strand starting at position 601 of SEQ ID NO: 586241
uauuuaucaggguguggca

SEQ ID NO: 702905 - RNA, 19 nt, Artificial Sequence
  Description of Artificial Sequence: Synthetic oligonucleotide
  Antisense strand to SEQ ID NO: 702904
ugccacacccugauaaaua

SEQ ID NO: 702906 - RNA, 19 nt, Artificial Sequence
  Description of Artificial Sequence: Synthetic oligonucleotide
  Sense strand starting at position 823 of SEQ ID NO: 586241
uuaagaaaguucucuacag

SEQ ID NO: 702907 - RNA, 19 nt, Artificial Sequence
  Description of Artificial Sequence: Synthetic oligonucleotide
  Antisense strand to SEQ ID NO: 702906
cuguagagaacuuucuuaa

SEQ ID NO: 702908 - RNA, 19 nt, Artificial Sequence
  Description of Artificial Sequence: Synthetic oligonucleotide
  Sense strand starting at position 1165 of SEQ ID NO: 586241
cggcauucugcucagagau

SEQ ID NO: 702909 - RNA, 19 nt, Artificial Sequence
  Description of Artificial Sequence: Synthetic oligonucleotide
  Antisense strand to SEQ ID NO: 702908
aucucugagcagaaugccg

SEQ ID NO: 702910 - RNA, 19 nt, Artificial Sequence
  Description of Artificial Sequence: Synthetic oligonucleotide
  Sense strand starting at position 1260 of SEQ ID NO: 586241
gcagguacgagucacaaca

SEQ ID NO: 702911 - RNA, 19 nt, Artificial Sequence
  Description of Artificial Sequence: Synthetic oligonucleotide
  Antisense strand to SEQ ID NO: 702910
uguugugacucguaccugc

SEQ ID NO: 702912 - RNA, 19 nt, Artificial Sequence
  Description of Artificial Sequence: Synthetic oligonucleotide
  Sense strand starting at position 1343 of SEQ ID NO: 586241
agccuuauguaugcaagga

SEQ ID NO: 702913 - RNA, 19 nt, Artificial Sequence
  Description of Artificial Sequence: Synthetic oligonucleotide
  Antisense strand to SEQ ID NO: 702912
uccuugcauacauaaggcu

SEQ ID NO: 702914 - RNA, 19 nt, Artificial Sequence
  Description of Artificial Sequence: Synthetic oligonucleotide
  Sense strand starting at position 1344 of SEQ ID NO: 586241
gccuuauguaugcaaggaa

SEQ ID NO: 702915 - RNA, 19 nt, Artificial Sequence
  Description of Artificial Sequence: Synthetic oligonucleotide
  Antisense strand to SEQ ID NO: 702914
uuccuugcauacauaaggc

SEQ ID NO: 702916 - RNA, 19 nt, Artificial Sequence
  Description of Artificial Sequence: Synthetic oligonucleotide
  Sense strand starting at position 1463 of SEQ ID NO: 586241
ucuuccuacugcuugggaa

SEQ ID NO: 702917 - RNA, 19 nt, Artificial Sequence
  Description of Artificial Sequence: Synthetic oligonucleotide
  Antisense strand to SEQ ID NO: 702916
uucccaagcaguaggaaga

SEQ ID NO: 702918 - RNA, 19 nt, Artificial Sequence
  Description of Artificial Sequence: Synthetic oligonucleotide
  Sense strand starting at position 1543 of SEQ ID NO: 586241
cggagaauaugcccauguu

SEQ ID NO: 702919 - RNA, 19 nt, Artificial Sequence
  Description of Artificial Sequence: Synthetic oligonucleotide
  Antisense strand to SEQ ID NO: 702918
aacaugggcauauucuccg

SEQ ID NO: 702920 - RNA, 19 nt, Artificial Sequence
  Description of Artificial Sequence: Synthetic oligonucleotide
  Sense strand starting at position 1544 of SEQ ID NO: 586241
ggagaauaugcccauguuu

SEQ ID NO: 702921 - RNA, 19 nt, Artificial Sequence
  Description of Artificial Sequence: Synthetic oligonucleotide
  Antisense strand to SEQ ID NO: 702920
aaacaugggcauauucucc

SEQ ID NO: 702922 - RNA, 19 nt, Artificial Sequence
  Description of Artificial Sequence: Synthetic oligonucleotide
  Sense strand starting at position 2104 of SEQ ID NO: 586241
cgggcuucaccuugagaug

SEQ ID NO: 702923 - RNA, 19 nt, Artificial Sequence
  Description of Artificial Sequence: Synthetic oligonucleotide
  Antisense strand to SEQ ID NO: 702922
caucucaaggugaagcccg

SEQ ID NO: 702924 - RNA, 19 nt, Artificial Sequence
  Description of Artificial Sequence: Synthetic oligonucleotide
  Sense strand starting at position 2616 of SEQ ID NO: 586241
caagucgucccagggaaga

SEQ ID NO: 702925 - RNA, 19 nt, Artificial Sequence
  Description of Artificial Sequence: Synthetic oligonucleotide
  Antisense strand to SEQ ID NO: 702924
ucuucccugggacgacuug

SEQ ID NO: 702926 - RNA, 19 nt, Artificial Sequence
  Description of Artificial Sequence: Synthetic oligonucleotide
  Sense strand starting at position 2815 of SEQ ID NO: 586241
guccgugagaauuaaaugu

SEQ ID NO: 702927 - RNA, 19 nt, Artificial Sequence
  Description of Artificial Sequence: Synthetic oligonucleotide
  Antisense strand to SEQ ID NO: 702926
acauuuaauucucacggac

SEQ ID NO: 702928 - RNA, 19 nt, Artificial Sequence
  Description of Artificial Sequence: Synthetic oligonucleotide
  Sense strand starting at position 2870 of SEQ ID NO: 586241
gcccguaacacacagugau

SEQ ID NO: 702929 - RNA, 19 nt, Artificial Sequence
  Description of Artificial Sequence: Synthetic oligonucleotide
  Antisense strand to SEQ ID NO: 702928
aucacuguguguuacgggc

SEQ ID NO: 702930 - RNA, 19 nt, Artificial Sequence
  Description of Artificial Sequence: Synthetic oligonucleotide
  Sense strand starting at position 2873 of SEQ ID NO: 586241
cguaacacacagugauaaa

SEQ ID NO: 702931 - RNA, 19 nt, Artificial Sequence
  Description of Artificial Sequence: Synthetic oligonucleotide
  Antisense strand to SEQ ID NO: 702930
uuuaucacuguguguuacg

SEQ ID NO: 702932 - RNA, 19 nt, Artificial Sequence
  Description of Artificial Sequence: Synthetic oligonucleotide
  Sense strand starting at position 2910 of SEQ ID NO: 586241
gcugcugucgugagaggua

SEQ ID NO: 702933 - RNA, 19 nt, Artificial Sequence
  Description of Artificial Sequence: Synthetic oligonucleotide
  Antisense strand to SEQ ID NO: 702932
uaccucucacgacagcagc

SEQ ID NO: 702934 - RNA, 19 nt, Artificial Sequence
  Description of Artificial Sequence: Synthetic oligonucleotide
  Sense strand starting at position 3435 of SEQ ID NO: 586241
gaaccagacugucuugaaa

SEQ ID NO: 702935 - RNA, 19 nt, Artificial Sequence
  Description of Artificial Sequence: Synthetic oligonucleotide
  Antisense strand to SEQ ID NO: 702934
uuucaagacagucugguuc

SEQ ID NO: 702936 - RNA, 19 nt, Artificial Sequence
  Description of Artificial Sequence: Synthetic oligonucleotide
  Sense strand starting at position 3474 of SEQ ID NO: 586241
gcagucacaucugugauua

SEQ ID NO: 702937 - RNA, 19 nt, Artificial Sequence
  Description of Artificial Sequence: Synthetic oligonucleotide
  Antisense strand to SEQ ID NO: 702936
uaaucacagaugugacugc

SEQ ID NO: 702938 - RNA, 19 nt, Artificial Sequence
  Description of Artificial Sequence: Synthetic oligonucleotide
  Sense strand starting at position 3478 of SEQ ID NO: 586241
ucacaucugugauuaucuu

SEQ ID NO: 702939 - RNA, 19 nt, Artificial Sequence
  Description of Artificial Sequence: Synthetic oligonucleotide
  Antisense strand to SEQ ID NO: 702938
aagauaaucacagauguga

SEQ ID NO: 702940 - RNA, 19 nt, Artificial Sequence
  Description of Artificial Sequence: Synthetic oligonucleotide
  Sense strand starting at position 3530 of SEQ ID NO: 586241
gccacauugcaauggauga

SEQ ID NO: 702941 - RNA, 19 nt, Artificial Sequence
  Description of Artificial Sequence: Synthetic oligonucleotide
  Antisense strand to SEQ ID NO: 702940
ucauccauugcaauguggc

SEQ ID NO: 702942 - RNA, 19 nt, Artificial Sequence
  Description of Artificial Sequence: Synthetic oligonucleotide
  Sense strand starting at position 3544 of SEQ ID NO: 586241
gaugaauuagccugcugac

SEQ ID NO: 702943 - RNA, 19 nt, Artificial Sequence
  Description of Artificial Sequence: Synthetic oligonucleotide
  Antisense strand to SEQ ID NO: 702942
gucagcaggcuaauucauc

SEQ ID NO: 702944 - RNA, 19 nt, Artificial Sequence
  Description of Artificial Sequence: Synthetic oligonucleotide
  Sense strand starting at position 3611 of SEQ ID NO: 586241
ggcuuuagggucugguaga

SEQ ID NO: 702945 - RNA, 19 nt, Artificial Sequence
  Description of Artificial Sequence: Synthetic oligonucleotide
  Antisense strand to SEQ ID NO: 702944
ucuaccagacccuaaagcc

SEQ ID NO: 702946 - RNA, 19 nt, Artificial Sequence
  Description of Artificial Sequence: Synthetic oligonucleotide
  Sense strand starting at position 3616 of SEQ ID NO: 586241
uagggucugguagacauau

SEQ ID NO: 702947 - RNA, 19 nt, Artificial Sequence
  Description of Artificial Sequence: Synthetic oligonucleotide
  Antisense strand to SEQ ID NO: 702946
auaugucuaccagacccua

SEQ ID NO: 702948 - RNA, 19 nt, Artificial Sequence
  Description of Artificial Sequence: Synthetic oligonucleotide
  Sense strand starting at position 3686 of SEQ ID NO: 586241
caaugagaacuaggcuuga

SEQ ID NO: 702949 - RNA, 19 nt, Artificial Sequence
  Description of Artificial Sequence: Synthetic oligonucleotide
  Antisense strand to SEQ ID NO: 702948
ucaagccuaguucucauug

SEQ ID NO: 702950 - RNA, 19 nt, Artificial Sequence
  Description of Artificial Sequence: Synthetic oligonucleotide
  Sense strand starting at position 3713 of SEQ ID NO: 586241
uugcucagagcucaaagua

SEQ ID NO: 702951 - RNA, 19 nt, Artificial Sequence
  Description of Artificial Sequence: Synthetic oligonucleotide
  Antisense strand to SEQ ID NO: 702950
uacuuugagcucugagcaa

SEQ ID NO: 702952 - RNA, 19 nt, Artificial Sequence
  Description of Artificial Sequence: Synthetic oligonucleotide
  Sense strand starting at position 3740 of SEQ ID NO: 586241
guagguauugcuggauaca

SEQ ID NO: 702953 - RNA, 19 nt, Artificial Sequence
  Description of Artificial Sequence: Synthetic oligonucleotide
  Antisense strand to SEQ ID NO: 702952
uguauccagcaauaccuac

SEQ ID NO: 702954 - RNA, 19 nt, Artificial Sequence
  Description of Artificial Sequence: Synthetic oligonucleotide
  Sense strand starting at position 3741 of SEQ ID NO: 586241
uagguauugcuggauacag

SEQ ID NO: 702955 - RNA, 19 nt, Artificial Sequence
  Description of Artificial Sequence: Synthetic oligonucleotide
  Antisense strand to SEQ ID NO: 702954
cuguauccagcaauaccua

SEQ ID NO: 702956 - RNA, 19 nt, Artificial Sequence
  Description of Artificial Sequence: Synthetic oligonucleotide
  Sense strand starting at position 3761 of SEQ ID NO: 586241
guauuuggagcuuguugaa

SEQ ID NO: 702957 - RNA, 19 nt, Artificial Sequence
  Description of Artificial Sequence: Synthetic oligonucleotide
  Antisense strand to SEQ ID NO: 702956
uucaacaagcuccaaauac

SEQ ID NO: 702958 - RNA, 19 nt, Artificial Sequence
  Description of Artificial Sequence: Synthetic oligonucleotide
  Sense strand starting at position 3768 of SEQ ID NO: 586241
gagcuuguugaacauauca

SEQ ID NO: 702959 - RNA, 19 nt, Artificial Sequence
  Description of Artificial Sequence: Synthetic oligonucleotide
  Antisense strand to SEQ ID NO: 702958
ugauauguucaacaagcuc

SEQ ID NO: 702960 - RNA, 19 nt, Artificial Sequence
  Description of Artificial Sequence: Synthetic oligonucleotide
  Sense strand starting at position 3813 of SEQ ID NO: 586241
agaauugcuucuuccgaaa

SEQ ID NO: 702961 - RNA, 19 nt, Artificial Sequence
  Description of Artificial Sequence: Synthetic oligonucleotide
  Antisense strand to SEQ ID NO: 702960
uuucggaagaagcaauucu

SEQ ID NO: 702962 - RNA, 19 nt, Artificial Sequence
  Description of Artificial Sequence: Synthetic oligonucleotide
  Sense strand starting at position 3956 of SEQ ID NO: 586241
cugcuaccucaguauauga

SEQ ID NO: 702963 - RNA, 19 nt, Artificial Sequence
  Description of Artificial Sequence: Synthetic oligonucleotide
  Antisense strand to SEQ ID NO: 702962
ucauauacugagguagcag

SEQ ID NO: 702964 - RNA, 19 nt, Artificial Sequence
  Description of Artificial Sequence: Synthetic oligonucleotide
  Sense strand starting at position 3970 of SEQ ID NO: 586241
uaugaagggcaguguugua

SEQ ID NO: 702965 - RNA, 19 nt, Artificial Sequence
  Description of Artificial Sequence: Synthetic oligonucleotide
  Antisense strand to SEQ ID NO: 702964
uacaacacugcccuucaua

SEQ ID NO: 702966 - RNA, 19 nt, Artificial Sequence
  Description of Artificial Sequence: Synthetic oligonucleotide
  Sense strand starting at position 323 of SEQ ID NO: 586242
uggaaaugcucuuccucuu

SEQ ID NO: 702967 - RNA, 19 nt, Artificial Sequence
  Description of Artificial Sequence: Synthetic oligonucleotide
  Antisense strand to SEQ ID NO: 702966
aagaggaagagcauuucca

SEQ ID NO: 702968 - RNA, 19 nt, Artificial Sequence
  Description of Artificial Sequence: Synthetic oligonucleotide
  Sense strand starting at position 359 of SEQ ID NO: 586242
ggguucuucucauccauca

SEQ ID NO: 702969 - RNA, 19 nt, Artificial Sequence
  Description of Artificial Sequence: Synthetic oligonucleotide
  Antisense strand to SEQ ID NO: 702968
ugauggaugagaagaaccc

SEQ ID NO: 702970 - RNA, 19 nt, Artificial Sequence
  Description of Artificial Sequence: Synthetic oligonucleotide
  Sense strand starting at position 419 of SEQ ID NO: 586242
gaaauuucguccuaugaau

SEQ ID NO: 702971 - RNA, 19 nt, Artificial Sequence
  Description of Artificial Sequence: Synthetic oligonucleotide
  Antisense strand to SEQ ID NO: 702970
auucauaggacgaaauuuc

SEQ ID NO: 702972 - RNA, 19 nt, Artificial Sequence
  Description of Artificial Sequence: Synthetic oligonucleotide
  Sense strand starting at position 591 of SEQ ID NO: 586242
ucucccgaccuauagauau

SEQ ID NO: 702973 - RNA, 19 nt, Artificial Sequence
  Description of Artificial Sequence: Synthetic oligonucleotide
  Antisense strand to SEQ ID NO: 702972
auaucuauaggucgggaga

SEQ ID NO: 702974 - RNA, 19 nt, Artificial Sequence
  Description of Artificial Sequence: Synthetic oligonucleotide
  Sense strand starting at position 677 of SEQ ID NO: 586242
ccaaguagauaucugauga

SEQ ID NO: 702975 - RNA, 19 nt, Artificial Sequence
  Description of Artificial Sequence: Synthetic oligonucleotide
  Antisense strand to SEQ ID NO: 702974
ucaucagauaucuacuugg

SEQ ID NO: 702976 - RNA, 19 nt, Artificial Sequence
  Description of Artificial Sequence: Synthetic oligonucleotide
  Sense strand starting at position 743 of SEQ ID NO: 586242
ugauacggucgcuauaaau

SEQ ID NO: 702977 - RNA, 19 nt, Artificial Sequence
  Description of Artificial Sequence: Synthetic oligonucleotide
  Antisense strand to SEQ ID NO: 702976
auuuauagcgaccguauca

SEQ ID NO: 702978 - RNA, 19 nt, Artificial Sequence
  Description of Artificial Sequence: Synthetic oligonucleotide
  Sense strand starting at position 851 of SEQ ID NO: 586242
ccacucuuacuuggagaaa

SEQ ID NO: 702979 - RNA, 19 nt, Artificial Sequence
  Description of Artificial Sequence: Synthetic oligonucleotide
  Antisense strand to SEQ ID NO: 702978
uuucuccaaguaagagugg

SEQ ID NO: 702980 - RNA, 19 nt, Artificial Sequence
  Description of Artificial Sequence: Synthetic oligonucleotide
  Sense strand starting at position 871 of SEQ ID NO: 586242
guaugagaaugccuugauu

SEQ ID NO: 702981 - RNA, 19 nt, Artificial Sequence
  Description of Artificial Sequence: Synthetic oligonucleotide
  Antisense strand to SEQ ID NO: 702980
aaucaaggcauucucauac

SEQ ID NO: 702982 - RNA, 19 nt, Artificial Sequence
  Description of Artificial Sequence: Synthetic oligonucleotide
  Sense strand starting at position 979 of SEQ ID NO: 586242
cuccgaguuugauuccaaa

SEQ ID NO: 702983 - RNA, 19 nt, Artificial Sequence
  Description of Artificial Sequence: Synthetic oligonucleotide
  Antisense strand to SEQ ID NO: 702982
uuuggaaucaaacucggag

SEQ ID NO: 702984 - RNA, 19 nt, Artificial Sequence
  Description of Artificial Sequence: Synthetic oligonucleotide
  Sense strand starting at position 1099 of SEQ ID NO: 586242
gcaggaagucuccaaccca

SEQ ID NO: 702985 - RNA, 19 nt, Artificial Sequence
  Description of Artificial Sequence: Synthetic oligonucleotide
  Antisense strand to SEQ ID NO: 702984
uggguuggagacuuccugc

SEQ ID NO: 702986 - RNA, 19 nt, Artificial Sequence
  Description of Artificial Sequence: Synthetic oligonucleotide
  Sense strand starting at position 1381 of SEQ ID NO: 586242
gaaggcaucugugagauuu

SEQ ID NO: 702987 - RNA, 19 nt, Artificial Sequence
  Description of Artificial Sequence: Synthetic oligonucleotide
  Antisense strand to SEQ ID NO: 702986
aaaucucacagaugccuuc

SEQ ID NO: 702988 - RNA, 19 nt, Artificial Sequence
  Description of Artificial Sequence: Synthetic oligonucleotide
  Sense strand starting at position 1513 of SEQ ID NO: 586242
ccuccuuaccagugugauc

SEQ ID NO: 702989 - RNA, 19 nt, Artificial Sequence
  Description of Artificial Sequence: Synthetic oligonucleotide
  Antisense strand to SEQ ID NO: 702988
gaucacacugguaaggagg

SEQ ID NO: 702990 - RNA, 19 nt, Artificial Sequence
  Description of Artificial Sequence: Synthetic oligonucleotide
  Sense strand starting at position 1518 of SEQ ID NO: 586242
uuaccagugugauccauga

SEQ ID NO: 702991 - RNA, 19 nt, Artificial Sequence
  Description of Artificial Sequence: Synthetic oligonucleotide
  Antisense strand to SEQ ID NO: 702990
ucauggaucacacugguaa

SEQ ID NO: 702992 - RNA, 19 nt, Artificial Sequence
  Description of Artificial Sequence: Synthetic oligonucleotide
  Sense strand starting at position 1994 of SEQ ID NO: 586242
ggaguaacgguuuggaauc

SEQ ID NO: 702993 - RNA, 19 nt, Artificial Sequence
  Description of Artificial Sequence: Synthetic oligonucleotide
  Antisense strand to SEQ ID NO: 702992
gauuccaaaccguuacucc

SEQ ID NO: 702994 - RNA, 19 nt, Artificial Sequence
  Description of Artificial Sequence: Synthetic oligonucleotide
  Sense strand starting at position 2201 of SEQ ID NO: 586242
cagagcuaacuugguauau

SEQ ID NO: 702995 - RNA, 19 nt, Artificial Sequence
  Description of Artificial Sequence: Synthetic oligonucleotide
  Antisense strand to SEQ ID NO: 702994
auauaccaaguuagcucug

SEQ ID NO: 702996 - RNA, 19 nt, Artificial Sequence
  Description of Artificial Sequence: Synthetic oligonucleotide
  Sense strand starting at position 2202 of SEQ ID NO: 586242
agagcuaacuugguauaug

SEQ ID NO: 702997 - RNA, 19 nt, Artificial Sequence
  Description of Artificial Sequence: Synthetic oligonucleotide
  Antisense strand to SEQ ID NO: 702996
cauauaccaaguuagcucu

SEQ ID NO: 702998 - RNA, 19 nt, Artificial Sequence
  Description of Artificial Sequence: Synthetic oligonucleotide
  Sense strand starting at position 2235 of SEQ ID NO: 586242
ucuuaagucucuuuacagu

SEQ ID NO: 702999 - RNA, 19 nt, Artificial Sequence
  Description of Artificial Sequence: Synthetic oligonucleotide
  Antisense strand to SEQ ID NO: 702998
acuguaaagagacuuaaga

SEQ ID NO: 703000 - RNA, 19 nt, Artificial Sequence
  Description of Artificial Sequence: Synthetic oligonucleotide
  Sense strand starting at position 2253 of SEQ ID NO: 586242
uugaaacacguuuauaaug

SEQ ID NO: 703001 - RNA, 19 nt, Artificial Sequence
  Description of Artificial Sequence: Synthetic oligonucleotide
  Antisense strand to SEQ ID NO: 703000
cauuauaaacguguuucaa

SEQ ID NO: 703002 - RNA, 19 nt, Artificial Sequence
  Description of Artificial Sequence: Synthetic oligonucleotide
  Sense strand starting at position 2300 of SEQ ID NO: 586242
gcgcuugugacgcuacgaa

SEQ ID NO: 703003 - RNA, 19 nt, Artificial Sequence
  Description of Artificial Sequence: Synthetic oligonucleotide
  Antisense strand to SEQ ID NO: 703002
uucguagcgucacaagcgc

SEQ ID NO: 703004 - RNA, 19 nt, Artificial Sequence
  Description of Artificial Sequence: Synthetic oligonucleotide
  Sense strand starting at position 2482 of SEQ ID NO: 586242
gccggaaggagagguuaaa

SEQ ID NO: 703005 - RNA, 19 nt, Artificial Sequence
  Description of Artificial Sequence: Synthetic oligonucleotide
  Antisense strand to SEQ ID NO: 703004
uuuaaccucuccuuccggc

SEQ ID NO: 703006 - RNA, 19 nt, Artificial Sequence
  Description of Artificial Sequence: Synthetic oligonucleotide
  Sense strand starting at position 2630 of SEQ ID NO: 586242
gggcgauuccuaggaccuu

SEQ ID NO: 703007 - RNA, 19 nt, Artificial Sequence
  Description of Artificial Sequence: Synthetic oligonucleotide
  Antisense strand to SEQ ID NO: 703006
aagguccuaggaaucgccc

SEQ ID NO: 703008 - RNA, 19 nt, Artificial Sequence
  Description of Artificial Sequence: Synthetic oligonucleotide
  Sense strand starting at position 2669 of SEQ ID NO: 586242
ggacuuggcucauuugugu

SEQ ID NO: 703009 - RNA, 19 nt, Artificial Sequence
  Description of Artificial Sequence: Synthetic oligonucleotide
  Antisense strand to SEQ ID NO: 703008
acacaaaugagccaagucc

SEQ ID NO: 703010 - RNA, 19 nt, Artificial Sequence
  Description of Artificial Sequence: Synthetic oligonucleotide
  Sense strand starting at position 2713 of SEQ ID NO: 586242
cuugaugcucuuggaugaa

SEQ ID NO: 703011 - RNA, 19 nt, Artificial Sequence
  Description of Artificial Sequence: Synthetic oligonucleotide
  Antisense strand to SEQ ID NO: 703010
uucauccaagagcaucaag

SEQ ID NO: 703012 - RNA, 19 nt, Artificial Sequence
  Description of Artificial Sequence: Synthetic oligonucleotide
  Sense strand starting at position 2716 of SEQ ID NO: 586242
gaugcucuuggaugaauag

SEQ ID NO: 703013 - RNA, 19 nt, Artificial Sequence
  Description of Artificial Sequence: Synthetic oligonucleotide
  Antisense strand to SEQ ID NO: 703012
cuauucauccaagagcauc

SEQ ID NO: 703014 - RNA, 19 nt, Artificial Sequence
  Description of Artificial Sequence: Synthetic oligonucleotide
  Sense strand starting at position 2777 of SEQ ID NO: 586242
ggauuuggguucuauucuu

SEQ ID NO: 703015 - RNA, 19 nt, Artificial Sequence
  Description of Artificial Sequence: Synthetic oligonucleotide
  Antisense strand to SEQ ID NO: 703014
aagaauagaacccaaaucc

SEQ ID NO: 703016 - RNA, 19 nt, Artificial Sequence
  Description of Artificial Sequence: Synthetic oligonucleotide
  Sense strand starting at position 2813 of SEQ ID NO: 586242
acaucauuaccuuggguua

SEQ ID NO: 703017 - RNA, 19 nt, Artificial Sequence
  Description of Artificial Sequence: Synthetic oligonucleotide
  Antisense strand to SEQ ID NO: 703016
uaacccaagguaaugaugu

SEQ ID NO: 703018 - RNA, 19 nt, Artificial Sequence
  Description of Artificial Sequence: Synthetic oligonucleotide
  Sense strand starting at position 2928 of SEQ ID NO: 586242
auguguagcgauguguuau

SEQ ID NO: 703019 - RNA, 19 nt, Artificial Sequence
  Description of Artificial Sequence: Synthetic oligonucleotide
  Antisense strand to SEQ ID NO: 703018
auaacacaucgcuacacau

SEQ ID NO: 703020 - RNA, 19 nt, Artificial Sequence
  Description of Artificial Sequence: Synthetic oligonucleotide
  Sense strand starting at position 2963 of SEQ ID NO: 586242
gguauuauuugugaaucau

SEQ ID NO: 703021 - RNA, 19 nt, Artificial Sequence
  Description of Artificial Sequence: Synthetic oligonucleotide
  Antisense strand to SEQ ID NO: 703020
augauucacaaauaauacc

SEQ ID NO: 703022 - RNA, 19 nt, Artificial Sequence
  Description of Artificial Sequence: Synthetic oligonucleotide
  Sense strand starting at position 2974 of SEQ ID NO: 586242
ugaaucaugcugugaugau

SEQ ID NO: 703023 - RNA, 19 nt, Artificial Sequence
  Description of Artificial Sequence: Synthetic oligonucleotide
  Antisense strand to SEQ ID NO: 703022
aucaucacagcaugauuca

SEQ ID NO: 703024 - RNA, 19 nt, Artificial Sequence
  Description of Artificial Sequence: Synthetic oligonucleotide
  Sense strand starting at position 2995 of SEQ ID NO: 586242
gugcgauuuaagugcacca

SEQ ID NO: 703025 - RNA, 19 nt, Artificial Sequence
  Description of Artificial Sequence: Synthetic oligonucleotide
  Antisense strand to SEQ ID NO: 703024
uggugcacuuaaaucgcac

SEQ ID NO: 703026 - RNA, 19 nt, Artificial Sequence
  Description of Artificial Sequence: Synthetic oligonucleotide
  Sense strand starting at position 3008 of SEQ ID NO: 586242
gcaccauguuauuugguga

SEQ ID NO: 703027 - RNA, 19 nt, Artificial Sequence
  Description of Artificial Sequence: Synthetic oligonucleotide
  Antisense strand to SEQ ID NO: 703026
ucaccaaauaacauggugc

SEQ ID NO: 703028 - RNA, 19 nt, Artificial Sequence
  Description of Artificial Sequence: Synthetic oligonucleotide
  Sense strand starting at position 3191 of SEQ ID NO: 586242
aguuucugggauuauuguu

SEQ ID NO: 703029 - RNA, 19 nt, Artificial Sequence
  Description of Artificial Sequence: Synthetic oligonucleotide
  Antisense strand to SEQ ID NO: 703028
aacaauaaucccagaaacu

SEQ ID NO: 703030 - RNA, 19 nt, Artificial Sequence
  Description of Artificial Sequence: Synthetic oligonucleotide
  Sense strand starting at position 3256 of SEQ ID NO: 586242
uucuaaauacaguguugau

SEQ ID NO: 703031 - RNA, 19 nt, Artificial Sequence
  Description of Artificial Sequence: Synthetic oligonucleotide
  Antisense strand to SEQ ID NO: 703030
aucaacacuguauuuagaa

SEQ ID NO: 703032 - RNA, 19 nt, Artificial Sequence
  Description of Artificial Sequence: Synthetic oligonucleotide
  Sense strand starting at position 3268 of SEQ ID NO: 586242
uguugauauagucaggcau

SEQ ID NO: 703033 - RNA, 19 nt, Artificial Sequence
  Description of Artificial Sequence: Synthetic oligonucleotide
  Antisense strand to SEQ ID NO: 703032
augccugacuauaucaaca

SEQ ID NO: 703034 - RNA, 19 nt, Artificial Sequence
  Description of Artificial Sequence: Synthetic oligonucleotide
  Sense strand starting at position 3588 of SEQ ID NO: 586242
auuauuaaugucugcugau

SEQ ID NO: 703035 - RNA, 19 nt, Artificial Sequence
  Description of Artificial Sequence: Synthetic oligonucleotide
  Antisense strand to SEQ ID NO: 703034
aucagcagacauuaauaau

SEQ ID NO: 703036 - RNA, 19 nt, Artificial Sequence
  Description of Artificial Sequence: Synthetic oligonucleotide
  Sense strand starting at position 3589 of SEQ ID NO: 586242
uuauuaaugucugcugaug

SEQ ID NO: 703037 - RNA, 19 nt, Artificial Sequence
  Description of Artificial Sequence: Synthetic oligonucleotide
  Antisense strand to SEQ ID NO: 703036
caucagcagacauuaauaa

SEQ ID NO: 703038 - RNA, 19 nt, Artificial Sequence
  Description of Artificial Sequence: Synthetic oligonucleotide
  Sense strand starting at position 3726 of SEQ ID NO: 586242
agauguacuuacuuuagau

SEQ ID NO: 703039 - RNA, 19 nt, Artificial Sequence
  Description of Artificial Sequence: Synthetic oligonucleotide
  Antisense strand to SEQ ID NO: 703038
aucuaaaguaaguacaucu

SEQ ID NO: 703040 - RNA, 19 nt, Artificial Sequence
  Description of Artificial Sequence: Synthetic oligonucleotide
  Sense strand starting at position 3809 of SEQ ID NO: 586242
gcaucuguggucuguauuu

SEQ ID NO: 703041 - RNA, 19 nt, Artificial Sequence
  Description of Artificial Sequence: Synthetic oligonucleotide
  Antisense strand to SEQ ID NO: 703040
aaauacagaccacagaugc

SEQ ID NO: 703042 - RNA, 19 nt, Artificial Sequence
  Description of Artificial Sequence: Synthetic oligonucleotide
  Sense strand starting at position 3839 of SEQ ID NO: 586242
ugugguugccuugaauuac

SEQ ID NO: 703043 - RNA, 19 nt, Artificial Sequence
  Description of Artificial Sequence: Synthetic oligonucleotide
  Antisense strand to SEQ ID NO: 703042
guaauucaaggcaaccaca

SEQ ID NO: 703044 - RNA, 19 nt, Artificial Sequence
  Description of Artificial Sequence: Synthetic oligonucleotide
  Sense strand starting at position 3849 of SEQ ID NO: 586242
uugaauuaccaaugcagua

SEQ ID NO: 703045 - RNA, 19 nt, Artificial Sequence
  Description of Artificial Sequence: Synthetic oligonucleotide
  Antisense strand to SEQ ID NO: 703044
uacugcauugguaauucaa

SEQ ID NO: 703046 - RNA, 19 nt, Artificial Sequence
  Description of Artificial Sequence: Synthetic oligonucleotide
  Sense strand starting at position 17 of SEQ ID NO: 586243
aguaucucccuguaaugaa

SEQ ID NO: 703047 - RNA, 19 nt, Artificial Sequence
  Description of Artificial Sequence: Synthetic oligonucleotide
  Antisense strand to SEQ ID NO: 703046
uucauuacagggagauacu

SEQ ID NO: 703048 - RNA, 19 nt, Artificial Sequence
  Description of Artificial Sequence: Synthetic oligonucleotide
  Sense strand starting at position 80 of SEQ ID NO: 586243
cugggaaauauguggaugu

SEQ ID NO: 703049 - RNA, 19 nt, Artificial Sequence
  Description of Artificial Sequence: Synthetic oligonucleotide
  Antisense strand to SEQ ID NO: 703048
acauccacauauuucccag

SEQ ID NO: 703050 - RNA, 19 nt, Artificial Sequence
  Description of Artificial Sequence: Synthetic oligonucleotide
  Sense strand starting at position 84 of SEQ ID NO: 586243
gaaauauguggauguaaau

SEQ ID NO: 703051 - RNA, 19 nt, Artificial Sequence
  Description of Artificial Sequence: Synthetic oligonucleotide
  Antisense strand to SEQ ID NO: 703050
auuuacauccacauauuuc

SEQ ID NO: 703052 - RNA, 19 nt, Artificial Sequence
  Description of Artificial Sequence: Synthetic oligonucleotide
  Sense strand starting at position 109 of SEQ ID NO: 586243
gccacagagaugcaaaguu

SEQ ID NO: 703053 - RNA, 19 nt, Artificial Sequence
  Description of Artificial Sequence: Synthetic oligonucleotide
  Antisense strand to SEQ ID NO: 703052
aacuuugcaucucuguggc

SEQ ID NO: 703054 - RNA, 19 nt, Artificial Sequence
  Description of Artificial Sequence: Synthetic oligonucleotide
  Sense strand starting at position 181 of SEQ ID NO: 586243
uuaacuuaccaauguaguu

SEQ ID NO: 703055 - RNA, 19 nt, Artificial Sequence
  Description of Artificial Sequence: Synthetic oligonucleotide
  Antisense strand to SEQ ID NO: 703054
aacuacauugguaaguuaa

SEQ ID NO: 703056 - RNA, 19 nt, Artificial Sequence
  Description of Artificial Sequence: Synthetic oligonucleotide
  Sense strand starting at position 250 of SEQ ID NO: 586243
augcaugacaguuaaggua

SEQ ID NO: 703057 - RNA, 19 nt, Artificial Sequence
  Description of Artificial Sequence: Synthetic oligonucleotide
  Antisense strand to SEQ ID NO: 703056
uaccuuaacugucaugcau

SEQ ID NO: 703058 - RNA, 19 nt, Artificial Sequence
  Description of Artificial Sequence: Synthetic oligonucleotide
  Sense strand starting at position 300 of SEQ ID NO: 586243
acaaauucuguuuggauuc

SEQ ID NO: 703059 - RNA, 19 nt, Artificial Sequence
  Description of Artificial Sequence: Synthetic oligonucleotide
  Antisense strand to SEQ ID NO: 703058
gaauccaaacagaauuugu

SEQ ID NO: 703060 - RNA, 19 nt, Artificial Sequence
  Description of Artificial Sequence: Synthetic oligonucleotide
  Sense strand starting at position 556 of SEQ ID NO: 586243
acaauccuuucgguuuaaa

SEQ ID NO: 703061 - RNA, 19 nt, Artificial Sequence
  Description of Artificial Sequence: Synthetic oligonucleotide
  Antisense strand to SEQ ID NO: 703060
uuuaaaccgaaaggauugu

SEQ ID NO: 703062 - RNA, 19 nt, Artificial Sequence
  Description of Artificial Sequence: Synthetic oligonucleotide
  Sense strand starting at position 606 of SEQ ID NO: 586243
gguaaagcacugugaaucu

SEQ ID NO: 703063 - RNA, 19 nt, Artificial Sequence
  Description of Artificial Sequence: Synthetic oligonucleotide
  Antisense strand to SEQ ID NO: 703062
agauucacagugcuuuacc

SEQ ID NO: 703064 - RNA, 19 nt, Artificial Sequence
  Description of Artificial Sequence: Synthetic oligonucleotide
  Sense strand starting at position 645 of SEQ ID NO: 586243
cuugguuucugcucagaaa

SEQ ID NO: 703065 - RNA, 19 nt, Artificial Sequence
  Description of Artificial Sequence: Synthetic oligonucleotide
  Antisense strand to SEQ ID NO: 703064
uuucugagcagaaaccaag

SEQ ID NO: 703066 - RNA, 19 nt, Artificial Sequence
  Description of Artificial Sequence: Synthetic oligonucleotide
  Sense strand starting at position 646 of SEQ ID NO: 586243
uugguuucugcucagaaac

SEQ ID NO: 703067 - RNA, 19 nt, Artificial Sequence
  Description of Artificial Sequence: Synthetic oligonucleotide
  Antisense strand to SEQ ID NO: 703066
guuucugagcagaaaccaa

SEQ ID NO: 703068 - RNA, 19 nt, Artificial Sequence
  Description of Artificial Sequence: Synthetic oligonucleotide
  Sense strand starting at position 671 of SEQ ID NO: 586243
ucuuuccaaucgguaauua

SEQ ID NO: 703069 - RNA, 19 nt, Artificial Sequence
  Description of Artificial Sequence: Synthetic oligonucleotide
  Antisense strand to SEQ ID NO: 703068
uaauuaccgauuggaaaga

SEQ ID NO: 703070 - RNA, 19 nt, Artificial Sequence
  Description of Artificial Sequence: Synthetic oligonucleotide
  Sense strand starting at position 672 of SEQ ID NO: 586243
cuuuccaaucgguaauuaa

SEQ ID NO: 703071 - RNA, 19 nt, Artificial Sequence
  Description of Artificial Sequence: Synthetic oligonucleotide
  Antisense strand to SEQ ID NO: 703070
uuaauuaccgauuggaaag

SEQ ID NO: 703072 - RNA, 19 nt, Artificial Sequence
  Description of Artificial Sequence: Synthetic oligonucleotide
  Sense strand starting at position 675 of SEQ ID NO: 586243
uccaaucgguaauuaaaua

SEQ ID NO: 703073 - RNA, 19 nt, Artificial Sequence
  Description of Artificial Sequence: Synthetic oligonucleotide
  Antisense strand to SEQ ID NO: 703072
uauuuaauuaccgauugga

SEQ ID NO: 703074 - RNA, 19 nt, Artificial Sequence
  Description of Artificial Sequence: Synthetic oligonucleotide
  Sense strand starting at position 1118 of SEQ ID NO: 586243
augcgcuuugucucgaaau

SEQ ID NO: 703075 - RNA, 19 nt, Artificial Sequence
  Description of Artificial Sequence: Synthetic oligonucleotide
  Antisense strand to SEQ ID NO: 703074
auuucgagacaaagcgcau

SEQ ID NO: 703076 - RNA, 19 nt, Artificial Sequence
  Description of Artificial Sequence: Synthetic oligonucleotide
  Sense strand starting at position 2004 of SEQ ID NO: 586243
cgagucaauccgccgaguu

SEQ ID NO: 703077 - RNA, 19 nt, Artificial Sequence
  Description of Artificial Sequence: Synthetic oligonucleotide
  Antisense strand to SEQ ID NO: 703076
aacucggcggauugacucg

SEQ ID NO: 703078 - RNA, 19 nt, Artificial Sequence
  Description of Artificial Sequence: Synthetic oligonucleotide
  Sense strand starting at position 2549 of SEQ ID NO: 586243
ggacgaguccgguucgugu

SEQ ID NO: 703079 - RNA, 19 nt, Artificial Sequence
  Description of Artificial Sequence: Synthetic oligonucleotide
  Antisense strand to SEQ ID NO: 703078
acacgaaccggacucgucc

SEQ ID NO: 703080 - RNA, 19 nt, Artificial Sequence
  Description of Artificial Sequence: Synthetic oligonucleotide
  Sense strand starting at position 2639 of SEQ ID NO: 586243
agguaacggguuugaaauc

SEQ ID NO: 703081 - RNA, 19 nt, Artificial Sequence
  Description of Artificial Sequence: Synthetic oligonucleotide
  Antisense strand to SEQ ID NO: 703080
gauuucaaacccguuaccu

SEQ ID NO: 703082 - RNA, 19 nt, Artificial Sequence
  Description of Artificial Sequence: Synthetic oligonucleotide
  Sense strand starting at position 2648 of SEQ ID NO: 586243
guuugaaaucaaugaguua

SEQ ID NO: 703083 - RNA, 19 nt, Artificial Sequence
  Description of Artificial Sequence: Synthetic oligonucleotide
  Antisense strand to SEQ ID NO: 703082
uaacucauugauuucaaac

SEQ ID NO: 703084 - RNA, 19 nt, Artificial Sequence
  Description of Artificial Sequence: Synthetic oligonucleotide
  Sense strand starting at position 2651 of SEQ ID NO: 586243
ugaaaucaaugaguuauug

SEQ ID NO: 703085 - RNA, 19 nt, Artificial Sequence
  Description of Artificial Sequence: Synthetic oligonucleotide
  Antisense strand to SEQ ID NO: 703084
caauaacucauugauuuca

SEQ ID NO: 703086 - RNA, 19 nt, Artificial Sequence
  Description of Artificial Sequence: Synthetic oligonucleotide
  Sense strand starting at position 2765 of SEQ ID NO: 586243
gggcuuaagguuuaugaac

SEQ ID NO: 703087 - RNA, 19 nt, Artificial Sequence
  Description of Artificial Sequence: Synthetic oligonucleotide
  Antisense strand to SEQ ID NO: 703086
guucauaaaccuuaagccc

SEQ ID NO: 703088 - RNA, 19 nt, Artificial Sequence
  Description of Artificial Sequence: Synthetic oligonucleotide
  Sense strand starting at position 2927 of SEQ ID NO: 586243
cgggaauucuuauucccuu

SEQ ID NO: 703089 - RNA, 19 nt, Artificial Sequence
  Description of Artificial Sequence: Synthetic oligonucleotide
  Antisense strand to SEQ ID NO: 703088
aagggaauaagaauucccg

SEQ ID NO: 703090 - RNA, 19 nt, Artificial Sequence
  Description of Artificial Sequence: Synthetic oligonucleotide
  Sense strand starting at position 2928 of SEQ ID NO: 586243
gggaauucuuauucccuuu

SEQ ID NO: 703091 - RNA, 19 nt, Artificial Sequence
  Description of Artificial Sequence: Synthetic oligonucleotide
  Antisense strand to SEQ ID NO: 703090
aaagggaauaagaauuccc

SEQ ID NO: 703092 - RNA, 19 nt, Artificial Sequence
  Description of Artificial Sequence: Synthetic oligonucleotide
  Sense strand starting at position 3152 of SEQ ID NO: 586243
aguagaagugguuaacuau

SEQ ID NO: 703093 - RNA, 19 nt, Artificial Sequence
  Description of Artificial Sequence: Synthetic oligonucleotide
  Antisense strand to SEQ ID NO: 703092
auaguuaaccacuucuacu

SEQ ID NO: 703094 - RNA, 19 nt, Artificial Sequence
  Description of Artificial Sequence: Synthetic oligonucleotide
  Sense strand starting at position 3198 of SEQ ID NO: 586243
aucguuucgagguggauuu

SEQ ID NO: 703095 - RNA, 19 nt, Artificial Sequence
  Description of Artificial Sequence: Synthetic oligonucleotide
  Antisense strand to SEQ ID NO: 703094
aaauccaccucgaaacgau

SEQ ID NO: 703096 - RNA, 19 nt, Artificial Sequence
  Description of Artificial Sequence: Synthetic oligonucleotide
  Sense strand starting at position 3229 of SEQ ID NO: 586243
gagcuuggaucuuuagagu

SEQ ID NO: 703097 - RNA, 19 nt, Artificial Sequence
  Description of Artificial Sequence: Synthetic oligonucleotide
  Antisense strand to SEQ ID NO: 703096
acucuaaagauccaagcuc

SEQ ID NO: 703098 - RNA, 19 nt, Artificial Sequence
  Description of Artificial Sequence: Synthetic oligonucleotide
  Sense strand starting at position 3293 of SEQ ID NO: 586243
ggcgccauugcguucggaa

SEQ ID NO: 703099 - RNA, 19 nt, Artificial Sequence
  Description of Artificial Sequence: Synthetic oligonucleotide
  Antisense strand to SEQ ID NO: 703098
uuccgaacgcaauggcgcc

SEQ ID NO: 703100 - RNA, 19 nt, Artificial Sequence
  Description of Artificial Sequence: Synthetic oligonucleotide
  Sense strand starting at position 3294 of SEQ ID NO: 586243
gcgccauugcguucggaag

SEQ ID NO: 703101 - RNA, 19 nt, Artificial Sequence
  Description of Artificial Sequence: Synthetic oligonucleotide
  Antisense strand to SEQ ID NO: 703100
cuuccgaacgcaauggcgc

SEQ ID NO: 703102 - RNA, 19 nt, Artificial Sequence
  Description of Artificial Sequence: Synthetic oligonucleotide
  Sense strand starting at position 3477 of SEQ ID NO: 586243
ugggucugcagucaguaaa

SEQ ID NO: 703103 - RNA, 19 nt, Artificial Sequence
  Description of Artificial Sequence: Synthetic oligonucleotide
  Antisense strand to SEQ ID NO: 703102
uuuacugacugcagaccca

SEQ ID NO: 703104 - RNA, 19 nt, Artificial Sequence
  Description of Artificial Sequence: Synthetic oligonucleotide
  Sense strand starting at position 3585 of SEQ ID NO: 586243
ggauauucgcgucagaauc

SEQ ID NO: 703105 - RNA, 19 nt, Artificial Sequence
  Description of Artificial Sequence: Synthetic oligonucleotide
  Antisense strand to SEQ ID NO: 703104
gauucugacgcgaauaucc

SEQ ID NO: 703106 - RNA, 19 nt, Artificial Sequence
  Description of Artificial Sequence: Synthetic oligonucleotide
  Sense strand starting at position 3595 of SEQ ID NO: 586243
gucagaauccuuuacuguu

SEQ ID NO: 703107 - RNA, 19 nt, Artificial Sequence
  Description of Artificial Sequence: Synthetic oligonucleotide
  Antisense strand to SEQ ID NO: 703106
aacaguaaaggauucugac

SEQ ID NO: 703108 - RNA, 19 nt, Artificial Sequence
  Description of Artificial Sequence: Synthetic oligonucleotide
  Sense strand starting at position 3603 of SEQ ID NO: 586243
ccuuuacuguucuuaagga

SEQ ID NO: 703109 - RNA, 19 nt, Artificial Sequence
  Description of Artificial Sequence: Synthetic oligonucleotide
  Antisense strand to SEQ ID NO: 703108
uccuuaagaacaguaaagg

SEQ ID NO: 703110 - RNA, 19 nt, Artificial Sequence
  Description of Artificial Sequence: Synthetic oligonucleotide
  Sense strand starting at position 3617 of SEQ ID NO: 586243
aaggauuccguuuaaguug

SEQ ID NO: 703111 - RNA, 19 nt, Artificial Sequence
  Description of Artificial Sequence: Synthetic oligonucleotide
  Antisense strand to SEQ ID NO: 703110
caacuuaaacggaauccuu

SEQ ID NO: 703112 - RNA, 19 nt, Artificial Sequence
  Description of Artificial Sequence: Synthetic oligonucleotide
  Sense strand starting at position 3626 of SEQ ID NO: 586243
guuuaaguuguagagcuga

SEQ ID NO: 703113 - RNA, 19 nt, Artificial Sequence
  Description of Artificial Sequence: Synthetic oligonucleotide
  Antisense strand to SEQ ID NO: 703112
ucagcucuacaacuuaaac

SEQ ID NO: 703114 - RNA, 19 nt, Artificial Sequence
  Description of Artificial Sequence: Synthetic oligonucleotide
  Sense strand starting at position 3631 of SEQ ID NO: 586243
aguuguagagcugacucau

SEQ ID NO: 703115 - RNA, 19 nt, Artificial Sequence
  Description of Artificial Sequence: Synthetic oligonucleotide
  Antisense strand to SEQ ID NO: 703114
augagucagcucuacaacu

SEQ ID NO: 703116 - RNA, 19 nt, Artificial Sequence
  Description of Artificial Sequence: Synthetic oligonucleotide
  Sense strand starting at position 3652 of SEQ ID NO: 586243
uaaguaauguuguuacuga

SEQ ID NO: 703117 - RNA, 19 nt, Artificial Sequence
  Description of Artificial Sequence: Synthetic oligonucleotide
  Antisense strand to SEQ ID NO: 703116
ucaguaacaacauuacuua

SEQ ID NO: 703118 - RNA, 19 nt, Artificial Sequence
  Description of Artificial Sequence: Synthetic oligonucleotide
  Sense strand starting at position 3672 of SEQ ID NO: 586243
aaguuuaacccuuacggga

SEQ ID NO: 703119 - RNA, 19 nt, Artificial Sequence
  Description of Artificial Sequence: Synthetic oligonucleotide
  Antisense strand to SEQ ID NO: 703118
ucccguaaggguuaaacuu

SEQ ID NO: 703120 - RNA, 19 nt, Artificial Sequence
  Description of Artificial Sequence: Synthetic oligonucleotide
  Sense strand starting at position 3873 of SEQ ID NO: 586243
uugcaaucuugguugaaca

SEQ ID NO: 703121 - RNA, 19 nt, Artificial Sequence
  Description of Artificial Sequence: Synthetic oligonucleotide
  Antisense strand to SEQ ID NO: 703120
uguucaaccaagauugcaa

SEQ ID NO: 703122 - RNA, 19 nt, Artificial Sequence
  Description of Artificial Sequence: Synthetic oligonucleotide
  Sense strand starting at position 3874 of SEQ ID NO: 586243
ugcaaucuugguugaacau

SEQ ID NO: 703123 - RNA, 19 nt, Artificial Sequence
  Description of Artificial Sequence: Synthetic oligonucleotide
  Antisense strand to SEQ ID NO: 703122
auguucaaccaagauugca

SEQ ID NO: 703124 - RNA, 19 nt, Artificial Sequence
  Description of Artificial Sequence: Synthetic oligonucleotide
  Sense strand starting at position 3875 of SEQ ID NO: 586243
gcaaucuugguugaacauu

SEQ ID NO: 703125 - RNA, 19 nt, Artificial Sequence
  Description of Artificial Sequence: Synthetic oligonucleotide
  Antisense strand to SEQ ID NO: 703124
aauguucaaccaagauugc

SEQ ID NO: 703126 - RNA, 19 nt, Artificial Sequence
  Description of Artificial Sequence: Synthetic oligonucleotide
  Sense strand starting at position 35 of SEQ ID NO: 586244
gugaauauuccaggguuua

SEQ ID NO: 703127 - RNA, 19 nt, Artificial Sequence
  Description of Artificial Sequence: Synthetic oligonucleotide
  Antisense strand to SEQ ID NO: 703126
uaaacccuggaauauucac

SEQ ID NO: 703128 - RNA, 19 nt, Artificial Sequence
  Description of Artificial Sequence: Synthetic oligonucleotide
  Sense strand starting at position 36 of SEQ ID NO: 586244
ugaauauuccaggguuuaa

SEQ ID NO: 703129 - RNA, 19 nt, Artificial Sequence
  Description of Artificial Sequence: Synthetic oligonucleotide
  Antisense strand to SEQ ID NO: 703128
uuaaacccuggaauauuca

SEQ ID NO: 703130 - RNA, 19 nt, Artificial Sequence
  Description of Artificial Sequence: Synthetic oligonucleotide
  Sense strand starting at position 66 of SEQ ID NO: 586244
acaugacauggcugaauaa

SEQ ID NO: 703131 - RNA, 19 nt, Artificial Sequence
  Description of Artificial Sequence: Synthetic oligonucleotide
  Antisense strand to SEQ ID NO: 703130
uuauucagccaugucaugu

SEQ ID NO: 703132 - RNA, 19 nt, Artificial Sequence
  Description of Artificial Sequence: Synthetic oligonucleotide
  Sense strand starting at position 116 of SEQ ID NO: 586244
cuggcucauauuugcgauu

SEQ ID NO: 703133 - RNA, 19 nt, Artificial Sequence
  Description of Artificial Sequence: Synthetic oligonucleotide
  Antisense strand to SEQ ID NO: 703132
aaucgcaaauaugagccag

SEQ ID NO: 703134 - RNA, 19 nt, Artificial Sequence
  Description of Artificial Sequence: Synthetic oligonucleotide
  Sense strand starting at position 125 of SEQ ID NO: 586244
auuugcgauuucgaucauu

SEQ ID NO: 703135 - RNA, 19 nt, Artificial Sequence
  Description of Artificial Sequence: Synthetic oligonucleotide
  Antisense strand to SEQ ID NO: 703134
aaugaucgaaaucgcaaau

SEQ ID NO: 703136 - RNA, 19 nt, Artificial Sequence
  Description of Artificial Sequence: Synthetic oligonucleotide
  Sense strand starting at position 277 of SEQ ID NO: 586244
gguaccuuguucuuuaaau

SEQ ID NO: 703137 - RNA, 19 nt, Artificial Sequence
  Description of Artificial Sequence: Synthetic oligonucleotide
  Antisense strand to SEQ ID NO: 703136
auuuaaagaacaagguacc

SEQ ID NO: 703138 - RNA, 19 nt, Artificial Sequence
  Description of Artificial Sequence: Synthetic oligonucleotide
  Sense strand starting at position 287 of SEQ ID NO: 586244
ucuuuaaauugggcuuuaa

SEQ ID NO: 703139 - RNA, 19 nt, Artificial Sequence
  Description of Artificial Sequence: Synthetic oligonucleotide
  Antisense strand to SEQ ID NO: 703138
uuaaagcccaauuuaaaga

SEQ ID NO: 703140 - RNA, 19 nt, Artificial Sequence
  Description of Artificial Sequence: Synthetic oligonucleotide
  Sense strand starting at position 465 of SEQ ID NO: 586244
agauuagccuucuuugaac

SEQ ID NO: 703141 - RNA, 19 nt, Artificial Sequence
  Description of Artificial Sequence: Synthetic oligonucleotide
  Antisense strand to SEQ ID NO: 703140
guucaaagaaggcuaaucu

SEQ ID NO: 703142 - RNA, 19 nt, Artificial Sequence
  Description of Artificial Sequence: Synthetic oligonucleotide
  Sense strand starting at position 508 of SEQ ID NO: 586244
ccaguaucucccuguaaug

SEQ ID NO: 703143 - RNA, 19 nt, Artificial Sequence
  Description of Artificial Sequence: Synthetic oligonucleotide
  Antisense strand to SEQ ID NO: 703142
cauuacagggagauacugg

SEQ ID NO: 703144 - RNA, 19 nt, Artificial Sequence
  Description of Artificial Sequence: Synthetic oligonucleotide
  Sense strand starting at position 510 of SEQ ID NO: 586244
aguaucucccuguaaugaa

SEQ ID NO: 703145 - RNA, 19 nt, Artificial Sequence
  Description of Artificial Sequence: Synthetic oligonucleotide
  Antisense strand to SEQ ID NO: 703144
uucauuacagggagauacu

SEQ ID NO: 703146 - RNA, 19 nt, Artificial Sequence
  Description of Artificial Sequence: Synthetic oligonucleotide
  Sense strand starting at position 573 of SEQ ID NO: 586244
cugggaaauauguggaugu

SEQ ID NO: 703147 - RNA, 19 nt, Artificial Sequence
  Description of Artificial Sequence: Synthetic oligonucleotide
  Antisense strand to SEQ ID NO: 703146
acauccacauauuucccag

SEQ ID NO: 703148 - RNA, 19 nt, Artificial Sequence
  Description of Artificial Sequence: Synthetic oligonucleotide
  Sense strand starting at position 577 of SEQ ID NO: 586244
gaaauauguggauguaaau

SEQ ID NO: 703149 - RNA, 19 nt, Artificial Sequence
  Description of Artificial Sequence: Synthetic oligonucleotide
  Antisense strand to SEQ ID NO: 703148
auuuacauccacauauuuc

SEQ ID NO: 703150 - RNA, 19 nt, Artificial Sequence
  Description of Artificial Sequence: Synthetic oligonucleotide
  Sense strand starting at position 602 of SEQ ID NO: 586244
gccacagagaugcaaaguu

SEQ ID NO: 703151 - RNA, 19 nt, Artificial Sequence
  Description of Artificial Sequence: Synthetic oligonucleotide
  Antisense strand to SEQ ID NO: 703150
aacuuugcaucucuguggc

SEQ ID NO: 703152 - RNA, 19 nt, Artificial Sequence
  Description of Artificial Sequence: Synthetic oligonucleotide
  Sense strand starting at position 674 of SEQ ID NO: 586244
uuaacuuaccaauguaguu

SEQ ID NO: 703153 - RNA, 19 nt, Artificial Sequence
  Description of Artificial Sequence: Synthetic oligonucleotide
  Antisense strand to SEQ ID NO: 703152
aacuacauugguaaguuaa

SEQ ID NO: 703154 - RNA, 19 nt, Artificial Sequence
  Description of Artificial Sequence: Synthetic oligonucleotide
  Sense strand starting at position 743 of SEQ ID NO: 586244
augcaugacaguuaaggua

SEQ ID NO: 703155 - RNA, 19 nt, Artificial Sequence
  Description of Artificial Sequence: Synthetic oligonucleotide
  Antisense strand to SEQ ID NO: 703154
uaccuuaacugucaugcau

SEQ ID NO: 703156 - RNA, 19 nt, Artificial Sequence
  Description of Artificial Sequence: Synthetic oligonucleotide
  Sense strand starting at position 793 of SEQ ID NO: 586244
acaaauucuguuuggauuc

SEQ ID NO: 703157 - RNA, 19 nt, Artificial Sequence
  Description of Artificial Sequence: Synthetic oligonucleotide
  Antisense strand to SEQ ID NO: 703156
gaauccaaacagaauuugu

SEQ ID NO: 703158 - RNA, 19 nt, Artificial Sequence
  Description of Artificial Sequence: Synthetic oligonucleotide
  Sense strand starting at position 1049 of SEQ ID NO: 586244
acaauccuuucgguuuaaa

SEQ ID NO: 703159 - RNA, 19 nt, Artificial Sequence
  Description of Artificial Sequence: Synthetic oligonucleotide
  Antisense strand to SEQ ID NO: 703158
uuuaaaccgaaaggauugu

SEQ ID NO: 703160 - RNA, 19 nt, Artificial Sequence
  Description of Artificial Sequence: Synthetic oligonucleotide
  Sense strand starting at position 1097 of SEQ ID NO: 586244
acgguaaagcacugugaau

SEQ ID NO: 703161 - RNA, 19 nt, Artificial Sequence
  Description of Artificial Sequence: Synthetic oligonucleotide
  Antisense strand to SEQ ID NO: 703160
auucacagugcuuuaccgu

SEQ ID NO: 703162 - RNA, 19 nt, Artificial Sequence
  Description of Artificial Sequence: Synthetic oligonucleotide
  Sense strand starting at position 1099 of SEQ ID NO: 586244
gguaaagcacugugaaucu

SEQ ID NO: 703163 - RNA, 19 nt, Artificial Sequence
  Description of Artificial Sequence: Synthetic oligonucleotide
  Antisense strand to SEQ ID NO: 703162
agauucacagugcuuuacc

SEQ ID NO: 703164 - RNA, 19 nt, Artificial Sequence
  Description of Artificial Sequence: Synthetic oligonucleotide
  Sense strand starting at position 1138 of SEQ ID NO: 586244
cuugguuucugcucagaaa

SEQ ID NO: 703165 - RNA, 19 nt, Artificial Sequence
  Description of Artificial Sequence: Synthetic oligonucleotide
  Antisense strand to SEQ ID NO: 703164
uuucugagcagaaaccaag

SEQ ID NO: 703166 - RNA, 19 nt, Artificial Sequence
  Description of Artificial Sequence: Synthetic oligonucleotide
  Sense strand starting at position 1139 of SEQ ID NO: 586244
uugguuucugcucagaaac

SEQ ID NO: 703167 - RNA, 19 nt, Artificial Sequence
  Description of Artificial Sequence: Synthetic oligonucleotide
  Antisense strand to SEQ ID NO: 703166
guuucugagcagaaaccaa

SEQ ID NO: 703168 - RNA, 19 nt, Artificial Sequence
  Description of Artificial Sequence: Synthetic oligonucleotide
  Sense strand starting at position 1164 of SEQ ID NO: 586244
ucuuuccaaucgguaauua

SEQ ID NO: 703169 - RNA, 19 nt, Artificial Sequence
  Description of Artificial Sequence: Synthetic oligonucleotide
  Antisense strand to SEQ ID NO: 703168
uaauuaccgauuggaaaga

SEQ ID NO: 703170 - RNA, 19 nt, Artificial Sequence
  Description of Artificial Sequence: Synthetic oligonucleotide
  Sense strand starting at position 1165 of SEQ ID NO: 586244
cuuuccaaucgguaauuaa

SEQ ID NO: 703171 - RNA, 19 nt, Artificial Sequence
  Description of Artificial Sequence: Synthetic oligonucleotide
  Antisense strand to SEQ ID NO: 703170
uuaauuaccgauuggaaag

SEQ ID NO: 703172 - RNA, 19 nt, Artificial Sequence
  Description of Artificial Sequence: Synthetic oligonucleotide
  Sense strand starting at position 1168 of SEQ ID NO: 586244
uccaaucgguaauuaaaua

SEQ ID NO: 703173 - RNA, 19 nt, Artificial Sequence
  Description of Artificial Sequence: Synthetic oligonucleotide
  Antisense strand to SEQ ID NO: 703172
uauuuaauuaccgauugga

SEQ ID NO: 703174 - RNA, 19 nt, Artificial Sequence
  Description of Artificial Sequence: Synthetic oligonucleotide
  Sense strand starting at position 1611 of SEQ ID NO: 586244
augcgcuuugucucgaaau

SEQ ID NO: 703175 - RNA, 19 nt, Artificial Sequence
  Description of Artificial Sequence: Synthetic oligonucleotide
  Antisense strand to SEQ ID NO: 703174
auuucgagacaaagcgcau

SEQ ID NO: 703176 - RNA, 19 nt, Artificial Sequence
  Description of Artificial Sequence: Synthetic oligonucleotide
  Sense strand starting at position 2497 of SEQ ID NO: 586244
cgagucaauccgccgaguu

SEQ ID NO: 703177 - RNA, 19 nt, Artificial Sequence
  Description of Artificial Sequence: Synthetic oligonucleotide
  Antisense strand to SEQ ID NO: 703176
aacucggcggauugacucg

SEQ ID NO: 703178 - RNA, 19 nt, Artificial Sequence
  Description of Artificial Sequence: Synthetic oligonucleotide
  Sense strand starting at position 3042 of SEQ ID NO: 586244
ggacgaguccgguucgugu

SEQ ID NO: 703179 - RNA, 19 nt, Artificial Sequence
  Description of Artificial Sequence: Synthetic oligonucleotide
  Antisense strand to SEQ ID NO: 703178
acacgaaccggacucgucc

SEQ ID NO: 703180 - RNA, 19 nt, Artificial Sequence
  Description of Artificial Sequence: Synthetic oligonucleotide
  Sense strand starting at position 3132 of SEQ ID NO: 586244
agguaacggguuugaaauc

SEQ ID NO: 703181 - RNA, 19 nt, Artificial Sequence
  Description of Artificial Sequence: Synthetic oligonucleotide
  Antisense strand to SEQ ID NO: 703180
gauuucaaacccguuaccu

SEQ ID NO: 703182 - RNA, 19 nt, Artificial Sequence
  Description of Artificial Sequence: Synthetic oligonucleotide
  Sense strand starting at position 3141 of SEQ ID NO: 586244
guuugaaaucaaugaguua

SEQ ID NO: 703183 - RNA, 19 nt, Artificial Sequence
  Description of Artificial Sequence: Synthetic oligonucleotide
  Antisense strand to SEQ ID NO: 703182
uaacucauugauuucaaac

SEQ ID NO: 703184 - RNA, 19 nt, Artificial Sequence
  Description of Artificial Sequence: Synthetic oligonucleotide
  Sense strand starting at position 3144 of SEQ ID NO: 586244
ugaaaucaaugaguuauug

SEQ ID NO: 703185 - RNA, 19 nt, Artificial Sequence
  Description of Artificial Sequence: Synthetic oligonucleotide
  Antisense strand to SEQ ID NO: 703184
caauaacucauugauuuca

SEQ ID NO: 703186 - RNA, 19 nt, Artificial Sequence
  Description of Artificial Sequence: Synthetic oligonucleotide
  Sense strand starting at position 3258 of SEQ ID NO: 586244
gggcuuaagguuuaugaac

SEQ ID NO: 703187 - RNA, 19 nt, Artificial Sequence
  Description of Artificial Sequence: Synthetic oligonucleotide
  Antisense strand to SEQ ID NO: 703186
guucauaaaccuuaagccc

SEQ ID NO: 703188 - RNA, 19 nt, Artificial Sequence
  Description of Artificial Sequence: Synthetic oligonucleotide
  Sense strand starting at position 3420 of SEQ ID NO: 586244
cgggaauucuuauucccuu

SEQ ID NO: 703189 - RNA, 19 nt, Artificial Sequence
  Description of Artificial Sequence: Synthetic oligonucleotide
  Antisense strand to SEQ ID NO: 703188
aagggaauaagaauucccg

SEQ ID NO: 703190 - RNA, 19 nt, Artificial Sequence
  Description of Artificial Sequence: Synthetic oligonucleotide
  Sense strand starting at position 3421 of SEQ ID NO: 586244
gggaauucuuauucccuuu

SEQ ID NO: 703191 - RNA, 19 nt, Artificial Sequence
  Description of Artificial Sequence: Synthetic oligonucleotide
  Antisense strand to SEQ ID NO: 703190
aaagggaauaagaauuccc

SEQ ID NO: 703192 - RNA, 19 nt, Artificial Sequence
  Description of Artificial Sequence: Synthetic oligonucleotide
  Sense strand starting at position 3625 of SEQ ID NO: 586244
gugugcuuucucuaucaag

SEQ ID NO: 703193 - RNA, 19 nt, Artificial Sequence
  Description of Artificial Sequence: Synthetic oligonucleotide
  Antisense strand to SEQ ID NO: 703192
cuugauagagaaagcacac

SEQ ID NO: 703194 - RNA, 19 nt, Artificial Sequence
  Description of Artificial Sequence: Synthetic oligonucleotide
  Sense strand starting at position 3645 of SEQ ID NO: 586244
aguagaagugguuaacuau

SEQ ID NO: 703195 - RNA, 19 nt, Artificial Sequence
  Description of Artificial Sequence: Synthetic oligonucleotide
  Antisense strand to SEQ ID NO: 703194
auaguuaaccacuucuacu

SEQ ID NO: 703196 - RNA, 19 nt, Artificial Sequence
  Description of Artificial Sequence: Synthetic oligonucleotide
  Sense strand starting at position 3691 of SEQ ID NO: 586244
aucguuucgagguggauuu

SEQ ID NO: 703197 - RNA, 19 nt, Artificial Sequence
  Description of Artificial Sequence: Synthetic oligonucleotide
  Antisense strand to SEQ ID NO: 703196
aaauccaccucgaaacgau

SEQ ID NO: 703198 - RNA, 19 nt, Artificial Sequence
  Description of Artificial Sequence: Synthetic oligonucleotide
  Sense strand starting at position 3722 of SEQ ID NO: 586244
gagcuuggaucuuuagagu

SEQ ID NO: 703199 - RNA, 19 nt, Artificial Sequence
  Description of Artificial Sequence: Synthetic oligonucleotide
  Antisense strand to SEQ ID NO: 703198
acucuaaagauccaagcuc

SEQ ID NO: 703200 - RNA, 19 nt, Artificial Sequence
  Description of Artificial Sequence: Synthetic oligonucleotide
  Sense strand starting at position 3786 of SEQ ID NO: 586244
ggcgccauugcguucggaa

SEQ ID NO: 703201 - RNA, 19 nt, Artificial Sequence
  Description of Artificial Sequence: Synthetic oligonucleotide
  Antisense strand to SEQ ID NO: 703200
uuccgaacgcaauggcgcc

SEQ ID NO: 703202 - RNA, 19 nt, Artificial Sequence
  Description of Artificial Sequence: Synthetic oligonucleotide
  Sense strand starting at position 3787 of SEQ ID NO: 586244
gcgccauugcguucggaag

SEQ ID NO: 703203 - RNA, 19 nt, Artificial Sequence
  Description of Artificial Sequence: Synthetic oligonucleotide
  Antisense strand to SEQ ID NO: 703202
cuuccgaacgcaauggcgc

SEQ ID NO: 703204 - RNA, 19 nt, Artificial Sequence
  Description of Artificial Sequence: Synthetic oligonucleotide
  Sense strand starting at position 3970 of SEQ ID NO: 586244
ugggucugcagucaguaaa

SEQ ID NO: 703205 - RNA, 19 nt, Artificial Sequence
  Description of Artificial Sequence: Synthetic oligonucleotide
  Antisense strand to SEQ ID NO: 703204
uuuacugacugcagaccca

SEQ ID NO: 703206 - RNA, 19 nt, Artificial Sequence
  Description of Artificial Sequence: Synthetic oligonucleotide
  Sense strand starting at position 249 of SEQ ID NO: 586245
gugauaacuggcugguaga

SEQ ID NO: 703207 - RNA, 19 nt, Artificial Sequence
  Description of Artificial Sequence: Synthetic oligonucleotide
  Antisense strand to SEQ ID NO: 703206
ucuaccagccaguuaucac

SEQ ID NO: 703208 - RNA, 19 nt, Artificial Sequence
  Description of Artificial Sequence: Synthetic oligonucleotide
  Sense strand starting at position 262 of SEQ ID NO: 586245
gguagagauucuuauuucu

SEQ ID NO: 703209 - RNA, 19 nt, Artificial Sequence
  Description of Artificial Sequence: Synthetic oligonucleotide
  Antisense strand to SEQ ID NO: 703208
agaaauaagaaucucuacc

SEQ ID NO: 703210 - RNA, 19 nt, Artificial Sequence
  Description of Artificial Sequence: Synthetic oligonucleotide
  Sense strand starting at position 442 of SEQ ID NO: 586245
uugaaagucugagcuagaa

SEQ ID NO: 703211 - RNA, 19 nt, Artificial Sequence
  Description of Artificial Sequence: Synthetic oligonucleotide
  Antisense strand to SEQ ID NO: 703210
uucuagcucagacuuucaa

SEQ ID NO: 703212 - RNA, 19 nt, Artificial Sequence
  Description of Artificial Sequence: Synthetic oligonucleotide
  Sense strand starting at position 446 of SEQ ID NO: 586245
aagucugagcuagaagagu

SEQ ID NO: 703213 - RNA, 19 nt, Artificial Sequence
  Description of Artificial Sequence: Synthetic oligonucleotide
  Antisense strand to SEQ ID NO: 703212
acucuucuagcucagacuu

SEQ ID NO: 703214 - RNA, 19 nt, Artificial Sequence
  Description of Artificial Sequence: Synthetic oligonucleotide
  Sense strand starting at position 455 of SEQ ID NO: 586245
cuagaagaguccuuggaau

SEQ ID NO: 703215 - RNA, 19 nt, Artificial Sequence
  Description of Artificial Sequence: Synthetic oligonucleotide
  Antisense strand to SEQ ID NO: 703214
auuccaaggacucuucuag

SEQ ID NO: 703216 - RNA, 19 nt, Artificial Sequence
  Description of Artificial Sequence: Synthetic oligonucleotide
  Sense strand starting at position 569 of SEQ ID NO: 586245
cuccuauuuccguagccau

SEQ ID NO: 703217 - RNA, 19 nt, Artificial Sequence
  Description of Artificial Sequence: Synthetic oligonucleotide
  Antisense strand to SEQ ID NO: 703216
auggcuacggaaauaggag

SEQ ID NO: 703218 - RNA, 19 nt, Artificial Sequence
  Description of Artificial Sequence: Synthetic oligonucleotide
  Sense strand starting at position 716 of SEQ ID NO: 586245
aaaguugacccagguuaaa

SEQ ID NO: 703219 - RNA, 19 nt, Artificial Sequence
  Description of Artificial Sequence: Synthetic oligonucleotide
  Antisense strand to SEQ ID NO: 703218
uuuaaccugggucaacuuu

SEQ ID NO: 703220 - RNA, 19 nt, Artificial Sequence
  Description of Artificial Sequence: Synthetic oligonucleotide
  Sense strand starting at position 719 of SEQ ID NO: 586245
guugacccagguuaaauau

SEQ ID NO: 703221 - RNA, 19 nt, Artificial Sequence
  Description of Artificial Sequence: Synthetic oligonucleotide
  Antisense strand to SEQ ID NO: 703220
auauuuaaccugggucaac

SEQ ID NO: 703222 - RNA, 19 nt, Artificial Sequence
  Description of Artificial Sequence: Synthetic oligonucleotide
  Sense strand starting at position 725 of SEQ ID NO: 586245
ccagguuaaauauggugaa

SEQ ID NO: 703223 - RNA, 19 nt, Artificial Sequence
  Description of Artificial Sequence: Synthetic oligonucleotide
  Antisense strand to SEQ ID NO: 703222
uucaccauauuuaaccugg

SEQ ID NO: 703224 - RNA, 19 nt, Artificial Sequence
  Description of Artificial Sequence: Synthetic oligonucleotide
  Sense strand starting at position 771 of SEQ ID NO: 586245
ggaugccuacucugacgaa

SEQ ID NO: 703225 - RNA, 19 nt, Artificial Sequence
  Description of Artificial Sequence: Synthetic oligonucleotide
  Antisense strand to SEQ ID NO: 703224
uucgucagaguaggcaucc

SEQ ID NO: 703226 - RNA, 19 nt, Artificial Sequence
  Description of Artificial Sequence: Synthetic oligonucleotide
  Sense strand starting at position 775 of SEQ ID NO: 586245
gccuacucugacgaaacaa

SEQ ID NO: 703227 - RNA, 19 nt, Artificial Sequence
  Description of Artificial Sequence: Synthetic oligonucleotide
  Antisense strand to SEQ ID NO: 703226
uuguuucgucagaguaggc

SEQ ID NO: 703228 - RNA, 19 nt, Artificial Sequence
  Description of Artificial Sequence: Synthetic oligonucleotide
  Sense strand starting at position 955 of SEQ ID NO: 586245
uuuaaugaauccuuugguu

SEQ ID NO: 703229 - RNA, 19 nt, Artificial Sequence
  Description of Artificial Sequence: Synthetic oligonucleotide
  Antisense strand to SEQ ID NO: 703228
aaccaaaggauucauuaaa

SEQ ID NO: 703230 - RNA, 19 nt, Artificial Sequence
  Description of Artificial Sequence: Synthetic oligonucleotide
  Sense strand starting at position 957 of SEQ ID NO: 586245
uaaugaauccuuugguuag

SEQ ID NO: 703231 - RNA, 19 nt, Artificial Sequence
  Description of Artificial Sequence: Synthetic oligonucleotide
  Antisense strand to SEQ ID NO: 703230
cuaaccaaaggauucauua

SEQ ID NO: 703232 - RNA, 19 nt, Artificial Sequence
  Description of Artificial Sequence: Synthetic oligonucleotide
  Sense strand starting at position 960 of SEQ ID NO: 586245
ugaauccuuugguuagguu

SEQ ID NO: 703233 - RNA, 19 nt, Artificial Sequence
  Description of Artificial Sequence: Synthetic oligonucleotide
  Antisense strand to SEQ ID NO: 703232
aaccuaaccaaaggauuca

SEQ ID NO: 703234 - RNA, 19 nt, Artificial Sequence
  Description of Artificial Sequence: Synthetic oligonucleotide
  Sense strand starting at position 961 of SEQ ID NO: 586245
gaauccuuugguuagguuu

SEQ ID NO: 703235 - RNA, 19 nt, Artificial Sequence
  Description of Artificial Sequence: Synthetic oligonucleotide
  Antisense strand to SEQ ID NO: 703234
aaaccuaaccaaaggauuc

SEQ ID NO: 703236 - RNA, 19 nt, Artificial Sequence
  Description of Artificial Sequence: Synthetic oligonucleotide
  Sense strand starting at position 967 of SEQ ID NO: 586245
uuugguuagguuuaagaua

SEQ ID NO: 703237 - RNA, 19 nt, Artificial Sequence
  Description of Artificial Sequence: Synthetic oligonucleotide
  Antisense strand to SEQ ID NO: 703236
uaucuuaaaccuaaccaaa

SEQ ID NO: 703238 - RNA, 19 nt, Artificial Sequence
  Description of Artificial Sequence: Synthetic oligonucleotide
  Sense strand starting at position 1076 of SEQ ID NO: 586245
augaaaguaucacaaagga

SEQ ID NO: 703239 - RNA, 19 nt, Artificial Sequence
  Description of Artificial Sequence: Synthetic oligonucleotide
  Antisense strand to SEQ ID NO: 703238
uccuuugugauacuuucau

SEQ ID NO: 703240 - RNA, 19 nt, Artificial Sequence
  Description of Artificial Sequence: Synthetic oligonucleotide
  Sense strand starting at position 1113 of SEQ ID NO: 586245
aacuaaugacguuauaggu

SEQ ID NO: 703241 - RNA, 19 nt, Artificial Sequence
  Description of Artificial Sequence: Synthetic oligonucleotide
  Antisense strand to SEQ ID NO: 703240
accuauaacgucauuaguu

SEQ ID NO: 703242 - RNA, 19 nt, Artificial Sequence
  Description of Artificial Sequence: Synthetic oligonucleotide
  Sense strand starting at position 1121 of SEQ ID NO: 586245
acguuauaggucuauauuc

SEQ ID NO: 703243 - RNA, 19 nt, Artificial Sequence
  Description of Artificial Sequence: Synthetic oligonucleotide
  Antisense strand to SEQ ID NO: 703242
gaauauagaccuauaacgu

SEQ ID NO: 703244 - RNA, 19 nt, Artificial Sequence
  Description of Artificial Sequence: Synthetic oligonucleotide
  Sense strand starting at position 1123 of SEQ ID NO: 586245
guuauaggucuauauuccu

SEQ ID NO: 703245 - RNA, 19 nt, Artificial Sequence
  Description of Artificial Sequence: Synthetic oligonucleotide
  Antisense strand to SEQ ID NO: 703244
aggaauauagaccuauaac

SEQ ID NO: 703246 - RNA, 19 nt, Artificial Sequence
  Description of Artificial Sequence: Synthetic oligonucleotide
  Sense strand starting at position 1197 of SEQ ID NO: 586245
gccuuuaaguaaccaagau

SEQ ID NO: 703247 - RNA, 19 nt, Artificial Sequence
  Description of Artificial Sequence: Synthetic oligonucleotide
  Antisense strand to SEQ ID NO: 703246
aucuugguuacuuaaaggc

SEQ ID NO: 703248 - RNA, 19 nt, Artificial Sequence
  Description of Artificial Sequence: Synthetic oligonucleotide
  Sense strand starting at position 1403 of SEQ ID NO: 586245
agagaacugagcugucaaa

SEQ ID NO: 703249 - RNA, 19 nt, Artificial Sequence
  Description of Artificial Sequence: Synthetic oligonucleotide
  Antisense strand to SEQ ID NO: 703248
uuugacagcucaguucucu

SEQ ID NO: 703250 - RNA, 19 nt, Artificial Sequence
  Description of Artificial Sequence: Synthetic oligonucleotide
  Sense strand starting at position 2162 of SEQ ID NO: 586245
gucuucuguguuggaagau

SEQ ID NO: 703251 - RNA, 19 nt, Artificial Sequence
  Description of Artificial Sequence: Synthetic oligonucleotide
  Antisense strand to SEQ ID NO: 703250
aucuuccaacacagaagac

SEQ ID NO: 703252 - RNA, 19 nt, Artificial Sequence
  Description of Artificial Sequence: Synthetic oligonucleotide
  Sense strand starting at position 2301 of SEQ ID NO: 586245
ugggaaagcuuagugauga

SEQ ID NO: 703253 - RNA, 19 nt, Artificial Sequence
  Description of Artificial Sequence: Synthetic oligonucleotide
  Antisense strand to SEQ ID NO: 703252
ucaucacuaagcuuuccca

SEQ ID NO: 703254 - RNA, 19 nt, Artificial Sequence
  Description of Artificial Sequence: Synthetic oligonucleotide
  Sense strand starting at position 2309 of SEQ ID NO: 586245
cuuagugaugauuaagugu

SEQ ID NO: 703255 - RNA, 19 nt, Artificial Sequence
  Description of Artificial Sequence: Synthetic oligonucleotide
  Antisense strand to SEQ ID NO: 703254
acacuuaaucaucacuaag

SEQ ID NO: 703256 - RNA, 19 nt, Artificial Sequence
  Description of Artificial Sequence: Synthetic oligonucleotide
  Sense strand starting at position 2315 of SEQ ID NO: 586245
gaugauuaagugugcuaca

SEQ ID NO: 703257 - RNA, 19 nt, Artificial Sequence
  Description of Artificial Sequence: Synthetic oligonucleotide
  Antisense strand to SEQ ID NO: 703256
uguagcacacuuaaucauc

SEQ ID NO: 703258 - RNA, 19 nt, Artificial Sequence
  Description of Artificial Sequence: Synthetic oligonucleotide
  Sense strand starting at position 2320 of SEQ ID NO: 586245
uuaagugugcuacagauga

SEQ ID NO: 703259 - RNA, 19 nt, Artificial Sequence
  Description of Artificial Sequence: Synthetic oligonucleotide
  Antisense strand to SEQ ID NO: 703258
ucaucuguagcacacuuaa

SEQ ID NO: 703260 - RNA, 19 nt, Artificial Sequence
  Description of Artificial Sequence: Synthetic oligonucleotide
  Sense strand starting at position 2322 of SEQ ID NO: 586245
aagugugcuacagaugaga

SEQ ID NO: 703261 - RNA, 19 nt, Artificial Sequence
  Description of Artificial Sequence: Synthetic oligonucleotide
  Antisense strand to SEQ ID NO: 703260
ucucaucuguagcacacuu

SEQ ID NO: 703262 - RNA, 19 nt, Artificial Sequence
  Description of Artificial Sequence: Synthetic oligonucleotide
  Sense strand starting at position 2324 of SEQ ID NO: 586245
gugugcuacagaugagacu

SEQ ID NO: 703263 - RNA, 19 nt, Artificial Sequence
  Description of Artificial Sequence: Synthetic oligonucleotide
  Antisense strand to SEQ ID NO: 703262
agucucaucuguagcacac

SEQ ID NO: 703264 - RNA, 19 nt, Artificial Sequence
  Description of Artificial Sequence: Synthetic oligonucleotide
  Sense strand starting at position 3133 of SEQ ID NO: 586245
gugugagaaacuugacaag

SEQ ID NO: 703265 - RNA, 19 nt, Artificial Sequence
  Description of Artificial Sequence: Synthetic oligonucleotide
  Antisense strand to SEQ ID NO: 703264
cuugucaaguuucucacac

SEQ ID NO: 703266 - RNA, 19 nt, Artificial Sequence
  Description of Artificial Sequence: Synthetic oligonucleotide
  Sense strand starting at position 3246 of SEQ ID NO: 586245
acuugugcuaccggauaac

SEQ ID NO: 703267 - RNA, 19 nt, Artificial Sequence
  Description of Artificial Sequence: Synthetic oligonucleotide
  Antisense strand to SEQ ID NO: 703266
guuauccgguagcacaagu

SEQ ID NO: 703268 - RNA, 19 nt, Artificial Sequence
  Description of Artificial Sequence: Synthetic oligonucleotide
  Sense strand starting at position 3766 of SEQ ID NO: 586245
auuauuaugcuuggcuaca

SEQ ID NO: 703269 - RNA, 19 nt, Artificial Sequence
  Description of Artificial Sequence: Synthetic oligonucleotide
  Antisense strand to SEQ ID NO: 703268
uguagccaagcauaauaau

SEQ ID NO: 703270 - RNA, 19 nt, Artificial Sequence
  Description of Artificial Sequence: Synthetic oligonucleotide
  Sense strand starting at position 3767 of SEQ ID NO: 586245
uuauuaugcuuggcuacaa

SEQ ID NO: 703271 - RNA, 19 nt, Artificial Sequence
  Description of Artificial Sequence: Synthetic oligonucleotide
  Antisense strand to SEQ ID NO: 703270
uuguagccaagcauaauaa

SEQ ID NO: 703272 - RNA, 19 nt, Artificial Sequence
  Description of Artificial Sequence: Synthetic oligonucleotide
  Sense strand starting at position 3871 of SEQ ID NO: 586245
guugcaguggucuuuaugu

SEQ ID NO: 703273 - RNA, 19 nt, Artificial Sequence
  Description of Artificial Sequence: Synthetic oligonucleotide
  Antisense strand to SEQ ID NO: 703272
acauaaagaccacugcaac

SEQ ID NO: 703274 - RNA, 19 nt, Artificial Sequence
  Description of Artificial Sequence: Synthetic oligonucleotide
  Sense strand starting at position 3873 of SEQ ID NO: 586245
ugcaguggucuuuauguaa

SEQ ID NO: 703275 - RNA, 19 nt, Artificial Sequence
  Description of Artificial Sequence: Synthetic oligonucleotide
  Antisense strand to SEQ ID NO: 703274
uuacauaaagaccacugca

SEQ ID NO: 703276 - RNA, 19 nt, Artificial Sequence
  Description of Artificial Sequence: Synthetic oligonucleotide
  Sense strand starting at position 3877 of SEQ ID NO: 586245
guggucuuuauguaagguu

SEQ ID NO: 703277 - RNA, 19 nt, Artificial Sequence
  Description of Artificial Sequence: Synthetic oligonucleotide
  Antisense strand to SEQ ID NO: 703276
aaccuuacauaaagaccac

SEQ ID NO: 703278 - RNA, 19 nt, Artificial Sequence
  Description of Artificial Sequence: Synthetic oligonucleotide
  Sense strand starting at position 3916 of SEQ ID NO: 586245
ugcaauaguuuaguuauca

SEQ ID NO: 703279 - RNA, 19 nt, Artificial Sequence
  Description of Artificial Sequence: Synthetic oligonucleotide
  Antisense strand to SEQ ID NO: 703278
ugauaacuaaacuauugca

SEQ ID NO: 703280 - RNA, 19 nt, Artificial Sequence
  Description of Artificial Sequence: Synthetic oligonucleotide
  Sense strand starting at position 3917 of SEQ ID NO: 586245
gcaauaguuuaguuaucag

SEQ ID NO: 703281 - RNA, 19 nt, Artificial Sequence
  Description of Artificial Sequence: Synthetic oligonucleotide
  Antisense strand to SEQ ID NO: 703280
cugauaacuaaacuauugc

SEQ ID NO: 703282 - RNA, 19 nt, Artificial Sequence
  Description of Artificial Sequence: Synthetic oligonucleotide
  Sense strand starting at position 3920 of SEQ ID NO: 586245
auaguuuaguuaucaggua

SEQ ID NO: 703283 - RNA, 19 nt, Artificial Sequence
  Description of Artificial Sequence: Synthetic oligonucleotide
  Antisense strand to SEQ ID NO: 703282
uaccugauaacuaaacuau

SEQ ID NO: 703284 - RNA, 19 nt, Artificial Sequence
  Description of Artificial Sequence: Synthetic oligonucleotide
  Sense strand starting at position 3927 of SEQ ID NO: 586245
aguuaucagguauacacau

SEQ ID NO: 703285 - RNA, 19 nt, Artificial Sequence
  Description of Artificial Sequence: Synthetic oligonucleotide
  Antisense strand to SEQ ID NO: 703284
auguguauaccugauaacu

SEQ ID NO: 703286 - RNA, 19 nt, Artificial Sequence
  Description of Artificial Sequence: Synthetic oligonucleotide
  Sense strand starting at position 4 of SEQ ID NO: 586246
ccauuaaugugguuaauac

SEQ ID NO: 703287 - RNA, 19 nt, Artificial Sequence
  Description of Artificial Sequence: Synthetic oligonucleotide
  Antisense strand to SEQ ID NO: 703286
guauuaaccacauuaaugg

SEQ ID NO: 703288 - RNA, 19 nt, Artificial Sequence
  Description of Artificial Sequence: Synthetic oligonucleotide
  Sense strand starting at position 259 of SEQ ID NO: 586246
aucauucuuucuguagaua

SEQ ID NO: 703289 - RNA, 19 nt, Artificial Sequence
  Description of Artificial Sequence: Synthetic oligonucleotide
  Antisense strand to SEQ ID NO: 703288
uaucuacagaaagaaugau

SEQ ID NO: 703290 - RNA, 19 nt, Artificial Sequence
  Description of Artificial Sequence: Synthetic oligonucleotide
  Sense strand starting at position 433 of SEQ ID NO: 586246
gacaucaugguauguccaa

SEQ ID NO: 703291 - RNA, 19 nt, Artificial Sequence
  Description of Artificial Sequence: Synthetic oligonucleotide
  Antisense strand to SEQ ID NO: 703290
uuggacauaccaugauguc

SEQ ID NO: 703292 - RNA, 19 nt, Artificial Sequence
  Description of Artificial Sequence: Synthetic oligonucleotide
  Sense strand starting at position 526 of SEQ ID NO: 586246
cuggaaugcaauggugaua

SEQ ID NO: 703293 - RNA, 19 nt, Artificial Sequence
  Description of Artificial Sequence: Synthetic oligonucleotide
  Antisense strand to SEQ ID NO: 703292
uaucaccauugcauuccag

SEQ ID NO: 703294 - RNA, 19 nt, Artificial Sequence
  Description of Artificial Sequence: Synthetic oligonucleotide
  Sense strand starting at position 529 of SEQ ID NO: 586246
gaaugcaauggugauaucu

SEQ ID NO: 703295 - RNA, 19 nt, Artificial Sequence
  Description of Artificial Sequence: Synthetic oligonucleotide
  Antisense strand to SEQ ID NO: 703294
agauaucaccauugcauuc

SEQ ID NO: 703296 - RNA, 19 nt, Artificial Sequence
  Description of Artificial Sequence: Synthetic oligonucleotide
  Sense strand starting at position 729 of SEQ ID NO: 586246
aguccauugcauggacaua

SEQ ID NO: 703297 - RNA, 19 nt, Artificial Sequence
  Description of Artificial Sequence: Synthetic oligonucleotide
  Antisense strand to SEQ ID NO: 703296
uauguccaugcaauggacu

SEQ ID NO: 703298 - RNA, 19 nt, Artificial Sequence
  Description of Artificial Sequence: Synthetic oligonucleotide
  Sense strand starting at position 940 of SEQ ID NO: 586246
gaucucuugccuuagagga

SEQ ID NO: 703299 - RNA, 19 nt, Artificial Sequence
  Description of Artificial Sequence: Synthetic oligonucleotide
  Antisense strand to SEQ ID NO: 703298
uccucuaaggcaagagauc

SEQ ID NO: 703300 - RNA, 19 nt, Artificial Sequence
  Description of Artificial Sequence: Synthetic oligonucleotide
  Sense strand starting at position 1109 of SEQ ID NO: 586246
gugagagggagcugugaau

SEQ ID NO: 703301 - RNA, 19 nt, Artificial Sequence
  Description of Artificial Sequence: Synthetic oligonucleotide
  Antisense strand to SEQ ID NO: 703300
auucacagcucccucucac

SEQ ID NO: 703302 - RNA, 19 nt, Artificial Sequence
  Description of Artificial Sequence: Synthetic oligonucleotide
  Sense strand starting at position 1115 of SEQ ID NO: 586246
gggagcugugaaugacuua

SEQ ID NO: 703303 - RNA, 19 nt, Artificial Sequence
  Description of Artificial Sequence: Synthetic oligonucleotide
  Antisense strand to SEQ ID NO: 703302
uaagucauucacagcuccc

SEQ ID NO: 703304 - RNA, 19 nt, Artificial Sequence
  Description of Artificial Sequence: Synthetic oligonucleotide
  Sense strand starting at position 1118 of SEQ ID NO: 586246
agcugugaaugacuuaaua

SEQ ID NO: 703305 - RNA, 19 nt, Artificial Sequence
  Description of Artificial Sequence: Synthetic oligonucleotide
  Antisense strand to SEQ ID NO: 703304
uauuaagucauucacagcu

SEQ ID NO: 703306 - RNA, 19 nt, Artificial Sequence
  Description of Artificial Sequence: Synthetic oligonucleotide
  Sense strand starting at position 1397 of SEQ ID NO: 586246
caaauuauacuggagcgau

SEQ ID NO: 703307 - RNA, 19 nt, Artificial Sequence
  Description of Artificial Sequence: Synthetic oligonucleotide
  Antisense strand to SEQ ID NO: 703306
aucgcuccaguauaauuug

SEQ ID NO: 703308 - RNA, 19 nt, Artificial Sequence
  Description of Artificial Sequence: Synthetic oligonucleotide
  Sense strand starting at position 1505 of SEQ ID NO: 586246
cccucauucccuggaauug

SEQ ID NO: 703309 - RNA, 19 nt, Artificial Sequence
  Description of Artificial Sequence: Synthetic oligonucleotide
  Antisense strand to SEQ ID NO: 703308
caauuccagggaaugaggg

SEQ ID NO: 703310 - RNA, 19 nt, Artificial Sequence
  Description of Artificial Sequence: Synthetic oligonucleotide
  Sense strand starting at position 2310 of SEQ ID NO: 586246
aguaacuuccguggaggaa

SEQ ID NO: 703311 - RNA, 19 nt, Artificial Sequence
  Description of Artificial Sequence: Synthetic oligonucleotide
  Antisense strand to SEQ ID NO: 703310
uuccuccacggaaguuacu

SEQ ID NO: 703312 - RNA, 19 nt, Artificial Sequence
  Description of Artificial Sequence: Synthetic oligonucleotide
  Sense strand starting at position 2311 of SEQ ID NO: 586246
guaacuuccguggaggaau

SEQ ID NO: 703313 - RNA, 19 nt, Artificial Sequence
  Description of Artificial Sequence: Synthetic oligonucleotide
  Antisense strand to SEQ ID NO: 703312
auuccuccacggaaguuac

SEQ ID NO: 703314 - RNA, 19 nt, Artificial Sequence
  Description of Artificial Sequence: Synthetic oligonucleotide
  Sense strand starting at position 2350 of SEQ ID NO: 586246
ggugaugaguuauccauag

SEQ ID NO: 703315 - RNA, 19 nt, Artificial Sequence
  Description of Artificial Sequence: Synthetic oligonucleotide
  Antisense strand to SEQ ID NO: 703314
cuauggauaacucaucacc

SEQ ID NO: 703316 - RNA, 19 nt, Artificial Sequence
  Description of Artificial Sequence: Synthetic oligonucleotide
  Sense strand starting at position 2394 of SEQ ID NO: 586246
ggauaaugccugugaugag

SEQ ID NO: 703317 - RNA, 19 nt, Artificial Sequence
  Description of Artificial Sequence: Synthetic oligonucleotide
  Antisense strand to SEQ ID NO: 703316
cucaucacaggcauuaucc

SEQ ID NO: 703318 - RNA, 19 nt, Artificial Sequence
  Description of Artificial Sequence: Synthetic oligonucleotide
  Sense strand starting at position 2639 of SEQ ID NO: 586246
gcuaacuuaugacuuagaa

SEQ ID NO: 703319 - RNA, 19 nt, Artificial Sequence
  Description of Artificial Sequence: Synthetic oligonucleotide
  Antisense strand to SEQ ID NO: 703318
uucuaagucauaaguuagc

SEQ ID NO: 703320 - RNA, 19 nt, Artificial Sequence
  Description of Artificial Sequence: Synthetic oligonucleotide
  Sense strand starting at position 2693 of SEQ ID NO: 586246
acacuuuagugucugaaug

SEQ ID NO: 703321 - RNA, 19 nt, Artificial Sequence
  Description of Artificial Sequence: Synthetic oligonucleotide
  Antisense strand to SEQ ID NO: 703320
cauucagacacuaaagugu

SEQ ID NO: 703322 - RNA, 19 nt, Artificial Sequence
  Description of Artificial Sequence: Synthetic oligonucleotide
  Sense strand starting at position 2735 of SEQ ID NO: 586246
acgagaagcauugguggaa

SEQ ID NO: 703323 - RNA, 19 nt, Artificial Sequence
  Description of Artificial Sequence: Synthetic oligonucleotide
  Antisense strand to SEQ ID NO: 703322
uuccaccaaugcuucucgu

SEQ ID NO: 703324 - RNA, 19 nt, Artificial Sequence
  Description of Artificial Sequence: Synthetic oligonucleotide
  Sense strand starting at position 2738 of SEQ ID NO: 586246
agaagcauugguggaagua

SEQ ID NO: 703325 - RNA, 19 nt, Artificial Sequence
  Description of Artificial Sequence: Synthetic oligonucleotide
  Antisense strand to SEQ ID NO: 703324
uacuuccaccaaugcuucu

SEQ ID NO: 703326 - RNA, 19 nt, Artificial Sequence
  Description of Artificial Sequence: Synthetic oligonucleotide
  Sense strand starting at position 2748 of SEQ ID NO: 586246
guggaaguaguuuaaugua

SEQ ID NO: 703327 - RNA, 19 nt, Artificial Sequence
  Description of Artificial Sequence: Synthetic oligonucleotide
  Antisense strand to SEQ ID NO: 703326
uacauuaaacuacuuccac

SEQ ID NO: 703328 - RNA, 19 nt, Artificial Sequence
  Description of Artificial Sequence: Synthetic oligonucleotide
  Sense strand starting at position 2799 of SEQ ID NO: 586246
uggucugguuaaucaaaug

SEQ ID NO: 703329 - RNA, 19 nt, Artificial Sequence
  Description of Artificial Sequence: Synthetic oligonucleotide
  Antisense strand to SEQ ID NO: 703328
cauuugauuaaccagacca

SEQ ID NO: 703330 - RNA, 19 nt, Artificial Sequence
  Description of Artificial Sequence: Synthetic oligonucleotide
  Sense strand starting at position 2817 of SEQ ID NO: 586246
gaccuagcuugagugaaga

SEQ ID NO: 703331 - RNA, 19 nt, Artificial Sequence
  Description of Artificial Sequence: Synthetic oligonucleotide
  Antisense strand to SEQ ID NO: 703330
ucuucacucaagcuagguc

SEQ ID NO: 703332 - RNA, 19 nt, Artificial Sequence
  Description of Artificial Sequence: Synthetic oligonucleotide
  Sense strand starting at position 2819 of SEQ ID NO: 586246
ccuagcuugagugaagaca

SEQ ID NO: 703333 - RNA, 19 nt, Artificial Sequence
  Description of Artificial Sequence: Synthetic oligonucleotide
  Antisense strand to SEQ ID NO: 703332
ugucuucacucaagcuagg

SEQ ID NO: 703334 - RNA, 19 nt, Artificial Sequence
  Description of Artificial Sequence: Synthetic oligonucleotide
  Sense strand starting at position 2892 of SEQ ID NO: 586246
cugucauuacugcacauua

SEQ ID NO: 703335 - RNA, 19 nt, Artificial Sequence
  Description of Artificial Sequence: Synthetic oligonucleotide
  Antisense strand to SEQ ID NO: 703334
uaaugugcaguaaugacag

SEQ ID NO: 703336 - RNA, 19 nt, Artificial Sequence
  Description of Artificial Sequence: Synthetic oligonucleotide
  Sense strand starting at position 3227 of SEQ ID NO: 586246
augugaucucagcaacaua

SEQ ID NO: 703337 - RNA, 19 nt, Artificial Sequence
  Description of Artificial Sequence: Synthetic oligonucleotide
  Antisense strand to SEQ ID NO: 703336
uauguugcugagaucacau

SEQ ID NO: 703338 - RNA, 19 nt, Artificial Sequence
  Description of Artificial Sequence: Synthetic oligonucleotide
  Sense strand starting at position 3426 of SEQ ID NO: 586246
ucgcauuaaugacuauaau

SEQ ID NO: 703339 - RNA, 19 nt, Artificial Sequence
  Description of Artificial Sequence: Synthetic oligonucleotide
  Antisense strand to SEQ ID NO: 703338
auuauagucauuaaugcga

SEQ ID NO: 703340 - RNA, 19 nt, Artificial Sequence
  Description of Artificial Sequence: Synthetic oligonucleotide
  Sense strand starting at position 3427 of SEQ ID NO: 586246
cgcauuaaugacuauaauu

SEQ ID NO: 703341 - RNA, 19 nt, Artificial Sequence
  Description of Artificial Sequence: Synthetic oligonucleotide
  Antisense strand to SEQ ID NO: 703340
aauuauagucauuaaugcg

SEQ ID NO: 703342 - RNA, 19 nt, Artificial Sequence
  Description of Artificial Sequence: Synthetic oligonucleotide
  Sense strand starting at position 3533 of SEQ ID NO: 586246
uuucuaaagaccuguggga

SEQ ID NO: 703343 - RNA, 19 nt, Artificial Sequence
  Description of Artificial Sequence: Synthetic oligonucleotide
  Antisense strand to SEQ ID NO: 703342
ucccacaggucuuuagaaa

SEQ ID NO: 703344 - RNA, 19 nt, Artificial Sequence
  Description of Artificial Sequence: Synthetic oligonucleotide
  Sense strand starting at position 3535 of SEQ ID NO: 586246
ucuaaagaccugugggaua

SEQ ID NO: 703345 - RNA, 19 nt, Artificial Sequence
  Description of Artificial Sequence: Synthetic oligonucleotide
  Antisense strand to SEQ ID NO: 703344
uaucccacaggucuuuaga

SEQ ID NO: 703346 - RNA, 19 nt, Artificial Sequence
  Description of Artificial Sequence: Synthetic oligonucleotide
  Sense strand starting at position 3612 of SEQ ID NO: 586246
gcuuaagagaggugacuuu

SEQ ID NO: 703347 - RNA, 19 nt, Artificial Sequence
  Description of Artificial Sequence: Synthetic oligonucleotide
  Antisense strand to SEQ ID NO: 703346
aaagucaccucucuuaagc

SEQ ID NO: 703348 - RNA, 19 nt, Artificial Sequence
  Description of Artificial Sequence: Synthetic oligonucleotide
  Sense strand starting at position 3686 of SEQ ID NO: 586246
gaauauccuuguguaagau

SEQ ID NO: 703349 - RNA, 19 nt, Artificial Sequence
  Description of Artificial Sequence: Synthetic oligonucleotide
  Antisense strand to SEQ ID NO: 703348
aucuuacacaaggauauuc

SEQ ID NO: 703350 - RNA, 19 nt, Artificial Sequence
  Description of Artificial Sequence: Synthetic oligonucleotide
  Sense strand starting at position 3760 of SEQ ID NO: 586246
uacuguuggucuccaggaa

SEQ ID NO: 703351 - RNA, 19 nt, Artificial Sequence
  Description of Artificial Sequence: Synthetic oligonucleotide
  Antisense strand to SEQ ID NO: 703350
uuccuggagaccaacagua

SEQ ID NO: 703352 - RNA, 19 nt, Artificial Sequence
  Description of Artificial Sequence: Synthetic oligonucleotide
  Sense strand starting at position 3761 of SEQ ID NO: 586246
acuguuggucuccaggaaa

SEQ ID NO: 703353 - RNA, 19 nt, Artificial Sequence
  Description of Artificial Sequence: Synthetic oligonucleotide
  Antisense strand to SEQ ID NO: 703352
uuuccuggagaccaacagu

SEQ ID NO: 703354 - RNA, 19 nt, Artificial Sequence
  Description of Artificial Sequence: Synthetic oligonucleotide
  Sense strand starting at position 3774 of SEQ ID NO: 586246
aggaaauccugaccaguuu

SEQ ID NO: 703355 - RNA, 19 nt, Artificial Sequence
  Description of Artificial Sequence: Synthetic oligonucleotide
  Antisense strand to SEQ ID NO: 703354
aaacuggucaggauuuccu

SEQ ID NO: 703356 - RNA, 19 nt, Artificial Sequence
  Description of Artificial Sequence: Synthetic oligonucleotide
  Sense strand starting at position 3855 of SEQ ID NO: 586246
aauaguguuguccacagac

SEQ ID NO: 703357 - RNA, 19 nt, Artificial Sequence
  Description of Artificial Sequence: Synthetic oligonucleotide
  Antisense strand to SEQ ID NO: 703356
gucuguggacaacacuauu

SEQ ID NO: 703358 - RNA, 19 nt, Artificial Sequence
  Description of Artificial Sequence: Synthetic oligonucleotide
  Sense strand starting at position 3857 of SEQ ID NO: 586246
uaguguuguccacagacag

SEQ ID NO: 703359 - RNA, 19 nt, Artificial Sequence
  Description of Artificial Sequence: Synthetic oligonucleotide
  Antisense strand to SEQ ID NO: 703358
cugucuguggacaacacua

SEQ ID NO: 703360 - RNA, 19 nt, Artificial Sequence
  Description of Artificial Sequence: Synthetic oligonucleotide
  Sense strand starting at position 3929 of SEQ ID NO: 586246
gugacuguuagaugaucca

SEQ ID NO: 703361 - RNA, 19 nt, Artificial Sequence
  Description of Artificial Sequence: Synthetic oligonucleotide
  Antisense strand to SEQ ID NO: 703360
uggaucaucuaacagucac

SEQ ID NO: 703362 - RNA, 19 nt, Artificial Sequence
  Description of Artificial Sequence: Synthetic oligonucleotide
  Sense strand starting at position 3969 of SEQ ID NO: 586246
cucuaauguccugaccaga

SEQ ID NO: 703363 - RNA, 19 nt, Artificial Sequence
  Description of Artificial Sequence: Synthetic oligonucleotide
  Antisense strand to SEQ ID NO: 703362
ucuggucaggacauuagag

SEQ ID NO: 703364 - RNA, 19 nt, Artificial Sequence
  Description of Artificial Sequence: Synthetic oligonucleotide
  Sense strand starting at position 3974 of SEQ ID NO: 586246
auguccugaccagaucauu

SEQ ID NO: 703365 - RNA, 19 nt, Artificial Sequence
  Description of Artificial Sequence: Synthetic oligonucleotide
  Antisense strand to SEQ ID NO: 703364
aaugaucuggucaggacau

SEQ ID NO: 703366 - RNA, 19 nt, Artificial Sequence
  Description of Artificial Sequence: Synthetic oligonucleotide
  Sense strand starting at position 51 of SEQ ID NO: 586247
ugggacuugugaguaauac

SEQ ID NO: 703367 - RNA, 19 nt, Artificial Sequence
  Description of Artificial Sequence: Synthetic oligonucleotide
  Antisense strand to SEQ ID NO: 703366
guauuacucacaaguccca

SEQ ID NO: 703368 - RNA, 19 nt, Artificial Sequence
  Description of Artificial Sequence: Synthetic oligonucleotide
  Sense strand starting at position 151 of SEQ ID NO: 586247
agugaacgaucuccugaaa

SEQ ID NO: 703369 - RNA, 19 nt, Artificial Sequence
  Description of Artificial Sequence: Synthetic oligonucleotide
  Antisense strand to SEQ ID NO: 703368
uuucaggagaucguucacu

SEQ ID NO: 703370 - RNA, 19 nt, Artificial Sequence
  Description of Artificial Sequence: Synthetic oligonucleotide
  Sense strand starting at position 348 of SEQ ID NO: 586247
uuguacucugugggauaau

SEQ ID NO: 703371 - RNA, 19 nt, Artificial Sequence
  Description of Artificial Sequence: Synthetic oligonucleotide
  Antisense strand to SEQ ID NO: 703370
auuaucccacagaguacaa

SEQ ID NO: 703372 - RNA, 19 nt, Artificial Sequence
  Description of Artificial Sequence: Synthetic oligonucleotide
  Sense strand starting at position 370 of SEQ ID NO: 586247
aagugcuaccaaggagaau

SEQ ID NO: 703373 - RNA, 19 nt, Artificial Sequence
  Description of Artificial Sequence: Synthetic oligonucleotide
  Antisense strand to SEQ ID NO: 703372
auucuccuugguagcacuu

SEQ ID NO: 703374 - RNA, 19 nt, Artificial Sequence
  Description of Artificial Sequence: Synthetic oligonucleotide
  Sense strand starting at position 447 of SEQ ID NO: 586247
cuuuguaguauauggagau

SEQ ID NO: 703375 - RNA, 19 nt, Artificial Sequence
  Description of Artificial Sequence: Synthetic oligonucleotide
  Antisense strand to SEQ ID NO: 703374
aucuccauauacuacaaag

SEQ ID NO: 703376 - RNA, 19 nt, Artificial Sequence
  Description of Artificial Sequence: Synthetic oligonucleotide
  Sense strand starting at position 478 of SEQ ID NO: 586247
augcaaacucugcaggauu

SEQ ID NO: 703377 - RNA, 19 nt, Artificial Sequence
  Description of Artificial Sequence: Synthetic oligonucleotide
  Antisense strand to SEQ ID NO: 703376
aauccugcagaguuugcau

SEQ ID NO: 703378 - RNA, 19 nt, Artificial Sequence
  Description of Artificial Sequence: Synthetic oligonucleotide
  Sense strand starting at position 712 of SEQ ID NO: 586247
cuugaacaguacuuguaga

SEQ ID NO: 703379 - RNA, 19 nt, Artificial Sequence
  Description of Artificial Sequence: Synthetic oligonucleotide
  Antisense strand to SEQ ID NO: 703378
ucuacaaguacuguucaag

SEQ ID NO: 703380 - RNA, 19 nt, Artificial Sequence
  Description of Artificial Sequence: Synthetic oligonucleotide
  Sense strand starting at position 717 of SEQ ID NO: 586247
acaguacuuguagagaagu

SEQ ID NO: 703381 - RNA, 19 nt, Artificial Sequence
  Description of Artificial Sequence: Synthetic oligonucleotide
  Antisense strand to SEQ ID NO: 703380
acuucucuacaaguacugu

SEQ ID NO: 703382 - RNA, 19 nt, Artificial Sequence
  Description of Artificial Sequence: Synthetic oligonucleotide
  Sense strand starting at position 730 of SEQ ID NO: 586247
agaaguucugagcaaggcu

SEQ ID NO: 703383 - RNA, 19 nt, Artificial Sequence
  Description of Artificial Sequence: Synthetic oligonucleotide
  Antisense strand to SEQ ID NO: 703382
agccuugcucagaacuucu

SEQ ID NO: 703384 - RNA, 19 nt, Artificial Sequence
  Description of Artificial Sequence: Synthetic oligonucleotide
  Sense strand starting at position 744 of SEQ ID NO: 586247
aggcuaaucaggcaguacu

SEQ ID NO: 703385 - RNA, 19 nt, Artificial Sequence
  Description of Artificial Sequence: Synthetic oligonucleotide
  Antisense strand to SEQ ID NO: 703384
aguacugccugauuagccu

SEQ ID NO: 703386 - RNA, 19 nt, Artificial Sequence
  Description of Artificial Sequence: Synthetic oligonucleotide
  Sense strand starting at position 799 of SEQ ID NO: 586247
uaucguaaucaugaucagu

SEQ ID NO: 703387 - RNA, 19 nt, Artificial Sequence
  Description of Artificial Sequence: Synthetic oligonucleotide
  Antisense strand to SEQ ID NO: 703386
acugaucaugauuacgaua

SEQ ID NO: 703388 - RNA, 19 nt, Artificial Sequence
  Description of Artificial Sequence: Synthetic oligonucleotide
  Sense strand starting at position 841 of SEQ ID NO: 586247
auuaacucauguguuaaca

SEQ ID NO: 703389 - RNA, 19 nt, Artificial Sequence
  Description of Artificial Sequence: Synthetic oligonucleotide
  Antisense strand to SEQ ID NO: 703388
uguuaacacaugaguuaau

SEQ ID NO: 703390 - RNA, 19 nt, Artificial Sequence
  Description of Artificial Sequence: Synthetic oligonucleotide
  Sense strand starting at position 937 of SEQ ID NO: 586247
aguauuaagucacuuccca

SEQ ID NO: 703391 - RNA, 19 nt, Artificial Sequence
  Description of Artificial Sequence: Synthetic oligonucleotide
  Antisense strand to SEQ ID NO: 703390
ugggaagugacuuaauacu

SEQ ID NO: 703392 - RNA, 19 nt, Artificial Sequence
  Description of Artificial Sequence: Synthetic oligonucleotide
  Sense strand starting at position 945 of SEQ ID NO: 586247
gucacuucccaauacugua

SEQ ID NO: 703393 - RNA, 19 nt, Artificial Sequence
  Description of Artificial Sequence: Synthetic oligonucleotide
  Antisense strand to SEQ ID NO: 703392
uacaguauugggaagugac

SEQ ID NO: 703394 - RNA, 19 nt, Artificial Sequence
  Description of Artificial Sequence: Synthetic oligonucleotide
  Sense strand starting at position 1071 of SEQ ID NO: 586247
ugaauugucuuagcaaaua

SEQ ID NO: 703395 - RNA, 19 nt, Artificial Sequence
  Description of Artificial Sequence: Synthetic oligonucleotide
  Antisense strand to SEQ ID NO: 703394
uauuugcuaagacaauuca

SEQ ID NO: 703396 - RNA, 19 nt, Artificial Sequence
  Description of Artificial Sequence: Synthetic oligonucleotide
  Sense strand starting at position 1138 of SEQ ID NO: 586247
ugggcauaacugugaccua

SEQ ID NO: 703397 - RNA, 19 nt, Artificial Sequence
  Description of Artificial Sequence: Synthetic oligonucleotide
  Antisense strand to SEQ ID NO: 703396
uaggucacaguuaugccca

SEQ ID NO: 703398 - RNA, 19 nt, Artificial Sequence
  Description of Artificial Sequence: Synthetic oligonucleotide
  Sense strand starting at position 1225 of SEQ ID NO: 586247
cucaaaugucacugggcau

SEQ ID NO: 703399 - RNA, 19 nt, Artificial Sequence
  Description of Artificial Sequence: Synthetic oligonucleotide
  Antisense strand to SEQ ID NO: 703398
augcccagugacauuugag

SEQ ID NO: 703400 - RNA, 19 nt, Artificial Sequence
  Description of Artificial Sequence: Synthetic oligonucleotide
  Sense strand starting at position 1488 of SEQ ID NO: 586247
ucagaaacauugcuugaac

SEQ ID NO: 703401 - RNA, 19 nt, Artificial Sequence
  Description of Artificial Sequence: Synthetic oligonucleotide
  Antisense strand to SEQ ID NO: 703400
guucaagcaauguuucuga

SEQ ID NO: 703402 - RNA, 19 nt, Artificial Sequence
  Description of Artificial Sequence: Synthetic oligonucleotide
  Sense strand starting at position 1490 of SEQ ID NO: 586247
agaaacauugcuugaacua

SEQ ID NO: 703403 - RNA, 19 nt, Artificial Sequence
  Description of Artificial Sequence: Synthetic oligonucleotide
  Antisense strand to SEQ ID NO: 703402
uaguucaagcaauguuucu

SEQ ID NO: 703404 - RNA, 19 nt, Artificial Sequence
  Description of Artificial Sequence: Synthetic oligonucleotide
  Sense strand starting at position 1626 of SEQ ID NO: 586247
ugaaaucaucuaggcccaa

SEQ ID NO: 703405 - RNA, 19 nt, Artificial Sequence
  Description of Artificial Sequence: Synthetic oligonucleotide
  Antisense strand to SEQ ID NO: 703404
uugggccuagaugauuuca

SEQ ID NO: 703406 - RNA, 19 nt, Artificial Sequence
  Description of Artificial Sequence: Synthetic oligonucleotide
  Sense strand starting at position 1638 of SEQ ID NO: 586247
ggcccaaauccaugacaau

SEQ ID NO: 703407 - RNA, 19 nt, Artificial Sequence
  Description of Artificial Sequence: Synthetic oligonucleotide
  Antisense strand to SEQ ID NO: 703406
auugucauggauuugggcc

SEQ ID NO: 703408 - RNA, 19 nt, Artificial Sequence
  Description of Artificial Sequence: Synthetic oligonucleotide
  Sense strand starting at position 2153 of SEQ ID NO: 586247
uuaggaauggcaggaguua

SEQ ID NO: 703409 - RNA, 19 nt, Artificial Sequence
  Description of Artificial Sequence: Synthetic oligonucleotide
  Antisense strand to SEQ ID NO: 703408
uaacuccugccauuccuaa

SEQ ID NO: 703410 - RNA, 19 nt, Artificial Sequence
  Description of Artificial Sequence: Synthetic oligonucleotide
  Sense strand starting at position 2402 of SEQ ID NO: 586247
ugcaaaccaucacuggaaa

SEQ ID NO: 703411 - RNA, 19 nt, Artificial Sequence
  Description of Artificial Sequence: Synthetic oligonucleotide
  Antisense strand to SEQ ID NO: 703410
uuuccagugaugguuugca

SEQ ID NO: 703412 - RNA, 19 nt, Artificial Sequence
  Description of Artificial Sequence: Synthetic oligonucleotide
  Sense strand starting at position 2403 of SEQ ID NO: 586247
gcaaaccaucacuggaaau

SEQ ID NO: 703413 - RNA, 19 nt, Artificial Sequence
  Description of Artificial Sequence: Synthetic oligonucleotide
  Antisense strand to SEQ ID NO: 703412
auuuccagugaugguuugc

SEQ ID NO: 703414 - RNA, 19 nt, Artificial Sequence
  Description of Artificial Sequence: Synthetic oligonucleotide
  Sense strand starting at position 2539 of SEQ ID NO: 586247
uccaaauugugaguaagaa

SEQ ID NO: 703415 - RNA, 19 nt, Artificial Sequence
  Description of Artificial Sequence: Synthetic oligonucleotide
  Antisense strand to SEQ ID NO: 703414
uucuuacucacaauuugga

SEQ ID NO: 703416 - RNA, 19 nt, Artificial Sequence
  Description of Artificial Sequence: Synthetic oligonucleotide
  Sense strand starting at position 2565 of SEQ ID NO: 586247
ucagucuuaucauccauag

SEQ ID NO: 703417 - RNA, 19 nt, Artificial Sequence
  Description of Artificial Sequence: Synthetic oligonucleotide
  Antisense strand to SEQ ID NO: 703416
cuauggaugauaagacuga

SEQ ID NO: 703418 - RNA, 19 nt, Artificial Sequence
  Description of Artificial Sequence: Synthetic oligonucleotide
  Sense strand starting at position 2786 of SEQ ID NO: 586247
uuugauaagcugcauuauu

SEQ ID NO: 703419 - RNA, 19 nt, Artificial Sequence
  Description of Artificial Sequence: Synthetic oligonucleotide
  Antisense strand to SEQ ID NO: 703418
aauaaugcagcuuaucaaa

SEQ ID NO: 703420 - RNA, 19 nt, Artificial Sequence
  Description of Artificial Sequence: Synthetic oligonucleotide
  Sense strand starting at position 2963 of SEQ ID NO: 586247
augacagcucgugaaguuu

SEQ ID NO: 703421 - RNA, 19 nt, Artificial Sequence
  Description of Artificial Sequence: Synthetic oligonucleotide
  Antisense strand to SEQ ID NO: 703420
aaacuucacgagcugucau

SEQ ID NO: 703422 - RNA, 19 nt, Artificial Sequence
  Description of Artificial Sequence: Synthetic oligonucleotide
  Sense strand starting at position 3051 of SEQ ID NO: 586247
cagccuauucugggagauc

SEQ ID NO: 703423 - RNA, 19 nt, Artificial Sequence
  Description of Artificial Sequence: Synthetic oligonucleotide
  Antisense strand to SEQ ID NO: 703422
gaucucccagaauaggcug

SEQ ID NO: 703424 - RNA, 19 nt, Artificial Sequence
  Description of Artificial Sequence: Synthetic oligonucleotide
  Sense strand starting at position 3100 of SEQ ID NO: 586247
aucaccaguggcugaaauu

SEQ ID NO: 703425 - RNA, 19 nt, Artificial Sequence
  Description of Artificial Sequence: Synthetic oligonucleotide
  Antisense strand to SEQ ID NO: 703424
aauuucagccacuggugau

SEQ ID NO: 703426 - RNA, 19 nt, Artificial Sequence
  Description of Artificial Sequence: Synthetic oligonucleotide
  Sense strand starting at position 3111 of SEQ ID NO: 586247
cugaaauucugccucucag

SEQ ID NO: 703427 - RNA, 19 nt, Artificial Sequence
  Description of Artificial Sequence: Synthetic oligonucleotide
  Antisense strand to SEQ ID NO: 703426
cugagaggcagaauuucag

SEQ ID NO: 703428 - RNA, 19 nt, Artificial Sequence
  Description of Artificial Sequence: Synthetic oligonucleotide
  Sense strand starting at position 3275 of SEQ ID NO: 586247
agcauacuuuaaccgaaau

SEQ ID NO: 703429 - RNA, 19 nt, Artificial Sequence
  Description of Artificial Sequence: Synthetic oligonucleotide
  Antisense strand to SEQ ID NO: 703428
auuucgguuaaaguaugcu

SEQ ID NO: 703430 - RNA, 19 nt, Artificial Sequence
  Description of Artificial Sequence: Synthetic oligonucleotide
  Sense strand starting at position 3301 of SEQ ID NO: 586247
ccagaacuguacuugcaaa

SEQ ID NO: 703431 - RNA, 19 nt, Artificial Sequence
  Description of Artificial Sequence: Synthetic oligonucleotide
  Antisense strand to SEQ ID NO: 703430
uuugcaaguacaguucugg

SEQ ID NO: 703432 - RNA, 19 nt, Artificial Sequence
  Description of Artificial Sequence: Synthetic oligonucleotide
  Sense strand starting at position 3498 of SEQ ID NO: 586247
cacucagagcacugaaguu

SEQ ID NO: 703433 - RNA, 19 nt, Artificial Sequence
  Description of Artificial Sequence: Synthetic oligonucleotide
  Antisense strand to SEQ ID NO: 703432
aacuucagugcucugagug

SEQ ID NO: 703434 - RNA, 19 nt, Artificial Sequence
  Description of Artificial Sequence: Synthetic oligonucleotide
  Sense strand starting at position 3615 of SEQ ID NO: 586247
agaauaaugaugugugcau

SEQ ID NO: 703435 - RNA, 19 nt, Artificial Sequence
  Description of Artificial Sequence: Synthetic oligonucleotide
  Antisense strand to SEQ ID NO: 703434
augcacacaucauuauucu

SEQ ID NO: 703436 - RNA, 19 nt, Artificial Sequence
  Description of Artificial Sequence: Synthetic oligonucleotide
  Sense strand starting at position 3616 of SEQ ID NO: 586247
gaauaaugaugugugcauc

SEQ ID NO: 703437 - RNA, 19 nt, Artificial Sequence
  Description of Artificial Sequence: Synthetic oligonucleotide
  Antisense strand to SEQ ID NO: 703436
gaugcacacaucauuauuc

SEQ ID NO: 703438 - RNA, 19 nt, Artificial Sequence
  Description of Artificial Sequence: Synthetic oligonucleotide
  Sense strand starting at position 3617 of SEQ ID NO: 586247
aauaaugaugugugcauca

SEQ ID NO: 703439 - RNA, 19 nt, Artificial Sequence
  Description of Artificial Sequence: Synthetic oligonucleotide
  Antisense strand to SEQ ID NO: 703438
ugaugcacacaucauuauu

SEQ ID NO: 703440 - RNA, 19 nt, Artificial Sequence
  Description of Artificial Sequence: Synthetic oligonucleotide
  Sense strand starting at position 3619 of SEQ ID NO: 586247
uaaugaugugugcaucaug

SEQ ID NO: 703441 - RNA, 19 nt, Artificial Sequence
  Description of Artificial Sequence: Synthetic oligonucleotide
  Antisense strand to SEQ ID NO: 703440
caugaugcacacaucauua

SEQ ID NO: 703442 - RNA, 19 nt, Artificial Sequence
  Description of Artificial Sequence: Synthetic oligonucleotide
  Sense strand starting at position 3622 of SEQ ID NO: 586247
ugaugugugcaucauggga

SEQ ID NO: 703443 - RNA, 19 nt, Artificial Sequence
  Description of Artificial Sequence: Synthetic oligonucleotide
  Antisense strand to SEQ ID NO: 703442
ucccaugaugcacacauca

SEQ ID NO: 703444 - RNA, 19 nt, Artificial Sequence
  Description of Artificial Sequence: Synthetic oligonucleotide
  Sense strand starting at position 3693 of SEQ ID NO: 586247
uauagugguccaugaaaca

SEQ ID NO: 703445 - RNA, 19 nt, Artificial Sequence
  Description of Artificial Sequence: Synthetic oligonucleotide
  Antisense strand to SEQ ID NO: 703444
uguuucauggaccacuaua

SEQ ID NO: 703446 - RNA, 19 nt, Artificial Sequence
  Description of Artificial Sequence: Synthetic oligonucleotide
  Sense strand starting at position 159 of SEQ ID NO: 586248
aaaguauugugagucaaac

SEQ ID NO: 703447 - RNA, 19 nt, Artificial Sequence
  Description of Artificial Sequence: Synthetic oligonucleotide
  Antisense strand to SEQ ID NO: 703446
guuugacucacaauacuuu

SEQ ID NO: 703448 - RNA, 19 nt, Artificial Sequence
  Description of Artificial Sequence: Synthetic oligonucleotide
  Sense strand starting at position 172 of SEQ ID NO: 586248
ucaaacaauguguguaaau

SEQ ID NO: 703449 - RNA, 19 nt, Artificial Sequence
  Description of Artificial Sequence: Synthetic oligonucleotide
  Antisense strand to SEQ ID NO: 703448
auuuacacacauuguuuga

SEQ ID NO: 703450 - RNA, 19 nt, Artificial Sequence
  Description of Artificial Sequence: Synthetic oligonucleotide
  Sense strand starting at position 247 of SEQ ID NO: 586248
uuuaguaagagaggacuuu

SEQ ID NO: 703451 - RNA, 19 nt, Artificial Sequence
  Description of Artificial Sequence: Synthetic oligonucleotide
  Antisense strand to SEQ ID NO: 703450
aaaguccucucuuacuaaa

SEQ ID NO: 703452 - RNA, 19 nt, Artificial Sequence
  Description of Artificial Sequence: Synthetic oligonucleotide
  Sense strand starting at position 404 of SEQ ID NO: 586248
ggcagaguuacacacauug

SEQ ID NO: 703453 - RNA, 19 nt, Artificial Sequence
  Description of Artificial Sequence: Synthetic oligonucleotide
  Antisense strand to SEQ ID NO: 703452
caauguguguaacucugcc

SEQ ID NO: 703454 - RNA, 19 nt, Artificial Sequence
  Description of Artificial Sequence: Synthetic oligonucleotide
  Sense strand starting at position 698 of SEQ ID NO: 586248
ugaucagccuuuccugaga

SEQ ID NO: 703455 - RNA, 19 nt, Artificial Sequence
  Description of Artificial Sequence: Synthetic oligonucleotide
  Antisense strand to SEQ ID NO: 703454
ucucaggaaaggcugauca

SEQ ID NO: 703456 - RNA, 19 nt, Artificial Sequence
  Description of Artificial Sequence: Synthetic oligonucleotide
  Sense strand starting at position 701 of SEQ ID NO: 586248
ucagccuuuccugagaaug

SEQ ID NO: 703457 - RNA, 19 nt, Artificial Sequence
  Description of Artificial Sequence: Synthetic oligonucleotide
  Antisense strand to SEQ ID NO: 703456
cauucucaggaaaggcuga

SEQ ID NO: 703458 - RNA, 19 nt, Artificial Sequence
  Description of Artificial Sequence: Synthetic oligonucleotide
  Sense strand starting at position 711 of SEQ ID NO: 586248
cugagaaugaaguguaaac

SEQ ID NO: 703459 - RNA, 19 nt, Artificial Sequence
  Description of Artificial Sequence: Synthetic oligonucleotide
  Antisense strand to SEQ ID NO: 703458
guuuacacuucauucucag

SEQ ID NO: 703460 - RNA, 19 nt, Artificial Sequence
  Description of Artificial Sequence: Synthetic oligonucleotide
  Sense strand starting at position 877 of SEQ ID NO: 586248
ucucuuguuggauauaaau

SEQ ID NO: 703461 - RNA, 19 nt, Artificial Sequence
  Description of Artificial Sequence: Synthetic oligonucleotide
  Antisense strand to SEQ ID NO: 703460
auuuauauccaacaagaga

SEQ ID NO: 703462 - RNA, 19 nt, Artificial Sequence
  Description of Artificial Sequence: Synthetic oligonucleotide
  Sense strand starting at position 952 of SEQ ID NO: 586248
gguuauuugcaaggaguuc

SEQ ID NO: 703463 - RNA, 19 nt, Artificial Sequence
  Description of Artificial Sequence: Synthetic oligonucleotide
  Antisense strand to SEQ ID NO: 703462
gaacuccuugcaaauaacc

SEQ ID NO: 703464 - RNA, 19 nt, Artificial Sequence
  Description of Artificial Sequence: Synthetic oligonucleotide
  Sense strand starting at position 1009 of SEQ ID NO: 586248
gacaaauugcacuagaguc

SEQ ID NO: 703465 - RNA, 19 nt, Artificial Sequence
  Description of Artificial Sequence: Synthetic oligonucleotide
  Antisense strand to SEQ ID NO: 703464
gacucuagugcaauuuguc

SEQ ID NO: 703466 - RNA, 19 nt, Artificial Sequence
  Description of Artificial Sequence: Synthetic oligonucleotide
  Sense strand starting at position 1073 of SEQ ID NO: 586248
uaagguggaucuuuaucau

SEQ ID NO: 703467 - RNA, 19 nt, Artificial Sequence
  Description of Artificial Sequence: Synthetic oligonucleotide
  Antisense strand to SEQ ID NO: 703466
augauaaagauccaccuua

SEQ ID NO: 703468 - RNA, 19 nt, Artificial Sequence
  Description of Artificial Sequence: Synthetic oligonucleotide
  Sense strand starting at position 1197 of SEQ ID NO: 586248
uuuguuugacuuuauccua

SEQ ID NO: 703469 - RNA, 19 nt, Artificial Sequence
  Description of Artificial Sequence: Synthetic oligonucleotide
  Antisense strand to SEQ ID NO: 703468
uaggauaaagucaaacaaa

SEQ ID NO: 703470 - RNA, 19 nt, Artificial Sequence
  Description of Artificial Sequence: Synthetic oligonucleotide
  Sense strand starting at position 1249 of SEQ ID NO: 586248
caaggugucaggugaacca

SEQ ID NO: 703471 - RNA, 19 nt, Artificial Sequence
  Description of Artificial Sequence: Synthetic oligonucleotide
  Antisense strand to SEQ ID NO: 703470
ugguucaccugacaccuug

SEQ ID NO: 703472 - RNA, 19 nt, Artificial Sequence
  Description of Artificial Sequence: Synthetic oligonucleotide
  Sense strand starting at position 1284 of SEQ ID NO: 586248
acaggaggucuguauuguu

SEQ ID NO: 703473 - RNA, 19 nt, Artificial Sequence
  Description of Artificial Sequence: Synthetic oligonucleotide
  Antisense strand to SEQ ID NO: 703472
aacaauacagaccuccugu

SEQ ID NO: 703474 - RNA, 19 nt, Artificial Sequence
  Description of Artificial Sequence: Synthetic oligonucleotide
  Sense strand starting at position 1324 of SEQ ID NO: 586248
guuagaaggaauugggcaa

SEQ ID NO: 703475 - RNA, 19 nt, Artificial Sequence
  Description of Artificial Sequence: Synthetic oligonucleotide
  Antisense strand to SEQ ID NO: 703474
uugcccaauuccuucuaac

SEQ ID NO: 703476 - RNA, 19 nt, Artificial Sequence
  Description of Artificial Sequence: Synthetic oligonucleotide
  Sense strand starting at position 1385 of SEQ ID NO: 586248
cagggagugcuggaaguau

SEQ ID NO: 703477 - RNA, 19 nt, Artificial Sequence
  Description of Artificial Sequence: Synthetic oligonucleotide
  Antisense strand to SEQ ID NO: 703476
auacuuccagcacucccug

SEQ ID NO: 703478 - RNA, 19 nt, Artificial Sequence
  Description of Artificial Sequence: Synthetic oligonucleotide
  Sense strand starting at position 1560 of SEQ ID NO: 586248
ggauguuuggaguggaaag

SEQ ID NO: 703479 - RNA, 19 nt, Artificial Sequence
  Description of Artificial Sequence: Synthetic oligonucleotide
  Antisense strand to SEQ ID NO: 703478
cuuuccacuccaaacaucc

SEQ ID NO: 703480 - RNA, 19 nt, Artificial Sequence
  Description of Artificial Sequence: Synthetic oligonucleotide
  Sense strand starting at position 1629 of SEQ ID NO: 586248
uccugaugucuauagcaga

SEQ ID NO: 703481 - RNA, 19 nt, Artificial Sequence
  Description of Artificial Sequence: Synthetic oligonucleotide
  Antisense strand to SEQ ID NO: 703480
ucugcuauagacaucagga

SEQ ID NO: 703482 - RNA, 19 nt, Artificial Sequence
  Description of Artificial Sequence: Synthetic oligonucleotide
  Sense strand starting at position 1634 of SEQ ID NO: 586248
augucuauagcagaaguca

SEQ ID NO: 703483 - RNA, 19 nt, Artificial Sequence
  Description of Artificial Sequence: Synthetic oligonucleotide
  Antisense strand to SEQ ID NO: 703482
ugacuucugcuauagacau

SEQ ID NO: 703484 - RNA, 19 nt, Artificial Sequence
  Description of Artificial Sequence: Synthetic oligonucleotide
  Sense strand starting at position 1680 of SEQ ID NO: 586248
gcaucaugccaggaacacu

SEQ ID NO: 703485 - RNA, 19 nt, Artificial Sequence
  Description of Artificial Sequence: Synthetic oligonucleotide
  Antisense strand to SEQ ID NO: 703484
aguguuccuggcaugaugc

SEQ ID NO: 703486 - RNA, 19 nt, Artificial Sequence
  Description of Artificial Sequence: Synthetic oligonucleotide
  Sense strand starting at position 2094 of SEQ ID NO: 586248
cagucagaugaaugaucca

SEQ ID NO: 703487 - RNA, 19 nt, Artificial Sequence
  Description of Artificial Sequence: Synthetic oligonucleotide
  Antisense strand to SEQ ID NO: 703486
uggaucauucaucugacug

SEQ ID NO: 703488 - RNA, 19 nt, Artificial Sequence
  Description of Artificial Sequence: Synthetic oligonucleotide
  Sense strand starting at position 2376 of SEQ ID NO: 586248
ggcccaaauguuggagaaa

SEQ ID NO: 703489 - RNA, 19 nt, Artificial Sequence
  Description of Artificial Sequence: Synthetic oligonucleotide
  Antisense strand to SEQ ID NO: 703488
uuucuccaacauuugggcc

SEQ ID NO: 703490 - RNA, 19 nt, Artificial Sequence
  Description of Artificial Sequence: Synthetic oligonucleotide
  Sense strand starting at position 2503 of SEQ ID NO: 586248
ggcgauacacucuaccgaa

SEQ ID NO: 703491 - RNA, 19 nt, Artificial Sequence
  Description of Artificial Sequence: Synthetic oligonucleotide
  Antisense strand to SEQ ID NO: 703490
uucgguagaguguaucgcc

SEQ ID NO: 703492 - RNA, 19 nt, Artificial Sequence
  Description of Artificial Sequence: Synthetic oligonucleotide
  Sense strand starting at position 2529 of SEQ ID NO: 586248
aacuguuaaccucagugga

SEQ ID NO: 703493 - RNA, 19 nt, Artificial Sequence
  Description of Artificial Sequence: Synthetic oligonucleotide
  Antisense strand to SEQ ID NO: 703492
uccacugagguuaacaguu

SEQ ID NO: 703494 - RNA, 19 nt, Artificial Sequence
  Description of Artificial Sequence: Synthetic oligonucleotide
  Sense strand starting at position 2532 of SEQ ID NO: 586248
uguuaaccucaguggaaua

SEQ ID NO: 703495 - RNA, 19 nt, Artificial Sequence
  Description of Artificial Sequence: Synthetic oligonucleotide
  Antisense strand to SEQ ID NO: 703494
uauuccacugagguuaaca

SEQ ID NO: 703496 - RNA, 19 nt, Artificial Sequence
  Description of Artificial Sequence: Synthetic oligonucleotide
  Sense strand starting at position 2543 of SEQ ID NO: 586248
guggaauacuuauuaugug

SEQ ID NO: 703497 - RNA, 19 nt, Artificial Sequence
  Description of Artificial Sequence: Synthetic oligonucleotide
  Antisense strand to SEQ ID NO: 703496
cacauaauaaguauuccac

SEQ ID NO: 703498 - RNA, 19 nt, Artificial Sequence
  Description of Artificial Sequence: Synthetic oligonucleotide
  Sense strand starting at position 2564 of SEQ ID NO: 586248
agauucuaugcugaauucu

SEQ ID NO: 703499 - RNA, 19 nt, Artificial Sequence
  Description of Artificial Sequence: Synthetic oligonucleotide
  Antisense strand to SEQ ID NO: 703498
agaauucagcauagaaucu

SEQ ID NO: 703500 - RNA, 19 nt, Artificial Sequence
  Description of Artificial Sequence: Synthetic oligonucleotide
  Sense strand starting at position 2600 of SEQ ID NO: 586248
cuuaauugucaaugaagga

SEQ ID NO: 703501 - RNA, 19 nt, Artificial Sequence
  Description of Artificial Sequence: Synthetic oligonucleotide
  Antisense strand to SEQ ID NO: 703500
uccuucauugacaauuaag

SEQ ID NO: 703502 - RNA, 19 nt, Artificial Sequence
  Description of Artificial Sequence: Synthetic oligonucleotide
  Sense strand starting at position 2728 of SEQ ID NO: 586248
gcauguucccaugacuaug

SEQ ID NO: 703503 - RNA, 19 nt, Artificial Sequence
  Description of Artificial Sequence: Synthetic oligonucleotide
  Antisense strand to SEQ ID NO: 703502
cauagucaugggaacaugc

SEQ ID NO: 703504 - RNA, 19 nt, Artificial Sequence
  Description of Artificial Sequence: Synthetic oligonucleotide
  Sense strand starting at position 2758 of SEQ ID NO: 586248
auaggauggcugggacaau

SEQ ID NO: 703505 - RNA, 19 nt, Artificial Sequence
  Description of Artificial Sequence: Synthetic oligonucleotide
  Antisense strand to SEQ ID NO: 703504
auugucccagccauccuau

SEQ ID NO: 703506 - RNA, 19 nt, Artificial Sequence
  Description of Artificial Sequence: Synthetic oligonucleotide
  Sense strand starting at position 3008 of SEQ ID NO: 586248
auaguagguggugaaucaa

SEQ ID NO: 703507 - RNA, 19 nt, Artificial Sequence
  Description of Artificial Sequence: Synthetic oligonucleotide
  Antisense strand to SEQ ID NO: 703506
uugauucaccaccuacuau

SEQ ID NO: 703508 - RNA, 19 nt, Artificial Sequence
  Description of Artificial Sequence: Synthetic oligonucleotide
  Sense strand starting at position 3288 of SEQ ID NO: 586248
ucaagaauaggugagcguu

SEQ ID NO: 703509 - RNA, 19 nt, Artificial Sequence
  Description of Artificial Sequence: Synthetic oligonucleotide
  Antisense strand to SEQ ID NO: 703508
aacgcucaccuauucuuga

SEQ ID NO: 703510 - RNA, 19 nt, Artificial Sequence
  Description of Artificial Sequence: Synthetic oligonucleotide
  Sense strand starting at position 3416 of SEQ ID NO: 586248
uaauuaugauggcugucaa

SEQ ID NO: 703511 - RNA, 19 nt, Artificial Sequence
  Description of Artificial Sequence: Synthetic oligonucleotide
  Antisense strand to SEQ ID NO: 703510
uugacagccaucauaauua

SEQ ID NO: 703512 - RNA, 19 nt, Artificial Sequence
  Description of Artificial Sequence: Synthetic oligonucleotide
  Sense strand starting at position 3526 of SEQ ID NO: 586248
gccaguuaacuuuaggaau

SEQ ID NO: 703513 - RNA, 19 nt, Artificial Sequence
  Description of Artificial Sequence: Synthetic oligonucleotide
  Antisense strand to SEQ ID NO: 703512
auuccuaaaguuaacuggc

SEQ ID NO: 703514 - RNA, 19 nt, Artificial Sequence
  Description of Artificial Sequence: Synthetic oligonucleotide
  Sense strand starting at position 3612 of SEQ ID NO: 586248
guuccuaaccuuuggagaa

SEQ ID NO: 703515 - RNA, 19 nt, Artificial Sequence
  Description of Artificial Sequence: Synthetic oligonucleotide
  Antisense strand to SEQ ID NO: 703514
uucuccaaagguuaggaac

SEQ ID NO: 703516 - RNA, 19 nt, Artificial Sequence
  Description of Artificial Sequence: Synthetic oligonucleotide
  Sense strand starting at position 3624 of SEQ ID NO: 586248
uggagaauuguuugguaua

SEQ ID NO: 703517 - RNA, 19 nt, Artificial Sequence
  Description of Artificial Sequence: Synthetic oligonucleotide
  Antisense strand to SEQ ID NO: 703516
uauaccaaacaauucucca

SEQ ID NO: 703518 - RNA, 19 nt, Artificial Sequence
  Description of Artificial Sequence: Synthetic oligonucleotide
  Sense strand starting at position 3626 of SEQ ID NO: 586248
gagaauuguuugguauacu

SEQ ID NO: 703519 - RNA, 19 nt, Artificial Sequence
  Description of Artificial Sequence: Synthetic oligonucleotide
  Antisense strand to SEQ ID NO: 703518
aguauaccaaacaauucuc

SEQ ID NO: 703520 - RNA, 19 nt, Artificial Sequence
  Description of Artificial Sequence: Synthetic oligonucleotide
  Sense strand starting at position 3629 of SEQ ID NO: 586248
aauuguuugguauacuaga

SEQ ID NO: 703521 - RNA, 19 nt, Artificial Sequence
  Description of Artificial Sequence: Synthetic oligonucleotide
  Antisense strand to SEQ ID NO: 703520
ucuaguauaccaaacaauu

SEQ ID NO: 703522 - RNA, 19 nt, Artificial Sequence
  Description of Artificial Sequence: Synthetic oligonucleotide
  Sense strand starting at position 3759 of SEQ ID NO: 586248
uuaucuugugagcaugaau

SEQ ID NO: 703523 - RNA, 19 nt, Artificial Sequence
  Description of Artificial Sequence: Synthetic oligonucleotide
  Antisense strand to SEQ ID NO: 703522
auucaugcucacaagauaa

SEQ ID NO: 703524 - RNA, 19 nt, Artificial Sequence
  Description of Artificial Sequence: Synthetic oligonucleotide
  Sense strand starting at position 3974 of SEQ ID NO: 586248
cauuuagaaugggagaguu

SEQ ID NO: 703525 - RNA, 19 nt, Artificial Sequence
  Description of Artificial Sequence: Synthetic oligonucleotide
  Antisense strand to SEQ ID NO: 703524
aacucucccauucuaaaug

SEQ ID NO: 703526 - RNA, 19 nt, Artificial Sequence
  Description of Artificial Sequence: Synthetic oligonucleotide
  Sense strand starting at position 302 of SEQ ID NO: 586249
cgaagucagcaugaacuua

SEQ ID NO: 703527 - RNA, 19 nt, Artificial Sequence
  Description of Artificial Sequence: Synthetic oligonucleotide
  Antisense strand to SEQ ID NO: 703526
uaaguucaugcugacuucg

SEQ ID NO: 703528 - RNA, 19 nt, Artificial Sequence
  Description of Artificial Sequence: Synthetic oligonucleotide
  Sense strand starting at position 420 of SEQ ID NO: 586249
ccuugauaaugcccaggaa

SEQ ID NO: 703529 - RNA, 19 nt, Artificial Sequence
  Description of Artificial Sequence: Synthetic oligonucleotide
  Antisense strand to SEQ ID NO: 703528
uuccugggcauuaucaagg

SEQ ID NO: 703530 - RNA, 19 nt, Artificial Sequence
  Description of Artificial Sequence: Synthetic oligonucleotide
  Sense strand starting at position 494 of SEQ ID NO: 586249
aggcuaacuccauaaggca

SEQ ID NO: 703531 - RNA, 19 nt, Artificial Sequence
  Description of Artificial Sequence: Synthetic oligonucleotide
  Antisense strand to SEQ ID NO: 703530
ugccuuauggaguuagccu

SEQ ID NO: 703532 - RNA, 19 nt, Artificial Sequence
  Description of Artificial Sequence: Synthetic oligonucleotide
  Sense strand starting at position 535 of SEQ ID NO: 586249
uguggaaauagaugcuuaa

SEQ ID NO: 703533 - RNA, 19 nt, Artificial Sequence
  Description of Artificial Sequence: Synthetic oligonucleotide
  Antisense strand to SEQ ID NO: 703532
uuaagcaucuauuuccaca

SEQ ID NO: 703534 - RNA, 19 nt, Artificial Sequence
  Description of Artificial Sequence: Synthetic oligonucleotide
  Sense strand starting at position 789 of SEQ ID NO: 586249
ucauuugugcauugugcaa

SEQ ID NO: 703535 - RNA, 19 nt, Artificial Sequence
  Description of Artificial Sequence: Synthetic oligonucleotide
  Antisense strand to SEQ ID NO: 703534
uugcacaaugcacaaauga

SEQ ID NO: 703536 - RNA, 19 nt, Artificial Sequence
  Description of Artificial Sequence: Synthetic oligonucleotide
  Sense strand starting at position 796 of SEQ ID NO: 586249
ugcauugugcaagagaaau

SEQ ID NO: 703537 - RNA, 19 nt, Artificial Sequence
  Description of Artificial Sequence: Synthetic oligonucleotide
  Antisense strand to SEQ ID NO: 703536
auuucucuugcacaaugca

SEQ ID NO: 703538 - RNA, 19 nt, Artificial Sequence
  Description of Artificial Sequence: Synthetic oligonucleotide
  Sense strand starting at position 1139 of SEQ ID NO: 586249
uuacgaggucccuaacauu

SEQ ID NO: 703539 - RNA, 19 nt, Artificial Sequence
  Description of Artificial Sequence: Synthetic oligonucleotide
  Antisense strand to SEQ ID NO: 703538
aauguuagggaccucguaa

SEQ ID NO: 703540 - RNA, 19 nt, Artificial Sequence
  Description of Artificial Sequence: Synthetic oligonucleotide
  Sense strand starting at position 1151 of SEQ ID NO: 586249
uaacauuuaugagacaggu

SEQ ID NO: 703541 - RNA, 19 nt, Artificial Sequence
  Description of Artificial Sequence: Synthetic oligonucleotide
  Antisense strand to SEQ ID NO: 703540
accugucucauaaauguua

SEQ ID NO: 703542 - RNA, 19 nt, Artificial Sequence
  Description of Artificial Sequence: Synthetic oligonucleotide
  Sense strand starting at position 1315 of SEQ ID NO: 586249
auaacagaacugugaagua

SEQ ID NO: 703543 - RNA, 19 nt, Artificial Sequence
  Description of Artificial Sequence: Synthetic oligonucleotide
  Antisense strand to SEQ ID NO: 703542
uacuucacaguucuguuau

SEQ ID NO: 703544 - RNA, 19 nt, Artificial Sequence
  Description of Artificial Sequence: Synthetic oligonucleotide
  Sense strand starting at position 1366 of SEQ ID NO: 586249
aaacguaagcuacaaaguu

SEQ ID NO: 703545 - RNA, 19 nt, Artificial Sequence
  Description of Artificial Sequence: Synthetic oligonucleotide
  Antisense strand to SEQ ID NO: 703544
aacuuuguagcuuacguuu

SEQ ID NO: 703546 - RNA, 19 nt, Artificial Sequence
  Description of Artificial Sequence: Synthetic oligonucleotide
  Sense strand starting at position 1627 of SEQ ID NO: 586249
gaauauuucugggaggcug

SEQ ID NO: 703547 - RNA, 19 nt, Artificial Sequence
  Description of Artificial Sequence: Synthetic oligonucleotide
  Antisense strand to SEQ ID NO: 703546
cagccucccagaaauauuc

SEQ ID NO: 703548 - RNA, 19 nt, Artificial Sequence
  Description of Artificial Sequence: Synthetic oligonucleotide
  Sense strand starting at position 1794 of SEQ ID NO: 586249
ucacuuccgagaugaagga

SEQ ID NO: 703549 - RNA, 19 nt, Artificial Sequence
  Description of Artificial Sequence: Synthetic oligonucleotide
  Antisense strand to SEQ ID NO: 703548
uccuucaucucggaaguga

SEQ ID NO: 703550 - RNA, 19 nt, Artificial Sequence
  Description of Artificial Sequence: Synthetic oligonucleotide
  Sense strand starting at position 2118 of SEQ ID NO: 586249
caguuaagccgguaaauau

SEQ ID NO: 703551 - RNA, 19 nt, Artificial Sequence
  Description of Artificial Sequence: Synthetic oligonucleotide
  Antisense strand to SEQ ID NO: 703550
auauuuaccggcuuaacug

SEQ ID NO: 703552 - RNA, 19 nt, Artificial Sequence
  Description of Artificial Sequence: Synthetic oligonucleotide
  Sense strand starting at position 2156 of SEQ ID NO: 586249
ugcgaucgccggucuuaca

SEQ ID NO: 703553 - RNA, 19 nt, Artificial Sequence
  Description of Artificial Sequence: Synthetic oligonucleotide
  Antisense strand to SEQ ID NO: 703552
uguaagaccggcgaucgca

SEQ ID NO: 703554 - RNA, 19 nt, Artificial Sequence
  Description of Artificial Sequence: Synthetic oligonucleotide
  Sense strand starting at position 2157 of SEQ ID NO: 586249
gcgaucgccggucuuacaa

SEQ ID NO: 703555 - RNA, 19 nt, Artificial Sequence
  Description of Artificial Sequence: Synthetic oligonucleotide
  Antisense strand to SEQ ID NO: 703554
uuguaagaccggcgaucgc

SEQ ID NO: 703556 - RNA, 19 nt, Artificial Sequence
  Description of Artificial Sequence: Synthetic oligonucleotide
  Sense strand starting at position 2241 of SEQ ID NO: 586249
cguugagcgaaagaucaaa

SEQ ID NO: 703557 - RNA, 19 nt, Artificial Sequence
  Description of Artificial Sequence: Synthetic oligonucleotide
  Antisense strand to SEQ ID NO: 703556
uuugaucuuucgcucaacg

SEQ ID NO: 703558 - RNA, 19 nt, Artificial Sequence
  Description of Artificial Sequence: Synthetic oligonucleotide
  Sense strand starting at position 2384 of SEQ ID NO: 586249
ucaagaaagggcugucacu

SEQ ID NO: 703559 - RNA, 19 nt, Artificial Sequence
  Description of Artificial Sequence: Synthetic oligonucleotide
  Antisense strand to SEQ ID NO: 703558
agugacagcccuuucuuga

SEQ ID NO: 703560 - RNA, 19 nt, Artificial Sequence
  Description of Artificial Sequence: Synthetic oligonucleotide
  Sense strand starting at position 2441 of SEQ ID NO: 586249
cuggguuuggccugaggaa

SEQ ID NO: 703561 - RNA, 19 nt, Artificial Sequence
  Description of Artificial Sequence: Synthetic oligonucleotide
  Antisense strand to SEQ ID NO: 703560
uuccucaggccaaacccag

SEQ ID NO: 703562 - RNA, 19 nt, Artificial Sequence
  Description of Artificial Sequence: Synthetic oligonucleotide
  Sense strand starting at position 2442 of SEQ ID NO: 586249
uggguuuggccugaggaaa

SEQ ID NO: 703563 - RNA, 19 nt, Artificial Sequence
  Description of Artificial Sequence: Synthetic oligonucleotide
  Antisense strand to SEQ ID NO: 703562
uuuccucaggccaaaccca

SEQ ID NO: 703564 - RNA, 19 nt, Artificial Sequence
  Description of Artificial Sequence: Synthetic oligonucleotide
  Sense strand starting at position 2594 of SEQ ID NO: 586249
agcagugaugacgggaaau

SEQ ID NO: 703565 - RNA, 19 nt, Artificial Sequence
  Description of Artificial Sequence: Synthetic oligonucleotide
  Antisense strand to SEQ ID NO: 703564
auuucccgucaucacugcu

SEQ ID NO: 703566 - RNA, 19 nt, Artificial Sequence
  Description of Artificial Sequence: Synthetic oligonucleotide
  Sense strand starting at position 2785 of SEQ ID NO: 586249
agcuaacacuuaucgaaag

SEQ ID NO: 703567 - RNA, 19 nt, Artificial Sequence
  Description of Artificial Sequence: Synthetic oligonucleotide
  Antisense strand to SEQ ID NO: 703566
cuuucgauaaguguuagcu

SEQ ID NO: 703568 - RNA, 19 nt, Artificial Sequence
  Description of Artificial Sequence: Synthetic oligonucleotide
  Sense strand starting at position 2860 of SEQ ID NO: 586249
acaagaauccuguggguuc

SEQ ID NO: 703569 - RNA, 19 nt, Artificial Sequence
  Description of Artificial Sequence: Synthetic oligonucleotide
  Antisense strand to SEQ ID NO: 703568
gaacccacaggauucuugu

SEQ ID NO: 703570 - RNA, 19 nt, Artificial Sequence
  Description of Artificial Sequence: Synthetic oligonucleotide
  Sense strand starting at position 2926 of SEQ ID NO: 586249
cuaagauuacugcagaugu

SEQ ID NO: 703571 - RNA, 19 nt, Artificial Sequence
  Description of Artificial Sequence: Synthetic oligonucleotide
  Antisense strand to SEQ ID NO: 703570
acaucugcaguaaucuuag

SEQ ID NO: 703572 - RNA, 19 nt, Artificial Sequence
  Description of Artificial Sequence: Synthetic oligonucleotide
  Sense strand starting at position 2959 of SEQ ID NO: 586249
aaggauuaaucggucauca

SEQ ID NO: 703573 - RNA, 19 nt, Artificial Sequence
  Description of Artificial Sequence: Synthetic oligonucleotide
  Antisense strand to SEQ ID NO: 703572
ugaugaccgauuaauccuu

SEQ ID NO: 703574 - RNA, 19 nt, Artificial Sequence
  Description of Artificial Sequence: Synthetic oligonucleotide
  Sense strand starting at position 2963 of SEQ ID NO: 586249
auuaaucggucaucagaug

SEQ ID NO: 703575 - RNA, 19 nt, Artificial Sequence
  Description of Artificial Sequence: Synthetic oligonucleotide
  Antisense strand to SEQ ID NO: 703574
caucugaugaccgauuaau

SEQ ID NO: 703576 - RNA, 19 nt, Artificial Sequence
  Description of Artificial Sequence: Synthetic oligonucleotide
  Sense strand starting at position 2971 of SEQ ID NO: 586249
gucaucagauguguuaaga

SEQ ID NO: 703577 - RNA, 19 nt, Artificial Sequence
  Description of Artificial Sequence: Synthetic oligonucleotide
  Antisense strand to SEQ ID NO: 703576
ucuuaacacaucugaugac

SEQ ID NO: 703578 - RNA, 19 nt, Artificial Sequence
  Description of Artificial Sequence: Synthetic oligonucleotide
  Sense strand starting at position 2998 of SEQ ID NO: 586249
uauugugcugaagaaaguu

SEQ ID NO: 703579 - RNA, 19 nt, Artificial Sequence
  Description of Artificial Sequence: Synthetic oligonucleotide
  Antisense strand to SEQ ID NO: 703578
aacuuucuucagcacaaua

SEQ ID NO: 703580 - RNA, 19 nt, Artificial Sequence
  Description of Artificial Sequence: Synthetic oligonucleotide
  Sense strand starting at position 3167 of SEQ ID NO: 586249
augggugguagucagauau

SEQ ID NO: 703581 - RNA, 19 nt, Artificial Sequence
  Description of Artificial Sequence: Synthetic oligonucleotide
  Antisense strand to SEQ ID NO: 703580
auaucugacuaccacccau

SEQ ID NO: 703582 - RNA, 19 nt, Artificial Sequence
  Description of Artificial Sequence: Synthetic oligonucleotide
  Sense strand starting at position 3171 of SEQ ID NO: 586249
gugguagucagauauggca

SEQ ID NO: 703583 - RNA, 19 nt, Artificial Sequence
  Description of Artificial Sequence: Synthetic oligonucleotide
  Antisense strand to SEQ ID NO: 703582
ugccauaucugacuaccac

SEQ ID NO: 703584 - RNA, 19 nt, Artificial Sequence
  Description of Artificial Sequence: Synthetic oligonucleotide
  Sense strand starting at position 3173 of SEQ ID NO: 586249
gguagucagauauggcaaa

SEQ ID NO: 703585 - RNA, 19 nt, Artificial Sequence
  Description of Artificial Sequence: Synthetic oligonucleotide
  Antisense strand to SEQ ID NO: 703584
uuugccauaucugacuacc

SEQ ID NO: 703586 - RNA, 19 nt, Artificial Sequence
  Description of Artificial Sequence: Synthetic oligonucleotide
  Sense strand starting at position 3198 of SEQ ID NO: 586249
aaaggugauuugcaaauga

SEQ ID NO: 703587 - RNA, 19 nt, Artificial Sequence
  Description of Artificial Sequence: Synthetic oligonucleotide
  Antisense strand to SEQ ID NO: 703586
ucauuugcaaaucaccuuu

SEQ ID NO: 703588 - RNA, 19 nt, Artificial Sequence
  Description of Artificial Sequence: Synthetic oligonucleotide
  Sense strand starting at position 3303 of SEQ ID NO: 586249
uacaaaugagguuguaaua

SEQ ID NO: 703589 - RNA, 19 nt, Artificial Sequence
  Description of Artificial Sequence: Synthetic oligonucleotide
  Antisense strand to SEQ ID NO: 703588
uauuacaaccucauuugua

SEQ ID NO: 703590 - RNA, 19 nt, Artificial Sequence
  Description of Artificial Sequence: Synthetic oligonucleotide
  Sense strand starting at position 3339 of SEQ ID NO: 586249
gggcuuuguaaggauaagu

SEQ ID NO: 703591 - RNA, 19 nt, Artificial Sequence
  Description of Artificial Sequence: Synthetic oligonucleotide
  Antisense strand to SEQ ID NO: 703590
acuuauccuuacaaagccc

SEQ ID NO: 703592 - RNA, 19 nt, Artificial Sequence
  Description of Artificial Sequence: Synthetic oligonucleotide
  Sense strand starting at position 3344 of SEQ ID NO: 586249
uuguaaggauaagugagau

SEQ ID NO: 703593 - RNA, 19 nt, Artificial Sequence
  Description of Artificial Sequence: Synthetic oligonucleotide
  Antisense strand to SEQ ID NO: 703592
aucucacuuauccuuacaa

SEQ ID NO: 703594 - RNA, 19 nt, Artificial Sequence
  Description of Artificial Sequence: Synthetic oligonucleotide
  Sense strand starting at position 3350 of SEQ ID NO: 586249
ggauaagugagaugaugua

SEQ ID NO: 703595 - RNA, 19 nt, Artificial Sequence
  Description of Artificial Sequence: Synthetic oligonucleotide
  Antisense strand to SEQ ID NO: 703594
uacaucaucucacuuaucc

SEQ ID NO: 703596 - RNA, 19 nt, Artificial Sequence
  Description of Artificial Sequence: Synthetic oligonucleotide
  Sense strand starting at position 3357 of SEQ ID NO: 586249
ugagaugauguaggugaau

SEQ ID NO: 703597 - RNA, 19 nt, Artificial Sequence
  Description of Artificial Sequence: Synthetic oligonucleotide
  Antisense strand to SEQ ID NO: 703596
auucaccuacaucaucuca

SEQ ID NO: 703598 - RNA, 19 nt, Artificial Sequence
  Description of Artificial Sequence: Synthetic oligonucleotide
  Sense strand starting at position 3359 of SEQ ID NO: 586249
agaugauguaggugaauga

SEQ ID NO: 703599 - RNA, 19 nt, Artificial Sequence
  Description of Artificial Sequence: Synthetic oligonucleotide
  Antisense strand to SEQ ID NO: 703598
ucauucaccuacaucaucu

SEQ ID NO: 703600 - RNA, 19 nt, Artificial Sequence
  Description of Artificial Sequence: Synthetic oligonucleotide
  Sense strand starting at position 3363 of SEQ ID NO: 586249
gauguaggugaaugaaaug

SEQ ID NO: 703601 - RNA, 19 nt, Artificial Sequence
  Description of Artificial Sequence: Synthetic oligonucleotide
  Antisense strand to SEQ ID NO: 703600
cauuucauucaccuacauc

SEQ ID NO: 703602 - RNA, 19 nt, Artificial Sequence
  Description of Artificial Sequence: Synthetic oligonucleotide
  Sense strand starting at position 3660 of SEQ ID NO: 586249
uuagaagucccugaaagca

SEQ ID NO: 703603 - RNA, 19 nt, Artificial Sequence
  Description of Artificial Sequence: Synthetic oligonucleotide
  Antisense strand to SEQ ID NO: 703602
ugcuuucagggacuucuaa

SEQ ID NO: 703604 - RNA, 19 nt, Artificial Sequence
  Description of Artificial Sequence: Synthetic oligonucleotide
  Sense strand starting at position 3849 of SEQ ID NO: 586249
gugaucugaguucaguaga

SEQ ID NO: 703605 - RNA, 19 nt, Artificial Sequence
  Description of Artificial Sequence: Synthetic oligonucleotide
  Antisense strand to SEQ ID NO: 703604
ucuacugaacucagaucac

SEQ ID NO: 703606 - RNA, 19 nt, Artificial Sequence
  Description of Artificial Sequence: Synthetic oligonucleotide
  Sense strand starting at position 94 of SEQ ID NO: 586250
ggcuguacuuguguguaaa

SEQ ID NO: 703607 - RNA, 19 nt, Artificial Sequence
  Description of Artificial Sequence: Synthetic oligonucleotide
  Antisense strand to SEQ ID NO: 703606
uuuacacacaaguacagcc

SEQ ID NO: 703608 - RNA, 19 nt, Artificial Sequence
  Description of Artificial Sequence: Synthetic oligonucleotide
  Sense strand starting at position 226 of SEQ ID NO: 586250
uguugucuggauggugauu

SEQ ID NO: 703609 - RNA, 19 nt, Artificial Sequence
  Description of Artificial Sequence: Synthetic oligonucleotide
  Antisense strand to SEQ ID NO: 703608
aaucaccauccagacaaca

SEQ ID NO: 703610 - RNA, 19 nt, Artificial Sequence
  Description of Artificial Sequence: Synthetic oligonucleotide
  Sense strand starting at position 235 of SEQ ID NO: 586250
gauggugauuguuugcuuu

SEQ ID NO: 703611 - RNA, 19 nt, Artificial Sequence
  Description of Artificial Sequence: Synthetic oligonucleotide
  Antisense strand to SEQ ID NO: 703610
aaagcaaacaaucaccauc

SEQ ID NO: 703612 - RNA, 19 nt, Artificial Sequence
  Description of Artificial Sequence: Synthetic oligonucleotide
  Sense strand starting at position 238 of SEQ ID NO: 586250
ggugauuguuugcuuuguu

SEQ ID NO: 703613 - RNA, 19 nt, Artificial Sequence
  Description of Artificial Sequence: Synthetic oligonucleotide
  Antisense strand to SEQ ID NO: 703612
aacaaagcaaacaaucacc

SEQ ID NO: 703614 - RNA, 19 nt, Artificial Sequence
  Description of Artificial Sequence: Synthetic oligonucleotide
  Sense strand starting at position 239 of SEQ ID NO: 586250
gugauuguuugcuuuguuu

SEQ ID NO: 703615 - RNA, 19 nt, Artificial Sequence
  Description of Artificial Sequence: Synthetic oligonucleotide
  Antisense strand to SEQ ID NO: 703614
aaacaaagcaaacaaucac

SEQ ID NO: 703616 - RNA, 19 nt, Artificial Sequence
  Description of Artificial Sequence: Synthetic oligonucleotide
  Sense strand starting at position 263 of SEQ ID NO: 586250
uucugaaucucuggucuua

SEQ ID NO: 703617 - RNA, 19 nt, Artificial Sequence
  Description of Artificial Sequence: Synthetic oligonucleotide
  Antisense strand to SEQ ID NO: 703616
uaagaccagagauucagaa

SEQ ID NO: 703618 - RNA, 19 nt, Artificial Sequence
  Description of Artificial Sequence: Synthetic oligonucleotide
  Sense strand starting at position 265 of SEQ ID NO: 586250
cugaaucucuggucuuacu

SEQ ID NO: 703619 - RNA, 19 nt, Artificial Sequence
  Description of Artificial Sequence: Synthetic oligonucleotide
  Antisense strand to SEQ ID NO: 703618
aguaagaccagagauucag

SEQ ID NO: 703620 - RNA, 19 nt, Artificial Sequence
  Description of Artificial Sequence: Synthetic oligonucleotide
  Sense strand starting at position 351 of SEQ ID NO: 586250
cagguuugcccauacugaa

SEQ ID NO: 703621 - RNA, 19 nt, Artificial Sequence
  Description of Artificial Sequence: Synthetic oligonucleotide
  Antisense strand to SEQ ID NO: 703620
uucaguaugggcaaaccug

SEQ ID NO: 703622 - RNA, 19 nt, Artificial Sequence
  Description of Artificial Sequence: Synthetic oligonucleotide
  Sense strand starting at position 358 of SEQ ID NO: 586250
gcccauacugaaugugcaa

SEQ ID NO: 703623 - RNA, 19 nt, Artificial Sequence
  Description of Artificial Sequence: Synthetic oligonucleotide
  Antisense strand to SEQ ID NO: 703622
uugcacauucaguaugggc

SEQ ID NO: 703624 - RNA, 19 nt, Artificial Sequence
  Description of Artificial Sequence: Synthetic oligonucleotide
  Sense strand starting at position 390 of SEQ ID NO: 586250
acaggaaguacuggcaaau

SEQ ID NO: 703625 - RNA, 19 nt, Artificial Sequence
  Description of Artificial Sequence: Synthetic oligonucleotide
  Antisense strand to SEQ ID NO: 703624
auuugccaguacuuccugu

SEQ ID NO: 703626 - RNA, 19 nt, Artificial Sequence
  Description of Artificial Sequence: Synthetic oligonucleotide
  Sense strand starting at position 531 of SEQ ID NO: 586250
gcaauaagguauccuaaag

SEQ ID NO: 703627 - RNA, 19 nt, Artificial Sequence
  Description of Artificial Sequence: Synthetic oligonucleotide
  Antisense strand to SEQ ID NO: 703626
cuuuaggauaccuuauugc

SEQ ID NO: 703628 - RNA, 19 nt, Artificial Sequence
  Description of Artificial Sequence: Synthetic oligonucleotide
  Sense strand starting at position 562 of SEQ ID NO: 586250
aggcuuccauucgaaguua

SEQ ID NO: 703629 - RNA, 19 nt, Artificial Sequence
  Description of Artificial Sequence: Synthetic oligonucleotide
  Antisense strand to SEQ ID NO: 703628
uaacuucgaauggaagccu

SEQ ID NO: 703630 - RNA, 19 nt, Artificial Sequence
  Description of Artificial Sequence: Synthetic oligonucleotide
  Sense strand starting at position 790 of SEQ ID NO: 586250
agggaugcauccugaacuu

SEQ ID NO: 703631 - RNA, 19 nt, Artificial Sequence
  Description of Artificial Sequence: Synthetic oligonucleotide
  Antisense strand to SEQ ID NO: 703630
aaguucaggaugcaucccu

SEQ ID NO: 703632 - RNA, 19 nt, Artificial Sequence
  Description of Artificial Sequence: Synthetic oligonucleotide
  Sense strand starting at position 799 of SEQ ID NO: 586250
uccugaacuucugucaaag

SEQ ID NO: 703633 - RNA, 19 nt, Artificial Sequence
  Description of Artificial Sequence: Synthetic oligonucleotide
  Antisense strand to SEQ ID NO: 703632
cuuugacagaaguucagga

SEQ ID NO: 703634 - RNA, 19 nt, Artificial Sequence
  Description of Artificial Sequence: Synthetic oligonucleotide
  Sense strand starting at position 2320 of SEQ ID NO: 586250
cccggucaugcucagcaau

SEQ ID NO: 703635 - RNA, 19 nt, Artificial Sequence
  Description of Artificial Sequence: Synthetic oligonucleotide
  Antisense strand to SEQ ID NO: 703634
auugcugagcaugaccggg

SEQ ID NO: 703636 - RNA, 19 nt, Artificial Sequence
  Description of Artificial Sequence: Synthetic oligonucleotide
  Sense strand starting at position 2358 of SEQ ID NO: 586250
gugggacuguuuccuccaa

SEQ ID NO: 703637 - RNA, 19 nt, Artificial Sequence
  Description of Artificial Sequence: Synthetic oligonucleotide
  Antisense strand to SEQ ID NO: 703636
uuggaggaaacagucccac

SEQ ID NO: 703638 - RNA, 19 nt, Artificial Sequence
  Description of Artificial Sequence: Synthetic oligonucleotide
  Sense strand starting at position 2359 of SEQ ID NO: 586250
ugggacuguuuccuccaaa

SEQ ID NO: 703639 - RNA, 19 nt, Artificial Sequence
  Description of Artificial Sequence: Synthetic oligonucleotide
  Antisense strand to SEQ ID NO: 703638
uuuggaggaaacaguccca

SEQ ID NO: 703640 - RNA, 19 nt, Artificial Sequence
  Description of Artificial Sequence: Synthetic oligonucleotide
  Sense strand starting at position 2938 of SEQ ID NO: 586250
cuggaagauuccuaagcca

SEQ ID NO: 703641 - RNA, 19 nt, Artificial Sequence
  Description of Artificial Sequence: Synthetic oligonucleotide
  Antisense strand to SEQ ID NO: 703640
uggcuuaggaaucuuccag

SEQ ID NO: 703642 - RNA, 19 nt, Artificial Sequence
  Description of Artificial Sequence: Synthetic oligonucleotide
  Sense strand starting at position 3005 of SEQ ID NO: 586250
gcuaguauugucugcguuc

SEQ ID NO: 703643 - RNA, 19 nt, Artificial Sequence
  Description of Artificial Sequence: Synthetic oligonucleotide
  Antisense strand to SEQ ID NO: 703642
gaacgcagacaauacuagc

SEQ ID NO: 703644 - RNA, 19 nt, Artificial Sequence
  Description of Artificial Sequence: Synthetic oligonucleotide
  Sense strand starting at position 3060 of SEQ ID NO: 586250
aacagaggguucuugaauc

SEQ ID NO: 703645 - RNA, 19 nt, Artificial Sequence
  Description of Artificial Sequence: Synthetic oligonucleotide
  Antisense strand to SEQ ID NO: 703644
gauucaagaacccucuguu

SEQ ID NO: 703646 - RNA, 19 nt, Artificial Sequence
  Description of Artificial Sequence: Synthetic oligonucleotide
  Sense strand starting at position 3229 of SEQ ID NO: 586250
ggugguuuauuccugacac

SEQ ID NO: 703647 - RNA, 19 nt, Artificial Sequence
  Description of Artificial Sequence: Synthetic oligonucleotide
  Antisense strand to SEQ ID NO: 703646
gugucaggaauaaaccacc

SEQ ID NO: 703648 - RNA, 19 nt, Artificial Sequence
  Description of Artificial Sequence: Synthetic oligonucleotide
  Sense strand starting at position 3320 of SEQ ID NO: 586250
aguguaacagugugaggau

SEQ ID NO: 703649 - RNA, 19 nt, Artificial Sequence
  Description of Artificial Sequence: Synthetic oligonucleotide
  Antisense strand to SEQ ID NO: 703648
auccucacacuguuacacu

SEQ ID NO: 703650 - RNA, 19 nt, Artificial Sequence
  Description of Artificial Sequence: Synthetic oligonucleotide
  Sense strand starting at position 3321 of SEQ ID NO: 586250
guguaacagugugaggauu

SEQ ID NO: 703651 - RNA, 19 nt, Artificial Sequence
  Description of Artificial Sequence: Synthetic oligonucleotide
  Antisense strand to SEQ ID NO: 703650
aauccucacacuguuacac

SEQ ID NO: 703652 - RNA, 19 nt, Artificial Sequence
  Description of Artificial Sequence: Synthetic oligonucleotide
  Sense strand starting at position 3323 of SEQ ID NO: 586250
guaacagugugaggauuac

SEQ ID NO: 703653 - RNA, 19 nt, Artificial Sequence
  Description of Artificial Sequence: Synthetic oligonucleotide
  Antisense strand to SEQ ID NO: 703652
guaauccucacacuguuac

SEQ ID NO: 703654 - RNA, 19 nt, Artificial Sequence
  Description of Artificial Sequence: Synthetic oligonucleotide
  Sense strand starting at position 3334 of SEQ ID NO: 586250
aggauuacuagaggucacu

SEQ ID NO: 703655 - RNA, 19 nt, Artificial Sequence
  Description of Artificial Sequence: Synthetic oligonucleotide
  Antisense strand to SEQ ID NO: 703654
agugaccucuaguaauccu

SEQ ID NO: 703656 - RNA, 19 nt, Artificial Sequence
  Description of Artificial Sequence: Synthetic oligonucleotide
  Sense strand starting at position 3467 of SEQ ID NO: 586250
cuuagaauuccuuaaacgu

SEQ ID NO: 703657 - RNA, 19 nt, Artificial Sequence
  Description of Artificial Sequence: Synthetic oligonucleotide
  Antisense strand to SEQ ID NO: 703656
acguuuaaggaauucuaag

SEQ ID NO: 703658 - RNA, 19 nt, Artificial Sequence
  Description of Artificial Sequence: Synthetic oligonucleotide
  Sense strand starting at position 3475 of SEQ ID NO: 586250
uccuuaaacgucugggaau

SEQ ID NO: 703659 - RNA, 19 nt, Artificial Sequence
  Description of Artificial Sequence: Synthetic oligonucleotide
  Antisense strand to SEQ ID NO: 703658
auucccagacguuuaagga

SEQ ID NO: 703660 - RNA, 19 nt, Artificial Sequence
  Description of Artificial Sequence: Synthetic oligonucleotide
  Sense strand starting at position 3554 of SEQ ID NO: 586250
gcucaaaugucucugacau

SEQ ID NO: 703661 - RNA, 19 nt, Artificial Sequence
  Description of Artificial Sequence: Synthetic oligonucleotide
  Antisense strand to SEQ ID NO: 703660
augucagagacauuugagc

SEQ ID NO: 703662 - RNA, 19 nt, Artificial Sequence
  Description of Artificial Sequence: Synthetic oligonucleotide
  Sense strand starting at position 3601 of SEQ ID NO: 586250
cccuguuccacgggaagga

SEQ ID NO: 703663 - RNA, 19 nt, Artificial Sequence
  Description of Artificial Sequence: Synthetic oligonucleotide
  Antisense strand to SEQ ID NO: 703662
uccuucccguggaacaggg

SEQ ID NO: 703664 - RNA, 19 nt, Artificial Sequence
  Description of Artificial Sequence: Synthetic oligonucleotide
  Sense strand starting at position 3803 of SEQ ID NO: 586250
ggaucuuaguuaucuuugu

SEQ ID NO: 703665 - RNA, 19 nt, Artificial Sequence
  Description of Artificial Sequence: Synthetic oligonucleotide
  Antisense strand to SEQ ID NO: 703664
acaaagauaacuaagaucc

SEQ ID NO: 703666 - RNA, 19 nt, Artificial Sequence
  Description of Artificial Sequence: Synthetic oligonucleotide
  Sense strand starting at position 3825 of SEQ ID NO: 586250
uccagcaucugacagaguu

SEQ ID NO: 703667 - RNA, 19 nt, Artificial Sequence
  Description of Artificial Sequence: Synthetic oligonucleotide
  Antisense strand to SEQ ID NO: 703666
aacucugucagaugcugga

SEQ ID NO: 703668 - RNA, 19 nt, Artificial Sequence
  Description of Artificial Sequence: Synthetic oligonucleotide
  Sense strand starting at position 3835 of SEQ ID NO: 586250
gacagaguuucugacacag

SEQ ID NO: 703669 - RNA, 19 nt, Artificial Sequence
  Description of Artificial Sequence: Synthetic oligonucleotide
  Antisense strand to SEQ ID NO: 703668
cugugucagaaacucuguc

SEQ ID NO: 703670 - RNA, 19 nt, Artificial Sequence
  Description of Artificial Sequence: Synthetic oligonucleotide
  Sense strand starting at position 3895 of SEQ ID NO: 586250
ugcccugucuuaucauuua

SEQ ID NO: 703671 - RNA, 19 nt, Artificial Sequence
  Description of Artificial Sequence: Synthetic oligonucleotide
  Antisense strand to SEQ ID NO: 703670
uaaaugauaagacagggca

SEQ ID NO: 703672 - RNA, 19 nt, Artificial Sequence
  Description of Artificial Sequence: Synthetic oligonucleotide
  Sense strand starting at position 3922 of SEQ ID NO: 586250
ucauauuugugguguuaaa

SEQ ID NO: 703673 - RNA, 19 nt, Artificial Sequence
  Description of Artificial Sequence: Synthetic oligonucleotide
  Antisense strand to SEQ ID NO: 703672
uuuaacaccacaaauauga

SEQ ID NO: 703674 - RNA, 19 nt, Artificial Sequence
  Description of Artificial Sequence: Synthetic oligonucleotide
  Sense strand starting at position 3934 of SEQ ID NO: 586250
uguuaaauguugccuauua

SEQ ID NO: 703675 - RNA, 19 nt, Artificial Sequence
  Description of Artificial Sequence: Synthetic oligonucleotide
  Antisense strand to SEQ ID NO: 703674
uaauaggcaacauuuaaca

SEQ ID NO: 703676 - RNA, 19 nt, Artificial Sequence
  Description of Artificial Sequence: Synthetic oligonucleotide
  Sense strand starting at position 3935 of SEQ ID NO: 586250
guuaaauguugccuauuaa

SEQ ID NO: 703677 - RNA, 19 nt, Artificial Sequence
  Description of Artificial Sequence: Synthetic oligonucleotide
  Antisense strand to SEQ ID NO: 703676
uuaauaggcaacauuuaac

SEQ ID NO: 703678 - RNA, 19 nt, Artificial Sequence
  Description of Artificial Sequence: Synthetic oligonucleotide
  Sense strand starting at position 3945 of SEQ ID NO: 586250
gccuauuaaugaugauguu

SEQ ID NO: 703679 - RNA, 19 nt, Artificial Sequence
  Description of Artificial Sequence: Synthetic oligonucleotide
  Antisense strand to SEQ ID NO: 703678
aacaucaucauuaauaggc

SEQ ID NO: 703680 - RNA, 19 nt, Artificial Sequence
  Description of Artificial Sequence: Synthetic oligonucleotide
  Sense strand starting at position 3954 of SEQ ID NO: 586250
ugaugauguugcccauaag

SEQ ID NO: 703681 - RNA, 19 nt, Artificial Sequence
  Description of Artificial Sequence: Synthetic oligonucleotide
  Antisense strand to SEQ ID NO: 703680
cuuaugggcaacaucauca

SEQ ID NO: 703682 - RNA, 19 nt, Artificial Sequence
  Description of Artificial Sequence: Synthetic oligonucleotide
  Sense strand starting at position 3955 of SEQ ID NO: 586250
gaugauguugcccauaagu

SEQ ID NO: 703683 - RNA, 19 nt, Artificial Sequence
  Description of Artificial Sequence: Synthetic oligonucleotide
  Antisense strand to SEQ ID NO: 703682
acuuaugggcaacaucauc

SEQ ID NO: 703684 - RNA, 19 nt, Artificial Sequence
  Description of Artificial Sequence: Synthetic oligonucleotide
  Sense strand starting at position 3957 of SEQ ID NO: 586250
ugauguugcccauaagucu

SEQ ID NO: 703685 - RNA, 19 nt, Artificial Sequence
  Description of Artificial Sequence: Synthetic oligonucleotide
  Antisense strand to SEQ ID NO: 703684
agacuuaugggcaacauca

SEQ ID NO: 703686 - RNA, 19 nt, Artificial Sequence
  Description of Artificial Sequence: Synthetic oligonucleotide
  Sense strand starting at position 11 of SEQ ID NO: 586251
agcggaucuuucggucaaa

SEQ ID NO: 703687 - RNA, 19 nt, Artificial Sequence
  Description of Artificial Sequence: Synthetic oligonucleotide
  Antisense strand to SEQ ID NO: 703686
uuugaccgaaagauccgcu

SEQ ID NO: 703688 - RNA, 19 nt, Artificial Sequence
  Description of Artificial Sequence: Synthetic oligonucleotide
  Sense strand starting at position 12 of SEQ ID NO: 586251
gcggaucuuucggucaaau

SEQ ID NO: 703689 - RNA, 19 nt, Artificial Sequence
  Description of Artificial Sequence: Synthetic oligonucleotide
  Antisense strand to SEQ ID NO: 703688
auuugaccgaaagauccgc

SEQ ID NO: 703690 - RNA, 19 nt, Artificial Sequence
  Description of Artificial Sequence: Synthetic oligonucleotide
  Sense strand starting at position 14 of SEQ ID NO: 586251
ggaucuuucggucaaaugg

SEQ ID NO: 703691 - RNA, 19 nt, Artificial Sequence
  Description of Artificial Sequence: Synthetic oligonucleotide
  Antisense strand to SEQ ID NO: 703690
ccauuugaccgaaagaucc

SEQ ID NO: 703692 - RNA, 19 nt, Artificial Sequence
  Description of Artificial Sequence: Synthetic oligonucleotide
  Sense strand starting at position 37 of SEQ ID NO: 586251
acaguuacaguuuggagau

SEQ ID NO: 703693 - RNA, 19 nt, Artificial Sequence
  Description of Artificial Sequence: Synthetic oligonucleotide
  Antisense strand to SEQ ID NO: 703692
aucuccaaacuguaacugu

SEQ ID NO: 703694 - RNA, 19 nt, Artificial Sequence
  Description of Artificial Sequence: Synthetic oligonucleotide
  Sense strand starting at position 38 of SEQ ID NO: 586251
caguuacaguuuggagauu

SEQ ID NO: 703695 - RNA, 19 nt, Artificial Sequence
  Description of Artificial Sequence: Synthetic oligonucleotide
  Antisense strand to SEQ ID NO: 703694
aaucuccaaacuguaacug

SEQ ID NO: 703696 - RNA, 19 nt, Artificial Sequence
  Description of Artificial Sequence: Synthetic oligonucleotide
  Sense strand starting at position 680 of SEQ ID NO: 586251
ggcuguacuuguguguaaa

SEQ ID NO: 703697 - RNA, 19 nt, Artificial Sequence
  Description of Artificial Sequence: Synthetic oligonucleotide
  Antisense strand to SEQ ID NO: 703696
uuuacacacaaguacagcc

SEQ ID NO: 703698 - RNA, 19 nt, Artificial Sequence
  Description of Artificial Sequence: Synthetic oligonucleotide
  Sense strand starting at position 812 of SEQ ID NO: 586251
uguugucuggauggugauu

SEQ ID NO: 703699 - RNA, 19 nt, Artificial Sequence
  Description of Artificial Sequence: Synthetic oligonucleotide
  Antisense strand to SEQ ID NO: 703698
aaucaccauccagacaaca

SEQ ID NO: 703700 - RNA, 19 nt, Artificial Sequence
  Description of Artificial Sequence: Synthetic oligonucleotide
  Sense strand starting at position 821 of SEQ ID NO: 586251
gauggugauuguuugcuuu

SEQ ID NO: 703701 - RNA, 19 nt, Artificial Sequence
  Description of Artificial Sequence: Synthetic oligonucleotide
  Antisense strand to SEQ ID NO: 703700
aaagcaaacaaucaccauc

SEQ ID NO: 703702 - RNA, 19 nt, Artificial Sequence
  Description of Artificial Sequence: Synthetic oligonucleotide
  Sense strand starting at position 824 of SEQ ID NO: 586251
ggugauuguuugcuuuguu

SEQ ID NO: 703703 - RNA, 19 nt, Artificial Sequence
  Description of Artificial Sequence: Synthetic oligonucleotide
  Antisense strand to SEQ ID NO: 703702
aacaaagcaaacaaucacc

SEQ ID NO: 703704 - RNA, 19 nt, Artificial Sequence
  Description of Artificial Sequence: Synthetic oligonucleotide
  Sense strand starting at position 825 of SEQ ID NO: 586251
gugauuguuugcuuuguuu

SEQ ID NO: 703705 - RNA, 19 nt, Artificial Sequence
  Description of Artificial Sequence: Synthetic oligonucleotide
  Antisense strand to SEQ ID NO: 703704
aaacaaagcaaacaaucac

SEQ ID NO: 703706 - RNA, 19 nt, Artificial Sequence
  Description of Artificial Sequence: Synthetic oligonucleotide
  Sense strand starting at position 849 of SEQ ID NO: 586251
uucugaaucucuggucuua

SEQ ID NO: 703707 - RNA, 19 nt, Artificial Sequence
  Description of Artificial Sequence: Synthetic oligonucleotide
  Antisense strand to SEQ ID NO: 703706
uaagaccagagauucagaa

SEQ ID NO: 703708 - RNA, 19 nt, Artificial Sequence
  Description of Artificial Sequence: Synthetic oligonucleotide
  Sense strand starting at position 851 of SEQ ID NO: 586251
cugaaucucuggucuuacu

SEQ ID NO: 703709 - RNA, 19 nt, Artificial Sequence
  Description of Artificial Sequence: Synthetic oligonucleotide
  Antisense strand to SEQ ID NO: 703708
aguaagaccagagauucag

SEQ ID NO: 703710 - RNA, 19 nt, Artificial Sequence
  Description of Artificial Sequence: Synthetic oligonucleotide
  Sense strand starting at position 937 of SEQ ID NO: 586251
cagguuugcccauacugaa

SEQ ID NO: 703711 - RNA, 19 nt, Artificial Sequence
  Description of Artificial Sequence: Synthetic oligonucleotide
  Antisense strand to SEQ ID NO: 703710
uucaguaugggcaaaccug

SEQ ID NO: 703712 - RNA, 19 nt, Artificial Sequence
  Description of Artificial Sequence: Synthetic oligonucleotide
  Sense strand starting at position 944 of SEQ ID NO: 586251
gcccauacugaaugugcaa

SEQ ID NO: 703713 - RNA, 19 nt, Artificial Sequence
  Description of Artificial Sequence: Synthetic oligonucleotide
  Antisense strand to SEQ ID NO: 703712
uugcacauucaguaugggc

SEQ ID NO: 703714 - RNA, 19 nt, Artificial Sequence
  Description of Artificial Sequence: Synthetic oligonucleotide
  Sense strand starting at position 976 of SEQ ID NO: 586251
acaggaaguacuggcaaau

SEQ ID NO: 703715 - RNA, 19 nt, Artificial Sequence
  Description of Artificial Sequence: Synthetic oligonucleotide
  Antisense strand to SEQ ID NO: 703714
auuugccaguacuuccugu

SEQ ID NO: 703716 - RNA, 19 nt, Artificial Sequence
  Description of Artificial Sequence: Synthetic oligonucleotide
  Sense strand starting at position 1062 of SEQ ID NO: 586251
acacguguguugggaggau

SEQ ID NO: 703717 - RNA, 19 nt, Artificial Sequence
  Description of Artificial Sequence: Synthetic oligonucleotide
  Antisense strand to SEQ ID NO: 703716
auccucccaacacacgugu

SEQ ID NO: 703718 - RNA, 19 nt, Artificial Sequence
  Description of Artificial Sequence: Synthetic oligonucleotide
  Sense strand starting at position 1117 of SEQ ID NO: 586251
gcaauaagguauccuaaag

SEQ ID NO: 703719 - RNA, 19 nt, Artificial Sequence
  Description of Artificial Sequence: Synthetic oligonucleotide
  Antisense strand to SEQ ID NO: 703718
cuuuaggauaccuuauugc

SEQ ID NO: 703720 - RNA, 19 nt, Artificial Sequence
  Description of Artificial Sequence: Synthetic oligonucleotide
  Sense strand starting at position 1148 of SEQ ID NO: 586251
aggcuuccauucgaaguua

SEQ ID NO: 703721 - RNA, 19 nt, Artificial Sequence
  Description of Artificial Sequence: Synthetic oligonucleotide
  Antisense strand to SEQ ID NO: 703720
uaacuucgaauggaagccu

SEQ ID NO: 703722 - RNA, 19 nt, Artificial Sequence
  Description of Artificial Sequence: Synthetic oligonucleotide
  Sense strand starting at position 1376 of SEQ ID NO: 586251
agggaugcauccugaacuu

SEQ ID NO: 703723 - RNA, 19 nt, Artificial Sequence
  Description of Artificial Sequence: Synthetic oligonucleotide
  Antisense strand to SEQ ID NO: 703722
aaguucaggaugcaucccu

SEQ ID NO: 703724 - RNA, 19 nt, Artificial Sequence
  Description of Artificial Sequence: Synthetic oligonucleotide
  Sense strand starting at position 1385 of SEQ ID NO: 586251
uccugaacuucugucaaag

SEQ ID NO: 703725 - RNA, 19 nt, Artificial Sequence
  Description of Artificial Sequence: Synthetic oligonucleotide
  Antisense strand to SEQ ID NO: 703724
cuuugacagaaguucagga

SEQ ID NO: 703726 - RNA, 19 nt, Artificial Sequence
  Description of Artificial Sequence: Synthetic oligonucleotide
  Sense strand starting at position 2906 of SEQ ID NO: 586251
cccggucaugcucagcaau

SEQ ID NO: 703727 - RNA, 19 nt, Artificial Sequence
  Description of Artificial Sequence: Synthetic oligonucleotide
  Antisense strand to SEQ ID NO: 703726
auugcugagcaugaccggg

SEQ ID NO: 703728 - RNA, 19 nt, Artificial Sequence
  Description of Artificial Sequence: Synthetic oligonucleotide
  Sense strand starting at position 2944 of SEQ ID NO: 586251
gugggacuguuuccuccaa

SEQ ID NO: 703729 - RNA, 19 nt, Artificial Sequence
  Description of Artificial Sequence: Synthetic oligonucleotide
  Antisense strand to SEQ ID NO: 703728
uuggaggaaacagucccac

SEQ ID NO: 703730 - RNA, 19 nt, Artificial Sequence
  Description of Artificial Sequence: Synthetic oligonucleotide
  Sense strand starting at position 2945 of SEQ ID NO: 586251
ugggacuguuuccuccaaa

SEQ ID NO: 703731 - RNA, 19 nt, Artificial Sequence
  Description of Artificial Sequence: Synthetic oligonucleotide
  Antisense strand to SEQ ID NO: 703730
uuuggaggaaacaguccca

SEQ ID NO: 703732 - RNA, 19 nt, Artificial Sequence
  Description of Artificial Sequence: Synthetic oligonucleotide
  Sense strand starting at position 3524 of SEQ ID NO: 586251
cuggaagauuccuaagcca

SEQ ID NO: 703733 - RNA, 19 nt, Artificial Sequence
  Description of Artificial Sequence: Synthetic oligonucleotide
  Antisense strand to SEQ ID NO: 703732
uggcuuaggaaucuuccag

SEQ ID NO: 703734 - RNA, 19 nt, Artificial Sequence
  Description of Artificial Sequence: Synthetic oligonucleotide
  Sense strand starting at position 3591 of SEQ ID NO: 586251
gcuaguauugucugcguuc

SEQ ID NO: 703735 - RNA, 19 nt, Artificial Sequence
  Description of Artificial Sequence: Synthetic oligonucleotide
  Antisense strand to SEQ ID NO: 703734
gaacgcagacaauacuagc

SEQ ID NO: 703736 - RNA, 19 nt, Artificial Sequence
  Description of Artificial Sequence: Synthetic oligonucleotide
  Sense strand starting at position 3646 of SEQ ID NO: 586251
aacagaggguucuugaauc

SEQ ID NO: 703737 - RNA, 19 nt, Artificial Sequence
  Description of Artificial Sequence: Synthetic oligonucleotide
  Antisense strand to SEQ ID NO: 703736
gauucaagaacccucuguu

SEQ ID NO: 703738 - RNA, 19 nt, Artificial Sequence
  Description of Artificial Sequence: Synthetic oligonucleotide
  Sense strand starting at position 3815 of SEQ ID NO: 586251
ggugguuuauuccugacac

SEQ ID NO: 703739 - RNA, 19 nt, Artificial Sequence
  Description of Artificial Sequence: Synthetic oligonucleotide
  Antisense strand to SEQ ID NO: 703738
gugucaggaauaaaccacc

SEQ ID NO: 703740 - RNA, 19 nt, Artificial Sequence
  Description of Artificial Sequence: Synthetic oligonucleotide
  Sense strand starting at position 3816 of SEQ ID NO: 586251
gugguuuauuccugacacc

SEQ ID NO: 703741 - RNA, 19 nt, Artificial Sequence
  Description of Artificial Sequence: Synthetic oligonucleotide
  Antisense strand to SEQ ID NO: 703740
ggugucaggaauaaaccac

SEQ ID NO: 703742 - RNA, 19 nt, Artificial Sequence
  Description of Artificial Sequence: Synthetic oligonucleotide
  Sense strand starting at position 3906 of SEQ ID NO: 586251
aguguaacagugugaggau

SEQ ID NO: 703743 - RNA, 19 nt, Artificial Sequence
  Description of Artificial Sequence: Synthetic oligonucleotide
  Antisense strand to SEQ ID NO: 703742
auccucacacuguuacacu

SEQ ID NO: 703744 - RNA, 19 nt, Artificial Sequence
  Description of Artificial Sequence: Synthetic oligonucleotide
  Sense strand starting at position 3907 of SEQ ID NO: 586251
guguaacagugugaggauu

SEQ ID NO: 703745 - RNA, 19 nt, Artificial Sequence
  Description of Artificial Sequence: Synthetic oligonucleotide
  Antisense strand to SEQ ID NO: 703744
aauccucacacuguuacac

SEQ ID NO: 703746 - RNA, 19 nt, Artificial Sequence
  Description of Artificial Sequence: Synthetic oligonucleotide
  Sense strand starting at position 3909 of SEQ ID NO: 586251
guaacagugugaggauuac

SEQ ID NO: 703747 - RNA, 19 nt, Artificial Sequence
  Description of Artificial Sequence: Synthetic oligonucleotide
  Antisense strand to SEQ ID NO: 703746
guaauccucacacuguuac

SEQ ID NO: 703748 - RNA, 19 nt, Artificial Sequence
  Description of Artificial Sequence: Synthetic oligonucleotide
  Sense strand starting at position 3920 of SEQ ID NO: 586251
aggauuacuagaggucacu

SEQ ID NO: 703749 - RNA, 19 nt, Artificial Sequence
  Description of Artificial Sequence: Synthetic oligonucleotide
  Antisense strand to SEQ ID NO: 703748
agugaccucuaguaauccu

SEQ ID NO: 703750 - RNA, 19 nt, Artificial Sequence
  Description of Artificial Sequence: Synthetic oligonucleotide
  Sense strand starting at position 172 of SEQ ID NO: 586252
ugagaugacgcaugugaac

SEQ ID NO: 703751 - RNA, 19 nt, Artificial Sequence
  Description of Artificial Sequence: Synthetic oligonucleotide
  Antisense strand to SEQ ID NO: 703750
guucacaugcgucaucuca

SEQ ID NO: 703752 - RNA, 19 nt, Artificial Sequence
  Description of Artificial Sequence: Synthetic oligonucleotide
  Sense strand starting at position 174 of SEQ ID NO: 586252
agaugacgcaugugaacau

SEQ ID NO: 703753 - RNA, 19 nt, Artificial Sequence
  Description of Artificial Sequence: Synthetic oligonucleotide
  Antisense strand to SEQ ID NO: 703752
auguucacaugcgucaucu

SEQ ID NO: 703754 - RNA, 19 nt, Artificial Sequence
  Description of Artificial Sequence: Synthetic oligonucleotide
  Sense strand starting at position 183 of SEQ ID NO: 586252
augugaacaugguuugaca

SEQ ID NO: 703755 - RNA, 19 nt, Artificial Sequence
  Description of Artificial Sequence: Synthetic oligonucleotide
  Antisense strand to SEQ ID NO: 703754
ugucaaaccauguucacau

SEQ ID NO: 703756 - RNA, 19 nt, Artificial Sequence
  Description of Artificial Sequence: Synthetic oligonucleotide
  Sense strand starting at position 185 of SEQ ID NO: 586252
gugaacaugguuugacaau

SEQ ID NO: 703757 - RNA, 19 nt, Artificial Sequence
  Description of Artificial Sequence: Synthetic oligonucleotide
  Antisense strand to SEQ ID NO: 703756
auugucaaaccauguucac

SEQ ID NO: 703758 - RNA, 19 nt, Artificial Sequence
  Description of Artificial Sequence: Synthetic oligonucleotide
  Sense strand starting at position 243 of SEQ ID NO: 586252
cauuguugauauguggaca

SEQ ID NO: 703759 - RNA, 19 nt, Artificial Sequence
  Description of Artificial Sequence: Synthetic oligonucleotide
  Antisense strand to SEQ ID NO: 703758
uguccacauaucaacaaug

SEQ ID NO: 703760 - RNA, 19 nt, Artificial Sequence
  Description of Artificial Sequence: Synthetic oligonucleotide
  Sense strand starting at position 246 of SEQ ID NO: 586252
uguugauauguggacagau

SEQ ID NO: 703761 - RNA, 19 nt, Artificial Sequence
  Description of Artificial Sequence: Synthetic oligonucleotide
  Antisense strand to SEQ ID NO: 703760
aucuguccacauaucaaca

SEQ ID NO: 703762 - RNA, 19 nt, Artificial Sequence
  Description of Artificial Sequence: Synthetic oligonucleotide
  Sense strand starting at position 353 of SEQ ID NO: 586252
uuguaugaucagcaaagua

SEQ ID NO: 703763 - RNA, 19 nt, Artificial Sequence
  Description of Artificial Sequence: Synthetic oligonucleotide
  Antisense strand to SEQ ID NO: 703762
uacuuugcugaucauacaa

SEQ ID NO: 703764 - RNA, 19 nt, Artificial Sequence
  Description of Artificial Sequence: Synthetic oligonucleotide
  Sense strand starting at position 649 of SEQ ID NO: 586252
guuugaagauuauucugaa

SEQ ID NO: 703765 - RNA, 19 nt, Artificial Sequence
  Description of Artificial Sequence: Synthetic oligonucleotide
  Antisense strand to SEQ ID NO: 703764
uucagaauaaucuucaaac

SEQ ID NO: 703766 - RNA, 19 nt, Artificial Sequence
  Description of Artificial Sequence: Synthetic oligonucleotide
  Sense strand starting at position 740 of SEQ ID NO: 586252
accuauaaugagugagucu

SEQ ID NO: 703767 - RNA, 19 nt, Artificial Sequence
  Description of Artificial Sequence: Synthetic oligonucleotide
  Antisense strand to SEQ ID NO: 703766
agacucacucauuauaggu

SEQ ID NO: 703768 - RNA, 19 nt, Artificial Sequence
  Description of Artificial Sequence: Synthetic oligonucleotide
  Sense strand starting at position 747 of SEQ ID NO: 586252
augagugagucuucaccga

SEQ ID NO: 703769 - RNA, 19 nt, Artificial Sequence
  Description of Artificial Sequence: Synthetic oligonucleotide
  Antisense strand to SEQ ID NO: 703768
ucggugaagacucacucau

SEQ ID NO: 703770 - RNA, 19 nt, Artificial Sequence
  Description of Artificial Sequence: Synthetic oligonucleotide
  Sense strand starting at position 751 of SEQ ID NO: 586252
gugagucuucaccgaaaga

SEQ ID NO: 703771 - RNA, 19 nt, Artificial Sequence
  Description of Artificial Sequence: Synthetic oligonucleotide
  Antisense strand to SEQ ID NO: 703770
ucuuucggugaagacucac

SEQ ID NO: 703772 - RNA, 19 nt, Artificial Sequence
  Description of Artificial Sequence: Synthetic oligonucleotide
  Sense strand starting at position 813 of SEQ ID NO: 586252
augauaacuuaagagaaca

SEQ ID NO: 703773 - RNA, 19 nt, Artificial Sequence
  Description of Artificial Sequence: Synthetic oligonucleotide
  Antisense strand to SEQ ID NO: 703772
uguucucuuaaguuaucau

SEQ ID NO: 703774 - RNA, 19 nt, Artificial Sequence
  Description of Artificial Sequence: Synthetic oligonucleotide
  Sense strand starting at position 889 of SEQ ID NO: 586252
ccaugagaacuuuagccca

SEQ ID NO: 703775 - RNA, 19 nt, Artificial Sequence
  Description of Artificial Sequence: Synthetic oligonucleotide
  Antisense strand to SEQ ID NO: 703774
ugggcuaaaguucucaugg

SEQ ID NO: 703776 - RNA, 19 nt, Artificial Sequence
  Description of Artificial Sequence: Synthetic oligonucleotide
  Sense strand starting at position 891 of SEQ ID NO: 586252
augagaacuuuagcccagu

SEQ ID NO: 703777 - RNA, 19 nt, Artificial Sequence
  Description of Artificial Sequence: Synthetic oligonucleotide
  Antisense strand to SEQ ID NO: 703776
acugggcuaaaguucucau

SEQ ID NO: 703778 - RNA, 19 nt, Artificial Sequence
  Description of Artificial Sequence: Synthetic oligonucleotide
  Sense strand starting at position 894 of SEQ ID NO: 586252
agaacuuuagcccagucua

SEQ ID NO: 703779 - RNA, 19 nt, Artificial Sequence
  Description of Artificial Sequence: Synthetic oligonucleotide
  Antisense strand to SEQ ID NO: 703778
uagacugggcuaaaguucu

SEQ ID NO: 703780 - RNA, 19 nt, Artificial Sequence
  Description of Artificial Sequence: Synthetic oligonucleotide
  Sense strand starting at position 929 of SEQ ID NO: 586252
caagaauucuggucauugu

SEQ ID NO: 703781 - RNA, 19 nt, Artificial Sequence
  Description of Artificial Sequence: Synthetic oligonucleotide
  Antisense strand to SEQ ID NO: 703780
acaaugaccagaauucuug

SEQ ID NO: 703782 - RNA, 19 nt, Artificial Sequence
  Description of Artificial Sequence: Synthetic oligonucleotide
  Sense strand starting at position 930 of SEQ ID NO: 586252
aagaauucuggucauugua

SEQ ID NO: 703783 - RNA, 19 nt, Artificial Sequence
  Description of Artificial Sequence: Synthetic oligonucleotide
  Antisense strand to SEQ ID NO: 703782
uacaaugaccagaauucuu

SEQ ID NO: 703784 - RNA, 19 nt, Artificial Sequence
  Description of Artificial Sequence: Synthetic oligonucleotide
  Sense strand starting at position 932 of SEQ ID NO: 586252
gaauucuggucauuguacu

SEQ ID NO: 703785 - RNA, 19 nt, Artificial Sequence
  Description of Artificial Sequence: Synthetic oligonucleotide
  Antisense strand to SEQ ID NO: 703784
aguacaaugaccagaauuc

SEQ ID NO: 703786 - RNA, 19 nt, Artificial Sequence
  Description of Artificial Sequence: Synthetic oligonucleotide
  Sense strand starting at position 1008 of SEQ ID NO: 586252
aggugucuuggcuaaauaa

SEQ ID NO: 703787 - RNA, 19 nt, Artificial Sequence
  Description of Artificial Sequence: Synthetic oligonucleotide
  Antisense strand to SEQ ID NO: 703786
uuauuuagccaagacaccu

SEQ ID NO: 703788 - RNA, 19 nt, Artificial Sequence
  Description of Artificial Sequence: Synthetic oligonucleotide
  Sense strand starting at position 1219 of SEQ ID NO: 586252
uagggucauuuagaaccau

SEQ ID NO: 703789 - RNA, 19 nt, Artificial Sequence
  Description of Artificial Sequence: Synthetic oligonucleotide
  Antisense strand to SEQ ID NO: 703788
augguucuaaaugacccua

SEQ ID NO: 703790 - RNA, 19 nt, Artificial Sequence
  Description of Artificial Sequence: Synthetic oligonucleotide
  Sense strand starting at position 1260 of SEQ ID NO: 586252
gaaacaggucuaggugaca

SEQ ID NO: 703791 - RNA, 19 nt, Artificial Sequence
  Description of Artificial Sequence: Synthetic oligonucleotide
  Antisense strand to SEQ ID NO: 703790
ugucaccuagaccuguuuc

SEQ ID NO: 703792 - RNA, 19 nt, Artificial Sequence
  Description of Artificial Sequence: Synthetic oligonucleotide
  Sense strand starting at position 1473 of SEQ ID NO: 586252
aauguuaaguacguugaaa

SEQ ID NO: 703793 - RNA, 19 nt, Artificial Sequence
  Description of Artificial Sequence: Synthetic oligonucleotide
  Antisense strand to SEQ ID NO: 703792
uuucaacguacuuaacauu

SEQ ID NO: 703794 - RNA, 19 nt, Artificial Sequence
  Description of Artificial Sequence: Synthetic oligonucleotide
  Sense strand starting at position 2088 of SEQ ID NO: 586252
gccaauggucuugaaacaa

SEQ ID NO: 703795 - RNA, 19 nt, Artificial Sequence
  Description of Artificial Sequence: Synthetic oligonucleotide
  Antisense strand to SEQ ID NO: 703794
uuguuucaagaccauuggc

SEQ ID NO: 703796 - RNA, 19 nt, Artificial Sequence
  Description of Artificial Sequence: Synthetic oligonucleotide
  Sense strand starting at position 2175 of SEQ ID NO: 586252
ugggauaugugguuucuaa

SEQ ID NO: 703797 - RNA, 19 nt, Artificial Sequence
  Description of Artificial Sequence: Synthetic oligonucleotide
  Antisense strand to SEQ ID NO: 703796
uuagaaaccacauauccca

SEQ ID NO: 703798 - RNA, 19 nt, Artificial Sequence
  Description of Artificial Sequence: Synthetic oligonucleotide
  Sense strand starting at position 2389 of SEQ ID NO: 586252
ugacuuacgucuccuauuu

SEQ ID NO: 703799 - RNA, 19 nt, Artificial Sequence
  Description of Artificial Sequence: Synthetic oligonucleotide
  Antisense strand to SEQ ID NO: 703798
aaauaggagacguaaguca

SEQ ID NO: 703800 - RNA, 19 nt, Artificial Sequence
  Description of Artificial Sequence: Synthetic oligonucleotide
  Sense strand starting at position 2431 of SEQ ID NO: 586252
agucgauuggccguggcaa

SEQ ID NO: 703801 - RNA, 19 nt, Artificial Sequence
  Description of Artificial Sequence: Synthetic oligonucleotide
  Antisense strand to SEQ ID NO: 703800
uugccacggccaaucgacu

SEQ ID NO: 703802 - RNA, 19 nt, Artificial Sequence
  Description of Artificial Sequence: Synthetic oligonucleotide
  Sense strand starting at position 3007 of SEQ ID NO: 586252
uaauaaauuuggucgacgu

SEQ ID NO: 703803 - RNA, 19 nt, Artificial Sequence
  Description of Artificial Sequence: Synthetic oligonucleotide
  Antisense strand to SEQ ID NO: 703802
acgucgaccaaauuuauua

SEQ ID NO: 703804 - RNA, 19 nt, Artificial Sequence
  Description of Artificial Sequence: Synthetic oligonucleotide
  Sense strand starting at position 3097 of SEQ ID NO: 586252
uguucuauucuugaguauc

SEQ ID NO: 703805 - RNA, 19 nt, Artificial Sequence
  Description of Artificial Sequence: Synthetic oligonucleotide
  Antisense strand to SEQ ID NO: 703804
gauacucaagaauagaaca

SEQ ID NO: 703806 - RNA, 19 nt, Artificial Sequence
  Description of Artificial Sequence: Synthetic oligonucleotide
  Sense strand starting at position 3100 of SEQ ID NO: 586252
ucuauucuugaguauccga

SEQ ID NO: 703807 - RNA, 19 nt, Artificial Sequence
  Description of Artificial Sequence: Synthetic oligonucleotide
  Antisense strand to SEQ ID NO: 703806
ucggauacucaagaauaga

SEQ ID NO: 703808 - RNA, 19 nt, Artificial Sequence
  Description of Artificial Sequence: Synthetic oligonucleotide
  Sense strand starting at position 3108 of SEQ ID NO: 586252
ugaguauccgaguaguauu

SEQ ID NO: 703809 - RNA, 19 nt, Artificial Sequence
  Description of Artificial Sequence: Synthetic oligonucleotide
  Antisense strand to SEQ ID NO: 703808
aauacuacucggauacuca

SEQ ID NO: 703810 - RNA, 19 nt, Artificial Sequence
  Description of Artificial Sequence: Synthetic oligonucleotide
  Sense strand starting at position 3182 of SEQ ID NO: 586252
ugguauaauccaggucaaa

SEQ ID NO: 703811 - RNA, 19 nt, Artificial Sequence
  Description of Artificial Sequence: Synthetic oligonucleotide
  Antisense strand to SEQ ID NO: 703810
uuugaccuggauuauacca

SEQ ID NO: 703812 - RNA, 19 nt, Artificial Sequence
  Description of Artificial Sequence: Synthetic oligonucleotide
  Sense strand starting at position 3217 of SEQ ID NO: 586252
gcuuguguucuucuuuauc

SEQ ID NO: 703813 - RNA, 19 nt, Artificial Sequence
  Description of Artificial Sequence: Synthetic oligonucleotide
  Antisense strand to SEQ ID NO: 703812
gauaaagaagaacacaagc

SEQ ID NO: 703814 - RNA, 19 nt, Artificial Sequence
  Description of Artificial Sequence: Synthetic oligonucleotide
  Sense strand starting at position 3269 of SEQ ID NO: 586252
gguugaaguuucuugacaa

SEQ ID NO: 703815 - RNA, 19 nt, Artificial Sequence
  Description of Artificial Sequence: Synthetic oligonucleotide
  Antisense strand to SEQ ID NO: 703814
uugucaagaaacuucaacc

SEQ ID NO: 703816 - RNA, 19 nt, Artificial Sequence
  Description of Artificial Sequence: Synthetic oligonucleotide
  Sense strand starting at position 3388 of SEQ ID NO: 586252
ugguuugaguauuugguuu

SEQ ID NO: 703817 - RNA, 19 nt, Artificial Sequence
  Description of Artificial Sequence: Synthetic oligonucleotide
  Antisense strand to SEQ ID NO: 703816
aaaccaaauacucaaacca

SEQ ID NO: 703818 - RNA, 19 nt, Artificial Sequence
  Description of Artificial Sequence: Synthetic oligonucleotide
  Sense strand starting at position 3468 of SEQ ID NO: 586252
aguagcaagcuuugaagaa

SEQ ID NO: 703819 - RNA, 19 nt, Artificial Sequence
  Description of Artificial Sequence: Synthetic oligonucleotide
  Antisense strand to SEQ ID NO: 703818
uucuucaaagcuugcuacu

SEQ ID NO: 703820 - RNA, 19 nt, Artificial Sequence
  Description of Artificial Sequence: Synthetic oligonucleotide
  Sense strand starting at position 3610 of SEQ ID NO: 586252
ucauucuuccugggacuga

SEQ ID NO: 703821 - RNA, 19 nt, Artificial Sequence
  Description of Artificial Sequence: Synthetic oligonucleotide
  Antisense strand to SEQ ID NO: 703820
ucagucccaggaagaauga

SEQ ID NO: 703822 - RNA, 19 nt, Artificial Sequence
  Description of Artificial Sequence: Synthetic oligonucleotide
  Sense strand starting at position 3725 of SEQ ID NO: 586252
ugccguaguccucccuuau

SEQ ID NO: 703823 - RNA, 19 nt, Artificial Sequence
  Description of Artificial Sequence: Synthetic oligonucleotide
  Antisense strand to SEQ ID NO: 703822
auaagggaggacuacggca

SEQ ID NO: 703824 - RNA, 19 nt, Artificial Sequence
  Description of Artificial Sequence: Synthetic oligonucleotide
  Sense strand starting at position 3726 of SEQ ID NO: 586252
gccguaguccucccuuauc

SEQ ID NO: 703825 - RNA, 19 nt, Artificial Sequence
  Description of Artificial Sequence: Synthetic oligonucleotide
  Antisense strand to SEQ ID NO: 703824
gauaagggaggacuacggc

SEQ ID NO: 703826 - RNA, 19 nt, Artificial Sequence
  Description of Artificial Sequence: Synthetic oligonucleotide
  Sense strand starting at position 3746 of SEQ ID NO: 586252
accguuuggcugucugagu

SEQ ID NO: 703827 - RNA, 19 nt, Artificial Sequence
  Description of Artificial Sequence: Synthetic oligonucleotide
  Antisense strand to SEQ ID NO: 703826
acucagacagccaaacggu

SEQ ID NO: 703828 - RNA, 19 nt, Artificial Sequence
  Description of Artificial Sequence: Synthetic oligonucleotide
  Sense strand starting at position 3954 of SEQ ID NO: 586252
aggauuugguacuauuugu

SEQ ID NO: 703829 - RNA, 19 nt, Artificial Sequence
  Description of Artificial Sequence: Synthetic oligonucleotide
  Antisense strand to SEQ ID NO: 703828
acaaauaguaccaaauccu

SEQ ID NO: 703830 - RNA, 19 nt, Artificial Sequence
  Description of Artificial Sequence: Synthetic oligonucleotide
  Sense strand starting at position 262 of SEQ ID NO: 586253
uuaggagcucaguaaauau

SEQ ID NO: 703831 - RNA, 19 nt, Artificial Sequence
  Description of Artificial Sequence: Synthetic oligonucleotide
  Antisense strand to SEQ ID NO: 703830
auauuuacugagcuccuaa

SEQ ID NO: 703832 - RNA, 19 nt, Artificial Sequence
  Description of Artificial Sequence: Synthetic oligonucleotide
  Sense strand starting at position 356 of SEQ ID NO: 586253
uguaaucacugagcccaua

SEQ ID NO: 703833 - RNA, 19 nt, Artificial Sequence
  Description of Artificial Sequence: Synthetic oligonucleotide
  Antisense strand to SEQ ID NO: 703832
uaugggcucagugauuaca

SEQ ID NO: 703834 - RNA, 19 nt, Artificial Sequence
  Description of Artificial Sequence: Synthetic oligonucleotide
  Sense strand starting at position 428 of SEQ ID NO: 586253
cgaucaaagcuuuggaauc

SEQ ID NO: 703835 - RNA, 19 nt, Artificial Sequence
  Description of Artificial Sequence: Synthetic oligonucleotide
  Antisense strand to SEQ ID NO: 703834
gauuccaaagcuuugaucg

SEQ ID NO: 703836 - RNA, 19 nt, Artificial Sequence
  Description of Artificial Sequence: Synthetic oligonucleotide
  Sense strand starting at position 463 of SEQ ID NO: 586253
acgagugggcuucagaaua

SEQ ID NO: 703837 - RNA, 19 nt, Artificial Sequence
  Description of Artificial Sequence: Synthetic oligonucleotide
  Antisense strand to SEQ ID NO: 703836
uauucugaagcccacucgu

SEQ ID NO: 703838 - RNA, 19 nt, Artificial Sequence
  Description of Artificial Sequence: Synthetic oligonucleotide
  Sense strand starting at position 514 of SEQ ID NO: 586253
ucgaacuucuguccacaaa

SEQ ID NO: 703839 - RNA, 19 nt, Artificial Sequence
  Description of Artificial Sequence: Synthetic oligonucleotide
  Antisense strand to SEQ ID NO: 703838
uuuguggacagaaguucga

SEQ ID NO: 703840 - RNA, 19 nt, Artificial Sequence
  Description of Artificial Sequence: Synthetic oligonucleotide
  Sense strand starting at position 515 of SEQ ID NO: 586253
cgaacuucuguccacaaag

SEQ ID NO: 703841 - RNA, 19 nt, Artificial Sequence
  Description of Artificial Sequence: Synthetic oligonucleotide
  Antisense strand to SEQ ID NO: 703840
cuuuguggacagaaguucg

SEQ ID NO: 703842 - RNA, 19 nt, Artificial Sequence
  Description of Artificial Sequence: Synthetic oligonucleotide
  Sense strand starting at position 624 of SEQ ID NO: 586253
aaauaaugucuucggagga

SEQ ID NO: 703843 - RNA, 19 nt, Artificial Sequence
  Description of Artificial Sequence: Synthetic oligonucleotide
  Antisense strand to SEQ ID NO: 703842
uccuccgaagacauuauuu

SEQ ID NO: 703844 - RNA, 19 nt, Artificial Sequence
  Description of Artificial Sequence: Synthetic oligonucleotide
  Sense strand starting at position 643 of SEQ ID NO: 586253
cuuccagaccagugaggua

SEQ ID NO: 703845 - RNA, 19 nt, Artificial Sequence
  Description of Artificial Sequence: Synthetic oligonucleotide
  Antisense strand to SEQ ID NO: 703844
uaccucacuggucuggaag

SEQ ID NO: 703846 - RNA, 19 nt, Artificial Sequence
  Description of Artificial Sequence: Synthetic oligonucleotide
  Sense strand starting at position 655 of SEQ ID NO: 586253
ugagguagaguccaacagu

SEQ ID NO: 703847 - RNA, 19 nt, Artificial Sequence
  Description of Artificial Sequence: Synthetic oligonucleotide
  Antisense strand to SEQ ID NO: 703846
acuguuggacucuaccuca

SEQ ID NO: 703848 - RNA, 19 nt, Artificial Sequence
  Description of Artificial Sequence: Synthetic oligonucleotide
  Sense strand starting at position 860 of SEQ ID NO: 586253
caacuucuucgcgcguaaa

SEQ ID NO: 703849 - RNA, 19 nt, Artificial Sequence
  Description of Artificial Sequence: Synthetic oligonucleotide
  Antisense strand to SEQ ID NO: 703848
uuuacgcgcgaagaaguug

SEQ ID NO: 703850 - RNA, 19 nt, Artificial Sequence
  Description of Artificial Sequence: Synthetic oligonucleotide
  Sense strand starting at position 1981 of SEQ ID NO: 586253
gccggcugccuuucuuuaa

SEQ ID NO: 703851 - RNA, 19 nt, Artificial Sequence
  Description of Artificial Sequence: Synthetic oligonucleotide
  Antisense strand to SEQ ID NO: 703850
uuaaagaaaggcagccggc

SEQ ID NO: 703852 - RNA, 19 nt, Artificial Sequence
  Description of Artificial Sequence: Synthetic oligonucleotide
  Sense strand starting at position 2086 of SEQ ID NO: 586253
aggccaguuccuggaagau

SEQ ID NO: 703853 - RNA, 19 nt, Artificial Sequence
  Description of Artificial Sequence: Synthetic oligonucleotide
  Antisense strand to SEQ ID NO: 703852
aucuuccaggaacuggccu

SEQ ID NO: 703854 - RNA, 19 nt, Artificial Sequence
  Description of Artificial Sequence: Synthetic oligonucleotide
  Sense strand starting at position 2297 of SEQ ID NO: 586253
aaggauguuccugguauca

SEQ ID NO: 703855 - RNA, 19 nt, Artificial Sequence
  Description of Artificial Sequence: Synthetic oligonucleotide
  Antisense strand to SEQ ID NO: 703854
ugauaccaggaacauccuu

SEQ ID NO: 703856 - RNA, 19 nt, Artificial Sequence
  Description of Artificial Sequence: Synthetic oligonucleotide
  Sense strand starting at position 2313 of SEQ ID NO: 586253
ucaucacagcuagggaauu

SEQ ID NO: 703857 - RNA, 19 nt, Artificial Sequence
  Description of Artificial Sequence: Synthetic oligonucleotide
  Antisense strand to SEQ ID NO: 703856
aauucccuagcugugauga

SEQ ID NO: 703858 - RNA, 19 nt, Artificial Sequence
  Description of Artificial Sequence: Synthetic oligonucleotide
  Sense strand starting at position 2442 of SEQ ID NO: 586253
ucaagaagccaguaguaau

SEQ ID NO: 703859 - RNA, 19 nt, Artificial Sequence
  Description of Artificial Sequence: Synthetic oligonucleotide
  Antisense strand to SEQ ID NO: 703858
auuacuacuggcuucuuga

SEQ ID NO: 703860 - RNA, 19 nt, Artificial Sequence
  Description of Artificial Sequence: Synthetic oligonucleotide
  Sense strand starting at position 2552 of SEQ ID NO: 586253
ccugcuuauccagaaagca

SEQ ID NO: 703861 - RNA, 19 nt, Artificial Sequence
  Description of Artificial Sequence: Synthetic oligonucleotide
  Antisense strand to SEQ ID NO: 703860
ugcuuucuggauaagcagg

SEQ ID NO: 703862 - RNA, 19 nt, Artificial Sequence
  Description of Artificial Sequence: Synthetic oligonucleotide
  Sense strand starting at position 2605 of SEQ ID NO: 586253
ugcucaaguugaucaaaga

SEQ ID NO: 703863 - RNA, 19 nt, Artificial Sequence
  Description of Artificial Sequence: Synthetic oligonucleotide
  Antisense strand to SEQ ID NO: 703862
ucuuugaucaacuugagca

SEQ ID NO: 703864 - RNA, 19 nt, Artificial Sequence
  Description of Artificial Sequence: Synthetic oligonucleotide
  Sense strand starting at position 2606 of SEQ ID NO: 586253
gcucaaguugaucaaagau

SEQ ID NO: 703865 - RNA, 19 nt, Artificial Sequence
  Description of Artificial Sequence: Synthetic oligonucleotide
  Antisense strand to SEQ ID NO: 703864
aucuuugaucaacuugagc

SEQ ID NO: 703866 - RNA, 19 nt, Artificial Sequence
  Description of Artificial Sequence: Synthetic oligonucleotide
  Sense strand starting at position 2669 of SEQ ID NO: 586253
auacacaguucuuuaugga

SEQ ID NO: 703867 - RNA, 19 nt, Artificial Sequence
  Description of Artificial Sequence: Synthetic oligonucleotide
  Antisense strand to SEQ ID NO: 703866
uccauaaagaacuguguau

SEQ ID NO: 703868 - RNA, 19 nt, Artificial Sequence
  Description of Artificial Sequence: Synthetic oligonucleotide
  Sense strand starting at position 2730 of SEQ ID NO: 586253
cccuaucauuuagaaagga

SEQ ID NO: 703869 - RNA, 19 nt, Artificial Sequence
  Description of Artificial Sequence: Synthetic oligonucleotide
  Antisense strand to SEQ ID NO: 703868
uccuuucuaaaugauaggg

SEQ ID NO: 703870 - RNA, 19 nt, Artificial Sequence
  Description of Artificial Sequence: Synthetic oligonucleotide
  Sense strand starting at position 2744 of SEQ ID NO: 586253
aaggaugcaucaucgcaga

SEQ ID NO: 703871 - RNA, 19 nt, Artificial Sequence
  Description of Artificial Sequence: Synthetic oligonucleotide
  Antisense strand to SEQ ID NO: 703870
ucugcgaugaugcauccuu

SEQ ID NO: 703872 - RNA, 19 nt, Artificial Sequence
  Description of Artificial Sequence: Synthetic oligonucleotide
  Sense strand starting at position 2749 of SEQ ID NO: 586253
ugcaucaucgcagacaaca

SEQ ID NO: 703873 - RNA, 19 nt, Artificial Sequence
  Description of Artificial Sequence: Synthetic oligonucleotide
  Antisense strand to SEQ ID NO: 703872
uguugucugcgaugaugca

SEQ ID NO: 703874 - RNA, 19 nt, Artificial Sequence
  Description of Artificial Sequence: Synthetic oligonucleotide
  Sense strand starting at position 2767 of SEQ ID NO: 586253
agauaagguuucguugaaa

SEQ ID NO: 703875 - RNA, 19 nt, Artificial Sequence
  Description of Artificial Sequence: Synthetic oligonucleotide
  Antisense strand to SEQ ID NO: 703874
uuucaacgaaaccuuaucu

SEQ ID NO: 703876 - RNA, 19 nt, Artificial Sequence
  Description of Artificial Sequence: Synthetic oligonucleotide
  Sense strand starting at position 2814 of SEQ ID NO: 586253
uuuguauugggaggagagu

SEQ ID NO: 703877 - RNA, 19 nt, Artificial Sequence
  Description of Artificial Sequence: Synthetic oligonucleotide
  Antisense strand to SEQ ID NO: 703876
acucuccucccaauacaaa

SEQ ID NO: 703878 - RNA, 19 nt, Artificial Sequence
  Description of Artificial Sequence: Synthetic oligonucleotide
  Sense strand starting at position 2827 of SEQ ID NO: 586253
gagaguaguggacauccuu

SEQ ID NO: 703879 - RNA, 19 nt, Artificial Sequence
  Description of Artificial Sequence: Synthetic oligonucleotide
  Antisense strand to SEQ ID NO: 703878
aaggauguccacuacucuc

SEQ ID NO: 703880 - RNA, 19 nt, Artificial Sequence
  Description of Artificial Sequence: Synthetic oligonucleotide
  Sense strand starting at position 2834 of SEQ ID NO: 586253
guggacauccuuuagucau

SEQ ID NO: 703881 - RNA, 19 nt, Artificial Sequence
  Description of Artificial Sequence: Synthetic oligonucleotide
  Antisense strand to SEQ ID NO: 703880
augacuaaaggauguccac

SEQ ID NO: 703882 - RNA, 19 nt, Artificial Sequence
  Description of Artificial Sequence: Synthetic oligonucleotide
  Sense strand starting at position 2925 of SEQ ID NO: 586253
augaaauaccaccgauuau

SEQ ID NO: 703883 - RNA, 19 nt, Artificial Sequence
  Description of Artificial Sequence: Synthetic oligonucleotide
  Antisense strand to SEQ ID NO: 703882
auaaucggugguauuucau

SEQ ID NO: 703884 - RNA, 19 nt, Artificial Sequence
  Description of Artificial Sequence: Synthetic oligonucleotide
  Sense strand starting at position 2962 of SEQ ID NO: 586253
uguugaaacugcuuagaac

SEQ ID NO: 703885 - RNA, 19 nt, Artificial Sequence
  Description of Artificial Sequence: Synthetic oligonucleotide
  Antisense strand to SEQ ID NO: 703884
guucuaagcaguuucaaca

SEQ ID NO: 703886 - RNA, 19 nt, Artificial Sequence
  Description of Artificial Sequence: Synthetic oligonucleotide
  Sense strand starting at position 2963 of SEQ ID NO: 586253
guugaaacugcuuagaaca

SEQ ID NO: 703887 - RNA, 19 nt, Artificial Sequence
  Description of Artificial Sequence: Synthetic oligonucleotide
  Antisense strand to SEQ ID NO: 703886
uguucuaagcaguuucaac

SEQ ID NO: 703888 - RNA, 19 nt, Artificial Sequence
  Description of Artificial Sequence: Synthetic oligonucleotide
  Sense strand starting at position 2979 of SEQ ID NO: 586253
acaggacaauuagauauuu

SEQ ID NO: 703889 - RNA, 19 nt, Artificial Sequence
  Description of Artificial Sequence: Synthetic oligonucleotide
  Antisense strand to SEQ ID NO: 703888
aaauaucuaauuguccugu

SEQ ID NO: 703890 - RNA, 19 nt, Artificial Sequence
  Description of Artificial Sequence: Synthetic oligonucleotide
  Sense strand starting at position 3113 of SEQ ID NO: 586253
ugcaguagugaacaaauaa

SEQ ID NO: 703891 - RNA, 19 nt, Artificial Sequence
  Description of Artificial Sequence: Synthetic oligonucleotide
  Antisense strand to SEQ ID NO: 703890
uuauuuguucacuacugca

SEQ ID NO: 703892 - RNA, 19 nt, Artificial Sequence
  Description of Artificial Sequence: Synthetic oligonucleotide
  Sense strand starting at position 3144 of SEQ ID NO: 586253
uugugauuuacauguaguu

SEQ ID NO: 703893 - RNA, 19 nt, Artificial Sequence
  Description of Artificial Sequence: Synthetic oligonucleotide
  Antisense strand to SEQ ID NO: 703892
aacuacauguaaaucacaa

SEQ ID NO: 703894 - RNA, 19 nt, Artificial Sequence
  Description of Artificial Sequence: Synthetic oligonucleotide
  Sense strand starting at position 3306 of SEQ ID NO: 586253
ucuagugaucuuuguauuu

SEQ ID NO: 703895 - RNA, 19 nt, Artificial Sequence
  Description of Artificial Sequence: Synthetic oligonucleotide
  Antisense strand to SEQ ID NO: 703894
aaauacaaagaucacuaga

SEQ ID NO: 703896 - RNA, 19 nt, Artificial Sequence
  Description of Artificial Sequence: Synthetic oligonucleotide
  Sense strand starting at position 3381 of SEQ ID NO: 586253
cuuuaugcauaaguagaau

SEQ ID NO: 703897 - RNA, 19 nt, Artificial Sequence
  Description of Artificial Sequence: Synthetic oligonucleotide
  Antisense strand to SEQ ID NO: 703896
auucuacuuaugcauaaag

SEQ ID NO: 703898 - RNA, 19 nt, Artificial Sequence
  Description of Artificial Sequence: Synthetic oligonucleotide
  Sense strand starting at position 3387 of SEQ ID NO: 586253
gcauaaguagaaugacgaa

SEQ ID NO: 703899 - RNA, 19 nt, Artificial Sequence
  Description of Artificial Sequence: Synthetic oligonucleotide
  Antisense strand to SEQ ID NO: 703898
uucgucauucuacuuaugc

SEQ ID NO: 703900 - RNA, 19 nt, Artificial Sequence
  Description of Artificial Sequence: Synthetic oligonucleotide
  Sense strand starting at position 3551 of SEQ ID NO: 586253
gaugucaaauucuugaaag

SEQ ID NO: 703901 - RNA, 19 nt, Artificial Sequence
  Description of Artificial Sequence: Synthetic oligonucleotide
  Antisense strand to SEQ ID NO: 703900
cuuucaagaauuugacauc

SEQ ID NO: 703902 - RNA, 19 nt, Artificial Sequence
  Description of Artificial Sequence: Synthetic oligonucleotide
  Sense strand starting at position 3648 of SEQ ID NO: 586253
ggaaccagcucucuagcaa

SEQ ID NO: 703903 - RNA, 19 nt, Artificial Sequence
  Description of Artificial Sequence: Synthetic oligonucleotide
  Antisense strand to SEQ ID NO: 703902
uugcuagagagcugguucc

SEQ ID NO: 703904 - RNA, 19 nt, Artificial Sequence
  Description of Artificial Sequence: Synthetic oligonucleotide
  Sense strand starting at position 3709 of SEQ ID NO: 586253
agcacacucugaucucaga

SEQ ID NO: 703905 - RNA, 19 nt, Artificial Sequence
  Description of Artificial Sequence: Synthetic oligonucleotide
  Antisense strand to SEQ ID NO: 703904
ucugagaucagagugugcu

SEQ ID NO: 703906 - RNA, 19 nt, Artificial Sequence
  Description of Artificial Sequence: Synthetic oligonucleotide
  Sense strand starting at position 3801 of SEQ ID NO: 586253
acaauuugcucuuuccgua

SEQ ID NO: 703907 - RNA, 19 nt, Artificial Sequence
  Description of Artificial Sequence: Synthetic oligonucleotide
  Antisense strand to SEQ ID NO: 703906
uacggaaagagcaaauugu

SEQ ID NO: 703908 - RNA, 19 nt, Artificial Sequence
  Description of Artificial Sequence: Synthetic oligonucleotide
  Sense strand starting at position 3878 of SEQ ID NO: 586253
uagagugagccaugagaaa

SEQ ID NO: 703909 - RNA, 19 nt, Artificial Sequence
  Description of Artificial Sequence: Synthetic oligonucleotide
  Antisense strand to SEQ ID NO: 703908
uuucucauggcucacucua

SEQ ID NO: 703910 - RNA, 19 nt, Artificial Sequence
  Description of Artificial Sequence: Synthetic oligonucleotide
  Sense strand starting at position 92 of SEQ ID NO: 586254
uuugguugccaggauaucu

SEQ ID NO: 703911 - RNA, 19 nt, Artificial Sequence
  Description of Artificial Sequence: Synthetic oligonucleotide
  Antisense strand to SEQ ID NO: 703910
agauauccuggcaaccaaa

SEQ ID NO: 703912 - RNA, 19 nt, Artificial Sequence
  Description of Artificial Sequence: Synthetic oligonucleotide
  Sense strand starting at position 241 of SEQ ID NO: 586254
guggugaagcuguggaaga

SEQ ID NO: 703913 - RNA, 19 nt, Artificial Sequence
  Description of Artificial Sequence: Synthetic oligonucleotide
  Antisense strand to SEQ ID NO: 703912
ucuuccacagcuucaccac

SEQ ID NO: 703914 - RNA, 19 nt, Artificial Sequence
  Description of Artificial Sequence: Synthetic oligonucleotide
  Sense strand starting at position 341 of SEQ ID NO: 586254
caguaaggcuuccuugcaa

SEQ ID NO: 703915 - RNA, 19 nt, Artificial Sequence
  Description of Artificial Sequence: Synthetic oligonucleotide
  Antisense strand to SEQ ID NO: 703914
uugcaaggaagccuuacug

SEQ ID NO: 703916 - RNA, 19 nt, Artificial Sequence
  Description of Artificial Sequence: Synthetic oligonucleotide
  Sense strand starting at position 354 of SEQ ID NO: 586254
uugcaaguugcugagauga

SEQ ID NO: 703917 - RNA, 19 nt, Artificial Sequence
  Description of Artificial Sequence: Synthetic oligonucleotide
  Antisense strand to SEQ ID NO: 703916
ucaucucagcaacuugcaa

SEQ ID NO: 703918 - RNA, 19 nt, Artificial Sequence
  Description of Artificial Sequence: Synthetic oligonucleotide
  Sense strand starting at position 421 of SEQ ID NO: 586254
caauaaaguggcgaucaua

SEQ ID NO: 703919 - RNA, 19 nt, Artificial Sequence
  Description of Artificial Sequence: Synthetic oligonucleotide
  Antisense strand to SEQ ID NO: 703918
uaugaucgccacuuuauug

SEQ ID NO: 703920 - RNA, 19 nt, Artificial Sequence
  Description of Artificial Sequence: Synthetic oligonucleotide
  Sense strand starting at position 424 of SEQ ID NO: 586254
uaaaguggcgaucauaacu

SEQ ID NO: 703921 - RNA, 19 nt, Artificial Sequence
  Description of Artificial Sequence: Synthetic oligonucleotide
  Antisense strand to SEQ ID NO: 703920
aguuaugaucgccacuuua

SEQ ID NO: 703922 - RNA, 19 nt, Artificial Sequence
  Description of Artificial Sequence: Synthetic oligonucleotide
  Sense strand starting at position 836 of SEQ ID NO: 586254
cccauagaauuguugagag

SEQ ID NO: 703923 - RNA, 19 nt, Artificial Sequence
  Description of Artificial Sequence: Synthetic oligonucleotide
  Antisense strand to SEQ ID NO: 703922
cucucaacaauucuauggg

SEQ ID NO: 703924 - RNA, 19 nt, Artificial Sequence
  Description of Artificial Sequence: Synthetic oligonucleotide
  Sense strand starting at position 848 of SEQ ID NO: 586254
uugagagaauuagauaaga

SEQ ID NO: 703925 - RNA, 19 nt, Artificial Sequence
  Description of Artificial Sequence: Synthetic oligonucleotide
  Antisense strand to SEQ ID NO: 703924
ucuuaucuaauucucucaa

SEQ ID NO: 703926 - RNA, 19 nt, Artificial Sequence
  Description of Artificial Sequence: Synthetic oligonucleotide
  Sense strand starting at position 881 of SEQ ID NO: 586254
ccugaauagugacuuguua

SEQ ID NO: 703927 - RNA, 19 nt, Artificial Sequence
  Description of Artificial Sequence: Synthetic oligonucleotide
  Antisense strand to SEQ ID NO: 703926
uaacaagucacuauucagg

SEQ ID NO: 703928 - RNA, 19 nt, Artificial Sequence
  Description of Artificial Sequence: Synthetic oligonucleotide
  Sense strand starting at position 896 of SEQ ID NO: 586254
guuauauauuuggugcuca

SEQ ID NO: 703929 - RNA, 19 nt, Artificial Sequence
  Description of Artificial Sequence: Synthetic oligonucleotide
  Antisense strand to SEQ ID NO: 703928
ugagcaccaaauauauaac

SEQ ID NO: 703930 - RNA, 19 nt, Artificial Sequence
  Description of Artificial Sequence: Synthetic oligonucleotide
  Sense strand starting at position 904 of SEQ ID NO: 586254
uuuggugcucaguagauau

SEQ ID NO: 703931 - RNA, 19 nt, Artificial Sequence
  Description of Artificial Sequence: Synthetic oligonucleotide
  Antisense strand to SEQ ID NO: 703930
auaucuacugagcaccaaa

SEQ ID NO: 703932 - RNA, 19 nt, Artificial Sequence
  Description of Artificial Sequence: Synthetic oligonucleotide
  Sense strand starting at position 908 of SEQ ID NO: 586254
gugcucaguagauauugaa

SEQ ID NO: 703933 - RNA, 19 nt, Artificial Sequence
  Description of Artificial Sequence: Synthetic oligonucleotide
  Antisense strand to SEQ ID NO: 703932
uucaauaucuacugagcac

SEQ ID NO: 703934 - RNA, 19 nt, Artificial Sequence
  Description of Artificial Sequence: Synthetic oligonucleotide
  Sense strand starting at position 931 of SEQ ID NO: 586254
aauccuucuccugguggau

SEQ ID NO: 703935 - RNA, 19 nt, Artificial Sequence
  Description of Artificial Sequence: Synthetic oligonucleotide
  Antisense strand to SEQ ID NO: 703934
auccaccaggagaaggauu

SEQ ID NO: 703936 - RNA, 19 nt, Artificial Sequence
  Description of Artificial Sequence: Synthetic oligonucleotide
  Sense strand starting at position 1478 of SEQ ID NO: 586254
ugacuucuccagggaugca

SEQ ID NO: 703937 - RNA, 19 nt, Artificial Sequence
  Description of Artificial Sequence: Synthetic oligonucleotide
  Antisense strand to SEQ ID NO: 703936
ugcaucccuggagaaguca

SEQ ID NO: 703938 - RNA, 19 nt, Artificial Sequence
  Description of Artificial Sequence: Synthetic oligonucleotide
  Sense strand starting at position 1513 of SEQ ID NO: 586254
ugaccuugcuucucaggga

SEQ ID NO: 703939 - RNA, 19 nt, Artificial Sequence
  Description of Artificial Sequence: Synthetic oligonucleotide
  Antisense strand to SEQ ID NO: 703938
ucccugagaagcaagguca

SEQ ID NO: 703940 - RNA, 19 nt, Artificial Sequence
  Description of Artificial Sequence: Synthetic oligonucleotide
  Sense strand starting at position 1643 of SEQ ID NO: 586254
cucgguucucaggaauucu

SEQ ID NO: 703941 - RNA, 19 nt, Artificial Sequence
  Description of Artificial Sequence: Synthetic oligonucleotide
  Antisense strand to SEQ ID NO: 703940
agaauuccugagaaccgag

SEQ ID NO: 703942 - RNA, 19 nt, Artificial Sequence
  Description of Artificial Sequence: Synthetic oligonucleotide
  Sense strand starting at position 1654 of SEQ ID NO: 586254
ggaauucucuuggaaacaa

SEQ ID NO: 703943 - RNA, 19 nt, Artificial Sequence
  Description of Artificial Sequence: Synthetic oligonucleotide
  Antisense strand to SEQ ID NO: 703942
uuguuuccaagagaauucc

SEQ ID NO: 703944 - RNA, 19 nt, Artificial Sequence
  Description of Artificial Sequence: Synthetic oligonucleotide
  Sense strand starting at position 1723 of SEQ ID NO: 586254
agagaagagccacgucuuu

SEQ ID NO: 703945 - RNA, 19 nt, Artificial Sequence
  Description of Artificial Sequence: Synthetic oligonucleotide
  Antisense strand to SEQ ID NO: 703944
aaagacguggcucuucucu

SEQ ID NO: 703946 - RNA, 19 nt, Artificial Sequence
  Description of Artificial Sequence: Synthetic oligonucleotide
  Sense strand starting at position 1779 of SEQ ID NO: 586254
gcuugaacccugcaccaaa

SEQ ID NO: 703947 - RNA, 19 nt, Artificial Sequence
  Description of Artificial Sequence: Synthetic oligonucleotide
  Antisense strand to SEQ ID NO: 703946
uuuggugcaggguucaagc

SEQ ID NO: 703948 - RNA, 19 nt, Artificial Sequence
  Description of Artificial Sequence: Synthetic oligonucleotide
  Sense strand starting at position 1908 of SEQ ID NO: 586254
cauccugucggaggucuua

SEQ ID NO: 703949 - RNA, 19 nt, Artificial Sequence
  Description of Artificial Sequence: Synthetic oligonucleotide
  Antisense strand to SEQ ID NO: 703948
uaagaccuccgacaggaug

SEQ ID NO: 703950 - RNA, 19 nt, Artificial Sequence
  Description of Artificial Sequence: Synthetic oligonucleotide
  Sense strand starting at position 1919 of SEQ ID NO: 586254
aggucuuacccguagggau

SEQ ID NO: 703951 - RNA, 19 nt, Artificial Sequence
  Description of Artificial Sequence: Synthetic oligonucleotide
  Antisense strand to SEQ ID NO: 703950
aucccuacggguaagaccu

SEQ ID NO: 703952 - RNA, 19 nt, Artificial Sequence
  Description of Artificial Sequence: Synthetic oligonucleotide
  Sense strand starting at position 1964 of SEQ ID NO: 586254
acagaaggcugguuacuau

SEQ ID NO: 703953 - RNA, 19 nt, Artificial Sequence
  Description of Artificial Sequence: Synthetic oligonucleotide
  Antisense strand to SEQ ID NO: 703952
auaguaaccagccuucugu

SEQ ID NO: 703954 - RNA, 19 nt, Artificial Sequence
  Description of Artificial Sequence: Synthetic oligonucleotide
  Sense strand starting at position 1997 of SEQ ID NO: 586254
ccaugucucagagagcaga

SEQ ID NO: 703955 - RNA, 19 nt, Artificial Sequence
  Description of Artificial Sequence: Synthetic oligonucleotide
  Antisense strand to SEQ ID NO: 703954
ucugcucucugagacaugg

SEQ ID NO: 703956 - RNA, 19 nt, Artificial Sequence
  Description of Artificial Sequence: Synthetic oligonucleotide
  Sense strand starting at position 2154 of SEQ ID NO: 586254
ccuccacgcuuccuugaaa

SEQ ID NO: 703957 - RNA, 19 nt, Artificial Sequence
  Description of Artificial Sequence: Synthetic oligonucleotide
  Antisense strand to SEQ ID NO: 703956
uuucaaggaagcguggagg

SEQ ID NO: 703958 - RNA, 19 nt, Artificial Sequence
  Description of Artificial Sequence: Synthetic oligonucleotide
  Sense strand starting at position 2224 of SEQ ID NO: 586254
agcugagucaaggguuauc

SEQ ID NO: 703959 - RNA, 19 nt, Artificial Sequence
  Description of Artificial Sequence: Synthetic oligonucleotide
  Antisense strand to SEQ ID NO: 703958
gauaacccuugacucagcu

SEQ ID NO: 703960 - RNA, 19 nt, Artificial Sequence
  Description of Artificial Sequence: Synthetic oligonucleotide
  Sense strand starting at position 2307 of SEQ ID NO: 586254
uuggaugcauugucagaag

SEQ ID NO: 703961 - RNA, 19 nt, Artificial Sequence
  Description of Artificial Sequence: Synthetic oligonucleotide
  Antisense strand to SEQ ID NO: 703960
cuucugacaaugcauccaa

SEQ ID NO: 703962 - RNA, 19 nt, Artificial Sequence
  Description of Artificial Sequence: Synthetic oligonucleotide
  Sense strand starting at position 2387 of SEQ ID NO: 586254
cccugagccucaguuacuu

SEQ ID NO: 703963 - RNA, 19 nt, Artificial Sequence
  Description of Artificial Sequence: Synthetic oligonucleotide
  Antisense strand to SEQ ID NO: 703962
aaguaacugaggcucaggg

SEQ ID NO: 703964 - RNA, 19 nt, Artificial Sequence
  Description of Artificial Sequence: Synthetic oligonucleotide
  Sense strand starting at position 2416 of SEQ ID NO: 586254
ugggcagagucaucccuau

SEQ ID NO: 703965 - RNA, 19 nt, Artificial Sequence
  Description of Artificial Sequence: Synthetic oligonucleotide
  Antisense strand to SEQ ID NO: 703964
auagggaugacucugccca

SEQ ID NO: 703966 - RNA, 19 nt, Artificial Sequence
  Description of Artificial Sequence: Synthetic oligonucleotide
  Sense strand starting at position 2524 of SEQ ID NO: 586254
gagacagauuugugaucaa

SEQ ID NO: 703967 - RNA, 19 nt, Artificial Sequence
  Description of Artificial Sequence: Synthetic oligonucleotide
  Antisense strand to SEQ ID NO: 703966
uugaucacaaaucugucuc

SEQ ID NO: 703968 - RNA, 19 nt, Artificial Sequence
  Description of Artificial Sequence: Synthetic oligonucleotide
  Sense strand starting at position 2995 of SEQ ID NO: 586254
gccacuuagucaccaagau

SEQ ID NO: 703969 - RNA, 19 nt, Artificial Sequence
  Description of Artificial Sequence: Synthetic oligonucleotide
  Antisense strand to SEQ ID NO: 703968
aucuuggugacuaaguggc

SEQ ID NO: 703970 - RNA, 19 nt, Artificial Sequence
  Description of Artificial Sequence: Synthetic oligonucleotide
  Sense strand starting at position 3004 of SEQ ID NO: 586254
ucaccaagauucuagggaa

SEQ ID NO: 703971 - RNA, 19 nt, Artificial Sequence
  Description of Artificial Sequence: Synthetic oligonucleotide
  Antisense strand to SEQ ID NO: 703970
uucccuagaaucuugguga

SEQ ID NO: 703972 - RNA, 19 nt, Artificial Sequence
  Description of Artificial Sequence: Synthetic oligonucleotide
  Sense strand starting at position 3023 of SEQ ID NO: 586254
gugggaaaugccuggaaau

SEQ ID NO: 703973 - RNA, 19 nt, Artificial Sequence
  Description of Artificial Sequence: Synthetic oligonucleotide
  Antisense strand to SEQ ID NO: 703972
auuuccaggcauuucccac

SEQ ID NO: 703974 - RNA, 19 nt, Artificial Sequence
  Description of Artificial Sequence: Synthetic oligonucleotide
  Sense strand starting at position 3024 of SEQ ID NO: 586254
ugggaaaugccuggaaauu

SEQ ID NO: 703975 - RNA, 19 nt, Artificial Sequence
  Description of Artificial Sequence: Synthetic oligonucleotide
  Antisense strand to SEQ ID NO: 703974
aauuuccaggcauuuccca

SEQ ID NO: 703976 - RNA, 19 nt, Artificial Sequence
  Description of Artificial Sequence: Synthetic oligonucleotide
  Sense strand starting at position 3061 of SEQ ID NO: 586254
caaugucugccagagggau

SEQ ID NO: 703977 - RNA, 19 nt, Artificial Sequence
  Description of Artificial Sequence: Synthetic oligonucleotide
  Antisense strand to SEQ ID NO: 703976
aucccucuggcagacauug

SEQ ID NO: 703978 - RNA, 19 nt, Artificial Sequence
  Description of Artificial Sequence: Synthetic oligonucleotide
  Sense strand starting at position 3119 of SEQ ID NO: 586254
guuuccaacucggucaaau

SEQ ID NO: 703979 - RNA, 19 nt, Artificial Sequence
  Description of Artificial Sequence: Synthetic oligonucleotide
  Antisense strand to SEQ ID NO: 703978
auuugaccgaguuggaaac

SEQ ID NO: 703980 - RNA, 19 nt, Artificial Sequence
  Description of Artificial Sequence: Synthetic oligonucleotide
  Sense strand starting at position 3129 of SEQ ID NO: 586254
cggucaaaucugugacucu

SEQ ID NO: 703981 - RNA, 19 nt, Artificial Sequence
  Description of Artificial Sequence: Synthetic oligonucleotide
  Antisense strand to SEQ ID NO: 703980
agagucacagauuugaccg

SEQ ID NO: 703982 - RNA, 19 nt, Artificial Sequence
  Description of Artificial Sequence: Synthetic oligonucleotide
  Sense strand starting at position 3207 of SEQ ID NO: 586254
uggucucucguggaagcau

SEQ ID NO: 703983 - RNA, 19 nt, Artificial Sequence
  Description of Artificial Sequence: Synthetic oligonucleotide
  Antisense strand to SEQ ID NO: 703982
augcuuccacgagagacca

SEQ ID NO: 703984 - RNA, 19 nt, Artificial Sequence
  Description of Artificial Sequence: Synthetic oligonucleotide
  Sense strand starting at position 3216 of SEQ ID NO: 586254
guggaagcaucucuuaaua

SEQ ID NO: 703985 - RNA, 19 nt, Artificial Sequence
  Description of Artificial Sequence: Synthetic oligonucleotide
  Antisense strand to SEQ ID NO: 703984
uauuaagagaugcuuccac

SEQ ID NO: 703986 - RNA, 19 nt, Artificial Sequence
  Description of Artificial Sequence: Synthetic oligonucleotide
  Sense strand starting at position 3806 of SEQ ID NO: 586254
ccaauugugccaggaggaa

SEQ ID NO: 703987 - RNA, 19 nt, Artificial Sequence
  Description of Artificial Sequence: Synthetic oligonucleotide
  Antisense strand to SEQ ID NO: 703986
uuccuccuggcacaauugg

SEQ ID NO: 703988 - RNA, 19 nt, Artificial Sequence
  Description of Artificial Sequence: Synthetic oligonucleotide
  Sense strand starting at position 3893 of SEQ ID NO: 586254
ggaagccuguaagucauaa

SEQ ID NO: 703989 - RNA, 19 nt, Artificial Sequence
  Description of Artificial Sequence: Synthetic oligonucleotide
  Antisense strand to SEQ ID NO: 703988
uuaugacuuacaggcuucc

SEQ ID NO: 703990 - RNA, 19 nt, Artificial Sequence
  Description of Artificial Sequence: Synthetic oligonucleotide
  Sense strand starting at position 103 of SEQ ID NO: 586255
cuccuucucuuauucggaa

SEQ ID NO: 703991 - RNA, 19 nt, Artificial Sequence
  Description of Artificial Sequence: Synthetic oligonucleotide
  Antisense strand to SEQ ID NO: 703990
uuccgaauaagagaaggag

SEQ ID NO: 703992 - RNA, 19 nt, Artificial Sequence
  Description of Artificial Sequence: Synthetic oligonucleotide
  Sense strand starting at position 524 of SEQ ID NO: 586255
gccuguucuugccuuaauu

SEQ ID NO: 703993 - RNA, 19 nt, Artificial Sequence
  Description of Artificial Sequence: Synthetic oligonucleotide
  Antisense strand to SEQ ID NO: 703992
aauuaaggcaagaacaggc

SEQ ID NO: 703994 - RNA, 19 nt, Artificial Sequence
  Description of Artificial Sequence: Synthetic oligonucleotide
  Sense strand starting at position 526 of SEQ ID NO: 586255
cuguucuugccuuaauuga

SEQ ID NO: 703995 - RNA, 19 nt, Artificial Sequence
  Description of Artificial Sequence: Synthetic oligonucleotide
  Antisense strand to SEQ ID NO: 703994
ucaauuaaggcaagaacag

SEQ ID NO: 703996 - RNA, 19 nt, Artificial Sequence
  Description of Artificial Sequence: Synthetic oligonucleotide
  Sense strand starting at position 1117 of SEQ ID NO: 586255
uuuaacccuuguggaaauu

SEQ ID NO: 703997 - RNA, 19 nt, Artificial Sequence
  Description of Artificial Sequence: Synthetic oligonucleotide
  Antisense strand to SEQ ID NO: 703996
aauuuccacaaggguuaaa

SEQ ID NO: 703998 - RNA, 19 nt, Artificial Sequence
  Description of Artificial Sequence: Synthetic oligonucleotide
  Sense strand starting at position 1126 of SEQ ID NO: 586255
uguggaaauucuuugaguu

SEQ ID NO: 703999 - RNA, 19 nt, Artificial Sequence
  Description of Artificial Sequence: Synthetic oligonucleotide
  Antisense strand to SEQ ID NO: 703998
aacucaaagaauuuccaca

SEQ ID NO: 704000 - RNA, 19 nt, Artificial Sequence
  Description of Artificial Sequence: Synthetic oligonucleotide
  Sense strand starting at position 1127 of SEQ ID NO: 586255
guggaaauucuuugaguug

SEQ ID NO: 704001 - RNA, 19 nt, Artificial Sequence
  Description of Artificial Sequence: Synthetic oligonucleotide
  Antisense strand to SEQ ID NO: 704000
caacucaaagaauuuccac

SEQ ID NO: 704002 - RNA, 19 nt, Artificial Sequence
  Description of Artificial Sequence: Synthetic oligonucleotide
  Sense strand starting at position 1128 of SEQ ID NO: 586255
uggaaauucuuugaguugu

SEQ ID NO: 704003 - RNA, 19 nt, Artificial Sequence
  Description of Artificial Sequence: Synthetic oligonucleotide
  Antisense strand to SEQ ID NO: 704002
acaacucaaagaauuucca

SEQ ID NO: 704004 - RNA, 19 nt, Artificial Sequence
  Description of Artificial Sequence: Synthetic oligonucleotide
  Sense strand starting at position 1130 of SEQ ID NO: 586255
gaaauucuuugaguuguac

SEQ ID NO: 704005 - RNA, 19 nt, Artificial Sequence
  Description of Artificial Sequence: Synthetic oligonucleotide
  Antisense strand to SEQ ID NO: 704004
guacaacucaaagaauuuc

SEQ ID NO: 704006 - RNA, 19 nt, Artificial Sequence
  Description of Artificial Sequence: Synthetic oligonucleotide
  Sense strand starting at position 1549 of SEQ ID NO: 586255
augaaaugauauggcgaau

SEQ ID NO: 704007 - RNA, 19 nt, Artificial Sequence
  Description of Artificial Sequence: Synthetic oligonucleotide
  Antisense strand to SEQ ID NO: 704006
auucgccauaucauuucau

SEQ ID NO: 704008 - RNA, 19 nt, Artificial Sequence
  Description of Artificial Sequence: Synthetic oligonucleotide
  Sense strand starting at position 1593 of SEQ ID NO: 586255
aaggaaauguaauauggga

SEQ ID NO: 704009 - RNA, 19 nt, Artificial Sequence
  Description of Artificial Sequence: Synthetic oligonucleotide
  Antisense strand to SEQ ID NO: 704008
ucccauauuacauuuccuu

SEQ ID NO: 704010 - RNA, 19 nt, Artificial Sequence
  Description of Artificial Sequence: Synthetic oligonucleotide
  Sense strand starting at position 1598 of SEQ ID NO: 586255
aauguaauaugggagccau

SEQ ID NO: 704011 - RNA, 19 nt, Artificial Sequence
  Description of Artificial Sequence: Synthetic oligonucleotide
  Antisense strand to SEQ ID NO: 704010
auggcucccauauuacauu

SEQ ID NO: 704012 - RNA, 19 nt, Artificial Sequence
  Description of Artificial Sequence: Synthetic oligonucleotide
  Sense strand starting at position 1635 of SEQ ID NO: 586255
cccuccuuccuugagauga

SEQ ID NO: 704013 - RNA, 19 nt, Artificial Sequence
  Description of Artificial Sequence: Synthetic oligonucleotide
  Antisense strand to SEQ ID NO: 704012
ucaucucaaggaaggaggg

SEQ ID NO: 704014 - RNA, 19 nt, Artificial Sequence
  Description of Artificial Sequence: Synthetic oligonucleotide
  Sense strand starting at position 1637 of SEQ ID NO: 586255
cuccuuccuugagaugaga

SEQ ID NO: 704015 - RNA, 19 nt, Artificial Sequence
  Description of Artificial Sequence: Synthetic oligonucleotide
  Antisense strand to SEQ ID NO: 704014
ucucaucucaaggaaggag

SEQ ID NO: 704016 - RNA, 19 nt, Artificial Sequence
  Description of Artificial Sequence: Synthetic oligonucleotide
  Sense strand starting at position 1679 of SEQ ID NO: 586255
ugccacucuucugggaaca

SEQ ID NO: 704017 - RNA, 19 nt, Artificial Sequence
  Description of Artificial Sequence: Synthetic oligonucleotide
  Antisense strand to SEQ ID NO: 704016
uguucccagaagaguggca

SEQ ID NO: 704018 - RNA, 19 nt, Artificial Sequence
  Description of Artificial Sequence: Synthetic oligonucleotide
  Sense strand starting at position 1680 of SEQ ID NO: 586255
gccacucuucugggaacau

SEQ ID NO: 704019 - RNA, 19 nt, Artificial Sequence
  Description of Artificial Sequence: Synthetic oligonucleotide
  Antisense strand to SEQ ID NO: 704018
auguucccagaagaguggc

SEQ ID NO: 704020 - RNA, 19 nt, Artificial Sequence
  Description of Artificial Sequence: Synthetic oligonucleotide
  Sense strand starting at position 1681 of SEQ ID NO: 586255
ccacucuucugggaacauc

SEQ ID NO: 704021 - RNA, 19 nt, Artificial Sequence
  Description of Artificial Sequence: Synthetic oligonucleotide
  Antisense strand to SEQ ID NO: 704020
gauguucccagaagagugg

SEQ ID NO: 704022 - RNA, 19 nt, Artificial Sequence
  Description of Artificial Sequence: Synthetic oligonucleotide
  Sense strand starting at position 1730 of SEQ ID NO: 586255
uugccagaauguuucucau

SEQ ID NO: 704023 - RNA, 19 nt, Artificial Sequence
  Description of Artificial Sequence: Synthetic oligonucleotide
  Antisense strand to SEQ ID NO: 704022
augagaaacauucuggcaa

SEQ ID NO: 704024 - RNA, 19 nt, Artificial Sequence
  Description of Artificial Sequence: Synthetic oligonucleotide
  Sense strand starting at position 1732 of SEQ ID NO: 586255
gccagaauguuucucauuu

SEQ ID NO: 704025 - RNA, 19 nt, Artificial Sequence
  Description of Artificial Sequence: Synthetic oligonucleotide
  Antisense strand to SEQ ID NO: 704024
aaaugagaaacauucuggc

SEQ ID NO: 704026 - RNA, 19 nt, Artificial Sequence
  Description of Artificial Sequence: Synthetic oligonucleotide
  Sense strand starting at position 1830 of SEQ ID NO: 586255
uggagucuauccucugaaa

SEQ ID NO: 704027 - RNA, 19 nt, Artificial Sequence
  Description of Artificial Sequence: Synthetic oligonucleotide
  Antisense strand to SEQ ID NO: 704026
uuucagaggauagacucca

SEQ ID NO: 704028 - RNA, 19 nt, Artificial Sequence
  Description of Artificial Sequence: Synthetic oligonucleotide
  Sense strand starting at position 1851 of SEQ ID NO: 586255
ucucuucugcaaugagaaa

SEQ ID NO: 704029 - RNA, 19 nt, Artificial Sequence
  Description of Artificial Sequence: Synthetic oligonucleotide
  Antisense strand to SEQ ID NO: 704028
uuucucauugcagaagaga

SEQ ID NO: 704030 - RNA, 19 nt, Artificial Sequence
  Description of Artificial Sequence: Synthetic oligonucleotide
  Sense strand starting at position 2143 of SEQ ID NO: 586255
gagguucuggguggacaau

SEQ ID NO: 704031 - RNA, 19 nt, Artificial Sequence
  Description of Artificial Sequence: Synthetic oligonucleotide
  Antisense strand to SEQ ID NO: 704030
auuguccacccagaaccuc

SEQ ID NO: 704032 - RNA, 19 nt, Artificial Sequence
  Description of Artificial Sequence: Synthetic oligonucleotide
  Sense strand starting at position 2192 of SEQ ID NO: 586255
acagauguauugcagaaau

SEQ ID NO: 704033 - RNA, 19 nt, Artificial Sequence
  Description of Artificial Sequence: Synthetic oligonucleotide
  Antisense strand to SEQ ID NO: 704032
auuucugcaauacaucugu

SEQ ID NO: 704034 - RNA, 19 nt, Artificial Sequence
  Description of Artificial Sequence: Synthetic oligonucleotide
  Sense strand starting at position 2550 of SEQ ID NO: 586255
uuucuuugcaguggugcaa

SEQ ID NO: 704035 - RNA, 19 nt, Artificial Sequence
  Description of Artificial Sequence: Synthetic oligonucleotide
  Antisense strand to SEQ ID NO: 704034
uugcaccacugcaaagaaa

SEQ ID NO: 704036 - RNA, 19 nt, Artificial Sequence
  Description of Artificial Sequence: Synthetic oligonucleotide
  Sense strand starting at position 2819 of SEQ ID NO: 586255
ucuuauggaugucuucuaa

SEQ ID NO: 704037 - RNA, 19 nt, Artificial Sequence
  Description of Artificial Sequence: Synthetic oligonucleotide
  Antisense strand to SEQ ID NO: 704036
uuagaagacauccauaaga

SEQ ID NO: 704038 - RNA, 19 nt, Artificial Sequence
  Description of Artificial Sequence: Synthetic oligonucleotide
  Sense strand starting at position 2823 of SEQ ID NO: 586255
auggaugucuucuaaugga

SEQ ID NO: 704039 - RNA, 19 nt, Artificial Sequence
  Description of Artificial Sequence: Synthetic oligonucleotide
  Antisense strand to SEQ ID NO: 704038
uccauuagaagacauccau

SEQ ID NO: 704040 - RNA, 19 nt, Artificial Sequence
  Description of Artificial Sequence: Synthetic oligonucleotide
  Sense strand starting at position 2826 of SEQ ID NO: 586255
gaugucuucuaauggauuu

SEQ ID NO: 704041 - RNA, 19 nt, Artificial Sequence
  Description of Artificial Sequence: Synthetic oligonucleotide
  Antisense strand to SEQ ID NO: 704040
aaauccauuagaagacauc

SEQ ID NO: 704042 - RNA, 19 nt, Artificial Sequence
  Description of Artificial Sequence: Synthetic oligonucleotide
  Sense strand starting at position 2874 of SEQ ID NO: 586255
cuguauggguaagugauua

SEQ ID NO: 704043 - RNA, 19 nt, Artificial Sequence
  Description of Artificial Sequence: Synthetic oligonucleotide
  Antisense strand to SEQ ID NO: 704042
uaaucacuuacccauacag

SEQ ID NO: 704044 - RNA, 19 nt, Artificial Sequence
  Description of Artificial Sequence: Synthetic oligonucleotide
  Sense strand starting at position 2886 of SEQ ID NO: 586255
gugauuauacccuguuuau

SEQ ID NO: 704045 - RNA, 19 nt, Artificial Sequence
  Description of Artificial Sequence: Synthetic oligonucleotide
  Antisense strand to SEQ ID NO: 704044
auaaacaggguauaaucac

SEQ ID NO: 704046 - RNA, 19 nt, Artificial Sequence
  Description of Artificial Sequence: Synthetic oligonucleotide
  Sense strand starting at position 3104 of SEQ ID NO: 586255
aggagaauagcuugaguuu

SEQ ID NO: 704047 - RNA, 19 nt, Artificial Sequence
  Description of Artificial Sequence: Synthetic oligonucleotide
  Antisense strand to SEQ ID NO: 704046
aaacucaagcuauucuccu

SEQ ID NO: 704048 - RNA, 19 nt, Artificial Sequence
  Description of Artificial Sequence: Synthetic oligonucleotide
  Sense strand starting at position 3105 of SEQ ID NO: 586255
ggagaauagcuugaguuug

SEQ ID NO: 704049 - RNA, 19 nt, Artificial Sequence
  Description of Artificial Sequence: Synthetic oligonucleotide
  Antisense strand to SEQ ID NO: 704048
caaacucaagcuauucucc

SEQ ID NO: 704050 - RNA, 19 nt, Artificial Sequence
  Description of Artificial Sequence: Synthetic oligonucleotide
  Sense strand starting at position 3107 of SEQ ID NO: 586255
agaauagcuugaguuugga

SEQ ID NO: 704051 - RNA, 19 nt, Artificial Sequence
  Description of Artificial Sequence: Synthetic oligonucleotide
  Antisense strand to SEQ ID NO: 704050
uccaaacucaagcuauucu

SEQ ID NO: 704052 - RNA, 19 nt, Artificial Sequence
  Description of Artificial Sequence: Synthetic oligonucleotide
  Sense strand starting at position 3225 of SEQ ID NO: 586255
agaggcaugucugucuaua

SEQ ID NO: 704053 - RNA, 19 nt, Artificial Sequence
  Description of Artificial Sequence: Synthetic oligonucleotide
  Antisense strand to SEQ ID NO: 704052
uauagacagacaugccucu

SEQ ID NO: 704054 - RNA, 19 nt, Artificial Sequence
  Description of Artificial Sequence: Synthetic oligonucleotide
  Sense strand starting at position 3227 of SEQ ID NO: 586255
aggcaugucugucuauaaa

SEQ ID NO: 704055 - RNA, 19 nt, Artificial Sequence
  Description of Artificial Sequence: Synthetic oligonucleotide
  Antisense strand to SEQ ID NO: 704054
uuuauagacagacaugccu

SEQ ID NO: 704056 - RNA, 19 nt, Artificial Sequence
  Description of Artificial Sequence: Synthetic oligonucleotide
  Sense strand starting at position 3614 of SEQ ID NO: 586255
cagucaggaccuugaguau

SEQ ID NO: 704057 - RNA, 19 nt, Artificial Sequence
  Description of Artificial Sequence: Synthetic oligonucleotide
  Antisense strand to SEQ ID NO: 704056
auacucaagguccugacug

SEQ ID NO: 704058 - RNA, 19 nt, Artificial Sequence
  Description of Artificial Sequence: Synthetic oligonucleotide
  Sense strand starting at position 3623 of SEQ ID NO: 586255
ccuugaguaugcccuugau

SEQ ID NO: 704059 - RNA, 19 nt, Artificial Sequence
  Description of Artificial Sequence: Synthetic oligonucleotide
  Antisense strand to SEQ ID NO: 704058
aucaagggcauacucaagg

SEQ ID NO: 704060 - RNA, 19 nt, Artificial Sequence
  Description of Artificial Sequence: Synthetic oligonucleotide
  Sense strand starting at position 3626 of SEQ ID NO: 586255
ugaguaugcccuugauguc

SEQ ID NO: 704061 - RNA, 19 nt, Artificial Sequence
  Description of Artificial Sequence: Synthetic oligonucleotide
  Antisense strand to SEQ ID NO: 704060
gacaucaagggcauacuca

SEQ ID NO: 704062 - RNA, 19 nt, Artificial Sequence
  Description of Artificial Sequence: Synthetic oligonucleotide
  Sense strand starting at position 3627 of SEQ ID NO: 586255
gaguaugcccuugauguca

SEQ ID NO: 704063 - RNA, 19 nt, Artificial Sequence
  Description of Artificial Sequence: Synthetic oligonucleotide
  Antisense strand to SEQ ID NO: 704062
ugacaucaagggcauacuc

SEQ ID NO: 704064 - RNA, 19 nt, Artificial Sequence
  Description of Artificial Sequence: Synthetic oligonucleotide
  Sense strand starting at position 3741 of SEQ ID NO: 586255
gcuccagauuccucugugu

SEQ ID NO: 704065 - RNA, 19 nt, Artificial Sequence
  Description of Artificial Sequence: Synthetic oligonucleotide
  Antisense strand to SEQ ID NO: 704064
acacagaggaaucuggagc

SEQ ID NO: 704066 - RNA, 19 nt, Artificial Sequence
  Description of Artificial Sequence: Synthetic oligonucleotide
  Sense strand starting at position 3744 of SEQ ID NO: 586255
ccagauuccucugugugga

SEQ ID NO: 704067 - RNA, 19 nt, Artificial Sequence
  Description of Artificial Sequence: Synthetic oligonucleotide
  Antisense strand to SEQ ID NO: 704066
uccacacagaggaaucugg

SEQ ID NO: 704068 - RNA, 19 nt, Artificial Sequence
  Description of Artificial Sequence: Synthetic oligonucleotide
  Sense strand starting at position 3745 of SEQ ID NO: 586255
cagauuccucuguguggau

SEQ ID NO: 704069 - RNA, 19 nt, Artificial Sequence
  Description of Artificial Sequence: Synthetic oligonucleotide
  Antisense strand to SEQ ID NO: 704068
auccacacagaggaaucug

SEQ ID NO: 704070 - RNA, 19 nt, Artificial Sequence
  Description of Artificial Sequence: Synthetic oligonucleotide
  Sense strand starting at position 9 of SEQ ID NO: 586256
cagggcaccuguuuauuaa

SEQ ID NO: 704071 - RNA, 19 nt, Artificial Sequence
  Description of Artificial Sequence: Synthetic oligonucleotide
  Antisense strand to SEQ ID NO: 704070
uuaauaaacaggugcccug

SEQ ID NO: 704072 - RNA, 19 nt, Artificial Sequence
  Description of Artificial Sequence: Synthetic oligonucleotide
  Sense strand starting at position 10 of SEQ ID NO: 586256
agggcaccuguuuauuaau

SEQ ID NO: 704073 - RNA, 19 nt, Artificial Sequence
  Description of Artificial Sequence: Synthetic oligonucleotide
  Antisense strand to SEQ ID NO: 704072
auuaauaaacaggugcccu

SEQ ID NO: 704074 - RNA, 19 nt, Artificial Sequence
  Description of Artificial Sequence: Synthetic oligonucleotide
  Sense strand starting at position 12 of SEQ ID NO: 586256
ggcaccuguuuauuaauuu

SEQ ID NO: 704075 - RNA, 19 nt, Artificial Sequence
  Description of Artificial Sequence: Synthetic oligonucleotide
  Antisense strand to SEQ ID NO: 704074
aaauuaauaaacaggugcc

SEQ ID NO: 704076 - RNA, 19 nt, Artificial Sequence
  Description of Artificial Sequence: Synthetic oligonucleotide
  Sense strand starting at position 105 of SEQ ID NO: 586256
aaguaaauaguauggcuau

SEQ ID NO: 704077 - RNA, 19 nt, Artificial Sequence
  Description of Artificial Sequence: Synthetic oligonucleotide
  Antisense strand to SEQ ID NO: 704076
auagccauacuauuuacuu

SEQ ID NO: 704078 - RNA, 19 nt, Artificial Sequence
  Description of Artificial Sequence: Synthetic oligonucleotide
  Sense strand starting at position 131 of SEQ ID NO: 586256
agcugcauucuccaugcaa

SEQ ID NO: 704079 - RNA, 19 nt, Artificial Sequence
  Description of Artificial Sequence: Synthetic oligonucleotide
  Antisense strand to SEQ ID NO: 704078
uugcauggagaaugcagcu

SEQ ID NO: 704080 - RNA, 19 nt, Artificial Sequence
  Description of Artificial Sequence: Synthetic oligonucleotide
  Sense strand starting at position 160 of SEQ ID NO: 586256
ucaguauuacucuggagaa

SEQ ID NO: 704081 - RNA, 19 nt, Artificial Sequence
  Description of Artificial Sequence: Synthetic oligonucleotide
  Antisense strand to SEQ ID NO: 704080
uucuccagaguaauacuga

SEQ ID NO: 704082 - RNA, 19 nt, Artificial Sequence
  Description of Artificial Sequence: Synthetic oligonucleotide
  Sense strand starting at position 403 of SEQ ID NO: 586256
aguacaucucaugaguauu

SEQ ID NO: 704083 - RNA, 19 nt, Artificial Sequence
  Description of Artificial Sequence: Synthetic oligonucleotide
  Antisense strand to SEQ ID NO: 704082
aauacucaugagauguacu

SEQ ID NO: 704084 - RNA, 19 nt, Artificial Sequence
  Description of Artificial Sequence: Synthetic oligonucleotide
  Sense strand starting at position 598 of SEQ ID NO: 586256
ggaaccuggagcgaugauu

SEQ ID NO: 704085 - RNA, 19 nt, Artificial Sequence
  Description of Artificial Sequence: Synthetic oligonucleotide
  Antisense strand to SEQ ID NO: 704084
aaucaucgcuccagguucc

SEQ ID NO: 704086 - RNA, 19 nt, Artificial Sequence
  Description of Artificial Sequence: Synthetic oligonucleotide
  Sense strand starting at position 626 of SEQ ID NO: 586256
uggacagugauaggcuaua

SEQ ID NO: 704087 - RNA, 19 nt, Artificial Sequence
  Description of Artificial Sequence: Synthetic oligonucleotide
  Antisense strand to SEQ ID NO: 704086
uauagccuaucacugucca

SEQ ID NO: 704088 - RNA, 19 nt, Artificial Sequence
  Description of Artificial Sequence: Synthetic oligonucleotide
  Sense strand starting at position 639 of SEQ ID NO: 586256
gcuauagucccagagagac

SEQ ID NO: 704089 - RNA, 19 nt, Artificial Sequence
  Description of Artificial Sequence: Synthetic oligonucleotide
  Antisense strand to SEQ ID NO: 704088
gucucucugggacuauagc

SEQ ID NO: 704090 - RNA, 19 nt, Artificial Sequence
  Description of Artificial Sequence: Synthetic oligonucleotide
  Sense strand starting at position 739 of SEQ ID NO: 586256
aaagaacuccucuguggac

SEQ ID NO: 704091 - RNA, 19 nt, Artificial Sequence
  Description of Artificial Sequence: Synthetic oligonucleotide
  Antisense strand to SEQ ID NO: 704090
guccacagaggaguucuuu

SEQ ID NO: 704092 - RNA, 19 nt, Artificial Sequence
  Description of Artificial Sequence: Synthetic oligonucleotide
  Sense strand starting at position 740 of SEQ ID NO: 586256
aagaacuccucuguggaca

SEQ ID NO: 704093 - RNA, 19 nt, Artificial Sequence
  Description of Artificial Sequence: Synthetic oligonucleotide
  Antisense strand to SEQ ID NO: 704092
uguccacagaggaguucuu

SEQ ID NO: 704094 - RNA, 19 nt, Artificial Sequence
  Description of Artificial Sequence: Synthetic oligonucleotide
  Sense strand starting at position 1415 of SEQ ID NO: 586256
gcaggcuucguggaugaaa

SEQ ID NO: 704095 - RNA, 19 nt, Artificial Sequence
  Description of Artificial Sequence: Synthetic oligonucleotide
  Antisense strand to SEQ ID NO: 704094
uuucauccacgaagccugc

SEQ ID NO: 704096 - RNA, 19 nt, Artificial Sequence
  Description of Artificial Sequence: Synthetic oligonucleotide
  Sense strand starting at position 1417 of SEQ ID NO: 586256
aggcuucguggaugaaauu

SEQ ID NO: 704097 - RNA, 19 nt, Artificial Sequence
  Description of Artificial Sequence: Synthetic oligonucleotide
  Antisense strand to SEQ ID NO: 704096
aauuucauccacgaagccu

SEQ ID NO: 704098 - RNA, 19 nt, Artificial Sequence
  Description of Artificial Sequence: Synthetic oligonucleotide
  Sense strand starting at position 1521 of SEQ ID NO: 586256
aaauuacuucuccguggaa

SEQ ID NO: 704099 - RNA, 19 nt, Artificial Sequence
  Description of Artificial Sequence: Synthetic oligonucleotide
  Antisense strand to SEQ ID NO: 704098
uuccacggagaaguaauuu

SEQ ID NO: 704100 - RNA, 19 nt, Artificial Sequence
  Description of Artificial Sequence: Synthetic oligonucleotide
  Sense strand starting at position 1522 of SEQ ID NO: 586256
aauuacuucuccguggaag

SEQ ID NO: 704101 - RNA, 19 nt, Artificial Sequence
  Description of Artificial Sequence: Synthetic oligonucleotide
  Antisense strand to SEQ ID NO: 704100
cuuccacggagaaguaauu

SEQ ID NO: 704102 - RNA, 19 nt, Artificial Sequence
  Description of Artificial Sequence: Synthetic oligonucleotide
  Sense strand starting at position 1523 of SEQ ID NO: 586256
auuacuucuccguggaaga

SEQ ID NO: 704103 - RNA, 19 nt, Artificial Sequence
  Description of Artificial Sequence: Synthetic oligonucleotide
  Antisense strand to SEQ ID NO: 704102
ucuuccacggagaaguaau

SEQ ID NO: 704104 - RNA, 19 nt, Artificial Sequence
  Description of Artificial Sequence: Synthetic oligonucleotide
  Sense strand starting at position 1524 of SEQ ID NO: 586256
uuacuucuccguggaagau

SEQ ID NO: 704105 - RNA, 19 nt, Artificial Sequence
  Description of Artificial Sequence: Synthetic oligonucleotide
  Antisense strand to SEQ ID NO: 704104
aucuuccacggagaaguaa

SEQ ID NO: 704106 - RNA, 19 nt, Artificial Sequence
  Description of Artificial Sequence: Synthetic oligonucleotide
  Sense strand starting at position 1559 of SEQ ID NO: 586256
cuucuuccuugagucaaga

SEQ ID NO: 704107 - RNA, 19 nt, Artificial Sequence
  Description of Artificial Sequence: Synthetic oligonucleotide
  Antisense strand to SEQ ID NO: 704106
ucuugacucaaggaagaag

SEQ ID NO: 704108 - RNA, 19 nt, Artificial Sequence
  Description of Artificial Sequence: Synthetic oligonucleotide
  Sense strand starting at position 2043 of SEQ ID NO: 586256
acugaagcuguuuacaauu

SEQ ID NO: 704109 - RNA, 19 nt, Artificial Sequence
  Description of Artificial Sequence: Synthetic oligonucleotide
  Antisense strand to SEQ ID NO: 704108
aauuguaaacagcuucagu

SEQ ID NO: 704110 - RNA, 19 nt, Artificial Sequence
  Description of Artificial Sequence: Synthetic oligonucleotide
  Sense strand starting at position 2209 of SEQ ID NO: 586256
agcagaaauucugcaguca

SEQ ID NO: 704111 - RNA, 19 nt, Artificial Sequence
  Description of Artificial Sequence: Synthetic oligonucleotide
  Antisense strand to SEQ ID NO: 704110
ugacugcagaauuucugcu

SEQ ID NO: 704112 - RNA, 19 nt, Artificial Sequence
  Description of Artificial Sequence: Synthetic oligonucleotide
  Sense strand starting at position 2210 of SEQ ID NO: 586256
gcagaaauucugcagucaa

SEQ ID NO: 704113 - RNA, 19 nt, Artificial Sequence
  Description of Artificial Sequence: Synthetic oligonucleotide
  Antisense strand to SEQ ID NO: 704112
uugacugcagaauuucugc

SEQ ID NO: 704114 - RNA, 19 nt, Artificial Sequence
  Description of Artificial Sequence: Synthetic oligonucleotide
  Sense strand starting at position 2416 of SEQ ID NO: 586256
auuugcagugcuugcucaa

SEQ ID NO: 704115 - RNA, 19 nt, Artificial Sequence
  Description of Artificial Sequence: Synthetic oligonucleotide
  Antisense strand to SEQ ID NO: 704114
uugagcaagcacugcaaau

SEQ ID NO: 704116 - RNA, 19 nt, Artificial Sequence
  Description of Artificial Sequence: Synthetic oligonucleotide
  Sense strand starting at position 2437 of SEQ ID NO: 586256
gcagcaagaucuuuacaga

SEQ ID NO: 704117 - RNA, 19 nt, Artificial Sequence
  Description of Artificial Sequence: Synthetic oligonucleotide
  Antisense strand to SEQ ID NO: 704116
ucuguaaagaucuugcugc

SEQ ID NO: 704118 - RNA, 19 nt, Artificial Sequence
  Description of Artificial Sequence: Synthetic oligonucleotide
  Sense strand starting at position 2542 of SEQ ID NO: 586256
gacucaugaguuugaguca

SEQ ID NO: 704119 - RNA, 19 nt, Artificial Sequence
  Description of Artificial Sequence: Synthetic oligonucleotide
  Antisense strand to SEQ ID NO: 704118
ugacucaaacucaugaguc

SEQ ID NO: 704120 - RNA, 19 nt, Artificial Sequence
  Description of Artificial Sequence: Synthetic oligonucleotide
  Sense strand starting at position 2545 of SEQ ID NO: 586256
ucaugaguuugagucagca

SEQ ID NO: 704121 - RNA, 19 nt, Artificial Sequence
  Description of Artificial Sequence: Synthetic oligonucleotide
  Antisense strand to SEQ ID NO: 704120
ugcugacucaaacucauga

SEQ ID NO: 704122 - RNA, 19 nt, Artificial Sequence
  Description of Artificial Sequence: Synthetic oligonucleotide
  Sense strand starting at position 2558 of SEQ ID NO: 586256
ucagcagcacuuugaaauu

SEQ ID NO: 704123 - RNA, 19 nt, Artificial Sequence
  Description of Artificial Sequence: Synthetic oligonucleotide
  Antisense strand to SEQ ID NO: 704122
aauuucaaagugcugcuga

SEQ ID NO: 704124 - RNA, 19 nt, Artificial Sequence
  Description of Artificial Sequence: Synthetic oligonucleotide
  Sense strand starting at position 2644 of SEQ ID NO: 586256
ggaucuguugcuggugaag

SEQ ID NO: 704125 - RNA, 19 nt, Artificial Sequence
  Description of Artificial Sequence: Synthetic oligonucleotide
  Antisense strand to SEQ ID NO: 704124
cuucaccagcaacagaucc

SEQ ID NO: 704126 - RNA, 19 nt, Artificial Sequence
  Description of Artificial Sequence: Synthetic oligonucleotide
  Sense strand starting at position 2683 of SEQ ID NO: 586256
uccagaauggcuugcaaau

SEQ ID NO: 704127 - RNA, 19 nt, Artificial Sequence
  Description of Artificial Sequence: Synthetic oligonucleotide
  Antisense strand to SEQ ID NO: 704126
auuugcaagccauucugga

SEQ ID NO: 704128 - RNA, 19 nt, Artificial Sequence
  Description of Artificial Sequence: Synthetic oligonucleotide
  Sense strand starting at position 2706 of SEQ ID NO: 586256
agggcuacuuaauuaaaua

SEQ ID NO: 704129 - RNA, 19 nt, Artificial Sequence
  Description of Artificial Sequence: Synthetic oligonucleotide
  Antisense strand to SEQ ID NO: 704128
uauuuaauuaaguagcccu

SEQ ID NO: 704130 - RNA, 19 nt, Artificial Sequence
  Description of Artificial Sequence: Synthetic oligonucleotide
  Sense strand starting at position 3038 of SEQ ID NO: 586256
ucugguuagagugacuaua

SEQ ID NO: 704131 - RNA, 19 nt, Artificial Sequence
  Description of Artificial Sequence: Synthetic oligonucleotide
  Antisense strand to SEQ ID NO: 704130
uauagucacucuaaccaga

SEQ ID NO: 704132 - RNA, 19 nt, Artificial Sequence
  Description of Artificial Sequence: Synthetic oligonucleotide
  Sense strand starting at position 3323 of SEQ ID NO: 586256
agaacuagauuugagucaa

SEQ ID NO: 704133 - RNA, 19 nt, Artificial Sequence
  Description of Artificial Sequence: Synthetic oligonucleotide
  Antisense strand to SEQ ID NO: 704132
uugacucaaaucuaguucu

SEQ ID NO: 704134 - RNA, 19 nt, Artificial Sequence
  Description of Artificial Sequence: Synthetic oligonucleotide
  Sense strand starting at position 3334 of SEQ ID NO: 586256
ugagucaauauccgguauu

SEQ ID NO: 704135 - RNA, 19 nt, Artificial Sequence
  Description of Artificial Sequence: Synthetic oligonucleotide
  Antisense strand to SEQ ID NO: 704134
aauaccggauauugacuca

SEQ ID NO: 704136 - RNA, 19 nt, Artificial Sequence
  Description of Artificial Sequence: Synthetic oligonucleotide
  Sense strand starting at position 3337 of SEQ ID NO: 586256
gucaauauccgguauuaac

SEQ ID NO: 704137 - RNA, 19 nt, Artificial Sequence
  Description of Artificial Sequence: Synthetic oligonucleotide
  Antisense strand to SEQ ID NO: 704136
guuaauaccggauauugac

SEQ ID NO: 704138 - RNA, 19 nt, Artificial Sequence
  Description of Artificial Sequence: Synthetic oligonucleotide
  Sense strand starting at position 3345 of SEQ ID NO: 586256
ccgguauuaacuggacugu

SEQ ID NO: 704139 - RNA, 19 nt, Artificial Sequence
  Description of Artificial Sequence: Synthetic oligonucleotide
  Antisense strand to SEQ ID NO: 704138
acaguccaguuaauaccgg

SEQ ID NO: 704140 - RNA, 19 nt, Artificial Sequence
  Description of Artificial Sequence: Synthetic oligonucleotide
  Sense strand starting at position 3362 of SEQ ID NO: 586256
gucacuuucugucuuuaaa

SEQ ID NO: 704141 - RNA, 19 nt, Artificial Sequence
  Description of Artificial Sequence: Synthetic oligonucleotide
  Antisense strand to SEQ ID NO: 704140
uuuaaagacagaaagugac

SEQ ID NO: 704142 - RNA, 19 nt, Artificial Sequence
  Description of Artificial Sequence: Synthetic oligonucleotide
  Sense strand starting at position 3385 of SEQ ID NO: 586256
agaguagagucacaauuuc

SEQ ID NO: 704143 - RNA, 19 nt, Artificial Sequence
  Description of Artificial Sequence: Synthetic oligonucleotide
  Antisense strand to SEQ ID NO: 704142
gaaauugugacucuacucu

SEQ ID NO: 704144 - RNA, 19 nt, Artificial Sequence
  Description of Artificial Sequence: Synthetic oligonucleotide
  Sense strand starting at position 3607 of SEQ ID NO: 586256
ugcucugaacacuagucaa

SEQ ID NO: 704145 - RNA, 19 nt, Artificial Sequence
  Description of Artificial Sequence: Synthetic oligonucleotide
  Antisense strand to SEQ ID NO: 704144
uugacuaguguucagagca

SEQ ID NO: 704146 - RNA, 19 nt, Artificial Sequence
  Description of Artificial Sequence: Synthetic oligonucleotide
  Sense strand starting at position 3716 of SEQ ID NO: 586256
ccuacauucuagcuaguau

SEQ ID NO: 704147 - RNA, 19 nt, Artificial Sequence
  Description of Artificial Sequence: Synthetic oligonucleotide
  Antisense strand to SEQ ID NO: 704146
auacuagcuagaauguagg

SEQ ID NO: 704148 - RNA, 19 nt, Artificial Sequence
  Description of Artificial Sequence: Synthetic oligonucleotide
  Sense strand starting at position 3725 of SEQ ID NO: 586256
uagcuaguauacuuagaga

SEQ ID NO: 704149 - RNA, 19 nt, Artificial Sequence
  Description of Artificial Sequence: Synthetic oligonucleotide
  Antisense strand to SEQ ID NO: 704148
ucucuaaguauacuagcua

SEQ ID NO: 704150 - RNA, 19 nt, Artificial Sequence
  Description of Artificial Sequence: Synthetic oligonucleotide
  Sense strand starting at position 5 of SEQ ID NO: 586257
auaaguuuagagcaaugca

SEQ ID NO: 704151 - RNA, 19 nt, Artificial Sequence
  Description of Artificial Sequence: Synthetic oligonucleotide
  Antisense strand to SEQ ID NO: 704150
ugcauugcucuaaacuuau

SEQ ID NO: 704152 - RNA, 19 nt, Artificial Sequence
  Description of Artificial Sequence: Synthetic oligonucleotide
  Sense strand starting at position 8 of SEQ ID NO: 586257
aguuuagagcaaugcaauu

SEQ ID NO: 704153 - RNA, 19 nt, Artificial Sequence
  Description of Artificial Sequence: Synthetic oligonucleotide
  Antisense strand to SEQ ID NO: 704152
aauugcauugcucuaaacu

SEQ ID NO: 704154 - RNA, 19 nt, Artificial Sequence
  Description of Artificial Sequence: Synthetic oligonucleotide
  Sense strand starting at position 26 of SEQ ID NO: 586257
uuaccuuaaugagaaugau

SEQ ID NO: 704155 - RNA, 19 nt, Artificial Sequence
  Description of Artificial Sequence: Synthetic oligonucleotide
  Antisense strand to SEQ ID NO: 704154
aucauucucauuaagguaa

SEQ ID NO: 704156 - RNA, 19 nt, Artificial Sequence
  Description of Artificial Sequence: Synthetic oligonucleotide
  Sense strand starting at position 72 of SEQ ID NO: 586257
gugaucucacauugaaugu

SEQ ID NO: 704157 - RNA, 19 nt, Artificial Sequence
  Description of Artificial Sequence: Synthetic oligonucleotide
  Antisense strand to SEQ ID NO: 704156
acauucaaugugagaucac

SEQ ID NO: 704158 - RNA, 19 nt, Artificial Sequence
  Description of Artificial Sequence: Synthetic oligonucleotide
  Sense strand starting at position 76 of SEQ ID NO: 586257
ucucacauugaauguggua

SEQ ID NO: 704159 - RNA, 19 nt, Artificial Sequence
  Description of Artificial Sequence: Synthetic oligonucleotide
  Antisense strand to SEQ ID NO: 704158
uaccacauucaaugugaga

SEQ ID NO: 704160 - RNA, 19 nt, Artificial Sequence
  Description of Artificial Sequence: Synthetic oligonucleotide
  Sense strand starting at position 193 of SEQ ID NO: 586257
cuggcuugucuacaggaaa

SEQ ID NO: 704161 - RNA, 19 nt, Artificial Sequence
  Description of Artificial Sequence: Synthetic oligonucleotide
  Antisense strand to SEQ ID NO: 704160
uuuccuguagacaagccag

SEQ ID NO: 704162 - RNA, 19 nt, Artificial Sequence
  Description of Artificial Sequence: Synthetic oligonucleotide
  Sense strand starting at position 196 of SEQ ID NO: 586257
gcuugucuacaggaaacaa

SEQ ID NO: 704163 - RNA, 19 nt, Artificial Sequence
  Description of Artificial Sequence: Synthetic oligonucleotide
  Antisense strand to SEQ ID NO: 704162
uuguuuccuguagacaagc

SEQ ID NO: 704164 - RNA, 19 nt, Artificial Sequence
  Description of Artificial Sequence: Synthetic oligonucleotide
  Sense strand starting at position 279 of SEQ ID NO: 586257
cugauuaucuccucuagug

SEQ ID NO: 704165 - RNA, 19 nt, Artificial Sequence
  Description of Artificial Sequence: Synthetic oligonucleotide
  Antisense strand to SEQ ID NO: 704164
cacuagaggagauaaucag

SEQ ID NO: 704166 - RNA, 19 nt, Artificial Sequence
  Description of Artificial Sequence: Synthetic oligonucleotide
  Sense strand starting at position 281 of SEQ ID NO: 586257
gauuaucuccucuagugag

SEQ ID NO: 704167 - RNA, 19 nt, Artificial Sequence
  Description of Artificial Sequence: Synthetic oligonucleotide
  Antisense strand to SEQ ID NO: 704166
cucacuagaggagauaauc

SEQ ID NO: 704168 - RNA, 19 nt, Artificial Sequence
  Description of Artificial Sequence: Synthetic oligonucleotide
  Sense strand starting at position 551 of SEQ ID NO: 586257
gcacaaugaggucaucagu

SEQ ID NO: 704169 - RNA, 19 nt, Artificial Sequence
  Description of Artificial Sequence: Synthetic oligonucleotide
  Antisense strand to SEQ ID NO: 704168
acugaugaccucauugugc

SEQ ID NO: 704170 - RNA, 19 nt, Artificial Sequence
  Description of Artificial Sequence: Synthetic oligonucleotide
  Sense strand starting at position 650 of SEQ ID NO: 586257
gccugauggucccuacuaa

SEQ ID NO: 704171 - RNA, 19 nt, Artificial Sequence
  Description of Artificial Sequence: Synthetic oligonucleotide
  Antisense strand to SEQ ID NO: 704170
uuaguagggaccaucaggc

SEQ ID NO: 704172 - RNA, 19 nt, Artificial Sequence
  Description of Artificial Sequence: Synthetic oligonucleotide
  Sense strand starting at position 817 of SEQ ID NO: 586257
uguagauaaccgcaaauua

SEQ ID NO: 704173 - RNA, 19 nt, Artificial Sequence
  Description of Artificial Sequence: Synthetic oligonucleotide
  Antisense strand to SEQ ID NO: 704172
uaauuugcgguuaucuaca

SEQ ID NO: 704174 - RNA, 19 nt, Artificial Sequence
  Description of Artificial Sequence: Synthetic oligonucleotide
  Sense strand starting at position 990 of SEQ ID NO: 586257
guagcugucaauuaaagga

SEQ ID NO: 704175 - RNA, 19 nt, Artificial Sequence
  Description of Artificial Sequence: Synthetic oligonucleotide
  Antisense strand to SEQ ID NO: 704174
uccuuuaauugacagcuac

SEQ ID NO: 704176 - RNA, 19 nt, Artificial Sequence
  Description of Artificial Sequence: Synthetic oligonucleotide
  Sense strand starting at position 1007 of SEQ ID NO: 586257
gacacuucccugcagaguu

SEQ ID NO: 704177 - RNA, 19 nt, Artificial Sequence
  Description of Artificial Sequence: Synthetic oligonucleotide
  Antisense strand to SEQ ID NO: 704176
aacucugcagggaaguguc

SEQ ID NO: 704178 - RNA, 19 nt, Artificial Sequence
  Description of Artificial Sequence: Synthetic oligonucleotide
  Sense strand starting at position 1017 of SEQ ID NO: 586257
ugcagaguucaggguagua

SEQ ID NO: 704179 - RNA, 19 nt, Artificial Sequence
  Description of Artificial Sequence: Synthetic oligonucleotide
  Antisense strand to SEQ ID NO: 704178
uacuacccugaacucugca

SEQ ID NO: 704180 - RNA, 19 nt, Artificial Sequence
  Description of Artificial Sequence: Synthetic oligonucleotide
  Sense strand starting at position 1045 of SEQ ID NO: 586257
uuaggaauuaucgaggucu

SEQ ID NO: 704181 - RNA, 19 nt, Artificial Sequence
  Description of Artificial Sequence: Synthetic oligonucleotide
  Antisense strand to SEQ ID NO: 704180
agaccucgauaauuccuaa

SEQ ID NO: 704182 - RNA, 19 nt, Artificial Sequence
  Description of Artificial Sequence: Synthetic oligonucleotide
  Sense strand starting at position 1056 of SEQ ID NO: 586257
cgaggucugcuuuaaacuu

SEQ ID NO: 704183 - RNA, 19 nt, Artificial Sequence
  Description of Artificial Sequence: Synthetic oligonucleotide
  Antisense strand to SEQ ID NO: 704182
aaguuuaaagcagaccucg

SEQ ID NO: 704184 - RNA, 19 nt, Artificial Sequence
  Description of Artificial Sequence: Synthetic oligonucleotide
  Sense strand starting at position 1115 of SEQ ID NO: 586257
uagccaagacgugaagauu

SEQ ID NO: 704185 - RNA, 19 nt, Artificial Sequence
  Description of Artificial Sequence: Synthetic oligonucleotide
  Antisense strand to SEQ ID NO: 704184
aaucuucacgucuuggcua

SEQ ID NO: 704186 - RNA, 19 nt, Artificial Sequence
  Description of Artificial Sequence: Synthetic oligonucleotide
  Sense strand starting at position 1368 of SEQ ID NO: 586257
uuaggucugagugauagug

SEQ ID NO: 704187 - RNA, 19 nt, Artificial Sequence
  Description of Artificial Sequence: Synthetic oligonucleotide
  Antisense strand to SEQ ID NO: 704186
cacuaucacucagaccuaa

SEQ ID NO: 704188 - RNA, 19 nt, Artificial Sequence
  Description of Artificial Sequence: Synthetic oligonucleotide
  Sense strand starting at position 1377 of SEQ ID NO: 586257
agugauaguggacgaguga

SEQ ID NO: 704189 - RNA, 19 nt, Artificial Sequence
  Description of Artificial Sequence: Synthetic oligonucleotide
  Antisense strand to SEQ ID NO: 704188
ucacucguccacuaucacu

SEQ ID NO: 704190 - RNA, 19 nt, Artificial Sequence
  Description of Artificial Sequence: Synthetic oligonucleotide
  Sense strand starting at position 1460 of SEQ ID NO: 586257
agcaaacgucuccacguua

SEQ ID NO: 704191 - RNA, 19 nt, Artificial Sequence
  Description of Artificial Sequence: Synthetic oligonucleotide
  Antisense strand to SEQ ID NO: 704190
uaacguggagacguuugcu

SEQ ID NO: 704192 - RNA, 19 nt, Artificial Sequence
  Description of Artificial Sequence: Synthetic oligonucleotide
  Sense strand starting at position 2671 of SEQ ID NO: 586257
ucuaguacuucucuguuau

SEQ ID NO: 704193 - RNA, 19 nt, Artificial Sequence
  Description of Artificial Sequence: Synthetic oligonucleotide
  Antisense strand to SEQ ID NO: 704192
auaacagagaaguacuaga

SEQ ID NO: 704194 - RNA, 19 nt, Artificial Sequence
  Description of Artificial Sequence: Synthetic oligonucleotide
  Sense strand starting at position 2672 of SEQ ID NO: 586257
cuaguacuucucuguuaua

SEQ ID NO: 704195 - RNA, 19 nt, Artificial Sequence
  Description of Artificial Sequence: Synthetic oligonucleotide
  Antisense strand to SEQ ID NO: 704194
uauaacagagaaguacuag

SEQ ID NO: 704196 - RNA, 19 nt, Artificial Sequence
  Description of Artificial Sequence: Synthetic oligonucleotide
  Sense strand starting at position 2693 of SEQ ID NO: 586257
gucugccugccuuagacaa

SEQ ID NO: 704197 - RNA, 19 nt, Artificial Sequence
  Description of Artificial Sequence: Synthetic oligonucleotide
  Antisense strand to SEQ ID NO: 704196
uugucuaaggcaggcagac

SEQ ID NO: 704198 - RNA, 19 nt, Artificial Sequence
  Description of Artificial Sequence: Synthetic oligonucleotide
  Sense strand starting at position 2771 of SEQ ID NO: 586257
cguagaaccuuaccaguca

SEQ ID NO: 704199 - RNA, 19 nt, Artificial Sequence
  Description of Artificial Sequence: Synthetic oligonucleotide
  Antisense strand to SEQ ID NO: 704198
ugacugguaagguucuacg

SEQ ID NO: 704200 - RNA, 19 nt, Artificial Sequence
  Description of Artificial Sequence: Synthetic oligonucleotide
  Sense strand starting at position 2783 of SEQ ID NO: 586257
ccagucauccgguauaauu

SEQ ID NO: 704201 - RNA, 19 nt, Artificial Sequence
  Description of Artificial Sequence: Synthetic oligonucleotide
  Antisense strand to SEQ ID NO: 704200
aauuauaccggaugacugg

SEQ ID NO: 704202 - RNA, 19 nt, Artificial Sequence
  Description of Artificial Sequence: Synthetic oligonucleotide
  Sense strand starting at position 2792 of SEQ ID NO: 586257
cgguauaauuuccacauuu

SEQ ID NO: 704203 - RNA, 19 nt, Artificial Sequence
  Description of Artificial Sequence: Synthetic oligonucleotide
  Antisense strand to SEQ ID NO: 704202
aaauguggaaauuauaccg

SEQ ID NO: 704204 - RNA, 19 nt, Artificial Sequence
  Description of Artificial Sequence: Synthetic oligonucleotide
  Sense strand starting at position 2897 of SEQ ID NO: 586257
aaccaaucugccgguaaga

SEQ ID NO: 704205 - RNA, 19 nt, Artificial Sequence
  Description of Artificial Sequence: Synthetic oligonucleotide
  Antisense strand to SEQ ID NO: 704204
ucuuaccggcagauugguu

SEQ ID NO: 704206 - RNA, 19 nt, Artificial Sequence
  Description of Artificial Sequence: Synthetic oligonucleotide
  Sense strand starting at position 2908 of SEQ ID NO: 586257
cgguaagaacuuuguagca

SEQ ID NO: 704207 - RNA, 19 nt, Artificial Sequence
  Description of Artificial Sequence: Synthetic oligonucleotide
  Antisense strand to SEQ ID NO: 704206
ugcuacaaaguucuuaccg

SEQ ID NO: 704208 - RNA, 19 nt, Artificial Sequence
  Description of Artificial Sequence: Synthetic oligonucleotide
  Sense strand starting at position 3288 of SEQ ID NO: 586257
ccugacugggccuauguua

SEQ ID NO: 704209 - RNA, 19 nt, Artificial Sequence
  Description of Artificial Sequence: Synthetic oligonucleotide
  Antisense strand to SEQ ID NO: 704208
uaacauaggcccagucagg

SEQ ID NO: 704210 - RNA, 19 nt, Artificial Sequence
  Description of Artificial Sequence: Synthetic oligonucleotide
  Sense strand starting at position 3321 of SEQ ID NO: 586257
agaaauacuuggucucuag

SEQ ID NO: 704211 - RNA, 19 nt, Artificial Sequence
  Description of Artificial Sequence: Synthetic oligonucleotide
  Antisense strand to SEQ ID NO: 704210
cuagagaccaaguauuucu

SEQ ID NO: 704212 - RNA, 19 nt, Artificial Sequence
  Description of Artificial Sequence: Synthetic oligonucleotide
  Sense strand starting at position 3343 of SEQ ID NO: 586257
ucuccaaaggcauaaguau

SEQ ID NO: 704213 - RNA, 19 nt, Artificial Sequence
  Description of Artificial Sequence: Synthetic oligonucleotide
  Antisense strand to SEQ ID NO: 704212
auacuuaugccuuuggaga

SEQ ID NO: 704214 - RNA, 19 nt, Artificial Sequence
  Description of Artificial Sequence: Synthetic oligonucleotide
  Sense strand starting at position 3461 of SEQ ID NO: 586257
gcgcaucugguugucauua

SEQ ID NO: 704215 - RNA, 19 nt, Artificial Sequence
  Description of Artificial Sequence: Synthetic oligonucleotide
  Antisense strand to SEQ ID NO: 704214
uaaugacaaccagaugcgc

SEQ ID NO: 704216 - RNA, 19 nt, Artificial Sequence
  Description of Artificial Sequence: Synthetic oligonucleotide
  Sense strand starting at position 3496 of SEQ ID NO: 586257
agaacaaaggccugauauu

SEQ ID NO: 704217 - RNA, 19 nt, Artificial Sequence
  Description of Artificial Sequence: Synthetic oligonucleotide
  Antisense strand to SEQ ID NO: 704216
aauaucaggccuuuguucu

SEQ ID NO: 704218 - RNA, 19 nt, Artificial Sequence
  Description of Artificial Sequence: Synthetic oligonucleotide
  Sense strand starting at position 3713 of SEQ ID NO: 586257
ggugauaacugggaauaaa

SEQ ID NO: 704219 - RNA, 19 nt, Artificial Sequence
  Description of Artificial Sequence: Synthetic oligonucleotide
  Antisense strand to SEQ ID NO: 704218
uuuauucccaguuaucacc

SEQ ID NO: 704220 - RNA, 19 nt, Artificial Sequence
  Description of Artificial Sequence: Synthetic oligonucleotide
  Sense strand starting at position 3761 of SEQ ID NO: 586257
guuagcuugcuauaacaag

SEQ ID NO: 704221 - RNA, 19 nt, Artificial Sequence
  Description of Artificial Sequence: Synthetic oligonucleotide
  Antisense strand to SEQ ID NO: 704220
cuuguuauagcaagcuaac

SEQ ID NO: 704222 - RNA, 19 nt, Artificial Sequence
  Description of Artificial Sequence: Synthetic oligonucleotide
  Sense strand starting at position 3800 of SEQ ID NO: 586257
guauuuggaugagacucaa

SEQ ID NO: 704223 - RNA, 19 nt, Artificial Sequence
  Description of Artificial Sequence: Synthetic oligonucleotide
  Antisense strand to SEQ ID NO: 704222
uugagucucauccaaauac

SEQ ID NO: 704224 - RNA, 19 nt, Artificial Sequence
  Description of Artificial Sequence: Synthetic oligonucleotide
  Sense strand starting at position 3833 of SEQ ID NO: 586257
guggguaagcuuuauagug

SEQ ID NO: 704225 - RNA, 19 nt, Artificial Sequence
  Description of Artificial Sequence: Synthetic oligonucleotide
  Antisense strand to SEQ ID NO: 704224
cacuauaaagcuuacccac

SEQ ID NO: 704226 - RNA, 19 nt, Artificial Sequence
  Description of Artificial Sequence: Synthetic oligonucleotide
  Sense strand starting at position 3918 of SEQ ID NO: 586257
caucccaagugauugguua

SEQ ID NO: 704227 - RNA, 19 nt, Artificial Sequence
  Description of Artificial Sequence: Synthetic oligonucleotide
  Antisense strand to SEQ ID NO: 704226
uaaccaaucacuugggaug

SEQ ID NO: 704228 - RNA, 19 nt, Artificial Sequence
  Description of Artificial Sequence: Synthetic oligonucleotide
  Sense strand starting at position 3939 of SEQ ID NO: 586257
ggcacauauuugucuuucu

SEQ ID NO: 704229 - RNA, 19 nt, Artificial Sequence
  Description of Artificial Sequence: Synthetic oligonucleotide
  Antisense strand to SEQ ID NO: 704228
agaaagacaaauaugugcc

SEQ ID NO: 704230 - RNA, 19 nt, Artificial Sequence
  Description of Artificial Sequence: Synthetic oligonucleotide
  Sense strand starting at position 5 of SEQ ID NO: 586258
gguuuaagcgaucgauucu

SEQ ID NO: 704231 - RNA, 19 nt, Artificial Sequence
  Description of Artificial Sequence: Synthetic oligonucleotide
  Antisense strand to SEQ ID NO: 704230
agaaucgaucgcuuaaacc

SEQ ID NO: 704232 - RNA, 19 nt, Artificial Sequence
  Description of Artificial Sequence: Synthetic oligonucleotide
  Sense strand starting at position 311 of SEQ ID NO: 586258
guuagcaaguccuuacuaa

SEQ ID NO: 704233 - RNA, 19 nt, Artificial Sequence
  Description of Artificial Sequence: Synthetic oligonucleotide
  Antisense strand to SEQ ID NO: 704232
uuaguaaggacuugcuaac

SEQ ID NO: 704234 - RNA, 19 nt, Artificial Sequence
  Description of Artificial Sequence: Synthetic oligonucleotide
  Sense strand starting at position 315 of SEQ ID NO: 586258
gcaaguccuuacuaaagau

SEQ ID NO: 704235 - RNA, 19 nt, Artificial Sequence
  Description of Artificial Sequence: Synthetic oligonucleotide
  Antisense strand to SEQ ID NO: 704234
aucuuuaguaaggacuugc

SEQ ID NO: 704236 - RNA, 19 nt, Artificial Sequence
  Description of Artificial Sequence: Synthetic oligonucleotide
  Sense strand starting at position 343 of SEQ ID NO: 586258
ggauguugauggcauggua

SEQ ID NO: 704237 - RNA, 19 nt, Artificial Sequence
  Description of Artificial Sequence: Synthetic oligonucleotide
  Antisense strand to SEQ ID NO: 704236
uaccaugccaucaacaucc

SEQ ID NO: 704238 - RNA, 19 nt, Artificial Sequence
  Description of Artificial Sequence: Synthetic oligonucleotide
  Sense strand starting at position 356 of SEQ ID NO: 586258
augguauaccacuagcaaa

SEQ ID NO: 704239 - RNA, 19 nt, Artificial Sequence
  Description of Artificial Sequence: Synthetic oligonucleotide
  Antisense strand to SEQ ID NO: 704238
uuugcuagugguauaccau

SEQ ID NO: 704240 - RNA, 19 nt, Artificial Sequence
  Description of Artificial Sequence: Synthetic oligonucleotide
  Sense strand starting at position 858 of SEQ ID NO: 586258
gagcgagacuucgucuaau

SEQ ID NO: 704241 - RNA, 19 nt, Artificial Sequence
  Description of Artificial Sequence: Synthetic oligonucleotide
  Antisense strand to SEQ ID NO: 704240
auuagacgaagucucgcuc

SEQ ID NO: 704242 - RNA, 19 nt, Artificial Sequence
  Description of Artificial Sequence: Synthetic oligonucleotide
  Sense strand starting at position 861 of SEQ ID NO: 586258
cgagacuucgucuaauuaa

SEQ ID NO: 704243 - RNA, 19 nt, Artificial Sequence
  Description of Artificial Sequence: Synthetic oligonucleotide
  Antisense strand to SEQ ID NO: 704242
uuaauuagacgaagucucg

SEQ ID NO: 704244 - RNA, 19 nt, Artificial Sequence
  Description of Artificial Sequence: Synthetic oligonucleotide
  Sense strand starting at position 938 of SEQ ID NO: 586258
gugucaaccucucuuaauu

SEQ ID NO: 704245 - RNA, 19 nt, Artificial Sequence
  Description of Artificial Sequence: Synthetic oligonucleotide
  Antisense strand to SEQ ID NO: 704244
aauuaagagagguugacac

SEQ ID NO: 704246 - RNA, 19 nt, Artificial Sequence
  Description of Artificial Sequence: Synthetic oligonucleotide
  Sense strand starting at position 1254 of SEQ ID NO: 586258
cagaaacgagccuguuuaa

SEQ ID NO: 704247 - RNA, 19 nt, Artificial Sequence
  Description of Artificial Sequence: Synthetic oligonucleotide
  Antisense strand to SEQ ID NO: 704246
uuaaacaggcucguuucug

SEQ ID NO: 704248 - RNA, 19 nt, Artificial Sequence
  Description of Artificial Sequence: Synthetic oligonucleotide
  Sense strand starting at position 1374 of SEQ ID NO: 586258
aguuauguccagcaggaug

SEQ ID NO: 704249 - RNA, 19 nt, Artificial Sequence
  Description of Artificial Sequence: Synthetic oligonucleotide
  Antisense strand to SEQ ID NO: 704248
cauccugcuggacauaacu

SEQ ID NO: 704250 - RNA, 19 nt, Artificial Sequence
  Description of Artificial Sequence: Synthetic oligonucleotide
  Sense strand starting at position 1482 of SEQ ID NO: 586258
gcucuagagccgcuuuguu

SEQ ID NO: 704251 - RNA, 19 nt, Artificial Sequence
  Description of Artificial Sequence: Synthetic oligonucleotide
  Antisense strand to SEQ ID NO: 704250
aacaaagcggcucuagagc

SEQ ID NO: 704252 - RNA, 19 nt, Artificial Sequence
  Description of Artificial Sequence: Synthetic oligonucleotide
  Sense strand starting at position 1495 of SEQ ID NO: 586258
uuuguucuccgcggagacu

SEQ ID NO: 704253 - RNA, 19 nt, Artificial Sequence
  Description of Artificial Sequence: Synthetic oligonucleotide
  Antisense strand to SEQ ID NO: 704252
agucuccgcggagaacaaa

SEQ ID NO: 704254 - RNA, 19 nt, Artificial Sequence
  Description of Artificial Sequence: Synthetic oligonucleotide
  Sense strand starting at position 2215 of SEQ ID NO: 586258
cccugaucucgcgguuugu

SEQ ID NO: 704255 - RNA, 19 nt, Artificial Sequence
  Description of Artificial Sequence: Synthetic oligonucleotide
  Antisense strand to SEQ ID NO: 704254
acaaaccgcgagaucaggg

SEQ ID NO: 704256 - RNA, 19 nt, Artificial Sequence
  Description of Artificial Sequence: Synthetic oligonucleotide
  Sense strand starting at position 2216 of SEQ ID NO: 586258
ccugaucucgcgguuuguu

SEQ ID NO: 704257 - RNA, 19 nt, Artificial Sequence
  Description of Artificial Sequence: Synthetic oligonucleotide
  Antisense strand to SEQ ID NO: 704256
aacaaaccgcgagaucagg

SEQ ID NO: 704258 - RNA, 19 nt, Artificial Sequence
  Description of Artificial Sequence: Synthetic oligonucleotide
  Sense strand starting at position 2226 of SEQ ID NO: 586258
cgguuuguuccguuucauu

SEQ ID NO: 704259 - RNA, 19 nt, Artificial Sequence
  Description of Artificial Sequence: Synthetic oligonucleotide
  Antisense strand to SEQ ID NO: 704258
aaugaaacggaacaaaccg

SEQ ID NO: 704260 - RNA, 19 nt, Artificial Sequence
  Description of Artificial Sequence: Synthetic oligonucleotide
  Sense strand starting at position 2335 of SEQ ID NO: 586258
ugcugugaggccuagcgaa

SEQ ID NO: 704261 - RNA, 19 nt, Artificial Sequence
  Description of Artificial Sequence: Synthetic oligonucleotide
  Antisense strand to SEQ ID NO: 704260
uucgcuaggccucacagca

SEQ ID NO: 704262 - RNA, 19 nt, Artificial Sequence
  Description of Artificial Sequence: Synthetic oligonucleotide
  Sense strand starting at position 2376 of SEQ ID NO: 586258
gaaagugcuggauaccuuu

SEQ ID NO: 704263 - RNA, 19 nt, Artificial Sequence
  Description of Artificial Sequence: Synthetic oligonucleotide
  Antisense strand to SEQ ID NO: 704262
aaagguauccagcacuuuc

SEQ ID NO: 704264 - RNA, 19 nt, Artificial Sequence
  Description of Artificial Sequence: Synthetic oligonucleotide
  Sense strand starting at position 2567 of SEQ ID NO: 586258
ccacaauuguuuccaguau

SEQ ID NO: 704265 - RNA, 19 nt, Artificial Sequence
  Description of Artificial Sequence: Synthetic oligonucleotide
  Antisense strand to SEQ ID NO: 704264
auacuggaaacaauugugg

SEQ ID NO: 704266 - RNA, 19 nt, Artificial Sequence
  Description of Artificial Sequence: Synthetic oligonucleotide
  Sense strand starting at position 2612 of SEQ ID NO: 586258
ucaguaacacgugguauuu

SEQ ID NO: 704267 - RNA, 19 nt, Artificial Sequence
  Description of Artificial Sequence: Synthetic oligonucleotide
  Antisense strand to SEQ ID NO: 704266
aaauaccacguguuacuga

SEQ ID NO: 704268 - RNA, 19 nt, Artificial Sequence
  Description of Artificial Sequence: Synthetic oligonucleotide
  Sense strand starting at position 3007 of SEQ ID NO: 586258
cacugcaggguguguuaua

SEQ ID NO: 704269 - RNA, 19 nt, Artificial Sequence
  Description of Artificial Sequence: Synthetic oligonucleotide
  Antisense strand to SEQ ID NO: 704268
uauaacacacccugcagug

SEQ ID NO: 704270 - RNA, 19 nt, Artificial Sequence
  Description of Artificial Sequence: Synthetic oligonucleotide
  Sense strand starting at position 3017 of SEQ ID NO: 586258
uguguuauacuuuaagugu

SEQ ID NO: 704271 - RNA, 19 nt, Artificial Sequence
  Description of Artificial Sequence: Synthetic oligonucleotide
  Antisense strand to SEQ ID NO: 704270
acacuuaaaguauaacaca

SEQ ID NO: 704272 - RNA, 19 nt, Artificial Sequence
  Description of Artificial Sequence: Synthetic oligonucleotide
  Sense strand starting at position 3036 of SEQ ID NO: 586258
cuuggagauugugccauau

SEQ ID NO: 704273 - RNA, 19 nt, Artificial Sequence
  Description of Artificial Sequence: Synthetic oligonucleotide
  Antisense strand to SEQ ID NO: 704272
auauggcacaaucuccaag

SEQ ID NO: 704274 - RNA, 19 nt, Artificial Sequence
  Description of Artificial Sequence: Synthetic oligonucleotide
  Sense strand starting at position 3063 of SEQ ID NO: 586258
augggaaguccucgguaac

SEQ ID NO: 704275 - RNA, 19 nt, Artificial Sequence
  Description of Artificial Sequence: Synthetic oligonucleotide
  Antisense strand to SEQ ID NO: 704274
guuaccgaggacuucccau

SEQ ID NO: 704276 - RNA, 19 nt, Artificial Sequence
  Description of Artificial Sequence: Synthetic oligonucleotide
  Sense strand starting at position 3064 of SEQ ID NO: 586258
ugggaaguccucgguaaca

SEQ ID NO: 704277 - RNA, 19 nt, Artificial Sequence
  Description of Artificial Sequence: Synthetic oligonucleotide
  Antisense strand to SEQ ID NO: 704276
uguuaccgaggacuuccca

SEQ ID NO: 704278 - RNA, 19 nt, Artificial Sequence
  Description of Artificial Sequence: Synthetic oligonucleotide
  Sense strand starting at position 3077 of SEQ ID NO: 586258
guaacagcagcgugauguu

SEQ ID NO: 704279 - RNA, 19 nt, Artificial Sequence
  Description of Artificial Sequence: Synthetic oligonucleotide
  Antisense strand to SEQ ID NO: 704278
aacaucacgcugcuguuac

SEQ ID NO: 704280 - RNA, 19 nt, Artificial Sequence
  Description of Artificial Sequence: Synthetic oligonucleotide
  Sense strand starting at position 3084 of SEQ ID NO: 586258
cagcgugauguucuuugua

SEQ ID NO: 704281 - RNA, 19 nt, Artificial Sequence
  Description of Artificial Sequence: Synthetic oligonucleotide
  Antisense strand to SEQ ID NO: 704280
uacaaagaacaucacgcug

SEQ ID NO: 704282 - RNA, 19 nt, Artificial Sequence
  Description of Artificial Sequence: Synthetic oligonucleotide
  Sense strand starting at position 3086 of SEQ ID NO: 586258
gcgugauguucuuuguaag

SEQ ID NO: 704283 - RNA, 19 nt, Artificial Sequence
  Description of Artificial Sequence: Synthetic oligonucleotide
  Antisense strand to SEQ ID NO: 704282
cuuacaaagaacaucacgc

SEQ ID NO: 704284 - RNA, 19 nt, Artificial Sequence
  Description of Artificial Sequence: Synthetic oligonucleotide
  Sense strand starting at position 3087 of SEQ ID NO: 586258
cgugauguucuuuguaaga

SEQ ID NO: 704285 - RNA, 19 nt, Artificial Sequence
  Description of Artificial Sequence: Synthetic oligonucleotide
  Antisense strand to SEQ ID NO: 704284
ucuuacaaagaacaucacg

SEQ ID NO: 704286 - RNA, 19 nt, Artificial Sequence
  Description of Artificial Sequence: Synthetic oligonucleotide
  Sense strand starting at position 3089 of SEQ ID NO: 586258
ugauguucuuuguaagaau

SEQ ID NO: 704287 - RNA, 19 nt, Artificial Sequence
  Description of Artificial Sequence: Synthetic oligonucleotide
  Antisense strand to SEQ ID NO: 704286
auucuuacaaagaacauca

SEQ ID NO: 704288 - RNA, 19 nt, Artificial Sequence
  Description of Artificial Sequence: Synthetic oligonucleotide
  Sense strand starting at position 3092 of SEQ ID NO: 586258
uguucuuuguaagaaugac

SEQ ID NO: 704289 - RNA, 19 nt, Artificial Sequence
  Description of Artificial Sequence: Synthetic oligonucleotide
  Antisense strand to SEQ ID NO: 704288
gucauucuuacaaagaaca

SEQ ID NO: 704290 - RNA, 19 nt, Artificial Sequence
  Description of Artificial Sequence: Synthetic oligonucleotide
  Sense strand starting at position 3098 of SEQ ID NO: 586258
uuguaagaaugacucaacu

SEQ ID NO: 704291 - RNA, 19 nt, Artificial Sequence
  Description of Artificial Sequence: Synthetic oligonucleotide
  Antisense strand to SEQ ID NO: 704290
aguugagucauucuuacaa

SEQ ID NO: 704292 - RNA, 19 nt, Artificial Sequence
  Description of Artificial Sequence: Synthetic oligonucleotide
  Sense strand starting at position 3475 of SEQ ID NO: 586258
cagugaauaucuggguaua

SEQ ID NO: 704293 - RNA, 19 nt, Artificial Sequence
  Description of Artificial Sequence: Synthetic oligonucleotide
  Antisense strand to SEQ ID NO: 704292
uauacccagauauucacug

SEQ ID NO: 704294 - RNA, 19 nt, Artificial Sequence
  Description of Artificial Sequence: Synthetic oligonucleotide
  Sense strand starting at position 3476 of SEQ ID NO: 586258
agugaauaucuggguauau

SEQ ID NO: 704295 - RNA, 19 nt, Artificial Sequence
  Description of Artificial Sequence: Synthetic oligonucleotide
  Antisense strand to SEQ ID NO: 704294
auauacccagauauucacu

SEQ ID NO: 704296 - RNA, 19 nt, Artificial Sequence
  Description of Artificial Sequence: Synthetic oligonucleotide
  Sense strand starting at position 3477 of SEQ ID NO: 586258
gugaauaucuggguauaug

SEQ ID NO: 704297 - RNA, 19 nt, Artificial Sequence
  Description of Artificial Sequence: Synthetic oligonucleotide
  Antisense strand to SEQ ID NO: 704296
cauauacccagauauucac

SEQ ID NO: 704298 - RNA, 19 nt, Artificial Sequence
  Description of Artificial Sequence: Synthetic oligonucleotide
  Sense strand starting at position 3510 of SEQ ID NO: 586258
guuuguguauuugagaauc

SEQ ID NO: 704299 - RNA, 19 nt, Artificial Sequence
  Description of Artificial Sequence: Synthetic oligonucleotide
  Antisense strand to SEQ ID NO: 704298
gauucucaaauacacaaac

SEQ ID NO: 704300 - RNA, 19 nt, Artificial Sequence
  Description of Artificial Sequence: Synthetic oligonucleotide
  Sense strand starting at position 3537 of SEQ ID NO: 586258
aucuauauaugugacuagu

SEQ ID NO: 704301 - RNA, 19 nt, Artificial Sequence
  Description of Artificial Sequence: Synthetic oligonucleotide
  Antisense strand to SEQ ID NO: 704300
acuagucacauauauagau

SEQ ID NO: 704302 - RNA, 19 nt, Artificial Sequence
  Description of Artificial Sequence: Synthetic oligonucleotide
  Sense strand starting at position 3539 of SEQ ID NO: 586258
cuauauaugugacuaguag

SEQ ID NO: 704303 - RNA, 19 nt, Artificial Sequence
  Description of Artificial Sequence: Synthetic oligonucleotide
  Antisense strand to SEQ ID NO: 704302
cuacuagucacauauauag

SEQ ID NO: 704304 - RNA, 19 nt, Artificial Sequence
  Description of Artificial Sequence: Synthetic oligonucleotide
  Sense strand starting at position 3543 of SEQ ID NO: 586258
auaugugacuaguagcacu

SEQ ID NO: 704305 - RNA, 19 nt, Artificial Sequence
  Description of Artificial Sequence: Synthetic oligonucleotide
  Antisense strand to SEQ ID NO: 704304
agugcuacuagucacauau

SEQ ID NO: 704306 - RNA, 19 nt, Artificial Sequence
  Description of Artificial Sequence: Synthetic oligonucleotide
  Sense strand starting at position 3554 of SEQ ID NO: 586258
guagcacugcacgauagaa

SEQ ID NO: 704307 - RNA, 19 nt, Artificial Sequence
  Description of Artificial Sequence: Synthetic oligonucleotide
  Antisense strand to SEQ ID NO: 704306
uucuaucgugcagugcuac

SEQ ID NO: 704308 - RNA, 19 nt, Artificial Sequence
  Description of Artificial Sequence: Synthetic oligonucleotide
  Sense strand starting at position 3593 of SEQ ID NO: 586258
ggcauuacacggugugcau

SEQ ID NO: 704309 - RNA, 19 nt, Artificial Sequence
  Description of Artificial Sequence: Synthetic oligonucleotide
  Antisense strand to SEQ ID NO: 704308
augcacaccguguaaugcc

SEQ ID NO: 704310 - RNA, 19 nt, Artificial Sequence
  Description of Artificial Sequence: Synthetic oligonucleotide
  Sense strand starting at position 226 of SEQ ID NO: 586259
ugggcuaaauguccuacaa

SEQ ID NO: 704311 - RNA, 19 nt, Artificial Sequence
  Description of Artificial Sequence: Synthetic oligonucleotide
  Antisense strand to SEQ ID NO: 704310
uuguaggacauuuagccca

SEQ ID NO: 704312 - RNA, 19 nt, Artificial Sequence
  Description of Artificial Sequence: Synthetic oligonucleotide
  Sense strand starting at position 228 of SEQ ID NO: 586259
ggcuaaauguccuacaaag

SEQ ID NO: 704313 - RNA, 19 nt, Artificial Sequence
  Description of Artificial Sequence: Synthetic oligonucleotide
  Antisense strand to SEQ ID NO: 704312
cuuuguaggacauuuagcc

SEQ ID NO: 704314 - RNA, 19 nt, Artificial Sequence
  Description of Artificial Sequence: Synthetic oligonucleotide
  Sense strand starting at position 230 of SEQ ID NO: 586259
cuaaauguccuacaaaggu

SEQ ID NO: 704315 - RNA, 19 nt, Artificial Sequence
  Description of Artificial Sequence: Synthetic oligonucleotide
  Antisense strand to SEQ ID NO: 704314
accuuuguaggacauuuag

SEQ ID NO: 704316 - RNA, 19 nt, Artificial Sequence
  Description of Artificial Sequence: Synthetic oligonucleotide
  Sense strand starting at position 254 of SEQ ID NO: 586259
aaauauguuugggacaauu

SEQ ID NO: 704317 - RNA, 19 nt, Artificial Sequence
  Description of Artificial Sequence: Synthetic oligonucleotide
  Antisense strand to SEQ ID NO: 704316
aauugucccaaacauauuu

SEQ ID NO: 704318 - RNA, 19 nt, Artificial Sequence
  Description of Artificial Sequence: Synthetic oligonucleotide
  Sense strand starting at position 320 of SEQ ID NO: 586259
gagguauuaccuuguaaac

SEQ ID NO: 704319 - RNA, 19 nt, Artificial Sequence
  Description of Artificial Sequence: Synthetic oligonucleotide
  Antisense strand to SEQ ID NO: 704318
guuuacaagguaauaccuc

SEQ ID NO: 704320 - RNA, 19 nt, Artificial Sequence
  Description of Artificial Sequence: Synthetic oligonucleotide
  Sense strand starting at position 322 of SEQ ID NO: 586259
gguauuaccuuguaaacug

SEQ ID NO: 704321 - RNA, 19 nt, Artificial Sequence
  Description of Artificial Sequence: Synthetic oligonucleotide
  Antisense strand to SEQ ID NO: 704320
caguuuacaagguaauacc

SEQ ID NO: 704322 - RNA, 19 nt, Artificial Sequence
  Description of Artificial Sequence: Synthetic oligonucleotide
  Sense strand starting at position 648 of SEQ ID NO: 586259
gugagacgucucuauuauu

SEQ ID NO: 704323 - RNA, 19 nt, Artificial Sequence
  Description of Artificial Sequence: Synthetic oligonucleotide
  Antisense strand to SEQ ID NO: 704322
aauaauagagacgucucac

SEQ ID NO: 704324 - RNA, 19 nt, Artificial Sequence
  Description of Artificial Sequence: Synthetic oligonucleotide
  Sense strand starting at position 651 of SEQ ID NO: 586259
agacgucucuauuauuuaa

SEQ ID NO: 704325 - RNA, 19 nt, Artificial Sequence
  Description of Artificial Sequence: Synthetic oligonucleotide
  Antisense strand to SEQ ID NO: 704324
uuaaauaauagagacgucu

SEQ ID NO: 704326 - RNA, 19 nt, Artificial Sequence
  Description of Artificial Sequence: Synthetic oligonucleotide
  Sense strand starting at position 736 of SEQ ID NO: 586259
uucgauagucaguaaguca

SEQ ID NO: 704327 - RNA, 19 nt, Artificial Sequence
  Description of Artificial Sequence: Synthetic oligonucleotide
  Antisense strand to SEQ ID NO: 704326
ugacuuacugacuaucgaa

SEQ ID NO: 704328 - RNA, 19 nt, Artificial Sequence
  Description of Artificial Sequence: Synthetic oligonucleotide
  Sense strand starting at position 743 of SEQ ID NO: 586259
gucaguaagucacaucuga

SEQ ID NO: 704329 - RNA, 19 nt, Artificial Sequence
  Description of Artificial Sequence: Synthetic oligonucleotide
  Antisense strand to SEQ ID NO: 704328
ucagaugugacuuacugac

SEQ ID NO: 704330 - RNA, 19 nt, Artificial Sequence
  Description of Artificial Sequence: Synthetic oligonucleotide
  Sense strand starting at position 760 of SEQ ID NO: 586259
gaaguagcaccagguaauu

SEQ ID NO: 704331 - RNA, 19 nt, Artificial Sequence
  Description of Artificial Sequence: Synthetic oligonucleotide
  Antisense strand to SEQ ID NO: 704330
aauuaccuggugcuacuuc

SEQ ID NO: 704332 - RNA, 19 nt, Artificial Sequence
  Description of Artificial Sequence: Synthetic oligonucleotide
  Sense strand starting at position 795 of SEQ ID NO: 586259
ucucuagguuucuuuccua

SEQ ID NO: 704333 - RNA, 19 nt, Artificial Sequence
  Description of Artificial Sequence: Synthetic oligonucleotide
  Antisense strand to SEQ ID NO: 704332
uaggaaagaaaccuagaga

SEQ ID NO: 704334 - RNA, 19 nt, Artificial Sequence
  Description of Artificial Sequence: Synthetic oligonucleotide
  Sense strand starting at position 813 of SEQ ID NO: 586259
agugcuaauuuguaauaca

SEQ ID NO: 704335 - RNA, 19 nt, Artificial Sequence
  Description of Artificial Sequence: Synthetic oligonucleotide
  Antisense strand to SEQ ID NO: 704334
uguauuacaaauuagcacu

SEQ ID NO: 704336 - RNA, 19 nt, Artificial Sequence
  Description of Artificial Sequence: Synthetic oligonucleotide
  Sense strand starting at position 837 of SEQ ID NO: 586259
gcuuguaagaaauaaaggu

SEQ ID NO: 704337 - RNA, 19 nt, Artificial Sequence
  Description of Artificial Sequence: Synthetic oligonucleotide
  Antisense strand to SEQ ID NO: 704336
accuuuauuucuuacaagc

SEQ ID NO: 704338 - RNA, 19 nt, Artificial Sequence
  Description of Artificial Sequence: Synthetic oligonucleotide
  Sense strand starting at position 845 of SEQ ID NO: 586259
gaaauaaaggugugcccau

SEQ ID NO: 704339 - RNA, 19 nt, Artificial Sequence
  Description of Artificial Sequence: Synthetic oligonucleotide
  Antisense strand to SEQ ID NO: 704338
augggcacaccuuuauuuc

SEQ ID NO: 704340 - RNA, 19 nt, Artificial Sequence
  Description of Artificial Sequence: Synthetic oligonucleotide
  Sense strand starting at position 1238 of SEQ ID NO: 586259
gacagucuuuaacagaagu

SEQ ID NO: 704341 - RNA, 19 nt, Artificial Sequence
  Description of Artificial Sequence: Synthetic oligonucleotide
  Antisense strand to SEQ ID NO: 704340
acuucuguuaaagacuguc

SEQ ID NO: 704342 - RNA, 19 nt, Artificial Sequence
  Description of Artificial Sequence: Synthetic oligonucleotide
  Sense strand starting at position 1251 of SEQ ID NO: 586259
agaagucugacuugcugga

SEQ ID NO: 704343 - RNA, 19 nt, Artificial Sequence
  Description of Artificial Sequence: Synthetic oligonucleotide
  Antisense strand to SEQ ID NO: 704342
uccagcaagucagacuucu

SEQ ID NO: 704344 - RNA, 19 nt, Artificial Sequence
  Description of Artificial Sequence: Synthetic oligonucleotide
  Sense strand starting at position 1253 of SEQ ID NO: 586259
aagucugacuugcuggaaa

SEQ ID NO: 704345 - RNA, 19 nt, Artificial Sequence
  Description of Artificial Sequence: Synthetic oligonucleotide
  Antisense strand to SEQ ID NO: 704344
uuuccagcaagucagacuu

SEQ ID NO: 704346 - RNA, 19 nt, Artificial Sequence
  Description of Artificial Sequence: Synthetic oligonucleotide
  Sense strand starting at position 1255 of SEQ ID NO: 586259
gucugacuugcuggaaaca

SEQ ID NO: 704347 - RNA, 19 nt, Artificial Sequence
  Description of Artificial Sequence: Synthetic oligonucleotide
  Antisense strand to SEQ ID NO: 704346
uguuuccagcaagucagac

SEQ ID NO: 704348 - RNA, 19 nt, Artificial Sequence
  Description of Artificial Sequence: Synthetic oligonucleotide
  Sense strand starting at position 1284 of SEQ ID NO: 586259
ccggacauccuuugagaaa

SEQ ID NO: 704349 - RNA, 19 nt, Artificial Sequence
  Description of Artificial Sequence: Synthetic oligonucleotide
  Antisense strand to SEQ ID NO: 704348
uuucucaaaggauguccgg

SEQ ID NO: 704350 - RNA, 19 nt, Artificial Sequence
  Description of Artificial Sequence: Synthetic oligonucleotide
  Sense strand starting at position 1285 of SEQ ID NO: 586259
cggacauccuuugagaaag

SEQ ID NO: 704351 - RNA, 19 nt, Artificial Sequence
  Description of Artificial Sequence: Synthetic oligonucleotide
  Antisense strand to SEQ ID NO: 704350
cuuucucaaaggauguccg

SEQ ID NO: 704352 - RNA, 19 nt, Artificial Sequence
  Description of Artificial Sequence: Synthetic oligonucleotide
  Sense strand starting at position 1287 of SEQ ID NO: 586259
gacauccuuugagaaaguc

SEQ ID NO: 704353 - RNA, 19 nt, Artificial Sequence
  Description of Artificial Sequence: Synthetic oligonucleotide
  Antisense strand to SEQ ID NO: 704352
gacuuucucaaaggauguc

SEQ ID NO: 704354 - RNA, 19 nt, Artificial Sequence
  Description of Artificial Sequence: Synthetic oligonucleotide
  Sense strand starting at position 1398 of SEQ ID NO: 586259
uuuccucauuugggcgaaa

SEQ ID NO: 704355 - RNA, 19 nt, Artificial Sequence
  Description of Artificial Sequence: Synthetic oligonucleotide
  Antisense strand to SEQ ID NO: 704354
uuucgcccaaaugaggaaa

SEQ ID NO: 704356 - RNA, 19 nt, Artificial Sequence
  Description of Artificial Sequence: Synthetic oligonucleotide
  Sense strand starting at position 1601 of SEQ ID NO: 586259
gcuuuauuccaucgaccua

SEQ ID NO: 704357 - RNA, 19 nt, Artificial Sequence
  Description of Artificial Sequence: Synthetic oligonucleotide
  Antisense strand to SEQ ID NO: 704356
uaggucgauggaauaaagc

SEQ ID NO: 704358 - RNA, 19 nt, Artificial Sequence
  Description of Artificial Sequence: Synthetic oligonucleotide
  Sense strand starting at position 2077 of SEQ ID NO: 586259
ggcuguuuccuggccgagu

SEQ ID NO: 704359 - RNA, 19 nt, Artificial Sequence
  Description of Artificial Sequence: Synthetic oligonucleotide
  Antisense strand to SEQ ID NO: 704358
acucggccaggaaacagcc

SEQ ID NO: 704360 - RNA, 19 nt, Artificial Sequence
  Description of Artificial Sequence: Synthetic oligonucleotide
  Sense strand starting at position 2078 of SEQ ID NO: 586259
gcuguuuccuggccgaguu

SEQ ID NO: 704361 - RNA, 19 nt, Artificial Sequence
  Description of Artificial Sequence: Synthetic oligonucleotide
  Antisense strand to SEQ ID NO: 704360
aacucggccaggaaacagc

SEQ ID NO: 704362 - RNA, 19 nt, Artificial Sequence
  Description of Artificial Sequence: Synthetic oligonucleotide
  Sense strand starting at position 2437 of SEQ ID NO: 586259
uccgauuacaggcgugaga

SEQ ID NO: 704363 - RNA, 19 nt, Artificial Sequence
  Description of Artificial Sequence: Synthetic oligonucleotide
  Antisense strand to SEQ ID NO: 704362
ucucacgccuguaaucgga

SEQ ID NO: 704364 - RNA, 19 nt, Artificial Sequence
  Description of Artificial Sequence: Synthetic oligonucleotide
  Sense strand starting at position 2758 of SEQ ID NO: 586259
gauggaaggucuugaccgu

SEQ ID NO: 704365 - RNA, 19 nt, Artificial Sequence
  Description of Artificial Sequence: Synthetic oligonucleotide
  Antisense strand to SEQ ID NO: 704364
acggucaagaccuuccauc

SEQ ID NO: 704366 - RNA, 19 nt, Artificial Sequence
  Description of Artificial Sequence: Synthetic oligonucleotide
  Sense strand starting at position 2762 of SEQ ID NO: 586259
gaaggucuugaccguggau

SEQ ID NO: 704367 - RNA, 19 nt, Artificial Sequence
  Description of Artificial Sequence: Synthetic oligonucleotide
  Antisense strand to SEQ ID NO: 704366
auccacggucaagaccuuc

SEQ ID NO: 704368 - RNA, 19 nt, Artificial Sequence
  Description of Artificial Sequence: Synthetic oligonucleotide
  Sense strand starting at position 2793 of SEQ ID NO: 586259
uggcuuguugaacacagaa

SEQ ID NO: 704369 - RNA, 19 nt, Artificial Sequence
  Description of Artificial Sequence: Synthetic oligonucleotide
  Antisense strand to SEQ ID NO: 704368
uucuguguucaacaagcca

SEQ ID NO: 704370 - RNA, 19 nt, Artificial Sequence
  Description of Artificial Sequence: Synthetic oligonucleotide
  Sense strand starting at position 3019 of SEQ ID NO: 586259
aggucuccgauugguuaca

SEQ ID NO: 704371 - RNA, 19 nt, Artificial Sequence
  Description of Artificial Sequence: Synthetic oligonucleotide
  Antisense strand to SEQ ID NO: 704370
uguaaccaaucggagaccu

SEQ ID NO: 704372 - RNA, 19 nt, Artificial Sequence
  Description of Artificial Sequence: Synthetic oligonucleotide
  Sense strand starting at position 3031 of SEQ ID NO: 586259
gguuacacccucugaagga

SEQ ID NO: 704373 - RNA, 19 nt, Artificial Sequence
  Description of Artificial Sequence: Synthetic oligonucleotide
  Antisense strand to SEQ ID NO: 704372
uccuucagaggguguaacc

SEQ ID NO: 704374 - RNA, 19 nt, Artificial Sequence
  Description of Artificial Sequence: Synthetic oligonucleotide
  Sense strand starting at position 3032 of SEQ ID NO: 586259
guuacacccucugaaggau

SEQ ID NO: 704375 - RNA, 19 nt, Artificial Sequence
  Description of Artificial Sequence: Synthetic oligonucleotide
  Antisense strand to SEQ ID NO: 704374
auccuucagaggguguaac

SEQ ID NO: 704376 - RNA, 19 nt, Artificial Sequence
  Description of Artificial Sequence: Synthetic oligonucleotide
  Sense strand starting at position 3160 of SEQ ID NO: 586259
ucaaucagccucugauuga

SEQ ID NO: 704377 - RNA, 19 nt, Artificial Sequence
  Description of Artificial Sequence: Synthetic oligonucleotide
  Antisense strand to SEQ ID NO: 704376
ucaaucagaggcugauuga

SEQ ID NO: 704378 - RNA, 19 nt, Artificial Sequence
  Description of Artificial Sequence: Synthetic oligonucleotide
  Sense strand starting at position 150 of SEQ ID NO: 586260
guguaaauaccaugaccau

SEQ ID NO: 704379 - RNA, 19 nt, Artificial Sequence
  Description of Artificial Sequence: Synthetic oligonucleotide
  Antisense strand to SEQ ID NO: 704378
auggucaugguauuuacac

SEQ ID NO: 704380 - RNA, 19 nt, Artificial Sequence
  Description of Artificial Sequence: Synthetic oligonucleotide
  Sense strand starting at position 192 of SEQ ID NO: 586260
ugaagaacugucuguucuu

SEQ ID NO: 704381 - RNA, 19 nt, Artificial Sequence
  Description of Artificial Sequence: Synthetic oligonucleotide
  Antisense strand to SEQ ID NO: 704380
aagaacagacaguucuuca

SEQ ID NO: 704382 - RNA, 19 nt, Artificial Sequence
  Description of Artificial Sequence: Synthetic oligonucleotide
  Sense strand starting at position 193 of SEQ ID NO: 586260
gaagaacugucuguucuuc

SEQ ID NO: 704383 - RNA, 19 nt, Artificial Sequence
  Description of Artificial Sequence: Synthetic oligonucleotide
  Antisense strand to SEQ ID NO: 704382
gaagaacagacaguucuuc

SEQ ID NO: 704384 - RNA, 19 nt, Artificial Sequence
  Description of Artificial Sequence: Synthetic oligonucleotide
  Sense strand starting at position 199 of SEQ ID NO: 586260
cugucuguucuucugugua

SEQ ID NO: 704385 - RNA, 19 nt, Artificial Sequence
  Description of Artificial Sequence: Synthetic oligonucleotide
  Antisense strand to SEQ ID NO: 704384
uacacagaagaacagacag

SEQ ID NO: 704386 - RNA, 19 nt, Artificial Sequence
  Description of Artificial Sequence: Synthetic oligonucleotide
  Sense strand starting at position 201 of SEQ ID NO: 586260
gucuguucuucuguguaug

SEQ ID NO: 704387 - RNA, 19 nt, Artificial Sequence
  Description of Artificial Sequence: Synthetic oligonucleotide
  Antisense strand to SEQ ID NO: 704386
cauacacagaagaacagac

SEQ ID NO: 704388 - RNA, 19 nt, Artificial Sequence
  Description of Artificial Sequence: Synthetic oligonucleotide
  Sense strand starting at position 202 of SEQ ID NO: 586260
ucuguucuucuguguaugu

SEQ ID NO: 704389 - RNA, 19 nt, Artificial Sequence
  Description of Artificial Sequence: Synthetic oligonucleotide
  Antisense strand to SEQ ID NO: 704388
acauacacagaagaacaga

SEQ ID NO: 704390 - RNA, 19 nt, Artificial Sequence
  Description of Artificial Sequence: Synthetic oligonucleotide
  Sense strand starting at position 203 of SEQ ID NO: 586260
cuguucuucuguguaugua

SEQ ID NO: 704391 - RNA, 19 nt, Artificial Sequence
  Description of Artificial Sequence: Synthetic oligonucleotide
  Antisense strand to SEQ ID NO: 704390
uacauacacagaagaacag

SEQ ID NO: 704392 - RNA, 19 nt, Artificial Sequence
  Description of Artificial Sequence: Synthetic oligonucleotide
  Sense strand starting at position 204 of SEQ ID NO: 586260
uguucuucuguguauguaa

SEQ ID NO: 704393 - RNA, 19 nt, Artificial Sequence
  Description of Artificial Sequence: Synthetic oligonucleotide
  Antisense strand to SEQ ID NO: 704392
uuacauacacagaagaaca

SEQ ID NO: 704394 - RNA, 19 nt, Artificial Sequence
  Description of Artificial Sequence: Synthetic oligonucleotide
  Sense strand starting at position 207 of SEQ ID NO: 586260
ucuucuguguauguaaaga

SEQ ID NO: 704395 - RNA, 19 nt, Artificial Sequence
  Description of Artificial Sequence: Synthetic oligonucleotide
  Antisense strand to SEQ ID NO: 704394
ucuuuacauacacagaaga

SEQ ID NO: 704396 - RNA, 19 nt, Artificial Sequence
  Description of Artificial Sequence: Synthetic oligonucleotide
  Sense strand starting at position 241 of SEQ ID NO: 586260
ugggcuaaauguccuacaa

SEQ ID NO: 704397 - RNA, 19 nt, Artificial Sequence
  Description of Artificial Sequence: Synthetic oligonucleotide
  Antisense strand to SEQ ID NO: 704396
uuguaggacauuuagccca

SEQ ID NO: 704398 - RNA, 19 nt, Artificial Sequence
  Description of Artificial Sequence: Synthetic oligonucleotide
  Sense strand starting at position 243 of SEQ ID NO: 586260
ggcuaaauguccuacaaag

SEQ ID NO: 704399 - RNA, 19 nt, Artificial Sequence
  Description of Artificial Sequence: Synthetic oligonucleotide
  Antisense strand to SEQ ID NO: 704398
cuuuguaggacauuuagcc

SEQ ID NO: 704400 - RNA, 19 nt, Artificial Sequence
  Description of Artificial Sequence: Synthetic oligonucleotide
  Sense strand starting at position 245 of SEQ ID NO: 586260
cuaaauguccuacaaaggu

SEQ ID NO: 704401 - RNA, 19 nt, Artificial Sequence
  Description of Artificial Sequence: Synthetic oligonucleotide
  Antisense strand to SEQ ID NO: 704400
accuuuguaggacauuuag

SEQ ID NO: 704402 - RNA, 19 nt, Artificial Sequence
  Description of Artificial Sequence: Synthetic oligonucleotide
  Sense strand starting at position 664 of SEQ ID NO: 586260
gugagacgucucuauuauu

SEQ ID NO: 704403 - RNA, 19 nt, Artificial Sequence
  Description of Artificial Sequence: Synthetic oligonucleotide
  Antisense strand to SEQ ID NO: 704402
aauaauagagacgucucac

SEQ ID NO: 704404 - RNA, 19 nt, Artificial Sequence
  Description of Artificial Sequence: Synthetic oligonucleotide
  Sense strand starting at position 667 of SEQ ID NO: 586260
agacgucucuauuauuuaa

SEQ ID NO: 704405 - RNA, 19 nt, Artificial Sequence
  Description of Artificial Sequence: Synthetic oligonucleotide
  Antisense strand to SEQ ID NO: 704404
uuaaauaauagagacgucu

SEQ ID NO: 704406 - RNA, 19 nt, Artificial Sequence
  Description of Artificial Sequence: Synthetic oligonucleotide
  Sense strand starting at position 752 of SEQ ID NO: 586260
uucgauagucaagaaguca

SEQ ID NO: 704407 - RNA, 19 nt, Artificial Sequence
  Description of Artificial Sequence: Synthetic oligonucleotide
  Antisense strand to SEQ ID NO: 704406
ugacuucuugacuaucgaa

SEQ ID NO: 704408 - RNA, 19 nt, Artificial Sequence
  Description of Artificial Sequence: Synthetic oligonucleotide
  Sense strand starting at position 829 of SEQ ID NO: 586260
agugcuaauuuguaauaca

SEQ ID NO: 704409 - RNA, 19 nt, Artificial Sequence
  Description of Artificial Sequence: Synthetic oligonucleotide
  Antisense strand to SEQ ID NO: 704408
uguauuacaaauuagcacu

SEQ ID NO: 704410 - RNA, 19 nt, Artificial Sequence
  Description of Artificial Sequence: Synthetic oligonucleotide
  Sense strand starting at position 849 of SEQ ID NO: 586260
caaugcuuguaagaaguaa

SEQ ID NO: 704411 - RNA, 19 nt, Artificial Sequence
  Description of Artificial Sequence: Synthetic oligonucleotide
  Antisense strand to SEQ ID NO: 704410
uuacuucuuacaagcauug

SEQ ID NO: 704412 - RNA, 19 nt, Artificial Sequence
  Description of Artificial Sequence: Synthetic oligonucleotide
  Sense strand starting at position 853 of SEQ ID NO: 586260
gcuuguaagaaguaaaggu

SEQ ID NO: 704413 - RNA, 19 nt, Artificial Sequence
  Description of Artificial Sequence: Synthetic oligonucleotide
  Antisense strand to SEQ ID NO: 704412
accuuuacuucuuacaagc

SEQ ID NO: 704414 - RNA, 19 nt, Artificial Sequence
  Description of Artificial Sequence: Synthetic oligonucleotide
  Sense strand starting at position 861 of SEQ ID NO: 586260
gaaguaaaggugugcccau

SEQ ID NO: 704415 - RNA, 19 nt, Artificial Sequence
  Description of Artificial Sequence: Synthetic oligonucleotide
  Antisense strand to SEQ ID NO: 704414
augggcacaccuuuacuuc

SEQ ID NO: 704416 - RNA, 19 nt, Artificial Sequence
  Description of Artificial Sequence: Synthetic oligonucleotide
  Sense strand starting at position 1063 of SEQ ID NO: 586260
ccuccugaguaacuggaaa

SEQ ID NO: 704417 - RNA, 19 nt, Artificial Sequence
  Description of Artificial Sequence: Synthetic oligonucleotide
  Antisense strand to SEQ ID NO: 704416
uuuccaguuacucaggagg

SEQ ID NO: 704418 - RNA, 19 nt, Artificial Sequence
  Description of Artificial Sequence: Synthetic oligonucleotide
  Sense strand starting at position 1257 of SEQ ID NO: 586260
gacagucuuuaacagaagu

SEQ ID NO: 704419 - RNA, 19 nt, Artificial Sequence
  Description of Artificial Sequence: Synthetic oligonucleotide
  Antisense strand to SEQ ID NO: 704418
acuucuguuaaagacuguc

SEQ ID NO: 704420 - RNA, 19 nt, Artificial Sequence
  Description of Artificial Sequence: Synthetic oligonucleotide
  Sense strand starting at position 1270 of SEQ ID NO: 586260
agaagucugacuugcugga

SEQ ID NO: 704421 - RNA, 19 nt, Artificial Sequence
  Description of Artificial Sequence: Synthetic oligonucleotide
  Antisense strand to SEQ ID NO: 704420
uccagcaagucagacuucu

SEQ ID NO: 704422 - RNA, 19 nt, Artificial Sequence
  Description of Artificial Sequence: Synthetic oligonucleotide
  Sense strand starting at position 1274 of SEQ ID NO: 586260
gucugacuugcuggaaaca

SEQ ID NO: 704423 - RNA, 19 nt, Artificial Sequence
  Description of Artificial Sequence: Synthetic oligonucleotide
  Antisense strand to SEQ ID NO: 704422
uguuuccagcaagucagac

SEQ ID NO: 704424 - RNA, 19 nt, Artificial Sequence
  Description of Artificial Sequence: Synthetic oligonucleotide
  Sense strand starting at position 1389 of SEQ ID NO: 586260
uuuccucauuugggcgaaa

SEQ ID NO: 704425 - RNA, 19 nt, Artificial Sequence
  Description of Artificial Sequence: Synthetic oligonucleotide
  Antisense strand to SEQ ID NO: 704424
uuucgcccaaaugaggaaa

SEQ ID NO: 704426 - RNA, 19 nt, Artificial Sequence
  Description of Artificial Sequence: Synthetic oligonucleotide
  Sense strand starting at position 1592 of SEQ ID NO: 586260
gcuuuauuccaucgaccua

SEQ ID NO: 704427 - RNA, 19 nt, Artificial Sequence
  Description of Artificial Sequence: Synthetic oligonucleotide
  Antisense strand to SEQ ID NO: 704426
uaggucgauggaauaaagc

SEQ ID NO: 704428 - RNA, 19 nt, Artificial Sequence
  Description of Artificial Sequence: Synthetic oligonucleotide
  Sense strand starting at position 2077 of SEQ ID NO: 586260
gucuguuuccuggccgagu

SEQ ID NO: 704429 - RNA, 19 nt, Artificial Sequence
  Description of Artificial Sequence: Synthetic oligonucleotide
  Antisense strand to SEQ ID NO: 704428
acucggccaggaaacagac

SEQ ID NO: 704430 - RNA, 19 nt, Artificial Sequence
  Description of Artificial Sequence: Synthetic oligonucleotide
  Sense strand starting at position 2078 of SEQ ID NO: 586260
ucuguuuccuggccgaguu

SEQ ID NO: 704431 - RNA, 19 nt, Artificial Sequence
  Description of Artificial Sequence: Synthetic oligonucleotide
  Antisense strand to SEQ ID NO: 704430
aacucggccaggaaacaga

SEQ ID NO: 704432 - RNA, 19 nt, Artificial Sequence
  Description of Artificial Sequence: Synthetic oligonucleotide
  Sense strand starting at position 2437 of SEQ ID NO: 586260
uccgauuacaggcgugaga

SEQ ID NO: 704433 - RNA, 19 nt, Artificial Sequence
  Description of Artificial Sequence: Synthetic oligonucleotide
  Antisense strand to SEQ ID NO: 704432
ucucacgccuguaaucgga

SEQ ID NO: 704434 - RNA, 19 nt, Artificial Sequence
  Description of Artificial Sequence: Synthetic oligonucleotide
  Sense strand starting at position 2793 of SEQ ID NO: 586260
uggcuuguugaacacagaa

SEQ ID NO: 704435 - RNA, 19 nt, Artificial Sequence
  Description of Artificial Sequence: Synthetic oligonucleotide
  Antisense strand to SEQ ID NO: 704434
uucuguguucaacaagcca

SEQ ID NO: 704436 - RNA, 19 nt, Artificial Sequence
  Description of Artificial Sequence: Synthetic oligonucleotide
  Sense strand starting at position 3019 of SEQ ID NO: 586260
aggucuccgauugguuaca

SEQ ID NO: 704437 - RNA, 19 nt, Artificial Sequence
  Description of Artificial Sequence: Synthetic oligonucleotide
  Antisense strand to SEQ ID NO: 704436
uguaaccaaucggagaccu

SEQ ID NO: 704438 - RNA, 19 nt, Artificial Sequence
  Description of Artificial Sequence: Synthetic oligonucleotide
  Sense strand starting at position 3138 of SEQ ID NO: 586260
cccugucguccgucaauca

SEQ ID NO: 704439 - RNA, 19 nt, Artificial Sequence
  Description of Artificial Sequence: Synthetic oligonucleotide
  Antisense strand to SEQ ID NO: 704438
ugauugacggacgacaggg

SEQ ID NO: 704440 - RNA, 19 nt, Artificial Sequence
  Description of Artificial Sequence: Synthetic oligonucleotide
  Sense strand starting at position 3150 of SEQ ID NO: 586260
ucaaucagccucugauuga

SEQ ID NO: 704441 - RNA, 19 nt, Artificial Sequence
  Description of Artificial Sequence: Synthetic oligonucleotide
  Antisense strand to SEQ ID NO: 704440
ucaaucagaggcugauuga

SEQ ID NO: 704442 - RNA, 19 nt, Artificial Sequence
  Description of Artificial Sequence: Synthetic oligonucleotide
  Sense strand starting at position 262 of SEQ ID NO: 586261
gugaucauauauguaugga

SEQ ID NO: 704443 - RNA, 19 nt, Artificial Sequence
  Description of Artificial Sequence: Synthetic oligonucleotide
  Antisense strand to SEQ ID NO: 704442
uccauacauauaugaucac

SEQ ID NO: 704444 - RNA, 19 nt, Artificial Sequence
  Description of Artificial Sequence: Synthetic oligonucleotide
  Sense strand starting at position 302 of SEQ ID NO: 586261
gacagcuacuaguuuagaa

SEQ ID NO: 704445 - RNA, 19 nt, Artificial Sequence
  Description of Artificial Sequence: Synthetic oligonucleotide
  Antisense strand to SEQ ID NO: 704444
uucuaaacuaguagcuguc

SEQ ID NO: 704446 - RNA, 19 nt, Artificial Sequence
  Description of Artificial Sequence: Synthetic oligonucleotide
  Sense strand starting at position 312 of SEQ ID NO: 586261
aguuuagaacaaugcuacu

SEQ ID NO: 704447 - RNA, 19 nt, Artificial Sequence
  Description of Artificial Sequence: Synthetic oligonucleotide
  Antisense strand to SEQ ID NO: 704446
aguagcauuguucuaaacu

SEQ ID NO: 704448 - RNA, 19 nt, Artificial Sequence
  Description of Artificial Sequence: Synthetic oligonucleotide
  Sense strand starting at position 406 of SEQ ID NO: 586261
aguaucugauaguuacaga

SEQ ID NO: 704449 - RNA, 19 nt, Artificial Sequence
  Description of Artificial Sequence: Synthetic oligonucleotide
  Antisense strand to SEQ ID NO: 704448
ucuguaacuaucagauacu

SEQ ID NO: 704450 - RNA, 19 nt, Artificial Sequence
  Description of Artificial Sequence: Synthetic oligonucleotide
  Sense strand starting at position 478 of SEQ ID NO: 586261
ggguucaaauguguuaaag

SEQ ID NO: 704451 - RNA, 19 nt, Artificial Sequence
  Description of Artificial Sequence: Synthetic oligonucleotide
  Antisense strand to SEQ ID NO: 704450
cuuuaacacauuugaaccc

SEQ ID NO: 704452 - RNA, 19 nt, Artificial Sequence
  Description of Artificial Sequence: Synthetic oligonucleotide
  Sense strand starting at position 614 of SEQ ID NO: 586261
aggcuaacccauuaucuga

SEQ ID NO: 704453 - RNA, 19 nt, Artificial Sequence
  Description of Artificial Sequence: Synthetic oligonucleotide
  Antisense strand to SEQ ID NO: 704452
ucagauaauggguuagccu

SEQ ID NO: 704454 - RNA, 19 nt, Artificial Sequence
  Description of Artificial Sequence: Synthetic oligonucleotide
  Sense strand starting at position 891 of SEQ ID NO: 586261
ucaauaugcuacuugauga

SEQ ID NO: 704455 - RNA, 19 nt, Artificial Sequence
  Description of Artificial Sequence: Synthetic oligonucleotide
  Antisense strand to SEQ ID NO: 704454
ucaucaaguagcauauuga

SEQ ID NO: 704456 - RNA, 19 nt, Artificial Sequence
  Description of Artificial Sequence: Synthetic oligonucleotide
  Sense strand starting at position 1069 of SEQ ID NO: 586261
guaauaagcuuccugaauc

SEQ ID NO: 704457 - RNA, 19 nt, Artificial Sequence
  Description of Artificial Sequence: Synthetic oligonucleotide
  Antisense strand to SEQ ID NO: 704456
gauucaggaagcuuauuac

SEQ ID NO: 704458 - RNA, 19 nt, Artificial Sequence
  Description of Artificial Sequence: Synthetic oligonucleotide
  Sense strand starting at position 1260 of SEQ ID NO: 586261
gcaagucagguauaccaaa

SEQ ID NO: 704459 - RNA, 19 nt, Artificial Sequence
  Description of Artificial Sequence: Synthetic oligonucleotide
  Antisense strand to SEQ ID NO: 704458
uuugguauaccugacuugc

SEQ ID NO: 704460 - RNA, 19 nt, Artificial Sequence
  Description of Artificial Sequence: Synthetic oligonucleotide
  Sense strand starting at position 1309 of SEQ ID NO: 586261
agcuaaugacucuguaaag

SEQ ID NO: 704461 - RNA, 19 nt, Artificial Sequence
  Description of Artificial Sequence: Synthetic oligonucleotide
  Antisense strand to SEQ ID NO: 704460
cuuuacagagucauuagcu

SEQ ID NO: 704462 - RNA, 19 nt, Artificial Sequence
  Description of Artificial Sequence: Synthetic oligonucleotide
  Sense strand starting at position 1361 of SEQ ID NO: 586261
ugacauaagagcuguaagu

SEQ ID NO: 704463 - RNA, 19 nt, Artificial Sequence
  Description of Artificial Sequence: Synthetic oligonucleotide
  Antisense strand to SEQ ID NO: 704462
acuuacagcucuuauguca

SEQ ID NO: 704464 - RNA, 19 nt, Artificial Sequence
  Description of Artificial Sequence: Synthetic oligonucleotide
  Sense strand starting at position 1363 of SEQ ID NO: 586261
acauaagagcuguaaguca

SEQ ID NO: 704465 - RNA, 19 nt, Artificial Sequence
  Description of Artificial Sequence: Synthetic oligonucleotide
  Antisense strand to SEQ ID NO: 704464
ugacuuacagcucuuaugu

SEQ ID NO: 704466 - RNA, 19 nt, Artificial Sequence
  Description of Artificial Sequence: Synthetic oligonucleotide
  Sense strand starting at position 1402 of SEQ ID NO: 586261
uauauuggucugcaguaua

SEQ ID NO: 704467 - RNA, 19 nt, Artificial Sequence
  Description of Artificial Sequence: Synthetic oligonucleotide
  Antisense strand to SEQ ID NO: 704466
uauacugcagaccaauaua

SEQ ID NO: 704468 - RNA, 19 nt, Artificial Sequence
  Description of Artificial Sequence: Synthetic oligonucleotide
  Sense strand starting at position 1405 of SEQ ID NO: 586261
auuggucugcaguauaaug

SEQ ID NO: 704469 - RNA, 19 nt, Artificial Sequence
  Description of Artificial Sequence: Synthetic oligonucleotide
  Antisense strand to SEQ ID NO: 704468
cauuauacugcagaccaau

SEQ ID NO: 704470 - RNA, 19 nt, Artificial Sequence
  Description of Artificial Sequence: Synthetic oligonucleotide
  Sense strand starting at position 1407 of SEQ ID NO: 586261
uggucugcaguauaaugau

SEQ ID NO: 704471 - RNA, 19 nt, Artificial Sequence
  Description of Artificial Sequence: Synthetic oligonucleotide
  Antisense strand to SEQ ID NO: 704470
aucauuauacugcagacca

SEQ ID NO: 704472 - RNA, 19 nt, Artificial Sequence
  Description of Artificial Sequence: Synthetic oligonucleotide
  Sense strand starting at position 1446 of SEQ ID NO: 586261
guauaaauagccuaaguau

SEQ ID NO: 704473 - RNA, 19 nt, Artificial Sequence
  Description of Artificial Sequence: Synthetic oligonucleotide
  Antisense strand to SEQ ID NO: 704472
auacuuaggcuauuuauac

SEQ ID NO: 704474 - RNA, 19 nt, Artificial Sequence
  Description of Artificial Sequence: Synthetic oligonucleotide
  Sense strand starting at position 1534 of SEQ ID NO: 586261
augaaaugccauuggguau

SEQ ID NO: 704475 - RNA, 19 nt, Artificial Sequence
  Description of Artificial Sequence: Synthetic oligonucleotide
  Antisense strand to SEQ ID NO: 704474
auacccaauggcauuucau

SEQ ID NO: 704476 - RNA, 19 nt, Artificial Sequence
  Description of Artificial Sequence: Synthetic oligonucleotide
  Sense strand starting at position 1545 of SEQ ID NO: 586261
uuggguaugguuuaagcau

SEQ ID NO: 704477 - RNA, 19 nt, Artificial Sequence
  Description of Artificial Sequence: Synthetic oligonucleotide
  Antisense strand to SEQ ID NO: 704476
augcuuaaaccauacccaa

SEQ ID NO: 704478 - RNA, 19 nt, Artificial Sequence
  Description of Artificial Sequence: Synthetic oligonucleotide
  Sense strand starting at position 2160 of SEQ ID NO: 586261
ggaacugacuugcugaguu

SEQ ID NO: 704479 - RNA, 19 nt, Artificial Sequence
  Description of Artificial Sequence: Synthetic oligonucleotide
  Antisense strand to SEQ ID NO: 704478
aacucagcaagucaguucc

SEQ ID NO: 704480 - RNA, 19 nt, Artificial Sequence
  Description of Artificial Sequence: Synthetic oligonucleotide
  Sense strand starting at position 2319 of SEQ ID NO: 586261
uauacagcguaauucugaa

SEQ ID NO: 704481 - RNA, 19 nt, Artificial Sequence
  Description of Artificial Sequence: Synthetic oligonucleotide
  Antisense strand to SEQ ID NO: 704480
uucagaauuacgcuguaua

SEQ ID NO: 704482 - RNA, 19 nt, Artificial Sequence
  Description of Artificial Sequence: Synthetic oligonucleotide
  Sense strand starting at position 2332 of SEQ ID NO: 586261
ucugaaauacugugagacu

SEQ ID NO: 704483 - RNA, 19 nt, Artificial Sequence
  Description of Artificial Sequence: Synthetic oligonucleotide
  Antisense strand to SEQ ID NO: 704482
agucucacaguauuucaga

SEQ ID NO: 704484 - RNA, 19 nt, Artificial Sequence
  Description of Artificial Sequence: Synthetic oligonucleotide
  Sense strand starting at position 2364 of SEQ ID NO: 586261
acaauuggagacugucaau

SEQ ID NO: 704485 - RNA, 19 nt, Artificial Sequence
  Description of Artificial Sequence: Synthetic oligonucleotide
  Antisense strand to SEQ ID NO: 704484
auugacagucuccaauugu

SEQ ID NO: 704486 - RNA, 19 nt, Artificial Sequence
  Description of Artificial Sequence: Synthetic oligonucleotide
  Sense strand starting at position 2374 of SEQ ID NO: 586261
acugucaaucagcaaggau

SEQ ID NO: 704487 - RNA, 19 nt, Artificial Sequence
  Description of Artificial Sequence: Synthetic oligonucleotide
  Antisense strand to SEQ ID NO: 704486
auccuugcugauugacagu

SEQ ID NO: 704488 - RNA, 19 nt, Artificial Sequence
  Description of Artificial Sequence: Synthetic oligonucleotide
  Sense strand starting at position 2411 of SEQ ID NO: 586261
aaggaaacagccuauuguu

SEQ ID NO: 704489 - RNA, 19 nt, Artificial Sequence
  Description of Artificial Sequence: Synthetic oligonucleotide
  Antisense strand to SEQ ID NO: 704488
aacaauaggcuguuuccuu

SEQ ID NO: 704490 - RNA, 19 nt, Artificial Sequence
  Description of Artificial Sequence: Synthetic oligonucleotide
  Sense strand starting at position 2436 of SEQ ID NO: 586261
ggaaguucuuaacuguuua

SEQ ID NO: 704491 - RNA, 19 nt, Artificial Sequence
  Description of Artificial Sequence: Synthetic oligonucleotide
  Antisense strand to SEQ ID NO: 704490
uaaacaguuaagaacuucc

SEQ ID NO: 704492 - RNA, 19 nt, Artificial Sequence
  Description of Artificial Sequence: Synthetic oligonucleotide
  Sense strand starting at position 2564 of SEQ ID NO: 586261
ugaggauaaucuuuaguac

SEQ ID NO: 704493 - RNA, 19 nt, Artificial Sequence
  Description of Artificial Sequence: Synthetic oligonucleotide
  Antisense strand to SEQ ID NO: 704492
guacuaaagauuauccuca

SEQ ID NO: 704494 - RNA, 19 nt, Artificial Sequence
  Description of Artificial Sequence: Synthetic oligonucleotide
  Sense strand starting at position 2567 of SEQ ID NO: 586261
ggauaaucuuuaguacuua

SEQ ID NO: 704495 - RNA, 19 nt, Artificial Sequence
  Description of Artificial Sequence: Synthetic oligonucleotide
  Antisense strand to SEQ ID NO: 704494
uaaguacuaaagauuaucc

SEQ ID NO: 704496 - RNA, 19 nt, Artificial Sequence
  Description of Artificial Sequence: Synthetic oligonucleotide
  Sense strand starting at position 2728 of SEQ ID NO: 586261
guuaaccuggcauguauuu

SEQ ID NO: 704497 - RNA, 19 nt, Artificial Sequence
  Description of Artificial Sequence: Synthetic oligonucleotide
  Antisense strand to SEQ ID NO: 704496
aaauacaugccagguuaac

SEQ ID NO: 704498 - RNA, 19 nt, Artificial Sequence
  Description of Artificial Sequence: Synthetic oligonucleotide
  Sense strand starting at position 2737 of SEQ ID NO: 586261
gcauguauuugauaggaga

SEQ ID NO: 704499 - RNA, 19 nt, Artificial Sequence
  Description of Artificial Sequence: Synthetic oligonucleotide
  Antisense strand to SEQ ID NO: 704498
ucuccuaucaaauacaugc

SEQ ID NO: 704500 - RNA, 19 nt, Artificial Sequence
  Description of Artificial Sequence: Synthetic oligonucleotide
  Sense strand starting at position 2841 of SEQ ID NO: 586261
uuaaaccaguccuuaaguu

SEQ ID NO: 704501 - RNA, 19 nt, Artificial Sequence
  Description of Artificial Sequence: Synthetic oligonucleotide
  Antisense strand to SEQ ID NO: 704500
aacuuaaggacugguuuaa

SEQ ID NO: 704502 - RNA, 19 nt, Artificial Sequence
  Description of Artificial Sequence: Synthetic oligonucleotide
  Sense strand starting at position 2845 of SEQ ID NO: 586261
accaguccuuaaguuagaa

SEQ ID NO: 704503 - RNA, 19 nt, Artificial Sequence
  Description of Artificial Sequence: Synthetic oligonucleotide
  Antisense strand to SEQ ID NO: 704502
uucuaacuuaaggacuggu

SEQ ID NO: 704504 - RNA, 19 nt, Artificial Sequence
  Description of Artificial Sequence: Synthetic oligonucleotide
  Sense strand starting at position 2857 of SEQ ID NO: 586261
guuagaaugcucgugcugu

SEQ ID NO: 704505 - RNA, 19 nt, Artificial Sequence
  Description of Artificial Sequence: Synthetic oligonucleotide
  Antisense strand to SEQ ID NO: 704504
acagcacgagcauucuaac

SEQ ID NO: 704506 - RNA, 19 nt, Artificial Sequence
  Description of Artificial Sequence: Synthetic oligonucleotide
  Sense strand starting at position 3089 of SEQ ID NO: 586261
uagaaaugaccaugugcaa

SEQ ID NO: 704507 - RNA, 19 nt, Artificial Sequence
  Description of Artificial Sequence: Synthetic oligonucleotide
  Antisense strand to SEQ ID NO: 704506
uugcacauggucauuucua

SEQ ID NO: 704508 - RNA, 19 nt, Artificial Sequence
  Description of Artificial Sequence: Synthetic oligonucleotide
  Sense strand starting at position 3504 of SEQ ID NO: 586261
uuaaacuuacuuggguauu

SEQ ID NO: 704509 - RNA, 19 nt, Artificial Sequence
  Description of Artificial Sequence: Synthetic oligonucleotide
  Antisense strand to SEQ ID NO: 704508
aauacccaaguaaguuuaa

SEQ ID NO: 704510 - RNA, 19 nt, Artificial Sequence
  Description of Artificial Sequence: Synthetic oligonucleotide
  Sense strand starting at position 3619 of SEQ ID NO: 586261
cccagagacagcuguuaag

SEQ ID NO: 704511 - RNA, 19 nt, Artificial Sequence
  Description of Artificial Sequence: Synthetic oligonucleotide
  Antisense strand to SEQ ID NO: 704510
cuuaacagcugucucuggg

SEQ ID NO: 704512 - RNA, 19 nt, Artificial Sequence
  Description of Artificial Sequence: Synthetic oligonucleotide
  Sense strand starting at position 3651 of SEQ ID NO: 586261
agacaacaguuccugagua

SEQ ID NO: 704513 - RNA, 19 nt, Artificial Sequence
  Description of Artificial Sequence: Synthetic oligonucleotide
  Antisense strand to SEQ ID NO: 704512
uacucaggaacuguugucu

SEQ ID NO: 704514 - RNA, 19 nt, Artificial Sequence
  Description of Artificial Sequence: Synthetic oligonucleotide
  Sense strand starting at position 3656 of SEQ ID NO: 586261
acaguuccugaguagcuua

SEQ ID NO: 704515 - RNA, 19 nt, Artificial Sequence
  Description of Artificial Sequence: Synthetic oligonucleotide
  Antisense strand to SEQ ID NO: 704514
uaagcuacucaggaacugu

SEQ ID NO: 704516 - RNA, 19 nt, Artificial Sequence
  Description of Artificial Sequence: Synthetic oligonucleotide
  Sense strand starting at position 3661 of SEQ ID NO: 586261
uccugaguagcuuagcaua

SEQ ID NO: 704517 - RNA, 19 nt, Artificial Sequence
  Description of Artificial Sequence: Synthetic oligonucleotide
  Antisense strand to SEQ ID NO: 704516
uaugcuaagcuacucagga

SEQ ID NO: 704518 - RNA, 19 nt, Artificial Sequence
  Description of Artificial Sequence: Synthetic oligonucleotide
  Sense strand starting at position 3666 of SEQ ID NO: 586261
aguagcuuagcauacaaga

SEQ ID NO: 704519 - RNA, 19 nt, Artificial Sequence
  Description of Artificial Sequence: Synthetic oligonucleotide
  Antisense strand to SEQ ID NO: 704518
ucuuguaugcuaagcuacu

SEQ ID NO: 704520 - RNA, 19 nt, Artificial Sequence
  Description of Artificial Sequence: Synthetic oligonucleotide
  Sense strand starting at position 3692 of SEQ ID NO: 586261
gcacacagcugagucaaau

SEQ ID NO: 704521 - RNA, 19 nt, Artificial Sequence
  Description of Artificial Sequence: Synthetic oligonucleotide
  Antisense strand to SEQ ID NO: 704520
auuugacucagcugugugc

SEQ ID NO: 704522 - RNA, 19 nt, Artificial Sequence
  Description of Artificial Sequence: Synthetic oligonucleotide
  Sense strand starting at position 10 of SEQ ID NO: 586262
ugaggauucuagucacaug

SEQ ID NO: 704523 - RNA, 19 nt, Artificial Sequence
  Description of Artificial Sequence: Synthetic oligonucleotide
  Antisense strand to SEQ ID NO: 704522
caugugacuagaauccuca

SEQ ID NO: 704524 - RNA, 19 nt, Artificial Sequence
  Description of Artificial Sequence: Synthetic oligonucleotide
  Sense strand starting at position 433 of SEQ ID NO: 586262
ucuugaguuccagagcuua

SEQ ID NO: 704525 - RNA, 19 nt, Artificial Sequence
  Description of Artificial Sequence: Synthetic oligonucleotide
  Antisense strand to SEQ ID NO: 704524
uaagcucuggaacucaaga

SEQ ID NO: 704526 - RNA, 19 nt, Artificial Sequence
  Description of Artificial Sequence: Synthetic oligonucleotide
  Sense strand starting at position 610 of SEQ ID NO: 586262
uccucuugucaggauuaca

SEQ ID NO: 704527 - RNA, 19 nt, Artificial Sequence
  Description of Artificial Sequence: Synthetic oligonucleotide
  Antisense strand to SEQ ID NO: 704526
uguaauccugacaagagga

SEQ ID NO: 704528 - RNA, 19 nt, Artificial Sequence
  Description of Artificial Sequence: Synthetic oligonucleotide
  Sense strand starting at position 697 of SEQ ID NO: 586262
guugccuauuucucuuuga

SEQ ID NO: 704529 - RNA, 19 nt, Artificial Sequence
  Description of Artificial Sequence: Synthetic oligonucleotide
  Antisense strand to SEQ ID NO: 704528
ucaaagagaaauaggcaac

SEQ ID NO: 704530 - RNA, 19 nt, Artificial Sequence
  Description of Artificial Sequence: Synthetic oligonucleotide
  Sense strand starting at position 733 of SEQ ID NO: 586262
aauugugaguucucucaag

SEQ ID NO: 704531 - RNA, 19 nt, Artificial Sequence
  Description of Artificial Sequence: Synthetic oligonucleotide
  Antisense strand to SEQ ID NO: 704530
cuugagagaacucacaauu

SEQ ID NO: 704532 - RNA, 19 nt, Artificial Sequence
  Description of Artificial Sequence: Synthetic oligonucleotide
  Sense strand starting at position 774 of SEQ ID NO: 586262
uuggaaguauuagccuuaa

SEQ ID NO: 704533 - RNA, 19 nt, Artificial Sequence
  Description of Artificial Sequence: Synthetic oligonucleotide
  Antisense strand to SEQ ID NO: 704532
uuaaggcuaauacuuccaa

SEQ ID NO: 704534 - RNA, 19 nt, Artificial Sequence
  Description of Artificial Sequence: Synthetic oligonucleotide
  Sense strand starting at position 778 of SEQ ID NO: 586262
aaguauuagccuuaaaugg

SEQ ID NO: 704535 - RNA, 19 nt, Artificial Sequence
  Description of Artificial Sequence: Synthetic oligonucleotide
  Antisense strand to SEQ ID NO: 704534
ccauuuaaggcuaauacuu

SEQ ID NO: 704536 - RNA, 19 nt, Artificial Sequence
  Description of Artificial Sequence: Synthetic oligonucleotide
  Sense strand starting at position 868 of SEQ ID NO: 586262
ggcaaagaagccuaucuaa

SEQ ID NO: 704537 - RNA, 19 nt, Artificial Sequence
  Description of Artificial Sequence: Synthetic oligonucleotide
  Antisense strand to SEQ ID NO: 704536
uuagauaggcuucuuugcc

SEQ ID NO: 704538 - RNA, 19 nt, Artificial Sequence
  Description of Artificial Sequence: Synthetic oligonucleotide
  Sense strand starting at position 897 of SEQ ID NO: 586262
gggcuuguagaauagcaga

SEQ ID NO: 704539 - RNA, 19 nt, Artificial Sequence
  Description of Artificial Sequence: Synthetic oligonucleotide
  Antisense strand to SEQ ID NO: 704538
ucugcuauucuacaagccc

SEQ ID NO: 704540 - RNA, 19 nt, Artificial Sequence
  Description of Artificial Sequence: Synthetic oligonucleotide
  Sense strand starting at position 910 of SEQ ID NO: 586262
agcagaauagcauggagaa

SEQ ID NO: 704541 - RNA, 19 nt, Artificial Sequence
  Description of Artificial Sequence: Synthetic oligonucleotide
  Antisense strand to SEQ ID NO: 704540
uucuccaugcuauucugcu

SEQ ID NO: 704542 - RNA, 19 nt, Artificial Sequence
  Description of Artificial Sequence: Synthetic oligonucleotide
  Sense strand starting at position 911 of SEQ ID NO: 586262
gcagaauagcauggagaaa

SEQ ID NO: 704543 - RNA, 19 nt, Artificial Sequence
  Description of Artificial Sequence: Synthetic oligonucleotide
  Antisense strand to SEQ ID NO: 704542
uuucuccaugcuauucugc

SEQ ID NO: 704544 - RNA, 19 nt, Artificial Sequence
  Description of Artificial Sequence: Synthetic oligonucleotide
  Sense strand starting at position 953 of SEQ ID NO: 586262
uuguaucaaccuuaauugu

SEQ ID NO: 704545 - RNA, 19 nt, Artificial Sequence
  Description of Artificial Sequence: Synthetic oligonucleotide
  Antisense strand to SEQ ID NO: 704544
acaauuaagguugauacaa

SEQ ID NO: 704546 - RNA, 19 nt, Artificial Sequence
  Description of Artificial Sequence: Synthetic oligonucleotide
  Sense strand starting at position 975 of SEQ ID NO: 586262
ucgaaauaugcauaacuua

SEQ ID NO: 704547 - RNA, 19 nt, Artificial Sequence
  Description of Artificial Sequence: Synthetic oligonucleotide
  Antisense strand to SEQ ID NO: 704546
uaaguuaugcauauuucga

SEQ ID NO: 704548 - RNA, 19 nt, Artificial Sequence
  Description of Artificial Sequence: Synthetic oligonucleotide
  Sense strand starting at position 994 of SEQ ID NO: 586262
aguugacuuucuguauaag

SEQ ID NO: 704549 - RNA, 19 nt, Artificial Sequence
  Description of Artificial Sequence: Synthetic oligonucleotide
  Antisense strand to SEQ ID NO: 704548
cuuauacagaaagucaacu

SEQ ID NO: 704550 - RNA, 19 nt, Artificial Sequence
  Description of Artificial Sequence: Synthetic oligonucleotide
  Sense strand starting at position 997 of SEQ ID NO: 586262
ugacuuucuguauaaguaa

SEQ ID NO: 704551 - RNA, 19 nt, Artificial Sequence
  Description of Artificial Sequence: Synthetic oligonucleotide
  Antisense strand to SEQ ID NO: 704550
uuacuuauacagaaaguca

SEQ ID NO: 704552 - RNA, 19 nt, Artificial Sequence
  Description of Artificial Sequence: Synthetic oligonucleotide
  Sense strand starting at position 1219 of SEQ ID NO: 586262
ggagucaaauuguuaagau

SEQ ID NO: 704553 - RNA, 19 nt, Artificial Sequence
  Description of Artificial Sequence: Synthetic oligonucleotide
  Antisense strand to SEQ ID NO: 704552
aucuuaacaauuugacucc

SEQ ID NO: 704554 - RNA, 19 nt, Artificial Sequence
  Description of Artificial Sequence: Synthetic oligonucleotide
  Sense strand starting at position 1395 of SEQ ID NO: 586262
uuuagagcauccuucugaa

SEQ ID NO: 704555 - RNA, 19 nt, Artificial Sequence
  Description of Artificial Sequence: Synthetic oligonucleotide
  Antisense strand to SEQ ID NO: 704554
uucagaaggaugcucuaaa

SEQ ID NO: 704556 - RNA, 19 nt, Artificial Sequence
  Description of Artificial Sequence: Synthetic oligonucleotide
  Sense strand starting at position 1583 of SEQ ID NO: 586262
uagagacuuguggauaugu

SEQ ID NO: 704557 - RNA, 19 nt, Artificial Sequence
  Description of Artificial Sequence: Synthetic oligonucleotide
  Antisense strand to SEQ ID NO: 704556
acauauccacaagucucua

SEQ ID NO: 704558 - RNA, 19 nt, Artificial Sequence
  Description of Artificial Sequence: Synthetic oligonucleotide
  Sense strand starting at position 1596 of SEQ ID NO: 586262
auaugugagguuuaagggu

SEQ ID NO: 704559 - RNA, 19 nt, Artificial Sequence
  Description of Artificial Sequence: Synthetic oligonucleotide
  Antisense strand to SEQ ID NO: 704558
acccuuaaaccucacauau

SEQ ID NO: 704560 - RNA, 19 nt, Artificial Sequence
  Description of Artificial Sequence: Synthetic oligonucleotide
  Sense strand starting at position 2062 of SEQ ID NO: 586262
agccaaauggaaugaaagu

SEQ ID NO: 704561 - RNA, 19 nt, Artificial Sequence
  Description of Artificial Sequence: Synthetic oligonucleotide
  Antisense strand to SEQ ID NO: 704560
acuuucauuccauuuggcu

SEQ ID NO: 704562 - RNA, 19 nt, Artificial Sequence
  Description of Artificial Sequence: Synthetic oligonucleotide
  Sense strand starting at position 2374 of SEQ ID NO: 586262
acuggaaagucucuguaaa

SEQ ID NO: 704563 - RNA, 19 nt, Artificial Sequence
  Description of Artificial Sequence: Synthetic oligonucleotide
  Antisense strand to SEQ ID NO: 704562
uuuacagagacuuuccagu

SEQ ID NO: 704564 - RNA, 19 nt, Artificial Sequence
  Description of Artificial Sequence: Synthetic oligonucleotide
  Sense strand starting at position 2375 of SEQ ID NO: 586262
cuggaaagucucuguaaac

SEQ ID NO: 704565 - RNA, 19 nt, Artificial Sequence
  Description of Artificial Sequence: Synthetic oligonucleotide
  Antisense strand to SEQ ID NO: 704564
guuuacagagacuuuccag

SEQ ID NO: 704566 - RNA, 19 nt, Artificial Sequence
  Description of Artificial Sequence: Synthetic oligonucleotide
  Sense strand starting at position 2376 of SEQ ID NO: 586262
uggaaagucucuguaaacu

SEQ ID NO: 704567 - RNA, 19 nt, Artificial Sequence
  Description of Artificial Sequence: Synthetic oligonucleotide
  Antisense strand to SEQ ID NO: 704566
aguuuacagagacuuucca

SEQ ID NO: 704568 - RNA, 19 nt, Artificial Sequence
  Description of Artificial Sequence: Synthetic oligonucleotide
  Sense strand starting at position 2423 of SEQ ID NO: 586262
ucaguagucauuuggucau

SEQ ID NO: 704569 - RNA, 19 nt, Artificial Sequence
  Description of Artificial Sequence: Synthetic oligonucleotide
  Antisense strand to SEQ ID NO: 704568
augaccaaaugacuacuga

SEQ ID NO: 704570 - RNA, 19 nt, Artificial Sequence
  Description of Artificial Sequence: Synthetic oligonucleotide
  Sense strand starting at position 2445 of SEQ ID NO: 586262
uuguuugccucauuuaaug

SEQ ID NO: 704571 - RNA, 19 nt, Artificial Sequence
  Description of Artificial Sequence: Synthetic oligonucleotide
  Antisense strand to SEQ ID NO: 704570
cauuaaaugaggcaaacaa

SEQ ID NO: 704572 - RNA, 19 nt, Artificial Sequence
  Description of Artificial Sequence: Synthetic oligonucleotide
  Sense strand starting at position 2487 of SEQ ID NO: 586262
cagaguucuuugguuuaaa

SEQ ID NO: 704573 - RNA, 19 nt, Artificial Sequence
  Description of Artificial Sequence: Synthetic oligonucleotide
  Antisense strand to SEQ ID NO: 704572
uuuaaaccaaagaacucug

SEQ ID NO: 704574 - RNA, 19 nt, Artificial Sequence
  Description of Artificial Sequence: Synthetic oligonucleotide
  Sense strand starting at position 2488 of SEQ ID NO: 586262
agaguucuuugguuuaaau

SEQ ID NO: 704575 - RNA, 19 nt, Artificial Sequence
  Description of Artificial Sequence: Synthetic oligonucleotide
  Antisense strand to SEQ ID NO: 704574
auuuaaaccaaagaacucu

SEQ ID NO: 704576 - RNA, 19 nt, Artificial Sequence
  Description of Artificial Sequence: Synthetic oligonucleotide
  Sense strand starting at position 2537 of SEQ ID NO: 586262
uagaauguacuugguuuaa

SEQ ID NO: 704577 - RNA, 19 nt, Artificial Sequence
  Description of Artificial Sequence: Synthetic oligonucleotide
  Antisense strand to SEQ ID NO: 704576
uuaaaccaaguacauucua

SEQ ID NO: 704578 - RNA, 19 nt, Artificial Sequence
  Description of Artificial Sequence: Synthetic oligonucleotide
  Sense strand starting at position 2622 of SEQ ID NO: 586262
ugaugaaaguuauuacucu

SEQ ID NO: 704579 - RNA, 19 nt, Artificial Sequence
  Description of Artificial Sequence: Synthetic oligonucleotide
  Antisense strand to SEQ ID NO: 704578
agaguaauaacuuucauca

SEQ ID NO: 704580 - RNA, 19 nt, Artificial Sequence
  Description of Artificial Sequence: Synthetic oligonucleotide
  Sense strand starting at position 2626 of SEQ ID NO: 586262
gaaaguuauuacucugaag

SEQ ID NO: 704581 - RNA, 19 nt, Artificial Sequence
  Description of Artificial Sequence: Synthetic oligonucleotide
  Antisense strand to SEQ ID NO: 704580
cuucagaguaauaacuuuc

SEQ ID NO: 704582 - RNA, 19 nt, Artificial Sequence
  Description of Artificial Sequence: Synthetic oligonucleotide
  Sense strand starting at position 3121 of SEQ ID NO: 586262
uugagagucuaacccacaa

SEQ ID NO: 704583 - RNA, 19 nt, Artificial Sequence
  Description of Artificial Sequence: Synthetic oligonucleotide
  Antisense strand to SEQ ID NO: 704582
uuguggguuagacucucaa

SEQ ID NO: 704584 - RNA, 19 nt, Artificial Sequence
  Description of Artificial Sequence: Synthetic oligonucleotide
  Sense strand starting at position 3312 of SEQ ID NO: 586262
uaaagaguauugcuaugac

SEQ ID NO: 704585 - RNA, 19 nt, Artificial Sequence
  Description of Artificial Sequence: Synthetic oligonucleotide
  Antisense strand to SEQ ID NO: 704584
gucauagcaauacucuuua

SEQ ID NO: 704586 - RNA, 19 nt, Artificial Sequence
  Description of Artificial Sequence: Synthetic oligonucleotide
  Sense strand starting at position 3346 of SEQ ID NO: 586262
gaagcauuaugucccuaag

SEQ ID NO: 704587 - RNA, 19 nt, Artificial Sequence
  Description of Artificial Sequence: Synthetic oligonucleotide
  Antisense strand to SEQ ID NO: 704586
cuuagggacauaaugcuuc

SEQ ID NO: 704588 - RNA, 19 nt, Artificial Sequence
  Description of Artificial Sequence: Synthetic oligonucleotide
  Sense strand starting at position 3349 of SEQ ID NO: 586262
gcauuaugucccuaagaca

SEQ ID NO: 704589 - RNA, 19 nt, Artificial Sequence
  Description of Artificial Sequence: Synthetic oligonucleotide
  Antisense strand to SEQ ID NO: 704588
ugucuuagggacauaaugc

SEQ ID NO: 704590 - RNA, 19 nt, Artificial Sequence
  Description of Artificial Sequence: Synthetic oligonucleotide
  Sense strand starting at position 3521 of SEQ ID NO: 586262
cagucagaggucugauaug

SEQ ID NO: 704591 - RNA, 19 nt, Artificial Sequence
  Description of Artificial Sequence: Synthetic oligonucleotide
  Antisense strand to SEQ ID NO: 704590
cauaucagaccucugacug

SEQ ID NO: 704592 - RNA, 19 nt, Artificial Sequence
  Description of Artificial Sequence: Synthetic oligonucleotide
  Sense strand starting at position 3526 of SEQ ID NO: 586262
agaggucugauaugugaca

SEQ ID NO: 704593 - RNA, 19 nt, Artificial Sequence
  Description of Artificial Sequence: Synthetic oligonucleotide
  Antisense strand to SEQ ID NO: 704592
ugucacauaucagaccucu

SEQ ID NO: 704594 - RNA, 19 nt, Artificial Sequence
  Description of Artificial Sequence: Synthetic oligonucleotide
  Sense strand starting at position 3528 of SEQ ID NO: 586262
aggucugauaugugacaga

SEQ ID NO: 704595 - RNA, 19 nt, Artificial Sequence
  Description of Artificial Sequence: Synthetic oligonucleotide
  Antisense strand to SEQ ID NO: 704594
ucugucacauaucagaccu

SEQ ID NO: 704596 - RNA, 19 nt, Artificial Sequence
  Description of Artificial Sequence: Synthetic oligonucleotide
  Sense strand starting at position 3586 of SEQ ID NO: 586262
ucagauggucuuuacguga

SEQ ID NO: 704597 - RNA, 19 nt, Artificial Sequence
  Description of Artificial Sequence: Synthetic oligonucleotide
  Antisense strand to SEQ ID NO: 704596
ucacguaaagaccaucuga

SEQ ID NO: 704598 - RNA, 19 nt, Artificial Sequence
  Description of Artificial Sequence: Synthetic oligonucleotide
  Sense strand starting at position 3627 of SEQ ID NO: 586262
aauauuguagaaugugaac

SEQ ID NO: 704599 - RNA, 19 nt, Artificial Sequence
  Description of Artificial Sequence: Synthetic oligonucleotide
  Antisense strand to SEQ ID NO: 704598
guucacauucuacaauauu

SEQ ID NO: 704600 - RNA, 19 nt, Artificial Sequence
  Description of Artificial Sequence: Synthetic oligonucleotide
  Sense strand starting at position 3804 of SEQ ID NO: 586262
auagacugccucugacauu

SEQ ID NO: 704601 - RNA, 19 nt, Artificial Sequence
  Description of Artificial Sequence: Synthetic oligonucleotide
  Antisense strand to SEQ ID NO: 704600
aaugucagaggcagucuau

SEQ ID NO: 704602 - RNA, 19 nt, Artificial Sequence
  Description of Artificial Sequence: Synthetic oligonucleotide
  Sense strand starting at position 17 of SEQ ID NO: 586263
uagucuguacguuaacaca

SEQ ID NO: 704603 - RNA, 19 nt, Artificial Sequence
  Description of Artificial Sequence: Synthetic oligonucleotide
  Antisense strand to SEQ ID NO: 704602
uguguuaacguacagacua

SEQ ID NO: 704604 - RNA, 19 nt, Artificial Sequence
  Description of Artificial Sequence: Synthetic oligonucleotide
  Sense strand starting at position 47 of SEQ ID NO: 586263
uguacuuucucugcauaag

SEQ ID NO: 704605 - RNA, 19 nt, Artificial Sequence
  Description of Artificial Sequence: Synthetic oligonucleotide
  Antisense strand to SEQ ID NO: 704604
cuuaugcagagaaaguaca

SEQ ID NO: 704606 - RNA, 19 nt, Artificial Sequence
  Description of Artificial Sequence: Synthetic oligonucleotide
  Sense strand starting at position 48 of SEQ ID NO: 586263
guacuuucucugcauaaga

SEQ ID NO: 704607 - RNA, 19 nt, Artificial Sequence
  Description of Artificial Sequence: Synthetic oligonucleotide
  Antisense strand to SEQ ID NO: 704606
ucuuaugcagagaaaguac

SEQ ID NO: 704608 - RNA, 19 nt, Artificial Sequence
  Description of Artificial Sequence: Synthetic oligonucleotide
  Sense strand starting at position 57 of SEQ ID NO: 586263
cugcauaagaucuggguga

SEQ ID NO: 704609 - RNA, 19 nt, Artificial Sequence
  Description of Artificial Sequence: Synthetic oligonucleotide
  Antisense strand to SEQ ID NO: 704608
ucacccagaucuuaugcag

SEQ ID NO: 704610 - RNA, 19 nt, Artificial Sequence
  Description of Artificial Sequence: Synthetic oligonucleotide
  Sense strand starting at position 59 of SEQ ID NO: 586263
gcauaagaucugggugaga

SEQ ID NO: 704611 - RNA, 19 nt, Artificial Sequence
  Description of Artificial Sequence: Synthetic oligonucleotide
  Antisense strand to SEQ ID NO: 704610
ucucacccagaucuuaugc

SEQ ID NO: 704612 - RNA, 19 nt, Artificial Sequence
  Description of Artificial Sequence: Synthetic oligonucleotide
  Sense strand starting at position 72 of SEQ ID NO: 586263
gugagaacauaguuuauga

SEQ ID NO: 704613 - RNA, 19 nt, Artificial Sequence
  Description of Artificial Sequence: Synthetic oligonucleotide
  Antisense strand to SEQ ID NO: 704612
ucauaaacuauguucucac

SEQ ID NO: 704614 - RNA, 19 nt, Artificial Sequence
  Description of Artificial Sequence: Synthetic oligonucleotide
  Sense strand starting at position 79 of SEQ ID NO: 586263
cauaguuuaugaguaggaa

SEQ ID NO: 704615 - RNA, 19 nt, Artificial Sequence
  Description of Artificial Sequence: Synthetic oligonucleotide
  Antisense strand to SEQ ID NO: 704614
uuccuacucauaaacuaug

SEQ ID NO: 704616 - RNA, 19 nt, Artificial Sequence
  Description of Artificial Sequence: Synthetic oligonucleotide
  Sense strand starting at position 82 of SEQ ID NO: 586263
aguuuaugaguaggaagga

SEQ ID NO: 704617 - RNA, 19 nt, Artificial Sequence
  Description of Artificial Sequence: Synthetic oligonucleotide
  Antisense strand to SEQ ID NO: 704616
uccuuccuacucauaaacu

SEQ ID NO: 704618 - RNA, 19 nt, Artificial Sequence
  Description of Artificial Sequence: Synthetic oligonucleotide
  Sense strand starting at position 168 of SEQ ID NO: 586263
uccauuggccuguauuaaa

SEQ ID NO: 704619 - RNA, 19 nt, Artificial Sequence
  Description of Artificial Sequence: Synthetic oligonucleotide
  Antisense strand to SEQ ID NO: 704618
uuuaauacaggccaaugga

SEQ ID NO: 704620 - RNA, 19 nt, Artificial Sequence
  Description of Artificial Sequence: Synthetic oligonucleotide
  Sense strand starting at position 247 of SEQ ID NO: 586263
caguuaaaugcaugaggcu

SEQ ID NO: 704621 - RNA, 19 nt, Artificial Sequence
  Description of Artificial Sequence: Synthetic oligonucleotide
  Antisense strand to SEQ ID NO: 704620
agccucaugcauuuaacug

SEQ ID NO: 704622 - RNA, 19 nt, Artificial Sequence
  Description of Artificial Sequence: Synthetic oligonucleotide
  Sense strand starting at position 263 of SEQ ID NO: 586263
gcugaaguucugcaauaug

SEQ ID NO: 704623 - RNA, 19 nt, Artificial Sequence
  Description of Artificial Sequence: Synthetic oligonucleotide
  Antisense strand to SEQ ID NO: 704622
cauauugcagaacuucagc

SEQ ID NO: 704624 - RNA, 19 nt, Artificial Sequence
  Description of Artificial Sequence: Synthetic oligonucleotide
  Sense strand starting at position 266 of SEQ ID NO: 586263
gaaguucugcaauauguua

SEQ ID NO: 704625 - RNA, 19 nt, Artificial Sequence
  Description of Artificial Sequence: Synthetic oligonucleotide
  Antisense strand to SEQ ID NO: 704624
uaacauauugcagaacuuc

SEQ ID NO: 704626 - RNA, 19 nt, Artificial Sequence
  Description of Artificial Sequence: Synthetic oligonucleotide
  Sense strand starting at position 273 of SEQ ID NO: 586263
ugcaauauguuagcaauaa

SEQ ID NO: 704627 - RNA, 19 nt, Artificial Sequence
  Description of Artificial Sequence: Synthetic oligonucleotide
  Antisense strand to SEQ ID NO: 704626
uuauugcuaacauauugca

SEQ ID NO: 704628 - RNA, 19 nt, Artificial Sequence
  Description of Artificial Sequence: Synthetic oligonucleotide
  Sense strand starting at position 726 of SEQ ID NO: 586263
caaucaacguuucugauga

SEQ ID NO: 704629 - RNA, 19 nt, Artificial Sequence
  Description of Artificial Sequence: Synthetic oligonucleotide
  Antisense strand to SEQ ID NO: 704628
ucaucagaaacguugauug

SEQ ID NO: 704630 - RNA, 19 nt, Artificial Sequence
  Description of Artificial Sequence: Synthetic oligonucleotide
  Sense strand starting at position 755 of SEQ ID NO: 586263
agcuaauucgaauaagcua

SEQ ID NO: 704631 - RNA, 19 nt, Artificial Sequence
  Description of Artificial Sequence: Synthetic oligonucleotide
  Antisense strand to SEQ ID NO: 704630
uagcuuauucgaauuagcu

SEQ ID NO: 704632 - RNA, 19 nt, Artificial Sequence
  Description of Artificial Sequence: Synthetic oligonucleotide
  Sense strand starting at position 781 of SEQ ID NO: 586263
agaugaauucuagguuguu

SEQ ID NO: 704633 - RNA, 19 nt, Artificial Sequence
  Description of Artificial Sequence: Synthetic oligonucleotide
  Antisense strand to SEQ ID NO: 704632
aacaaccuagaauucaucu

SEQ ID NO: 704634 - RNA, 19 nt, Artificial Sequence
  Description of Artificial Sequence: Synthetic oligonucleotide
  Sense strand starting at position 782 of SEQ ID NO: 586263
gaugaauucuagguuguug

SEQ ID NO: 704635 - RNA, 19 nt, Artificial Sequence
  Description of Artificial Sequence: Synthetic oligonucleotide
  Antisense strand to SEQ ID NO: 704634
caacaaccuagaauucauc

SEQ ID NO: 704636 - RNA, 19 nt, Artificial Sequence
  Description of Artificial Sequence: Synthetic oligonucleotide
  Sense strand starting at position 868 of SEQ ID NO: 586263
uguucugcauauuucugaa

SEQ ID NO: 704637 - RNA, 19 nt, Artificial Sequence
  Description of Artificial Sequence: Synthetic oligonucleotide
  Antisense strand to SEQ ID NO: 704636
uucagaaauaugcagaaca

SEQ ID NO: 704638 - RNA, 19 nt, Artificial Sequence
  Description of Artificial Sequence: Synthetic oligonucleotide
  Sense strand starting at position 1164 of SEQ ID NO: 586263
ccaacaugcucuuuggaca

SEQ ID NO: 704639 - RNA, 19 nt, Artificial Sequence
  Description of Artificial Sequence: Synthetic oligonucleotide
  Antisense strand to SEQ ID NO: 704638
uguccaaagagcauguugg

SEQ ID NO: 704640 - RNA, 19 nt, Artificial Sequence
  Description of Artificial Sequence: Synthetic oligonucleotide
  Sense strand starting at position 1169 of SEQ ID NO: 586263
augcucuuuggacauaacu

SEQ ID NO: 704641 - RNA, 19 nt, Artificial Sequence
  Description of Artificial Sequence: Synthetic oligonucleotide
  Antisense strand to SEQ ID NO: 704640
aguuauguccaaagagcau

SEQ ID NO: 704642 - RNA, 19 nt, Artificial Sequence
  Description of Artificial Sequence: Synthetic oligonucleotide
  Sense strand starting at position 1311 of SEQ ID NO: 586263
agucgcaucauauagaguu

SEQ ID NO: 704643 - RNA, 19 nt, Artificial Sequence
  Description of Artificial Sequence: Synthetic oligonucleotide
  Antisense strand to SEQ ID NO: 704642
aacucuauaugaugcgacu

SEQ ID NO: 704644 - RNA, 19 nt, Artificial Sequence
  Description of Artificial Sequence: Synthetic oligonucleotide
  Sense strand starting at position 1371 of SEQ ID NO: 586263
agcaguuaccaugaaauau

SEQ ID NO: 704645 - RNA, 19 nt, Artificial Sequence
  Description of Artificial Sequence: Synthetic oligonucleotide
  Antisense strand to SEQ ID NO: 704644
auauuucaugguaacugcu

SEQ ID NO: 704646 - RNA, 19 nt, Artificial Sequence
  Description of Artificial Sequence: Synthetic oligonucleotide
  Sense strand starting at position 1444 of SEQ ID NO: 586263
aggcauauucuuuggacua

SEQ ID NO: 704647 - RNA, 19 nt, Artificial Sequence
  Description of Artificial Sequence: Synthetic oligonucleotide
  Antisense strand to SEQ ID NO: 704646
uaguccaaagaauaugccu

SEQ ID NO: 704648 - RNA, 19 nt, Artificial Sequence
  Description of Artificial Sequence: Synthetic oligonucleotide
  Sense strand starting at position 1958 of SEQ ID NO: 586263
ggagaacucucacccucau

SEQ ID NO: 704649 - RNA, 19 nt, Artificial Sequence
  Description of Artificial Sequence: Synthetic oligonucleotide
  Antisense strand to SEQ ID NO: 704648
augagggugagaguucucc

SEQ ID NO: 704650 - RNA, 19 nt, Artificial Sequence
  Description of Artificial Sequence: Synthetic oligonucleotide
  Sense strand starting at position 2108 of SEQ ID NO: 586263
augauaagcaaguauggua

SEQ ID NO: 704651 - RNA, 19 nt, Artificial Sequence
  Description of Artificial Sequence: Synthetic oligonucleotide
  Antisense strand to SEQ ID NO: 704650
uaccauacuugcuuaucau

SEQ ID NO: 704652 - RNA, 19 nt, Artificial Sequence
  Description of Artificial Sequence: Synthetic oligonucleotide
  Sense strand starting at position 2231 of SEQ ID NO: 586263
uuggaaagcuaucugugaa

SEQ ID NO: 704653 - RNA, 19 nt, Artificial Sequence
  Description of Artificial Sequence: Synthetic oligonucleotide
  Antisense strand to SEQ ID NO: 704652
uucacagauagcuuuccaa

SEQ ID NO: 704654 - RNA, 19 nt, Artificial Sequence
  Description of Artificial Sequence: Synthetic oligonucleotide
  Sense strand starting at position 2232 of SEQ ID NO: 586263
uggaaagcuaucugugaaa

SEQ ID NO: 704655 - RNA, 19 nt, Artificial Sequence
  Description of Artificial Sequence: Synthetic oligonucleotide
  Antisense strand to SEQ ID NO: 704654
uuucacagauagcuuucca

SEQ ID NO: 704656 - RNA, 19 nt, Artificial Sequence
  Description of Artificial Sequence: Synthetic oligonucleotide
  Sense strand starting at position 2298 of SEQ ID NO: 586263
cugggacacucucuaauau

SEQ ID NO: 704657 - RNA, 19 nt, Artificial Sequence
  Description of Artificial Sequence: Synthetic oligonucleotide
  Antisense strand to SEQ ID NO: 704656
auauuagagagugucccag

SEQ ID NO: 704658 - RNA, 19 nt, Artificial Sequence
  Description of Artificial Sequence: Synthetic oligonucleotide
  Sense strand starting at position 2377 of SEQ ID NO: 586263
cugaauggcuuguccuaaa

SEQ ID NO: 704659 - RNA, 19 nt, Artificial Sequence
  Description of Artificial Sequence: Synthetic oligonucleotide
  Antisense strand to SEQ ID NO: 704658
uuuaggacaagccauucag

SEQ ID NO: 704660 - RNA, 19 nt, Artificial Sequence
  Description of Artificial Sequence: Synthetic oligonucleotide
  Sense strand starting at position 2530 of SEQ ID NO: 586263
auugcucucuuacugaaga

SEQ ID NO: 704661 - RNA, 19 nt, Artificial Sequence
  Description of Artificial Sequence: Synthetic oligonucleotide
  Antisense strand to SEQ ID NO: 704660
ucuucaguaagagagcaau

SEQ ID NO: 704662 - RNA, 19 nt, Artificial Sequence
  Description of Artificial Sequence: Synthetic oligonucleotide
  Sense strand starting at position 2974 of SEQ ID NO: 586263
cagccauaguaugugauua

SEQ ID NO: 704663 - RNA, 19 nt, Artificial Sequence
  Description of Artificial Sequence: Synthetic oligonucleotide
  Antisense strand to SEQ ID NO: 704662
uaaucacauacuauggcug

SEQ ID NO: 704664 - RNA, 19 nt, Artificial Sequence
  Description of Artificial Sequence: Synthetic oligonucleotide
  Sense strand starting at position 3441 of SEQ ID NO: 586263
guuggcgugucauuuauag

SEQ ID NO: 704665 - RNA, 19 nt, Artificial Sequence
  Description of Artificial Sequence: Synthetic oligonucleotide
  Antisense strand to SEQ ID NO: 704664
cuauaaaugacacgccaac

SEQ ID NO: 704666 - RNA, 19 nt, Artificial Sequence
  Description of Artificial Sequence: Synthetic oligonucleotide
  Sense strand starting at position 3443 of SEQ ID NO: 586263
uggcgugucauuuauaguc

SEQ ID NO: 704667 - RNA, 19 nt, Artificial Sequence
  Description of Artificial Sequence: Synthetic oligonucleotide
  Antisense strand to SEQ ID NO: 704666
gacuauaaaugacacgcca

SEQ ID NO: 704668 - RNA, 19 nt, Artificial Sequence
  Description of Artificial Sequence: Synthetic oligonucleotide
  Sense strand starting at position 3468 of SEQ ID NO: 586263
cgcuuuauaguuuauaaac

SEQ ID NO: 704669 - RNA, 19 nt, Artificial Sequence
  Description of Artificial Sequence: Synthetic oligonucleotide
  Antisense strand to SEQ ID NO: 704668
guuuauaaacuauaaagcg

SEQ ID NO: 704670 - RNA, 19 nt, Artificial Sequence
  Description of Artificial Sequence: Synthetic oligonucleotide
  Sense strand starting at position 3723 of SEQ ID NO: 586263
auauuaccuguagagcuaa

SEQ ID NO: 704671 - RNA, 19 nt, Artificial Sequence
  Description of Artificial Sequence: Synthetic oligonucleotide
  Antisense strand to SEQ ID NO: 704670
uuagcucuacagguaauau

SEQ ID NO: 704672 - RNA, 19 nt, Artificial Sequence
  Description of Artificial Sequence: Synthetic oligonucleotide
  Sense strand starting at position 3831 of SEQ ID NO: 586263
ucccuuaaccuuugggauu

SEQ ID NO: 704673 - RNA, 19 nt, Artificial Sequence
  Description of Artificial Sequence: Synthetic oligonucleotide
  Antisense strand to SEQ ID NO: 704672
aaucccaaagguuaaggga

SEQ ID NO: 704674 - RNA, 19 nt, Artificial Sequence
  Description of Artificial Sequence: Synthetic oligonucleotide
  Sense strand starting at position 3873 of SEQ ID NO: 586263
auaggauacuuuccaguau

SEQ ID NO: 704675 - RNA, 19 nt, Artificial Sequence
  Description of Artificial Sequence: Synthetic oligonucleotide
  Antisense strand to SEQ ID NO: 704674
auacuggaaaguauccuau

SEQ ID NO: 704676 - RNA, 19 nt, Artificial Sequence
  Description of Artificial Sequence: Synthetic oligonucleotide
  Sense strand starting at position 3921 of SEQ ID NO: 586263
caucaaggucuuggugauu

SEQ ID NO: 704677 - RNA, 19 nt, Artificial Sequence
  Description of Artificial Sequence: Synthetic oligonucleotide
  Antisense strand to SEQ ID NO: 704676
aaucaccaagaccuugaug

SEQ ID NO: 704678 - RNA, 19 nt, Artificial Sequence
  Description of Artificial Sequence: Synthetic oligonucleotide
  Sense strand starting at position 3924 of SEQ ID NO: 586263
caaggucuuggugauuaag

SEQ ID NO: 704679 - RNA, 19 nt, Artificial Sequence
  Description of Artificial Sequence: Synthetic oligonucleotide
  Antisense strand to SEQ ID NO: 704678
cuuaaucaccaagaccuug

SEQ ID NO: 704680 - RNA, 19 nt, Artificial Sequence
  Description of Artificial Sequence: Synthetic oligonucleotide
  Sense strand starting at position 3926 of SEQ ID NO: 586263
aggucuuggugauuaagaa

SEQ ID NO: 704681 - RNA, 19 nt, Artificial Sequence
  Description of Artificial Sequence: Synthetic oligonucleotide
  Antisense strand to SEQ ID NO: 704680
uucuuaaucaccaagaccu

SEQ ID NO: 704682 - RNA, 19 nt, Artificial Sequence
  Description of Artificial Sequence: Synthetic oligonucleotide
  Sense strand starting at position 65 of SEQ ID NO: 586264
gucuaaaucgcugugcauu

SEQ ID NO: 704683 - RNA, 19 nt, Artificial Sequence
  Description of Artificial Sequence: Synthetic oligonucleotide
  Antisense strand to SEQ ID NO: 704682
aaugcacagcgauuuagac

SEQ ID NO: 704684 - RNA, 19 nt, Artificial Sequence
  Description of Artificial Sequence: Synthetic oligonucleotide
  Sense strand starting at position 76 of SEQ ID NO: 586264
ugugcauuggaagauuauu

SEQ ID NO: 704685 - RNA, 19 nt, Artificial Sequence
  Description of Artificial Sequence: Synthetic oligonucleotide
  Antisense strand to SEQ ID NO: 704684
aauaaucuuccaaugcaca

SEQ ID NO: 704686 - RNA, 19 nt, Artificial Sequence
  Description of Artificial Sequence: Synthetic oligonucleotide
  Sense strand starting at position 81 of SEQ ID NO: 586264
auuggaagauuauugugau

SEQ ID NO: 704687 - RNA, 19 nt, Artificial Sequence
  Description of Artificial Sequence: Synthetic oligonucleotide
  Antisense strand to SEQ ID NO: 704686
aucacaauaaucuuccaau

SEQ ID NO: 704688 - RNA, 19 nt, Artificial Sequence
  Description of Artificial Sequence: Synthetic oligonucleotide
  Sense strand starting at position 134 of SEQ ID NO: 586264
uagucuguacguuaacaca

SEQ ID NO: 704689 - RNA, 19 nt, Artificial Sequence
  Description of Artificial Sequence: Synthetic oligonucleotide
  Antisense strand to SEQ ID NO: 704688
uguguuaacguacagacua

SEQ ID NO: 704690 - RNA, 19 nt, Artificial Sequence
  Description of Artificial Sequence: Synthetic oligonucleotide
  Sense strand starting at position 164 of SEQ ID NO: 586264
uguacuuucucugcauaag

SEQ ID NO: 704691 - RNA, 19 nt, Artificial Sequence
  Description of Artificial Sequence: Synthetic oligonucleotide
  Antisense strand to SEQ ID NO: 704690
cuuaugcagagaaaguaca

SEQ ID NO: 704692 - RNA, 19 nt, Artificial Sequence
  Description of Artificial Sequence: Synthetic oligonucleotide
  Sense strand starting at position 165 of SEQ ID NO: 586264
guacuuucucugcauaaga

SEQ ID NO: 704693 - RNA, 19 nt, Artificial Sequence
  Description of Artificial Sequence: Synthetic oligonucleotide
  Antisense strand to SEQ ID NO: 704692
ucuuaugcagagaaaguac

SEQ ID NO: 704694 - RNA, 19 nt, Artificial Sequence
  Description of Artificial Sequence: Synthetic oligonucleotide
  Sense strand starting at position 174 of SEQ ID NO: 586264
cugcauaagaucuggguga

SEQ ID NO: 704695 - RNA, 19 nt, Artificial Sequence
  Description of Artificial Sequence: Synthetic oligonucleotide
  Antisense strand to SEQ ID NO: 704694
ucacccagaucuuaugcag

SEQ ID NO: 704696 - RNA, 19 nt, Artificial Sequence
  Description of Artificial Sequence: Synthetic oligonucleotide
  Sense strand starting at position 176 of SEQ ID NO: 586264
gcauaagaucugggugaga

SEQ ID NO: 704697 - RNA, 19 nt, Artificial Sequence
  Description of Artificial Sequence: Synthetic oligonucleotide
  Antisense strand to SEQ ID NO: 704696
ucucacccagaucuuaugc

SEQ ID NO: 704698 - RNA, 19 nt, Artificial Sequence
  Description of Artificial Sequence: Synthetic oligonucleotide
  Sense strand starting at position 189 of SEQ ID NO: 586264
gugagaacauaguuuauga

SEQ ID NO: 704699 - RNA, 19 nt, Artificial Sequence
  Description of Artificial Sequence: Synthetic oligonucleotide
  Antisense strand to SEQ ID NO: 704698
ucauaaacuauguucucac

SEQ ID NO: 704700 - RNA, 19 nt, Artificial Sequence
  Description of Artificial Sequence: Synthetic oligonucleotide
  Sense strand starting at position 196 of SEQ ID NO: 586264
cauaguuuaugaguaggaa

SEQ ID NO: 704701 - RNA, 19 nt, Artificial Sequence
  Description of Artificial Sequence: Synthetic oligonucleotide
  Antisense strand to SEQ ID NO: 704700
uuccuacucauaaacuaug

SEQ ID NO: 704702 - RNA, 19 nt, Artificial Sequence
  Description of Artificial Sequence: Synthetic oligonucleotide
  Sense strand starting at position 199 of SEQ ID NO: 586264
aguuuaugaguaggaagga

SEQ ID NO: 704703 - RNA, 19 nt, Artificial Sequence
  Description of Artificial Sequence: Synthetic oligonucleotide
  Antisense strand to SEQ ID NO: 704702
uccuuccuacucauaaacu

SEQ ID NO: 704704 - RNA, 19 nt, Artificial Sequence
  Description of Artificial Sequence: Synthetic oligonucleotide
  Sense strand starting at position 285 of SEQ ID NO: 586264
uccauuggccuguauuaaa

SEQ ID NO: 704705 - RNA, 19 nt, Artificial Sequence
  Description of Artificial Sequence: Synthetic oligonucleotide
  Antisense strand to SEQ ID NO: 704704
uuuaauacaggccaaugga

SEQ ID NO: 704706 - RNA, 19 nt, Artificial Sequence
  Description of Artificial Sequence: Synthetic oligonucleotide
  Sense strand starting at position 364 of SEQ ID NO: 586264
caguuaaaugcaugaggcu

SEQ ID NO: 704707 - RNA, 19 nt, Artificial Sequence
  Description of Artificial Sequence: Synthetic oligonucleotide
  Antisense strand to SEQ ID NO: 704706
agccucaugcauuuaacug

SEQ ID NO: 704708 - RNA, 19 nt, Artificial Sequence
  Description of Artificial Sequence: Synthetic oligonucleotide
  Sense strand starting at position 380 of SEQ ID NO: 586264
gcugaaguucugcaauaug

SEQ ID NO: 704709 - RNA, 19 nt, Artificial Sequence
  Description of Artificial Sequence: Synthetic oligonucleotide
  Antisense strand to SEQ ID NO: 704708
cauauugcagaacuucagc

SEQ ID NO: 704710 - RNA, 19 nt, Artificial Sequence
  Description of Artificial Sequence: Synthetic oligonucleotide
  Sense strand starting at position 383 of SEQ ID NO: 586264
gaaguucugcaauauguua

SEQ ID NO: 704711 - RNA, 19 nt, Artificial Sequence
  Description of Artificial Sequence: Synthetic oligonucleotide
  Antisense strand to SEQ ID NO: 704710
uaacauauugcagaacuuc

SEQ ID NO: 704712 - RNA, 19 nt, Artificial Sequence
  Description of Artificial Sequence: Synthetic oligonucleotide
  Sense strand starting at position 390 of SEQ ID NO: 586264
ugcaauauguuagcaauaa

SEQ ID NO: 704713 - RNA, 19 nt, Artificial Sequence
  Description of Artificial Sequence: Synthetic oligonucleotide
  Antisense strand to SEQ ID NO: 704712
uuauugcuaacauauugca

SEQ ID NO: 704714 - RNA, 19 nt, Artificial Sequence
  Description of Artificial Sequence: Synthetic oligonucleotide
  Sense strand starting at position 843 of SEQ ID NO: 586264
caaucaacguuucugauga

SEQ ID NO: 704715 - RNA, 19 nt, Artificial Sequence
  Description of Artificial Sequence: Synthetic oligonucleotide
  Antisense strand to SEQ ID NO: 704714
ucaucagaaacguugauug

SEQ ID NO: 704716 - RNA, 19 nt, Artificial Sequence
  Description of Artificial Sequence: Synthetic oligonucleotide
  Sense strand starting at position 872 of SEQ ID NO: 586264
agcuaauucgaauaagcua

SEQ ID NO: 704717 - RNA, 19 nt, Artificial Sequence
  Description of Artificial Sequence: Synthetic oligonucleotide
  Antisense strand to SEQ ID NO: 704716
uagcuuauucgaauuagcu

SEQ ID NO: 704718 - RNA, 19 nt, Artificial Sequence
  Description of Artificial Sequence: Synthetic oligonucleotide
  Sense strand starting at position 898 of SEQ ID NO: 586264
agaugaauucuagguuguu

SEQ ID NO: 704719 - RNA, 19 nt, Artificial Sequence
  Description of Artificial Sequence: Synthetic oligonucleotide
  Antisense strand to SEQ ID NO: 704718
aacaaccuagaauucaucu

SEQ ID NO: 704720 - RNA, 19 nt, Artificial Sequence
  Description of Artificial Sequence: Synthetic oligonucleotide
  Sense strand starting at position 899 of SEQ ID NO: 586264
gaugaauucuagguuguug

SEQ ID NO: 704721 - RNA, 19 nt, Artificial Sequence
  Description of Artificial Sequence: Synthetic oligonucleotide
  Antisense strand to SEQ ID NO: 704720
caacaaccuagaauucauc

SEQ ID NO: 704722 - RNA, 19 nt, Artificial Sequence
  Description of Artificial Sequence: Synthetic oligonucleotide
  Sense strand starting at position 985 of SEQ ID NO: 586264
uguucugcauauuucugaa

SEQ ID NO: 704723 - RNA, 19 nt, Artificial Sequence
  Description of Artificial Sequence: Synthetic oligonucleotide
  Antisense strand to SEQ ID NO: 704722
uucagaaauaugcagaaca

SEQ ID NO: 704724 - RNA, 19 nt, Artificial Sequence
  Description of Artificial Sequence: Synthetic oligonucleotide
  Sense strand starting at position 1281 of SEQ ID NO: 586264
ccaacaugcucuuuggaca

SEQ ID NO: 704725 - RNA, 19 nt, Artificial Sequence
  Description of Artificial Sequence: Synthetic oligonucleotide
  Antisense strand to SEQ ID NO: 704724
uguccaaagagcauguugg

SEQ ID NO: 704726 - RNA, 19 nt, Artificial Sequence
  Description of Artificial Sequence: Synthetic oligonucleotide
  Sense strand starting at position 1286 of SEQ ID NO: 586264
augcucuuuggacauaacu

SEQ ID NO: 704727 - RNA, 19 nt, Artificial Sequence
  Description of Artificial Sequence: Synthetic oligonucleotide
  Antisense strand to SEQ ID NO: 704726
aguuauguccaaagagcau

SEQ ID NO: 704728 - RNA, 19 nt, Artificial Sequence
  Description of Artificial Sequence: Synthetic oligonucleotide
  Sense strand starting at position 1428 of SEQ ID NO: 586264
agucgcaucauauagaguu

SEQ ID NO: 704729 - RNA, 19 nt, Artificial Sequence
  Description of Artificial Sequence: Synthetic oligonucleotide
  Antisense strand to SEQ ID NO: 704728
aacucuauaugaugcgacu

SEQ ID NO: 704730 - RNA, 19 nt, Artificial Sequence
  Description of Artificial Sequence: Synthetic oligonucleotide
  Sense strand starting at position 1488 of SEQ ID NO: 586264
agcaguuaccaugaaauau

SEQ ID NO: 704731 - RNA, 19 nt, Artificial Sequence
  Description of Artificial Sequence: Synthetic oligonucleotide
  Antisense strand to SEQ ID NO: 704730
auauuucaugguaacugcu

SEQ ID NO: 704732 - RNA, 19 nt, Artificial Sequence
  Description of Artificial Sequence: Synthetic oligonucleotide
  Sense strand starting at position 1561 of SEQ ID NO: 586264
aggcauauucuuuggacua

SEQ ID NO: 704733 - RNA, 19 nt, Artificial Sequence
  Description of Artificial Sequence: Synthetic oligonucleotide
  Antisense strand to SEQ ID NO: 704732
uaguccaaagaauaugccu

SEQ ID NO: 704734 - RNA, 19 nt, Artificial Sequence
  Description of Artificial Sequence: Synthetic oligonucleotide
  Sense strand starting at position 2075 of SEQ ID NO: 586264
ggagaacucucacccucau

SEQ ID NO: 704735 - RNA, 19 nt, Artificial Sequence
  Description of Artificial Sequence: Synthetic oligonucleotide
  Antisense strand to SEQ ID NO: 704734
augagggugagaguucucc

SEQ ID NO: 704736 - RNA, 19 nt, Artificial Sequence
  Description of Artificial Sequence: Synthetic oligonucleotide
  Sense strand starting at position 2225 of SEQ ID NO: 586264
augauaagcaaguauggua

SEQ ID NO: 704737 - RNA, 19 nt, Artificial Sequence
  Description of Artificial Sequence: Synthetic oligonucleotide
  Antisense strand to SEQ ID NO: 704736
uaccauacuugcuuaucau

SEQ ID NO: 704738 - RNA, 19 nt, Artificial Sequence
  Description of Artificial Sequence: Synthetic oligonucleotide
  Sense strand starting at position 2348 of SEQ ID NO: 586264
uuggaaagcuaucugugaa

SEQ ID NO: 704739 - RNA, 19 nt, Artificial Sequence
  Description of Artificial Sequence: Synthetic oligonucleotide
  Antisense strand to SEQ ID NO: 704738
uucacagauagcuuuccaa

SEQ ID NO: 704740 - RNA, 19 nt, Artificial Sequence
  Description of Artificial Sequence: Synthetic oligonucleotide
  Sense strand starting at position 2349 of SEQ ID NO: 586264
uggaaagcuaucugugaaa

SEQ ID NO: 704741 - RNA, 19 nt, Artificial Sequence
  Description of Artificial Sequence: Synthetic oligonucleotide
  Antisense strand to SEQ ID NO: 704740
uuucacagauagcuuucca

SEQ ID NO: 704742 - RNA, 19 nt, Artificial Sequence
  Description of Artificial Sequence: Synthetic oligonucleotide
  Sense strand starting at position 2415 of SEQ ID NO: 586264
cugggacacucucuaauau

SEQ ID NO: 704743 - RNA, 19 nt, Artificial Sequence
  Description of Artificial Sequence: Synthetic oligonucleotide
  Antisense strand to SEQ ID NO: 704742
auauuagagagugucccag

SEQ ID NO: 704744 - RNA, 19 nt, Artificial Sequence
  Description of Artificial Sequence: Synthetic oligonucleotide
  Sense strand starting at position 2494 of SEQ ID NO: 586264
cugaauggcuuguccuaaa

SEQ ID NO: 704745 - RNA, 19 nt, Artificial Sequence
  Description of Artificial Sequence: Synthetic oligonucleotide
  Antisense strand to SEQ ID NO: 704744
uuuaggacaagccauucag

SEQ ID NO: 704746 - RNA, 19 nt, Artificial Sequence
  Description of Artificial Sequence: Synthetic oligonucleotide
  Sense strand starting at position 2618 of SEQ ID NO: 586264
uguagaggaugucuuguuu

SEQ ID NO: 704747 - RNA, 19 nt, Artificial Sequence
  Description of Artificial Sequence: Synthetic oligonucleotide
  Antisense strand to SEQ ID NO: 704746
aaacaagacauccucuaca

SEQ ID NO: 704748 - RNA, 19 nt, Artificial Sequence
  Description of Artificial Sequence: Synthetic oligonucleotide
  Sense strand starting at position 2647 of SEQ ID NO: 586264
auugcucucuuacugaaga

SEQ ID NO: 704749 - RNA, 19 nt, Artificial Sequence
  Description of Artificial Sequence: Synthetic oligonucleotide
  Antisense strand to SEQ ID NO: 704748
ucuucaguaagagagcaau

SEQ ID NO: 704750 - RNA, 19 nt, Artificial Sequence
  Description of Artificial Sequence: Synthetic oligonucleotide
  Sense strand starting at position 3091 of SEQ ID NO: 586264
cagccauaguaugugauua

SEQ ID NO: 704751 - RNA, 19 nt, Artificial Sequence
  Description of Artificial Sequence: Synthetic oligonucleotide
  Antisense strand to SEQ ID NO: 704750
uaaucacauacuauggcug

SEQ ID NO: 704752 - RNA, 19 nt, Artificial Sequence
  Description of Artificial Sequence: Synthetic oligonucleotide
  Sense strand starting at position 3558 of SEQ ID NO: 586264
guuggcgugucauuuauag

SEQ ID NO: 704753 - RNA, 19 nt, Artificial Sequence
  Description of Artificial Sequence: Synthetic oligonucleotide
  Antisense strand to SEQ ID NO: 704752
cuauaaaugacacgccaac

SEQ ID NO: 704754 - RNA, 19 nt, Artificial Sequence
  Description of Artificial Sequence: Synthetic oligonucleotide
  Sense strand starting at position 3560 of SEQ ID NO: 586264
uggcgugucauuuauaguc

SEQ ID NO: 704755 - RNA, 19 nt, Artificial Sequence
  Description of Artificial Sequence: Synthetic oligonucleotide
  Antisense strand to SEQ ID NO: 704754
gacuauaaaugacacgcca

SEQ ID NO: 704756 - RNA, 19 nt, Artificial Sequence
  Description of Artificial Sequence: Synthetic oligonucleotide
  Sense strand starting at position 3585 of SEQ ID NO: 586264
cgcuuuauaguuuauaaac

SEQ ID NO: 704757 - RNA, 19 nt, Artificial Sequence
  Description of Artificial Sequence: Synthetic oligonucleotide
  Antisense strand to SEQ ID NO: 704756
guuuauaaacuauaaagcg

SEQ ID NO: 704758 - RNA, 19 nt, Artificial Sequence
  Description of Artificial Sequence: Synthetic oligonucleotide
  Sense strand starting at position 3840 of SEQ ID NO: 586264
auauuaccuguagagcuaa

SEQ ID NO: 704759 - RNA, 19 nt, Artificial Sequence
  Description of Artificial Sequence: Synthetic oligonucleotide
  Antisense strand to SEQ ID NO: 704758
uuagcucuacagguaauau

SEQ ID NO: 704760 - RNA, 19 nt, Artificial Sequence
  Description of Artificial Sequence: Synthetic oligonucleotide
  Sense strand starting at position 3948 of SEQ ID NO: 586264
ucccuuaaccuuugggauu

SEQ ID NO: 704761 - RNA, 19 nt, Artificial Sequence
  Description of Artificial Sequence: Synthetic oligonucleotide
  Antisense strand to SEQ ID NO: 704760
aaucccaaagguuaaggga

SEQ ID NO: 704762 - RNA, 19 nt, Artificial Sequence
  Description of Artificial Sequence: Synthetic oligonucleotide
  Sense strand starting at position 9 of SEQ ID NO: 586265
cugguuauagcuuacaaua

SEQ ID NO: 704763 - RNA, 19 nt, Artificial Sequence
  Description of Artificial Sequence: Synthetic oligonucleotide
  Antisense strand to SEQ ID NO: 704762
uauuguaagcuauaaccag

SEQ ID NO: 704764 - RNA, 19 nt, Artificial Sequence
  Description of Artificial Sequence: Synthetic oligonucleotide
  Sense strand starting at position 272 of SEQ ID NO: 586265
gucuaaaucgcugugcauu

SEQ ID NO: 704765 - RNA, 19 nt, Artificial Sequence
  Description of Artificial Sequence: Synthetic oligonucleotide
  Antisense strand to SEQ ID NO: 704764
aaugcacagcgauuuagac

SEQ ID NO: 704766 - RNA, 19 nt, Artificial Sequence
  Description of Artificial Sequence: Synthetic oligonucleotide
  Sense strand starting at position 283 of SEQ ID NO: 586265
ugugcauuggaagauuauu

SEQ ID NO: 704767 - RNA, 19 nt, Artificial Sequence
  Description of Artificial Sequence: Synthetic oligonucleotide
  Antisense strand to SEQ ID NO: 704766
aauaaucuuccaaugcaca

SEQ ID NO: 704768 - RNA, 19 nt, Artificial Sequence
  Description of Artificial Sequence: Synthetic oligonucleotide
  Sense strand starting at position 288 of SEQ ID NO: 586265
auuggaagauuauugugau

SEQ ID NO: 704769 - RNA, 19 nt, Artificial Sequence
  Description of Artificial Sequence: Synthetic oligonucleotide
  Antisense strand to SEQ ID NO: 704768
aucacaauaaucuuccaau

SEQ ID NO: 704770 - RNA, 19 nt, Artificial Sequence
  Description of Artificial Sequence: Synthetic oligonucleotide
  Sense strand starting at position 341 of SEQ ID NO: 586265
uagucuguacguuaacaca

SEQ ID NO: 704771 - RNA, 19 nt, Artificial Sequence
  Description of Artificial Sequence: Synthetic oligonucleotide
  Antisense strand to SEQ ID NO: 704770
uguguuaacguacagacua

SEQ ID NO: 704772 - RNA, 19 nt, Artificial Sequence
  Description of Artificial Sequence: Synthetic oligonucleotide
  Sense strand starting at position 371 of SEQ ID NO: 586265
uguacuuucucugcauaag

SEQ ID NO: 704773 - RNA, 19 nt, Artificial Sequence
  Description of Artificial Sequence: Synthetic oligonucleotide
  Antisense strand to SEQ ID NO: 704772
cuuaugcagagaaaguaca

SEQ ID NO: 704774 - RNA, 19 nt, Artificial Sequence
  Description of Artificial Sequence: Synthetic oligonucleotide
  Sense strand starting at position 372 of SEQ ID NO: 586265
guacuuucucugcauaaga

SEQ ID NO: 704775 - RNA, 19 nt, Artificial Sequence
  Description of Artificial Sequence: Synthetic oligonucleotide
  Antisense strand to SEQ ID NO: 704774
ucuuaugcagagaaaguac

SEQ ID NO: 704776 - RNA, 19 nt, Artificial Sequence
  Description of Artificial Sequence: Synthetic oligonucleotide
  Sense strand starting at position 381 of SEQ ID NO: 586265
cugcauaagaucuggguga

SEQ ID NO: 704777 - RNA, 19 nt, Artificial Sequence
  Description of Artificial Sequence: Synthetic oligonucleotide
  Antisense strand to SEQ ID NO: 704776
ucacccagaucuuaugcag

SEQ ID NO: 704778 - RNA, 19 nt, Artificial Sequence
  Description of Artificial Sequence: Synthetic oligonucleotide
  Sense strand starting at position 383 of SEQ ID NO: 586265
gcauaagaucugggugaga

SEQ ID NO: 704779 - RNA, 19 nt, Artificial Sequence
  Description of Artificial Sequence: Synthetic oligonucleotide
  Antisense strand to SEQ ID NO: 704778
ucucacccagaucuuaugc

SEQ ID NO: 704780 - RNA, 19 nt, Artificial Sequence
  Description of Artificial Sequence: Synthetic oligonucleotide
  Sense strand starting at position 396 of SEQ ID NO: 586265
gugagaacauaguuuauga

SEQ ID NO: 704781 - RNA, 19 nt, Artificial Sequence
  Description of Artificial Sequence: Synthetic oligonucleotide
  Antisense strand to SEQ ID NO: 704780
ucauaaacuauguucucac

SEQ ID NO: 704782 - RNA, 19 nt, Artificial Sequence
  Description of Artificial Sequence: Synthetic oligonucleotide
  Sense strand starting at position 403 of SEQ ID NO: 586265
cauaguuuaugaguaggaa

SEQ ID NO: 704783 - RNA, 19 nt, Artificial Sequence
  Description of Artificial Sequence: Synthetic oligonucleotide
  Antisense strand to SEQ ID NO: 704782
uuccuacucauaaacuaug

SEQ ID NO: 704784 - RNA, 19 nt, Artificial Sequence
  Description of Artificial Sequence: Synthetic oligonucleotide
  Sense strand starting at position 406 of SEQ ID NO: 586265
aguuuaugaguaggaagga

SEQ ID NO: 704785 - RNA, 19 nt, Artificial Sequence
  Description of Artificial Sequence: Synthetic oligonucleotide
  Antisense strand to SEQ ID NO: 704784
uccuuccuacucauaaacu

SEQ ID NO: 704786 - RNA, 19 nt, Artificial Sequence
  Description of Artificial Sequence: Synthetic oligonucleotide
  Sense strand starting at position 492 of SEQ ID NO: 586265
uccauuggccuguauuaaa

SEQ ID NO: 704787 - RNA, 19 nt, Artificial Sequence
  Description of Artificial Sequence: Synthetic oligonucleotide
  Antisense strand to SEQ ID NO: 704786
uuuaauacaggccaaugga

SEQ ID NO: 704788 - RNA, 19 nt, Artificial Sequence
  Description of Artificial Sequence: Synthetic oligonucleotide
  Sense strand starting at position 571 of SEQ ID NO: 586265
caguuaaaugcaugaggcu

SEQ ID NO: 704789 - RNA, 19 nt, Artificial Sequence
  Description of Artificial Sequence: Synthetic oligonucleotide
  Antisense strand to SEQ ID NO: 704788
agccucaugcauuuaacug

SEQ ID NO: 704790 - RNA, 19 nt, Artificial Sequence
  Description of Artificial Sequence: Synthetic oligonucleotide
  Sense strand starting at position 587 of SEQ ID NO: 586265
gcugaaguucugcaauaug

SEQ ID NO: 704791 - RNA, 19 nt, Artificial Sequence
  Description of Artificial Sequence: Synthetic oligonucleotide
  Antisense strand to SEQ ID NO: 704790
cauauugcagaacuucagc

SEQ ID NO: 704792 - RNA, 19 nt, Artificial Sequence
  Description of Artificial Sequence: Synthetic oligonucleotide
  Sense strand starting at position 590 of SEQ ID NO: 586265
gaaguucugcaauauguua

SEQ ID NO: 704793 - RNA, 19 nt, Artificial Sequence
  Description of Artificial Sequence: Synthetic oligonucleotide
  Antisense strand to SEQ ID NO: 704792
uaacauauugcagaacuuc

SEQ ID NO: 704794 - RNA, 19 nt, Artificial Sequence
  Description of Artificial Sequence: Synthetic oligonucleotide
  Sense strand starting at position 597 of SEQ ID NO: 586265
ugcaauauguuagcaauaa

SEQ ID NO: 704795 - RNA, 19 nt, Artificial Sequence
  Description of Artificial Sequence: Synthetic oligonucleotide
  Antisense strand to SEQ ID NO: 704794
uuauugcuaacauauugca

SEQ ID NO: 704796 - RNA, 19 nt, Artificial Sequence
  Description of Artificial Sequence: Synthetic oligonucleotide
  Sense strand starting at position 1050 of SEQ ID NO: 586265
caaucaacguuucugauga

SEQ ID NO: 704797 - RNA, 19 nt, Artificial Sequence
  Description of Artificial Sequence: Synthetic oligonucleotide
  Antisense strand to SEQ ID NO: 704796
ucaucagaaacguugauug

SEQ ID NO: 704798 - RNA, 19 nt, Artificial Sequence
  Description of Artificial Sequence: Synthetic oligonucleotide
  Sense strand starting at position 1079 of SEQ ID NO: 586265
agcuaauucgaauaagcua

SEQ ID NO: 704799 - RNA, 19 nt, Artificial Sequence
  Description of Artificial Sequence: Synthetic oligonucleotide
  Antisense strand to SEQ ID NO: 704798
uagcuuauucgaauuagcu

SEQ ID NO: 704800 - RNA, 19 nt, Artificial Sequence
  Description of Artificial Sequence: Synthetic oligonucleotide
  Sense strand starting at position 1105 of SEQ ID NO: 586265
agaugaauucuagguuguu

SEQ ID NO: 704801 - RNA, 19 nt, Artificial Sequence
  Description of Artificial Sequence: Synthetic oligonucleotide
  Antisense strand to SEQ ID NO: 704800
aacaaccuagaauucaucu

SEQ ID NO: 704802 - RNA, 19 nt, Artificial Sequence
  Description of Artificial Sequence: Synthetic oligonucleotide
  Sense strand starting at position 1106 of SEQ ID NO: 586265
gaugaauucuagguuguug

SEQ ID NO: 704803 - RNA, 19 nt, Artificial Sequence
  Description of Artificial Sequence: Synthetic oligonucleotide
  Antisense strand to SEQ ID NO: 704802
caacaaccuagaauucauc

SEQ ID NO: 704804 - RNA, 19 nt, Artificial Sequence
  Description of Artificial Sequence: Synthetic oligonucleotide
  Sense strand starting at position 1192 of SEQ ID NO: 586265
uguucugcauauuucugaa

SEQ ID NO: 704805 - RNA, 19 nt, Artificial Sequence
  Description of Artificial Sequence: Synthetic oligonucleotide
  Antisense strand to SEQ ID NO: 704804
uucagaaauaugcagaaca

SEQ ID NO: 704806 - RNA, 19 nt, Artificial Sequence
  Description of Artificial Sequence: Synthetic oligonucleotide
  Sense strand starting at position 1262 of SEQ ID NO: 586265
agaugagauuauuacacau

SEQ ID NO: 704807 - RNA, 19 nt, Artificial Sequence
  Description of Artificial Sequence: Synthetic oligonucleotide
  Antisense strand to SEQ ID NO: 704806
auguguaauaaucucaucu

SEQ ID NO: 704808 - RNA, 19 nt, Artificial Sequence
  Description of Artificial Sequence: Synthetic oligonucleotide
  Sense strand starting at position 1488 of SEQ ID NO: 586265
ccaacaugcucuuuggaca

SEQ ID NO: 704809 - RNA, 19 nt, Artificial Sequence
  Description of Artificial Sequence: Synthetic oligonucleotide
  Antisense strand to SEQ ID NO: 704808
uguccaaagagcauguugg

SEQ ID NO: 704810 - RNA, 19 nt, Artificial Sequence
  Description of Artificial Sequence: Synthetic oligonucleotide
  Sense strand starting at position 1493 of SEQ ID NO: 586265
augcucuuuggacauaacu

SEQ ID NO: 704811 - RNA, 19 nt, Artificial Sequence
  Description of Artificial Sequence: Synthetic oligonucleotide
  Antisense strand to SEQ ID NO: 704810
aguuauguccaaagagcau

SEQ ID NO: 704812 - RNA, 19 nt, Artificial Sequence
  Description of Artificial Sequence: Synthetic oligonucleotide
  Sense strand starting at position 1635 of SEQ ID NO: 586265
agucgcaucauauagaguu

SEQ ID NO: 704813 - RNA, 19 nt, Artificial Sequence
  Description of Artificial Sequence: Synthetic oligonucleotide
  Antisense strand to SEQ ID NO: 704812
aacucuauaugaugcgacu

SEQ ID NO: 704814 - RNA, 19 nt, Artificial Sequence
  Description of Artificial Sequence: Synthetic oligonucleotide
  Sense strand starting at position 1695 of SEQ ID NO: 586265
agcaguuaccaugaaauau

SEQ ID NO: 704815 - RNA, 19 nt, Artificial Sequence
  Description of Artificial Sequence: Synthetic oligonucleotide
  Antisense strand to SEQ ID NO: 704814
auauuucaugguaacugcu

SEQ ID NO: 704816 - RNA, 19 nt, Artificial Sequence
  Description of Artificial Sequence: Synthetic oligonucleotide
  Sense strand starting at position 1768 of SEQ ID NO: 586265
aggcauauucuuuggacua

SEQ ID NO: 704817 - RNA, 19 nt, Artificial Sequence
  Description of Artificial Sequence: Synthetic oligonucleotide
  Antisense strand to SEQ ID NO: 704816
uaguccaaagaauaugccu

SEQ ID NO: 704818 - RNA, 19 nt, Artificial Sequence
  Description of Artificial Sequence: Synthetic oligonucleotide
  Sense strand starting at position 2282 of SEQ ID NO: 586265
ggagaacucucacccucau

SEQ ID NO: 704819 - RNA, 19 nt, Artificial Sequence
  Description of Artificial Sequence: Synthetic oligonucleotide
  Antisense strand to SEQ ID NO: 704818
augagggugagaguucucc

SEQ ID NO: 704820 - RNA, 19 nt, Artificial Sequence
  Description of Artificial Sequence: Synthetic oligonucleotide
  Sense strand starting at position 2432 of SEQ ID NO: 586265
augauaagcaaguauggua

SEQ ID NO: 704821 - RNA, 19 nt, Artificial Sequence
  Description of Artificial Sequence: Synthetic oligonucleotide
  Antisense strand to SEQ ID NO: 704820
uaccauacuugcuuaucau

SEQ ID NO: 704822 - RNA, 19 nt, Artificial Sequence
  Description of Artificial Sequence: Synthetic oligonucleotide
  Sense strand starting at position 2555 of SEQ ID NO: 586265
uuggaaagcuaucugugaa

SEQ ID NO: 704823 - RNA, 19 nt, Artificial Sequence
  Description of Artificial Sequence: Synthetic oligonucleotide
  Antisense strand to SEQ ID NO: 704822
uucacagauagcuuuccaa

SEQ ID NO: 704824 - RNA, 19 nt, Artificial Sequence
  Description of Artificial Sequence: Synthetic oligonucleotide
  Sense strand starting at position 2556 of SEQ ID NO: 586265
uggaaagcuaucugugaaa

SEQ ID NO: 704825 - RNA, 19 nt, Artificial Sequence
  Description of Artificial Sequence: Synthetic oligonucleotide
  Antisense strand to SEQ ID NO: 704824
uuucacagauagcuuucca

SEQ ID NO: 704826 - RNA, 19 nt, Artificial Sequence
  Description of Artificial Sequence: Synthetic oligonucleotide
  Sense strand starting at position 2622 of SEQ ID NO: 586265
cugggacacucucuaauau

SEQ ID NO: 704827 - RNA, 19 nt, Artificial Sequence
  Description of Artificial Sequence: Synthetic oligonucleotide
  Antisense strand to SEQ ID NO: 704826
auauuagagagugucccag

SEQ ID NO: 704828 - RNA, 19 nt, Artificial Sequence
  Description of Artificial Sequence: Synthetic oligonucleotide
  Sense strand starting at position 2701 of SEQ ID NO: 586265
cugaauggcuuguccuaaa

SEQ ID NO: 704829 - RNA, 19 nt, Artificial Sequence
  Description of Artificial Sequence: Synthetic oligonucleotide
  Antisense strand to SEQ ID NO: 704828
uuuaggacaagccauucag

SEQ ID NO: 704830 - RNA, 19 nt, Artificial Sequence
  Description of Artificial Sequence: Synthetic oligonucleotide
  Sense strand starting at position 2825 of SEQ ID NO: 586265
uguagaggaugucuuguuu

SEQ ID NO: 704831 - RNA, 19 nt, Artificial Sequence
  Description of Artificial Sequence: Synthetic oligonucleotide
  Antisense strand to SEQ ID NO: 704830
aaacaagacauccucuaca

SEQ ID NO: 704832 - RNA, 19 nt, Artificial Sequence
  Description of Artificial Sequence: Synthetic oligonucleotide
  Sense strand starting at position 2854 of SEQ ID NO: 586265
auugcucucuuacugaaga

SEQ ID NO: 704833 - RNA, 19 nt, Artificial Sequence
  Description of Artificial Sequence: Synthetic oligonucleotide
  Antisense strand to SEQ ID NO: 704832
ucuucaguaagagagcaau

SEQ ID NO: 704834 - RNA, 19 nt, Artificial Sequence
  Description of Artificial Sequence: Synthetic oligonucleotide
  Sense strand starting at position 3298 of SEQ ID NO: 586265
cagccauaguaugugauua

SEQ ID NO: 704835 - RNA, 19 nt, Artificial Sequence
  Description of Artificial Sequence: Synthetic oligonucleotide
  Antisense strand to SEQ ID NO: 704834
uaaucacauacuauggcug

SEQ ID NO: 704836 - RNA, 19 nt, Artificial Sequence
  Description of Artificial Sequence: Synthetic oligonucleotide
  Sense strand starting at position 3765 of SEQ ID NO: 586265
guuggcgugucauuuauag

SEQ ID NO: 704837 - RNA, 19 nt, Artificial Sequence
  Description of Artificial Sequence: Synthetic oligonucleotide
  Antisense strand to SEQ ID NO: 704836
cuauaaaugacacgccaac

SEQ ID NO: 704838 - RNA, 19 nt, Artificial Sequence
  Description of Artificial Sequence: Synthetic oligonucleotide
  Sense strand starting at position 3767 of SEQ ID NO: 586265
uggcgugucauuuauaguc

SEQ ID NO: 704839 - RNA, 19 nt, Artificial Sequence
  Description of Artificial Sequence: Synthetic oligonucleotide
  Antisense strand to SEQ ID NO: 704838
gacuauaaaugacacgcca

SEQ ID NO: 704840 - RNA, 19 nt, Artificial Sequence
  Description of Artificial Sequence: Synthetic oligonucleotide
  Sense strand starting at position 3792 of SEQ ID NO: 586265
cgcuuuauaguuuauaaac

SEQ ID NO: 704841 - RNA, 19 nt, Artificial Sequence
  Description of Artificial Sequence: Synthetic oligonucleotide
  Antisense strand to SEQ ID NO: 704840
guuuauaaacuauaaagcg

SEQ ID NO: 704842 - RNA, 19 nt, Artificial Sequence
  Description of Artificial Sequence: Synthetic oligonucleotide
  Sense strand starting at position 10 of SEQ ID NO: 586266
caguuaaaugcaugaggcu

SEQ ID NO: 704843 - RNA, 19 nt, Artificial Sequence
  Description of Artificial Sequence: Synthetic oligonucleotide
  Antisense strand to SEQ ID NO: 704842
agccucaugcauuuaacug

SEQ ID NO: 704844 - RNA, 19 nt, Artificial Sequence
  Description of Artificial Sequence: Synthetic oligonucleotide
  Sense strand starting at position 26 of SEQ ID NO: 586266
gcugaaguucugcaauaug

SEQ ID NO: 704845 - RNA, 19 nt, Artificial Sequence
  Description of Artificial Sequence: Synthetic oligonucleotide
  Antisense strand to SEQ ID NO: 704844
cauauugcagaacuucagc

SEQ ID NO: 704846 - RNA, 19 nt, Artificial Sequence
  Description of Artificial Sequence: Synthetic oligonucleotide
  Sense strand starting at position 29 of SEQ ID NO: 586266
gaaguucugcaauauguua

SEQ ID NO: 704847 - RNA, 19 nt, Artificial Sequence
  Description of Artificial Sequence: Synthetic oligonucleotide
  Antisense strand to SEQ ID NO: 704846
uaacauauugcagaacuuc

SEQ ID NO: 704848 - RNA, 19 nt, Artificial Sequence
  Description of Artificial Sequence: Synthetic oligonucleotide
  Sense strand starting at position 36 of SEQ ID NO: 586266
ugcaauauguuagcaauaa

SEQ ID NO: 704849 - RNA, 19 nt, Artificial Sequence
  Description of Artificial Sequence: Synthetic oligonucleotide
  Antisense strand to SEQ ID NO: 704848
uuauugcuaacauauugca

SEQ ID NO: 704850 - RNA, 19 nt, Artificial Sequence
  Description of Artificial Sequence: Synthetic oligonucleotide
  Sense strand starting at position 489 of SEQ ID NO: 586266
caaucaacguuucugauga

SEQ ID NO: 704851 - RNA, 19 nt, Artificial Sequence
  Description of Artificial Sequence: Synthetic oligonucleotide
  Antisense strand to SEQ ID NO: 704850
ucaucagaaacguugauug

SEQ ID NO: 704852 - RNA, 19 nt, Artificial Sequence
  Description of Artificial Sequence: Synthetic oligonucleotide
  Sense strand starting at position 500 of SEQ ID NO: 586266
ucugaugagugagugugua

SEQ ID NO: 704853 - RNA, 19 nt, Artificial Sequence
  Description of Artificial Sequence: Synthetic oligonucleotide
  Antisense strand to SEQ ID NO: 704852
uacacacucacucaucaga

SEQ ID NO: 704854 - RNA, 19 nt, Artificial Sequence
  Description of Artificial Sequence: Synthetic oligonucleotide
  Sense strand starting at position 518 of SEQ ID NO: 586266
agcuaauucgaauaagcua

SEQ ID NO: 704855 - RNA, 19 nt, Artificial Sequence
  Description of Artificial Sequence: Synthetic oligonucleotide
  Antisense strand to SEQ ID NO: 704854
uagcuuauucgaauuagcu

SEQ ID NO: 704856 - RNA, 19 nt, Artificial Sequence
  Description of Artificial Sequence: Synthetic oligonucleotide
  Sense strand starting at position 544 of SEQ ID NO: 586266
agaugaauucuagguuguu

SEQ ID NO: 704857 - RNA, 19 nt, Artificial Sequence
  Description of Artificial Sequence: Synthetic oligonucleotide
  Antisense strand to SEQ ID NO: 704856
aacaaccuagaauucaucu

SEQ ID NO: 704858 - RNA, 19 nt, Artificial Sequence
  Description of Artificial Sequence: Synthetic oligonucleotide
  Sense strand starting at position 545 of SEQ ID NO: 586266
gaugaauucuagguuguug

SEQ ID NO: 704859 - RNA, 19 nt, Artificial Sequence
  Description of Artificial Sequence: Synthetic oligonucleotide
  Antisense strand to SEQ ID NO: 704858
caacaaccuagaauucauc

SEQ ID NO: 704860 - RNA, 19 nt, Artificial Sequence
  Description of Artificial Sequence: Synthetic oligonucleotide
  Sense strand starting at position 631 of SEQ ID NO: 586266
uguucugcauauuucugaa

SEQ ID NO: 704861 - RNA, 19 nt, Artificial Sequence
  Description of Artificial Sequence: Synthetic oligonucleotide
  Antisense strand to SEQ ID NO: 704860
uucagaaauaugcagaaca

SEQ ID NO: 704862 - RNA, 19 nt, Artificial Sequence
  Description of Artificial Sequence: Synthetic oligonucleotide
  Sense strand starting at position 701 of SEQ ID NO: 586266
agaugagauuauuacacau

SEQ ID NO: 704863 - RNA, 19 nt, Artificial Sequence
  Description of Artificial Sequence: Synthetic oligonucleotide
  Antisense strand to SEQ ID NO: 704862
auguguaauaaucucaucu

SEQ ID NO: 704864 - RNA, 19 nt, Artificial Sequence
  Description of Artificial Sequence: Synthetic oligonucleotide
  Sense strand starting at position 927 of SEQ ID NO: 586266
ccaacaugcucuuuggaca

SEQ ID NO: 704865 - RNA, 19 nt, Artificial Sequence
  Description of Artificial Sequence: Synthetic oligonucleotide
  Antisense strand to SEQ ID NO: 704864
uguccaaagagcauguugg

SEQ ID NO: 704866 - RNA, 19 nt, Artificial Sequence
  Description of Artificial Sequence: Synthetic oligonucleotide
  Sense strand starting at position 932 of SEQ ID NO: 586266
augcucuuuggacauaacu

SEQ ID NO: 704867 - RNA, 19 nt, Artificial Sequence
  Description of Artificial Sequence: Synthetic oligonucleotide
  Antisense strand to SEQ ID NO: 704866
aguuauguccaaagagcau

SEQ ID NO: 704868 - RNA, 19 nt, Artificial Sequence
  Description of Artificial Sequence: Synthetic oligonucleotide
  Sense strand starting at position 1074 of SEQ ID NO: 586266
agucgcaucauauagaguu

SEQ ID NO: 704869 - RNA, 19 nt, Artificial Sequence
  Description of Artificial Sequence: Synthetic oligonucleotide
  Antisense strand to SEQ ID NO: 704868
aacucuauaugaugcgacu

SEQ ID NO: 704870 - RNA, 19 nt, Artificial Sequence
  Description of Artificial Sequence: Synthetic oligonucleotide
  Sense strand starting at position 1134 of SEQ ID NO: 586266
agcaguuaccaugaaauau

SEQ ID NO: 704871 - RNA, 19 nt, Artificial Sequence
  Description of Artificial Sequence: Synthetic oligonucleotide
  Antisense strand to SEQ ID NO: 704870
auauuucaugguaacugcu

SEQ ID NO: 704872 - RNA, 19 nt, Artificial Sequence
  Description of Artificial Sequence: Synthetic oligonucleotide
  Sense strand starting at position 1207 of SEQ ID NO: 586266
aggcauauucuuuggacua

SEQ ID NO: 704873 - RNA, 19 nt, Artificial Sequence
  Description of Artificial Sequence: Synthetic oligonucleotide
  Antisense strand to SEQ ID NO: 704872
uaguccaaagaauaugccu

SEQ ID NO: 704874 - RNA, 19 nt, Artificial Sequence
  Description of Artificial Sequence: Synthetic oligonucleotide
  Sense strand starting at position 1721 of SEQ ID NO: 586266
ggagaacucucacccucau

SEQ ID NO: 704875 - RNA, 19 nt, Artificial Sequence
  Description of Artificial Sequence: Synthetic oligonucleotide
  Antisense strand to SEQ ID NO: 704874
augagggugagaguucucc

SEQ ID NO: 704876 - RNA, 19 nt, Artificial Sequence
  Description of Artificial Sequence: Synthetic oligonucleotide
  Sense strand starting at position 1871 of SEQ ID NO: 586266
augauaagcaaguauggua

SEQ ID NO: 704877 - RNA, 19 nt, Artificial Sequence
  Description of Artificial Sequence: Synthetic oligonucleotide
  Antisense strand to SEQ ID NO: 704876
uaccauacuugcuuaucau

SEQ ID NO: 704878 - RNA, 19 nt, Artificial Sequence
  Description of Artificial Sequence: Synthetic oligonucleotide
  Sense strand starting at position 1994 of SEQ ID NO: 586266
uuggaaagcuaucugugaa

SEQ ID NO: 704879 - RNA, 19 nt, Artificial Sequence
  Description of Artificial Sequence: Synthetic oligonucleotide
  Antisense strand to SEQ ID NO: 704878
uucacagauagcuuuccaa

SEQ ID NO: 704880 - RNA, 19 nt, Artificial Sequence
  Description of Artificial Sequence: Synthetic oligonucleotide
  Sense strand starting at position 1995 of SEQ ID NO: 586266
uggaaagcuaucugugaaa

SEQ ID NO: 704881 - RNA, 19 nt, Artificial Sequence
  Description of Artificial Sequence: Synthetic oligonucleotide
  Antisense strand to SEQ ID NO: 704880
uuucacagauagcuuucca

SEQ ID NO: 704882 - RNA, 19 nt, Artificial Sequence
  Description of Artificial Sequence: Synthetic oligonucleotide
  Sense strand starting at position 2061 of SEQ ID NO: 586266
cugggacacucucuaauau

SEQ ID NO: 704883 - RNA, 19 nt, Artificial Sequence
  Description of Artificial Sequence: Synthetic oligonucleotide
  Antisense strand to SEQ ID NO: 704882
auauuagagagugucccag

SEQ ID NO: 704884 - RNA, 19 nt, Artificial Sequence
  Description of Artificial Sequence: Synthetic oligonucleotide
  Sense strand starting at position 2140 of SEQ ID NO: 586266
cugaauggcuuguccuaaa

SEQ ID NO: 704885 - RNA, 19 nt, Artificial Sequence
  Description of Artificial Sequence: Synthetic oligonucleotide
  Antisense strand to SEQ ID NO: 704884
uuuaggacaagccauucag

SEQ ID NO: 704886 - RNA, 19 nt, Artificial Sequence
  Description of Artificial Sequence: Synthetic oligonucleotide
  Sense strand starting at position 2264 of SEQ ID NO: 586266
uguagaggaugucuuguuu

SEQ ID NO: 704887 - RNA, 19 nt, Artificial Sequence
  Description of Artificial Sequence: Synthetic oligonucleotide
  Antisense strand to SEQ ID NO: 704886
aaacaagacauccucuaca

SEQ ID NO: 704888 - RNA, 19 nt, Artificial Sequence
  Description of Artificial Sequence: Synthetic oligonucleotide
  Sense strand starting at position 2293 of SEQ ID NO: 586266
auugcucucuuacugaaga

SEQ ID NO: 704889 - RNA, 19 nt, Artificial Sequence
  Description of Artificial Sequence: Synthetic oligonucleotide
  Antisense strand to SEQ ID NO: 704888
ucuucaguaagagagcaau

SEQ ID NO: 704890 - RNA, 19 nt, Artificial Sequence
  Description of Artificial Sequence: Synthetic oligonucleotide
  Sense strand starting at position 2737 of SEQ ID NO: 586266
cagccauaguaugugauua

SEQ ID NO: 704891 - RNA, 19 nt, Artificial Sequence
  Description of Artificial Sequence: Synthetic oligonucleotide
  Antisense strand to SEQ ID NO: 704890
uaaucacauacuauggcug

SEQ ID NO: 704892 - RNA, 19 nt, Artificial Sequence
  Description of Artificial Sequence: Synthetic oligonucleotide
  Sense strand starting at position 3204 of SEQ ID NO: 586266
guuggcgugucauuuauag

SEQ ID NO: 704893 - RNA, 19 nt, Artificial Sequence
  Description of Artificial Sequence: Synthetic oligonucleotide
  Antisense strand to SEQ ID NO: 704892
cuauaaaugacacgccaac

SEQ ID NO: 704894 - RNA, 19 nt, Artificial Sequence
  Description of Artificial Sequence: Synthetic oligonucleotide
  Sense strand starting at position 3206 of SEQ ID NO: 586266
uggcgugucauuuauaguc

SEQ ID NO: 704895 - RNA, 19 nt, Artificial Sequence
  Description of Artificial Sequence: Synthetic oligonucleotide
  Antisense strand to SEQ ID NO: 704894
gacuauaaaugacacgcca

SEQ ID NO: 704896 - RNA, 19 nt, Artificial Sequence
  Description of Artificial Sequence: Synthetic oligonucleotide
  Sense strand starting at position 3231 of SEQ ID NO: 586266
cgcuuuauaguuuauaaac

SEQ ID NO: 704897 - RNA, 19 nt, Artificial Sequence
  Description of Artificial Sequence: Synthetic oligonucleotide
  Antisense strand to SEQ ID NO: 704896
guuuauaaacuauaaagcg

SEQ ID NO: 704898 - RNA, 19 nt, Artificial Sequence
  Description of Artificial Sequence: Synthetic oligonucleotide
  Sense strand starting at position 3486 of SEQ ID NO: 586266
auauuaccuguagagcuaa

SEQ ID NO: 704899 - RNA, 19 nt, Artificial Sequence
  Description of Artificial Sequence: Synthetic oligonucleotide
  Antisense strand to SEQ ID NO: 704898
uuagcucuacagguaauau

SEQ ID NO: 704900 - RNA, 19 nt, Artificial Sequence
  Description of Artificial Sequence: Synthetic oligonucleotide
  Sense strand starting at position 3594 of SEQ ID NO: 586266
ucccuuaaccuuugggauu

SEQ ID NO: 704901 - RNA, 19 nt, Artificial Sequence
  Description of Artificial Sequence: Synthetic oligonucleotide
  Antisense strand to SEQ ID NO: 704900
aaucccaaagguuaaggga

SEQ ID NO: 704902 - RNA, 19 nt, Artificial Sequence
  Description of Artificial Sequence: Synthetic oligonucleotide
  Sense strand starting at position 3636 of SEQ ID NO: 586266
auaggauacuuuccaguau

SEQ ID NO: 704903 - RNA, 19 nt, Artificial Sequence
  Description of Artificial Sequence: Synthetic oligonucleotide
  Antisense strand to SEQ ID NO: 704902
auacuggaaaguauccuau

SEQ ID NO: 704904 - RNA, 19 nt, Artificial Sequence
  Description of Artificial Sequence: Synthetic oligonucleotide
  Sense strand starting at position 3684 of SEQ ID NO: 586266
caucaaggucuuggugauu

SEQ ID NO: 704905 - RNA, 19 nt, Artificial Sequence
  Description of Artificial Sequence: Synthetic oligonucleotide
  Antisense strand to SEQ ID NO: 704904
aaucaccaagaccuugaug

SEQ ID NO: 704906 - RNA, 19 nt, Artificial Sequence
  Description of Artificial Sequence: Synthetic oligonucleotide
  Sense strand starting at position 3687 of SEQ ID NO: 586266
caaggucuuggugauuaag

SEQ ID NO: 704907 - RNA, 19 nt, Artificial Sequence
  Description of Artificial Sequence: Synthetic oligonucleotide
  Antisense strand to SEQ ID NO: 704906
cuuaaucaccaagaccuug

SEQ ID NO: 704908 - RNA, 19 nt, Artificial Sequence
  Description of Artificial Sequence: Synthetic oligonucleotide
  Sense strand starting at position 3689 of SEQ ID NO: 586266
aggucuuggugauuaagaa

SEQ ID NO: 704909 - RNA, 19 nt, Artificial Sequence
  Description of Artificial Sequence: Synthetic oligonucleotide
  Antisense strand to SEQ ID NO: 704908
uucuuaaucaccaagaccu

SEQ ID NO: 704910 - RNA, 19 nt, Artificial Sequence
  Description of Artificial Sequence: Synthetic oligonucleotide
  Sense strand starting at position 3874 of SEQ ID NO: 586266
uuggaaaucguauaccaug

SEQ ID NO: 704911 - RNA, 19 nt, Artificial Sequence
  Description of Artificial Sequence: Synthetic oligonucleotide
  Antisense strand to SEQ ID NO: 704910
caugguauacgauuuccaa

SEQ ID NO: 704912 - RNA, 19 nt, Artificial Sequence
  Description of Artificial Sequence: Synthetic oligonucleotide
  Sense strand starting at position 3920 of SEQ ID NO: 586266
guccuaaugcaauggaaug

SEQ ID NO: 704913 - RNA, 19 nt, Artificial Sequence
  Description of Artificial Sequence: Synthetic oligonucleotide
  Antisense strand to SEQ ID NO: 704912
cauuccauugcauuaggac

SEQ ID NO: 704914 - RNA, 19 nt, Artificial Sequence
  Description of Artificial Sequence: Synthetic oligonucleotide
  Sense strand starting at position 3925 of SEQ ID NO: 586266
aaugcaauggaaugaguaa

SEQ ID NO: 704915 - RNA, 19 nt, Artificial Sequence
  Description of Artificial Sequence: Synthetic oligonucleotide
  Antisense strand to SEQ ID NO: 704914
uuacucauuccauugcauu

SEQ ID NO: 704916 - RNA, 19 nt, Artificial Sequence
  Description of Artificial Sequence: Synthetic oligonucleotide
  Sense strand starting at position 3943 of SEQ ID NO: 586266
auuuaaugcugguaaucag

SEQ ID NO: 704917 - RNA, 19 nt, Artificial Sequence
  Description of Artificial Sequence: Synthetic oligonucleotide
  Antisense strand to SEQ ID NO: 704916
cugauuaccagcauuaaau

SEQ ID NO: 704918 - RNA, 19 nt, Artificial Sequence
  Description of Artificial Sequence: Synthetic oligonucleotide
  Sense strand starting at position 3950 of SEQ ID NO: 586266
gcugguaaucaggacugga

SEQ ID NO: 704919 - RNA, 19 nt, Artificial Sequence
  Description of Artificial Sequence: Synthetic oligonucleotide
  Antisense strand to SEQ ID NO: 704918
uccaguccugauuaccagc

SEQ ID NO: 704920 - RNA, 19 nt, Artificial Sequence
  Description of Artificial Sequence: Synthetic oligonucleotide
  Sense strand starting at position 3954 of SEQ ID NO: 586266
guaaucaggacuggauauu

SEQ ID NO: 704921 - RNA, 19 nt, Artificial Sequence
  Description of Artificial Sequence: Synthetic oligonucleotide
  Antisense strand to SEQ ID NO: 704920
aauauccaguccugauuac

SEQ ID NO: 704922 - RNA, 19 nt, Artificial Sequence
  Description of Artificial Sequence: Synthetic oligonucleotide
  Sense strand starting at position 29 of SEQ ID NO: 586267
ugaggauucuagucacaug

SEQ ID NO: 704923 - RNA, 19 nt, Artificial Sequence
  Description of Artificial Sequence: Synthetic oligonucleotide
  Antisense strand to SEQ ID NO: 704922
caugugacuagaauccuca

SEQ ID NO: 704924 - RNA, 19 nt, Artificial Sequence
  Description of Artificial Sequence: Synthetic oligonucleotide
  Sense strand starting at position 452 of SEQ ID NO: 586267
ucuugaguuccagagcuua

SEQ ID NO: 704925 - RNA, 19 nt, Artificial Sequence
  Description of Artificial Sequence: Synthetic oligonucleotide
  Antisense strand to SEQ ID NO: 704924
uaagcucuggaacucaaga

SEQ ID NO: 704926 - RNA, 19 nt, Artificial Sequence
  Description of Artificial Sequence: Synthetic oligonucleotide
  Sense strand starting at position 629 of SEQ ID NO: 586267
uccucuugucaggauuaca

SEQ ID NO: 704927 - RNA, 19 nt, Artificial Sequence
  Description of Artificial Sequence: Synthetic oligonucleotide
  Antisense strand to SEQ ID NO: 704926
uguaauccugacaagagga

SEQ ID NO: 704928 - RNA, 19 nt, Artificial Sequence
  Description of Artificial Sequence: Synthetic oligonucleotide
  Sense strand starting at position 716 of SEQ ID NO: 586267
guugccuauuucucuuuga

SEQ ID NO: 704929 - RNA, 19 nt, Artificial Sequence
  Description of Artificial Sequence: Synthetic oligonucleotide
  Antisense strand to SEQ ID NO: 704928
ucaaagagaaauaggcaac

SEQ ID NO: 704930 - RNA, 19 nt, Artificial Sequence
  Description of Artificial Sequence: Synthetic oligonucleotide
  Sense strand starting at position 752 of SEQ ID NO: 586267
aauugugaguucucucaag

SEQ ID NO: 704931 - RNA, 19 nt, Artificial Sequence
  Description of Artificial Sequence: Synthetic oligonucleotide
  Antisense strand to SEQ ID NO: 704930
cuugagagaacucacaauu

SEQ ID NO: 704932 - RNA, 19 nt, Artificial Sequence
  Description of Artificial Sequence: Synthetic oligonucleotide
  Sense strand starting at position 793 of SEQ ID NO: 586267
uuggaaguauuagccuuaa

SEQ ID NO: 704933 - RNA, 19 nt, Artificial Sequence
  Description of Artificial Sequence: Synthetic oligonucleotide
  Antisense strand to SEQ ID NO: 704932
uuaaggcuaauacuuccaa

SEQ ID NO: 704934 - RNA, 19 nt, Artificial Sequence
  Description of Artificial Sequence: Synthetic oligonucleotide
  Sense strand starting at position 797 of SEQ ID NO: 586267
aaguauuagccuuaaaugg

SEQ ID NO: 704935 - RNA, 19 nt, Artificial Sequence
  Description of Artificial Sequence: Synthetic oligonucleotide
  Antisense strand to SEQ ID NO: 704934
ccauuuaaggcuaauacuu

SEQ ID NO: 704936 - RNA, 19 nt, Artificial Sequence
  Description of Artificial Sequence: Synthetic oligonucleotide
  Sense strand starting at position 887 of SEQ ID NO: 586267
ggcaaagaagccuaucuaa

SEQ ID NO: 704937 - RNA, 19 nt, Artificial Sequence
  Description of Artificial Sequence: Synthetic oligonucleotide
  Antisense strand to SEQ ID NO: 704936
uuagauaggcuucuuugcc

SEQ ID NO: 704938 - RNA, 19 nt, Artificial Sequence
  Description of Artificial Sequence: Synthetic oligonucleotide
  Sense strand starting at position 916 of SEQ ID NO: 586267
gggcuuguagaauagcaga

SEQ ID NO: 704939 - RNA, 19 nt, Artificial Sequence
  Description of Artificial Sequence: Synthetic oligonucleotide
  Antisense strand to SEQ ID NO: 704938
ucugcuauucuacaagccc

SEQ ID NO: 704940 - RNA, 19 nt, Artificial Sequence
  Description of Artificial Sequence: Synthetic oligonucleotide
  Sense strand starting at position 929 of SEQ ID NO: 586267
agcagaauagcauggagaa

SEQ ID NO: 704941 - RNA, 19 nt, Artificial Sequence
  Description of Artificial Sequence: Synthetic oligonucleotide
  Antisense strand to SEQ ID NO: 704940
uucuccaugcuauucugcu

SEQ ID NO: 704942 - RNA, 19 nt, Artificial Sequence
  Description of Artificial Sequence: Synthetic oligonucleotide
  Sense strand starting at position 930 of SEQ ID NO: 586267
gcagaauagcauggagaaa

SEQ ID NO: 704943 - RNA, 19 nt, Artificial Sequence
  Description of Artificial Sequence: Synthetic oligonucleotide
  Antisense strand to SEQ ID NO: 704942
uuucuccaugcuauucugc

SEQ ID NO: 704944 - RNA, 19 nt, Artificial Sequence
  Description of Artificial Sequence: Synthetic oligonucleotide
  Sense strand starting at position 972 of SEQ ID NO: 586267
uuguaucaaccuuaauugu

SEQ ID NO: 704945 - RNA, 19 nt, Artificial Sequence
  Description of Artificial Sequence: Synthetic oligonucleotide
  Antisense strand to SEQ ID NO: 704944
acaauuaagguugauacaa

SEQ ID NO: 704946 - RNA, 19 nt, Artificial Sequence
  Description of Artificial Sequence: Synthetic oligonucleotide
  Sense strand starting at position 994 of SEQ ID NO: 586267
ucgaaauaugcauaacuua

SEQ ID NO: 704947 - RNA, 19 nt, Artificial Sequence
  Description of Artificial Sequence: Synthetic oligonucleotide
  Antisense strand to SEQ ID NO: 704946
uaaguuaugcauauuucga

SEQ ID NO: 704948 - RNA, 19 nt, Artificial Sequence
  Description of Artificial Sequence: Synthetic oligonucleotide
  Sense strand starting at position 1013 of SEQ ID NO: 586267
aguugacuuucuguauaag

SEQ ID NO: 704949 - RNA, 19 nt, Artificial Sequence
  Description of Artificial Sequence: Synthetic oligonucleotide
  Antisense strand to SEQ ID NO: 704948
cuuauacagaaagucaacu

SEQ ID NO: 704950 - RNA, 19 nt, Artificial Sequence
  Description of Artificial Sequence: Synthetic oligonucleotide
  Sense strand starting at position 1016 of SEQ ID NO: 586267
ugacuuucuguauaaguaa

SEQ ID NO: 704951 - RNA, 19 nt, Artificial Sequence
  Description of Artificial Sequence: Synthetic oligonucleotide
  Antisense strand to SEQ ID NO: 704950
uuacuuauacagaaaguca

SEQ ID NO: 704952 - RNA, 19 nt, Artificial Sequence
  Description of Artificial Sequence: Synthetic oligonucleotide
  Sense strand starting at position 1238 of SEQ ID NO: 586267
ggagucaaauuguuaagau

SEQ ID NO: 704953 - RNA, 19 nt, Artificial Sequence
  Description of Artificial Sequence: Synthetic oligonucleotide
  Antisense strand to SEQ ID NO: 704952
aucuuaacaauuugacucc

SEQ ID NO: 704954 - RNA, 19 nt, Artificial Sequence
  Description of Artificial Sequence: Synthetic oligonucleotide
  Sense strand starting at position 1414 of SEQ ID NO: 586267
uuuagagcauccuucugaa

SEQ ID NO: 704955 - RNA, 19 nt, Artificial Sequence
  Description of Artificial Sequence: Synthetic oligonucleotide
  Antisense strand to SEQ ID NO: 704954
uucagaaggaugcucuaaa

SEQ ID NO: 704956 - RNA, 19 nt, Artificial Sequence
  Description of Artificial Sequence: Synthetic oligonucleotide
  Sense strand starting at position 1602 of SEQ ID NO: 586267
uagagacuuguggauaugu

SEQ ID NO: 704957 - RNA, 19 nt, Artificial Sequence
  Description of Artificial Sequence: Synthetic oligonucleotide
  Antisense strand to SEQ ID NO: 704956
acauauccacaagucucua

SEQ ID NO: 704958 - RNA, 19 nt, Artificial Sequence
  Description of Artificial Sequence: Synthetic oligonucleotide
  Sense strand starting at position 1615 of SEQ ID NO: 586267
auaugugagguuuaagggu

SEQ ID NO: 704959 - RNA, 19 nt, Artificial Sequence
  Description of Artificial Sequence: Synthetic oligonucleotide
  Antisense strand to SEQ ID NO: 704958
acccuuaaaccucacauau

SEQ ID NO: 704960 - RNA, 19 nt, Artificial Sequence
  Description of Artificial Sequence: Synthetic oligonucleotide
  Sense strand starting at position 2081 of SEQ ID NO: 586267
agccaaauggaaugaaagu

SEQ ID NO: 704961 - RNA, 19 nt, Artificial Sequence
  Description of Artificial Sequence: Synthetic oligonucleotide
  Antisense strand to SEQ ID NO: 704960
acuuucauuccauuuggcu

SEQ ID NO: 704962 - RNA, 19 nt, Artificial Sequence
  Description of Artificial Sequence: Synthetic oligonucleotide
  Sense strand starting at position 2393 of SEQ ID NO: 586267
acuggaaagucucuguaaa

SEQ ID NO: 704963 - RNA, 19 nt, Artificial Sequence
  Description of Artificial Sequence: Synthetic oligonucleotide
  Antisense strand to SEQ ID NO: 704962
uuuacagagacuuuccagu

SEQ ID NO: 704964 - RNA, 19 nt, Artificial Sequence
  Description of Artificial Sequence: Synthetic oligonucleotide
  Sense strand starting at position 2394 of SEQ ID NO: 586267
cuggaaagucucuguaaac

SEQ ID NO: 704965 - RNA, 19 nt, Artificial Sequence
  Description of Artificial Sequence: Synthetic oligonucleotide
  Antisense strand to SEQ ID NO: 704964
guuuacagagacuuuccag

SEQ ID NO: 704966 - RNA, 19 nt, Artificial Sequence
  Description of Artificial Sequence: Synthetic oligonucleotide
  Sense strand starting at position 2395 of SEQ ID NO: 586267
uggaaagucucuguaaacu

SEQ ID NO: 704967 - RNA, 19 nt, Artificial Sequence
  Description of Artificial Sequence: Synthetic oligonucleotide
  Antisense strand to SEQ ID NO: 704966
aguuuacagagacuuucca

SEQ ID NO: 704968 - RNA, 19 nt, Artificial Sequence
  Description of Artificial Sequence: Synthetic oligonucleotide
  Sense strand starting at position 2442 of SEQ ID NO: 586267
ucaguagucauuuggucau

SEQ ID NO: 704969 - RNA, 19 nt, Artificial Sequence
  Description of Artificial Sequence: Synthetic oligonucleotide
  Antisense strand to SEQ ID NO: 704968
augaccaaaugacuacuga

SEQ ID NO: 704970 - RNA, 19 nt, Artificial Sequence
  Description of Artificial Sequence: Synthetic oligonucleotide
  Sense strand starting at position 2464 of SEQ ID NO: 586267
uuguuugccucauuuaaug

SEQ ID NO: 704971 - RNA, 19 nt, Artificial Sequence
  Description of Artificial Sequence: Synthetic oligonucleotide
  Antisense strand to SEQ ID NO: 704970
cauuaaaugaggcaaacaa

SEQ ID NO: 704972 - RNA, 19 nt, Artificial Sequence
  Description of Artificial Sequence: Synthetic oligonucleotide
  Sense strand starting at position 2506 of SEQ ID NO: 586267
cagaguucuuugguuuaaa

SEQ ID NO: 704973 - RNA, 19 nt, Artificial Sequence
  Description of Artificial Sequence: Synthetic oligonucleotide
  Antisense strand to SEQ ID NO: 704972
uuuaaaccaaagaacucug

SEQ ID NO: 704974 - RNA, 19 nt, Artificial Sequence
  Description of Artificial Sequence: Synthetic oligonucleotide
  Sense strand starting at position 2507 of SEQ ID NO: 586267
agaguucuuugguuuaaau

SEQ ID NO: 704975 - RNA, 19 nt, Artificial Sequence
  Description of Artificial Sequence: Synthetic oligonucleotide
  Antisense strand to SEQ ID NO: 704974
auuuaaaccaaagaacucu

SEQ ID NO: 704976 - RNA, 19 nt, Artificial Sequence
  Description of Artificial Sequence: Synthetic oligonucleotide
  Sense strand starting at position 2556 of SEQ ID NO: 586267
uagaauguacuugguuuaa

SEQ ID NO: 704977 - RNA, 19 nt, Artificial Sequence
  Description of Artificial Sequence: Synthetic oligonucleotide
  Antisense strand to SEQ ID NO: 704976
uuaaaccaaguacauucua

SEQ ID NO: 704978 - RNA, 19 nt, Artificial Sequence
  Description of Artificial Sequence: Synthetic oligonucleotide
  Sense strand starting at position 2641 of SEQ ID NO: 586267
ugaugaaaguuauuacucu

SEQ ID NO: 704979 - RNA, 19 nt, Artificial Sequence
  Description of Artificial Sequence: Synthetic oligonucleotide
  Antisense strand to SEQ ID NO: 704978
agaguaauaacuuucauca

SEQ ID NO: 704980 - RNA, 19 nt, Artificial Sequence
  Description of Artificial Sequence: Synthetic oligonucleotide
  Sense strand starting at position 2645 of SEQ ID NO: 586267
gaaaguuauuacucugaag

SEQ ID NO: 704981 - RNA, 19 nt, Artificial Sequence
  Description of Artificial Sequence: Synthetic oligonucleotide
  Antisense strand to SEQ ID NO: 704980
cuucagaguaauaacuuuc

SEQ ID NO: 704982 - RNA, 19 nt, Artificial Sequence
  Description of Artificial Sequence: Synthetic oligonucleotide
  Sense strand starting at position 3140 of SEQ ID NO: 586267
uugagagucuaacccacaa

SEQ ID NO: 704983 - RNA, 19 nt, Artificial Sequence
  Description of Artificial Sequence: Synthetic oligonucleotide
  Antisense strand to SEQ ID NO: 704982
uuguggguuagacucucaa

SEQ ID NO: 704984 - RNA, 19 nt, Artificial Sequence
  Description of Artificial Sequence: Synthetic oligonucleotide
  Sense strand starting at position 3331 of SEQ ID NO: 586267
uaaagaguauugcuaugac

SEQ ID NO: 704985 - RNA, 19 nt, Artificial Sequence
  Description of Artificial Sequence: Synthetic oligonucleotide
  Antisense strand to SEQ ID NO: 704984
gucauagcaauacucuuua

SEQ ID NO: 704986 - RNA, 19 nt, Artificial Sequence
  Description of Artificial Sequence: Synthetic oligonucleotide
  Sense strand starting at position 3365 of SEQ ID NO: 586267
gaagcauuaugucccuaag

SEQ ID NO: 704987 - RNA, 19 nt, Artificial Sequence
  Description of Artificial Sequence: Synthetic oligonucleotide
  Antisense strand to SEQ ID NO: 704986
cuuagggacauaaugcuuc

SEQ ID NO: 704988 - RNA, 19 nt, Artificial Sequence
  Description of Artificial Sequence: Synthetic oligonucleotide
  Sense strand starting at position 3368 of SEQ ID NO: 586267
gcauuaugucccuaagaca

SEQ ID NO: 704989 - RNA, 19 nt, Artificial Sequence
  Description of Artificial Sequence: Synthetic oligonucleotide
  Antisense strand to SEQ ID NO: 704988
ugucuuagggacauaaugc

SEQ ID NO: 704990 - RNA, 19 nt, Artificial Sequence
  Description of Artificial Sequence: Synthetic oligonucleotide
  Sense strand starting at position 3540 of SEQ ID NO: 586267
cagucagaggucugauaug

SEQ ID NO: 704991 - RNA, 19 nt, Artificial Sequence
  Description of Artificial Sequence: Synthetic oligonucleotide
  Antisense strand to SEQ ID NO: 704990
cauaucagaccucugacug

SEQ ID NO: 704992 - RNA, 19 nt, Artificial Sequence
  Description of Artificial Sequence: Synthetic oligonucleotide
  Sense strand starting at position 3545 of SEQ ID NO: 586267
agaggucugauaugugaca

SEQ ID NO: 704993 - RNA, 19 nt, Artificial Sequence
  Description of Artificial Sequence: Synthetic oligonucleotide
  Antisense strand to SEQ ID NO: 704992
ugucacauaucagaccucu

SEQ ID NO: 704994 - RNA, 19 nt, Artificial Sequence
  Description of Artificial Sequence: Synthetic oligonucleotide
  Sense strand starting at position 3547 of SEQ ID NO: 586267
aggucugauaugugacaga

SEQ ID NO: 704995 - RNA, 19 nt, Artificial Sequence
  Description of Artificial Sequence: Synthetic oligonucleotide
  Antisense strand to SEQ ID NO: 704994
ucugucacauaucagaccu

SEQ ID NO: 704996 - RNA, 19 nt, Artificial Sequence
  Description of Artificial Sequence: Synthetic oligonucleotide
  Sense strand starting at position 3605 of SEQ ID NO: 586267
ucagauggucuuuacguga

SEQ ID NO: 704997 - RNA, 19 nt, Artificial Sequence
  Description of Artificial Sequence: Synthetic oligonucleotide
  Antisense strand to SEQ ID NO: 704996
ucacguaaagaccaucuga

SEQ ID NO: 704998 - RNA, 19 nt, Artificial Sequence
  Description of Artificial Sequence: Synthetic oligonucleotide
  Sense strand starting at position 3646 of SEQ ID NO: 586267
aauauuguagaaugugaac

SEQ ID NO: 704999 - RNA, 19 nt, Artificial Sequence
  Description of Artificial Sequence: Synthetic oligonucleotide
  Antisense strand to SEQ ID NO: 704998
guucacauucuacaauauu

SEQ ID NO: 705000 - RNA, 19 nt, Artificial Sequence
  Description of Artificial Sequence: Synthetic oligonucleotide
  Sense strand starting at position 3823 of SEQ ID NO: 586267
auagacugccucugacauu

SEQ ID NO: 705001 - RNA, 19 nt, Artificial Sequence
  Description of Artificial Sequence: Synthetic oligonucleotide
  Antisense strand to SEQ ID NO: 705000
aaugucagaggcagucuau

SEQ ID NO: 705002 - RNA, 19 nt, Artificial Sequence
  Description of Artificial Sequence: Synthetic oligonucleotide
  Sense strand starting at position 99 of SEQ ID NO: 586268
caaggagcuccggagugau

SEQ ID NO: 705003 - RNA, 19 nt, Artificial Sequence
  Description of Artificial Sequence: Synthetic oligonucleotide
  Antisense strand to SEQ ID NO: 705002
aucacuccggagcuccuug

SEQ ID NO: 705004 - RNA, 19 nt, Artificial Sequence
  Description of Artificial Sequence: Synthetic oligonucleotide
  Sense strand starting at position 102 of SEQ ID NO: 586268
ggagcuccggagugauaaa

SEQ ID NO: 705005 - RNA, 19 nt, Artificial Sequence
  Description of Artificial Sequence: Synthetic oligonucleotide
  Antisense strand to SEQ ID NO: 705004
uuuaucacuccggagcucc

SEQ ID NO: 705006 - RNA, 19 nt, Artificial Sequence
  Description of Artificial Sequence: Synthetic oligonucleotide
  Sense strand starting at position 103 of SEQ ID NO: 586268
gagcuccggagugauaaau

SEQ ID NO: 705007 - RNA, 19 nt, Artificial Sequence
  Description of Artificial Sequence: Synthetic oligonucleotide
  Antisense strand to SEQ ID NO: 705006
auuuaucacuccggagcuc

SEQ ID NO: 705008 - RNA, 19 nt, Artificial Sequence
  Description of Artificial Sequence: Synthetic oligonucleotide
  Sense strand starting at position 764 of SEQ ID NO: 586268
cagucuuugccgccagacu

SEQ ID NO: 705009 - RNA, 19 nt, Artificial Sequence
  Description of Artificial Sequence: Synthetic oligonucleotide
  Antisense strand to SEQ ID NO: 705008
agucuggcggcaaagacug

SEQ ID NO: 705010 - RNA, 19 nt, Artificial Sequence
  Description of Artificial Sequence: Synthetic oligonucleotide
  Sense strand starting at position 1084 of SEQ ID NO: 586268
guaaacauguaucuccauu

SEQ ID NO: 705011 - RNA, 19 nt, Artificial Sequence
  Description of Artificial Sequence: Synthetic oligonucleotide
  Antisense strand to SEQ ID NO: 705010
aauggagauacauguuuac

SEQ ID NO: 705012 - RNA, 19 nt, Artificial Sequence
  Description of Artificial Sequence: Synthetic oligonucleotide
  Sense strand starting at position 1090 of SEQ ID NO: 586268
auguaucuccauuacgaua

SEQ ID NO: 705013 - RNA, 19 nt, Artificial Sequence
  Description of Artificial Sequence: Synthetic oligonucleotide
  Antisense strand to SEQ ID NO: 705012
uaucguaauggagauacau

SEQ ID NO: 705014 - RNA, 19 nt, Artificial Sequence
  Description of Artificial Sequence: Synthetic oligonucleotide
  Sense strand starting at position 1095 of SEQ ID NO: 586268
ucuccauuacgauaacgua

SEQ ID NO: 705015 - RNA, 19 nt, Artificial Sequence
  Description of Artificial Sequence: Synthetic oligonucleotide
  Antisense strand to SEQ ID NO: 705014
uacguuaucguaauggaga

SEQ ID NO: 705016 - RNA, 19 nt, Artificial Sequence
  Description of Artificial Sequence: Synthetic oligonucleotide
  Sense strand starting at position 1303 of SEQ ID NO: 586268
gcccaaugacguuaccauu

SEQ ID NO: 705017 - RNA, 19 nt, Artificial Sequence
  Description of Artificial Sequence: Synthetic oligonucleotide
  Antisense strand to SEQ ID NO: 705016
aaugguaacgucauugggc

SEQ ID NO: 705018 - RNA, 19 nt, Artificial Sequence
  Description of Artificial Sequence: Synthetic oligonucleotide
  Sense strand starting at position 1332 of SEQ ID NO: 586268
gguuacuaauuccuugaaa

SEQ ID NO: 705019 - RNA, 19 nt, Artificial Sequence
  Description of Artificial Sequence: Synthetic oligonucleotide
  Antisense strand to SEQ ID NO: 705018
uuucaaggaauuaguaacc

SEQ ID NO: 705020 - RNA, 19 nt, Artificial Sequence
  Description of Artificial Sequence: Synthetic oligonucleotide
  Sense strand starting at position 1479 of SEQ ID NO: 586268
gugccaauucccggagaaa

SEQ ID NO: 705021 - RNA, 19 nt, Artificial Sequence
  Description of Artificial Sequence: Synthetic oligonucleotide
  Antisense strand to SEQ ID NO: 705020
uuucuccgggaauuggcac

SEQ ID NO: 705022 - RNA, 19 nt, Artificial Sequence
  Description of Artificial Sequence: Synthetic oligonucleotide
  Sense strand starting at position 1480 of SEQ ID NO: 586268
ugccaauucccggagaaag

SEQ ID NO: 705023 - RNA, 19 nt, Artificial Sequence
  Description of Artificial Sequence: Synthetic oligonucleotide
  Antisense strand to SEQ ID NO: 705022
cuuucuccgggaauuggca

SEQ ID NO: 705024 - RNA, 19 nt, Artificial Sequence
  Description of Artificial Sequence: Synthetic oligonucleotide
  Sense strand starting at position 2173 of SEQ ID NO: 586268
agcaauuaccaguguuagg

SEQ ID NO: 705025 - RNA, 19 nt, Artificial Sequence
  Description of Artificial Sequence: Synthetic oligonucleotide
  Antisense strand to SEQ ID NO: 705024
ccuaacacugguaauugcu

SEQ ID NO: 705026 - RNA, 19 nt, Artificial Sequence
  Description of Artificial Sequence: Synthetic oligonucleotide
  Sense strand starting at position 2303 of SEQ ID NO: 586268
ggauacuuggcaggguuua

SEQ ID NO: 705027 - RNA, 19 nt, Artificial Sequence
  Description of Artificial Sequence: Synthetic oligonucleotide
  Antisense strand to SEQ ID NO: 705026
uaaacccugccaaguaucc

SEQ ID NO: 705028 - RNA, 19 nt, Artificial Sequence
  Description of Artificial Sequence: Synthetic oligonucleotide
  Sense strand starting at position 2304 of SEQ ID NO: 586268
gauacuuggcaggguuuau

SEQ ID NO: 705029 - RNA, 19 nt, Artificial Sequence
  Description of Artificial Sequence: Synthetic oligonucleotide
  Antisense strand to SEQ ID NO: 705028
auaaacccugccaaguauc

SEQ ID NO: 705030 - RNA, 19 nt, Artificial Sequence
  Description of Artificial Sequence: Synthetic oligonucleotide
  Sense strand starting at position 2315 of SEQ ID NO: 586268
ggguuuauuccaggucaug

SEQ ID NO: 705031 - RNA, 19 nt, Artificial Sequence
  Description of Artificial Sequence: Synthetic oligonucleotide
  Antisense strand to SEQ ID NO: 705030
caugaccuggaauaaaccc

SEQ ID NO: 705032 - RNA, 19 nt, Artificial Sequence
  Description of Artificial Sequence: Synthetic oligonucleotide
  Sense strand starting at position 2365 of SEQ ID NO: 586268
gucucugauccaggcaaau

SEQ ID NO: 705033 - RNA, 19 nt, Artificial Sequence
  Description of Artificial Sequence: Synthetic oligonucleotide
  Antisense strand to SEQ ID NO: 705032
auuugccuggaucagagac

SEQ ID NO: 705034 - RNA, 19 nt, Artificial Sequence
  Description of Artificial Sequence: Synthetic oligonucleotide
  Sense strand starting at position 2432 of SEQ ID NO: 586268
caggguucucuuugggaag

SEQ ID NO: 705035 - RNA, 19 nt, Artificial Sequence
  Description of Artificial Sequence: Synthetic oligonucleotide
  Antisense strand to SEQ ID NO: 705034
cuucccaaagagaacccug

SEQ ID NO: 705036 - RNA, 19 nt, Artificial Sequence
  Description of Artificial Sequence: Synthetic oligonucleotide
  Sense strand starting at position 2446 of SEQ ID NO: 586268
ggaagauucugucucccaa

SEQ ID NO: 705037 - RNA, 19 nt, Artificial Sequence
  Description of Artificial Sequence: Synthetic oligonucleotide
  Antisense strand to SEQ ID NO: 705036
uugggagacagaaucuucc

SEQ ID NO: 705038 - RNA, 19 nt, Artificial Sequence
  Description of Artificial Sequence: Synthetic oligonucleotide
  Sense strand starting at position 2549 of SEQ ID NO: 586268
gaaacuuuagacggccauu

SEQ ID NO: 705039 - RNA, 19 nt, Artificial Sequence
  Description of Artificial Sequence: Synthetic oligonucleotide
  Antisense strand to SEQ ID NO: 705038
aauggccgucuaaaguuuc

SEQ ID NO: 705040 - RNA, 19 nt, Artificial Sequence
  Description of Artificial Sequence: Synthetic oligonucleotide
  Sense strand starting at position 2601 of SEQ ID NO: 586268
guuuguagaggucaggaau

SEQ ID NO: 705041 - RNA, 19 nt, Artificial Sequence
  Description of Artificial Sequence: Synthetic oligonucleotide
  Antisense strand to SEQ ID NO: 705040
auuccugaccucuacaaac

SEQ ID NO: 705042 - RNA, 19 nt, Artificial Sequence
  Description of Artificial Sequence: Synthetic oligonucleotide
  Sense strand starting at position 2671 of SEQ ID NO: 586268
gggcuaguccuaggaacag

SEQ ID NO: 705043 - RNA, 19 nt, Artificial Sequence
  Description of Artificial Sequence: Synthetic oligonucleotide
  Antisense strand to SEQ ID NO: 705042
cuguuccuaggacuagccc

SEQ ID NO: 705044 - RNA, 19 nt, Artificial Sequence
  Description of Artificial Sequence: Synthetic oligonucleotide
  Sense strand starting at position 2787 of SEQ ID NO: 586268
ugcaaauaaguguaauaac

SEQ ID NO: 705045 - RNA, 19 nt, Artificial Sequence
  Description of Artificial Sequence: Synthetic oligonucleotide
  Antisense strand to SEQ ID NO: 705044
guuauuacacuuauuugca

SEQ ID NO: 705046 - RNA, 19 nt, Artificial Sequence
  Description of Artificial Sequence: Synthetic oligonucleotide
  Sense strand starting at position 2796 of SEQ ID NO: 586268
guguaauaacgauguaaau

SEQ ID NO: 705047 - RNA, 19 nt, Artificial Sequence
  Description of Artificial Sequence: Synthetic oligonucleotide
  Antisense strand to SEQ ID NO: 705046
auuuacaucguuauuacac

SEQ ID NO: 705048 - RNA, 19 nt, Artificial Sequence
  Description of Artificial Sequence: Synthetic oligonucleotide
  Sense strand starting at position 2954 of SEQ ID NO: 586268
ggaagacaaucugauagag

SEQ ID NO: 705049 - RNA, 19 nt, Artificial Sequence
  Description of Artificial Sequence: Synthetic oligonucleotide
  Antisense strand to SEQ ID NO: 705048
cucuaucagauugucuucc

SEQ ID NO: 705050 - RNA, 19 nt, Artificial Sequence
  Description of Artificial Sequence: Synthetic oligonucleotide
  Sense strand starting at position 2976 of SEQ ID NO: 586268
agggaauacuucuuagagu

SEQ ID NO: 705051 - RNA, 19 nt, Artificial Sequence
  Description of Artificial Sequence: Synthetic oligonucleotide
  Antisense strand to SEQ ID NO: 705050
acucuaagaaguauucccu

SEQ ID NO: 705052 - RNA, 19 nt, Artificial Sequence
  Description of Artificial Sequence: Synthetic oligonucleotide
  Sense strand starting at position 3011 of SEQ ID NO: 586268
aggaauuaaguuuguggaa

SEQ ID NO: 705053 - RNA, 19 nt, Artificial Sequence
  Description of Artificial Sequence: Synthetic oligonucleotide
  Antisense strand to SEQ ID NO: 705052
uuccacaaacuuaauuccu

SEQ ID NO: 705054 - RNA, 19 nt, Artificial Sequence
  Description of Artificial Sequence: Synthetic oligonucleotide
  Sense strand starting at position 3012 of SEQ ID NO: 586268
ggaauuaaguuuguggaaa

SEQ ID NO: 705055 - RNA, 19 nt, Artificial Sequence
  Description of Artificial Sequence: Synthetic oligonucleotide
  Antisense strand to SEQ ID NO: 705054
uuuccacaaacuuaauucc

SEQ ID NO: 705056 - RNA, 19 nt, Artificial Sequence
  Description of Artificial Sequence: Synthetic oligonucleotide
  Sense strand starting at position 3024 of SEQ ID NO: 586268
guggaaauugugggagagu

SEQ ID NO: 705057 - RNA, 19 nt, Artificial Sequence
  Description of Artificial Sequence: Synthetic oligonucleotide
  Antisense strand to SEQ ID NO: 705056
acucucccacaauuuccac

SEQ ID NO: 705058 - RNA, 19 nt, Artificial Sequence
  Description of Artificial Sequence: Synthetic oligonucleotide
  Sense strand starting at position 3033 of SEQ ID NO: 586268
gugggagaguugaaguaga

SEQ ID NO: 705059 - RNA, 19 nt, Artificial Sequence
  Description of Artificial Sequence: Synthetic oligonucleotide
  Antisense strand to SEQ ID NO: 705058
ucuacuucaacucucccac

SEQ ID NO: 705060 - RNA, 19 nt, Artificial Sequence
  Description of Artificial Sequence: Synthetic oligonucleotide
  Sense strand starting at position 3068 of SEQ ID NO: 586268
aaaugaaguuguccugaaa

SEQ ID NO: 705061 - RNA, 19 nt, Artificial Sequence
  Description of Artificial Sequence: Synthetic oligonucleotide
  Antisense strand to SEQ ID NO: 705060
uuucaggacaacuucauuu

SEQ ID NO: 705062 - RNA, 19 nt, Artificial Sequence
  Description of Artificial Sequence: Synthetic oligonucleotide
  Sense strand starting at position 3071 of SEQ ID NO: 586268
ugaaguuguccugaaauca

SEQ ID NO: 705063 - RNA, 19 nt, Artificial Sequence
  Description of Artificial Sequence: Synthetic oligonucleotide
  Antisense strand to SEQ ID NO: 705062
ugauuucaggacaacuuca

SEQ ID NO: 705064 - RNA, 19 nt, Artificial Sequence
  Description of Artificial Sequence: Synthetic oligonucleotide
  Sense strand starting at position 3081 of SEQ ID NO: 586268
cugaaaucacagcagguuu

SEQ ID NO: 705065 - RNA, 19 nt, Artificial Sequence
  Description of Artificial Sequence: Synthetic oligonucleotide
  Antisense strand to SEQ ID NO: 705064
aaaccugcugugauuucag

SEQ ID NO: 705066 - RNA, 19 nt, Artificial Sequence
  Description of Artificial Sequence: Synthetic oligonucleotide
  Sense strand starting at position 3104 of SEQ ID NO: 586268
gacaguguugcacaccuau

SEQ ID NO: 705067 - RNA, 19 nt, Artificial Sequence
  Description of Artificial Sequence: Synthetic oligonucleotide
  Antisense strand to SEQ ID NO: 705066
auaggugugcaacacuguc

SEQ ID NO: 705068 - RNA, 19 nt, Artificial Sequence
  Description of Artificial Sequence: Synthetic oligonucleotide
  Sense strand starting at position 3132 of SEQ ID NO: 586268
uggucauagguuuacagua

SEQ ID NO: 705069 - RNA, 19 nt, Artificial Sequence
  Description of Artificial Sequence: Synthetic oligonucleotide
  Antisense strand to SEQ ID NO: 705068
uacuguaaaccuaugacca

SEQ ID NO: 705070 - RNA, 19 nt, Artificial Sequence
  Description of Artificial Sequence: Synthetic oligonucleotide
  Sense strand starting at position 3137 of SEQ ID NO: 586268
auagguuuacaguagagca

SEQ ID NO: 705071 - RNA, 19 nt, Artificial Sequence
  Description of Artificial Sequence: Synthetic oligonucleotide
  Antisense strand to SEQ ID NO: 705070
ugcucuacuguaaaccuau

SEQ ID NO: 705072 - RNA, 19 nt, Artificial Sequence
  Description of Artificial Sequence: Synthetic oligonucleotide
  Sense strand starting at position 3217 of SEQ ID NO: 586268
uucuuuauugaacgaguga

SEQ ID NO: 705073 - RNA, 19 nt, Artificial Sequence
  Description of Artificial Sequence: Synthetic oligonucleotide
  Antisense strand to SEQ ID NO: 705072
ucacucguucaauaaagaa

SEQ ID NO: 705074 - RNA, 19 nt, Artificial Sequence
  Description of Artificial Sequence: Synthetic oligonucleotide
  Sense strand starting at position 3218 of SEQ ID NO: 586268
ucuuuauugaacgagugaa

SEQ ID NO: 705075 - RNA, 19 nt, Artificial Sequence
  Description of Artificial Sequence: Synthetic oligonucleotide
  Antisense strand to SEQ ID NO: 705074
uucacucguucaauaaaga

SEQ ID NO: 705076 - RNA, 19 nt, Artificial Sequence
  Description of Artificial Sequence: Synthetic oligonucleotide
  Sense strand starting at position 3324 of SEQ ID NO: 586268
guguuaugugcuuucaugu

SEQ ID NO: 705077 - RNA, 19 nt, Artificial Sequence
  Description of Artificial Sequence: Synthetic oligonucleotide
  Antisense strand to SEQ ID NO: 705076
acaugaaagcacauaacac

SEQ ID NO: 705078 - RNA, 19 nt, Artificial Sequence
  Description of Artificial Sequence: Synthetic oligonucleotide
  Sense strand starting at position 3382 of SEQ ID NO: 586268
ccaauacaacauuguguga

SEQ ID NO: 705079 - RNA, 19 nt, Artificial Sequence
  Description of Artificial Sequence: Synthetic oligonucleotide
  Antisense strand to SEQ ID NO: 705078
ucacacaauguuguauugg

SEQ ID NO: 705080 - RNA, 19 nt, Artificial Sequence
  Description of Artificial Sequence: Synthetic oligonucleotide
  Sense strand starting at position 3927 of SEQ ID NO: 586268
uugaaccuuucuguuuaga

SEQ ID NO: 705081 - RNA, 19 nt, Artificial Sequence
  Description of Artificial Sequence: Synthetic oligonucleotide
  Antisense strand to SEQ ID NO: 705080
ucuaaacagaaagguucaa

SEQ ID NO: 705082 - RNA, 19 nt, Artificial Sequence
  Description of Artificial Sequence: Synthetic oligonucleotide
  Sense strand starting at position 37 of SEQ ID NO: 586269
aaagaaacaguuuguguca

SEQ ID NO: 705083 - RNA, 19 nt, Artificial Sequence
  Description of Artificial Sequence: Synthetic oligonucleotide
  Antisense strand to SEQ ID NO: 705082
ugacacaaacuguuucuuu

SEQ ID NO: 705084 - RNA, 19 nt, Artificial Sequence
  Description of Artificial Sequence: Synthetic oligonucleotide
  Sense strand starting at position 131 of SEQ ID NO: 586269
cuugcaaaccuuugugauc

SEQ ID NO: 705085 - RNA, 19 nt, Artificial Sequence
  Description of Artificial Sequence: Synthetic oligonucleotide
  Antisense strand to SEQ ID NO: 705084
gaucacaaagguuugcaag

SEQ ID NO: 705086 - RNA, 19 nt, Artificial Sequence
  Description of Artificial Sequence: Synthetic oligonucleotide
  Sense strand starting at position 132 of SEQ ID NO: 586269
uugcaaaccuuugugaucu

SEQ ID NO: 705087 - RNA, 19 nt, Artificial Sequence
  Description of Artificial Sequence: Synthetic oligonucleotide
  Antisense strand to SEQ ID NO: 705086
agaucacaaagguuugcaa

SEQ ID NO: 705088 - RNA, 19 nt, Artificial Sequence
  Description of Artificial Sequence: Synthetic oligonucleotide
  Sense strand starting at position 200 of SEQ ID NO: 586269
gaaauuggguucuuccuaa

SEQ ID NO: 705089 - RNA, 19 nt, Artificial Sequence
  Description of Artificial Sequence: Synthetic oligonucleotide
  Antisense strand to SEQ ID NO: 705088
uuaggaagaacccaauuuc

SEQ ID NO: 705090 - RNA, 19 nt, Artificial Sequence
  Description of Artificial Sequence: Synthetic oligonucleotide
  Sense strand starting at position 260 of SEQ ID NO: 586269
aaaugauuguggcccuaaa

SEQ ID NO: 705091 - RNA, 19 nt, Artificial Sequence
  Description of Artificial Sequence: Synthetic oligonucleotide
  Antisense strand to SEQ ID NO: 705090
uuuagggccacaaucauuu

SEQ ID NO: 705092 - RNA, 19 nt, Artificial Sequence
  Description of Artificial Sequence: Synthetic oligonucleotide
  Sense strand starting at position 368 of SEQ ID NO: 586269
gcccucugcugaguugaaa

SEQ ID NO: 705093 - RNA, 19 nt, Artificial Sequence
  Description of Artificial Sequence: Synthetic oligonucleotide
  Antisense strand to SEQ ID NO: 705092
uuucaacucagcagagggc

SEQ ID NO: 705094 - RNA, 19 nt, Artificial Sequence
  Description of Artificial Sequence: Synthetic oligonucleotide
  Sense strand starting at position 402 of SEQ ID NO: 586269
agggcucaauauuaggaaa

SEQ ID NO: 705095 - RNA, 19 nt, Artificial Sequence
  Description of Artificial Sequence: Synthetic oligonucleotide
  Antisense strand to SEQ ID NO: 705094
uuuccuaauauugagcccu

SEQ ID NO: 705096 - RNA, 19 nt, Artificial Sequence
  Description of Artificial Sequence: Synthetic oligonucleotide
  Sense strand starting at position 436 of SEQ ID NO: 586269
aucuuauuagcagaucgaa

SEQ ID NO: 705097 - RNA, 19 nt, Artificial Sequence
  Description of Artificial Sequence: Synthetic oligonucleotide
  Antisense strand to SEQ ID NO: 705096
uucgaucugcuaauaagau

SEQ ID NO: 705098 - RNA, 19 nt, Artificial Sequence
  Description of Artificial Sequence: Synthetic oligonucleotide
  Sense strand starting at position 734 of SEQ ID NO: 586269
aggccuggcaguuagauaa

SEQ ID NO: 705099 - RNA, 19 nt, Artificial Sequence
  Description of Artificial Sequence: Synthetic oligonucleotide
  Antisense strand to SEQ ID NO: 705098
uuaucuaacugccaggccu

SEQ ID NO: 705100 - RNA, 19 nt, Artificial Sequence
  Description of Artificial Sequence: Synthetic oligonucleotide
  Sense strand starting at position 989 of SEQ ID NO: 586269
ccaaaucuauaugaaggaa

SEQ ID NO: 705101 - RNA, 19 nt, Artificial Sequence
  Description of Artificial Sequence: Synthetic oligonucleotide
  Antisense strand to SEQ ID NO: 705100
uuccuucauauagauuugg

SEQ ID NO: 705102 - RNA, 19 nt, Artificial Sequence
  Description of Artificial Sequence: Synthetic oligonucleotide
  Sense strand starting at position 1123 of SEQ ID NO: 586269
uuuacuauguacucagaca

SEQ ID NO: 705103 - RNA, 19 nt, Artificial Sequence
  Description of Artificial Sequence: Synthetic oligonucleotide
  Antisense strand to SEQ ID NO: 705102
ugucugaguacauaguaaa

SEQ ID NO: 705104 - RNA, 19 nt, Artificial Sequence
  Description of Artificial Sequence: Synthetic oligonucleotide
  Sense strand starting at position 1318 of SEQ ID NO: 586269
ucuugaugcccuugaauga

SEQ ID NO: 705105 - RNA, 19 nt, Artificial Sequence
  Description of Artificial Sequence: Synthetic oligonucleotide
  Antisense strand to SEQ ID NO: 705104
ucauucaagggcaucaaga

SEQ ID NO: 705106 - RNA, 19 nt, Artificial Sequence
  Description of Artificial Sequence: Synthetic oligonucleotide
  Sense strand starting at position 1351 of SEQ ID NO: 586269
aaugaucacuagcuugagu

SEQ ID NO: 705107 - RNA, 19 nt, Artificial Sequence
  Description of Artificial Sequence: Synthetic oligonucleotide
  Antisense strand to SEQ ID NO: 705106
acucaagcuagugaucauu

SEQ ID NO: 705108 - RNA, 19 nt, Artificial Sequence
  Description of Artificial Sequence: Synthetic oligonucleotide
  Sense strand starting at position 1378 of SEQ ID NO: 586269
cuucuaucagaagguguuu

SEQ ID NO: 705109 - RNA, 19 nt, Artificial Sequence
  Description of Artificial Sequence: Synthetic oligonucleotide
  Antisense strand to SEQ ID NO: 705108
aaacaccuucugauagaag

SEQ ID NO: 705110 - RNA, 19 nt, Artificial Sequence
  Description of Artificial Sequence: Synthetic oligonucleotide
  Sense strand starting at position 1489 of SEQ ID NO: 586269
gggccagaaucuccacaaa

SEQ ID NO: 705111 - RNA, 19 nt, Artificial Sequence
  Description of Artificial Sequence: Synthetic oligonucleotide
  Antisense strand to SEQ ID NO: 705110
uuuguggagauucuggccc

SEQ ID NO: 705112 - RNA, 19 nt, Artificial Sequence
  Description of Artificial Sequence: Synthetic oligonucleotide
  Sense strand starting at position 1524 of SEQ ID NO: 586269
ucacaaagcucugcuauga

SEQ ID NO: 705113 - RNA, 19 nt, Artificial Sequence
  Description of Artificial Sequence: Synthetic oligonucleotide
  Antisense strand to SEQ ID NO: 705112
ucauagcagagcuuuguga

SEQ ID NO: 705114 - RNA, 19 nt, Artificial Sequence
  Description of Artificial Sequence: Synthetic oligonucleotide
  Sense strand starting at position 1630 of SEQ ID NO: 586269
agauuagauuaggcucuuu

SEQ ID NO: 705115 - RNA, 19 nt, Artificial Sequence
  Description of Artificial Sequence: Synthetic oligonucleotide
  Antisense strand to SEQ ID NO: 705114
aaagagccuaaucuaaucu

SEQ ID NO: 705116 - RNA, 19 nt, Artificial Sequence
  Description of Artificial Sequence: Synthetic oligonucleotide
  Sense strand starting at position 1635 of SEQ ID NO: 586269
agauuaggcucuuuaagca

SEQ ID NO: 705117 - RNA, 19 nt, Artificial Sequence
  Description of Artificial Sequence: Synthetic oligonucleotide
  Antisense strand to SEQ ID NO: 705116
ugcuuaaagagccuaaucu

SEQ ID NO: 705118 - RNA, 19 nt, Artificial Sequence
  Description of Artificial Sequence: Synthetic oligonucleotide
  Sense strand starting at position 1791 of SEQ ID NO: 586269
ugguauuaugcagaccaag

SEQ ID NO: 705119 - RNA, 19 nt, Artificial Sequence
  Description of Artificial Sequence: Synthetic oligonucleotide
  Antisense strand to SEQ ID NO: 705118
cuuggucugcauaauacca

SEQ ID NO: 705120 - RNA, 19 nt, Artificial Sequence
  Description of Artificial Sequence: Synthetic oligonucleotide
  Sense strand starting at position 1836 of SEQ ID NO: 586269
uugaguuccuaccugacau

SEQ ID NO: 705121 - RNA, 19 nt, Artificial Sequence
  Description of Artificial Sequence: Synthetic oligonucleotide
  Antisense strand to SEQ ID NO: 705120
augucagguaggaacucaa

SEQ ID NO: 705122 - RNA, 19 nt, Artificial Sequence
  Description of Artificial Sequence: Synthetic oligonucleotide
  Sense strand starting at position 2002 of SEQ ID NO: 586269
guugccaugcaagaaauca

SEQ ID NO: 705123 - RNA, 19 nt, Artificial Sequence
  Description of Artificial Sequence: Synthetic oligonucleotide
  Antisense strand to SEQ ID NO: 705122
ugauuucuugcauggcaac

SEQ ID NO: 705124 - RNA, 19 nt, Artificial Sequence
  Description of Artificial Sequence: Synthetic oligonucleotide
  Sense strand starting at position 2064 of SEQ ID NO: 586269
aggacuguuuguucuuuga

SEQ ID NO: 705125 - RNA, 19 nt, Artificial Sequence
  Description of Artificial Sequence: Synthetic oligonucleotide
  Antisense strand to SEQ ID NO: 705124
ucaaagaacaaacaguccu

SEQ ID NO: 705126 - RNA, 19 nt, Artificial Sequence
  Description of Artificial Sequence: Synthetic oligonucleotide
  Sense strand starting at position 2295 of SEQ ID NO: 586269
uguggucauuuccagaaac

SEQ ID NO: 705127 - RNA, 19 nt, Artificial Sequence
  Description of Artificial Sequence: Synthetic oligonucleotide
  Antisense strand to SEQ ID NO: 705126
guuucuggaaaugaccaca

SEQ ID NO: 705128 - RNA, 19 nt, Artificial Sequence
  Description of Artificial Sequence: Synthetic oligonucleotide
  Sense strand starting at position 2436 of SEQ ID NO: 586269
gcugacuugagguggaaga

SEQ ID NO: 705129 - RNA, 19 nt, Artificial Sequence
  Description of Artificial Sequence: Synthetic oligonucleotide
  Antisense strand to SEQ ID NO: 705128
ucuuccaccucaagucagc

SEQ ID NO: 705130 - RNA, 19 nt, Artificial Sequence
  Description of Artificial Sequence: Synthetic oligonucleotide
  Sense strand starting at position 2497 of SEQ ID NO: 586269
cgaagaaggcugugaagga

SEQ ID NO: 705131 - RNA, 19 nt, Artificial Sequence
  Description of Artificial Sequence: Synthetic oligonucleotide
  Antisense strand to SEQ ID NO: 705130
uccuucacagccuucuucg

SEQ ID NO: 705132 - RNA, 19 nt, Artificial Sequence
  Description of Artificial Sequence: Synthetic oligonucleotide
  Sense strand starting at position 2613 of SEQ ID NO: 586269
caagauguggcaugugaac

SEQ ID NO: 705133 - RNA, 19 nt, Artificial Sequence
  Description of Artificial Sequence: Synthetic oligonucleotide
  Antisense strand to SEQ ID NO: 705132
guucacaugccacaucuug

SEQ ID NO: 705134 - RNA, 19 nt, Artificial Sequence
  Description of Artificial Sequence: Synthetic oligonucleotide
  Sense strand starting at position 2615 of SEQ ID NO: 586269
agauguggcaugugaacaa

SEQ ID NO: 705135 - RNA, 19 nt, Artificial Sequence
  Description of Artificial Sequence: Synthetic oligonucleotide
  Antisense strand to SEQ ID NO: 705134
uuguucacaugccacaucu

SEQ ID NO: 705136 - RNA, 19 nt, Artificial Sequence
  Description of Artificial Sequence: Synthetic oligonucleotide
  Sense strand starting at position 2647 of SEQ ID NO: 586269
ucuagucuccacugagaag

SEQ ID NO: 705137 - RNA, 19 nt, Artificial Sequence
  Description of Artificial Sequence: Synthetic oligonucleotide
  Antisense strand to SEQ ID NO: 705136
cuucucaguggagacuaga

SEQ ID NO: 705138 - RNA, 19 nt, Artificial Sequence
  Description of Artificial Sequence: Synthetic oligonucleotide
  Sense strand starting at position 2829 of SEQ ID NO: 586269
gcaggaaugcagugaagaa

SEQ ID NO: 705139 - RNA, 19 nt, Artificial Sequence
  Description of Artificial Sequence: Synthetic oligonucleotide
  Antisense strand to SEQ ID NO: 705138
uucuucacugcauuccugc

SEQ ID NO: 705140 - RNA, 19 nt, Artificial Sequence
  Description of Artificial Sequence: Synthetic oligonucleotide
  Sense strand starting at position 2975 of SEQ ID NO: 586269
gggagacaguguuauggaa

SEQ ID NO: 705141 - RNA, 19 nt, Artificial Sequence
  Description of Artificial Sequence: Synthetic oligonucleotide
  Antisense strand to SEQ ID NO: 705140
uuccauaacacugucuccc

SEQ ID NO: 705142 - RNA, 19 nt, Artificial Sequence
  Description of Artificial Sequence: Synthetic oligonucleotide
  Sense strand starting at position 3068 of SEQ ID NO: 586269
ggcauuuauuugcaagggu

SEQ ID NO: 705143 - RNA, 19 nt, Artificial Sequence
  Description of Artificial Sequence: Synthetic oligonucleotide
  Antisense strand to SEQ ID NO: 705142
acccuugcaaauaaaugcc

SEQ ID NO: 705144 - RNA, 19 nt, Artificial Sequence
  Description of Artificial Sequence: Synthetic oligonucleotide
  Sense strand starting at position 3432 of SEQ ID NO: 586269
uuguguaaagcaugaagga

SEQ ID NO: 705145 - RNA, 19 nt, Artificial Sequence
  Description of Artificial Sequence: Synthetic oligonucleotide
  Antisense strand to SEQ ID NO: 705144
uccuucaugcuuuacacaa

SEQ ID NO: 705146 - RNA, 19 nt, Artificial Sequence
  Description of Artificial Sequence: Synthetic oligonucleotide
  Sense strand starting at position 3441 of SEQ ID NO: 586269
gcaugaaggaaagguagua

SEQ ID NO: 705147 - RNA, 19 nt, Artificial Sequence
  Description of Artificial Sequence: Synthetic oligonucleotide
  Antisense strand to SEQ ID NO: 705146
uacuaccuuuccuucaugc

SEQ ID NO: 705148 - RNA, 19 nt, Artificial Sequence
  Description of Artificial Sequence: Synthetic oligonucleotide
  Sense strand starting at position 3446 of SEQ ID NO: 586269
aaggaaagguaguaagauu

SEQ ID NO: 705149 - RNA, 19 nt, Artificial Sequence
  Description of Artificial Sequence: Synthetic oligonucleotide
  Antisense strand to SEQ ID NO: 705148
aaucuuacuaccuuuccuu

SEQ ID NO: 705150 - RNA, 19 nt, Artificial Sequence
  Description of Artificial Sequence: Synthetic oligonucleotide
  Sense strand starting at position 3464 of SEQ ID NO: 586269
uaggaaagcuagucgauag

SEQ ID NO: 705151 - RNA, 19 nt, Artificial Sequence
  Description of Artificial Sequence: Synthetic oligonucleotide
  Antisense strand to SEQ ID NO: 705150
cuaucgacuagcuuuccua

SEQ ID NO: 705152 - RNA, 19 nt, Artificial Sequence
  Description of Artificial Sequence: Synthetic oligonucleotide
  Sense strand starting at position 3489 of SEQ ID NO: 586269
guucgaagcacauagauag

SEQ ID NO: 705153 - RNA, 19 nt, Artificial Sequence
  Description of Artificial Sequence: Synthetic oligonucleotide
  Antisense strand to SEQ ID NO: 705152
cuaucuaugugcuucgaac

SEQ ID NO: 705154 - RNA, 19 nt, Artificial Sequence
  Description of Artificial Sequence: Synthetic oligonucleotide
  Sense strand starting at position 3540 of SEQ ID NO: 586269
cugugucaccuuuggcaau

SEQ ID NO: 705155 - RNA, 19 nt, Artificial Sequence
  Description of Artificial Sequence: Synthetic oligonucleotide
  Antisense strand to SEQ ID NO: 705154
auugccaaaggugacacag

SEQ ID NO: 705156 - RNA, 19 nt, Artificial Sequence
  Description of Artificial Sequence: Synthetic oligonucleotide
  Sense strand starting at position 3542 of SEQ ID NO: 586269
gugucaccuuuggcaauuu

SEQ ID NO: 705157 - RNA, 19 nt, Artificial Sequence
  Description of Artificial Sequence: Synthetic oligonucleotide
  Antisense strand to SEQ ID NO: 705156
aaauugccaaaggugacac

SEQ ID NO: 705158 - RNA, 19 nt, Artificial Sequence
  Description of Artificial Sequence: Synthetic oligonucleotide
  Sense strand starting at position 3543 of SEQ ID NO: 586269
ugucaccuuuggcaauuua

SEQ ID NO: 705159 - RNA, 19 nt, Artificial Sequence
  Description of Artificial Sequence: Synthetic oligonucleotide
  Antisense strand to SEQ ID NO: 705158
uaaauugccaaaggugaca

SEQ ID NO: 705160 - RNA, 19 nt, Artificial Sequence
  Description of Artificial Sequence: Synthetic oligonucleotide
  Sense strand starting at position 3728 of SEQ ID NO: 586269
acaggaucucacugucacu

SEQ ID NO: 705161 - RNA, 19 nt, Artificial Sequence
  Description of Artificial Sequence: Synthetic oligonucleotide
  Antisense strand to SEQ ID NO: 705160
agugacagugagauccugu

SEQ ID NO: 705162 - RNA, 19 nt, Artificial Sequence
  Description of Artificial Sequence: Synthetic oligonucleotide
  Sense strand starting at position 50 of SEQ ID NO: 586270
acaucaguaccugauucuu

SEQ ID NO: 705163 - RNA, 19 nt, Artificial Sequence
  Description of Artificial Sequence: Synthetic oligonucleotide
  Antisense strand to SEQ ID NO: 705162
aagaaucagguacugaugu

SEQ ID NO: 705164 - RNA, 19 nt, Artificial Sequence
  Description of Artificial Sequence: Synthetic oligonucleotide
  Sense strand starting at position 52 of SEQ ID NO: 586270
aucaguaccugauucuuau

SEQ ID NO: 705165 - RNA, 19 nt, Artificial Sequence
  Description of Artificial Sequence: Synthetic oligonucleotide
  Antisense strand to SEQ ID NO: 705164
auaagaaucagguacugau

SEQ ID NO: 705166 - RNA, 19 nt, Artificial Sequence
  Description of Artificial Sequence: Synthetic oligonucleotide
  Sense strand starting at position 212 of SEQ ID NO: 586270
agagaaaccuguuaacaca

SEQ ID NO: 705167 - RNA, 19 nt, Artificial Sequence
  Description of Artificial Sequence: Synthetic oligonucleotide
  Antisense strand to SEQ ID NO: 705166
uguguuaacagguuucucu

SEQ ID NO: 705168 - RNA, 19 nt, Artificial Sequence
  Description of Artificial Sequence: Synthetic oligonucleotide
  Sense strand starting at position 234 of SEQ ID NO: 586270
augcaacaagucugaaacu

SEQ ID NO: 705169 - RNA, 19 nt, Artificial Sequence
  Description of Artificial Sequence: Synthetic oligonucleotide
  Antisense strand to SEQ ID NO: 705168
aguuucagacuuguugcau

SEQ ID NO: 705170 - RNA, 19 nt, Artificial Sequence
  Description of Artificial Sequence: Synthetic oligonucleotide
  Sense strand starting at position 235 of SEQ ID NO: 586270
ugcaacaagucugaaacuu

SEQ ID NO: 705171 - RNA, 19 nt, Artificial Sequence
  Description of Artificial Sequence: Synthetic oligonucleotide
  Antisense strand to SEQ ID NO: 705170
aaguuucagacuuguugca

SEQ ID NO: 705172 - RNA, 19 nt, Artificial Sequence
  Description of Artificial Sequence: Synthetic oligonucleotide
  Sense strand starting at position 2886 of SEQ ID NO: 586270
gggugggacuccgugugaa

SEQ ID NO: 705173 - RNA, 19 nt, Artificial Sequence
  Description of Artificial Sequence: Synthetic oligonucleotide
  Antisense strand to SEQ ID NO: 705172
uucacacggagucccaccc

SEQ ID NO: 705174 - RNA, 19 nt, Artificial Sequence
  Description of Artificial Sequence: Synthetic oligonucleotide
  Sense strand starting at position 2889 of SEQ ID NO: 586270
ugggacuccgugugaagaa

SEQ ID NO: 705175 - RNA, 19 nt, Artificial Sequence
  Description of Artificial Sequence: Synthetic oligonucleotide
  Antisense strand to SEQ ID NO: 705174
uucuucacacggaguccca

SEQ ID NO: 705176 - RNA, 19 nt, Artificial Sequence
  Description of Artificial Sequence: Synthetic oligonucleotide
  Sense strand starting at position 2896 of SEQ ID NO: 586270
ccgugugaagaaggguuaa

SEQ ID NO: 705177 - RNA, 19 nt, Artificial Sequence
  Description of Artificial Sequence: Synthetic oligonucleotide
  Antisense strand to SEQ ID NO: 705176
uuaacccuucuucacacgg

SEQ ID NO: 705178 - RNA, 19 nt, Artificial Sequence
  Description of Artificial Sequence: Synthetic oligonucleotide
  Sense strand starting at position 2942 of SEQ ID NO: 586270
acugcuguugcuugagacu

SEQ ID NO: 705179 - RNA, 19 nt, Artificial Sequence
  Description of Artificial Sequence: Synthetic oligonucleotide
  Antisense strand to SEQ ID NO: 705178
agucucaagcaacagcagu

SEQ ID NO: 705180 - RNA, 19 nt, Artificial Sequence
  Description of Artificial Sequence: Synthetic oligonucleotide
  Sense strand starting at position 3070 of SEQ ID NO: 586270
gagaacaaguguuucugga

SEQ ID NO: 705181 - RNA, 19 nt, Artificial Sequence
  Description of Artificial Sequence: Synthetic oligonucleotide
  Antisense strand to SEQ ID NO: 705180
uccagaaacacuuguucuc

SEQ ID NO: 705182 - RNA, 19 nt, Artificial Sequence
  Description of Artificial Sequence: Synthetic oligonucleotide
  Sense strand starting at position 3072 of SEQ ID NO: 586270
gaacaaguguuucuggaga

SEQ ID NO: 705183 - RNA, 19 nt, Artificial Sequence
  Description of Artificial Sequence: Synthetic oligonucleotide
  Antisense strand to SEQ ID NO: 705182
ucuccagaaacacuuguuc

SEQ ID NO: 705184 - RNA, 19 nt, Artificial Sequence
  Description of Artificial Sequence: Synthetic oligonucleotide
  Sense strand starting at position 3074 of SEQ ID NO: 586270
acaaguguuucuggagacu

SEQ ID NO: 705185 - RNA, 19 nt, Artificial Sequence
  Description of Artificial Sequence: Synthetic oligonucleotide
  Antisense strand to SEQ ID NO: 705184
agucuccagaaacacuugu

SEQ ID NO: 705186 - RNA, 19 nt, Artificial Sequence
  Description of Artificial Sequence: Synthetic oligonucleotide
  Sense strand starting at position 3086 of SEQ ID NO: 586270
ggagacugcgagggaaaua

SEQ ID NO: 705187 - RNA, 19 nt, Artificial Sequence
  Description of Artificial Sequence: Synthetic oligonucleotide
  Antisense strand to SEQ ID NO: 705186
uauuucccucgcagucucc

SEQ ID NO: 705188 - RNA, 19 nt, Artificial Sequence
  Description of Artificial Sequence: Synthetic oligonucleotide
  Sense strand starting at position 3097 of SEQ ID NO: 586270
gggaaauaaugcuguuggu

SEQ ID NO: 705189 - RNA, 19 nt, Artificial Sequence
  Description of Artificial Sequence: Synthetic oligonucleotide
  Antisense strand to SEQ ID NO: 705188
accaacagcauuauuuccc

SEQ ID NO: 705190 - RNA, 19 nt, Artificial Sequence
  Description of Artificial Sequence: Synthetic oligonucleotide
  Sense strand starting at position 3213 of SEQ ID NO: 586270
uggagauggcguugguuua

SEQ ID NO: 705191 - RNA, 19 nt, Artificial Sequence
  Description of Artificial Sequence: Synthetic oligonucleotide
  Antisense strand to SEQ ID NO: 705190
uaaaccaacgccaucucca

SEQ ID NO: 705192 - RNA, 19 nt, Artificial Sequence
  Description of Artificial Sequence: Synthetic oligonucleotide
  Sense strand starting at position 3214 of SEQ ID NO: 586270
ggagauggcguugguuuaa

SEQ ID NO: 705193 - RNA, 19 nt, Artificial Sequence
  Description of Artificial Sequence: Synthetic oligonucleotide
  Antisense strand to SEQ ID NO: 705192
uuaaaccaacgccaucucc

SEQ ID NO: 705194 - RNA, 19 nt, Artificial Sequence
  Description of Artificial Sequence: Synthetic oligonucleotide
  Sense strand starting at position 3223 of SEQ ID NO: 586270
guugguuuaacuugucuca

SEQ ID NO: 705195 - RNA, 19 nt, Artificial Sequence
  Description of Artificial Sequence: Synthetic oligonucleotide
  Antisense strand to SEQ ID NO: 705194
ugagacaaguuaaaccaac

SEQ ID NO: 705196 - RNA, 19 nt, Artificial Sequence
  Description of Artificial Sequence: Synthetic oligonucleotide
  Sense strand starting at position 3226 of SEQ ID NO: 586270
gguuuaacuugucucacgu

SEQ ID NO: 705197 - RNA, 19 nt, Artificial Sequence
  Description of Artificial Sequence: Synthetic oligonucleotide
  Antisense strand to SEQ ID NO: 705196
acgugagacaaguuaaacc

SEQ ID NO: 705198 - RNA, 19 nt, Artificial Sequence
  Description of Artificial Sequence: Synthetic oligonucleotide
  Sense strand starting at position 3397 of SEQ ID NO: 586270
agcucaagcuucgguaaca

SEQ ID NO: 705199 - RNA, 19 nt, Artificial Sequence
  Description of Artificial Sequence: Synthetic oligonucleotide
  Antisense strand to SEQ ID NO: 705198
uguuaccgaagcuugagcu

SEQ ID NO: 705200 - RNA, 19 nt, Artificial Sequence
  Description of Artificial Sequence: Synthetic oligonucleotide
  Sense strand starting at position 3498 of SEQ ID NO: 586270
uccaaauucucaggaggcu

SEQ ID NO: 705201 - RNA, 19 nt, Artificial Sequence
  Description of Artificial Sequence: Synthetic oligonucleotide
  Antisense strand to SEQ ID NO: 705200
agccuccugagaauuugga

SEQ ID NO: 705202 - RNA, 19 nt, Artificial Sequence
  Description of Artificial Sequence: Synthetic oligonucleotide
  Sense strand starting at position 3525 of SEQ ID NO: 586270
aaacaucuugugcgaauga

SEQ ID NO: 705203 - RNA, 19 nt, Artificial Sequence
  Description of Artificial Sequence: Synthetic oligonucleotide
  Antisense strand to SEQ ID NO: 705202
ucauucgcacaagauguuu

SEQ ID NO: 705204 - RNA, 19 nt, Artificial Sequence
  Description of Artificial Sequence: Synthetic oligonucleotide
  Sense strand starting at position 3611 of SEQ ID NO: 586270
gccauauagugaccucaca

SEQ ID NO: 705205 - RNA, 19 nt, Artificial Sequence
  Description of Artificial Sequence: Synthetic oligonucleotide
  Antisense strand to SEQ ID NO: 705204
ugugaggucacuauauggc

SEQ ID NO: 705206 - RNA, 19 nt, Artificial Sequence
  Description of Artificial Sequence: Synthetic oligonucleotide
  Sense strand starting at position 3665 of SEQ ID NO: 586270
agacuaagcacucgggaua

SEQ ID NO: 705207 - RNA, 19 nt, Artificial Sequence
  Description of Artificial Sequence: Synthetic oligonucleotide
  Antisense strand to SEQ ID NO: 705206
uaucccgagugcuuagucu

SEQ ID NO: 705208 - RNA, 19 nt, Artificial Sequence
  Description of Artificial Sequence: Synthetic oligonucleotide
  Sense strand starting at position 3666 of SEQ ID NO: 586270
gacuaagcacucgggauaa

SEQ ID NO: 705209 - RNA, 19 nt, Artificial Sequence
  Description of Artificial Sequence: Synthetic oligonucleotide
  Antisense strand to SEQ ID NO: 705208
uuaucccgagugcuuaguc

SEQ ID NO: 705210 - RNA, 19 nt, Artificial Sequence
  Description of Artificial Sequence: Synthetic oligonucleotide
  Sense strand starting at position 3668 of SEQ ID NO: 586270
cuaagcacucgggauaauu

SEQ ID NO: 705211 - RNA, 19 nt, Artificial Sequence
  Description of Artificial Sequence: Synthetic oligonucleotide
  Antisense strand to SEQ ID NO: 705210
aauuaucccgagugcuuag

SEQ ID NO: 705212 - RNA, 19 nt, Artificial Sequence
  Description of Artificial Sequence: Synthetic oligonucleotide
  Sense strand starting at position 3676 of SEQ ID NO: 586270
ucgggauaauuagauuaaa

SEQ ID NO: 705213 - RNA, 19 nt, Artificial Sequence
  Description of Artificial Sequence: Synthetic oligonucleotide
  Antisense strand to SEQ ID NO: 705212
uuuaaucuaauuaucccga

SEQ ID NO: 705214 - RNA, 19 nt, Artificial Sequence
  Description of Artificial Sequence: Synthetic oligonucleotide
  Sense strand starting at position 3810 of SEQ ID NO: 586270
ucaagaguucgaggcugga

SEQ ID NO: 705215 - RNA, 19 nt, Artificial Sequence
  Description of Artificial Sequence: Synthetic oligonucleotide
  Antisense strand to SEQ ID NO: 705214
uccagccucgaacucuuga

SEQ ID NO: 705216 - RNA, 19 nt, Artificial Sequence
  Description of Artificial Sequence: Synthetic oligonucleotide
  Sense strand starting at position 3879 of SEQ ID NO: 586270
aggcccugccucuaauaaa

SEQ ID NO: 705217 - RNA, 19 nt, Artificial Sequence
  Description of Artificial Sequence: Synthetic oligonucleotide
  Antisense strand to SEQ ID NO: 705216
uuuauuagaggcagggccu

SEQ ID NO: 705218 - RNA, 19 nt, Artificial Sequence
  Description of Artificial Sequence: Synthetic oligonucleotide
  Sense strand starting at position 3963 of SEQ ID NO: 586270
gaucaucaguugguuuagu

SEQ ID NO: 705219 - RNA, 19 nt, Artificial Sequence
  Description of Artificial Sequence: Synthetic oligonucleotide
  Antisense strand to SEQ ID NO: 705218
acuaaaccaacugaugauc

SEQ ID NO: 705220 - RNA, 19 nt, Artificial Sequence
  Description of Artificial Sequence: Synthetic oligonucleotide
  Sense strand starting at position 3968 of SEQ ID NO: 586270
ucaguugguuuaguucuua

SEQ ID NO: 705221 - RNA, 19 nt, Artificial Sequence
  Description of Artificial Sequence: Synthetic oligonucleotide
  Antisense strand to SEQ ID NO: 705220
uaagaacuaaaccaacuga

SEQ ID NO: 705222 - RNA, 19 nt, Artificial Sequence
  Description of Artificial Sequence: Synthetic oligonucleotide
  Sense strand starting at position 3972 of SEQ ID NO: 586270
uugguuuaguucuuaaaca

SEQ ID NO: 705223 - RNA, 19 nt, Artificial Sequence
  Description of Artificial Sequence: Synthetic oligonucleotide
  Antisense strand to SEQ ID NO: 705222
uguuuaagaacuaaaccaa

SEQ ID NO: 705224 - RNA, 19 nt, Artificial Sequence
  Description of Artificial Sequence: Synthetic oligonucleotide
  Sense strand starting at position 3973 of SEQ ID NO: 586270
ugguuuaguucuuaaacac

SEQ ID NO: 705225 - RNA, 19 nt, Artificial Sequence
  Description of Artificial Sequence: Synthetic oligonucleotide
  Antisense strand to SEQ ID NO: 705224
guguuuaagaacuaaacca

SEQ ID NO: 705226 - RNA, 19 nt, Artificial Sequence
  Description of Artificial Sequence: Synthetic oligonucleotide
  Sense strand starting at position 120 of SEQ ID NO: 586271
cuugguuucuuacugagac

SEQ ID NO: 705227 - RNA, 19 nt, Artificial Sequence
  Description of Artificial Sequence: Synthetic oligonucleotide
  Antisense strand to SEQ ID NO: 705226
gucucaguaagaaaccaag

SEQ ID NO: 705228 - RNA, 19 nt, Artificial Sequence
  Description of Artificial Sequence: Synthetic oligonucleotide
  Sense strand starting at position 179 of SEQ ID NO: 586271
ccagcagaaucauuagcau

SEQ ID NO: 705229 - RNA, 19 nt, Artificial Sequence
  Description of Artificial Sequence: Synthetic oligonucleotide
  Antisense strand to SEQ ID NO: 705228
augcuaaugauucugcugg

SEQ ID NO: 705230 - RNA, 19 nt, Artificial Sequence
  Description of Artificial Sequence: Synthetic oligonucleotide
  Sense strand starting at position 182 of SEQ ID NO: 586271
gcagaaucauuagcauuag

SEQ ID NO: 705231 - RNA, 19 nt, Artificial Sequence
  Description of Artificial Sequence: Synthetic oligonucleotide
  Antisense strand to SEQ ID NO: 705230
cuaaugcuaaugauucugc

SEQ ID NO: 705232 - RNA, 19 nt, Artificial Sequence
  Description of Artificial Sequence: Synthetic oligonucleotide
  Sense strand starting at position 264 of SEQ ID NO: 586271
gguuugggucaggguugaa

SEQ ID NO: 705233 - RNA, 19 nt, Artificial Sequence
  Description of Artificial Sequence: Synthetic oligonucleotide
  Antisense strand to SEQ ID NO: 705232
uucaacccugacccaaacc

SEQ ID NO: 705234 - RNA, 19 nt, Artificial Sequence
  Description of Artificial Sequence: Synthetic oligonucleotide
  Sense strand starting at position 267 of SEQ ID NO: 586271
uugggucaggguugaaaca

SEQ ID NO: 705235 - RNA, 19 nt, Artificial Sequence
  Description of Artificial Sequence: Synthetic oligonucleotide
  Antisense strand to SEQ ID NO: 705234
uguuucaacccugacccaa

SEQ ID NO: 705236 - RNA, 19 nt, Artificial Sequence
  Description of Artificial Sequence: Synthetic oligonucleotide
  Sense strand starting at position 278 of SEQ ID NO: 586271
uugaaacauccucguuaau

SEQ ID NO: 705237 - RNA, 19 nt, Artificial Sequence
  Description of Artificial Sequence: Synthetic oligonucleotide
  Antisense strand to SEQ ID NO: 705236
auuaacgaggauguuucaa

SEQ ID NO: 705238 - RNA, 19 nt, Artificial Sequence
  Description of Artificial Sequence: Synthetic oligonucleotide
  Sense strand starting at position 291 of SEQ ID NO: 586271
guuaauaaugcacacgacu

SEQ ID NO: 705239 - RNA, 19 nt, Artificial Sequence
  Description of Artificial Sequence: Synthetic oligonucleotide
  Antisense strand to SEQ ID NO: 705238
agucgugugcauuauuaac

SEQ ID NO: 705240 - RNA, 19 nt, Artificial Sequence
  Description of Artificial Sequence: Synthetic oligonucleotide
  Sense strand starting at position 565 of SEQ ID NO: 586271
ugaagaaaguuugcauauc

SEQ ID NO: 705241 - RNA, 19 nt, Artificial Sequence
  Description of Artificial Sequence: Synthetic oligonucleotide
  Antisense strand to SEQ ID NO: 705240
gauaugcaaacuuucuuca

SEQ ID NO: 705242 - RNA, 19 nt, Artificial Sequence
  Description of Artificial Sequence: Synthetic oligonucleotide
  Sense strand starting at position 597 of SEQ ID NO: 586271
guggaaggauaucuguaac

SEQ ID NO: 705243 - RNA, 19 nt, Artificial Sequence
  Description of Artificial Sequence: Synthetic oligonucleotide
  Antisense strand to SEQ ID NO: 705242
guuacagauauccuuccac

SEQ ID NO: 705244 - RNA, 19 nt, Artificial Sequence
  Description of Artificial Sequence: Synthetic oligonucleotide
  Sense strand starting at position 646 of SEQ ID NO: 586271
ggaauuaaguaccuuuaug

SEQ ID NO: 705245 - RNA, 19 nt, Artificial Sequence
  Description of Artificial Sequence: Synthetic oligonucleotide
  Antisense strand to SEQ ID NO: 705244
cauaaagguacuuaauucc

SEQ ID NO: 705246 - RNA, 19 nt, Artificial Sequence
  Description of Artificial Sequence: Synthetic oligonucleotide
  Sense strand starting at position 684 of SEQ ID NO: 586271
uucguuaacauggaugaca

SEQ ID NO: 705247 - RNA, 19 nt, Artificial Sequence
  Description of Artificial Sequence: Synthetic oligonucleotide
  Antisense strand to SEQ ID NO: 705246
ugucauccauguuaacgaa

SEQ ID NO: 705248 - RNA, 19 nt, Artificial Sequence
  Description of Artificial Sequence: Synthetic oligonucleotide
  Sense strand starting at position 686 of SEQ ID NO: 586271
cguuaacauggaugacauu

SEQ ID NO: 705249 - RNA, 19 nt, Artificial Sequence
  Description of Artificial Sequence: Synthetic oligonucleotide
  Antisense strand to SEQ ID NO: 705248
aaugucauccauguuaacg

SEQ ID NO: 705250 - RNA, 19 nt, Artificial Sequence
  Description of Artificial Sequence: Synthetic oligonucleotide
  Sense strand starting at position 802 of SEQ ID NO: 586271
auuagugaaaguugugaca

SEQ ID NO: 705251 - RNA, 19 nt, Artificial Sequence
  Description of Artificial Sequence: Synthetic oligonucleotide
  Antisense strand to SEQ ID NO: 705250
ugucacaacuuucacuaau

SEQ ID NO: 705252 - RNA, 19 nt, Artificial Sequence
  Description of Artificial Sequence: Synthetic oligonucleotide
  Sense strand starting at position 928 of SEQ ID NO: 586271
gugacaugcauuuauucgu

SEQ ID NO: 705253 - RNA, 19 nt, Artificial Sequence
  Description of Artificial Sequence: Synthetic oligonucleotide
  Antisense strand to SEQ ID NO: 705252
acgaauaaaugcaugucac

SEQ ID NO: 705254 - RNA, 19 nt, Artificial Sequence
  Description of Artificial Sequence: Synthetic oligonucleotide
  Sense strand starting at position 1138 of SEQ ID NO: 586271
acccgaaguaccgaacaau

SEQ ID NO: 705255 - RNA, 19 nt, Artificial Sequence
  Description of Artificial Sequence: Synthetic oligonucleotide
  Antisense strand to SEQ ID NO: 705254
auuguucgguacuucgggu

SEQ ID NO: 705256 - RNA, 19 nt, Artificial Sequence
  Description of Artificial Sequence: Synthetic oligonucleotide
  Sense strand starting at position 1186 of SEQ ID NO: 586271
uuagguuggauacguuaaa

SEQ ID NO: 705257 - RNA, 19 nt, Artificial Sequence
  Description of Artificial Sequence: Synthetic oligonucleotide
  Antisense strand to SEQ ID NO: 705256
uuuaacguauccaaccuaa

SEQ ID NO: 705258 - RNA, 19 nt, Artificial Sequence
  Description of Artificial Sequence: Synthetic oligonucleotide
  Sense strand starting at position 2034 of SEQ ID NO: 586271
cuccuuuguaacggagaga

SEQ ID NO: 705259 - RNA, 19 nt, Artificial Sequence
  Description of Artificial Sequence: Synthetic oligonucleotide
  Antisense strand to SEQ ID NO: 705258
ucucuccguuacaaaggag

SEQ ID NO: 705260 - RNA, 19 nt, Artificial Sequence
  Description of Artificial Sequence: Synthetic oligonucleotide
  Sense strand starting at position 2171 of SEQ ID NO: 586271
aaguucucagcccagaguu

SEQ ID NO: 705261 - RNA, 19 nt, Artificial Sequence
  Description of Artificial Sequence: Synthetic oligonucleotide
  Antisense strand to SEQ ID NO: 705260
aacucugggcugagaacuu

SEQ ID NO: 705262 - RNA, 19 nt, Artificial Sequence
  Description of Artificial Sequence: Synthetic oligonucleotide
  Sense strand starting at position 2529 of SEQ ID NO: 586271
ggccgaguccaguuguuug

SEQ ID NO: 705263 - RNA, 19 nt, Artificial Sequence
  Description of Artificial Sequence: Synthetic oligonucleotide
  Antisense strand to SEQ ID NO: 705262
caaacaacuggacucggcc

SEQ ID NO: 705264 - RNA, 19 nt, Artificial Sequence
  Description of Artificial Sequence: Synthetic oligonucleotide
  Sense strand starting at position 2659 of SEQ ID NO: 586271
gauguagggugccuuauuu

SEQ ID NO: 705265 - RNA, 19 nt, Artificial Sequence
  Description of Artificial Sequence: Synthetic oligonucleotide
  Antisense strand to SEQ ID NO: 705264
aaauaaggcacccuacauc

SEQ ID NO: 705266 - RNA, 19 nt, Artificial Sequence
  Description of Artificial Sequence: Synthetic oligonucleotide
  Sense strand starting at position 2851 of SEQ ID NO: 586271
ucugaucuuggugacacau

SEQ ID NO: 705267 - RNA, 19 nt, Artificial Sequence
  Description of Artificial Sequence: Synthetic oligonucleotide
  Antisense strand to SEQ ID NO: 705266
augugucaccaagaucaga

SEQ ID NO: 705268 - RNA, 19 nt, Artificial Sequence
  Description of Artificial Sequence: Synthetic oligonucleotide
  Sense strand starting at position 2861 of SEQ ID NO: 586271
gugacacauguaggugauu

SEQ ID NO: 705269 - RNA, 19 nt, Artificial Sequence
  Description of Artificial Sequence: Synthetic oligonucleotide
  Antisense strand to SEQ ID NO: 705268
aaucaccuacaugugucac

SEQ ID NO: 705270 - RNA, 19 nt, Artificial Sequence
  Description of Artificial Sequence: Synthetic oligonucleotide
  Sense strand starting at position 2873 of SEQ ID NO: 586271
ggugauuucugauaggaau

SEQ ID NO: 705271 - RNA, 19 nt, Artificial Sequence
  Description of Artificial Sequence: Synthetic oligonucleotide
  Antisense strand to SEQ ID NO: 705270
auuccuaucagaaaucacc

SEQ ID NO: 705272 - RNA, 19 nt, Artificial Sequence
  Description of Artificial Sequence: Synthetic oligonucleotide
  Sense strand starting at position 2894 of SEQ ID NO: 586271
ccaguucugcaguaaauag

SEQ ID NO: 705273 - RNA, 19 nt, Artificial Sequence
  Description of Artificial Sequence: Synthetic oligonucleotide
  Antisense strand to SEQ ID NO: 705272
cuauuuacugcagaacugg

SEQ ID NO: 705274 - RNA, 19 nt, Artificial Sequence
  Description of Artificial Sequence: Synthetic oligonucleotide
  Sense strand starting at position 2956 of SEQ ID NO: 586271
auuucugaauugggagauu

SEQ ID NO: 705275 - RNA, 19 nt, Artificial Sequence
  Description of Artificial Sequence: Synthetic oligonucleotide
  Antisense strand to SEQ ID NO: 705274
aaucucccaauucagaaau

SEQ ID NO: 705276 - RNA, 19 nt, Artificial Sequence
  Description of Artificial Sequence: Synthetic oligonucleotide
  Sense strand starting at position 3176 of SEQ ID NO: 586271
cuugauuguguugaucuga

SEQ ID NO: 705277 - RNA, 19 nt, Artificial Sequence
  Description of Artificial Sequence: Synthetic oligonucleotide
  Antisense strand to SEQ ID NO: 705276
ucagaucaacacaaucaag

SEQ ID NO: 705278 - RNA, 19 nt, Artificial Sequence
  Description of Artificial Sequence: Synthetic oligonucleotide
  Sense strand starting at position 3215 of SEQ ID NO: 586271
auagaaacguuaguaaucu

SEQ ID NO: 705279 - RNA, 19 nt, Artificial Sequence
  Description of Artificial Sequence: Synthetic oligonucleotide
  Antisense strand to SEQ ID NO: 705278
agauuacuaacguuucuau

SEQ ID NO: 705280 - RNA, 19 nt, Artificial Sequence
  Description of Artificial Sequence: Synthetic oligonucleotide
  Sense strand starting at position 3223 of SEQ ID NO: 586271
guuaguaaucuugagucau

SEQ ID NO: 705281 - RNA, 19 nt, Artificial Sequence
  Description of Artificial Sequence: Synthetic oligonucleotide
  Antisense strand to SEQ ID NO: 705280
augacucaagauuacuaac

SEQ ID NO: 705282 - RNA, 19 nt, Artificial Sequence
  Description of Artificial Sequence: Synthetic oligonucleotide
  Sense strand starting at position 3231 of SEQ ID NO: 586271
ucuugagucauuuggcugu

SEQ ID NO: 705283 - RNA, 19 nt, Artificial Sequence
  Description of Artificial Sequence: Synthetic oligonucleotide
  Antisense strand to SEQ ID NO: 705282
acagccaaaugacucaaga

SEQ ID NO: 705284 - RNA, 19 nt, Artificial Sequence
  Description of Artificial Sequence: Synthetic oligonucleotide
  Sense strand starting at position 3234 of SEQ ID NO: 586271
ugagucauuuggcugugua

SEQ ID NO: 705285 - RNA, 19 nt, Artificial Sequence
  Description of Artificial Sequence: Synthetic oligonucleotide
  Antisense strand to SEQ ID NO: 705284
uacacagccaaaugacuca

SEQ ID NO: 705286 - RNA, 19 nt, Artificial Sequence
  Description of Artificial Sequence: Synthetic oligonucleotide
  Sense strand starting at position 3235 of SEQ ID NO: 586271
gagucauuuggcuguguaa

SEQ ID NO: 705287 - RNA, 19 nt, Artificial Sequence
  Description of Artificial Sequence: Synthetic oligonucleotide
  Antisense strand to SEQ ID NO: 705286
uuacacagccaaaugacuc

SEQ ID NO: 705288 - RNA, 19 nt, Artificial Sequence
  Description of Artificial Sequence: Synthetic oligonucleotide
  Sense strand starting at position 3238 of SEQ ID NO: 586271
ucauuuggcuguguaagua

SEQ ID NO: 705289 - RNA, 19 nt, Artificial Sequence
  Description of Artificial Sequence: Synthetic oligonucleotide
  Antisense strand to SEQ ID NO: 705288
uacuuacacagccaaauga

SEQ ID NO: 705290 - RNA, 19 nt, Artificial Sequence
  Description of Artificial Sequence: Synthetic oligonucleotide
  Sense strand starting at position 3254 of SEQ ID NO: 586271
guaauaagagcuugugagg

SEQ ID NO: 705291 - RNA, 19 nt, Artificial Sequence
  Description of Artificial Sequence: Synthetic oligonucleotide
  Antisense strand to SEQ ID NO: 705290
ccucacaagcucuuauuac

SEQ ID NO: 705292 - RNA, 19 nt, Artificial Sequence
  Description of Artificial Sequence: Synthetic oligonucleotide
  Sense strand starting at position 3426 of SEQ ID NO: 586271
auagauugcggaugauaaa

SEQ ID NO: 705293 - RNA, 19 nt, Artificial Sequence
  Description of Artificial Sequence: Synthetic oligonucleotide
  Antisense strand to SEQ ID NO: 705292
uuuaucauccgcaaucuau

SEQ ID NO: 705294 - RNA, 19 nt, Artificial Sequence
  Description of Artificial Sequence: Synthetic oligonucleotide
  Sense strand starting at position 3484 of SEQ ID NO: 586271
aggaauucgccaggaaaga

SEQ ID NO: 705295 - RNA, 19 nt, Artificial Sequence
  Description of Artificial Sequence: Synthetic oligonucleotide
  Antisense strand to SEQ ID NO: 705294
ucuuuccuggcgaauuccu

SEQ ID NO: 705296 - RNA, 19 nt, Artificial Sequence
  Description of Artificial Sequence: Synthetic oligonucleotide
  Sense strand starting at position 3537 of SEQ ID NO: 586271
ggcugccaugucuagauaa

SEQ ID NO: 705297 - RNA, 19 nt, Artificial Sequence
  Description of Artificial Sequence: Synthetic oligonucleotide
  Antisense strand to SEQ ID NO: 705296
uuaucuagacauggcagcc

SEQ ID NO: 705298 - RNA, 19 nt, Artificial Sequence
  Description of Artificial Sequence: Synthetic oligonucleotide
  Sense strand starting at position 3539 of SEQ ID NO: 586271
cugccaugucuagauaauu

SEQ ID NO: 705299 - RNA, 19 nt, Artificial Sequence
  Description of Artificial Sequence: Synthetic oligonucleotide
  Antisense strand to SEQ ID NO: 705298
aauuaucuagacauggcag

SEQ ID NO: 705300 - RNA, 19 nt, Artificial Sequence
  Description of Artificial Sequence: Synthetic oligonucleotide
  Sense strand starting at position 3619 of SEQ ID NO: 586271
guuaguuagggagaaaguu

SEQ ID NO: 705301 - RNA, 19 nt, Artificial Sequence
  Description of Artificial Sequence: Synthetic oligonucleotide
  Antisense strand to SEQ ID NO: 705300
aacuuucucccuaacuaac

SEQ ID NO: 705302 - RNA, 19 nt, Artificial Sequence
  Description of Artificial Sequence: Synthetic oligonucleotide
  Sense strand starting at position 3679 of SEQ ID NO: 586271
acacuaauggguuguacga

SEQ ID NO: 705303 - RNA, 19 nt, Artificial Sequence
  Description of Artificial Sequence: Synthetic oligonucleotide
  Antisense strand to SEQ ID NO: 705302
ucguacaacccauuagugu

SEQ ID NO: 705304 - RNA, 19 nt, Artificial Sequence
  Description of Artificial Sequence: Synthetic oligonucleotide
  Sense strand starting at position 3688 of SEQ ID NO: 586271
gguuguacgagucaacaaa

SEQ ID NO: 705305 - RNA, 19 nt, Artificial Sequence
  Description of Artificial Sequence: Synthetic oligonucleotide
  Antisense strand to SEQ ID NO: 705304
uuuguugacucguacaacc

SEQ ID NO: 705306 - RNA, 19 nt, Artificial Sequence
  Description of Artificial Sequence: Synthetic oligonucleotide
  Sense strand starting at position 199 of SEQ ID NO: 586272
guggguggcuaaucaauau

SEQ ID NO: 705307 - RNA, 19 nt, Artificial Sequence
  Description of Artificial Sequence: Synthetic oligonucleotide
  Antisense strand to SEQ ID NO: 705306
auauugauuagccacccac

SEQ ID NO: 705308 - RNA, 19 nt, Artificial Sequence
  Description of Artificial Sequence: Synthetic oligonucleotide
  Sense strand starting at position 230 of SEQ ID NO: 586272
agaaauaucguaugauugu

SEQ ID NO: 705309 - RNA, 19 nt, Artificial Sequence
  Description of Artificial Sequence: Synthetic oligonucleotide
  Antisense strand to SEQ ID NO: 705308
acaaucauacgauauuucu

SEQ ID NO: 705310 - RNA, 19 nt, Artificial Sequence
  Description of Artificial Sequence: Synthetic oligonucleotide
  Sense strand starting at position 459 of SEQ ID NO: 586272
agagguaaauuugaucuau

SEQ ID NO: 705311 - RNA, 19 nt, Artificial Sequence
  Description of Artificial Sequence: Synthetic oligonucleotide
  Antisense strand to SEQ ID NO: 705310
auagaucaaauuuaccucu

SEQ ID NO: 705312 - RNA, 19 nt, Artificial Sequence
  Description of Artificial Sequence: Synthetic oligonucleotide
  Sense strand starting at position 468 of SEQ ID NO: 586272
uuugaucuaucuuuggaag

SEQ ID NO: 705313 - RNA, 19 nt, Artificial Sequence
  Description of Artificial Sequence: Synthetic oligonucleotide
  Antisense strand to SEQ ID NO: 705312
cuuccaaagauagaucaaa

SEQ ID NO: 705314 - RNA, 19 nt, Artificial Sequence
  Description of Artificial Sequence: Synthetic oligonucleotide
  Sense strand starting at position 469 of SEQ ID NO: 586272
uugaucuaucuuuggaaga

SEQ ID NO: 705315 - RNA, 19 nt, Artificial Sequence
  Description of Artificial Sequence: Synthetic oligonucleotide
  Antisense strand to SEQ ID NO: 705314
ucuuccaaagauagaucaa

SEQ ID NO: 705316 - RNA, 19 nt, Artificial Sequence
  Description of Artificial Sequence: Synthetic oligonucleotide
  Sense strand starting at position 529 of SEQ ID NO: 586272
acaguaaauaguugaguga

SEQ ID NO: 705317 - RNA, 19 nt, Artificial Sequence
  Description of Artificial Sequence: Synthetic oligonucleotide
  Antisense strand to SEQ ID NO: 705316
ucacucaacuauuuacugu

SEQ ID NO: 705318 - RNA, 19 nt, Artificial Sequence
  Description of Artificial Sequence: Synthetic oligonucleotide
  Sense strand starting at position 532 of SEQ ID NO: 586272
guaaauaguugagugaaua

SEQ ID NO: 705319 - RNA, 19 nt, Artificial Sequence
  Description of Artificial Sequence: Synthetic oligonucleotide
  Antisense strand to SEQ ID NO: 705318
uauucacucaacuauuuac

SEQ ID NO: 705320 - RNA, 19 nt, Artificial Sequence
  Description of Artificial Sequence: Synthetic oligonucleotide
  Sense strand starting at position 533 of SEQ ID NO: 586272
uaaauaguugagugaauac

SEQ ID NO: 705321 - RNA, 19 nt, Artificial Sequence
  Description of Artificial Sequence: Synthetic oligonucleotide
  Antisense strand to SEQ ID NO: 705320
guauucacucaacuauuua

SEQ ID NO: 705322 - RNA, 19 nt, Artificial Sequence
  Description of Artificial Sequence: Synthetic oligonucleotide
  Sense strand starting at position 691 of SEQ ID NO: 586272
augccaguucuguauaaua

SEQ ID NO: 705323 - RNA, 19 nt, Artificial Sequence
  Description of Artificial Sequence: Synthetic oligonucleotide
  Antisense strand to SEQ ID NO: 705322
uauuauacagaacuggcau

SEQ ID NO: 705324 - RNA, 19 nt, Artificial Sequence
  Description of Artificial Sequence: Synthetic oligonucleotide
  Sense strand starting at position 959 of SEQ ID NO: 586272
auaugucaacugugugaca

SEQ ID NO: 705325 - RNA, 19 nt, Artificial Sequence
  Description of Artificial Sequence: Synthetic oligonucleotide
  Antisense strand to SEQ ID NO: 705324
ugucacacaguugacauau

SEQ ID NO: 705326 - RNA, 19 nt, Artificial Sequence
  Description of Artificial Sequence: Synthetic oligonucleotide
  Sense strand starting at position 960 of SEQ ID NO: 586272
uaugucaacugugugacaa

SEQ ID NO: 705327 - RNA, 19 nt, Artificial Sequence
  Description of Artificial Sequence: Synthetic oligonucleotide
  Antisense strand to SEQ ID NO: 705326
uugucacacaguugacaua

SEQ ID NO: 705328 - RNA, 19 nt, Artificial Sequence
  Description of Artificial Sequence: Synthetic oligonucleotide
  Sense strand starting at position 961 of SEQ ID NO: 586272
augucaacugugugacaau

SEQ ID NO: 705329 - RNA, 19 nt, Artificial Sequence
  Description of Artificial Sequence: Synthetic oligonucleotide
  Antisense strand to SEQ ID NO: 705328
auugucacacaguugacau

SEQ ID NO: 705330 - RNA, 19 nt, Artificial Sequence
  Description of Artificial Sequence: Synthetic oligonucleotide
  Sense strand starting at position 1004 of SEQ ID NO: 586272
cucugaagacgucaagguu

SEQ ID NO: 705331 - RNA, 19 nt, Artificial Sequence
  Description of Artificial Sequence: Synthetic oligonucleotide
  Antisense strand to SEQ ID NO: 705330
aaccuugacgucuucagag

SEQ ID NO: 705332 - RNA, 19 nt, Artificial Sequence
  Description of Artificial Sequence: Synthetic oligonucleotide
  Sense strand starting at position 1058 of SEQ ID NO: 586272
gcagguaagccucauugga

SEQ ID NO: 705333 - RNA, 19 nt, Artificial Sequence
  Description of Artificial Sequence: Synthetic oligonucleotide
  Antisense strand to SEQ ID NO: 705332
uccaaugaggcuuaccugc

SEQ ID NO: 705334 - RNA, 19 nt, Artificial Sequence
  Description of Artificial Sequence: Synthetic oligonucleotide
  Sense strand starting at position 1171 of SEQ ID NO: 586272
gcagaacugcacgaagaau

SEQ ID NO: 705335 - RNA, 19 nt, Artificial Sequence
  Description of Artificial Sequence: Synthetic oligonucleotide
  Antisense strand to SEQ ID NO: 705334
auucuucgugcaguucugc

SEQ ID NO: 705336 - RNA, 19 nt, Artificial Sequence
  Description of Artificial Sequence: Synthetic oligonucleotide
  Sense strand starting at position 1216 of SEQ ID NO: 586272
ccacuacagguguaaugau

SEQ ID NO: 705337 - RNA, 19 nt, Artificial Sequence
  Description of Artificial Sequence: Synthetic oligonucleotide
  Antisense strand to SEQ ID NO: 705336
aucauuacaccuguagugg

SEQ ID NO: 705338 - RNA, 19 nt, Artificial Sequence
  Description of Artificial Sequence: Synthetic oligonucleotide
  Sense strand starting at position 1284 of SEQ ID NO: 586272
gguguauuucugugaucca

SEQ ID NO: 705339 - RNA, 19 nt, Artificial Sequence
  Description of Artificial Sequence: Synthetic oligonucleotide
  Antisense strand to SEQ ID NO: 705338
uggaucacagaaauacacc

SEQ ID NO: 705340 - RNA, 19 nt, Artificial Sequence
  Description of Artificial Sequence: Synthetic oligonucleotide
  Sense strand starting at position 1561 of SEQ ID NO: 586272
agaagcagucguuaaaccu

SEQ ID NO: 705341 - RNA, 19 nt, Artificial Sequence
  Description of Artificial Sequence: Synthetic oligonucleotide
  Antisense strand to SEQ ID NO: 705340
agguuuaacgacugcuucu

SEQ ID NO: 705342 - RNA, 19 nt, Artificial Sequence
  Description of Artificial Sequence: Synthetic oligonucleotide
  Sense strand starting at position 1710 of SEQ ID NO: 586272
guuucuggcaguuaaauag

SEQ ID NO: 705343 - RNA, 19 nt, Artificial Sequence
  Description of Artificial Sequence: Synthetic oligonucleotide
  Antisense strand to SEQ ID NO: 705342
cuauuuaacugccagaaac

SEQ ID NO: 705344 - RNA, 19 nt, Artificial Sequence
  Description of Artificial Sequence: Synthetic oligonucleotide
  Sense strand starting at position 1769 of SEQ ID NO: 586272
uuaaguuguaaaugaguga

SEQ ID NO: 705345 - RNA, 19 nt, Artificial Sequence
  Description of Artificial Sequence: Synthetic oligonucleotide
  Antisense strand to SEQ ID NO: 705344
ucacucauuuacaacuuaa

SEQ ID NO: 705346 - RNA, 19 nt, Artificial Sequence
  Description of Artificial Sequence: Synthetic oligonucleotide
  Sense strand starting at position 2068 of SEQ ID NO: 586272
agcuaaucucaguggaaua

SEQ ID NO: 705347 - RNA, 19 nt, Artificial Sequence
  Description of Artificial Sequence: Synthetic oligonucleotide
  Antisense strand to SEQ ID NO: 705346
uauuccacugagauuagcu

SEQ ID NO: 705348 - RNA, 19 nt, Artificial Sequence
  Description of Artificial Sequence: Synthetic oligonucleotide
  Sense strand starting at position 2456 of SEQ ID NO: 586272
ggagaaagccaguaagugu

SEQ ID NO: 705349 - RNA, 19 nt, Artificial Sequence
  Description of Artificial Sequence: Synthetic oligonucleotide
  Antisense strand to SEQ ID NO: 705348
acacuuacuggcuuucucc

SEQ ID NO: 705350 - RNA, 19 nt, Artificial Sequence
  Description of Artificial Sequence: Synthetic oligonucleotide
  Sense strand starting at position 2469 of SEQ ID NO: 586272
aaguguccugagugacaac

SEQ ID NO: 705351 - RNA, 19 nt, Artificial Sequence
  Description of Artificial Sequence: Synthetic oligonucleotide
  Antisense strand to SEQ ID NO: 705350
guugucacucaggacacuu

SEQ ID NO: 705352 - RNA, 19 nt, Artificial Sequence
  Description of Artificial Sequence: Synthetic oligonucleotide
  Sense strand starting at position 2569 of SEQ ID NO: 586272
ugucuacguguauauauuu

SEQ ID NO: 705353 - RNA, 19 nt, Artificial Sequence
  Description of Artificial Sequence: Synthetic oligonucleotide
  Antisense strand to SEQ ID NO: 705352
aaauauauacacguagaca

SEQ ID NO: 705354 - RNA, 19 nt, Artificial Sequence
  Description of Artificial Sequence: Synthetic oligonucleotide
  Sense strand starting at position 2574 of SEQ ID NO: 586272
acguguauauauuugucau

SEQ ID NO: 705355 - RNA, 19 nt, Artificial Sequence
  Description of Artificial Sequence: Synthetic oligonucleotide
  Antisense strand to SEQ ID NO: 705354
augacaaauauauacacgu

SEQ ID NO: 705356 - RNA, 19 nt, Artificial Sequence
  Description of Artificial Sequence: Synthetic oligonucleotide
  Sense strand starting at position 2575 of SEQ ID NO: 586272
cguguauauauuugucaua

SEQ ID NO: 705357 - RNA, 19 nt, Artificial Sequence
  Description of Artificial Sequence: Synthetic oligonucleotide
  Antisense strand to SEQ ID NO: 705356
uaugacaaauauauacacg

SEQ ID NO: 705358 - RNA, 19 nt, Artificial Sequence
  Description of Artificial Sequence: Synthetic oligonucleotide
  Sense strand starting at position 2588 of SEQ ID NO: 586272
gucauaugcaaauggagua

SEQ ID NO: 705359 - RNA, 19 nt, Artificial Sequence
  Description of Artificial Sequence: Synthetic oligonucleotide
  Antisense strand to SEQ ID NO: 705358
uacuccauuugcauaugac

SEQ ID NO: 705360 - RNA, 19 nt, Artificial Sequence
  Description of Artificial Sequence: Synthetic oligonucleotide
  Sense strand starting at position 2947 of SEQ ID NO: 586272
ggacauaaauuagauuaag

SEQ ID NO: 705361 - RNA, 19 nt, Artificial Sequence
  Description of Artificial Sequence: Synthetic oligonucleotide
  Antisense strand to SEQ ID NO: 705360
cuuaaucuaauuuaugucc

SEQ ID NO: 705362 - RNA, 19 nt, Artificial Sequence
  Description of Artificial Sequence: Synthetic oligonucleotide
  Sense strand starting at position 3064 of SEQ ID NO: 586272
gguaacuacugugucaaug

SEQ ID NO: 705363 - RNA, 19 nt, Artificial Sequence
  Description of Artificial Sequence: Synthetic oligonucleotide
  Antisense strand to SEQ ID NO: 705362
cauugacacaguaguuacc

SEQ ID NO: 705364 - RNA, 19 nt, Artificial Sequence
  Description of Artificial Sequence: Synthetic oligonucleotide
  Sense strand starting at position 3079 of SEQ ID NO: 586272
aaugauaaguggucgauau

SEQ ID NO: 705365 - RNA, 19 nt, Artificial Sequence
  Description of Artificial Sequence: Synthetic oligonucleotide
  Antisense strand to SEQ ID NO: 705364
auaucgaccacuuaucauu

SEQ ID NO: 705366 - RNA, 19 nt, Artificial Sequence
  Description of Artificial Sequence: Synthetic oligonucleotide
  Sense strand starting at position 3080 of SEQ ID NO: 586272
augauaaguggucgauauu

SEQ ID NO: 705367 - RNA, 19 nt, Artificial Sequence
  Description of Artificial Sequence: Synthetic oligonucleotide
  Antisense strand to SEQ ID NO: 705366
aauaucgaccacuuaucau

SEQ ID NO: 705368 - RNA, 19 nt, Artificial Sequence
  Description of Artificial Sequence: Synthetic oligonucleotide
  Sense strand starting at position 3086 of SEQ ID NO: 586272
aguggucgauauucccaaa

SEQ ID NO: 705369 - RNA, 19 nt, Artificial Sequence
  Description of Artificial Sequence: Synthetic oligonucleotide
  Antisense strand to SEQ ID NO: 705368
uuugggaauaucgaccacu

SEQ ID NO: 705370 - RNA, 19 nt, Artificial Sequence
  Description of Artificial Sequence: Synthetic oligonucleotide
  Sense strand starting at position 3234 of SEQ ID NO: 586272
uuugaaugacacugugaag

SEQ ID NO: 705371 - RNA, 19 nt, Artificial Sequence
  Description of Artificial Sequence: Synthetic oligonucleotide
  Antisense strand to SEQ ID NO: 705370
cuucacagugucauucaaa

SEQ ID NO: 705372 - RNA, 19 nt, Artificial Sequence
  Description of Artificial Sequence: Synthetic oligonucleotide
  Sense strand starting at position 3360 of SEQ ID NO: 586272
agagaaagcuaucuccuua

SEQ ID NO: 705373 - RNA, 19 nt, Artificial Sequence
  Description of Artificial Sequence: Synthetic oligonucleotide
  Antisense strand to SEQ ID NO: 705372
uaaggagauagcuuucucu

SEQ ID NO: 705374 - RNA, 19 nt, Artificial Sequence
  Description of Artificial Sequence: Synthetic oligonucleotide
  Sense strand starting at position 3394 of SEQ ID NO: 586272
ugaauuauaugagcaucau

SEQ ID NO: 705375 - RNA, 19 nt, Artificial Sequence
  Description of Artificial Sequence: Synthetic oligonucleotide
  Antisense strand to SEQ ID NO: 705374
augaugcucauauaauuca

SEQ ID NO: 705376 - RNA, 19 nt, Artificial Sequence
  Description of Artificial Sequence: Synthetic oligonucleotide
  Sense strand starting at position 3726 of SEQ ID NO: 586272
ggcuaaagguucuucuuag

SEQ ID NO: 705377 - RNA, 19 nt, Artificial Sequence
  Description of Artificial Sequence: Synthetic oligonucleotide
  Antisense strand to SEQ ID NO: 705376
cuaagaagaaccuuuagcc

SEQ ID NO: 705378 - RNA, 19 nt, Artificial Sequence
  Description of Artificial Sequence: Synthetic oligonucleotide
  Sense strand starting at position 3760 of SEQ ID NO: 586272
cuaacauucguacaauguu

SEQ ID NO: 705379 - RNA, 19 nt, Artificial Sequence
  Description of Artificial Sequence: Synthetic oligonucleotide
  Antisense strand to SEQ ID NO: 705378
aacauuguacgaauguuag

SEQ ID NO: 705380 - RNA, 19 nt, Artificial Sequence
  Description of Artificial Sequence: Synthetic oligonucleotide
  Sense strand starting at position 3888 of SEQ ID NO: 586272
gagccaugugcucugcauu

SEQ ID NO: 705381 - RNA, 19 nt, Artificial Sequence
  Description of Artificial Sequence: Synthetic oligonucleotide
  Antisense strand to SEQ ID NO: 705380
aaugcagagcacauggcuc

SEQ ID NO: 705382 - RNA, 19 nt, Artificial Sequence
  Description of Artificial Sequence: Synthetic oligonucleotide
  Sense strand starting at position 3914 of SEQ ID NO: 586272
ugccuuaagugauuagaaa

SEQ ID NO: 705383 - RNA, 19 nt, Artificial Sequence
  Description of Artificial Sequence: Synthetic oligonucleotide
  Antisense strand to SEQ ID NO: 705382
uuucuaaucacuuaaggca

SEQ ID NO: 705384 - RNA, 19 nt, Artificial Sequence
  Description of Artificial Sequence: Synthetic oligonucleotide
  Sense strand starting at position 3915 of SEQ ID NO: 586272
gccuuaagugauuagaaau

SEQ ID NO: 705385 - RNA, 19 nt, Artificial Sequence
  Description of Artificial Sequence: Synthetic oligonucleotide
  Antisense strand to SEQ ID NO: 705384
auuucuaaucacuuaaggc

SEQ ID NO: 705386 - RNA, 19 nt, Artificial Sequence
  Description of Artificial Sequence: Synthetic oligonucleotide
  Sense strand starting at position 41 of SEQ ID NO: 586273
agagguaaauuugaucuau

SEQ ID NO: 705387 - RNA, 19 nt, Artificial Sequence
  Description of Artificial Sequence: Synthetic oligonucleotide
  Antisense strand to SEQ ID NO: 705386
auagaucaaauuuaccucu

SEQ ID NO: 705388 - RNA, 19 nt, Artificial Sequence
  Description of Artificial Sequence: Synthetic oligonucleotide
  Sense strand starting at position 50 of SEQ ID NO: 586273
uuugaucuaucuuuggaag

SEQ ID NO: 705389 - RNA, 19 nt, Artificial Sequence
  Description of Artificial Sequence: Synthetic oligonucleotide
  Antisense strand to SEQ ID NO: 705388
cuuccaaagauagaucaaa

SEQ ID NO: 705390 - RNA, 19 nt, Artificial Sequence
  Description of Artificial Sequence: Synthetic oligonucleotide
  Sense strand starting at position 51 of SEQ ID NO: 586273
uugaucuaucuuuggaaga

SEQ ID NO: 705391 - RNA, 19 nt, Artificial Sequence
  Description of Artificial Sequence: Synthetic oligonucleotide
  Antisense strand to SEQ ID NO: 705390
ucuuccaaagauagaucaa

SEQ ID NO: 705392 - RNA, 19 nt, Artificial Sequence
  Description of Artificial Sequence: Synthetic oligonucleotide
  Sense strand starting at position 111 of SEQ ID NO: 586273
acaguaaauaguugaguga

SEQ ID NO: 705393 - RNA, 19 nt, Artificial Sequence
  Description of Artificial Sequence: Synthetic oligonucleotide
  Antisense strand to SEQ ID NO: 705392
ucacucaacuauuuacugu

SEQ ID NO: 705394 - RNA, 19 nt, Artificial Sequence
  Description of Artificial Sequence: Synthetic oligonucleotide
  Sense strand starting at position 114 of SEQ ID NO: 586273
guaaauaguugagugaaua

SEQ ID NO: 705395 - RNA, 19 nt, Artificial Sequence
  Description of Artificial Sequence: Synthetic oligonucleotide
  Antisense strand to SEQ ID NO: 705394
uauucacucaacuauuuac

SEQ ID NO: 705396 - RNA, 19 nt, Artificial Sequence
  Description of Artificial Sequence: Synthetic oligonucleotide
  Sense strand starting at position 115 of SEQ ID NO: 586273
uaaauaguugagugaauac

SEQ ID NO: 705397 - RNA, 19 nt, Artificial Sequence
  Description of Artificial Sequence: Synthetic oligonucleotide
  Antisense strand to SEQ ID NO: 705396
guauucacucaacuauuua

SEQ ID NO: 705398 - RNA, 19 nt, Artificial Sequence
  Description of Artificial Sequence: Synthetic oligonucleotide
  Sense strand starting at position 273 of SEQ ID NO: 586273
augccaguucuguauaaua

SEQ ID NO: 705399 - RNA, 19 nt, Artificial Sequence
  Description of Artificial Sequence: Synthetic oligonucleotide
  Antisense strand to SEQ ID NO: 705398
uauuauacagaacuggcau

SEQ ID NO: 705400 - RNA, 19 nt, Artificial Sequence
  Description of Artificial Sequence: Synthetic oligonucleotide
  Sense strand starting at position 541 of SEQ ID NO: 586273
auaugucaacugugugaca

SEQ ID NO: 705401 - RNA, 19 nt, Artificial Sequence
  Description of Artificial Sequence: Synthetic oligonucleotide
  Antisense strand to SEQ ID NO: 705400
ugucacacaguugacauau

SEQ ID NO: 705402 - RNA, 19 nt, Artificial Sequence
  Description of Artificial Sequence: Synthetic oligonucleotide
  Sense strand starting at position 542 of SEQ ID NO: 586273
uaugucaacugugugacaa

SEQ ID NO: 705403 - RNA, 19 nt, Artificial Sequence
  Description of Artificial Sequence: Synthetic oligonucleotide
  Antisense strand to SEQ ID NO: 705402
uugucacacaguugacaua

SEQ ID NO: 705404 - RNA, 19 nt, Artificial Sequence
  Description of Artificial Sequence: Synthetic oligonucleotide
  Sense strand starting at position 543 of SEQ ID NO: 586273
augucaacugugugacaau

SEQ ID NO: 705405 - RNA, 19 nt, Artificial Sequence
  Description of Artificial Sequence: Synthetic oligonucleotide
  Antisense strand to SEQ ID NO: 705404
auugucacacaguugacau

SEQ ID NO: 705406 - RNA, 19 nt, Artificial Sequence
  Description of Artificial Sequence: Synthetic oligonucleotide
  Sense strand starting at position 586 of SEQ ID NO: 586273
cucugaagacgucaagguu

SEQ ID NO: 705407 - RNA, 19 nt, Artificial Sequence
  Description of Artificial Sequence: Synthetic oligonucleotide
  Antisense strand to SEQ ID NO: 705406
aaccuugacgucuucagag

SEQ ID NO: 705408 - RNA, 19 nt, Artificial Sequence
  Description of Artificial Sequence: Synthetic oligonucleotide
  Sense strand starting at position 640 of SEQ ID NO: 586273
gcagguaagccucauugga

SEQ ID NO: 705409 - RNA, 19 nt, Artificial Sequence
  Description of Artificial Sequence: Synthetic oligonucleotide
  Antisense strand to SEQ ID NO: 705408
uccaaugaggcuuaccugc

SEQ ID NO: 705410 - RNA, 19 nt, Artificial Sequence
  Description of Artificial Sequence: Synthetic oligonucleotide
  Sense strand starting at position 642 of SEQ ID NO: 586273
agguaagccucauuggagu

SEQ ID NO: 705411 - RNA, 19 nt, Artificial Sequence
  Description of Artificial Sequence: Synthetic oligonucleotide
  Antisense strand to SEQ ID NO: 705410
acuccaaugaggcuuaccu

SEQ ID NO: 705412 - RNA, 19 nt, Artificial Sequence
  Description of Artificial Sequence: Synthetic oligonucleotide
  Sense strand starting at position 753 of SEQ ID NO: 586273
gcagaacugcacgaagaau

SEQ ID NO: 705413 - RNA, 19 nt, Artificial Sequence
  Description of Artificial Sequence: Synthetic oligonucleotide
  Antisense strand to SEQ ID NO: 705412
auucuucgugcaguucugc

SEQ ID NO: 705414 - RNA, 19 nt, Artificial Sequence
  Description of Artificial Sequence: Synthetic oligonucleotide
  Sense strand starting at position 798 of SEQ ID NO: 586273
ccacuacagguguaaugau

SEQ ID NO: 705415 - RNA, 19 nt, Artificial Sequence
  Description of Artificial Sequence: Synthetic oligonucleotide
  Antisense strand to SEQ ID NO: 705414
aucauuacaccuguagugg

SEQ ID NO: 705416 - RNA, 19 nt, Artificial Sequence
  Description of Artificial Sequence: Synthetic oligonucleotide
  Sense strand starting at position 866 of SEQ ID NO: 586273
gguguauuucugugaucca

SEQ ID NO: 705417 - RNA, 19 nt, Artificial Sequence
  Description of Artificial Sequence: Synthetic oligonucleotide
  Antisense strand to SEQ ID NO: 705416
uggaucacagaaauacacc

SEQ ID NO: 705418 - RNA, 19 nt, Artificial Sequence
  Description of Artificial Sequence: Synthetic oligonucleotide
  Sense strand starting at position 1143 of SEQ ID NO: 586273
agaagcagucguuaaaccu

SEQ ID NO: 705419 - RNA, 19 nt, Artificial Sequence
  Description of Artificial Sequence: Synthetic oligonucleotide
  Antisense strand to SEQ ID NO: 705418
agguuuaacgacugcuucu

SEQ ID NO: 705420 - RNA, 19 nt, Artificial Sequence
  Description of Artificial Sequence: Synthetic oligonucleotide
  Sense strand starting at position 1292 of SEQ ID NO: 586273
guuucuggcaguuaaauag

SEQ ID NO: 705421 - RNA, 19 nt, Artificial Sequence
  Description of Artificial Sequence: Synthetic oligonucleotide
  Antisense strand to SEQ ID NO: 705420
cuauuuaacugccagaaac

SEQ ID NO: 705422 - RNA, 19 nt, Artificial Sequence
  Description of Artificial Sequence: Synthetic oligonucleotide
  Sense strand starting at position 1351 of SEQ ID NO: 586273
uuaaguuguaaaugaguga

SEQ ID NO: 705423 - RNA, 19 nt, Artificial Sequence
  Description of Artificial Sequence: Synthetic oligonucleotide
  Antisense strand to SEQ ID NO: 705422
ucacucauuuacaacuuaa

SEQ ID NO: 705424 - RNA, 19 nt, Artificial Sequence
  Description of Artificial Sequence: Synthetic oligonucleotide
  Sense strand starting at position 1650 of SEQ ID NO: 586273
agcuaaucucaguggaaua

SEQ ID NO: 705425 - RNA, 19 nt, Artificial Sequence
  Description of Artificial Sequence: Synthetic oligonucleotide
  Antisense strand to SEQ ID NO: 705424
uauuccacugagauuagcu

SEQ ID NO: 705426 - RNA, 19 nt, Artificial Sequence
  Description of Artificial Sequence: Synthetic oligonucleotide
  Sense strand starting at position 2038 of SEQ ID NO: 586273
ggagaaagccaguaagugu

SEQ ID NO: 705427 - RNA, 19 nt, Artificial Sequence
  Description of Artificial Sequence: Synthetic oligonucleotide
  Antisense strand to SEQ ID NO: 705426
acacuuacuggcuuucucc

SEQ ID NO: 705428 - RNA, 19 nt, Artificial Sequence
  Description of Artificial Sequence: Synthetic oligonucleotide
  Sense strand starting at position 2051 of SEQ ID NO: 586273
aaguguccugagugacaac

SEQ ID NO: 705429 - RNA, 19 nt, Artificial Sequence
  Description of Artificial Sequence: Synthetic oligonucleotide
  Antisense strand to SEQ ID NO: 705428
guugucacucaggacacuu

SEQ ID NO: 705430 - RNA, 19 nt, Artificial Sequence
  Description of Artificial Sequence: Synthetic oligonucleotide
  Sense strand starting at position 2151 of SEQ ID NO: 586273
ugucuacguguauauauuu

SEQ ID NO: 705431 - RNA, 19 nt, Artificial Sequence
  Description of Artificial Sequence: Synthetic oligonucleotide
  Antisense strand to SEQ ID NO: 705430
aaauauauacacguagaca

SEQ ID NO: 705432 - RNA, 19 nt, Artificial Sequence
  Description of Artificial Sequence: Synthetic oligonucleotide
  Sense strand starting at position 2156 of SEQ ID NO: 586273
acguguauauauuugucau

SEQ ID NO: 705433 - RNA, 19 nt, Artificial Sequence
  Description of Artificial Sequence: Synthetic oligonucleotide
  Antisense strand to SEQ ID NO: 705432
augacaaauauauacacgu

SEQ ID NO: 705434 - RNA, 19 nt, Artificial Sequence
  Description of Artificial Sequence: Synthetic oligonucleotide
  Sense strand starting at position 2157 of SEQ ID NO: 586273
cguguauauauuugucaua

SEQ ID NO: 705435 - RNA, 19 nt, Artificial Sequence
  Description of Artificial Sequence: Synthetic oligonucleotide
  Antisense strand to SEQ ID NO: 705434
uaugacaaauauauacacg

SEQ ID NO: 705436 - RNA, 19 nt, Artificial Sequence
  Description of Artificial Sequence: Synthetic oligonucleotide
  Sense strand starting at position 2170 of SEQ ID NO: 586273
gucauaugcaaauggagua

SEQ ID NO: 705437 - RNA, 19 nt, Artificial Sequence
  Description of Artificial Sequence: Synthetic oligonucleotide
  Antisense strand to SEQ ID NO: 705436
uacuccauuugcauaugac

SEQ ID NO: 705438 - RNA, 19 nt, Artificial Sequence
  Description of Artificial Sequence: Synthetic oligonucleotide
  Sense strand starting at position 2529 of SEQ ID NO: 586273
ggacauaaauuagauuaag

SEQ ID NO: 705439 - RNA, 19 nt, Artificial Sequence
  Description of Artificial Sequence: Synthetic oligonucleotide
  Antisense strand to SEQ ID NO: 705438
cuuaaucuaauuuaugucc

SEQ ID NO: 705440 - RNA, 19 nt, Artificial Sequence
  Description of Artificial Sequence: Synthetic oligonucleotide
  Sense strand starting at position 2646 of SEQ ID NO: 586273
gguaacuacugugucaaug

SEQ ID NO: 705441 - RNA, 19 nt, Artificial Sequence
  Description of Artificial Sequence: Synthetic oligonucleotide
  Antisense strand to SEQ ID NO: 705440
cauugacacaguaguuacc

SEQ ID NO: 705442 - RNA, 19 nt, Artificial Sequence
  Description of Artificial Sequence: Synthetic oligonucleotide
  Sense strand starting at position 2661 of SEQ ID NO: 586273
aaugauaaguggucgauau

SEQ ID NO: 705443 - RNA, 19 nt, Artificial Sequence
  Description of Artificial Sequence: Synthetic oligonucleotide
  Antisense strand to SEQ ID NO: 705442
auaucgaccacuuaucauu

SEQ ID NO: 705444 - RNA, 19 nt, Artificial Sequence
  Description of Artificial Sequence: Synthetic oligonucleotide
  Sense strand starting at position 2662 of SEQ ID NO: 586273
augauaaguggucgauauu

SEQ ID NO: 705445 - RNA, 19 nt, Artificial Sequence
  Description of Artificial Sequence: Synthetic oligonucleotide
  Antisense strand to SEQ ID NO: 705444
aauaucgaccacuuaucau

SEQ ID NO: 705446 - RNA, 19 nt, Artificial Sequence
  Description of Artificial Sequence: Synthetic oligonucleotide
  Sense strand starting at position 2668 of SEQ ID NO: 586273
aguggucgauauucccaaa

SEQ ID NO: 705447 - RNA, 19 nt, Artificial Sequence
  Description of Artificial Sequence: Synthetic oligonucleotide
  Antisense strand to SEQ ID NO: 705446
uuugggaauaucgaccacu

SEQ ID NO: 705448 - RNA, 19 nt, Artificial Sequence
  Description of Artificial Sequence: Synthetic oligonucleotide
  Sense strand starting at position 2816 of SEQ ID NO: 586273
uuugaaugacacugugaag

SEQ ID NO: 705449 - RNA, 19 nt, Artificial Sequence
  Description of Artificial Sequence: Synthetic oligonucleotide
  Antisense strand to SEQ ID NO: 705448
cuucacagugucauucaaa

SEQ ID NO: 705450 - RNA, 19 nt, Artificial Sequence
  Description of Artificial Sequence: Synthetic oligonucleotide
  Sense strand starting at position 2942 of SEQ ID NO: 586273
agagaaagcuaucuccuua

SEQ ID NO: 705451 - RNA, 19 nt, Artificial Sequence
  Description of Artificial Sequence: Synthetic oligonucleotide
  Antisense strand to SEQ ID NO: 705450
uaaggagauagcuuucucu

SEQ ID NO: 705452 - RNA, 19 nt, Artificial Sequence
  Description of Artificial Sequence: Synthetic oligonucleotide
  Sense strand starting at position 2976 of SEQ ID NO: 586273
ugaauuauaugagcaucau

SEQ ID NO: 705453 - RNA, 19 nt, Artificial Sequence
  Description of Artificial Sequence: Synthetic oligonucleotide
  Antisense strand to SEQ ID NO: 705452
augaugcucauauaauuca

SEQ ID NO: 705454 - RNA, 19 nt, Artificial Sequence
  Description of Artificial Sequence: Synthetic oligonucleotide
  Sense strand starting at position 3308 of SEQ ID NO: 586273
ggcuaaagguucuucuuag

SEQ ID NO: 705455 - RNA, 19 nt, Artificial Sequence
  Description of Artificial Sequence: Synthetic oligonucleotide
  Antisense strand to SEQ ID NO: 705454
cuaagaagaaccuuuagcc

SEQ ID NO: 705456 - RNA, 19 nt, Artificial Sequence
  Description of Artificial Sequence: Synthetic oligonucleotide
  Sense strand starting at position 3342 of SEQ ID NO: 586273
cuaacauucguacaauguu

SEQ ID NO: 705457 - RNA, 19 nt, Artificial Sequence
  Description of Artificial Sequence: Synthetic oligonucleotide
  Antisense strand to SEQ ID NO: 705456
aacauuguacgaauguuag

SEQ ID NO: 705458 - RNA, 19 nt, Artificial Sequence
  Description of Artificial Sequence: Synthetic oligonucleotide
  Sense strand starting at position 3470 of SEQ ID NO: 586273
gagccaugugcucugcauu

SEQ ID NO: 705459 - RNA, 19 nt, Artificial Sequence
  Description of Artificial Sequence: Synthetic oligonucleotide
  Antisense strand to SEQ ID NO: 705458
aaugcagagcacauggcuc

SEQ ID NO: 705460 - RNA, 19 nt, Artificial Sequence
  Description of Artificial Sequence: Synthetic oligonucleotide
  Sense strand starting at position 3496 of SEQ ID NO: 586273
ugccuuaagugauuagaaa

SEQ ID NO: 705461 - RNA, 19 nt, Artificial Sequence
  Description of Artificial Sequence: Synthetic oligonucleotide
  Antisense strand to SEQ ID NO: 705460
uuucuaaucacuuaaggca

SEQ ID NO: 705462 - RNA, 19 nt, Artificial Sequence
  Description of Artificial Sequence: Synthetic oligonucleotide
  Sense strand starting at position 3497 of SEQ ID NO: 586273
gccuuaagugauuagaaau

SEQ ID NO: 705463 - RNA, 19 nt, Artificial Sequence
  Description of Artificial Sequence: Synthetic oligonucleotide
  Antisense strand to SEQ ID NO: 705462
auuucuaaucacuuaaggc

SEQ ID NO: 705464 - RNA, 19 nt, Artificial Sequence
  Description of Artificial Sequence: Synthetic oligonucleotide
  Sense strand starting at position 3753 of SEQ ID NO: 586273
gaagaaagguggcucaaug

SEQ ID NO: 705465 - RNA, 19 nt, Artificial Sequence
  Description of Artificial Sequence: Synthetic oligonucleotide
  Antisense strand to SEQ ID NO: 705464
cauugagccaccuuucuuc

SEQ ID NO: 705466 - RNA, 19 nt, Artificial Sequence
  Description of Artificial Sequence: Synthetic oligonucleotide
  Sense strand starting at position 44 of SEQ ID NO: 586274
uauacugugcuaggcauua

SEQ ID NO: 705467 - RNA, 19 nt, Artificial Sequence
  Description of Artificial Sequence: Synthetic oligonucleotide
  Antisense strand to SEQ ID NO: 705466
uaaugccuagcacaguaua

SEQ ID NO: 705468 - RNA, 19 nt, Artificial Sequence
  Description of Artificial Sequence: Synthetic oligonucleotide
  Sense strand starting at position 195 of SEQ ID NO: 586274
ugaguaugcacgccgugaa

SEQ ID NO: 705469 - RNA, 19 nt, Artificial Sequence
  Description of Artificial Sequence: Synthetic oligonucleotide
  Antisense strand to SEQ ID NO: 705468
uucacggcgugcauacuca

SEQ ID NO: 705470 - RNA, 19 nt, Artificial Sequence
  Description of Artificial Sequence: Synthetic oligonucleotide
  Sense strand starting at position 198 of SEQ ID NO: 586274
guaugcacgccgugaacau

SEQ ID NO: 705471 - RNA, 19 nt, Artificial Sequence
  Description of Artificial Sequence: Synthetic oligonucleotide
  Antisense strand to SEQ ID NO: 705470
auguucacggcgugcauac

SEQ ID NO: 705472 - RNA, 19 nt, Artificial Sequence
  Description of Artificial Sequence: Synthetic oligonucleotide
  Sense strand starting at position 205 of SEQ ID NO: 586274
cgccgugaacaucaacaua

SEQ ID NO: 705473 - RNA, 19 nt, Artificial Sequence
  Description of Artificial Sequence: Synthetic oligonucleotide
  Antisense strand to SEQ ID NO: 705472
uauguugauguucacggcg

SEQ ID NO: 705474 - RNA, 19 nt, Artificial Sequence
  Description of Artificial Sequence: Synthetic oligonucleotide
  Sense strand starting at position 219 of SEQ ID NO: 586274
acauaaauaucgugcugua

SEQ ID NO: 705475 - RNA, 19 nt, Artificial Sequence
  Description of Artificial Sequence: Synthetic oligonucleotide
  Antisense strand to SEQ ID NO: 705474
uacagcacgauauuuaugu

SEQ ID NO: 705476 - RNA, 19 nt, Artificial Sequence
  Description of Artificial Sequence: Synthetic oligonucleotide
  Sense strand starting at position 222 of SEQ ID NO: 586274
uaaauaucgugcuguagua

SEQ ID NO: 705477 - RNA, 19 nt, Artificial Sequence
  Description of Artificial Sequence: Synthetic oligonucleotide
  Antisense strand to SEQ ID NO: 705476
uacuacagcacgauauuua

SEQ ID NO: 705478 - RNA, 19 nt, Artificial Sequence
  Description of Artificial Sequence: Synthetic oligonucleotide
  Sense strand starting at position 229 of SEQ ID NO: 586274
cgugcuguaguaucauuca

SEQ ID NO: 705479 - RNA, 19 nt, Artificial Sequence
  Description of Artificial Sequence: Synthetic oligonucleotide
  Antisense strand to SEQ ID NO: 705478
ugaaugauacuacagcacg

SEQ ID NO: 705480 - RNA, 19 nt, Artificial Sequence
  Description of Artificial Sequence: Synthetic oligonucleotide
  Sense strand starting at position 327 of SEQ ID NO: 586274
guaaguauguguugaauga

SEQ ID NO: 705481 - RNA, 19 nt, Artificial Sequence
  Description of Artificial Sequence: Synthetic oligonucleotide
  Antisense strand to SEQ ID NO: 705480
ucauucaacacauacuuac

SEQ ID NO: 705482 - RNA, 19 nt, Artificial Sequence
  Description of Artificial Sequence: Synthetic oligonucleotide
  Sense strand starting at position 346 of SEQ ID NO: 586274
augaguguaucuccuugaa

SEQ ID NO: 705483 - RNA, 19 nt, Artificial Sequence
  Description of Artificial Sequence: Synthetic oligonucleotide
  Antisense strand to SEQ ID NO: 705482
uucaaggagauacacucau

SEQ ID NO: 705484 - RNA, 19 nt, Artificial Sequence
  Description of Artificial Sequence: Synthetic oligonucleotide
  Sense strand starting at position 348 of SEQ ID NO: 586274
gaguguaucuccuugaacc

SEQ ID NO: 705485 - RNA, 19 nt, Artificial Sequence
  Description of Artificial Sequence: Synthetic oligonucleotide
  Antisense strand to SEQ ID NO: 705484
gguucaaggagauacacuc

SEQ ID NO: 705486 - RNA, 19 nt, Artificial Sequence
  Description of Artificial Sequence: Synthetic oligonucleotide
  Sense strand starting at position 349 of SEQ ID NO: 586274
aguguaucuccuugaaccu

SEQ ID NO: 705487 - RNA, 19 nt, Artificial Sequence
  Description of Artificial Sequence: Synthetic oligonucleotide
  Antisense strand to SEQ ID NO: 705486
agguucaaggagauacacu

SEQ ID NO: 705488 - RNA, 19 nt, Artificial Sequence
  Description of Artificial Sequence: Synthetic oligonucleotide
  Sense strand starting at position 371 of SEQ ID NO: 586274
uuucucaucucucgagugu

SEQ ID NO: 705489 - RNA, 19 nt, Artificial Sequence
  Description of Artificial Sequence: Synthetic oligonucleotide
  Antisense strand to SEQ ID NO: 705488
acacucgagagaugagaaa

SEQ ID NO: 705490 - RNA, 19 nt, Artificial Sequence
  Description of Artificial Sequence: Synthetic oligonucleotide
  Sense strand starting at position 372 of SEQ ID NO: 586274
uucucaucucucgagugua

SEQ ID NO: 705491 - RNA, 19 nt, Artificial Sequence
  Description of Artificial Sequence: Synthetic oligonucleotide
  Antisense strand to SEQ ID NO: 705490
uacacucgagagaugagaa

SEQ ID NO: 705492 - RNA, 19 nt, Artificial Sequence
  Description of Artificial Sequence: Synthetic oligonucleotide
  Sense strand starting at position 375 of SEQ ID NO: 586274
ucaucucucgaguguaaau

SEQ ID NO: 705493 - RNA, 19 nt, Artificial Sequence
  Description of Artificial Sequence: Synthetic oligonucleotide
  Antisense strand to SEQ ID NO: 705492
auuuacacucgagagauga

SEQ ID NO: 705494 - RNA, 19 nt, Artificial Sequence
  Description of Artificial Sequence: Synthetic oligonucleotide
  Sense strand starting at position 377 of SEQ ID NO: 586274
aucucucgaguguaaauaa

SEQ ID NO: 705495 - RNA, 19 nt, Artificial Sequence
  Description of Artificial Sequence: Synthetic oligonucleotide
  Antisense strand to SEQ ID NO: 705494
uuauuuacacucgagagau

SEQ ID NO: 705496 - RNA, 19 nt, Artificial Sequence
  Description of Artificial Sequence: Synthetic oligonucleotide
  Sense strand starting at position 413 of SEQ ID NO: 586274
ugacacugugcgggucaaa

SEQ ID NO: 705497 - RNA, 19 nt, Artificial Sequence
  Description of Artificial Sequence: Synthetic oligonucleotide
  Antisense strand to SEQ ID NO: 705496
uuugacccgcacaguguca

SEQ ID NO: 705498 - RNA, 19 nt, Artificial Sequence
  Description of Artificial Sequence: Synthetic oligonucleotide
  Sense strand starting at position 416 of SEQ ID NO: 586274
cacugugcgggucaaagau

SEQ ID NO: 705499 - RNA, 19 nt, Artificial Sequence
  Description of Artificial Sequence: Synthetic oligonucleotide
  Antisense strand to SEQ ID NO: 705498
aucuuugacccgcacagug

SEQ ID NO: 705500 - RNA, 19 nt, Artificial Sequence
  Description of Artificial Sequence: Synthetic oligonucleotide
  Sense strand starting at position 428 of SEQ ID NO: 586274
caaagaugaccacgugaaa

SEQ ID NO: 705501 - RNA, 19 nt, Artificial Sequence
  Description of Artificial Sequence: Synthetic oligonucleotide
  Antisense strand to SEQ ID NO: 705500
uuucacguggucaucuuug

SEQ ID NO: 705502 - RNA, 19 nt, Artificial Sequence
  Description of Artificial Sequence: Synthetic oligonucleotide
  Sense strand starting at position 550 of SEQ ID NO: 586274
ggugcuuacaccgaaugca

SEQ ID NO: 705503 - RNA, 19 nt, Artificial Sequence
  Description of Artificial Sequence: Synthetic oligonucleotide
  Antisense strand to SEQ ID NO: 705502
ugcauucgguguaagcacc

SEQ ID NO: 705504 - RNA, 19 nt, Artificial Sequence
  Description of Artificial Sequence: Synthetic oligonucleotide
  Sense strand starting at position 616 of SEQ ID NO: 586274
uuuacaaucucaggaucga

SEQ ID NO: 705505 - RNA, 19 nt, Artificial Sequence
  Description of Artificial Sequence: Synthetic oligonucleotide
  Antisense strand to SEQ ID NO: 705504
ucgauccugagauuguaaa

SEQ ID NO: 705506 - RNA, 19 nt, Artificial Sequence
  Description of Artificial Sequence: Synthetic oligonucleotide
  Sense strand starting at position 740 of SEQ ID NO: 586274
aggcuacuguccuccaaac

SEQ ID NO: 705507 - RNA, 19 nt, Artificial Sequence
  Description of Artificial Sequence: Synthetic oligonucleotide
  Antisense strand to SEQ ID NO: 705506
guuuggaggacaguagccu

SEQ ID NO: 705508 - RNA, 19 nt, Artificial Sequence
  Description of Artificial Sequence: Synthetic oligonucleotide
  Sense strand starting at position 1139 of SEQ ID NO: 586274
gagccacgaucucaugagu

SEQ ID NO: 705509 - RNA, 19 nt, Artificial Sequence
  Description of Artificial Sequence: Synthetic oligonucleotide
  Antisense strand to SEQ ID NO: 705508
acucaugagaucguggcuc

SEQ ID NO: 705510 - RNA, 19 nt, Artificial Sequence
  Description of Artificial Sequence: Synthetic oligonucleotide
  Sense strand starting at position 1232 of SEQ ID NO: 586274
ggcacucuucccuaagcca

SEQ ID NO: 705511 - RNA, 19 nt, Artificial Sequence
  Description of Artificial Sequence: Synthetic oligonucleotide
  Antisense strand to SEQ ID NO: 705510
uggcuuagggaagagugcc

SEQ ID NO: 705512 - RNA, 19 nt, Artificial Sequence
  Description of Artificial Sequence: Synthetic oligonucleotide
  Sense strand starting at position 1251 of SEQ ID NO: 586274
ggaaaugccuccugagaga

SEQ ID NO: 705513 - RNA, 19 nt, Artificial Sequence
  Description of Artificial Sequence: Synthetic oligonucleotide
  Antisense strand to SEQ ID NO: 705512
ucucucaggaggcauuucc

SEQ ID NO: 705514 - RNA, 19 nt, Artificial Sequence
  Description of Artificial Sequence: Synthetic oligonucleotide
  Sense strand starting at position 1321 of SEQ ID NO: 586274
guuggugagcuuugugagu

SEQ ID NO: 705515 - RNA, 19 nt, Artificial Sequence
  Description of Artificial Sequence: Synthetic oligonucleotide
  Antisense strand to SEQ ID NO: 705514
acucacaaagcucaccaac

SEQ ID NO: 705516 - RNA, 19 nt, Artificial Sequence
  Description of Artificial Sequence: Synthetic oligonucleotide
  Sense strand starting at position 1323 of SEQ ID NO: 586274
uggugagcuuugugaguga

SEQ ID NO: 705517 - RNA, 19 nt, Artificial Sequence
  Description of Artificial Sequence: Synthetic oligonucleotide
  Antisense strand to SEQ ID NO: 705516
ucacucacaaagcucacca

SEQ ID NO: 705518 - RNA, 19 nt, Artificial Sequence
  Description of Artificial Sequence: Synthetic oligonucleotide
  Sense strand starting at position 1326 of SEQ ID NO: 586274
ugagcuuugugagugagga

SEQ ID NO: 705519 - RNA, 19 nt, Artificial Sequence
  Description of Artificial Sequence: Synthetic oligonucleotide
  Antisense strand to SEQ ID NO: 705518
uccucacucacaaagcuca

SEQ ID NO: 705520 - RNA, 19 nt, Artificial Sequence
  Description of Artificial Sequence: Synthetic oligonucleotide
  Sense strand starting at position 1327 of SEQ ID NO: 586274
gagcuuugugagugaggau

SEQ ID NO: 705521 - RNA, 19 nt, Artificial Sequence
  Description of Artificial Sequence: Synthetic oligonucleotide
  Antisense strand to SEQ ID NO: 705520
auccucacucacaaagcuc

SEQ ID NO: 705522 - RNA, 19 nt, Artificial Sequence
  Description of Artificial Sequence: Synthetic oligonucleotide
  Sense strand starting at position 1452 of SEQ ID NO: 586274
uccggaagggucuggaaau

SEQ ID NO: 705523 - RNA, 19 nt, Artificial Sequence
  Description of Artificial Sequence: Synthetic oligonucleotide
  Antisense strand to SEQ ID NO: 705522
auuuccagacccuuccgga

SEQ ID NO: 705524 - RNA, 19 nt, Artificial Sequence
  Description of Artificial Sequence: Synthetic oligonucleotide
  Sense strand starting at position 1453 of SEQ ID NO: 586274
ccggaagggucuggaaaua

SEQ ID NO: 705525 - RNA, 19 nt, Artificial Sequence
  Description of Artificial Sequence: Synthetic oligonucleotide
  Antisense strand to SEQ ID NO: 705524
uauuuccagacccuuccgg

SEQ ID NO: 705526 - RNA, 19 nt, Artificial Sequence
  Description of Artificial Sequence: Synthetic oligonucleotide
  Sense strand starting at position 1506 of SEQ ID NO: 586274
cagaaauauugagguugga

SEQ ID NO: 705527 - RNA, 19 nt, Artificial Sequence
  Description of Artificial Sequence: Synthetic oligonucleotide
  Antisense strand to SEQ ID NO: 705526
uccaaccucaauauuucug

SEQ ID NO: 705528 - RNA, 19 nt, Artificial Sequence
  Description of Artificial Sequence: Synthetic oligonucleotide
  Sense strand starting at position 1522 of SEQ ID NO: 586274
ggaggucugcagcaagaaa

SEQ ID NO: 705529 - RNA, 19 nt, Artificial Sequence
  Description of Artificial Sequence: Synthetic oligonucleotide
  Antisense strand to SEQ ID NO: 705528
uuucuugcugcagaccucc

SEQ ID NO: 705530 - RNA, 19 nt, Artificial Sequence
  Description of Artificial Sequence: Synthetic oligonucleotide
  Sense strand starting at position 1639 of SEQ ID NO: 586274
cgcuaagguuggagugaga

SEQ ID NO: 705531 - RNA, 19 nt, Artificial Sequence
  Description of Artificial Sequence: Synthetic oligonucleotide
  Antisense strand to SEQ ID NO: 705530
ucucacuccaaccuuagcg

SEQ ID NO: 705532 - RNA, 19 nt, Artificial Sequence
  Description of Artificial Sequence: Synthetic oligonucleotide
  Sense strand starting at position 1753 of SEQ ID NO: 586274
guaggcauugcugacggua

SEQ ID NO: 705533 - RNA, 19 nt, Artificial Sequence
  Description of Artificial Sequence: Synthetic oligonucleotide
  Antisense strand to SEQ ID NO: 705532
uaccgucagcaaugccuac

SEQ ID NO: 705534 - RNA, 19 nt, Artificial Sequence
  Description of Artificial Sequence: Synthetic oligonucleotide
  Sense strand starting at position 1812 of SEQ ID NO: 586274
ggagcucuugcaggaacau

SEQ ID NO: 705535 - RNA, 19 nt, Artificial Sequence
  Description of Artificial Sequence: Synthetic oligonucleotide
  Antisense strand to SEQ ID NO: 705534
auguuccugcaagagcucc

SEQ ID NO: 705536 - RNA, 19 nt, Artificial Sequence
  Description of Artificial Sequence: Synthetic oligonucleotide
  Sense strand starting at position 1821 of SEQ ID NO: 586274
gcaggaacaucucgagauu

SEQ ID NO: 705537 - RNA, 19 nt, Artificial Sequence
  Description of Artificial Sequence: Synthetic oligonucleotide
  Antisense strand to SEQ ID NO: 705536
aaucucgagauguuccugc

SEQ ID NO: 705538 - RNA, 19 nt, Artificial Sequence
  Description of Artificial Sequence: Synthetic oligonucleotide
  Sense strand starting at position 1832 of SEQ ID NO: 586274
ucgagauuccauuaccuuc

SEQ ID NO: 705539 - RNA, 19 nt, Artificial Sequence
  Description of Artificial Sequence: Synthetic oligonucleotide
  Antisense strand to SEQ ID NO: 705538
gaagguaauggaaucucga

SEQ ID NO: 705540 - RNA, 19 nt, Artificial Sequence
  Description of Artificial Sequence: Synthetic oligonucleotide
  Sense strand starting at position 1859 of SEQ ID NO: 586274
uuuccaguuucucguauuu

SEQ ID NO: 705541 - RNA, 19 nt, Artificial Sequence
  Description of Artificial Sequence: Synthetic oligonucleotide
  Antisense strand to SEQ ID NO: 705540
aaauacgagaaacuggaaa

SEQ ID NO: 705542 - RNA, 19 nt, Artificial Sequence
  Description of Artificial Sequence: Synthetic oligonucleotide
  Sense strand starting at position 3363 of SEQ ID NO: 586274
cccgaauuuccuugugccu

SEQ ID NO: 705543 - RNA, 19 nt, Artificial Sequence
  Description of Artificial Sequence: Synthetic oligonucleotide
  Antisense strand to SEQ ID NO: 705542
aggcacaaggaaauucggg

SEQ ID NO: 705544 - RNA, 19 nt, Artificial Sequence
  Description of Artificial Sequence: Synthetic oligonucleotide
  Sense strand starting at position 3395 of SEQ ID NO: 586274
ugggaucccuagcgugaga

SEQ ID NO: 705545 - RNA, 19 nt, Artificial Sequence
  Description of Artificial Sequence: Synthetic oligonucleotide
  Antisense strand to SEQ ID NO: 705544
ucucacgcuagggauccca

SEQ ID NO: 705546 - RNA, 19 nt, Artificial Sequence
  Description of Artificial Sequence: Synthetic oligonucleotide
  Sense strand starting at position 91 of SEQ ID NO: 586275
gagagaaggucucuguccu

SEQ ID NO: 705547 - RNA, 19 nt, Artificial Sequence
  Description of Artificial Sequence: Synthetic oligonucleotide
  Antisense strand to SEQ ID NO: 705546
aggacagagaccuucucuc

SEQ ID NO: 705548 - RNA, 19 nt, Artificial Sequence
  Description of Artificial Sequence: Synthetic oligonucleotide
  Sense strand starting at position 289 of SEQ ID NO: 586275
agcagcuaucugggaccua

SEQ ID NO: 705549 - RNA, 19 nt, Artificial Sequence
  Description of Artificial Sequence: Synthetic oligonucleotide
  Antisense strand to SEQ ID NO: 705548
uaggucccagauagcugcu

SEQ ID NO: 705550 - RNA, 19 nt, Artificial Sequence
  Description of Artificial Sequence: Synthetic oligonucleotide
  Sense strand starting at position 393 of SEQ ID NO: 586275
ggaauuaccugccucgcaa

SEQ ID NO: 705551 - RNA, 19 nt, Artificial Sequence
  Description of Artificial Sequence: Synthetic oligonucleotide
  Antisense strand to SEQ ID NO: 705550
uugcgaggcagguaauucc

SEQ ID NO: 705552 - RNA, 19 nt, Artificial Sequence
  Description of Artificial Sequence: Synthetic oligonucleotide
  Sense strand starting at position 793 of SEQ ID NO: 586275
cggcuucggcggagagaaa

SEQ ID NO: 705553 - RNA, 19 nt, Artificial Sequence
  Description of Artificial Sequence: Synthetic oligonucleotide
  Antisense strand to SEQ ID NO: 705552
uuucucuccgccgaagccg

SEQ ID NO: 705554 - RNA, 19 nt, Artificial Sequence
  Description of Artificial Sequence: Synthetic oligonucleotide
  Sense strand starting at position 941 of SEQ ID NO: 586275
gcauuccuccgcgacuaca

SEQ ID NO: 705555 - RNA, 19 nt, Artificial Sequence
  Description of Artificial Sequence: Synthetic oligonucleotide
  Antisense strand to SEQ ID NO: 705554
uguagucgcggaggaaugc

SEQ ID NO: 705556 - RNA, 19 nt, Artificial Sequence
  Description of Artificial Sequence: Synthetic oligonucleotide
  Sense strand starting at position 1191 of SEQ ID NO: 586275
uguguuuaacuccaauauu

SEQ ID NO: 705557 - RNA, 19 nt, Artificial Sequence
  Description of Artificial Sequence: Synthetic oligonucleotide
  Antisense strand to SEQ ID NO: 705556
aauauuggaguuaaacaca

SEQ ID NO: 705558 - RNA, 19 nt, Artificial Sequence
  Description of Artificial Sequence: Synthetic oligonucleotide
  Sense strand starting at position 1318 of SEQ ID NO: 586275
caggaagccugcguuaaca

SEQ ID NO: 705559 - RNA, 19 nt, Artificial Sequence
  Description of Artificial Sequence: Synthetic oligonucleotide
  Antisense strand to SEQ ID NO: 705558
uguuaacgcaggcuuccug

SEQ ID NO: 705560 - RNA, 19 nt, Artificial Sequence
  Description of Artificial Sequence: Synthetic oligonucleotide
  Sense strand starting at position 1320 of SEQ ID NO: 586275
ggaagccugcguuaacauu

SEQ ID NO: 705561 - RNA, 19 nt, Artificial Sequence
  Description of Artificial Sequence: Synthetic oligonucleotide
  Antisense strand to SEQ ID NO: 705560
aauguuaacgcaggcuucc

SEQ ID NO: 705562 - RNA, 19 nt, Artificial Sequence
  Description of Artificial Sequence: Synthetic oligonucleotide
  Sense strand starting at position 1332 of SEQ ID NO: 586275
uaacauuuaucucguggag

SEQ ID NO: 705563 - RNA, 19 nt, Artificial Sequence
  Description of Artificial Sequence: Synthetic oligonucleotide
  Antisense strand to SEQ ID NO: 705562
cuccacgagauaaauguua

SEQ ID NO: 705564 - RNA, 19 nt, Artificial Sequence
  Description of Artificial Sequence: Synthetic oligonucleotide
  Sense strand starting at position 1469 of SEQ ID NO: 586275
gugaauuauuaugugagug

SEQ ID NO: 705565 - RNA, 19 nt, Artificial Sequence
  Description of Artificial Sequence: Synthetic oligonucleotide
  Antisense strand to SEQ ID NO: 705564
cacucacauaauaauucac

SEQ ID NO: 705566 - RNA, 19 nt, Artificial Sequence
  Description of Artificial Sequence: Synthetic oligonucleotide
  Sense strand starting at position 1470 of SEQ ID NO: 586275
ugaauuauuaugugagugu

SEQ ID NO: 705567 - RNA, 19 nt, Artificial Sequence
  Description of Artificial Sequence: Synthetic oligonucleotide
  Antisense strand to SEQ ID NO: 705566
acacucacauaauaauuca

SEQ ID NO: 705568 - RNA, 19 nt, Artificial Sequence
  Description of Artificial Sequence: Synthetic oligonucleotide
  Sense strand starting at position 1474 of SEQ ID NO: 586275
uuauuaugugaguguccga

SEQ ID NO: 705569 - RNA, 19 nt, Artificial Sequence
  Description of Artificial Sequence: Synthetic oligonucleotide
  Antisense strand to SEQ ID NO: 705568
ucggacacucacauaauaa

SEQ ID NO: 705570 - RNA, 19 nt, Artificial Sequence
  Description of Artificial Sequence: Synthetic oligonucleotide
  Sense strand starting at position 1500 of SEQ ID NO: 586275
uccaguuccguuuggagaa

SEQ ID NO: 705571 - RNA, 19 nt, Artificial Sequence
  Description of Artificial Sequence: Synthetic oligonucleotide
  Antisense strand to SEQ ID NO: 705570
uucuccaaacggaacugga

SEQ ID NO: 705572 - RNA, 19 nt, Artificial Sequence
  Description of Artificial Sequence: Synthetic oligonucleotide
  Sense strand starting at position 1699 of SEQ ID NO: 586275
agccgauuccaaggaaaca

SEQ ID NO: 705573 - RNA, 19 nt, Artificial Sequence
  Description of Artificial Sequence: Synthetic oligonucleotide
  Antisense strand to SEQ ID NO: 705572
uguuuccuuggaaucggcu

SEQ ID NO: 705574 - RNA, 19 nt, Artificial Sequence
  Description of Artificial Sequence: Synthetic oligonucleotide
  Sense strand starting at position 2198 of SEQ ID NO: 586275
gcaagaaagugugcaaauu

SEQ ID NO: 705575 - RNA, 19 nt, Artificial Sequence
  Description of Artificial Sequence: Synthetic oligonucleotide
  Antisense strand to SEQ ID NO: 705574
aauuugcacacuuucuugc

SEQ ID NO: 705576 - RNA, 19 nt, Artificial Sequence
  Description of Artificial Sequence: Synthetic oligonucleotide
  Sense strand starting at position 2199 of SEQ ID NO: 586275
caagaaagugugcaaauua

SEQ ID NO: 705577 - RNA, 19 nt, Artificial Sequence
  Description of Artificial Sequence: Synthetic oligonucleotide
  Antisense strand to SEQ ID NO: 705576
uaauuugcacacuuucuug

SEQ ID NO: 705578 - RNA, 19 nt, Artificial Sequence
  Description of Artificial Sequence: Synthetic oligonucleotide
  Sense strand starting at position 2360 of SEQ ID NO: 586275
uuucgcugaaacuguagua

SEQ ID NO: 705579 - RNA, 19 nt, Artificial Sequence
  Description of Artificial Sequence: Synthetic oligonucleotide
  Antisense strand to SEQ ID NO: 705578
uacuacaguuucagcgaaa

SEQ ID NO: 705580 - RNA, 19 nt, Artificial Sequence
  Description of Artificial Sequence: Synthetic oligonucleotide
  Sense strand starting at position 2402 of SEQ ID NO: 586275
gcggcauuagugggagaga

SEQ ID NO: 705581 - RNA, 19 nt, Artificial Sequence
  Description of Artificial Sequence: Synthetic oligonucleotide
  Antisense strand to SEQ ID NO: 705580
ucucucccacuaaugccgc

SEQ ID NO: 705582 - RNA, 19 nt, Artificial Sequence
  Description of Artificial Sequence: Synthetic oligonucleotide
  Sense strand starting at position 2501 of SEQ ID NO: 586275
gggcauccucacuguguga

SEQ ID NO: 705583 - RNA, 19 nt, Artificial Sequence
  Description of Artificial Sequence: Synthetic oligonucleotide
  Antisense strand to SEQ ID NO: 705582
ucacacagugaggaugccc

SEQ ID NO: 705584 - RNA, 19 nt, Artificial Sequence
  Description of Artificial Sequence: Synthetic oligonucleotide
  Sense strand starting at position 2794 of SEQ ID NO: 586275
ggauaugguuuggaaauug

SEQ ID NO: 705585 - RNA, 19 nt, Artificial Sequence
  Description of Artificial Sequence: Synthetic oligonucleotide
  Antisense strand to SEQ ID NO: 705584
caauuuccaaaccauaucc

SEQ ID NO: 705586 - RNA, 19 nt, Artificial Sequence
  Description of Artificial Sequence: Synthetic oligonucleotide
  Sense strand starting at position 2817 of SEQ ID NO: 586275
gcacucuuaugguuaacga

SEQ ID NO: 705587 - RNA, 19 nt, Artificial Sequence
  Description of Artificial Sequence: Synthetic oligonucleotide
  Antisense strand to SEQ ID NO: 705586
ucguuaaccauaagagugc

SEQ ID NO: 705588 - RNA, 19 nt, Artificial Sequence
  Description of Artificial Sequence: Synthetic oligonucleotide
  Sense strand starting at position 2818 of SEQ ID NO: 586275
cacucuuaugguuaacgau

SEQ ID NO: 705589 - RNA, 19 nt, Artificial Sequence
  Description of Artificial Sequence: Synthetic oligonucleotide
  Antisense strand to SEQ ID NO: 705588
aucguuaaccauaagagug

SEQ ID NO: 705590 - RNA, 19 nt, Artificial Sequence
  Description of Artificial Sequence: Synthetic oligonucleotide
  Sense strand starting at position 2826 of SEQ ID NO: 586275
ugguuaacgaucuacuuga

SEQ ID NO: 705591 - RNA, 19 nt, Artificial Sequence
  Description of Artificial Sequence: Synthetic oligonucleotide
  Antisense strand to SEQ ID NO: 705590
ucaaguagaucguuaacca

SEQ ID NO: 705592 - RNA, 19 nt, Artificial Sequence
  Description of Artificial Sequence: Synthetic oligonucleotide
  Sense strand starting at position 2990 of SEQ ID NO: 586275
guuuaaaugcauuauugga

SEQ ID NO: 705593 - RNA, 19 nt, Artificial Sequence
  Description of Artificial Sequence: Synthetic oligonucleotide
  Antisense strand to SEQ ID NO: 705592
uccaauaaugcauuuaaac

SEQ ID NO: 705594 - RNA, 19 nt, Artificial Sequence
  Description of Artificial Sequence: Synthetic oligonucleotide
  Sense strand starting at position 3041 of SEQ ID NO: 586275
acuuuaccugcugagaaac

SEQ ID NO: 705595 - RNA, 19 nt, Artificial Sequence
  Description of Artificial Sequence: Synthetic oligonucleotide
  Antisense strand to SEQ ID NO: 705594
guuucucagcagguaaagu

SEQ ID NO: 705596 - RNA, 19 nt, Artificial Sequence
  Description of Artificial Sequence: Synthetic oligonucleotide
  Sense strand starting at position 3165 of SEQ ID NO: 586275
gaaagaauuugguguucuc

SEQ ID NO: 705597 - RNA, 19 nt, Artificial Sequence
  Description of Artificial Sequence: Synthetic oligonucleotide
  Antisense strand to SEQ ID NO: 705596
gagaacaccaaauucuuuc

SEQ ID NO: 705598 - RNA, 19 nt, Artificial Sequence
  Description of Artificial Sequence: Synthetic oligonucleotide
  Sense strand starting at position 3197 of SEQ ID NO: 586275
ucuguagaauacuugaaac

SEQ ID NO: 705599 - RNA, 19 nt, Artificial Sequence
  Description of Artificial Sequence: Synthetic oligonucleotide
  Antisense strand to SEQ ID NO: 705598
guuucaaguauucuacaga

SEQ ID NO: 705600 - RNA, 19 nt, Artificial Sequence
  Description of Artificial Sequence: Synthetic oligonucleotide
  Sense strand starting at position 3258 of SEQ ID NO: 586275
acuuaagugcuuuguagaa

SEQ ID NO: 705601 - RNA, 19 nt, Artificial Sequence
  Description of Artificial Sequence: Synthetic oligonucleotide
  Antisense strand to SEQ ID NO: 705600
uucuacaaagcacuuaagu

SEQ ID NO: 705602 - RNA, 19 nt, Artificial Sequence
  Description of Artificial Sequence: Synthetic oligonucleotide
  Sense strand starting at position 3398 of SEQ ID NO: 586275
uauguuauagugugaggua

SEQ ID NO: 705603 - RNA, 19 nt, Artificial Sequence
  Description of Artificial Sequence: Synthetic oligonucleotide
  Antisense strand to SEQ ID NO: 705602
uaccucacacuauaacaua

SEQ ID NO: 705604 - RNA, 19 nt, Artificial Sequence
  Description of Artificial Sequence: Synthetic oligonucleotide
  Sense strand starting at position 3411 of SEQ ID NO: 586275
gagguaaggcuagggaaau

SEQ ID NO: 705605 - RNA, 19 nt, Artificial Sequence
  Description of Artificial Sequence: Synthetic oligonucleotide
  Antisense strand to SEQ ID NO: 705604
auuucccuagccuuaccuc

SEQ ID NO: 705606 - RNA, 19 nt, Artificial Sequence
  Description of Artificial Sequence: Synthetic oligonucleotide
  Sense strand starting at position 3507 of SEQ ID NO: 586275
auuguaugucuuuaagcuu

SEQ ID NO: 705607 - RNA, 19 nt, Artificial Sequence
  Description of Artificial Sequence: Synthetic oligonucleotide
  Antisense strand to SEQ ID NO: 705606
aagcuuaaagacauacaau

SEQ ID NO: 705608 - RNA, 19 nt, Artificial Sequence
  Description of Artificial Sequence: Synthetic oligonucleotide
  Sense strand starting at position 3510 of SEQ ID NO: 586275
guaugucuuuaagcuuaag

SEQ ID NO: 705609 - RNA, 19 nt, Artificial Sequence
  Description of Artificial Sequence: Synthetic oligonucleotide
  Antisense strand to SEQ ID NO: 705608
cuuaagcuuaaagacauac

SEQ ID NO: 705610 - RNA, 19 nt, Artificial Sequence
  Description of Artificial Sequence: Synthetic oligonucleotide
  Sense strand starting at position 3513 of SEQ ID NO: 586275
ugucuuuaagcuuaagaua

SEQ ID NO: 705611 - RNA, 19 nt, Artificial Sequence
  Description of Artificial Sequence: Synthetic oligonucleotide
  Antisense strand to SEQ ID NO: 705610
uaucuuaagcuuaaagaca

SEQ ID NO: 705612 - RNA, 19 nt, Artificial Sequence
  Description of Artificial Sequence: Synthetic oligonucleotide
  Sense strand starting at position 3541 of SEQ ID NO: 586275
auacauuuguguuaagagc

SEQ ID NO: 705613 - RNA, 19 nt, Artificial Sequence
  Description of Artificial Sequence: Synthetic oligonucleotide
  Antisense strand to SEQ ID NO: 705612
gcucuuaacacaaauguau

SEQ ID NO: 705614 - RNA, 19 nt, Artificial Sequence
  Description of Artificial Sequence: Synthetic oligonucleotide
  Sense strand starting at position 3549 of SEQ ID NO: 586275
guguuaagagcaugucuuc

SEQ ID NO: 705615 - RNA, 19 nt, Artificial Sequence
  Description of Artificial Sequence: Synthetic oligonucleotide
  Antisense strand to SEQ ID NO: 705614
gaagacaugcucuuaacac

SEQ ID NO: 705616 - RNA, 19 nt, Artificial Sequence
  Description of Artificial Sequence: Synthetic oligonucleotide
  Sense strand starting at position 3552 of SEQ ID NO: 586275
uuaagagcaugucuucuaa

SEQ ID NO: 705617 - RNA, 19 nt, Artificial Sequence
  Description of Artificial Sequence: Synthetic oligonucleotide
  Antisense strand to SEQ ID NO: 705616
uuagaagacaugcucuuaa

SEQ ID NO: 705618 - RNA, 19 nt, Artificial Sequence
  Description of Artificial Sequence: Synthetic oligonucleotide
  Sense strand starting at position 3849 of SEQ ID NO: 586275
agcacaucauggcuagaau

SEQ ID NO: 705619 - RNA, 19 nt, Artificial Sequence
  Description of Artificial Sequence: Synthetic oligonucleotide
  Antisense strand to SEQ ID NO: 705618
auucuagccaugaugugcu

SEQ ID NO: 705620 - RNA, 19 nt, Artificial Sequence
  Description of Artificial Sequence: Synthetic oligonucleotide
  Sense strand starting at position 3850 of SEQ ID NO: 586275
gcacaucauggcuagaauu

SEQ ID NO: 705621 - RNA, 19 nt, Artificial Sequence
  Description of Artificial Sequence: Synthetic oligonucleotide
  Antisense strand to SEQ ID NO: 705620
aauucuagccaugaugugc

SEQ ID NO: 705622 - RNA, 19 nt, Artificial Sequence
  Description of Artificial Sequence: Synthetic oligonucleotide
  Sense strand starting at position 3935 of SEQ ID NO: 586275
uuucuacacuggguugaau

SEQ ID NO: 705623 - RNA, 19 nt, Artificial Sequence
  Description of Artificial Sequence: Synthetic oligonucleotide
  Antisense strand to SEQ ID NO: 705622
auucaacccaguguagaaa

SEQ ID NO: 705624 - RNA, 19 nt, Artificial Sequence
  Description of Artificial Sequence: Synthetic oligonucleotide
  Sense strand starting at position 3959 of SEQ ID NO: 586275
guuacugaauuugacaaca

SEQ ID NO: 705625 - RNA, 19 nt, Artificial Sequence
  Description of Artificial Sequence: Synthetic oligonucleotide
  Antisense strand to SEQ ID NO: 705624
uguugucaaauucaguaac

SEQ ID NO: 705626 - RNA, 19 nt, Artificial Sequence
  Description of Artificial Sequence: Synthetic oligonucleotide
  Sense strand starting at position 46 of SEQ ID NO: 586276
ugugcuuauuuacaucauu

SEQ ID NO: 705627 - RNA, 19 nt, Artificial Sequence
  Description of Artificial Sequence: Synthetic oligonucleotide
  Antisense strand to SEQ ID NO: 705626
aaugauguaaauaagcaca

SEQ ID NO: 705628 - RNA, 19 nt, Artificial Sequence
  Description of Artificial Sequence: Synthetic oligonucleotide
  Sense strand starting at position 83 of SEQ ID NO: 586276
guaggcauguauuuguuga

SEQ ID NO: 705629 - RNA, 19 nt, Artificial Sequence
  Description of Artificial Sequence: Synthetic oligonucleotide
  Antisense strand to SEQ ID NO: 705628
ucaacaaauacaugccuac

SEQ ID NO: 705630 - RNA, 19 nt, Artificial Sequence
  Description of Artificial Sequence: Synthetic oligonucleotide
  Sense strand starting at position 220 of SEQ ID NO: 586276
agcuaugcaucucuguuua

SEQ ID NO: 705631 - RNA, 19 nt, Artificial Sequence
  Description of Artificial Sequence: Synthetic oligonucleotide
  Antisense strand to SEQ ID NO: 705630
uaaacagagaugcauagcu

SEQ ID NO: 705632 - RNA, 19 nt, Artificial Sequence
  Description of Artificial Sequence: Synthetic oligonucleotide
  Sense strand starting at position 420 of SEQ ID NO: 586276
gcagaacauuuaugaucua

SEQ ID NO: 705633 - RNA, 19 nt, Artificial Sequence
  Description of Artificial Sequence: Synthetic oligonucleotide
  Antisense strand to SEQ ID NO: 705632
uagaucauaaauguucugc

SEQ ID NO: 705634 - RNA, 19 nt, Artificial Sequence
  Description of Artificial Sequence: Synthetic oligonucleotide
  Sense strand starting at position 462 of SEQ ID NO: 586276
auuuaacccuuuggagaau

SEQ ID NO: 705635 - RNA, 19 nt, Artificial Sequence
  Description of Artificial Sequence: Synthetic oligonucleotide
  Antisense strand to SEQ ID NO: 705634
auucuccaaaggguuaaau

SEQ ID NO: 705636 - RNA, 19 nt, Artificial Sequence
  Description of Artificial Sequence: Synthetic oligonucleotide
  Sense strand starting at position 463 of SEQ ID NO: 586276
uuuaacccuuuggagaauu

SEQ ID NO: 705637 - RNA, 19 nt, Artificial Sequence
  Description of Artificial Sequence: Synthetic oligonucleotide
  Antisense strand to SEQ ID NO: 705636
aauucuccaaaggguuaaa

SEQ ID NO: 705638 - RNA, 19 nt, Artificial Sequence
  Description of Artificial Sequence: Synthetic oligonucleotide
  Sense strand starting at position 488 of SEQ ID NO: 586276
aagaguauguccgcccaga

SEQ ID NO: 705639 - RNA, 19 nt, Artificial Sequence
  Description of Artificial Sequence: Synthetic oligonucleotide
  Antisense strand to SEQ ID NO: 705638
ucugggcggacauacucuu

SEQ ID NO: 705640 - RNA, 19 nt, Artificial Sequence
  Description of Artificial Sequence: Synthetic oligonucleotide
  Sense strand starting at position 493 of SEQ ID NO: 586276
uauguccgcccagagauau

SEQ ID NO: 705641 - RNA, 19 nt, Artificial Sequence
  Description of Artificial Sequence: Synthetic oligonucleotide
  Antisense strand to SEQ ID NO: 705640
auaucucugggcggacaua

SEQ ID NO: 705642 - RNA, 19 nt, Artificial Sequence
  Description of Artificial Sequence: Synthetic oligonucleotide
  Sense strand starting at position 499 of SEQ ID NO: 586276
cgcccagagauauaaagua

SEQ ID NO: 705643 - RNA, 19 nt, Artificial Sequence
  Description of Artificial Sequence: Synthetic oligonucleotide
  Antisense strand to SEQ ID NO: 705642
uacuuuauaucucugggcg

SEQ ID NO: 705644 - RNA, 19 nt, Artificial Sequence
  Description of Artificial Sequence: Synthetic oligonucleotide
  Sense strand starting at position 554 of SEQ ID NO: 586276
uuaugacgcuguuugagau

SEQ ID NO: 705645 - RNA, 19 nt, Artificial Sequence
  Description of Artificial Sequence: Synthetic oligonucleotide
  Antisense strand to SEQ ID NO: 705644
aucucaaacagcgucauaa

SEQ ID NO: 705646 - RNA, 19 nt, Artificial Sequence
  Description of Artificial Sequence: Synthetic oligonucleotide
  Sense strand starting at position 555 of SEQ ID NO: 586276
uaugacgcuguuugagauu

SEQ ID NO: 705647 - RNA, 19 nt, Artificial Sequence
  Description of Artificial Sequence: Synthetic oligonucleotide
  Antisense strand to SEQ ID NO: 705646
aaucucaaacagcgucaua

SEQ ID NO: 705648 - RNA, 19 nt, Artificial Sequence
  Description of Artificial Sequence: Synthetic oligonucleotide
  Sense strand starting at position 561 of SEQ ID NO: 586276
gcuguuugagauugggcau

SEQ ID NO: 705649 - RNA, 19 nt, Artificial Sequence
  Description of Artificial Sequence: Synthetic oligonucleotide
  Antisense strand to SEQ ID NO: 705648
augcccaaucucaaacagc

SEQ ID NO: 705650 - RNA, 19 nt, Artificial Sequence
  Description of Artificial Sequence: Synthetic oligonucleotide
  Sense strand starting at position 607 of SEQ ID NO: 586276
gagucauucuuacuacgca

SEQ ID NO: 705651 - RNA, 19 nt, Artificial Sequence
  Description of Artificial Sequence: Synthetic oligonucleotide
  Antisense strand to SEQ ID NO: 705650
ugcguaguaagaaugacuc

SEQ ID NO: 705652 - RNA, 19 nt, Artificial Sequence
  Description of Artificial Sequence: Synthetic oligonucleotide
  Sense strand starting at position 643 of SEQ ID NO: 586276
cugagaguaugacuggcaa

SEQ ID NO: 705653 - RNA, 19 nt, Artificial Sequence
  Description of Artificial Sequence: Synthetic oligonucleotide
  Antisense strand to SEQ ID NO: 705652
uugccagucauacucucag

SEQ ID NO: 705654 - RNA, 19 nt, Artificial Sequence
  Description of Artificial Sequence: Synthetic oligonucleotide
  Sense strand starting at position 680 of SEQ ID NO: 586276
gcaucuuguuaaccugauu

SEQ ID NO: 705655 - RNA, 19 nt, Artificial Sequence
  Description of Artificial Sequence: Synthetic oligonucleotide
  Antisense strand to SEQ ID NO: 705654
aaucagguuaacaagaugc

SEQ ID NO: 705656 - RNA, 19 nt, Artificial Sequence
  Description of Artificial Sequence: Synthetic oligonucleotide
  Sense strand starting at position 705 of SEQ ID NO: 586276
uggcuccacccauaaaguu

SEQ ID NO: 705657 - RNA, 19 nt, Artificial Sequence
  Description of Artificial Sequence: Synthetic oligonucleotide
  Antisense strand to SEQ ID NO: 705656
aacuuuauggguggagcca

SEQ ID NO: 705658 - RNA, 19 nt, Artificial Sequence
  Description of Artificial Sequence: Synthetic oligonucleotide
  Sense strand starting at position 721 of SEQ ID NO: 586276
guucccacugauuaucaca

SEQ ID NO: 705659 - RNA, 19 nt, Artificial Sequence
  Description of Artificial Sequence: Synthetic oligonucleotide
  Antisense strand to SEQ ID NO: 705658
ugugauaaucagugggaac

SEQ ID NO: 705660 - RNA, 19 nt, Artificial Sequence
  Description of Artificial Sequence: Synthetic oligonucleotide
  Sense strand starting at position 842 of SEQ ID NO: 586276
ggcuuauccugucccuaaa

SEQ ID NO: 705661 - RNA, 19 nt, Artificial Sequence
  Description of Artificial Sequence: Synthetic oligonucleotide
  Antisense strand to SEQ ID NO: 705660
uuuagggacaggauaagcc

SEQ ID NO: 705662 - RNA, 19 nt, Artificial Sequence
  Description of Artificial Sequence: Synthetic oligonucleotide
  Sense strand starting at position 1091 of SEQ ID NO: 586276
cuuucugggccugaggauu

SEQ ID NO: 705663 - RNA, 19 nt, Artificial Sequence
  Description of Artificial Sequence: Synthetic oligonucleotide
  Antisense strand to SEQ ID NO: 705662
aauccucaggcccagaaag

SEQ ID NO: 705664 - RNA, 19 nt, Artificial Sequence
  Description of Artificial Sequence: Synthetic oligonucleotide
  Sense strand starting at position 1501 of SEQ ID NO: 586276
cggagaucggucuagcuuu

SEQ ID NO: 705665 - RNA, 19 nt, Artificial Sequence
  Description of Artificial Sequence: Synthetic oligonucleotide
  Antisense strand to SEQ ID NO: 705664
aaagcuagaccgaucuccg

SEQ ID NO: 705666 - RNA, 19 nt, Artificial Sequence
  Description of Artificial Sequence: Synthetic oligonucleotide
  Sense strand starting at position 1555 of SEQ ID NO: 586276
gggcuuucgccgcugcaga

SEQ ID NO: 705667 - RNA, 19 nt, Artificial Sequence
  Description of Artificial Sequence: Synthetic oligonucleotide
  Antisense strand to SEQ ID NO: 705666
ucugcagcggcgaaagccc

SEQ ID NO: 705668 - RNA, 19 nt, Artificial Sequence
  Description of Artificial Sequence: Synthetic oligonucleotide
  Sense strand starting at position 1747 of SEQ ID NO: 586276
gcgcgucucaguccagaau

SEQ ID NO: 705669 - RNA, 19 nt, Artificial Sequence
  Description of Artificial Sequence: Synthetic oligonucleotide
  Antisense strand to SEQ ID NO: 705668
auucuggacugagacgcgc

SEQ ID NO: 705670 - RNA, 19 nt, Artificial Sequence
  Description of Artificial Sequence: Synthetic oligonucleotide
  Sense strand starting at position 1750 of SEQ ID NO: 586276
cgucucaguccagaaucau

SEQ ID NO: 705671 - RNA, 19 nt, Artificial Sequence
  Description of Artificial Sequence: Synthetic oligonucleotide
  Antisense strand to SEQ ID NO: 705670
augauucuggacugagacg

SEQ ID NO: 705672 - RNA, 19 nt, Artificial Sequence
  Description of Artificial Sequence: Synthetic oligonucleotide
  Sense strand starting at position 1924 of SEQ ID NO: 586276
cuuccugguuccuccgaga

SEQ ID NO: 705673 - RNA, 19 nt, Artificial Sequence
  Description of Artificial Sequence: Synthetic oligonucleotide
  Antisense strand to SEQ ID NO: 705672
ucucggaggaaccaggaag

SEQ ID NO: 705674 - RNA, 19 nt, Artificial Sequence
  Description of Artificial Sequence: Synthetic oligonucleotide
  Sense strand starting at position 2112 of SEQ ID NO: 586276
cgucaaugucacggcuuaa

SEQ ID NO: 705675 - RNA, 19 nt, Artificial Sequence
  Description of Artificial Sequence: Synthetic oligonucleotide
  Antisense strand to SEQ ID NO: 705674
uuaagccgugacauugacg

SEQ ID NO: 705676 - RNA, 19 nt, Artificial Sequence
  Description of Artificial Sequence: Synthetic oligonucleotide
  Sense strand starting at position 2116 of SEQ ID NO: 586276
aaugucacggcuuaauauu

SEQ ID NO: 705677 - RNA, 19 nt, Artificial Sequence
  Description of Artificial Sequence: Synthetic oligonucleotide
  Antisense strand to SEQ ID NO: 705676
aauauuaagccgugacauu

SEQ ID NO: 705678 - RNA, 19 nt, Artificial Sequence
  Description of Artificial Sequence: Synthetic oligonucleotide
  Sense strand starting at position 2136 of SEQ ID NO: 586276
aucccuauaucauuguguu

SEQ ID NO: 705679 - RNA, 19 nt, Artificial Sequence
  Description of Artificial Sequence: Synthetic oligonucleotide
  Antisense strand to SEQ ID NO: 705678
aacacaaugauauagggau

SEQ ID NO: 705680 - RNA, 19 nt, Artificial Sequence
  Description of Artificial Sequence: Synthetic oligonucleotide
  Sense strand starting at position 2137 of SEQ ID NO: 586276
ucccuauaucauuguguug

SEQ ID NO: 705681 - RNA, 19 nt, Artificial Sequence
  Description of Artificial Sequence: Synthetic oligonucleotide
  Antisense strand to SEQ ID NO: 705680
caacacaaugauauaggga

SEQ ID NO: 705682 - RNA, 19 nt, Artificial Sequence
  Description of Artificial Sequence: Synthetic oligonucleotide
  Sense strand starting at position 2349 of SEQ ID NO: 586276
ucagacaucugcucagaaa

SEQ ID NO: 705683 - RNA, 19 nt, Artificial Sequence
  Description of Artificial Sequence: Synthetic oligonucleotide
  Antisense strand to SEQ ID NO: 705682
uuucugagcagaugucuga

SEQ ID NO: 705684 - RNA, 19 nt, Artificial Sequence
  Description of Artificial Sequence: Synthetic oligonucleotide
  Sense strand starting at position 2451 of SEQ ID NO: 586276
aaaggagucucgguuggaa

SEQ ID NO: 705685 - RNA, 19 nt, Artificial Sequence
  Description of Artificial Sequence: Synthetic oligonucleotide
  Antisense strand to SEQ ID NO: 705684
uuccaaccgagacuccuuu

SEQ ID NO: 705686 - RNA, 19 nt, Artificial Sequence
  Description of Artificial Sequence: Synthetic oligonucleotide
  Sense strand starting at position 2453 of SEQ ID NO: 586276
aggagucucgguuggaaac

SEQ ID NO: 705687 - RNA, 19 nt, Artificial Sequence
  Description of Artificial Sequence: Synthetic oligonucleotide
  Antisense strand to SEQ ID NO: 705686
guuuccaaccgagacuccu

SEQ ID NO: 705688 - RNA, 19 nt, Artificial Sequence
  Description of Artificial Sequence: Synthetic oligonucleotide
  Sense strand starting at position 2630 of SEQ ID NO: 586276
ggguguucgccacaauuuc

SEQ ID NO: 705689 - RNA, 19 nt, Artificial Sequence
  Description of Artificial Sequence: Synthetic oligonucleotide
  Antisense strand to SEQ ID NO: 705688
gaaauuguggcgaacaccc

SEQ ID NO: 705690 - RNA, 19 nt, Artificial Sequence
  Description of Artificial Sequence: Synthetic oligonucleotide
  Sense strand starting at position 2647 of SEQ ID NO: 586276
ucgcuugucgucuccuuaa

SEQ ID NO: 705691 - RNA, 19 nt, Artificial Sequence
  Description of Artificial Sequence: Synthetic oligonucleotide
  Antisense strand to SEQ ID NO: 705690
uuaaggagacgacaagcga

SEQ ID NO: 705692 - RNA, 19 nt, Artificial Sequence
  Description of Artificial Sequence: Synthetic oligonucleotide
  Sense strand starting at position 2650 of SEQ ID NO: 586276
cuugucgucuccuuaaaga

SEQ ID NO: 705693 - RNA, 19 nt, Artificial Sequence
  Description of Artificial Sequence: Synthetic oligonucleotide
  Antisense strand to SEQ ID NO: 705692
ucuuuaaggagacgacaag

SEQ ID NO: 705694 - RNA, 19 nt, Artificial Sequence
  Description of Artificial Sequence: Synthetic oligonucleotide
  Sense strand starting at position 2801 of SEQ ID NO: 586276
gagagaaggucucuguccu

SEQ ID NO: 705695 - RNA, 19 nt, Artificial Sequence
  Description of Artificial Sequence: Synthetic oligonucleotide
  Antisense strand to SEQ ID NO: 705694
aggacagagaccuucucuc

SEQ ID NO: 705696 - RNA, 19 nt, Artificial Sequence
  Description of Artificial Sequence: Synthetic oligonucleotide
  Sense strand starting at position 2999 of SEQ ID NO: 586276
agcagcuaucugggaccua

SEQ ID NO: 705697 - RNA, 19 nt, Artificial Sequence
  Description of Artificial Sequence: Synthetic oligonucleotide
  Antisense strand to SEQ ID NO: 705696
uaggucccagauagcugcu

SEQ ID NO: 705698 - RNA, 19 nt, Artificial Sequence
  Description of Artificial Sequence: Synthetic oligonucleotide
  Sense strand starting at position 3103 of SEQ ID NO: 586276
ggaauuaccugccucgcaa

SEQ ID NO: 705699 - RNA, 19 nt, Artificial Sequence
  Description of Artificial Sequence: Synthetic oligonucleotide
  Antisense strand to SEQ ID NO: 705698
uugcgaggcagguaauucc

SEQ ID NO: 705700 - RNA, 19 nt, Artificial Sequence
  Description of Artificial Sequence: Synthetic oligonucleotide
  Sense strand starting at position 3503 of SEQ ID NO: 586276
cggcuucggcggagagaaa

SEQ ID NO: 705701 - RNA, 19 nt, Artificial Sequence
  Description of Artificial Sequence: Synthetic oligonucleotide
  Antisense strand to SEQ ID NO: 705700
uuucucuccgccgaagccg

SEQ ID NO: 705702 - RNA, 19 nt, Artificial Sequence
  Description of Artificial Sequence: Synthetic oligonucleotide
  Sense strand starting at position 3651 of SEQ ID NO: 586276
gcauuccuccgcgacuaca

SEQ ID NO: 705703 - RNA, 19 nt, Artificial Sequence
  Description of Artificial Sequence: Synthetic oligonucleotide
  Antisense strand to SEQ ID NO: 705702
uguagucgcggaggaaugc

SEQ ID NO: 705704 - RNA, 19 nt, Artificial Sequence
  Description of Artificial Sequence: Synthetic oligonucleotide
  Sense strand starting at position 3901 of SEQ ID NO: 586276
uguguuuaacuccaauauu

SEQ ID NO: 705705 - RNA, 19 nt, Artificial Sequence
  Description of Artificial Sequence: Synthetic oligonucleotide
  Antisense strand to SEQ ID NO: 705704
aauauuggaguuaaacaca

SEQ ID NO: 705706 - RNA, 19 nt, Artificial Sequence
  Description of Artificial Sequence: Synthetic oligonucleotide
  Sense strand starting at position 86 of SEQ ID NO: 586277
guguuucuguuaucaggaa

SEQ ID NO: 705707 - RNA, 19 nt, Artificial Sequence
  Description of Artificial Sequence: Synthetic oligonucleotide
  Antisense strand to SEQ ID NO: 705706
uuccugauaacagaaacac

SEQ ID NO: 705708 - RNA, 19 nt, Artificial Sequence
  Description of Artificial Sequence: Synthetic oligonucleotide
  Sense strand starting at position 90 of SEQ ID NO: 586277
uucuguuaucaggaagccu

SEQ ID NO: 705709 - RNA, 19 nt, Artificial Sequence
  Description of Artificial Sequence: Synthetic oligonucleotide
  Antisense strand to SEQ ID NO: 705708
aggcuuccugauaacagaa

SEQ ID NO: 705710 - RNA, 19 nt, Artificial Sequence
  Description of Artificial Sequence: Synthetic oligonucleotide
  Sense strand starting at position 232 of SEQ ID NO: 586277
caugcugugccagagaucu

SEQ ID NO: 705711 - RNA, 19 nt, Artificial Sequence
  Description of Artificial Sequence: Synthetic oligonucleotide
  Antisense strand to SEQ ID NO: 705710
agaucucuggcacagcaug

SEQ ID NO: 705712 - RNA, 19 nt, Artificial Sequence
  Description of Artificial Sequence: Synthetic oligonucleotide
  Sense strand starting at position 234 of SEQ ID NO: 586277
ugcugugccagagaucuca

SEQ ID NO: 705713 - RNA, 19 nt, Artificial Sequence
  Description of Artificial Sequence: Synthetic oligonucleotide
  Antisense strand to SEQ ID NO: 705712
ugagaucucuggcacagca

SEQ ID NO: 705714 - RNA, 19 nt, Artificial Sequence
  Description of Artificial Sequence: Synthetic oligonucleotide
  Sense strand starting at position 366 of SEQ ID NO: 586277
cuucuaugagcuggacuuu

SEQ ID NO: 705715 - RNA, 19 nt, Artificial Sequence
  Description of Artificial Sequence: Synthetic oligonucleotide
  Antisense strand to SEQ ID NO: 705714
aaaguccagcucauagaag

SEQ ID NO: 705716 - RNA, 19 nt, Artificial Sequence
  Description of Artificial Sequence: Synthetic oligonucleotide
  Sense strand starting at position 524 of SEQ ID NO: 586277
acuccuauuugggauaaag

SEQ ID NO: 705717 - RNA, 19 nt, Artificial Sequence
  Description of Artificial Sequence: Synthetic oligonucleotide
  Antisense strand to SEQ ID NO: 705716
cuuuaucccaaauaggagu

SEQ ID NO: 705718 - RNA, 19 nt, Artificial Sequence
  Description of Artificial Sequence: Synthetic oligonucleotide
  Sense strand starting at position 627 of SEQ ID NO: 586277
cuguucuacccgggaugau

SEQ ID NO: 705719 - RNA, 19 nt, Artificial Sequence
  Description of Artificial Sequence: Synthetic oligonucleotide
  Antisense strand to SEQ ID NO: 705718
aucaucccggguagaacag

SEQ ID NO: 705720 - RNA, 19 nt, Artificial Sequence
  Description of Artificial Sequence: Synthetic oligonucleotide
  Sense strand starting at position 628 of SEQ ID NO: 586277
uguucuacccgggaugaug

SEQ ID NO: 705721 - RNA, 19 nt, Artificial Sequence
  Description of Artificial Sequence: Synthetic oligonucleotide
  Antisense strand to SEQ ID NO: 705720
caucaucccggguagaaca

SEQ ID NO: 705722 - RNA, 19 nt, Artificial Sequence
  Description of Artificial Sequence: Synthetic oligonucleotide
  Sense strand starting at position 829 of SEQ ID NO: 586277
gagacagagucgcucuuau

SEQ ID NO: 705723 - RNA, 19 nt, Artificial Sequence
  Description of Artificial Sequence: Synthetic oligonucleotide
  Antisense strand to SEQ ID NO: 705722
auaagagcgacucugucuc

SEQ ID NO: 705724 - RNA, 19 nt, Artificial Sequence
  Description of Artificial Sequence: Synthetic oligonucleotide
  Sense strand starting at position 1176 of SEQ ID NO: 586277
ggaaguuuccaauaacguu

SEQ ID NO: 705725 - RNA, 19 nt, Artificial Sequence
  Description of Artificial Sequence: Synthetic oligonucleotide
  Antisense strand to SEQ ID NO: 705724
aacguuauuggaaacuucc

SEQ ID NO: 705726 - RNA, 19 nt, Artificial Sequence
  Description of Artificial Sequence: Synthetic oligonucleotide
  Sense strand starting at position 1183 of SEQ ID NO: 586277
uccaauaacguuuguugaa

SEQ ID NO: 705727 - RNA, 19 nt, Artificial Sequence
  Description of Artificial Sequence: Synthetic oligonucleotide
  Antisense strand to SEQ ID NO: 705726
uucaacaaacguuauugga

SEQ ID NO: 705728 - RNA, 19 nt, Artificial Sequence
  Description of Artificial Sequence: Synthetic oligonucleotide
  Sense strand starting at position 1184 of SEQ ID NO: 586277
ccaauaacguuuguugaaa

SEQ ID NO: 705729 - RNA, 19 nt, Artificial Sequence
  Description of Artificial Sequence: Synthetic oligonucleotide
  Antisense strand to SEQ ID NO: 705728
uuucaacaaacguuauugg

SEQ ID NO: 705730 - RNA, 19 nt, Artificial Sequence
  Description of Artificial Sequence: Synthetic oligonucleotide
  Sense strand starting at position 1185 of SEQ ID NO: 586277
caauaacguuuguugaaac

SEQ ID NO: 705731 - RNA, 19 nt, Artificial Sequence
  Description of Artificial Sequence: Synthetic oligonucleotide
  Antisense strand to SEQ ID NO: 705730
guuucaacaaacguuauug

SEQ ID NO: 705732 - RNA, 19 nt, Artificial Sequence
  Description of Artificial Sequence: Synthetic oligonucleotide
  Sense strand starting at position 1421 of SEQ ID NO: 586277
cugucacuccgagacugua

SEQ ID NO: 705733 - RNA, 19 nt, Artificial Sequence
  Description of Artificial Sequence: Synthetic oligonucleotide
  Antisense strand to SEQ ID NO: 705732
uacagucucggagugacag

SEQ ID NO: 705734 - RNA, 19 nt, Artificial Sequence
  Description of Artificial Sequence: Synthetic oligonucleotide
  Sense strand starting at position 2097 of SEQ ID NO: 586277
gcuugagagccgggacaaa

SEQ ID NO: 705735 - RNA, 19 nt, Artificial Sequence
  Description of Artificial Sequence: Synthetic oligonucleotide
  Antisense strand to SEQ ID NO: 705734
uuugucccggcucucaagc

SEQ ID NO: 705736 - RNA, 19 nt, Artificial Sequence
  Description of Artificial Sequence: Synthetic oligonucleotide
  Sense strand starting at position 2226 of SEQ ID NO: 586277
gggaauauuauaugggcca

SEQ ID NO: 705737 - RNA, 19 nt, Artificial Sequence
  Description of Artificial Sequence: Synthetic oligonucleotide
  Antisense strand to SEQ ID NO: 705736
uggcccauauaauauuccc

SEQ ID NO: 705738 - RNA, 19 nt, Artificial Sequence
  Description of Artificial Sequence: Synthetic oligonucleotide
  Sense strand starting at position 2244 of SEQ ID NO: 586277
aggguuguucagcagaaau

SEQ ID NO: 705739 - RNA, 19 nt, Artificial Sequence
  Description of Artificial Sequence: Synthetic oligonucleotide
  Antisense strand to SEQ ID NO: 705738
auuucugcugaacaacccu

SEQ ID NO: 705740 - RNA, 19 nt, Artificial Sequence
  Description of Artificial Sequence: Synthetic oligonucleotide
  Sense strand starting at position 2263 of SEQ ID NO: 586277
gggagaguaugguuuauua

SEQ ID NO: 705741 - RNA, 19 nt, Artificial Sequence
  Description of Artificial Sequence: Synthetic oligonucleotide
  Antisense strand to SEQ ID NO: 705740
uaauaaaccauacucuccc

SEQ ID NO: 705742 - RNA, 19 nt, Artificial Sequence
  Description of Artificial Sequence: Synthetic oligonucleotide
  Sense strand starting at position 2265 of SEQ ID NO: 586277
gagaguaugguuuauuauu

SEQ ID NO: 705743 - RNA, 19 nt, Artificial Sequence
  Description of Artificial Sequence: Synthetic oligonucleotide
  Antisense strand to SEQ ID NO: 705742
aauaauaaaccauacucuc

SEQ ID NO: 705744 - RNA, 19 nt, Artificial Sequence
  Description of Artificial Sequence: Synthetic oligonucleotide
  Sense strand starting at position 2366 of SEQ ID NO: 586277
gcuauagagcgacauccuu

SEQ ID NO: 705745 - RNA, 19 nt, Artificial Sequence
  Description of Artificial Sequence: Synthetic oligonucleotide
  Antisense strand to SEQ ID NO: 705744
aaggaugucgcucuauagc

SEQ ID NO: 705746 - RNA, 19 nt, Artificial Sequence
  Description of Artificial Sequence: Synthetic oligonucleotide
  Sense strand starting at position 2375 of SEQ ID NO: 586277
cgacauccuuaauugcaaa

SEQ ID NO: 705747 - RNA, 19 nt, Artificial Sequence
  Description of Artificial Sequence: Synthetic oligonucleotide
  Antisense strand to SEQ ID NO: 705746
uuugcaauuaaggaugucg

SEQ ID NO: 705748 - RNA, 19 nt, Artificial Sequence
  Description of Artificial Sequence: Synthetic oligonucleotide
  Sense strand starting at position 2466 of SEQ ID NO: 586277
guaggucuuguggagaaug

SEQ ID NO: 705749 - RNA, 19 nt, Artificial Sequence
  Description of Artificial Sequence: Synthetic oligonucleotide
  Antisense strand to SEQ ID NO: 705748
cauucuccacaagaccuac

SEQ ID NO: 705750 - RNA, 19 nt, Artificial Sequence
  Description of Artificial Sequence: Synthetic oligonucleotide
  Sense strand starting at position 2514 of SEQ ID NO: 586277
cauggaaaccauugugacu

SEQ ID NO: 705751 - RNA, 19 nt, Artificial Sequence
  Description of Artificial Sequence: Synthetic oligonucleotide
  Antisense strand to SEQ ID NO: 705750
agucacaaugguuuccaug

SEQ ID NO: 705752 - RNA, 19 nt, Artificial Sequence
  Description of Artificial Sequence: Synthetic oligonucleotide
  Sense strand starting at position 2611 of SEQ ID NO: 586277
caguuugacuuggcuccua

SEQ ID NO: 705753 - RNA, 19 nt, Artificial Sequence
  Description of Artificial Sequence: Synthetic oligonucleotide
  Antisense strand to SEQ ID NO: 705752
uaggagccaagucaaacug

SEQ ID NO: 705754 - RNA, 19 nt, Artificial Sequence
  Description of Artificial Sequence: Synthetic oligonucleotide
  Sense strand starting at position 2685 of SEQ ID NO: 586277
acaguaacccuuuguccuu

SEQ ID NO: 705755 - RNA, 19 nt, Artificial Sequence
  Description of Artificial Sequence: Synthetic oligonucleotide
  Antisense strand to SEQ ID NO: 705754
aaggacaaaggguuacugu

SEQ ID NO: 705756 - RNA, 19 nt, Artificial Sequence
  Description of Artificial Sequence: Synthetic oligonucleotide
  Sense strand starting at position 2800 of SEQ ID NO: 586277
acuucagggucugugagau

SEQ ID NO: 705757 - RNA, 19 nt, Artificial Sequence
  Description of Artificial Sequence: Synthetic oligonucleotide
  Antisense strand to SEQ ID NO: 705756
aucucacagacccugaagu

SEQ ID NO: 705758 - RNA, 19 nt, Artificial Sequence
  Description of Artificial Sequence: Synthetic oligonucleotide
  Sense strand starting at position 2884 of SEQ ID NO: 586277
gggcuacaccuuggaucau

SEQ ID NO: 705759 - RNA, 19 nt, Artificial Sequence
  Description of Artificial Sequence: Synthetic oligonucleotide
  Antisense strand to SEQ ID NO: 705758
augauccaagguguagccc

SEQ ID NO: 705760 - RNA, 19 nt, Artificial Sequence
  Description of Artificial Sequence: Synthetic oligonucleotide
  Sense strand starting at position 3192 of SEQ ID NO: 586277
gcaccuuguggguaaccau

SEQ ID NO: 705761 - RNA, 19 nt, Artificial Sequence
  Description of Artificial Sequence: Synthetic oligonucleotide
  Antisense strand to SEQ ID NO: 705760
augguuacccacaaggugc

SEQ ID NO: 705762 - RNA, 19 nt, Artificial Sequence
  Description of Artificial Sequence: Synthetic oligonucleotide
  Sense strand starting at position 3195 of SEQ ID NO: 586277
ccuuguggguaaccauaga

SEQ ID NO: 705763 - RNA, 19 nt, Artificial Sequence
  Description of Artificial Sequence: Synthetic oligonucleotide
  Antisense strand to SEQ ID NO: 705762
ucuaugguuacccacaagg

SEQ ID NO: 705764 - RNA, 19 nt, Artificial Sequence
  Description of Artificial Sequence: Synthetic oligonucleotide
  Sense strand starting at position 3300 of SEQ ID NO: 586277
uuuaaagacguguagguaa

SEQ ID NO: 705765 - RNA, 19 nt, Artificial Sequence
  Description of Artificial Sequence: Synthetic oligonucleotide
  Antisense strand to SEQ ID NO: 705764
uuaccuacacgucuuuaaa

SEQ ID NO: 705766 - RNA, 19 nt, Artificial Sequence
  Description of Artificial Sequence: Synthetic oligonucleotide
  Sense strand starting at position 3368 of SEQ ID NO: 586277
caucaaagauggcuauagu

SEQ ID NO: 705767 - RNA, 19 nt, Artificial Sequence
  Description of Artificial Sequence: Synthetic oligonucleotide
  Antisense strand to SEQ ID NO: 705766
acuauagccaucuuugaug

SEQ ID NO: 705768 - RNA, 19 nt, Artificial Sequence
  Description of Artificial Sequence: Synthetic oligonucleotide
  Sense strand starting at position 3371 of SEQ ID NO: 586277
caaagauggcuauaguuuc

SEQ ID NO: 705769 - RNA, 19 nt, Artificial Sequence
  Description of Artificial Sequence: Synthetic oligonucleotide
  Antisense strand to SEQ ID NO: 705768
gaaacuauagccaucuuug

SEQ ID NO: 705770 - RNA, 19 nt, Artificial Sequence
  Description of Artificial Sequence: Synthetic oligonucleotide
  Sense strand starting at position 3377 of SEQ ID NO: 586277
uggcuauaguuucucuaac

SEQ ID NO: 705771 - RNA, 19 nt, Artificial Sequence
  Description of Artificial Sequence: Synthetic oligonucleotide
  Antisense strand to SEQ ID NO: 705770
guuagagaaacuauagcca

SEQ ID NO: 705772 - RNA, 19 nt, Artificial Sequence
  Description of Artificial Sequence: Synthetic oligonucleotide
  Sense strand starting at position 3378 of SEQ ID NO: 586277
ggcuauaguuucucuaacu

SEQ ID NO: 705773 - RNA, 19 nt, Artificial Sequence
  Description of Artificial Sequence: Synthetic oligonucleotide
  Antisense strand to SEQ ID NO: 705772
aguuagagaaacuauagcc

SEQ ID NO: 705774 - RNA, 19 nt, Artificial Sequence
  Description of Artificial Sequence: Synthetic oligonucleotide
  Sense strand starting at position 3404 of SEQ ID NO: 586277
cugaguagaugggcgauaa

SEQ ID NO: 705775 - RNA, 19 nt, Artificial Sequence
  Description of Artificial Sequence: Synthetic oligonucleotide
  Antisense strand to SEQ ID NO: 705774
uuaucgcccaucuacucag

SEQ ID NO: 705776 - RNA, 19 nt, Artificial Sequence
  Description of Artificial Sequence: Synthetic oligonucleotide
  Sense strand starting at position 3405 of SEQ ID NO: 586277
ugaguagaugggcgauaau

SEQ ID NO: 705777 - RNA, 19 nt, Artificial Sequence
  Description of Artificial Sequence: Synthetic oligonucleotide
  Antisense strand to SEQ ID NO: 705776
auuaucgcccaucuacuca

SEQ ID NO: 705778 - RNA, 19 nt, Artificial Sequence
  Description of Artificial Sequence: Synthetic oligonucleotide
  Sense strand starting at position 3416 of SEQ ID NO: 586277
gcgauaaugcauuaaucaa

SEQ ID NO: 705779 - RNA, 19 nt, Artificial Sequence
  Description of Artificial Sequence: Synthetic oligonucleotide
  Antisense strand to SEQ ID NO: 705778
uugauuaaugcauuaucgc

SEQ ID NO: 705780 - RNA, 19 nt, Artificial Sequence
  Description of Artificial Sequence: Synthetic oligonucleotide
  Sense strand starting at position 3559 of SEQ ID NO: 586277
gagaacaucugguuuacuu

SEQ ID NO: 705781 - RNA, 19 nt, Artificial Sequence
  Description of Artificial Sequence: Synthetic oligonucleotide
  Antisense strand to SEQ ID NO: 705780
aaguaaaccagauguucuc

SEQ ID NO: 705782 - RNA, 19 nt, Artificial Sequence
  Description of Artificial Sequence: Synthetic oligonucleotide
  Sense strand starting at position 3902 of SEQ ID NO: 586277
uggauccugcuaugccaaa

SEQ ID NO: 705783 - RNA, 19 nt, Artificial Sequence
  Description of Artificial Sequence: Synthetic oligonucleotide
  Antisense strand to SEQ ID NO: 705782
uuuggcauagcaggaucca

SEQ ID NO: 705784 - RNA, 19 nt, Artificial Sequence
  Description of Artificial Sequence: Synthetic oligonucleotide
  Sense strand starting at position 3939 of SEQ ID NO: 586277
ccaagugcuuacuuugaaa

SEQ ID NO: 705785 - RNA, 19 nt, Artificial Sequence
  Description of Artificial Sequence: Synthetic oligonucleotide
  Antisense strand to SEQ ID NO: 705784
uuucaaaguaagcacuugg

SEQ ID NO: 705786 - RNA, 19 nt, Artificial Sequence
  Description of Artificial Sequence: Synthetic oligonucleotide
  Sense strand starting at position 21 of SEQ ID NO: 586278
ggcugaggaucacuaagau

SEQ ID NO: 705787 - RNA, 19 nt, Artificial Sequence
  Description of Artificial Sequence: Synthetic oligonucleotide
  Antisense strand to SEQ ID NO: 705786
aucuuagugauccucagcc

SEQ ID NO: 705788 - RNA, 19 nt, Artificial Sequence
  Description of Artificial Sequence: Synthetic oligonucleotide
  Sense strand starting at position 377 of SEQ ID NO: 586278
guauaacguugcccaauuu

SEQ ID NO: 705789 - RNA, 19 nt, Artificial Sequence
  Description of Artificial Sequence: Synthetic oligonucleotide
  Antisense strand to SEQ ID NO: 705788
aaauugggcaacguuauac

SEQ ID NO: 705790 - RNA, 19 nt, Artificial Sequence
  Description of Artificial Sequence: Synthetic oligonucleotide
  Sense strand starting at position 517 of SEQ ID NO: 586278
gagagcuauuguuccucaa

SEQ ID NO: 705791 - RNA, 19 nt, Artificial Sequence
  Description of Artificial Sequence: Synthetic oligonucleotide
  Antisense strand to SEQ ID NO: 705790
uugaggaacaauagcucuc

SEQ ID NO: 705792 - RNA, 19 nt, Artificial Sequence
  Description of Artificial Sequence: Synthetic oligonucleotide
  Sense strand starting at position 715 of SEQ ID NO: 586278
ccaggaugugaacgcaaga

SEQ ID NO: 705793 - RNA, 19 nt, Artificial Sequence
  Description of Artificial Sequence: Synthetic oligonucleotide
  Antisense strand to SEQ ID NO: 705792
ucuugcguucacauccugg

SEQ ID NO: 705794 - RNA, 19 nt, Artificial Sequence
  Description of Artificial Sequence: Synthetic oligonucleotide
  Sense strand starting at position 820 of SEQ ID NO: 586278
aggguuccuccaggaauuc

SEQ ID NO: 705795 - RNA, 19 nt, Artificial Sequence
  Description of Artificial Sequence: Synthetic oligonucleotide
  Antisense strand to SEQ ID NO: 705794
gaauuccuggaggaacccu

SEQ ID NO: 705796 - RNA, 19 nt, Artificial Sequence
  Description of Artificial Sequence: Synthetic oligonucleotide
  Sense strand starting at position 1169 of SEQ ID NO: 586278
gcuuuagucgcagcaaauu

SEQ ID NO: 705797 - RNA, 19 nt, Artificial Sequence
  Description of Artificial Sequence: Synthetic oligonucleotide
  Antisense strand to SEQ ID NO: 705796
aauuugcugcgacuaaagc

SEQ ID NO: 705798 - RNA, 19 nt, Artificial Sequence
  Description of Artificial Sequence: Synthetic oligonucleotide
  Sense strand starting at position 1214 of SEQ ID NO: 586278
ucaagaacaucacucggua

SEQ ID NO: 705799 - RNA, 19 nt, Artificial Sequence
  Description of Artificial Sequence: Synthetic oligonucleotide
  Antisense strand to SEQ ID NO: 705798
uaccgagugauguucuuga

SEQ ID NO: 705800 - RNA, 19 nt, Artificial Sequence
  Description of Artificial Sequence: Synthetic oligonucleotide
  Sense strand starting at position 1217 of SEQ ID NO: 586278
agaacaucacucgguaaca

SEQ ID NO: 705801 - RNA, 19 nt, Artificial Sequence
  Description of Artificial Sequence: Synthetic oligonucleotide
  Antisense strand to SEQ ID NO: 705800
uguuaccgagugauguucu

SEQ ID NO: 705802 - RNA, 19 nt, Artificial Sequence
  Description of Artificial Sequence: Synthetic oligonucleotide
  Sense strand starting at position 1230 of SEQ ID NO: 586278
guaacagggaucuacguau

SEQ ID NO: 705803 - RNA, 19 nt, Artificial Sequence
  Description of Artificial Sequence: Synthetic oligonucleotide
  Antisense strand to SEQ ID NO: 705802
auacguagaucccuguuac

SEQ ID NO: 705804 - RNA, 19 nt, Artificial Sequence
  Description of Artificial Sequence: Synthetic oligonucleotide
  Sense strand starting at position 1267 of SEQ ID NO: 586278
cugaucaggucaucaaauc

SEQ ID NO: 705805 - RNA, 19 nt, Artificial Sequence
  Description of Artificial Sequence: Synthetic oligonucleotide
  Antisense strand to SEQ ID NO: 705804
gauuugaugaccugaucag

SEQ ID NO: 705806 - RNA, 19 nt, Artificial Sequence
  Description of Artificial Sequence: Synthetic oligonucleotide
  Sense strand starting at position 1293 of SEQ ID NO: 586278
ugcuaagaaugauuccuuu

SEQ ID NO: 705807 - RNA, 19 nt, Artificial Sequence
  Description of Artificial Sequence: Synthetic oligonucleotide
  Antisense strand to SEQ ID NO: 705806
aaaggaaucauucuuagca

SEQ ID NO: 705808 - RNA, 19 nt, Artificial Sequence
  Description of Artificial Sequence: Synthetic oligonucleotide
  Sense strand starting at position 1359 of SEQ ID NO: 586278
ccgccuacucaguuugcua

SEQ ID NO: 705809 - RNA, 19 nt, Artificial Sequence
  Description of Artificial Sequence: Synthetic oligonucleotide
  Antisense strand to SEQ ID NO: 705808
uagcaaacugaguaggcgg

SEQ ID NO: 705810 - RNA, 19 nt, Artificial Sequence
  Description of Artificial Sequence: Synthetic oligonucleotide
  Sense strand starting at position 1481 of SEQ ID NO: 586278
uuagcucugcgcuuggaau

SEQ ID NO: 705811 - RNA, 19 nt, Artificial Sequence
  Description of Artificial Sequence: Synthetic oligonucleotide
  Antisense strand to SEQ ID NO: 705810
auuccaagcgcagagcuaa

SEQ ID NO: 705812 - RNA, 19 nt, Artificial Sequence
  Description of Artificial Sequence: Synthetic oligonucleotide
  Sense strand starting at position 2158 of SEQ ID NO: 586278
guguguuucggucuucaua

SEQ ID NO: 705813 - RNA, 19 nt, Artificial Sequence
  Description of Artificial Sequence: Synthetic oligonucleotide
  Antisense strand to SEQ ID NO: 705812
uaugaagaccgaaacacac

SEQ ID NO: 705814 - RNA, 19 nt, Artificial Sequence
  Description of Artificial Sequence: Synthetic oligonucleotide
  Sense strand starting at position 2218 of SEQ ID NO: 586278
augucuaugggauacguua

SEQ ID NO: 705815 - RNA, 19 nt, Artificial Sequence
  Description of Artificial Sequence: Synthetic oligonucleotide
  Antisense strand to SEQ ID NO: 705814
uaacguaucccauagacau

SEQ ID NO: 705816 - RNA, 19 nt, Artificial Sequence
  Description of Artificial Sequence: Synthetic oligonucleotide
  Sense strand starting at position 2370 of SEQ ID NO: 586278
agguauuguacagaauguu

SEQ ID NO: 705817 - RNA, 19 nt, Artificial Sequence
  Description of Artificial Sequence: Synthetic oligonucleotide
  Antisense strand to SEQ ID NO: 705816
aacauucuguacaauaccu

SEQ ID NO: 705818 - RNA, 19 nt, Artificial Sequence
  Description of Artificial Sequence: Synthetic oligonucleotide
  Sense strand starting at position 2412 of SEQ ID NO: 586278
ugaaucuagagcgaguuau

SEQ ID NO: 705819 - RNA, 19 nt, Artificial Sequence
  Description of Artificial Sequence: Synthetic oligonucleotide
  Antisense strand to SEQ ID NO: 705818
auaacucgcucuagauuca

SEQ ID NO: 705820 - RNA, 19 nt, Artificial Sequence
  Description of Artificial Sequence: Synthetic oligonucleotide
  Sense strand starting at position 2424 of SEQ ID NO: 586278
gaguuaucccuugaagucu

SEQ ID NO: 705821 - RNA, 19 nt, Artificial Sequence
  Description of Artificial Sequence: Synthetic oligonucleotide
  Antisense strand to SEQ ID NO: 705820
agacuucaagggauaacuc

SEQ ID NO: 705822 - RNA, 19 nt, Artificial Sequence
  Description of Artificial Sequence: Synthetic oligonucleotide
  Sense strand starting at position 2476 of SEQ ID NO: 586278
aggauugaaugagaugaca

SEQ ID NO: 705823 - RNA, 19 nt, Artificial Sequence
  Description of Artificial Sequence: Synthetic oligonucleotide
  Antisense strand to SEQ ID NO: 705822
ugucaucucauucaauccu

SEQ ID NO: 705824 - RNA, 19 nt, Artificial Sequence
  Description of Artificial Sequence: Synthetic oligonucleotide
  Sense strand starting at position 2484 of SEQ ID NO: 586278
augagaugacaguguuugu

SEQ ID NO: 705825 - RNA, 19 nt, Artificial Sequence
  Description of Artificial Sequence: Synthetic oligonucleotide
  Antisense strand to SEQ ID NO: 705824
acaaacacugucaucucau

SEQ ID NO: 705826 - RNA, 19 nt, Artificial Sequence
  Description of Artificial Sequence: Synthetic oligonucleotide
  Sense strand starting at position 2487 of SEQ ID NO: 586278
agaugacaguguuuguuaa

SEQ ID NO: 705827 - RNA, 19 nt, Artificial Sequence
  Description of Artificial Sequence: Synthetic oligonucleotide
  Antisense strand to SEQ ID NO: 705826
uuaacaaacacugucaucu

SEQ ID NO: 705828 - RNA, 19 nt, Artificial Sequence
  Description of Artificial Sequence: Synthetic oligonucleotide
  Sense strand starting at position 2526 of SEQ ID NO: 586278
ccguauggucaagauuauc

SEQ ID NO: 705829 - RNA, 19 nt, Artificial Sequence
  Description of Artificial Sequence: Synthetic oligonucleotide
  Antisense strand to SEQ ID NO: 705828
gauaaucuugaccauacgg

SEQ ID NO: 705830 - RNA, 19 nt, Artificial Sequence
  Description of Artificial Sequence: Synthetic oligonucleotide
  Sense strand starting at position 2531 of SEQ ID NO: 586278
uggucaagauuaucauuau

SEQ ID NO: 705831 - RNA, 19 nt, Artificial Sequence
  Description of Artificial Sequence: Synthetic oligonucleotide
  Antisense strand to SEQ ID NO: 705830
auaaugauaaucuugacca

SEQ ID NO: 705832 - RNA, 19 nt, Artificial Sequence
  Description of Artificial Sequence: Synthetic oligonucleotide
  Sense strand starting at position 2550 of SEQ ID NO: 586278
cuuuauuacuguuugagaa

SEQ ID NO: 705833 - RNA, 19 nt, Artificial Sequence
  Description of Artificial Sequence: Synthetic oligonucleotide
  Antisense strand to SEQ ID NO: 705832
uucucaaacaguaauaaag

SEQ ID NO: 705834 - RNA, 19 nt, Artificial Sequence
  Description of Artificial Sequence: Synthetic oligonucleotide
  Sense strand starting at position 2551 of SEQ ID NO: 586278
uuuauuacuguuugagaac

SEQ ID NO: 705835 - RNA, 19 nt, Artificial Sequence
  Description of Artificial Sequence: Synthetic oligonucleotide
  Antisense strand to SEQ ID NO: 705834
guucucaaacaguaauaaa

SEQ ID NO: 705836 - RNA, 19 nt, Artificial Sequence
  Description of Artificial Sequence: Synthetic oligonucleotide
  Sense strand starting at position 2845 of SEQ ID NO: 586278
ucgggaauagcugggagua

SEQ ID NO: 705837 - RNA, 19 nt, Artificial Sequence
  Description of Artificial Sequence: Synthetic oligonucleotide
  Antisense strand to SEQ ID NO: 705836
uacucccagcuauucccga

SEQ ID NO: 705838 - RNA, 19 nt, Artificial Sequence
  Description of Artificial Sequence: Synthetic oligonucleotide
  Sense strand starting at position 3020 of SEQ ID NO: 586278
agaguuaagucacucacac

SEQ ID NO: 705839 - RNA, 19 nt, Artificial Sequence
  Description of Artificial Sequence: Synthetic oligonucleotide
  Antisense strand to SEQ ID NO: 705838
gugugagugacuuaacucu

SEQ ID NO: 705840 - RNA, 19 nt, Artificial Sequence
  Description of Artificial Sequence: Synthetic oligonucleotide
  Sense strand starting at position 3106 of SEQ ID NO: 586278
agaacugcccucgacauaa

SEQ ID NO: 705841 - RNA, 19 nt, Artificial Sequence
  Description of Artificial Sequence: Synthetic oligonucleotide
  Antisense strand to SEQ ID NO: 705840
uuaugucgagggcaguucu

SEQ ID NO: 705842 - RNA, 19 nt, Artificial Sequence
  Description of Artificial Sequence: Synthetic oligonucleotide
  Sense strand starting at position 3156 of SEQ ID NO: 586278
gccagauguugacuaacaa

SEQ ID NO: 705843 - RNA, 19 nt, Artificial Sequence
  Description of Artificial Sequence: Synthetic oligonucleotide
  Antisense strand to SEQ ID NO: 705842
uuguuagucaacaucuggc

SEQ ID NO: 705844 - RNA, 19 nt, Artificial Sequence
  Description of Artificial Sequence: Synthetic oligonucleotide
  Sense strand starting at position 3178 of SEQ ID NO: 586278
ccuccuguuccacaaguca

SEQ ID NO: 705845 - RNA, 19 nt, Artificial Sequence
  Description of Artificial Sequence: Synthetic oligonucleotide
  Antisense strand to SEQ ID NO: 705844
ugacuuguggaacaggagg

SEQ ID NO: 705846 - RNA, 19 nt, Artificial Sequence
  Description of Artificial Sequence: Synthetic oligonucleotide
  Sense strand starting at position 3191 of SEQ ID NO: 586278
aagucauaacugcagguuu

SEQ ID NO: 705847 - RNA, 19 nt, Artificial Sequence
  Description of Artificial Sequence: Synthetic oligonucleotide
  Antisense strand to SEQ ID NO: 705846
aaaccugcaguuaugacuu

SEQ ID NO: 705848 - RNA, 19 nt, Artificial Sequence
  Description of Artificial Sequence: Synthetic oligonucleotide
  Sense strand starting at position 3202 of SEQ ID NO: 586278
gcagguuugauuggacaag

SEQ ID NO: 705849 - RNA, 19 nt, Artificial Sequence
  Description of Artificial Sequence: Synthetic oligonucleotide
  Antisense strand to SEQ ID NO: 705848
cuuguccaaucaaaccugc

SEQ ID NO: 705850 - RNA, 19 nt, Artificial Sequence
  Description of Artificial Sequence: Synthetic oligonucleotide
  Sense strand starting at position 3220 of SEQ ID NO: 586278
gggaccgauucaguaacuu

SEQ ID NO: 705851 - RNA, 19 nt, Artificial Sequence
  Description of Artificial Sequence: Synthetic oligonucleotide
  Antisense strand to SEQ ID NO: 705850
aaguuacugaaucgguccc

SEQ ID NO: 705852 - RNA, 19 nt, Artificial Sequence
  Description of Artificial Sequence: Synthetic oligonucleotide
  Sense strand starting at position 3585 of SEQ ID NO: 586278
gguuguaacucauuauaag

SEQ ID NO: 705853 - RNA, 19 nt, Artificial Sequence
  Description of Artificial Sequence: Synthetic oligonucleotide
  Antisense strand to SEQ ID NO: 705852
cuuauaaugaguuacaacc

SEQ ID NO: 705854 - RNA, 19 nt, Artificial Sequence
  Description of Artificial Sequence: Synthetic oligonucleotide
  Sense strand starting at position 3586 of SEQ ID NO: 586278
guuguaacucauuauaaga

SEQ ID NO: 705855 - RNA, 19 nt, Artificial Sequence
  Description of Artificial Sequence: Synthetic oligonucleotide
  Antisense strand to SEQ ID NO: 705854
ucuuauaaugaguuacaac

SEQ ID NO: 705856 - RNA, 19 nt, Artificial Sequence
  Description of Artificial Sequence: Synthetic oligonucleotide
  Sense strand starting at position 3667 of SEQ ID NO: 586278
uccauuguagacugaauaa

SEQ ID NO: 705857 - RNA, 19 nt, Artificial Sequence
  Description of Artificial Sequence: Synthetic oligonucleotide
  Antisense strand to SEQ ID NO: 705856
uuauucagucuacaaugga

SEQ ID NO: 705858 - RNA, 19 nt, Artificial Sequence
  Description of Artificial Sequence: Synthetic oligonucleotide
  Sense strand starting at position 3711 of SEQ ID NO: 586278
auggaaagcuucucaugau

SEQ ID NO: 705859 - RNA, 19 nt, Artificial Sequence
  Description of Artificial Sequence: Synthetic oligonucleotide
  Antisense strand to SEQ ID NO: 705858
aucaugagaagcuuuccau

SEQ ID NO: 705860 - RNA, 19 nt, Artificial Sequence
  Description of Artificial Sequence: Synthetic oligonucleotide
  Sense strand starting at position 3723 of SEQ ID NO: 586278
ucaugaugaucaucaguau

SEQ ID NO: 705861 - RNA, 19 nt, Artificial Sequence
  Description of Artificial Sequence: Synthetic oligonucleotide
  Antisense strand to SEQ ID NO: 705860
auacugaugaucaucauga

SEQ ID NO: 705862 - RNA, 19 nt, Artificial Sequence
  Description of Artificial Sequence: Synthetic oligonucleotide
  Sense strand starting at position 3726 of SEQ ID NO: 586278
ugaugaucaucaguauaau

SEQ ID NO: 705863 - RNA, 19 nt, Artificial Sequence
  Description of Artificial Sequence: Synthetic oligonucleotide
  Antisense strand to SEQ ID NO: 705862
auuauacugaugaucauca

SEQ ID NO: 705864 - RNA, 19 nt, Artificial Sequence
  Description of Artificial Sequence: Synthetic oligonucleotide
  Sense strand starting at position 3977 of SEQ ID NO: 586278
gccucagacguugaauauu

SEQ ID NO: 705865 - RNA, 19 nt, Artificial Sequence
  Description of Artificial Sequence: Synthetic oligonucleotide
  Antisense strand to SEQ ID NO: 705864
aauauucaacgucugaggc

SEQ ID NO: 705866 - RNA, 19 nt, Artificial Sequence
  Description of Artificial Sequence: Synthetic oligonucleotide
  Sense strand starting at position 211 of SEQ ID NO: 586279
ggaaguuuguaaucauugg

SEQ ID NO: 705867 - RNA, 19 nt, Artificial Sequence
  Description of Artificial Sequence: Synthetic oligonucleotide
  Antisense strand to SEQ ID NO: 705866
ccaaugauuacaaacuucc

SEQ ID NO: 705868 - RNA, 19 nt, Artificial Sequence
  Description of Artificial Sequence: Synthetic oligonucleotide
  Sense strand starting at position 324 of SEQ ID NO: 586279
cagaaaugaguaugcucuu

SEQ ID NO: 705869 - RNA, 19 nt, Artificial Sequence
  Description of Artificial Sequence: Synthetic oligonucleotide
  Antisense strand to SEQ ID NO: 705868
aagagcauacucauuucug

SEQ ID NO: 705870 - RNA, 19 nt, Artificial Sequence
  Description of Artificial Sequence: Synthetic oligonucleotide
  Sense strand starting at position 325 of SEQ ID NO: 586279
agaaaugaguaugcucuua

SEQ ID NO: 705871 - RNA, 19 nt, Artificial Sequence
  Description of Artificial Sequence: Synthetic oligonucleotide
  Antisense strand to SEQ ID NO: 705870
uaagagcauacucauuucu

SEQ ID NO: 705872 - RNA, 19 nt, Artificial Sequence
  Description of Artificial Sequence: Synthetic oligonucleotide
  Sense strand starting at position 416 of SEQ ID NO: 586279
ugugucaggugauuuguaa

SEQ ID NO: 705873 - RNA, 19 nt, Artificial Sequence
  Description of Artificial Sequence: Synthetic oligonucleotide
  Antisense strand to SEQ ID NO: 705872
uuacaaaucaccugacaca

SEQ ID NO: 705874 - RNA, 19 nt, Artificial Sequence
  Description of Artificial Sequence: Synthetic oligonucleotide
  Sense strand starting at position 718 of SEQ ID NO: 586279
agaguaaaguccuucucuc

SEQ ID NO: 705875 - RNA, 19 nt, Artificial Sequence
  Description of Artificial Sequence: Synthetic oligonucleotide
  Antisense strand to SEQ ID NO: 705874
gagagaaggacuuuacucu

SEQ ID NO: 705876 - RNA, 19 nt, Artificial Sequence
  Description of Artificial Sequence: Synthetic oligonucleotide
  Sense strand starting at position 787 of SEQ ID NO: 586279
accggaguuccaggauuaa

SEQ ID NO: 705877 - RNA, 19 nt, Artificial Sequence
  Description of Artificial Sequence: Synthetic oligonucleotide
  Antisense strand to SEQ ID NO: 705876
uuaauccuggaacuccggu

SEQ ID NO: 705878 - RNA, 19 nt, Artificial Sequence
  Description of Artificial Sequence: Synthetic oligonucleotide
  Sense strand starting at position 903 of SEQ ID NO: 586279
uugauaccucaguaugcuu

SEQ ID NO: 705879 - RNA, 19 nt, Artificial Sequence
  Description of Artificial Sequence: Synthetic oligonucleotide
  Antisense strand to SEQ ID NO: 705878
aagcauacugagguaucaa

SEQ ID NO: 705880 - RNA, 19 nt, Artificial Sequence
  Description of Artificial Sequence: Synthetic oligonucleotide
  Sense strand starting at position 927 of SEQ ID NO: 586279
uuggguaauuaugugucaa

SEQ ID NO: 705881 - RNA, 19 nt, Artificial Sequence
  Description of Artificial Sequence: Synthetic oligonucleotide
  Antisense strand to SEQ ID NO: 705880
uugacacauaauuacccaa

SEQ ID NO: 705882 - RNA, 19 nt, Artificial Sequence
  Description of Artificial Sequence: Synthetic oligonucleotide
  Sense strand starting at position 928 of SEQ ID NO: 586279
uggguaauuaugugucaag

SEQ ID NO: 705883 - RNA, 19 nt, Artificial Sequence
  Description of Artificial Sequence: Synthetic oligonucleotide
  Antisense strand to SEQ ID NO: 705882
cuugacacauaauuaccca

SEQ ID NO: 705884 - RNA, 19 nt, Artificial Sequence
  Description of Artificial Sequence: Synthetic oligonucleotide
  Sense strand starting at position 935 of SEQ ID NO: 586279
uuaugugucaaguaauguc

SEQ ID NO: 705885 - RNA, 19 nt, Artificial Sequence
  Description of Artificial Sequence: Synthetic oligonucleotide
  Antisense strand to SEQ ID NO: 705884
gacauuacuugacacauaa

SEQ ID NO: 705886 - RNA, 19 nt, Artificial Sequence
  Description of Artificial Sequence: Synthetic oligonucleotide
  Sense strand starting at position 1130 of SEQ ID NO: 586279
ggcucaucacauuaggcua

SEQ ID NO: 705887 - RNA, 19 nt, Artificial Sequence
  Description of Artificial Sequence: Synthetic oligonucleotide
  Antisense strand to SEQ ID NO: 705886
uagccuaaugugaugagcc

SEQ ID NO: 705888 - RNA, 19 nt, Artificial Sequence
  Description of Artificial Sequence: Synthetic oligonucleotide
  Sense strand starting at position 1160 of SEQ ID NO: 586279
uauuaaaugucaguuggau

SEQ ID NO: 705889 - RNA, 19 nt, Artificial Sequence
  Description of Artificial Sequence: Synthetic oligonucleotide
  Antisense strand to SEQ ID NO: 705888
auccaacugacauuuaaua

SEQ ID NO: 705890 - RNA, 19 nt, Artificial Sequence
  Description of Artificial Sequence: Synthetic oligonucleotide
  Sense strand starting at position 1166 of SEQ ID NO: 586279
augucaguuggauauaacu

SEQ ID NO: 705891 - RNA, 19 nt, Artificial Sequence
  Description of Artificial Sequence: Synthetic oligonucleotide
  Antisense strand to SEQ ID NO: 705890
aguuauauccaacugacau

SEQ ID NO: 705892 - RNA, 19 nt, Artificial Sequence
  Description of Artificial Sequence: Synthetic oligonucleotide
  Sense strand starting at position 1174 of SEQ ID NO: 586279
uggauauaacuucgguauc

SEQ ID NO: 705893 - RNA, 19 nt, Artificial Sequence
  Description of Artificial Sequence: Synthetic oligonucleotide
  Antisense strand to SEQ ID NO: 705892
gauaccgaaguuauaucca

SEQ ID NO: 705894 - RNA, 19 nt, Artificial Sequence
  Description of Artificial Sequence: Synthetic oligonucleotide
  Sense strand starting at position 1176 of SEQ ID NO: 586279
gauauaacuucgguaucua

SEQ ID NO: 705895 - RNA, 19 nt, Artificial Sequence
  Description of Artificial Sequence: Synthetic oligonucleotide
  Antisense strand to SEQ ID NO: 705894
uagauaccgaaguuauauc

SEQ ID NO: 705896 - RNA, 19 nt, Artificial Sequence
  Description of Artificial Sequence: Synthetic oligonucleotide
  Sense strand starting at position 1177 of SEQ ID NO: 586279
auauaacuucgguaucuau

SEQ ID NO: 705897 - RNA, 19 nt, Artificial Sequence
  Description of Artificial Sequence: Synthetic oligonucleotide
  Antisense strand to SEQ ID NO: 705896
auagauaccgaaguuauau

SEQ ID NO: 705898 - RNA, 19 nt, Artificial Sequence
  Description of Artificial Sequence: Synthetic oligonucleotide
  Sense strand starting at position 1450 of SEQ ID NO: 586279
ucaaguguccaaggcauga

SEQ ID NO: 705899 - RNA, 19 nt, Artificial Sequence
  Description of Artificial Sequence: Synthetic oligonucleotide
  Antisense strand to SEQ ID NO: 705898
ucaugccuuggacacuuga

SEQ ID NO: 705900 - RNA, 19 nt, Artificial Sequence
  Description of Artificial Sequence: Synthetic oligonucleotide
  Sense strand starting at position 2494 of SEQ ID NO: 586279
gucggguuccuguuacguu

SEQ ID NO: 705901 - RNA, 19 nt, Artificial Sequence
  Description of Artificial Sequence: Synthetic oligonucleotide
  Antisense strand to SEQ ID NO: 705900
aacguaacaggaacccgac

SEQ ID NO: 705902 - RNA, 19 nt, Artificial Sequence
  Description of Artificial Sequence: Synthetic oligonucleotide
  Sense strand starting at position 2499 of SEQ ID NO: 586279
guuccuguuacguuugcaa

SEQ ID NO: 705903 - RNA, 19 nt, Artificial Sequence
  Description of Artificial Sequence: Synthetic oligonucleotide
  Antisense strand to SEQ ID NO: 705902
uugcaaacguaacaggaac

SEQ ID NO: 705904 - RNA, 19 nt, Artificial Sequence
  Description of Artificial Sequence: Synthetic oligonucleotide
  Sense strand starting at position 2627 of SEQ ID NO: 586279
uuccuuugcgugucggaga

SEQ ID NO: 705905 - RNA, 19 nt, Artificial Sequence
  Description of Artificial Sequence: Synthetic oligonucleotide
  Antisense strand to SEQ ID NO: 705904
ucuccgacacgcaaaggaa

SEQ ID NO: 705906 - RNA, 19 nt, Artificial Sequence
  Description of Artificial Sequence: Synthetic oligonucleotide
  Sense strand starting at position 2648 of SEQ ID NO: 586279
agaaccaagcuuuauuagu

SEQ ID NO: 705907 - RNA, 19 nt, Artificial Sequence
  Description of Artificial Sequence: Synthetic oligonucleotide
  Antisense strand to SEQ ID NO: 705906
acuaauaaagcuugguucu

SEQ ID NO: 705908 - RNA, 19 nt, Artificial Sequence
  Description of Artificial Sequence: Synthetic oligonucleotide
  Sense strand starting at position 2668 of SEQ ID NO: 586279
ucagguuuaggugagugaa

SEQ ID NO: 705909 - RNA, 19 nt, Artificial Sequence
  Description of Artificial Sequence: Synthetic oligonucleotide
  Antisense strand to SEQ ID NO: 705908
uucacucaccuaaaccuga

SEQ ID NO: 705910 - RNA, 19 nt, Artificial Sequence
  Description of Artificial Sequence: Synthetic oligonucleotide
  Sense strand starting at position 2670 of SEQ ID NO: 586279
agguuuaggugagugaacu

SEQ ID NO: 705911 - RNA, 19 nt, Artificial Sequence
  Description of Artificial Sequence: Synthetic oligonucleotide
  Antisense strand to SEQ ID NO: 705910
aguucacucaccuaaaccu

SEQ ID NO: 705912 - RNA, 19 nt, Artificial Sequence
  Description of Artificial Sequence: Synthetic oligonucleotide
  Sense strand starting at position 2671 of SEQ ID NO: 586279
gguuuaggugagugaacuc

SEQ ID NO: 705913 - RNA, 19 nt, Artificial Sequence
  Description of Artificial Sequence: Synthetic oligonucleotide
  Antisense strand to SEQ ID NO: 705912
gaguucacucaccuaaacc

SEQ ID NO: 705914 - RNA, 19 nt, Artificial Sequence
  Description of Artificial Sequence: Synthetic oligonucleotide
  Sense strand starting at position 2928 of SEQ ID NO: 586279
ugacuaauccaccgaaagg

SEQ ID NO: 705915 - RNA, 19 nt, Artificial Sequence
  Description of Artificial Sequence: Synthetic oligonucleotide
  Antisense strand to SEQ ID NO: 705914
ccuuucgguggauuaguca

SEQ ID NO: 705916 - RNA, 19 nt, Artificial Sequence
  Description of Artificial Sequence: Synthetic oligonucleotide
  Sense strand starting at position 2956 of SEQ ID NO: 586279
agucuuugaagcgaaggua

SEQ ID NO: 705917 - RNA, 19 nt, Artificial Sequence
  Description of Artificial Sequence: Synthetic oligonucleotide
  Antisense strand to SEQ ID NO: 705916
uaccuucgcuucaaagacu

SEQ ID NO: 705918 - RNA, 19 nt, Artificial Sequence
  Description of Artificial Sequence: Synthetic oligonucleotide
  Sense strand starting at position 3153 of SEQ ID NO: 586279
auacauuguguuugaauug

SEQ ID NO: 705919 - RNA, 19 nt, Artificial Sequence
  Description of Artificial Sequence: Synthetic oligonucleotide
  Antisense strand to SEQ ID NO: 705918
caauucaaacacaauguau

SEQ ID NO: 705920 - RNA, 19 nt, Artificial Sequence
  Description of Artificial Sequence: Synthetic oligonucleotide
  Sense strand starting at position 3209 of SEQ ID NO: 586279
cuuuauugccgacacaucu

SEQ ID NO: 705921 - RNA, 19 nt, Artificial Sequence
  Description of Artificial Sequence: Synthetic oligonucleotide
  Antisense strand to SEQ ID NO: 705920
agaugugucggcaauaaag

SEQ ID NO: 705922 - RNA, 19 nt, Artificial Sequence
  Description of Artificial Sequence: Synthetic oligonucleotide
  Sense strand starting at position 3236 of SEQ ID NO: 586279
ggucuugugaauuaucuug

SEQ ID NO: 705923 - RNA, 19 nt, Artificial Sequence
  Description of Artificial Sequence: Synthetic oligonucleotide
  Antisense strand to SEQ ID NO: 705922
caagauaauucacaagacc

SEQ ID NO: 705924 - RNA, 19 nt, Artificial Sequence
  Description of Artificial Sequence: Synthetic oligonucleotide
  Sense strand starting at position 3243 of SEQ ID NO: 586279
ugaauuaucuuguuguuga

SEQ ID NO: 705925 - RNA, 19 nt, Artificial Sequence
  Description of Artificial Sequence: Synthetic oligonucleotide
  Antisense strand to SEQ ID NO: 705924
ucaacaacaagauaauuca

SEQ ID NO: 705926 - RNA, 19 nt, Artificial Sequence
  Description of Artificial Sequence: Synthetic oligonucleotide
  Sense strand starting at position 3258 of SEQ ID NO: 586279
uugacuuguggucacccaa

SEQ ID NO: 705927 - RNA, 19 nt, Artificial Sequence
  Description of Artificial Sequence: Synthetic oligonucleotide
  Antisense strand to SEQ ID NO: 705926
uugggugaccacaagucaa

SEQ ID NO: 705928 - RNA, 19 nt, Artificial Sequence
  Description of Artificial Sequence: Synthetic oligonucleotide
  Sense strand starting at position 3315 of SEQ ID NO: 586279
acaagaaccuguguugaaa

SEQ ID NO: 705929 - RNA, 19 nt, Artificial Sequence
  Description of Artificial Sequence: Synthetic oligonucleotide
  Antisense strand to SEQ ID NO: 705928
uuucaacacagguucuugu

SEQ ID NO: 705930 - RNA, 19 nt, Artificial Sequence
  Description of Artificial Sequence: Synthetic oligonucleotide
  Sense strand starting at position 3635 of SEQ ID NO: 586279
ccagacaugugauugaacu

SEQ ID NO: 705931 - RNA, 19 nt, Artificial Sequence
  Description of Artificial Sequence: Synthetic oligonucleotide
  Antisense strand to SEQ ID NO: 705930
aguucaaucacaugucugg

SEQ ID NO: 705932 - RNA, 19 nt, Artificial Sequence
  Description of Artificial Sequence: Synthetic oligonucleotide
  Sense strand starting at position 3636 of SEQ ID NO: 586279
cagacaugugauugaacuc

SEQ ID NO: 705933 - RNA, 19 nt, Artificial Sequence
  Description of Artificial Sequence: Synthetic oligonucleotide
  Antisense strand to SEQ ID NO: 705932
gaguucaaucacaugucug

SEQ ID NO: 705934 - RNA, 19 nt, Artificial Sequence
  Description of Artificial Sequence: Synthetic oligonucleotide
  Sense strand starting at position 3682 of SEQ ID NO: 586279
uguuguuugguuuauaacu

SEQ ID NO: 705935 - RNA, 19 nt, Artificial Sequence
  Description of Artificial Sequence: Synthetic oligonucleotide
  Antisense strand to SEQ ID NO: 705934
aguuauaaaccaaacaaca

SEQ ID NO: 705936 - RNA, 19 nt, Artificial Sequence
  Description of Artificial Sequence: Synthetic oligonucleotide
  Sense strand starting at position 3892 of SEQ ID NO: 586279
gugaaacaguuacuugagu

SEQ ID NO: 705937 - RNA, 19 nt, Artificial Sequence
  Description of Artificial Sequence: Synthetic oligonucleotide
  Antisense strand to SEQ ID NO: 705936
acucaaguaacuguuucac

SEQ ID NO: 705938 - RNA, 19 nt, Artificial Sequence
  Description of Artificial Sequence: Synthetic oligonucleotide
  Sense strand starting at position 3893 of SEQ ID NO: 586279
ugaaacaguuacuugaguu

SEQ ID NO: 705939 - RNA, 19 nt, Artificial Sequence
  Description of Artificial Sequence: Synthetic oligonucleotide
  Antisense strand to SEQ ID NO: 705938
aacucaaguaacuguuuca

SEQ ID NO: 705940 - RNA, 19 nt, Artificial Sequence
  Description of Artificial Sequence: Synthetic oligonucleotide
  Sense strand starting at position 3897 of SEQ ID NO: 586279
acaguuacuugaguucuua

SEQ ID NO: 705941 - RNA, 19 nt, Artificial Sequence
  Description of Artificial Sequence: Synthetic oligonucleotide
  Antisense strand to SEQ ID NO: 705940
uaagaacucaaguaacugu

SEQ ID NO: 705942 - RNA, 19 nt, Artificial Sequence
  Description of Artificial Sequence: Synthetic oligonucleotide
  Sense strand starting at position 3901 of SEQ ID NO: 586279
uuacuugaguucuuacuau

SEQ ID NO: 705943 - RNA, 19 nt, Artificial Sequence
  Description of Artificial Sequence: Synthetic oligonucleotide
  Antisense strand to SEQ ID NO: 705942
auaguaagaacucaaguaa

SEQ ID NO: 705944 - RNA, 19 nt, Artificial Sequence
  Description of Artificial Sequence: Synthetic oligonucleotide
  Sense strand starting at position 3954 of SEQ ID NO: 586279
ccauguaaauagguguuau

SEQ ID NO: 705945 - RNA, 19 nt, Artificial Sequence
  Description of Artificial Sequence: Synthetic oligonucleotide
  Antisense strand to SEQ ID NO: 705944
auaacaccuauuuacaugg

SEQ ID NO: 705946 - RNA, 19 nt, Artificial Sequence
  Description of Artificial Sequence: Synthetic oligonucleotide
  Sense strand starting at position 738 of SEQ ID NO: 586280
aguaauagccuaggacaua

SEQ ID NO: 705947 - RNA, 19 nt, Artificial Sequence
  Description of Artificial Sequence: Synthetic oligonucleotide
  Antisense strand to SEQ ID NO: 705946
uauguccuaggcuauuacu

SEQ ID NO: 705948 - RNA, 19 nt, Artificial Sequence
  Description of Artificial Sequence: Synthetic oligonucleotide
  Sense strand starting at position 788 of SEQ ID NO: 586280
cauguauucggauagccca

SEQ ID NO: 705949 - RNA, 19 nt, Artificial Sequence
  Description of Artificial Sequence: Synthetic oligonucleotide
  Antisense strand to SEQ ID NO: 705948
ugggcuauccgaauacaug

SEQ ID NO: 705950 - RNA, 19 nt, Artificial Sequence
  Description of Artificial Sequence: Synthetic oligonucleotide
  Sense strand starting at position 915 of SEQ ID NO: 586280
cugguaauguaacugugaa

SEQ ID NO: 705951 - RNA, 19 nt, Artificial Sequence
  Description of Artificial Sequence: Synthetic oligonucleotide
  Antisense strand to SEQ ID NO: 705950
uucacaguuacauuaccag

SEQ ID NO: 705952 - RNA, 19 nt, Artificial Sequence
  Description of Artificial Sequence: Synthetic oligonucleotide
  Sense strand starting at position 916 of SEQ ID NO: 586280
ugguaauguaacugugaac

SEQ ID NO: 705953 - RNA, 19 nt, Artificial Sequence
  Description of Artificial Sequence: Synthetic oligonucleotide
  Antisense strand to SEQ ID NO: 705952
guucacaguuacauuacca

SEQ ID NO: 705954 - RNA, 19 nt, Artificial Sequence
  Description of Artificial Sequence: Synthetic oligonucleotide
  Sense strand starting at position 919 of SEQ ID NO: 586280
uaauguaacugugaacaag

SEQ ID NO: 705955 - RNA, 19 nt, Artificial Sequence
  Description of Artificial Sequence: Synthetic oligonucleotide
  Antisense strand to SEQ ID NO: 705954
cuuguucacaguuacauua

SEQ ID NO: 705956 - RNA, 19 nt, Artificial Sequence
  Description of Artificial Sequence: Synthetic oligonucleotide
  Sense strand starting at position 1133 of SEQ ID NO: 586280
gaauaaagucgccaagugu

SEQ ID NO: 705957 - RNA, 19 nt, Artificial Sequence
  Description of Artificial Sequence: Synthetic oligonucleotide
  Antisense strand to SEQ ID NO: 705956
acacuuggcgacuuuauuc

SEQ ID NO: 705958 - RNA, 19 nt, Artificial Sequence
  Description of Artificial Sequence: Synthetic oligonucleotide
  Sense strand starting at position 1244 of SEQ ID NO: 586280
ccauaauuacgucacugca

SEQ ID NO: 705959 - RNA, 19 nt, Artificial Sequence
  Description of Artificial Sequence: Synthetic oligonucleotide
  Antisense strand to SEQ ID NO: 705958
ugcagugacguaauuaugg

SEQ ID NO: 705960 - RNA, 19 nt, Artificial Sequence
  Description of Artificial Sequence: Synthetic oligonucleotide
  Sense strand starting at position 1271 of SEQ ID NO: 586280
ugaguuagacucugacuca

SEQ ID NO: 705961 - RNA, 19 nt, Artificial Sequence
  Description of Artificial Sequence: Synthetic oligonucleotide
  Antisense strand to SEQ ID NO: 705960
ugagucagagucuaacuca

SEQ ID NO: 705962 - RNA, 19 nt, Artificial Sequence
  Description of Artificial Sequence: Synthetic oligonucleotide
  Sense strand starting at position 1391 of SEQ ID NO: 586280
gccaaagugacucgucuga

SEQ ID NO: 705963 - RNA, 19 nt, Artificial Sequence
  Description of Artificial Sequence: Synthetic oligonucleotide
  Antisense strand to SEQ ID NO: 705962
ucagacgagucacuuuggc

SEQ ID NO: 705964 - RNA, 19 nt, Artificial Sequence
  Description of Artificial Sequence: Synthetic oligonucleotide
  Sense strand starting at position 1393 of SEQ ID NO: 586280
caaagugacucgucugaac

SEQ ID NO: 705965 - RNA, 19 nt, Artificial Sequence
  Description of Artificial Sequence: Synthetic oligonucleotide
  Antisense strand to SEQ ID NO: 705964
guucagacgagucacuuug

SEQ ID NO: 705966 - RNA, 19 nt, Artificial Sequence
  Description of Artificial Sequence: Synthetic oligonucleotide
  Sense strand starting at position 1395 of SEQ ID NO: 586280
aagugacucgucugaacua

SEQ ID NO: 705967 - RNA, 19 nt, Artificial Sequence
  Description of Artificial Sequence: Synthetic oligonucleotide
  Antisense strand to SEQ ID NO: 705966
uaguucagacgagucacuu

SEQ ID NO: 705968 - RNA, 19 nt, Artificial Sequence
  Description of Artificial Sequence: Synthetic oligonucleotide
  Sense strand starting at position 1506 of SEQ ID NO: 586280
aauuauguccugcacguau

SEQ ID NO: 705969 - RNA, 19 nt, Artificial Sequence
  Description of Artificial Sequence: Synthetic oligonucleotide
  Antisense strand to SEQ ID NO: 705968
auacgugcaggacauaauu

SEQ ID NO: 705970 - RNA, 19 nt, Artificial Sequence
  Description of Artificial Sequence: Synthetic oligonucleotide
  Sense strand starting at position 1508 of SEQ ID NO: 586280
uuauguccugcacguauuu

SEQ ID NO: 705971 - RNA, 19 nt, Artificial Sequence
  Description of Artificial Sequence: Synthetic oligonucleotide
  Antisense strand to SEQ ID NO: 705970
aaauacgugcaggacauaa

SEQ ID NO: 705972 - RNA, 19 nt, Artificial Sequence
  Description of Artificial Sequence: Synthetic oligonucleotide
  Sense strand starting at position 1555 of SEQ ID NO: 586280
cugaccauuuccggauuau

SEQ ID NO: 705973 - RNA, 19 nt, Artificial Sequence
  Description of Artificial Sequence: Synthetic oligonucleotide
  Antisense strand to SEQ ID NO: 705972
auaauccggaaauggucag

SEQ ID NO: 705974 - RNA, 19 nt, Artificial Sequence
  Description of Artificial Sequence: Synthetic oligonucleotide
  Sense strand starting at position 1568 of SEQ ID NO: 586280
gauuauuuccuugggugcu

SEQ ID NO: 705975 - RNA, 19 nt, Artificial Sequence
  Description of Artificial Sequence: Synthetic oligonucleotide
  Antisense strand to SEQ ID NO: 705974
agcacccaaggaaauaauc

SEQ ID NO: 705976 - RNA, 19 nt, Artificial Sequence
  Description of Artificial Sequence: Synthetic oligonucleotide
  Sense strand starting at position 1594 of SEQ ID NO: 586280
ccgaaaucaagcuagguca

SEQ ID NO: 705977 - RNA, 19 nt, Artificial Sequence
  Description of Artificial Sequence: Synthetic oligonucleotide
  Antisense strand to SEQ ID NO: 705976
ugaccuagcuugauuucgg

SEQ ID NO: 705978 - RNA, 19 nt, Artificial Sequence
  Description of Artificial Sequence: Synthetic oligonucleotide
  Sense strand starting at position 2126 of SEQ ID NO: 586280
cggucaacgcccugaacuu

SEQ ID NO: 705979 - RNA, 19 nt, Artificial Sequence
  Description of Artificial Sequence: Synthetic oligonucleotide
  Antisense strand to SEQ ID NO: 705978
aaguucagggcguugaccg

SEQ ID NO: 705980 - RNA, 19 nt, Artificial Sequence
  Description of Artificial Sequence: Synthetic oligonucleotide
  Sense strand starting at position 2178 of SEQ ID NO: 586280
ugguucauccgcgaaccuu

SEQ ID NO: 705981 - RNA, 19 nt, Artificial Sequence
  Description of Artificial Sequence: Synthetic oligonucleotide
  Antisense strand to SEQ ID NO: 705980
aagguucgcggaugaacca

SEQ ID NO: 705982 - RNA, 19 nt, Artificial Sequence
  Description of Artificial Sequence: Synthetic oligonucleotide
  Sense strand starting at position 2291 of SEQ ID NO: 586280
ccuuaagagugacucacau

SEQ ID NO: 705983 - RNA, 19 nt, Artificial Sequence
  Description of Artificial Sequence: Synthetic oligonucleotide
  Antisense strand to SEQ ID NO: 705982
augugagucacucuuaagg

SEQ ID NO: 705984 - RNA, 19 nt, Artificial Sequence
  Description of Artificial Sequence: Synthetic oligonucleotide
  Sense strand starting at position 2452 of SEQ ID NO: 586280
agaguugaauuaguuguau

SEQ ID NO: 705985 - RNA, 19 nt, Artificial Sequence
  Description of Artificial Sequence: Synthetic oligonucleotide
  Antisense strand to SEQ ID NO: 705984
auacaacuaauucaacucu

SEQ ID NO: 705986 - RNA, 19 nt, Artificial Sequence
  Description of Artificial Sequence: Synthetic oligonucleotide
  Sense strand starting at position 2470 of SEQ ID NO: 586280
uuugguauuucucuuucuu

SEQ ID NO: 705987 - RNA, 19 nt, Artificial Sequence
  Description of Artificial Sequence: Synthetic oligonucleotide
  Antisense strand to SEQ ID NO: 705986
aagaaagagaaauaccaaa

SEQ ID NO: 705988 - RNA, 19 nt, Artificial Sequence
  Description of Artificial Sequence: Synthetic oligonucleotide
  Sense strand starting at position 2472 of SEQ ID NO: 586280
ugguauuucucuuucuugu

SEQ ID NO: 705989 - RNA, 19 nt, Artificial Sequence
  Description of Artificial Sequence: Synthetic oligonucleotide
  Antisense strand to SEQ ID NO: 705988
acaagaaagagaaauacca

SEQ ID NO: 705990 - RNA, 19 nt, Artificial Sequence
  Description of Artificial Sequence: Synthetic oligonucleotide
  Sense strand starting at position 2612 of SEQ ID NO: 586280
guaaccauacacugguaaa

SEQ ID NO: 705991 - RNA, 19 nt, Artificial Sequence
  Description of Artificial Sequence: Synthetic oligonucleotide
  Antisense strand to SEQ ID NO: 705990
uuuaccaguguaugguuac

SEQ ID NO: 705992 - RNA, 19 nt, Artificial Sequence
  Description of Artificial Sequence: Synthetic oligonucleotide
  Sense strand starting at position 2843 of SEQ ID NO: 586280
ggaagcaagccauguguuu

SEQ ID NO: 705993 - RNA, 19 nt, Artificial Sequence
  Description of Artificial Sequence: Synthetic oligonucleotide
  Antisense strand to SEQ ID NO: 705992
aaacacauggcuugcuucc

SEQ ID NO: 705994 - RNA, 19 nt, Artificial Sequence
  Description of Artificial Sequence: Synthetic oligonucleotide
  Sense strand starting at position 2848 of SEQ ID NO: 586280
caagccauguguuuaugaa

SEQ ID NO: 705995 - RNA, 19 nt, Artificial Sequence
  Description of Artificial Sequence: Synthetic oligonucleotide
  Antisense strand to SEQ ID NO: 705994
uucauaaacacauggcuug

SEQ ID NO: 705996 - RNA, 19 nt, Artificial Sequence
  Description of Artificial Sequence: Synthetic oligonucleotide
  Sense strand starting at position 2849 of SEQ ID NO: 586280
aagccauguguuuaugaag

SEQ ID NO: 705997 - RNA, 19 nt, Artificial Sequence
  Description of Artificial Sequence: Synthetic oligonucleotide
  Antisense strand to SEQ ID NO: 705996
cuucauaaacacauggcuu

SEQ ID NO: 705998 - RNA, 19 nt, Artificial Sequence
  Description of Artificial Sequence: Synthetic oligonucleotide
  Sense strand starting at position 2914 of SEQ ID NO: 586280
ggaucugugcuuuagugau

SEQ ID NO: 705999 - RNA, 19 nt, Artificial Sequence
  Description of Artificial Sequence: Synthetic oligonucleotide
  Antisense strand to SEQ ID NO: 705998
aucacuaaagcacagaucc

SEQ ID NO: 706000 - RNA, 19 nt, Artificial Sequence
  Description of Artificial Sequence: Synthetic oligonucleotide
  Sense strand starting at position 2926 of SEQ ID NO: 586280
uagugauacuuggugugaa

SEQ ID NO: 706001 - RNA, 19 nt, Artificial Sequence
  Description of Artificial Sequence: Synthetic oligonucleotide
  Antisense strand to SEQ ID NO: 706000
uucacaccaaguaucacua

SEQ ID NO: 706002 - RNA, 19 nt, Artificial Sequence
  Description of Artificial Sequence: Synthetic oligonucleotide
  Sense strand starting at position 2929 of SEQ ID NO: 586280
ugauacuuggugugaaaug

SEQ ID NO: 706003 - RNA, 19 nt, Artificial Sequence
  Description of Artificial Sequence: Synthetic oligonucleotide
  Antisense strand to SEQ ID NO: 706002
cauuucacaccaaguauca

SEQ ID NO: 706004 - RNA, 19 nt, Artificial Sequence
  Description of Artificial Sequence: Synthetic oligonucleotide
  Sense strand starting at position 3321 of SEQ ID NO: 586280
gggaaagucccuugcgguu

SEQ ID NO: 706005 - RNA, 19 nt, Artificial Sequence
  Description of Artificial Sequence: Synthetic oligonucleotide
  Antisense strand to SEQ ID NO: 706004
aaccgcaagggacuuuccc

SEQ ID NO: 706006 - RNA, 19 nt, Artificial Sequence
  Description of Artificial Sequence: Synthetic oligonucleotide
  Sense strand starting at position 3334 of SEQ ID NO: 586280
gcgguuggagugagguuua

SEQ ID NO: 706007 - RNA, 19 nt, Artificial Sequence
  Description of Artificial Sequence: Synthetic oligonucleotide
  Antisense strand to SEQ ID NO: 706006
uaaaccucacuccaaccgc

SEQ ID NO: 706008 - RNA, 19 nt, Artificial Sequence
  Description of Artificial Sequence: Synthetic oligonucleotide
  Sense strand starting at position 3341 of SEQ ID NO: 586280
gagugagguuuauugagga

SEQ ID NO: 706009 - RNA, 19 nt, Artificial Sequence
  Description of Artificial Sequence: Synthetic oligonucleotide
  Antisense strand to SEQ ID NO: 706008
uccucaauaaaccucacuc

SEQ ID NO: 706010 - RNA, 19 nt, Artificial Sequence
  Description of Artificial Sequence: Synthetic oligonucleotide
  Sense strand starting at position 3344 of SEQ ID NO: 586280
ugagguuuauugaggagag

SEQ ID NO: 706011 - RNA, 19 nt, Artificial Sequence
  Description of Artificial Sequence: Synthetic oligonucleotide
  Antisense strand to SEQ ID NO: 706010
cucuccucaauaaaccuca

SEQ ID NO: 706012 - RNA, 19 nt, Artificial Sequence
  Description of Artificial Sequence: Synthetic oligonucleotide
  Sense strand starting at position 3389 of SEQ ID NO: 586280
ugaugucaaucagaaauuu

SEQ ID NO: 706013 - RNA, 19 nt, Artificial Sequence
  Description of Artificial Sequence: Synthetic oligonucleotide
  Antisense strand to SEQ ID NO: 706012
aaauuucugauugacauca

SEQ ID NO: 706014 - RNA, 19 nt, Artificial Sequence
  Description of Artificial Sequence: Synthetic oligonucleotide
  Sense strand starting at position 3464 of SEQ ID NO: 586280
gcagaauguacuuggaacu

SEQ ID NO: 706015 - RNA, 19 nt, Artificial Sequence
  Description of Artificial Sequence: Synthetic oligonucleotide
  Antisense strand to SEQ ID NO: 706014
aguuccaaguacauucugc

SEQ ID NO: 706016 - RNA, 19 nt, Artificial Sequence
  Description of Artificial Sequence: Synthetic oligonucleotide
  Sense strand starting at position 3465 of SEQ ID NO: 586280
cagaauguacuuggaacua

SEQ ID NO: 706017 - RNA, 19 nt, Artificial Sequence
  Description of Artificial Sequence: Synthetic oligonucleotide
  Antisense strand to SEQ ID NO: 706016
uaguuccaaguacauucug

SEQ ID NO: 706018 - RNA, 19 nt, Artificial Sequence
  Description of Artificial Sequence: Synthetic oligonucleotide
  Sense strand starting at position 3562 of SEQ ID NO: 586280
ggaugugcuagguggguaa

SEQ ID NO: 706019 - RNA, 19 nt, Artificial Sequence
  Description of Artificial Sequence: Synthetic oligonucleotide
  Antisense strand to SEQ ID NO: 706018
uuacccaccuagcacaucc

SEQ ID NO: 706020 - RNA, 19 nt, Artificial Sequence
  Description of Artificial Sequence: Synthetic oligonucleotide
  Sense strand starting at position 3598 of SEQ ID NO: 586280
uguugaguacgguguacau

SEQ ID NO: 706021 - RNA, 19 nt, Artificial Sequence
  Description of Artificial Sequence: Synthetic oligonucleotide
  Antisense strand to SEQ ID NO: 706020
auguacaccguacucaaca

SEQ ID NO: 706022 - RNA, 19 nt, Artificial Sequence
  Description of Artificial Sequence: Synthetic oligonucleotide
  Sense strand starting at position 3867 of SEQ ID NO: 586280
aaagcagucuuauaaagga

SEQ ID NO: 706023 - RNA, 19 nt, Artificial Sequence
  Description of Artificial Sequence: Synthetic oligonucleotide
  Antisense strand to SEQ ID NO: 706022
uccuuuauaagacugcuuu

SEQ ID NO: 706024 - RNA, 19 nt, Artificial Sequence
  Description of Artificial Sequence: Synthetic oligonucleotide
  Sense strand starting at position 3916 of SEQ ID NO: 586280
aggagaacuuuggacaguu

SEQ ID NO: 706025 - RNA, 19 nt, Artificial Sequence
  Description of Artificial Sequence: Synthetic oligonucleotide
  Antisense strand to SEQ ID NO: 706024
aacuguccaaaguucuccu

SEQ ID NO: 706026 - RNA, 19 nt, Artificial Sequence
  Description of Artificial Sequence: Synthetic oligonucleotide
  Sense strand starting at position 360 of SEQ ID NO: 586281
uguacuaaagcacgagaau

SEQ ID NO: 706027 - RNA, 19 nt, Artificial Sequence
  Description of Artificial Sequence: Synthetic oligonucleotide
  Antisense strand to SEQ ID NO: 706026
auucucgugcuuuaguaca

SEQ ID NO: 706028 - RNA, 19 nt, Artificial Sequence
  Description of Artificial Sequence: Synthetic oligonucleotide
  Sense strand starting at position 361 of SEQ ID NO: 586281
guacuaaagcacgagaaua

SEQ ID NO: 706029 - RNA, 19 nt, Artificial Sequence
  Description of Artificial Sequence: Synthetic oligonucleotide
  Antisense strand to SEQ ID NO: 706028
uauucucgugcuuuaguac

SEQ ID NO: 706030 - RNA, 19 nt, Artificial Sequence
  Description of Artificial Sequence: Synthetic oligonucleotide
  Sense strand starting at position 456 of SEQ ID NO: 586281
cucugaguugcguacugaa

SEQ ID NO: 706031 - RNA, 19 nt, Artificial Sequence
  Description of Artificial Sequence: Synthetic oligonucleotide
  Antisense strand to SEQ ID NO: 706030
uucaguacgcaacucagag

SEQ ID NO: 706032 - RNA, 19 nt, Artificial Sequence
  Description of Artificial Sequence: Synthetic oligonucleotide
  Sense strand starting at position 476 of SEQ ID NO: 586281
gccuaauggcaagagucuu

SEQ ID NO: 706033 - RNA, 19 nt, Artificial Sequence
  Description of Artificial Sequence: Synthetic oligonucleotide
  Antisense strand to SEQ ID NO: 706032
aagacucuugccauuaggc

SEQ ID NO: 706034 - RNA, 19 nt, Artificial Sequence
  Description of Artificial Sequence: Synthetic oligonucleotide
  Sense strand starting at position 664 of SEQ ID NO: 586281
ucgacagucugaguuucua

SEQ ID NO: 706035 - RNA, 19 nt, Artificial Sequence
  Description of Artificial Sequence: Synthetic oligonucleotide
  Antisense strand to SEQ ID NO: 706034
uagaaacucagacugucga

SEQ ID NO: 706036 - RNA, 19 nt, Artificial Sequence
  Description of Artificial Sequence: Synthetic oligonucleotide
  Sense strand starting at position 668 of SEQ ID NO: 586281
cagucugaguuucuaugaa

SEQ ID NO: 706037 - RNA, 19 nt, Artificial Sequence
  Description of Artificial Sequence: Synthetic oligonucleotide
  Antisense strand to SEQ ID NO: 706036
uucauagaaacucagacug

SEQ ID NO: 706038 - RNA, 19 nt, Artificial Sequence
  Description of Artificial Sequence: Synthetic oligonucleotide
  Sense strand starting at position 808 of SEQ ID NO: 586281
uuuauuuacgcugguugau

SEQ ID NO: 706039 - RNA, 19 nt, Artificial Sequence
  Description of Artificial Sequence: Synthetic oligonucleotide
  Antisense strand to SEQ ID NO: 706038
aucaaccagcguaaauaaa

SEQ ID NO: 706040 - RNA, 19 nt, Artificial Sequence
  Description of Artificial Sequence: Synthetic oligonucleotide
  Sense strand starting at position 810 of SEQ ID NO: 586281
uauuuacgcugguugauaa

SEQ ID NO: 706041 - RNA, 19 nt, Artificial Sequence
  Description of Artificial Sequence: Synthetic oligonucleotide
  Antisense strand to SEQ ID NO: 706040
uuaucaaccagcguaaaua

SEQ ID NO: 706042 - RNA, 19 nt, Artificial Sequence
  Description of Artificial Sequence: Synthetic oligonucleotide
  Sense strand starting at position 893 of SEQ ID NO: 586281
caggcaucauacguccaaa

SEQ ID NO: 706043 - RNA, 19 nt, Artificial Sequence
  Description of Artificial Sequence: Synthetic oligonucleotide
  Antisense strand to SEQ ID NO: 706042
uuuggacguaugaugccug

SEQ ID NO: 706044 - RNA, 19 nt, Artificial Sequence
  Description of Artificial Sequence: Synthetic oligonucleotide
  Sense strand starting at position 943 of SEQ ID NO: 586281
gaguguguuaaugaaguua

SEQ ID NO: 706045 - RNA, 19 nt, Artificial Sequence
  Description of Artificial Sequence: Synthetic oligonucleotide
  Antisense strand to SEQ ID NO: 706044
uaacuucauuaacacacuc

SEQ ID NO: 706046 - RNA, 19 nt, Artificial Sequence
  Description of Artificial Sequence: Synthetic oligonucleotide
  Sense strand starting at position 1049 of SEQ ID NO: 586281
uacaacguuggucagaaau

SEQ ID NO: 706047 - RNA, 19 nt, Artificial Sequence
  Description of Artificial Sequence: Synthetic oligonucleotide
  Antisense strand to SEQ ID NO: 706046
auuucugaccaacguugua

SEQ ID NO: 706048 - RNA, 19 nt, Artificial Sequence
  Description of Artificial Sequence: Synthetic oligonucleotide
  Sense strand starting at position 1127 of SEQ ID NO: 586281
ggcagacacuaguccugaa

SEQ ID NO: 706049 - RNA, 19 nt, Artificial Sequence
  Description of Artificial Sequence: Synthetic oligonucleotide
  Antisense strand to SEQ ID NO: 706048
uucaggacuagugucugcc

SEQ ID NO: 706050 - RNA, 19 nt, Artificial Sequence
  Description of Artificial Sequence: Synthetic oligonucleotide
  Sense strand starting at position 1131 of SEQ ID NO: 586281
gacacuaguccugaagcaa

SEQ ID NO: 706051 - RNA, 19 nt, Artificial Sequence
  Description of Artificial Sequence: Synthetic oligonucleotide
  Antisense strand to SEQ ID NO: 706050
uugcuucaggacuaguguc

SEQ ID NO: 706052 - RNA, 19 nt, Artificial Sequence
  Description of Artificial Sequence: Synthetic oligonucleotide
  Sense strand starting at position 1324 of SEQ ID NO: 586281
gguguuaucagagggagag

SEQ ID NO: 706053 - RNA, 19 nt, Artificial Sequence
  Description of Artificial Sequence: Synthetic oligonucleotide
  Antisense strand to SEQ ID NO: 706052
cucucccucugauaacacc

SEQ ID NO: 706054 - RNA, 19 nt, Artificial Sequence
  Description of Artificial Sequence: Synthetic oligonucleotide
  Sense strand starting at position 1531 of SEQ ID NO: 586281
gagcccuugcaggguauaa

SEQ ID NO: 706055 - RNA, 19 nt, Artificial Sequence
  Description of Artificial Sequence: Synthetic oligonucleotide
  Antisense strand to SEQ ID NO: 706054
uuauacccugcaagggcuc

SEQ ID NO: 706056 - RNA, 19 nt, Artificial Sequence
  Description of Artificial Sequence: Synthetic oligonucleotide
  Sense strand starting at position 1533 of SEQ ID NO: 586281
gcccuugcaggguauaauu

SEQ ID NO: 706057 - RNA, 19 nt, Artificial Sequence
  Description of Artificial Sequence: Synthetic oligonucleotide
  Antisense strand to SEQ ID NO: 706056
aauuauacccugcaagggc

SEQ ID NO: 706058 - RNA, 19 nt, Artificial Sequence
  Description of Artificial Sequence: Synthetic oligonucleotide
  Sense strand starting at position 1607 of SEQ ID NO: 586281
acuaucucugaaugaaugu

SEQ ID NO: 706059 - RNA, 19 nt, Artificial Sequence
  Description of Artificial Sequence: Synthetic oligonucleotide
  Antisense strand to SEQ ID NO: 706058
acauucauucagagauagu

SEQ ID NO: 706060 - RNA, 19 nt, Artificial Sequence
  Description of Artificial Sequence: Synthetic oligonucleotide
  Sense strand starting at position 1642 of SEQ ID NO: 586281
cuaggcuucuucccagaca

SEQ ID NO: 706061 - RNA, 19 nt, Artificial Sequence
  Description of Artificial Sequence: Synthetic oligonucleotide
  Antisense strand to SEQ ID NO: 706060
ugucugggaagaagccuag

SEQ ID NO: 706062 - RNA, 19 nt, Artificial Sequence
  Description of Artificial Sequence: Synthetic oligonucleotide
  Sense strand starting at position 1855 of SEQ ID NO: 586281
gguggucccacccaugauu

SEQ ID NO: 706063 - RNA, 19 nt, Artificial Sequence
  Description of Artificial Sequence: Synthetic oligonucleotide
  Antisense strand to SEQ ID NO: 706062
aaucaugggugggaccacc

SEQ ID NO: 706064 - RNA, 19 nt, Artificial Sequence
  Description of Artificial Sequence: Synthetic oligonucleotide
  Sense strand starting at position 2191 of SEQ ID NO: 586281
ugggaacuguggucucgau

SEQ ID NO: 706065 - RNA, 19 nt, Artificial Sequence
  Description of Artificial Sequence: Synthetic oligonucleotide
  Antisense strand to SEQ ID NO: 706064
aucgagaccacaguuccca

SEQ ID NO: 706066 - RNA, 19 nt, Artificial Sequence
  Description of Artificial Sequence: Synthetic oligonucleotide
  Sense strand starting at position 2432 of SEQ ID NO: 586281
ccuaguguucuauacacaa

SEQ ID NO: 706067 - RNA, 19 nt, Artificial Sequence
  Description of Artificial Sequence: Synthetic oligonucleotide
  Antisense strand to SEQ ID NO: 706066
uuguguauagaacacuagg

SEQ ID NO: 706068 - RNA, 19 nt, Artificial Sequence
  Description of Artificial Sequence: Synthetic oligonucleotide
  Sense strand starting at position 2614 of SEQ ID NO: 586281
ggcuacuugguguaaccua

SEQ ID NO: 706069 - RNA, 19 nt, Artificial Sequence
  Description of Artificial Sequence: Synthetic oligonucleotide
  Antisense strand to SEQ ID NO: 706068
uagguuacaccaaguagcc

SEQ ID NO: 706070 - RNA, 19 nt, Artificial Sequence
  Description of Artificial Sequence: Synthetic oligonucleotide
  Sense strand starting at position 2656 of SEQ ID NO: 586281
acagcaugucacuguacua

SEQ ID NO: 706071 - RNA, 19 nt, Artificial Sequence
  Description of Artificial Sequence: Synthetic oligonucleotide
  Antisense strand to SEQ ID NO: 706070
uaguacagugacaugcugu

SEQ ID NO: 706072 - RNA, 19 nt, Artificial Sequence
  Description of Artificial Sequence: Synthetic oligonucleotide
  Sense strand starting at position 2698 of SEQ ID NO: 586281
agugguauuuguguguaca

SEQ ID NO: 706073 - RNA, 19 nt, Artificial Sequence
  Description of Artificial Sequence: Synthetic oligonucleotide
  Antisense strand to SEQ ID NO: 706072
uguacacacaaauaccacu

SEQ ID NO: 706074 - RNA, 19 nt, Artificial Sequence
  Description of Artificial Sequence: Synthetic oligonucleotide
  Sense strand starting at position 2699 of SEQ ID NO: 586281
gugguauuuguguguacaa

SEQ ID NO: 706075 - RNA, 19 nt, Artificial Sequence
  Description of Artificial Sequence: Synthetic oligonucleotide
  Antisense strand to SEQ ID NO: 706074
uuguacacacaaauaccac

SEQ ID NO: 706076 - RNA, 19 nt, Artificial Sequence
  Description of Artificial Sequence: Synthetic oligonucleotide
  Sense strand starting at position 2700 of SEQ ID NO: 586281
ugguauuuguguguacaaa

SEQ ID NO: 706077 - RNA, 19 nt, Artificial Sequence
  Description of Artificial Sequence: Synthetic oligonucleotide
  Antisense strand to SEQ ID NO: 706076
uuuguacacacaaauacca

SEQ ID NO: 706078 - RNA, 19 nt, Artificial Sequence
  Description of Artificial Sequence: Synthetic oligonucleotide
  Sense strand starting at position 2773 of SEQ ID NO: 586281
gcaacacaucuaggacaau

SEQ ID NO: 706079 - RNA, 19 nt, Artificial Sequence
  Description of Artificial Sequence: Synthetic oligonucleotide
  Antisense strand to SEQ ID NO: 706078
auuguccuagauguguugc

SEQ ID NO: 706080 - RNA, 19 nt, Artificial Sequence
  Description of Artificial Sequence: Synthetic oligonucleotide
  Sense strand starting at position 2782 of SEQ ID NO: 586281
cuaggacaauuugaacaau

SEQ ID NO: 706081 - RNA, 19 nt, Artificial Sequence
  Description of Artificial Sequence: Synthetic oligonucleotide
  Antisense strand to SEQ ID NO: 706080
auuguucaaauuguccuag

SEQ ID NO: 706082 - RNA, 19 nt, Artificial Sequence
  Description of Artificial Sequence: Synthetic oligonucleotide
  Sense strand starting at position 2990 of SEQ ID NO: 586281
gcaacuaugcaguacugua

SEQ ID NO: 706083 - RNA, 19 nt, Artificial Sequence
  Description of Artificial Sequence: Synthetic oligonucleotide
  Antisense strand to SEQ ID NO: 706082
uacaguacugcauaguugc

SEQ ID NO: 706084 - RNA, 19 nt, Artificial Sequence
  Description of Artificial Sequence: Synthetic oligonucleotide
  Sense strand starting at position 3527 of SEQ ID NO: 586281
uauaguaaauacuaggaga

SEQ ID NO: 706085 - RNA, 19 nt, Artificial Sequence
  Description of Artificial Sequence: Synthetic oligonucleotide
  Antisense strand to SEQ ID NO: 706084
ucuccuaguauuuacuaua

SEQ ID NO: 706086 - RNA, 19 nt, Artificial Sequence
  Description of Artificial Sequence: Synthetic oligonucleotide
  Sense strand starting at position 3573 of SEQ ID NO: 586281
uuaugauuccacugccaga

SEQ ID NO: 706087 - RNA, 19 nt, Artificial Sequence
  Description of Artificial Sequence: Synthetic oligonucleotide
  Antisense strand to SEQ ID NO: 706086
ucuggcaguggaaucauaa

SEQ ID NO: 706088 - RNA, 19 nt, Artificial Sequence
  Description of Artificial Sequence: Synthetic oligonucleotide
  Sense strand starting at position 3591 of SEQ ID NO: 586281
aaaugagguucuucuuuga

SEQ ID NO: 706089 - RNA, 19 nt, Artificial Sequence
  Description of Artificial Sequence: Synthetic oligonucleotide
  Antisense strand to SEQ ID NO: 706088
ucaaagaagaaccucauuu

SEQ ID NO: 706090 - RNA, 19 nt, Artificial Sequence
  Description of Artificial Sequence: Synthetic oligonucleotide
  Sense strand starting at position 3595 of SEQ ID NO: 586281
gagguucuucuuugacuga

SEQ ID NO: 706091 - RNA, 19 nt, Artificial Sequence
  Description of Artificial Sequence: Synthetic oligonucleotide
  Antisense strand to SEQ ID NO: 706090
ucagucaaagaagaaccuc

SEQ ID NO: 706092 - RNA, 19 nt, Artificial Sequence
  Description of Artificial Sequence: Synthetic oligonucleotide
  Sense strand starting at position 3598 of SEQ ID NO: 586281
guucuucuuugacugaaac

SEQ ID NO: 706093 - RNA, 19 nt, Artificial Sequence
  Description of Artificial Sequence: Synthetic oligonucleotide
  Antisense strand to SEQ ID NO: 706092
guuucagucaaagaagaac

SEQ ID NO: 706094 - RNA, 19 nt, Artificial Sequence
  Description of Artificial Sequence: Synthetic oligonucleotide
  Sense strand starting at position 3617 of SEQ ID NO: 586281
acuguuaugcaguacauga

SEQ ID NO: 706095 - RNA, 19 nt, Artificial Sequence
  Description of Artificial Sequence: Synthetic oligonucleotide
  Antisense strand to SEQ ID NO: 706094
ucauguacugcauaacagu

SEQ ID NO: 706096 - RNA, 19 nt, Artificial Sequence
  Description of Artificial Sequence: Synthetic oligonucleotide
  Sense strand starting at position 3714 of SEQ ID NO: 586281
augaacuaguaucuguauu

SEQ ID NO: 706097 - RNA, 19 nt, Artificial Sequence
  Description of Artificial Sequence: Synthetic oligonucleotide
  Antisense strand to SEQ ID NO: 706096
aauacagauacuaguucau

SEQ ID NO: 706098 - RNA, 19 nt, Artificial Sequence
  Description of Artificial Sequence: Synthetic oligonucleotide
  Sense strand starting at position 3821 of SEQ ID NO: 586281
gcaccaaguauguagagaa

SEQ ID NO: 706099 - RNA, 19 nt, Artificial Sequence
  Description of Artificial Sequence: Synthetic oligonucleotide
  Antisense strand to SEQ ID NO: 706098
uucucuacauacuuggugc

SEQ ID NO: 706100 - RNA, 19 nt, Artificial Sequence
  Description of Artificial Sequence: Synthetic oligonucleotide
  Sense strand starting at position 3917 of SEQ ID NO: 586281
aaaguuaagugauugccaa

SEQ ID NO: 706101 - RNA, 19 nt, Artificial Sequence
  Description of Artificial Sequence: Synthetic oligonucleotide
  Antisense strand to SEQ ID NO: 706100
uuggcaaucacuuaacuuu

SEQ ID NO: 706102 - RNA, 19 nt, Artificial Sequence
  Description of Artificial Sequence: Synthetic oligonucleotide
  Sense strand starting at position 3918 of SEQ ID NO: 586281
aaguuaagugauugccaaa

SEQ ID NO: 706103 - RNA, 19 nt, Artificial Sequence
  Description of Artificial Sequence: Synthetic oligonucleotide
  Antisense strand to SEQ ID NO: 706102
uuuggcaaucacuuaacuu

SEQ ID NO: 706104 - RNA, 19 nt, Artificial Sequence
  Description of Artificial Sequence: Synthetic oligonucleotide
  Sense strand starting at position 3941 of SEQ ID NO: 586281
gcauaaauuaguggaggaa

SEQ ID NO: 706105 - RNA, 19 nt, Artificial Sequence
  Description of Artificial Sequence: Synthetic oligonucleotide
  Antisense strand to SEQ ID NO: 706104
uuccuccacuaauuuaugc

SEQ ID NO: 706106 - RNA, 19 nt, Artificial Sequence
  Description of Artificial Sequence: Synthetic oligonucleotide
  Sense strand starting at position 134 of SEQ ID NO: 586282
ggaccuaugcaaugcaauu

SEQ ID NO: 706107 - RNA, 19 nt, Artificial Sequence
  Description of Artificial Sequence: Synthetic oligonucleotide
  Antisense strand to SEQ ID NO: 706106
aauugcauugcauaggucc

SEQ ID NO: 706108 - RNA, 19 nt, Artificial Sequence
  Description of Artificial Sequence: Synthetic oligonucleotide
  Sense strand starting at position 171 of SEQ ID NO: 586282
uauguagggcuguauaauu

SEQ ID NO: 706109 - RNA, 19 nt, Artificial Sequence
  Description of Artificial Sequence: Synthetic oligonucleotide
  Antisense strand to SEQ ID NO: 706108
aauuauacagcccuacaua

SEQ ID NO: 706110 - RNA, 19 nt, Artificial Sequence
  Description of Artificial Sequence: Synthetic oligonucleotide
  Sense strand starting at position 365 of SEQ ID NO: 586282
aggguuaucuaauuccaag

SEQ ID NO: 706111 - RNA, 19 nt, Artificial Sequence
  Description of Artificial Sequence: Synthetic oligonucleotide
  Antisense strand to SEQ ID NO: 706110
cuuggaauuagauaacccu

SEQ ID NO: 706112 - RNA, 19 nt, Artificial Sequence
  Description of Artificial Sequence: Synthetic oligonucleotide
  Sense strand starting at position 379 of SEQ ID NO: 586282
ccaagagucacuuggguua

SEQ ID NO: 706113 - RNA, 19 nt, Artificial Sequence
  Description of Artificial Sequence: Synthetic oligonucleotide
  Antisense strand to SEQ ID NO: 706112
uaacccaagugacucuugg

SEQ ID NO: 706114 - RNA, 19 nt, Artificial Sequence
  Description of Artificial Sequence: Synthetic oligonucleotide
  Sense strand starting at position 390 of SEQ ID NO: 586282
uuggguuacugacccuaaa

SEQ ID NO: 706115 - RNA, 19 nt, Artificial Sequence
  Description of Artificial Sequence: Synthetic oligonucleotide
  Antisense strand to SEQ ID NO: 706114
uuuagggucaguaacccaa

SEQ ID NO: 706116 - RNA, 19 nt, Artificial Sequence
  Description of Artificial Sequence: Synthetic oligonucleotide
  Sense strand starting at position 528 of SEQ ID NO: 586282
gggugaagccucuaacucu

SEQ ID NO: 706117 - RNA, 19 nt, Artificial Sequence
  Description of Artificial Sequence: Synthetic oligonucleotide
  Antisense strand to SEQ ID NO: 706116
agaguuagaggcuucaccc

SEQ ID NO: 706118 - RNA, 19 nt, Artificial Sequence
  Description of Artificial Sequence: Synthetic oligonucleotide
  Sense strand starting at position 706 of SEQ ID NO: 586282
gucuuuccaguuuauaaau

SEQ ID NO: 706119 - RNA, 19 nt, Artificial Sequence
  Description of Artificial Sequence: Synthetic oligonucleotide
  Antisense strand to SEQ ID NO: 706118
auuuauaaacuggaaagac

SEQ ID NO: 706120 - RNA, 19 nt, Artificial Sequence
  Description of Artificial Sequence: Synthetic oligonucleotide
  Sense strand starting at position 791 of SEQ ID NO: 586282
ggauaaaggcugugaccaa

SEQ ID NO: 706121 - RNA, 19 nt, Artificial Sequence
  Description of Artificial Sequence: Synthetic oligonucleotide
  Antisense strand to SEQ ID NO: 706120
uuggucacagccuuuaucc

SEQ ID NO: 706122 - RNA, 19 nt, Artificial Sequence
  Description of Artificial Sequence: Synthetic oligonucleotide
  Sense strand starting at position 890 of SEQ ID NO: 586282
ggugucuacgcauaaagga

SEQ ID NO: 706123 - RNA, 19 nt, Artificial Sequence
  Description of Artificial Sequence: Synthetic oligonucleotide
  Antisense strand to SEQ ID NO: 706122
uccuuuaugcguagacacc

SEQ ID NO: 706124 - RNA, 19 nt, Artificial Sequence
  Description of Artificial Sequence: Synthetic oligonucleotide
  Sense strand starting at position 979 of SEQ ID NO: 586282
cggagacagcaauauucuu

SEQ ID NO: 706125 - RNA, 19 nt, Artificial Sequence
  Description of Artificial Sequence: Synthetic oligonucleotide
  Antisense strand to SEQ ID NO: 706124
aagaauauugcugucuccg

SEQ ID NO: 706126 - RNA, 19 nt, Artificial Sequence
  Description of Artificial Sequence: Synthetic oligonucleotide
  Sense strand starting at position 992 of SEQ ID NO: 586282
auucuuuacugaguggaaa

SEQ ID NO: 706127 - RNA, 19 nt, Artificial Sequence
  Description of Artificial Sequence: Synthetic oligonucleotide
  Antisense strand to SEQ ID NO: 706126
uuuccacucaguaaagaau

SEQ ID NO: 706128 - RNA, 19 nt, Artificial Sequence
  Description of Artificial Sequence: Synthetic oligonucleotide
  Sense strand starting at position 1029 of SEQ ID NO: 586282
gcagaacaucucugacuga

SEQ ID NO: 706129 - RNA, 19 nt, Artificial Sequence
  Description of Artificial Sequence: Synthetic oligonucleotide
  Antisense strand to SEQ ID NO: 706128
ucagucagagauguucugc

SEQ ID NO: 706130 - RNA, 19 nt, Artificial Sequence
  Description of Artificial Sequence: Synthetic oligonucleotide
  Sense strand starting at position 2116 of SEQ ID NO: 586282
ccugaugacuguuuaaucu

SEQ ID NO: 706131 - RNA, 19 nt, Artificial Sequence
  Description of Artificial Sequence: Synthetic oligonucleotide
  Antisense strand to SEQ ID NO: 706130
agauuaaacagucaucagg

SEQ ID NO: 706132 - RNA, 19 nt, Artificial Sequence
  Description of Artificial Sequence: Synthetic oligonucleotide
  Sense strand starting at position 2221 of SEQ ID NO: 586282
ggaacagucugagcaccaa

SEQ ID NO: 706133 - RNA, 19 nt, Artificial Sequence
  Description of Artificial Sequence: Synthetic oligonucleotide
  Antisense strand to SEQ ID NO: 706132
uuggugcucagacuguucc

SEQ ID NO: 706134 - RNA, 19 nt, Artificial Sequence
  Description of Artificial Sequence: Synthetic oligonucleotide
  Sense strand starting at position 2307 of SEQ ID NO: 586282
gaugucuugccucaggaca

SEQ ID NO: 706135 - RNA, 19 nt, Artificial Sequence
  Description of Artificial Sequence: Synthetic oligonucleotide
  Antisense strand to SEQ ID NO: 706134
uguccugaggcaagacauc

SEQ ID NO: 706136 - RNA, 19 nt, Artificial Sequence
  Description of Artificial Sequence: Synthetic oligonucleotide
  Sense strand starting at position 2354 of SEQ ID NO: 586282
cgaacaaacucugcucaaa

SEQ ID NO: 706137 - RNA, 19 nt, Artificial Sequence
  Description of Artificial Sequence: Synthetic oligonucleotide
  Antisense strand to SEQ ID NO: 706136
uuugagcagaguuuguucg

SEQ ID NO: 706138 - RNA, 19 nt, Artificial Sequence
  Description of Artificial Sequence: Synthetic oligonucleotide
  Sense strand starting at position 2579 of SEQ ID NO: 586282
uccugaugucuugggagua

SEQ ID NO: 706139 - RNA, 19 nt, Artificial Sequence
  Description of Artificial Sequence: Synthetic oligonucleotide
  Antisense strand to SEQ ID NO: 706138
uacucccaagacaucagga

SEQ ID NO: 706140 - RNA, 19 nt, Artificial Sequence
  Description of Artificial Sequence: Synthetic oligonucleotide
  Sense strand starting at position 2593 of SEQ ID NO: 586282
gaguacuccugacucauug

SEQ ID NO: 706141 - RNA, 19 nt, Artificial Sequence
  Description of Artificial Sequence: Synthetic oligonucleotide
  Antisense strand to SEQ ID NO: 706140
caaugagucaggaguacuc

SEQ ID NO: 706142 - RNA, 19 nt, Artificial Sequence
  Description of Artificial Sequence: Synthetic oligonucleotide
  Sense strand starting at position 2597 of SEQ ID NO: 586282
acuccugacucauugguga

SEQ ID NO: 706143 - RNA, 19 nt, Artificial Sequence
  Description of Artificial Sequence: Synthetic oligonucleotide
  Antisense strand to SEQ ID NO: 706142
ucaccaaugagucaggagu

SEQ ID NO: 706144 - RNA, 19 nt, Artificial Sequence
  Description of Artificial Sequence: Synthetic oligonucleotide
  Sense strand starting at position 2599 of SEQ ID NO: 586282
uccugacucauuggugaag

SEQ ID NO: 706145 - RNA, 19 nt, Artificial Sequence
  Description of Artificial Sequence: Synthetic oligonucleotide
  Antisense strand to SEQ ID NO: 706144
cuucaccaaugagucagga

SEQ ID NO: 706146 - RNA, 19 nt, Artificial Sequence
  Description of Artificial Sequence: Synthetic oligonucleotide
  Sense strand starting at position 2600 of SEQ ID NO: 586282
ccugacucauuggugaaga

SEQ ID NO: 706147 - RNA, 19 nt, Artificial Sequence
  Description of Artificial Sequence: Synthetic oligonucleotide
  Antisense strand to SEQ ID NO: 706146
ucuucaccaaugagucagg

SEQ ID NO: 706148 - RNA, 19 nt, Artificial Sequence
  Description of Artificial Sequence: Synthetic oligonucleotide
  Sense strand starting at position 2625 of SEQ ID NO: 586282
cagcuaaugccagacagua

SEQ ID NO: 706149 - RNA, 19 nt, Artificial Sequence
  Description of Artificial Sequence: Synthetic oligonucleotide
  Antisense strand to SEQ ID NO: 706148
uacugucuggcauuagcug

SEQ ID NO: 706150 - RNA, 19 nt, Artificial Sequence
  Description of Artificial Sequence: Synthetic oligonucleotide
  Sense strand starting at position 2676 of SEQ ID NO: 586282
cuagauaacugggccuuua

SEQ ID NO: 706151 - RNA, 19 nt, Artificial Sequence
  Description of Artificial Sequence: Synthetic oligonucleotide
  Antisense strand to SEQ ID NO: 706150
uaaaggcccaguuaucuag

SEQ ID NO: 706152 - RNA, 19 nt, Artificial Sequence
  Description of Artificial Sequence: Synthetic oligonucleotide
  Sense strand starting at position 2901 of SEQ ID NO: 586282
uuaagcuauugagcacaau

SEQ ID NO: 706153 - RNA, 19 nt, Artificial Sequence
  Description of Artificial Sequence: Synthetic oligonucleotide
  Antisense strand to SEQ ID NO: 706152
auugugcucaauagcuuaa

SEQ ID NO: 706154 - RNA, 19 nt, Artificial Sequence
  Description of Artificial Sequence: Synthetic oligonucleotide
  Sense strand starting at position 2904 of SEQ ID NO: 586282
agcuauugagcacaauaau

SEQ ID NO: 706155 - RNA, 19 nt, Artificial Sequence
  Description of Artificial Sequence: Synthetic oligonucleotide
  Antisense strand to SEQ ID NO: 706154
auuauugugcucaauagcu

SEQ ID NO: 706156 - RNA, 19 nt, Artificial Sequence
  Description of Artificial Sequence: Synthetic oligonucleotide
  Sense strand starting at position 2917 of SEQ ID NO: 586282
aauaauuuacgcuguguca

SEQ ID NO: 706157 - RNA, 19 nt, Artificial Sequence
  Description of Artificial Sequence: Synthetic oligonucleotide
  Antisense strand to SEQ ID NO: 706156
ugacacagcguaaauuauu

SEQ ID NO: 706158 - RNA, 19 nt, Artificial Sequence
  Description of Artificial Sequence: Synthetic oligonucleotide
  Sense strand starting at position 2919 of SEQ ID NO: 586282
uaauuuacgcugugucaga

SEQ ID NO: 706159 - RNA, 19 nt, Artificial Sequence
  Description of Artificial Sequence: Synthetic oligonucleotide
  Antisense strand to SEQ ID NO: 706158
ucugacacagcguaaauua

SEQ ID NO: 706160 - RNA, 19 nt, Artificial Sequence
  Description of Artificial Sequence: Synthetic oligonucleotide
  Sense strand starting at position 2932 of SEQ ID NO: 586282
gucagaggacguuagaaug

SEQ ID NO: 706161 - RNA, 19 nt, Artificial Sequence
  Description of Artificial Sequence: Synthetic oligonucleotide
  Antisense strand to SEQ ID NO: 706160
cauucuaacguccucugac

SEQ ID NO: 706162 - RNA, 19 nt, Artificial Sequence
  Description of Artificial Sequence: Synthetic oligonucleotide
  Sense strand starting at position 2988 of SEQ ID NO: 586282
gggugugaggagcaagauu

SEQ ID NO: 706163 - RNA, 19 nt, Artificial Sequence
  Description of Artificial Sequence: Synthetic oligonucleotide
  Antisense strand to SEQ ID NO: 706162
aaucuugcuccucacaccc

SEQ ID NO: 706164 - RNA, 19 nt, Artificial Sequence
  Description of Artificial Sequence: Synthetic oligonucleotide
  Sense strand starting at position 3069 of SEQ ID NO: 586282
ggacaugcagccuaguuua

SEQ ID NO: 706165 - RNA, 19 nt, Artificial Sequence
  Description of Artificial Sequence: Synthetic oligonucleotide
  Antisense strand to SEQ ID NO: 706164
uaaacuaggcugcaugucc

SEQ ID NO: 706166 - RNA, 19 nt, Artificial Sequence
  Description of Artificial Sequence: Synthetic oligonucleotide
  Sense strand starting at position 3191 of SEQ ID NO: 586282
gccaucaguccugacaaau

SEQ ID NO: 706167 - RNA, 19 nt, Artificial Sequence
  Description of Artificial Sequence: Synthetic oligonucleotide
  Antisense strand to SEQ ID NO: 706166
auuugucaggacugauggc

SEQ ID NO: 706168 - RNA, 19 nt, Artificial Sequence
  Description of Artificial Sequence: Synthetic oligonucleotide
  Sense strand starting at position 3444 of SEQ ID NO: 586282
acaucucuucugugacaua

SEQ ID NO: 706169 - RNA, 19 nt, Artificial Sequence
  Description of Artificial Sequence: Synthetic oligonucleotide
  Antisense strand to SEQ ID NO: 706168
uaugucacagaagagaugu

SEQ ID NO: 706170 - RNA, 19 nt, Artificial Sequence
  Description of Artificial Sequence: Synthetic oligonucleotide
  Sense strand starting at position 3486 of SEQ ID NO: 586282
ugcucuguucuuuagaaua

SEQ ID NO: 706171 - RNA, 19 nt, Artificial Sequence
  Description of Artificial Sequence: Synthetic oligonucleotide
  Antisense strand to SEQ ID NO: 706170
uauucuaaagaacagagca

SEQ ID NO: 706172 - RNA, 19 nt, Artificial Sequence
  Description of Artificial Sequence: Synthetic oligonucleotide
  Sense strand starting at position 3606 of SEQ ID NO: 586282
ccaacuguguccucugaaa

SEQ ID NO: 706173 - RNA, 19 nt, Artificial Sequence
  Description of Artificial Sequence: Synthetic oligonucleotide
  Antisense strand to SEQ ID NO: 706172
uuucagaggacacaguugg

SEQ ID NO: 706174 - RNA, 19 nt, Artificial Sequence
  Description of Artificial Sequence: Synthetic oligonucleotide
  Sense strand starting at position 3618 of SEQ ID NO: 586282
ucugaaaucccauaguguu

SEQ ID NO: 706175 - RNA, 19 nt, Artificial Sequence
  Description of Artificial Sequence: Synthetic oligonucleotide
  Antisense strand to SEQ ID NO: 706174
aacacuaugggauuucaga

SEQ ID NO: 706176 - RNA, 19 nt, Artificial Sequence
  Description of Artificial Sequence: Synthetic oligonucleotide
  Sense strand starting at position 3678 of SEQ ID NO: 586282
guauuauagugacuauaac

SEQ ID NO: 706177 - RNA, 19 nt, Artificial Sequence
  Description of Artificial Sequence: Synthetic oligonucleotide
  Antisense strand to SEQ ID NO: 706176
guuauagucacuauaauac

SEQ ID NO: 706178 - RNA, 19 nt, Artificial Sequence
  Description of Artificial Sequence: Synthetic oligonucleotide
  Sense strand starting at position 3716 of SEQ ID NO: 586282
cugagaacucacugugaca

SEQ ID NO: 706179 - RNA, 19 nt, Artificial Sequence
  Description of Artificial Sequence: Synthetic oligonucleotide
  Antisense strand to SEQ ID NO: 706178
ugucacagugaguucucag

SEQ ID NO: 706180 - RNA, 19 nt, Artificial Sequence
  Description of Artificial Sequence: Synthetic oligonucleotide
  Sense strand starting at position 3718 of SEQ ID NO: 586282
gagaacucacugugacaug

SEQ ID NO: 706181 - RNA, 19 nt, Artificial Sequence
  Description of Artificial Sequence: Synthetic oligonucleotide
  Antisense strand to SEQ ID NO: 706180
caugucacagugaguucuc

SEQ ID NO: 706182 - RNA, 19 nt, Artificial Sequence
  Description of Artificial Sequence: Synthetic oligonucleotide
  Sense strand starting at position 3785 of SEQ ID NO: 586282
gaguccuugccacaguaga

SEQ ID NO: 706183 - RNA, 19 nt, Artificial Sequence
  Description of Artificial Sequence: Synthetic oligonucleotide
  Antisense strand to SEQ ID NO: 706182
ucuacuguggcaaggacuc

SEQ ID NO: 706184 - RNA, 19 nt, Artificial Sequence
  Description of Artificial Sequence: Synthetic oligonucleotide
  Sense strand starting at position 3861 of SEQ ID NO: 586282
ggaagaaggugugcaaaga

SEQ ID NO: 706185 - RNA, 19 nt, Artificial Sequence
  Description of Artificial Sequence: Synthetic oligonucleotide
  Antisense strand to SEQ ID NO: 706184
ucuuugcacaccuucuucc

SEQ ID NO: 706186 - RNA, 19 nt, Artificial Sequence
  Description of Artificial Sequence: Synthetic oligonucleotide
  Sense strand starting at position 6 of SEQ ID NO: 586283
uucucuucugguuaaugua

SEQ ID NO: 706187 - RNA, 19 nt, Artificial Sequence
  Description of Artificial Sequence: Synthetic oligonucleotide
  Antisense strand to SEQ ID NO: 706186
uacauuaaccagaagagaa

SEQ ID NO: 706188 - RNA, 19 nt, Artificial Sequence
  Description of Artificial Sequence: Synthetic oligonucleotide
  Sense strand starting at position 148 of SEQ ID NO: 586283
uagccuugagguuacuaaa

SEQ ID NO: 706189 - RNA, 19 nt, Artificial Sequence
  Description of Artificial Sequence: Synthetic oligonucleotide
  Antisense strand to SEQ ID NO: 706188
uuuaguaaccucaaggcua

SEQ ID NO: 706190 - RNA, 19 nt, Artificial Sequence
  Description of Artificial Sequence: Synthetic oligonucleotide
  Sense strand starting at position 662 of SEQ ID NO: 586283
gucaauucccaagguauau

SEQ ID NO: 706191 - RNA, 19 nt, Artificial Sequence
  Description of Artificial Sequence: Synthetic oligonucleotide
  Antisense strand to SEQ ID NO: 706190
auauaccuugggaauugac

SEQ ID NO: 706192 - RNA, 19 nt, Artificial Sequence
  Description of Artificial Sequence: Synthetic oligonucleotide
  Sense strand starting at position 753 of SEQ ID NO: 586283
agguaucuggccuacagau

SEQ ID NO: 706193 - RNA, 19 nt, Artificial Sequence
  Description of Artificial Sequence: Synthetic oligonucleotide
  Antisense strand to SEQ ID NO: 706192
aucuguaggccagauaccu

SEQ ID NO: 706194 - RNA, 19 nt, Artificial Sequence
  Description of Artificial Sequence: Synthetic oligonucleotide
  Sense strand starting at position 791 of SEQ ID NO: 586283
cuggguccugcauauauua

SEQ ID NO: 706195 - RNA, 19 nt, Artificial Sequence
  Description of Artificial Sequence: Synthetic oligonucleotide
  Antisense strand to SEQ ID NO: 706194
uaauauaugcaggacccag

SEQ ID NO: 706196 - RNA, 19 nt, Artificial Sequence
  Description of Artificial Sequence: Synthetic oligonucleotide
  Sense strand starting at position 805 of SEQ ID NO: 586283
uauuaaaggugggcugauu

SEQ ID NO: 706197 - RNA, 19 nt, Artificial Sequence
  Description of Artificial Sequence: Synthetic oligonucleotide
  Antisense strand to SEQ ID NO: 706196
aaucagcccaccuuuaaua

SEQ ID NO: 706198 - RNA, 19 nt, Artificial Sequence
  Description of Artificial Sequence: Synthetic oligonucleotide
  Sense strand starting at position 894 of SEQ ID NO: 586283
uuccauauggaagguauga

SEQ ID NO: 706199 - RNA, 19 nt, Artificial Sequence
  Description of Artificial Sequence: Synthetic oligonucleotide
  Antisense strand to SEQ ID NO: 706198
ucauaccuuccauauggaa

SEQ ID NO: 706200 - RNA, 19 nt, Artificial Sequence
  Description of Artificial Sequence: Synthetic oligonucleotide
  Sense strand starting at position 946 of SEQ ID NO: 586283
cuuugugcugggugauuua

SEQ ID NO: 706201 - RNA, 19 nt, Artificial Sequence
  Description of Artificial Sequence: Synthetic oligonucleotide
  Antisense strand to SEQ ID NO: 706200
uaaaucacccagcacaaag

SEQ ID NO: 706202 - RNA, 19 nt, Artificial Sequence
  Description of Artificial Sequence: Synthetic oligonucleotide
  Sense strand starting at position 1041 of SEQ ID NO: 586283
uaguuuguuccagcucgua

SEQ ID NO: 706203 - RNA, 19 nt, Artificial Sequence
  Description of Artificial Sequence: Synthetic oligonucleotide
  Antisense strand to SEQ ID NO: 706202
uacgagcuggaacaaacua

SEQ ID NO: 706204 - RNA, 19 nt, Artificial Sequence
  Description of Artificial Sequence: Synthetic oligonucleotide
  Sense strand starting at position 1043 of SEQ ID NO: 586283
guuuguuccagcucguaaa

SEQ ID NO: 706205 - RNA, 19 nt, Artificial Sequence
  Description of Artificial Sequence: Synthetic oligonucleotide
  Antisense strand to SEQ ID NO: 706204
uuuacgagcuggaacaaac

SEQ ID NO: 706206 - RNA, 19 nt, Artificial Sequence
  Description of Artificial Sequence: Synthetic oligonucleotide
  Sense strand starting at position 1060 of SEQ ID NO: 586283
aaacuagugcuuuaguuag

SEQ ID NO: 706207 - RNA, 19 nt, Artificial Sequence
  Description of Artificial Sequence: Synthetic oligonucleotide
  Antisense strand to SEQ ID NO: 706206
cuaacuaaagcacuaguuu

SEQ ID NO: 706208 - RNA, 19 nt, Artificial Sequence
  Description of Artificial Sequence: Synthetic oligonucleotide
  Sense strand starting at position 1078 of SEQ ID NO: 586283
gccuuaguugcauaacaaa

SEQ ID NO: 706209 - RNA, 19 nt, Artificial Sequence
  Description of Artificial Sequence: Synthetic oligonucleotide
  Antisense strand to SEQ ID NO: 706208
uuuguuaugcaacuaaggc

SEQ ID NO: 706210 - RNA, 19 nt, Artificial Sequence
  Description of Artificial Sequence: Synthetic oligonucleotide
  Sense strand starting at position 1389 of SEQ ID NO: 586283
ccuggugguggcuaauaau

SEQ ID NO: 706211 - RNA, 19 nt, Artificial Sequence
  Description of Artificial Sequence: Synthetic oligonucleotide
  Antisense strand to SEQ ID NO: 706210
auuauuagccaccaccagg

SEQ ID NO: 706212 - RNA, 19 nt, Artificial Sequence
  Description of Artificial Sequence: Synthetic oligonucleotide
  Sense strand starting at position 1691 of SEQ ID NO: 586283
aaguaaguccuagagugca

SEQ ID NO: 706213 - RNA, 19 nt, Artificial Sequence
  Description of Artificial Sequence: Synthetic oligonucleotide
  Antisense strand to SEQ ID NO: 706212
ugcacucuaggacuuacuu

SEQ ID NO: 706214 - RNA, 19 nt, Artificial Sequence
  Description of Artificial Sequence: Synthetic oligonucleotide
  Sense strand starting at position 1696 of SEQ ID NO: 586283
aguccuagagugcagaaau

SEQ ID NO: 706215 - RNA, 19 nt, Artificial Sequence
  Description of Artificial Sequence: Synthetic oligonucleotide
  Antisense strand to SEQ ID NO: 706214
auuucugcacucuaggacu

SEQ ID NO: 706216 - RNA, 19 nt, Artificial Sequence
  Description of Artificial Sequence: Synthetic oligonucleotide
  Sense strand starting at position 2029 of SEQ ID NO: 586283
cucacuucugccugauuug

SEQ ID NO: 706217 - RNA, 19 nt, Artificial Sequence
  Description of Artificial Sequence: Synthetic oligonucleotide
  Antisense strand to SEQ ID NO: 706216
caaaucaggcagaagugag

SEQ ID NO: 706218 - RNA, 19 nt, Artificial Sequence
  Description of Artificial Sequence: Synthetic oligonucleotide
  Sense strand starting at position 2633 of SEQ ID NO: 586283
uuauucuuggaauguagga

SEQ ID NO: 706219 - RNA, 19 nt, Artificial Sequence
  Description of Artificial Sequence: Synthetic oligonucleotide
  Antisense strand to SEQ ID NO: 706218
uccuacauuccaagaauaa

SEQ ID NO: 706220 - RNA, 19 nt, Artificial Sequence
  Description of Artificial Sequence: Synthetic oligonucleotide
  Sense strand starting at position 2643 of SEQ ID NO: 586283
aauguaggauuagcagaaa

SEQ ID NO: 706221 - RNA, 19 nt, Artificial Sequence
  Description of Artificial Sequence: Synthetic oligonucleotide
  Antisense strand to SEQ ID NO: 706220
uuucugcuaauccuacauu

SEQ ID NO: 706222 - RNA, 19 nt, Artificial Sequence
  Description of Artificial Sequence: Synthetic oligonucleotide
  Sense strand starting at position 2724 of SEQ ID NO: 586283
uuggaauauuuguggauuu

SEQ ID NO: 706223 - RNA, 19 nt, Artificial Sequence
  Description of Artificial Sequence: Synthetic oligonucleotide
  Antisense strand to SEQ ID NO: 706222
aaauccacaaauauuccaa

SEQ ID NO: 706224 - RNA, 19 nt, Artificial Sequence
  Description of Artificial Sequence: Synthetic oligonucleotide
  Sense strand starting at position 2725 of SEQ ID NO: 586283
uggaauauuuguggauuua

SEQ ID NO: 706225 - RNA, 19 nt, Artificial Sequence
  Description of Artificial Sequence: Synthetic oligonucleotide
  Antisense strand to SEQ ID NO: 706224
uaaauccacaaauauucca

SEQ ID NO: 706226 - RNA, 19 nt, Artificial Sequence
  Description of Artificial Sequence: Synthetic oligonucleotide
  Sense strand starting at position 2770 of SEQ ID NO: 586283
agugaccucgggcaaauua

SEQ ID NO: 706227 - RNA, 19 nt, Artificial Sequence
  Description of Artificial Sequence: Synthetic oligonucleotide
  Antisense strand to SEQ ID NO: 706226
uaauuugcccgaggucacu

SEQ ID NO: 706228 - RNA, 19 nt, Artificial Sequence
  Description of Artificial Sequence: Synthetic oligonucleotide
  Sense strand starting at position 2941 of SEQ ID NO: 586283
aucaguuaugauugaugau

SEQ ID NO: 706229 - RNA, 19 nt, Artificial Sequence
  Description of Artificial Sequence: Synthetic oligonucleotide
  Antisense strand to SEQ ID NO: 706228
aucaucaaucauaacugau

SEQ ID NO: 706230 - RNA, 19 nt, Artificial Sequence
  Description of Artificial Sequence: Synthetic oligonucleotide
  Sense strand starting at position 2956 of SEQ ID NO: 586283
ugaugaagucuauggugaa

SEQ ID NO: 706231 - RNA, 19 nt, Artificial Sequence
  Description of Artificial Sequence: Synthetic oligonucleotide
  Antisense strand to SEQ ID NO: 706230
uucaccauagacuucauca

SEQ ID NO: 706232 - RNA, 19 nt, Artificial Sequence
  Description of Artificial Sequence: Synthetic oligonucleotide
  Sense strand starting at position 3007 of SEQ ID NO: 586283
auauaaugacuguggcuau

SEQ ID NO: 706233 - RNA, 19 nt, Artificial Sequence
  Description of Artificial Sequence: Synthetic oligonucleotide
  Antisense strand to SEQ ID NO: 706232
auagccacagucauuauau

SEQ ID NO: 706234 - RNA, 19 nt, Artificial Sequence
  Description of Artificial Sequence: Synthetic oligonucleotide
  Sense strand starting at position 3145 of SEQ ID NO: 586283
ccacuacuuggaugacauc

SEQ ID NO: 706235 - RNA, 19 nt, Artificial Sequence
  Description of Artificial Sequence: Synthetic oligonucleotide
  Antisense strand to SEQ ID NO: 706234
gaugucauccaaguagugg

SEQ ID NO: 706236 - RNA, 19 nt, Artificial Sequence
  Description of Artificial Sequence: Synthetic oligonucleotide
  Sense strand starting at position 3154 of SEQ ID NO: 586283
ggaugacaucagggacgua

SEQ ID NO: 706237 - RNA, 19 nt, Artificial Sequence
  Description of Artificial Sequence: Synthetic oligonucleotide
  Antisense strand to SEQ ID NO: 706236
uacgucccugaugucaucc

SEQ ID NO: 706238 - RNA, 19 nt, Artificial Sequence
  Description of Artificial Sequence: Synthetic oligonucleotide
  Sense strand starting at position 3484 of SEQ ID NO: 586283
agauguguaccucaugcua

SEQ ID NO: 706239 - RNA, 19 nt, Artificial Sequence
  Description of Artificial Sequence: Synthetic oligonucleotide
  Antisense strand to SEQ ID NO: 706238
uagcaugagguacacaucu

SEQ ID NO: 706240 - RNA, 19 nt, Artificial Sequence
  Description of Artificial Sequence: Synthetic oligonucleotide
  Sense strand starting at position 3539 of SEQ ID NO: 586283
caguguucuuaaccagaug

SEQ ID NO: 706241 - RNA, 19 nt, Artificial Sequence
  Description of Artificial Sequence: Synthetic oligonucleotide
  Antisense strand to SEQ ID NO: 706240
caucugguuaagaacacug

SEQ ID NO: 706242 - RNA, 19 nt, Artificial Sequence
  Description of Artificial Sequence: Synthetic oligonucleotide
  Sense strand starting at position 3540 of SEQ ID NO: 586283
aguguucuuaaccagaugu

SEQ ID NO: 706243 - RNA, 19 nt, Artificial Sequence
  Description of Artificial Sequence: Synthetic oligonucleotide
  Antisense strand to SEQ ID NO: 706242
acaucugguuaagaacacu

SEQ ID NO: 706244 - RNA, 19 nt, Artificial Sequence
  Description of Artificial Sequence: Synthetic oligonucleotide
  Sense strand starting at position 3652 of SEQ ID NO: 586283
ggauucuacuagccugaga

SEQ ID NO: 706245 - RNA, 19 nt, Artificial Sequence
  Description of Artificial Sequence: Synthetic oligonucleotide
  Antisense strand to SEQ ID NO: 706244
ucucaggcuaguagaaucc

SEQ ID NO: 706246 - RNA, 19 nt, Artificial Sequence
  Description of Artificial Sequence: Synthetic oligonucleotide
  Sense strand starting at position 3654 of SEQ ID NO: 586283
auucuacuagccugagaaa

SEQ ID NO: 706247 - RNA, 19 nt, Artificial Sequence
  Description of Artificial Sequence: Synthetic oligonucleotide
  Antisense strand to SEQ ID NO: 706246
uuucucaggcuaguagaau

SEQ ID NO: 706248 - RNA, 19 nt, Artificial Sequence
  Description of Artificial Sequence: Synthetic oligonucleotide
  Sense strand starting at position 3655 of SEQ ID NO: 586283
uucuacuagccugagaaau

SEQ ID NO: 706249 - RNA, 19 nt, Artificial Sequence
  Description of Artificial Sequence: Synthetic oligonucleotide
  Antisense strand to SEQ ID NO: 706248
auuucucaggcuaguagaa

SEQ ID NO: 706250 - RNA, 19 nt, Artificial Sequence
  Description of Artificial Sequence: Synthetic oligonucleotide
  Sense strand starting at position 3665 of SEQ ID NO: 586283
cugagaaauagguggguuu

SEQ ID NO: 706251 - RNA, 19 nt, Artificial Sequence
  Description of Artificial Sequence: Synthetic oligonucleotide
  Antisense strand to SEQ ID NO: 706250
aaacccaccuauuucucag

SEQ ID NO: 706252 - RNA, 19 nt, Artificial Sequence
  Description of Artificial Sequence: Synthetic oligonucleotide
  Sense strand starting at position 3691 of SEQ ID NO: 586283
caguuugaaugacuuagaa

SEQ ID NO: 706253 - RNA, 19 nt, Artificial Sequence
  Description of Artificial Sequence: Synthetic oligonucleotide
  Antisense strand to SEQ ID NO: 706252
uucuaagucauucaaacug

SEQ ID NO: 706254 - RNA, 19 nt, Artificial Sequence
  Description of Artificial Sequence: Synthetic oligonucleotide
  Sense strand starting at position 3701 of SEQ ID NO: 586283
gacuuagaagaguguuaag

SEQ ID NO: 706255 - RNA, 19 nt, Artificial Sequence
  Description of Artificial Sequence: Synthetic oligonucleotide
  Antisense strand to SEQ ID NO: 706254
cuuaacacucuucuaaguc

SEQ ID NO: 706256 - RNA, 19 nt, Artificial Sequence
  Description of Artificial Sequence: Synthetic oligonucleotide
  Sense strand starting at position 3717 of SEQ ID NO: 586283
aagaaaguccacuggguuu

SEQ ID NO: 706257 - RNA, 19 nt, Artificial Sequence
  Description of Artificial Sequence: Synthetic oligonucleotide
  Antisense strand to SEQ ID NO: 706256
aaacccaguggacuuucuu

SEQ ID NO: 706258 - RNA, 19 nt, Artificial Sequence
  Description of Artificial Sequence: Synthetic oligonucleotide
  Sense strand starting at position 3838 of SEQ ID NO: 586283
ggaaacacugaguguugaa

SEQ ID NO: 706259 - RNA, 19 nt, Artificial Sequence
  Description of Artificial Sequence: Synthetic oligonucleotide
  Antisense strand to SEQ ID NO: 706258
uucaacacucaguguuucc

SEQ ID NO: 706260 - RNA, 19 nt, Artificial Sequence
  Description of Artificial Sequence: Synthetic oligonucleotide
  Sense strand starting at position 3851 of SEQ ID NO: 586283
guugaauacuacccuggga

SEQ ID NO: 706261 - RNA, 19 nt, Artificial Sequence
  Description of Artificial Sequence: Synthetic oligonucleotide
  Antisense strand to SEQ ID NO: 706260
ucccaggguaguauucaac

SEQ ID NO: 706262 - RNA, 19 nt, Artificial Sequence
  Description of Artificial Sequence: Synthetic oligonucleotide
  Sense strand starting at position 3921 of SEQ ID NO: 586283
aucaucagauaucuguuua

SEQ ID NO: 706263 - RNA, 19 nt, Artificial Sequence
  Description of Artificial Sequence: Synthetic oligonucleotide
  Antisense strand to SEQ ID NO: 706262
uaaacagauaucugaugau

SEQ ID NO: 706264 - RNA, 19 nt, Artificial Sequence
  Description of Artificial Sequence: Synthetic oligonucleotide
  Sense strand starting at position 3925 of SEQ ID NO: 586283
ucagauaucuguuuauuag

SEQ ID NO: 706265 - RNA, 19 nt, Artificial Sequence
  Description of Artificial Sequence: Synthetic oligonucleotide
  Antisense strand to SEQ ID NO: 706264
cuaauaaacagauaucuga

SEQ ID NO: 706266 - RNA, 19 nt, Artificial Sequence
  Description of Artificial Sequence: Synthetic oligonucleotide
  Sense strand starting at position 17 of SEQ ID NO: 586284
gugguuugaggguacuaaa

SEQ ID NO: 706267 - RNA, 19 nt, Artificial Sequence
  Description of Artificial Sequence: Synthetic oligonucleotide
  Antisense strand to SEQ ID NO: 706266
uuuaguacccucaaaccac

SEQ ID NO: 706268 - RNA, 19 nt, Artificial Sequence
  Description of Artificial Sequence: Synthetic oligonucleotide
  Sense strand starting at position 46 of SEQ ID NO: 586284
agcauuugcugaguucuca

SEQ ID NO: 706269 - RNA, 19 nt, Artificial Sequence
  Description of Artificial Sequence: Synthetic oligonucleotide
  Antisense strand to SEQ ID NO: 706268
ugagaacucagcaaaugcu

SEQ ID NO: 706270 - RNA, 19 nt, Artificial Sequence
  Description of Artificial Sequence: Synthetic oligonucleotide
  Sense strand starting at position 50 of SEQ ID NO: 586284
uuugcugaguucucagaau

SEQ ID NO: 706271 - RNA, 19 nt, Artificial Sequence
  Description of Artificial Sequence: Synthetic oligonucleotide
  Antisense strand to SEQ ID NO: 706270
auucugagaacucagcaaa

SEQ ID NO: 706272 - RNA, 19 nt, Artificial Sequence
  Description of Artificial Sequence: Synthetic oligonucleotide
  Sense strand starting at position 188 of SEQ ID NO: 586284
guuggcagugaucgagaaa

SEQ ID NO: 706273 - RNA, 19 nt, Artificial Sequence
  Description of Artificial Sequence: Synthetic oligonucleotide
  Antisense strand to SEQ ID NO: 706272
uuucucgaucacugccaac

SEQ ID NO: 706274 - RNA, 19 nt, Artificial Sequence
  Description of Artificial Sequence: Synthetic oligonucleotide
  Sense strand starting at position 189 of SEQ ID NO: 586284
uuggcagugaucgagaaag

SEQ ID NO: 706275 - RNA, 19 nt, Artificial Sequence
  Description of Artificial Sequence: Synthetic oligonucleotide
  Antisense strand to SEQ ID NO: 706274
cuuucucgaucacugccaa

SEQ ID NO: 706276 - RNA, 19 nt, Artificial Sequence
  Description of Artificial Sequence: Synthetic oligonucleotide
  Sense strand starting at position 224 of SEQ ID NO: 586284
ggaaguaaaucugccaaga

SEQ ID NO: 706277 - RNA, 19 nt, Artificial Sequence
  Description of Artificial Sequence: Synthetic oligonucleotide
  Antisense strand to SEQ ID NO: 706276
ucuuggcagauuuacuucc

SEQ ID NO: 706278 - RNA, 19 nt, Artificial Sequence
  Description of Artificial Sequence: Synthetic oligonucleotide
  Sense strand starting at position 408 of SEQ ID NO: 586284
aguuuaauucgcgaauaau

SEQ ID NO: 706279 - RNA, 19 nt, Artificial Sequence
  Description of Artificial Sequence: Synthetic oligonucleotide
  Antisense strand to SEQ ID NO: 706278
auuauucgcgaauuaaacu

SEQ ID NO: 706280 - RNA, 19 nt, Artificial Sequence
  Description of Artificial Sequence: Synthetic oligonucleotide
  Sense strand starting at position 516 of SEQ ID NO: 586284
uguauacuacccuaaaugu

SEQ ID NO: 706281 - RNA, 19 nt, Artificial Sequence
  Description of Artificial Sequence: Synthetic oligonucleotide
  Antisense strand to SEQ ID NO: 706280
acauuuaggguaguauaca

SEQ ID NO: 706282 - RNA, 19 nt, Artificial Sequence
  Description of Artificial Sequence: Synthetic oligonucleotide
  Sense strand starting at position 551 of SEQ ID NO: 586284
uuggguuugucauuaaagu

SEQ ID NO: 706283 - RNA, 19 nt, Artificial Sequence
  Description of Artificial Sequence: Synthetic oligonucleotide
  Antisense strand to SEQ ID NO: 706282
acuuuaaugacaaacccaa

SEQ ID NO: 706284 - RNA, 19 nt, Artificial Sequence
  Description of Artificial Sequence: Synthetic oligonucleotide
  Sense strand starting at position 552 of SEQ ID NO: 586284
uggguuugucauuaaaguu

SEQ ID NO: 706285 - RNA, 19 nt, Artificial Sequence
  Description of Artificial Sequence: Synthetic oligonucleotide
  Antisense strand to SEQ ID NO: 706284
aacuuuaaugacaaaccca

SEQ ID NO: 706286 - RNA, 19 nt, Artificial Sequence
  Description of Artificial Sequence: Synthetic oligonucleotide
  Sense strand starting at position 607 of SEQ ID NO: 586284
gcaucauucugauuagaaa

SEQ ID NO: 706287 - RNA, 19 nt, Artificial Sequence
  Description of Artificial Sequence: Synthetic oligonucleotide
  Antisense strand to SEQ ID NO: 706286
uuucuaaucagaaugaugc

SEQ ID NO: 706288 - RNA, 19 nt, Artificial Sequence
  Description of Artificial Sequence: Synthetic oligonucleotide
  Sense strand starting at position 647 of SEQ ID NO: 586284
ugggucugccucuauugau

SEQ ID NO: 706289 - RNA, 19 nt, Artificial Sequence
  Description of Artificial Sequence: Synthetic oligonucleotide
  Antisense strand to SEQ ID NO: 706288
aucaauagaggcagaccca

SEQ ID NO: 706290 - RNA, 19 nt, Artificial Sequence
  Description of Artificial Sequence: Synthetic oligonucleotide
  Sense strand starting at position 1037 of SEQ ID NO: 586284
agagcuaauuucugaaaca

SEQ ID NO: 706291 - RNA, 19 nt, Artificial Sequence
  Description of Artificial Sequence: Synthetic oligonucleotide
  Antisense strand to SEQ ID NO: 706290
uguuucagaaauuagcucu

SEQ ID NO: 706292 - RNA, 19 nt, Artificial Sequence
  Description of Artificial Sequence: Synthetic oligonucleotide
  Sense strand starting at position 2479 of SEQ ID NO: 586284
uccaaauuguccuuuguug

SEQ ID NO: 706293 - RNA, 19 nt, Artificial Sequence
  Description of Artificial Sequence: Synthetic oligonucleotide
  Antisense strand to SEQ ID NO: 706292
caacaaaggacaauuugga

SEQ ID NO: 706294 - RNA, 19 nt, Artificial Sequence
  Description of Artificial Sequence: Synthetic oligonucleotide
  Sense strand starting at position 2675 of SEQ ID NO: 586284
gcuggugucaaagagaaag

SEQ ID NO: 706295 - RNA, 19 nt, Artificial Sequence
  Description of Artificial Sequence: Synthetic oligonucleotide
  Antisense strand to SEQ ID NO: 706294
cuuucucuuugacaccagc

SEQ ID NO: 706296 - RNA, 19 nt, Artificial Sequence
  Description of Artificial Sequence: Synthetic oligonucleotide
  Sense strand starting at position 2760 of SEQ ID NO: 586284
gugcccuuucaggauagga

SEQ ID NO: 706297 - RNA, 19 nt, Artificial Sequence
  Description of Artificial Sequence: Synthetic oligonucleotide
  Antisense strand to SEQ ID NO: 706296
uccuauccugaaagggcac

SEQ ID NO: 706298 - RNA, 19 nt, Artificial Sequence
  Description of Artificial Sequence: Synthetic oligonucleotide
  Sense strand starting at position 3217 of SEQ ID NO: 586284
uuucuaguugauuagaacu

SEQ ID NO: 706299 - RNA, 19 nt, Artificial Sequence
  Description of Artificial Sequence: Synthetic oligonucleotide
  Antisense strand to SEQ ID NO: 706298
aguucuaaucaacuagaaa

SEQ ID NO: 706300 - RNA, 19 nt, Artificial Sequence
  Description of Artificial Sequence: Synthetic oligonucleotide
  Sense strand starting at position 3271 of SEQ ID NO: 586284
gugucuucucauuaagguc

SEQ ID NO: 706301 - RNA, 19 nt, Artificial Sequence
  Description of Artificial Sequence: Synthetic oligonucleotide
  Antisense strand to SEQ ID NO: 706300
gaccuuaaugagaagacac

SEQ ID NO: 706302 - RNA, 19 nt, Artificial Sequence
  Description of Artificial Sequence: Synthetic oligonucleotide
  Sense strand starting at position 3376 of SEQ ID NO: 586284
cuguauggaccuugaaaca

SEQ ID NO: 706303 - RNA, 19 nt, Artificial Sequence
  Description of Artificial Sequence: Synthetic oligonucleotide
  Antisense strand to SEQ ID NO: 706302
uguuucaagguccauacag

SEQ ID NO: 706304 - RNA, 19 nt, Artificial Sequence
  Description of Artificial Sequence: Synthetic oligonucleotide
  Sense strand starting at position 3522 of SEQ ID NO: 586284
acacacuuggcuuguugau

SEQ ID NO: 706305 - RNA, 19 nt, Artificial Sequence
  Description of Artificial Sequence: Synthetic oligonucleotide
  Antisense strand to SEQ ID NO: 706304
aucaacaagccaagugugu

SEQ ID NO: 706306 - RNA, 19 nt, Artificial Sequence
  Description of Artificial Sequence: Synthetic oligonucleotide
  Sense strand starting at position 3524 of SEQ ID NO: 586284
acacuuggcuuguugauca

SEQ ID NO: 706307 - RNA, 19 nt, Artificial Sequence
  Description of Artificial Sequence: Synthetic oligonucleotide
  Antisense strand to SEQ ID NO: 706306
ugaucaacaagccaagugu

SEQ ID NO: 706308 - RNA, 19 nt, Artificial Sequence
  Description of Artificial Sequence: Synthetic oligonucleotide
  Sense strand starting at position 3528 of SEQ ID NO: 586284
uuggcuuguugaucagauc

SEQ ID NO: 706309 - RNA, 19 nt, Artificial Sequence
  Description of Artificial Sequence: Synthetic oligonucleotide
  Antisense strand to SEQ ID NO: 706308
gaucugaucaacaagccaa

SEQ ID NO: 706310 - RNA, 19 nt, Artificial Sequence
  Description of Artificial Sequence: Synthetic oligonucleotide
  Sense strand starting at position 3529 of SEQ ID NO: 586284
uggcuuguugaucagauca

SEQ ID NO: 706311 - RNA, 19 nt, Artificial Sequence
  Description of Artificial Sequence: Synthetic oligonucleotide
  Antisense strand to SEQ ID NO: 706310
ugaucugaucaacaagcca

SEQ ID NO: 706312 - RNA, 19 nt, Artificial Sequence
  Description of Artificial Sequence: Synthetic oligonucleotide
  Sense strand starting at position 3590 of SEQ ID NO: 586284
agcacuuacuuguuugacu

SEQ ID NO: 706313 - RNA, 19 nt, Artificial Sequence
  Description of Artificial Sequence: Synthetic oligonucleotide
  Antisense strand to SEQ ID NO: 706312
agucaaacaaguaagugcu

SEQ ID NO: 706314 - RNA, 19 nt, Artificial Sequence
  Description of Artificial Sequence: Synthetic oligonucleotide
  Sense strand starting at position 3591 of SEQ ID NO: 586284
gcacuuacuuguuugacua

SEQ ID NO: 706315 - RNA, 19 nt, Artificial Sequence
  Description of Artificial Sequence: Synthetic oligonucleotide
  Antisense strand to SEQ ID NO: 706314
uagucaaacaaguaagugc

SEQ ID NO: 706316 - RNA, 19 nt, Artificial Sequence
  Description of Artificial Sequence: Synthetic oligonucleotide
  Sense strand starting at position 3595 of SEQ ID NO: 586284
uuacuuguuugacuaguaa

SEQ ID NO: 706317 - RNA, 19 nt, Artificial Sequence
  Description of Artificial Sequence: Synthetic oligonucleotide
  Antisense strand to SEQ ID NO: 706316
uuacuagucaaacaaguaa

SEQ ID NO: 706318 - RNA, 19 nt, Artificial Sequence
  Description of Artificial Sequence: Synthetic oligonucleotide
  Sense strand starting at position 3602 of SEQ ID NO: 586284
uuugacuaguaaucuaugu

SEQ ID NO: 706319 - RNA, 19 nt, Artificial Sequence
  Description of Artificial Sequence: Synthetic oligonucleotide
  Antisense strand to SEQ ID NO: 706318
acauagauuacuagucaaa

SEQ ID NO: 706320 - RNA, 19 nt, Artificial Sequence
  Description of Artificial Sequence: Synthetic oligonucleotide
  Sense strand starting at position 3632 of SEQ ID NO: 586284
ucuuuagaugguggacuau

SEQ ID NO: 706321 - RNA, 19 nt, Artificial Sequence
  Description of Artificial Sequence: Synthetic oligonucleotide
  Antisense strand to SEQ ID NO: 706320
auaguccaccaucuaaaga

SEQ ID NO: 706322 - RNA, 19 nt, Artificial Sequence
  Description of Artificial Sequence: Synthetic oligonucleotide
  Sense strand starting at position 3734 of SEQ ID NO: 586284
cugcgaacuugagcaaauu

SEQ ID NO: 706323 - RNA, 19 nt, Artificial Sequence
  Description of Artificial Sequence: Synthetic oligonucleotide
  Antisense strand to SEQ ID NO: 706322
aauuugcucaaguucgcag

SEQ ID NO: 706324 - RNA, 19 nt, Artificial Sequence
  Description of Artificial Sequence: Synthetic oligonucleotide
  Sense strand starting at position 3735 of SEQ ID NO: 586284
ugcgaacuugagcaaauua

SEQ ID NO: 706325 - RNA, 19 nt, Artificial Sequence
  Description of Artificial Sequence: Synthetic oligonucleotide
  Antisense strand to SEQ ID NO: 706324
uaauuugcucaaguucgca

SEQ ID NO: 706326 - RNA, 19 nt, Artificial Sequence
  Description of Artificial Sequence: Synthetic oligonucleotide
  Sense strand starting at position 3826 of SEQ ID NO: 586284
auaagaugcuauguggaaa

SEQ ID NO: 706327 - RNA, 19 nt, Artificial Sequence
  Description of Artificial Sequence: Synthetic oligonucleotide
  Antisense strand to SEQ ID NO: 706326
uuuccacauagcaucuuau

SEQ ID NO: 706328 - RNA, 19 nt, Artificial Sequence
  Description of Artificial Sequence: Synthetic oligonucleotide
  Sense strand starting at position 3837 of SEQ ID NO: 586284
uguggaaagcuacagugua

SEQ ID NO: 706329 - RNA, 19 nt, Artificial Sequence
  Description of Artificial Sequence: Synthetic oligonucleotide
  Antisense strand to SEQ ID NO: 706328
uacacuguagcuuuccaca

SEQ ID NO: 706330 - RNA, 19 nt, Artificial Sequence
  Description of Artificial Sequence: Synthetic oligonucleotide
  Sense strand starting at position 3861 of SEQ ID NO: 586284
caugaaguuuguguuccaa

SEQ ID NO: 706331 - RNA, 19 nt, Artificial Sequence
  Description of Artificial Sequence: Synthetic oligonucleotide
  Antisense strand to SEQ ID NO: 706330
uuggaacacaaacuucaug

SEQ ID NO: 706332 - RNA, 19 nt, Artificial Sequence
  Description of Artificial Sequence: Synthetic oligonucleotide
  Sense strand starting at position 3863 of SEQ ID NO: 586284
ugaaguuuguguuccaaag

SEQ ID NO: 706333 - RNA, 19 nt, Artificial Sequence
  Description of Artificial Sequence: Synthetic oligonucleotide
  Antisense strand to SEQ ID NO: 706332
cuuuggaacacaaacuuca

SEQ ID NO: 706334 - RNA, 19 nt, Artificial Sequence
  Description of Artificial Sequence: Synthetic oligonucleotide
  Sense strand starting at position 3871 of SEQ ID NO: 586284
guguuccaaagugauugua

SEQ ID NO: 706335 - RNA, 19 nt, Artificial Sequence
  Description of Artificial Sequence: Synthetic oligonucleotide
  Antisense strand to SEQ ID NO: 706334
uacaaucacuuuggaacac

SEQ ID NO: 706336 - RNA, 19 nt, Artificial Sequence
  Description of Artificial Sequence: Synthetic oligonucleotide
  Sense strand starting at position 3873 of SEQ ID NO: 586284
guuccaaagugauuguaag

SEQ ID NO: 706337 - RNA, 19 nt, Artificial Sequence
  Description of Artificial Sequence: Synthetic oligonucleotide
  Antisense strand to SEQ ID NO: 706336
cuuacaaucacuuuggaac

SEQ ID NO: 706338 - RNA, 19 nt, Artificial Sequence
  Description of Artificial Sequence: Synthetic oligonucleotide
  Sense strand starting at position 3874 of SEQ ID NO: 586284
uuccaaagugauuguaagu

SEQ ID NO: 706339 - RNA, 19 nt, Artificial Sequence
  Description of Artificial Sequence: Synthetic oligonucleotide
  Antisense strand to SEQ ID NO: 706338
acuuacaaucacuuuggaa

SEQ ID NO: 706340 - RNA, 19 nt, Artificial Sequence
  Description of Artificial Sequence: Synthetic oligonucleotide
  Sense strand starting at position 3885 of SEQ ID NO: 586284
uuguaaguugcucacuuua

SEQ ID NO: 706341 - RNA, 19 nt, Artificial Sequence
  Description of Artificial Sequence: Synthetic oligonucleotide
  Antisense strand to SEQ ID NO: 706340
uaaagugagcaacuuacaa

SEQ ID NO: 706342 - RNA, 19 nt, Artificial Sequence
  Description of Artificial Sequence: Synthetic oligonucleotide
  Sense strand starting at position 3890 of SEQ ID NO: 586284
aguugcucacuuuaaggaa

SEQ ID NO: 706343 - RNA, 19 nt, Artificial Sequence
  Description of Artificial Sequence: Synthetic oligonucleotide
  Antisense strand to SEQ ID NO: 706342
uuccuuaaagugagcaacu

SEQ ID NO: 706344 - RNA, 19 nt, Artificial Sequence
  Description of Artificial Sequence: Synthetic oligonucleotide
  Sense strand starting at position 3908 of SEQ ID NO: 586284
aggaauguauaguuugaaa

SEQ ID NO: 706345 - RNA, 19 nt, Artificial Sequence
  Description of Artificial Sequence: Synthetic oligonucleotide
  Antisense strand to SEQ ID NO: 706344
uuucaaacuauacauuccu

SEQ ID NO: 706346 - RNA, 19 nt, Artificial Sequence
  Description of Artificial Sequence: Synthetic oligonucleotide
  Sense strand starting at position 117 of SEQ ID NO: 586285
acuaguacuccucaucuga

SEQ ID NO: 706347 - RNA, 19 nt, Artificial Sequence
  Description of Artificial Sequence: Synthetic oligonucleotide
  Antisense strand to SEQ ID NO: 706346
ucagaugaggaguacuagu

SEQ ID NO: 706348 - RNA, 19 nt, Artificial Sequence
  Description of Artificial Sequence: Synthetic oligonucleotide
  Sense strand starting at position 144 of SEQ ID NO: 586285
uuucucucacaggguuaau

SEQ ID NO: 706349 - RNA, 19 nt, Artificial Sequence
  Description of Artificial Sequence: Synthetic oligonucleotide
  Antisense strand to SEQ ID NO: 706348
auuaacccugugagagaaa

SEQ ID NO: 706350 - RNA, 19 nt, Artificial Sequence
  Description of Artificial Sequence: Synthetic oligonucleotide
  Sense strand starting at position 205 of SEQ ID NO: 586285
acaauuugugcacguguga

SEQ ID NO: 706351 - RNA, 19 nt, Artificial Sequence
  Description of Artificial Sequence: Synthetic oligonucleotide
  Antisense strand to SEQ ID NO: 706350
ucacacgugcacaaauugu

SEQ ID NO: 706352 - RNA, 19 nt, Artificial Sequence
  Description of Artificial Sequence: Synthetic oligonucleotide
  Sense strand starting at position 277 of SEQ ID NO: 586285
uuaauuaucgagcaguuau

SEQ ID NO: 706353 - RNA, 19 nt, Artificial Sequence
  Description of Artificial Sequence: Synthetic oligonucleotide
  Antisense strand to SEQ ID NO: 706352
auaacugcucgauaauuaa

SEQ ID NO: 706354 - RNA, 19 nt, Artificial Sequence
  Description of Artificial Sequence: Synthetic oligonucleotide
  Sense strand starting at position 405 of SEQ ID NO: 586285
ucaguaagauacccuguuu

SEQ ID NO: 706355 - RNA, 19 nt, Artificial Sequence
  Description of Artificial Sequence: Synthetic oligonucleotide
  Antisense strand to SEQ ID NO: 706354
aaacaggguaucuuacuga

SEQ ID NO: 706356 - RNA, 19 nt, Artificial Sequence
  Description of Artificial Sequence: Synthetic oligonucleotide
  Sense strand starting at position 460 of SEQ ID NO: 586285
acauaagucuugccagaau

SEQ ID NO: 706357 - RNA, 19 nt, Artificial Sequence
  Description of Artificial Sequence: Synthetic oligonucleotide
  Antisense strand to SEQ ID NO: 706356
auucuggcaagacuuaugu

SEQ ID NO: 706358 - RNA, 19 nt, Artificial Sequence
  Description of Artificial Sequence: Synthetic oligonucleotide
  Sense strand starting at position 469 of SEQ ID NO: 586285
uugccagaauuacuauagu

SEQ ID NO: 706359 - RNA, 19 nt, Artificial Sequence
  Description of Artificial Sequence: Synthetic oligonucleotide
  Antisense strand to SEQ ID NO: 706358
acuauaguaauucuggcaa

SEQ ID NO: 706360 - RNA, 19 nt, Artificial Sequence
  Description of Artificial Sequence: Synthetic oligonucleotide
  Sense strand starting at position 515 of SEQ ID NO: 586285
auggaagacuuaucuacgu

SEQ ID NO: 706361 - RNA, 19 nt, Artificial Sequence
  Description of Artificial Sequence: Synthetic oligonucleotide
  Antisense strand to SEQ ID NO: 706360
acguagauaagucuuccau

SEQ ID NO: 706362 - RNA, 19 nt, Artificial Sequence
  Description of Artificial Sequence: Synthetic oligonucleotide
  Sense strand starting at position 517 of SEQ ID NO: 586285
ggaagacuuaucuacguua

SEQ ID NO: 706363 - RNA, 19 nt, Artificial Sequence
  Description of Artificial Sequence: Synthetic oligonucleotide
  Antisense strand to SEQ ID NO: 706362
uaacguagauaagucuucc

SEQ ID NO: 706364 - RNA, 19 nt, Artificial Sequence
  Description of Artificial Sequence: Synthetic oligonucleotide
  Sense strand starting at position 588 of SEQ ID NO: 586285
acaucaacaucagugugau

SEQ ID NO: 706365 - RNA, 19 nt, Artificial Sequence
  Description of Artificial Sequence: Synthetic oligonucleotide
  Antisense strand to SEQ ID NO: 706364
aucacacugauguugaugu

SEQ ID NO: 706366 - RNA, 19 nt, Artificial Sequence
  Description of Artificial Sequence: Synthetic oligonucleotide
  Sense strand starting at position 789 of SEQ ID NO: 586285
uugauaauacaguggguuu

SEQ ID NO: 706367 - RNA, 19 nt, Artificial Sequence
  Description of Artificial Sequence: Synthetic oligonucleotide
  Antisense strand to SEQ ID NO: 706366
aaacccacuguauuaucaa

SEQ ID NO: 706368 - RNA, 19 nt, Artificial Sequence
  Description of Artificial Sequence: Synthetic oligonucleotide
  Sense strand starting at position 790 of SEQ ID NO: 586285
ugauaauacaguggguuua

SEQ ID NO: 706369 - RNA, 19 nt, Artificial Sequence
  Description of Artificial Sequence: Synthetic oligonucleotide
  Antisense strand to SEQ ID NO: 706368
uaaacccacuguauuauca

SEQ ID NO: 706370 - RNA, 19 nt, Artificial Sequence
  Description of Artificial Sequence: Synthetic oligonucleotide
  Sense strand starting at position 1038 of SEQ ID NO: 586285
gcaaauuggccguuguuua

SEQ ID NO: 706371 - RNA, 19 nt, Artificial Sequence
  Description of Artificial Sequence: Synthetic oligonucleotide
  Antisense strand to SEQ ID NO: 706370
uaaacaacggccaauuugc

SEQ ID NO: 706372 - RNA, 19 nt, Artificial Sequence
  Description of Artificial Sequence: Synthetic oligonucleotide
  Sense strand starting at position 1162 of SEQ ID NO: 586285
caaucuaggugauugugaa

SEQ ID NO: 706373 - RNA, 19 nt, Artificial Sequence
  Description of Artificial Sequence: Synthetic oligonucleotide
  Antisense strand to SEQ ID NO: 706372
uucacaaucaccuagauug

SEQ ID NO: 706374 - RNA, 19 nt, Artificial Sequence
  Description of Artificial Sequence: Synthetic oligonucleotide
  Sense strand starting at position 1163 of SEQ ID NO: 586285
aaucuaggugauugugaaa

SEQ ID NO: 706375 - RNA, 19 nt, Artificial Sequence
  Description of Artificial Sequence: Synthetic oligonucleotide
  Antisense strand to SEQ ID NO: 706374
uuucacaaucaccuagauu

SEQ ID NO: 706376 - RNA, 19 nt, Artificial Sequence
  Description of Artificial Sequence: Synthetic oligonucleotide
  Sense strand starting at position 1350 of SEQ ID NO: 586285
acauuugggcgauguaguu

SEQ ID NO: 706377 - RNA, 19 nt, Artificial Sequence
  Description of Artificial Sequence: Synthetic oligonucleotide
  Antisense strand to SEQ ID NO: 706376
aacuacaucgcccaaaugu

SEQ ID NO: 706378 - RNA, 19 nt, Artificial Sequence
  Description of Artificial Sequence: Synthetic oligonucleotide
  Sense strand starting at position 1406 of SEQ ID NO: 586285
aggcaacuuugaccuuaau

SEQ ID NO: 706379 - RNA, 19 nt, Artificial Sequence
  Description of Artificial Sequence: Synthetic oligonucleotide
  Antisense strand to SEQ ID NO: 706378
auuaaggucaaaguugccu

SEQ ID NO: 706380 - RNA, 19 nt, Artificial Sequence
  Description of Artificial Sequence: Synthetic oligonucleotide
  Sense strand starting at position 1419 of SEQ ID NO: 586285
cuuaaugcugagcaaauua

SEQ ID NO: 706381 - RNA, 19 nt, Artificial Sequence
  Description of Artificial Sequence: Synthetic oligonucleotide
  Antisense strand to SEQ ID NO: 706380
uaauuugcucagcauuaag

SEQ ID NO: 706382 - RNA, 19 nt, Artificial Sequence
  Description of Artificial Sequence: Synthetic oligonucleotide
  Sense strand starting at position 1483 of SEQ ID NO: 586285
gcuauuccucuaugagagg

SEQ ID NO: 706383 - RNA, 19 nt, Artificial Sequence
  Description of Artificial Sequence: Synthetic oligonucleotide
  Antisense strand to SEQ ID NO: 706382
ccucucauagaggaauagc

SEQ ID NO: 706384 - RNA, 19 nt, Artificial Sequence
  Description of Artificial Sequence: Synthetic oligonucleotide
  Sense strand starting at position 2034 of SEQ ID NO: 586285
agggcuaugccugaaaccu

SEQ ID NO: 706385 - RNA, 19 nt, Artificial Sequence
  Description of Artificial Sequence: Synthetic oligonucleotide
  Antisense strand to SEQ ID NO: 706384
agguuucaggcauagcccu

SEQ ID NO: 706386 - RNA, 19 nt, Artificial Sequence
  Description of Artificial Sequence: Synthetic oligonucleotide
  Sense strand starting at position 2056 of SEQ ID NO: 586285
aaacacucgcgugcuuauu

SEQ ID NO: 706387 - RNA, 19 nt, Artificial Sequence
  Description of Artificial Sequence: Synthetic oligonucleotide
  Antisense strand to SEQ ID NO: 706386
aauaagcacgcgaguguuu

SEQ ID NO: 706388 - RNA, 19 nt, Artificial Sequence
  Description of Artificial Sequence: Synthetic oligonucleotide
  Sense strand starting at position 2297 of SEQ ID NO: 586285
aggucuuaucaucaguauc

SEQ ID NO: 706389 - RNA, 19 nt, Artificial Sequence
  Description of Artificial Sequence: Synthetic oligonucleotide
  Antisense strand to SEQ ID NO: 706388
gauacugaugauaagaccu

SEQ ID NO: 706390 - RNA, 19 nt, Artificial Sequence
  Description of Artificial Sequence: Synthetic oligonucleotide
  Sense strand starting at position 2299 of SEQ ID NO: 586285
gucuuaucaucaguaucag

SEQ ID NO: 706391 - RNA, 19 nt, Artificial Sequence
  Description of Artificial Sequence: Synthetic oligonucleotide
  Antisense strand to SEQ ID NO: 706390
cugauacugaugauaagac

SEQ ID NO: 706392 - RNA, 19 nt, Artificial Sequence
  Description of Artificial Sequence: Synthetic oligonucleotide
  Sense strand starting at position 2387 of SEQ ID NO: 586285
cggugaugaagccagaauu

SEQ ID NO: 706393 - RNA, 19 nt, Artificial Sequence
  Description of Artificial Sequence: Synthetic oligonucleotide
  Antisense strand to SEQ ID NO: 706392
aauucuggcuucaucaccg

SEQ ID NO: 706394 - RNA, 19 nt, Artificial Sequence
  Description of Artificial Sequence: Synthetic oligonucleotide
  Sense strand starting at position 2476 of SEQ ID NO: 586285
gaagcugagguuuauaacu

SEQ ID NO: 706395 - RNA, 19 nt, Artificial Sequence
  Description of Artificial Sequence: Synthetic oligonucleotide
  Antisense strand to SEQ ID NO: 706394
aguuauaaaccucagcuuc

SEQ ID NO: 706396 - RNA, 19 nt, Artificial Sequence
  Description of Artificial Sequence: Synthetic oligonucleotide
  Sense strand starting at position 2529 of SEQ ID NO: 586285
ugauuaauacauugacgga

SEQ ID NO: 706397 - RNA, 19 nt, Artificial Sequence
  Description of Artificial Sequence: Synthetic oligonucleotide
  Antisense strand to SEQ ID NO: 706396
uccgucaauguauuaauca

SEQ ID NO: 706398 - RNA, 19 nt, Artificial Sequence
  Description of Artificial Sequence: Synthetic oligonucleotide
  Sense strand starting at position 2548 of SEQ ID NO: 586285
gugcccuaauuucucagau

SEQ ID NO: 706399 - RNA, 19 nt, Artificial Sequence
  Description of Artificial Sequence: Synthetic oligonucleotide
  Antisense strand to SEQ ID NO: 706398
aucugagaaauuagggcac

SEQ ID NO: 706400 - RNA, 19 nt, Artificial Sequence
  Description of Artificial Sequence: Synthetic oligonucleotide
  Sense strand starting at position 2703 of SEQ ID NO: 586285
agagaacuacaaugcugua

SEQ ID NO: 706401 - RNA, 19 nt, Artificial Sequence
  Description of Artificial Sequence: Synthetic oligonucleotide
  Antisense strand to SEQ ID NO: 706400
uacagcauuguaguucucu

SEQ ID NO: 706402 - RNA, 19 nt, Artificial Sequence
  Description of Artificial Sequence: Synthetic oligonucleotide
  Sense strand starting at position 2728 of SEQ ID NO: 586285
aagacaaagugccugauua

SEQ ID NO: 706403 - RNA, 19 nt, Artificial Sequence
  Description of Artificial Sequence: Synthetic oligonucleotide
  Antisense strand to SEQ ID NO: 706402
uaaucaggcacuuugucuu

SEQ ID NO: 706404 - RNA, 19 nt, Artificial Sequence
  Description of Artificial Sequence: Synthetic oligonucleotide
  Sense strand starting at position 2729 of SEQ ID NO: 586285
agacaaagugccugauuaa

SEQ ID NO: 706405 - RNA, 19 nt, Artificial Sequence
  Description of Artificial Sequence: Synthetic oligonucleotide
  Antisense strand to SEQ ID NO: 706404
uuaaucaggcacuuugucu

SEQ ID NO: 706406 - RNA, 19 nt, Artificial Sequence
  Description of Artificial Sequence: Synthetic oligonucleotide
  Sense strand starting at position 2730 of SEQ ID NO: 586285
gacaaagugccugauuaau

SEQ ID NO: 706407 - RNA, 19 nt, Artificial Sequence
  Description of Artificial Sequence: Synthetic oligonucleotide
  Antisense strand to SEQ ID NO: 706406
auuaaucaggcacuuuguc

SEQ ID NO: 706408 - RNA, 19 nt, Artificial Sequence
  Description of Artificial Sequence: Synthetic oligonucleotide
  Sense strand starting at position 2732 of SEQ ID NO: 586285
caaagugccugauuaauug

SEQ ID NO: 706409 - RNA, 19 nt, Artificial Sequence
  Description of Artificial Sequence: Synthetic oligonucleotide
  Antisense strand to SEQ ID NO: 706408
caauuaaucaggcacuuug

SEQ ID NO: 706410 - RNA, 19 nt, Artificial Sequence
  Description of Artificial Sequence: Synthetic oligonucleotide
  Sense strand starting at position 3167 of SEQ ID NO: 586285
ggauaaccauaugcuaaua

SEQ ID NO: 706411 - RNA, 19 nt, Artificial Sequence
  Description of Artificial Sequence: Synthetic oligonucleotide
  Antisense strand to SEQ ID NO: 706410
uauuagcauaugguuaucc

SEQ ID NO: 706412 - RNA, 19 nt, Artificial Sequence
  Description of Artificial Sequence: Synthetic oligonucleotide
  Sense strand starting at position 3253 of SEQ ID NO: 586285
gugguuugaggguacuaaa

SEQ ID NO: 706413 - RNA, 19 nt, Artificial Sequence
  Description of Artificial Sequence: Synthetic oligonucleotide
  Antisense strand to SEQ ID NO: 706412
uuuaguacccucaaaccac

SEQ ID NO: 706414 - RNA, 19 nt, Artificial Sequence
  Description of Artificial Sequence: Synthetic oligonucleotide
  Sense strand starting at position 3282 of SEQ ID NO: 586285
agcauuugcugaguucuca

SEQ ID NO: 706415 - RNA, 19 nt, Artificial Sequence
  Description of Artificial Sequence: Synthetic oligonucleotide
  Antisense strand to SEQ ID NO: 706414
ugagaacucagcaaaugcu

SEQ ID NO: 706416 - RNA, 19 nt, Artificial Sequence
  Description of Artificial Sequence: Synthetic oligonucleotide
  Sense strand starting at position 3425 of SEQ ID NO: 586285
uuggcagugaucgagaaag

SEQ ID NO: 706417 - RNA, 19 nt, Artificial Sequence
  Description of Artificial Sequence: Synthetic oligonucleotide
  Antisense strand to SEQ ID NO: 706416
cuuucucgaucacugccaa

SEQ ID NO: 706418 - RNA, 19 nt, Artificial Sequence
  Description of Artificial Sequence: Synthetic oligonucleotide
  Sense strand starting at position 3460 of SEQ ID NO: 586285
ggaaguaaaucugccaaga

SEQ ID NO: 706419 - RNA, 19 nt, Artificial Sequence
  Description of Artificial Sequence: Synthetic oligonucleotide
  Antisense strand to SEQ ID NO: 706418
ucuuggcagauuuacuucc

SEQ ID NO: 706420 - RNA, 19 nt, Artificial Sequence
  Description of Artificial Sequence: Synthetic oligonucleotide
  Sense strand starting at position 3752 of SEQ ID NO: 586285
uguauacuacccuaaaugu

SEQ ID NO: 706421 - RNA, 19 nt, Artificial Sequence
  Description of Artificial Sequence: Synthetic oligonucleotide
  Antisense strand to SEQ ID NO: 706420
acauuuaggguaguauaca

SEQ ID NO: 706422 - RNA, 19 nt, Artificial Sequence
  Description of Artificial Sequence: Synthetic oligonucleotide
  Sense strand starting at position 3788 of SEQ ID NO: 586285
uggguuugucauuaaaguu

SEQ ID NO: 706423 - RNA, 19 nt, Artificial Sequence
  Description of Artificial Sequence: Synthetic oligonucleotide
  Antisense strand to SEQ ID NO: 706422
aacuuuaaugacaaaccca

SEQ ID NO: 706424 - RNA, 19 nt, Artificial Sequence
  Description of Artificial Sequence: Synthetic oligonucleotide
  Sense strand starting at position 3843 of SEQ ID NO: 586285
gcaucauucugauuagaaa

SEQ ID NO: 706425 - RNA, 19 nt, Artificial Sequence
  Description of Artificial Sequence: Synthetic oligonucleotide
  Antisense strand to SEQ ID NO: 706424
uuucuaaucagaaugaugc

SEQ ID NO: 706426 - RNA, 19 nt, Artificial Sequence
  Description of Artificial Sequence: Synthetic oligonucleotide
  Sense strand starting at position 82 of SEQ ID NO: 586286
auuuaaaugugauggacuc

SEQ ID NO: 706427 - RNA, 19 nt, Artificial Sequence
  Description of Artificial Sequence: Synthetic oligonucleotide
  Antisense strand to SEQ ID NO: 706426
gaguccaucacauuuaaau

SEQ ID NO: 706428 - RNA, 19 nt, Artificial Sequence
  Description of Artificial Sequence: Synthetic oligonucleotide
  Sense strand starting at position 267 of SEQ ID NO: 586286
ccacgaggauucuugguua

SEQ ID NO: 706429 - RNA, 19 nt, Artificial Sequence
  Description of Artificial Sequence: Synthetic oligonucleotide
  Antisense strand to SEQ ID NO: 706428
uaaccaagaauccucgugg

SEQ ID NO: 706430 - RNA, 19 nt, Artificial Sequence
  Description of Artificial Sequence: Synthetic oligonucleotide
  Sense strand starting at position 270 of SEQ ID NO: 586286
cgaggauucuugguuaagg

SEQ ID NO: 706431 - RNA, 19 nt, Artificial Sequence
  Description of Artificial Sequence: Synthetic oligonucleotide
  Antisense strand to SEQ ID NO: 706430
ccuuaaccaagaauccucg

SEQ ID NO: 706432 - RNA, 19 nt, Artificial Sequence
  Description of Artificial Sequence: Synthetic oligonucleotide
  Sense strand starting at position 278 of SEQ ID NO: 586286
cuugguuaaggcugagaga

SEQ ID NO: 706433 - RNA, 19 nt, Artificial Sequence
  Description of Artificial Sequence: Synthetic oligonucleotide
  Antisense strand to SEQ ID NO: 706432
ucucucagccuuaaccaag

SEQ ID NO: 706434 - RNA, 19 nt, Artificial Sequence
  Description of Artificial Sequence: Synthetic oligonucleotide
  Sense strand starting at position 347 of SEQ ID NO: 586286
cucuuugaaugcucacaga

SEQ ID NO: 706435 - RNA, 19 nt, Artificial Sequence
  Description of Artificial Sequence: Synthetic oligonucleotide
  Antisense strand to SEQ ID NO: 706434
ucugugagcauucaaagag

SEQ ID NO: 706436 - RNA, 19 nt, Artificial Sequence
  Description of Artificial Sequence: Synthetic oligonucleotide
  Sense strand starting at position 358 of SEQ ID NO: 586286
cucacagaagcuugucuuu

SEQ ID NO: 706437 - RNA, 19 nt, Artificial Sequence
  Description of Artificial Sequence: Synthetic oligonucleotide
  Antisense strand to SEQ ID NO: 706436
aaagacaagcuucugugag

SEQ ID NO: 706438 - RNA, 19 nt, Artificial Sequence
  Description of Artificial Sequence: Synthetic oligonucleotide
  Sense strand starting at position 453 of SEQ ID NO: 586286
uccuuagcaugguuuaaug

SEQ ID NO: 706439 - RNA, 19 nt, Artificial Sequence
  Description of Artificial Sequence: Synthetic oligonucleotide
  Antisense strand to SEQ ID NO: 706438
cauuaaaccaugcuaagga

SEQ ID NO: 706440 - RNA, 19 nt, Artificial Sequence
  Description of Artificial Sequence: Synthetic oligonucleotide
  Sense strand starting at position 559 of SEQ ID NO: 586286
ugcccaguccugcauaauc

SEQ ID NO: 706441 - RNA, 19 nt, Artificial Sequence
  Description of Artificial Sequence: Synthetic oligonucleotide
  Antisense strand to SEQ ID NO: 706440
gauuaugcaggacugggca

SEQ ID NO: 706442 - RNA, 19 nt, Artificial Sequence
  Description of Artificial Sequence: Synthetic oligonucleotide
  Sense strand starting at position 742 of SEQ ID NO: 586286
ugaagaaaugcuugguaaa

SEQ ID NO: 706443 - RNA, 19 nt, Artificial Sequence
  Description of Artificial Sequence: Synthetic oligonucleotide
  Antisense strand to SEQ ID NO: 706442
uuuaccaagcauuucuuca

SEQ ID NO: 706444 - RNA, 19 nt, Artificial Sequence
  Description of Artificial Sequence: Synthetic oligonucleotide
  Sense strand starting at position 743 of SEQ ID NO: 586286
gaagaaaugcuugguaaag

SEQ ID NO: 706445 - RNA, 19 nt, Artificial Sequence
  Description of Artificial Sequence: Synthetic oligonucleotide
  Antisense strand to SEQ ID NO: 706444
cuuuaccaagcauuucuuc

SEQ ID NO: 706446 - RNA, 19 nt, Artificial Sequence
  Description of Artificial Sequence: Synthetic oligonucleotide
  Sense strand starting at position 744 of SEQ ID NO: 586286
aagaaaugcuugguaaaga

SEQ ID NO: 706447 - RNA, 19 nt, Artificial Sequence
  Description of Artificial Sequence: Synthetic oligonucleotide
  Antisense strand to SEQ ID NO: 706446
ucuuuaccaagcauuucuu

SEQ ID NO: 706448 - RNA, 19 nt, Artificial Sequence
  Description of Artificial Sequence: Synthetic oligonucleotide
  Sense strand starting at position 797 of SEQ ID NO: 586286
cuaucagagcaaugaagca

SEQ ID NO: 706449 - RNA, 19 nt, Artificial Sequence
  Description of Artificial Sequence: Synthetic oligonucleotide
  Antisense strand to SEQ ID NO: 706448
ugcuucauugcucugauag

SEQ ID NO: 706450 - RNA, 19 nt, Artificial Sequence
  Description of Artificial Sequence: Synthetic oligonucleotide
  Sense strand starting at position 860 of SEQ ID NO: 586286
aucaauagccauggaaauc

SEQ ID NO: 706451 - RNA, 19 nt, Artificial Sequence
  Description of Artificial Sequence: Synthetic oligonucleotide
  Antisense strand to SEQ ID NO: 706450
gauuuccauggcuauugau

SEQ ID NO: 706452 - RNA, 19 nt, Artificial Sequence
  Description of Artificial Sequence: Synthetic oligonucleotide
  Sense strand starting at position 869 of SEQ ID NO: 586286
cauggaaaucagcaguuau

SEQ ID NO: 706453 - RNA, 19 nt, Artificial Sequence
  Description of Artificial Sequence: Synthetic oligonucleotide
  Antisense strand to SEQ ID NO: 706452
auaacugcugauuuccaug

SEQ ID NO: 706454 - RNA, 19 nt, Artificial Sequence
  Description of Artificial Sequence: Synthetic oligonucleotide
  Sense strand starting at position 881 of SEQ ID NO: 586286
caguuaugccuggaccaag

SEQ ID NO: 706455 - RNA, 19 nt, Artificial Sequence
  Description of Artificial Sequence: Synthetic oligonucleotide
  Antisense strand to SEQ ID NO: 706454
cuugguccaggcauaacug

SEQ ID NO: 706456 - RNA, 19 nt, Artificial Sequence
  Description of Artificial Sequence: Synthetic oligonucleotide
  Sense strand starting at position 1161 of SEQ ID NO: 586286
agauauaauuaagacgaca

SEQ ID NO: 706457 - RNA, 19 nt, Artificial Sequence
  Description of Artificial Sequence: Synthetic oligonucleotide
  Antisense strand to SEQ ID NO: 706456
ugucgucuuaauuauaucu

SEQ ID NO: 706458 - RNA, 19 nt, Artificial Sequence
  Description of Artificial Sequence: Synthetic oligonucleotide
  Sense strand starting at position 1226 of SEQ ID NO: 586286
auaagaagaugacagauau

SEQ ID NO: 706459 - RNA, 19 nt, Artificial Sequence
  Description of Artificial Sequence: Synthetic oligonucleotide
  Antisense strand to SEQ ID NO: 706458
auaucugucaucuucuuau

SEQ ID NO: 706460 - RNA, 19 nt, Artificial Sequence
  Description of Artificial Sequence: Synthetic oligonucleotide
  Sense strand starting at position 1605 of SEQ ID NO: 586286
accaguauuggcuacagga

SEQ ID NO: 706461 - RNA, 19 nt, Artificial Sequence
  Description of Artificial Sequence: Synthetic oligonucleotide
  Antisense strand to SEQ ID NO: 706460
uccuguagccaauacuggu

SEQ ID NO: 706462 - RNA, 19 nt, Artificial Sequence
  Description of Artificial Sequence: Synthetic oligonucleotide
  Sense strand starting at position 2050 of SEQ ID NO: 586286
guuggcuggccugaagauu

SEQ ID NO: 706463 - RNA, 19 nt, Artificial Sequence
  Description of Artificial Sequence: Synthetic oligonucleotide
  Antisense strand to SEQ ID NO: 706462
aaucuucaggccagccaac

SEQ ID NO: 706464 - RNA, 19 nt, Artificial Sequence
  Description of Artificial Sequence: Synthetic oligonucleotide
  Sense strand starting at position 2072 of SEQ ID NO: 586286
agagcucagccauaaggua

SEQ ID NO: 706465 - RNA, 19 nt, Artificial Sequence
  Description of Artificial Sequence: Synthetic oligonucleotide
  Antisense strand to SEQ ID NO: 706464
uaccuuauggcugagcucu

SEQ ID NO: 706466 - RNA, 19 nt, Artificial Sequence
  Description of Artificial Sequence: Synthetic oligonucleotide
  Sense strand starting at position 2088 of SEQ ID NO: 586286
guauuauuaggguggacca

SEQ ID NO: 706467 - RNA, 19 nt, Artificial Sequence
  Description of Artificial Sequence: Synthetic oligonucleotide
  Antisense strand to SEQ ID NO: 706466
ugguccacccuaauaauac

SEQ ID NO: 706468 - RNA, 19 nt, Artificial Sequence
  Description of Artificial Sequence: Synthetic oligonucleotide
  Sense strand starting at position 2231 of SEQ ID NO: 586286
uagagaggagucuguuaau

SEQ ID NO: 706469 - RNA, 19 nt, Artificial Sequence
  Description of Artificial Sequence: Synthetic oligonucleotide
  Antisense strand to SEQ ID NO: 706468
auuaacagacuccucucua

SEQ ID NO: 706470 - RNA, 19 nt, Artificial Sequence
  Description of Artificial Sequence: Synthetic oligonucleotide
  Sense strand starting at position 2234 of SEQ ID NO: 586286
agaggagucuguuaauuuc

SEQ ID NO: 706471 - RNA, 19 nt, Artificial Sequence
  Description of Artificial Sequence: Synthetic oligonucleotide
  Antisense strand to SEQ ID NO: 706470
gaaauuaacagacuccucu

SEQ ID NO: 706472 - RNA, 19 nt, Artificial Sequence
  Description of Artificial Sequence: Synthetic oligonucleotide
  Sense strand starting at position 2302 of SEQ ID NO: 586286
cuaggaaauccaggcuuua

SEQ ID NO: 706473 - RNA, 19 nt, Artificial Sequence
  Description of Artificial Sequence: Synthetic oligonucleotide
  Antisense strand to SEQ ID NO: 706472
uaaagccuggauuuccuag

SEQ ID NO: 706474 - RNA, 19 nt, Artificial Sequence
  Description of Artificial Sequence: Synthetic oligonucleotide
  Sense strand starting at position 2314 of SEQ ID NO: 586286
ggcuuuaaauaagcaaaga

SEQ ID NO: 706475 - RNA, 19 nt, Artificial Sequence
  Description of Artificial Sequence: Synthetic oligonucleotide
  Antisense strand to SEQ ID NO: 706474
ucuuugcuuauuuaaagcc

SEQ ID NO: 706476 - RNA, 19 nt, Artificial Sequence
  Description of Artificial Sequence: Synthetic oligonucleotide
  Sense strand starting at position 2414 of SEQ ID NO: 586286
uguucucagagccgaauuu

SEQ ID NO: 706477 - RNA, 19 nt, Artificial Sequence
  Description of Artificial Sequence: Synthetic oligonucleotide
  Antisense strand to SEQ ID NO: 706476
aaauucggcucugagaaca

SEQ ID NO: 706478 - RNA, 19 nt, Artificial Sequence
  Description of Artificial Sequence: Synthetic oligonucleotide
  Sense strand starting at position 2441 of SEQ ID NO: 586286
uuagacaagcuuuguuuga

SEQ ID NO: 706479 - RNA, 19 nt, Artificial Sequence
  Description of Artificial Sequence: Synthetic oligonucleotide
  Antisense strand to SEQ ID NO: 706478
ucaaacaaagcuugucuaa

SEQ ID NO: 706480 - RNA, 19 nt, Artificial Sequence
  Description of Artificial Sequence: Synthetic oligonucleotide
  Sense strand starting at position 2443 of SEQ ID NO: 586286
agacaagcuuuguuugaga

SEQ ID NO: 706481 - RNA, 19 nt, Artificial Sequence
  Description of Artificial Sequence: Synthetic oligonucleotide
  Antisense strand to SEQ ID NO: 706480
ucucaaacaaagcuugucu

SEQ ID NO: 706482 - RNA, 19 nt, Artificial Sequence
  Description of Artificial Sequence: Synthetic oligonucleotide
  Sense strand starting at position 2445 of SEQ ID NO: 586286
acaagcuuuguuugagaag

SEQ ID NO: 706483 - RNA, 19 nt, Artificial Sequence
  Description of Artificial Sequence: Synthetic oligonucleotide
  Antisense strand to SEQ ID NO: 706482
cuucucaaacaaagcuugu

SEQ ID NO: 706484 - RNA, 19 nt, Artificial Sequence
  Description of Artificial Sequence: Synthetic oligonucleotide
  Sense strand starting at position 2550 of SEQ ID NO: 586286
gacaaaguuccugggcaga

SEQ ID NO: 706485 - RNA, 19 nt, Artificial Sequence
  Description of Artificial Sequence: Synthetic oligonucleotide
  Antisense strand to SEQ ID NO: 706484
ucugcccaggaacuuuguc

SEQ ID NO: 706486 - RNA, 19 nt, Artificial Sequence
  Description of Artificial Sequence: Synthetic oligonucleotide
  Sense strand starting at position 2658 of SEQ ID NO: 586286
auuugaaugucagguagga

SEQ ID NO: 706487 - RNA, 19 nt, Artificial Sequence
  Description of Artificial Sequence: Synthetic oligonucleotide
  Antisense strand to SEQ ID NO: 706486
uccuaccugacauucaaau

SEQ ID NO: 706488 - RNA, 19 nt, Artificial Sequence
  Description of Artificial Sequence: Synthetic oligonucleotide
  Sense strand starting at position 3050 of SEQ ID NO: 586286
cuauuaucugaugagcaug

SEQ ID NO: 706489 - RNA, 19 nt, Artificial Sequence
  Description of Artificial Sequence: Synthetic oligonucleotide
  Antisense strand to SEQ ID NO: 706488
caugcucaucagauaauag

SEQ ID NO: 706490 - RNA, 19 nt, Artificial Sequence
  Description of Artificial Sequence: Synthetic oligonucleotide
  Sense strand starting at position 3107 of SEQ ID NO: 586286
auaugcuaugcacauagua

SEQ ID NO: 706491 - RNA, 19 nt, Artificial Sequence
  Description of Artificial Sequence: Synthetic oligonucleotide
  Antisense strand to SEQ ID NO: 706490
uacuaugugcauagcauau

SEQ ID NO: 706492 - RNA, 19 nt, Artificial Sequence
  Description of Artificial Sequence: Synthetic oligonucleotide
  Sense strand starting at position 3316 of SEQ ID NO: 586286
guauuuauagccugagccu

SEQ ID NO: 706493 - RNA, 19 nt, Artificial Sequence
  Description of Artificial Sequence: Synthetic oligonucleotide
  Antisense strand to SEQ ID NO: 706492
aggcucaggcuauaaauac

SEQ ID NO: 706494 - RNA, 19 nt, Artificial Sequence
  Description of Artificial Sequence: Synthetic oligonucleotide
  Sense strand starting at position 3459 of SEQ ID NO: 586286
ugccacucauucuuaagga

SEQ ID NO: 706495 - RNA, 19 nt, Artificial Sequence
  Description of Artificial Sequence: Synthetic oligonucleotide
  Antisense strand to SEQ ID NO: 706494
uccuuaagaaugaguggca

SEQ ID NO: 706496 - RNA, 19 nt, Artificial Sequence
  Description of Artificial Sequence: Synthetic oligonucleotide
  Sense strand starting at position 3524 of SEQ ID NO: 586286
cuacuugaggucugcuaag

SEQ ID NO: 706497 - RNA, 19 nt, Artificial Sequence
  Description of Artificial Sequence: Synthetic oligonucleotide
  Antisense strand to SEQ ID NO: 706496
cuuagcagaccucaaguag

SEQ ID NO: 706498 - RNA, 19 nt, Artificial Sequence
  Description of Artificial Sequence: Synthetic oligonucleotide
  Sense strand starting at position 3643 of SEQ ID NO: 586286
agagcuguuaacggugaau

SEQ ID NO: 706499 - RNA, 19 nt, Artificial Sequence
  Description of Artificial Sequence: Synthetic oligonucleotide
  Antisense strand to SEQ ID NO: 706498
auucaccguuaacagcucu

SEQ ID NO: 706500 - RNA, 19 nt, Artificial Sequence
  Description of Artificial Sequence: Synthetic oligonucleotide
  Sense strand starting at position 3645 of SEQ ID NO: 586286
agcuguuaacggugaauag

SEQ ID NO: 706501 - RNA, 19 nt, Artificial Sequence
  Description of Artificial Sequence: Synthetic oligonucleotide
  Antisense strand to SEQ ID NO: 706500
cuauucaccguuaacagcu

SEQ ID NO: 706502 - RNA, 19 nt, Artificial Sequence
  Description of Artificial Sequence: Synthetic oligonucleotide
  Sense strand starting at position 3726 of SEQ ID NO: 586286
uuguguuagcaacaguacu

SEQ ID NO: 706503 - RNA, 19 nt, Artificial Sequence
  Description of Artificial Sequence: Synthetic oligonucleotide
  Antisense strand to SEQ ID NO: 706502
aguacuguugcuaacacaa

SEQ ID NO: 706504 - RNA, 19 nt, Artificial Sequence
  Description of Artificial Sequence: Synthetic oligonucleotide
  Sense strand starting at position 3854 of SEQ ID NO: 586286
cuauguauauuuguguguu

SEQ ID NO: 706505 - RNA, 19 nt, Artificial Sequence
  Description of Artificial Sequence: Synthetic oligonucleotide
  Antisense strand to SEQ ID NO: 706504
aacacacaaauauacauag

SEQ ID NO: 706506 - RNA, 19 nt, Artificial Sequence
  Description of Artificial Sequence: Synthetic oligonucleotide
  Sense strand starting at position 27 of SEQ ID NO: 586287
accaaugaaugugagacuu

SEQ ID NO: 706507 - RNA, 19 nt, Artificial Sequence
  Description of Artificial Sequence: Synthetic oligonucleotide
  Antisense strand to SEQ ID NO: 706506
aagucucacauucauuggu

SEQ ID NO: 706508 - RNA, 19 nt, Artificial Sequence
  Description of Artificial Sequence: Synthetic oligonucleotide
  Sense strand starting at position 29 of SEQ ID NO: 586287
caaugaaugugagacuuuc

SEQ ID NO: 706509 - RNA, 19 nt, Artificial Sequence
  Description of Artificial Sequence: Synthetic oligonucleotide
  Antisense strand to SEQ ID NO: 706508
gaaagucucacauucauug

SEQ ID NO: 706510 - RNA, 19 nt, Artificial Sequence
  Description of Artificial Sequence: Synthetic oligonucleotide
  Sense strand starting at position 35 of SEQ ID NO: 586287
augugagacuuucuaagac

SEQ ID NO: 706511 - RNA, 19 nt, Artificial Sequence
  Description of Artificial Sequence: Synthetic oligonucleotide
  Antisense strand to SEQ ID NO: 706510
gucuuagaaagucucacau

SEQ ID NO: 706512 - RNA, 19 nt, Artificial Sequence
  Description of Artificial Sequence: Synthetic oligonucleotide
  Sense strand starting at position 125 of SEQ ID NO: 586287
gccgauugccaauggaaag

SEQ ID NO: 706513 - RNA, 19 nt, Artificial Sequence
  Description of Artificial Sequence: Synthetic oligonucleotide
  Antisense strand to SEQ ID NO: 706512
cuuuccauuggcaaucggc

SEQ ID NO: 706514 - RNA, 19 nt, Artificial Sequence
  Description of Artificial Sequence: Synthetic oligonucleotide
  Sense strand starting at position 2287 of SEQ ID NO: 586287
cucccaauuggcuguggaa

SEQ ID NO: 706515 - RNA, 19 nt, Artificial Sequence
  Description of Artificial Sequence: Synthetic oligonucleotide
  Antisense strand to SEQ ID NO: 706514
uuccacagccaauugggag

SEQ ID NO: 706516 - RNA, 19 nt, Artificial Sequence
  Description of Artificial Sequence: Synthetic oligonucleotide
  Sense strand starting at position 2300 of SEQ ID NO: 586287
guggaaucccaucagccuu

SEQ ID NO: 706517 - RNA, 19 nt, Artificial Sequence
  Description of Artificial Sequence: Synthetic oligonucleotide
  Antisense strand to SEQ ID NO: 706516
aaggcugaugggauuccac

SEQ ID NO: 706518 - RNA, 19 nt, Artificial Sequence
  Description of Artificial Sequence: Synthetic oligonucleotide
  Sense strand starting at position 2327 of SEQ ID NO: 586287
cuaagaaauguuuguuguu

SEQ ID NO: 706519 - RNA, 19 nt, Artificial Sequence
  Description of Artificial Sequence: Synthetic oligonucleotide
  Antisense strand to SEQ ID NO: 706518
aacaacaaacauuucuuag

SEQ ID NO: 706520 - RNA, 19 nt, Artificial Sequence
  Description of Artificial Sequence: Synthetic oligonucleotide
  Sense strand starting at position 2332 of SEQ ID NO: 586287
aaauguuuguuguuugcca

SEQ ID NO: 706521 - RNA, 19 nt, Artificial Sequence
  Description of Artificial Sequence: Synthetic oligonucleotide
  Antisense strand to SEQ ID NO: 706520
uggcaaacaacaaacauuu

SEQ ID NO: 706522 - RNA, 19 nt, Artificial Sequence
  Description of Artificial Sequence: Synthetic oligonucleotide
  Sense strand starting at position 2340 of SEQ ID NO: 586287
guuguuugccaggcacgua

SEQ ID NO: 706523 - RNA, 19 nt, Artificial Sequence
  Description of Artificial Sequence: Synthetic oligonucleotide
  Antisense strand to SEQ ID NO: 706522
uacgugccuggcaaacaac

SEQ ID NO: 706524 - RNA, 19 nt, Artificial Sequence
  Description of Artificial Sequence: Synthetic oligonucleotide
  Sense strand starting at position 2392 of SEQ ID NO: 586287
ucgugagugcuggguaaac

SEQ ID NO: 706525 - RNA, 19 nt, Artificial Sequence
  Description of Artificial Sequence: Synthetic oligonucleotide
  Antisense strand to SEQ ID NO: 706524
guuuacccagcacucacga

SEQ ID NO: 706526 - RNA, 19 nt, Artificial Sequence
  Description of Artificial Sequence: Synthetic oligonucleotide
  Sense strand starting at position 2394 of SEQ ID NO: 586287
gugagugcuggguaaacaa

SEQ ID NO: 706527 - RNA, 19 nt, Artificial Sequence
  Description of Artificial Sequence: Synthetic oligonucleotide
  Antisense strand to SEQ ID NO: 706526
uuguuuacccagcacucac

SEQ ID NO: 706528 - RNA, 19 nt, Artificial Sequence
  Description of Artificial Sequence: Synthetic oligonucleotide
  Sense strand starting at position 2511 of SEQ ID NO: 586287
gaaaucccagucugauaag

SEQ ID NO: 706529 - RNA, 19 nt, Artificial Sequence
  Description of Artificial Sequence: Synthetic oligonucleotide
  Antisense strand to SEQ ID NO: 706528
cuuaucagacugggauuuc

SEQ ID NO: 706530 - RNA, 19 nt, Artificial Sequence
  Description of Artificial Sequence: Synthetic oligonucleotide
  Sense strand starting at position 2588 of SEQ ID NO: 586287
cugggaauuuggcaaugcu

SEQ ID NO: 706531 - RNA, 19 nt, Artificial Sequence
  Description of Artificial Sequence: Synthetic oligonucleotide
  Antisense strand to SEQ ID NO: 706530
agcauugccaaauucccag

SEQ ID NO: 706532 - RNA, 19 nt, Artificial Sequence
  Description of Artificial Sequence: Synthetic oligonucleotide
  Sense strand starting at position 2699 of SEQ ID NO: 586287
gagauuggcuuggagaaga

SEQ ID NO: 706533 - RNA, 19 nt, Artificial Sequence
  Description of Artificial Sequence: Synthetic oligonucleotide
  Antisense strand to SEQ ID NO: 706532
ucuucuccaagccaaucuc

SEQ ID NO: 706534 - RNA, 19 nt, Artificial Sequence
  Description of Artificial Sequence: Synthetic oligonucleotide
  Sense strand starting at position 2925 of SEQ ID NO: 586287
ugcacauugcaagauggua

SEQ ID NO: 706535 - RNA, 19 nt, Artificial Sequence
  Description of Artificial Sequence: Synthetic oligonucleotide
  Antisense strand to SEQ ID NO: 706534
uaccaucuugcaaugugca

SEQ ID NO: 706536 - RNA, 19 nt, Artificial Sequence
  Description of Artificial Sequence: Synthetic oligonucleotide
  Sense strand starting at position 3020 of SEQ ID NO: 586287
ugguuauaaucaucugaug

SEQ ID NO: 706537 - RNA, 19 nt, Artificial Sequence
  Description of Artificial Sequence: Synthetic oligonucleotide
  Antisense strand to SEQ ID NO: 706536
caucagaugauuauaacca

SEQ ID NO: 706538 - RNA, 19 nt, Artificial Sequence
  Description of Artificial Sequence: Synthetic oligonucleotide
  Sense strand starting at position 3131 of SEQ ID NO: 586287
ggaagauuauacuuuguug

SEQ ID NO: 706539 - RNA, 19 nt, Artificial Sequence
  Description of Artificial Sequence: Synthetic oligonucleotide
  Antisense strand to SEQ ID NO: 706538
caacaaaguauaaucuucc

SEQ ID NO: 706540 - RNA, 19 nt, Artificial Sequence
  Description of Artificial Sequence: Synthetic oligonucleotide
  Sense strand starting at position 3134 of SEQ ID NO: 586287
agauuauacuuuguugugu

SEQ ID NO: 706541 - RNA, 19 nt, Artificial Sequence
  Description of Artificial Sequence: Synthetic oligonucleotide
  Antisense strand to SEQ ID NO: 706540
acacaacaaaguauaaucu

SEQ ID NO: 706542 - RNA, 19 nt, Artificial Sequence
  Description of Artificial Sequence: Synthetic oligonucleotide
  Sense strand starting at position 3135 of SEQ ID NO: 586287
gauuauacuuuguuguguu

SEQ ID NO: 706543 - RNA, 19 nt, Artificial Sequence
  Description of Artificial Sequence: Synthetic oligonucleotide
  Antisense strand to SEQ ID NO: 706542
aacacaacaaaguauaauc

SEQ ID NO: 706544 - RNA, 19 nt, Artificial Sequence
  Description of Artificial Sequence: Synthetic oligonucleotide
  Sense strand starting at position 3153 of SEQ ID NO: 586287
ucaggaauuuauuaggaau

SEQ ID NO: 706545 - RNA, 19 nt, Artificial Sequence
  Description of Artificial Sequence: Synthetic oligonucleotide
  Antisense strand to SEQ ID NO: 706544
auuccuaauaaauuccuga

SEQ ID NO: 706546 - RNA, 19 nt, Artificial Sequence
  Description of Artificial Sequence: Synthetic oligonucleotide
  Sense strand starting at position 3156 of SEQ ID NO: 586287
ggaauuuauuaggaauuac

SEQ ID NO: 706547 - RNA, 19 nt, Artificial Sequence
  Description of Artificial Sequence: Synthetic oligonucleotide
  Antisense strand to SEQ ID NO: 706546
guaauuccuaauaaauucc

SEQ ID NO: 706548 - RNA, 19 nt, Artificial Sequence
  Description of Artificial Sequence: Synthetic oligonucleotide
  Sense strand starting at position 3197 of SEQ ID NO: 586287
cacugauagcaguguuauu

SEQ ID NO: 706549 - RNA, 19 nt, Artificial Sequence
  Description of Artificial Sequence: Synthetic oligonucleotide
  Antisense strand to SEQ ID NO: 706548
aauaacacugcuaucagug

SEQ ID NO: 706550 - RNA, 19 nt, Artificial Sequence
  Description of Artificial Sequence: Synthetic oligonucleotide
  Sense strand starting at position 3220 of SEQ ID NO: 586287
gcguucagucugcauuugu

SEQ ID NO: 706551 - RNA, 19 nt, Artificial Sequence
  Description of Artificial Sequence: Synthetic oligonucleotide
  Antisense strand to SEQ ID NO: 706550
acaaaugcagacugaacgc

SEQ ID NO: 706552 - RNA, 19 nt, Artificial Sequence
  Description of Artificial Sequence: Synthetic oligonucleotide
  Sense strand starting at position 3276 of SEQ ID NO: 586287
gcaucugacuaauuaugcu

SEQ ID NO: 706553 - RNA, 19 nt, Artificial Sequence
  Description of Artificial Sequence: Synthetic oligonucleotide
  Antisense strand to SEQ ID NO: 706552
agcauaauuagucagaugc

SEQ ID NO: 706554 - RNA, 19 nt, Artificial Sequence
  Description of Artificial Sequence: Synthetic oligonucleotide
  Sense strand starting at position 3291 of SEQ ID NO: 586287
ugcuuucuagcauacugaa

SEQ ID NO: 706555 - RNA, 19 nt, Artificial Sequence
  Description of Artificial Sequence: Synthetic oligonucleotide
  Antisense strand to SEQ ID NO: 706554
uucaguaugcuagaaagca

SEQ ID NO: 706556 - RNA, 19 nt, Artificial Sequence
  Description of Artificial Sequence: Synthetic oligonucleotide
  Sense strand starting at position 3392 of SEQ ID NO: 586287
guaguuaggcuauacuauc

SEQ ID NO: 706557 - RNA, 19 nt, Artificial Sequence
  Description of Artificial Sequence: Synthetic oligonucleotide
  Antisense strand to SEQ ID NO: 706556
gauaguauagccuaacuac

SEQ ID NO: 706558 - RNA, 19 nt, Artificial Sequence
  Description of Artificial Sequence: Synthetic oligonucleotide
  Sense strand starting at position 3524 of SEQ ID NO: 586287
uagauaccauucuaggagu

SEQ ID NO: 706559 - RNA, 19 nt, Artificial Sequence
  Description of Artificial Sequence: Synthetic oligonucleotide
  Antisense strand to SEQ ID NO: 706558
acuccuagaaugguaucua

SEQ ID NO: 706560 - RNA, 19 nt, Artificial Sequence
  Description of Artificial Sequence: Synthetic oligonucleotide
  Sense strand starting at position 3526 of SEQ ID NO: 586287
gauaccauucuaggaguau

SEQ ID NO: 706561 - RNA, 19 nt, Artificial Sequence
  Description of Artificial Sequence: Synthetic oligonucleotide
  Antisense strand to SEQ ID NO: 706560
auacuccuagaaugguauc

SEQ ID NO: 706562 - RNA, 19 nt, Artificial Sequence
  Description of Artificial Sequence: Synthetic oligonucleotide
  Sense strand starting at position 3527 of SEQ ID NO: 586287
auaccauucuaggaguaua

SEQ ID NO: 706563 - RNA, 19 nt, Artificial Sequence
  Description of Artificial Sequence: Synthetic oligonucleotide
  Antisense strand to SEQ ID NO: 706562
uauacuccuagaaugguau

SEQ ID NO: 706564 - RNA, 19 nt, Artificial Sequence
  Description of Artificial Sequence: Synthetic oligonucleotide
  Sense strand starting at position 3537 of SEQ ID NO: 586287
aggaguauauaagauagaa

SEQ ID NO: 706565 - RNA, 19 nt, Artificial Sequence
  Description of Artificial Sequence: Synthetic oligonucleotide
  Antisense strand to SEQ ID NO: 706564
uucuaucuuauauacuccu

SEQ ID NO: 706566 - RNA, 19 nt, Artificial Sequence
  Description of Artificial Sequence: Synthetic oligonucleotide
  Sense strand starting at position 3594 of SEQ ID NO: 586287
uuagucucauccuuagacu

SEQ ID NO: 706567 - RNA, 19 nt, Artificial Sequence
  Description of Artificial Sequence: Synthetic oligonucleotide
  Antisense strand to SEQ ID NO: 706566
agucuaaggaugagacuaa

SEQ ID NO: 706568 - RNA, 19 nt, Artificial Sequence
  Description of Artificial Sequence: Synthetic oligonucleotide
  Sense strand starting at position 3613 of SEQ ID NO: 586287
gcaacugaaucuguucuca

SEQ ID NO: 706569 - RNA, 19 nt, Artificial Sequence
  Description of Artificial Sequence: Synthetic oligonucleotide
  Antisense strand to SEQ ID NO: 706568
ugagaacagauucaguugc

SEQ ID NO: 706570 - RNA, 19 nt, Artificial Sequence
  Description of Artificial Sequence: Synthetic oligonucleotide
  Sense strand starting at position 3638 of SEQ ID NO: 586287
ggcacaugauagguuguaa

SEQ ID NO: 706571 - RNA, 19 nt, Artificial Sequence
  Description of Artificial Sequence: Synthetic oligonucleotide
  Antisense strand to SEQ ID NO: 706570
uuacaaccuaucaugugcc

SEQ ID NO: 706572 - RNA, 19 nt, Artificial Sequence
  Description of Artificial Sequence: Synthetic oligonucleotide
  Sense strand starting at position 3651 of SEQ ID NO: 586287
uuguaaaugacuuguugga

SEQ ID NO: 706573 - RNA, 19 nt, Artificial Sequence
  Description of Artificial Sequence: Synthetic oligonucleotide
  Antisense strand to SEQ ID NO: 706572
uccaacaagucauuuacaa

SEQ ID NO: 706574 - RNA, 19 nt, Artificial Sequence
  Description of Artificial Sequence: Synthetic oligonucleotide
  Sense strand starting at position 3653 of SEQ ID NO: 586287
guaaaugacuuguuggaag

SEQ ID NO: 706575 - RNA, 19 nt, Artificial Sequence
  Description of Artificial Sequence: Synthetic oligonucleotide
  Antisense strand to SEQ ID NO: 706574
cuuccaacaagucauuuac

SEQ ID NO: 706576 - RNA, 19 nt, Artificial Sequence
  Description of Artificial Sequence: Synthetic oligonucleotide
  Sense strand starting at position 3706 of SEQ ID NO: 586287
ucagaagauuucuagacca

SEQ ID NO: 706577 - RNA, 19 nt, Artificial Sequence
  Description of Artificial Sequence: Synthetic oligonucleotide
  Antisense strand to SEQ ID NO: 706576
uggucuagaaaucuucuga

SEQ ID NO: 706578 - RNA, 19 nt, Artificial Sequence
  Description of Artificial Sequence: Synthetic oligonucleotide
  Sense strand starting at position 3753 of SEQ ID NO: 586287
ccacaaaugugagccauau

SEQ ID NO: 706579 - RNA, 19 nt, Artificial Sequence
  Description of Artificial Sequence: Synthetic oligonucleotide
  Antisense strand to SEQ ID NO: 706578
auauggcucacauuugugg

SEQ ID NO: 706580 - RNA, 19 nt, Artificial Sequence
  Description of Artificial Sequence: Synthetic oligonucleotide
  Sense strand starting at position 3757 of SEQ ID NO: 586287
aaaugugagccauauaugu

SEQ ID NO: 706581 - RNA, 19 nt, Artificial Sequence
  Description of Artificial Sequence: Synthetic oligonucleotide
  Antisense strand to SEQ ID NO: 706580
acauauauggcucacauuu

SEQ ID NO: 706582 - RNA, 19 nt, Artificial Sequence
  Description of Artificial Sequence: Synthetic oligonucleotide
  Sense strand starting at position 3759 of SEQ ID NO: 586287
augugagccauauauguug

SEQ ID NO: 706583 - RNA, 19 nt, Artificial Sequence
  Description of Artificial Sequence: Synthetic oligonucleotide
  Antisense strand to SEQ ID NO: 706582
caacauauauggcucacau

SEQ ID NO: 706584 - RNA, 19 nt, Artificial Sequence
  Description of Artificial Sequence: Synthetic oligonucleotide
  Sense strand starting at position 3927 of SEQ ID NO: 586287
uauggaauauuugaagucu

SEQ ID NO: 706585 - RNA, 19 nt, Artificial Sequence
  Description of Artificial Sequence: Synthetic oligonucleotide
  Antisense strand to SEQ ID NO: 706584
agacuucaaauauuccaua

SEQ ID NO: 706586 - RNA, 19 nt, Artificial Sequence
  Description of Artificial Sequence: Synthetic oligonucleotide
  Sense strand starting at position 354 of SEQ ID NO: 586288
ugaaauguccaccgacagu

SEQ ID NO: 706587 - RNA, 19 nt, Artificial Sequence
  Description of Artificial Sequence: Synthetic oligonucleotide
  Antisense strand to SEQ ID NO: 706586
acugucgguggacauuuca

SEQ ID NO: 706588 - RNA, 19 nt, Artificial Sequence
  Description of Artificial Sequence: Synthetic oligonucleotide
  Sense strand starting at position 445 of SEQ ID NO: 586288
gcugguauuuccguacaug

SEQ ID NO: 706589 - RNA, 19 nt, Artificial Sequence
  Description of Artificial Sequence: Synthetic oligonucleotide
  Antisense strand to SEQ ID NO: 706588
cauguacggaaauaccagc

SEQ ID NO: 706590 - RNA, 19 nt, Artificial Sequence
  Description of Artificial Sequence: Synthetic oligonucleotide
  Sense strand starting at position 463 of SEQ ID NO: 586288
gcaagagccuuggcaucau

SEQ ID NO: 706591 - RNA, 19 nt, Artificial Sequence
  Description of Artificial Sequence: Synthetic oligonucleotide
  Antisense strand to SEQ ID NO: 706590
augaugccaaggcucuugc

SEQ ID NO: 706592 - RNA, 19 nt, Artificial Sequence
  Description of Artificial Sequence: Synthetic oligonucleotide
  Sense strand starting at position 504 of SEQ ID NO: 586288
ggacucagccugggacaau

SEQ ID NO: 706593 - RNA, 19 nt, Artificial Sequence
  Description of Artificial Sequence: Synthetic oligonucleotide
  Antisense strand to SEQ ID NO: 706592
auugucccaggcugagucc

SEQ ID NO: 706594 - RNA, 19 nt, Artificial Sequence
  Description of Artificial Sequence: Synthetic oligonucleotide
  Sense strand starting at position 647 of SEQ ID NO: 586288
ucaccucucccagaugagu

SEQ ID NO: 706595 - RNA, 19 nt, Artificial Sequence
  Description of Artificial Sequence: Synthetic oligonucleotide
  Antisense strand to SEQ ID NO: 706594
acucaucugggagagguga

SEQ ID NO: 706596 - RNA, 19 nt, Artificial Sequence
  Description of Artificial Sequence: Synthetic oligonucleotide
  Sense strand starting at position 656 of SEQ ID NO: 586288
ccagaugagucucuacuua

SEQ ID NO: 706597 - RNA, 19 nt, Artificial Sequence
  Description of Artificial Sequence: Synthetic oligonucleotide
  Antisense strand to SEQ ID NO: 706596
uaaguagagacucaucugg

SEQ ID NO: 706598 - RNA, 19 nt, Artificial Sequence
  Description of Artificial Sequence: Synthetic oligonucleotide
  Sense strand starting at position 716 of SEQ ID NO: 586288
uggaauuucugcgcgucua

SEQ ID NO: 706599 - RNA, 19 nt, Artificial Sequence
  Description of Artificial Sequence: Synthetic oligonucleotide
  Antisense strand to SEQ ID NO: 706598
uagacgcgcagaaauucca

SEQ ID NO: 706600 - RNA, 19 nt, Artificial Sequence
  Description of Artificial Sequence: Synthetic oligonucleotide
  Sense strand starting at position 717 of SEQ ID NO: 586288
ggaauuucugcgcgucuac

SEQ ID NO: 706601 - RNA, 19 nt, Artificial Sequence
  Description of Artificial Sequence: Synthetic oligonucleotide
  Antisense strand to SEQ ID NO: 706600
guagacgcgcagaaauucc

SEQ ID NO: 706602 - RNA, 19 nt, Artificial Sequence
  Description of Artificial Sequence: Synthetic oligonucleotide
  Sense strand starting at position 766 of SEQ ID NO: 586288
guccgagagcuacaaguua

SEQ ID NO: 706603 - RNA, 19 nt, Artificial Sequence
  Description of Artificial Sequence: Synthetic oligonucleotide
  Antisense strand to SEQ ID NO: 706602
uaacuuguagcucucggac

SEQ ID NO: 706604 - RNA, 19 nt, Artificial Sequence
  Description of Artificial Sequence: Synthetic oligonucleotide
  Sense strand starting at position 892 of SEQ ID NO: 586288
gacccauugugaguuaggu

SEQ ID NO: 706605 - RNA, 19 nt, Artificial Sequence
  Description of Artificial Sequence: Synthetic oligonucleotide
  Antisense strand to SEQ ID NO: 706604
accuaacucacaauggguc

SEQ ID NO: 706606 - RNA, 19 nt, Artificial Sequence
  Description of Artificial Sequence: Synthetic oligonucleotide
  Sense strand starting at position 1001 of SEQ ID NO: 586288
gcucaaauaggaugggauu

SEQ ID NO: 706607 - RNA, 19 nt, Artificial Sequence
  Description of Artificial Sequence: Synthetic oligonucleotide
  Antisense strand to SEQ ID NO: 706606
aaucccauccuauuugagc

SEQ ID NO: 706608 - RNA, 19 nt, Artificial Sequence
  Description of Artificial Sequence: Synthetic oligonucleotide
  Sense strand starting at position 1505 of SEQ ID NO: 586288
aaaguuuccguuugagaau

SEQ ID NO: 706609 - RNA, 19 nt, Artificial Sequence
  Description of Artificial Sequence: Synthetic oligonucleotide
  Antisense strand to SEQ ID NO: 706608
auucucaaacggaaacuuu

SEQ ID NO: 706610 - RNA, 19 nt, Artificial Sequence
  Description of Artificial Sequence: Synthetic oligonucleotide
  Sense strand starting at position 2010 of SEQ ID NO: 586288
cgugguuuagacuggaguu

SEQ ID NO: 706611 - RNA, 19 nt, Artificial Sequence
  Description of Artificial Sequence: Synthetic oligonucleotide
  Antisense strand to SEQ ID NO: 706610
aacuccagucuaaaccacg

SEQ ID NO: 706612 - RNA, 19 nt, Artificial Sequence
  Description of Artificial Sequence: Synthetic oligonucleotide
  Sense strand starting at position 2011 of SEQ ID NO: 586288
gugguuuagacuggaguua

SEQ ID NO: 706613 - RNA, 19 nt, Artificial Sequence
  Description of Artificial Sequence: Synthetic oligonucleotide
  Antisense strand to SEQ ID NO: 706612
uaacuccagucuaaaccac

SEQ ID NO: 706614 - RNA, 19 nt, Artificial Sequence
  Description of Artificial Sequence: Synthetic oligonucleotide
  Sense strand starting at position 2012 of SEQ ID NO: 586288
ugguuuagacuggaguuaa

SEQ ID NO: 706615 - RNA, 19 nt, Artificial Sequence
  Description of Artificial Sequence: Synthetic oligonucleotide
  Antisense strand to SEQ ID NO: 706614
uuaacuccagucuaaacca

SEQ ID NO: 706616 - RNA, 19 nt, Artificial Sequence
  Description of Artificial Sequence: Synthetic oligonucleotide
  Sense strand starting at position 2428 of SEQ ID NO: 586288
cugcaaugggcggacaauu

SEQ ID NO: 706617 - RNA, 19 nt, Artificial Sequence
  Description of Artificial Sequence: Synthetic oligonucleotide
  Antisense strand to SEQ ID NO: 706616
aauuguccgcccauugcag

SEQ ID NO: 706618 - RNA, 19 nt, Artificial Sequence
  Description of Artificial Sequence: Synthetic oligonucleotide
  Sense strand starting at position 2438 of SEQ ID NO: 586288
cggacaauuucuggagaga

SEQ ID NO: 706619 - RNA, 19 nt, Artificial Sequence
  Description of Artificial Sequence: Synthetic oligonucleotide
  Antisense strand to SEQ ID NO: 706618
ucucuccagaaauuguccg

SEQ ID NO: 706620 - RNA, 19 nt, Artificial Sequence
  Description of Artificial Sequence: Synthetic oligonucleotide
  Sense strand starting at position 2483 of SEQ ID NO: 586288
caggauuaguugcuguuga

SEQ ID NO: 706621 - RNA, 19 nt, Artificial Sequence
  Description of Artificial Sequence: Synthetic oligonucleotide
  Antisense strand to SEQ ID NO: 706620
ucaacagcaacuaauccug

SEQ ID NO: 706622 - RNA, 19 nt, Artificial Sequence
  Description of Artificial Sequence: Synthetic oligonucleotide
  Sense strand starting at position 2504 of SEQ ID NO: 586288
gcgcuccuccaaugaaauc

SEQ ID NO: 706623 - RNA, 19 nt, Artificial Sequence
  Description of Artificial Sequence: Synthetic oligonucleotide
  Antisense strand to SEQ ID NO: 706622
gauuucauuggaggagcgc

SEQ ID NO: 706624 - RNA, 19 nt, Artificial Sequence
  Description of Artificial Sequence: Synthetic oligonucleotide
  Sense strand starting at position 2515 of SEQ ID NO: 586288
augaaaucuucugugcucu

SEQ ID NO: 706625 - RNA, 19 nt, Artificial Sequence
  Description of Artificial Sequence: Synthetic oligonucleotide
  Antisense strand to SEQ ID NO: 706624
agagcacagaagauuucau

SEQ ID NO: 706626 - RNA, 19 nt, Artificial Sequence
  Description of Artificial Sequence: Synthetic oligonucleotide
  Sense strand starting at position 2532 of SEQ ID NO: 586288
cucugauuuggcgguucuu

SEQ ID NO: 706627 - RNA, 19 nt, Artificial Sequence
  Description of Artificial Sequence: Synthetic oligonucleotide
  Antisense strand to SEQ ID NO: 706626
aagaaccgccaaaucagag

SEQ ID NO: 706628 - RNA, 19 nt, Artificial Sequence
  Description of Artificial Sequence: Synthetic oligonucleotide
  Sense strand starting at position 2543 of SEQ ID NO: 586288
cgguucuucugagcaaaua

SEQ ID NO: 706629 - RNA, 19 nt, Artificial Sequence
  Description of Artificial Sequence: Synthetic oligonucleotide
  Antisense strand to SEQ ID NO: 706628
uauuugcucagaagaaccg

SEQ ID NO: 706630 - RNA, 19 nt, Artificial Sequence
  Description of Artificial Sequence: Synthetic oligonucleotide
  Sense strand starting at position 2544 of SEQ ID NO: 586288
gguucuucugagcaaauau

SEQ ID NO: 706631 - RNA, 19 nt, Artificial Sequence
  Description of Artificial Sequence: Synthetic oligonucleotide
  Antisense strand to SEQ ID NO: 706630
auauuugcucagaagaacc

SEQ ID NO: 706632 - RNA, 19 nt, Artificial Sequence
  Description of Artificial Sequence: Synthetic oligonucleotide
  Sense strand starting at position 2682 of SEQ ID NO: 586288
gugugagugcuacaaaggu

SEQ ID NO: 706633 - RNA, 19 nt, Artificial Sequence
  Description of Artificial Sequence: Synthetic oligonucleotide
  Antisense strand to SEQ ID NO: 706632
accuuuguagcacucacac

SEQ ID NO: 706634 - RNA, 19 nt, Artificial Sequence
  Description of Artificial Sequence: Synthetic oligonucleotide
  Sense strand starting at position 2686 of SEQ ID NO: 586288
gagugcuacaaaggugaca

SEQ ID NO: 706635 - RNA, 19 nt, Artificial Sequence
  Description of Artificial Sequence: Synthetic oligonucleotide
  Antisense strand to SEQ ID NO: 706634
ugucaccuuuguagcacuc

SEQ ID NO: 706636 - RNA, 19 nt, Artificial Sequence
  Description of Artificial Sequence: Synthetic oligonucleotide
  Sense strand starting at position 2712 of SEQ ID NO: 586288
uugggaagaacgcaguauu

SEQ ID NO: 706637 - RNA, 19 nt, Artificial Sequence
  Description of Artificial Sequence: Synthetic oligonucleotide
  Antisense strand to SEQ ID NO: 706636
aauacugcguucuucccaa

SEQ ID NO: 706638 - RNA, 19 nt, Artificial Sequence
  Description of Artificial Sequence: Synthetic oligonucleotide
  Sense strand starting at position 2715 of SEQ ID NO: 586288
ggaagaacgcaguauugcu

SEQ ID NO: 706639 - RNA, 19 nt, Artificial Sequence
  Description of Artificial Sequence: Synthetic oligonucleotide
  Antisense strand to SEQ ID NO: 706638
agcaauacugcguucuucc

SEQ ID NO: 706640 - RNA, 19 nt, Artificial Sequence
  Description of Artificial Sequence: Synthetic oligonucleotide
  Sense strand starting at position 2736 of SEQ ID NO: 586288
uuguuugucggagauacuu

SEQ ID NO: 706641 - RNA, 19 nt, Artificial Sequence
  Description of Artificial Sequence: Synthetic oligonucleotide
  Antisense strand to SEQ ID NO: 706640
aaguaucuccgacaaacaa

SEQ ID NO: 706642 - RNA, 19 nt, Artificial Sequence
  Description of Artificial Sequence: Synthetic oligonucleotide
  Sense strand starting at position 2738 of SEQ ID NO: 586288
guuugucggagauacuuaa

SEQ ID NO: 706643 - RNA, 19 nt, Artificial Sequence
  Description of Artificial Sequence: Synthetic oligonucleotide
  Antisense strand to SEQ ID NO: 706642
uuaaguaucuccgacaaac

SEQ ID NO: 706644 - RNA, 19 nt, Artificial Sequence
  Description of Artificial Sequence: Synthetic oligonucleotide
  Sense strand starting at position 2810 of SEQ ID NO: 586288
auauauaauugugcugaac

SEQ ID NO: 706645 - RNA, 19 nt, Artificial Sequence
  Description of Artificial Sequence: Synthetic oligonucleotide
  Antisense strand to SEQ ID NO: 706644
guucagcacaauuauauau

SEQ ID NO: 706646 - RNA, 19 nt, Artificial Sequence
  Description of Artificial Sequence: Synthetic oligonucleotide
  Sense strand starting at position 2840 of SEQ ID NO: 586288
uguuuauuucuuuggagcu

SEQ ID NO: 706647 - RNA, 19 nt, Artificial Sequence
  Description of Artificial Sequence: Synthetic oligonucleotide
  Antisense strand to SEQ ID NO: 706646
agcuccaaagaaauaaaca

SEQ ID NO: 706648 - RNA, 19 nt, Artificial Sequence
  Description of Artificial Sequence: Synthetic oligonucleotide
  Sense strand starting at position 2998 of SEQ ID NO: 586288
auauguguauauccagaau

SEQ ID NO: 706649 - RNA, 19 nt, Artificial Sequence
  Description of Artificial Sequence: Synthetic oligonucleotide
  Antisense strand to SEQ ID NO: 706648
auucuggauauacacauau

SEQ ID NO: 706650 - RNA, 19 nt, Artificial Sequence
  Description of Artificial Sequence: Synthetic oligonucleotide
  Sense strand starting at position 3001 of SEQ ID NO: 586288
uguguauauccagaauaua

SEQ ID NO: 706651 - RNA, 19 nt, Artificial Sequence
  Description of Artificial Sequence: Synthetic oligonucleotide
  Antisense strand to SEQ ID NO: 706650
uauauucuggauauacaca

SEQ ID NO: 706652 - RNA, 19 nt, Artificial Sequence
  Description of Artificial Sequence: Synthetic oligonucleotide
  Sense strand starting at position 3552 of SEQ ID NO: 586288
gaugcaaacuuucuguguu

SEQ ID NO: 706653 - RNA, 19 nt, Artificial Sequence
  Description of Artificial Sequence: Synthetic oligonucleotide
  Antisense strand to SEQ ID NO: 706652
aacacagaaaguuugcauc

SEQ ID NO: 706654 - RNA, 19 nt, Artificial Sequence
  Description of Artificial Sequence: Synthetic oligonucleotide
  Sense strand starting at position 3605 of SEQ ID NO: 586288
augagaaauuucugccaau

SEQ ID NO: 706655 - RNA, 19 nt, Artificial Sequence
  Description of Artificial Sequence: Synthetic oligonucleotide
  Antisense strand to SEQ ID NO: 706654
auuggcagaaauuucucau

SEQ ID NO: 706656 - RNA, 19 nt, Artificial Sequence
  Description of Artificial Sequence: Synthetic oligonucleotide
  Sense strand starting at position 3664 of SEQ ID NO: 586288
aaaguacaaugauaggauu

SEQ ID NO: 706657 - RNA, 19 nt, Artificial Sequence
  Description of Artificial Sequence: Synthetic oligonucleotide
  Antisense strand to SEQ ID NO: 706656
aauccuaucauuguacuuu

SEQ ID NO: 706658 - RNA, 19 nt, Artificial Sequence
  Description of Artificial Sequence: Synthetic oligonucleotide
  Sense strand starting at position 3679 of SEQ ID NO: 586288
gauucuaaaguguagcuua

SEQ ID NO: 706659 - RNA, 19 nt, Artificial Sequence
  Description of Artificial Sequence: Synthetic oligonucleotide
  Antisense strand to SEQ ID NO: 706658
uaagcuacacuuuagaauc

SEQ ID NO: 706660 - RNA, 19 nt, Artificial Sequence
  Description of Artificial Sequence: Synthetic oligonucleotide
  Sense strand starting at position 3720 of SEQ ID NO: 586288
agcauauguguaugugaau

SEQ ID NO: 706661 - RNA, 19 nt, Artificial Sequence
  Description of Artificial Sequence: Synthetic oligonucleotide
  Antisense strand to SEQ ID NO: 706660
auucacauacacauaugcu

SEQ ID NO: 706662 - RNA, 19 nt, Artificial Sequence
  Description of Artificial Sequence: Synthetic oligonucleotide
  Sense strand starting at position 3721 of SEQ ID NO: 586288
gcauauguguaugugaaua

SEQ ID NO: 706663 - RNA, 19 nt, Artificial Sequence
  Description of Artificial Sequence: Synthetic oligonucleotide
  Antisense strand to SEQ ID NO: 706662
uauucacauacacauaugc

SEQ ID NO: 706664 - RNA, 19 nt, Artificial Sequence
  Description of Artificial Sequence: Synthetic oligonucleotide
  Sense strand starting at position 3726 of SEQ ID NO: 586288
uguguaugugaauauaaca

SEQ ID NO: 706665 - RNA, 19 nt, Artificial Sequence
  Description of Artificial Sequence: Synthetic oligonucleotide
  Antisense strand to SEQ ID NO: 706664
uguuauauucacauacaca

SEQ ID NO: 706666 - RNA, 19 nt, Artificial Sequence
  Description of Artificial Sequence: Synthetic oligonucleotide
  Sense strand starting at position 391 of SEQ ID NO: 586289
ugaaauguccaccgacagu

SEQ ID NO: 706667 - RNA, 19 nt, Artificial Sequence
  Description of Artificial Sequence: Synthetic oligonucleotide
  Antisense strand to SEQ ID NO: 706666
acugucgguggacauuuca

SEQ ID NO: 706668 - RNA, 19 nt, Artificial Sequence
  Description of Artificial Sequence: Synthetic oligonucleotide
  Sense strand starting at position 482 of SEQ ID NO: 586289
gcugguauuuccguacaug

SEQ ID NO: 706669 - RNA, 19 nt, Artificial Sequence
  Description of Artificial Sequence: Synthetic oligonucleotide
  Antisense strand to SEQ ID NO: 706668
cauguacggaaauaccagc

SEQ ID NO: 706670 - RNA, 19 nt, Artificial Sequence
  Description of Artificial Sequence: Synthetic oligonucleotide
  Sense strand starting at position 500 of SEQ ID NO: 586289
gcaagagccuuggcaucau

SEQ ID NO: 706671 - RNA, 19 nt, Artificial Sequence
  Description of Artificial Sequence: Synthetic oligonucleotide
  Antisense strand to SEQ ID NO: 706670
augaugccaaggcucuugc

SEQ ID NO: 706672 - RNA, 19 nt, Artificial Sequence
  Description of Artificial Sequence: Synthetic oligonucleotide
  Sense strand starting at position 541 of SEQ ID NO: 586289
ggacucagccugggacaau

SEQ ID NO: 706673 - RNA, 19 nt, Artificial Sequence
  Description of Artificial Sequence: Synthetic oligonucleotide
  Antisense strand to SEQ ID NO: 706672
auugucccaggcugagucc

SEQ ID NO: 706674 - RNA, 19 nt, Artificial Sequence
  Description of Artificial Sequence: Synthetic oligonucleotide
  Sense strand starting at position 684 of SEQ ID NO: 586289
ucaccucucccagaugagu

SEQ ID NO: 706675 - RNA, 19 nt, Artificial Sequence
  Description of Artificial Sequence: Synthetic oligonucleotide
  Antisense strand to SEQ ID NO: 706674
acucaucugggagagguga

SEQ ID NO: 706676 - RNA, 19 nt, Artificial Sequence
  Description of Artificial Sequence: Synthetic oligonucleotide
  Sense strand starting at position 693 of SEQ ID NO: 586289
ccagaugagucucuacuua

SEQ ID NO: 706677 - RNA, 19 nt, Artificial Sequence
  Description of Artificial Sequence: Synthetic oligonucleotide
  Antisense strand to SEQ ID NO: 706676
uaaguagagacucaucugg

SEQ ID NO: 706678 - RNA, 19 nt, Artificial Sequence
  Description of Artificial Sequence: Synthetic oligonucleotide
  Sense strand starting at position 753 of SEQ ID NO: 586289
uggaauuucugcgcgucua

SEQ ID NO: 706679 - RNA, 19 nt, Artificial Sequence
  Description of Artificial Sequence: Synthetic oligonucleotide
  Antisense strand to SEQ ID NO: 706678
uagacgcgcagaaauucca

SEQ ID NO: 706680 - RNA, 19 nt, Artificial Sequence
  Description of Artificial Sequence: Synthetic oligonucleotide
  Sense strand starting at position 754 of SEQ ID NO: 586289
ggaauuucugcgcgucuac

SEQ ID NO: 706681 - RNA, 19 nt, Artificial Sequence
  Description of Artificial Sequence: Synthetic oligonucleotide
  Antisense strand to SEQ ID NO: 706680
guagacgcgcagaaauucc

SEQ ID NO: 706682 - RNA, 19 nt, Artificial Sequence
  Description of Artificial Sequence: Synthetic oligonucleotide
  Sense strand starting at position 803 of SEQ ID NO: 586289
guccgagagcuacaaguua

SEQ ID NO: 706683 - RNA, 19 nt, Artificial Sequence
  Description of Artificial Sequence: Synthetic oligonucleotide
  Antisense strand to SEQ ID NO: 706682
uaacuuguagcucucggac

SEQ ID NO: 706684 - RNA, 19 nt, Artificial Sequence
  Description of Artificial Sequence: Synthetic oligonucleotide
  Sense strand starting at position 929 of SEQ ID NO: 586289
gacccauugugaguuaggu

SEQ ID NO: 706685 - RNA, 19 nt, Artificial Sequence
  Description of Artificial Sequence: Synthetic oligonucleotide
  Antisense strand to SEQ ID NO: 706684
accuaacucacaauggguc

SEQ ID NO: 706686 - RNA, 19 nt, Artificial Sequence
  Description of Artificial Sequence: Synthetic oligonucleotide
  Sense strand starting at position 1038 of SEQ ID NO: 586289
gcucaaauaggaugggauu

SEQ ID NO: 706687 - RNA, 19 nt, Artificial Sequence
  Description of Artificial Sequence: Synthetic oligonucleotide
  Antisense strand to SEQ ID NO: 706686
aaucccauccuauuugagc

SEQ ID NO: 706688 - RNA, 19 nt, Artificial Sequence
  Description of Artificial Sequence: Synthetic oligonucleotide
  Sense strand starting at position 1542 of SEQ ID NO: 586289
aaaguuuccguuugagaau

SEQ ID NO: 706689 - RNA, 19 nt, Artificial Sequence
  Description of Artificial Sequence: Synthetic oligonucleotide
  Antisense strand to SEQ ID NO: 706688
auucucaaacggaaacuuu

SEQ ID NO: 706690 - RNA, 19 nt, Artificial Sequence
  Description of Artificial Sequence: Synthetic oligonucleotide
  Sense strand starting at position 2047 of SEQ ID NO: 586289
cgugguuuagacuggaguu

SEQ ID NO: 706691 - RNA, 19 nt, Artificial Sequence
  Description of Artificial Sequence: Synthetic oligonucleotide
  Antisense strand to SEQ ID NO: 706690
aacuccagucuaaaccacg

SEQ ID NO: 706692 - RNA, 19 nt, Artificial Sequence
  Description of Artificial Sequence: Synthetic oligonucleotide
  Sense strand starting at position 2048 of SEQ ID NO: 586289
gugguuuagacuggaguua

SEQ ID NO: 706693 - RNA, 19 nt, Artificial Sequence
  Description of Artificial Sequence: Synthetic oligonucleotide
  Antisense strand to SEQ ID NO: 706692
uaacuccagucuaaaccac

SEQ ID NO: 706694 - RNA, 19 nt, Artificial Sequence
  Description of Artificial Sequence: Synthetic oligonucleotide
  Sense strand starting at position 2049 of SEQ ID NO: 586289
ugguuuagacuggaguuaa

SEQ ID NO: 706695 - RNA, 19 nt, Artificial Sequence
  Description of Artificial Sequence: Synthetic oligonucleotide
  Antisense strand to SEQ ID NO: 706694
uuaacuccagucuaaacca

SEQ ID NO: 706696 - RNA, 19 nt, Artificial Sequence
  Description of Artificial Sequence: Synthetic oligonucleotide
  Sense strand starting at position 2465 of SEQ ID NO: 586289
cugcaaugggcggacaauu

SEQ ID NO: 706697 - RNA, 19 nt, Artificial Sequence
  Description of Artificial Sequence: Synthetic oligonucleotide
  Antisense strand to SEQ ID NO: 706696
aauuguccgcccauugcag

SEQ ID NO: 706698 - RNA, 19 nt, Artificial Sequence
  Description of Artificial Sequence: Synthetic oligonucleotide
  Sense strand starting at position 2475 of SEQ ID NO: 586289
cggacaauuucuggagaga

SEQ ID NO: 706699 - RNA, 19 nt, Artificial Sequence
  Description of Artificial Sequence: Synthetic oligonucleotide
  Antisense strand to SEQ ID NO: 706698
ucucuccagaaauuguccg

SEQ ID NO: 706700 - RNA, 19 nt, Artificial Sequence
  Description of Artificial Sequence: Synthetic oligonucleotide
  Sense strand starting at position 2520 of SEQ ID NO: 586289
caggauuaguugcuguuga

SEQ ID NO: 706701 - RNA, 19 nt, Artificial Sequence
  Description of Artificial Sequence: Synthetic oligonucleotide
  Antisense strand to SEQ ID NO: 706700
ucaacagcaacuaauccug

SEQ ID NO: 706702 - RNA, 19 nt, Artificial Sequence
  Description of Artificial Sequence: Synthetic oligonucleotide
  Sense strand starting at position 2541 of SEQ ID NO: 586289
gcgcuccuccaaugaaauc

SEQ ID NO: 706703 - RNA, 19 nt, Artificial Sequence
  Description of Artificial Sequence: Synthetic oligonucleotide
  Antisense strand to SEQ ID NO: 706702
gauuucauuggaggagcgc

SEQ ID NO: 706704 - RNA, 19 nt, Artificial Sequence
  Description of Artificial Sequence: Synthetic oligonucleotide
  Sense strand starting at position 2552 of SEQ ID NO: 586289
augaaaucuucugugcucu

SEQ ID NO: 706705 - RNA, 19 nt, Artificial Sequence
  Description of Artificial Sequence: Synthetic oligonucleotide
  Antisense strand to SEQ ID NO: 706704
agagcacagaagauuucau

SEQ ID NO: 706706 - RNA, 19 nt, Artificial Sequence
  Description of Artificial Sequence: Synthetic oligonucleotide
  Sense strand starting at position 2569 of SEQ ID NO: 586289
cucugauuuggcgguucuu

SEQ ID NO: 706707 - RNA, 19 nt, Artificial Sequence
  Description of Artificial Sequence: Synthetic oligonucleotide
  Antisense strand to SEQ ID NO: 706706
aagaaccgccaaaucagag

SEQ ID NO: 706708 - RNA, 19 nt, Artificial Sequence
  Description of Artificial Sequence: Synthetic oligonucleotide
  Sense strand starting at position 2580 of SEQ ID NO: 586289
cgguucuucugagcaaaua

SEQ ID NO: 706709 - RNA, 19 nt, Artificial Sequence
  Description of Artificial Sequence: Synthetic oligonucleotide
  Antisense strand to SEQ ID NO: 706708
uauuugcucagaagaaccg

SEQ ID NO: 706710 - RNA, 19 nt, Artificial Sequence
  Description of Artificial Sequence: Synthetic oligonucleotide
  Sense strand starting at position 2581 of SEQ ID NO: 586289
gguucuucugagcaaauau

SEQ ID NO: 706711 - RNA, 19 nt, Artificial Sequence
  Description of Artificial Sequence: Synthetic oligonucleotide
  Antisense strand to SEQ ID NO: 706710
auauuugcucagaagaacc

SEQ ID NO: 706712 - RNA, 19 nt, Artificial Sequence
  Description of Artificial Sequence: Synthetic oligonucleotide
  Sense strand starting at position 2719 of SEQ ID NO: 586289
gugugagugcuacaaaggu

SEQ ID NO: 706713 - RNA, 19 nt, Artificial Sequence
  Description of Artificial Sequence: Synthetic oligonucleotide
  Antisense strand to SEQ ID NO: 706712
accuuuguagcacucacac

SEQ ID NO: 706714 - RNA, 19 nt, Artificial Sequence
  Description of Artificial Sequence: Synthetic oligonucleotide
  Sense strand starting at position 2723 of SEQ ID NO: 586289
gagugcuacaaaggugaca

SEQ ID NO: 706715 - RNA, 19 nt, Artificial Sequence
  Description of Artificial Sequence: Synthetic oligonucleotide
  Antisense strand to SEQ ID NO: 706714
ugucaccuuuguagcacuc

SEQ ID NO: 706716 - RNA, 19 nt, Artificial Sequence
  Description of Artificial Sequence: Synthetic oligonucleotide
  Sense strand starting at position 2749 of SEQ ID NO: 586289
uugggaagaacgcaguauu

SEQ ID NO: 706717 - RNA, 19 nt, Artificial Sequence
  Description of Artificial Sequence: Synthetic oligonucleotide
  Antisense strand to SEQ ID NO: 706716
aauacugcguucuucccaa

SEQ ID NO: 706718 - RNA, 19 nt, Artificial Sequence
  Description of Artificial Sequence: Synthetic oligonucleotide
  Sense strand starting at position 2752 of SEQ ID NO: 586289
ggaagaacgcaguauugcu

SEQ ID NO: 706719 - RNA, 19 nt, Artificial Sequence
  Description of Artificial Sequence: Synthetic oligonucleotide
  Antisense strand to SEQ ID NO: 706718
agcaauacugcguucuucc

SEQ ID NO: 706720 - RNA, 19 nt, Artificial Sequence
  Description of Artificial Sequence: Synthetic oligonucleotide
  Sense strand starting at position 2773 of SEQ ID NO: 586289
uuguuugucggagauacuu

SEQ ID NO: 706721 - RNA, 19 nt, Artificial Sequence
  Description of Artificial Sequence: Synthetic oligonucleotide
  Antisense strand to SEQ ID NO: 706720
aaguaucuccgacaaacaa

SEQ ID NO: 706722 - RNA, 19 nt, Artificial Sequence
  Description of Artificial Sequence: Synthetic oligonucleotide
  Sense strand starting at position 2775 of SEQ ID NO: 586289
guuugucggagauacuuaa

SEQ ID NO: 706723 - RNA, 19 nt, Artificial Sequence
  Description of Artificial Sequence: Synthetic oligonucleotide
  Antisense strand to SEQ ID NO: 706722
uuaaguaucuccgacaaac

SEQ ID NO: 706724 - RNA, 19 nt, Artificial Sequence
  Description of Artificial Sequence: Synthetic oligonucleotide
  Sense strand starting at position 2847 of SEQ ID NO: 586289
auauauaauugugcugaac

SEQ ID NO: 706725 - RNA, 19 nt, Artificial Sequence
  Description of Artificial Sequence: Synthetic oligonucleotide
  Antisense strand to SEQ ID NO: 706724
guucagcacaauuauauau

SEQ ID NO: 706726 - RNA, 19 nt, Artificial Sequence
  Description of Artificial Sequence: Synthetic oligonucleotide
  Sense strand starting at position 2877 of SEQ ID NO: 586289
uguuuauuucuuuggagcu

SEQ ID NO: 706727 - RNA, 19 nt, Artificial Sequence
  Description of Artificial Sequence: Synthetic oligonucleotide
  Antisense strand to SEQ ID NO: 706726
agcuccaaagaaauaaaca

SEQ ID NO: 706728 - RNA, 19 nt, Artificial Sequence
  Description of Artificial Sequence: Synthetic oligonucleotide
  Sense strand starting at position 3035 of SEQ ID NO: 586289
auauguguauauccagaau

SEQ ID NO: 706729 - RNA, 19 nt, Artificial Sequence
  Description of Artificial Sequence: Synthetic oligonucleotide
  Antisense strand to SEQ ID NO: 706728
auucuggauauacacauau

SEQ ID NO: 706730 - RNA, 19 nt, Artificial Sequence
  Description of Artificial Sequence: Synthetic oligonucleotide
  Sense strand starting at position 3038 of SEQ ID NO: 586289
uguguauauccagaauaua

SEQ ID NO: 706731 - RNA, 19 nt, Artificial Sequence
  Description of Artificial Sequence: Synthetic oligonucleotide
  Antisense strand to SEQ ID NO: 706730
uauauucuggauauacaca

SEQ ID NO: 706732 - RNA, 19 nt, Artificial Sequence
  Description of Artificial Sequence: Synthetic oligonucleotide
  Sense strand starting at position 3589 of SEQ ID NO: 586289
gaugcaaacuuucuguguu

SEQ ID NO: 706733 - RNA, 19 nt, Artificial Sequence
  Description of Artificial Sequence: Synthetic oligonucleotide
  Antisense strand to SEQ ID NO: 706732
aacacagaaaguuugcauc

SEQ ID NO: 706734 - RNA, 19 nt, Artificial Sequence
  Description of Artificial Sequence: Synthetic oligonucleotide
  Sense strand starting at position 3642 of SEQ ID NO: 586289
augagaaauuucugccaau

SEQ ID NO: 706735 - RNA, 19 nt, Artificial Sequence
  Description of Artificial Sequence: Synthetic oligonucleotide
  Antisense strand to SEQ ID NO: 706734
auuggcagaaauuucucau

SEQ ID NO: 706736 - RNA, 19 nt, Artificial Sequence
  Description of Artificial Sequence: Synthetic oligonucleotide
  Sense strand starting at position 3701 of SEQ ID NO: 586289
aaaguacaaugauaggauu

SEQ ID NO: 706737 - RNA, 19 nt, Artificial Sequence
  Description of Artificial Sequence: Synthetic oligonucleotide
  Antisense strand to SEQ ID NO: 706736
aauccuaucauuguacuuu

SEQ ID NO: 706738 - RNA, 19 nt, Artificial Sequence
  Description of Artificial Sequence: Synthetic oligonucleotide
  Sense strand starting at position 3716 of SEQ ID NO: 586289
gauucuaaaguguagcuua

SEQ ID NO: 706739 - RNA, 19 nt, Artificial Sequence
  Description of Artificial Sequence: Synthetic oligonucleotide
  Antisense strand to SEQ ID NO: 706738
uaagcuacacuuuagaauc

SEQ ID NO: 706740 - RNA, 19 nt, Artificial Sequence
  Description of Artificial Sequence: Synthetic oligonucleotide
  Sense strand starting at position 3757 of SEQ ID NO: 586289
agcauauguguaugugaau

SEQ ID NO: 706741 - RNA, 19 nt, Artificial Sequence
  Description of Artificial Sequence: Synthetic oligonucleotide
  Antisense strand to SEQ ID NO: 706740
auucacauacacauaugcu

SEQ ID NO: 706742 - RNA, 19 nt, Artificial Sequence
  Description of Artificial Sequence: Synthetic oligonucleotide
  Sense strand starting at position 3758 of SEQ ID NO: 586289
gcauauguguaugugaaua

SEQ ID NO: 706743 - RNA, 19 nt, Artificial Sequence
  Description of Artificial Sequence: Synthetic oligonucleotide
  Antisense strand to SEQ ID NO: 706742
uauucacauacacauaugc

SEQ ID NO: 706744 - RNA, 19 nt, Artificial Sequence
  Description of Artificial Sequence: Synthetic oligonucleotide
  Sense strand starting at position 3763 of SEQ ID NO: 586289
uguguaugugaauauaaca

SEQ ID NO: 706745 - RNA, 19 nt, Artificial Sequence
  Description of Artificial Sequence: Synthetic oligonucleotide
  Antisense strand to SEQ ID NO: 706744
uguuauauucacauacaca

SEQ ID NO: 706746 - RNA, 19 nt, Artificial Sequence
  Description of Artificial Sequence: Synthetic oligonucleotide
  Sense strand starting at position 12 of SEQ ID NO: 586290
gcugguauuuccguacaug

SEQ ID NO: 706747 - RNA, 19 nt, Artificial Sequence
  Description of Artificial Sequence: Synthetic oligonucleotide
  Antisense strand to SEQ ID NO: 706746
cauguacggaaauaccagc

SEQ ID NO: 706748 - RNA, 19 nt, Artificial Sequence
  Description of Artificial Sequence: Synthetic oligonucleotide
  Sense strand starting at position 71 of SEQ ID NO: 586290
ggacucagccugggacaau

SEQ ID NO: 706749 - RNA, 19 nt, Artificial Sequence
  Description of Artificial Sequence: Synthetic oligonucleotide
  Antisense strand to SEQ ID NO: 706748
auugucccaggcugagucc

SEQ ID NO: 706750 - RNA, 19 nt, Artificial Sequence
  Description of Artificial Sequence: Synthetic oligonucleotide
  Sense strand starting at position 214 of SEQ ID NO: 586290
ucaccucucccagaugagu

SEQ ID NO: 706751 - RNA, 19 nt, Artificial Sequence
  Description of Artificial Sequence: Synthetic oligonucleotide
  Antisense strand to SEQ ID NO: 706750
acucaucugggagagguga

SEQ ID NO: 706752 - RNA, 19 nt, Artificial Sequence
  Description of Artificial Sequence: Synthetic oligonucleotide
  Sense strand starting at position 223 of SEQ ID NO: 586290
ccagaugagucucuacuua

SEQ ID NO: 706753 - RNA, 19 nt, Artificial Sequence
  Description of Artificial Sequence: Synthetic oligonucleotide
  Antisense strand to SEQ ID NO: 706752
uaaguagagacucaucugg

SEQ ID NO: 706754 - RNA, 19 nt, Artificial Sequence
  Description of Artificial Sequence: Synthetic oligonucleotide
  Sense strand starting at position 283 of SEQ ID NO: 586290
uggaauuucugcgcgucua

SEQ ID NO: 706755 - RNA, 19 nt, Artificial Sequence
  Description of Artificial Sequence: Synthetic oligonucleotide
  Antisense strand to SEQ ID NO: 706754
uagacgcgcagaaauucca

SEQ ID NO: 706756 - RNA, 19 nt, Artificial Sequence
  Description of Artificial Sequence: Synthetic oligonucleotide
  Sense strand starting at position 284 of SEQ ID NO: 586290
ggaauuucugcgcgucuac

SEQ ID NO: 706757 - RNA, 19 nt, Artificial Sequence
  Description of Artificial Sequence: Synthetic oligonucleotide
  Antisense strand to SEQ ID NO: 706756
guagacgcgcagaaauucc

SEQ ID NO: 706758 - RNA, 19 nt, Artificial Sequence
  Description of Artificial Sequence: Synthetic oligonucleotide
  Sense strand starting at position 333 of SEQ ID NO: 586290
guccgagagcuacaaguua

SEQ ID NO: 706759 - RNA, 19 nt, Artificial Sequence
  Description of Artificial Sequence: Synthetic oligonucleotide
  Antisense strand to SEQ ID NO: 706758
uaacuuguagcucucggac

SEQ ID NO: 706760 - RNA, 19 nt, Artificial Sequence
  Description of Artificial Sequence: Synthetic oligonucleotide
  Sense strand starting at position 459 of SEQ ID NO: 586290
gacccauugugaguuaggu

SEQ ID NO: 706761 - RNA, 19 nt, Artificial Sequence
  Description of Artificial Sequence: Synthetic oligonucleotide
  Antisense strand to SEQ ID NO: 706760
accuaacucacaauggguc

SEQ ID NO: 706762 - RNA, 19 nt, Artificial Sequence
  Description of Artificial Sequence: Synthetic oligonucleotide
  Sense strand starting at position 568 of SEQ ID NO: 586290
gcucaaauaggaugggauu

SEQ ID NO: 706763 - RNA, 19 nt, Artificial Sequence
  Description of Artificial Sequence: Synthetic oligonucleotide
  Antisense strand to SEQ ID NO: 706762
aaucccauccuauuugagc

SEQ ID NO: 706764 - RNA, 19 nt, Artificial Sequence
  Description of Artificial Sequence: Synthetic oligonucleotide
  Sense strand starting at position 1072 of SEQ ID NO: 586290
aaaguuuccguuugagaau

SEQ ID NO: 706765 - RNA, 19 nt, Artificial Sequence
  Description of Artificial Sequence: Synthetic oligonucleotide
  Antisense strand to SEQ ID NO: 706764
auucucaaacggaaacuuu

SEQ ID NO: 706766 - RNA, 19 nt, Artificial Sequence
  Description of Artificial Sequence: Synthetic oligonucleotide
  Sense strand starting at position 1578 of SEQ ID NO: 586290
gugguuuagacuggaguua

SEQ ID NO: 706767 - RNA, 19 nt, Artificial Sequence
  Description of Artificial Sequence: Synthetic oligonucleotide
  Antisense strand to SEQ ID NO: 706766
uaacuccagucuaaaccac

SEQ ID NO: 706768 - RNA, 19 nt, Artificial Sequence
  Description of Artificial Sequence: Synthetic oligonucleotide
  Sense strand starting at position 1579 of SEQ ID NO: 586290
ugguuuagacuggaguuaa

SEQ ID NO: 706769 - RNA, 19 nt, Artificial Sequence
  Description of Artificial Sequence: Synthetic oligonucleotide
  Antisense strand to SEQ ID NO: 706768
uuaacuccagucuaaacca

SEQ ID NO: 706770 - RNA, 19 nt, Artificial Sequence
  Description of Artificial Sequence: Synthetic oligonucleotide
  Sense strand starting at position 1995 of SEQ ID NO: 586290
cugcaaugggcggacaauu

SEQ ID NO: 706771 - RNA, 19 nt, Artificial Sequence
  Description of Artificial Sequence: Synthetic oligonucleotide
  Antisense strand to SEQ ID NO: 706770
aauuguccgcccauugcag

SEQ ID NO: 706772 - RNA, 19 nt, Artificial Sequence
  Description of Artificial Sequence: Synthetic oligonucleotide
  Sense strand starting at position 2005 of SEQ ID NO: 586290
cggacaauuucuggagaga

SEQ ID NO: 706773 - RNA, 19 nt, Artificial Sequence
  Description of Artificial Sequence: Synthetic oligonucleotide
  Antisense strand to SEQ ID NO: 706772
ucucuccagaaauuguccg

SEQ ID NO: 706774 - RNA, 19 nt, Artificial Sequence
  Description of Artificial Sequence: Synthetic oligonucleotide
  Sense strand starting at position 2050 of SEQ ID NO: 586290
caggauuaguugcuguuga

SEQ ID NO: 706775 - RNA, 19 nt, Artificial Sequence
  Description of Artificial Sequence: Synthetic oligonucleotide
  Antisense strand to SEQ ID NO: 706774
ucaacagcaacuaauccug

SEQ ID NO: 706776 - RNA, 19 nt, Artificial Sequence
  Description of Artificial Sequence: Synthetic oligonucleotide
  Sense strand starting at position 2082 of SEQ ID NO: 586290
augaaaucuucugugcucu

SEQ ID NO: 706777 - RNA, 19 nt, Artificial Sequence
  Description of Artificial Sequence: Synthetic oligonucleotide
  Antisense strand to SEQ ID NO: 706776
agagcacagaagauuucau

SEQ ID NO: 706778 - RNA, 19 nt, Artificial Sequence
  Description of Artificial Sequence: Synthetic oligonucleotide
  Sense strand starting at position 2099 of SEQ ID NO: 586290
cucugauuuggcgguucuu

SEQ ID NO: 706779 - RNA, 19 nt, Artificial Sequence
  Description of Artificial Sequence: Synthetic oligonucleotide
  Antisense strand to SEQ ID NO: 706778
aagaaccgccaaaucagag

SEQ ID NO: 706780 - RNA, 19 nt, Artificial Sequence
  Description of Artificial Sequence: Synthetic oligonucleotide
  Sense strand starting at position 2110 of SEQ ID NO: 586290
cgguucuucugagcaaaua

SEQ ID NO: 706781 - RNA, 19 nt, Artificial Sequence
  Description of Artificial Sequence: Synthetic oligonucleotide
  Antisense strand to SEQ ID NO: 706780
uauuugcucagaagaaccg

SEQ ID NO: 706782 - RNA, 19 nt, Artificial Sequence
  Description of Artificial Sequence: Synthetic oligonucleotide
  Sense strand starting at position 2111 of SEQ ID NO: 586290
gguucuucugagcaaauau

SEQ ID NO: 706783 - RNA, 19 nt, Artificial Sequence
  Description of Artificial Sequence: Synthetic oligonucleotide
  Antisense strand to SEQ ID NO: 706782
auauuugcucagaagaacc

SEQ ID NO: 706784 - RNA, 19 nt, Artificial Sequence
  Description of Artificial Sequence: Synthetic oligonucleotide
  Sense strand starting at position 2249 of SEQ ID NO: 586290
gugugagugcuacaaaggu

SEQ ID NO: 706785 - RNA, 19 nt, Artificial Sequence
  Description of Artificial Sequence: Synthetic oligonucleotide
  Antisense strand to SEQ ID NO: 706784
accuuuguagcacucacac

SEQ ID NO: 706786 - RNA, 19 nt, Artificial Sequence
  Description of Artificial Sequence: Synthetic oligonucleotide
  Sense strand starting at position 2253 of SEQ ID NO: 586290
gagugcuacaaaggugaca

SEQ ID NO: 706787 - RNA, 19 nt, Artificial Sequence
  Description of Artificial Sequence: Synthetic oligonucleotide
  Antisense strand to SEQ ID NO: 706786
ugucaccuuuguagcacuc

SEQ ID NO: 706788 - RNA, 19 nt, Artificial Sequence
  Description of Artificial Sequence: Synthetic oligonucleotide
  Sense strand starting at position 2279 of SEQ ID NO: 586290
uugggaagaacgcaguauu

SEQ ID NO: 706789 - RNA, 19 nt, Artificial Sequence
  Description of Artificial Sequence: Synthetic oligonucleotide
  Antisense strand to SEQ ID NO: 706788
aauacugcguucuucccaa

SEQ ID NO: 706790 - RNA, 19 nt, Artificial Sequence
  Description of Artificial Sequence: Synthetic oligonucleotide
  Sense strand starting at position 2282 of SEQ ID NO: 586290
ggaagaacgcaguauugcu

SEQ ID NO: 706791 - RNA, 19 nt, Artificial Sequence
  Description of Artificial Sequence: Synthetic oligonucleotide
  Antisense strand to SEQ ID NO: 706790
agcaauacugcguucuucc

SEQ ID NO: 706792 - RNA, 19 nt, Artificial Sequence
  Description of Artificial Sequence: Synthetic oligonucleotide
  Sense strand starting at position 2303 of SEQ ID NO: 586290
uuguuugucggagauacuu

SEQ ID NO: 706793 - RNA, 19 nt, Artificial Sequence
  Description of Artificial Sequence: Synthetic oligonucleotide
  Antisense strand to SEQ ID NO: 706792
aaguaucuccgacaaacaa

SEQ ID NO: 706794 - RNA, 19 nt, Artificial Sequence
  Description of Artificial Sequence: Synthetic oligonucleotide
  Sense strand starting at position 2305 of SEQ ID NO: 586290
guuugucggagauacuuaa

SEQ ID NO: 706795 - RNA, 19 nt, Artificial Sequence
  Description of Artificial Sequence: Synthetic oligonucleotide
  Antisense strand to SEQ ID NO: 706794
uuaaguaucuccgacaaac

SEQ ID NO: 706796 - RNA, 19 nt, Artificial Sequence
  Description of Artificial Sequence: Synthetic oligonucleotide
  Sense strand starting at position 2377 of SEQ ID NO: 586290
auauauaauugugcugaac

SEQ ID NO: 706797 - RNA, 19 nt, Artificial Sequence
  Description of Artificial Sequence: Synthetic oligonucleotide
  Antisense strand to SEQ ID NO: 706796
guucagcacaauuauauau

SEQ ID NO: 706798 - RNA, 19 nt, Artificial Sequence
  Description of Artificial Sequence: Synthetic oligonucleotide
  Sense strand starting at position 2407 of SEQ ID NO: 586290
uguuuauuucuuuggagcu

SEQ ID NO: 706799 - RNA, 19 nt, Artificial Sequence
  Description of Artificial Sequence: Synthetic oligonucleotide
  Antisense strand to SEQ ID NO: 706798
agcuccaaagaaauaaaca

SEQ ID NO: 706800 - RNA, 19 nt, Artificial Sequence
  Description of Artificial Sequence: Synthetic oligonucleotide
  Sense strand starting at position 2565 of SEQ ID NO: 586290
auauguguauauccagaau

SEQ ID NO: 706801 - RNA, 19 nt, Artificial Sequence
  Description of Artificial Sequence: Synthetic oligonucleotide
  Antisense strand to SEQ ID NO: 706800
auucuggauauacacauau

SEQ ID NO: 706802 - RNA, 19 nt, Artificial Sequence
  Description of Artificial Sequence: Synthetic oligonucleotide
  Sense strand starting at position 2568 of SEQ ID NO: 586290
uguguauauccagaauaua

SEQ ID NO: 706803 - RNA, 19 nt, Artificial Sequence
  Description of Artificial Sequence: Synthetic oligonucleotide
  Antisense strand to SEQ ID NO: 706802
uauauucuggauauacaca

SEQ ID NO: 706804 - RNA, 19 nt, Artificial Sequence
  Description of Artificial Sequence: Synthetic oligonucleotide
  Sense strand starting at position 3172 of SEQ ID NO: 586290
augagaaauuucugccaau

SEQ ID NO: 706805 - RNA, 19 nt, Artificial Sequence
  Description of Artificial Sequence: Synthetic oligonucleotide
  Antisense strand to SEQ ID NO: 706804
auuggcagaaauuucucau

SEQ ID NO: 706806 - RNA, 19 nt, Artificial Sequence
  Description of Artificial Sequence: Synthetic oligonucleotide
  Sense strand starting at position 3231 of SEQ ID NO: 586290
aaaguacaaugauaggauu

SEQ ID NO: 706807 - RNA, 19 nt, Artificial Sequence
  Description of Artificial Sequence: Synthetic oligonucleotide
  Antisense strand to SEQ ID NO: 706806
aauccuaucauuguacuuu

SEQ ID NO: 706808 - RNA, 19 nt, Artificial Sequence
  Description of Artificial Sequence: Synthetic oligonucleotide
  Sense strand starting at position 3246 of SEQ ID NO: 586290
gauucuaaaguguagcuua

SEQ ID NO: 706809 - RNA, 19 nt, Artificial Sequence
  Description of Artificial Sequence: Synthetic oligonucleotide
  Antisense strand to SEQ ID NO: 706808
uaagcuacacuuuagaauc

SEQ ID NO: 706810 - RNA, 19 nt, Artificial Sequence
  Description of Artificial Sequence: Synthetic oligonucleotide
  Sense strand starting at position 3287 of SEQ ID NO: 586290
agcauauguguaugugaau

SEQ ID NO: 706811 - RNA, 19 nt, Artificial Sequence
  Description of Artificial Sequence: Synthetic oligonucleotide
  Antisense strand to SEQ ID NO: 706810
auucacauacacauaugcu

SEQ ID NO: 706812 - RNA, 19 nt, Artificial Sequence
  Description of Artificial Sequence: Synthetic oligonucleotide
  Sense strand starting at position 3288 of SEQ ID NO: 586290
gcauauguguaugugaaua

SEQ ID NO: 706813 - RNA, 19 nt, Artificial Sequence
  Description of Artificial Sequence: Synthetic oligonucleotide
  Antisense strand to SEQ ID NO: 706812
uauucacauacacauaugc

SEQ ID NO: 706814 - RNA, 19 nt, Artificial Sequence
  Description of Artificial Sequence: Synthetic oligonucleotide
  Sense strand starting at position 3293 of SEQ ID NO: 586290
uguguaugugaauauaaca

SEQ ID NO: 706815 - RNA, 19 nt, Artificial Sequence
  Description of Artificial Sequence: Synthetic oligonucleotide
  Antisense strand to SEQ ID NO: 706814
uguuauauucacauacaca

SEQ ID NO: 706816 - RNA, 19 nt, Artificial Sequence
  Description of Artificial Sequence: Synthetic oligonucleotide
  Sense strand starting at position 3687 of SEQ ID NO: 586290
aaugcuguagcugaaaguu

SEQ ID NO: 706817 - RNA, 19 nt, Artificial Sequence
  Description of Artificial Sequence: Synthetic oligonucleotide
  Antisense strand to SEQ ID NO: 706816
aacuuucagcuacagcauu

SEQ ID NO: 706818 - RNA, 19 nt, Artificial Sequence
  Description of Artificial Sequence: Synthetic oligonucleotide
  Sense strand starting at position 3838 of SEQ ID NO: 586290
ccaccaucacugggugauu

SEQ ID NO: 706819 - RNA, 19 nt, Artificial Sequence
  Description of Artificial Sequence: Synthetic oligonucleotide
  Antisense strand to SEQ ID NO: 706818
aaucacccagugauggugg

SEQ ID NO: 706820 - RNA, 19 nt, Artificial Sequence
  Description of Artificial Sequence: Synthetic oligonucleotide
  Sense strand starting at position 3839 of SEQ ID NO: 586290
caccaucacugggugauua

SEQ ID NO: 706821 - RNA, 19 nt, Artificial Sequence
  Description of Artificial Sequence: Synthetic oligonucleotide
  Antisense strand to SEQ ID NO: 706820
uaaucacccagugauggug

SEQ ID NO: 706822 - RNA, 19 nt, Artificial Sequence
  Description of Artificial Sequence: Synthetic oligonucleotide
  Sense strand starting at position 3840 of SEQ ID NO: 586290
accaucacugggugauuau

SEQ ID NO: 706823 - RNA, 19 nt, Artificial Sequence
  Description of Artificial Sequence: Synthetic oligonucleotide
  Antisense strand to SEQ ID NO: 706822
auaaucacccagugauggu

SEQ ID NO: 706824 - RNA, 19 nt, Artificial Sequence
  Description of Artificial Sequence: Synthetic oligonucleotide
  Sense strand starting at position 3913 of SEQ ID NO: 586290
cccagcauuuguuccacua

SEQ ID NO: 706825 - RNA, 19 nt, Artificial Sequence
  Description of Artificial Sequence: Synthetic oligonucleotide
  Antisense strand to SEQ ID NO: 706824
uaguggaacaaaugcuggg

SEQ ID NO: 706826 - RNA, 19 nt, Artificial Sequence
  Description of Artificial Sequence: Synthetic oligonucleotide
  Sense strand starting at position 53 of SEQ ID NO: 586291
caggguuucucucuggagu

SEQ ID NO: 706827 - RNA, 19 nt, Artificial Sequence
  Description of Artificial Sequence: Synthetic oligonucleotide
  Antisense strand to SEQ ID NO: 706826
acuccagagagaaacccug

SEQ ID NO: 706828 - RNA, 19 nt, Artificial Sequence
  Description of Artificial Sequence: Synthetic oligonucleotide
  Sense strand starting at position 56 of SEQ ID NO: 586291
gguuucucucuggagucua

SEQ ID NO: 706829 - RNA, 19 nt, Artificial Sequence
  Description of Artificial Sequence: Synthetic oligonucleotide
  Antisense strand to SEQ ID NO: 706828
uagacuccagagagaaacc

SEQ ID NO: 706830 - RNA, 19 nt, Artificial Sequence
  Description of Artificial Sequence: Synthetic oligonucleotide
  Sense strand starting at position 515 of SEQ ID NO: 586291
ugaaauguccaccgacagu

SEQ ID NO: 706831 - RNA, 19 nt, Artificial Sequence
  Description of Artificial Sequence: Synthetic oligonucleotide
  Antisense strand to SEQ ID NO: 706830
acugucgguggacauuuca

SEQ ID NO: 706832 - RNA, 19 nt, Artificial Sequence
  Description of Artificial Sequence: Synthetic oligonucleotide
  Sense strand starting at position 606 of SEQ ID NO: 586291
gcugguauuuccguacaug

SEQ ID NO: 706833 - RNA, 19 nt, Artificial Sequence
  Description of Artificial Sequence: Synthetic oligonucleotide
  Antisense strand to SEQ ID NO: 706832
cauguacggaaauaccagc

SEQ ID NO: 706834 - RNA, 19 nt, Artificial Sequence
  Description of Artificial Sequence: Synthetic oligonucleotide
  Sense strand starting at position 624 of SEQ ID NO: 586291
gcaagagccuuggcaucau

SEQ ID NO: 706835 - RNA, 19 nt, Artificial Sequence
  Description of Artificial Sequence: Synthetic oligonucleotide
  Antisense strand to SEQ ID NO: 706834
augaugccaaggcucuugc

SEQ ID NO: 706836 - RNA, 19 nt, Artificial Sequence
  Description of Artificial Sequence: Synthetic oligonucleotide
  Sense strand starting at position 665 of SEQ ID NO: 586291
ggacucagccugggacaau

SEQ ID NO: 706837 - RNA, 19 nt, Artificial Sequence
  Description of Artificial Sequence: Synthetic oligonucleotide
  Antisense strand to SEQ ID NO: 706836
auugucccaggcugagucc

SEQ ID NO: 706838 - RNA, 19 nt, Artificial Sequence
  Description of Artificial Sequence: Synthetic oligonucleotide
  Sense strand starting at position 808 of SEQ ID NO: 586291
ucaccucucccagaugagu

SEQ ID NO: 706839 - RNA, 19 nt, Artificial Sequence
  Description of Artificial Sequence: Synthetic oligonucleotide
  Antisense strand to SEQ ID NO: 706838
acucaucugggagagguga

SEQ ID NO: 706840 - RNA, 19 nt, Artificial Sequence
  Description of Artificial Sequence: Synthetic oligonucleotide
  Sense strand starting at position 817 of SEQ ID NO: 586291
ccagaugagucucuacuua

SEQ ID NO: 706841 - RNA, 19 nt, Artificial Sequence
  Description of Artificial Sequence: Synthetic oligonucleotide
  Antisense strand to SEQ ID NO: 706840
uaaguagagacucaucugg

SEQ ID NO: 706842 - RNA, 19 nt, Artificial Sequence
  Description of Artificial Sequence: Synthetic oligonucleotide
  Sense strand starting at position 877 of SEQ ID NO: 586291
uggaauuucugcgcgucua

SEQ ID NO: 706843 - RNA, 19 nt, Artificial Sequence
  Description of Artificial Sequence: Synthetic oligonucleotide
  Antisense strand to SEQ ID NO: 706842
uagacgcgcagaaauucca

SEQ ID NO: 706844 - RNA, 19 nt, Artificial Sequence
  Description of Artificial Sequence: Synthetic oligonucleotide
  Sense strand starting at position 878 of SEQ ID NO: 586291
ggaauuucugcgcgucuac

SEQ ID NO: 706845 - RNA, 19 nt, Artificial Sequence
  Description of Artificial Sequence: Synthetic oligonucleotide
  Antisense strand to SEQ ID NO: 706844
guagacgcgcagaaauucc

SEQ ID NO: 706846 - RNA, 19 nt, Artificial Sequence
  Description of Artificial Sequence: Synthetic oligonucleotide
  Sense strand starting at position 927 of SEQ ID NO: 586291
guccgagagcuacaaguua

SEQ ID NO: 706847 - RNA, 19 nt, Artificial Sequence
  Description of Artificial Sequence: Synthetic oligonucleotide
  Antisense strand to SEQ ID NO: 706846
uaacuuguagcucucggac

SEQ ID NO: 706848 - RNA, 19 nt, Artificial Sequence
  Description of Artificial Sequence: Synthetic oligonucleotide
  Sense strand starting at position 1053 of SEQ ID NO: 586291
gacccauugugaguuaggu

SEQ ID NO: 706849 - RNA, 19 nt, Artificial Sequence
  Description of Artificial Sequence: Synthetic oligonucleotide
  Antisense strand to SEQ ID NO: 706848
accuaacucacaauggguc

SEQ ID NO: 706850 - RNA, 19 nt, Artificial Sequence
  Description of Artificial Sequence: Synthetic oligonucleotide
  Sense strand starting at position 1162 of SEQ ID NO: 586291
gcucaaauaggaugggauu

SEQ ID NO: 706851 - RNA, 19 nt, Artificial Sequence
  Description of Artificial Sequence: Synthetic oligonucleotide
  Antisense strand to SEQ ID NO: 706850
aaucccauccuauuugagc

SEQ ID NO: 706852 - RNA, 19 nt, Artificial Sequence
  Description of Artificial Sequence: Synthetic oligonucleotide
  Sense strand starting at position 1666 of SEQ ID NO: 586291
aaaguuuccguuugagaau

SEQ ID NO: 706853 - RNA, 19 nt, Artificial Sequence
  Description of Artificial Sequence: Synthetic oligonucleotide
  Antisense strand to SEQ ID NO: 706852
auucucaaacggaaacuuu

SEQ ID NO: 706854 - RNA, 19 nt, Artificial Sequence
  Description of Artificial Sequence: Synthetic oligonucleotide
  Sense strand starting at position 2172 of SEQ ID NO: 586291
gugguuuagacuggaguua

SEQ ID NO: 706855 - RNA, 19 nt, Artificial Sequence
  Description of Artificial Sequence: Synthetic oligonucleotide
  Antisense strand to SEQ ID NO: 706854
uaacuccagucuaaaccac

SEQ ID NO: 706856 - RNA, 19 nt, Artificial Sequence
  Description of Artificial Sequence: Synthetic oligonucleotide
  Sense strand starting at position 2173 of SEQ ID NO: 586291
ugguuuagacuggaguuaa

SEQ ID NO: 706857 - RNA, 19 nt, Artificial Sequence
  Description of Artificial Sequence: Synthetic oligonucleotide
  Antisense strand to SEQ ID NO: 706856
uuaacuccagucuaaacca

SEQ ID NO: 706858 - RNA, 19 nt, Artificial Sequence
  Description of Artificial Sequence: Synthetic oligonucleotide
  Sense strand starting at position 2589 of SEQ ID NO: 586291
cugcaaugggcggacaauu

SEQ ID NO: 706859 - RNA, 19 nt, Artificial Sequence
  Description of Artificial Sequence: Synthetic oligonucleotide
  Antisense strand to SEQ ID NO: 706858
aauuguccgcccauugcag

SEQ ID NO: 706860 - RNA, 19 nt, Artificial Sequence
  Description of Artificial Sequence: Synthetic oligonucleotide
  Sense strand starting at position 2599 of SEQ ID NO: 586291
cggacaauuucuggagaga

SEQ ID NO: 706861 - RNA, 19 nt, Artificial Sequence
  Description of Artificial Sequence: Synthetic oligonucleotide
  Antisense strand to SEQ ID NO: 706860
ucucuccagaaauuguccg

SEQ ID NO: 706862 - RNA, 19 nt, Artificial Sequence
  Description of Artificial Sequence: Synthetic oligonucleotide
  Sense strand starting at position 2644 of SEQ ID NO: 586291
caggauuaguugcuguuga

SEQ ID NO: 706863 - RNA, 19 nt, Artificial Sequence
  Description of Artificial Sequence: Synthetic oligonucleotide
  Antisense strand to SEQ ID NO: 706862
ucaacagcaacuaauccug

SEQ ID NO: 706864 - RNA, 19 nt, Artificial Sequence
  Description of Artificial Sequence: Synthetic oligonucleotide
  Sense strand starting at position 2676 of SEQ ID NO: 586291
augaaaucuucugugcucu

SEQ ID NO: 706865 - RNA, 19 nt, Artificial Sequence
  Description of Artificial Sequence: Synthetic oligonucleotide
  Antisense strand to SEQ ID NO: 706864
agagcacagaagauuucau

SEQ ID NO: 706866 - RNA, 19 nt, Artificial Sequence
  Description of Artificial Sequence: Synthetic oligonucleotide
  Sense strand starting at position 2693 of SEQ ID NO: 586291
cucugauuuggcgguucuu

SEQ ID NO: 706867 - RNA, 19 nt, Artificial Sequence
  Description of Artificial Sequence: Synthetic oligonucleotide
  Antisense strand to SEQ ID NO: 706866
aagaaccgccaaaucagag

SEQ ID NO: 706868 - RNA, 19 nt, Artificial Sequence
  Description of Artificial Sequence: Synthetic oligonucleotide
  Sense strand starting at position 2704 of SEQ ID NO: 586291
cgguucuucugagcaaaua

SEQ ID NO: 706869 - RNA, 19 nt, Artificial Sequence
  Description of Artificial Sequence: Synthetic oligonucleotide
  Antisense strand to SEQ ID NO: 706868
uauuugcucagaagaaccg

SEQ ID NO: 706870 - RNA, 19 nt, Artificial Sequence
  Description of Artificial Sequence: Synthetic oligonucleotide
  Sense strand starting at position 2705 of SEQ ID NO: 586291
gguucuucugagcaaauau

SEQ ID NO: 706871 - RNA, 19 nt, Artificial Sequence
  Description of Artificial Sequence: Synthetic oligonucleotide
  Antisense strand to SEQ ID NO: 706870
auauuugcucagaagaacc

SEQ ID NO: 706872 - RNA, 19 nt, Artificial Sequence
  Description of Artificial Sequence: Synthetic oligonucleotide
  Sense strand starting at position 2843 of SEQ ID NO: 586291
gugugagugcuacaaaggu

SEQ ID NO: 706873 - RNA, 19 nt, Artificial Sequence
  Description of Artificial Sequence: Synthetic oligonucleotide
  Antisense strand to SEQ ID NO: 706872
accuuuguagcacucacac

SEQ ID NO: 706874 - RNA, 19 nt, Artificial Sequence
  Description of Artificial Sequence: Synthetic oligonucleotide
  Sense strand starting at position 2847 of SEQ ID NO: 586291
gagugcuacaaaggugaca

SEQ ID NO: 706875 - RNA, 19 nt, Artificial Sequence
  Description of Artificial Sequence: Synthetic oligonucleotide
  Antisense strand to SEQ ID NO: 706874
ugucaccuuuguagcacuc

SEQ ID NO: 706876 - RNA, 19 nt, Artificial Sequence
  Description of Artificial Sequence: Synthetic oligonucleotide
  Sense strand starting at position 2873 of SEQ ID NO: 586291
uugggaagaacgcaguauu

SEQ ID NO: 706877 - RNA, 19 nt, Artificial Sequence
  Description of Artificial Sequence: Synthetic oligonucleotide
  Antisense strand to SEQ ID NO: 706876
aauacugcguucuucccaa

SEQ ID NO: 706878 - RNA, 19 nt, Artificial Sequence
  Description of Artificial Sequence: Synthetic oligonucleotide
  Sense strand starting at position 2876 of SEQ ID NO: 586291
ggaagaacgcaguauugcu

SEQ ID NO: 706879 - RNA, 19 nt, Artificial Sequence
  Description of Artificial Sequence: Synthetic oligonucleotide
  Antisense strand to SEQ ID NO: 706878
agcaauacugcguucuucc

SEQ ID NO: 706880 - RNA, 19 nt, Artificial Sequence
  Description of Artificial Sequence: Synthetic oligonucleotide
  Sense strand starting at position 2897 of SEQ ID NO: 586291
uuguuugucggagauacuu

SEQ ID NO: 706881 - RNA, 19 nt, Artificial Sequence
  Description of Artificial Sequence: Synthetic oligonucleotide
  Antisense strand to SEQ ID NO: 706880
aaguaucuccgacaaacaa

SEQ ID NO: 706882 - RNA, 19 nt, Artificial Sequence
  Description of Artificial Sequence: Synthetic oligonucleotide
  Sense strand starting at position 2899 of SEQ ID NO: 586291
guuugucggagauacuuaa

SEQ ID NO: 706883 - RNA, 19 nt, Artificial Sequence
  Description of Artificial Sequence: Synthetic oligonucleotide
  Antisense strand to SEQ ID NO: 706882
uuaaguaucuccgacaaac

SEQ ID NO: 706884 - RNA, 19 nt, Artificial Sequence
  Description of Artificial Sequence: Synthetic oligonucleotide
  Sense strand starting at position 2971 of SEQ ID NO: 586291
auauauaauugugcugaac

SEQ ID NO: 706885 - RNA, 19 nt, Artificial Sequence
  Description of Artificial Sequence: Synthetic oligonucleotide
  Antisense strand to SEQ ID NO: 706884
guucagcacaauuauauau

SEQ ID NO: 706886 - RNA, 19 nt, Artificial Sequence
  Description of Artificial Sequence: Synthetic oligonucleotide
  Sense strand starting at position 3001 of SEQ ID NO: 586291
uguuuauuucuuuggagcu

SEQ ID NO: 706887 - RNA, 19 nt, Artificial Sequence
  Description of Artificial Sequence: Synthetic oligonucleotide
  Antisense strand to SEQ ID NO: 706886
agcuccaaagaaauaaaca

SEQ ID NO: 706888 - RNA, 19 nt, Artificial Sequence
  Description of Artificial Sequence: Synthetic oligonucleotide
  Sense strand starting at position 3159 of SEQ ID NO: 586291
auauguguauauccagaau

SEQ ID NO: 706889 - RNA, 19 nt, Artificial Sequence
  Description of Artificial Sequence: Synthetic oligonucleotide
  Antisense strand to SEQ ID NO: 706888
auucuggauauacacauau

SEQ ID NO: 706890 - RNA, 19 nt, Artificial Sequence
  Description of Artificial Sequence: Synthetic oligonucleotide
  Sense strand starting at position 3162 of SEQ ID NO: 586291
uguguauauccagaauaua

SEQ ID NO: 706891 - RNA, 19 nt, Artificial Sequence
  Description of Artificial Sequence: Synthetic oligonucleotide
  Antisense strand to SEQ ID NO: 706890
uauauucuggauauacaca

SEQ ID NO: 706892 - RNA, 19 nt, Artificial Sequence
  Description of Artificial Sequence: Synthetic oligonucleotide
  Sense strand starting at position 3713 of SEQ ID NO: 586291
gaugcaaacuuucuguguu

SEQ ID NO: 706893 - RNA, 19 nt, Artificial Sequence
  Description of Artificial Sequence: Synthetic oligonucleotide
  Antisense strand to SEQ ID NO: 706892
aacacagaaaguuugcauc

SEQ ID NO: 706894 - RNA, 19 nt, Artificial Sequence
  Description of Artificial Sequence: Synthetic oligonucleotide
  Sense strand starting at position 3766 of SEQ ID NO: 586291
augagaaauuucugccaau

SEQ ID NO: 706895 - RNA, 19 nt, Artificial Sequence
  Description of Artificial Sequence: Synthetic oligonucleotide
  Antisense strand to SEQ ID NO: 706894
auuggcagaaauuucucau

SEQ ID NO: 706896 - RNA, 19 nt, Artificial Sequence
  Description of Artificial Sequence: Synthetic oligonucleotide
  Sense strand starting at position 3825 of SEQ ID NO: 586291
aaaguacaaugauaggauu

SEQ ID NO: 706897 - RNA, 19 nt, Artificial Sequence
  Description of Artificial Sequence: Synthetic oligonucleotide
  Antisense strand to SEQ ID NO: 706896
aauccuaucauuguacuuu

SEQ ID NO: 706898 - RNA, 19 nt, Artificial Sequence
  Description of Artificial Sequence: Synthetic oligonucleotide
  Sense strand starting at position 3840 of SEQ ID NO: 586291
gauucuaaaguguagcuua

SEQ ID NO: 706899 - RNA, 19 nt, Artificial Sequence
  Description of Artificial Sequence: Synthetic oligonucleotide
  Antisense strand to SEQ ID NO: 706898
uaagcuacacuuuagaauc

SEQ ID NO: 706900 - RNA, 19 nt, Artificial Sequence
  Description of Artificial Sequence: Synthetic oligonucleotide
  Sense strand starting at position 3881 of SEQ ID NO: 586291
agcauauguguaugugaau

SEQ ID NO: 706901 - RNA, 19 nt, Artificial Sequence
  Description of Artificial Sequence: Synthetic oligonucleotide
  Antisense strand to SEQ ID NO: 706900
auucacauacacauaugcu

SEQ ID NO: 706902 - RNA, 19 nt, Artificial Sequence
  Description of Artificial Sequence: Synthetic oligonucleotide
  Sense strand starting at position 3882 of SEQ ID NO: 586291
gcauauguguaugugaaua

SEQ ID NO: 706903 - RNA, 19 nt, Artificial Sequence
  Description of Artificial Sequence: Synthetic oligonucleotide
  Antisense strand to SEQ ID NO: 706902
uauucacauacacauaugc

SEQ ID NO: 706904 - RNA, 19 nt, Artificial Sequence
  Description of Artificial Sequence: Synthetic oligonucleotide
  Sense strand starting at position 3887 of SEQ ID NO: 586291
uguguaugugaauauaaca

SEQ ID NO: 706905 - RNA, 19 nt, Artificial Sequence
  Description of Artificial Sequence: Synthetic oligonucleotide
  Antisense strand to SEQ ID NO: 706904
uguuauauucacauacaca

SEQ ID NO: 706906 - RNA, 19 nt, Artificial Sequence
  Description of Artificial Sequence: Synthetic oligonucleotide
  Sense strand starting at position 44 of SEQ ID NO: 586292
caggguuucucucuggagu

SEQ ID NO: 706907 - RNA, 19 nt, Artificial Sequence
  Description of Artificial Sequence: Synthetic oligonucleotide
  Antisense strand to SEQ ID NO: 706906
acuccagagagaaacccug

SEQ ID NO: 706908 - RNA, 19 nt, Artificial Sequence
  Description of Artificial Sequence: Synthetic oligonucleotide
  Sense strand starting at position 47 of SEQ ID NO: 586292
gguuucucucuggagucua

SEQ ID NO: 706909 - RNA, 19 nt, Artificial Sequence
  Description of Artificial Sequence: Synthetic oligonucleotide
  Antisense strand to SEQ ID NO: 706908
uagacuccagagagaaacc

SEQ ID NO: 706910 - RNA, 19 nt, Artificial Sequence
  Description of Artificial Sequence: Synthetic oligonucleotide
  Sense strand starting at position 506 of SEQ ID NO: 586292
ugaaauguccaccgacagu

SEQ ID NO: 706911 - RNA, 19 nt, Artificial Sequence
  Description of Artificial Sequence: Synthetic oligonucleotide
  Antisense strand to SEQ ID NO: 706910
acugucgguggacauuuca

SEQ ID NO: 706912 - RNA, 19 nt, Artificial Sequence
  Description of Artificial Sequence: Synthetic oligonucleotide
  Sense strand starting at position 597 of SEQ ID NO: 586292
gcugguauuuccguacaug

SEQ ID NO: 706913 - RNA, 19 nt, Artificial Sequence
  Description of Artificial Sequence: Synthetic oligonucleotide
  Antisense strand to SEQ ID NO: 706912
cauguacggaaauaccagc

SEQ ID NO: 706914 - RNA, 19 nt, Artificial Sequence
  Description of Artificial Sequence: Synthetic oligonucleotide
  Sense strand starting at position 615 of SEQ ID NO: 586292
gcaagagccuuggcaucau

SEQ ID NO: 706915 - RNA, 19 nt, Artificial Sequence
  Description of Artificial Sequence: Synthetic oligonucleotide
  Antisense strand to SEQ ID NO: 706914
augaugccaaggcucuugc

SEQ ID NO: 706916 - RNA, 19 nt, Artificial Sequence
  Description of Artificial Sequence: Synthetic oligonucleotide
  Sense strand starting at position 656 of SEQ ID NO: 586292
ggacucagccugggacaau

SEQ ID NO: 706917 - RNA, 19 nt, Artificial Sequence
  Description of Artificial Sequence: Synthetic oligonucleotide
  Antisense strand to SEQ ID NO: 706916
auugucccaggcugagucc

SEQ ID NO: 706918 - RNA, 19 nt, Artificial Sequence
  Description of Artificial Sequence: Synthetic oligonucleotide
  Sense strand starting at position 799 of SEQ ID NO: 586292
ucaccucucccagaugagu

SEQ ID NO: 706919 - RNA, 19 nt, Artificial Sequence
  Description of Artificial Sequence: Synthetic oligonucleotide
  Antisense strand to SEQ ID NO: 706918
acucaucugggagagguga

SEQ ID NO: 706920 - RNA, 19 nt, Artificial Sequence
  Description of Artificial Sequence: Synthetic oligonucleotide
  Sense strand starting at position 808 of SEQ ID NO: 586292
ccagaugagucucuacuua

SEQ ID NO: 706921 - RNA, 19 nt, Artificial Sequence
  Description of Artificial Sequence: Synthetic oligonucleotide
  Antisense strand to SEQ ID NO: 706920
uaaguagagacucaucugg

SEQ ID NO: 706922 - RNA, 19 nt, Artificial Sequence
  Description of Artificial Sequence: Synthetic oligonucleotide
  Sense strand starting at position 868 of SEQ ID NO: 586292
uggaauuucugcgcgucua

SEQ ID NO: 706923 - RNA, 19 nt, Artificial Sequence
  Description of Artificial Sequence: Synthetic oligonucleotide
  Antisense strand to SEQ ID NO: 706922
uagacgcgcagaaauucca

SEQ ID NO: 706924 - RNA, 19 nt, Artificial Sequence
  Description of Artificial Sequence: Synthetic oligonucleotide
  Sense strand starting at position 869 of SEQ ID NO: 586292
ggaauuucugcgcgucuac

SEQ ID NO: 706925 - RNA, 19 nt, Artificial Sequence
  Description of Artificial Sequence: Synthetic oligonucleotide
  Antisense strand to SEQ ID NO: 706924
guagacgcgcagaaauucc

SEQ ID NO: 706926 - RNA, 19 nt, Artificial Sequence
  Description of Artificial Sequence: Synthetic oligonucleotide
  Sense strand starting at position 918 of SEQ ID NO: 586292
guccgagagcuacaaguua

SEQ ID NO: 706927 - RNA, 19 nt, Artificial Sequence
  Description of Artificial Sequence: Synthetic oligonucleotide
  Antisense strand to SEQ ID NO: 706926
uaacuuguagcucucggac

SEQ ID NO: 706928 - RNA, 19 nt, Artificial Sequence
  Description of Artificial Sequence: Synthetic oligonucleotide
  Sense strand starting at position 1044 of SEQ ID NO: 586292
gacccauugugaguuaggu

SEQ ID NO: 706929 - RNA, 19 nt, Artificial Sequence
  Description of Artificial Sequence: Synthetic oligonucleotide
  Antisense strand to SEQ ID NO: 706928
accuaacucacaauggguc

SEQ ID NO: 706930 - RNA, 19 nt, Artificial Sequence
  Description of Artificial Sequence: Synthetic oligonucleotide
  Sense strand starting at position 1153 of SEQ ID NO: 586292
gcucaaauaggaugggauu

SEQ ID NO: 706931 - RNA, 19 nt, Artificial Sequence
  Description of Artificial Sequence: Synthetic oligonucleotide
  Antisense strand to SEQ ID NO: 706930
aaucccauccuauuugagc

SEQ ID NO: 706932 - RNA, 19 nt, Artificial Sequence
  Description of Artificial Sequence: Synthetic oligonucleotide
  Sense strand starting at position 1657 of SEQ ID NO: 586292
aaaguuuccguuugagaau

SEQ ID NO: 706933 - RNA, 19 nt, Artificial Sequence
  Description of Artificial Sequence: Synthetic oligonucleotide
  Antisense strand to SEQ ID NO: 706932
auucucaaacggaaacuuu

SEQ ID NO: 706934 - RNA, 19 nt, Artificial Sequence
  Description of Artificial Sequence: Synthetic oligonucleotide
  Sense strand starting at position 2163 of SEQ ID NO: 586292
gugguuuagacuggaguua

SEQ ID NO: 706935 - RNA, 19 nt, Artificial Sequence
  Description of Artificial Sequence: Synthetic oligonucleotide
  Antisense strand to SEQ ID NO: 706934
uaacuccagucuaaaccac

SEQ ID NO: 706936 - RNA, 19 nt, Artificial Sequence
  Description of Artificial Sequence: Synthetic oligonucleotide
  Sense strand starting at position 2164 of SEQ ID NO: 586292
ugguuuagacuggaguuaa

SEQ ID NO: 706937 - RNA, 19 nt, Artificial Sequence
  Description of Artificial Sequence: Synthetic oligonucleotide
  Antisense strand to SEQ ID NO: 706936
uuaacuccagucuaaacca

SEQ ID NO: 706938 - RNA, 19 nt, Artificial Sequence
  Description of Artificial Sequence: Synthetic oligonucleotide
  Sense strand starting at position 2580 of SEQ ID NO: 586292
cugcaaugggcggacaauu

SEQ ID NO: 706939 - RNA, 19 nt, Artificial Sequence
  Description of Artificial Sequence: Synthetic oligonucleotide
  Antisense strand to SEQ ID NO: 706938
aauuguccgcccauugcag

SEQ ID NO: 706940 - RNA, 19 nt, Artificial Sequence
  Description of Artificial Sequence: Synthetic oligonucleotide
  Sense strand starting at position 2590 of SEQ ID NO: 586292
cggacaauuucuggagaga

SEQ ID NO: 706941 - RNA, 19 nt, Artificial Sequence
  Description of Artificial Sequence: Synthetic oligonucleotide
  Antisense strand to SEQ ID NO: 706940
ucucuccagaaauuguccg

SEQ ID NO: 706942 - RNA, 19 nt, Artificial Sequence
  Description of Artificial Sequence: Synthetic oligonucleotide
  Sense strand starting at position 2635 of SEQ ID NO: 586292
caggauuaguugcuguuga

SEQ ID NO: 706943 - RNA, 19 nt, Artificial Sequence
  Description of Artificial Sequence: Synthetic oligonucleotide
  Antisense strand to SEQ ID NO: 706942
ucaacagcaacuaauccug

SEQ ID NO: 706944 - RNA, 19 nt, Artificial Sequence
  Description of Artificial Sequence: Synthetic oligonucleotide
  Sense strand starting at position 2667 of SEQ ID NO: 586292
augaaaucuucugugcucu

SEQ ID NO: 706945 - RNA, 19 nt, Artificial Sequence
  Description of Artificial Sequence: Synthetic oligonucleotide
  Antisense strand to SEQ ID NO: 706944
agagcacagaagauuucau

SEQ ID NO: 706946 - RNA, 19 nt, Artificial Sequence
  Description of Artificial Sequence: Synthetic oligonucleotide
  Sense strand starting at position 2684 of SEQ ID NO: 586292
cucugauuuggcgguucuu

SEQ ID NO: 706947 - RNA, 19 nt, Artificial Sequence
  Description of Artificial Sequence: Synthetic oligonucleotide
  Antisense strand to SEQ ID NO: 706946
aagaaccgccaaaucagag

SEQ ID NO: 706948 - RNA, 19 nt, Artificial Sequence
  Description of Artificial Sequence: Synthetic oligonucleotide
  Sense strand starting at position 2695 of SEQ ID NO: 586292
cgguucuucugagcaaaua

SEQ ID NO: 706949 - RNA, 19 nt, Artificial Sequence
  Description of Artificial Sequence: Synthetic oligonucleotide
  Antisense strand to SEQ ID NO: 706948
uauuugcucagaagaaccg

SEQ ID NO: 706950 - RNA, 19 nt, Artificial Sequence
  Description of Artificial Sequence: Synthetic oligonucleotide
  Sense strand starting at position 2696 of SEQ ID NO: 586292
gguucuucugagcaaauau

SEQ ID NO: 706951 - RNA, 19 nt, Artificial Sequence
  Description of Artificial Sequence: Synthetic oligonucleotide
  Antisense strand to SEQ ID NO: 706950
auauuugcucagaagaacc

SEQ ID NO: 706952 - RNA, 19 nt, Artificial Sequence
  Description of Artificial Sequence: Synthetic oligonucleotide
  Sense strand starting at position 2834 of SEQ ID NO: 586292
gugugagugcuacaaaggu

SEQ ID NO: 706953 - RNA, 19 nt, Artificial Sequence
  Description of Artificial Sequence: Synthetic oligonucleotide
  Antisense strand to SEQ ID NO: 706952
accuuuguagcacucacac

SEQ ID NO: 706954 - RNA, 19 nt, Artificial Sequence
  Description of Artificial Sequence: Synthetic oligonucleotide
  Sense strand starting at position 2838 of SEQ ID NO: 586292
gagugcuacaaaggugaca

SEQ ID NO: 706955 - RNA, 19 nt, Artificial Sequence
  Description of Artificial Sequence: Synthetic oligonucleotide
  Antisense strand to SEQ ID NO: 706954
ugucaccuuuguagcacuc

SEQ ID NO: 706956 - RNA, 19 nt, Artificial Sequence
  Description of Artificial Sequence: Synthetic oligonucleotide
  Sense strand starting at position 2864 of SEQ ID NO: 586292
uugggaagaacgcaguauu

SEQ ID NO: 706957 - RNA, 19 nt, Artificial Sequence
  Description of Artificial Sequence: Synthetic oligonucleotide
  Antisense strand to SEQ ID NO: 706956
aauacugcguucuucccaa

SEQ ID NO: 706958 - RNA, 19 nt, Artificial Sequence
  Description of Artificial Sequence: Synthetic oligonucleotide
  Sense strand starting at position 2867 of SEQ ID NO: 586292
ggaagaacgcaguauugcu

SEQ ID NO: 706959 - RNA, 19 nt, Artificial Sequence
  Description of Artificial Sequence: Synthetic oligonucleotide
  Antisense strand to SEQ ID NO: 706958
agcaauacugcguucuucc

SEQ ID NO: 706960 - RNA, 19 nt, Artificial Sequence
  Description of Artificial Sequence: Synthetic oligonucleotide
  Sense strand starting at position 2888 of SEQ ID NO: 586292
uuguuugucggagauacuu

SEQ ID NO: 706961 - RNA, 19 nt, Artificial Sequence
  Description of Artificial Sequence: Synthetic oligonucleotide
  Antisense strand to SEQ ID NO: 706960
aaguaucuccgacaaacaa

SEQ ID NO: 706962 - RNA, 19 nt, Artificial Sequence
  Description of Artificial Sequence: Synthetic oligonucleotide
  Sense strand starting at position 2890 of SEQ ID NO: 586292
guuugucggagauacuuaa

SEQ ID NO: 706963 - RNA, 19 nt, Artificial Sequence
  Description of Artificial Sequence: Synthetic oligonucleotide
  Antisense strand to SEQ ID NO: 706962
uuaaguaucuccgacaaac

SEQ ID NO: 706964 - RNA, 19 nt, Artificial Sequence
  Description of Artificial Sequence: Synthetic oligonucleotide
  Sense strand starting at position 2962 of SEQ ID NO: 586292
auauauaauugugcugaac

SEQ ID NO: 706965 - RNA, 19 nt, Artificial Sequence
  Description of Artificial Sequence: Synthetic oligonucleotide
  Antisense strand to SEQ ID NO: 706964
guucagcacaauuauauau

SEQ ID NO: 706966 - RNA, 19 nt, Artificial Sequence
  Description of Artificial Sequence: Synthetic oligonucleotide
  Sense strand starting at position 2992 of SEQ ID NO: 586292
uguuuauuucuuuggagcu

SEQ ID NO: 706967 - RNA, 19 nt, Artificial Sequence
  Description of Artificial Sequence: Synthetic oligonucleotide
  Antisense strand to SEQ ID NO: 706966
agcuccaaagaaauaaaca

SEQ ID NO: 706968 - RNA, 19 nt, Artificial Sequence
  Description of Artificial Sequence: Synthetic oligonucleotide
  Sense strand starting at position 3150 of SEQ ID NO: 586292
auauguguauauccagaau

SEQ ID NO: 706969 - RNA, 19 nt, Artificial Sequence
  Description of Artificial Sequence: Synthetic oligonucleotide
  Antisense strand to SEQ ID NO: 706968
auucuggauauacacauau

SEQ ID NO: 706970 - RNA, 19 nt, Artificial Sequence
  Description of Artificial Sequence: Synthetic oligonucleotide
  Sense strand starting at position 3153 of SEQ ID NO: 586292
uguguauauccagaauaua

SEQ ID NO: 706971 - RNA, 19 nt, Artificial Sequence
  Description of Artificial Sequence: Synthetic oligonucleotide
  Antisense strand to SEQ ID NO: 706970
uauauucuggauauacaca

SEQ ID NO: 706972 - RNA, 19 nt, Artificial Sequence
  Description of Artificial Sequence: Synthetic oligonucleotide
  Sense strand starting at position 3704 of SEQ ID NO: 586292
gaugcaaacuuucuguguu

SEQ ID NO: 706973 - RNA, 19 nt, Artificial Sequence
  Description of Artificial Sequence: Synthetic oligonucleotide
  Antisense strand to SEQ ID NO: 706972
aacacagaaaguuugcauc

SEQ ID NO: 706974 - RNA, 19 nt, Artificial Sequence
  Description of Artificial Sequence: Synthetic oligonucleotide
  Sense strand starting at position 3757 of SEQ ID NO: 586292
augagaaauuucugccaau

SEQ ID NO: 706975 - RNA, 19 nt, Artificial Sequence
  Description of Artificial Sequence: Synthetic oligonucleotide
  Antisense strand to SEQ ID NO: 706974
auuggcagaaauuucucau

SEQ ID NO: 706976 - RNA, 19 nt, Artificial Sequence
  Description of Artificial Sequence: Synthetic oligonucleotide
  Sense strand starting at position 3816 of SEQ ID NO: 586292
aaaguacaaugauaggauu

SEQ ID NO: 706977 - RNA, 19 nt, Artificial Sequence
  Description of Artificial Sequence: Synthetic oligonucleotide
  Antisense strand to SEQ ID NO: 706976
aauccuaucauuguacuuu

SEQ ID NO: 706978 - RNA, 19 nt, Artificial Sequence
  Description of Artificial Sequence: Synthetic oligonucleotide
  Sense strand starting at position 3831 of SEQ ID NO: 586292
gauucuaaaguguagcuua

SEQ ID NO: 706979 - RNA, 19 nt, Artificial Sequence
  Description of Artificial Sequence: Synthetic oligonucleotide
  Antisense strand to SEQ ID NO: 706978
uaagcuacacuuuagaauc

SEQ ID NO: 706980 - RNA, 19 nt, Artificial Sequence
  Description of Artificial Sequence: Synthetic oligonucleotide
  Sense strand starting at position 3872 of SEQ ID NO: 586292
agcauauguguaugugaau

SEQ ID NO: 706981 - RNA, 19 nt, Artificial Sequence
  Description of Artificial Sequence: Synthetic oligonucleotide
  Antisense strand to SEQ ID NO: 706980
auucacauacacauaugcu

SEQ ID NO: 706982 - RNA, 19 nt, Artificial Sequence
  Description of Artificial Sequence: Synthetic oligonucleotide
  Sense strand starting at position 3873 of SEQ ID NO: 586292
gcauauguguaugugaaua

SEQ ID NO: 706983 - RNA, 19 nt, Artificial Sequence
  Description of Artificial Sequence: Synthetic oligonucleotide
  Antisense strand to SEQ ID NO: 706982
uauucacauacacauaugc

SEQ ID NO: 706984 - RNA, 19 nt, Artificial Sequence
  Description of Artificial Sequence: Synthetic oligonucleotide
  Sense strand starting at position 3878 of SEQ ID NO: 586292
uguguaugugaauauaaca

SEQ ID NO: 706985 - RNA, 19 nt, Artificial Sequence
  Description of Artificial Sequence: Synthetic oligonucleotide
  Antisense strand to SEQ ID NO: 706984
uguuauauucacauacaca

SEQ ID NO: 706986 - RNA, 19 nt, Artificial Sequence
  Description of Artificial Sequence: Synthetic oligonucleotide
  Sense strand starting at position 532 of SEQ ID NO: 586293
gguccucuccacuguggaa

SEQ ID NO: 706987 - RNA, 19 nt, Artificial Sequence
  Description of Artificial Sequence: Synthetic oligonucleotide
  Antisense strand to SEQ ID NO: 706986
uuccacaguggagaggacc

SEQ ID NO: 706988 - RNA, 19 nt, Artificial Sequence
  Description of Artificial Sequence: Synthetic oligonucleotide
  Sense strand starting at position 698 of SEQ ID NO: 586293
gagguuugauaauaaagcu

SEQ ID NO: 706989 - RNA, 19 nt, Artificial Sequence
  Description of Artificial Sequence: Synthetic oligonucleotide
  Antisense strand to SEQ ID NO: 706988
agcuuuauuaucaaaccuc

SEQ ID NO: 706990 - RNA, 19 nt, Artificial Sequence
  Description of Artificial Sequence: Synthetic oligonucleotide
  Sense strand starting at position 705 of SEQ ID NO: 586293
gauaauaaagcuggaguca

SEQ ID NO: 706991 - RNA, 19 nt, Artificial Sequence
  Description of Artificial Sequence: Synthetic oligonucleotide
  Antisense strand to SEQ ID NO: 706990
ugacuccagcuuuauuauc

SEQ ID NO: 706992 - RNA, 19 nt, Artificial Sequence
  Description of Artificial Sequence: Synthetic oligonucleotide
  Sense strand starting at position 714 of SEQ ID NO: 586293
gcuggagucagcugaguga

SEQ ID NO: 706993 - RNA, 19 nt, Artificial Sequence
  Description of Artificial Sequence: Synthetic oligonucleotide
  Antisense strand to SEQ ID NO: 706992
ucacucagcugacuccagc

SEQ ID NO: 706994 - RNA, 19 nt, Artificial Sequence
  Description of Artificial Sequence: Synthetic oligonucleotide
  Sense strand starting at position 782 of SEQ ID NO: 586293
acuccuuugcagggaaauc

SEQ ID NO: 706995 - RNA, 19 nt, Artificial Sequence
  Description of Artificial Sequence: Synthetic oligonucleotide
  Antisense strand to SEQ ID NO: 706994
gauuucccugcaaaggagu

SEQ ID NO: 706996 - RNA, 19 nt, Artificial Sequence
  Description of Artificial Sequence: Synthetic oligonucleotide
  Sense strand starting at position 848 of SEQ ID NO: 586293
ugcaccuucguguagcaau

SEQ ID NO: 706997 - RNA, 19 nt, Artificial Sequence
  Description of Artificial Sequence: Synthetic oligonucleotide
  Antisense strand to SEQ ID NO: 706996
auugcuacacgaaggugca

SEQ ID NO: 706998 - RNA, 19 nt, Artificial Sequence
  Description of Artificial Sequence: Synthetic oligonucleotide
  Sense strand starting at position 1138 of SEQ ID NO: 586293
auuuaauaaugcuggaaac

SEQ ID NO: 706999 - RNA, 19 nt, Artificial Sequence
  Description of Artificial Sequence: Synthetic oligonucleotide
  Antisense strand to SEQ ID NO: 706998
guuuccagcauuauuaaau

SEQ ID NO: 707000 - RNA, 19 nt, Artificial Sequence
  Description of Artificial Sequence: Synthetic oligonucleotide
  Sense strand starting at position 1139 of SEQ ID NO: 586293
uuuaauaaugcuggaaaca

SEQ ID NO: 707001 - RNA, 19 nt, Artificial Sequence
  Description of Artificial Sequence: Synthetic oligonucleotide
  Antisense strand to SEQ ID NO: 707000
uguuuccagcauuauuaaa

SEQ ID NO: 707002 - RNA, 19 nt, Artificial Sequence
  Description of Artificial Sequence: Synthetic oligonucleotide
  Sense strand starting at position 1258 of SEQ ID NO: 586293
cccacuguucccggacuaa

SEQ ID NO: 707003 - RNA, 19 nt, Artificial Sequence
  Description of Artificial Sequence: Synthetic oligonucleotide
  Antisense strand to SEQ ID NO: 707002
uuaguccgggaacaguggg

SEQ ID NO: 707004 - RNA, 19 nt, Artificial Sequence
  Description of Artificial Sequence: Synthetic oligonucleotide
  Sense strand starting at position 1309 of SEQ ID NO: 586293
ugcggcuucuggagugaga

SEQ ID NO: 707005 - RNA, 19 nt, Artificial Sequence
  Description of Artificial Sequence: Synthetic oligonucleotide
  Antisense strand to SEQ ID NO: 707004
ucucacuccagaagccgca

SEQ ID NO: 707006 - RNA, 19 nt, Artificial Sequence
  Description of Artificial Sequence: Synthetic oligonucleotide
  Sense strand starting at position 1316 of SEQ ID NO: 586293
ucuggagugagaggucauu

SEQ ID NO: 707007 - RNA, 19 nt, Artificial Sequence
  Description of Artificial Sequence: Synthetic oligonucleotide
  Antisense strand to SEQ ID NO: 707006
aaugaccucucacuccaga

SEQ ID NO: 707008 - RNA, 19 nt, Artificial Sequence
  Description of Artificial Sequence: Synthetic oligonucleotide
  Sense strand starting at position 1558 of SEQ ID NO: 586293
gccucugcugucgcugaau

SEQ ID NO: 707009 - RNA, 19 nt, Artificial Sequence
  Description of Artificial Sequence: Synthetic oligonucleotide
  Antisense strand to SEQ ID NO: 707008
auucagcgacagcagaggc

SEQ ID NO: 707010 - RNA, 19 nt, Artificial Sequence
  Description of Artificial Sequence: Synthetic oligonucleotide
  Sense strand starting at position 1560 of SEQ ID NO: 586293
cucugcugucgcugaauca

SEQ ID NO: 707011 - RNA, 19 nt, Artificial Sequence
  Description of Artificial Sequence: Synthetic oligonucleotide
  Antisense strand to SEQ ID NO: 707010
ugauucagcgacagcagag

SEQ ID NO: 707012 - RNA, 19 nt, Artificial Sequence
  Description of Artificial Sequence: Synthetic oligonucleotide
  Sense strand starting at position 2015 of SEQ ID NO: 586293
cgucuucucgcgagacguc

SEQ ID NO: 707013 - RNA, 19 nt, Artificial Sequence
  Description of Artificial Sequence: Synthetic oligonucleotide
  Antisense strand to SEQ ID NO: 707012
gacgucucgcgagaagacg

SEQ ID NO: 707014 - RNA, 19 nt, Artificial Sequence
  Description of Artificial Sequence: Synthetic oligonucleotide
  Sense strand starting at position 2308 of SEQ ID NO: 586293
acacgaucccguuaaccaa

SEQ ID NO: 707015 - RNA, 19 nt, Artificial Sequence
  Description of Artificial Sequence: Synthetic oligonucleotide
  Antisense strand to SEQ ID NO: 707014
uugguuaacgggaucgugu

SEQ ID NO: 707016 - RNA, 19 nt, Artificial Sequence
  Description of Artificial Sequence: Synthetic oligonucleotide
  Sense strand starting at position 2337 of SEQ ID NO: 586293
gugccuguugucuauccga

SEQ ID NO: 707017 - RNA, 19 nt, Artificial Sequence
  Description of Artificial Sequence: Synthetic oligonucleotide
  Antisense strand to SEQ ID NO: 707016
ucggauagacaacaggcac

SEQ ID NO: 707018 - RNA, 19 nt, Artificial Sequence
  Description of Artificial Sequence: Synthetic oligonucleotide
  Sense strand starting at position 2458 of SEQ ID NO: 586293
gguugucgccaauccguaa

SEQ ID NO: 707019 - RNA, 19 nt, Artificial Sequence
  Description of Artificial Sequence: Synthetic oligonucleotide
  Antisense strand to SEQ ID NO: 707018
uuacggauuggcgacaacc

SEQ ID NO: 707020 - RNA, 19 nt, Artificial Sequence
  Description of Artificial Sequence: Synthetic oligonucleotide
  Sense strand starting at position 2524 of SEQ ID NO: 586293
acgagaugacacggguaaa

SEQ ID NO: 707021 - RNA, 19 nt, Artificial Sequence
  Description of Artificial Sequence: Synthetic oligonucleotide
  Antisense strand to SEQ ID NO: 707020
uuuacccgugucaucucgu

SEQ ID NO: 707022 - RNA, 19 nt, Artificial Sequence
  Description of Artificial Sequence: Synthetic oligonucleotide
  Sense strand starting at position 2536 of SEQ ID NO: 586293
ggguaaagagcuuagcaag

SEQ ID NO: 707023 - RNA, 19 nt, Artificial Sequence
  Description of Artificial Sequence: Synthetic oligonucleotide
  Antisense strand to SEQ ID NO: 707022
cuugcuaagcucuuuaccc

SEQ ID NO: 707024 - RNA, 19 nt, Artificial Sequence
  Description of Artificial Sequence: Synthetic oligonucleotide
  Sense strand starting at position 2569 of SEQ ID NO: 586293
gugagcaugcaguaauugu

SEQ ID NO: 707025 - RNA, 19 nt, Artificial Sequence
  Description of Artificial Sequence: Synthetic oligonucleotide
  Antisense strand to SEQ ID NO: 707024
acaauuacugcaugcucac

SEQ ID NO: 707026 - RNA, 19 nt, Artificial Sequence
  Description of Artificial Sequence: Synthetic oligonucleotide
  Sense strand starting at position 2578 of SEQ ID NO: 586293
caguaauuguucuuggcau

SEQ ID NO: 707027 - RNA, 19 nt, Artificial Sequence
  Description of Artificial Sequence: Synthetic oligonucleotide
  Antisense strand to SEQ ID NO: 707026
augccaagaacaauuacug

SEQ ID NO: 707028 - RNA, 19 nt, Artificial Sequence
  Description of Artificial Sequence: Synthetic oligonucleotide
  Sense strand starting at position 2580 of SEQ ID NO: 586293
guaauuguucuuggcauca

SEQ ID NO: 707029 - RNA, 19 nt, Artificial Sequence
  Description of Artificial Sequence: Synthetic oligonucleotide
  Antisense strand to SEQ ID NO: 707028
ugaugccaagaacaauuac

SEQ ID NO: 707030 - RNA, 19 nt, Artificial Sequence
  Description of Artificial Sequence: Synthetic oligonucleotide
  Sense strand starting at position 3634 of SEQ ID NO: 586293
uauguuuauacguaugugu

SEQ ID NO: 707031 - RNA, 19 nt, Artificial Sequence
  Description of Artificial Sequence: Synthetic oligonucleotide
  Antisense strand to SEQ ID NO: 707030
acacauacguauaaacaua

SEQ ID NO: 707032 - RNA, 19 nt, Artificial Sequence
  Description of Artificial Sequence: Synthetic oligonucleotide
  Sense strand starting at position 3636 of SEQ ID NO: 586293
uguuuauacguauguguaa

SEQ ID NO: 707033 - RNA, 19 nt, Artificial Sequence
  Description of Artificial Sequence: Synthetic oligonucleotide
  Antisense strand to SEQ ID NO: 707032
uuacacauacguauaaaca

SEQ ID NO: 707034 - RNA, 19 nt, Artificial Sequence
  Description of Artificial Sequence: Synthetic oligonucleotide
  Sense strand starting at position 3637 of SEQ ID NO: 586293
guuuauacguauguguaau

SEQ ID NO: 707035 - RNA, 19 nt, Artificial Sequence
  Description of Artificial Sequence: Synthetic oligonucleotide
  Antisense strand to SEQ ID NO: 707034
auuacacauacguauaaac

SEQ ID NO: 707036 - RNA, 19 nt, Artificial Sequence
  Description of Artificial Sequence: Synthetic oligonucleotide
  Sense strand starting at position 3638 of SEQ ID NO: 586293
uuuauacguauguguaaug

SEQ ID NO: 707037 - RNA, 19 nt, Artificial Sequence
  Description of Artificial Sequence: Synthetic oligonucleotide
  Antisense strand to SEQ ID NO: 707036
cauuacacauacguauaaa

SEQ ID NO: 707038 - RNA, 19 nt, Artificial Sequence
  Description of Artificial Sequence: Synthetic oligonucleotide
  Sense strand starting at position 3645 of SEQ ID NO: 586293
guauguguaaugcauacau

SEQ ID NO: 707039 - RNA, 19 nt, Artificial Sequence
  Description of Artificial Sequence: Synthetic oligonucleotide
  Antisense strand to SEQ ID NO: 707038
auguaugcauuacacauac

SEQ ID NO: 707040 - RNA, 19 nt, Artificial Sequence
  Description of Artificial Sequence: Synthetic oligonucleotide
  Sense strand starting at position 3647 of SEQ ID NO: 586293
auguguaaugcauacaugu

SEQ ID NO: 707041 - RNA, 19 nt, Artificial Sequence
  Description of Artificial Sequence: Synthetic oligonucleotide
  Antisense strand to SEQ ID NO: 707040
acauguaugcauuacacau

SEQ ID NO: 707042 - RNA, 19 nt, Artificial Sequence
  Description of Artificial Sequence: Synthetic oligonucleotide
  Sense strand starting at position 3649 of SEQ ID NO: 586293
guguaaugcauacauguua

SEQ ID NO: 707043 - RNA, 19 nt, Artificial Sequence
  Description of Artificial Sequence: Synthetic oligonucleotide
  Antisense strand to SEQ ID NO: 707042
uaacauguaugcauuacac

SEQ ID NO: 707044 - RNA, 19 nt, Artificial Sequence
  Description of Artificial Sequence: Synthetic oligonucleotide
  Sense strand starting at position 3660 of SEQ ID NO: 586293
acauguuaccuauguguau

SEQ ID NO: 707045 - RNA, 19 nt, Artificial Sequence
  Description of Artificial Sequence: Synthetic oligonucleotide
  Antisense strand to SEQ ID NO: 707044
auacacauagguaacaugu

SEQ ID NO: 707046 - RNA, 19 nt, Artificial Sequence
  Description of Artificial Sequence: Synthetic oligonucleotide
  Sense strand starting at position 3664 of SEQ ID NO: 586293
guuaccuauguguauguau

SEQ ID NO: 707047 - RNA, 19 nt, Artificial Sequence
  Description of Artificial Sequence: Synthetic oligonucleotide
  Antisense strand to SEQ ID NO: 707046
auacauacacauagguaac

SEQ ID NO: 707048 - RNA, 19 nt, Artificial Sequence
  Description of Artificial Sequence: Synthetic oligonucleotide
  Sense strand starting at position 3723 of SEQ ID NO: 586293
cuguauuaugcauguauaa

SEQ ID NO: 707049 - RNA, 19 nt, Artificial Sequence
  Description of Artificial Sequence: Synthetic oligonucleotide
  Antisense strand to SEQ ID NO: 707048
uuauacaugcauaauacag

SEQ ID NO: 707050 - RNA, 19 nt, Artificial Sequence
  Description of Artificial Sequence: Synthetic oligonucleotide
  Sense strand starting at position 3736 of SEQ ID NO: 586293
guauaauaugucuauguug

SEQ ID NO: 707051 - RNA, 19 nt, Artificial Sequence
  Description of Artificial Sequence: Synthetic oligonucleotide
  Antisense strand to SEQ ID NO: 707050
caacauagacauauuauac

SEQ ID NO: 707052 - RNA, 19 nt, Artificial Sequence
  Description of Artificial Sequence: Synthetic oligonucleotide
  Sense strand starting at position 3745 of SEQ ID NO: 586293
gucuauguuguauacauac

SEQ ID NO: 707053 - RNA, 19 nt, Artificial Sequence
  Description of Artificial Sequence: Synthetic oligonucleotide
  Antisense strand to SEQ ID NO: 707052
guauguauacaacauagac

SEQ ID NO: 707054 - RNA, 19 nt, Artificial Sequence
  Description of Artificial Sequence: Synthetic oligonucleotide
  Sense strand starting at position 3769 of SEQ ID NO: 586293
ugcaauugcacguauguaa

SEQ ID NO: 707055 - RNA, 19 nt, Artificial Sequence
  Description of Artificial Sequence: Synthetic oligonucleotide
  Antisense strand to SEQ ID NO: 707054
uuacauacgugcaauugca

SEQ ID NO: 707056 - RNA, 19 nt, Artificial Sequence
  Description of Artificial Sequence: Synthetic oligonucleotide
  Sense strand starting at position 3772 of SEQ ID NO: 586293
aauugcacguauguaaaua

SEQ ID NO: 707057 - RNA, 19 nt, Artificial Sequence
  Description of Artificial Sequence: Synthetic oligonucleotide
  Antisense strand to SEQ ID NO: 707056
uauuuacauacgugcaauu

SEQ ID NO: 707058 - RNA, 19 nt, Artificial Sequence
  Description of Artificial Sequence: Synthetic oligonucleotide
  Sense strand starting at position 3792 of SEQ ID NO: 586293
ggugacagccucuggcaau

SEQ ID NO: 707059 - RNA, 19 nt, Artificial Sequence
  Description of Artificial Sequence: Synthetic oligonucleotide
  Antisense strand to SEQ ID NO: 707058
auugccagaggcugucacc

SEQ ID NO: 707060 - RNA, 19 nt, Artificial Sequence
  Description of Artificial Sequence: Synthetic oligonucleotide
  Sense strand starting at position 3822 of SEQ ID NO: 586293
augccugucucagcuuaga

SEQ ID NO: 707061 - RNA, 19 nt, Artificial Sequence
  Description of Artificial Sequence: Synthetic oligonucleotide
  Antisense strand to SEQ ID NO: 707060
ucuaagcugagacaggcau

SEQ ID NO: 707062 - RNA, 19 nt, Artificial Sequence
  Description of Artificial Sequence: Synthetic oligonucleotide
  Sense strand starting at position 3825 of SEQ ID NO: 586293
ccugucucagcuuagaaau

SEQ ID NO: 707063 - RNA, 19 nt, Artificial Sequence
  Description of Artificial Sequence: Synthetic oligonucleotide
  Antisense strand to SEQ ID NO: 707062
auuucuaagcugagacagg

SEQ ID NO: 707064 - RNA, 19 nt, Artificial Sequence
  Description of Artificial Sequence: Synthetic oligonucleotide
  Sense strand starting at position 3827 of SEQ ID NO: 586293
ugucucagcuuagaaauuu

SEQ ID NO: 707065 - RNA, 19 nt, Artificial Sequence
  Description of Artificial Sequence: Synthetic oligonucleotide
  Antisense strand to SEQ ID NO: 707064
aaauuucuaagcugagaca

SEQ ID NO: 707066 - RNA, 19 nt, Artificial Sequence
  Description of Artificial Sequence: Synthetic oligonucleotide
  Sense strand starting at position 38 of SEQ ID NO: 586294
uuguguaagucuuccauaa

SEQ ID NO: 707067 - RNA, 19 nt, Artificial Sequence
  Description of Artificial Sequence: Synthetic oligonucleotide
  Antisense strand to SEQ ID NO: 707066
uuauggaagacuuacacaa

SEQ ID NO: 707068 - RNA, 19 nt, Artificial Sequence
  Description of Artificial Sequence: Synthetic oligonucleotide
  Sense strand starting at position 160 of SEQ ID NO: 586294
cgagaacugucaucaggaa

SEQ ID NO: 707069 - RNA, 19 nt, Artificial Sequence
  Description of Artificial Sequence: Synthetic oligonucleotide
  Antisense strand to SEQ ID NO: 707068
uuccugaugacaguucucg

SEQ ID NO: 707070 - RNA, 19 nt, Artificial Sequence
  Description of Artificial Sequence: Synthetic oligonucleotide
  Sense strand starting at position 182 of SEQ ID NO: 586294
ccauaauggcacuguuacu

SEQ ID NO: 707071 - RNA, 19 nt, Artificial Sequence
  Description of Artificial Sequence: Synthetic oligonucleotide
  Antisense strand to SEQ ID NO: 707070
aguaacagugccauuaugg

SEQ ID NO: 707072 - RNA, 19 nt, Artificial Sequence
  Description of Artificial Sequence: Synthetic oligonucleotide
  Sense strand starting at position 315 of SEQ ID NO: 586294
cgcugucuccaagaaaccu

SEQ ID NO: 707073 - RNA, 19 nt, Artificial Sequence
  Description of Artificial Sequence: Synthetic oligonucleotide
  Antisense strand to SEQ ID NO: 707072
agguuucuuggagacagcg

SEQ ID NO: 707074 - RNA, 19 nt, Artificial Sequence
  Description of Artificial Sequence: Synthetic oligonucleotide
  Sense strand starting at position 517 of SEQ ID NO: 586294
acugaaggcucccuguuaa

SEQ ID NO: 707075 - RNA, 19 nt, Artificial Sequence
  Description of Artificial Sequence: Synthetic oligonucleotide
  Antisense strand to SEQ ID NO: 707074
uuaacagggagccuucagu

SEQ ID NO: 707076 - RNA, 19 nt, Artificial Sequence
  Description of Artificial Sequence: Synthetic oligonucleotide
  Sense strand starting at position 1163 of SEQ ID NO: 586294
auagguucuuacuugauca

SEQ ID NO: 707077 - RNA, 19 nt, Artificial Sequence
  Description of Artificial Sequence: Synthetic oligonucleotide
  Antisense strand to SEQ ID NO: 707076
ugaucaaguaagaaccuau

SEQ ID NO: 707078 - RNA, 19 nt, Artificial Sequence
  Description of Artificial Sequence: Synthetic oligonucleotide
  Sense strand starting at position 1167 of SEQ ID NO: 586294
guucuuacuugaucaucuu

SEQ ID NO: 707079 - RNA, 19 nt, Artificial Sequence
  Description of Artificial Sequence: Synthetic oligonucleotide
  Antisense strand to SEQ ID NO: 707078
aagaugaucaaguaagaac

SEQ ID NO: 707080 - RNA, 19 nt, Artificial Sequence
  Description of Artificial Sequence: Synthetic oligonucleotide
  Sense strand starting at position 1223 of SEQ ID NO: 586294
guugguagaucuuugauca

SEQ ID NO: 707081 - RNA, 19 nt, Artificial Sequence
  Description of Artificial Sequence: Synthetic oligonucleotide
  Antisense strand to SEQ ID NO: 707080
ugaucaaagaucuaccaac

SEQ ID NO: 707082 - RNA, 19 nt, Artificial Sequence
  Description of Artificial Sequence: Synthetic oligonucleotide
  Sense strand starting at position 1224 of SEQ ID NO: 586294
uugguagaucuuugaucac

SEQ ID NO: 707083 - RNA, 19 nt, Artificial Sequence
  Description of Artificial Sequence: Synthetic oligonucleotide
  Antisense strand to SEQ ID NO: 707082
gugaucaaagaucuaccaa

SEQ ID NO: 707084 - RNA, 19 nt, Artificial Sequence
  Description of Artificial Sequence: Synthetic oligonucleotide
  Sense strand starting at position 1227 of SEQ ID NO: 586294
guagaucuuugaucacuga

SEQ ID NO: 707085 - RNA, 19 nt, Artificial Sequence
  Description of Artificial Sequence: Synthetic oligonucleotide
  Antisense strand to SEQ ID NO: 707084
ucagugaucaaagaucuac

SEQ ID NO: 707086 - RNA, 19 nt, Artificial Sequence
  Description of Artificial Sequence: Synthetic oligonucleotide
  Sense strand starting at position 1231 of SEQ ID NO: 586294
aucuuugaucacugauaag

SEQ ID NO: 707087 - RNA, 19 nt, Artificial Sequence
  Description of Artificial Sequence: Synthetic oligonucleotide
  Antisense strand to SEQ ID NO: 707086
cuuaucagugaucaaagau

SEQ ID NO: 707088 - RNA, 19 nt, Artificial Sequence
  Description of Artificial Sequence: Synthetic oligonucleotide
  Sense strand starting at position 1290 of SEQ ID NO: 586294
cugccuucugcagaaagau

SEQ ID NO: 707089 - RNA, 19 nt, Artificial Sequence
  Description of Artificial Sequence: Synthetic oligonucleotide
  Antisense strand to SEQ ID NO: 707088
aucuuucugcagaaggcag

SEQ ID NO: 707090 - RNA, 19 nt, Artificial Sequence
  Description of Artificial Sequence: Synthetic oligonucleotide
  Sense strand starting at position 1341 of SEQ ID NO: 586294
gaggcagaaaucuggcagu

SEQ ID NO: 707091 - RNA, 19 nt, Artificial Sequence
  Description of Artificial Sequence: Synthetic oligonucleotide
  Antisense strand to SEQ ID NO: 707090
acugccagauuucugccuc

SEQ ID NO: 707092 - RNA, 19 nt, Artificial Sequence
  Description of Artificial Sequence: Synthetic oligonucleotide
  Sense strand starting at position 1440 of SEQ ID NO: 586294
uuauguaagcacgagcuau

SEQ ID NO: 707093 - RNA, 19 nt, Artificial Sequence
  Description of Artificial Sequence: Synthetic oligonucleotide
  Antisense strand to SEQ ID NO: 707092
auagcucgugcuuacauaa

SEQ ID NO: 707094 - RNA, 19 nt, Artificial Sequence
  Description of Artificial Sequence: Synthetic oligonucleotide
  Sense strand starting at position 1506 of SEQ ID NO: 586294
guugguaaagguuguauga

SEQ ID NO: 707095 - RNA, 19 nt, Artificial Sequence
  Description of Artificial Sequence: Synthetic oligonucleotide
  Antisense strand to SEQ ID NO: 707094
ucauacaaccuuuaccaac

SEQ ID NO: 707096 - RNA, 19 nt, Artificial Sequence
  Description of Artificial Sequence: Synthetic oligonucleotide
  Sense strand starting at position 1520 of SEQ ID NO: 586294
uaugaaagugcaugcauau

SEQ ID NO: 707097 - RNA, 19 nt, Artificial Sequence
  Description of Artificial Sequence: Synthetic oligonucleotide
  Antisense strand to SEQ ID NO: 707096
auaugcaugcacuuucaua

SEQ ID NO: 707098 - RNA, 19 nt, Artificial Sequence
  Description of Artificial Sequence: Synthetic oligonucleotide
  Sense strand starting at position 1531 of SEQ ID NO: 586294
augcauaucucucuaagug

SEQ ID NO: 707099 - RNA, 19 nt, Artificial Sequence
  Description of Artificial Sequence: Synthetic oligonucleotide
  Antisense strand to SEQ ID NO: 707098
cacuuagagagauaugcau

SEQ ID NO: 707100 - RNA, 19 nt, Artificial Sequence
  Description of Artificial Sequence: Synthetic oligonucleotide
  Sense strand starting at position 2165 of SEQ ID NO: 586294
gggaauucccucugcugag

SEQ ID NO: 707101 - RNA, 19 nt, Artificial Sequence
  Description of Artificial Sequence: Synthetic oligonucleotide
  Antisense strand to SEQ ID NO: 707100
cucagcagagggaauuccc

SEQ ID NO: 707102 - RNA, 19 nt, Artificial Sequence
  Description of Artificial Sequence: Synthetic oligonucleotide
  Sense strand starting at position 2201 of SEQ ID NO: 586294
cuucuuagucaccaguagu

SEQ ID NO: 707103 - RNA, 19 nt, Artificial Sequence
  Description of Artificial Sequence: Synthetic oligonucleotide
  Antisense strand to SEQ ID NO: 707102
acuacuggugacuaagaag

SEQ ID NO: 707104 - RNA, 19 nt, Artificial Sequence
  Description of Artificial Sequence: Synthetic oligonucleotide
  Sense strand starting at position 2235 of SEQ ID NO: 586294
ugucacuggucccucuaua

SEQ ID NO: 707105 - RNA, 19 nt, Artificial Sequence
  Description of Artificial Sequence: Synthetic oligonucleotide
  Antisense strand to SEQ ID NO: 707104
uauagagggaccagugaca

SEQ ID NO: 707106 - RNA, 19 nt, Artificial Sequence
  Description of Artificial Sequence: Synthetic oligonucleotide
  Sense strand starting at position 2251 of SEQ ID NO: 586294
auaaauaucgccuggacca

SEQ ID NO: 707107 - RNA, 19 nt, Artificial Sequence
  Description of Artificial Sequence: Synthetic oligonucleotide
  Antisense strand to SEQ ID NO: 707106
ugguccaggcgauauuuau

SEQ ID NO: 707108 - RNA, 19 nt, Artificial Sequence
  Description of Artificial Sequence: Synthetic oligonucleotide
  Sense strand starting at position 2293 of SEQ ID NO: 586294
ucucaaaccuauguguaga

SEQ ID NO: 707109 - RNA, 19 nt, Artificial Sequence
  Description of Artificial Sequence: Synthetic oligonucleotide
  Antisense strand to SEQ ID NO: 707108
ucuacacauagguuugaga

SEQ ID NO: 707110 - RNA, 19 nt, Artificial Sequence
  Description of Artificial Sequence: Synthetic oligonucleotide
  Sense strand starting at position 2376 of SEQ ID NO: 586294
gugggugcuggauaaagau

SEQ ID NO: 707111 - RNA, 19 nt, Artificial Sequence
  Description of Artificial Sequence: Synthetic oligonucleotide
  Antisense strand to SEQ ID NO: 707110
aucuuuauccagcacccac

SEQ ID NO: 707112 - RNA, 19 nt, Artificial Sequence
  Description of Artificial Sequence: Synthetic oligonucleotide
  Sense strand starting at position 2392 of SEQ ID NO: 586294
gaugaagcgacucgaaguu

SEQ ID NO: 707113 - RNA, 19 nt, Artificial Sequence
  Description of Artificial Sequence: Synthetic oligonucleotide
  Antisense strand to SEQ ID NO: 707112
aacuucgagucgcuucauc

SEQ ID NO: 707114 - RNA, 19 nt, Artificial Sequence
  Description of Artificial Sequence: Synthetic oligonucleotide
  Sense strand starting at position 2428 of SEQ ID NO: 586294
uuaacucaccugggaaagu

SEQ ID NO: 707115 - RNA, 19 nt, Artificial Sequence
  Description of Artificial Sequence: Synthetic oligonucleotide
  Antisense strand to SEQ ID NO: 707114
acuuucccaggugaguuaa

SEQ ID NO: 707116 - RNA, 19 nt, Artificial Sequence
  Description of Artificial Sequence: Synthetic oligonucleotide
  Sense strand starting at position 3022 of SEQ ID NO: 586294
ugacaugucuucccuauga

SEQ ID NO: 707117 - RNA, 19 nt, Artificial Sequence
  Description of Artificial Sequence: Synthetic oligonucleotide
  Antisense strand to SEQ ID NO: 707116
ucauagggaagacauguca

SEQ ID NO: 707118 - RNA, 19 nt, Artificial Sequence
  Description of Artificial Sequence: Synthetic oligonucleotide
  Sense strand starting at position 3081 of SEQ ID NO: 586294
uaaaguuuaggaugcauua

SEQ ID NO: 707119 - RNA, 19 nt, Artificial Sequence
  Description of Artificial Sequence: Synthetic oligonucleotide
  Antisense strand to SEQ ID NO: 707118
uaaugcauccuaaacuuua

SEQ ID NO: 707120 - RNA, 19 nt, Artificial Sequence
  Description of Artificial Sequence: Synthetic oligonucleotide
  Sense strand starting at position 3107 of SEQ ID NO: 586294
gggucugucccaggacagu

SEQ ID NO: 707121 - RNA, 19 nt, Artificial Sequence
  Description of Artificial Sequence: Synthetic oligonucleotide
  Antisense strand to SEQ ID NO: 707120
acuguccugggacagaccc

SEQ ID NO: 707122 - RNA, 19 nt, Artificial Sequence
  Description of Artificial Sequence: Synthetic oligonucleotide
  Sense strand starting at position 3162 of SEQ ID NO: 586294
ucuggucuacaaugugauu

SEQ ID NO: 707123 - RNA, 19 nt, Artificial Sequence
  Description of Artificial Sequence: Synthetic oligonucleotide
  Antisense strand to SEQ ID NO: 707122
aaucacauuguagaccaga

SEQ ID NO: 707124 - RNA, 19 nt, Artificial Sequence
  Description of Artificial Sequence: Synthetic oligonucleotide
  Sense strand starting at position 3249 of SEQ ID NO: 586294
gggccucaacaucauuaau

SEQ ID NO: 707125 - RNA, 19 nt, Artificial Sequence
  Description of Artificial Sequence: Synthetic oligonucleotide
  Antisense strand to SEQ ID NO: 707124
auuaaugauguugaggccc

SEQ ID NO: 707126 - RNA, 19 nt, Artificial Sequence
  Description of Artificial Sequence: Synthetic oligonucleotide
  Sense strand starting at position 3291 of SEQ ID NO: 586294
gcaauaucgccucauaccu

SEQ ID NO: 707127 - RNA, 19 nt, Artificial Sequence
  Description of Artificial Sequence: Synthetic oligonucleotide
  Antisense strand to SEQ ID NO: 707126
agguaugaggcgauauugc

SEQ ID NO: 707128 - RNA, 19 nt, Artificial Sequence
  Description of Artificial Sequence: Synthetic oligonucleotide
  Sense strand starting at position 3345 of SEQ ID NO: 586294
ccauuauuauggcuaugga

SEQ ID NO: 707129 - RNA, 19 nt, Artificial Sequence
  Description of Artificial Sequence: Synthetic oligonucleotide
  Antisense strand to SEQ ID NO: 707128
uccauagccauaauaaugg

SEQ ID NO: 707130 - RNA, 19 nt, Artificial Sequence
  Description of Artificial Sequence: Synthetic oligonucleotide
  Sense strand starting at position 3346 of SEQ ID NO: 586294
cauuauuauggcuauggau

SEQ ID NO: 707131 - RNA, 19 nt, Artificial Sequence
  Description of Artificial Sequence: Synthetic oligonucleotide
  Antisense strand to SEQ ID NO: 707130
auccauagccauaauaaug

SEQ ID NO: 707132 - RNA, 19 nt, Artificial Sequence
  Description of Artificial Sequence: Synthetic oligonucleotide
  Sense strand starting at position 3348 of SEQ ID NO: 586294
uuauuauggcuauggauau

SEQ ID NO: 707133 - RNA, 19 nt, Artificial Sequence
  Description of Artificial Sequence: Synthetic oligonucleotide
  Antisense strand to SEQ ID NO: 707132
auauccauagccauaauaa

SEQ ID NO: 707134 - RNA, 19 nt, Artificial Sequence
  Description of Artificial Sequence: Synthetic oligonucleotide
  Sense strand starting at position 3379 of SEQ ID NO: 586294
uuauaaucccagcaaugug

SEQ ID NO: 707135 - RNA, 19 nt, Artificial Sequence
  Description of Artificial Sequence: Synthetic oligonucleotide
  Antisense strand to SEQ ID NO: 707134
cacauugcugggauuauaa

SEQ ID NO: 707136 - RNA, 19 nt, Artificial Sequence
  Description of Artificial Sequence: Synthetic oligonucleotide
  Sense strand starting at position 3388 of SEQ ID NO: 586294
cagcaaugugggugaccaa

SEQ ID NO: 707137 - RNA, 19 nt, Artificial Sequence
  Description of Artificial Sequence: Synthetic oligonucleotide
  Antisense strand to SEQ ID NO: 707136
uuggucacccacauugcug

SEQ ID NO: 707138 - RNA, 19 nt, Artificial Sequence
  Description of Artificial Sequence: Synthetic oligonucleotide
  Sense strand starting at position 3612 of SEQ ID NO: 586294
uggucuacagagugagauu

SEQ ID NO: 707139 - RNA, 19 nt, Artificial Sequence
  Description of Artificial Sequence: Synthetic oligonucleotide
  Antisense strand to SEQ ID NO: 707138
aaucucacucuguagacca

SEQ ID NO: 707140 - RNA, 19 nt, Artificial Sequence
  Description of Artificial Sequence: Synthetic oligonucleotide
  Sense strand starting at position 3657 of SEQ ID NO: 586294
agaugagauaaauguuagu

SEQ ID NO: 707141 - RNA, 19 nt, Artificial Sequence
  Description of Artificial Sequence: Synthetic oligonucleotide
  Antisense strand to SEQ ID NO: 707140
acuaacauuuaucucaucu

SEQ ID NO: 707142 - RNA, 19 nt, Artificial Sequence
  Description of Artificial Sequence: Synthetic oligonucleotide
  Sense strand starting at position 3720 of SEQ ID NO: 586294
uguaaacugguauagucau

SEQ ID NO: 707143 - RNA, 19 nt, Artificial Sequence
  Description of Artificial Sequence: Synthetic oligonucleotide
  Antisense strand to SEQ ID NO: 707142
augacuauaccaguuuaca

SEQ ID NO: 707144 - RNA, 19 nt, Artificial Sequence
  Description of Artificial Sequence: Synthetic oligonucleotide
  Sense strand starting at position 3726 of SEQ ID NO: 586294
cugguauagucauuaugaa

SEQ ID NO: 707145 - RNA, 19 nt, Artificial Sequence
  Description of Artificial Sequence: Synthetic oligonucleotide
  Antisense strand to SEQ ID NO: 707144
uucauaaugacuauaccag

SEQ ID NO: 707146 - RNA, 19 nt, Artificial Sequence
  Description of Artificial Sequence: Synthetic oligonucleotide
  Sense strand starting at position 296 of SEQ ID NO: 586295
acacguguugucccaguuu

SEQ ID NO: 707147 - RNA, 19 nt, Artificial Sequence
  Description of Artificial Sequence: Synthetic oligonucleotide
  Antisense strand to SEQ ID NO: 707146
aaacugggacaacacgugu

SEQ ID NO: 707148 - RNA, 19 nt, Artificial Sequence
  Description of Artificial Sequence: Synthetic oligonucleotide
  Sense strand starting at position 299 of SEQ ID NO: 586295
cguguugucccaguuucuu

SEQ ID NO: 707149 - RNA, 19 nt, Artificial Sequence
  Description of Artificial Sequence: Synthetic oligonucleotide
  Antisense strand to SEQ ID NO: 707148
aagaaacugggacaacacg

SEQ ID NO: 707150 - RNA, 19 nt, Artificial Sequence
  Description of Artificial Sequence: Synthetic oligonucleotide
  Sense strand starting at position 536 of SEQ ID NO: 586295
cucaucuugugacuugaga

SEQ ID NO: 707151 - RNA, 19 nt, Artificial Sequence
  Description of Artificial Sequence: Synthetic oligonucleotide
  Antisense strand to SEQ ID NO: 707150
ucucaagucacaagaugag

SEQ ID NO: 707152 - RNA, 19 nt, Artificial Sequence
  Description of Artificial Sequence: Synthetic oligonucleotide
  Sense strand starting at position 818 of SEQ ID NO: 586295
auggcucaaccugauacuu

SEQ ID NO: 707153 - RNA, 19 nt, Artificial Sequence
  Description of Artificial Sequence: Synthetic oligonucleotide
  Antisense strand to SEQ ID NO: 707152
aaguaucagguugagccau

SEQ ID NO: 707154 - RNA, 19 nt, Artificial Sequence
  Description of Artificial Sequence: Synthetic oligonucleotide
  Sense strand starting at position 976 of SEQ ID NO: 586295
cccuauuacgaucauuaug

SEQ ID NO: 707155 - RNA, 19 nt, Artificial Sequence
  Description of Artificial Sequence: Synthetic oligonucleotide
  Antisense strand to SEQ ID NO: 707154
cauaaugaucguaauaggg

SEQ ID NO: 707156 - RNA, 19 nt, Artificial Sequence
  Description of Artificial Sequence: Synthetic oligonucleotide
  Sense strand starting at position 982 of SEQ ID NO: 586295
uacgaucauuauguagaau

SEQ ID NO: 707157 - RNA, 19 nt, Artificial Sequence
  Description of Artificial Sequence: Synthetic oligonucleotide
  Antisense strand to SEQ ID NO: 707156
auucuacauaaugaucgua

SEQ ID NO: 707158 - RNA, 19 nt, Artificial Sequence
  Description of Artificial Sequence: Synthetic oligonucleotide
  Sense strand starting at position 985 of SEQ ID NO: 586295
gaucauuauguagaaugcu

SEQ ID NO: 707159 - RNA, 19 nt, Artificial Sequence
  Description of Artificial Sequence: Synthetic oligonucleotide
  Antisense strand to SEQ ID NO: 707158
agcauucuacauaaugauc

SEQ ID NO: 707160 - RNA, 19 nt, Artificial Sequence
  Description of Artificial Sequence: Synthetic oligonucleotide
  Sense strand starting at position 2072 of SEQ ID NO: 586295
cuagaauuggguuaucggu

SEQ ID NO: 707161 - RNA, 19 nt, Artificial Sequence
  Description of Artificial Sequence: Synthetic oligonucleotide
  Antisense strand to SEQ ID NO: 707160
accgauaacccaauucuag

SEQ ID NO: 707162 - RNA, 19 nt, Artificial Sequence
  Description of Artificial Sequence: Synthetic oligonucleotide
  Sense strand starting at position 2079 of SEQ ID NO: 586295
uggguuaucgguuaaagaa

SEQ ID NO: 707163 - RNA, 19 nt, Artificial Sequence
  Description of Artificial Sequence: Synthetic oligonucleotide
  Antisense strand to SEQ ID NO: 707162
uucuuuaaccgauaaccca

SEQ ID NO: 707164 - RNA, 19 nt, Artificial Sequence
  Description of Artificial Sequence: Synthetic oligonucleotide
  Sense strand starting at position 2136 of SEQ ID NO: 586295
ugaguuggauaccuaagua

SEQ ID NO: 707165 - RNA, 19 nt, Artificial Sequence
  Description of Artificial Sequence: Synthetic oligonucleotide
  Antisense strand to SEQ ID NO: 707164
uacuuagguauccaacuca

SEQ ID NO: 707166 - RNA, 19 nt, Artificial Sequence
  Description of Artificial Sequence: Synthetic oligonucleotide
  Sense strand starting at position 2225 of SEQ ID NO: 586295
ccucaaaguguuuaucuag

SEQ ID NO: 707167 - RNA, 19 nt, Artificial Sequence
  Description of Artificial Sequence: Synthetic oligonucleotide
  Antisense strand to SEQ ID NO: 707166
cuagauaaacacuuugagg

SEQ ID NO: 707168 - RNA, 19 nt, Artificial Sequence
  Description of Artificial Sequence: Synthetic oligonucleotide
  Sense strand starting at position 2262 of SEQ ID NO: 586295
gcucaaagucuagaaccaa

SEQ ID NO: 707169 - RNA, 19 nt, Artificial Sequence
  Description of Artificial Sequence: Synthetic oligonucleotide
  Antisense strand to SEQ ID NO: 707168
uugguucuagacuuugagc

SEQ ID NO: 707170 - RNA, 19 nt, Artificial Sequence
  Description of Artificial Sequence: Synthetic oligonucleotide
  Sense strand starting at position 2328 of SEQ ID NO: 586295
cugggaaaguuaucucuac

SEQ ID NO: 707171 - RNA, 19 nt, Artificial Sequence
  Description of Artificial Sequence: Synthetic oligonucleotide
  Antisense strand to SEQ ID NO: 707170
guagagauaacuuucccag

SEQ ID NO: 707172 - RNA, 19 nt, Artificial Sequence
  Description of Artificial Sequence: Synthetic oligonucleotide
  Sense strand starting at position 2329 of SEQ ID NO: 586295
ugggaaaguuaucucuaca

SEQ ID NO: 707173 - RNA, 19 nt, Artificial Sequence
  Description of Artificial Sequence: Synthetic oligonucleotide
  Antisense strand to SEQ ID NO: 707172
uguagagauaacuuuccca

SEQ ID NO: 707174 - RNA, 19 nt, Artificial Sequence
  Description of Artificial Sequence: Synthetic oligonucleotide
  Sense strand starting at position 2340 of SEQ ID NO: 586295
ucucuacaucuggagguua

SEQ ID NO: 707175 - RNA, 19 nt, Artificial Sequence
  Description of Artificial Sequence: Synthetic oligonucleotide
  Antisense strand to SEQ ID NO: 707174
uaaccuccagauguagaga

SEQ ID NO: 707176 - RNA, 19 nt, Artificial Sequence
  Description of Artificial Sequence: Synthetic oligonucleotide
  Sense strand starting at position 2348 of SEQ ID NO: 586295
ucuggagguuaucuggaaa

SEQ ID NO: 707177 - RNA, 19 nt, Artificial Sequence
  Description of Artificial Sequence: Synthetic oligonucleotide
  Antisense strand to SEQ ID NO: 707176
uuuccagauaaccuccaga

SEQ ID NO: 707178 - RNA, 19 nt, Artificial Sequence
  Description of Artificial Sequence: Synthetic oligonucleotide
  Sense strand starting at position 2529 of SEQ ID NO: 586295
gaaguccugcauuagugaa

SEQ ID NO: 707179 - RNA, 19 nt, Artificial Sequence
  Description of Artificial Sequence: Synthetic oligonucleotide
  Antisense strand to SEQ ID NO: 707178
uucacuaaugcaggacuuc

SEQ ID NO: 707180 - RNA, 19 nt, Artificial Sequence
  Description of Artificial Sequence: Synthetic oligonucleotide
  Sense strand starting at position 2536 of SEQ ID NO: 586295
ugcauuagugaaugaauau

SEQ ID NO: 707181 - RNA, 19 nt, Artificial Sequence
  Description of Artificial Sequence: Synthetic oligonucleotide
  Antisense strand to SEQ ID NO: 707180
auauucauucacuaaugca

SEQ ID NO: 707182 - RNA, 19 nt, Artificial Sequence
  Description of Artificial Sequence: Synthetic oligonucleotide
  Sense strand starting at position 2543 of SEQ ID NO: 586295
gugaaugaauaucugaauu

SEQ ID NO: 707183 - RNA, 19 nt, Artificial Sequence
  Description of Artificial Sequence: Synthetic oligonucleotide
  Antisense strand to SEQ ID NO: 707182
aauucagauauucauucac

SEQ ID NO: 707184 - RNA, 19 nt, Artificial Sequence
  Description of Artificial Sequence: Synthetic oligonucleotide
  Sense strand starting at position 2691 of SEQ ID NO: 586295
ggauauaaaguguggcaaa

SEQ ID NO: 707185 - RNA, 19 nt, Artificial Sequence
  Description of Artificial Sequence: Synthetic oligonucleotide
  Antisense strand to SEQ ID NO: 707184
uuugccacacuuuauaucc

SEQ ID NO: 707186 - RNA, 19 nt, Artificial Sequence
  Description of Artificial Sequence: Synthetic oligonucleotide
  Sense strand starting at position 2731 of SEQ ID NO: 586295
gaagaauauguuugugggu

SEQ ID NO: 707187 - RNA, 19 nt, Artificial Sequence
  Description of Artificial Sequence: Synthetic oligonucleotide
  Antisense strand to SEQ ID NO: 707186
acccacaaacauauucuuc

SEQ ID NO: 707188 - RNA, 19 nt, Artificial Sequence
  Description of Artificial Sequence: Synthetic oligonucleotide
  Sense strand starting at position 2897 of SEQ ID NO: 586295
aggucucaucuguaacagu

SEQ ID NO: 707189 - RNA, 19 nt, Artificial Sequence
  Description of Artificial Sequence: Synthetic oligonucleotide
  Antisense strand to SEQ ID NO: 707188
acuguuacagaugagaccu

SEQ ID NO: 707190 - RNA, 19 nt, Artificial Sequence
  Description of Artificial Sequence: Synthetic oligonucleotide
  Sense strand starting at position 2977 of SEQ ID NO: 586295
guaucugacgcauaauaag

SEQ ID NO: 707191 - RNA, 19 nt, Artificial Sequence
  Description of Artificial Sequence: Synthetic oligonucleotide
  Antisense strand to SEQ ID NO: 707190
cuuauuaugcgucagauac

SEQ ID NO: 707192 - RNA, 19 nt, Artificial Sequence
  Description of Artificial Sequence: Synthetic oligonucleotide
  Sense strand starting at position 3028 of SEQ ID NO: 586295
ugcguugcucuaguaacaa

SEQ ID NO: 707193 - RNA, 19 nt, Artificial Sequence
  Description of Artificial Sequence: Synthetic oligonucleotide
  Antisense strand to SEQ ID NO: 707192
uuguuacuagagcaacgca

SEQ ID NO: 707194 - RNA, 19 nt, Artificial Sequence
  Description of Artificial Sequence: Synthetic oligonucleotide
  Sense strand starting at position 3048 of SEQ ID NO: 586295
gagacuauuugucagagac

SEQ ID NO: 707195 - RNA, 19 nt, Artificial Sequence
  Description of Artificial Sequence: Synthetic oligonucleotide
  Antisense strand to SEQ ID NO: 707194
gucucugacaaauagucuc

SEQ ID NO: 707196 - RNA, 19 nt, Artificial Sequence
  Description of Artificial Sequence: Synthetic oligonucleotide
  Sense strand starting at position 3126 of SEQ ID NO: 586295
gugauacugcuuuagagga

SEQ ID NO: 707197 - RNA, 19 nt, Artificial Sequence
  Description of Artificial Sequence: Synthetic oligonucleotide
  Antisense strand to SEQ ID NO: 707196
uccucuaaagcaguaucac

SEQ ID NO: 707198 - RNA, 19 nt, Artificial Sequence
  Description of Artificial Sequence: Synthetic oligonucleotide
  Sense strand starting at position 3133 of SEQ ID NO: 586295
ugcuuuagaggauggauaa

SEQ ID NO: 707199 - RNA, 19 nt, Artificial Sequence
  Description of Artificial Sequence: Synthetic oligonucleotide
  Antisense strand to SEQ ID NO: 707198
uuauccauccucuaaagca

SEQ ID NO: 707200 - RNA, 19 nt, Artificial Sequence
  Description of Artificial Sequence: Synthetic oligonucleotide
  Sense strand starting at position 3134 of SEQ ID NO: 586295
gcuuuagaggauggauaag

SEQ ID NO: 707201 - RNA, 19 nt, Artificial Sequence
  Description of Artificial Sequence: Synthetic oligonucleotide
  Antisense strand to SEQ ID NO: 707200
cuuauccauccucuaaagc

SEQ ID NO: 707202 - RNA, 19 nt, Artificial Sequence
  Description of Artificial Sequence: Synthetic oligonucleotide
  Sense strand starting at position 3220 of SEQ ID NO: 586295
auagcauuggguggugaaa

SEQ ID NO: 707203 - RNA, 19 nt, Artificial Sequence
  Description of Artificial Sequence: Synthetic oligonucleotide
  Antisense strand to SEQ ID NO: 707202
uuucaccacccaaugcuau

SEQ ID NO: 707204 - RNA, 19 nt, Artificial Sequence
  Description of Artificial Sequence: Synthetic oligonucleotide
  Sense strand starting at position 3265 of SEQ ID NO: 586295
ggcaauagcagauggauaa

SEQ ID NO: 707205 - RNA, 19 nt, Artificial Sequence
  Description of Artificial Sequence: Synthetic oligonucleotide
  Antisense strand to SEQ ID NO: 707204
uuauccaucugcuauugcc

SEQ ID NO: 707206 - RNA, 19 nt, Artificial Sequence
  Description of Artificial Sequence: Synthetic oligonucleotide
  Sense strand starting at position 3266 of SEQ ID NO: 586295
gcaauagcagauggauaau

SEQ ID NO: 707207 - RNA, 19 nt, Artificial Sequence
  Description of Artificial Sequence: Synthetic oligonucleotide
  Antisense strand to SEQ ID NO: 707206
auuauccaucugcuauugc

SEQ ID NO: 707208 - RNA, 19 nt, Artificial Sequence
  Description of Artificial Sequence: Synthetic oligonucleotide
  Sense strand starting at position 3278 of SEQ ID NO: 586295
ggauaauagcaaugugaca

SEQ ID NO: 707209 - RNA, 19 nt, Artificial Sequence
  Description of Artificial Sequence: Synthetic oligonucleotide
  Antisense strand to SEQ ID NO: 707208
ugucacauugcuauuaucc

SEQ ID NO: 707210 - RNA, 19 nt, Artificial Sequence
  Description of Artificial Sequence: Synthetic oligonucleotide
  Sense strand starting at position 3405 of SEQ ID NO: 586295
augaauacugccugauuag

SEQ ID NO: 707211 - RNA, 19 nt, Artificial Sequence
  Description of Artificial Sequence: Synthetic oligonucleotide
  Antisense strand to SEQ ID NO: 707210
cuaaucaggcaguauucau

SEQ ID NO: 707212 - RNA, 19 nt, Artificial Sequence
  Description of Artificial Sequence: Synthetic oligonucleotide
  Sense strand starting at position 3425 of SEQ ID NO: 586295
ggacuuuagcugggaggua

SEQ ID NO: 707213 - RNA, 19 nt, Artificial Sequence
  Description of Artificial Sequence: Synthetic oligonucleotide
  Antisense strand to SEQ ID NO: 707212
uaccucccagcuaaagucc

SEQ ID NO: 707214 - RNA, 19 nt, Artificial Sequence
  Description of Artificial Sequence: Synthetic oligonucleotide
  Sense strand starting at position 3576 of SEQ ID NO: 586295
acuuaaauacccuguugga

SEQ ID NO: 707215 - RNA, 19 nt, Artificial Sequence
  Description of Artificial Sequence: Synthetic oligonucleotide
  Antisense strand to SEQ ID NO: 707214
uccaacaggguauuuaagu

SEQ ID NO: 707216 - RNA, 19 nt, Artificial Sequence
  Description of Artificial Sequence: Synthetic oligonucleotide
  Sense strand starting at position 3589 of SEQ ID NO: 586295
guuggaguucaauaguuag

SEQ ID NO: 707217 - RNA, 19 nt, Artificial Sequence
  Description of Artificial Sequence: Synthetic oligonucleotide
  Antisense strand to SEQ ID NO: 707216
cuaacuauugaacuccaac

SEQ ID NO: 707218 - RNA, 19 nt, Artificial Sequence
  Description of Artificial Sequence: Synthetic oligonucleotide
  Sense strand starting at position 3770 of SEQ ID NO: 586295
ccauuuggucacuguguua

SEQ ID NO: 707219 - RNA, 19 nt, Artificial Sequence
  Description of Artificial Sequence: Synthetic oligonucleotide
  Antisense strand to SEQ ID NO: 707218
uaacacagugaccaaaugg

SEQ ID NO: 707220 - RNA, 19 nt, Artificial Sequence
  Description of Artificial Sequence: Synthetic oligonucleotide
  Sense strand starting at position 3935 of SEQ ID NO: 586295
uuuacuaaugugugauaga

SEQ ID NO: 707221 - RNA, 19 nt, Artificial Sequence
  Description of Artificial Sequence: Synthetic oligonucleotide
  Antisense strand to SEQ ID NO: 707220
ucuaucacacauuaguaaa

SEQ ID NO: 707222 - RNA, 19 nt, Artificial Sequence
  Description of Artificial Sequence: Synthetic oligonucleotide
  Sense strand starting at position 3946 of SEQ ID NO: 586295
gugauagauguucauagug

SEQ ID NO: 707223 - RNA, 19 nt, Artificial Sequence
  Description of Artificial Sequence: Synthetic oligonucleotide
  Antisense strand to SEQ ID NO: 707222
cacuaugaacaucuaucac

SEQ ID NO: 707224 - RNA, 19 nt, Artificial Sequence
  Description of Artificial Sequence: Synthetic oligonucleotide
  Sense strand starting at position 3961 of SEQ ID NO: 586295
aguguuuagaaguagauau

SEQ ID NO: 707225 - RNA, 19 nt, Artificial Sequence
  Description of Artificial Sequence: Synthetic oligonucleotide
  Antisense strand to SEQ ID NO: 707224
auaucuacuucuaaacacu

SEQ ID NO: 707226 - RNA, 19 nt, Artificial Sequence
  Description of Artificial Sequence: Synthetic oligonucleotide
  Sense strand starting at position 160 of SEQ ID NO: 586296
gagugccuauguguguuaa

SEQ ID NO: 707227 - RNA, 19 nt, Artificial Sequence
  Description of Artificial Sequence: Synthetic oligonucleotide
  Antisense strand to SEQ ID NO: 707226
uuaacacacauaggcacuc

SEQ ID NO: 707228 - RNA, 19 nt, Artificial Sequence
  Description of Artificial Sequence: Synthetic oligonucleotide
  Sense strand starting at position 162 of SEQ ID NO: 586296
gugccuauguguguuaaca

SEQ ID NO: 707229 - RNA, 19 nt, Artificial Sequence
  Description of Artificial Sequence: Synthetic oligonucleotide
  Antisense strand to SEQ ID NO: 707228
uguuaacacacauaggcac

SEQ ID NO: 707230 - RNA, 19 nt, Artificial Sequence
  Description of Artificial Sequence: Synthetic oligonucleotide
  Sense strand starting at position 164 of SEQ ID NO: 586296
gccuauguguguuaacauc

SEQ ID NO: 707231 - RNA, 19 nt, Artificial Sequence
  Description of Artificial Sequence: Synthetic oligonucleotide
  Antisense strand to SEQ ID NO: 707230
gauguuaacacacauaggc

SEQ ID NO: 707232 - RNA, 19 nt, Artificial Sequence
  Description of Artificial Sequence: Synthetic oligonucleotide
  Sense strand starting at position 170 of SEQ ID NO: 586296
guguguuaacaucacgcua

SEQ ID NO: 707233 - RNA, 19 nt, Artificial Sequence
  Description of Artificial Sequence: Synthetic oligonucleotide
  Antisense strand to SEQ ID NO: 707232
uagcgugauguuaacacac

SEQ ID NO: 707234 - RNA, 19 nt, Artificial Sequence
  Description of Artificial Sequence: Synthetic oligonucleotide
  Sense strand starting at position 172 of SEQ ID NO: 586296
guguuaacaucacgcuaac

SEQ ID NO: 707235 - RNA, 19 nt, Artificial Sequence
  Description of Artificial Sequence: Synthetic oligonucleotide
  Antisense strand to SEQ ID NO: 707234
guuagcgugauguuaacac

SEQ ID NO: 707236 - RNA, 19 nt, Artificial Sequence
  Description of Artificial Sequence: Synthetic oligonucleotide
  Sense strand starting at position 248 of SEQ ID NO: 586296
ggagaugaagcugguuuca

SEQ ID NO: 707237 - RNA, 19 nt, Artificial Sequence
  Description of Artificial Sequence: Synthetic oligonucleotide
  Antisense strand to SEQ ID NO: 707236
ugaaaccagcuucaucucc

SEQ ID NO: 707238 - RNA, 19 nt, Artificial Sequence
  Description of Artificial Sequence: Synthetic oligonucleotide
  Sense strand starting at position 456 of SEQ ID NO: 586296
cugcauccucacggaagua

SEQ ID NO: 707239 - RNA, 19 nt, Artificial Sequence
  Description of Artificial Sequence: Synthetic oligonucleotide
  Antisense strand to SEQ ID NO: 707238
uacuuccgugaggaugcag

SEQ ID NO: 707240 - RNA, 19 nt, Artificial Sequence
  Description of Artificial Sequence: Synthetic oligonucleotide
  Sense strand starting at position 614 of SEQ ID NO: 586296
accagagguucucgaagau

SEQ ID NO: 707241 - RNA, 19 nt, Artificial Sequence
  Description of Artificial Sequence: Synthetic oligonucleotide
  Antisense strand to SEQ ID NO: 707240
aucuucgagaaccucuggu

SEQ ID NO: 707242 - RNA, 19 nt, Artificial Sequence
  Description of Artificial Sequence: Synthetic oligonucleotide
  Sense strand starting at position 675 of SEQ ID NO: 586296
ccaguagcuguuuggcaga

SEQ ID NO: 707243 - RNA, 19 nt, Artificial Sequence
  Description of Artificial Sequence: Synthetic oligonucleotide
  Antisense strand to SEQ ID NO: 707242
ucugccaaacagcuacugg

SEQ ID NO: 707244 - RNA, 19 nt, Artificial Sequence
  Description of Artificial Sequence: Synthetic oligonucleotide
  Sense strand starting at position 1309 of SEQ ID NO: 586296
agccuucaguggugaagga

SEQ ID NO: 707245 - RNA, 19 nt, Artificial Sequence
  Description of Artificial Sequence: Synthetic oligonucleotide
  Antisense strand to SEQ ID NO: 707244
uccuucaccacugaaggcu

SEQ ID NO: 707246 - RNA, 19 nt, Artificial Sequence
  Description of Artificial Sequence: Synthetic oligonucleotide
  Sense strand starting at position 1349 of SEQ ID NO: 586296
cuaagauacucagaccaag

SEQ ID NO: 707247 - RNA, 19 nt, Artificial Sequence
  Description of Artificial Sequence: Synthetic oligonucleotide
  Antisense strand to SEQ ID NO: 707246
cuuggucugaguaucuuag

SEQ ID NO: 707248 - RNA, 19 nt, Artificial Sequence
  Description of Artificial Sequence: Synthetic oligonucleotide
  Sense strand starting at position 1376 of SEQ ID NO: 586296
gcguaugagucucuuaagg

SEQ ID NO: 707249 - RNA, 19 nt, Artificial Sequence
  Description of Artificial Sequence: Synthetic oligonucleotide
  Antisense strand to SEQ ID NO: 707248
ccuuaagagacucauacgc

SEQ ID NO: 707250 - RNA, 19 nt, Artificial Sequence
  Description of Artificial Sequence: Synthetic oligonucleotide
  Sense strand starting at position 1378 of SEQ ID NO: 586296
guaugagucucuuaaggaa

SEQ ID NO: 707251 - RNA, 19 nt, Artificial Sequence
  Description of Artificial Sequence: Synthetic oligonucleotide
  Antisense strand to SEQ ID NO: 707250
uuccuuaagagacucauac

SEQ ID NO: 707252 - RNA, 19 nt, Artificial Sequence
  Description of Artificial Sequence: Synthetic oligonucleotide
  Sense strand starting at position 1381 of SEQ ID NO: 586296
ugagucucuuaaggaagau

SEQ ID NO: 707253 - RNA, 19 nt, Artificial Sequence
  Description of Artificial Sequence: Synthetic oligonucleotide
  Antisense strand to SEQ ID NO: 707252
aucuuccuuaagagacuca

SEQ ID NO: 707254 - RNA, 19 nt, Artificial Sequence
  Description of Artificial Sequence: Synthetic oligonucleotide
  Sense strand starting at position 1521 of SEQ ID NO: 586296
cugagcuucugcucuguca

SEQ ID NO: 707255 - RNA, 19 nt, Artificial Sequence
  Description of Artificial Sequence: Synthetic oligonucleotide
  Antisense strand to SEQ ID NO: 707254
ugacagagcagaagcucag

SEQ ID NO: 707256 - RNA, 19 nt, Artificial Sequence
  Description of Artificial Sequence: Synthetic oligonucleotide
  Sense strand starting at position 1523 of SEQ ID NO: 586296
gagcuucugcucugucagu

SEQ ID NO: 707257 - RNA, 19 nt, Artificial Sequence
  Description of Artificial Sequence: Synthetic oligonucleotide
  Antisense strand to SEQ ID NO: 707256
acugacagagcagaagcuc

SEQ ID NO: 707258 - RNA, 19 nt, Artificial Sequence
  Description of Artificial Sequence: Synthetic oligonucleotide
  Sense strand starting at position 1525 of SEQ ID NO: 586296
gcuucugcucugucaguga

SEQ ID NO: 707259 - RNA, 19 nt, Artificial Sequence
  Description of Artificial Sequence: Synthetic oligonucleotide
  Antisense strand to SEQ ID NO: 707258
ucacugacagagcagaagc

SEQ ID NO: 707260 - RNA, 19 nt, Artificial Sequence
  Description of Artificial Sequence: Synthetic oligonucleotide
  Sense strand starting at position 1528 of SEQ ID NO: 586296
ucugcucugucagugacau

SEQ ID NO: 707261 - RNA, 19 nt, Artificial Sequence
  Description of Artificial Sequence: Synthetic oligonucleotide
  Antisense strand to SEQ ID NO: 707260
augucacugacagagcaga

SEQ ID NO: 707262 - RNA, 19 nt, Artificial Sequence
  Description of Artificial Sequence: Synthetic oligonucleotide
  Sense strand starting at position 1529 of SEQ ID NO: 586296
cugcucugucagugacaua

SEQ ID NO: 707263 - RNA, 19 nt, Artificial Sequence
  Description of Artificial Sequence: Synthetic oligonucleotide
  Antisense strand to SEQ ID NO: 707262
uaugucacugacagagcag

SEQ ID NO: 707264 - RNA, 19 nt, Artificial Sequence
  Description of Artificial Sequence: Synthetic oligonucleotide
  Sense strand starting at position 1641 of SEQ ID NO: 586296
ggcugagacgauugcuuga

SEQ ID NO: 707265 - RNA, 19 nt, Artificial Sequence
  Description of Artificial Sequence: Synthetic oligonucleotide
  Antisense strand to SEQ ID NO: 707264
ucaagcaaucgucucagcc

SEQ ID NO: 707266 - RNA, 19 nt, Artificial Sequence
  Description of Artificial Sequence: Synthetic oligonucleotide
  Sense strand starting at position 1644 of SEQ ID NO: 586296
ugagacgauugcuugaacu

SEQ ID NO: 707267 - RNA, 19 nt, Artificial Sequence
  Description of Artificial Sequence: Synthetic oligonucleotide
  Antisense strand to SEQ ID NO: 707266
aguucaagcaaucgucuca

SEQ ID NO: 707268 - RNA, 19 nt, Artificial Sequence
  Description of Artificial Sequence: Synthetic oligonucleotide
  Sense strand starting at position 1646 of SEQ ID NO: 586296
agacgauugcuugaacuca

SEQ ID NO: 707269 - RNA, 19 nt, Artificial Sequence
  Description of Artificial Sequence: Synthetic oligonucleotide
  Antisense strand to SEQ ID NO: 707268
ugaguucaagcaaucgucu

SEQ ID NO: 707270 - RNA, 19 nt, Artificial Sequence
  Description of Artificial Sequence: Synthetic oligonucleotide
  Sense strand starting at position 1751 of SEQ ID NO: 586296
cgggaacuguccuggaugu

SEQ ID NO: 707271 - RNA, 19 nt, Artificial Sequence
  Description of Artificial Sequence: Synthetic oligonucleotide
  Antisense strand to SEQ ID NO: 707270
acauccaggacaguucccg

SEQ ID NO: 707272 - RNA, 19 nt, Artificial Sequence
  Description of Artificial Sequence: Synthetic oligonucleotide
  Sense strand starting at position 1753 of SEQ ID NO: 586296
ggaacuguccuggauguga

SEQ ID NO: 707273 - RNA, 19 nt, Artificial Sequence
  Description of Artificial Sequence: Synthetic oligonucleotide
  Antisense strand to SEQ ID NO: 707272
ucacauccaggacaguucc

SEQ ID NO: 707274 - RNA, 19 nt, Artificial Sequence
  Description of Artificial Sequence: Synthetic oligonucleotide
  Sense strand starting at position 1761 of SEQ ID NO: 586296
ccuggaugugagugucaca

SEQ ID NO: 707275 - RNA, 19 nt, Artificial Sequence
  Description of Artificial Sequence: Synthetic oligonucleotide
  Antisense strand to SEQ ID NO: 707274
ugugacacucacauccagg

SEQ ID NO: 707276 - RNA, 19 nt, Artificial Sequence
  Description of Artificial Sequence: Synthetic oligonucleotide
  Sense strand starting at position 1826 of SEQ ID NO: 586296
cuccuaaguugaucuuuga

SEQ ID NO: 707277 - RNA, 19 nt, Artificial Sequence
  Description of Artificial Sequence: Synthetic oligonucleotide
  Antisense strand to SEQ ID NO: 707276
ucaaagaucaacuuaggag

SEQ ID NO: 707278 - RNA, 19 nt, Artificial Sequence
  Description of Artificial Sequence: Synthetic oligonucleotide
  Sense strand starting at position 1833 of SEQ ID NO: 586296
guugaucuuugacucagca

SEQ ID NO: 707279 - RNA, 19 nt, Artificial Sequence
  Description of Artificial Sequence: Synthetic oligonucleotide
  Antisense strand to SEQ ID NO: 707278
ugcugagucaaagaucaac

SEQ ID NO: 707280 - RNA, 19 nt, Artificial Sequence
  Description of Artificial Sequence: Synthetic oligonucleotide
  Sense strand starting at position 1884 of SEQ ID NO: 586296
gcgugauccuguggcuaag

SEQ ID NO: 707281 - RNA, 19 nt, Artificial Sequence
  Description of Artificial Sequence: Synthetic oligonucleotide
  Antisense strand to SEQ ID NO: 707280
cuuagccacaggaucacgc

SEQ ID NO: 707282 - RNA, 19 nt, Artificial Sequence
  Description of Artificial Sequence: Synthetic oligonucleotide
  Sense strand starting at position 1907 of SEQ ID NO: 586296
gcaaccuguucccaguuau

SEQ ID NO: 707283 - RNA, 19 nt, Artificial Sequence
  Description of Artificial Sequence: Synthetic oligonucleotide
  Antisense strand to SEQ ID NO: 707282
auaacugggaacagguugc

SEQ ID NO: 707284 - RNA, 19 nt, Artificial Sequence
  Description of Artificial Sequence: Synthetic oligonucleotide
  Sense strand starting at position 1917 of SEQ ID NO: 586296
cccaguuaucagggacugu

SEQ ID NO: 707285 - RNA, 19 nt, Artificial Sequence
  Description of Artificial Sequence: Synthetic oligonucleotide
  Antisense strand to SEQ ID NO: 707284
acagucccugauaacuggg

SEQ ID NO: 707286 - RNA, 19 nt, Artificial Sequence
  Description of Artificial Sequence: Synthetic oligonucleotide
  Sense strand starting at position 1939 of SEQ ID NO: 586296
ccacucuauucguuaauga

SEQ ID NO: 707287 - RNA, 19 nt, Artificial Sequence
  Description of Artificial Sequence: Synthetic oligonucleotide
  Antisense strand to SEQ ID NO: 707286
ucauuaacgaauagagugg

SEQ ID NO: 707288 - RNA, 19 nt, Artificial Sequence
  Description of Artificial Sequence: Synthetic oligonucleotide
  Sense strand starting at position 1943 of SEQ ID NO: 586296
ucuauucguuaaugaugau

SEQ ID NO: 707289 - RNA, 19 nt, Artificial Sequence
  Description of Artificial Sequence: Synthetic oligonucleotide
  Antisense strand to SEQ ID NO: 707288
aucaucauuaacgaauaga

SEQ ID NO: 707290 - RNA, 19 nt, Artificial Sequence
  Description of Artificial Sequence: Synthetic oligonucleotide
  Sense strand starting at position 1946 of SEQ ID NO: 586296
auucguuaaugaugaugga

SEQ ID NO: 707291 - RNA, 19 nt, Artificial Sequence
  Description of Artificial Sequence: Synthetic oligonucleotide
  Antisense strand to SEQ ID NO: 707290
uccaucaucauuaacgaau

SEQ ID NO: 707292 - RNA, 19 nt, Artificial Sequence
  Description of Artificial Sequence: Synthetic oligonucleotide
  Sense strand starting at position 1947 of SEQ ID NO: 586296
uucguuaaugaugauggau

SEQ ID NO: 707293 - RNA, 19 nt, Artificial Sequence
  Description of Artificial Sequence: Synthetic oligonucleotide
  Antisense strand to SEQ ID NO: 707292
auccaucaucauuaacgaa

SEQ ID NO: 707294 - RNA, 19 nt, Artificial Sequence
  Description of Artificial Sequence: Synthetic oligonucleotide
  Sense strand starting at position 1949 of SEQ ID NO: 586296
cguuaaugaugauggauua

SEQ ID NO: 707295 - RNA, 19 nt, Artificial Sequence
  Description of Artificial Sequence: Synthetic oligonucleotide
  Antisense strand to SEQ ID NO: 707294
uaauccaucaucauuaacg

SEQ ID NO: 707296 - RNA, 19 nt, Artificial Sequence
  Description of Artificial Sequence: Synthetic oligonucleotide
  Sense strand starting at position 2176 of SEQ ID NO: 586296
agagguaugcggugaagca

SEQ ID NO: 707297 - RNA, 19 nt, Artificial Sequence
  Description of Artificial Sequence: Synthetic oligonucleotide
  Antisense strand to SEQ ID NO: 707296
ugcuucaccgcauaccucu

SEQ ID NO: 707298 - RNA, 19 nt, Artificial Sequence
  Description of Artificial Sequence: Synthetic oligonucleotide
  Sense strand starting at position 2177 of SEQ ID NO: 586296
gagguaugcggugaagcaa

SEQ ID NO: 707299 - RNA, 19 nt, Artificial Sequence
  Description of Artificial Sequence: Synthetic oligonucleotide
  Antisense strand to SEQ ID NO: 707298
uugcuucaccgcauaccuc

SEQ ID NO: 707300 - RNA, 19 nt, Artificial Sequence
  Description of Artificial Sequence: Synthetic oligonucleotide
  Sense strand starting at position 2975 of SEQ ID NO: 586296
ccgcgucuccuucaggauu

SEQ ID NO: 707301 - RNA, 19 nt, Artificial Sequence
  Description of Artificial Sequence: Synthetic oligonucleotide
  Antisense strand to SEQ ID NO: 707300
aauccugaaggagacgcgg

SEQ ID NO: 707302 - RNA, 19 nt, Artificial Sequence
  Description of Artificial Sequence: Synthetic oligonucleotide
  Sense strand starting at position 3775 of SEQ ID NO: 586296
cccaacucugcgggagaua

SEQ ID NO: 707303 - RNA, 19 nt, Artificial Sequence
  Description of Artificial Sequence: Synthetic oligonucleotide
  Antisense strand to SEQ ID NO: 707302
uaucucccgcagaguuggg

SEQ ID NO: 707304 - RNA, 19 nt, Artificial Sequence
  Description of Artificial Sequence: Synthetic oligonucleotide
  Sense strand starting at position 3776 of SEQ ID NO: 586296
ccaacucugcgggagauaa

SEQ ID NO: 707305 - RNA, 19 nt, Artificial Sequence
  Description of Artificial Sequence: Synthetic oligonucleotide
  Antisense strand to SEQ ID NO: 707304
uuaucucccgcagaguugg

SEQ ID NO: 707306 - RNA, 19 nt, Artificial Sequence
  Description of Artificial Sequence: Synthetic oligonucleotide
  Sense strand starting at position 203 of SEQ ID NO: 586297
gcaugaugugucugggaag

SEQ ID NO: 707307 - RNA, 19 nt, Artificial Sequence
  Description of Artificial Sequence: Synthetic oligonucleotide
  Antisense strand to SEQ ID NO: 707306
cuucccagacacaucaugc

SEQ ID NO: 707308 - RNA, 19 nt, Artificial Sequence
  Description of Artificial Sequence: Synthetic oligonucleotide
  Sense strand starting at position 204 of SEQ ID NO: 586297
caugaugugucugggaagu

SEQ ID NO: 707309 - RNA, 19 nt, Artificial Sequence
  Description of Artificial Sequence: Synthetic oligonucleotide
  Antisense strand to SEQ ID NO: 707308
acuucccagacacaucaug

SEQ ID NO: 707310 - RNA, 19 nt, Artificial Sequence
  Description of Artificial Sequence: Synthetic oligonucleotide
  Sense strand starting at position 1034 of SEQ ID NO: 586297
gagugccuauguguguuaa

SEQ ID NO: 707311 - RNA, 19 nt, Artificial Sequence
  Description of Artificial Sequence: Synthetic oligonucleotide
  Antisense strand to SEQ ID NO: 707310
uuaacacacauaggcacuc

SEQ ID NO: 707312 - RNA, 19 nt, Artificial Sequence
  Description of Artificial Sequence: Synthetic oligonucleotide
  Sense strand starting at position 1036 of SEQ ID NO: 586297
gugccuauguguguuaaca

SEQ ID NO: 707313 - RNA, 19 nt, Artificial Sequence
  Description of Artificial Sequence: Synthetic oligonucleotide
  Antisense strand to SEQ ID NO: 707312
uguuaacacacauaggcac

SEQ ID NO: 707314 - RNA, 19 nt, Artificial Sequence
  Description of Artificial Sequence: Synthetic oligonucleotide
  Sense strand starting at position 1038 of SEQ ID NO: 586297
gccuauguguguuaacauc

SEQ ID NO: 707315 - RNA, 19 nt, Artificial Sequence
  Description of Artificial Sequence: Synthetic oligonucleotide
  Antisense strand to SEQ ID NO: 707314
gauguuaacacacauaggc

SEQ ID NO: 707316 - RNA, 19 nt, Artificial Sequence
  Description of Artificial Sequence: Synthetic oligonucleotide
  Sense strand starting at position 1044 of SEQ ID NO: 586297
guguguuaacaucacgcua

SEQ ID NO: 707317 - RNA, 19 nt, Artificial Sequence
  Description of Artificial Sequence: Synthetic oligonucleotide
  Antisense strand to SEQ ID NO: 707316
uagcgugauguuaacacac

SEQ ID NO: 707318 - RNA, 19 nt, Artificial Sequence
  Description of Artificial Sequence: Synthetic oligonucleotide
  Sense strand starting at position 1046 of SEQ ID NO: 586297
guguuaacaucacgcuaac

SEQ ID NO: 707319 - RNA, 19 nt, Artificial Sequence
  Description of Artificial Sequence: Synthetic oligonucleotide
  Antisense strand to SEQ ID NO: 707318
guuagcgugauguuaacac

SEQ ID NO: 707320 - RNA, 19 nt, Artificial Sequence
  Description of Artificial Sequence: Synthetic oligonucleotide
  Sense strand starting at position 1122 of SEQ ID NO: 586297
ggagaugaagcugguuuca

SEQ ID NO: 707321 - RNA, 19 nt, Artificial Sequence
  Description of Artificial Sequence: Synthetic oligonucleotide
  Antisense strand to SEQ ID NO: 707320
ugaaaccagcuucaucucc

SEQ ID NO: 707322 - RNA, 19 nt, Artificial Sequence
  Description of Artificial Sequence: Synthetic oligonucleotide
  Sense strand starting at position 1330 of SEQ ID NO: 586297
cugcauccucacggaagua

SEQ ID NO: 707323 - RNA, 19 nt, Artificial Sequence
  Description of Artificial Sequence: Synthetic oligonucleotide
  Antisense strand to SEQ ID NO: 707322
uacuuccgugaggaugcag

SEQ ID NO: 707324 - RNA, 19 nt, Artificial Sequence
  Description of Artificial Sequence: Synthetic oligonucleotide
  Sense strand starting at position 1488 of SEQ ID NO: 586297
accagagguucucgaagau

SEQ ID NO: 707325 - RNA, 19 nt, Artificial Sequence
  Description of Artificial Sequence: Synthetic oligonucleotide
  Antisense strand to SEQ ID NO: 707324
aucuucgagaaccucuggu

SEQ ID NO: 707326 - RNA, 19 nt, Artificial Sequence
  Description of Artificial Sequence: Synthetic oligonucleotide
  Sense strand starting at position 1549 of SEQ ID NO: 586297
ccaguagcuguuuggcaga

SEQ ID NO: 707327 - RNA, 19 nt, Artificial Sequence
  Description of Artificial Sequence: Synthetic oligonucleotide
  Antisense strand to SEQ ID NO: 707326
ucugccaaacagcuacugg

SEQ ID NO: 707328 - RNA, 19 nt, Artificial Sequence
  Description of Artificial Sequence: Synthetic oligonucleotide
  Sense strand starting at position 2183 of SEQ ID NO: 586297
agccuucaguggugaagga

SEQ ID NO: 707329 - RNA, 19 nt, Artificial Sequence
  Description of Artificial Sequence: Synthetic oligonucleotide
  Antisense strand to SEQ ID NO: 707328
uccuucaccacugaaggcu

SEQ ID NO: 707330 - RNA, 19 nt, Artificial Sequence
  Description of Artificial Sequence: Synthetic oligonucleotide
  Sense strand starting at position 2223 of SEQ ID NO: 586297
cuaagauacucagaccaag

SEQ ID NO: 707331 - RNA, 19 nt, Artificial Sequence
  Description of Artificial Sequence: Synthetic oligonucleotide
  Antisense strand to SEQ ID NO: 707330
cuuggucugaguaucuuag

SEQ ID NO: 707332 - RNA, 19 nt, Artificial Sequence
  Description of Artificial Sequence: Synthetic oligonucleotide
  Sense strand starting at position 2250 of SEQ ID NO: 586297
gcguaugagucucuuaagg

SEQ ID NO: 707333 - RNA, 19 nt, Artificial Sequence
  Description of Artificial Sequence: Synthetic oligonucleotide
  Antisense strand to SEQ ID NO: 707332
ccuuaagagacucauacgc

SEQ ID NO: 707334 - RNA, 19 nt, Artificial Sequence
  Description of Artificial Sequence: Synthetic oligonucleotide
  Sense strand starting at position 2252 of SEQ ID NO: 586297
guaugagucucuuaaggaa

SEQ ID NO: 707335 - RNA, 19 nt, Artificial Sequence
  Description of Artificial Sequence: Synthetic oligonucleotide
  Antisense strand to SEQ ID NO: 707334
uuccuuaagagacucauac

SEQ ID NO: 707336 - RNA, 19 nt, Artificial Sequence
  Description of Artificial Sequence: Synthetic oligonucleotide
  Sense strand starting at position 2255 of SEQ ID NO: 586297
ugagucucuuaaggaagau

SEQ ID NO: 707337 - RNA, 19 nt, Artificial Sequence
  Description of Artificial Sequence: Synthetic oligonucleotide
  Antisense strand to SEQ ID NO: 707336
aucuuccuuaagagacuca

SEQ ID NO: 707338 - RNA, 19 nt, Artificial Sequence
  Description of Artificial Sequence: Synthetic oligonucleotide
  Sense strand starting at position 2395 of SEQ ID NO: 586297
cugagcuucugcucuguca

SEQ ID NO: 707339 - RNA, 19 nt, Artificial Sequence
  Description of Artificial Sequence: Synthetic oligonucleotide
  Antisense strand to SEQ ID NO: 707338
ugacagagcagaagcucag

SEQ ID NO: 707340 - RNA, 19 nt, Artificial Sequence
  Description of Artificial Sequence: Synthetic oligonucleotide
  Sense strand starting at position 2397 of SEQ ID NO: 586297
gagcuucugcucugucagu

SEQ ID NO: 707341 - RNA, 19 nt, Artificial Sequence
  Description of Artificial Sequence: Synthetic oligonucleotide
  Antisense strand to SEQ ID NO: 707340
acugacagagcagaagcuc

SEQ ID NO: 707342 - RNA, 19 nt, Artificial Sequence
  Description of Artificial Sequence: Synthetic oligonucleotide
  Sense strand starting at position 2399 of SEQ ID NO: 586297
gcuucugcucugucaguga

SEQ ID NO: 707343 - RNA, 19 nt, Artificial Sequence
  Description of Artificial Sequence: Synthetic oligonucleotide
  Antisense strand to SEQ ID NO: 707342
ucacugacagagcagaagc

SEQ ID NO: 707344 - RNA, 19 nt, Artificial Sequence
  Description of Artificial Sequence: Synthetic oligonucleotide
  Sense strand starting at position 2402 of SEQ ID NO: 586297
ucugcucugucagugacau

SEQ ID NO: 707345 - RNA, 19 nt, Artificial Sequence
  Description of Artificial Sequence: Synthetic oligonucleotide
  Antisense strand to SEQ ID NO: 707344
augucacugacagagcaga

SEQ ID NO: 707346 - RNA, 19 nt, Artificial Sequence
  Description of Artificial Sequence: Synthetic oligonucleotide
  Sense strand starting at position 2403 of SEQ ID NO: 586297
cugcucugucagugacaua

SEQ ID NO: 707347 - RNA, 19 nt, Artificial Sequence
  Description of Artificial Sequence: Synthetic oligonucleotide
  Antisense strand to SEQ ID NO: 707346
uaugucacugacagagcag

SEQ ID NO: 707348 - RNA, 19 nt, Artificial Sequence
  Description of Artificial Sequence: Synthetic oligonucleotide
  Sense strand starting at position 2515 of SEQ ID NO: 586297
ggcugagacgauugcuuga

SEQ ID NO: 707349 - RNA, 19 nt, Artificial Sequence
  Description of Artificial Sequence: Synthetic oligonucleotide
  Antisense strand to SEQ ID NO: 707348
ucaagcaaucgucucagcc

SEQ ID NO: 707350 - RNA, 19 nt, Artificial Sequence
  Description of Artificial Sequence: Synthetic oligonucleotide
  Sense strand starting at position 2518 of SEQ ID NO: 586297
ugagacgauugcuugaacu

SEQ ID NO: 707351 - RNA, 19 nt, Artificial Sequence
  Description of Artificial Sequence: Synthetic oligonucleotide
  Antisense strand to SEQ ID NO: 707350
aguucaagcaaucgucuca

SEQ ID NO: 707352 - RNA, 19 nt, Artificial Sequence
  Description of Artificial Sequence: Synthetic oligonucleotide
  Sense strand starting at position 2520 of SEQ ID NO: 586297
agacgauugcuugaacuca

SEQ ID NO: 707353 - RNA, 19 nt, Artificial Sequence
  Description of Artificial Sequence: Synthetic oligonucleotide
  Antisense strand to SEQ ID NO: 707352
ugaguucaagcaaucgucu

SEQ ID NO: 707354 - RNA, 19 nt, Artificial Sequence
  Description of Artificial Sequence: Synthetic oligonucleotide
  Sense strand starting at position 2625 of SEQ ID NO: 586297
cgggaacuguccuggaugu

SEQ ID NO: 707355 - RNA, 19 nt, Artificial Sequence
  Description of Artificial Sequence: Synthetic oligonucleotide
  Antisense strand to SEQ ID NO: 707354
acauccaggacaguucccg

SEQ ID NO: 707356 - RNA, 19 nt, Artificial Sequence
  Description of Artificial Sequence: Synthetic oligonucleotide
  Sense strand starting at position 2627 of SEQ ID NO: 586297
ggaacuguccuggauguga

SEQ ID NO: 707357 - RNA, 19 nt, Artificial Sequence
  Description of Artificial Sequence: Synthetic oligonucleotide
  Antisense strand to SEQ ID NO: 707356
ucacauccaggacaguucc

SEQ ID NO: 707358 - RNA, 19 nt, Artificial Sequence
  Description of Artificial Sequence: Synthetic oligonucleotide
  Sense strand starting at position 2635 of SEQ ID NO: 586297
ccuggaugugagugucaca

SEQ ID NO: 707359 - RNA, 19 nt, Artificial Sequence
  Description of Artificial Sequence: Synthetic oligonucleotide
  Antisense strand to SEQ ID NO: 707358
ugugacacucacauccagg

SEQ ID NO: 707360 - RNA, 19 nt, Artificial Sequence
  Description of Artificial Sequence: Synthetic oligonucleotide
  Sense strand starting at position 2700 of SEQ ID NO: 586297
cuccuaaguugaucuuuga

SEQ ID NO: 707361 - RNA, 19 nt, Artificial Sequence
  Description of Artificial Sequence: Synthetic oligonucleotide
  Antisense strand to SEQ ID NO: 707360
ucaaagaucaacuuaggag

SEQ ID NO: 707362 - RNA, 19 nt, Artificial Sequence
  Description of Artificial Sequence: Synthetic oligonucleotide
  Sense strand starting at position 2707 of SEQ ID NO: 586297
guugaucuuugacucagca

SEQ ID NO: 707363 - RNA, 19 nt, Artificial Sequence
  Description of Artificial Sequence: Synthetic oligonucleotide
  Antisense strand to SEQ ID NO: 707362
ugcugagucaaagaucaac

SEQ ID NO: 707364 - RNA, 19 nt, Artificial Sequence
  Description of Artificial Sequence: Synthetic oligonucleotide
  Sense strand starting at position 2758 of SEQ ID NO: 586297
gcgugauccuguggcuaag

SEQ ID NO: 707365 - RNA, 19 nt, Artificial Sequence
  Description of Artificial Sequence: Synthetic oligonucleotide
  Antisense strand to SEQ ID NO: 707364
cuuagccacaggaucacgc

SEQ ID NO: 707366 - RNA, 19 nt, Artificial Sequence
  Description of Artificial Sequence: Synthetic oligonucleotide
  Sense strand starting at position 2781 of SEQ ID NO: 586297
gcaaccuguucccaguuau

SEQ ID NO: 707367 - RNA, 19 nt, Artificial Sequence
  Description of Artificial Sequence: Synthetic oligonucleotide
  Antisense strand to SEQ ID NO: 707366
auaacugggaacagguugc

SEQ ID NO: 707368 - RNA, 19 nt, Artificial Sequence
  Description of Artificial Sequence: Synthetic oligonucleotide
  Sense strand starting at position 2791 of SEQ ID NO: 586297
cccaguuaucagggacugu

SEQ ID NO: 707369 - RNA, 19 nt, Artificial Sequence
  Description of Artificial Sequence: Synthetic oligonucleotide
  Antisense strand to SEQ ID NO: 707368
acagucccugauaacuggg

SEQ ID NO: 707370 - RNA, 19 nt, Artificial Sequence
  Description of Artificial Sequence: Synthetic oligonucleotide
  Sense strand starting at position 2813 of SEQ ID NO: 586297
ccacucuauucguuaauga

SEQ ID NO: 707371 - RNA, 19 nt, Artificial Sequence
  Description of Artificial Sequence: Synthetic oligonucleotide
  Antisense strand to SEQ ID NO: 707370
ucauuaacgaauagagugg

SEQ ID NO: 707372 - RNA, 19 nt, Artificial Sequence
  Description of Artificial Sequence: Synthetic oligonucleotide
  Sense strand starting at position 2817 of SEQ ID NO: 586297
ucuauucguuaaugaugau

SEQ ID NO: 707373 - RNA, 19 nt, Artificial Sequence
  Description of Artificial Sequence: Synthetic oligonucleotide
  Antisense strand to SEQ ID NO: 707372
aucaucauuaacgaauaga

SEQ ID NO: 707374 - RNA, 19 nt, Artificial Sequence
  Description of Artificial Sequence: Synthetic oligonucleotide
  Sense strand starting at position 2820 of SEQ ID NO: 586297
auucguuaaugaugaugga

SEQ ID NO: 707375 - RNA, 19 nt, Artificial Sequence
  Description of Artificial Sequence: Synthetic oligonucleotide
  Antisense strand to SEQ ID NO: 707374
uccaucaucauuaacgaau

SEQ ID NO: 707376 - RNA, 19 nt, Artificial Sequence
  Description of Artificial Sequence: Synthetic oligonucleotide
  Sense strand starting at position 2821 of SEQ ID NO: 586297
uucguuaaugaugauggau

SEQ ID NO: 707377 - RNA, 19 nt, Artificial Sequence
  Description of Artificial Sequence: Synthetic oligonucleotide
  Antisense strand to SEQ ID NO: 707376
auccaucaucauuaacgaa

SEQ ID NO: 707378 - RNA, 19 nt, Artificial Sequence
  Description of Artificial Sequence: Synthetic oligonucleotide
  Sense strand starting at position 2823 of SEQ ID NO: 586297
cguuaaugaugauggauua

SEQ ID NO: 707379 - RNA, 19 nt, Artificial Sequence
  Description of Artificial Sequence: Synthetic oligonucleotide
  Antisense strand to SEQ ID NO: 707378
uaauccaucaucauuaacg

SEQ ID NO: 707380 - RNA, 19 nt, Artificial Sequence
  Description of Artificial Sequence: Synthetic oligonucleotide
  Sense strand starting at position 3050 of SEQ ID NO: 586297
agagguaugcggugaagca

SEQ ID NO: 707381 - RNA, 19 nt, Artificial Sequence
  Description of Artificial Sequence: Synthetic oligonucleotide
  Antisense strand to SEQ ID NO: 707380
ugcuucaccgcauaccucu

SEQ ID NO: 707382 - RNA, 19 nt, Artificial Sequence
  Description of Artificial Sequence: Synthetic oligonucleotide
  Sense strand starting at position 3051 of SEQ ID NO: 586297
gagguaugcggugaagcaa

SEQ ID NO: 707383 - RNA, 19 nt, Artificial Sequence
  Description of Artificial Sequence: Synthetic oligonucleotide
  Antisense strand to SEQ ID NO: 707382
uugcuucaccgcauaccuc

SEQ ID NO: 707384 - RNA, 19 nt, Artificial Sequence
  Description of Artificial Sequence: Synthetic oligonucleotide
  Sense strand starting at position 3849 of SEQ ID NO: 586297
ccgcgucuccuucaggauu

SEQ ID NO: 707385 - RNA, 19 nt, Artificial Sequence
  Description of Artificial Sequence: Synthetic oligonucleotide
  Antisense strand to SEQ ID NO: 707384
aauccugaaggagacgcgg

SEQ ID NO: 707386 - RNA, 19 nt, Artificial Sequence
  Description of Artificial Sequence: Synthetic oligonucleotide
  Sense strand starting at position 139 of SEQ ID NO: 586298
ccucguccucuaggaguga

SEQ ID NO: 707387 - RNA, 19 nt, Artificial Sequence
  Description of Artificial Sequence: Synthetic oligonucleotide
  Antisense strand to SEQ ID NO: 707386
ucacuccuagaggacgagg

SEQ ID NO: 707388 - RNA, 19 nt, Artificial Sequence
  Description of Artificial Sequence: Synthetic oligonucleotide
  Sense strand starting at position 399 of SEQ ID NO: 586298
uuccgaaugugucggguau

SEQ ID NO: 707389 - RNA, 19 nt, Artificial Sequence
  Description of Artificial Sequence: Synthetic oligonucleotide
  Antisense strand to SEQ ID NO: 707388
auacccgacacauucggaa

SEQ ID NO: 707390 - RNA, 19 nt, Artificial Sequence
  Description of Artificial Sequence: Synthetic oligonucleotide
  Sense strand starting at position 400 of SEQ ID NO: 586298
uccgaaugugucggguauu

SEQ ID NO: 707391 - RNA, 19 nt, Artificial Sequence
  Description of Artificial Sequence: Synthetic oligonucleotide
  Antisense strand to SEQ ID NO: 707390
aauacccgacacauucgga

SEQ ID NO: 707392 - RNA, 19 nt, Artificial Sequence
  Description of Artificial Sequence: Synthetic oligonucleotide
  Sense strand starting at position 401 of SEQ ID NO: 586298
ccgaaugugucggguauug

SEQ ID NO: 707393 - RNA, 19 nt, Artificial Sequence
  Description of Artificial Sequence: Synthetic oligonucleotide
  Antisense strand to SEQ ID NO: 707392
caauacccgacacauucgg

SEQ ID NO: 707394 - RNA, 19 nt, Artificial Sequence
  Description of Artificial Sequence: Synthetic oligonucleotide
  Sense strand starting at position 402 of SEQ ID NO: 586298
cgaaugugucggguauugu

SEQ ID NO: 707395 - RNA, 19 nt, Artificial Sequence
  Description of Artificial Sequence: Synthetic oligonucleotide
  Antisense strand to SEQ ID NO: 707394
acaauacccgacacauucg

SEQ ID NO: 707396 - RNA, 19 nt, Artificial Sequence
  Description of Artificial Sequence: Synthetic oligonucleotide
  Sense strand starting at position 403 of SEQ ID NO: 586298
gaaugugucggguauugug

SEQ ID NO: 707397 - RNA, 19 nt, Artificial Sequence
  Description of Artificial Sequence: Synthetic oligonucleotide
  Antisense strand to SEQ ID NO: 707396
cacaauacccgacacauuc

SEQ ID NO: 707398 - RNA, 19 nt, Artificial Sequence
  Description of Artificial Sequence: Synthetic oligonucleotide
  Sense strand starting at position 1106 of SEQ ID NO: 586298
gcgucugucccuuagacgu

SEQ ID NO: 707399 - RNA, 19 nt, Artificial Sequence
  Description of Artificial Sequence: Synthetic oligonucleotide
  Antisense strand to SEQ ID NO: 707398
acgucuaagggacagacgc

SEQ ID NO: 707400 - RNA, 19 nt, Artificial Sequence
  Description of Artificial Sequence: Synthetic oligonucleotide
  Sense strand starting at position 1338 of SEQ ID NO: 586298
uguagaagucccggauaau

SEQ ID NO: 707401 - RNA, 19 nt, Artificial Sequence
  Description of Artificial Sequence: Synthetic oligonucleotide
  Antisense strand to SEQ ID NO: 707400
auuauccgggacuucuaca

SEQ ID NO: 707402 - RNA, 19 nt, Artificial Sequence
  Description of Artificial Sequence: Synthetic oligonucleotide
  Sense strand starting at position 1339 of SEQ ID NO: 586298
guagaagucccggauaaug

SEQ ID NO: 707403 - RNA, 19 nt, Artificial Sequence
  Description of Artificial Sequence: Synthetic oligonucleotide
  Antisense strand to SEQ ID NO: 707402
cauuauccgggacuucuac

SEQ ID NO: 707404 - RNA, 19 nt, Artificial Sequence
  Description of Artificial Sequence: Synthetic oligonucleotide
  Sense strand starting at position 1350 of SEQ ID NO: 586298
ggauaaugguguuggccga

SEQ ID NO: 707405 - RNA, 19 nt, Artificial Sequence
  Description of Artificial Sequence: Synthetic oligonucleotide
  Antisense strand to SEQ ID NO: 707404
ucggccaacaccauuaucc

SEQ ID NO: 707406 - RNA, 19 nt, Artificial Sequence
  Description of Artificial Sequence: Synthetic oligonucleotide
  Sense strand starting at position 1645 of SEQ ID NO: 586298
gauguucugcgacgugaug

SEQ ID NO: 707407 - RNA, 19 nt, Artificial Sequence
  Description of Artificial Sequence: Synthetic oligonucleotide
  Antisense strand to SEQ ID NO: 707406
caucacgucgcagaacauc

SEQ ID NO: 707408 - RNA, 19 nt, Artificial Sequence
  Description of Artificial Sequence: Synthetic oligonucleotide
  Sense strand starting at position 1647 of SEQ ID NO: 586298
uguucugcgacgugaugau

SEQ ID NO: 707409 - RNA, 19 nt, Artificial Sequence
  Description of Artificial Sequence: Synthetic oligonucleotide
  Antisense strand to SEQ ID NO: 707408
aucaucacgucgcagaaca

SEQ ID NO: 707410 - RNA, 19 nt, Artificial Sequence
  Description of Artificial Sequence: Synthetic oligonucleotide
  Sense strand starting at position 1659 of SEQ ID NO: 586298
ugaugauguugcugccgau

SEQ ID NO: 707411 - RNA, 19 nt, Artificial Sequence
  Description of Artificial Sequence: Synthetic oligonucleotide
  Antisense strand to SEQ ID NO: 707410
aucggcagcaacaucauca

SEQ ID NO: 707412 - RNA, 19 nt, Artificial Sequence
  Description of Artificial Sequence: Synthetic oligonucleotide
  Sense strand starting at position 1662 of SEQ ID NO: 586298
ugauguugcugccgaugaa

SEQ ID NO: 707413 - RNA, 19 nt, Artificial Sequence
  Description of Artificial Sequence: Synthetic oligonucleotide
  Antisense strand to SEQ ID NO: 707412
uucaucggcagcaacauca

SEQ ID NO: 707414 - RNA, 19 nt, Artificial Sequence
  Description of Artificial Sequence: Synthetic oligonucleotide
  Sense strand starting at position 1755 of SEQ ID NO: 586298
ccgugaucuccaggcccau

SEQ ID NO: 707415 - RNA, 19 nt, Artificial Sequence
  Description of Artificial Sequence: Synthetic oligonucleotide
  Antisense strand to SEQ ID NO: 707414
augggccuggagaucacgg

SEQ ID NO: 707416 - RNA, 19 nt, Artificial Sequence
  Description of Artificial Sequence: Synthetic oligonucleotide
  Sense strand starting at position 2014 of SEQ ID NO: 586298
ggccggugcgucuuagcua

SEQ ID NO: 707417 - RNA, 19 nt, Artificial Sequence
  Description of Artificial Sequence: Synthetic oligonucleotide
  Antisense strand to SEQ ID NO: 707416
uagcuaagacgcaccggcc

SEQ ID NO: 707418 - RNA, 19 nt, Artificial Sequence
  Description of Artificial Sequence: Synthetic oligonucleotide
  Sense strand starting at position 2015 of SEQ ID NO: 586298
gccggugcgucuuagcuaa

SEQ ID NO: 707419 - RNA, 19 nt, Artificial Sequence
  Description of Artificial Sequence: Synthetic oligonucleotide
  Antisense strand to SEQ ID NO: 707418
uuagcuaagacgcaccggc

SEQ ID NO: 707420 - RNA, 19 nt, Artificial Sequence
  Description of Artificial Sequence: Synthetic oligonucleotide
  Sense strand starting at position 2232 of SEQ ID NO: 586298
ucccucucugcucgggaau

SEQ ID NO: 707421 - RNA, 19 nt, Artificial Sequence
  Description of Artificial Sequence: Synthetic oligonucleotide
  Antisense strand to SEQ ID NO: 707420
auucccgagcagagaggga

SEQ ID NO: 707422 - RNA, 19 nt, Artificial Sequence
  Description of Artificial Sequence: Synthetic oligonucleotide
  Sense strand starting at position 2234 of SEQ ID NO: 586298
ccucucugcucgggaauga

SEQ ID NO: 707423 - RNA, 19 nt, Artificial Sequence
  Description of Artificial Sequence: Synthetic oligonucleotide
  Antisense strand to SEQ ID NO: 707422
ucauucccgagcagagagg

SEQ ID NO: 707424 - RNA, 19 nt, Artificial Sequence
  Description of Artificial Sequence: Synthetic oligonucleotide
  Sense strand starting at position 2235 of SEQ ID NO: 586298
cucucugcucgggaaugaa

SEQ ID NO: 707425 - RNA, 19 nt, Artificial Sequence
  Description of Artificial Sequence: Synthetic oligonucleotide
  Antisense strand to SEQ ID NO: 707424
uucauucccgagcagagag

SEQ ID NO: 707426 - RNA, 19 nt, Artificial Sequence
  Description of Artificial Sequence: Synthetic oligonucleotide
  Sense strand starting at position 2296 of SEQ ID NO: 586298
gggugcaaaucccaaagaa

SEQ ID NO: 707427 - RNA, 19 nt, Artificial Sequence
  Description of Artificial Sequence: Synthetic oligonucleotide
  Antisense strand to SEQ ID NO: 707426
uucuuugggauuugcaccc

SEQ ID NO: 707428 - RNA, 19 nt, Artificial Sequence
  Description of Artificial Sequence: Synthetic oligonucleotide
  Sense strand starting at position 2520 of SEQ ID NO: 586298
gguuguccagcccaggaau

SEQ ID NO: 707429 - RNA, 19 nt, Artificial Sequence
  Description of Artificial Sequence: Synthetic oligonucleotide
  Antisense strand to SEQ ID NO: 707428
auuccugggcuggacaacc

SEQ ID NO: 707430 - RNA, 19 nt, Artificial Sequence
  Description of Artificial Sequence: Synthetic oligonucleotide
  Sense strand starting at position 2655 of SEQ ID NO: 586298
gccugcaugccuuuagcua

SEQ ID NO: 707431 - RNA, 19 nt, Artificial Sequence
  Description of Artificial Sequence: Synthetic oligonucleotide
  Antisense strand to SEQ ID NO: 707430
uagcuaaaggcaugcaggc

SEQ ID NO: 707432 - RNA, 19 nt, Artificial Sequence
  Description of Artificial Sequence: Synthetic oligonucleotide
  Sense strand starting at position 2656 of SEQ ID NO: 586298
ccugcaugccuuuagcuaa

SEQ ID NO: 707433 - RNA, 19 nt, Artificial Sequence
  Description of Artificial Sequence: Synthetic oligonucleotide
  Antisense strand to SEQ ID NO: 707432
uuagcuaaaggcaugcagg

SEQ ID NO: 707434 - RNA, 19 nt, Artificial Sequence
  Description of Artificial Sequence: Synthetic oligonucleotide
  Sense strand starting at position 2745 of SEQ ID NO: 586298
ucccuuugagccugaguca

SEQ ID NO: 707435 - RNA, 19 nt, Artificial Sequence
  Description of Artificial Sequence: Synthetic oligonucleotide
  Antisense strand to SEQ ID NO: 707434
ugacucaggcucaaaggga

SEQ ID NO: 707436 - RNA, 19 nt, Artificial Sequence
  Description of Artificial Sequence: Synthetic oligonucleotide
  Sense strand starting at position 2782 of SEQ ID NO: 586298
augaaaugguggugaaaga

SEQ ID NO: 707437 - RNA, 19 nt, Artificial Sequence
  Description of Artificial Sequence: Synthetic oligonucleotide
  Antisense strand to SEQ ID NO: 707436
ucuuucaccaccauuucau

SEQ ID NO: 707438 - RNA, 19 nt, Artificial Sequence
  Description of Artificial Sequence: Synthetic oligonucleotide
  Sense strand starting at position 2799 of SEQ ID NO: 586298
gagguucgaucuccgcaaa

SEQ ID NO: 707439 - RNA, 19 nt, Artificial Sequence
  Description of Artificial Sequence: Synthetic oligonucleotide
  Antisense strand to SEQ ID NO: 707438
uuugcggagaucgaaccuc

SEQ ID NO: 707440 - RNA, 19 nt, Artificial Sequence
  Description of Artificial Sequence: Synthetic oligonucleotide
  Sense strand starting at position 3100 of SEQ ID NO: 586298
cagagcagacccuguuuaa

SEQ ID NO: 707441 - RNA, 19 nt, Artificial Sequence
  Description of Artificial Sequence: Synthetic oligonucleotide
  Antisense strand to SEQ ID NO: 707440
uuaaacagggucugcucug

SEQ ID NO: 707442 - RNA, 19 nt, Artificial Sequence
  Description of Artificial Sequence: Synthetic oligonucleotide
  Sense strand starting at position 3149 of SEQ ID NO: 586298
ggaagucagaaaugcuaca

SEQ ID NO: 707443 - RNA, 19 nt, Artificial Sequence
  Description of Artificial Sequence: Synthetic oligonucleotide
  Antisense strand to SEQ ID NO: 707442
uguagcauuucugacuucc

SEQ ID NO: 707444 - RNA, 19 nt, Artificial Sequence
  Description of Artificial Sequence: Synthetic oligonucleotide
  Sense strand starting at position 3358 of SEQ ID NO: 586298
ggaacaugccugcagacau

SEQ ID NO: 707445 - RNA, 19 nt, Artificial Sequence
  Description of Artificial Sequence: Synthetic oligonucleotide
  Antisense strand to SEQ ID NO: 707444
augucugcaggcauguucc

SEQ ID NO: 707446 - RNA, 19 nt, Artificial Sequence
  Description of Artificial Sequence: Synthetic oligonucleotide
  Sense strand starting at position 3417 of SEQ ID NO: 586298
cagugagucuuucccugac

SEQ ID NO: 707447 - RNA, 19 nt, Artificial Sequence
  Description of Artificial Sequence: Synthetic oligonucleotide
  Antisense strand to SEQ ID NO: 707446
gucagggaaagacucacug

SEQ ID NO: 707448 - RNA, 19 nt, Artificial Sequence
  Description of Artificial Sequence: Synthetic oligonucleotide
  Sense strand starting at position 3419 of SEQ ID NO: 586298
gugagucuuucccugacca

SEQ ID NO: 707449 - RNA, 19 nt, Artificial Sequence
  Description of Artificial Sequence: Synthetic oligonucleotide
  Antisense strand to SEQ ID NO: 707448
uggucagggaaagacucac

SEQ ID NO: 707450 - RNA, 19 nt, Artificial Sequence
  Description of Artificial Sequence: Synthetic oligonucleotide
  Sense strand starting at position 3420 of SEQ ID NO: 586298
ugagucuuucccugaccac

SEQ ID NO: 707451 - RNA, 19 nt, Artificial Sequence
  Description of Artificial Sequence: Synthetic oligonucleotide
  Antisense strand to SEQ ID NO: 707450
guggucagggaaagacuca

SEQ ID NO: 707452 - RNA, 19 nt, Artificial Sequence
  Description of Artificial Sequence: Synthetic oligonucleotide
  Sense strand starting at position 3838 of SEQ ID NO: 586298
guaacaccaucggacaaua

SEQ ID NO: 707453 - RNA, 19 nt, Artificial Sequence
  Description of Artificial Sequence: Synthetic oligonucleotide
  Antisense strand to SEQ ID NO: 707452
uauuguccgaugguguuac

SEQ ID NO: 707454 - RNA, 19 nt, Artificial Sequence
  Description of Artificial Sequence: Synthetic oligonucleotide
  Sense strand starting at position 3846 of SEQ ID NO: 586298
aucggacaauauucuauau

SEQ ID NO: 707455 - RNA, 19 nt, Artificial Sequence
  Description of Artificial Sequence: Synthetic oligonucleotide
  Antisense strand to SEQ ID NO: 707454
auauagaauauuguccgau

SEQ ID NO: 707456 - RNA, 19 nt, Artificial Sequence
  Description of Artificial Sequence: Synthetic oligonucleotide
  Sense strand starting at position 3848 of SEQ ID NO: 586298
cggacaauauucuauauuu

SEQ ID NO: 707457 - RNA, 19 nt, Artificial Sequence
  Description of Artificial Sequence: Synthetic oligonucleotide
  Antisense strand to SEQ ID NO: 707456
aaauauagaauauuguccg

SEQ ID NO: 707458 - RNA, 19 nt, Artificial Sequence
  Description of Artificial Sequence: Synthetic oligonucleotide
  Sense strand starting at position 3965 of SEQ ID NO: 586298
uaguaaucauaucagggua

SEQ ID NO: 707459 - RNA, 19 nt, Artificial Sequence
  Description of Artificial Sequence: Synthetic oligonucleotide
  Antisense strand to SEQ ID NO: 707458
uacccugauaugauuacua

SEQ ID NO: 707460 - RNA, 19 nt, Artificial Sequence
  Description of Artificial Sequence: Synthetic oligonucleotide
  Sense strand starting at position 56 of SEQ ID NO: 586299
uguuuaugucccggccaaa

SEQ ID NO: 707461 - RNA, 19 nt, Artificial Sequence
  Description of Artificial Sequence: Synthetic oligonucleotide
  Antisense strand to SEQ ID NO: 707460
uuuggccgggacauaaaca

SEQ ID NO: 707462 - RNA, 19 nt, Artificial Sequence
  Description of Artificial Sequence: Synthetic oligonucleotide
  Sense strand starting at position 2270 of SEQ ID NO: 586299
gaaugaagucuuggaaacg

SEQ ID NO: 707463 - RNA, 19 nt, Artificial Sequence
  Description of Artificial Sequence: Synthetic oligonucleotide
  Antisense strand to SEQ ID NO: 707462
cguuuccaagacuucauuc

SEQ ID NO: 707464 - RNA, 19 nt, Artificial Sequence
  Description of Artificial Sequence: Synthetic oligonucleotide
  Sense strand starting at position 2279 of SEQ ID NO: 586299
cuuggaaacguccacgaga

SEQ ID NO: 707465 - RNA, 19 nt, Artificial Sequence
  Description of Artificial Sequence: Synthetic oligonucleotide
  Antisense strand to SEQ ID NO: 707464
ucucguggacguuuccaag

SEQ ID NO: 707466 - RNA, 19 nt, Artificial Sequence
  Description of Artificial Sequence: Synthetic oligonucleotide
  Sense strand starting at position 2281 of SEQ ID NO: 586299
uggaaacguccacgagaaa

SEQ ID NO: 707467 - RNA, 19 nt, Artificial Sequence
  Description of Artificial Sequence: Synthetic oligonucleotide
  Antisense strand to SEQ ID NO: 707466
uuucucguggacguuucca

SEQ ID NO: 707468 - RNA, 19 nt, Artificial Sequence
  Description of Artificial Sequence: Synthetic oligonucleotide
  Sense strand starting at position 2302 of SEQ ID NO: 586299
ccaccuugauuauugucau

SEQ ID NO: 707469 - RNA, 19 nt, Artificial Sequence
  Description of Artificial Sequence: Synthetic oligonucleotide
  Antisense strand to SEQ ID NO: 707468
augacaauaaucaaggugg

SEQ ID NO: 707470 - RNA, 19 nt, Artificial Sequence
  Description of Artificial Sequence: Synthetic oligonucleotide
  Sense strand starting at position 2306 of SEQ ID NO: 586299
cuugauuauugucauuucu

SEQ ID NO: 707471 - RNA, 19 nt, Artificial Sequence
  Description of Artificial Sequence: Synthetic oligonucleotide
  Antisense strand to SEQ ID NO: 707470
agaaaugacaauaaucaag

SEQ ID NO: 707472 - RNA, 19 nt, Artificial Sequence
  Description of Artificial Sequence: Synthetic oligonucleotide
  Sense strand starting at position 2358 of SEQ ID NO: 586299
gacuguugugaguaugauc

SEQ ID NO: 707473 - RNA, 19 nt, Artificial Sequence
  Description of Artificial Sequence: Synthetic oligonucleotide
  Antisense strand to SEQ ID NO: 707472
gaucauacucacaacaguc

SEQ ID NO: 707474 - RNA, 19 nt, Artificial Sequence
  Description of Artificial Sequence: Synthetic oligonucleotide
  Sense strand starting at position 2363 of SEQ ID NO: 586299
uugugaguaugaucacuca

SEQ ID NO: 707475 - RNA, 19 nt, Artificial Sequence
  Description of Artificial Sequence: Synthetic oligonucleotide
  Antisense strand to SEQ ID NO: 707474
ugagugaucauacucacaa

SEQ ID NO: 707476 - RNA, 19 nt, Artificial Sequence
  Description of Artificial Sequence: Synthetic oligonucleotide
  Sense strand starting at position 2408 of SEQ ID NO: 586299
gcggcauuggccggauaaa

SEQ ID NO: 707477 - RNA, 19 nt, Artificial Sequence
  Description of Artificial Sequence: Synthetic oligonucleotide
  Antisense strand to SEQ ID NO: 707476
uuuauccggccaaugccgc

SEQ ID NO: 707478 - RNA, 19 nt, Artificial Sequence
  Description of Artificial Sequence: Synthetic oligonucleotide
  Sense strand starting at position 2409 of SEQ ID NO: 586299
cggcauuggccggauaaag

SEQ ID NO: 707479 - RNA, 19 nt, Artificial Sequence
  Description of Artificial Sequence: Synthetic oligonucleotide
  Antisense strand to SEQ ID NO: 707478
cuuuauccggccaaugccg

SEQ ID NO: 707480 - RNA, 19 nt, Artificial Sequence
  Description of Artificial Sequence: Synthetic oligonucleotide
  Sense strand starting at position 2506 of SEQ ID NO: 586299
gcuucucugcuuggcuaga

SEQ ID NO: 707481 - RNA, 19 nt, Artificial Sequence
  Description of Artificial Sequence: Synthetic oligonucleotide
  Antisense strand to SEQ ID NO: 707480
ucuagccaagcagagaagc

SEQ ID NO: 707482 - RNA, 19 nt, Artificial Sequence
  Description of Artificial Sequence: Synthetic oligonucleotide
  Sense strand starting at position 2507 of SEQ ID NO: 586299
cuucucugcuuggcuagaa

SEQ ID NO: 707483 - RNA, 19 nt, Artificial Sequence
  Description of Artificial Sequence: Synthetic oligonucleotide
  Antisense strand to SEQ ID NO: 707482
uucuagccaagcagagaag

SEQ ID NO: 707484 - RNA, 19 nt, Artificial Sequence
  Description of Artificial Sequence: Synthetic oligonucleotide
  Sense strand starting at position 2707 of SEQ ID NO: 586299
cccaguaaauggguguuua

SEQ ID NO: 707485 - RNA, 19 nt, Artificial Sequence
  Description of Artificial Sequence: Synthetic oligonucleotide
  Antisense strand to SEQ ID NO: 707484
uaaacacccauuuacuggg

SEQ ID NO: 707486 - RNA, 19 nt, Artificial Sequence
  Description of Artificial Sequence: Synthetic oligonucleotide
  Sense strand starting at position 2708 of SEQ ID NO: 586299
ccaguaaauggguguuuac

SEQ ID NO: 707487 - RNA, 19 nt, Artificial Sequence
  Description of Artificial Sequence: Synthetic oligonucleotide
  Antisense strand to SEQ ID NO: 707486
guaaacacccauuuacugg

SEQ ID NO: 707488 - RNA, 19 nt, Artificial Sequence
  Description of Artificial Sequence: Synthetic oligonucleotide
  Sense strand starting at position 2717 of SEQ ID NO: 586299
ggguguuuacccuguggag

SEQ ID NO: 707489 - RNA, 19 nt, Artificial Sequence
  Description of Artificial Sequence: Synthetic oligonucleotide
  Antisense strand to SEQ ID NO: 707488
cuccacaggguaaacaccc

SEQ ID NO: 707490 - RNA, 19 nt, Artificial Sequence
  Description of Artificial Sequence: Synthetic oligonucleotide
  Sense strand starting at position 2719 of SEQ ID NO: 586299
guguuuacccuguggagac

SEQ ID NO: 707491 - RNA, 19 nt, Artificial Sequence
  Description of Artificial Sequence: Synthetic oligonucleotide
  Antisense strand to SEQ ID NO: 707490
gucuccacaggguaaacac

SEQ ID NO: 707492 - RNA, 19 nt, Artificial Sequence
  Description of Artificial Sequence: Synthetic oligonucleotide
  Sense strand starting at position 2769 of SEQ ID NO: 586299
ugcaaagucccaugagauu

SEQ ID NO: 707493 - RNA, 19 nt, Artificial Sequence
  Description of Artificial Sequence: Synthetic oligonucleotide
  Antisense strand to SEQ ID NO: 707492
aaucucaugggacuuugca

SEQ ID NO: 707494 - RNA, 19 nt, Artificial Sequence
  Description of Artificial Sequence: Synthetic oligonucleotide
  Sense strand starting at position 2800 of SEQ ID NO: 586299
ggaacucuuccagggugga

SEQ ID NO: 707495 - RNA, 19 nt, Artificial Sequence
  Description of Artificial Sequence: Synthetic oligonucleotide
  Antisense strand to SEQ ID NO: 707494
uccacccuggaagaguucc

SEQ ID NO: 707496 - RNA, 19 nt, Artificial Sequence
  Description of Artificial Sequence: Synthetic oligonucleotide
  Sense strand starting at position 2831 of SEQ ID NO: 586299
gagggagcuugacugcaaa

SEQ ID NO: 707497 - RNA, 19 nt, Artificial Sequence
  Description of Artificial Sequence: Synthetic oligonucleotide
  Antisense strand to SEQ ID NO: 707496
uuugcagucaagcucccuc

SEQ ID NO: 707498 - RNA, 19 nt, Artificial Sequence
  Description of Artificial Sequence: Synthetic oligonucleotide
  Sense strand starting at position 2883 of SEQ ID NO: 586299
ggauucuuggaguaugcua

SEQ ID NO: 707499 - RNA, 19 nt, Artificial Sequence
  Description of Artificial Sequence: Synthetic oligonucleotide
  Antisense strand to SEQ ID NO: 707498
uagcauacuccaagaaucc

SEQ ID NO: 707500 - RNA, 19 nt, Artificial Sequence
  Description of Artificial Sequence: Synthetic oligonucleotide
  Sense strand starting at position 3004 of SEQ ID NO: 586299
agcucauucugggaugaca

SEQ ID NO: 707501 - RNA, 19 nt, Artificial Sequence
  Description of Artificial Sequence: Synthetic oligonucleotide
  Antisense strand to SEQ ID NO: 707500
ugucaucccagaaugagcu

SEQ ID NO: 707502 - RNA, 19 nt, Artificial Sequence
  Description of Artificial Sequence: Synthetic oligonucleotide
  Sense strand starting at position 3139 of SEQ ID NO: 586299
aauccaguuugaccagaga

SEQ ID NO: 707503 - RNA, 19 nt, Artificial Sequence
  Description of Artificial Sequence: Synthetic oligonucleotide
  Antisense strand to SEQ ID NO: 707502
ucucuggucaaacuggauu

SEQ ID NO: 707504 - RNA, 19 nt, Artificial Sequence
  Description of Artificial Sequence: Synthetic oligonucleotide
  Sense strand starting at position 3257 of SEQ ID NO: 586299
ucaggaagagcuugguuca

SEQ ID NO: 707505 - RNA, 19 nt, Artificial Sequence
  Description of Artificial Sequence: Synthetic oligonucleotide
  Antisense strand to SEQ ID NO: 707504
ugaaccaagcucuuccuga

SEQ ID NO: 707506 - RNA, 19 nt, Artificial Sequence
  Description of Artificial Sequence: Synthetic oligonucleotide
  Sense strand starting at position 3319 of SEQ ID NO: 586299
ggugauugagagugucuag

SEQ ID NO: 707507 - RNA, 19 nt, Artificial Sequence
  Description of Artificial Sequence: Synthetic oligonucleotide
  Antisense strand to SEQ ID NO: 707506
cuagacacucucaaucacc

SEQ ID NO: 707508 - RNA, 19 nt, Artificial Sequence
  Description of Artificial Sequence: Synthetic oligonucleotide
  Sense strand starting at position 3508 of SEQ ID NO: 586299
gaugcauaguccuugagcu

SEQ ID NO: 707509 - RNA, 19 nt, Artificial Sequence
  Description of Artificial Sequence: Synthetic oligonucleotide
  Antisense strand to SEQ ID NO: 707508
agcucaaggacuaugcauc

SEQ ID NO: 707510 - RNA, 19 nt, Artificial Sequence
  Description of Artificial Sequence: Synthetic oligonucleotide
  Sense strand starting at position 3509 of SEQ ID NO: 586299
augcauaguccuugagcuu

SEQ ID NO: 707511 - RNA, 19 nt, Artificial Sequence
  Description of Artificial Sequence: Synthetic oligonucleotide
  Antisense strand to SEQ ID NO: 707510
aagcucaaggacuaugcau

SEQ ID NO: 707512 - RNA, 19 nt, Artificial Sequence
  Description of Artificial Sequence: Synthetic oligonucleotide
  Sense strand starting at position 3522 of SEQ ID NO: 586299
gagcuuccugagggaaagu

SEQ ID NO: 707513 - RNA, 19 nt, Artificial Sequence
  Description of Artificial Sequence: Synthetic oligonucleotide
  Antisense strand to SEQ ID NO: 707512
acuuucccucaggaagcuc

SEQ ID NO: 707514 - RNA, 19 nt, Artificial Sequence
  Description of Artificial Sequence: Synthetic oligonucleotide
  Sense strand starting at position 3543 of SEQ ID NO: 586299
ucaagagugccaugguuug

SEQ ID NO: 707515 - RNA, 19 nt, Artificial Sequence
  Description of Artificial Sequence: Synthetic oligonucleotide
  Antisense strand to SEQ ID NO: 707514
caaaccauggcacucuuga

SEQ ID NO: 707516 - RNA, 19 nt, Artificial Sequence
  Description of Artificial Sequence: Synthetic oligonucleotide
  Sense strand starting at position 3553 of SEQ ID NO: 586299
caugguuuggguuaaagca

SEQ ID NO: 707517 - RNA, 19 nt, Artificial Sequence
  Description of Artificial Sequence: Synthetic oligonucleotide
  Antisense strand to SEQ ID NO: 707516
ugcuuuaacccaaaccaug

SEQ ID NO: 707518 - RNA, 19 nt, Artificial Sequence
  Description of Artificial Sequence: Synthetic oligonucleotide
  Sense strand starting at position 3589 of SEQ ID NO: 586299
ggagguauuugagauggau

SEQ ID NO: 707519 - RNA, 19 nt, Artificial Sequence
  Description of Artificial Sequence: Synthetic oligonucleotide
  Antisense strand to SEQ ID NO: 707518
auccaucucaaauaccucc

SEQ ID NO: 707520 - RNA, 19 nt, Artificial Sequence
  Description of Artificial Sequence: Synthetic oligonucleotide
  Sense strand starting at position 3597 of SEQ ID NO: 586299
uugagauggaucuguugac

SEQ ID NO: 707521 - RNA, 19 nt, Artificial Sequence
  Description of Artificial Sequence: Synthetic oligonucleotide
  Antisense strand to SEQ ID NO: 707520
gucaacagauccaucucaa

SEQ ID NO: 707522 - RNA, 19 nt, Artificial Sequence
  Description of Artificial Sequence: Synthetic oligonucleotide
  Sense strand starting at position 3604 of SEQ ID NO: 586299
ggaucuguugaccggcuaa

SEQ ID NO: 707523 - RNA, 19 nt, Artificial Sequence
  Description of Artificial Sequence: Synthetic oligonucleotide
  Antisense strand to SEQ ID NO: 707522
uuagccggucaacagaucc

SEQ ID NO: 707524 - RNA, 19 nt, Artificial Sequence
  Description of Artificial Sequence: Synthetic oligonucleotide
  Sense strand starting at position 3665 of SEQ ID NO: 586299
guguuacagacgggaaguu

SEQ ID NO: 707525 - RNA, 19 nt, Artificial Sequence
  Description of Artificial Sequence: Synthetic oligonucleotide
  Antisense strand to SEQ ID NO: 707524
aacuucccgucuguaacac

SEQ ID NO: 707526 - RNA, 19 nt, Artificial Sequence
  Description of Artificial Sequence: Synthetic oligonucleotide
  Sense strand starting at position 3678 of SEQ ID NO: 586299
gaaguugaggccugguauu

SEQ ID NO: 707527 - RNA, 19 nt, Artificial Sequence
  Description of Artificial Sequence: Synthetic oligonucleotide
  Antisense strand to SEQ ID NO: 707526
aauaccaggccucaacuuc

SEQ ID NO: 707528 - RNA, 19 nt, Artificial Sequence
  Description of Artificial Sequence: Synthetic oligonucleotide
  Sense strand starting at position 3689 of SEQ ID NO: 586299
cugguauugugguuaacuc

SEQ ID NO: 707529 - RNA, 19 nt, Artificial Sequence
  Description of Artificial Sequence: Synthetic oligonucleotide
  Antisense strand to SEQ ID NO: 707528
gaguuaaccacaauaccag

SEQ ID NO: 707530 - RNA, 19 nt, Artificial Sequence
  Description of Artificial Sequence: Synthetic oligonucleotide
  Sense strand starting at position 3690 of SEQ ID NO: 586299
ugguauugugguuaacucu

SEQ ID NO: 707531 - RNA, 19 nt, Artificial Sequence
  Description of Artificial Sequence: Synthetic oligonucleotide
  Antisense strand to SEQ ID NO: 707530
agaguuaaccacaauacca

SEQ ID NO: 707532 - RNA, 19 nt, Artificial Sequence
  Description of Artificial Sequence: Synthetic oligonucleotide
  Sense strand starting at position 3696 of SEQ ID NO: 586299
ugugguuaacucuauacac

SEQ ID NO: 707533 - RNA, 19 nt, Artificial Sequence
  Description of Artificial Sequence: Synthetic oligonucleotide
  Antisense strand to SEQ ID NO: 707532
guguauagaguuaaccaca

SEQ ID NO: 707534 - RNA, 19 nt, Artificial Sequence
  Description of Artificial Sequence: Synthetic oligonucleotide
  Sense strand starting at position 3780 of SEQ ID NO: 586299
cccagcaucuggcuugaua

SEQ ID NO: 707535 - RNA, 19 nt, Artificial Sequence
  Description of Artificial Sequence: Synthetic oligonucleotide
  Antisense strand to SEQ ID NO: 707534
uaucaagccagaugcuggg

SEQ ID NO: 707536 - RNA, 19 nt, Artificial Sequence
  Description of Artificial Sequence: Synthetic oligonucleotide
  Sense strand starting at position 3782 of SEQ ID NO: 586299
cagcaucuggcuugauaca

SEQ ID NO: 707537 - RNA, 19 nt, Artificial Sequence
  Description of Artificial Sequence: Synthetic oligonucleotide
  Antisense strand to SEQ ID NO: 707536
uguaucaagccagaugcug

SEQ ID NO: 707538 - RNA, 19 nt, Artificial Sequence
  Description of Artificial Sequence: Synthetic oligonucleotide
  Sense strand starting at position 3783 of SEQ ID NO: 586299
agcaucuggcuugauacau

SEQ ID NO: 707539 - RNA, 19 nt, Artificial Sequence
  Description of Artificial Sequence: Synthetic oligonucleotide
  Antisense strand to SEQ ID NO: 707538
auguaucaagccagaugcu

SEQ ID NO: 707540 - RNA, 19 nt, Artificial Sequence
  Description of Artificial Sequence: Synthetic oligonucleotide
  Sense strand starting at position 55 of SEQ ID NO: 586300
guguguggucuguucugca

SEQ ID NO: 707541 - RNA, 19 nt, Artificial Sequence
  Description of Artificial Sequence: Synthetic oligonucleotide
  Antisense strand to SEQ ID NO: 707540
ugcagaacagaccacacac

SEQ ID NO: 707542 - RNA, 19 nt, Artificial Sequence
  Description of Artificial Sequence: Synthetic oligonucleotide
  Sense strand starting at position 244 of SEQ ID NO: 586300
cagaaaugcugacgaauaa

SEQ ID NO: 707543 - RNA, 19 nt, Artificial Sequence
  Description of Artificial Sequence: Synthetic oligonucleotide
  Antisense strand to SEQ ID NO: 707542
uuauucgucagcauuucug

SEQ ID NO: 707544 - RNA, 19 nt, Artificial Sequence
  Description of Artificial Sequence: Synthetic oligonucleotide
  Sense strand starting at position 303 of SEQ ID NO: 586300
agaaauagcuuuggcagga

SEQ ID NO: 707545 - RNA, 19 nt, Artificial Sequence
  Description of Artificial Sequence: Synthetic oligonucleotide
  Antisense strand to SEQ ID NO: 707544
uccugccaaagcuauuucu

SEQ ID NO: 707546 - RNA, 19 nt, Artificial Sequence
  Description of Artificial Sequence: Synthetic oligonucleotide
  Sense strand starting at position 307 of SEQ ID NO: 586300
auagcuuuggcaggaguga

SEQ ID NO: 707547 - RNA, 19 nt, Artificial Sequence
  Description of Artificial Sequence: Synthetic oligonucleotide
  Antisense strand to SEQ ID NO: 707546
ucacuccugccaaagcuau

SEQ ID NO: 707548 - RNA, 19 nt, Artificial Sequence
  Description of Artificial Sequence: Synthetic oligonucleotide
  Sense strand starting at position 308 of SEQ ID NO: 586300
uagcuuuggcaggagugaa

SEQ ID NO: 707549 - RNA, 19 nt, Artificial Sequence
  Description of Artificial Sequence: Synthetic oligonucleotide
  Antisense strand to SEQ ID NO: 707548
uucacuccugccaaagcua

SEQ ID NO: 707550 - RNA, 19 nt, Artificial Sequence
  Description of Artificial Sequence: Synthetic oligonucleotide
  Sense strand starting at position 340 of SEQ ID NO: 586300
gggccacuccaacaguaaa

SEQ ID NO: 707551 - RNA, 19 nt, Artificial Sequence
  Description of Artificial Sequence: Synthetic oligonucleotide
  Antisense strand to SEQ ID NO: 707550
uuuacuguuggaguggccc

SEQ ID NO: 707552 - RNA, 19 nt, Artificial Sequence
  Description of Artificial Sequence: Synthetic oligonucleotide
  Sense strand starting at position 438 of SEQ ID NO: 586300
cagcucuucuccuugguga

SEQ ID NO: 707553 - RNA, 19 nt, Artificial Sequence
  Description of Artificial Sequence: Synthetic oligonucleotide
  Antisense strand to SEQ ID NO: 707552
ucaccaaggagaagagcug

SEQ ID NO: 707554 - RNA, 19 nt, Artificial Sequence
  Description of Artificial Sequence: Synthetic oligonucleotide
  Sense strand starting at position 1164 of SEQ ID NO: 586300
ggcgguagcuaauacaagu

SEQ ID NO: 707555 - RNA, 19 nt, Artificial Sequence
  Description of Artificial Sequence: Synthetic oligonucleotide
  Antisense strand to SEQ ID NO: 707554
acuuguauuagcuaccgcc

SEQ ID NO: 707556 - RNA, 19 nt, Artificial Sequence
  Description of Artificial Sequence: Synthetic oligonucleotide
  Sense strand starting at position 1306 of SEQ ID NO: 586300
ggaagagccucuccuggau

SEQ ID NO: 707557 - RNA, 19 nt, Artificial Sequence
  Description of Artificial Sequence: Synthetic oligonucleotide
  Antisense strand to SEQ ID NO: 707556
auccaggagaggcucuucc

SEQ ID NO: 707558 - RNA, 19 nt, Artificial Sequence
  Description of Artificial Sequence: Synthetic oligonucleotide
  Sense strand starting at position 1429 of SEQ ID NO: 586300
acuuuacucgaagcguguu

SEQ ID NO: 707559 - RNA, 19 nt, Artificial Sequence
  Description of Artificial Sequence: Synthetic oligonucleotide
  Antisense strand to SEQ ID NO: 707558
aacacgcuucgaguaaagu

SEQ ID NO: 707560 - RNA, 19 nt, Artificial Sequence
  Description of Artificial Sequence: Synthetic oligonucleotide
  Sense strand starting at position 1434 of SEQ ID NO: 586300
acucgaagcguguucacga

SEQ ID NO: 707561 - RNA, 19 nt, Artificial Sequence
  Description of Artificial Sequence: Synthetic oligonucleotide
  Antisense strand to SEQ ID NO: 707560
ucgugaacacgcuucgagu

SEQ ID NO: 707562 - RNA, 19 nt, Artificial Sequence
  Description of Artificial Sequence: Synthetic oligonucleotide
  Sense strand starting at position 1442 of SEQ ID NO: 586300
cguguucacgaccacagau

SEQ ID NO: 707563 - RNA, 19 nt, Artificial Sequence
  Description of Artificial Sequence: Synthetic oligonucleotide
  Antisense strand to SEQ ID NO: 707562
aucuguggucgugaacacg

SEQ ID NO: 707564 - RNA, 19 nt, Artificial Sequence
  Description of Artificial Sequence: Synthetic oligonucleotide
  Sense strand starting at position 1512 of SEQ ID NO: 586300
cccuucaugcgugaggaga

SEQ ID NO: 707565 - RNA, 19 nt, Artificial Sequence
  Description of Artificial Sequence: Synthetic oligonucleotide
  Antisense strand to SEQ ID NO: 707564
ucuccucacgcaugaaggg

SEQ ID NO: 707566 - RNA, 19 nt, Artificial Sequence
  Description of Artificial Sequence: Synthetic oligonucleotide
  Sense strand starting at position 2416 of SEQ ID NO: 586300
gagaccugguucuaacuca

SEQ ID NO: 707567 - RNA, 19 nt, Artificial Sequence
  Description of Artificial Sequence: Synthetic oligonucleotide
  Antisense strand to SEQ ID NO: 707566
ugaguuagaaccaggucuc

SEQ ID NO: 707568 - RNA, 19 nt, Artificial Sequence
  Description of Artificial Sequence: Synthetic oligonucleotide
  Sense strand starting at position 2585 of SEQ ID NO: 586300
ccaaacucuugauaaagga

SEQ ID NO: 707569 - RNA, 19 nt, Artificial Sequence
  Description of Artificial Sequence: Synthetic oligonucleotide
  Antisense strand to SEQ ID NO: 707568
uccuuuaucaagaguuugg

SEQ ID NO: 707570 - RNA, 19 nt, Artificial Sequence
  Description of Artificial Sequence: Synthetic oligonucleotide
  Sense strand starting at position 2602 of SEQ ID NO: 586300
gagagaaacguccgaacga

SEQ ID NO: 707571 - RNA, 19 nt, Artificial Sequence
  Description of Artificial Sequence: Synthetic oligonucleotide
  Antisense strand to SEQ ID NO: 707570
ucguucggacguuucucuc

SEQ ID NO: 707572 - RNA, 19 nt, Artificial Sequence
  Description of Artificial Sequence: Synthetic oligonucleotide
  Sense strand starting at position 2603 of SEQ ID NO: 586300
agagaaacguccgaacgau

SEQ ID NO: 707573 - RNA, 19 nt, Artificial Sequence
  Description of Artificial Sequence: Synthetic oligonucleotide
  Antisense strand to SEQ ID NO: 707572
aucguucggacguuucucu

SEQ ID NO: 707574 - RNA, 19 nt, Artificial Sequence
  Description of Artificial Sequence: Synthetic oligonucleotide
  Sense strand starting at position 2654 of SEQ ID NO: 586300
gcgaagugacguugcagau

SEQ ID NO: 707575 - RNA, 19 nt, Artificial Sequence
  Description of Artificial Sequence: Synthetic oligonucleotide
  Antisense strand to SEQ ID NO: 707574
aucugcaacgucacuucgc

SEQ ID NO: 707576 - RNA, 19 nt, Artificial Sequence
  Description of Artificial Sequence: Synthetic oligonucleotide
  Sense strand starting at position 2658 of SEQ ID NO: 586300
agugacguugcagauucaa

SEQ ID NO: 707577 - RNA, 19 nt, Artificial Sequence
  Description of Artificial Sequence: Synthetic oligonucleotide
  Antisense strand to SEQ ID NO: 707576
uugaaucugcaacgucacu

SEQ ID NO: 707578 - RNA, 19 nt, Artificial Sequence
  Description of Artificial Sequence: Synthetic oligonucleotide
  Sense strand starting at position 2747 of SEQ ID NO: 586300
gaggcugagaaguggaauu

SEQ ID NO: 707579 - RNA, 19 nt, Artificial Sequence
  Description of Artificial Sequence: Synthetic oligonucleotide
  Antisense strand to SEQ ID NO: 707578
aauuccacuucucagccuc

SEQ ID NO: 707580 - RNA, 19 nt, Artificial Sequence
  Description of Artificial Sequence: Synthetic oligonucleotide
  Sense strand starting at position 3020 of SEQ ID NO: 586300
gccacugacucuugugaau

SEQ ID NO: 707581 - RNA, 19 nt, Artificial Sequence
  Description of Artificial Sequence: Synthetic oligonucleotide
  Antisense strand to SEQ ID NO: 707580
auucacaagagucaguggc

SEQ ID NO: 707582 - RNA, 19 nt, Artificial Sequence
  Description of Artificial Sequence: Synthetic oligonucleotide
  Sense strand starting at position 3529 of SEQ ID NO: 586300
aacucuuagucugcgcauu

SEQ ID NO: 707583 - RNA, 19 nt, Artificial Sequence
  Description of Artificial Sequence: Synthetic oligonucleotide
  Antisense strand to SEQ ID NO: 707582
aaugcgcagacuaagaguu

SEQ ID NO: 707584 - RNA, 19 nt, Artificial Sequence
  Description of Artificial Sequence: Synthetic oligonucleotide
  Sense strand starting at position 3722 of SEQ ID NO: 586300
ggucccuuuaccuguggau

SEQ ID NO: 707585 - RNA, 19 nt, Artificial Sequence
  Description of Artificial Sequence: Synthetic oligonucleotide
  Antisense strand to SEQ ID NO: 707584
auccacagguaaagggacc

SEQ ID NO: 707586 - RNA, 19 nt, Artificial Sequence
  Description of Artificial Sequence: Synthetic oligonucleotide
  Sense strand starting at position 3724 of SEQ ID NO: 586300
ucccuuuaccuguggauua

SEQ ID NO: 707587 - RNA, 19 nt, Artificial Sequence
  Description of Artificial Sequence: Synthetic oligonucleotide
  Antisense strand to SEQ ID NO: 707586
uaauccacagguaaaggga

SEQ ID NO: 707588 - RNA, 19 nt, Artificial Sequence
  Description of Artificial Sequence: Synthetic oligonucleotide
  Sense strand starting at position 3725 of SEQ ID NO: 586300
cccuuuaccuguggauuaa

SEQ ID NO: 707589 - RNA, 19 nt, Artificial Sequence
  Description of Artificial Sequence: Synthetic oligonucleotide
  Antisense strand to SEQ ID NO: 707588
uuaauccacagguaaaggg

SEQ ID NO: 707590 - RNA, 19 nt, Artificial Sequence
  Description of Artificial Sequence: Synthetic oligonucleotide
  Sense strand starting at position 3735 of SEQ ID NO: 586300
guggauuaaggccaucuuu

SEQ ID NO: 707591 - RNA, 19 nt, Artificial Sequence
  Description of Artificial Sequence: Synthetic oligonucleotide
  Antisense strand to SEQ ID NO: 707590
aaagauggccuuaauccac

SEQ ID NO: 707592 - RNA, 19 nt, Artificial Sequence
  Description of Artificial Sequence: Synthetic oligonucleotide
  Sense strand starting at position 3768 of SEQ ID NO: 586300
ggucccucauggucaaagu

SEQ ID NO: 707593 - RNA, 19 nt, Artificial Sequence
  Description of Artificial Sequence: Synthetic oligonucleotide
  Antisense strand to SEQ ID NO: 707592
acuuugaccaugagggacc

SEQ ID NO: 707594 - RNA, 19 nt, Artificial Sequence
  Description of Artificial Sequence: Synthetic oligonucleotide
  Sense strand starting at position 3976 of SEQ ID NO: 586300
gcuaaugcuucugauugca

SEQ ID NO: 707595 - RNA, 19 nt, Artificial Sequence
  Description of Artificial Sequence: Synthetic oligonucleotide
  Antisense strand to SEQ ID NO: 707594
ugcaaucagaagcauuagc

SEQ ID NO: 707596 - RNA, 19 nt, Artificial Sequence
  Description of Artificial Sequence: Synthetic oligonucleotide
  Sense strand starting at position 3 of SEQ ID NO: 586301
gaaggaagcugguuuaauc

SEQ ID NO: 707597 - RNA, 19 nt, Artificial Sequence
  Description of Artificial Sequence: Synthetic oligonucleotide
  Antisense strand to SEQ ID NO: 707596
gauuaaaccagcuuccuuc

SEQ ID NO: 707598 - RNA, 19 nt, Artificial Sequence
  Description of Artificial Sequence: Synthetic oligonucleotide
  Sense strand starting at position 235 of SEQ ID NO: 586301
aagaauuucuugggaaagg

SEQ ID NO: 707599 - RNA, 19 nt, Artificial Sequence
  Description of Artificial Sequence: Synthetic oligonucleotide
  Antisense strand to SEQ ID NO: 707598
ccuuucccaagaaauucuu

SEQ ID NO: 707600 - RNA, 19 nt, Artificial Sequence
  Description of Artificial Sequence: Synthetic oligonucleotide
  Sense strand starting at position 428 of SEQ ID NO: 586301
augugacugcaugaugaau

SEQ ID NO: 707601 - RNA, 19 nt, Artificial Sequence
  Description of Artificial Sequence: Synthetic oligonucleotide
  Antisense strand to SEQ ID NO: 707600
auucaucaugcagucacau

SEQ ID NO: 707602 - RNA, 19 nt, Artificial Sequence
  Description of Artificial Sequence: Synthetic oligonucleotide
  Sense strand starting at position 479 of SEQ ID NO: 586301
ggguacugugacuauuagu

SEQ ID NO: 707603 - RNA, 19 nt, Artificial Sequence
  Description of Artificial Sequence: Synthetic oligonucleotide
  Antisense strand to SEQ ID NO: 707602
acuaauagucacaguaccc

SEQ ID NO: 707604 - RNA, 19 nt, Artificial Sequence
  Description of Artificial Sequence: Synthetic oligonucleotide
  Sense strand starting at position 484 of SEQ ID NO: 586301
cugugacuauuagugggaa

SEQ ID NO: 707605 - RNA, 19 nt, Artificial Sequence
  Description of Artificial Sequence: Synthetic oligonucleotide
  Antisense strand to SEQ ID NO: 707604
uucccacuaauagucacag

SEQ ID NO: 707606 - RNA, 19 nt, Artificial Sequence
  Description of Artificial Sequence: Synthetic oligonucleotide
  Sense strand starting at position 486 of SEQ ID NO: 586301
gugacuauuagugggaaau

SEQ ID NO: 707607 - RNA, 19 nt, Artificial Sequence
  Description of Artificial Sequence: Synthetic oligonucleotide
  Antisense strand to SEQ ID NO: 707606
auuucccacuaauagucac

SEQ ID NO: 707608 - RNA, 19 nt, Artificial Sequence
  Description of Artificial Sequence: Synthetic oligonucleotide
  Sense strand starting at position 511 of SEQ ID NO: 586301
cucucugacucagugaaga

SEQ ID NO: 707609 - RNA, 19 nt, Artificial Sequence
  Description of Artificial Sequence: Synthetic oligonucleotide
  Antisense strand to SEQ ID NO: 707608
ucuucacugagucagagag

SEQ ID NO: 707610 - RNA, 19 nt, Artificial Sequence
  Description of Artificial Sequence: Synthetic oligonucleotide
  Sense strand starting at position 522 of SEQ ID NO: 586301
agugaagaugcauaaaugu

SEQ ID NO: 707611 - RNA, 19 nt, Artificial Sequence
  Description of Artificial Sequence: Synthetic oligonucleotide
  Antisense strand to SEQ ID NO: 707610
acauuuaugcaucuucacu

SEQ ID NO: 707612 - RNA, 19 nt, Artificial Sequence
  Description of Artificial Sequence: Synthetic oligonucleotide
  Sense strand starting at position 580 of SEQ ID NO: 586301
gcugucugacaugauagga

SEQ ID NO: 707613 - RNA, 19 nt, Artificial Sequence
  Description of Artificial Sequence: Synthetic oligonucleotide
  Antisense strand to SEQ ID NO: 707612
uccuaucaugucagacagc

SEQ ID NO: 707614 - RNA, 19 nt, Artificial Sequence
  Description of Artificial Sequence: Synthetic oligonucleotide
  Sense strand starting at position 660 of SEQ ID NO: 586301
acguuuccuuccucauuua

SEQ ID NO: 707615 - RNA, 19 nt, Artificial Sequence
  Description of Artificial Sequence: Synthetic oligonucleotide
  Antisense strand to SEQ ID NO: 707614
uaaaugaggaaggaaacgu

SEQ ID NO: 707616 - RNA, 19 nt, Artificial Sequence
  Description of Artificial Sequence: Synthetic oligonucleotide
  Sense strand starting at position 661 of SEQ ID NO: 586301
cguuuccuuccucauuuau

SEQ ID NO: 707617 - RNA, 19 nt, Artificial Sequence
  Description of Artificial Sequence: Synthetic oligonucleotide
  Antisense strand to SEQ ID NO: 707616
auaaaugaggaaggaaacg

SEQ ID NO: 707618 - RNA, 19 nt, Artificial Sequence
  Description of Artificial Sequence: Synthetic oligonucleotide
  Sense strand starting at position 705 of SEQ ID NO: 586301
agaagauucuaguuucuga

SEQ ID NO: 707619 - RNA, 19 nt, Artificial Sequence
  Description of Artificial Sequence: Synthetic oligonucleotide
  Antisense strand to SEQ ID NO: 707618
ucagaaacuagaaucuucu

SEQ ID NO: 707620 - RNA, 19 nt, Artificial Sequence
  Description of Artificial Sequence: Synthetic oligonucleotide
  Sense strand starting at position 742 of SEQ ID NO: 586301
auaggaggcuucuuuaacu

SEQ ID NO: 707621 - RNA, 19 nt, Artificial Sequence
  Description of Artificial Sequence: Synthetic oligonucleotide
  Antisense strand to SEQ ID NO: 707620
aguuaaagaagccuccuau

SEQ ID NO: 707622 - RNA, 19 nt, Artificial Sequence
  Description of Artificial Sequence: Synthetic oligonucleotide
  Sense strand starting at position 970 of SEQ ID NO: 586301
cguucuaaccaucagaaac

SEQ ID NO: 707623 - RNA, 19 nt, Artificial Sequence
  Description of Artificial Sequence: Synthetic oligonucleotide
  Antisense strand to SEQ ID NO: 707622
guuucugaugguuagaacg

SEQ ID NO: 707624 - RNA, 19 nt, Artificial Sequence
  Description of Artificial Sequence: Synthetic oligonucleotide
  Sense strand starting at position 995 of SEQ ID NO: 586301
guucuauaucuccaaggua

SEQ ID NO: 707625 - RNA, 19 nt, Artificial Sequence
  Description of Artificial Sequence: Synthetic oligonucleotide
  Antisense strand to SEQ ID NO: 707624
uaccuuggagauauagaac

SEQ ID NO: 707626 - RNA, 19 nt, Artificial Sequence
  Description of Artificial Sequence: Synthetic oligonucleotide
  Sense strand starting at position 998 of SEQ ID NO: 586301
cuauaucuccaagguagac

SEQ ID NO: 707627 - RNA, 19 nt, Artificial Sequence
  Description of Artificial Sequence: Synthetic oligonucleotide
  Antisense strand to SEQ ID NO: 707626
gucuaccuuggagauauag

SEQ ID NO: 707628 - RNA, 19 nt, Artificial Sequence
  Description of Artificial Sequence: Synthetic oligonucleotide
  Sense strand starting at position 1050 of SEQ ID NO: 586301
ugagaaaggcauugccaau

SEQ ID NO: 707629 - RNA, 19 nt, Artificial Sequence
  Description of Artificial Sequence: Synthetic oligonucleotide
  Antisense strand to SEQ ID NO: 707628
auuggcaaugccuuucuca

SEQ ID NO: 707630 - RNA, 19 nt, Artificial Sequence
  Description of Artificial Sequence: Synthetic oligonucleotide
  Sense strand starting at position 1074 of SEQ ID NO: 586301
ucagguugggucaguuagu

SEQ ID NO: 707631 - RNA, 19 nt, Artificial Sequence
  Description of Artificial Sequence: Synthetic oligonucleotide
  Antisense strand to SEQ ID NO: 707630
acuaacugacccaaccuga

SEQ ID NO: 707632 - RNA, 19 nt, Artificial Sequence
  Description of Artificial Sequence: Synthetic oligonucleotide
  Sense strand starting at position 1274 of SEQ ID NO: 586301
gugccaguucaugaugaag

SEQ ID NO: 707633 - RNA, 19 nt, Artificial Sequence
  Description of Artificial Sequence: Synthetic oligonucleotide
  Antisense strand to SEQ ID NO: 707632
cuucaucaugaacuggcac

SEQ ID NO: 707634 - RNA, 19 nt, Artificial Sequence
  Description of Artificial Sequence: Synthetic oligonucleotide
  Sense strand starting at position 1304 of SEQ ID NO: 586301
gccugugaagauuagagca

SEQ ID NO: 707635 - RNA, 19 nt, Artificial Sequence
  Description of Artificial Sequence: Synthetic oligonucleotide
  Antisense strand to SEQ ID NO: 707634
ugcucuaaucuucacaggc

SEQ ID NO: 707636 - RNA, 19 nt, Artificial Sequence
  Description of Artificial Sequence: Synthetic oligonucleotide
  Sense strand starting at position 1555 of SEQ ID NO: 586301
cccuauuuguggccuccua

SEQ ID NO: 707637 - RNA, 19 nt, Artificial Sequence
  Description of Artificial Sequence: Synthetic oligonucleotide
  Antisense strand to SEQ ID NO: 707636
uaggaggccacaaauaggg

SEQ ID NO: 707638 - RNA, 19 nt, Artificial Sequence
  Description of Artificial Sequence: Synthetic oligonucleotide
  Sense strand starting at position 1609 of SEQ ID NO: 586301
ugagaacccuuauccuuga

SEQ ID NO: 707639 - RNA, 19 nt, Artificial Sequence
  Description of Artificial Sequence: Synthetic oligonucleotide
  Antisense strand to SEQ ID NO: 707638
ucaaggauaaggguucuca

SEQ ID NO: 707640 - RNA, 19 nt, Artificial Sequence
  Description of Artificial Sequence: Synthetic oligonucleotide
  Sense strand starting at position 1674 of SEQ ID NO: 586301
ugacuuaaguugucagaag

SEQ ID NO: 707641 - RNA, 19 nt, Artificial Sequence
  Description of Artificial Sequence: Synthetic oligonucleotide
  Antisense strand to SEQ ID NO: 707640
cuucugacaacuuaaguca

SEQ ID NO: 707642 - RNA, 19 nt, Artificial Sequence
  Description of Artificial Sequence: Synthetic oligonucleotide
  Sense strand starting at position 2225 of SEQ ID NO: 586301
gcuggaaguuauuuguacu

SEQ ID NO: 707643 - RNA, 19 nt, Artificial Sequence
  Description of Artificial Sequence: Synthetic oligonucleotide
  Antisense strand to SEQ ID NO: 707642
aguacaaauaacuuccagc

SEQ ID NO: 707644 - RNA, 19 nt, Artificial Sequence
  Description of Artificial Sequence: Synthetic oligonucleotide
  Sense strand starting at position 2231 of SEQ ID NO: 586301
aguuauuuguacuuuccuu

SEQ ID NO: 707645 - RNA, 19 nt, Artificial Sequence
  Description of Artificial Sequence: Synthetic oligonucleotide
  Antisense strand to SEQ ID NO: 707644
aaggaaaguacaaauaacu

SEQ ID NO: 707646 - RNA, 19 nt, Artificial Sequence
  Description of Artificial Sequence: Synthetic oligonucleotide
  Sense strand starting at position 2689 of SEQ ID NO: 586301
guauccuuucgagaugagu

SEQ ID NO: 707647 - RNA, 19 nt, Artificial Sequence
  Description of Artificial Sequence: Synthetic oligonucleotide
  Antisense strand to SEQ ID NO: 707646
acucaucucgaaaggauac

SEQ ID NO: 707648 - RNA, 19 nt, Artificial Sequence
  Description of Artificial Sequence: Synthetic oligonucleotide
  Sense strand starting at position 2691 of SEQ ID NO: 586301
auccuuucgagaugaguag

SEQ ID NO: 707649 - RNA, 19 nt, Artificial Sequence
  Description of Artificial Sequence: Synthetic oligonucleotide
  Antisense strand to SEQ ID NO: 707648
cuacucaucucgaaaggau

SEQ ID NO: 707650 - RNA, 19 nt, Artificial Sequence
  Description of Artificial Sequence: Synthetic oligonucleotide
  Sense strand starting at position 2697 of SEQ ID NO: 586301
ucgagaugaguagguagau

SEQ ID NO: 707651 - RNA, 19 nt, Artificial Sequence
  Description of Artificial Sequence: Synthetic oligonucleotide
  Antisense strand to SEQ ID NO: 707650
aucuaccuacucaucucga

SEQ ID NO: 707652 - RNA, 19 nt, Artificial Sequence
  Description of Artificial Sequence: Synthetic oligonucleotide
  Sense strand starting at position 2698 of SEQ ID NO: 586301
cgagaugaguagguagaua

SEQ ID NO: 707653 - RNA, 19 nt, Artificial Sequence
  Description of Artificial Sequence: Synthetic oligonucleotide
  Antisense strand to SEQ ID NO: 707652
uaucuaccuacucaucucg

SEQ ID NO: 707654 - RNA, 19 nt, Artificial Sequence
  Description of Artificial Sequence: Synthetic oligonucleotide
  Sense strand starting at position 2806 of SEQ ID NO: 586301
cuaucugcucaagauuaag

SEQ ID NO: 707655 - RNA, 19 nt, Artificial Sequence
  Description of Artificial Sequence: Synthetic oligonucleotide
  Antisense strand to SEQ ID NO: 707654
cuuaaucuugagcagauag

SEQ ID NO: 707656 - RNA, 19 nt, Artificial Sequence
  Description of Artificial Sequence: Synthetic oligonucleotide
  Sense strand starting at position 2812 of SEQ ID NO: 586301
gcucaagauuaagcuaaca

SEQ ID NO: 707657 - RNA, 19 nt, Artificial Sequence
  Description of Artificial Sequence: Synthetic oligonucleotide
  Antisense strand to SEQ ID NO: 707656
uguuagcuuaaucuugagc

SEQ ID NO: 707658 - RNA, 19 nt, Artificial Sequence
  Description of Artificial Sequence: Synthetic oligonucleotide
  Sense strand starting at position 3057 of SEQ ID NO: 586301
agcugaacauccuugauua

SEQ ID NO: 707659 - RNA, 19 nt, Artificial Sequence
  Description of Artificial Sequence: Synthetic oligonucleotide
  Antisense strand to SEQ ID NO: 707658
uaaucaaggauguucagcu

SEQ ID NO: 707660 - RNA, 19 nt, Artificial Sequence
  Description of Artificial Sequence: Synthetic oligonucleotide
  Sense strand starting at position 3058 of SEQ ID NO: 586301
gcugaacauccuugauuaa

SEQ ID NO: 707661 - RNA, 19 nt, Artificial Sequence
  Description of Artificial Sequence: Synthetic oligonucleotide
  Antisense strand to SEQ ID NO: 707660
uuaaucaaggauguucagc

SEQ ID NO: 707662 - RNA, 19 nt, Artificial Sequence
  Description of Artificial Sequence: Synthetic oligonucleotide
  Sense strand starting at position 3315 of SEQ ID NO: 586301
acuuucuugggcuaaguua

SEQ ID NO: 707663 - RNA, 19 nt, Artificial Sequence
  Description of Artificial Sequence: Synthetic oligonucleotide
  Antisense strand to SEQ ID NO: 707662
uaacuuagcccaagaaagu

SEQ ID NO: 707664 - RNA, 19 nt, Artificial Sequence
  Description of Artificial Sequence: Synthetic oligonucleotide
  Sense strand starting at position 3322 of SEQ ID NO: 586301
ugggcuaaguuaucagaaa

SEQ ID NO: 707665 - RNA, 19 nt, Artificial Sequence
  Description of Artificial Sequence: Synthetic oligonucleotide
  Antisense strand to SEQ ID NO: 707664
uuucugauaacuuagccca

SEQ ID NO: 707666 - RNA, 19 nt, Artificial Sequence
  Description of Artificial Sequence: Synthetic oligonucleotide
  Sense strand starting at position 3490 of SEQ ID NO: 586301
gauugcuguccagaaggau

SEQ ID NO: 707667 - RNA, 19 nt, Artificial Sequence
  Description of Artificial Sequence: Synthetic oligonucleotide
  Antisense strand to SEQ ID NO: 707666
auccuucuggacagcaauc

SEQ ID NO: 707668 - RNA, 19 nt, Artificial Sequence
  Description of Artificial Sequence: Synthetic oligonucleotide
  Sense strand starting at position 3571 of SEQ ID NO: 586301
ucaggagacuugguuauua

SEQ ID NO: 707669 - RNA, 19 nt, Artificial Sequence
  Description of Artificial Sequence: Synthetic oligonucleotide
  Antisense strand to SEQ ID NO: 707668
uaauaaccaagucuccuga

SEQ ID NO: 707670 - RNA, 19 nt, Artificial Sequence
  Description of Artificial Sequence: Synthetic oligonucleotide
  Sense strand starting at position 3575 of SEQ ID NO: 586301
gagacuugguuauuauuau

SEQ ID NO: 707671 - RNA, 19 nt, Artificial Sequence
  Description of Artificial Sequence: Synthetic oligonucleotide
  Antisense strand to SEQ ID NO: 707670
auaauaauaaccaagucuc

SEQ ID NO: 707672 - RNA, 19 nt, Artificial Sequence
  Description of Artificial Sequence: Synthetic oligonucleotide
  Sense strand starting at position 3647 of SEQ ID NO: 586301
uggauagcaagugaaucuu

SEQ ID NO: 707673 - RNA, 19 nt, Artificial Sequence
  Description of Artificial Sequence: Synthetic oligonucleotide
  Antisense strand to SEQ ID NO: 707672
aagauucacuugcuaucca

SEQ ID NO: 707674 - RNA, 19 nt, Artificial Sequence
  Description of Artificial Sequence: Synthetic oligonucleotide
  Sense strand starting at position 3927 of SEQ ID NO: 586301
gguuacuagagaugaaguc

SEQ ID NO: 707675 - RNA, 19 nt, Artificial Sequence
  Description of Artificial Sequence: Synthetic oligonucleotide
  Antisense strand to SEQ ID NO: 707674
gacuucaucucuaguaacc

SEQ ID NO: 707676 - RNA, 19 nt, Artificial Sequence
  Description of Artificial Sequence: Synthetic oligonucleotide
  Sense strand starting at position 27 of SEQ ID NO: 586302
gaaggaagcugguuuaauc

SEQ ID NO: 707677 - RNA, 19 nt, Artificial Sequence
  Description of Artificial Sequence: Synthetic oligonucleotide
  Antisense strand to SEQ ID NO: 707676
gauuaaaccagcuuccuuc

SEQ ID NO: 707678 - RNA, 19 nt, Artificial Sequence
  Description of Artificial Sequence: Synthetic oligonucleotide
  Sense strand starting at position 259 of SEQ ID NO: 586302
aagaauuucuugggaaagg

SEQ ID NO: 707679 - RNA, 19 nt, Artificial Sequence
  Description of Artificial Sequence: Synthetic oligonucleotide
  Antisense strand to SEQ ID NO: 707678
ccuuucccaagaaauucuu

SEQ ID NO: 707680 - RNA, 19 nt, Artificial Sequence
  Description of Artificial Sequence: Synthetic oligonucleotide
  Sense strand starting at position 452 of SEQ ID NO: 586302
augugacugcaugaugaau

SEQ ID NO: 707681 - RNA, 19 nt, Artificial Sequence
  Description of Artificial Sequence: Synthetic oligonucleotide
  Antisense strand to SEQ ID NO: 707680
auucaucaugcagucacau

SEQ ID NO: 707682 - RNA, 19 nt, Artificial Sequence
  Description of Artificial Sequence: Synthetic oligonucleotide
  Sense strand starting at position 503 of SEQ ID NO: 586302
ggguacugugacuauuagu

SEQ ID NO: 707683 - RNA, 19 nt, Artificial Sequence
  Description of Artificial Sequence: Synthetic oligonucleotide
  Antisense strand to SEQ ID NO: 707682
acuaauagucacaguaccc

SEQ ID NO: 707684 - RNA, 19 nt, Artificial Sequence
  Description of Artificial Sequence: Synthetic oligonucleotide
  Sense strand starting at position 508 of SEQ ID NO: 586302
cugugacuauuagugggaa

SEQ ID NO: 707685 - RNA, 19 nt, Artificial Sequence
  Description of Artificial Sequence: Synthetic oligonucleotide
  Antisense strand to SEQ ID NO: 707684
uucccacuaauagucacag

SEQ ID NO: 707686 - RNA, 19 nt, Artificial Sequence
  Description of Artificial Sequence: Synthetic oligonucleotide
  Sense strand starting at position 510 of SEQ ID NO: 586302
gugacuauuagugggaaau

SEQ ID NO: 707687 - RNA, 19 nt, Artificial Sequence
  Description of Artificial Sequence: Synthetic oligonucleotide
  Antisense strand to SEQ ID NO: 707686
auuucccacuaauagucac

SEQ ID NO: 707688 - RNA, 19 nt, Artificial Sequence
  Description of Artificial Sequence: Synthetic oligonucleotide
  Sense strand starting at position 535 of SEQ ID NO: 586302
cucucugacucagugaaga

SEQ ID NO: 707689 - RNA, 19 nt, Artificial Sequence
  Description of Artificial Sequence: Synthetic oligonucleotide
  Antisense strand to SEQ ID NO: 707688
ucuucacugagucagagag

SEQ ID NO: 707690 - RNA, 19 nt, Artificial Sequence
  Description of Artificial Sequence: Synthetic oligonucleotide
  Sense strand starting at position 546 of SEQ ID NO: 586302
agugaagaugcauaaaugu

SEQ ID NO: 707691 - RNA, 19 nt, Artificial Sequence
  Description of Artificial Sequence: Synthetic oligonucleotide
  Antisense strand to SEQ ID NO: 707690
acauuuaugcaucuucacu

SEQ ID NO: 707692 - RNA, 19 nt, Artificial Sequence
  Description of Artificial Sequence: Synthetic oligonucleotide
  Sense strand starting at position 604 of SEQ ID NO: 586302
gcugucugacaugauagga

SEQ ID NO: 707693 - RNA, 19 nt, Artificial Sequence
  Description of Artificial Sequence: Synthetic oligonucleotide
  Antisense strand to SEQ ID NO: 707692
uccuaucaugucagacagc

SEQ ID NO: 707694 - RNA, 19 nt, Artificial Sequence
  Description of Artificial Sequence: Synthetic oligonucleotide
  Sense strand starting at position 684 of SEQ ID NO: 586302
acguuuccuuccucauuua

SEQ ID NO: 707695 - RNA, 19 nt, Artificial Sequence
  Description of Artificial Sequence: Synthetic oligonucleotide
  Antisense strand to SEQ ID NO: 707694
uaaaugaggaaggaaacgu

SEQ ID NO: 707696 - RNA, 19 nt, Artificial Sequence
  Description of Artificial Sequence: Synthetic oligonucleotide
  Sense strand starting at position 685 of SEQ ID NO: 586302
cguuuccuuccucauuuau

SEQ ID NO: 707697 - RNA, 19 nt, Artificial Sequence
  Description of Artificial Sequence: Synthetic oligonucleotide
  Antisense strand to SEQ ID NO: 707696
auaaaugaggaaggaaacg

SEQ ID NO: 707698 - RNA, 19 nt, Artificial Sequence
  Description of Artificial Sequence: Synthetic oligonucleotide
  Sense strand starting at position 729 of SEQ ID NO: 586302
agaagauucuaguuucuga

SEQ ID NO: 707699 - RNA, 19 nt, Artificial Sequence
  Description of Artificial Sequence: Synthetic oligonucleotide
  Antisense strand to SEQ ID NO: 707698
ucagaaacuagaaucuucu

SEQ ID NO: 707700 - RNA, 19 nt, Artificial Sequence
  Description of Artificial Sequence: Synthetic oligonucleotide
  Sense strand starting at position 766 of SEQ ID NO: 586302
auaggaggcuucuuuaacu

SEQ ID NO: 707701 - RNA, 19 nt, Artificial Sequence
  Description of Artificial Sequence: Synthetic oligonucleotide
  Antisense strand to SEQ ID NO: 707700
aguuaaagaagccuccuau

SEQ ID NO: 707702 - RNA, 19 nt, Artificial Sequence
  Description of Artificial Sequence: Synthetic oligonucleotide
  Sense strand starting at position 994 of SEQ ID NO: 586302
cguucuaaccaucagaaac

SEQ ID NO: 707703 - RNA, 19 nt, Artificial Sequence
  Description of Artificial Sequence: Synthetic oligonucleotide
  Antisense strand to SEQ ID NO: 707702
guuucugaugguuagaacg

SEQ ID NO: 707704 - RNA, 19 nt, Artificial Sequence
  Description of Artificial Sequence: Synthetic oligonucleotide
  Sense strand starting at position 1019 of SEQ ID NO: 586302
guucuauaucuccaaggua

SEQ ID NO: 707705 - RNA, 19 nt, Artificial Sequence
  Description of Artificial Sequence: Synthetic oligonucleotide
  Antisense strand to SEQ ID NO: 707704
uaccuuggagauauagaac

SEQ ID NO: 707706 - RNA, 19 nt, Artificial Sequence
  Description of Artificial Sequence: Synthetic oligonucleotide
  Sense strand starting at position 1022 of SEQ ID NO: 586302
cuauaucuccaagguagac

SEQ ID NO: 707707 - RNA, 19 nt, Artificial Sequence
  Description of Artificial Sequence: Synthetic oligonucleotide
  Antisense strand to SEQ ID NO: 707706
gucuaccuuggagauauag

SEQ ID NO: 707708 - RNA, 19 nt, Artificial Sequence
  Description of Artificial Sequence: Synthetic oligonucleotide
  Sense strand starting at position 1074 of SEQ ID NO: 586302
ugagaaaggcauugccaau

SEQ ID NO: 707709 - RNA, 19 nt, Artificial Sequence
  Description of Artificial Sequence: Synthetic oligonucleotide
  Antisense strand to SEQ ID NO: 707708
auuggcaaugccuuucuca

SEQ ID NO: 707710 - RNA, 19 nt, Artificial Sequence
  Description of Artificial Sequence: Synthetic oligonucleotide
  Sense strand starting at position 1098 of SEQ ID NO: 586302
ucagguugggucaguuagu

SEQ ID NO: 707711 - RNA, 19 nt, Artificial Sequence
  Description of Artificial Sequence: Synthetic oligonucleotide
  Antisense strand to SEQ ID NO: 707710
acuaacugacccaaccuga

SEQ ID NO: 707712 - RNA, 19 nt, Artificial Sequence
  Description of Artificial Sequence: Synthetic oligonucleotide
  Sense strand starting at position 1298 of SEQ ID NO: 586302
gugccaguucaugaugaag

SEQ ID NO: 707713 - RNA, 19 nt, Artificial Sequence
  Description of Artificial Sequence: Synthetic oligonucleotide
  Antisense strand to SEQ ID NO: 707712
cuucaucaugaacuggcac

SEQ ID NO: 707714 - RNA, 19 nt, Artificial Sequence
  Description of Artificial Sequence: Synthetic oligonucleotide
  Sense strand starting at position 1328 of SEQ ID NO: 586302
gccugugaagauuagagca

SEQ ID NO: 707715 - RNA, 19 nt, Artificial Sequence
  Description of Artificial Sequence: Synthetic oligonucleotide
  Antisense strand to SEQ ID NO: 707714
ugcucuaaucuucacaggc

SEQ ID NO: 707716 - RNA, 19 nt, Artificial Sequence
  Description of Artificial Sequence: Synthetic oligonucleotide
  Sense strand starting at position 1579 of SEQ ID NO: 586302
cccuauuuguggccuccua

SEQ ID NO: 707717 - RNA, 19 nt, Artificial Sequence
  Description of Artificial Sequence: Synthetic oligonucleotide
  Antisense strand to SEQ ID NO: 707716
uaggaggccacaaauaggg

SEQ ID NO: 707718 - RNA, 19 nt, Artificial Sequence
  Description of Artificial Sequence: Synthetic oligonucleotide
  Sense strand starting at position 1633 of SEQ ID NO: 586302
ugagaacccuuauccuuga

SEQ ID NO: 707719 - RNA, 19 nt, Artificial Sequence
  Description of Artificial Sequence: Synthetic oligonucleotide
  Antisense strand to SEQ ID NO: 707718
ucaaggauaaggguucuca

SEQ ID NO: 707720 - RNA, 19 nt, Artificial Sequence
  Description of Artificial Sequence: Synthetic oligonucleotide
  Sense strand starting at position 1698 of SEQ ID NO: 586302
ugacuuaaguugucagaag

SEQ ID NO: 707721 - RNA, 19 nt, Artificial Sequence
  Description of Artificial Sequence: Synthetic oligonucleotide
  Antisense strand to SEQ ID NO: 707720
cuucugacaacuuaaguca

SEQ ID NO: 707722 - RNA, 19 nt, Artificial Sequence
  Description of Artificial Sequence: Synthetic oligonucleotide
  Sense strand starting at position 2249 of SEQ ID NO: 586302
gcuggaaguuauuuguacu

SEQ ID NO: 707723 - RNA, 19 nt, Artificial Sequence
  Description of Artificial Sequence: Synthetic oligonucleotide
  Antisense strand to SEQ ID NO: 707722
aguacaaauaacuuccagc

SEQ ID NO: 707724 - RNA, 19 nt, Artificial Sequence
  Description of Artificial Sequence: Synthetic oligonucleotide
  Sense strand starting at position 2255 of SEQ ID NO: 586302
aguuauuuguacuuuccuu

SEQ ID NO: 707725 - RNA, 19 nt, Artificial Sequence
  Description of Artificial Sequence: Synthetic oligonucleotide
  Antisense strand to SEQ ID NO: 707724
aaggaaaguacaaauaacu

SEQ ID NO: 707726 - RNA, 19 nt, Artificial Sequence
  Description of Artificial Sequence: Synthetic oligonucleotide
  Sense strand starting at position 2713 of SEQ ID NO: 586302
guauccuuucgagaugagu

SEQ ID NO: 707727 - RNA, 19 nt, Artificial Sequence
  Description of Artificial Sequence: Synthetic oligonucleotide
  Antisense strand to SEQ ID NO: 707726
acucaucucgaaaggauac

SEQ ID NO: 707728 - RNA, 19 nt, Artificial Sequence
  Description of Artificial Sequence: Synthetic oligonucleotide
  Sense strand starting at position 2715 of SEQ ID NO: 586302
auccuuucgagaugaguag

SEQ ID NO: 707729 - RNA, 19 nt, Artificial Sequence
  Description of Artificial Sequence: Synthetic oligonucleotide
  Antisense strand to SEQ ID NO: 707728
cuacucaucucgaaaggau

SEQ ID NO: 707730 - RNA, 19 nt, Artificial Sequence
  Description of Artificial Sequence: Synthetic oligonucleotide
  Sense strand starting at position 2721 of SEQ ID NO: 586302
ucgagaugaguagguagau

SEQ ID NO: 707731 - RNA, 19 nt, Artificial Sequence
  Description of Artificial Sequence: Synthetic oligonucleotide
  Antisense strand to SEQ ID NO: 707730
aucuaccuacucaucucga

SEQ ID NO: 707732 - RNA, 19 nt, Artificial Sequence
  Description of Artificial Sequence: Synthetic oligonucleotide
  Sense strand starting at position 2722 of SEQ ID NO: 586302
cgagaugaguagguagaua

SEQ ID NO: 707733 - RNA, 19 nt, Artificial Sequence
  Description of Artificial Sequence: Synthetic oligonucleotide
  Antisense strand to SEQ ID NO: 707732
uaucuaccuacucaucucg

SEQ ID NO: 707734 - RNA, 19 nt, Artificial Sequence
  Description of Artificial Sequence: Synthetic oligonucleotide
  Sense strand starting at position 2830 of SEQ ID NO: 586302
cuaucugcucaagauuaag

SEQ ID NO: 707735 - RNA, 19 nt, Artificial Sequence
  Description of Artificial Sequence: Synthetic oligonucleotide
  Antisense strand to SEQ ID NO: 707734
cuuaaucuugagcagauag

SEQ ID NO: 707736 - RNA, 19 nt, Artificial Sequence
  Description of Artificial Sequence: Synthetic oligonucleotide
  Sense strand starting at position 2836 of SEQ ID NO: 586302
gcucaagauuaagcuaaca

SEQ ID NO: 707737 - RNA, 19 nt, Artificial Sequence
  Description of Artificial Sequence: Synthetic oligonucleotide
  Antisense strand to SEQ ID NO: 707736
uguuagcuuaaucuugagc

SEQ ID NO: 707738 - RNA, 19 nt, Artificial Sequence
  Description of Artificial Sequence: Synthetic oligonucleotide
  Sense strand starting at position 3081 of SEQ ID NO: 586302
agcugaacauccuugauua

SEQ ID NO: 707739 - RNA, 19 nt, Artificial Sequence
  Description of Artificial Sequence: Synthetic oligonucleotide
  Antisense strand to SEQ ID NO: 707738
uaaucaaggauguucagcu

SEQ ID NO: 707740 - RNA, 19 nt, Artificial Sequence
  Description of Artificial Sequence: Synthetic oligonucleotide
  Sense strand starting at position 3082 of SEQ ID NO: 586302
gcugaacauccuugauuaa

SEQ ID NO: 707741 - RNA, 19 nt, Artificial Sequence
  Description of Artificial Sequence: Synthetic oligonucleotide
  Antisense strand to SEQ ID NO: 707740
uuaaucaaggauguucagc

SEQ ID NO: 707742 - RNA, 19 nt, Artificial Sequence
  Description of Artificial Sequence: Synthetic oligonucleotide
  Sense strand starting at position 3339 of SEQ ID NO: 586302
acuuucuugggcuaaguua

SEQ ID NO: 707743 - RNA, 19 nt, Artificial Sequence
  Description of Artificial Sequence: Synthetic oligonucleotide
  Antisense strand to SEQ ID NO: 707742
uaacuuagcccaagaaagu

SEQ ID NO: 707744 - RNA, 19 nt, Artificial Sequence
  Description of Artificial Sequence: Synthetic oligonucleotide
  Sense strand starting at position 3346 of SEQ ID NO: 586302
ugggcuaaguuaucagaaa

SEQ ID NO: 707745 - RNA, 19 nt, Artificial Sequence
  Description of Artificial Sequence: Synthetic oligonucleotide
  Antisense strand to SEQ ID NO: 707744
uuucugauaacuuagccca

SEQ ID NO: 707746 - RNA, 19 nt, Artificial Sequence
  Description of Artificial Sequence: Synthetic oligonucleotide
  Sense strand starting at position 3514 of SEQ ID NO: 586302
gauugcuguccagaaggau

SEQ ID NO: 707747 - RNA, 19 nt, Artificial Sequence
  Description of Artificial Sequence: Synthetic oligonucleotide
  Antisense strand to SEQ ID NO: 707746
auccuucuggacagcaauc

SEQ ID NO: 707748 - RNA, 19 nt, Artificial Sequence
  Description of Artificial Sequence: Synthetic oligonucleotide
  Sense strand starting at position 3595 of SEQ ID NO: 586302
ucaggagacuugguuauua

SEQ ID NO: 707749 - RNA, 19 nt, Artificial Sequence
  Description of Artificial Sequence: Synthetic oligonucleotide
  Antisense strand to SEQ ID NO: 707748
uaauaaccaagucuccuga

SEQ ID NO: 707750 - RNA, 19 nt, Artificial Sequence
  Description of Artificial Sequence: Synthetic oligonucleotide
  Sense strand starting at position 3599 of SEQ ID NO: 586302
gagacuugguuauuauuau

SEQ ID NO: 707751 - RNA, 19 nt, Artificial Sequence
  Description of Artificial Sequence: Synthetic oligonucleotide
  Antisense strand to SEQ ID NO: 707750
auaauaauaaccaagucuc

SEQ ID NO: 707752 - RNA, 19 nt, Artificial Sequence
  Description of Artificial Sequence: Synthetic oligonucleotide
  Sense strand starting at position 3671 of SEQ ID NO: 586302
uggauagcaagugaaucuu

SEQ ID NO: 707753 - RNA, 19 nt, Artificial Sequence
  Description of Artificial Sequence: Synthetic oligonucleotide
  Antisense strand to SEQ ID NO: 707752
aagauucacuugcuaucca

SEQ ID NO: 707754 - RNA, 19 nt, Artificial Sequence
  Description of Artificial Sequence: Synthetic oligonucleotide
  Sense strand starting at position 3951 of SEQ ID NO: 586302
gguuacuagagaugaaguc

SEQ ID NO: 707755 - RNA, 19 nt, Artificial Sequence
  Description of Artificial Sequence: Synthetic oligonucleotide
  Antisense strand to SEQ ID NO: 707754
gacuucaucucuaguaacc

SEQ ID NO: 707756 - RNA, 19 nt, Artificial Sequence
  Description of Artificial Sequence: Synthetic oligonucleotide
  Sense strand starting at position 93 of SEQ ID NO: 586303
gauuacugcuccuuggagu

SEQ ID NO: 707757 - RNA, 19 nt, Artificial Sequence
  Description of Artificial Sequence: Synthetic oligonucleotide
  Antisense strand to SEQ ID NO: 707756
acuccaaggagcaguaauc

SEQ ID NO: 707758 - RNA, 19 nt, Artificial Sequence
  Description of Artificial Sequence: Synthetic oligonucleotide
  Sense strand starting at position 94 of SEQ ID NO: 586303
auuacugcuccuuggagua

SEQ ID NO: 707759 - RNA, 19 nt, Artificial Sequence
  Description of Artificial Sequence: Synthetic oligonucleotide
  Antisense strand to SEQ ID NO: 707758
uacuccaaggagcaguaau

SEQ ID NO: 707760 - RNA, 19 nt, Artificial Sequence
  Description of Artificial Sequence: Synthetic oligonucleotide
  Sense strand starting at position 134 of SEQ ID NO: 586303
gggcucugagugcagaauu

SEQ ID NO: 707761 - RNA, 19 nt, Artificial Sequence
  Description of Artificial Sequence: Synthetic oligonucleotide
  Antisense strand to SEQ ID NO: 707760
aauucugcacucagagccc

SEQ ID NO: 707762 - RNA, 19 nt, Artificial Sequence
  Description of Artificial Sequence: Synthetic oligonucleotide
  Sense strand starting at position 144 of SEQ ID NO: 586303
ugcagaauuccaggcacca

SEQ ID NO: 707763 - RNA, 19 nt, Artificial Sequence
  Description of Artificial Sequence: Synthetic oligonucleotide
  Antisense strand to SEQ ID NO: 707762
uggugccuggaauucugca

SEQ ID NO: 707764 - RNA, 19 nt, Artificial Sequence
  Description of Artificial Sequence: Synthetic oligonucleotide
  Sense strand starting at position 346 of SEQ ID NO: 586303
gaaugcauccugugcucaa

SEQ ID NO: 707765 - RNA, 19 nt, Artificial Sequence
  Description of Artificial Sequence: Synthetic oligonucleotide
  Antisense strand to SEQ ID NO: 707764
uugagcacaggaugcauuc

SEQ ID NO: 707766 - RNA, 19 nt, Artificial Sequence
  Description of Artificial Sequence: Synthetic oligonucleotide
  Sense strand starting at position 368 of SEQ ID NO: 586303
aggucuaaguuccuuaaau

SEQ ID NO: 707767 - RNA, 19 nt, Artificial Sequence
  Description of Artificial Sequence: Synthetic oligonucleotide
  Antisense strand to SEQ ID NO: 707766
auuuaaggaacuuagaccu

SEQ ID NO: 707768 - RNA, 19 nt, Artificial Sequence
  Description of Artificial Sequence: Synthetic oligonucleotide
  Sense strand starting at position 369 of SEQ ID NO: 586303
ggucuaaguuccuuaaauc

SEQ ID NO: 707769 - RNA, 19 nt, Artificial Sequence
  Description of Artificial Sequence: Synthetic oligonucleotide
  Antisense strand to SEQ ID NO: 707768
gauuuaaggaacuuagacc

SEQ ID NO: 707770 - RNA, 19 nt, Artificial Sequence
  Description of Artificial Sequence: Synthetic oligonucleotide
  Sense strand starting at position 484 of SEQ ID NO: 586303
agcaaacuucugcaagaug

SEQ ID NO: 707771 - RNA, 19 nt, Artificial Sequence
  Description of Artificial Sequence: Synthetic oligonucleotide
  Antisense strand to SEQ ID NO: 707770
caucuugcagaaguuugcu

SEQ ID NO: 707772 - RNA, 19 nt, Artificial Sequence
  Description of Artificial Sequence: Synthetic oligonucleotide
  Sense strand starting at position 492 of SEQ ID NO: 586303
ucugcaagaugcucuauga

SEQ ID NO: 707773 - RNA, 19 nt, Artificial Sequence
  Description of Artificial Sequence: Synthetic oligonucleotide
  Antisense strand to SEQ ID NO: 707772
ucauagagcaucuugcaga

SEQ ID NO: 707774 - RNA, 19 nt, Artificial Sequence
  Description of Artificial Sequence: Synthetic oligonucleotide
  Sense strand starting at position 669 of SEQ ID NO: 586303
agcugaaugaagggcuuau

SEQ ID NO: 707775 - RNA, 19 nt, Artificial Sequence
  Description of Artificial Sequence: Synthetic oligonucleotide
  Antisense strand to SEQ ID NO: 707774
auaagcccuucauucagcu

SEQ ID NO: 707776 - RNA, 19 nt, Artificial Sequence
  Description of Artificial Sequence: Synthetic oligonucleotide
  Sense strand starting at position 673 of SEQ ID NO: 586303
gaaugaagggcuuauuguu

SEQ ID NO: 707777 - RNA, 19 nt, Artificial Sequence
  Description of Artificial Sequence: Synthetic oligonucleotide
  Antisense strand to SEQ ID NO: 707776
aacaauaagcccuucauuc

SEQ ID NO: 707778 - RNA, 19 nt, Artificial Sequence
  Description of Artificial Sequence: Synthetic oligonucleotide
  Sense strand starting at position 678 of SEQ ID NO: 586303
aagggcuuauuguuuacau

SEQ ID NO: 707779 - RNA, 19 nt, Artificial Sequence
  Description of Artificial Sequence: Synthetic oligonucleotide
  Antisense strand to SEQ ID NO: 707778
auguaaacaauaagcccuu

SEQ ID NO: 707780 - RNA, 19 nt, Artificial Sequence
  Description of Artificial Sequence: Synthetic oligonucleotide
  Sense strand starting at position 679 of SEQ ID NO: 586303
agggcuuauuguuuacauu

SEQ ID NO: 707781 - RNA, 19 nt, Artificial Sequence
  Description of Artificial Sequence: Synthetic oligonucleotide
  Antisense strand to SEQ ID NO: 707780
aauguaaacaauaagcccu

SEQ ID NO: 707782 - RNA, 19 nt, Artificial Sequence
  Description of Artificial Sequence: Synthetic oligonucleotide
  Sense strand starting at position 996 of SEQ ID NO: 586303
caagcucugccugaaaggu

SEQ ID NO: 707783 - RNA, 19 nt, Artificial Sequence
  Description of Artificial Sequence: Synthetic oligonucleotide
  Antisense strand to SEQ ID NO: 707782
accuuucaggcagagcuug

SEQ ID NO: 707784 - RNA, 19 nt, Artificial Sequence
  Description of Artificial Sequence: Synthetic oligonucleotide
  Sense strand starting at position 2325 of SEQ ID NO: 586303
cuuacaucgcguuugguga

SEQ ID NO: 707785 - RNA, 19 nt, Artificial Sequence
  Description of Artificial Sequence: Synthetic oligonucleotide
  Antisense strand to SEQ ID NO: 707784
ucaccaaacgcgauguaag

SEQ ID NO: 707786 - RNA, 19 nt, Artificial Sequence
  Description of Artificial Sequence: Synthetic oligonucleotide
  Sense strand starting at position 2331 of SEQ ID NO: 586303
ucgcguuuggugaaacgca

SEQ ID NO: 707787 - RNA, 19 nt, Artificial Sequence
  Description of Artificial Sequence: Synthetic oligonucleotide
  Antisense strand to SEQ ID NO: 707786
ugcguuucaccaaacgcga

SEQ ID NO: 707788 - RNA, 19 nt, Artificial Sequence
  Description of Artificial Sequence: Synthetic oligonucleotide
  Sense strand starting at position 2378 of SEQ ID NO: 586303
ugucucuggucauugggaa

SEQ ID NO: 707789 - RNA, 19 nt, Artificial Sequence
  Description of Artificial Sequence: Synthetic oligonucleotide
  Antisense strand to SEQ ID NO: 707788
uucccaaugaccagagaca

SEQ ID NO: 707790 - RNA, 19 nt, Artificial Sequence
  Description of Artificial Sequence: Synthetic oligonucleotide
  Sense strand starting at position 2523 of SEQ ID NO: 586303
agggucucaugguuaucaa

SEQ ID NO: 707791 - RNA, 19 nt, Artificial Sequence
  Description of Artificial Sequence: Synthetic oligonucleotide
  Antisense strand to SEQ ID NO: 707790
uugauaaccaugagacccu

SEQ ID NO: 707792 - RNA, 19 nt, Artificial Sequence
  Description of Artificial Sequence: Synthetic oligonucleotide
  Sense strand starting at position 2524 of SEQ ID NO: 586303
gggucucaugguuaucaag

SEQ ID NO: 707793 - RNA, 19 nt, Artificial Sequence
  Description of Artificial Sequence: Synthetic oligonucleotide
  Antisense strand to SEQ ID NO: 707792
cuugauaaccaugagaccc

SEQ ID NO: 707794 - RNA, 19 nt, Artificial Sequence
  Description of Artificial Sequence: Synthetic oligonucleotide
  Sense strand starting at position 2526 of SEQ ID NO: 586303
gucucaugguuaucaagga

SEQ ID NO: 707795 - RNA, 19 nt, Artificial Sequence
  Description of Artificial Sequence: Synthetic oligonucleotide
  Antisense strand to SEQ ID NO: 707794
uccuugauaaccaugagac

SEQ ID NO: 707796 - RNA, 19 nt, Artificial Sequence
  Description of Artificial Sequence: Synthetic oligonucleotide
  Sense strand starting at position 2834 of SEQ ID NO: 586303
aaaggaucucauggugauc

SEQ ID NO: 707797 - RNA, 19 nt, Artificial Sequence
  Description of Artificial Sequence: Synthetic oligonucleotide
  Antisense strand to SEQ ID NO: 707796
gaucaccaugagauccuuu

SEQ ID NO: 707798 - RNA, 19 nt, Artificial Sequence
  Description of Artificial Sequence: Synthetic oligonucleotide
  Sense strand starting at position 3059 of SEQ ID NO: 586303
uugauaagcucgccuggau

SEQ ID NO: 707799 - RNA, 19 nt, Artificial Sequence
  Description of Artificial Sequence: Synthetic oligonucleotide
  Antisense strand to SEQ ID NO: 707798
auccaggcgagcuuaucaa

SEQ ID NO: 707800 - RNA, 19 nt, Artificial Sequence
  Description of Artificial Sequence: Synthetic oligonucleotide
  Sense strand starting at position 3071 of SEQ ID NO: 586303
ccuggaugccuuugaccua

SEQ ID NO: 707801 - RNA, 19 nt, Artificial Sequence
  Description of Artificial Sequence: Synthetic oligonucleotide
  Antisense strand to SEQ ID NO: 707800
uaggucaaaggcauccagg

SEQ ID NO: 707802 - RNA, 19 nt, Artificial Sequence
  Description of Artificial Sequence: Synthetic oligonucleotide
  Sense strand starting at position 3210 of SEQ ID NO: 586303
gggagguuguggucuguau

SEQ ID NO: 707803 - RNA, 19 nt, Artificial Sequence
  Description of Artificial Sequence: Synthetic oligonucleotide
  Antisense strand to SEQ ID NO: 707802
auacagaccacaaccuccc

SEQ ID NO: 707804 - RNA, 19 nt, Artificial Sequence
  Description of Artificial Sequence: Synthetic oligonucleotide
  Sense strand starting at position 3235 of SEQ ID NO: 586303
accacuguucugcgggaga

SEQ ID NO: 707805 - RNA, 19 nt, Artificial Sequence
  Description of Artificial Sequence: Synthetic oligonucleotide
  Antisense strand to SEQ ID NO: 707804
ucucccgcagaacaguggu

SEQ ID NO: 707806 - RNA, 19 nt, Artificial Sequence
  Description of Artificial Sequence: Synthetic oligonucleotide
  Sense strand starting at position 3237 of SEQ ID NO: 586303
cacuguucugcgggagaga

SEQ ID NO: 707807 - RNA, 19 nt, Artificial Sequence
  Description of Artificial Sequence: Synthetic oligonucleotide
  Antisense strand to SEQ ID NO: 707806
ucucucccgcagaacagug

SEQ ID NO: 707808 - RNA, 19 nt, Artificial Sequence
  Description of Artificial Sequence: Synthetic oligonucleotide
  Sense strand starting at position 3238 of SEQ ID NO: 586303
acuguucugcgggagagaa

SEQ ID NO: 707809 - RNA, 19 nt, Artificial Sequence
  Description of Artificial Sequence: Synthetic oligonucleotide
  Antisense strand to SEQ ID NO: 707808
uucucucccgcagaacagu

SEQ ID NO: 707810 - RNA, 19 nt, Artificial Sequence
  Description of Artificial Sequence: Synthetic oligonucleotide
  Sense strand starting at position 3251 of SEQ ID NO: 586303
agagaagugccacauacga

SEQ ID NO: 707811 - RNA, 19 nt, Artificial Sequence
  Description of Artificial Sequence: Synthetic oligonucleotide
  Antisense strand to SEQ ID NO: 707810
ucguauguggcacuucucu

SEQ ID NO: 707812 - RNA, 19 nt, Artificial Sequence
  Description of Artificial Sequence: Synthetic oligonucleotide
  Sense strand starting at position 3316 of SEQ ID NO: 586303
guagacauccaguaauauu

SEQ ID NO: 707813 - RNA, 19 nt, Artificial Sequence
  Description of Artificial Sequence: Synthetic oligonucleotide
  Antisense strand to SEQ ID NO: 707812
aauauuacuggaugucuac

SEQ ID NO: 707814 - RNA, 19 nt, Artificial Sequence
  Description of Artificial Sequence: Synthetic oligonucleotide
  Sense strand starting at position 3379 of SEQ ID NO: 586303
ucaacugucuugguaucca

SEQ ID NO: 707815 - RNA, 19 nt, Artificial Sequence
  Description of Artificial Sequence: Synthetic oligonucleotide
  Antisense strand to SEQ ID NO: 707814
uggauaccaagacaguuga

SEQ ID NO: 707816 - RNA, 19 nt, Artificial Sequence
  Description of Artificial Sequence: Synthetic oligonucleotide
  Sense strand starting at position 3383 of SEQ ID NO: 586303
cugucuugguauccauaau

SEQ ID NO: 707817 - RNA, 19 nt, Artificial Sequence
  Description of Artificial Sequence: Synthetic oligonucleotide
  Antisense strand to SEQ ID NO: 707816
auuauggauaccaagacag

SEQ ID NO: 707818 - RNA, 19 nt, Artificial Sequence
  Description of Artificial Sequence: Synthetic oligonucleotide
  Sense strand starting at position 3389 of SEQ ID NO: 586303
ugguauccauaaucuuuga

SEQ ID NO: 707819 - RNA, 19 nt, Artificial Sequence
  Description of Artificial Sequence: Synthetic oligonucleotide
  Antisense strand to SEQ ID NO: 707818
ucaaagauuauggauacca

SEQ ID NO: 707820 - RNA, 19 nt, Artificial Sequence
  Description of Artificial Sequence: Synthetic oligonucleotide
  Sense strand starting at position 3396 of SEQ ID NO: 586303
cauaaucuuugagaaguga

SEQ ID NO: 707821 - RNA, 19 nt, Artificial Sequence
  Description of Artificial Sequence: Synthetic oligonucleotide
  Antisense strand to SEQ ID NO: 707820
ucacuucucaaagauuaug

SEQ ID NO: 707822 - RNA, 19 nt, Artificial Sequence
  Description of Artificial Sequence: Synthetic oligonucleotide
  Sense strand starting at position 3400 of SEQ ID NO: 586303
aucuuugagaagugaguga

SEQ ID NO: 707823 - RNA, 19 nt, Artificial Sequence
  Description of Artificial Sequence: Synthetic oligonucleotide
  Antisense strand to SEQ ID NO: 707822
ucacucacuucucaaagau

SEQ ID NO: 707824 - RNA, 19 nt, Artificial Sequence
  Description of Artificial Sequence: Synthetic oligonucleotide
  Sense strand starting at position 3779 of SEQ ID NO: 586303
caugcaaugcuguaaugau

SEQ ID NO: 707825 - RNA, 19 nt, Artificial Sequence
  Description of Artificial Sequence: Synthetic oligonucleotide
  Antisense strand to SEQ ID NO: 707824
aucauuacagcauugcaug

SEQ ID NO: 707826 - RNA, 19 nt, Artificial Sequence
  Description of Artificial Sequence: Synthetic oligonucleotide
  Sense strand starting at position 3871 of SEQ ID NO: 586303
ggaggagguucagagugaa

SEQ ID NO: 707827 - RNA, 19 nt, Artificial Sequence
  Description of Artificial Sequence: Synthetic oligonucleotide
  Antisense strand to SEQ ID NO: 707826
uucacucugaaccuccucc

SEQ ID NO: 707828 - RNA, 19 nt, Artificial Sequence
  Description of Artificial Sequence: Synthetic oligonucleotide
  Sense strand starting at position 3874 of SEQ ID NO: 586303
ggagguucagagugaacuc

SEQ ID NO: 707829 - RNA, 19 nt, Artificial Sequence
  Description of Artificial Sequence: Synthetic oligonucleotide
  Antisense strand to SEQ ID NO: 707828
gaguucacucugaaccucc

SEQ ID NO: 707830 - RNA, 19 nt, Artificial Sequence
  Description of Artificial Sequence: Synthetic oligonucleotide
  Sense strand starting at position 3955 of SEQ ID NO: 586303
gagggcaguguucaggaaa

SEQ ID NO: 707831 - RNA, 19 nt, Artificial Sequence
  Description of Artificial Sequence: Synthetic oligonucleotide
  Antisense strand to SEQ ID NO: 707830
uuuccugaacacugcccuc

SEQ ID NO: 707832 - RNA, 19 nt, Artificial Sequence
  Description of Artificial Sequence: Synthetic oligonucleotide
  Sense strand starting at position 3958 of SEQ ID NO: 586303
ggcaguguucaggaaacag

SEQ ID NO: 707833 - RNA, 19 nt, Artificial Sequence
  Description of Artificial Sequence: Synthetic oligonucleotide
  Antisense strand to SEQ ID NO: 707832
cuguuuccugaacacugcc

SEQ ID NO: 707834 - RNA, 19 nt, Artificial Sequence
  Description of Artificial Sequence: Synthetic oligonucleotide
  Sense strand starting at position 3977 of SEQ ID NO: 586303
ggagcuaauuguuccuugu

SEQ ID NO: 707835 - RNA, 19 nt, Artificial Sequence
  Description of Artificial Sequence: Synthetic oligonucleotide
  Antisense strand to SEQ ID NO: 707834
acaaggaacaauuagcucc

SEQ ID NO: 707836 - RNA, 19 nt, Artificial Sequence
  Description of Artificial Sequence: Synthetic oligonucleotide
  Sense strand starting at position 51 of SEQ ID NO: 586304
guaagucauguuuaaacuu

SEQ ID NO: 707837 - RNA, 19 nt, Artificial Sequence
  Description of Artificial Sequence: Synthetic oligonucleotide
  Antisense strand to SEQ ID NO: 707836
aaguuuaaacaugacuuac

SEQ ID NO: 707838 - RNA, 19 nt, Artificial Sequence
  Description of Artificial Sequence: Synthetic oligonucleotide
  Sense strand starting at position 58 of SEQ ID NO: 586304
auguuuaaacuugggaugu

SEQ ID NO: 707839 - RNA, 19 nt, Artificial Sequence
  Description of Artificial Sequence: Synthetic oligonucleotide
  Antisense strand to SEQ ID NO: 707838
acaucccaaguuuaaacau

SEQ ID NO: 707840 - RNA, 19 nt, Artificial Sequence
  Description of Artificial Sequence: Synthetic oligonucleotide
  Sense strand starting at position 62 of SEQ ID NO: 586304
uuaaacuugggauguaugu

SEQ ID NO: 707841 - RNA, 19 nt, Artificial Sequence
  Description of Artificial Sequence: Synthetic oligonucleotide
  Antisense strand to SEQ ID NO: 707840
acauacaucccaaguuuaa

SEQ ID NO: 707842 - RNA, 19 nt, Artificial Sequence
  Description of Artificial Sequence: Synthetic oligonucleotide
  Sense strand starting at position 84 of SEQ ID NO: 586304
ugaacuauguaaucuuggu

SEQ ID NO: 707843 - RNA, 19 nt, Artificial Sequence
  Description of Artificial Sequence: Synthetic oligonucleotide
  Antisense strand to SEQ ID NO: 707842
accaagauuacauaguuca

SEQ ID NO: 707844 - RNA, 19 nt, Artificial Sequence
  Description of Artificial Sequence: Synthetic oligonucleotide
  Sense strand starting at position 123 of SEQ ID NO: 586304
aucucacaguggucugauu

SEQ ID NO: 707845 - RNA, 19 nt, Artificial Sequence
  Description of Artificial Sequence: Synthetic oligonucleotide
  Antisense strand to SEQ ID NO: 707844
aaucagaccacugugagau

SEQ ID NO: 707846 - RNA, 19 nt, Artificial Sequence
  Description of Artificial Sequence: Synthetic oligonucleotide
  Sense strand starting at position 169 of SEQ ID NO: 586304
accauuagucaguacaucu

SEQ ID NO: 707847 - RNA, 19 nt, Artificial Sequence
  Description of Artificial Sequence: Synthetic oligonucleotide
  Antisense strand to SEQ ID NO: 707846
agauguacugacuaauggu

SEQ ID NO: 707848 - RNA, 19 nt, Artificial Sequence
  Description of Artificial Sequence: Synthetic oligonucleotide
  Sense strand starting at position 255 of SEQ ID NO: 586304
uguagauaacaaugacagu

SEQ ID NO: 707849 - RNA, 19 nt, Artificial Sequence
  Description of Artificial Sequence: Synthetic oligonucleotide
  Antisense strand to SEQ ID NO: 707848
acugucauuguuaucuaca

SEQ ID NO: 707850 - RNA, 19 nt, Artificial Sequence
  Description of Artificial Sequence: Synthetic oligonucleotide
  Sense strand starting at position 261 of SEQ ID NO: 586304
uaacaaugacagugaguuc

SEQ ID NO: 707851 - RNA, 19 nt, Artificial Sequence
  Description of Artificial Sequence: Synthetic oligonucleotide
  Antisense strand to SEQ ID NO: 707850
gaacucacugucauuguua

SEQ ID NO: 707852 - RNA, 19 nt, Artificial Sequence
  Description of Artificial Sequence: Synthetic oligonucleotide
  Sense strand starting at position 350 of SEQ ID NO: 586304
cgaggaacuuagguuuaua

SEQ ID NO: 707853 - RNA, 19 nt, Artificial Sequence
  Description of Artificial Sequence: Synthetic oligonucleotide
  Antisense strand to SEQ ID NO: 707852
uauaaaccuaaguuccucg

SEQ ID NO: 707854 - RNA, 19 nt, Artificial Sequence
  Description of Artificial Sequence: Synthetic oligonucleotide
  Sense strand starting at position 657 of SEQ ID NO: 586304
agaugaauucuguaugugc

SEQ ID NO: 707855 - RNA, 19 nt, Artificial Sequence
  Description of Artificial Sequence: Synthetic oligonucleotide
  Antisense strand to SEQ ID NO: 707854
gcacauacagaauucaucu

SEQ ID NO: 707856 - RNA, 19 nt, Artificial Sequence
  Description of Artificial Sequence: Synthetic oligonucleotide
  Sense strand starting at position 665 of SEQ ID NO: 586304
ucuguaugugcgccagauu

SEQ ID NO: 707857 - RNA, 19 nt, Artificial Sequence
  Description of Artificial Sequence: Synthetic oligonucleotide
  Antisense strand to SEQ ID NO: 707856
aaucuggcgcacauacaga

SEQ ID NO: 707858 - RNA, 19 nt, Artificial Sequence
  Description of Artificial Sequence: Synthetic oligonucleotide
  Sense strand starting at position 666 of SEQ ID NO: 586304
cuguaugugcgccagauuu

SEQ ID NO: 707859 - RNA, 19 nt, Artificial Sequence
  Description of Artificial Sequence: Synthetic oligonucleotide
  Antisense strand to SEQ ID NO: 707858
aaaucuggcgcacauacag

SEQ ID NO: 707860 - RNA, 19 nt, Artificial Sequence
  Description of Artificial Sequence: Synthetic oligonucleotide
  Sense strand starting at position 668 of SEQ ID NO: 586304
guaugugcgccagauuuau

SEQ ID NO: 707861 - RNA, 19 nt, Artificial Sequence
  Description of Artificial Sequence: Synthetic oligonucleotide
  Antisense strand to SEQ ID NO: 707860
auaaaucuggcgcacauac

SEQ ID NO: 707862 - RNA, 19 nt, Artificial Sequence
  Description of Artificial Sequence: Synthetic oligonucleotide
  Sense strand starting at position 672 of SEQ ID NO: 586304
gugcgccagauuuaucuua

SEQ ID NO: 707863 - RNA, 19 nt, Artificial Sequence
  Description of Artificial Sequence: Synthetic oligonucleotide
  Antisense strand to SEQ ID NO: 707862
uaagauaaaucuggcgcac

SEQ ID NO: 707864 - RNA, 19 nt, Artificial Sequence
  Description of Artificial Sequence: Synthetic oligonucleotide
  Sense strand starting at position 674 of SEQ ID NO: 586304
gcgccagauuuaucuuauu

SEQ ID NO: 707865 - RNA, 19 nt, Artificial Sequence
  Description of Artificial Sequence: Synthetic oligonucleotide
  Antisense strand to SEQ ID NO: 707864
aauaagauaaaucuggcgc

SEQ ID NO: 707866 - RNA, 19 nt, Artificial Sequence
  Description of Artificial Sequence: Synthetic oligonucleotide
  Sense strand starting at position 839 of SEQ ID NO: 586304
gagcgaauaagcgacaaau

SEQ ID NO: 707867 - RNA, 19 nt, Artificial Sequence
  Description of Artificial Sequence: Synthetic oligonucleotide
  Antisense strand to SEQ ID NO: 707866
auuugucgcuuauucgcuc

SEQ ID NO: 707868 - RNA, 19 nt, Artificial Sequence
  Description of Artificial Sequence: Synthetic oligonucleotide
  Sense strand starting at position 841 of SEQ ID NO: 586304
gcgaauaagcgacaaauag

SEQ ID NO: 707869 - RNA, 19 nt, Artificial Sequence
  Description of Artificial Sequence: Synthetic oligonucleotide
  Antisense strand to SEQ ID NO: 707868
cuauuugucgcuuauucgc

SEQ ID NO: 707870 - RNA, 19 nt, Artificial Sequence
  Description of Artificial Sequence: Synthetic oligonucleotide
  Sense strand starting at position 852 of SEQ ID NO: 586304
acaaauagaucacagaaag

SEQ ID NO: 707871 - RNA, 19 nt, Artificial Sequence
  Description of Artificial Sequence: Synthetic oligonucleotide
  Antisense strand to SEQ ID NO: 707870
cuuucugugaucuauuugu

SEQ ID NO: 707872 - RNA, 19 nt, Artificial Sequence
  Description of Artificial Sequence: Synthetic oligonucleotide
  Sense strand starting at position 918 of SEQ ID NO: 586304
acucauaacguuuaauagu

SEQ ID NO: 707873 - RNA, 19 nt, Artificial Sequence
  Description of Artificial Sequence: Synthetic oligonucleotide
  Antisense strand to SEQ ID NO: 707872
acuauuaaacguuaugagu

SEQ ID NO: 707874 - RNA, 19 nt, Artificial Sequence
  Description of Artificial Sequence: Synthetic oligonucleotide
  Sense strand starting at position 1073 of SEQ ID NO: 586304
cugagaaacagguggguua

SEQ ID NO: 707875 - RNA, 19 nt, Artificial Sequence
  Description of Artificial Sequence: Synthetic oligonucleotide
  Antisense strand to SEQ ID NO: 707874
uaacccaccuguuucucag

SEQ ID NO: 707876 - RNA, 19 nt, Artificial Sequence
  Description of Artificial Sequence: Synthetic oligonucleotide
  Sense strand starting at position 1229 of SEQ ID NO: 586304
aggcuaacuccagaguggu

SEQ ID NO: 707877 - RNA, 19 nt, Artificial Sequence
  Description of Artificial Sequence: Synthetic oligonucleotide
  Antisense strand to SEQ ID NO: 707876
accacucuggaguuagccu

SEQ ID NO: 707878 - RNA, 19 nt, Artificial Sequence
  Description of Artificial Sequence: Synthetic oligonucleotide
  Sense strand starting at position 1284 of SEQ ID NO: 586304
ggcaaugagcagugggauu

SEQ ID NO: 707879 - RNA, 19 nt, Artificial Sequence
  Description of Artificial Sequence: Synthetic oligonucleotide
  Antisense strand to SEQ ID NO: 707878
aaucccacugcucauugcc

SEQ ID NO: 707880 - RNA, 19 nt, Artificial Sequence
  Description of Artificial Sequence: Synthetic oligonucleotide
  Sense strand starting at position 1286 of SEQ ID NO: 586304
caaugagcagugggauuaa

SEQ ID NO: 707881 - RNA, 19 nt, Artificial Sequence
  Description of Artificial Sequence: Synthetic oligonucleotide
  Antisense strand to SEQ ID NO: 707880
uuaaucccacugcucauug

SEQ ID NO: 707882 - RNA, 19 nt, Artificial Sequence
  Description of Artificial Sequence: Synthetic oligonucleotide
  Sense strand starting at position 1322 of SEQ ID NO: 586304
cacggaucagaguggaagu

SEQ ID NO: 707883 - RNA, 19 nt, Artificial Sequence
  Description of Artificial Sequence: Synthetic oligonucleotide
  Antisense strand to SEQ ID NO: 707882
acuuccacucugauccgug

SEQ ID NO: 707884 - RNA, 19 nt, Artificial Sequence
  Description of Artificial Sequence: Synthetic oligonucleotide
  Sense strand starting at position 1325 of SEQ ID NO: 586304
ggaucagaguggaagugau

SEQ ID NO: 707885 - RNA, 19 nt, Artificial Sequence
  Description of Artificial Sequence: Synthetic oligonucleotide
  Antisense strand to SEQ ID NO: 707884
aucacuuccacucugaucc

SEQ ID NO: 707886 - RNA, 19 nt, Artificial Sequence
  Description of Artificial Sequence: Synthetic oligonucleotide
  Sense strand starting at position 1502 of SEQ ID NO: 586304
gaaauucucgaaggagagu

SEQ ID NO: 707887 - RNA, 19 nt, Artificial Sequence
  Description of Artificial Sequence: Synthetic oligonucleotide
  Antisense strand to SEQ ID NO: 707886
acucuccuucgagaauuuc

SEQ ID NO: 707888 - RNA, 19 nt, Artificial Sequence
  Description of Artificial Sequence: Synthetic oligonucleotide
  Sense strand starting at position 1569 of SEQ ID NO: 586304
guaacugcuguggcguaaa

SEQ ID NO: 707889 - RNA, 19 nt, Artificial Sequence
  Description of Artificial Sequence: Synthetic oligonucleotide
  Antisense strand to SEQ ID NO: 707888
uuuacgccacagcaguuac

SEQ ID NO: 707890 - RNA, 19 nt, Artificial Sequence
  Description of Artificial Sequence: Synthetic oligonucleotide
  Sense strand starting at position 1887 of SEQ ID NO: 586304
gaccuuuacggcugagaga

SEQ ID NO: 707891 - RNA, 19 nt, Artificial Sequence
  Description of Artificial Sequence: Synthetic oligonucleotide
  Antisense strand to SEQ ID NO: 707890
ucucucagccguaaagguc

SEQ ID NO: 707892 - RNA, 19 nt, Artificial Sequence
  Description of Artificial Sequence: Synthetic oligonucleotide
  Sense strand starting at position 2284 of SEQ ID NO: 586304
cgguguuugcggaaaugug

SEQ ID NO: 707893 - RNA, 19 nt, Artificial Sequence
  Description of Artificial Sequence: Synthetic oligonucleotide
  Antisense strand to SEQ ID NO: 707892
cacauuuccgcaaacaccg

SEQ ID NO: 707894 - RNA, 19 nt, Artificial Sequence
  Description of Artificial Sequence: Synthetic oligonucleotide
  Sense strand starting at position 2438 of SEQ ID NO: 586304
uuugauccagggugagaau

SEQ ID NO: 707895 - RNA, 19 nt, Artificial Sequence
  Description of Artificial Sequence: Synthetic oligonucleotide
  Antisense strand to SEQ ID NO: 707894
auucucacccuggaucaaa

SEQ ID NO: 707896 - RNA, 19 nt, Artificial Sequence
  Description of Artificial Sequence: Synthetic oligonucleotide
  Sense strand starting at position 2447 of SEQ ID NO: 586304
gggugagaauuugauacag

SEQ ID NO: 707897 - RNA, 19 nt, Artificial Sequence
  Description of Artificial Sequence: Synthetic oligonucleotide
  Antisense strand to SEQ ID NO: 707896
cuguaucaaauucucaccc

SEQ ID NO: 707898 - RNA, 19 nt, Artificial Sequence
  Description of Artificial Sequence: Synthetic oligonucleotide
  Sense strand starting at position 2449 of SEQ ID NO: 586304
gugagaauuugauacagac

SEQ ID NO: 707899 - RNA, 19 nt, Artificial Sequence
  Description of Artificial Sequence: Synthetic oligonucleotide
  Antisense strand to SEQ ID NO: 707898
gucuguaucaaauucucac

SEQ ID NO: 707900 - RNA, 19 nt, Artificial Sequence
  Description of Artificial Sequence: Synthetic oligonucleotide
  Sense strand starting at position 2595 of SEQ ID NO: 586304
aauuguucugugcagauua

SEQ ID NO: 707901 - RNA, 19 nt, Artificial Sequence
  Description of Artificial Sequence: Synthetic oligonucleotide
  Antisense strand to SEQ ID NO: 707900
uaaucugcacagaacaauu

SEQ ID NO: 707902 - RNA, 19 nt, Artificial Sequence
  Description of Artificial Sequence: Synthetic oligonucleotide
  Sense strand starting at position 2851 of SEQ ID NO: 586304
guuugcaucccagaacucu

SEQ ID NO: 707903 - RNA, 19 nt, Artificial Sequence
  Description of Artificial Sequence: Synthetic oligonucleotide
  Antisense strand to SEQ ID NO: 707902
agaguucugggaugcaaac

SEQ ID NO: 707904 - RNA, 19 nt, Artificial Sequence
  Description of Artificial Sequence: Synthetic oligonucleotide
  Sense strand starting at position 2966 of SEQ ID NO: 586304
gguacucuucuauauauug

SEQ ID NO: 707905 - RNA, 19 nt, Artificial Sequence
  Description of Artificial Sequence: Synthetic oligonucleotide
  Antisense strand to SEQ ID NO: 707904
caauauauagaagaguacc

SEQ ID NO: 707906 - RNA, 19 nt, Artificial Sequence
  Description of Artificial Sequence: Synthetic oligonucleotide
  Sense strand starting at position 3031 of SEQ ID NO: 586304
uagugauguguugggauga

SEQ ID NO: 707907 - RNA, 19 nt, Artificial Sequence
  Description of Artificial Sequence: Synthetic oligonucleotide
  Antisense strand to SEQ ID NO: 707906
ucaucccaacacaucacua

SEQ ID NO: 707908 - RNA, 19 nt, Artificial Sequence
  Description of Artificial Sequence: Synthetic oligonucleotide
  Sense strand starting at position 3644 of SEQ ID NO: 586304
augaaaugauuaccuagca

SEQ ID NO: 707909 - RNA, 19 nt, Artificial Sequence
  Description of Artificial Sequence: Synthetic oligonucleotide
  Antisense strand to SEQ ID NO: 707908
ugcuagguaaucauuucau

SEQ ID NO: 707910 - RNA, 19 nt, Artificial Sequence
  Description of Artificial Sequence: Synthetic oligonucleotide
  Sense strand starting at position 3645 of SEQ ID NO: 586304
ugaaaugauuaccuagcaa

SEQ ID NO: 707911 - RNA, 19 nt, Artificial Sequence
  Description of Artificial Sequence: Synthetic oligonucleotide
  Antisense strand to SEQ ID NO: 707910
uugcuagguaaucauuuca

SEQ ID NO: 707912 - RNA, 19 nt, Artificial Sequence
  Description of Artificial Sequence: Synthetic oligonucleotide
  Sense strand starting at position 3662 of SEQ ID NO: 586304
aaggaaacuugggaaauua

SEQ ID NO: 707913 - RNA, 19 nt, Artificial Sequence
  Description of Artificial Sequence: Synthetic oligonucleotide
  Antisense strand to SEQ ID NO: 707912
uaauuucccaaguuuccuu

SEQ ID NO: 707914 - RNA, 19 nt, Artificial Sequence
  Description of Artificial Sequence: Synthetic oligonucleotide
  Sense strand starting at position 3690 of SEQ ID NO: 586304
cccuuuagguaauuaaaug

SEQ ID NO: 707915 - RNA, 19 nt, Artificial Sequence
  Description of Artificial Sequence: Synthetic oligonucleotide
  Antisense strand to SEQ ID NO: 707914
cauuuaauuaccuaaaggg

SEQ ID NO: 707916 - RNA, 19 nt, Artificial Sequence
  Description of Artificial Sequence: Synthetic oligonucleotide
  Sense strand starting at position 133 of SEQ ID NO: 586305
cagguuaaagugugagaac

SEQ ID NO: 707917 - RNA, 19 nt, Artificial Sequence
  Description of Artificial Sequence: Synthetic oligonucleotide
  Antisense strand to SEQ ID NO: 707916
guucucacacuuuaaccug

SEQ ID NO: 707918 - RNA, 19 nt, Artificial Sequence
  Description of Artificial Sequence: Synthetic oligonucleotide
  Sense strand starting at position 142 of SEQ ID NO: 586305
gugugagaaccggaucaac

SEQ ID NO: 707919 - RNA, 19 nt, Artificial Sequence
  Description of Artificial Sequence: Synthetic oligonucleotide
  Antisense strand to SEQ ID NO: 707918
guugauccgguucucacac

SEQ ID NO: 707920 - RNA, 19 nt, Artificial Sequence
  Description of Artificial Sequence: Synthetic oligonucleotide
  Sense strand starting at position 171 of SEQ ID NO: 586305
gacugacagcuugagcaaa

SEQ ID NO: 707921 - RNA, 19 nt, Artificial Sequence
  Description of Artificial Sequence: Synthetic oligonucleotide
  Antisense strand to SEQ ID NO: 707920
uuugcucaagcugucaguc

SEQ ID NO: 707922 - RNA, 19 nt, Artificial Sequence
  Description of Artificial Sequence: Synthetic oligonucleotide
  Sense strand starting at position 173 of SEQ ID NO: 586305
cugacagcuugagcaaaua

SEQ ID NO: 707923 - RNA, 19 nt, Artificial Sequence
  Description of Artificial Sequence: Synthetic oligonucleotide
  Antisense strand to SEQ ID NO: 707922
uauuugcucaagcugucag

SEQ ID NO: 707924 - RNA, 19 nt, Artificial Sequence
  Description of Artificial Sequence: Synthetic oligonucleotide
  Sense strand starting at position 195 of SEQ ID NO: 586305
caagauaugcgucagcauc

SEQ ID NO: 707925 - RNA, 19 nt, Artificial Sequence
  Description of Artificial Sequence: Synthetic oligonucleotide
  Antisense strand to SEQ ID NO: 707924
gaugcugacgcauaucuug

SEQ ID NO: 707926 - RNA, 19 nt, Artificial Sequence
  Description of Artificial Sequence: Synthetic oligonucleotide
  Sense strand starting at position 205 of SEQ ID NO: 586305
gucagcaucugcucaaacu

SEQ ID NO: 707927 - RNA, 19 nt, Artificial Sequence
  Description of Artificial Sequence: Synthetic oligonucleotide
  Antisense strand to SEQ ID NO: 707926
aguuugagcagaugcugac

SEQ ID NO: 707928 - RNA, 19 nt, Artificial Sequence
  Description of Artificial Sequence: Synthetic oligonucleotide
  Sense strand starting at position 238 of SEQ ID NO: 586305
ugcagagaucaaugucuag

SEQ ID NO: 707929 - RNA, 19 nt, Artificial Sequence
  Description of Artificial Sequence: Synthetic oligonucleotide
  Antisense strand to SEQ ID NO: 707928
cuagacauugaucucugca

SEQ ID NO: 707930 - RNA, 19 nt, Artificial Sequence
  Description of Artificial Sequence: Synthetic oligonucleotide
  Sense strand starting at position 245 of SEQ ID NO: 586305
aucaaugucuaggaggaua

SEQ ID NO: 707931 - RNA, 19 nt, Artificial Sequence
  Description of Artificial Sequence: Synthetic oligonucleotide
  Antisense strand to SEQ ID NO: 707930
uauccuccuagacauugau

SEQ ID NO: 707932 - RNA, 19 nt, Artificial Sequence
  Description of Artificial Sequence: Synthetic oligonucleotide
  Sense strand starting at position 364 of SEQ ID NO: 586305
guggguucugcucacagaa

SEQ ID NO: 707933 - RNA, 19 nt, Artificial Sequence
  Description of Artificial Sequence: Synthetic oligonucleotide
  Antisense strand to SEQ ID NO: 707932
uucugugagcagaacccac

SEQ ID NO: 707934 - RNA, 19 nt, Artificial Sequence
  Description of Artificial Sequence: Synthetic oligonucleotide
  Sense strand starting at position 379 of SEQ ID NO: 586305
agaagagagcugugucucu

SEQ ID NO: 707935 - RNA, 19 nt, Artificial Sequence
  Description of Artificial Sequence: Synthetic oligonucleotide
  Antisense strand to SEQ ID NO: 707934
agagacacagcucucuucu

SEQ ID NO: 707936 - RNA, 19 nt, Artificial Sequence
  Description of Artificial Sequence: Synthetic oligonucleotide
  Sense strand starting at position 416 of SEQ ID NO: 586305
ugugucuuccuguagguca

SEQ ID NO: 707937 - RNA, 19 nt, Artificial Sequence
  Description of Artificial Sequence: Synthetic oligonucleotide
  Antisense strand to SEQ ID NO: 707936
ugaccuacaggaagacaca

SEQ ID NO: 707938 - RNA, 19 nt, Artificial Sequence
  Description of Artificial Sequence: Synthetic oligonucleotide
  Sense strand starting at position 968 of SEQ ID NO: 586305
gaguucggucugcaacaca

SEQ ID NO: 707939 - RNA, 19 nt, Artificial Sequence
  Description of Artificial Sequence: Synthetic oligonucleotide
  Antisense strand to SEQ ID NO: 707938
uguguugcagaccgaacuc

SEQ ID NO: 707940 - RNA, 19 nt, Artificial Sequence
  Description of Artificial Sequence: Synthetic oligonucleotide
  Sense strand starting at position 1138 of SEQ ID NO: 586305
cgugcucauuucuccuuua

SEQ ID NO: 707941 - RNA, 19 nt, Artificial Sequence
  Description of Artificial Sequence: Synthetic oligonucleotide
  Antisense strand to SEQ ID NO: 707940
uaaaggagaaaugagcacg

SEQ ID NO: 707942 - RNA, 19 nt, Artificial Sequence
  Description of Artificial Sequence: Synthetic oligonucleotide
  Sense strand starting at position 1233 of SEQ ID NO: 586305
gcuagaggaucuucuauug

SEQ ID NO: 707943 - RNA, 19 nt, Artificial Sequence
  Description of Artificial Sequence: Synthetic oligonucleotide
  Antisense strand to SEQ ID NO: 707942
caauagaagauccucuagc

SEQ ID NO: 707944 - RNA, 19 nt, Artificial Sequence
  Description of Artificial Sequence: Synthetic oligonucleotide
  Sense strand starting at position 1451 of SEQ ID NO: 586305
auaagugagucugcucgga

SEQ ID NO: 707945 - RNA, 19 nt, Artificial Sequence
  Description of Artificial Sequence: Synthetic oligonucleotide
  Antisense strand to SEQ ID NO: 707944
uccgagcagacucacuuau

SEQ ID NO: 707946 - RNA, 19 nt, Artificial Sequence
  Description of Artificial Sequence: Synthetic oligonucleotide
  Sense strand starting at position 1453 of SEQ ID NO: 586305
aagugagucugcucggaug

SEQ ID NO: 707947 - RNA, 19 nt, Artificial Sequence
  Description of Artificial Sequence: Synthetic oligonucleotide
  Antisense strand to SEQ ID NO: 707946
cauccgagcagacucacuu

SEQ ID NO: 707948 - RNA, 19 nt, Artificial Sequence
  Description of Artificial Sequence: Synthetic oligonucleotide
  Sense strand starting at position 1542 of SEQ ID NO: 586305
uggcucuccacgcaaaguu

SEQ ID NO: 707949 - RNA, 19 nt, Artificial Sequence
  Description of Artificial Sequence: Synthetic oligonucleotide
  Antisense strand to SEQ ID NO: 707948
aacuuugcguggagagcca

SEQ ID NO: 707950 - RNA, 19 nt, Artificial Sequence
  Description of Artificial Sequence: Synthetic oligonucleotide
  Sense strand starting at position 1552 of SEQ ID NO: 586305
cgcaaaguuaacguuuguu

SEQ ID NO: 707951 - RNA, 19 nt, Artificial Sequence
  Description of Artificial Sequence: Synthetic oligonucleotide
  Antisense strand to SEQ ID NO: 707950
aacaaacguuaacuuugcg

SEQ ID NO: 707952 - RNA, 19 nt, Artificial Sequence
  Description of Artificial Sequence: Synthetic oligonucleotide
  Sense strand starting at position 1555 of SEQ ID NO: 586305
aaaguuaacguuuguuuac

SEQ ID NO: 707953 - RNA, 19 nt, Artificial Sequence
  Description of Artificial Sequence: Synthetic oligonucleotide
  Antisense strand to SEQ ID NO: 707952
guaaacaaacguuaacuuu

SEQ ID NO: 707954 - RNA, 19 nt, Artificial Sequence
  Description of Artificial Sequence: Synthetic oligonucleotide
  Sense strand starting at position 1564 of SEQ ID NO: 586305
guuuguuuacucuaagcau

SEQ ID NO: 707955 - RNA, 19 nt, Artificial Sequence
  Description of Artificial Sequence: Synthetic oligonucleotide
  Antisense strand to SEQ ID NO: 707954
augcuuagaguaaacaaac

SEQ ID NO: 707956 - RNA, 19 nt, Artificial Sequence
  Description of Artificial Sequence: Synthetic oligonucleotide
  Sense strand starting at position 1567 of SEQ ID NO: 586305
uguuuacucuaagcauaug

SEQ ID NO: 707957 - RNA, 19 nt, Artificial Sequence
  Description of Artificial Sequence: Synthetic oligonucleotide
  Antisense strand to SEQ ID NO: 707956
cauaugcuuagaguaaaca

SEQ ID NO: 707958 - RNA, 19 nt, Artificial Sequence
  Description of Artificial Sequence: Synthetic oligonucleotide
  Sense strand starting at position 1776 of SEQ ID NO: 586305
gcggguaucaaaugugaau

SEQ ID NO: 707959 - RNA, 19 nt, Artificial Sequence
  Description of Artificial Sequence: Synthetic oligonucleotide
  Antisense strand to SEQ ID NO: 707958
auucacauuugauacccgc

SEQ ID NO: 707960 - RNA, 19 nt, Artificial Sequence
  Description of Artificial Sequence: Synthetic oligonucleotide
  Sense strand starting at position 1778 of SEQ ID NO: 586305
ggguaucaaaugugaauuc

SEQ ID NO: 707961 - RNA, 19 nt, Artificial Sequence
  Description of Artificial Sequence: Synthetic oligonucleotide
  Antisense strand to SEQ ID NO: 707960
gaauucacauuugauaccc

SEQ ID NO: 707962 - RNA, 19 nt, Artificial Sequence
  Description of Artificial Sequence: Synthetic oligonucleotide
  Sense strand starting at position 1833 of SEQ ID NO: 586305
gcaccuuugaccggagaag

SEQ ID NO: 707963 - RNA, 19 nt, Artificial Sequence
  Description of Artificial Sequence: Synthetic oligonucleotide
  Antisense strand to SEQ ID NO: 707962
cuucuccggucaaaggugc

SEQ ID NO: 707964 - RNA, 19 nt, Artificial Sequence
  Description of Artificial Sequence: Synthetic oligonucleotide
  Sense strand starting at position 1849 of SEQ ID NO: 586305
aagcaauagcuaugggauu

SEQ ID NO: 707965 - RNA, 19 nt, Artificial Sequence
  Description of Artificial Sequence: Synthetic oligonucleotide
  Antisense strand to SEQ ID NO: 707964
aaucccauagcuauugcuu

SEQ ID NO: 707966 - RNA, 19 nt, Artificial Sequence
  Description of Artificial Sequence: Synthetic oligonucleotide
  Sense strand starting at position 1869 of SEQ ID NO: 586305
aggcgaauuucuuacggag

SEQ ID NO: 707967 - RNA, 19 nt, Artificial Sequence
  Description of Artificial Sequence: Synthetic oligonucleotide
  Antisense strand to SEQ ID NO: 707966
cuccguaagaaauucgccu

SEQ ID NO: 707968 - RNA, 19 nt, Artificial Sequence
  Description of Artificial Sequence: Synthetic oligonucleotide
  Sense strand starting at position 2403 of SEQ ID NO: 586305
cccugucucugcucugaga

SEQ ID NO: 707969 - RNA, 19 nt, Artificial Sequence
  Description of Artificial Sequence: Synthetic oligonucleotide
  Antisense strand to SEQ ID NO: 707968
ucucagagcagagacaggg

SEQ ID NO: 707970 - RNA, 19 nt, Artificial Sequence
  Description of Artificial Sequence: Synthetic oligonucleotide
  Sense strand starting at position 2405 of SEQ ID NO: 586305
cugucucugcucugagaua

SEQ ID NO: 707971 - RNA, 19 nt, Artificial Sequence
  Description of Artificial Sequence: Synthetic oligonucleotide
  Antisense strand to SEQ ID NO: 707970
uaucucagagcagagacag

SEQ ID NO: 707972 - RNA, 19 nt, Artificial Sequence
  Description of Artificial Sequence: Synthetic oligonucleotide
  Sense strand starting at position 2410 of SEQ ID NO: 586305
ucugcucugagauagguga

SEQ ID NO: 707973 - RNA, 19 nt, Artificial Sequence
  Description of Artificial Sequence: Synthetic oligonucleotide
  Antisense strand to SEQ ID NO: 707972
ucaccuaucucagagcaga

SEQ ID NO: 707974 - RNA, 19 nt, Artificial Sequence
  Description of Artificial Sequence: Synthetic oligonucleotide
  Sense strand starting at position 2414 of SEQ ID NO: 586305
cucugagauaggugacuuu

SEQ ID NO: 707975 - RNA, 19 nt, Artificial Sequence
  Description of Artificial Sequence: Synthetic oligonucleotide
  Antisense strand to SEQ ID NO: 707974
aaagucaccuaucucagag

SEQ ID NO: 707976 - RNA, 19 nt, Artificial Sequence
  Description of Artificial Sequence: Synthetic oligonucleotide
  Sense strand starting at position 3036 of SEQ ID NO: 586305
ggugucuguggacaagaga

SEQ ID NO: 707977 - RNA, 19 nt, Artificial Sequence
  Description of Artificial Sequence: Synthetic oligonucleotide
  Antisense strand to SEQ ID NO: 707976
ucucuuguccacagacacc

SEQ ID NO: 707978 - RNA, 19 nt, Artificial Sequence
  Description of Artificial Sequence: Synthetic oligonucleotide
  Sense strand starting at position 3069 of SEQ ID NO: 586305
accuaucuuccugggagga

SEQ ID NO: 707979 - RNA, 19 nt, Artificial Sequence
  Description of Artificial Sequence: Synthetic oligonucleotide
  Antisense strand to SEQ ID NO: 707978
uccucccaggaagauaggu

SEQ ID NO: 707980 - RNA, 19 nt, Artificial Sequence
  Description of Artificial Sequence: Synthetic oligonucleotide
  Sense strand starting at position 3070 of SEQ ID NO: 586305
ccuaucuuccugggaggau

SEQ ID NO: 707981 - RNA, 19 nt, Artificial Sequence
  Description of Artificial Sequence: Synthetic oligonucleotide
  Antisense strand to SEQ ID NO: 707980
auccucccaggaagauagg

SEQ ID NO: 707982 - RNA, 19 nt, Artificial Sequence
  Description of Artificial Sequence: Synthetic oligonucleotide
  Sense strand starting at position 3248 of SEQ ID NO: 586305
cggagaaggcuccgcucaa

SEQ ID NO: 707983 - RNA, 19 nt, Artificial Sequence
  Description of Artificial Sequence: Synthetic oligonucleotide
  Antisense strand to SEQ ID NO: 707982
uugagcggagccuucuccg

SEQ ID NO: 707984 - RNA, 19 nt, Artificial Sequence
  Description of Artificial Sequence: Synthetic oligonucleotide
  Sense strand starting at position 3249 of SEQ ID NO: 586305
ggagaaggcuccgcucaaa

SEQ ID NO: 707985 - RNA, 19 nt, Artificial Sequence
  Description of Artificial Sequence: Synthetic oligonucleotide
  Antisense strand to SEQ ID NO: 707984
uuugagcggagccuucucc

SEQ ID NO: 707986 - RNA, 19 nt, Artificial Sequence
  Description of Artificial Sequence: Synthetic oligonucleotide
  Sense strand starting at position 3338 of SEQ ID NO: 586305
ugccuuugccuggucagua

SEQ ID NO: 707987 - RNA, 19 nt, Artificial Sequence
  Description of Artificial Sequence: Synthetic oligonucleotide
  Antisense strand to SEQ ID NO: 707986
uacugaccaggcaaaggca

SEQ ID NO: 707988 - RNA, 19 nt, Artificial Sequence
  Description of Artificial Sequence: Synthetic oligonucleotide
  Sense strand starting at position 3343 of SEQ ID NO: 586305
uugccuggucaguaugcaa

SEQ ID NO: 707989 - RNA, 19 nt, Artificial Sequence
  Description of Artificial Sequence: Synthetic oligonucleotide
  Antisense strand to SEQ ID NO: 707988
uugcauacugaccaggcaa

SEQ ID NO: 707990 - RNA, 19 nt, Artificial Sequence
  Description of Artificial Sequence: Synthetic oligonucleotide
  Sense strand starting at position 3368 of SEQ ID NO: 586305
gugggauggacccagcauu

SEQ ID NO: 707991 - RNA, 19 nt, Artificial Sequence
  Description of Artificial Sequence: Synthetic oligonucleotide
  Antisense strand to SEQ ID NO: 707990
aaugcuggguccaucccac

SEQ ID NO: 707992 - RNA, 19 nt, Artificial Sequence
  Description of Artificial Sequence: Synthetic oligonucleotide
  Sense strand starting at position 3489 of SEQ ID NO: 586305
gggagagccuucucaguuu

SEQ ID NO: 707993 - RNA, 19 nt, Artificial Sequence
  Description of Artificial Sequence: Synthetic oligonucleotide
  Antisense strand to SEQ ID NO: 707992
aaacugagaaggcucuccc

SEQ ID NO: 707994 - RNA, 19 nt, Artificial Sequence
  Description of Artificial Sequence: Synthetic oligonucleotide
  Sense strand starting at position 3798 of SEQ ID NO: 586305
cugauuuaauccuagaagg

SEQ ID NO: 707995 - RNA, 19 nt, Artificial Sequence
  Description of Artificial Sequence: Synthetic oligonucleotide
  Antisense strand to SEQ ID NO: 707994
ccuucuaggauuaaaucag

SEQ ID NO: 707996 - RNA, 19 nt, Artificial Sequence
  Description of Artificial Sequence: Synthetic oligonucleotide
  Sense strand starting at position 57 of SEQ ID NO: 586306
uguaauagcuacucgggaa

SEQ ID NO: 707997 - RNA, 19 nt, Artificial Sequence
  Description of Artificial Sequence: Synthetic oligonucleotide
  Antisense strand to SEQ ID NO: 707996
uucccgaguagcuauuaca

SEQ ID NO: 707998 - RNA, 19 nt, Artificial Sequence
  Description of Artificial Sequence: Synthetic oligonucleotide
  Sense strand starting at position 58 of SEQ ID NO: 586306
guaauagcuacucgggaag

SEQ ID NO: 707999 - RNA, 19 nt, Artificial Sequence
  Description of Artificial Sequence: Synthetic oligonucleotide
  Antisense strand to SEQ ID NO: 707998
cuucccgaguagcuauuac

SEQ ID NO: 708000 - RNA, 19 nt, Artificial Sequence
  Description of Artificial Sequence: Synthetic oligonucleotide
  Sense strand starting at position 572 of SEQ ID NO: 586306
auaauaguaugucccucau

SEQ ID NO: 708001 - RNA, 19 nt, Artificial Sequence
  Description of Artificial Sequence: Synthetic oligonucleotide
  Antisense strand to SEQ ID NO: 708000
augagggacauacuauuau

SEQ ID NO: 708002 - RNA, 19 nt, Artificial Sequence
  Description of Artificial Sequence: Synthetic oligonucleotide
  Sense strand starting at position 576 of SEQ ID NO: 586306
uaguaugucccucauagga

SEQ ID NO: 708003 - RNA, 19 nt, Artificial Sequence
  Description of Artificial Sequence: Synthetic oligonucleotide
  Antisense strand to SEQ ID NO: 708002
uccuaugagggacauacua

SEQ ID NO: 708004 - RNA, 19 nt, Artificial Sequence
  Description of Artificial Sequence: Synthetic oligonucleotide
  Sense strand starting at position 584 of SEQ ID NO: 586306
cccucauaggagugugaug

SEQ ID NO: 708005 - RNA, 19 nt, Artificial Sequence
  Description of Artificial Sequence: Synthetic oligonucleotide
  Antisense strand to SEQ ID NO: 708004
caucacacuccuaugaggg

SEQ ID NO: 708006 - RNA, 19 nt, Artificial Sequence
  Description of Artificial Sequence: Synthetic oligonucleotide
  Sense strand starting at position 586 of SEQ ID NO: 586306
cucauaggagugugaugaa

SEQ ID NO: 708007 - RNA, 19 nt, Artificial Sequence
  Description of Artificial Sequence: Synthetic oligonucleotide
  Antisense strand to SEQ ID NO: 708006
uucaucacacuccuaugag

SEQ ID NO: 708008 - RNA, 19 nt, Artificial Sequence
  Description of Artificial Sequence: Synthetic oligonucleotide
  Sense strand starting at position 638 of SEQ ID NO: 586306
cauagugagcacuguauaa

SEQ ID NO: 708009 - RNA, 19 nt, Artificial Sequence
  Description of Artificial Sequence: Synthetic oligonucleotide
  Antisense strand to SEQ ID NO: 708008
uuauacagugcucacuaug

SEQ ID NO: 708010 - RNA, 19 nt, Artificial Sequence
  Description of Artificial Sequence: Synthetic oligonucleotide
  Sense strand starting at position 640 of SEQ ID NO: 586306
uagugagcacuguauaagu

SEQ ID NO: 708011 - RNA, 19 nt, Artificial Sequence
  Description of Artificial Sequence: Synthetic oligonucleotide
  Antisense strand to SEQ ID NO: 708010
acuuauacagugcucacua

SEQ ID NO: 708012 - RNA, 19 nt, Artificial Sequence
  Description of Artificial Sequence: Synthetic oligonucleotide
  Sense strand starting at position 642 of SEQ ID NO: 586306
gugagcacuguauaaguau

SEQ ID NO: 708013 - RNA, 19 nt, Artificial Sequence
  Description of Artificial Sequence: Synthetic oligonucleotide
  Antisense strand to SEQ ID NO: 708012
auacuuauacagugcucac

SEQ ID NO: 708014 - RNA, 19 nt, Artificial Sequence
  Description of Artificial Sequence: Synthetic oligonucleotide
  Sense strand starting at position 663 of SEQ ID NO: 586306
acuguuauccugcaguuau

SEQ ID NO: 708015 - RNA, 19 nt, Artificial Sequence
  Description of Artificial Sequence: Synthetic oligonucleotide
  Antisense strand to SEQ ID NO: 708014
auaacugcaggauaacagu

SEQ ID NO: 708016 - RNA, 19 nt, Artificial Sequence
  Description of Artificial Sequence: Synthetic oligonucleotide
  Sense strand starting at position 670 of SEQ ID NO: 586306
uccugcaguuauuuauuga

SEQ ID NO: 708017 - RNA, 19 nt, Artificial Sequence
  Description of Artificial Sequence: Synthetic oligonucleotide
  Antisense strand to SEQ ID NO: 708016
ucaauaaauaacugcagga

SEQ ID NO: 708018 - RNA, 19 nt, Artificial Sequence
  Description of Artificial Sequence: Synthetic oligonucleotide
  Sense strand starting at position 687 of SEQ ID NO: 586306
gagcuccuucuguaugcau

SEQ ID NO: 708019 - RNA, 19 nt, Artificial Sequence
  Description of Artificial Sequence: Synthetic oligonucleotide
  Antisense strand to SEQ ID NO: 708018
augcauacagaaggagcuc

SEQ ID NO: 708020 - RNA, 19 nt, Artificial Sequence
  Description of Artificial Sequence: Synthetic oligonucleotide
  Sense strand starting at position 744 of SEQ ID NO: 586306
ucuacaggucucugucagu

SEQ ID NO: 708021 - RNA, 19 nt, Artificial Sequence
  Description of Artificial Sequence: Synthetic oligonucleotide
  Antisense strand to SEQ ID NO: 708020
acugacagagaccuguaga

SEQ ID NO: 708022 - RNA, 19 nt, Artificial Sequence
  Description of Artificial Sequence: Synthetic oligonucleotide
  Sense strand starting at position 944 of SEQ ID NO: 586306
ugauacaauuaggugauua

SEQ ID NO: 708023 - RNA, 19 nt, Artificial Sequence
  Description of Artificial Sequence: Synthetic oligonucleotide
  Antisense strand to SEQ ID NO: 708022
uaaucaccuaauuguauca

SEQ ID NO: 708024 - RNA, 19 nt, Artificial Sequence
  Description of Artificial Sequence: Synthetic oligonucleotide
  Sense strand starting at position 949 of SEQ ID NO: 586306
caauuaggugauuaagucu

SEQ ID NO: 708025 - RNA, 19 nt, Artificial Sequence
  Description of Artificial Sequence: Synthetic oligonucleotide
  Antisense strand to SEQ ID NO: 708024
agacuuaaucaccuaauug

SEQ ID NO: 708026 - RNA, 19 nt, Artificial Sequence
  Description of Artificial Sequence: Synthetic oligonucleotide
  Sense strand starting at position 955 of SEQ ID NO: 586306
ggugauuaagucuguuuaa

SEQ ID NO: 708027 - RNA, 19 nt, Artificial Sequence
  Description of Artificial Sequence: Synthetic oligonucleotide
  Antisense strand to SEQ ID NO: 708026
uuaaacagacuuaaucacc

SEQ ID NO: 708028 - RNA, 19 nt, Artificial Sequence
  Description of Artificial Sequence: Synthetic oligonucleotide
  Sense strand starting at position 956 of SEQ ID NO: 586306
gugauuaagucuguuuaaa

SEQ ID NO: 708029 - RNA, 19 nt, Artificial Sequence
  Description of Artificial Sequence: Synthetic oligonucleotide
  Antisense strand to SEQ ID NO: 708028
uuuaaacagacuuaaucac

SEQ ID NO: 708030 - RNA, 19 nt, Artificial Sequence
  Description of Artificial Sequence: Synthetic oligonucleotide
  Sense strand starting at position 1038 of SEQ ID NO: 586306
aagucaugagacugucaug

SEQ ID NO: 708031 - RNA, 19 nt, Artificial Sequence
  Description of Artificial Sequence: Synthetic oligonucleotide
  Antisense strand to SEQ ID NO: 708030
caugacagucucaugacuu

SEQ ID NO: 708032 - RNA, 19 nt, Artificial Sequence
  Description of Artificial Sequence: Synthetic oligonucleotide
  Sense strand starting at position 1361 of SEQ ID NO: 586306
guaauuugggagcgucuau

SEQ ID NO: 708033 - RNA, 19 nt, Artificial Sequence
  Description of Artificial Sequence: Synthetic oligonucleotide
  Antisense strand to SEQ ID NO: 708032
auagacgcucccaaauuac

SEQ ID NO: 708034 - RNA, 19 nt, Artificial Sequence
  Description of Artificial Sequence: Synthetic oligonucleotide
  Sense strand starting at position 1508 of SEQ ID NO: 586306
ggccgauggucccugaacu

SEQ ID NO: 708035 - RNA, 19 nt, Artificial Sequence
  Description of Artificial Sequence: Synthetic oligonucleotide
  Antisense strand to SEQ ID NO: 708034
aguucagggaccaucggcc

SEQ ID NO: 708036 - RNA, 19 nt, Artificial Sequence
  Description of Artificial Sequence: Synthetic oligonucleotide
  Sense strand starting at position 1509 of SEQ ID NO: 586306
gccgauggucccugaacua

SEQ ID NO: 708037 - RNA, 19 nt, Artificial Sequence
  Description of Artificial Sequence: Synthetic oligonucleotide
  Antisense strand to SEQ ID NO: 708036
uaguucagggaccaucggc

SEQ ID NO: 708038 - RNA, 19 nt, Artificial Sequence
  Description of Artificial Sequence: Synthetic oligonucleotide
  Sense strand starting at position 1714 of SEQ ID NO: 586306
ggauguccggccuagaaga

SEQ ID NO: 708039 - RNA, 19 nt, Artificial Sequence
  Description of Artificial Sequence: Synthetic oligonucleotide
  Antisense strand to SEQ ID NO: 708038
ucuucuaggccggacaucc

SEQ ID NO: 708040 - RNA, 19 nt, Artificial Sequence
  Description of Artificial Sequence: Synthetic oligonucleotide
  Sense strand starting at position 2107 of SEQ ID NO: 586306
ccggguagugaaggaauaa

SEQ ID NO: 708041 - RNA, 19 nt, Artificial Sequence
  Description of Artificial Sequence: Synthetic oligonucleotide
  Antisense strand to SEQ ID NO: 708040
uuauuccuucacuacccgg

SEQ ID NO: 708042 - RNA, 19 nt, Artificial Sequence
  Description of Artificial Sequence: Synthetic oligonucleotide
  Sense strand starting at position 2118 of SEQ ID NO: 586306
aggaauaaauugcaguaau

SEQ ID NO: 708043 - RNA, 19 nt, Artificial Sequence
  Description of Artificial Sequence: Synthetic oligonucleotide
  Antisense strand to SEQ ID NO: 708042
auuacugcaauuuauuccu

SEQ ID NO: 708044 - RNA, 19 nt, Artificial Sequence
  Description of Artificial Sequence: Synthetic oligonucleotide
  Sense strand starting at position 2147 of SEQ ID NO: 586306
gggagugcuccuuauauau

SEQ ID NO: 708045 - RNA, 19 nt, Artificial Sequence
  Description of Artificial Sequence: Synthetic oligonucleotide
  Antisense strand to SEQ ID NO: 708044
auauauaaggagcacuccc

SEQ ID NO: 708046 - RNA, 19 nt, Artificial Sequence
  Description of Artificial Sequence: Synthetic oligonucleotide
  Sense strand starting at position 2491 of SEQ ID NO: 586306
agagauguugcaggagaug

SEQ ID NO: 708047 - RNA, 19 nt, Artificial Sequence
  Description of Artificial Sequence: Synthetic oligonucleotide
  Antisense strand to SEQ ID NO: 708046
caucuccugcaacaucucu

SEQ ID NO: 708048 - RNA, 19 nt, Artificial Sequence
  Description of Artificial Sequence: Synthetic oligonucleotide
  Sense strand starting at position 2569 of SEQ ID NO: 586306
ugggaucucgcuuaaguua

SEQ ID NO: 708049 - RNA, 19 nt, Artificial Sequence
  Description of Artificial Sequence: Synthetic oligonucleotide
  Antisense strand to SEQ ID NO: 708048
uaacuuaagcgagauccca

SEQ ID NO: 708050 - RNA, 19 nt, Artificial Sequence
  Description of Artificial Sequence: Synthetic oligonucleotide
  Sense strand starting at position 2685 of SEQ ID NO: 586306
cggguauugaaggauucgu

SEQ ID NO: 708051 - RNA, 19 nt, Artificial Sequence
  Description of Artificial Sequence: Synthetic oligonucleotide
  Antisense strand to SEQ ID NO: 708050
acgaauccuucaauacccg

SEQ ID NO: 708052 - RNA, 19 nt, Artificial Sequence
  Description of Artificial Sequence: Synthetic oligonucleotide
  Sense strand starting at position 2689 of SEQ ID NO: 586306
uauugaaggauucguagga

SEQ ID NO: 708053 - RNA, 19 nt, Artificial Sequence
  Description of Artificial Sequence: Synthetic oligonucleotide
  Antisense strand to SEQ ID NO: 708052
uccuacgaauccuucaaua

SEQ ID NO: 708054 - RNA, 19 nt, Artificial Sequence
  Description of Artificial Sequence: Synthetic oligonucleotide
  Sense strand starting at position 2693 of SEQ ID NO: 586306
gaaggauucguaggaguuc

SEQ ID NO: 708055 - RNA, 19 nt, Artificial Sequence
  Description of Artificial Sequence: Synthetic oligonucleotide
  Antisense strand to SEQ ID NO: 708054
gaacuccuacgaauccuuc

SEQ ID NO: 708056 - RNA, 19 nt, Artificial Sequence
  Description of Artificial Sequence: Synthetic oligonucleotide
  Sense strand starting at position 2702 of SEQ ID NO: 586306
guaggaguucgccagggaa

SEQ ID NO: 708057 - RNA, 19 nt, Artificial Sequence
  Description of Artificial Sequence: Synthetic oligonucleotide
  Antisense strand to SEQ ID NO: 708056
uucccuggcgaacuccuac

SEQ ID NO: 708058 - RNA, 19 nt, Artificial Sequence
  Description of Artificial Sequence: Synthetic oligonucleotide
  Sense strand starting at position 2704 of SEQ ID NO: 586306
aggaguucgccagggaagu

SEQ ID NO: 708059 - RNA, 19 nt, Artificial Sequence
  Description of Artificial Sequence: Synthetic oligonucleotide
  Antisense strand to SEQ ID NO: 708058
acuucccuggcgaacuccu

SEQ ID NO: 708060 - RNA, 19 nt, Artificial Sequence
  Description of Artificial Sequence: Synthetic oligonucleotide
  Sense strand starting at position 2758 of SEQ ID NO: 586306
cacagaguaugucucgaau

SEQ ID NO: 708061 - RNA, 19 nt, Artificial Sequence
  Description of Artificial Sequence: Synthetic oligonucleotide
  Antisense strand to SEQ ID NO: 708060
auucgagacauacucugug

SEQ ID NO: 708062 - RNA, 19 nt, Artificial Sequence
  Description of Artificial Sequence: Synthetic oligonucleotide
  Sense strand starting at position 2761 of SEQ ID NO: 586306
agaguaugucucgaauagu

SEQ ID NO: 708063 - RNA, 19 nt, Artificial Sequence
  Description of Artificial Sequence: Synthetic oligonucleotide
  Antisense strand to SEQ ID NO: 708062
acuauucgagacauacucu

SEQ ID NO: 708064 - RNA, 19 nt, Artificial Sequence
  Description of Artificial Sequence: Synthetic oligonucleotide
  Sense strand starting at position 2764 of SEQ ID NO: 586306
guaugucucgaauaguugu

SEQ ID NO: 708065 - RNA, 19 nt, Artificial Sequence
  Description of Artificial Sequence: Synthetic oligonucleotide
  Antisense strand to SEQ ID NO: 708064
acaacuauucgagacauac

SEQ ID NO: 708066 - RNA, 19 nt, Artificial Sequence
  Description of Artificial Sequence: Synthetic oligonucleotide
  Sense strand starting at position 2775 of SEQ ID NO: 586306
auaguuguguucccuauag

SEQ ID NO: 708067 - RNA, 19 nt, Artificial Sequence
  Description of Artificial Sequence: Synthetic oligonucleotide
  Antisense strand to SEQ ID NO: 708066
cuauagggaacacaacuau

SEQ ID NO: 708068 - RNA, 19 nt, Artificial Sequence
  Description of Artificial Sequence: Synthetic oligonucleotide
  Sense strand starting at position 2777 of SEQ ID NO: 586306
aguuguguucccuauagau

SEQ ID NO: 708069 - RNA, 19 nt, Artificial Sequence
  Description of Artificial Sequence: Synthetic oligonucleotide
  Antisense strand to SEQ ID NO: 708068
aucuauagggaacacaacu

SEQ ID NO: 708070 - RNA, 19 nt, Artificial Sequence
  Description of Artificial Sequence: Synthetic oligonucleotide
  Sense strand starting at position 2779 of SEQ ID NO: 586306
uuguguucccuauagauaa

SEQ ID NO: 708071 - RNA, 19 nt, Artificial Sequence
  Description of Artificial Sequence: Synthetic oligonucleotide
  Antisense strand to SEQ ID NO: 708070
uuaucuauagggaacacaa

SEQ ID NO: 708072 - RNA, 19 nt, Artificial Sequence
  Description of Artificial Sequence: Synthetic oligonucleotide
  Sense strand starting at position 2905 of SEQ ID NO: 586306
acuccuaagcaguauugau

SEQ ID NO: 708073 - RNA, 19 nt, Artificial Sequence
  Description of Artificial Sequence: Synthetic oligonucleotide
  Antisense strand to SEQ ID NO: 708072
aucaauacugcuuaggagu

SEQ ID NO: 708074 - RNA, 19 nt, Artificial Sequence
  Description of Artificial Sequence: Synthetic oligonucleotide
  Sense strand starting at position 2924 of SEQ ID NO: 586306
auguuaaucuuccuaaugu

SEQ ID NO: 708075 - RNA, 19 nt, Artificial Sequence
  Description of Artificial Sequence: Synthetic oligonucleotide
  Antisense strand to SEQ ID NO: 708074
acauuaggaagauuaacau

SEQ ID NO: 708076 - RNA, 19 nt, Artificial Sequence
  Description of Artificial Sequence: Synthetic oligonucleotide
  Sense strand starting at position 22 of SEQ ID NO: 586307
ugugauuuaacuuguguua

SEQ ID NO: 708077 - RNA, 19 nt, Artificial Sequence
  Description of Artificial Sequence: Synthetic oligonucleotide
  Antisense strand to SEQ ID NO: 708076
uaacacaaguuaaaucaca

SEQ ID NO: 708078 - RNA, 19 nt, Artificial Sequence
  Description of Artificial Sequence: Synthetic oligonucleotide
  Sense strand starting at position 135 of SEQ ID NO: 586307
cuaauacuguacuuaggaa

SEQ ID NO: 708079 - RNA, 19 nt, Artificial Sequence
  Description of Artificial Sequence: Synthetic oligonucleotide
  Antisense strand to SEQ ID NO: 708078
uuccuaaguacaguauuag

SEQ ID NO: 708080 - RNA, 19 nt, Artificial Sequence
  Description of Artificial Sequence: Synthetic oligonucleotide
  Sense strand starting at position 175 of SEQ ID NO: 586307
uggcucauaaccggauauu

SEQ ID NO: 708081 - RNA, 19 nt, Artificial Sequence
  Description of Artificial Sequence: Synthetic oligonucleotide
  Antisense strand to SEQ ID NO: 708080
aauauccgguuaugagcca

SEQ ID NO: 708082 - RNA, 19 nt, Artificial Sequence
  Description of Artificial Sequence: Synthetic oligonucleotide
  Sense strand starting at position 176 of SEQ ID NO: 586307
ggcucauaaccggauauua

SEQ ID NO: 708083 - RNA, 19 nt, Artificial Sequence
  Description of Artificial Sequence: Synthetic oligonucleotide
  Antisense strand to SEQ ID NO: 708082
uaauauccgguuaugagcc

SEQ ID NO: 708084 - RNA, 19 nt, Artificial Sequence
  Description of Artificial Sequence: Synthetic oligonucleotide
  Sense strand starting at position 196 of SEQ ID NO: 586307
auaguagauuccuuauuac

SEQ ID NO: 708085 - RNA, 19 nt, Artificial Sequence
  Description of Artificial Sequence: Synthetic oligonucleotide
  Antisense strand to SEQ ID NO: 708084
guaauaaggaaucuacuau

SEQ ID NO: 708086 - RNA, 19 nt, Artificial Sequence
  Description of Artificial Sequence: Synthetic oligonucleotide
  Sense strand starting at position 247 of SEQ ID NO: 586307
guugauauuuaccacuaca

SEQ ID NO: 708087 - RNA, 19 nt, Artificial Sequence
  Description of Artificial Sequence: Synthetic oligonucleotide
  Antisense strand to SEQ ID NO: 708086
uguagugguaaauaucaac

SEQ ID NO: 708088 - RNA, 19 nt, Artificial Sequence
  Description of Artificial Sequence: Synthetic oligonucleotide
  Sense strand starting at position 402 of SEQ ID NO: 586307
cugaaaucuccacgauaau

SEQ ID NO: 708089 - RNA, 19 nt, Artificial Sequence
  Description of Artificial Sequence: Synthetic oligonucleotide
  Antisense strand to SEQ ID NO: 708088
auuaucguggagauuucag

SEQ ID NO: 708090 - RNA, 19 nt, Artificial Sequence
  Description of Artificial Sequence: Synthetic oligonucleotide
  Sense strand starting at position 501 of SEQ ID NO: 586307
guguuuaacucuuucugaa

SEQ ID NO: 708091 - RNA, 19 nt, Artificial Sequence
  Description of Artificial Sequence: Synthetic oligonucleotide
  Antisense strand to SEQ ID NO: 708090
uucagaaagaguuaaacac

SEQ ID NO: 708092 - RNA, 19 nt, Artificial Sequence
  Description of Artificial Sequence: Synthetic oligonucleotide
  Sense strand starting at position 565 of SEQ ID NO: 586307
cuucuaaaggaaugcagaa

SEQ ID NO: 708093 - RNA, 19 nt, Artificial Sequence
  Description of Artificial Sequence: Synthetic oligonucleotide
  Antisense strand to SEQ ID NO: 708092
uucugcauuccuuuagaag

SEQ ID NO: 708094 - RNA, 19 nt, Artificial Sequence
  Description of Artificial Sequence: Synthetic oligonucleotide
  Sense strand starting at position 840 of SEQ ID NO: 586307
guuacaauuucgcugccuu

SEQ ID NO: 708095 - RNA, 19 nt, Artificial Sequence
  Description of Artificial Sequence: Synthetic oligonucleotide
  Antisense strand to SEQ ID NO: 708094
aaggcagcgaaauuguaac

SEQ ID NO: 708096 - RNA, 19 nt, Artificial Sequence
  Description of Artificial Sequence: Synthetic oligonucleotide
  Sense strand starting at position 874 of SEQ ID NO: 586307
aguacuaaaugggcauuaa

SEQ ID NO: 708097 - RNA, 19 nt, Artificial Sequence
  Description of Artificial Sequence: Synthetic oligonucleotide
  Antisense strand to SEQ ID NO: 708096
uuaaugcccauuuaguacu

SEQ ID NO: 708098 - RNA, 19 nt, Artificial Sequence
  Description of Artificial Sequence: Synthetic oligonucleotide
  Sense strand starting at position 1230 of SEQ ID NO: 586307
cgaguuugucuacugcagu

SEQ ID NO: 708099 - RNA, 19 nt, Artificial Sequence
  Description of Artificial Sequence: Synthetic oligonucleotide
  Antisense strand to SEQ ID NO: 708098
acugcaguagacaaacucg

SEQ ID NO: 708100 - RNA, 19 nt, Artificial Sequence
  Description of Artificial Sequence: Synthetic oligonucleotide
  Sense strand starting at position 1298 of SEQ ID NO: 586307
cugcgaugcacuucggagu

SEQ ID NO: 708101 - RNA, 19 nt, Artificial Sequence
  Description of Artificial Sequence: Synthetic oligonucleotide
  Antisense strand to SEQ ID NO: 708100
acuccgaagugcaucgcag

SEQ ID NO: 708102 - RNA, 19 nt, Artificial Sequence
  Description of Artificial Sequence: Synthetic oligonucleotide
  Sense strand starting at position 1350 of SEQ ID NO: 586307
gaaacugcuccagagcaga

SEQ ID NO: 708103 - RNA, 19 nt, Artificial Sequence
  Description of Artificial Sequence: Synthetic oligonucleotide
  Antisense strand to SEQ ID NO: 708102
ucugcucuggagcaguuuc

SEQ ID NO: 708104 - RNA, 19 nt, Artificial Sequence
  Description of Artificial Sequence: Synthetic oligonucleotide
  Sense strand starting at position 2437 of SEQ ID NO: 586307
ggauuugccguguaauccu

SEQ ID NO: 708105 - RNA, 19 nt, Artificial Sequence
  Description of Artificial Sequence: Synthetic oligonucleotide
  Antisense strand to SEQ ID NO: 708104
aggauuacacggcaaaucc

SEQ ID NO: 708106 - RNA, 19 nt, Artificial Sequence
  Description of Artificial Sequence: Synthetic oligonucleotide
  Sense strand starting at position 2445 of SEQ ID NO: 586307
cguguaauccuagaacccu

SEQ ID NO: 708107 - RNA, 19 nt, Artificial Sequence
  Description of Artificial Sequence: Synthetic oligonucleotide
  Antisense strand to SEQ ID NO: 708106
aggguucuaggauuacacg

SEQ ID NO: 708108 - RNA, 19 nt, Artificial Sequence
  Description of Artificial Sequence: Synthetic oligonucleotide
  Sense strand starting at position 2617 of SEQ ID NO: 586307
gcaggucuuccgagugguc

SEQ ID NO: 708109 - RNA, 19 nt, Artificial Sequence
  Description of Artificial Sequence: Synthetic oligonucleotide
  Antisense strand to SEQ ID NO: 708108
gaccacucggaagaccugc

SEQ ID NO: 708110 - RNA, 19 nt, Artificial Sequence
  Description of Artificial Sequence: Synthetic oligonucleotide
  Sense strand starting at position 2841 of SEQ ID NO: 586307
gcaggcauauggguaacua

SEQ ID NO: 708111 - RNA, 19 nt, Artificial Sequence
  Description of Artificial Sequence: Synthetic oligonucleotide
  Antisense strand to SEQ ID NO: 708110
uaguuacccauaugccugc

SEQ ID NO: 708112 - RNA, 19 nt, Artificial Sequence
  Description of Artificial Sequence: Synthetic oligonucleotide
  Sense strand starting at position 2842 of SEQ ID NO: 586307
caggcauauggguaacuau

SEQ ID NO: 708113 - RNA, 19 nt, Artificial Sequence
  Description of Artificial Sequence: Synthetic oligonucleotide
  Antisense strand to SEQ ID NO: 708112
auaguuacccauaugccug

SEQ ID NO: 708114 - RNA, 19 nt, Artificial Sequence
  Description of Artificial Sequence: Synthetic oligonucleotide
  Sense strand starting at position 3112 of SEQ ID NO: 586307
aucuaaugauguuugugga

SEQ ID NO: 708115 - RNA, 19 nt, Artificial Sequence
  Description of Artificial Sequence: Synthetic oligonucleotide
  Antisense strand to SEQ ID NO: 708114
uccacaaacaucauuagau

SEQ ID NO: 708116 - RNA, 19 nt, Artificial Sequence
  Description of Artificial Sequence: Synthetic oligonucleotide
  Sense strand starting at position 3142 of SEQ ID NO: 586307
gaguaaccaugucuuucga

SEQ ID NO: 708117 - RNA, 19 nt, Artificial Sequence
  Description of Artificial Sequence: Synthetic oligonucleotide
  Antisense strand to SEQ ID NO: 708116
ucgaaagacaugguuacuc

SEQ ID NO: 708118 - RNA, 19 nt, Artificial Sequence
  Description of Artificial Sequence: Synthetic oligonucleotide
  Sense strand starting at position 3156 of SEQ ID NO: 586307
uucgauguuaugcaaugaa

SEQ ID NO: 708119 - RNA, 19 nt, Artificial Sequence
  Description of Artificial Sequence: Synthetic oligonucleotide
  Antisense strand to SEQ ID NO: 708118
uucauugcauaacaucgaa

SEQ ID NO: 708120 - RNA, 19 nt, Artificial Sequence
  Description of Artificial Sequence: Synthetic oligonucleotide
  Sense strand starting at position 3217 of SEQ ID NO: 586307
uugccuaauccuggaauaa

SEQ ID NO: 708121 - RNA, 19 nt, Artificial Sequence
  Description of Artificial Sequence: Synthetic oligonucleotide
  Antisense strand to SEQ ID NO: 708120
uuauuccaggauuaggcaa

SEQ ID NO: 708122 - RNA, 19 nt, Artificial Sequence
  Description of Artificial Sequence: Synthetic oligonucleotide
  Sense strand starting at position 3250 of SEQ ID NO: 586307
aucauuguuuggucuuaga

SEQ ID NO: 708123 - RNA, 19 nt, Artificial Sequence
  Description of Artificial Sequence: Synthetic oligonucleotide
  Antisense strand to SEQ ID NO: 708122
ucuaagaccaaacaaugau

SEQ ID NO: 708124 - RNA, 19 nt, Artificial Sequence
  Description of Artificial Sequence: Synthetic oligonucleotide
  Sense strand starting at position 3263 of SEQ ID NO: 586307
cuuagaaagguccacugua

SEQ ID NO: 708125 - RNA, 19 nt, Artificial Sequence
  Description of Artificial Sequence: Synthetic oligonucleotide
  Antisense strand to SEQ ID NO: 708124
uacaguggaccuuucuaag

SEQ ID NO: 708126 - RNA, 19 nt, Artificial Sequence
  Description of Artificial Sequence: Synthetic oligonucleotide
  Sense strand starting at position 3314 of SEQ ID NO: 586307
ugguguuaaugggucugau

SEQ ID NO: 708127 - RNA, 19 nt, Artificial Sequence
  Description of Artificial Sequence: Synthetic oligonucleotide
  Antisense strand to SEQ ID NO: 708126
aucagacccauuaacacca

SEQ ID NO: 708128 - RNA, 19 nt, Artificial Sequence
  Description of Artificial Sequence: Synthetic oligonucleotide
  Sense strand starting at position 3396 of SEQ ID NO: 586307
acugcagauuggguacaau

SEQ ID NO: 708129 - RNA, 19 nt, Artificial Sequence
  Description of Artificial Sequence: Synthetic oligonucleotide
  Antisense strand to SEQ ID NO: 708128
auuguacccaaucugcagu

SEQ ID NO: 708130 - RNA, 19 nt, Artificial Sequence
  Description of Artificial Sequence: Synthetic oligonucleotide
  Sense strand starting at position 3501 of SEQ ID NO: 586307
gcaaaugcauucuuaugga

SEQ ID NO: 708131 - RNA, 19 nt, Artificial Sequence
  Description of Artificial Sequence: Synthetic oligonucleotide
  Antisense strand to SEQ ID NO: 708130
uccauaagaaugcauuugc

SEQ ID NO: 708132 - RNA, 19 nt, Artificial Sequence
  Description of Artificial Sequence: Synthetic oligonucleotide
  Sense strand starting at position 3538 of SEQ ID NO: 586307
cuguuugaauuaucacaga

SEQ ID NO: 708133 - RNA, 19 nt, Artificial Sequence
  Description of Artificial Sequence: Synthetic oligonucleotide
  Antisense strand to SEQ ID NO: 708132
ucugugauaauucaaacag

SEQ ID NO: 708134 - RNA, 19 nt, Artificial Sequence
  Description of Artificial Sequence: Synthetic oligonucleotide
  Sense strand starting at position 3812 of SEQ ID NO: 586307
aaugcuauuccauggguau

SEQ ID NO: 708135 - RNA, 19 nt, Artificial Sequence
  Description of Artificial Sequence: Synthetic oligonucleotide
  Antisense strand to SEQ ID NO: 708134
auacccauggaauagcauu

SEQ ID NO: 708136 - RNA, 19 nt, Artificial Sequence
  Description of Artificial Sequence: Synthetic oligonucleotide
  Sense strand starting at position 3813 of SEQ ID NO: 586307
augcuauuccauggguauc

SEQ ID NO: 708137 - RNA, 19 nt, Artificial Sequence
  Description of Artificial Sequence: Synthetic oligonucleotide
  Antisense strand to SEQ ID NO: 708136
gauacccauggaauagcau

SEQ ID NO: 708138 - RNA, 19 nt, Artificial Sequence
  Description of Artificial Sequence: Synthetic oligonucleotide
  Sense strand starting at position 3825 of SEQ ID NO: 586307
ggguaucucaagcagaacu

SEQ ID NO: 708139 - RNA, 19 nt, Artificial Sequence
  Description of Artificial Sequence: Synthetic oligonucleotide
  Antisense strand to SEQ ID NO: 708138
aguucugcuugagauaccc

SEQ ID NO: 708140 - RNA, 19 nt, Artificial Sequence
  Description of Artificial Sequence: Synthetic oligonucleotide
  Sense strand starting at position 3922 of SEQ ID NO: 586307
gauauaccugaggguguau

SEQ ID NO: 708141 - RNA, 19 nt, Artificial Sequence
  Description of Artificial Sequence: Synthetic oligonucleotide
  Antisense strand to SEQ ID NO: 708140
auacacccucagguauauc

SEQ ID NO: 708142 - RNA, 19 nt, Artificial Sequence
  Description of Artificial Sequence: Synthetic oligonucleotide
  Sense strand starting at position 3931 of SEQ ID NO: 586307
gaggguguauucuucucca

SEQ ID NO: 708143 - RNA, 19 nt, Artificial Sequence
  Description of Artificial Sequence: Synthetic oligonucleotide
  Antisense strand to SEQ ID NO: 708142
uggagaagaauacacccuc

SEQ ID NO: 708144 - RNA, 19 nt, Artificial Sequence
  Description of Artificial Sequence: Synthetic oligonucleotide
  Sense strand starting at position 3934 of SEQ ID NO: 586307
gguguauucuucuccaaag

SEQ ID NO: 708145 - RNA, 19 nt, Artificial Sequence
  Description of Artificial Sequence: Synthetic oligonucleotide
  Antisense strand to SEQ ID NO: 708144
cuuuggagaagaauacacc

SEQ ID NO: 708146 - RNA, 19 nt, Artificial Sequence
  Description of Artificial Sequence: Synthetic oligonucleotide
  Sense strand starting at position 3935 of SEQ ID NO: 586307
guguauucuucuccaaaga

SEQ ID NO: 708147 - RNA, 19 nt, Artificial Sequence
  Description of Artificial Sequence: Synthetic oligonucleotide
  Antisense strand to SEQ ID NO: 708146
ucuuuggagaagaauacac

SEQ ID NO: 708148 - RNA, 19 nt, Artificial Sequence
  Description of Artificial Sequence: Synthetic oligonucleotide
  Sense strand starting at position 3936 of SEQ ID NO: 586307
uguauucuucuccaaagag

SEQ ID NO: 708149 - RNA, 19 nt, Artificial Sequence
  Description of Artificial Sequence: Synthetic oligonucleotide
  Antisense strand to SEQ ID NO: 708148
cucuuuggagaagaauaca

SEQ ID NO: 708150 - RNA, 19 nt, Artificial Sequence
  Description of Artificial Sequence: Synthetic oligonucleotide
  Sense strand starting at position 3951 of SEQ ID NO: 586307
agagcauucugaucaguuu

SEQ ID NO: 708151 - RNA, 19 nt, Artificial Sequence
  Description of Artificial Sequence: Synthetic oligonucleotide
  Antisense strand to SEQ ID NO: 708150
aaacugaucagaaugcucu

SEQ ID NO: 708152 - RNA, 19 nt, Artificial Sequence
  Description of Artificial Sequence: Synthetic oligonucleotide
  Sense strand starting at position 3958 of SEQ ID NO: 586307
ucugaucaguuuguaguaa

SEQ ID NO: 708153 - RNA, 19 nt, Artificial Sequence
  Description of Artificial Sequence: Synthetic oligonucleotide
  Antisense strand to SEQ ID NO: 708152
uuacuacaaacugaucaga

SEQ ID NO: 708154 - RNA, 19 nt, Artificial Sequence
  Description of Artificial Sequence: Synthetic oligonucleotide
  Sense strand starting at position 3972 of SEQ ID NO: 586307
aguaauuucuccuaaugag

SEQ ID NO: 708155 - RNA, 19 nt, Artificial Sequence
  Description of Artificial Sequence: Synthetic oligonucleotide
  Antisense strand to SEQ ID NO: 708154
cucauuaggagaaauuacu

SEQ ID NO: 708156 - RNA, 19 nt, Artificial Sequence
  Description of Artificial Sequence: Synthetic oligonucleotide
  Sense strand starting at position 140 of SEQ ID NO: 586308
uugcuuagggcuuagaaug

SEQ ID NO: 708157 - RNA, 19 nt, Artificial Sequence
  Description of Artificial Sequence: Synthetic oligonucleotide
  Antisense strand to SEQ ID NO: 708156
cauucuaagcccuaagcaa

SEQ ID NO: 708158 - RNA, 19 nt, Artificial Sequence
  Description of Artificial Sequence: Synthetic oligonucleotide
  Sense strand starting at position 260 of SEQ ID NO: 586308
cugaaugcagcauauuaaa

SEQ ID NO: 708159 - RNA, 19 nt, Artificial Sequence
  Description of Artificial Sequence: Synthetic oligonucleotide
  Antisense strand to SEQ ID NO: 708158
uuuaauaugcugcauucag

SEQ ID NO: 708160 - RNA, 19 nt, Artificial Sequence
  Description of Artificial Sequence: Synthetic oligonucleotide
  Sense strand starting at position 307 of SEQ ID NO: 586308
auuggagucugucugaaau

SEQ ID NO: 708161 - RNA, 19 nt, Artificial Sequence
  Description of Artificial Sequence: Synthetic oligonucleotide
  Antisense strand to SEQ ID NO: 708160
auuucagacagacuccaau

SEQ ID NO: 708162 - RNA, 19 nt, Artificial Sequence
  Description of Artificial Sequence: Synthetic oligonucleotide
  Sense strand starting at position 373 of SEQ ID NO: 586308
uaugaugaugguuguacaa

SEQ ID NO: 708163 - RNA, 19 nt, Artificial Sequence
  Description of Artificial Sequence: Synthetic oligonucleotide
  Antisense strand to SEQ ID NO: 708162
uuguacaaccaucaucaua

SEQ ID NO: 708164 - RNA, 19 nt, Artificial Sequence
  Description of Artificial Sequence: Synthetic oligonucleotide
  Sense strand starting at position 734 of SEQ ID NO: 586308
aauggugaacucuacggua

SEQ ID NO: 708165 - RNA, 19 nt, Artificial Sequence
  Description of Artificial Sequence: Synthetic oligonucleotide
  Antisense strand to SEQ ID NO: 708164
uaccguagaguucaccauu

SEQ ID NO: 708166 - RNA, 19 nt, Artificial Sequence
  Description of Artificial Sequence: Synthetic oligonucleotide
  Sense strand starting at position 951 of SEQ ID NO: 586308
auuaaauuaccguagacug

SEQ ID NO: 708167 - RNA, 19 nt, Artificial Sequence
  Description of Artificial Sequence: Synthetic oligonucleotide
  Antisense strand to SEQ ID NO: 708166
cagucuacgguaauuuaau

SEQ ID NO: 708168 - RNA, 19 nt, Artificial Sequence
  Description of Artificial Sequence: Synthetic oligonucleotide
  Sense strand starting at position 1065 of SEQ ID NO: 586308
ccuugaaguuaggcuaaga

SEQ ID NO: 708169 - RNA, 19 nt, Artificial Sequence
  Description of Artificial Sequence: Synthetic oligonucleotide
  Antisense strand to SEQ ID NO: 708168
ucuuagccuaacuucaagg

SEQ ID NO: 708170 - RNA, 19 nt, Artificial Sequence
  Description of Artificial Sequence: Synthetic oligonucleotide
  Sense strand starting at position 1076 of SEQ ID NO: 586308
ggcuaagaaauguguauua

SEQ ID NO: 708171 - RNA, 19 nt, Artificial Sequence
  Description of Artificial Sequence: Synthetic oligonucleotide
  Antisense strand to SEQ ID NO: 708170
uaauacacauuucuuagcc

SEQ ID NO: 708172 - RNA, 19 nt, Artificial Sequence
  Description of Artificial Sequence: Synthetic oligonucleotide
  Sense strand starting at position 1078 of SEQ ID NO: 586308
cuaagaaauguguauuauc

SEQ ID NO: 708173 - RNA, 19 nt, Artificial Sequence
  Description of Artificial Sequence: Synthetic oligonucleotide
  Antisense strand to SEQ ID NO: 708172
gauaauacacauuucuuag

SEQ ID NO: 708174 - RNA, 19 nt, Artificial Sequence
  Description of Artificial Sequence: Synthetic oligonucleotide
  Sense strand starting at position 1087 of SEQ ID NO: 586308
guguauuauccugaaagca

SEQ ID NO: 708175 - RNA, 19 nt, Artificial Sequence
  Description of Artificial Sequence: Synthetic oligonucleotide
  Antisense strand to SEQ ID NO: 708174
ugcuuucaggauaauacac

SEQ ID NO: 708176 - RNA, 19 nt, Artificial Sequence
  Description of Artificial Sequence: Synthetic oligonucleotide
  Sense strand starting at position 1351 of SEQ ID NO: 586308
acugauaggcacugauaua

SEQ ID NO: 708177 - RNA, 19 nt, Artificial Sequence
  Description of Artificial Sequence: Synthetic oligonucleotide
  Antisense strand to SEQ ID NO: 708176
uauaucagugccuaucagu

SEQ ID NO: 708178 - RNA, 19 nt, Artificial Sequence
  Description of Artificial Sequence: Synthetic oligonucleotide
  Sense strand starting at position 1879 of SEQ ID NO: 586308
gagacuaaccugugagcaa

SEQ ID NO: 708179 - RNA, 19 nt, Artificial Sequence
  Description of Artificial Sequence: Synthetic oligonucleotide
  Antisense strand to SEQ ID NO: 708178
uugcucacagguuagucuc

SEQ ID NO: 708180 - RNA, 19 nt, Artificial Sequence
  Description of Artificial Sequence: Synthetic oligonucleotide
  Sense strand starting at position 1930 of SEQ ID NO: 586308
uucuuccaggcuugggaaa

SEQ ID NO: 708181 - RNA, 19 nt, Artificial Sequence
  Description of Artificial Sequence: Synthetic oligonucleotide
  Antisense strand to SEQ ID NO: 708180
uuucccaagccuggaagaa

SEQ ID NO: 708182 - RNA, 19 nt, Artificial Sequence
  Description of Artificial Sequence: Synthetic oligonucleotide
  Sense strand starting at position 1942 of SEQ ID NO: 586308
ugggaaagcacggguaaau

SEQ ID NO: 708183 - RNA, 19 nt, Artificial Sequence
  Description of Artificial Sequence: Synthetic oligonucleotide
  Antisense strand to SEQ ID NO: 708182
auuuacccgugcuuuccca

SEQ ID NO: 708184 - RNA, 19 nt, Artificial Sequence
  Description of Artificial Sequence: Synthetic oligonucleotide
  Sense strand starting at position 2096 of SEQ ID NO: 586308
ccggcugauccagaacuua

SEQ ID NO: 708185 - RNA, 19 nt, Artificial Sequence
  Description of Artificial Sequence: Synthetic oligonucleotide
  Antisense strand to SEQ ID NO: 708184
uaaguucuggaucagccgg

SEQ ID NO: 708186 - RNA, 19 nt, Artificial Sequence
  Description of Artificial Sequence: Synthetic oligonucleotide
  Sense strand starting at position 2244 of SEQ ID NO: 586308
agcacuagcccaggaaaua

SEQ ID NO: 708187 - RNA, 19 nt, Artificial Sequence
  Description of Artificial Sequence: Synthetic oligonucleotide
  Antisense strand to SEQ ID NO: 708186
uauuuccugggcuagugcu

SEQ ID NO: 708188 - RNA, 19 nt, Artificial Sequence
  Description of Artificial Sequence: Synthetic oligonucleotide
  Sense strand starting at position 2245 of SEQ ID NO: 586308
gcacuagcccaggaaauau

SEQ ID NO: 708189 - RNA, 19 nt, Artificial Sequence
  Description of Artificial Sequence: Synthetic oligonucleotide
  Antisense strand to SEQ ID NO: 708188
auauuuccugggcuagugc

SEQ ID NO: 708190 - RNA, 19 nt, Artificial Sequence
  Description of Artificial Sequence: Synthetic oligonucleotide
  Sense strand starting at position 2436 of SEQ ID NO: 586308
caguuaacaccagggagua

SEQ ID NO: 708191 - RNA, 19 nt, Artificial Sequence
  Description of Artificial Sequence: Synthetic oligonucleotide
  Antisense strand to SEQ ID NO: 708190
uacucccugguguuaacug

SEQ ID NO: 708192 - RNA, 19 nt, Artificial Sequence
  Description of Artificial Sequence: Synthetic oligonucleotide
  Sense strand starting at position 2507 of SEQ ID NO: 586308
uaaauuuguuaugaggaug

SEQ ID NO: 708193 - RNA, 19 nt, Artificial Sequence
  Description of Artificial Sequence: Synthetic oligonucleotide
  Antisense strand to SEQ ID NO: 708192
cauccucauaacaaauuua

SEQ ID NO: 708194 - RNA, 19 nt, Artificial Sequence
  Description of Artificial Sequence: Synthetic oligonucleotide
  Sense strand starting at position 2512 of SEQ ID NO: 586308
uuguuaugaggaugugaag

SEQ ID NO: 708195 - RNA, 19 nt, Artificial Sequence
  Description of Artificial Sequence: Synthetic oligonucleotide
  Antisense strand to SEQ ID NO: 708194
cuucacauccucauaacaa

SEQ ID NO: 708196 - RNA, 19 nt, Artificial Sequence
  Description of Artificial Sequence: Synthetic oligonucleotide
  Sense strand starting at position 2523 of SEQ ID NO: 586308
augugaagcacuuagagua

SEQ ID NO: 708197 - RNA, 19 nt, Artificial Sequence
  Description of Artificial Sequence: Synthetic oligonucleotide
  Antisense strand to SEQ ID NO: 708196
uacucuaagugcuucacau

SEQ ID NO: 708198 - RNA, 19 nt, Artificial Sequence
  Description of Artificial Sequence: Synthetic oligonucleotide
  Sense strand starting at position 2552 of SEQ ID NO: 586308
guuuguaggcgcucaguaa

SEQ ID NO: 708199 - RNA, 19 nt, Artificial Sequence
  Description of Artificial Sequence: Synthetic oligonucleotide
  Antisense strand to SEQ ID NO: 708198
uuacugagcgccuacaaac

SEQ ID NO: 708200 - RNA, 19 nt, Artificial Sequence
  Description of Artificial Sequence: Synthetic oligonucleotide
  Sense strand starting at position 2595 of SEQ ID NO: 586308
uugauuauuccauagucac

SEQ ID NO: 708201 - RNA, 19 nt, Artificial Sequence
  Description of Artificial Sequence: Synthetic oligonucleotide
  Antisense strand to SEQ ID NO: 708200
gugacuauggaauaaucaa

SEQ ID NO: 708202 - RNA, 19 nt, Artificial Sequence
  Description of Artificial Sequence: Synthetic oligonucleotide
  Sense strand starting at position 2892 of SEQ ID NO: 586308
acaauuagguugccaaaca

SEQ ID NO: 708203 - RNA, 19 nt, Artificial Sequence
  Description of Artificial Sequence: Synthetic oligonucleotide
  Antisense strand to SEQ ID NO: 708202
uguuuggcaaccuaauugu

SEQ ID NO: 708204 - RNA, 19 nt, Artificial Sequence
  Description of Artificial Sequence: Synthetic oligonucleotide
  Sense strand starting at position 2924 of SEQ ID NO: 586308
ucuggaauccacuagcuaa

SEQ ID NO: 708205 - RNA, 19 nt, Artificial Sequence
  Description of Artificial Sequence: Synthetic oligonucleotide
  Antisense strand to SEQ ID NO: 708204
uuagcuaguggauuccaga

SEQ ID NO: 708206 - RNA, 19 nt, Artificial Sequence
  Description of Artificial Sequence: Synthetic oligonucleotide
  Sense strand starting at position 2938 of SEQ ID NO: 586308
gcuaaaugagcacauuauc

SEQ ID NO: 708207 - RNA, 19 nt, Artificial Sequence
  Description of Artificial Sequence: Synthetic oligonucleotide
  Antisense strand to SEQ ID NO: 708206
gauaaugugcucauuuagc

SEQ ID NO: 708208 - RNA, 19 nt, Artificial Sequence
  Description of Artificial Sequence: Synthetic oligonucleotide
  Sense strand starting at position 3090 of SEQ ID NO: 586308
auaggcauccacugaguaa

SEQ ID NO: 708209 - RNA, 19 nt, Artificial Sequence
  Description of Artificial Sequence: Synthetic oligonucleotide
  Antisense strand to SEQ ID NO: 708208
uuacucaguggaugccuau

SEQ ID NO: 708210 - RNA, 19 nt, Artificial Sequence
  Description of Artificial Sequence: Synthetic oligonucleotide
  Sense strand starting at position 3093 of SEQ ID NO: 586308
ggcauccacugaguaauau

SEQ ID NO: 708211 - RNA, 19 nt, Artificial Sequence
  Description of Artificial Sequence: Synthetic oligonucleotide
  Antisense strand to SEQ ID NO: 708210
auauuacucaguggaugcc

SEQ ID NO: 708212 - RNA, 19 nt, Artificial Sequence
  Description of Artificial Sequence: Synthetic oligonucleotide
  Sense strand starting at position 3094 of SEQ ID NO: 586308
gcauccacugaguaauauu

SEQ ID NO: 708213 - RNA, 19 nt, Artificial Sequence
  Description of Artificial Sequence: Synthetic oligonucleotide
  Antisense strand to SEQ ID NO: 708212
aauauuacucaguggaugc

SEQ ID NO: 708214 - RNA, 19 nt, Artificial Sequence
  Description of Artificial Sequence: Synthetic oligonucleotide
  Sense strand starting at position 3118 of SEQ ID NO: 586308
augcaacauugauuauuga

SEQ ID NO: 708215 - RNA, 19 nt, Artificial Sequence
  Description of Artificial Sequence: Synthetic oligonucleotide
  Antisense strand to SEQ ID NO: 708214
ucaauaaucaauguugcau

SEQ ID NO: 708216 - RNA, 19 nt, Artificial Sequence
  Description of Artificial Sequence: Synthetic oligonucleotide
  Sense strand starting at position 3221 of SEQ ID NO: 586308
uuaugagguuugguauaug

SEQ ID NO: 708217 - RNA, 19 nt, Artificial Sequence
  Description of Artificial Sequence: Synthetic oligonucleotide
  Antisense strand to SEQ ID NO: 708216
cauauaccaaaccucauaa

SEQ ID NO: 708218 - RNA, 19 nt, Artificial Sequence
  Description of Artificial Sequence: Synthetic oligonucleotide
  Sense strand starting at position 3289 of SEQ ID NO: 586308
cguucuguaccagaaagag

SEQ ID NO: 708219 - RNA, 19 nt, Artificial Sequence
  Description of Artificial Sequence: Synthetic oligonucleotide
  Antisense strand to SEQ ID NO: 708218
cucuuucugguacagaacg

SEQ ID NO: 708220 - RNA, 19 nt, Artificial Sequence
  Description of Artificial Sequence: Synthetic oligonucleotide
  Sense strand starting at position 3396 of SEQ ID NO: 586308
ggacuuaaaucugcuaaag

SEQ ID NO: 708221 - RNA, 19 nt, Artificial Sequence
  Description of Artificial Sequence: Synthetic oligonucleotide
  Antisense strand to SEQ ID NO: 708220
cuuuagcagauuuaagucc

SEQ ID NO: 708222 - RNA, 19 nt, Artificial Sequence
  Description of Artificial Sequence: Synthetic oligonucleotide
  Sense strand starting at position 3446 of SEQ ID NO: 586308
cucuauagugaauaauguu

SEQ ID NO: 708223 - RNA, 19 nt, Artificial Sequence
  Description of Artificial Sequence: Synthetic oligonucleotide
  Antisense strand to SEQ ID NO: 708222
aacauuauucacuauagag

SEQ ID NO: 708224 - RNA, 19 nt, Artificial Sequence
  Description of Artificial Sequence: Synthetic oligonucleotide
  Sense strand starting at position 3760 of SEQ ID NO: 586308
uggaaauaguugcuaauca

SEQ ID NO: 708225 - RNA, 19 nt, Artificial Sequence
  Description of Artificial Sequence: Synthetic oligonucleotide
  Antisense strand to SEQ ID NO: 708224
ugauuagcaacuauuucca

SEQ ID NO: 708226 - RNA, 19 nt, Artificial Sequence
  Description of Artificial Sequence: Synthetic oligonucleotide
  Sense strand starting at position 3836 of SEQ ID NO: 586308
ucaugcucaggagaaaguu

SEQ ID NO: 708227 - RNA, 19 nt, Artificial Sequence
  Description of Artificial Sequence: Synthetic oligonucleotide
  Antisense strand to SEQ ID NO: 708226
aacuuucuccugagcauga

SEQ ID NO: 708228 - RNA, 19 nt, Artificial Sequence
  Description of Artificial Sequence: Synthetic oligonucleotide
  Sense strand starting at position 3868 of SEQ ID NO: 586308
ccucuugacgucgaaacau

SEQ ID NO: 708229 - RNA, 19 nt, Artificial Sequence
  Description of Artificial Sequence: Synthetic oligonucleotide
  Antisense strand to SEQ ID NO: 708228
auguuucgacgucaagagg

SEQ ID NO: 708230 - RNA, 19 nt, Artificial Sequence
  Description of Artificial Sequence: Synthetic oligonucleotide
  Sense strand starting at position 3916 of SEQ ID NO: 586308
ugcccaucacaaggaauaa

SEQ ID NO: 708231 - RNA, 19 nt, Artificial Sequence
  Description of Artificial Sequence: Synthetic oligonucleotide
  Antisense strand to SEQ ID NO: 708230
uuauuccuugugaugggca

SEQ ID NO: 708232 - RNA, 19 nt, Artificial Sequence
  Description of Artificial Sequence: Synthetic oligonucleotide
  Sense strand starting at position 3975 of SEQ ID NO: 586308
aaacaauguccuuggugac

SEQ ID NO: 708233 - RNA, 19 nt, Artificial Sequence
  Description of Artificial Sequence: Synthetic oligonucleotide
  Antisense strand to SEQ ID NO: 708232
gucaccaaggacauuguuu

SEQ ID NO: 708234 - RNA, 19 nt, Artificial Sequence
  Description of Artificial Sequence: Synthetic oligonucleotide
  Sense strand starting at position 3976 of SEQ ID NO: 586308
aacaauguccuuggugaca

SEQ ID NO: 708235 - RNA, 19 nt, Artificial Sequence
  Description of Artificial Sequence: Synthetic oligonucleotide
  Antisense strand to SEQ ID NO: 708234
ugucaccaaggacauuguu

SEQ ID NO: 708236 - RNA, 19 nt, Artificial Sequence
  Description of Artificial Sequence: Synthetic oligonucleotide
  Sense strand starting at position 167 of SEQ ID NO: 586309
acagauacucuuuggauac

SEQ ID NO: 708237 - RNA, 19 nt, Artificial Sequence
  Description of Artificial Sequence: Synthetic oligonucleotide
  Antisense strand to SEQ ID NO: 708236
guauccaaagaguaucugu

SEQ ID NO: 708238 - RNA, 19 nt, Artificial Sequence
  Description of Artificial Sequence: Synthetic oligonucleotide
  Sense strand starting at position 285 of SEQ ID NO: 586309
ggcuaugaaagccacagau

SEQ ID NO: 708239 - RNA, 19 nt, Artificial Sequence
  Description of Artificial Sequence: Synthetic oligonucleotide
  Antisense strand to SEQ ID NO: 708238
aucuguggcuuucauagcc

SEQ ID NO: 708240 - RNA, 19 nt, Artificial Sequence
  Description of Artificial Sequence: Synthetic oligonucleotide
  Sense strand starting at position 342 of SEQ ID NO: 586309
ggaugccuauuaccaugaa

SEQ ID NO: 708241 - RNA, 19 nt, Artificial Sequence
  Description of Artificial Sequence: Synthetic oligonucleotide
  Antisense strand to SEQ ID NO: 708240
uucaugguaauaggcaucc

SEQ ID NO: 708242 - RNA, 19 nt, Artificial Sequence
  Description of Artificial Sequence: Synthetic oligonucleotide
  Sense strand starting at position 945 of SEQ ID NO: 586309
gcucguccuguuugaggga

SEQ ID NO: 708243 - RNA, 19 nt, Artificial Sequence
  Description of Artificial Sequence: Synthetic oligonucleotide
  Antisense strand to SEQ ID NO: 708242
ucccucaaacaggacgagc

SEQ ID NO: 708244 - RNA, 19 nt, Artificial Sequence
  Description of Artificial Sequence: Synthetic oligonucleotide
  Sense strand starting at position 948 of SEQ ID NO: 586309
cguccuguuugagggaaau

SEQ ID NO: 708245 - RNA, 19 nt, Artificial Sequence
  Description of Artificial Sequence: Synthetic oligonucleotide
  Antisense strand to SEQ ID NO: 708244
auuucccucaaacaggacg

SEQ ID NO: 708246 - RNA, 19 nt, Artificial Sequence
  Description of Artificial Sequence: Synthetic oligonucleotide
  Sense strand starting at position 961 of SEQ ID NO: 586309
ggaaauuacucuuucugag

SEQ ID NO: 708247 - RNA, 19 nt, Artificial Sequence
  Description of Artificial Sequence: Synthetic oligonucleotide
  Antisense strand to SEQ ID NO: 708246
cucagaaagaguaauuucc

SEQ ID NO: 708248 - RNA, 19 nt, Artificial Sequence
  Description of Artificial Sequence: Synthetic oligonucleotide
  Sense strand starting at position 978 of SEQ ID NO: 586309
agagucaaauccugaaugu

SEQ ID NO: 708249 - RNA, 19 nt, Artificial Sequence
  Description of Artificial Sequence: Synthetic oligonucleotide
  Antisense strand to SEQ ID NO: 708248
acauucaggauuugacucu

SEQ ID NO: 708250 - RNA, 19 nt, Artificial Sequence
  Description of Artificial Sequence: Synthetic oligonucleotide
  Sense strand starting at position 989 of SEQ ID NO: 586309
cugaaugugacguguaauc

SEQ ID NO: 708251 - RNA, 19 nt, Artificial Sequence
  Description of Artificial Sequence: Synthetic oligonucleotide
  Antisense strand to SEQ ID NO: 708250
gauuacacgucacauucag

SEQ ID NO: 708252 - RNA, 19 nt, Artificial Sequence
  Description of Artificial Sequence: Synthetic oligonucleotide
  Sense strand starting at position 999 of SEQ ID NO: 586309
cguguaaucccugcacgca

SEQ ID NO: 708253 - RNA, 19 nt, Artificial Sequence
  Description of Artificial Sequence: Synthetic oligonucleotide
  Antisense strand to SEQ ID NO: 708252
ugcgugcagggauuacacg

SEQ ID NO: 708254 - RNA, 19 nt, Artificial Sequence
  Description of Artificial Sequence: Synthetic oligonucleotide
  Sense strand starting at position 1000 of SEQ ID NO: 586309
guguaaucccugcacgcaa

SEQ ID NO: 708255 - RNA, 19 nt, Artificial Sequence
  Description of Artificial Sequence: Synthetic oligonucleotide
  Antisense strand to SEQ ID NO: 708254
uugcgugcagggauuacac

SEQ ID NO: 708256 - RNA, 19 nt, Artificial Sequence
  Description of Artificial Sequence: Synthetic oligonucleotide
  Sense strand starting at position 2430 of SEQ ID NO: 586309
gaccuuuauccgugcagca

SEQ ID NO: 708257 - RNA, 19 nt, Artificial Sequence
  Description of Artificial Sequence: Synthetic oligonucleotide
  Antisense strand to SEQ ID NO: 708256
ugcugcacggauaaagguc

SEQ ID NO: 708258 - RNA, 19 nt, Artificial Sequence
  Description of Artificial Sequence: Synthetic oligonucleotide
  Sense strand starting at position 2432 of SEQ ID NO: 586309
ccuuuauccgugcagcaaa

SEQ ID NO: 708259 - RNA, 19 nt, Artificial Sequence
  Description of Artificial Sequence: Synthetic oligonucleotide
  Antisense strand to SEQ ID NO: 708258
uuugcugcacggauaaagg

SEQ ID NO: 708260 - RNA, 19 nt, Artificial Sequence
  Description of Artificial Sequence: Synthetic oligonucleotide
  Sense strand starting at position 2445 of SEQ ID NO: 586309
agcaaaugucuagugcgua

SEQ ID NO: 708261 - RNA, 19 nt, Artificial Sequence
  Description of Artificial Sequence: Synthetic oligonucleotide
  Antisense strand to SEQ ID NO: 708260
uacgcacuagacauuugcu

SEQ ID NO: 708262 - RNA, 19 nt, Artificial Sequence
  Description of Artificial Sequence: Synthetic oligonucleotide
  Sense strand starting at position 2603 of SEQ ID NO: 586309
ucacucgcucuaggugaau

SEQ ID NO: 708263 - RNA, 19 nt, Artificial Sequence
  Description of Artificial Sequence: Synthetic oligonucleotide
  Antisense strand to SEQ ID NO: 708262
auucaccuagagcgaguga

SEQ ID NO: 708264 - RNA, 19 nt, Artificial Sequence
  Description of Artificial Sequence: Synthetic oligonucleotide
  Sense strand starting at position 2612 of SEQ ID NO: 586309
cuaggugaaugcucgcuua

SEQ ID NO: 708265 - RNA, 19 nt, Artificial Sequence
  Description of Artificial Sequence: Synthetic oligonucleotide
  Antisense strand to SEQ ID NO: 708264
uaagcgagcauucaccuag

SEQ ID NO: 708266 - RNA, 19 nt, Artificial Sequence
  Description of Artificial Sequence: Synthetic oligonucleotide
  Sense strand starting at position 2615 of SEQ ID NO: 586309
ggugaaugcucgcuuaagu

SEQ ID NO: 708267 - RNA, 19 nt, Artificial Sequence
  Description of Artificial Sequence: Synthetic oligonucleotide
  Antisense strand to SEQ ID NO: 708266
acuuaagcgagcauucacc

SEQ ID NO: 708268 - RNA, 19 nt, Artificial Sequence
  Description of Artificial Sequence: Synthetic oligonucleotide
  Sense strand starting at position 2616 of SEQ ID NO: 586309
gugaaugcucgcuuaaguu

SEQ ID NO: 708269 - RNA, 19 nt, Artificial Sequence
  Description of Artificial Sequence: Synthetic oligonucleotide
  Antisense strand to SEQ ID NO: 708268
aacuuaagcgagcauucac

SEQ ID NO: 708270 - RNA, 19 nt, Artificial Sequence
  Description of Artificial Sequence: Synthetic oligonucleotide
  Sense strand starting at position 2782 of SEQ ID NO: 586309
cucuaagaucuugguuggu

SEQ ID NO: 708271 - RNA, 19 nt, Artificial Sequence
  Description of Artificial Sequence: Synthetic oligonucleotide
  Antisense strand to SEQ ID NO: 708270
accaaccaagaucuuagag

SEQ ID NO: 708272 - RNA, 19 nt, Artificial Sequence
  Description of Artificial Sequence: Synthetic oligonucleotide
  Sense strand starting at position 2784 of SEQ ID NO: 586309
cuaagaucuugguugguau

SEQ ID NO: 708273 - RNA, 19 nt, Artificial Sequence
  Description of Artificial Sequence: Synthetic oligonucleotide
  Antisense strand to SEQ ID NO: 708272
auaccaaccaagaucuuag

SEQ ID NO: 708274 - RNA, 19 nt, Artificial Sequence
  Description of Artificial Sequence: Synthetic oligonucleotide
  Sense strand starting at position 2786 of SEQ ID NO: 586309
aagaucuugguugguauga

SEQ ID NO: 708275 - RNA, 19 nt, Artificial Sequence
  Description of Artificial Sequence: Synthetic oligonucleotide
  Antisense strand to SEQ ID NO: 708274
ucauaccaaccaagaucuu

SEQ ID NO: 708276 - RNA, 19 nt, Artificial Sequence
  Description of Artificial Sequence: Synthetic oligonucleotide
  Sense strand starting at position 2787 of SEQ ID NO: 586309
agaucuugguugguaugau

SEQ ID NO: 708277 - RNA, 19 nt, Artificial Sequence
  Description of Artificial Sequence: Synthetic oligonucleotide
  Antisense strand to SEQ ID NO: 708276
aucauaccaaccaagaucu

SEQ ID NO: 708278 - RNA, 19 nt, Artificial Sequence
  Description of Artificial Sequence: Synthetic oligonucleotide
  Sense strand starting at position 2788 of SEQ ID NO: 586309
gaucuugguugguaugaug

SEQ ID NO: 708279 - RNA, 19 nt, Artificial Sequence
  Description of Artificial Sequence: Synthetic oligonucleotide
  Antisense strand to SEQ ID NO: 708278
caucauaccaaccaagauc

SEQ ID NO: 708280 - RNA, 19 nt, Artificial Sequence
  Description of Artificial Sequence: Synthetic oligonucleotide
  Sense strand starting at position 2799 of SEQ ID NO: 586309
guaugaugggcugaccuau

SEQ ID NO: 708281 - RNA, 19 nt, Artificial Sequence
  Description of Artificial Sequence: Synthetic oligonucleotide
  Antisense strand to SEQ ID NO: 708280
auaggucagcccaucauac

SEQ ID NO: 708282 - RNA, 19 nt, Artificial Sequence
  Description of Artificial Sequence: Synthetic oligonucleotide
  Sense strand starting at position 2914 of SEQ ID NO: 586309
uugcgaucuugucauugga

SEQ ID NO: 708283 - RNA, 19 nt, Artificial Sequence
  Description of Artificial Sequence: Synthetic oligonucleotide
  Antisense strand to SEQ ID NO: 708282
uccaaugacaagaucgcaa

SEQ ID NO: 708284 - RNA, 19 nt, Artificial Sequence
  Description of Artificial Sequence: Synthetic oligonucleotide
  Sense strand starting at position 2916 of SEQ ID NO: 586309
gcgaucuugucauuggaug

SEQ ID NO: 708285 - RNA, 19 nt, Artificial Sequence
  Description of Artificial Sequence: Synthetic oligonucleotide
  Antisense strand to SEQ ID NO: 708284
cauccaaugacaagaucgc

SEQ ID NO: 708286 - RNA, 19 nt, Artificial Sequence
  Description of Artificial Sequence: Synthetic oligonucleotide
  Sense strand starting at position 2917 of SEQ ID NO: 586309
cgaucuugucauuggauga

SEQ ID NO: 708287 - RNA, 19 nt, Artificial Sequence
  Description of Artificial Sequence: Synthetic oligonucleotide
  Antisense strand to SEQ ID NO: 708286
ucauccaaugacaagaucg

SEQ ID NO: 708288 - RNA, 19 nt, Artificial Sequence
  Description of Artificial Sequence: Synthetic oligonucleotide
  Sense strand starting at position 2921 of SEQ ID NO: 586309
cuugucauuggaugaggua

SEQ ID NO: 708289 - RNA, 19 nt, Artificial Sequence
  Description of Artificial Sequence: Synthetic oligonucleotide
  Antisense strand to SEQ ID NO: 708288
uaccucauccaaugacaag

SEQ ID NO: 708290 - RNA, 19 nt, Artificial Sequence
  Description of Artificial Sequence: Synthetic oligonucleotide
  Sense strand starting at position 2922 of SEQ ID NO: 586309
uugucauuggaugagguau

SEQ ID NO: 708291 - RNA, 19 nt, Artificial Sequence
  Description of Artificial Sequence: Synthetic oligonucleotide
  Antisense strand to SEQ ID NO: 708290
auaccucauccaaugacaa

SEQ ID NO: 708292 - RNA, 19 nt, Artificial Sequence
  Description of Artificial Sequence: Synthetic oligonucleotide
  Sense strand starting at position 3073 of SEQ ID NO: 586309
ccuagaagguuuccuaagu

SEQ ID NO: 708293 - RNA, 19 nt, Artificial Sequence
  Description of Artificial Sequence: Synthetic oligonucleotide
  Antisense strand to SEQ ID NO: 708292
acuuaggaaaccuucuagg

SEQ ID NO: 708294 - RNA, 19 nt, Artificial Sequence
  Description of Artificial Sequence: Synthetic oligonucleotide
  Sense strand starting at position 3074 of SEQ ID NO: 586309
cuagaagguuuccuaaguc

SEQ ID NO: 708295 - RNA, 19 nt, Artificial Sequence
  Description of Artificial Sequence: Synthetic oligonucleotide
  Antisense strand to SEQ ID NO: 708294
gacuuaggaaaccuucuag

SEQ ID NO: 708296 - RNA, 19 nt, Artificial Sequence
  Description of Artificial Sequence: Synthetic oligonucleotide
  Sense strand starting at position 3522 of SEQ ID NO: 586309
acugcugccuuguccuaau

SEQ ID NO: 708297 - RNA, 19 nt, Artificial Sequence
  Description of Artificial Sequence: Synthetic oligonucleotide
  Antisense strand to SEQ ID NO: 708296
auuaggacaaggcagcagu

SEQ ID NO: 708298 - RNA, 19 nt, Artificial Sequence
  Description of Artificial Sequence: Synthetic oligonucleotide
  Sense strand starting at position 3547 of SEQ ID NO: 586309
cugagcauuugucacugua

SEQ ID NO: 708299 - RNA, 19 nt, Artificial Sequence
  Description of Artificial Sequence: Synthetic oligonucleotide
  Antisense strand to SEQ ID NO: 708298
uacagugacaaaugcucag

SEQ ID NO: 708300 - RNA, 19 nt, Artificial Sequence
  Description of Artificial Sequence: Synthetic oligonucleotide
  Sense strand starting at position 3549 of SEQ ID NO: 586309
gagcauuugucacuguaug

SEQ ID NO: 708301 - RNA, 19 nt, Artificial Sequence
  Description of Artificial Sequence: Synthetic oligonucleotide
  Antisense strand to SEQ ID NO: 708300
cauacagugacaaaugcuc

SEQ ID NO: 708302 - RNA, 19 nt, Artificial Sequence
  Description of Artificial Sequence: Synthetic oligonucleotide
  Sense strand starting at position 3550 of SEQ ID NO: 586309
agcauuugucacuguaugu

SEQ ID NO: 708303 - RNA, 19 nt, Artificial Sequence
  Description of Artificial Sequence: Synthetic oligonucleotide
  Antisense strand to SEQ ID NO: 708302
acauacagugacaaaugcu

SEQ ID NO: 708304 - RNA, 19 nt, Artificial Sequence
  Description of Artificial Sequence: Synthetic oligonucleotide
  Sense strand starting at position 3814 of SEQ ID NO: 586309
ugcucauguguuugccauu

SEQ ID NO: 708305 - RNA, 19 nt, Artificial Sequence
  Description of Artificial Sequence: Synthetic oligonucleotide
  Antisense strand to SEQ ID NO: 708304
aauggcaaacacaugagca

SEQ ID NO: 708306 - RNA, 19 nt, Artificial Sequence
  Description of Artificial Sequence: Synthetic oligonucleotide
  Sense strand starting at position 3840 of SEQ ID NO: 586309
ucccuagcaugugaucuua

SEQ ID NO: 708307 - RNA, 19 nt, Artificial Sequence
  Description of Artificial Sequence: Synthetic oligonucleotide
  Antisense strand to SEQ ID NO: 708306
uaagaucacaugcuaggga

SEQ ID NO: 708308 - RNA, 19 nt, Artificial Sequence
  Description of Artificial Sequence: Synthetic oligonucleotide
  Sense strand starting at position 3868 of SEQ ID NO: 586309
gggccuuugucugauuuau

SEQ ID NO: 708309 - RNA, 19 nt, Artificial Sequence
  Description of Artificial Sequence: Synthetic oligonucleotide
  Antisense strand to SEQ ID NO: 708308
auaaaucagacaaaggccc

SEQ ID NO: 708310 - RNA, 19 nt, Artificial Sequence
  Description of Artificial Sequence: Synthetic oligonucleotide
  Sense strand starting at position 3870 of SEQ ID NO: 586309
gccuuugucugauuuauca

SEQ ID NO: 708311 - RNA, 19 nt, Artificial Sequence
  Description of Artificial Sequence: Synthetic oligonucleotide
  Antisense strand to SEQ ID NO: 708310
ugauaaaucagacaaaggc

SEQ ID NO: 708312 - RNA, 19 nt, Artificial Sequence
  Description of Artificial Sequence: Synthetic oligonucleotide
  Sense strand starting at position 3921 of SEQ ID NO: 586309
ggagucagugcucaguaaa

SEQ ID NO: 708313 - RNA, 19 nt, Artificial Sequence
  Description of Artificial Sequence: Synthetic oligonucleotide
  Antisense strand to SEQ ID NO: 708312
uuuacugagcacugacucc

SEQ ID NO: 708314 - RNA, 19 nt, Artificial Sequence
  Description of Artificial Sequence: Synthetic oligonucleotide
  Sense strand starting at position 3924 of SEQ ID NO: 586309
gucagugcucaguaaacaa

SEQ ID NO: 708315 - RNA, 19 nt, Artificial Sequence
  Description of Artificial Sequence: Synthetic oligonucleotide
  Antisense strand to SEQ ID NO: 708314
uuguuuacugagcacugac

SEQ ID NO: 708316 - RNA, 19 nt, Artificial Sequence
  Description of Artificial Sequence: Synthetic oligonucleotide
  Sense strand starting at position 155 of SEQ ID NO: 586310
guccuagaguuuccaacau

SEQ ID NO: 708317 - RNA, 19 nt, Artificial Sequence
  Description of Artificial Sequence: Synthetic oligonucleotide
  Antisense strand to SEQ ID NO: 708316
auguuggaaacucuaggac

SEQ ID NO: 708318 - RNA, 19 nt, Artificial Sequence
  Description of Artificial Sequence: Synthetic oligonucleotide
  Sense strand starting at position 332 of SEQ ID NO: 586310
ugugcaugugcuucuaacu

SEQ ID NO: 708319 - RNA, 19 nt, Artificial Sequence
  Description of Artificial Sequence: Synthetic oligonucleotide
  Antisense strand to SEQ ID NO: 708318
aguuagaagcacaugcaca

SEQ ID NO: 708320 - RNA, 19 nt, Artificial Sequence
  Description of Artificial Sequence: Synthetic oligonucleotide
  Sense strand starting at position 343 of SEQ ID NO: 586310
uucuaacugcgaugaugaa

SEQ ID NO: 708321 - RNA, 19 nt, Artificial Sequence
  Description of Artificial Sequence: Synthetic oligonucleotide
  Antisense strand to SEQ ID NO: 708320
uucaucaucgcaguuagaa

SEQ ID NO: 708322 - RNA, 19 nt, Artificial Sequence
  Description of Artificial Sequence: Synthetic oligonucleotide
  Sense strand starting at position 344 of SEQ ID NO: 586310
ucuaacugcgaugaugaau

SEQ ID NO: 708323 - RNA, 19 nt, Artificial Sequence
  Description of Artificial Sequence: Synthetic oligonucleotide
  Antisense strand to SEQ ID NO: 708322
auucaucaucgcaguuaga

SEQ ID NO: 708324 - RNA, 19 nt, Artificial Sequence
  Description of Artificial Sequence: Synthetic oligonucleotide
  Sense strand starting at position 487 of SEQ ID NO: 586310
ugcgauggccacuagagaa

SEQ ID NO: 708325 - RNA, 19 nt, Artificial Sequence
  Description of Artificial Sequence: Synthetic oligonucleotide
  Antisense strand to SEQ ID NO: 708324
uucucuaguggccaucgca

SEQ ID NO: 708326 - RNA, 19 nt, Artificial Sequence
  Description of Artificial Sequence: Synthetic oligonucleotide
  Sense strand starting at position 550 of SEQ ID NO: 586310
augugaacuuuauucugaa

SEQ ID NO: 708327 - RNA, 19 nt, Artificial Sequence
  Description of Artificial Sequence: Synthetic oligonucleotide
  Antisense strand to SEQ ID NO: 708326
uucagaauaaaguucacau

SEQ ID NO: 708328 - RNA, 19 nt, Artificial Sequence
  Description of Artificial Sequence: Synthetic oligonucleotide
  Sense strand starting at position 551 of SEQ ID NO: 586310
ugugaacuuuauucugaag

SEQ ID NO: 708329 - RNA, 19 nt, Artificial Sequence
  Description of Artificial Sequence: Synthetic oligonucleotide
  Antisense strand to SEQ ID NO: 708328
cuucagaauaaaguucaca

SEQ ID NO: 708330 - RNA, 19 nt, Artificial Sequence
  Description of Artificial Sequence: Synthetic oligonucleotide
  Sense strand starting at position 692 of SEQ ID NO: 586310
cugcuagauucuguacaaa

SEQ ID NO: 708331 - RNA, 19 nt, Artificial Sequence
  Description of Artificial Sequence: Synthetic oligonucleotide
  Antisense strand to SEQ ID NO: 708330
uuuguacagaaucuagcag

SEQ ID NO: 708332 - RNA, 19 nt, Artificial Sequence
  Description of Artificial Sequence: Synthetic oligonucleotide
  Sense strand starting at position 753 of SEQ ID NO: 586310
cgugucacuguagauaacu

SEQ ID NO: 708333 - RNA, 19 nt, Artificial Sequence
  Description of Artificial Sequence: Synthetic oligonucleotide
  Antisense strand to SEQ ID NO: 708332
aguuaucuacagugacacg

SEQ ID NO: 708334 - RNA, 19 nt, Artificial Sequence
  Description of Artificial Sequence: Synthetic oligonucleotide
  Sense strand starting at position 762 of SEQ ID NO: 586310
guagauaacugccucauaa

SEQ ID NO: 708335 - RNA, 19 nt, Artificial Sequence
  Description of Artificial Sequence: Synthetic oligonucleotide
  Antisense strand to SEQ ID NO: 708334
uuaugaggcaguuaucuac

SEQ ID NO: 708336 - RNA, 19 nt, Artificial Sequence
  Description of Artificial Sequence: Synthetic oligonucleotide
  Sense strand starting at position 823 of SEQ ID NO: 586310
caguccauuuguuaaagga

SEQ ID NO: 708337 - RNA, 19 nt, Artificial Sequence
  Description of Artificial Sequence: Synthetic oligonucleotide
  Antisense strand to SEQ ID NO: 708336
uccuuuaacaaauggacug

SEQ ID NO: 708338 - RNA, 19 nt, Artificial Sequence
  Description of Artificial Sequence: Synthetic oligonucleotide
  Sense strand starting at position 900 of SEQ ID NO: 586310
uguucuagagcuuacacuu

SEQ ID NO: 708339 - RNA, 19 nt, Artificial Sequence
  Description of Artificial Sequence: Synthetic oligonucleotide
  Antisense strand to SEQ ID NO: 708338
aaguguaagcucuagaaca

SEQ ID NO: 708340 - RNA, 19 nt, Artificial Sequence
  Description of Artificial Sequence: Synthetic oligonucleotide
  Sense strand starting at position 1103 of SEQ ID NO: 586310
gagccagucccagaguaaa

SEQ ID NO: 708341 - RNA, 19 nt, Artificial Sequence
  Description of Artificial Sequence: Synthetic oligonucleotide
  Antisense strand to SEQ ID NO: 708340
uuuacucugggacuggcuc

SEQ ID NO: 708342 - RNA, 19 nt, Artificial Sequence
  Description of Artificial Sequence: Synthetic oligonucleotide
  Sense strand starting at position 1116 of SEQ ID NO: 586310
aguaaauagguuggcuaga

SEQ ID NO: 708343 - RNA, 19 nt, Artificial Sequence
  Description of Artificial Sequence: Synthetic oligonucleotide
  Antisense strand to SEQ ID NO: 708342
ucuagccaaccuauuuacu

SEQ ID NO: 708344 - RNA, 19 nt, Artificial Sequence
  Description of Artificial Sequence: Synthetic oligonucleotide
  Sense strand starting at position 1117 of SEQ ID NO: 586310
guaaauagguuggcuagaa

SEQ ID NO: 708345 - RNA, 19 nt, Artificial Sequence
  Description of Artificial Sequence: Synthetic oligonucleotide
  Antisense strand to SEQ ID NO: 708344
uucuagccaaccuauuuac

SEQ ID NO: 708346 - RNA, 19 nt, Artificial Sequence
  Description of Artificial Sequence: Synthetic oligonucleotide
  Sense strand starting at position 1121 of SEQ ID NO: 586310
auagguuggcuagaacagu

SEQ ID NO: 708347 - RNA, 19 nt, Artificial Sequence
  Description of Artificial Sequence: Synthetic oligonucleotide
  Antisense strand to SEQ ID NO: 708346
acuguucuagccaaccuau

SEQ ID NO: 708348 - RNA, 19 nt, Artificial Sequence
  Description of Artificial Sequence: Synthetic oligonucleotide
  Sense strand starting at position 1903 of SEQ ID NO: 586310
gcaggaaaugcuugggaag

SEQ ID NO: 708349 - RNA, 19 nt, Artificial Sequence
  Description of Artificial Sequence: Synthetic oligonucleotide
  Antisense strand to SEQ ID NO: 708348
cuucccaagcauuuccugc

SEQ ID NO: 708350 - RNA, 19 nt, Artificial Sequence
  Description of Artificial Sequence: Synthetic oligonucleotide
  Sense strand starting at position 2031 of SEQ ID NO: 586310
ccaugagaccuuugaccuu

SEQ ID NO: 708351 - RNA, 19 nt, Artificial Sequence
  Description of Artificial Sequence: Synthetic oligonucleotide
  Antisense strand to SEQ ID NO: 708350
aaggucaaaggucucaugg

SEQ ID NO: 708352 - RNA, 19 nt, Artificial Sequence
  Description of Artificial Sequence: Synthetic oligonucleotide
  Sense strand starting at position 2185 of SEQ ID NO: 586310
uuacuaauacguucgcguu

SEQ ID NO: 708353 - RNA, 19 nt, Artificial Sequence
  Description of Artificial Sequence: Synthetic oligonucleotide
  Antisense strand to SEQ ID NO: 708352
aacgcgaacguauuaguaa

SEQ ID NO: 708354 - RNA, 19 nt, Artificial Sequence
  Description of Artificial Sequence: Synthetic oligonucleotide
  Sense strand starting at position 2334 of SEQ ID NO: 586310
guagguauguauccaggaa

SEQ ID NO: 708355 - RNA, 19 nt, Artificial Sequence
  Description of Artificial Sequence: Synthetic oligonucleotide
  Antisense strand to SEQ ID NO: 708354
uuccuggauacauaccuac

SEQ ID NO: 708356 - RNA, 19 nt, Artificial Sequence
  Description of Artificial Sequence: Synthetic oligonucleotide
  Sense strand starting at position 2425 of SEQ ID NO: 586310
gugcuuaucgcuguucuaa

SEQ ID NO: 708357 - RNA, 19 nt, Artificial Sequence
  Description of Artificial Sequence: Synthetic oligonucleotide
  Antisense strand to SEQ ID NO: 708356
uuagaacagcgauaagcac

SEQ ID NO: 708358 - RNA, 19 nt, Artificial Sequence
  Description of Artificial Sequence: Synthetic oligonucleotide
  Sense strand starting at position 2426 of SEQ ID NO: 586310
ugcuuaucgcuguucuaag

SEQ ID NO: 708359 - RNA, 19 nt, Artificial Sequence
  Description of Artificial Sequence: Synthetic oligonucleotide
  Antisense strand to SEQ ID NO: 708358
cuuagaacagcgauaagca

SEQ ID NO: 708360 - RNA, 19 nt, Artificial Sequence
  Description of Artificial Sequence: Synthetic oligonucleotide
  Sense strand starting at position 2537 of SEQ ID NO: 586310
uuucccuaguauguaagau

SEQ ID NO: 708361 - RNA, 19 nt, Artificial Sequence
  Description of Artificial Sequence: Synthetic oligonucleotide
  Antisense strand to SEQ ID NO: 708360
aucuuacauacuagggaaa

SEQ ID NO: 708362 - RNA, 19 nt, Artificial Sequence
  Description of Artificial Sequence: Synthetic oligonucleotide
  Sense strand starting at position 2549 of SEQ ID NO: 586310
guaagaucuuagucaugau

SEQ ID NO: 708363 - RNA, 19 nt, Artificial Sequence
  Description of Artificial Sequence: Synthetic oligonucleotide
  Antisense strand to SEQ ID NO: 708362
aucaugacuaagaucuuac

SEQ ID NO: 708364 - RNA, 19 nt, Artificial Sequence
  Description of Artificial Sequence: Synthetic oligonucleotide
  Sense strand starting at position 2556 of SEQ ID NO: 586310
cuuagucaugaugggaaua

SEQ ID NO: 708365 - RNA, 19 nt, Artificial Sequence
  Description of Artificial Sequence: Synthetic oligonucleotide
  Antisense strand to SEQ ID NO: 708364
uauucccaucaugacuaag

SEQ ID NO: 708366 - RNA, 19 nt, Artificial Sequence
  Description of Artificial Sequence: Synthetic oligonucleotide
  Sense strand starting at position 2650 of SEQ ID NO: 586310
uuagaagagugaguaauau

SEQ ID NO: 708367 - RNA, 19 nt, Artificial Sequence
  Description of Artificial Sequence: Synthetic oligonucleotide
  Antisense strand to SEQ ID NO: 708366
auauuacucacucuucuaa

SEQ ID NO: 708368 - RNA, 19 nt, Artificial Sequence
  Description of Artificial Sequence: Synthetic oligonucleotide
  Sense strand starting at position 2753 of SEQ ID NO: 586310
aggaguuaauagguaaggu

SEQ ID NO: 708369 - RNA, 19 nt, Artificial Sequence
  Description of Artificial Sequence: Synthetic oligonucleotide
  Antisense strand to SEQ ID NO: 708368
accuuaccuauuaacuccu

SEQ ID NO: 708370 - RNA, 19 nt, Artificial Sequence
  Description of Artificial Sequence: Synthetic oligonucleotide
  Sense strand starting at position 2808 of SEQ ID NO: 586310
uuggaaucuuuggauuuac

SEQ ID NO: 708371 - RNA, 19 nt, Artificial Sequence
  Description of Artificial Sequence: Synthetic oligonucleotide
  Antisense strand to SEQ ID NO: 708370
guaaauccaaagauuccaa

SEQ ID NO: 708372 - RNA, 19 nt, Artificial Sequence
  Description of Artificial Sequence: Synthetic oligonucleotide
  Sense strand starting at position 2907 of SEQ ID NO: 586310
agcccagacguuuggauuu

SEQ ID NO: 708373 - RNA, 19 nt, Artificial Sequence
  Description of Artificial Sequence: Synthetic oligonucleotide
  Antisense strand to SEQ ID NO: 708372
aaauccaaacgucugggcu

SEQ ID NO: 708374 - RNA, 19 nt, Artificial Sequence
  Description of Artificial Sequence: Synthetic oligonucleotide
  Sense strand starting at position 2976 of SEQ ID NO: 586310
gucauuguaguguacaacu

SEQ ID NO: 708375 - RNA, 19 nt, Artificial Sequence
  Description of Artificial Sequence: Synthetic oligonucleotide
  Antisense strand to SEQ ID NO: 708374
aguuguacacuacaaugac

SEQ ID NO: 708376 - RNA, 19 nt, Artificial Sequence
  Description of Artificial Sequence: Synthetic oligonucleotide
  Sense strand starting at position 3363 of SEQ ID NO: 586310
uuacuaugacugcaggagu

SEQ ID NO: 708377 - RNA, 19 nt, Artificial Sequence
  Description of Artificial Sequence: Synthetic oligonucleotide
  Antisense strand to SEQ ID NO: 708376
acuccugcagucauaguaa

SEQ ID NO: 708378 - RNA, 19 nt, Artificial Sequence
  Description of Artificial Sequence: Synthetic oligonucleotide
  Sense strand starting at position 3425 of SEQ ID NO: 586310
guugccauugcgcuuuauu

SEQ ID NO: 708379 - RNA, 19 nt, Artificial Sequence
  Description of Artificial Sequence: Synthetic oligonucleotide
  Antisense strand to SEQ ID NO: 708378
aauaaagcgcaauggcaac

SEQ ID NO: 708380 - RNA, 19 nt, Artificial Sequence
  Description of Artificial Sequence: Synthetic oligonucleotide
  Sense strand starting at position 3507 of SEQ ID NO: 586310
uucugaguaucacucuuua

SEQ ID NO: 708381 - RNA, 19 nt, Artificial Sequence
  Description of Artificial Sequence: Synthetic oligonucleotide
  Antisense strand to SEQ ID NO: 708380
uaaagagugauacucagaa

SEQ ID NO: 708382 - RNA, 19 nt, Artificial Sequence
  Description of Artificial Sequence: Synthetic oligonucleotide
  Sense strand starting at position 3511 of SEQ ID NO: 586310
gaguaucacucuuuagguu

SEQ ID NO: 708383 - RNA, 19 nt, Artificial Sequence
  Description of Artificial Sequence: Synthetic oligonucleotide
  Antisense strand to SEQ ID NO: 708382
aaccuaaagagugauacuc

SEQ ID NO: 708384 - RNA, 19 nt, Artificial Sequence
  Description of Artificial Sequence: Synthetic oligonucleotide
  Sense strand starting at position 3512 of SEQ ID NO: 586310
aguaucacucuuuagguuu

SEQ ID NO: 708385 - RNA, 19 nt, Artificial Sequence
  Description of Artificial Sequence: Synthetic oligonucleotide
  Antisense strand to SEQ ID NO: 708384
aaaccuaaagagugauacu

SEQ ID NO: 708386 - RNA, 19 nt, Artificial Sequence
  Description of Artificial Sequence: Synthetic oligonucleotide
  Sense strand starting at position 3515 of SEQ ID NO: 586310
aucacucuuuagguuuauu

SEQ ID NO: 708387 - RNA, 19 nt, Artificial Sequence
  Description of Artificial Sequence: Synthetic oligonucleotide
  Antisense strand to SEQ ID NO: 708386
aauaaaccuaaagagugau

SEQ ID NO: 708388 - RNA, 19 nt, Artificial Sequence
  Description of Artificial Sequence: Synthetic oligonucleotide
  Sense strand starting at position 3687 of SEQ ID NO: 586310
gacucuaaaguuugagcaa

SEQ ID NO: 708389 - RNA, 19 nt, Artificial Sequence
  Description of Artificial Sequence: Synthetic oligonucleotide
  Antisense strand to SEQ ID NO: 708388
uugcucaaacuuuagaguc

SEQ ID NO: 708390 - RNA, 19 nt, Artificial Sequence
  Description of Artificial Sequence: Synthetic oligonucleotide
  Sense strand starting at position 3690 of SEQ ID NO: 586310
ucuaaaguuugagcaauua

SEQ ID NO: 708391 - RNA, 19 nt, Artificial Sequence
  Description of Artificial Sequence: Synthetic oligonucleotide
  Antisense strand to SEQ ID NO: 708390
uaauugcucaaacuuuaga

SEQ ID NO: 708392 - RNA, 19 nt, Artificial Sequence
  Description of Artificial Sequence: Synthetic oligonucleotide
  Sense strand starting at position 3718 of SEQ ID NO: 586310
aaaguuggcccauaucuga

SEQ ID NO: 708393 - RNA, 19 nt, Artificial Sequence
  Description of Artificial Sequence: Synthetic oligonucleotide
  Antisense strand to SEQ ID NO: 708392
ucagauaugggccaacuuu

SEQ ID NO: 708394 - RNA, 19 nt, Artificial Sequence
  Description of Artificial Sequence: Synthetic oligonucleotide
  Sense strand starting at position 3782 of SEQ ID NO: 586310
acauaccuguuucuaaguu

SEQ ID NO: 708395 - RNA, 19 nt, Artificial Sequence
  Description of Artificial Sequence: Synthetic oligonucleotide
  Antisense strand to SEQ ID NO: 708394
aacuuagaaacagguaugu

SEQ ID NO: 708396 - RNA, 19 nt, Artificial Sequence
  Description of Artificial Sequence: Synthetic oligonucleotide
  Sense strand starting at position 5 of SEQ ID NO: 586311
uguugaucagaagguaagu

SEQ ID NO: 708397 - RNA, 19 nt, Artificial Sequence
  Description of Artificial Sequence: Synthetic oligonucleotide
  Antisense strand to SEQ ID NO: 708396
acuuaccuucugaucaaca

SEQ ID NO: 708398 - RNA, 19 nt, Artificial Sequence
  Description of Artificial Sequence: Synthetic oligonucleotide
  Sense strand starting at position 113 of SEQ ID NO: 586311
aaauaugaacucgguaaug

SEQ ID NO: 708399 - RNA, 19 nt, Artificial Sequence
  Description of Artificial Sequence: Synthetic oligonucleotide
  Antisense strand to SEQ ID NO: 708398
cauuaccgaguucauauuu

SEQ ID NO: 708400 - RNA, 19 nt, Artificial Sequence
  Description of Artificial Sequence: Synthetic oligonucleotide
  Sense strand starting at position 115 of SEQ ID NO: 586311
auaugaacucgguaaugug

SEQ ID NO: 708401 - RNA, 19 nt, Artificial Sequence
  Description of Artificial Sequence: Synthetic oligonucleotide
  Antisense strand to SEQ ID NO: 708400
cacauuaccgaguucauau

SEQ ID NO: 708402 - RNA, 19 nt, Artificial Sequence
  Description of Artificial Sequence: Synthetic oligonucleotide
  Sense strand starting at position 158 of SEQ ID NO: 586311
uaguauccacaguauguau

SEQ ID NO: 708403 - RNA, 19 nt, Artificial Sequence
  Description of Artificial Sequence: Synthetic oligonucleotide
  Antisense strand to SEQ ID NO: 708402
auacauacuguggauacua

SEQ ID NO: 708404 - RNA, 19 nt, Artificial Sequence
  Description of Artificial Sequence: Synthetic oligonucleotide
  Sense strand starting at position 265 of SEQ ID NO: 586311
gaaauuaugcagugguaga

SEQ ID NO: 708405 - RNA, 19 nt, Artificial Sequence
  Description of Artificial Sequence: Synthetic oligonucleotide
  Antisense strand to SEQ ID NO: 708404
ucuaccacugcauaauuuc

SEQ ID NO: 708406 - RNA, 19 nt, Artificial Sequence
  Description of Artificial Sequence: Synthetic oligonucleotide
  Sense strand starting at position 353 of SEQ ID NO: 586311
agucaauaucuuugucuag

SEQ ID NO: 708407 - RNA, 19 nt, Artificial Sequence
  Description of Artificial Sequence: Synthetic oligonucleotide
  Antisense strand to SEQ ID NO: 708406
cuagacaaagauauugacu

SEQ ID NO: 708408 - RNA, 19 nt, Artificial Sequence
  Description of Artificial Sequence: Synthetic oligonucleotide
  Sense strand starting at position 430 of SEQ ID NO: 586311
augaaagucuggccaugga

SEQ ID NO: 708409 - RNA, 19 nt, Artificial Sequence
  Description of Artificial Sequence: Synthetic oligonucleotide
  Antisense strand to SEQ ID NO: 708408
uccauggccagacuuucau

SEQ ID NO: 708410 - RNA, 19 nt, Artificial Sequence
  Description of Artificial Sequence: Synthetic oligonucleotide
  Sense strand starting at position 512 of SEQ ID NO: 586311
guuugacuugcccaaaguc

SEQ ID NO: 708411 - RNA, 19 nt, Artificial Sequence
  Description of Artificial Sequence: Synthetic oligonucleotide
  Antisense strand to SEQ ID NO: 708410
gacuuugggcaagucaaac

SEQ ID NO: 708412 - RNA, 19 nt, Artificial Sequence
  Description of Artificial Sequence: Synthetic oligonucleotide
  Sense strand starting at position 542 of SEQ ID NO: 586311
uggugucagacucauggga

SEQ ID NO: 708413 - RNA, 19 nt, Artificial Sequence
  Description of Artificial Sequence: Synthetic oligonucleotide
  Antisense strand to SEQ ID NO: 708412
ucccaugagucugacacca

SEQ ID NO: 708414 - RNA, 19 nt, Artificial Sequence
  Description of Artificial Sequence: Synthetic oligonucleotide
  Sense strand starting at position 625 of SEQ ID NO: 586311
uuugcuuaucacugggaac

SEQ ID NO: 708415 - RNA, 19 nt, Artificial Sequence
  Description of Artificial Sequence: Synthetic oligonucleotide
  Antisense strand to SEQ ID NO: 708414
guucccagugauaagcaaa

SEQ ID NO: 708416 - RNA, 19 nt, Artificial Sequence
  Description of Artificial Sequence: Synthetic oligonucleotide
  Sense strand starting at position 627 of SEQ ID NO: 586311
ugcuuaucacugggaacau

SEQ ID NO: 708417 - RNA, 19 nt, Artificial Sequence
  Description of Artificial Sequence: Synthetic oligonucleotide
  Antisense strand to SEQ ID NO: 708416
auguucccagugauaagca

SEQ ID NO: 708418 - RNA, 19 nt, Artificial Sequence
  Description of Artificial Sequence: Synthetic oligonucleotide
  Sense strand starting at position 680 of SEQ ID NO: 586311
uagagcagauuugaguuaa

SEQ ID NO: 708419 - RNA, 19 nt, Artificial Sequence
  Description of Artificial Sequence: Synthetic oligonucleotide
  Antisense strand to SEQ ID NO: 708418
uuaacucaaaucugcucua

SEQ ID NO: 708420 - RNA, 19 nt, Artificial Sequence
  Description of Artificial Sequence: Synthetic oligonucleotide
  Sense strand starting at position 802 of SEQ ID NO: 586311
cugacuagccacugggaaa

SEQ ID NO: 708421 - RNA, 19 nt, Artificial Sequence
  Description of Artificial Sequence: Synthetic oligonucleotide
  Antisense strand to SEQ ID NO: 708420
uuucccaguggcuagucag

SEQ ID NO: 708422 - RNA, 19 nt, Artificial Sequence
  Description of Artificial Sequence: Synthetic oligonucleotide
  Sense strand starting at position 850 of SEQ ID NO: 586311
cuguauaaauccguagaag

SEQ ID NO: 708423 - RNA, 19 nt, Artificial Sequence
  Description of Artificial Sequence: Synthetic oligonucleotide
  Antisense strand to SEQ ID NO: 708422
cuucuacggauuuauacag

SEQ ID NO: 708424 - RNA, 19 nt, Artificial Sequence
  Description of Artificial Sequence: Synthetic oligonucleotide
  Sense strand starting at position 851 of SEQ ID NO: 586311
uguauaaauccguagaagc

SEQ ID NO: 708425 - RNA, 19 nt, Artificial Sequence
  Description of Artificial Sequence: Synthetic oligonucleotide
  Antisense strand to SEQ ID NO: 708424
gcuucuacggauuuauaca

SEQ ID NO: 708426 - RNA, 19 nt, Artificial Sequence
  Description of Artificial Sequence: Synthetic oligonucleotide
  Sense strand starting at position 853 of SEQ ID NO: 586311
uauaaauccguagaagcuu

SEQ ID NO: 708427 - RNA, 19 nt, Artificial Sequence
  Description of Artificial Sequence: Synthetic oligonucleotide
  Antisense strand to SEQ ID NO: 708426
aagcuucuacggauuuaua

SEQ ID NO: 708428 - RNA, 19 nt, Artificial Sequence
  Description of Artificial Sequence: Synthetic oligonucleotide
  Sense strand starting at position 877 of SEQ ID NO: 586311
gggauuccaucugcuuaag

SEQ ID NO: 708429 - RNA, 19 nt, Artificial Sequence
  Description of Artificial Sequence: Synthetic oligonucleotide
  Antisense strand to SEQ ID NO: 708428
cuuaagcagauggaauccc

SEQ ID NO: 708430 - RNA, 19 nt, Artificial Sequence
  Description of Artificial Sequence: Synthetic oligonucleotide
  Sense strand starting at position 1030 of SEQ ID NO: 586311
uuacauuacucaguugaag

SEQ ID NO: 708431 - RNA, 19 nt, Artificial Sequence
  Description of Artificial Sequence: Synthetic oligonucleotide
  Antisense strand to SEQ ID NO: 708430
cuucaacugaguaauguaa

SEQ ID NO: 708432 - RNA, 19 nt, Artificial Sequence
  Description of Artificial Sequence: Synthetic oligonucleotide
  Sense strand starting at position 1137 of SEQ ID NO: 586311
cacauuggucguuaauauc

SEQ ID NO: 708433 - RNA, 19 nt, Artificial Sequence
  Description of Artificial Sequence: Synthetic oligonucleotide
  Antisense strand to SEQ ID NO: 708432
gauauuaacgaccaaugug

SEQ ID NO: 708434 - RNA, 19 nt, Artificial Sequence
  Description of Artificial Sequence: Synthetic oligonucleotide
  Sense strand starting at position 1353 of SEQ ID NO: 586311
cuccaaguguaccuggaau

SEQ ID NO: 708435 - RNA, 19 nt, Artificial Sequence
  Description of Artificial Sequence: Synthetic oligonucleotide
  Antisense strand to SEQ ID NO: 708434
auuccagguacacuuggag

SEQ ID NO: 708436 - RNA, 19 nt, Artificial Sequence
  Description of Artificial Sequence: Synthetic oligonucleotide
  Sense strand starting at position 1355 of SEQ ID NO: 586311
ccaaguguaccuggaauuc

SEQ ID NO: 708437 - RNA, 19 nt, Artificial Sequence
  Description of Artificial Sequence: Synthetic oligonucleotide
  Antisense strand to SEQ ID NO: 708436
gaauuccagguacacuugg

SEQ ID NO: 708438 - RNA, 19 nt, Artificial Sequence
  Description of Artificial Sequence: Synthetic oligonucleotide
  Sense strand starting at position 2040 of SEQ ID NO: 586311
cagaucuccggcgaucaaa

SEQ ID NO: 708439 - RNA, 19 nt, Artificial Sequence
  Description of Artificial Sequence: Synthetic oligonucleotide
  Antisense strand to SEQ ID NO: 708438
uuugaucgccggagaucug

SEQ ID NO: 708440 - RNA, 19 nt, Artificial Sequence
  Description of Artificial Sequence: Synthetic oligonucleotide
  Sense strand starting at position 2294 of SEQ ID NO: 586311
gucuuaugacuucgggaaa

SEQ ID NO: 708441 - RNA, 19 nt, Artificial Sequence
  Description of Artificial Sequence: Synthetic oligonucleotide
  Antisense strand to SEQ ID NO: 708440
uuucccgaagucauaagac

SEQ ID NO: 708442 - RNA, 19 nt, Artificial Sequence
  Description of Artificial Sequence: Synthetic oligonucleotide
  Sense strand starting at position 2426 of SEQ ID NO: 586311
cuuugcgaacucuagacua

SEQ ID NO: 708443 - RNA, 19 nt, Artificial Sequence
  Description of Artificial Sequence: Synthetic oligonucleotide
  Antisense strand to SEQ ID NO: 708442
uagucuagaguucgcaaag

SEQ ID NO: 708444 - RNA, 19 nt, Artificial Sequence
  Description of Artificial Sequence: Synthetic oligonucleotide
  Sense strand starting at position 2428 of SEQ ID NO: 586311
uugcgaacucuagacuaga

SEQ ID NO: 708445 - RNA, 19 nt, Artificial Sequence
  Description of Artificial Sequence: Synthetic oligonucleotide
  Antisense strand to SEQ ID NO: 708444
ucuagucuagaguucgcaa

SEQ ID NO: 708446 - RNA, 19 nt, Artificial Sequence
  Description of Artificial Sequence: Synthetic oligonucleotide
  Sense strand starting at position 2649 of SEQ ID NO: 586311
gggcuccuugucuggauuu

SEQ ID NO: 708447 - RNA, 19 nt, Artificial Sequence
  Description of Artificial Sequence: Synthetic oligonucleotide
  Antisense strand to SEQ ID NO: 708446
aaauccagacaaggagccc

SEQ ID NO: 708448 - RNA, 19 nt, Artificial Sequence
  Description of Artificial Sequence: Synthetic oligonucleotide
  Sense strand starting at position 2960 of SEQ ID NO: 586311
guacuuugacccugaggug

SEQ ID NO: 708449 - RNA, 19 nt, Artificial Sequence
  Description of Artificial Sequence: Synthetic oligonucleotide
  Antisense strand to SEQ ID NO: 708448
caccucagggucaaaguac

SEQ ID NO: 708450 - RNA, 19 nt, Artificial Sequence
  Description of Artificial Sequence: Synthetic oligonucleotide
  Sense strand starting at position 3171 of SEQ ID NO: 586311
ugcucuaucccagaaguca

SEQ ID NO: 708451 - RNA, 19 nt, Artificial Sequence
  Description of Artificial Sequence: Synthetic oligonucleotide
  Antisense strand to SEQ ID NO: 708450
ugacuucugggauagagca

SEQ ID NO: 708452 - RNA, 19 nt, Artificial Sequence
  Description of Artificial Sequence: Synthetic oligonucleotide
  Sense strand starting at position 3179 of SEQ ID NO: 586311
cccagaagucaucgcaaag

SEQ ID NO: 708453 - RNA, 19 nt, Artificial Sequence
  Description of Artificial Sequence: Synthetic oligonucleotide
  Antisense strand to SEQ ID NO: 708452
cuuugcgaugacuucuggg

SEQ ID NO: 708454 - RNA, 19 nt, Artificial Sequence
  Description of Artificial Sequence: Synthetic oligonucleotide
  Sense strand starting at position 3212 of SEQ ID NO: 586311
ucaguucugucucuaagaa

SEQ ID NO: 708455 - RNA, 19 nt, Artificial Sequence
  Description of Artificial Sequence: Synthetic oligonucleotide
  Antisense strand to SEQ ID NO: 708454
uucuuagagacagaacuga

SEQ ID NO: 708456 - RNA, 19 nt, Artificial Sequence
  Description of Artificial Sequence: Synthetic oligonucleotide
  Sense strand starting at position 3302 of SEQ ID NO: 586311
uuugcuuugccuuaaggaa

SEQ ID NO: 708457 - RNA, 19 nt, Artificial Sequence
  Description of Artificial Sequence: Synthetic oligonucleotide
  Antisense strand to SEQ ID NO: 708456
uuccuuaaggcaaagcaaa

SEQ ID NO: 708458 - RNA, 19 nt, Artificial Sequence
  Description of Artificial Sequence: Synthetic oligonucleotide
  Sense strand starting at position 3383 of SEQ ID NO: 586311
agguuacucuuucuaaaug

SEQ ID NO: 708459 - RNA, 19 nt, Artificial Sequence
  Description of Artificial Sequence: Synthetic oligonucleotide
  Antisense strand to SEQ ID NO: 708458
cauuuagaaagaguaaccu

SEQ ID NO: 708460 - RNA, 19 nt, Artificial Sequence
  Description of Artificial Sequence: Synthetic oligonucleotide
  Sense strand starting at position 3670 of SEQ ID NO: 586311
gguugaauuguauauucca

SEQ ID NO: 708461 - RNA, 19 nt, Artificial Sequence
  Description of Artificial Sequence: Synthetic oligonucleotide
  Antisense strand to SEQ ID NO: 708460
uggaauauacaauucaacc

SEQ ID NO: 708462 - RNA, 19 nt, Artificial Sequence
  Description of Artificial Sequence: Synthetic oligonucleotide
  Sense strand starting at position 3673 of SEQ ID NO: 586311
ugaauuguauauuccaaga

SEQ ID NO: 708463 - RNA, 19 nt, Artificial Sequence
  Description of Artificial Sequence: Synthetic oligonucleotide
  Antisense strand to SEQ ID NO: 708462
ucuuggaauauacaauuca

SEQ ID NO: 708464 - RNA, 19 nt, Artificial Sequence
  Description of Artificial Sequence: Synthetic oligonucleotide
  Sense strand starting at position 3708 of SEQ ID NO: 586311
ccugaaauaucaccguuac

SEQ ID NO: 708465 - RNA, 19 nt, Artificial Sequence
  Description of Artificial Sequence: Synthetic oligonucleotide
  Antisense strand to SEQ ID NO: 708464
guaacggugauauuucagg

SEQ ID NO: 708466 - RNA, 19 nt, Artificial Sequence
  Description of Artificial Sequence: Synthetic oligonucleotide
  Sense strand starting at position 3709 of SEQ ID NO: 586311
cugaaauaucaccguuaca

SEQ ID NO: 708467 - RNA, 19 nt, Artificial Sequence
  Description of Artificial Sequence: Synthetic oligonucleotide
  Antisense strand to SEQ ID NO: 708466
uguaacggugauauuucag

SEQ ID NO: 708468 - RNA, 19 nt, Artificial Sequence
  Description of Artificial Sequence: Synthetic oligonucleotide
  Sense strand starting at position 3878 of SEQ ID NO: 586311
agggcauauguguguauuu

SEQ ID NO: 708469 - RNA, 19 nt, Artificial Sequence
  Description of Artificial Sequence: Synthetic oligonucleotide
  Antisense strand to SEQ ID NO: 708468
aaauacacacauaugcccu

SEQ ID NO: 708470 - RNA, 19 nt, Artificial Sequence
  Description of Artificial Sequence: Synthetic oligonucleotide
  Sense strand starting at position 3880 of SEQ ID NO: 586311
ggcauauguguguauuugu

SEQ ID NO: 708471 - RNA, 19 nt, Artificial Sequence
  Description of Artificial Sequence: Synthetic oligonucleotide
  Antisense strand to SEQ ID NO: 708470
acaaauacacacauaugcc

SEQ ID NO: 708472 - RNA, 19 nt, Artificial Sequence
  Description of Artificial Sequence: Synthetic oligonucleotide
  Sense strand starting at position 3936 of SEQ ID NO: 586311
aaugacucagggugguaau

SEQ ID NO: 708473 - RNA, 19 nt, Artificial Sequence
  Description of Artificial Sequence: Synthetic oligonucleotide
  Antisense strand to SEQ ID NO: 708472
auuaccacccugagucauu

SEQ ID NO: 708474 - RNA, 19 nt, Artificial Sequence
  Description of Artificial Sequence: Synthetic oligonucleotide
  Sense strand starting at position 3955 of SEQ ID NO: 586311
gcaacagauuuaugaaaga

SEQ ID NO: 708475 - RNA, 19 nt, Artificial Sequence
  Description of Artificial Sequence: Synthetic oligonucleotide
  Antisense strand to SEQ ID NO: 708474
ucuuucauaaaucuguugc

SEQ ID NO: 708476 - RNA, 19 nt, Artificial Sequence
  Description of Artificial Sequence: Synthetic oligonucleotide
  Sense strand starting at position 100 of SEQ ID NO: 586312
gguguacaccugugaucuc

SEQ ID NO: 708477 - RNA, 19 nt, Artificial Sequence
  Description of Artificial Sequence: Synthetic oligonucleotide
  Antisense strand to SEQ ID NO: 708476
gagaucacagguguacacc

SEQ ID NO: 708478 - RNA, 19 nt, Artificial Sequence
  Description of Artificial Sequence: Synthetic oligonucleotide
  Sense strand starting at position 101 of SEQ ID NO: 586312
guguacaccugugaucuca

SEQ ID NO: 708479 - RNA, 19 nt, Artificial Sequence
  Description of Artificial Sequence: Synthetic oligonucleotide
  Antisense strand to SEQ ID NO: 708478
ugagaucacagguguacac

SEQ ID NO: 708480 - RNA, 19 nt, Artificial Sequence
  Description of Artificial Sequence: Synthetic oligonucleotide
  Sense strand starting at position 165 of SEQ ID NO: 586312
ucagguuugcagugagcua

SEQ ID NO: 708481 - RNA, 19 nt, Artificial Sequence
  Description of Artificial Sequence: Synthetic oligonucleotide
  Antisense strand to SEQ ID NO: 708480
uagcucacugcaaaccuga

SEQ ID NO: 708482 - RNA, 19 nt, Artificial Sequence
  Description of Artificial Sequence: Synthetic oligonucleotide
  Sense strand starting at position 166 of SEQ ID NO: 586312
cagguuugcagugagcuau

SEQ ID NO: 708483 - RNA, 19 nt, Artificial Sequence
  Description of Artificial Sequence: Synthetic oligonucleotide
  Antisense strand to SEQ ID NO: 708482
auagcucacugcaaaccug

SEQ ID NO: 708484 - RNA, 19 nt, Artificial Sequence
  Description of Artificial Sequence: Synthetic oligonucleotide
  Sense strand starting at position 354 of SEQ ID NO: 586312
uaggguuguuaaggaucaa

SEQ ID NO: 708485 - RNA, 19 nt, Artificial Sequence
  Description of Artificial Sequence: Synthetic oligonucleotide
  Antisense strand to SEQ ID NO: 708484
uugauccuuaacaacccua

SEQ ID NO: 708486 - RNA, 19 nt, Artificial Sequence
  Description of Artificial Sequence: Synthetic oligonucleotide
  Sense strand starting at position 438 of SEQ ID NO: 586312
gggcaacagaguugagauu

SEQ ID NO: 708487 - RNA, 19 nt, Artificial Sequence
  Description of Artificial Sequence: Synthetic oligonucleotide
  Antisense strand to SEQ ID NO: 708486
aaucucaacucuguugccc

SEQ ID NO: 708488 - RNA, 19 nt, Artificial Sequence
  Description of Artificial Sequence: Synthetic oligonucleotide
  Sense strand starting at position 449 of SEQ ID NO: 586312
uugagauucugccucugca

SEQ ID NO: 708489 - RNA, 19 nt, Artificial Sequence
  Description of Artificial Sequence: Synthetic oligonucleotide
  Antisense strand to SEQ ID NO: 708488
ugcagaggcagaaucucaa

SEQ ID NO: 708490 - RNA, 19 nt, Artificial Sequence
  Description of Artificial Sequence: Synthetic oligonucleotide
  Sense strand starting at position 523 of SEQ ID NO: 586312
auuccagagcgcugucaua

SEQ ID NO: 708491 - RNA, 19 nt, Artificial Sequence
  Description of Artificial Sequence: Synthetic oligonucleotide
  Antisense strand to SEQ ID NO: 708490
uaugacagcgcucuggaau

SEQ ID NO: 708492 - RNA, 19 nt, Artificial Sequence
  Description of Artificial Sequence: Synthetic oligonucleotide
  Sense strand starting at position 534 of SEQ ID NO: 586312
cugucauagcuguguaggu

SEQ ID NO: 708493 - RNA, 19 nt, Artificial Sequence
  Description of Artificial Sequence: Synthetic oligonucleotide
  Antisense strand to SEQ ID NO: 708492
accuacacagcuaugacag

SEQ ID NO: 708494 - RNA, 19 nt, Artificial Sequence
  Description of Artificial Sequence: Synthetic oligonucleotide
  Sense strand starting at position 535 of SEQ ID NO: 586312
ugucauagcuguguagguu

SEQ ID NO: 708495 - RNA, 19 nt, Artificial Sequence
  Description of Artificial Sequence: Synthetic oligonucleotide
  Antisense strand to SEQ ID NO: 708494
aaccuacacagcuaugaca

SEQ ID NO: 708496 - RNA, 19 nt, Artificial Sequence
  Description of Artificial Sequence: Synthetic oligonucleotide
  Sense strand starting at position 543 of SEQ ID NO: 586312
cuguguagguuguaguuau

SEQ ID NO: 708497 - RNA, 19 nt, Artificial Sequence
  Description of Artificial Sequence: Synthetic oligonucleotide
  Antisense strand to SEQ ID NO: 708496
auaacuacaaccuacacag

SEQ ID NO: 708498 - RNA, 19 nt, Artificial Sequence
  Description of Artificial Sequence: Synthetic oligonucleotide
  Sense strand starting at position 547 of SEQ ID NO: 586312
guagguuguaguuaucacu

SEQ ID NO: 708499 - RNA, 19 nt, Artificial Sequence
  Description of Artificial Sequence: Synthetic oligonucleotide
  Antisense strand to SEQ ID NO: 708498
agugauaacuacaaccuac

SEQ ID NO: 708500 - RNA, 19 nt, Artificial Sequence
  Description of Artificial Sequence: Synthetic oligonucleotide
  Sense strand starting at position 550 of SEQ ID NO: 586312
gguuguaguuaucacuaaa

SEQ ID NO: 708501 - RNA, 19 nt, Artificial Sequence
  Description of Artificial Sequence: Synthetic oligonucleotide
  Antisense strand to SEQ ID NO: 708500
uuuagugauaacuacaacc

SEQ ID NO: 708502 - RNA, 19 nt, Artificial Sequence
  Description of Artificial Sequence: Synthetic oligonucleotide
  Sense strand starting at position 553 of SEQ ID NO: 586312
uguaguuaucacuaaauga

SEQ ID NO: 708503 - RNA, 19 nt, Artificial Sequence
  Description of Artificial Sequence: Synthetic oligonucleotide
  Antisense strand to SEQ ID NO: 708502
ucauuuagugauaacuaca

SEQ ID NO: 708504 - RNA, 19 nt, Artificial Sequence
  Description of Artificial Sequence: Synthetic oligonucleotide
  Sense strand starting at position 586 of SEQ ID NO: 586312
aagcgaguuaugcaaacga

SEQ ID NO: 708505 - RNA, 19 nt, Artificial Sequence
  Description of Artificial Sequence: Synthetic oligonucleotide
  Antisense strand to SEQ ID NO: 708504
ucguuugcauaacucgcuu

SEQ ID NO: 708506 - RNA, 19 nt, Artificial Sequence
  Description of Artificial Sequence: Synthetic oligonucleotide
  Sense strand starting at position 1988 of SEQ ID NO: 586312
ugggcucuaagccgucaaa

SEQ ID NO: 708507 - RNA, 19 nt, Artificial Sequence
  Description of Artificial Sequence: Synthetic oligonucleotide
  Antisense strand to SEQ ID NO: 708506
uuugacggcuuagagccca

SEQ ID NO: 708508 - RNA, 19 nt, Artificial Sequence
  Description of Artificial Sequence: Synthetic oligonucleotide
  Sense strand starting at position 2209 of SEQ ID NO: 586312
ccauucugugucugccaau

SEQ ID NO: 708509 - RNA, 19 nt, Artificial Sequence
  Description of Artificial Sequence: Synthetic oligonucleotide
  Antisense strand to SEQ ID NO: 708508
auuggcagacacagaaugg

SEQ ID NO: 708510 - RNA, 19 nt, Artificial Sequence
  Description of Artificial Sequence: Synthetic oligonucleotide
  Sense strand starting at position 2245 of SEQ ID NO: 586312
ggugaauccucgccacacu

SEQ ID NO: 708511 - RNA, 19 nt, Artificial Sequence
  Description of Artificial Sequence: Synthetic oligonucleotide
  Antisense strand to SEQ ID NO: 708510
aguguggcgaggauucacc

SEQ ID NO: 708512 - RNA, 19 nt, Artificial Sequence
  Description of Artificial Sequence: Synthetic oligonucleotide
  Sense strand starting at position 2346 of SEQ ID NO: 586312
cagggcucuuuggaucaaa

SEQ ID NO: 708513 - RNA, 19 nt, Artificial Sequence
  Description of Artificial Sequence: Synthetic oligonucleotide
  Antisense strand to SEQ ID NO: 708512
uuugauccaaagagcccug

SEQ ID NO: 708514 - RNA, 19 nt, Artificial Sequence
  Description of Artificial Sequence: Synthetic oligonucleotide
  Sense strand starting at position 2365 of SEQ ID NO: 586312
gcgcugcguucccgugaga

SEQ ID NO: 708515 - RNA, 19 nt, Artificial Sequence
  Description of Artificial Sequence: Synthetic oligonucleotide
  Antisense strand to SEQ ID NO: 708514
ucucacgggaacgcagcgc

SEQ ID NO: 708516 - RNA, 19 nt, Artificial Sequence
  Description of Artificial Sequence: Synthetic oligonucleotide
  Sense strand starting at position 2366 of SEQ ID NO: 586312
cgcugcguucccgugagaa

SEQ ID NO: 708517 - RNA, 19 nt, Artificial Sequence
  Description of Artificial Sequence: Synthetic oligonucleotide
  Antisense strand to SEQ ID NO: 708516
uucucacgggaacgcagcg

SEQ ID NO: 708518 - RNA, 19 nt, Artificial Sequence
  Description of Artificial Sequence: Synthetic oligonucleotide
  Sense strand starting at position 2368 of SEQ ID NO: 586312
cugcguucccgugagaaac

SEQ ID NO: 708519 - RNA, 19 nt, Artificial Sequence
  Description of Artificial Sequence: Synthetic oligonucleotide
  Antisense strand to SEQ ID NO: 708518
guuucucacgggaacgcag

SEQ ID NO: 708520 - RNA, 19 nt, Artificial Sequence
  Description of Artificial Sequence: Synthetic oligonucleotide
  Sense strand starting at position 2389 of SEQ ID NO: 586312
accagagcuucccaggauu

SEQ ID NO: 708521 - RNA, 19 nt, Artificial Sequence
  Description of Artificial Sequence: Synthetic oligonucleotide
  Antisense strand to SEQ ID NO: 708520
aauccugggaagcucuggu

SEQ ID NO: 708522 - RNA, 19 nt, Artificial Sequence
  Description of Artificial Sequence: Synthetic oligonucleotide
  Sense strand starting at position 2391 of SEQ ID NO: 586312
cagagcuucccaggauucu

SEQ ID NO: 708523 - RNA, 19 nt, Artificial Sequence
  Description of Artificial Sequence: Synthetic oligonucleotide
  Antisense strand to SEQ ID NO: 708522
agaauccugggaagcucug

SEQ ID NO: 708524 - RNA, 19 nt, Artificial Sequence
  Description of Artificial Sequence: Synthetic oligonucleotide
  Sense strand starting at position 2446 of SEQ ID NO: 586312
cgcugucucuuccagguaa

SEQ ID NO: 708525 - RNA, 19 nt, Artificial Sequence
  Description of Artificial Sequence: Synthetic oligonucleotide
  Antisense strand to SEQ ID NO: 708524
uuaccuggaagagacagcg

SEQ ID NO: 708526 - RNA, 19 nt, Artificial Sequence
  Description of Artificial Sequence: Synthetic oligonucleotide
  Sense strand starting at position 2448 of SEQ ID NO: 586312
cugucucuuccagguaaga

SEQ ID NO: 708527 - RNA, 19 nt, Artificial Sequence
  Description of Artificial Sequence: Synthetic oligonucleotide
  Antisense strand to SEQ ID NO: 708526
ucuuaccuggaagagacag

SEQ ID NO: 708528 - RNA, 19 nt, Artificial Sequence
  Description of Artificial Sequence: Synthetic oligonucleotide
  Sense strand starting at position 2450 of SEQ ID NO: 586312
gucucuuccagguaagaag

SEQ ID NO: 708529 - RNA, 19 nt, Artificial Sequence
  Description of Artificial Sequence: Synthetic oligonucleotide
  Antisense strand to SEQ ID NO: 708528
cuucuuaccuggaagagac

SEQ ID NO: 708530 - RNA, 19 nt, Artificial Sequence
  Description of Artificial Sequence: Synthetic oligonucleotide
  Sense strand starting at position 2501 of SEQ ID NO: 586312
agaaguuguagcuagauug

SEQ ID NO: 708531 - RNA, 19 nt, Artificial Sequence
  Description of Artificial Sequence: Synthetic oligonucleotide
  Antisense strand to SEQ ID NO: 708530
caaucuagcuacaacuucu

SEQ ID NO: 708532 - RNA, 19 nt, Artificial Sequence
  Description of Artificial Sequence: Synthetic oligonucleotide
  Sense strand starting at position 2934 of SEQ ID NO: 586312
gcaggauucccauagggcu

SEQ ID NO: 708533 - RNA, 19 nt, Artificial Sequence
  Description of Artificial Sequence: Synthetic oligonucleotide
  Antisense strand to SEQ ID NO: 708532
agcccuaugggaauccugc

SEQ ID NO: 708534 - RNA, 19 nt, Artificial Sequence
  Description of Artificial Sequence: Synthetic oligonucleotide
  Sense strand starting at position 3482 of SEQ ID NO: 586312
ggaaguguuugcuggacug

SEQ ID NO: 708535 - RNA, 19 nt, Artificial Sequence
  Description of Artificial Sequence: Synthetic oligonucleotide
  Antisense strand to SEQ ID NO: 708534
caguccagcaaacacuucc

SEQ ID NO: 708536 - RNA, 19 nt, Artificial Sequence
  Description of Artificial Sequence: Synthetic oligonucleotide
  Sense strand starting at position 3484 of SEQ ID NO: 586312
aaguguuugcuggacugga

SEQ ID NO: 708537 - RNA, 19 nt, Artificial Sequence
  Description of Artificial Sequence: Synthetic oligonucleotide
  Antisense strand to SEQ ID NO: 708536
uccaguccagcaaacacuu

SEQ ID NO: 708538 - RNA, 19 nt, Artificial Sequence
  Description of Artificial Sequence: Synthetic oligonucleotide
  Sense strand starting at position 147 of SEQ ID NO: 586313
gggaaaucaugagcacgau

SEQ ID NO: 708539 - RNA, 19 nt, Artificial Sequence
  Description of Artificial Sequence: Synthetic oligonucleotide
  Antisense strand to SEQ ID NO: 708538
aucgugcucaugauuuccc

SEQ ID NO: 708540 - RNA, 19 nt, Artificial Sequence
  Description of Artificial Sequence: Synthetic oligonucleotide
  Sense strand starting at position 169 of SEQ ID NO: 586313
uccagacucugaguagaga

SEQ ID NO: 708541 - RNA, 19 nt, Artificial Sequence
  Description of Artificial Sequence: Synthetic oligonucleotide
  Antisense strand to SEQ ID NO: 708540
ucucuacucagagucugga

SEQ ID NO: 708542 - RNA, 19 nt, Artificial Sequence
  Description of Artificial Sequence: Synthetic oligonucleotide
  Sense strand starting at position 177 of SEQ ID NO: 586313
cugaguagagaguggaaau

SEQ ID NO: 708543 - RNA, 19 nt, Artificial Sequence
  Description of Artificial Sequence: Synthetic oligonucleotide
  Antisense strand to SEQ ID NO: 708542
auuuccacucucuacucag

SEQ ID NO: 708544 - RNA, 19 nt, Artificial Sequence
  Description of Artificial Sequence: Synthetic oligonucleotide
  Sense strand starting at position 368 of SEQ ID NO: 586313
uuuggauagguaugaccaa

SEQ ID NO: 708545 - RNA, 19 nt, Artificial Sequence
  Description of Artificial Sequence: Synthetic oligonucleotide
  Antisense strand to SEQ ID NO: 708544
uuggucauaccuauccaaa

SEQ ID NO: 708546 - RNA, 19 nt, Artificial Sequence
  Description of Artificial Sequence: Synthetic oligonucleotide
  Sense strand starting at position 413 of SEQ ID NO: 586313
gccaacugauccucagaca

SEQ ID NO: 708547 - RNA, 19 nt, Artificial Sequence
  Description of Artificial Sequence: Synthetic oligonucleotide
  Antisense strand to SEQ ID NO: 708546
ugucugaggaucaguuggc

SEQ ID NO: 708548 - RNA, 19 nt, Artificial Sequence
  Description of Artificial Sequence: Synthetic oligonucleotide
  Sense strand starting at position 447 of SEQ ID NO: 586313
uaaagacagcuggguauua

SEQ ID NO: 708549 - RNA, 19 nt, Artificial Sequence
  Description of Artificial Sequence: Synthetic oligonucleotide
  Antisense strand to SEQ ID NO: 708548
uaauacccagcugucuuua

SEQ ID NO: 708550 - RNA, 19 nt, Artificial Sequence
  Description of Artificial Sequence: Synthetic oligonucleotide
  Sense strand starting at position 448 of SEQ ID NO: 586313
aaagacagcuggguauuaa

SEQ ID NO: 708551 - RNA, 19 nt, Artificial Sequence
  Description of Artificial Sequence: Synthetic oligonucleotide
  Antisense strand to SEQ ID NO: 708550
uuaauacccagcugucuuu

SEQ ID NO: 708552 - RNA, 19 nt, Artificial Sequence
  Description of Artificial Sequence: Synthetic oligonucleotide
  Sense strand starting at position 567 of SEQ ID NO: 586313
guacaacuuuaagucugaa

SEQ ID NO: 708553 - RNA, 19 nt, Artificial Sequence
  Description of Artificial Sequence: Synthetic oligonucleotide
  Antisense strand to SEQ ID NO: 708552
uucagacuuaaaguuguac

SEQ ID NO: 708554 - RNA, 19 nt, Artificial Sequence
  Description of Artificial Sequence: Synthetic oligonucleotide
  Sense strand starting at position 596 of SEQ ID NO: 586313
aagauaaggcuaugugaaa

SEQ ID NO: 708555 - RNA, 19 nt, Artificial Sequence
  Description of Artificial Sequence: Synthetic oligonucleotide
  Antisense strand to SEQ ID NO: 708554
uuucacauagccuuaucuu

SEQ ID NO: 708556 - RNA, 19 nt, Artificial Sequence
  Description of Artificial Sequence: Synthetic oligonucleotide
  Sense strand starting at position 895 of SEQ ID NO: 586313
cuuggcauauaaucaugaa

SEQ ID NO: 708557 - RNA, 19 nt, Artificial Sequence
  Description of Artificial Sequence: Synthetic oligonucleotide
  Antisense strand to SEQ ID NO: 708556
uucaugauuauaugccaag

SEQ ID NO: 708558 - RNA, 19 nt, Artificial Sequence
  Description of Artificial Sequence: Synthetic oligonucleotide
  Sense strand starting at position 919 of SEQ ID NO: 586313
accugaucccuguauauau

SEQ ID NO: 708559 - RNA, 19 nt, Artificial Sequence
  Description of Artificial Sequence: Synthetic oligonucleotide
  Antisense strand to SEQ ID NO: 708558
auauauacagggaucaggu

SEQ ID NO: 708560 - RNA, 19 nt, Artificial Sequence
  Description of Artificial Sequence: Synthetic oligonucleotide
  Sense strand starting at position 921 of SEQ ID NO: 586313
cugaucccuguauauauga

SEQ ID NO: 708561 - RNA, 19 nt, Artificial Sequence
  Description of Artificial Sequence: Synthetic oligonucleotide
  Antisense strand to SEQ ID NO: 708560
ucauauauacagggaucag

SEQ ID NO: 708562 - RNA, 19 nt, Artificial Sequence
  Description of Artificial Sequence: Synthetic oligonucleotide
  Sense strand starting at position 992 of SEQ ID NO: 586313
guucuuauuugcucugaca

SEQ ID NO: 708563 - RNA, 19 nt, Artificial Sequence
  Description of Artificial Sequence: Synthetic oligonucleotide
  Antisense strand to SEQ ID NO: 708562
ugucagagcaaauaagaac

SEQ ID NO: 708564 - RNA, 19 nt, Artificial Sequence
  Description of Artificial Sequence: Synthetic oligonucleotide
  Sense strand starting at position 1039 of SEQ ID NO: 586313
ucuuguuauuucuuucugu

SEQ ID NO: 708565 - RNA, 19 nt, Artificial Sequence
  Description of Artificial Sequence: Synthetic oligonucleotide
  Antisense strand to SEQ ID NO: 708564
acagaaagaaauaacaaga

SEQ ID NO: 708566 - RNA, 19 nt, Artificial Sequence
  Description of Artificial Sequence: Synthetic oligonucleotide
  Sense strand starting at position 1040 of SEQ ID NO: 586313
cuuguuauuucuuucuguu

SEQ ID NO: 708567 - RNA, 19 nt, Artificial Sequence
  Description of Artificial Sequence: Synthetic oligonucleotide
  Antisense strand to SEQ ID NO: 708566
aacagaaagaaauaacaag

SEQ ID NO: 708568 - RNA, 19 nt, Artificial Sequence
  Description of Artificial Sequence: Synthetic oligonucleotide
  Sense strand starting at position 1060 of SEQ ID NO: 586313
cccuauuguagccagagga

SEQ ID NO: 708569 - RNA, 19 nt, Artificial Sequence
  Description of Artificial Sequence: Synthetic oligonucleotide
  Antisense strand to SEQ ID NO: 708568
uccucuggcuacaauaggg

SEQ ID NO: 708570 - RNA, 19 nt, Artificial Sequence
  Description of Artificial Sequence: Synthetic oligonucleotide
  Sense strand starting at position 1096 of SEQ ID NO: 586313
agauuuguuucucuagcuu

SEQ ID NO: 708571 - RNA, 19 nt, Artificial Sequence
  Description of Artificial Sequence: Synthetic oligonucleotide
  Antisense strand to SEQ ID NO: 708570
aagcuagagaaacaaaucu

SEQ ID NO: 708572 - RNA, 19 nt, Artificial Sequence
  Description of Artificial Sequence: Synthetic oligonucleotide
  Sense strand starting at position 1838 of SEQ ID NO: 586313
guaaguaagucauuuaguc

SEQ ID NO: 708573 - RNA, 19 nt, Artificial Sequence
  Description of Artificial Sequence: Synthetic oligonucleotide
  Antisense strand to SEQ ID NO: 708572
gacuaaaugacuuacuuac

SEQ ID NO: 708574 - RNA, 19 nt, Artificial Sequence
  Description of Artificial Sequence: Synthetic oligonucleotide
  Sense strand starting at position 1944 of SEQ ID NO: 586313
auuaaagacuaguugagua

SEQ ID NO: 708575 - RNA, 19 nt, Artificial Sequence
  Description of Artificial Sequence: Synthetic oligonucleotide
  Antisense strand to SEQ ID NO: 708574
uacucaacuagucuuuaau

SEQ ID NO: 708576 - RNA, 19 nt, Artificial Sequence
  Description of Artificial Sequence: Synthetic oligonucleotide
  Sense strand starting at position 1948 of SEQ ID NO: 586313
aagacuaguugaguaaaug

SEQ ID NO: 708577 - RNA, 19 nt, Artificial Sequence
  Description of Artificial Sequence: Synthetic oligonucleotide
  Antisense strand to SEQ ID NO: 708576
cauuuacucaacuagucuu

SEQ ID NO: 708578 - RNA, 19 nt, Artificial Sequence
  Description of Artificial Sequence: Synthetic oligonucleotide
  Sense strand starting at position 2004 of SEQ ID NO: 586313
auuugauauuguucuguuc

SEQ ID NO: 708579 - RNA, 19 nt, Artificial Sequence
  Description of Artificial Sequence: Synthetic oligonucleotide
  Antisense strand to SEQ ID NO: 708578
gaacagaacaauaucaaau

SEQ ID NO: 708580 - RNA, 19 nt, Artificial Sequence
  Description of Artificial Sequence: Synthetic oligonucleotide
  Sense strand starting at position 2321 of SEQ ID NO: 586313
cuaagauacugguucugaa

SEQ ID NO: 708581 - RNA, 19 nt, Artificial Sequence
  Description of Artificial Sequence: Synthetic oligonucleotide
  Antisense strand to SEQ ID NO: 708580
uucagaaccaguaucuuag

SEQ ID NO: 708582 - RNA, 19 nt, Artificial Sequence
  Description of Artificial Sequence: Synthetic oligonucleotide
  Sense strand starting at position 2333 of SEQ ID NO: 586313
uucugaacaucucugugaa

SEQ ID NO: 708583 - RNA, 19 nt, Artificial Sequence
  Description of Artificial Sequence: Synthetic oligonucleotide
  Antisense strand to SEQ ID NO: 708582
uucacagagauguucagaa

SEQ ID NO: 708584 - RNA, 19 nt, Artificial Sequence
  Description of Artificial Sequence: Synthetic oligonucleotide
  Sense strand starting at position 2334 of SEQ ID NO: 586313
ucugaacaucucugugaag

SEQ ID NO: 708585 - RNA, 19 nt, Artificial Sequence
  Description of Artificial Sequence: Synthetic oligonucleotide
  Antisense strand to SEQ ID NO: 708584
cuucacagagauguucaga

SEQ ID NO: 708586 - RNA, 19 nt, Artificial Sequence
  Description of Artificial Sequence: Synthetic oligonucleotide
  Sense strand starting at position 2336 of SEQ ID NO: 586313
ugaacaucucugugaagga

SEQ ID NO: 708587 - RNA, 19 nt, Artificial Sequence
  Description of Artificial Sequence: Synthetic oligonucleotide
  Antisense strand to SEQ ID NO: 708586
uccuucacagagauguuca

SEQ ID NO: 708588 - RNA, 19 nt, Artificial Sequence
  Description of Artificial Sequence: Synthetic oligonucleotide
  Sense strand starting at position 2425 of SEQ ID NO: 586313
gcuggaugaugaguacaua

SEQ ID NO: 708589 - RNA, 19 nt, Artificial Sequence
  Description of Artificial Sequence: Synthetic oligonucleotide
  Antisense strand to SEQ ID NO: 708588
uauguacucaucauccagc

SEQ ID NO: 708590 - RNA, 19 nt, Artificial Sequence
  Description of Artificial Sequence: Synthetic oligonucleotide
  Sense strand starting at position 2454 of SEQ ID NO: 586313
guucuagucuuuguauuuc

SEQ ID NO: 708591 - RNA, 19 nt, Artificial Sequence
  Description of Artificial Sequence: Synthetic oligonucleotide
  Antisense strand to SEQ ID NO: 708590
gaaauacaaagacuagaac

SEQ ID NO: 708592 - RNA, 19 nt, Artificial Sequence
  Description of Artificial Sequence: Synthetic oligonucleotide
  Sense strand starting at position 2519 of SEQ ID NO: 586313
gggaaagaguggucugagu

SEQ ID NO: 708593 - RNA, 19 nt, Artificial Sequence
  Description of Artificial Sequence: Synthetic oligonucleotide
  Antisense strand to SEQ ID NO: 708592
acucagaccacucuuuccc

SEQ ID NO: 708594 - RNA, 19 nt, Artificial Sequence
  Description of Artificial Sequence: Synthetic oligonucleotide
  Sense strand starting at position 2521 of SEQ ID NO: 586313
gaaagaguggucugaguau

SEQ ID NO: 708595 - RNA, 19 nt, Artificial Sequence
  Description of Artificial Sequence: Synthetic oligonucleotide
  Antisense strand to SEQ ID NO: 708594
auacucagaccacucuuuc

SEQ ID NO: 708596 - RNA, 19 nt, Artificial Sequence
  Description of Artificial Sequence: Synthetic oligonucleotide
  Sense strand starting at position 2734 of SEQ ID NO: 586313
gguuaugguccauauuaag

SEQ ID NO: 708597 - RNA, 19 nt, Artificial Sequence
  Description of Artificial Sequence: Synthetic oligonucleotide
  Antisense strand to SEQ ID NO: 708596
cuuaauauggaccauaacc

SEQ ID NO: 708598 - RNA, 19 nt, Artificial Sequence
  Description of Artificial Sequence: Synthetic oligonucleotide
  Sense strand starting at position 2826 of SEQ ID NO: 586313
acggacuuccucugaaaua

SEQ ID NO: 708599 - RNA, 19 nt, Artificial Sequence
  Description of Artificial Sequence: Synthetic oligonucleotide
  Antisense strand to SEQ ID NO: 708598
uauuucagaggaaguccgu

SEQ ID NO: 708600 - RNA, 19 nt, Artificial Sequence
  Description of Artificial Sequence: Synthetic oligonucleotide
  Sense strand starting at position 2849 of SEQ ID NO: 586313
auagcaagaucauccgaga

SEQ ID NO: 708601 - RNA, 19 nt, Artificial Sequence
  Description of Artificial Sequence: Synthetic oligonucleotide
  Antisense strand to SEQ ID NO: 708600
ucucggaugaucuugcuau

SEQ ID NO: 708602 - RNA, 19 nt, Artificial Sequence
  Description of Artificial Sequence: Synthetic oligonucleotide
  Sense strand starting at position 3086 of SEQ ID NO: 586313
gguucuggaaacugugaca

SEQ ID NO: 708603 - RNA, 19 nt, Artificial Sequence
  Description of Artificial Sequence: Synthetic oligonucleotide
  Antisense strand to SEQ ID NO: 708602
ugucacaguuuccagaacc

SEQ ID NO: 708604 - RNA, 19 nt, Artificial Sequence
  Description of Artificial Sequence: Synthetic oligonucleotide
  Sense strand starting at position 3704 of SEQ ID NO: 586313
guaacuuguccgcugucau

SEQ ID NO: 708605 - RNA, 19 nt, Artificial Sequence
  Description of Artificial Sequence: Synthetic oligonucleotide
  Antisense strand to SEQ ID NO: 708604
augacagcggacaaguuac

SEQ ID NO: 708606 - RNA, 19 nt, Artificial Sequence
  Description of Artificial Sequence: Synthetic oligonucleotide
  Sense strand starting at position 3903 of SEQ ID NO: 586313
agaagaaacgguggguaua

SEQ ID NO: 708607 - RNA, 19 nt, Artificial Sequence
  Description of Artificial Sequence: Synthetic oligonucleotide
  Antisense strand to SEQ ID NO: 708606
uauacccaccguuucuucu

SEQ ID NO: 708608 - RNA, 19 nt, Artificial Sequence
  Description of Artificial Sequence: Synthetic oligonucleotide
  Sense strand starting at position 3904 of SEQ ID NO: 586313
gaagaaacgguggguauaa

SEQ ID NO: 708609 - RNA, 19 nt, Artificial Sequence
  Description of Artificial Sequence: Synthetic oligonucleotide
  Antisense strand to SEQ ID NO: 708608
uuauacccaccguuucuuc

SEQ ID NO: 708610 - RNA, 19 nt, Artificial Sequence
  Description of Artificial Sequence: Synthetic oligonucleotide
  Sense strand starting at position 3905 of SEQ ID NO: 586313
aagaaacgguggguauaau

SEQ ID NO: 708611 - RNA, 19 nt, Artificial Sequence
  Description of Artificial Sequence: Synthetic oligonucleotide
  Antisense strand to SEQ ID NO: 708610
auuauacccaccguuucuu

SEQ ID NO: 708612 - RNA, 19 nt, Artificial Sequence
  Description of Artificial Sequence: Synthetic oligonucleotide
  Sense strand starting at position 3913 of SEQ ID NO: 586313
guggguauaaugcagaaau

SEQ ID NO: 708613 - RNA, 19 nt, Artificial Sequence
  Description of Artificial Sequence: Synthetic oligonucleotide
  Antisense strand to SEQ ID NO: 708612
auuucugcauuauacccac

SEQ ID NO: 708614 - RNA, 19 nt, Artificial Sequence
  Description of Artificial Sequence: Synthetic oligonucleotide
  Sense strand starting at position 3935 of SEQ ID NO: 586313
aacggaauuuccuagggaa

SEQ ID NO: 708615 - RNA, 19 nt, Artificial Sequence
  Description of Artificial Sequence: Synthetic oligonucleotide
  Antisense strand to SEQ ID NO: 708614
uucccuaggaaauuccguu

SEQ ID NO: 708616 - RNA, 19 nt, Artificial Sequence
  Description of Artificial Sequence: Synthetic oligonucleotide
  Sense strand starting at position 3938 of SEQ ID NO: 586313
ggaauuuccuagggaacaa

SEQ ID NO: 708617 - RNA, 19 nt, Artificial Sequence
  Description of Artificial Sequence: Synthetic oligonucleotide
  Antisense strand to SEQ ID NO: 708616
uuguucccuaggaaauucc

SEQ ID NO: 708618 - RNA, 19 nt, Artificial Sequence
  Description of Artificial Sequence: Synthetic oligonucleotide
  Sense strand starting at position 102 of SEQ ID NO: 586314
aguaaagaaucuuuguaag

SEQ ID NO: 708619 - RNA, 19 nt, Artificial Sequence
  Description of Artificial Sequence: Synthetic oligonucleotide
  Antisense strand to SEQ ID NO: 708618
cuuacaaagauucuuuacu

SEQ ID NO: 708620 - RNA, 19 nt, Artificial Sequence
  Description of Artificial Sequence: Synthetic oligonucleotide
  Sense strand starting at position 114 of SEQ ID NO: 586314
uuguaagaauaugcaaaca

SEQ ID NO: 708621 - RNA, 19 nt, Artificial Sequence
  Description of Artificial Sequence: Synthetic oligonucleotide
  Antisense strand to SEQ ID NO: 708620
uguuugcauauucuuacaa

SEQ ID NO: 708622 - RNA, 19 nt, Artificial Sequence
  Description of Artificial Sequence: Synthetic oligonucleotide
  Sense strand starting at position 124 of SEQ ID NO: 586314
augcaaacaucuucuugga

SEQ ID NO: 708623 - RNA, 19 nt, Artificial Sequence
  Description of Artificial Sequence: Synthetic oligonucleotide
  Antisense strand to SEQ ID NO: 708622
uccaagaagauguuugcau

SEQ ID NO: 708624 - RNA, 19 nt, Artificial Sequence
  Description of Artificial Sequence: Synthetic oligonucleotide
  Sense strand starting at position 126 of SEQ ID NO: 586314
gcaaacaucuucuuggauu

SEQ ID NO: 708625 - RNA, 19 nt, Artificial Sequence
  Description of Artificial Sequence: Synthetic oligonucleotide
  Antisense strand to SEQ ID NO: 708624
aauccaagaagauguuugc

SEQ ID NO: 708626 - RNA, 19 nt, Artificial Sequence
  Description of Artificial Sequence: Synthetic oligonucleotide
  Sense strand starting at position 137 of SEQ ID NO: 586314
cuuggauugauuggaguuu

SEQ ID NO: 708627 - RNA, 19 nt, Artificial Sequence
  Description of Artificial Sequence: Synthetic oligonucleotide
  Antisense strand to SEQ ID NO: 708626
aaacuccaaucaauccaag

SEQ ID NO: 708628 - RNA, 19 nt, Artificial Sequence
  Description of Artificial Sequence: Synthetic oligonucleotide
  Sense strand starting at position 297 of SEQ ID NO: 586314
uuacuaagguaucugauaa

SEQ ID NO: 708629 - RNA, 19 nt, Artificial Sequence
  Description of Artificial Sequence: Synthetic oligonucleotide
  Antisense strand to SEQ ID NO: 708628
uuaucagauaccuuaguaa

SEQ ID NO: 708630 - RNA, 19 nt, Artificial Sequence
  Description of Artificial Sequence: Synthetic oligonucleotide
  Sense strand starting at position 530 of SEQ ID NO: 586314
gucuuugcauuucuauaag

SEQ ID NO: 708631 - RNA, 19 nt, Artificial Sequence
  Description of Artificial Sequence: Synthetic oligonucleotide
  Antisense strand to SEQ ID NO: 708630
cuuauagaaaugcaaagac

SEQ ID NO: 708632 - RNA, 19 nt, Artificial Sequence
  Description of Artificial Sequence: Synthetic oligonucleotide
  Sense strand starting at position 849 of SEQ ID NO: 586314
gguacugaaugcuugggaa

SEQ ID NO: 708633 - RNA, 19 nt, Artificial Sequence
  Description of Artificial Sequence: Synthetic oligonucleotide
  Antisense strand to SEQ ID NO: 708632
uucccaagcauucaguacc

SEQ ID NO: 708634 - RNA, 19 nt, Artificial Sequence
  Description of Artificial Sequence: Synthetic oligonucleotide
  Sense strand starting at position 851 of SEQ ID NO: 586314
uacugaaugcuugggaagu

SEQ ID NO: 708635 - RNA, 19 nt, Artificial Sequence
  Description of Artificial Sequence: Synthetic oligonucleotide
  Antisense strand to SEQ ID NO: 708634
acuucccaagcauucagua

SEQ ID NO: 708636 - RNA, 19 nt, Artificial Sequence
  Description of Artificial Sequence: Synthetic oligonucleotide
  Sense strand starting at position 887 of SEQ ID NO: 586314
agugauaaucauggcuaau

SEQ ID NO: 708637 - RNA, 19 nt, Artificial Sequence
  Description of Artificial Sequence: Synthetic oligonucleotide
  Antisense strand to SEQ ID NO: 708636
auuagccaugauuaucacu

SEQ ID NO: 708638 - RNA, 19 nt, Artificial Sequence
  Description of Artificial Sequence: Synthetic oligonucleotide
  Sense strand starting at position 889 of SEQ ID NO: 586314
ugauaaucauggcuaauac

SEQ ID NO: 708639 - RNA, 19 nt, Artificial Sequence
  Description of Artificial Sequence: Synthetic oligonucleotide
  Antisense strand to SEQ ID NO: 708638
guauuagccaugauuauca

SEQ ID NO: 708640 - RNA, 19 nt, Artificial Sequence
  Description of Artificial Sequence: Synthetic oligonucleotide
  Sense strand starting at position 1070 of SEQ ID NO: 586314
gauuaaugagauuguagua

SEQ ID NO: 708641 - RNA, 19 nt, Artificial Sequence
  Description of Artificial Sequence: Synthetic oligonucleotide
  Antisense strand to SEQ ID NO: 708640
uacuacaaucucauuaauc

SEQ ID NO: 708642 - RNA, 19 nt, Artificial Sequence
  Description of Artificial Sequence: Synthetic oligonucleotide
  Sense strand starting at position 1153 of SEQ ID NO: 586314
aaacgaaguuucccagaga

SEQ ID NO: 708643 - RNA, 19 nt, Artificial Sequence
  Description of Artificial Sequence: Synthetic oligonucleotide
  Antisense strand to SEQ ID NO: 708642
ucucugggaaacuucguuu

SEQ ID NO: 708644 - RNA, 19 nt, Artificial Sequence
  Description of Artificial Sequence: Synthetic oligonucleotide
  Sense strand starting at position 1156 of SEQ ID NO: 586314
cgaaguuucccagagaauc

SEQ ID NO: 708645 - RNA, 19 nt, Artificial Sequence
  Description of Artificial Sequence: Synthetic oligonucleotide
  Antisense strand to SEQ ID NO: 708644
gauucucugggaaacuucg

SEQ ID NO: 708646 - RNA, 19 nt, Artificial Sequence
  Description of Artificial Sequence: Synthetic oligonucleotide
  Sense strand starting at position 1244 of SEQ ID NO: 586314
gcuaccaaacacugagaau

SEQ ID NO: 708647 - RNA, 19 nt, Artificial Sequence
  Description of Artificial Sequence: Synthetic oligonucleotide
  Antisense strand to SEQ ID NO: 708646
auucucaguguuugguagc

SEQ ID NO: 708648 - RNA, 19 nt, Artificial Sequence
  Description of Artificial Sequence: Synthetic oligonucleotide
  Sense strand starting at position 2343 of SEQ ID NO: 586314
caugucuuccaagagcgau

SEQ ID NO: 708649 - RNA, 19 nt, Artificial Sequence
  Description of Artificial Sequence: Synthetic oligonucleotide
  Antisense strand to SEQ ID NO: 708648
aucgcucuuggaagacaug

SEQ ID NO: 708650 - RNA, 19 nt, Artificial Sequence
  Description of Artificial Sequence: Synthetic oligonucleotide
  Sense strand starting at position 2378 of SEQ ID NO: 586314
cccgaaucacuuuggaaau

SEQ ID NO: 708651 - RNA, 19 nt, Artificial Sequence
  Description of Artificial Sequence: Synthetic oligonucleotide
  Antisense strand to SEQ ID NO: 708650
auuuccaaagugauucggg

SEQ ID NO: 708652 - RNA, 19 nt, Artificial Sequence
  Description of Artificial Sequence: Synthetic oligonucleotide
  Sense strand starting at position 2467 of SEQ ID NO: 586314
gaaguacucgaaggauacu

SEQ ID NO: 708653 - RNA, 19 nt, Artificial Sequence
  Description of Artificial Sequence: Synthetic oligonucleotide
  Antisense strand to SEQ ID NO: 708652
aguauccuucgaguacuuc

SEQ ID NO: 708654 - RNA, 19 nt, Artificial Sequence
  Description of Artificial Sequence: Synthetic oligonucleotide
  Sense strand starting at position 2484 of SEQ ID NO: 586314
cuuaaugugagauguaaag

SEQ ID NO: 708655 - RNA, 19 nt, Artificial Sequence
  Description of Artificial Sequence: Synthetic oligonucleotide
  Antisense strand to SEQ ID NO: 708654
cuuuacaucucacauuaag

SEQ ID NO: 708656 - RNA, 19 nt, Artificial Sequence
  Description of Artificial Sequence: Synthetic oligonucleotide
  Sense strand starting at position 2787 of SEQ ID NO: 586314
cuaagaguguagcuaagaa

SEQ ID NO: 708657 - RNA, 19 nt, Artificial Sequence
  Description of Artificial Sequence: Synthetic oligonucleotide
  Antisense strand to SEQ ID NO: 708656
uucuuagcuacacucuuag

SEQ ID NO: 708658 - RNA, 19 nt, Artificial Sequence
  Description of Artificial Sequence: Synthetic oligonucleotide
  Sense strand starting at position 2829 of SEQ ID NO: 586314
uggcauaacuuguuuagaa

SEQ ID NO: 708659 - RNA, 19 nt, Artificial Sequence
  Description of Artificial Sequence: Synthetic oligonucleotide
  Antisense strand to SEQ ID NO: 708658
uucuaaacaaguuaugcca

SEQ ID NO: 708660 - RNA, 19 nt, Artificial Sequence
  Description of Artificial Sequence: Synthetic oligonucleotide
  Sense strand starting at position 2830 of SEQ ID NO: 586314
ggcauaacuuguuuagaaa

SEQ ID NO: 708661 - RNA, 19 nt, Artificial Sequence
  Description of Artificial Sequence: Synthetic oligonucleotide
  Antisense strand to SEQ ID NO: 708660
uuucuaaacaaguuaugcc

SEQ ID NO: 708662 - RNA, 19 nt, Artificial Sequence
  Description of Artificial Sequence: Synthetic oligonucleotide
  Sense strand starting at position 2831 of SEQ ID NO: 586314
gcauaacuuguuuagaaau

SEQ ID NO: 708663 - RNA, 19 nt, Artificial Sequence
  Description of Artificial Sequence: Synthetic oligonucleotide
  Antisense strand to SEQ ID NO: 708662
auuucuaaacaaguuaugc

SEQ ID NO: 708664 - RNA, 19 nt, Artificial Sequence
  Description of Artificial Sequence: Synthetic oligonucleotide
  Sense strand starting at position 2847 of SEQ ID NO: 586314
aauguaaauugggucuaua

SEQ ID NO: 708665 - RNA, 19 nt, Artificial Sequence
  Description of Artificial Sequence: Synthetic oligonucleotide
  Antisense strand to SEQ ID NO: 708664
uauagacccaauuuacauu

SEQ ID NO: 708666 - RNA, 19 nt, Artificial Sequence
  Description of Artificial Sequence: Synthetic oligonucleotide
  Sense strand starting at position 2850 of SEQ ID NO: 586314
guaaauugggucuauacuc

SEQ ID NO: 708667 - RNA, 19 nt, Artificial Sequence
  Description of Artificial Sequence: Synthetic oligonucleotide
  Antisense strand to SEQ ID NO: 708666
gaguauagacccaauuuac

SEQ ID NO: 708668 - RNA, 19 nt, Artificial Sequence
  Description of Artificial Sequence: Synthetic oligonucleotide
  Sense strand starting at position 2997 of SEQ ID NO: 586314
agauuuaacuccgacuuga

SEQ ID NO: 708669 - RNA, 19 nt, Artificial Sequence
  Description of Artificial Sequence: Synthetic oligonucleotide
  Antisense strand to SEQ ID NO: 708668
ucaagucggaguuaaaucu

SEQ ID NO: 708670 - RNA, 19 nt, Artificial Sequence
  Description of Artificial Sequence: Synthetic oligonucleotide
  Sense strand starting at position 3005 of SEQ ID NO: 586314
cuccgacuugacuaaaugu

SEQ ID NO: 708671 - RNA, 19 nt, Artificial Sequence
  Description of Artificial Sequence: Synthetic oligonucleotide
  Antisense strand to SEQ ID NO: 708670
acauuuagucaagucggag

SEQ ID NO: 708672 - RNA, 19 nt, Artificial Sequence
  Description of Artificial Sequence: Synthetic oligonucleotide
  Sense strand starting at position 3257 of SEQ ID NO: 586314
cggagaccugcugagaagu

SEQ ID NO: 708673 - RNA, 19 nt, Artificial Sequence
  Description of Artificial Sequence: Synthetic oligonucleotide
  Antisense strand to SEQ ID NO: 708672
acuucucagcaggucuccg

SEQ ID NO: 708674 - RNA, 19 nt, Artificial Sequence
  Description of Artificial Sequence: Synthetic oligonucleotide
  Sense strand starting at position 3321 of SEQ ID NO: 586314
cuuguaaagcaagaucaau

SEQ ID NO: 708675 - RNA, 19 nt, Artificial Sequence
  Description of Artificial Sequence: Synthetic oligonucleotide
  Antisense strand to SEQ ID NO: 708674
auugaucuugcuuuacaag

SEQ ID NO: 708676 - RNA, 19 nt, Artificial Sequence
  Description of Artificial Sequence: Synthetic oligonucleotide
  Sense strand starting at position 3424 of SEQ ID NO: 586314
cggaguuaagagcaucagu

SEQ ID NO: 708677 - RNA, 19 nt, Artificial Sequence
  Description of Artificial Sequence: Synthetic oligonucleotide
  Antisense strand to SEQ ID NO: 708676
acugaugcucuuaacuccg

SEQ ID NO: 708678 - RNA, 19 nt, Artificial Sequence
  Description of Artificial Sequence: Synthetic oligonucleotide
  Sense strand starting at position 3433 of SEQ ID NO: 586314
gagcaucaguagguggaaa

SEQ ID NO: 708679 - RNA, 19 nt, Artificial Sequence
  Description of Artificial Sequence: Synthetic oligonucleotide
  Antisense strand to SEQ ID NO: 708678
uuuccaccuacugaugcuc

SEQ ID NO: 708680 - RNA, 19 nt, Artificial Sequence
  Description of Artificial Sequence: Synthetic oligonucleotide
  Sense strand starting at position 3434 of SEQ ID NO: 586314
agcaucaguagguggaaau

SEQ ID NO: 708681 - RNA, 19 nt, Artificial Sequence
  Description of Artificial Sequence: Synthetic oligonucleotide
  Antisense strand to SEQ ID NO: 708680
auuuccaccuacugaugcu

SEQ ID NO: 708682 - RNA, 19 nt, Artificial Sequence
  Description of Artificial Sequence: Synthetic oligonucleotide
  Sense strand starting at position 3487 of SEQ ID NO: 586314
agcagagaagccugaagaa

SEQ ID NO: 708683 - RNA, 19 nt, Artificial Sequence
  Description of Artificial Sequence: Synthetic oligonucleotide
  Antisense strand to SEQ ID NO: 708682
uucuucaggcuucucugcu

SEQ ID NO: 708684 - RNA, 19 nt, Artificial Sequence
  Description of Artificial Sequence: Synthetic oligonucleotide
  Sense strand starting at position 3496 of SEQ ID NO: 586314
gccugaagaagccaguuaa

SEQ ID NO: 708685 - RNA, 19 nt, Artificial Sequence
  Description of Artificial Sequence: Synthetic oligonucleotide
  Antisense strand to SEQ ID NO: 708684
uuaacuggcuucuucaggc

SEQ ID NO: 708686 - RNA, 19 nt, Artificial Sequence
  Description of Artificial Sequence: Synthetic oligonucleotide
  Sense strand starting at position 3507 of SEQ ID NO: 586314
ccaguuaagggaugguaua

SEQ ID NO: 708687 - RNA, 19 nt, Artificial Sequence
  Description of Artificial Sequence: Synthetic oligonucleotide
  Antisense strand to SEQ ID NO: 708686
uauaccaucccuuaacugg

SEQ ID NO: 708688 - RNA, 19 nt, Artificial Sequence
  Description of Artificial Sequence: Synthetic oligonucleotide
  Sense strand starting at position 3508 of SEQ ID NO: 586314
caguuaagggaugguauaa

SEQ ID NO: 708689 - RNA, 19 nt, Artificial Sequence
  Description of Artificial Sequence: Synthetic oligonucleotide
  Antisense strand to SEQ ID NO: 708688
uuauaccaucccuuaacug

SEQ ID NO: 708690 - RNA, 19 nt, Artificial Sequence
  Description of Artificial Sequence: Synthetic oligonucleotide
  Sense strand starting at position 3635 of SEQ ID NO: 586314
agucucaggaauuguuuga

SEQ ID NO: 708691 - RNA, 19 nt, Artificial Sequence
  Description of Artificial Sequence: Synthetic oligonucleotide
  Antisense strand to SEQ ID NO: 708690
ucaaacaauuccugagacu

SEQ ID NO: 708692 - RNA, 19 nt, Artificial Sequence
  Description of Artificial Sequence: Synthetic oligonucleotide
  Sense strand starting at position 3639 of SEQ ID NO: 586314
ucaggaauuguuugaggag

SEQ ID NO: 708693 - RNA, 19 nt, Artificial Sequence
  Description of Artificial Sequence: Synthetic oligonucleotide
  Antisense strand to SEQ ID NO: 708692
cuccucaaacaauuccuga

SEQ ID NO: 708694 - RNA, 19 nt, Artificial Sequence
  Description of Artificial Sequence: Synthetic oligonucleotide
  Sense strand starting at position 3641 of SEQ ID NO: 586314
aggaauuguuugaggagag

SEQ ID NO: 708695 - RNA, 19 nt, Artificial Sequence
  Description of Artificial Sequence: Synthetic oligonucleotide
  Antisense strand to SEQ ID NO: 708694
cucuccucaaacaauuccu

SEQ ID NO: 708696 - RNA, 19 nt, Artificial Sequence
  Description of Artificial Sequence: Synthetic oligonucleotide
  Sense strand starting at position 3846 of SEQ ID NO: 586314
uucgauuucuuguuauugu

SEQ ID NO: 708697 - RNA, 19 nt, Artificial Sequence
  Description of Artificial Sequence: Synthetic oligonucleotide
  Antisense strand to SEQ ID NO: 708696
acaauaacaagaaaucgaa

SEQ ID NO: 708698 - RNA, 19 nt, Artificial Sequence
  Description of Artificial Sequence: Synthetic oligonucleotide
  Sense strand starting at position 4 of SEQ ID NO: 586315
gguauuaccucuccauuga

SEQ ID NO: 708699 - RNA, 19 nt, Artificial Sequence
  Description of Artificial Sequence: Synthetic oligonucleotide
  Antisense strand to SEQ ID NO: 708698
ucaauggagagguaauacc

SEQ ID NO: 708700 - RNA, 19 nt, Artificial Sequence
  Description of Artificial Sequence: Synthetic oligonucleotide
  Sense strand starting at position 5 of SEQ ID NO: 586315
guauuaccucuccauugau

SEQ ID NO: 708701 - RNA, 19 nt, Artificial Sequence
  Description of Artificial Sequence: Synthetic oligonucleotide
  Antisense strand to SEQ ID NO: 708700
aucaauggagagguaauac

SEQ ID NO: 708702 - RNA, 19 nt, Artificial Sequence
  Description of Artificial Sequence: Synthetic oligonucleotide
  Sense strand starting at position 235 of SEQ ID NO: 586315
ccaauagaggagugucaca

SEQ ID NO: 708703 - RNA, 19 nt, Artificial Sequence
  Description of Artificial Sequence: Synthetic oligonucleotide
  Antisense strand to SEQ ID NO: 708702
ugugacacuccucuauugg

SEQ ID NO: 708704 - RNA, 19 nt, Artificial Sequence
  Description of Artificial Sequence: Synthetic oligonucleotide
  Sense strand starting at position 260 of SEQ ID NO: 586315
aagguauagcgacaaucau

SEQ ID NO: 708705 - RNA, 19 nt, Artificial Sequence
  Description of Artificial Sequence: Synthetic oligonucleotide
  Antisense strand to SEQ ID NO: 708704
augauugucgcuauaccuu

SEQ ID NO: 708706 - RNA, 19 nt, Artificial Sequence
  Description of Artificial Sequence: Synthetic oligonucleotide
  Sense strand starting at position 281 of SEQ ID NO: 586315
cagaguaggcauggaguau

SEQ ID NO: 708707 - RNA, 19 nt, Artificial Sequence
  Description of Artificial Sequence: Synthetic oligonucleotide
  Antisense strand to SEQ ID NO: 708706
auacuccaugccuacucug

SEQ ID NO: 708708 - RNA, 19 nt, Artificial Sequence
  Description of Artificial Sequence: Synthetic oligonucleotide
  Sense strand starting at position 282 of SEQ ID NO: 586315
agaguaggcauggaguauu

SEQ ID NO: 708709 - RNA, 19 nt, Artificial Sequence
  Description of Artificial Sequence: Synthetic oligonucleotide
  Antisense strand to SEQ ID NO: 708708
aauacuccaugccuacucu

SEQ ID NO: 708710 - RNA, 19 nt, Artificial Sequence
  Description of Artificial Sequence: Synthetic oligonucleotide
  Sense strand starting at position 285 of SEQ ID NO: 586315
guaggcauggaguauuacu

SEQ ID NO: 708711 - RNA, 19 nt, Artificial Sequence
  Description of Artificial Sequence: Synthetic oligonucleotide
  Antisense strand to SEQ ID NO: 708710
aguaauacuccaugccuac

SEQ ID NO: 708712 - RNA, 19 nt, Artificial Sequence
  Description of Artificial Sequence: Synthetic oligonucleotide
  Sense strand starting at position 466 of SEQ ID NO: 586315
augcauaccugcuuaugga

SEQ ID NO: 708713 - RNA, 19 nt, Artificial Sequence
  Description of Artificial Sequence: Synthetic oligonucleotide
  Antisense strand to SEQ ID NO: 708712
uccauaagcagguaugcau

SEQ ID NO: 708714 - RNA, 19 nt, Artificial Sequence
  Description of Artificial Sequence: Synthetic oligonucleotide
  Sense strand starting at position 887 of SEQ ID NO: 586315
cccggccugacauaguaau

SEQ ID NO: 708715 - RNA, 19 nt, Artificial Sequence
  Description of Artificial Sequence: Synthetic oligonucleotide
  Antisense strand to SEQ ID NO: 708714
auuacuaugucaggccggg

SEQ ID NO: 708716 - RNA, 19 nt, Artificial Sequence
  Description of Artificial Sequence: Synthetic oligonucleotide
  Sense strand starting at position 916 of SEQ ID NO: 586315
auccuuccucaaugugaag

SEQ ID NO: 708717 - RNA, 19 nt, Artificial Sequence
  Description of Artificial Sequence: Synthetic oligonucleotide
  Antisense strand to SEQ ID NO: 708716
cuucacauugaggaaggau

SEQ ID NO: 708718 - RNA, 19 nt, Artificial Sequence
  Description of Artificial Sequence: Synthetic oligonucleotide
  Sense strand starting at position 971 of SEQ ID NO: 586315
cucaaauccuggcucaguu

SEQ ID NO: 708719 - RNA, 19 nt, Artificial Sequence
  Description of Artificial Sequence: Synthetic oligonucleotide
  Antisense strand to SEQ ID NO: 708718
aacugagccaggauuugag

SEQ ID NO: 708720 - RNA, 19 nt, Artificial Sequence
  Description of Artificial Sequence: Synthetic oligonucleotide
  Sense strand starting at position 975 of SEQ ID NO: 586315
aauccuggcucaguuuaga

SEQ ID NO: 708721 - RNA, 19 nt, Artificial Sequence
  Description of Artificial Sequence: Synthetic oligonucleotide
  Antisense strand to SEQ ID NO: 708720
ucuaaacugagccaggauu

SEQ ID NO: 708722 - RNA, 19 nt, Artificial Sequence
  Description of Artificial Sequence: Synthetic oligonucleotide
  Sense strand starting at position 978 of SEQ ID NO: 586315
ccuggcucaguuuagaaua

SEQ ID NO: 708723 - RNA, 19 nt, Artificial Sequence
  Description of Artificial Sequence: Synthetic oligonucleotide
  Antisense strand to SEQ ID NO: 708722
uauucuaaacugagccagg

SEQ ID NO: 708724 - RNA, 19 nt, Artificial Sequence
  Description of Artificial Sequence: Synthetic oligonucleotide
  Sense strand starting at position 1042 of SEQ ID NO: 586315
gagaaagaacucugaacgu

SEQ ID NO: 708725 - RNA, 19 nt, Artificial Sequence
  Description of Artificial Sequence: Synthetic oligonucleotide
  Antisense strand to SEQ ID NO: 708724
acguucagaguucuuucuc

SEQ ID NO: 708726 - RNA, 19 nt, Artificial Sequence
  Description of Artificial Sequence: Synthetic oligonucleotide
  Sense strand starting at position 1070 of SEQ ID NO: 586315
cugagaucucuccagcuac

SEQ ID NO: 708727 - RNA, 19 nt, Artificial Sequence
  Description of Artificial Sequence: Synthetic oligonucleotide
  Antisense strand to SEQ ID NO: 708726
guagcuggagagaucucag

SEQ ID NO: 708728 - RNA, 19 nt, Artificial Sequence
  Description of Artificial Sequence: Synthetic oligonucleotide
  Sense strand starting at position 1383 of SEQ ID NO: 586315
agaaacuucuaugaccuga

SEQ ID NO: 708729 - RNA, 19 nt, Artificial Sequence
  Description of Artificial Sequence: Synthetic oligonucleotide
  Antisense strand to SEQ ID NO: 708728
ucaggucauagaaguuucu

SEQ ID NO: 708730 - RNA, 19 nt, Artificial Sequence
  Description of Artificial Sequence: Synthetic oligonucleotide
  Sense strand starting at position 1404 of SEQ ID NO: 586315
gucugagaucagugggaac

SEQ ID NO: 708731 - RNA, 19 nt, Artificial Sequence
  Description of Artificial Sequence: Synthetic oligonucleotide
  Antisense strand to SEQ ID NO: 708730
guucccacugaucucagac

SEQ ID NO: 708732 - RNA, 19 nt, Artificial Sequence
  Description of Artificial Sequence: Synthetic oligonucleotide
  Sense strand starting at position 1407 of SEQ ID NO: 586315
ugagaucagugggaaccau

SEQ ID NO: 708733 - RNA, 19 nt, Artificial Sequence
  Description of Artificial Sequence: Synthetic oligonucleotide
  Antisense strand to SEQ ID NO: 708732
augguucccacugaucuca

SEQ ID NO: 708734 - RNA, 19 nt, Artificial Sequence
  Description of Artificial Sequence: Synthetic oligonucleotide
  Sense strand starting at position 1455 of SEQ ID NO: 586315
gggaauuggcuccaguaga

SEQ ID NO: 708735 - RNA, 19 nt, Artificial Sequence
  Description of Artificial Sequence: Synthetic oligonucleotide
  Antisense strand to SEQ ID NO: 708734
ucuacuggagccaauuccc

SEQ ID NO: 708736 - RNA, 19 nt, Artificial Sequence
  Description of Artificial Sequence: Synthetic oligonucleotide
  Sense strand starting at position 1524 of SEQ ID NO: 586315
ggagucuaugcccaacacu

SEQ ID NO: 708737 - RNA, 19 nt, Artificial Sequence
  Description of Artificial Sequence: Synthetic oligonucleotide
  Antisense strand to SEQ ID NO: 708736
aguguugggcauagacucc

SEQ ID NO: 708738 - RNA, 19 nt, Artificial Sequence
  Description of Artificial Sequence: Synthetic oligonucleotide
  Sense strand starting at position 1713 of SEQ ID NO: 586315
ccacguucuucccuggaga

SEQ ID NO: 708739 - RNA, 19 nt, Artificial Sequence
  Description of Artificial Sequence: Synthetic oligonucleotide
  Antisense strand to SEQ ID NO: 708738
ucuccagggaagaacgugg

SEQ ID NO: 708740 - RNA, 19 nt, Artificial Sequence
  Description of Artificial Sequence: Synthetic oligonucleotide
  Sense strand starting at position 1714 of SEQ ID NO: 586315
cacguucuucccuggagau

SEQ ID NO: 708741 - RNA, 19 nt, Artificial Sequence
  Description of Artificial Sequence: Synthetic oligonucleotide
  Antisense strand to SEQ ID NO: 708740
aucuccagggaagaacgug

SEQ ID NO: 708742 - RNA, 19 nt, Artificial Sequence
  Description of Artificial Sequence: Synthetic oligonucleotide
  Sense strand starting at position 1715 of SEQ ID NO: 586315
acguucuucccuggagaug

SEQ ID NO: 708743 - RNA, 19 nt, Artificial Sequence
  Description of Artificial Sequence: Synthetic oligonucleotide
  Antisense strand to SEQ ID NO: 708742
caucuccagggaagaacgu

SEQ ID NO: 708744 - RNA, 19 nt, Artificial Sequence
  Description of Artificial Sequence: Synthetic oligonucleotide
  Sense strand starting at position 2192 of SEQ ID NO: 586315
gcgggugaccuuugacaaa

SEQ ID NO: 708745 - RNA, 19 nt, Artificial Sequence
  Description of Artificial Sequence: Synthetic oligonucleotide
  Antisense strand to SEQ ID NO: 708744
uuugucaaaggucacccgc

SEQ ID NO: 708746 - RNA, 19 nt, Artificial Sequence
  Description of Artificial Sequence: Synthetic oligonucleotide
  Sense strand starting at position 2233 of SEQ ID NO: 586315
cugugaaauugggauaaga

SEQ ID NO: 708747 - RNA, 19 nt, Artificial Sequence
  Description of Artificial Sequence: Synthetic oligonucleotide
  Antisense strand to SEQ ID NO: 708746
ucuuaucccaauuucacag

SEQ ID NO: 708748 - RNA, 19 nt, Artificial Sequence
  Description of Artificial Sequence: Synthetic oligonucleotide
  Sense strand starting at position 2277 of SEQ ID NO: 586315
gaaggaaugacaugucgug

SEQ ID NO: 708749 - RNA, 19 nt, Artificial Sequence
  Description of Artificial Sequence: Synthetic oligonucleotide
  Antisense strand to SEQ ID NO: 708748
cacgacaugucauuccuuc

SEQ ID NO: 708750 - RNA, 19 nt, Artificial Sequence
  Description of Artificial Sequence: Synthetic oligonucleotide
  Sense strand starting at position 2291 of SEQ ID NO: 586315
ucguguuauuucccucaca

SEQ ID NO: 708751 - RNA, 19 nt, Artificial Sequence
  Description of Artificial Sequence: Synthetic oligonucleotide
  Antisense strand to SEQ ID NO: 708750
ugugagggaaauaacacga

SEQ ID NO: 708752 - RNA, 19 nt, Artificial Sequence
  Description of Artificial Sequence: Synthetic oligonucleotide
  Sense strand starting at position 2292 of SEQ ID NO: 586315
cguguuauuucccucacaa

SEQ ID NO: 708753 - RNA, 19 nt, Artificial Sequence
  Description of Artificial Sequence: Synthetic oligonucleotide
  Antisense strand to SEQ ID NO: 708752
uugugagggaaauaacacg

SEQ ID NO: 708754 - RNA, 19 nt, Artificial Sequence
  Description of Artificial Sequence: Synthetic oligonucleotide
  Sense strand starting at position 2904 of SEQ ID NO: 586315
ugaguuaguugcuccaucu

SEQ ID NO: 708755 - RNA, 19 nt, Artificial Sequence
  Description of Artificial Sequence: Synthetic oligonucleotide
  Antisense strand to SEQ ID NO: 708754
agauggagcaacuaacuca

SEQ ID NO: 708756 - RNA, 19 nt, Artificial Sequence
  Description of Artificial Sequence: Synthetic oligonucleotide
  Sense strand starting at position 2920 of SEQ ID NO: 586315
ucuugugaaaguugcagau

SEQ ID NO: 708757 - RNA, 19 nt, Artificial Sequence
  Description of Artificial Sequence: Synthetic oligonucleotide
  Antisense strand to SEQ ID NO: 708756
aucugcaacuuucacaaga

SEQ ID NO: 708758 - RNA, 19 nt, Artificial Sequence
  Description of Artificial Sequence: Synthetic oligonucleotide
  Sense strand starting at position 3552 of SEQ ID NO: 586315
gaggcaugccgaggaaauu

SEQ ID NO: 708759 - RNA, 19 nt, Artificial Sequence
  Description of Artificial Sequence: Synthetic oligonucleotide
  Antisense strand to SEQ ID NO: 708758
aauuuccucggcaugccuc

SEQ ID NO: 708760 - RNA, 19 nt, Artificial Sequence
  Description of Artificial Sequence: Synthetic oligonucleotide
  Sense strand starting at position 3567 of SEQ ID NO: 586315
aauuuaugcuugggaagug

SEQ ID NO: 708761 - RNA, 19 nt, Artificial Sequence
  Description of Artificial Sequence: Synthetic oligonucleotide
  Antisense strand to SEQ ID NO: 708760
cacuucccaagcauaaauu

SEQ ID NO: 708762 - RNA, 19 nt, Artificial Sequence
  Description of Artificial Sequence: Synthetic oligonucleotide
  Sense strand starting at position 3568 of SEQ ID NO: 586315
auuuaugcuugggaaguga

SEQ ID NO: 708763 - RNA, 19 nt, Artificial Sequence
  Description of Artificial Sequence: Synthetic oligonucleotide
  Antisense strand to SEQ ID NO: 708762
ucacuucccaagcauaaau

SEQ ID NO: 708764 - RNA, 19 nt, Artificial Sequence
  Description of Artificial Sequence: Synthetic oligonucleotide
  Sense strand starting at position 3627 of SEQ ID NO: 586315
uccacaacccugugucaua

SEQ ID NO: 708765 - RNA, 19 nt, Artificial Sequence
  Description of Artificial Sequence: Synthetic oligonucleotide
  Antisense strand to SEQ ID NO: 708764
uaugacacaggguugugga

SEQ ID NO: 708766 - RNA, 19 nt, Artificial Sequence
  Description of Artificial Sequence: Synthetic oligonucleotide
  Sense strand starting at position 3638 of SEQ ID NO: 586315
gugucauagccucauacau

SEQ ID NO: 708767 - RNA, 19 nt, Artificial Sequence
  Description of Artificial Sequence: Synthetic oligonucleotide
  Antisense strand to SEQ ID NO: 708766
auguaugaggcuaugacac

SEQ ID NO: 708768 - RNA, 19 nt, Artificial Sequence
  Description of Artificial Sequence: Synthetic oligonucleotide
  Sense strand starting at position 3711 of SEQ ID NO: 586315
acaaauugcuugccaggaa

SEQ ID NO: 708769 - RNA, 19 nt, Artificial Sequence
  Description of Artificial Sequence: Synthetic oligonucleotide
  Antisense strand to SEQ ID NO: 708768
uuccuggcaagcaauuugu

SEQ ID NO: 708770 - RNA, 19 nt, Artificial Sequence
  Description of Artificial Sequence: Synthetic oligonucleotide
  Sense strand starting at position 3715 of SEQ ID NO: 586315
auugcuugccaggaaauuc

SEQ ID NO: 708771 - RNA, 19 nt, Artificial Sequence
  Description of Artificial Sequence: Synthetic oligonucleotide
  Antisense strand to SEQ ID NO: 708770
gaauuuccuggcaagcaau

SEQ ID NO: 708772 - RNA, 19 nt, Artificial Sequence
  Description of Artificial Sequence: Synthetic oligonucleotide
  Sense strand starting at position 3726 of SEQ ID NO: 586315
ggaaauuccucauuagccu

SEQ ID NO: 708773 - RNA, 19 nt, Artificial Sequence
  Description of Artificial Sequence: Synthetic oligonucleotide
  Antisense strand to SEQ ID NO: 708772
aggcuaaugaggaauuucc

SEQ ID NO: 708774 - RNA, 19 nt, Artificial Sequence
  Description of Artificial Sequence: Synthetic oligonucleotide
  Sense strand starting at position 3788 of SEQ ID NO: 586315
auccgaguucugugaaauc

SEQ ID NO: 708775 - RNA, 19 nt, Artificial Sequence
  Description of Artificial Sequence: Synthetic oligonucleotide
  Antisense strand to SEQ ID NO: 708774
gauuucacagaacucggau

SEQ ID NO: 708776 - RNA, 19 nt, Artificial Sequence
  Description of Artificial Sequence: Synthetic oligonucleotide
  Sense strand starting at position 3813 of SEQ ID NO: 586315
ugacaauguugauuacaag

SEQ ID NO: 708777 - RNA, 19 nt, Artificial Sequence
  Description of Artificial Sequence: Synthetic oligonucleotide
  Antisense strand to SEQ ID NO: 708776
cuuguaaucaacauuguca

SEQ ID NO: 708778 - RNA, 19 nt, Artificial Sequence
  Description of Artificial Sequence: Synthetic oligonucleotide
  Sense strand starting at position 382 of SEQ ID NO: 586316
aaugauccagccuggucaa

SEQ ID NO: 708779 - RNA, 19 nt, Artificial Sequence
  Description of Artificial Sequence: Synthetic oligonucleotide
  Antisense strand to SEQ ID NO: 708778
uugaccaggcuggaucauu

SEQ ID NO: 708780 - RNA, 19 nt, Artificial Sequence
  Description of Artificial Sequence: Synthetic oligonucleotide
  Sense strand starting at position 927 of SEQ ID NO: 586316
gagguuaaggugcaaugua

SEQ ID NO: 708781 - RNA, 19 nt, Artificial Sequence
  Description of Artificial Sequence: Synthetic oligonucleotide
  Antisense strand to SEQ ID NO: 708780
uacauugcaccuuaaccuc

SEQ ID NO: 708782 - RNA, 19 nt, Artificial Sequence
  Description of Artificial Sequence: Synthetic oligonucleotide
  Sense strand starting at position 945 of SEQ ID NO: 586316
aggugauggucacaggaga

SEQ ID NO: 708783 - RNA, 19 nt, Artificial Sequence
  Description of Artificial Sequence: Synthetic oligonucleotide
  Antisense strand to SEQ ID NO: 708782
ucuccugugaccaucaccu

SEQ ID NO: 708784 - RNA, 19 nt, Artificial Sequence
  Description of Artificial Sequence: Synthetic oligonucleotide
  Sense strand starting at position 1445 of SEQ ID NO: 586316
ugagcuuugcagcagacau

SEQ ID NO: 708785 - RNA, 19 nt, Artificial Sequence
  Description of Artificial Sequence: Synthetic oligonucleotide
  Antisense strand to SEQ ID NO: 708784
augucugcugcaaagcuca

SEQ ID NO: 708786 - RNA, 19 nt, Artificial Sequence
  Description of Artificial Sequence: Synthetic oligonucleotide
  Sense strand starting at position 1874 of SEQ ID NO: 586316
ggaagcucuuggucccgaa

SEQ ID NO: 708787 - RNA, 19 nt, Artificial Sequence
  Description of Artificial Sequence: Synthetic oligonucleotide
  Antisense strand to SEQ ID NO: 708786
uucgggaccaagagcuucc

SEQ ID NO: 708788 - RNA, 19 nt, Artificial Sequence
  Description of Artificial Sequence: Synthetic oligonucleotide
  Sense strand starting at position 1877 of SEQ ID NO: 586316
agcucuuggucccgaaauu

SEQ ID NO: 708789 - RNA, 19 nt, Artificial Sequence
  Description of Artificial Sequence: Synthetic oligonucleotide
  Antisense strand to SEQ ID NO: 708788
aauuucgggaccaagagcu

SEQ ID NO: 708790 - RNA, 19 nt, Artificial Sequence
  Description of Artificial Sequence: Synthetic oligonucleotide
  Sense strand starting at position 1878 of SEQ ID NO: 586316
gcucuuggucccgaaauuc

SEQ ID NO: 708791 - RNA, 19 nt, Artificial Sequence
  Description of Artificial Sequence: Synthetic oligonucleotide
  Antisense strand to SEQ ID NO: 708790
gaauuucgggaccaagagc

SEQ ID NO: 708792 - RNA, 19 nt, Artificial Sequence
  Description of Artificial Sequence: Synthetic oligonucleotide
  Sense strand starting at position 2201 of SEQ ID NO: 586316
agcgaauugcccgaggaca

SEQ ID NO: 708793 - RNA, 19 nt, Artificial Sequence
  Description of Artificial Sequence: Synthetic oligonucleotide
  Antisense strand to SEQ ID NO: 708792
uguccucgggcaauucgcu

SEQ ID NO: 708794 - RNA, 19 nt, Artificial Sequence
  Description of Artificial Sequence: Synthetic oligonucleotide
  Sense strand starting at position 2203 of SEQ ID NO: 586316
cgaauugcccgaggacaca

SEQ ID NO: 708795 - RNA, 19 nt, Artificial Sequence
  Description of Artificial Sequence: Synthetic oligonucleotide
  Antisense strand to SEQ ID NO: 708794
uguguccucgggcaauucg

SEQ ID NO: 708796 - RNA, 19 nt, Artificial Sequence
  Description of Artificial Sequence: Synthetic oligonucleotide
  Sense strand starting at position 2401 of SEQ ID NO: 586316
acaggaaugugcucucagu

SEQ ID NO: 708797 - RNA, 19 nt, Artificial Sequence
  Description of Artificial Sequence: Synthetic oligonucleotide
  Antisense strand to SEQ ID NO: 708796
acugagagcacauuccugu

SEQ ID NO: 708798 - RNA, 19 nt, Artificial Sequence
  Description of Artificial Sequence: Synthetic oligonucleotide
  Sense strand starting at position 2502 of SEQ ID NO: 586316
cugugagguuccuuggcuu

SEQ ID NO: 708799 - RNA, 19 nt, Artificial Sequence
  Description of Artificial Sequence: Synthetic oligonucleotide
  Antisense strand to SEQ ID NO: 708798
aagccaaggaaccucacag

SEQ ID NO: 708800 - RNA, 19 nt, Artificial Sequence
  Description of Artificial Sequence: Synthetic oligonucleotide
  Sense strand starting at position 2508 of SEQ ID NO: 586316
gguuccuuggcuugcagaa

SEQ ID NO: 708801 - RNA, 19 nt, Artificial Sequence
  Description of Artificial Sequence: Synthetic oligonucleotide
  Antisense strand to SEQ ID NO: 708800
uucugcaagccaaggaacc

SEQ ID NO: 708802 - RNA, 19 nt, Artificial Sequence
  Description of Artificial Sequence: Synthetic oligonucleotide
  Sense strand starting at position 3514 of SEQ ID NO: 586316
guaguuacagcucaaccua

SEQ ID NO: 708803 - RNA, 19 nt, Artificial Sequence
  Description of Artificial Sequence: Synthetic oligonucleotide
  Antisense strand to SEQ ID NO: 708802
uagguugagcuguaacuac

SEQ ID NO: 708804 - RNA, 19 nt, Artificial Sequence
  Description of Artificial Sequence: Synthetic oligonucleotide
  Sense strand starting at position 3570 of SEQ ID NO: 586316
gccuuugcgugucgauguu

SEQ ID NO: 708805 - RNA, 19 nt, Artificial Sequence
  Description of Artificial Sequence: Synthetic oligonucleotide
  Antisense strand to SEQ ID NO: 708804
aacaucgacacgcaaaggc

SEQ ID NO: 708806 - RNA, 19 nt, Artificial Sequence
  Description of Artificial Sequence: Synthetic oligonucleotide
  Sense strand starting at position 3579 of SEQ ID NO: 586316
ugucgauguugucauggca

SEQ ID NO: 708807 - RNA, 19 nt, Artificial Sequence
  Description of Artificial Sequence: Synthetic oligonucleotide
  Antisense strand to SEQ ID NO: 708806
ugccaugacaacaucgaca

SEQ ID NO: 708808 - RNA, 19 nt, Artificial Sequence
  Description of Artificial Sequence: Synthetic oligonucleotide
  Sense strand starting at position 3582 of SEQ ID NO: 586316
cgauguugucauggcaaca

SEQ ID NO: 708809 - RNA, 19 nt, Artificial Sequence
  Description of Artificial Sequence: Synthetic oligonucleotide
  Antisense strand to SEQ ID NO: 708808
uguugccaugacaacaucg

SEQ ID NO: 708810 - RNA, 19 nt, Artificial Sequence
  Description of Artificial Sequence: Synthetic oligonucleotide
  Sense strand starting at position 41 of SEQ ID NO: 586317
gaucaccugucuuugugua

SEQ ID NO: 708811 - RNA, 19 nt, Artificial Sequence
  Description of Artificial Sequence: Synthetic oligonucleotide
  Antisense strand to SEQ ID NO: 708810
uacacaaagacaggugauc

SEQ ID NO: 708812 - RNA, 19 nt, Artificial Sequence
  Description of Artificial Sequence: Synthetic oligonucleotide
  Sense strand starting at position 138 of SEQ ID NO: 586317
gcguguucccugguaccau

SEQ ID NO: 708813 - RNA, 19 nt, Artificial Sequence
  Description of Artificial Sequence: Synthetic oligonucleotide
  Antisense strand to SEQ ID NO: 708812
augguaccagggaacacgc

SEQ ID NO: 708814 - RNA, 19 nt, Artificial Sequence
  Description of Artificial Sequence: Synthetic oligonucleotide
  Sense strand starting at position 332 of SEQ ID NO: 586317
aagucauagaucugaggug

SEQ ID NO: 708815 - RNA, 19 nt, Artificial Sequence
  Description of Artificial Sequence: Synthetic oligonucleotide
  Antisense strand to SEQ ID NO: 708814
caccucagaucuaugacuu

SEQ ID NO: 708816 - RNA, 19 nt, Artificial Sequence
  Description of Artificial Sequence: Synthetic oligonucleotide
  Sense strand starting at position 333 of SEQ ID NO: 586317
agucauagaucugaggugu

SEQ ID NO: 708817 - RNA, 19 nt, Artificial Sequence
  Description of Artificial Sequence: Synthetic oligonucleotide
  Antisense strand to SEQ ID NO: 708816
acaccucagaucuaugacu

SEQ ID NO: 708818 - RNA, 19 nt, Artificial Sequence
  Description of Artificial Sequence: Synthetic oligonucleotide
  Sense strand starting at position 337 of SEQ ID NO: 586317
auagaucugaggugugaaa

SEQ ID NO: 708819 - RNA, 19 nt, Artificial Sequence
  Description of Artificial Sequence: Synthetic oligonucleotide
  Antisense strand to SEQ ID NO: 708818
uuucacaccucagaucuau

SEQ ID NO: 708820 - RNA, 19 nt, Artificial Sequence
  Description of Artificial Sequence: Synthetic oligonucleotide
  Sense strand starting at position 339 of SEQ ID NO: 586317
agaucugaggugugaaaga

SEQ ID NO: 708821 - RNA, 19 nt, Artificial Sequence
  Description of Artificial Sequence: Synthetic oligonucleotide
  Antisense strand to SEQ ID NO: 708820
ucuuucacaccucagaucu

SEQ ID NO: 708822 - RNA, 19 nt, Artificial Sequence
  Description of Artificial Sequence: Synthetic oligonucleotide
  Sense strand starting at position 358 of SEQ ID NO: 586317
agagaccacuggccuuaau

SEQ ID NO: 708823 - RNA, 19 nt, Artificial Sequence
  Description of Artificial Sequence: Synthetic oligonucleotide
  Antisense strand to SEQ ID NO: 708822
auuaaggccaguggucucu

SEQ ID NO: 708824 - RNA, 19 nt, Artificial Sequence
  Description of Artificial Sequence: Synthetic oligonucleotide
  Sense strand starting at position 390 of SEQ ID NO: 586317
ccagaugcuucccuuagca

SEQ ID NO: 708825 - RNA, 19 nt, Artificial Sequence
  Description of Artificial Sequence: Synthetic oligonucleotide
  Antisense strand to SEQ ID NO: 708824
ugcuaagggaagcaucugg

SEQ ID NO: 708826 - RNA, 19 nt, Artificial Sequence
  Description of Artificial Sequence: Synthetic oligonucleotide
  Sense strand starting at position 906 of SEQ ID NO: 586317
ggcuguuggugccagaagu

SEQ ID NO: 708827 - RNA, 19 nt, Artificial Sequence
  Description of Artificial Sequence: Synthetic oligonucleotide
  Antisense strand to SEQ ID NO: 708826
acuucuggcaccaacagcc

SEQ ID NO: 708828 - RNA, 19 nt, Artificial Sequence
  Description of Artificial Sequence: Synthetic oligonucleotide
  Sense strand starting at position 916 of SEQ ID NO: 586317
gccagaaguucucauauaa

SEQ ID NO: 708829 - RNA, 19 nt, Artificial Sequence
  Description of Artificial Sequence: Synthetic oligonucleotide
  Antisense strand to SEQ ID NO: 708828
uuauaugagaacuucuggc

SEQ ID NO: 708830 - RNA, 19 nt, Artificial Sequence
  Description of Artificial Sequence: Synthetic oligonucleotide
  Sense strand starting at position 999 of SEQ ID NO: 586317
caguguggucagggaaaug

SEQ ID NO: 708831 - RNA, 19 nt, Artificial Sequence
  Description of Artificial Sequence: Synthetic oligonucleotide
  Antisense strand to SEQ ID NO: 708830
cauuucccugaccacacug

SEQ ID NO: 708832 - RNA, 19 nt, Artificial Sequence
  Description of Artificial Sequence: Synthetic oligonucleotide
  Sense strand starting at position 1133 of SEQ ID NO: 586317
gaagucgcuuccuaacaga

SEQ ID NO: 708833 - RNA, 19 nt, Artificial Sequence
  Description of Artificial Sequence: Synthetic oligonucleotide
  Antisense strand to SEQ ID NO: 708832
ucuguuaggaagcgacuuc

SEQ ID NO: 708834 - RNA, 19 nt, Artificial Sequence
  Description of Artificial Sequence: Synthetic oligonucleotide
  Sense strand starting at position 1561 of SEQ ID NO: 586317
cgcuguuacuaucucaauc

SEQ ID NO: 708835 - RNA, 19 nt, Artificial Sequence
  Description of Artificial Sequence: Synthetic oligonucleotide
  Antisense strand to SEQ ID NO: 708834
gauugagauaguaacagcg

SEQ ID NO: 708836 - RNA, 19 nt, Artificial Sequence
  Description of Artificial Sequence: Synthetic oligonucleotide
  Sense strand starting at position 1658 of SEQ ID NO: 586317
cagguuucuccagggcuca

SEQ ID NO: 708837 - RNA, 19 nt, Artificial Sequence
  Description of Artificial Sequence: Synthetic oligonucleotide
  Antisense strand to SEQ ID NO: 708836
ugagcccuggagaaaccug

SEQ ID NO: 708838 - RNA, 19 nt, Artificial Sequence
  Description of Artificial Sequence: Synthetic oligonucleotide
  Sense strand starting at position 1676 of SEQ ID NO: 586317
aggagacugucuugggaga

SEQ ID NO: 708839 - RNA, 19 nt, Artificial Sequence
  Description of Artificial Sequence: Synthetic oligonucleotide
  Antisense strand to SEQ ID NO: 708838
ucucccaagacagucuccu

SEQ ID NO: 708840 - RNA, 19 nt, Artificial Sequence
  Description of Artificial Sequence: Synthetic oligonucleotide
  Sense strand starting at position 1678 of SEQ ID NO: 586317
gagacugucuugggagaca

SEQ ID NO: 708841 - RNA, 19 nt, Artificial Sequence
  Description of Artificial Sequence: Synthetic oligonucleotide
  Antisense strand to SEQ ID NO: 708840
ugucucccaagacagucuc

SEQ ID NO: 708842 - RNA, 19 nt, Artificial Sequence
  Description of Artificial Sequence: Synthetic oligonucleotide
  Sense strand starting at position 2365 of SEQ ID NO: 586317
cuuucauuccggugaucga

SEQ ID NO: 708843 - RNA, 19 nt, Artificial Sequence
  Description of Artificial Sequence: Synthetic oligonucleotide
  Antisense strand to SEQ ID NO: 708842
ucgaucaccggaaugaaag

SEQ ID NO: 708844 - RNA, 19 nt, Artificial Sequence
  Description of Artificial Sequence: Synthetic oligonucleotide
  Sense strand starting at position 2446 of SEQ ID NO: 586317
ccauuagaccugugugaag

SEQ ID NO: 708845 - RNA, 19 nt, Artificial Sequence
  Description of Artificial Sequence: Synthetic oligonucleotide
  Antisense strand to SEQ ID NO: 708844
cuucacacaggucuaaugg

SEQ ID NO: 708846 - RNA, 19 nt, Artificial Sequence
  Description of Artificial Sequence: Synthetic oligonucleotide
  Sense strand starting at position 2448 of SEQ ID NO: 586317
auuagaccugugugaagca

SEQ ID NO: 708847 - RNA, 19 nt, Artificial Sequence
  Description of Artificial Sequence: Synthetic oligonucleotide
  Antisense strand to SEQ ID NO: 708846
ugcuucacacaggucuaau

SEQ ID NO: 708848 - RNA, 19 nt, Artificial Sequence
  Description of Artificial Sequence: Synthetic oligonucleotide
  Sense strand starting at position 2453 of SEQ ID NO: 586317
accugugugaagcacagau

SEQ ID NO: 708849 - RNA, 19 nt, Artificial Sequence
  Description of Artificial Sequence: Synthetic oligonucleotide
  Antisense strand to SEQ ID NO: 708848
aucugugcuucacacaggu

SEQ ID NO: 708850 - RNA, 19 nt, Artificial Sequence
  Description of Artificial Sequence: Synthetic oligonucleotide
  Sense strand starting at position 2508 of SEQ ID NO: 586317
cccugaugccuuggagaga

SEQ ID NO: 708851 - RNA, 19 nt, Artificial Sequence
  Description of Artificial Sequence: Synthetic oligonucleotide
  Antisense strand to SEQ ID NO: 708850
ucucuccaaggcaucaggg

SEQ ID NO: 708852 - RNA, 19 nt, Artificial Sequence
  Description of Artificial Sequence: Synthetic oligonucleotide
  Sense strand starting at position 2779 of SEQ ID NO: 586317
ccagaugucgucugaauag

SEQ ID NO: 708853 - RNA, 19 nt, Artificial Sequence
  Description of Artificial Sequence: Synthetic oligonucleotide
  Antisense strand to SEQ ID NO: 708852
cuauucagacgacaucugg

SEQ ID NO: 708854 - RNA, 19 nt, Artificial Sequence
  Description of Artificial Sequence: Synthetic oligonucleotide
  Sense strand starting at position 3031 of SEQ ID NO: 586317
agccauagugcccguucua

SEQ ID NO: 708855 - RNA, 19 nt, Artificial Sequence
  Description of Artificial Sequence: Synthetic oligonucleotide
  Antisense strand to SEQ ID NO: 708854
uagaacgggcacuauggcu

SEQ ID NO: 708856 - RNA, 19 nt, Artificial Sequence
  Description of Artificial Sequence: Synthetic oligonucleotide
  Sense strand starting at position 3034 of SEQ ID NO: 586317
cauagugcccguucuaguu

SEQ ID NO: 708857 - RNA, 19 nt, Artificial Sequence
  Description of Artificial Sequence: Synthetic oligonucleotide
  Antisense strand to SEQ ID NO: 708856
aacuagaacgggcacuaug

SEQ ID NO: 708858 - RNA, 19 nt, Artificial Sequence
  Description of Artificial Sequence: Synthetic oligonucleotide
  Sense strand starting at position 3367 of SEQ ID NO: 586317
acuuauucuucugggccaa

SEQ ID NO: 708859 - RNA, 19 nt, Artificial Sequence
  Description of Artificial Sequence: Synthetic oligonucleotide
  Antisense strand to SEQ ID NO: 708858
uuggcccagaagaauaagu

SEQ ID NO: 708860 - RNA, 19 nt, Artificial Sequence
  Description of Artificial Sequence: Synthetic oligonucleotide
  Sense strand starting at position 3417 of SEQ ID NO: 586317
uacagauguucgcugaccu

SEQ ID NO: 708861 - RNA, 19 nt, Artificial Sequence
  Description of Artificial Sequence: Synthetic oligonucleotide
  Antisense strand to SEQ ID NO: 708860
aggucagcgaacaucugua

SEQ ID NO: 708862 - RNA, 19 nt, Artificial Sequence
  Description of Artificial Sequence: Synthetic oligonucleotide
  Sense strand starting at position 3480 of SEQ ID NO: 586317
acuuguugguccucuaaca

SEQ ID NO: 708863 - RNA, 19 nt, Artificial Sequence
  Description of Artificial Sequence: Synthetic oligonucleotide
  Antisense strand to SEQ ID NO: 708862
uguuagaggaccaacaagu

SEQ ID NO: 708864 - RNA, 19 nt, Artificial Sequence
  Description of Artificial Sequence: Synthetic oligonucleotide
  Sense strand starting at position 3505 of SEQ ID NO: 586317
ccaagaagcugucaccaau

SEQ ID NO: 708865 - RNA, 19 nt, Artificial Sequence
  Description of Artificial Sequence: Synthetic oligonucleotide
  Antisense strand to SEQ ID NO: 708864
auuggugacagcuucuugg

SEQ ID NO: 708866 - RNA, 19 nt, Artificial Sequence
  Description of Artificial Sequence: Synthetic oligonucleotide
  Sense strand starting at position 3525 of SEQ ID NO: 586317
agggauuagacgugcaaag

SEQ ID NO: 708867 - RNA, 19 nt, Artificial Sequence
  Description of Artificial Sequence: Synthetic oligonucleotide
  Antisense strand to SEQ ID NO: 708866
cuuugcacgucuaaucccu

SEQ ID NO: 708868 - RNA, 19 nt, Artificial Sequence
  Description of Artificial Sequence: Synthetic oligonucleotide
  Sense strand starting at position 3527 of SEQ ID NO: 586317
ggauuagacgugcaaagga

SEQ ID NO: 708869 - RNA, 19 nt, Artificial Sequence
  Description of Artificial Sequence: Synthetic oligonucleotide
  Antisense strand to SEQ ID NO: 708868
uccuuugcacgucuaaucc

SEQ ID NO: 708870 - RNA, 19 nt, Artificial Sequence
  Description of Artificial Sequence: Synthetic oligonucleotide
  Sense strand starting at position 3557 of SEQ ID NO: 586317
uguucuccucccugcaaga

SEQ ID NO: 708871 - RNA, 19 nt, Artificial Sequence
  Description of Artificial Sequence: Synthetic oligonucleotide
  Antisense strand to SEQ ID NO: 708870
ucuugcagggaggagaaca

SEQ ID NO: 708872 - RNA, 19 nt, Artificial Sequence
  Description of Artificial Sequence: Synthetic oligonucleotide
  Sense strand starting at position 3586 of SEQ ID NO: 586317
gggaugugaugugguauga

SEQ ID NO: 708873 - RNA, 19 nt, Artificial Sequence
  Description of Artificial Sequence: Synthetic oligonucleotide
  Antisense strand to SEQ ID NO: 708872
ucauaccacaucacauccc

SEQ ID NO: 708874 - RNA, 19 nt, Artificial Sequence
  Description of Artificial Sequence: Synthetic oligonucleotide
  Sense strand starting at position 3653 of SEQ ID NO: 586317
ggaagacuuuaccaagaag

SEQ ID NO: 708875 - RNA, 19 nt, Artificial Sequence
  Description of Artificial Sequence: Synthetic oligonucleotide
  Antisense strand to SEQ ID NO: 708874
cuucuugguaaagucuucc

SEQ ID NO: 708876 - RNA, 19 nt, Artificial Sequence
  Description of Artificial Sequence: Synthetic oligonucleotide
  Sense strand starting at position 3983 of SEQ ID NO: 586317
agcuuaacuuaggucuuau

SEQ ID NO: 708877 - RNA, 19 nt, Artificial Sequence
  Description of Artificial Sequence: Synthetic oligonucleotide
  Antisense strand to SEQ ID NO: 708876
auaagaccuaaguuaagcu

SEQ ID NO: 708878 - RNA, 19 nt, Artificial Sequence
  Description of Artificial Sequence: Synthetic oligonucleotide
  Sense strand starting at position 20 of SEQ ID NO: 586318
cguauaacagauuaaugca

SEQ ID NO: 708879 - RNA, 19 nt, Artificial Sequence
  Description of Artificial Sequence: Synthetic oligonucleotide
  Antisense strand to SEQ ID NO: 708878
ugcauuaaucuguuauacg

SEQ ID NO: 708880 - RNA, 19 nt, Artificial Sequence
  Description of Artificial Sequence: Synthetic oligonucleotide
  Sense strand starting at position 41 of SEQ ID NO: 586318
agucaauaaucucugugac

SEQ ID NO: 708881 - RNA, 19 nt, Artificial Sequence
  Description of Artificial Sequence: Synthetic oligonucleotide
  Antisense strand to SEQ ID NO: 708880
gucacagagauuauugacu

SEQ ID NO: 708882 - RNA, 19 nt, Artificial Sequence
  Description of Artificial Sequence: Synthetic oligonucleotide
  Sense strand starting at position 240 of SEQ ID NO: 586318
gcugcuuguggaguguuau

SEQ ID NO: 708883 - RNA, 19 nt, Artificial Sequence
  Description of Artificial Sequence: Synthetic oligonucleotide
  Antisense strand to SEQ ID NO: 708882
auaacacuccacaagcagc

SEQ ID NO: 708884 - RNA, 19 nt, Artificial Sequence
  Description of Artificial Sequence: Synthetic oligonucleotide
  Sense strand starting at position 322 of SEQ ID NO: 586318
gugcuuguaagaggaaaca

SEQ ID NO: 708885 - RNA, 19 nt, Artificial Sequence
  Description of Artificial Sequence: Synthetic oligonucleotide
  Antisense strand to SEQ ID NO: 708884
uguuuccucuuacaagcac

SEQ ID NO: 708886 - RNA, 19 nt, Artificial Sequence
  Description of Artificial Sequence: Synthetic oligonucleotide
  Sense strand starting at position 637 of SEQ ID NO: 586318
aagaguucccuuggugaca

SEQ ID NO: 708887 - RNA, 19 nt, Artificial Sequence
  Description of Artificial Sequence: Synthetic oligonucleotide
  Antisense strand to SEQ ID NO: 708886
ugucaccaagggaacucuu

SEQ ID NO: 708888 - RNA, 19 nt, Artificial Sequence
  Description of Artificial Sequence: Synthetic oligonucleotide
  Sense strand starting at position 765 of SEQ ID NO: 586318
gaauaugggucuucugaaa

SEQ ID NO: 708889 - RNA, 19 nt, Artificial Sequence
  Description of Artificial Sequence: Synthetic oligonucleotide
  Antisense strand to SEQ ID NO: 708888
uuucagaagacccauauuc

SEQ ID NO: 708890 - RNA, 19 nt, Artificial Sequence
  Description of Artificial Sequence: Synthetic oligonucleotide
  Sense strand starting at position 804 of SEQ ID NO: 586318
uacgaacuccaguggaaua

SEQ ID NO: 708891 - RNA, 19 nt, Artificial Sequence
  Description of Artificial Sequence: Synthetic oligonucleotide
  Antisense strand to SEQ ID NO: 708890
uauuccacuggaguucgua

SEQ ID NO: 708892 - RNA, 19 nt, Artificial Sequence
  Description of Artificial Sequence: Synthetic oligonucleotide
  Sense strand starting at position 821 of SEQ ID NO: 586318
uacagaagugauggaaugu

SEQ ID NO: 708893 - RNA, 19 nt, Artificial Sequence
  Description of Artificial Sequence: Synthetic oligonucleotide
  Antisense strand to SEQ ID NO: 708892
acauuccaucacuucugua

SEQ ID NO: 708894 - RNA, 19 nt, Artificial Sequence
  Description of Artificial Sequence: Synthetic oligonucleotide
  Sense strand starting at position 859 of SEQ ID NO: 586318
ugccacaaauggucugaaa

SEQ ID NO: 708895 - RNA, 19 nt, Artificial Sequence
  Description of Artificial Sequence: Synthetic oligonucleotide
  Antisense strand to SEQ ID NO: 708894
uuucagaccauuuguggca

SEQ ID NO: 708896 - RNA, 19 nt, Artificial Sequence
  Description of Artificial Sequence: Synthetic oligonucleotide
  Sense strand starting at position 962 of SEQ ID NO: 586318
guaauacaacagggucaua

SEQ ID NO: 708897 - RNA, 19 nt, Artificial Sequence
  Description of Artificial Sequence: Synthetic oligonucleotide
  Antisense strand to SEQ ID NO: 708896
uaugacccuguuguauuac

SEQ ID NO: 708898 - RNA, 19 nt, Artificial Sequence
  Description of Artificial Sequence: Synthetic oligonucleotide
  Sense strand starting at position 973 of SEQ ID NO: 586318
gggucauauuuccuggugu

SEQ ID NO: 708899 - RNA, 19 nt, Artificial Sequence
  Description of Artificial Sequence: Synthetic oligonucleotide
  Antisense strand to SEQ ID NO: 708898
acaccaggaaauaugaccc

SEQ ID NO: 708900 - RNA, 19 nt, Artificial Sequence
  Description of Artificial Sequence: Synthetic oligonucleotide
  Sense strand starting at position 975 of SEQ ID NO: 586318
gucauauuuccuggugugu

SEQ ID NO: 708901 - RNA, 19 nt, Artificial Sequence
  Description of Artificial Sequence: Synthetic oligonucleotide
  Antisense strand to SEQ ID NO: 708900
acacaccaggaaauaugac

SEQ ID NO: 708902 - RNA, 19 nt, Artificial Sequence
  Description of Artificial Sequence: Synthetic oligonucleotide
  Sense strand starting at position 993 of SEQ ID NO: 586318
uguucuaaagaauaguagu

SEQ ID NO: 708903 - RNA, 19 nt, Artificial Sequence
  Description of Artificial Sequence: Synthetic oligonucleotide
  Antisense strand to SEQ ID NO: 708902
acuacuauucuuuagaaca

SEQ ID NO: 708904 - RNA, 19 nt, Artificial Sequence
  Description of Artificial Sequence: Synthetic oligonucleotide
  Sense strand starting at position 1015 of SEQ ID NO: 586318
uugaguuacucagugaaag

SEQ ID NO: 708905 - RNA, 19 nt, Artificial Sequence
  Description of Artificial Sequence: Synthetic oligonucleotide
  Antisense strand to SEQ ID NO: 708904
cuuucacugaguaacucaa

SEQ ID NO: 708906 - RNA, 19 nt, Artificial Sequence
  Description of Artificial Sequence: Synthetic oligonucleotide
  Sense strand starting at position 1016 of SEQ ID NO: 586318
ugaguuacucagugaaaga

SEQ ID NO: 708907 - RNA, 19 nt, Artificial Sequence
  Description of Artificial Sequence: Synthetic oligonucleotide
  Antisense strand to SEQ ID NO: 708906
ucuuucacugaguaacuca

SEQ ID NO: 708908 - RNA, 19 nt, Artificial Sequence
  Description of Artificial Sequence: Synthetic oligonucleotide
  Sense strand starting at position 1136 of SEQ ID NO: 586318
gggagcaguagguaguuua

SEQ ID NO: 708909 - RNA, 19 nt, Artificial Sequence
  Description of Artificial Sequence: Synthetic oligonucleotide
  Antisense strand to SEQ ID NO: 708908
uaaacuaccuacugcuccc

SEQ ID NO: 708910 - RNA, 19 nt, Artificial Sequence
  Description of Artificial Sequence: Synthetic oligonucleotide
  Sense strand starting at position 1435 of SEQ ID NO: 586318
agcugaaaucuauagcccu

SEQ ID NO: 708911 - RNA, 19 nt, Artificial Sequence
  Description of Artificial Sequence: Synthetic oligonucleotide
  Antisense strand to SEQ ID NO: 708910
agggcuauagauuucagcu

SEQ ID NO: 708912 - RNA, 19 nt, Artificial Sequence
  Description of Artificial Sequence: Synthetic oligonucleotide
  Sense strand starting at position 1585 of SEQ ID NO: 586318
cugaguugccuggaacaaa

SEQ ID NO: 708913 - RNA, 19 nt, Artificial Sequence
  Description of Artificial Sequence: Synthetic oligonucleotide
  Antisense strand to SEQ ID NO: 708912
uuuguuccaggcaacucag

SEQ ID NO: 708914 - RNA, 19 nt, Artificial Sequence
  Description of Artificial Sequence: Synthetic oligonucleotide
  Sense strand starting at position 1683 of SEQ ID NO: 586318
gagaaauaggguuaugugu

SEQ ID NO: 708915 - RNA, 19 nt, Artificial Sequence
  Description of Artificial Sequence: Synthetic oligonucleotide
  Antisense strand to SEQ ID NO: 708914
acacauaacccuauuucuc

SEQ ID NO: 708916 - RNA, 19 nt, Artificial Sequence
  Description of Artificial Sequence: Synthetic oligonucleotide
  Sense strand starting at position 1987 of SEQ ID NO: 586318
uuuccuggaguccagaauu

SEQ ID NO: 708917 - RNA, 19 nt, Artificial Sequence
  Description of Artificial Sequence: Synthetic oligonucleotide
  Antisense strand to SEQ ID NO: 708916
aauucuggacuccaggaaa

SEQ ID NO: 708918 - RNA, 19 nt, Artificial Sequence
  Description of Artificial Sequence: Synthetic oligonucleotide
  Sense strand starting at position 2007 of SEQ ID NO: 586318
agaguccuuccugaacuuu

SEQ ID NO: 708919 - RNA, 19 nt, Artificial Sequence
  Description of Artificial Sequence: Synthetic oligonucleotide
  Antisense strand to SEQ ID NO: 708918
aaaguucaggaaggacucu

SEQ ID NO: 708920 - RNA, 19 nt, Artificial Sequence
  Description of Artificial Sequence: Synthetic oligonucleotide
  Sense strand starting at position 2019 of SEQ ID NO: 586318
gaacuuuauuuguagggau

SEQ ID NO: 708921 - RNA, 19 nt, Artificial Sequence
  Description of Artificial Sequence: Synthetic oligonucleotide
  Antisense strand to SEQ ID NO: 708920
aucccuacaaauaaaguuc

SEQ ID NO: 708922 - RNA, 19 nt, Artificial Sequence
  Description of Artificial Sequence: Synthetic oligonucleotide
  Sense strand starting at position 2066 of SEQ ID NO: 586318
ugagaacucacgugaauuc

SEQ ID NO: 708923 - RNA, 19 nt, Artificial Sequence
  Description of Artificial Sequence: Synthetic oligonucleotide
  Antisense strand to SEQ ID NO: 708922
gaauucacgugaguucuca

SEQ ID NO: 708924 - RNA, 19 nt, Artificial Sequence
  Description of Artificial Sequence: Synthetic oligonucleotide
  Sense strand starting at position 2076 of SEQ ID NO: 586318
cgugaauucccacauggga

SEQ ID NO: 708925 - RNA, 19 nt, Artificial Sequence
  Description of Artificial Sequence: Synthetic oligonucleotide
  Antisense strand to SEQ ID NO: 708924
ucccaugugggaauucacg

SEQ ID NO: 708926 - RNA, 19 nt, Artificial Sequence
  Description of Artificial Sequence: Synthetic oligonucleotide
  Sense strand starting at position 2112 of SEQ ID NO: 586318
ugaaauucucaagguugua

SEQ ID NO: 708927 - RNA, 19 nt, Artificial Sequence
  Description of Artificial Sequence: Synthetic oligonucleotide
  Antisense strand to SEQ ID NO: 708926
uacaaccuugagaauuuca

SEQ ID NO: 708928 - RNA, 19 nt, Artificial Sequence
  Description of Artificial Sequence: Synthetic oligonucleotide
  Sense strand starting at position 2142 of SEQ ID NO: 586318
gugugauaucaccaaugug

SEQ ID NO: 708929 - RNA, 19 nt, Artificial Sequence
  Description of Artificial Sequence: Synthetic oligonucleotide
  Antisense strand to SEQ ID NO: 708928
cacauuggugauaucacac

SEQ ID NO: 708930 - RNA, 19 nt, Artificial Sequence
  Description of Artificial Sequence: Synthetic oligonucleotide
  Sense strand starting at position 2145 of SEQ ID NO: 586318
ugauaucaccaauguguac

SEQ ID NO: 708931 - RNA, 19 nt, Artificial Sequence
  Description of Artificial Sequence: Synthetic oligonucleotide
  Antisense strand to SEQ ID NO: 708930
guacacauuggugauauca

SEQ ID NO: 708932 - RNA, 19 nt, Artificial Sequence
  Description of Artificial Sequence: Synthetic oligonucleotide
  Sense strand starting at position 2166 of SEQ ID NO: 586318
guuccauuccuaggauaag

SEQ ID NO: 708933 - RNA, 19 nt, Artificial Sequence
  Description of Artificial Sequence: Synthetic oligonucleotide
  Antisense strand to SEQ ID NO: 708932
cuuauccuaggaauggaac

SEQ ID NO: 708934 - RNA, 19 nt, Artificial Sequence
  Description of Artificial Sequence: Synthetic oligonucleotide
  Sense strand starting at position 2231 of SEQ ID NO: 586318
agggcaauauaguuaugau

SEQ ID NO: 708935 - RNA, 19 nt, Artificial Sequence
  Description of Artificial Sequence: Synthetic oligonucleotide
  Antisense strand to SEQ ID NO: 708934
aucauaacuauauugcccu

SEQ ID NO: 708936 - RNA, 19 nt, Artificial Sequence
  Description of Artificial Sequence: Synthetic oligonucleotide
  Sense strand starting at position 2232 of SEQ ID NO: 586318
gggcaauauaguuaugauu

SEQ ID NO: 708937 - RNA, 19 nt, Artificial Sequence
  Description of Artificial Sequence: Synthetic oligonucleotide
  Antisense strand to SEQ ID NO: 708936
aaucauaacuauauugccc

SEQ ID NO: 708938 - RNA, 19 nt, Artificial Sequence
  Description of Artificial Sequence: Synthetic oligonucleotide
  Sense strand starting at position 2377 of SEQ ID NO: 586318
aggcauccugucuaucaca

SEQ ID NO: 708939 - RNA, 19 nt, Artificial Sequence
  Description of Artificial Sequence: Synthetic oligonucleotide
  Antisense strand to SEQ ID NO: 708938
ugugauagacaggaugccu

SEQ ID NO: 708940 - RNA, 19 nt, Artificial Sequence
  Description of Artificial Sequence: Synthetic oligonucleotide
  Sense strand starting at position 2398 of SEQ ID NO: 586318
ccauuaguuugcucauuug

SEQ ID NO: 708941 - RNA, 19 nt, Artificial Sequence
  Description of Artificial Sequence: Synthetic oligonucleotide
  Antisense strand to SEQ ID NO: 708940
caaaugagcaaacuaaugg

SEQ ID NO: 708942 - RNA, 19 nt, Artificial Sequence
  Description of Artificial Sequence: Synthetic oligonucleotide
  Sense strand starting at position 2401 of SEQ ID NO: 586318
uuaguuugcucauuuguuu

SEQ ID NO: 708943 - RNA, 19 nt, Artificial Sequence
  Description of Artificial Sequence: Synthetic oligonucleotide
  Antisense strand to SEQ ID NO: 708942
aaacaaaugagcaaacuaa

SEQ ID NO: 708944 - RNA, 19 nt, Artificial Sequence
  Description of Artificial Sequence: Synthetic oligonucleotide
  Sense strand starting at position 2773 of SEQ ID NO: 586318
cuuucucugcuuucgaguu

SEQ ID NO: 708945 - RNA, 19 nt, Artificial Sequence
  Description of Artificial Sequence: Synthetic oligonucleotide
  Antisense strand to SEQ ID NO: 708944
aacucgaaagcagagaaag

SEQ ID NO: 708946 - RNA, 19 nt, Artificial Sequence
  Description of Artificial Sequence: Synthetic oligonucleotide
  Sense strand starting at position 3082 of SEQ ID NO: 586318
ucaaauaucugcuuuaagg

SEQ ID NO: 708947 - RNA, 19 nt, Artificial Sequence
  Description of Artificial Sequence: Synthetic oligonucleotide
  Antisense strand to SEQ ID NO: 708946
ccuuaaagcagauauuuga

SEQ ID NO: 708948 - RNA, 19 nt, Artificial Sequence
  Description of Artificial Sequence: Synthetic oligonucleotide
  Sense strand starting at position 3264 of SEQ ID NO: 586318
aaguauguacuuggagaau

SEQ ID NO: 708949 - RNA, 19 nt, Artificial Sequence
  Description of Artificial Sequence: Synthetic oligonucleotide
  Antisense strand to SEQ ID NO: 708948
auucuccaaguacauacuu

SEQ ID NO: 708950 - RNA, 19 nt, Artificial Sequence
  Description of Artificial Sequence: Synthetic oligonucleotide
  Sense strand starting at position 3738 of SEQ ID NO: 586318
gaggaaacuuagccuagca

SEQ ID NO: 708951 - RNA, 19 nt, Artificial Sequence
  Description of Artificial Sequence: Synthetic oligonucleotide
  Antisense strand to SEQ ID NO: 708950
ugcuaggcuaaguuuccuc

SEQ ID NO: 708952 - RNA, 19 nt, Artificial Sequence
  Description of Artificial Sequence: Synthetic oligonucleotide
  Sense strand starting at position 3740 of SEQ ID NO: 586318
ggaaacuuagccuagcaga

SEQ ID NO: 708953 - RNA, 19 nt, Artificial Sequence
  Description of Artificial Sequence: Synthetic oligonucleotide
  Antisense strand to SEQ ID NO: 708952
ucugcuaggcuaaguuucc

SEQ ID NO: 708954 - RNA, 19 nt, Artificial Sequence
  Description of Artificial Sequence: Synthetic oligonucleotide
  Sense strand starting at position 3762 of SEQ ID NO: 586318
gagacuugaaccugggagu

SEQ ID NO: 708955 - RNA, 19 nt, Artificial Sequence
  Description of Artificial Sequence: Synthetic oligonucleotide
  Antisense strand to SEQ ID NO: 708954
acucccagguucaagucuc

SEQ ID NO: 708956 - RNA, 19 nt, Artificial Sequence
  Description of Artificial Sequence: Synthetic oligonucleotide
  Sense strand starting at position 3888 of SEQ ID NO: 586318
gcagguaacugauugauga

SEQ ID NO: 708957 - RNA, 19 nt, Artificial Sequence
  Description of Artificial Sequence: Synthetic oligonucleotide
  Antisense strand to SEQ ID NO: 708956
ucaucaaucaguuaccugc

SEQ ID NO: 708958 - RNA, 19 nt, Artificial Sequence
  Description of Artificial Sequence: Synthetic oligonucleotide
  Sense strand starting at position 374 of SEQ ID NO: 586319
cuacuauggcgugagaaug

SEQ ID NO: 708959 - RNA, 19 nt, Artificial Sequence
  Description of Artificial Sequence: Synthetic oligonucleotide
  Antisense strand to SEQ ID NO: 708958
cauucucacgccauaguag

SEQ ID NO: 708960 - RNA, 19 nt, Artificial Sequence
  Description of Artificial Sequence: Synthetic oligonucleotide
  Sense strand starting at position 533 of SEQ ID NO: 586319
aagagaggucuguaucuug

SEQ ID NO: 708961 - RNA, 19 nt, Artificial Sequence
  Description of Artificial Sequence: Synthetic oligonucleotide
  Antisense strand to SEQ ID NO: 708960
caagauacagaccucucuu

SEQ ID NO: 708962 - RNA, 19 nt, Artificial Sequence
  Description of Artificial Sequence: Synthetic oligonucleotide
  Sense strand starting at position 807 of SEQ ID NO: 586319
ucucauuagccagauagua

SEQ ID NO: 708963 - RNA, 19 nt, Artificial Sequence
  Description of Artificial Sequence: Synthetic oligonucleotide
  Antisense strand to SEQ ID NO: 708962
uacuaucuggcuaaugaga

SEQ ID NO: 708964 - RNA, 19 nt, Artificial Sequence
  Description of Artificial Sequence: Synthetic oligonucleotide
  Sense strand starting at position 875 of SEQ ID NO: 586319
uggagaugaacuuguguua

SEQ ID NO: 708965 - RNA, 19 nt, Artificial Sequence
  Description of Artificial Sequence: Synthetic oligonucleotide
  Antisense strand to SEQ ID NO: 708964
uaacacaaguucaucucca

SEQ ID NO: 708966 - RNA, 19 nt, Artificial Sequence
  Description of Artificial Sequence: Synthetic oligonucleotide
  Sense strand starting at position 878 of SEQ ID NO: 586319
agaugaacuuguguuauag

SEQ ID NO: 708967 - RNA, 19 nt, Artificial Sequence
  Description of Artificial Sequence: Synthetic oligonucleotide
  Antisense strand to SEQ ID NO: 708966
cuauaacacaaguucaucu

SEQ ID NO: 708968 - RNA, 19 nt, Artificial Sequence
  Description of Artificial Sequence: Synthetic oligonucleotide
  Sense strand starting at position 955 of SEQ ID NO: 586319
ccuugagcgcguuccuuaa

SEQ ID NO: 708969 - RNA, 19 nt, Artificial Sequence
  Description of Artificial Sequence: Synthetic oligonucleotide
  Antisense strand to SEQ ID NO: 708968
uuaaggaacgcgcucaagg

SEQ ID NO: 708970 - RNA, 19 nt, Artificial Sequence
  Description of Artificial Sequence: Synthetic oligonucleotide
  Sense strand starting at position 994 of SEQ ID NO: 586319
ucauguuuaaguggaagaa

SEQ ID NO: 708971 - RNA, 19 nt, Artificial Sequence
  Description of Artificial Sequence: Synthetic oligonucleotide
  Antisense strand to SEQ ID NO: 708970
uucuuccacuuaaacauga

SEQ ID NO: 708972 - RNA, 19 nt, Artificial Sequence
  Description of Artificial Sequence: Synthetic oligonucleotide
  Sense strand starting at position 1064 of SEQ ID NO: 586319
augaaagcucuuugcaaau

SEQ ID NO: 708973 - RNA, 19 nt, Artificial Sequence
  Description of Artificial Sequence: Synthetic oligonucleotide
  Antisense strand to SEQ ID NO: 708972
auuugcaaagagcuuucau

SEQ ID NO: 708974 - RNA, 19 nt, Artificial Sequence
  Description of Artificial Sequence: Synthetic oligonucleotide
  Sense strand starting at position 1088 of SEQ ID NO: 586319
aguauuaugcaguaaugag

SEQ ID NO: 708975 - RNA, 19 nt, Artificial Sequence
  Description of Artificial Sequence: Synthetic oligonucleotide
  Antisense strand to SEQ ID NO: 708974
cucauuacugcauaauacu

SEQ ID NO: 708976 - RNA, 19 nt, Artificial Sequence
  Description of Artificial Sequence: Synthetic oligonucleotide
  Sense strand starting at position 1192 of SEQ ID NO: 586319
caaaguauucugcauggag

SEQ ID NO: 708977 - RNA, 19 nt, Artificial Sequence
  Description of Artificial Sequence: Synthetic oligonucleotide
  Antisense strand to SEQ ID NO: 708976
cuccaugcagaauacuuug

SEQ ID NO: 708978 - RNA, 19 nt, Artificial Sequence
  Description of Artificial Sequence: Synthetic oligonucleotide
  Sense strand starting at position 1303 of SEQ ID NO: 586319
cuaggcaagaccugugaaa

SEQ ID NO: 708979 - RNA, 19 nt, Artificial Sequence
  Description of Artificial Sequence: Synthetic oligonucleotide
  Antisense strand to SEQ ID NO: 708978
uuucacaggucuugccuag

SEQ ID NO: 708980 - RNA, 19 nt, Artificial Sequence
  Description of Artificial Sequence: Synthetic oligonucleotide
  Sense strand starting at position 1385 of SEQ ID NO: 586319
agcauuaaacugcagauca

SEQ ID NO: 708981 - RNA, 19 nt, Artificial Sequence
  Description of Artificial Sequence: Synthetic oligonucleotide
  Antisense strand to SEQ ID NO: 708980
ugaucugcaguuuaaugcu

SEQ ID NO: 708982 - RNA, 19 nt, Artificial Sequence
  Description of Artificial Sequence: Synthetic oligonucleotide
  Sense strand starting at position 1426 of SEQ ID NO: 586319
agccuucgccauuaacaaa

SEQ ID NO: 708983 - RNA, 19 nt, Artificial Sequence
  Description of Artificial Sequence: Synthetic oligonucleotide
  Antisense strand to SEQ ID NO: 708982
uuuguuaauggcgaaggcu

SEQ ID NO: 708984 - RNA, 19 nt, Artificial Sequence
  Description of Artificial Sequence: Synthetic oligonucleotide
  Sense strand starting at position 1472 of SEQ ID NO: 586319
aggguuucccuuuaugcau

SEQ ID NO: 708985 - RNA, 19 nt, Artificial Sequence
  Description of Artificial Sequence: Synthetic oligonucleotide
  Antisense strand to SEQ ID NO: 708984
augcauaaagggaaacccu

SEQ ID NO: 708986 - RNA, 19 nt, Artificial Sequence
  Description of Artificial Sequence: Synthetic oligonucleotide
  Sense strand starting at position 1598 of SEQ ID NO: 586319
aaaguagaugccuggaacu

SEQ ID NO: 708987 - RNA, 19 nt, Artificial Sequence
  Description of Artificial Sequence: Synthetic oligonucleotide
  Antisense strand to SEQ ID NO: 708986
aguuccaggcaucuacuuu

SEQ ID NO: 708988 - RNA, 19 nt, Artificial Sequence
  Description of Artificial Sequence: Synthetic oligonucleotide
  Sense strand starting at position 1674 of SEQ ID NO: 586319
gagagacugcaaugaucau

SEQ ID NO: 708989 - RNA, 19 nt, Artificial Sequence
  Description of Artificial Sequence: Synthetic oligonucleotide
  Antisense strand to SEQ ID NO: 708988
augaucauugcagucucuc

SEQ ID NO: 708990 - RNA, 19 nt, Artificial Sequence
  Description of Artificial Sequence: Synthetic oligonucleotide
  Sense strand starting at position 1685 of SEQ ID NO: 586319
augaucaucuaguccugau

SEQ ID NO: 708991 - RNA, 19 nt, Artificial Sequence
  Description of Artificial Sequence: Synthetic oligonucleotide
  Antisense strand to SEQ ID NO: 708990
aucaggacuagaugaucau

SEQ ID NO: 708992 - RNA, 19 nt, Artificial Sequence
  Description of Artificial Sequence: Synthetic oligonucleotide
  Sense strand starting at position 1737 of SEQ ID NO: 586319
uggacuuguccaggaugac

SEQ ID NO: 708993 - RNA, 19 nt, Artificial Sequence
  Description of Artificial Sequence: Synthetic oligonucleotide
  Antisense strand to SEQ ID NO: 708992
gucauccuggacaagucca

SEQ ID NO: 708994 - RNA, 19 nt, Artificial Sequence
  Description of Artificial Sequence: Synthetic oligonucleotide
  Sense strand starting at position 1998 of SEQ ID NO: 586319
uuauaaagagucugagagu

SEQ ID NO: 708995 - RNA, 19 nt, Artificial Sequence
  Description of Artificial Sequence: Synthetic oligonucleotide
  Antisense strand to SEQ ID NO: 708994
acucucagacucuuuauaa

SEQ ID NO: 708996 - RNA, 19 nt, Artificial Sequence
  Description of Artificial Sequence: Synthetic oligonucleotide
  Sense strand starting at position 2007 of SEQ ID NO: 586319
gucugagagugacucaagu

SEQ ID NO: 708997 - RNA, 19 nt, Artificial Sequence
  Description of Artificial Sequence: Synthetic oligonucleotide
  Antisense strand to SEQ ID NO: 708996
acuugagucacucucagac

SEQ ID NO: 708998 - RNA, 19 nt, Artificial Sequence
  Description of Artificial Sequence: Synthetic oligonucleotide
  Sense strand starting at position 2034 of SEQ ID NO: 586319
augcuaaugugauucccaa

SEQ ID NO: 708999 - RNA, 19 nt, Artificial Sequence
  Description of Artificial Sequence: Synthetic oligonucleotide
  Antisense strand to SEQ ID NO: 708998
uugggaaucacauuagcau

SEQ ID NO: 709000 - RNA, 19 nt, Artificial Sequence
  Description of Artificial Sequence: Synthetic oligonucleotide
  Sense strand starting at position 2114 of SEQ ID NO: 586319
agugauaaagguugagcau

SEQ ID NO: 709001 - RNA, 19 nt, Artificial Sequence
  Description of Artificial Sequence: Synthetic oligonucleotide
  Antisense strand to SEQ ID NO: 709000
augcucaaccuuuaucacu

SEQ ID NO: 709002 - RNA, 19 nt, Artificial Sequence
  Description of Artificial Sequence: Synthetic oligonucleotide
  Sense strand starting at position 2198 of SEQ ID NO: 586319
gcucaucacuuggcauuua

SEQ ID NO: 709003 - RNA, 19 nt, Artificial Sequence
  Description of Artificial Sequence: Synthetic oligonucleotide
  Antisense strand to SEQ ID NO: 709002
uaaaugccaagugaugagc

SEQ ID NO: 709004 - RNA, 19 nt, Artificial Sequence
  Description of Artificial Sequence: Synthetic oligonucleotide
  Sense strand starting at position 2241 of SEQ ID NO: 586319
cuaauuccacaguguugga

SEQ ID NO: 709005 - RNA, 19 nt, Artificial Sequence
  Description of Artificial Sequence: Synthetic oligonucleotide
  Antisense strand to SEQ ID NO: 709004
uccaacacuguggaauuag

SEQ ID NO: 709006 - RNA, 19 nt, Artificial Sequence
  Description of Artificial Sequence: Synthetic oligonucleotide
  Sense strand starting at position 2248 of SEQ ID NO: 586319
cacaguguuggauggaauu

SEQ ID NO: 709007 - RNA, 19 nt, Artificial Sequence
  Description of Artificial Sequence: Synthetic oligonucleotide
  Antisense strand to SEQ ID NO: 709006
aauuccauccaacacugug

SEQ ID NO: 709008 - RNA, 19 nt, Artificial Sequence
  Description of Artificial Sequence: Synthetic oligonucleotide
  Sense strand starting at position 2260 of SEQ ID NO: 586319
uggaauuuauccugauagg

SEQ ID NO: 709009 - RNA, 19 nt, Artificial Sequence
  Description of Artificial Sequence: Synthetic oligonucleotide
  Antisense strand to SEQ ID NO: 709008
ccuaucaggauaaauucca

SEQ ID NO: 709010 - RNA, 19 nt, Artificial Sequence
  Description of Artificial Sequence: Synthetic oligonucleotide
  Sense strand starting at position 2450 of SEQ ID NO: 586319
guaucugaagccuaauucu

SEQ ID NO: 709011 - RNA, 19 nt, Artificial Sequence
  Description of Artificial Sequence: Synthetic oligonucleotide
  Antisense strand to SEQ ID NO: 709010
agaauuaggcuucagauac

SEQ ID NO: 709012 - RNA, 19 nt, Artificial Sequence
  Description of Artificial Sequence: Synthetic oligonucleotide
  Sense strand starting at position 2530 of SEQ ID NO: 586319
cugaauaaauuaucagugu

SEQ ID NO: 709013 - RNA, 19 nt, Artificial Sequence
  Description of Artificial Sequence: Synthetic oligonucleotide
  Antisense strand to SEQ ID NO: 709012
acacugauaauuuauucag

SEQ ID NO: 709014 - RNA, 19 nt, Artificial Sequence
  Description of Artificial Sequence: Synthetic oligonucleotide
  Sense strand starting at position 2534 of SEQ ID NO: 586319
auaaauuaucaguguuccu

SEQ ID NO: 709015 - RNA, 19 nt, Artificial Sequence
  Description of Artificial Sequence: Synthetic oligonucleotide
  Antisense strand to SEQ ID NO: 709014
aggaacacugauaauuuau

SEQ ID NO: 709016 - RNA, 19 nt, Artificial Sequence
  Description of Artificial Sequence: Synthetic oligonucleotide
  Sense strand starting at position 3112 of SEQ ID NO: 586319
aagggucauaguugagaga

SEQ ID NO: 709017 - RNA, 19 nt, Artificial Sequence
  Description of Artificial Sequence: Synthetic oligonucleotide
  Antisense strand to SEQ ID NO: 709016
ucucucaacuaugacccuu

SEQ ID NO: 709018 - RNA, 19 nt, Artificial Sequence
  Description of Artificial Sequence: Synthetic oligonucleotide
  Sense strand starting at position 3189 of SEQ ID NO: 586319
ugauuaggaccauggcuau

SEQ ID NO: 709019 - RNA, 19 nt, Artificial Sequence
  Description of Artificial Sequence: Synthetic oligonucleotide
  Antisense strand to SEQ ID NO: 709018
auagccaugguccuaauca

SEQ ID NO: 709020 - RNA, 19 nt, Artificial Sequence
  Description of Artificial Sequence: Synthetic oligonucleotide
  Sense strand starting at position 3270 of SEQ ID NO: 586319
ugggauuacuaagagaaga

SEQ ID NO: 709021 - RNA, 19 nt, Artificial Sequence
  Description of Artificial Sequence: Synthetic oligonucleotide
  Antisense strand to SEQ ID NO: 709020
ucuucucuuaguaauccca

SEQ ID NO: 709022 - RNA, 19 nt, Artificial Sequence
  Description of Artificial Sequence: Synthetic oligonucleotide
  Sense strand starting at position 3390 of SEQ ID NO: 586319
gagggaugacuucgcagga

SEQ ID NO: 709023 - RNA, 19 nt, Artificial Sequence
  Description of Artificial Sequence: Synthetic oligonucleotide
  Antisense strand to SEQ ID NO: 709022
uccugcgaagucaucccuc

SEQ ID NO: 709024 - RNA, 19 nt, Artificial Sequence
  Description of Artificial Sequence: Synthetic oligonucleotide
  Sense strand starting at position 3391 of SEQ ID NO: 586319
agggaugacuucgcaggau

SEQ ID NO: 709025 - RNA, 19 nt, Artificial Sequence
  Description of Artificial Sequence: Synthetic oligonucleotide
  Antisense strand to SEQ ID NO: 709024
auccugcgaagucaucccu

SEQ ID NO: 709026 - RNA, 19 nt, Artificial Sequence
  Description of Artificial Sequence: Synthetic oligonucleotide
  Sense strand starting at position 3395 of SEQ ID NO: 586319
augacuucgcaggaucuuu

SEQ ID NO: 709027 - RNA, 19 nt, Artificial Sequence
  Description of Artificial Sequence: Synthetic oligonucleotide
  Antisense strand to SEQ ID NO: 709026
aaagauccugcgaagucau

SEQ ID NO: 709028 - RNA, 19 nt, Artificial Sequence
  Description of Artificial Sequence: Synthetic oligonucleotide
  Sense strand starting at position 3489 of SEQ ID NO: 586319
gagagagccuuuguuagga

SEQ ID NO: 709029 - RNA, 19 nt, Artificial Sequence
  Description of Artificial Sequence: Synthetic oligonucleotide
  Antisense strand to SEQ ID NO: 709028
uccuaacaaaggcucucuc

SEQ ID NO: 709030 - RNA, 19 nt, Artificial Sequence
  Description of Artificial Sequence: Synthetic oligonucleotide
  Sense strand starting at position 3622 of SEQ ID NO: 586319
gucacugagaucgauguca

SEQ ID NO: 709031 - RNA, 19 nt, Artificial Sequence
  Description of Artificial Sequence: Synthetic oligonucleotide
  Antisense strand to SEQ ID NO: 709030
ugacaucgaucucagugac

SEQ ID NO: 709032 - RNA, 19 nt, Artificial Sequence
  Description of Artificial Sequence: Synthetic oligonucleotide
  Sense strand starting at position 3677 of SEQ ID NO: 586319
aucuguaagagaugugaag

SEQ ID NO: 709033 - RNA, 19 nt, Artificial Sequence
  Description of Artificial Sequence: Synthetic oligonucleotide
  Antisense strand to SEQ ID NO: 709032
cuucacaucucuuacagau

SEQ ID NO: 709034 - RNA, 19 nt, Artificial Sequence
  Description of Artificial Sequence: Synthetic oligonucleotide
  Sense strand starting at position 3863 of SEQ ID NO: 586319
aaaggaaugucauuggcuu

SEQ ID NO: 709035 - RNA, 19 nt, Artificial Sequence
  Description of Artificial Sequence: Synthetic oligonucleotide
  Antisense strand to SEQ ID NO: 709034
aagccaaugacauuccuuu

SEQ ID NO: 709036 - RNA, 19 nt, Artificial Sequence
  Description of Artificial Sequence: Synthetic oligonucleotide
  Sense strand starting at position 3864 of SEQ ID NO: 586319
aaggaaugucauuggcuug

SEQ ID NO: 709037 - RNA, 19 nt, Artificial Sequence
  Description of Artificial Sequence: Synthetic oligonucleotide
  Antisense strand to SEQ ID NO: 709036
caagccaaugacauuccuu

SEQ ID NO: 709038 - RNA, 19 nt, Artificial Sequence
  Description of Artificial Sequence: Synthetic oligonucleotide
  Sense strand starting at position 180 of SEQ ID NO: 586320
agccacucacccugugaaa

SEQ ID NO: 709039 - RNA, 19 nt, Artificial Sequence
  Description of Artificial Sequence: Synthetic oligonucleotide
  Antisense strand to SEQ ID NO: 709038
uuucacagggugaguggcu

SEQ ID NO: 709040 - RNA, 19 nt, Artificial Sequence
  Description of Artificial Sequence: Synthetic oligonucleotide
  Sense strand starting at position 599 of SEQ ID NO: 586320
agcuuccaucucuggagaa

SEQ ID NO: 709041 - RNA, 19 nt, Artificial Sequence
  Description of Artificial Sequence: Synthetic oligonucleotide
  Antisense strand to SEQ ID NO: 709040
uucuccagagauggaagcu

SEQ ID NO: 709042 - RNA, 19 nt, Artificial Sequence
  Description of Artificial Sequence: Synthetic oligonucleotide
  Sense strand starting at position 749 of SEQ ID NO: 586320
uguggaugccauugaaaca

SEQ ID NO: 709043 - RNA, 19 nt, Artificial Sequence
  Description of Artificial Sequence: Synthetic oligonucleotide
  Antisense strand to SEQ ID NO: 709042
uguuucaauggcauccaca

SEQ ID NO: 709044 - RNA, 19 nt, Artificial Sequence
  Description of Artificial Sequence: Synthetic oligonucleotide
  Sense strand starting at position 1011 of SEQ ID NO: 586320
ugagaucaguccuccagug

SEQ ID NO: 709045 - RNA, 19 nt, Artificial Sequence
  Description of Artificial Sequence: Synthetic oligonucleotide
  Antisense strand to SEQ ID NO: 709044
cacuggaggacugaucuca

SEQ ID NO: 709046 - RNA, 19 nt, Artificial Sequence
  Description of Artificial Sequence: Synthetic oligonucleotide
  Sense strand starting at position 1083 of SEQ ID NO: 586320
cuauauauuguaugagaag

SEQ ID NO: 709047 - RNA, 19 nt, Artificial Sequence
  Description of Artificial Sequence: Synthetic oligonucleotide
  Antisense strand to SEQ ID NO: 709046
cuucucauacaauauauag

SEQ ID NO: 709048 - RNA, 19 nt, Artificial Sequence
  Description of Artificial Sequence: Synthetic oligonucleotide
  Sense strand starting at position 1086 of SEQ ID NO: 586320
uauauuguaugagaaggaa

SEQ ID NO: 709049 - RNA, 19 nt, Artificial Sequence
  Description of Artificial Sequence: Synthetic oligonucleotide
  Antisense strand to SEQ ID NO: 709048
uuccuucucauacaauaua

SEQ ID NO: 709050 - RNA, 19 nt, Artificial Sequence
  Description of Artificial Sequence: Synthetic oligonucleotide
  Sense strand starting at position 1187 of SEQ ID NO: 586320
ggucaccgcagucauuauu

SEQ ID NO: 709051 - RNA, 19 nt, Artificial Sequence
  Description of Artificial Sequence: Synthetic oligonucleotide
  Antisense strand to SEQ ID NO: 709050
aauaaugacugcggugacc

SEQ ID NO: 709052 - RNA, 19 nt, Artificial Sequence
  Description of Artificial Sequence: Synthetic oligonucleotide
  Sense strand starting at position 1190 of SEQ ID NO: 586320
caccgcagucauuauuaga

SEQ ID NO: 709053 - RNA, 19 nt, Artificial Sequence
  Description of Artificial Sequence: Synthetic oligonucleotide
  Antisense strand to SEQ ID NO: 709052
ucuaauaaugacugcggug

SEQ ID NO: 709054 - RNA, 19 nt, Artificial Sequence
  Description of Artificial Sequence: Synthetic oligonucleotide
  Sense strand starting at position 1201 of SEQ ID NO: 586320
uuauuagaguucucaacag

SEQ ID NO: 709055 - RNA, 19 nt, Artificial Sequence
  Description of Artificial Sequence: Synthetic oligonucleotide
  Antisense strand to SEQ ID NO: 709054
cuguugagaacucuaauaa

SEQ ID NO: 709056 - RNA, 19 nt, Artificial Sequence
  Description of Artificial Sequence: Synthetic oligonucleotide
  Sense strand starting at position 1264 of SEQ ID NO: 586320
cccuuuauaguuugggaau

SEQ ID NO: 709057 - RNA, 19 nt, Artificial Sequence
  Description of Artificial Sequence: Synthetic oligonucleotide
  Antisense strand to SEQ ID NO: 709056
auucccaaacuauaaaggg

SEQ ID NO: 709058 - RNA, 19 nt, Artificial Sequence
  Description of Artificial Sequence: Synthetic oligonucleotide
  Sense strand starting at position 1275 of SEQ ID NO: 586320
uugggaauagcaggaguaa

SEQ ID NO: 709059 - RNA, 19 nt, Artificial Sequence
  Description of Artificial Sequence: Synthetic oligonucleotide
  Antisense strand to SEQ ID NO: 709058
uuacuccugcuauucccaa

SEQ ID NO: 709060 - RNA, 19 nt, Artificial Sequence
  Description of Artificial Sequence: Synthetic oligonucleotide
  Sense strand starting at position 1430 of SEQ ID NO: 586320
agcagaggacgucaacaau

SEQ ID NO: 709061 - RNA, 19 nt, Artificial Sequence
  Description of Artificial Sequence: Synthetic oligonucleotide
  Antisense strand to SEQ ID NO: 709060
auuguugacguccucugcu

SEQ ID NO: 709062 - RNA, 19 nt, Artificial Sequence
  Description of Artificial Sequence: Synthetic oligonucleotide
  Sense strand starting at position 1506 of SEQ ID NO: 586320
cucagaauggccgauuaac

SEQ ID NO: 709063 - RNA, 19 nt, Artificial Sequence
  Description of Artificial Sequence: Synthetic oligonucleotide
  Antisense strand to SEQ ID NO: 709062
guuaaucggccauucugag

SEQ ID NO: 709064 - RNA, 19 nt, Artificial Sequence
  Description of Artificial Sequence: Synthetic oligonucleotide
  Sense strand starting at position 1517 of SEQ ID NO: 586320
cgauuaacuggcuaugugu

SEQ ID NO: 709065 - RNA, 19 nt, Artificial Sequence
  Description of Artificial Sequence: Synthetic oligonucleotide
  Antisense strand to SEQ ID NO: 709064
acacauagccaguuaaucg

SEQ ID NO: 709066 - RNA, 19 nt, Artificial Sequence
  Description of Artificial Sequence: Synthetic oligonucleotide
  Sense strand starting at position 1525 of SEQ ID NO: 586320
uggcuaugugugcaaagaa

SEQ ID NO: 709067 - RNA, 19 nt, Artificial Sequence
  Description of Artificial Sequence: Synthetic oligonucleotide
  Antisense strand to SEQ ID NO: 709066
uucuuugcacacauagcca

SEQ ID NO: 709068 - RNA, 19 nt, Artificial Sequence
  Description of Artificial Sequence: Synthetic oligonucleotide
  Sense strand starting at position 1544 of SEQ ID NO: 586320
gggagcucguuuaucgaca

SEQ ID NO: 709069 - RNA, 19 nt, Artificial Sequence
  Description of Artificial Sequence: Synthetic oligonucleotide
  Antisense strand to SEQ ID NO: 709068
ugucgauaaacgagcuccc

SEQ ID NO: 709070 - RNA, 19 nt, Artificial Sequence
  Description of Artificial Sequence: Synthetic oligonucleotide
  Sense strand starting at position 2030 of SEQ ID NO: 586320
ggaaauauucuauguccac

SEQ ID NO: 709071 - RNA, 19 nt, Artificial Sequence
  Description of Artificial Sequence: Synthetic oligonucleotide
  Antisense strand to SEQ ID NO: 709070
guggacauagaauauuucc

SEQ ID NO: 709072 - RNA, 19 nt, Artificial Sequence
  Description of Artificial Sequence: Synthetic oligonucleotide
  Sense strand starting at position 2085 of SEQ ID NO: 586320
uggcuauugugguugaaua

SEQ ID NO: 709073 - RNA, 19 nt, Artificial Sequence
  Description of Artificial Sequence: Synthetic oligonucleotide
  Antisense strand to SEQ ID NO: 709072
uauucaaccacaauagcca

SEQ ID NO: 709074 - RNA, 19 nt, Artificial Sequence
  Description of Artificial Sequence: Synthetic oligonucleotide
  Sense strand starting at position 2086 of SEQ ID NO: 586320
ggcuauugugguugaauau

SEQ ID NO: 709075 - RNA, 19 nt, Artificial Sequence
  Description of Artificial Sequence: Synthetic oligonucleotide
  Antisense strand to SEQ ID NO: 709074
auauucaaccacaauagcc

SEQ ID NO: 709076 - RNA, 19 nt, Artificial Sequence
  Description of Artificial Sequence: Synthetic oligonucleotide
  Sense strand starting at position 2087 of SEQ ID NO: 586320
gcuauugugguugaauauu

SEQ ID NO: 709077 - RNA, 19 nt, Artificial Sequence
  Description of Artificial Sequence: Synthetic oligonucleotide
  Antisense strand to SEQ ID NO: 709076
aauauucaaccacaauagc

SEQ ID NO: 709078 - RNA, 19 nt, Artificial Sequence
  Description of Artificial Sequence: Synthetic oligonucleotide
  Sense strand starting at position 2187 of SEQ ID NO: 586320
agcagaguucucugggaau

SEQ ID NO: 709079 - RNA, 19 nt, Artificial Sequence
  Description of Artificial Sequence: Synthetic oligonucleotide
  Antisense strand to SEQ ID NO: 709078
auucccagagaacucugcu

SEQ ID NO: 709080 - RNA, 19 nt, Artificial Sequence
  Description of Artificial Sequence: Synthetic oligonucleotide
  Sense strand starting at position 2189 of SEQ ID NO: 586320
cagaguucucugggaauuc

SEQ ID NO: 709081 - RNA, 19 nt, Artificial Sequence
  Description of Artificial Sequence: Synthetic oligonucleotide
  Antisense strand to SEQ ID NO: 709080
gaauucccagagaacucug

SEQ ID NO: 709082 - RNA, 19 nt, Artificial Sequence
  Description of Artificial Sequence: Synthetic oligonucleotide
  Sense strand starting at position 2270 of SEQ ID NO: 586320
ucauguuagacggguaaug

SEQ ID NO: 709083 - RNA, 19 nt, Artificial Sequence
  Description of Artificial Sequence: Synthetic oligonucleotide
  Antisense strand to SEQ ID NO: 709082
cauuacccgucuaacauga

SEQ ID NO: 709084 - RNA, 19 nt, Artificial Sequence
  Description of Artificial Sequence: Synthetic oligonucleotide
  Sense strand starting at position 2272 of SEQ ID NO: 586320
auguuagacggguaaugug

SEQ ID NO: 709085 - RNA, 19 nt, Artificial Sequence
  Description of Artificial Sequence: Synthetic oligonucleotide
  Antisense strand to SEQ ID NO: 709084
cacauuacccgucuaacau

SEQ ID NO: 709086 - RNA, 19 nt, Artificial Sequence
  Description of Artificial Sequence: Synthetic oligonucleotide
  Sense strand starting at position 2367 of SEQ ID NO: 586320
cugcaauuaucagcuuaug

SEQ ID NO: 709087 - RNA, 19 nt, Artificial Sequence
  Description of Artificial Sequence: Synthetic oligonucleotide
  Antisense strand to SEQ ID NO: 709086
cauaagcugauaauugcag

SEQ ID NO: 709088 - RNA, 19 nt, Artificial Sequence
  Description of Artificial Sequence: Synthetic oligonucleotide
  Sense strand starting at position 2376 of SEQ ID NO: 586320
ucagcuuauggcuggauuu

SEQ ID NO: 709089 - RNA, 19 nt, Artificial Sequence
  Description of Artificial Sequence: Synthetic oligonucleotide
  Antisense strand to SEQ ID NO: 709088
aaauccagccauaagcuga

SEQ ID NO: 709090 - RNA, 19 nt, Artificial Sequence
  Description of Artificial Sequence: Synthetic oligonucleotide
  Sense strand starting at position 2403 of SEQ ID NO: 586320
gacacauagcuaugcuuga

SEQ ID NO: 709091 - RNA, 19 nt, Artificial Sequence
  Description of Artificial Sequence: Synthetic oligonucleotide
  Antisense strand to SEQ ID NO: 709090
ucaagcauagcuauguguc

SEQ ID NO: 709092 - RNA, 19 nt, Artificial Sequence
  Description of Artificial Sequence: Synthetic oligonucleotide
  Sense strand starting at position 2408 of SEQ ID NO: 586320
auagcuaugcuugaccuaa

SEQ ID NO: 709093 - RNA, 19 nt, Artificial Sequence
  Description of Artificial Sequence: Synthetic oligonucleotide
  Antisense strand to SEQ ID NO: 709092
uuaggucaagcauagcuau

SEQ ID NO: 709094 - RNA, 19 nt, Artificial Sequence
  Description of Artificial Sequence: Synthetic oligonucleotide
  Sense strand starting at position 2410 of SEQ ID NO: 586320
agcuaugcuugaccuaaua

SEQ ID NO: 709095 - RNA, 19 nt, Artificial Sequence
  Description of Artificial Sequence: Synthetic oligonucleotide
  Antisense strand to SEQ ID NO: 709094
uauuaggucaagcauagcu

SEQ ID NO: 709096 - RNA, 19 nt, Artificial Sequence
  Description of Artificial Sequence: Synthetic oligonucleotide
  Sense strand starting at position 2481 of SEQ ID NO: 586320
guaaauguccucugaauac

SEQ ID NO: 709097 - RNA, 19 nt, Artificial Sequence
  Description of Artificial Sequence: Synthetic oligonucleotide
  Antisense strand to SEQ ID NO: 709096
guauucagaggacauuuac

SEQ ID NO: 709098 - RNA, 19 nt, Artificial Sequence
  Description of Artificial Sequence: Synthetic oligonucleotide
  Sense strand starting at position 2604 of SEQ ID NO: 586320
gcaugaagauaauugguaa

SEQ ID NO: 709099 - RNA, 19 nt, Artificial Sequence
  Description of Artificial Sequence: Synthetic oligonucleotide
  Antisense strand to SEQ ID NO: 709098
uuaccaauuaucuucaugc

SEQ ID NO: 709100 - RNA, 19 nt, Artificial Sequence
  Description of Artificial Sequence: Synthetic oligonucleotide
  Sense strand starting at position 2671 of SEQ ID NO: 586320
auagaugguguuuguguua

SEQ ID NO: 709101 - RNA, 19 nt, Artificial Sequence
  Description of Artificial Sequence: Synthetic oligonucleotide
  Antisense strand to SEQ ID NO: 709100
uaacacaaacaccaucuau

SEQ ID NO: 709102 - RNA, 19 nt, Artificial Sequence
  Description of Artificial Sequence: Synthetic oligonucleotide
  Sense strand starting at position 2674 of SEQ ID NO: 586320
gaugguguuuguguuacaa

SEQ ID NO: 709103 - RNA, 19 nt, Artificial Sequence
  Description of Artificial Sequence: Synthetic oligonucleotide
  Antisense strand to SEQ ID NO: 709102
uuguaacacaaacaccauc

SEQ ID NO: 709104 - RNA, 19 nt, Artificial Sequence
  Description of Artificial Sequence: Synthetic oligonucleotide
  Sense strand starting at position 2747 of SEQ ID NO: 586320
aggagaguuucccuaaauu

SEQ ID NO: 709105 - RNA, 19 nt, Artificial Sequence
  Description of Artificial Sequence: Synthetic oligonucleotide
  Antisense strand to SEQ ID NO: 709104
aauuuagggaaacucuccu

SEQ ID NO: 709106 - RNA, 19 nt, Artificial Sequence
  Description of Artificial Sequence: Synthetic oligonucleotide
  Sense strand starting at position 2806 of SEQ ID NO: 586320
uggguuagauaccuaagca

SEQ ID NO: 709107 - RNA, 19 nt, Artificial Sequence
  Description of Artificial Sequence: Synthetic oligonucleotide
  Antisense strand to SEQ ID NO: 709106
ugcuuagguaucuaaccca

SEQ ID NO: 709108 - RNA, 19 nt, Artificial Sequence
  Description of Artificial Sequence: Synthetic oligonucleotide
  Sense strand starting at position 2821 of SEQ ID NO: 586320
agcaaucuugcccaaauga

SEQ ID NO: 709109 - RNA, 19 nt, Artificial Sequence
  Description of Artificial Sequence: Synthetic oligonucleotide
  Antisense strand to SEQ ID NO: 709108
ucauuugggcaagauugcu

SEQ ID NO: 709110 - RNA, 19 nt, Artificial Sequence
  Description of Artificial Sequence: Synthetic oligonucleotide
  Sense strand starting at position 2994 of SEQ ID NO: 586320
gaaugcugguguucuugau

SEQ ID NO: 709111 - RNA, 19 nt, Artificial Sequence
  Description of Artificial Sequence: Synthetic oligonucleotide
  Antisense strand to SEQ ID NO: 709110
aucaagaacaccagcauuc

SEQ ID NO: 709112 - RNA, 19 nt, Artificial Sequence
  Description of Artificial Sequence: Synthetic oligonucleotide
  Sense strand starting at position 3745 of SEQ ID NO: 586320
uugcucucauucuugaaag

SEQ ID NO: 709113 - RNA, 19 nt, Artificial Sequence
  Description of Artificial Sequence: Synthetic oligonucleotide
  Antisense strand to SEQ ID NO: 709112
cuuucaagaaugagagcaa

SEQ ID NO: 709114 - RNA, 19 nt, Artificial Sequence
  Description of Artificial Sequence: Synthetic oligonucleotide
  Sense strand starting at position 3831 of SEQ ID NO: 586320
acagucuucuggcuuccau

SEQ ID NO: 709115 - RNA, 19 nt, Artificial Sequence
  Description of Artificial Sequence: Synthetic oligonucleotide
  Antisense strand to SEQ ID NO: 709114
auggaagccagaagacugu

SEQ ID NO: 709116 - RNA, 19 nt, Artificial Sequence
  Description of Artificial Sequence: Synthetic oligonucleotide
  Sense strand starting at position 3924 of SEQ ID NO: 586320
ugaagagcuucucuuugcu

SEQ ID NO: 709117 - RNA, 19 nt, Artificial Sequence
  Description of Artificial Sequence: Synthetic oligonucleotide
  Antisense strand to SEQ ID NO: 709116
agcaaagagaagcucuuca

SEQ ID NO: 709118 - RNA, 19 nt, Artificial Sequence
  Description of Artificial Sequence: Synthetic oligonucleotide
  Sense strand starting at position 148 of SEQ ID NO: 586321
auaagauaguucuugguca

SEQ ID NO: 709119 - RNA, 19 nt, Artificial Sequence
  Description of Artificial Sequence: Synthetic oligonucleotide
  Antisense strand to SEQ ID NO: 709118
ugaccaagaacuaucuuau

SEQ ID NO: 709120 - RNA, 19 nt, Artificial Sequence
  Description of Artificial Sequence: Synthetic oligonucleotide
  Sense strand starting at position 175 of SEQ ID NO: 586321
ccuggcauuacggauaaca

SEQ ID NO: 709121 - RNA, 19 nt, Artificial Sequence
  Description of Artificial Sequence: Synthetic oligonucleotide
  Antisense strand to SEQ ID NO: 709120
uguuauccguaaugccagg

SEQ ID NO: 709122 - RNA, 19 nt, Artificial Sequence
  Description of Artificial Sequence: Synthetic oligonucleotide
  Sense strand starting at position 293 of SEQ ID NO: 586321
agggcuuugaauugacuuu

SEQ ID NO: 709123 - RNA, 19 nt, Artificial Sequence
  Description of Artificial Sequence: Synthetic oligonucleotide
  Antisense strand to SEQ ID NO: 709122
aaagucaauucaaagcccu

SEQ ID NO: 709124 - RNA, 19 nt, Artificial Sequence
  Description of Artificial Sequence: Synthetic oligonucleotide
  Sense strand starting at position 478 of SEQ ID NO: 586321
aguagucugaaacgaaaua

SEQ ID NO: 709125 - RNA, 19 nt, Artificial Sequence
  Description of Artificial Sequence: Synthetic oligonucleotide
  Antisense strand to SEQ ID NO: 709124
uauuucguuucagacuacu

SEQ ID NO: 709126 - RNA, 19 nt, Artificial Sequence
  Description of Artificial Sequence: Synthetic oligonucleotide
  Sense strand starting at position 596 of SEQ ID NO: 586321
aacgguaaccggcaucaua

SEQ ID NO: 709127 - RNA, 19 nt, Artificial Sequence
  Description of Artificial Sequence: Synthetic oligonucleotide
  Antisense strand to SEQ ID NO: 709126
uaugaugccgguuaccguu

SEQ ID NO: 709128 - RNA, 19 nt, Artificial Sequence
  Description of Artificial Sequence: Synthetic oligonucleotide
  Sense strand starting at position 640 of SEQ ID NO: 586321
auaagaugcuacuuacaga

SEQ ID NO: 709129 - RNA, 19 nt, Artificial Sequence
  Description of Artificial Sequence: Synthetic oligonucleotide
  Antisense strand to SEQ ID NO: 709128
ucuguaaguagcaucuuau

SEQ ID NO: 709130 - RNA, 19 nt, Artificial Sequence
  Description of Artificial Sequence: Synthetic oligonucleotide
  Sense strand starting at position 766 of SEQ ID NO: 586321
uuuacacuugacuauguua

SEQ ID NO: 709131 - RNA, 19 nt, Artificial Sequence
  Description of Artificial Sequence: Synthetic oligonucleotide
  Antisense strand to SEQ ID NO: 709130
uaacauagucaaguguaaa

SEQ ID NO: 709132 - RNA, 19 nt, Artificial Sequence
  Description of Artificial Sequence: Synthetic oligonucleotide
  Sense strand starting at position 780 of SEQ ID NO: 586321
uguuacaggucauuauauu

SEQ ID NO: 709133 - RNA, 19 nt, Artificial Sequence
  Description of Artificial Sequence: Synthetic oligonucleotide
  Antisense strand to SEQ ID NO: 709132
aauauaaugaccuguaaca

SEQ ID NO: 709134 - RNA, 19 nt, Artificial Sequence
  Description of Artificial Sequence: Synthetic oligonucleotide
  Sense strand starting at position 781 of SEQ ID NO: 586321
guuacaggucauuauauua

SEQ ID NO: 709135 - RNA, 19 nt, Artificial Sequence
  Description of Artificial Sequence: Synthetic oligonucleotide
  Antisense strand to SEQ ID NO: 709134
uaauauaaugaccuguaac

SEQ ID NO: 709136 - RNA, 19 nt, Artificial Sequence
  Description of Artificial Sequence: Synthetic oligonucleotide
  Sense strand starting at position 788 of SEQ ID NO: 586321
gucauuauauuacugauag

SEQ ID NO: 709137 - RNA, 19 nt, Artificial Sequence
  Description of Artificial Sequence: Synthetic oligonucleotide
  Antisense strand to SEQ ID NO: 709136
cuaucaguaauauaaugac

SEQ ID NO: 709138 - RNA, 19 nt, Artificial Sequence
  Description of Artificial Sequence: Synthetic oligonucleotide
  Sense strand starting at position 807 of SEQ ID NO: 586321
gcaugaggagagugguaua

SEQ ID NO: 709139 - RNA, 19 nt, Artificial Sequence
  Description of Artificial Sequence: Synthetic oligonucleotide
  Antisense strand to SEQ ID NO: 709138
uauaccacucuccucaugc

SEQ ID NO: 709140 - RNA, 19 nt, Artificial Sequence
  Description of Artificial Sequence: Synthetic oligonucleotide
  Sense strand starting at position 831 of SEQ ID NO: 586321
auagaaauccuguguuacu

SEQ ID NO: 709141 - RNA, 19 nt, Artificial Sequence
  Description of Artificial Sequence: Synthetic oligonucleotide
  Antisense strand to SEQ ID NO: 709140
aguaacacaggauuucuau

SEQ ID NO: 709142 - RNA, 19 nt, Artificial Sequence
  Description of Artificial Sequence: Synthetic oligonucleotide
  Sense strand starting at position 884 of SEQ ID NO: 586321
caaguaagauuaguaaguu

SEQ ID NO: 709143 - RNA, 19 nt, Artificial Sequence
  Description of Artificial Sequence: Synthetic oligonucleotide
  Antisense strand to SEQ ID NO: 709142
aacuuacuaaucuuacuug

SEQ ID NO: 709144 - RNA, 19 nt, Artificial Sequence
  Description of Artificial Sequence: Synthetic oligonucleotide
  Sense strand starting at position 930 of SEQ ID NO: 586321
ucuguauuucccugauccu

SEQ ID NO: 709145 - RNA, 19 nt, Artificial Sequence
  Description of Artificial Sequence: Synthetic oligonucleotide
  Antisense strand to SEQ ID NO: 709144
aggaucagggaaauacaga

SEQ ID NO: 709146 - RNA, 19 nt, Artificial Sequence
  Description of Artificial Sequence: Synthetic oligonucleotide
  Sense strand starting at position 1034 of SEQ ID NO: 586321
uuagaaauguggucaccaa

SEQ ID NO: 709147 - RNA, 19 nt, Artificial Sequence
  Description of Artificial Sequence: Synthetic oligonucleotide
  Antisense strand to SEQ ID NO: 709146
uuggugaccacauuucuaa

SEQ ID NO: 709148 - RNA, 19 nt, Artificial Sequence
  Description of Artificial Sequence: Synthetic oligonucleotide
  Sense strand starting at position 1087 of SEQ ID NO: 586321
uuuggagaaucuuugaguc

SEQ ID NO: 709149 - RNA, 19 nt, Artificial Sequence
  Description of Artificial Sequence: Synthetic oligonucleotide
  Antisense strand to SEQ ID NO: 709148
gacucaaagauucuccaaa

SEQ ID NO: 709150 - RNA, 19 nt, Artificial Sequence
  Description of Artificial Sequence: Synthetic oligonucleotide
  Sense strand starting at position 1091 of SEQ ID NO: 586321
gagaaucuuugagucugga

SEQ ID NO: 709151 - RNA, 19 nt, Artificial Sequence
  Description of Artificial Sequence: Synthetic oligonucleotide
  Antisense strand to SEQ ID NO: 709150
uccagacucaaagauucuc

SEQ ID NO: 709152 - RNA, 19 nt, Artificial Sequence
  Description of Artificial Sequence: Synthetic oligonucleotide
  Sense strand starting at position 1094 of SEQ ID NO: 586321
aaucuuugagucuggaaug

SEQ ID NO: 709153 - RNA, 19 nt, Artificial Sequence
  Description of Artificial Sequence: Synthetic oligonucleotide
  Antisense strand to SEQ ID NO: 709152
cauuccagacucaaagauu

SEQ ID NO: 709154 - RNA, 19 nt, Artificial Sequence
  Description of Artificial Sequence: Synthetic oligonucleotide
  Sense strand starting at position 1124 of SEQ ID NO: 586321
cauacugacugccuugaga

SEQ ID NO: 709155 - RNA, 19 nt, Artificial Sequence
  Description of Artificial Sequence: Synthetic oligonucleotide
  Antisense strand to SEQ ID NO: 709154
ucucaaggcagucaguaug

SEQ ID NO: 709156 - RNA, 19 nt, Artificial Sequence
  Description of Artificial Sequence: Synthetic oligonucleotide
  Sense strand starting at position 1145 of SEQ ID NO: 586321
agagacacucaagguuuau

SEQ ID NO: 709157 - RNA, 19 nt, Artificial Sequence
  Description of Artificial Sequence: Synthetic oligonucleotide
  Antisense strand to SEQ ID NO: 709156
auaaaccuugagugucucu

SEQ ID NO: 709158 - RNA, 19 nt, Artificial Sequence
  Description of Artificial Sequence: Synthetic oligonucleotide
  Sense strand starting at position 1151 of SEQ ID NO: 586321
acucaagguuuaucaaagu

SEQ ID NO: 709159 - RNA, 19 nt, Artificial Sequence
  Description of Artificial Sequence: Synthetic oligonucleotide
  Antisense strand to SEQ ID NO: 709158
acuuugauaaaccuugagu

SEQ ID NO: 709160 - RNA, 19 nt, Artificial Sequence
  Description of Artificial Sequence: Synthetic oligonucleotide
  Sense strand starting at position 1349 of SEQ ID NO: 586321
gaaguugaagcuuauguaa

SEQ ID NO: 709161 - RNA, 19 nt, Artificial Sequence
  Description of Artificial Sequence: Synthetic oligonucleotide
  Antisense strand to SEQ ID NO: 709160
uuacauaagcuucaacuuc

SEQ ID NO: 709162 - RNA, 19 nt, Artificial Sequence
  Description of Artificial Sequence: Synthetic oligonucleotide
  Sense strand starting at position 1496 of SEQ ID NO: 586321
cuccguuaagcuuaugaga

SEQ ID NO: 709163 - RNA, 19 nt, Artificial Sequence
  Description of Artificial Sequence: Synthetic oligonucleotide
  Antisense strand to SEQ ID NO: 709162
ucucauaagcuuaacggag

SEQ ID NO: 709164 - RNA, 19 nt, Artificial Sequence
  Description of Artificial Sequence: Synthetic oligonucleotide
  Sense strand starting at position 1509 of SEQ ID NO: 586321
augagagucuuaccuuucu

SEQ ID NO: 709165 - RNA, 19 nt, Artificial Sequence
  Description of Artificial Sequence: Synthetic oligonucleotide
  Antisense strand to SEQ ID NO: 709164
agaaagguaagacucucau

SEQ ID NO: 709166 - RNA, 19 nt, Artificial Sequence
  Description of Artificial Sequence: Synthetic oligonucleotide
  Sense strand starting at position 1992 of SEQ ID NO: 586321
aguggaugaccugaguuua

SEQ ID NO: 709167 - RNA, 19 nt, Artificial Sequence
  Description of Artificial Sequence: Synthetic oligonucleotide
  Antisense strand to SEQ ID NO: 709166
uaaacucaggucauccacu

SEQ ID NO: 709168 - RNA, 19 nt, Artificial Sequence
  Description of Artificial Sequence: Synthetic oligonucleotide
  Sense strand starting at position 2039 of SEQ ID NO: 586321
aacgaauaaccugagugua

SEQ ID NO: 709169 - RNA, 19 nt, Artificial Sequence
  Description of Artificial Sequence: Synthetic oligonucleotide
  Antisense strand to SEQ ID NO: 709168
uacacucagguuauucguu

SEQ ID NO: 709170 - RNA, 19 nt, Artificial Sequence
  Description of Artificial Sequence: Synthetic oligonucleotide
  Sense strand starting at position 2139 of SEQ ID NO: 586321
ucagcuuugcaggaagaga

SEQ ID NO: 709171 - RNA, 19 nt, Artificial Sequence
  Description of Artificial Sequence: Synthetic oligonucleotide
  Antisense strand to SEQ ID NO: 709170
ucucuuccugcaaagcuga

SEQ ID NO: 709172 - RNA, 19 nt, Artificial Sequence
  Description of Artificial Sequence: Synthetic oligonucleotide
  Sense strand starting at position 2950 of SEQ ID NO: 586321
ggugacaaaggucgagaau

SEQ ID NO: 709173 - RNA, 19 nt, Artificial Sequence
  Description of Artificial Sequence: Synthetic oligonucleotide
  Antisense strand to SEQ ID NO: 709172
auucucgaccuuugucacc

SEQ ID NO: 709174 - RNA, 19 nt, Artificial Sequence
  Description of Artificial Sequence: Synthetic oligonucleotide
  Sense strand starting at position 2976 of SEQ ID NO: 586321
aagugaacuccaugaguga

SEQ ID NO: 709175 - RNA, 19 nt, Artificial Sequence
  Description of Artificial Sequence: Synthetic oligonucleotide
  Antisense strand to SEQ ID NO: 709174
ucacucauggaguucacuu

SEQ ID NO: 709176 - RNA, 19 nt, Artificial Sequence
  Description of Artificial Sequence: Synthetic oligonucleotide
  Sense strand starting at position 2979 of SEQ ID NO: 586321
ugaacuccaugagugaauu

SEQ ID NO: 709177 - RNA, 19 nt, Artificial Sequence
  Description of Artificial Sequence: Synthetic oligonucleotide
  Antisense strand to SEQ ID NO: 709176
aauucacucauggaguuca

SEQ ID NO: 709178 - RNA, 19 nt, Artificial Sequence
  Description of Artificial Sequence: Synthetic oligonucleotide
  Sense strand starting at position 3015 of SEQ ID NO: 586321
agggaauugugguuacucu

SEQ ID NO: 709179 - RNA, 19 nt, Artificial Sequence
  Description of Artificial Sequence: Synthetic oligonucleotide
  Antisense strand to SEQ ID NO: 709178
agaguaaccacaauucccu

SEQ ID NO: 709180 - RNA, 19 nt, Artificial Sequence
  Description of Artificial Sequence: Synthetic oligonucleotide
  Sense strand starting at position 3016 of SEQ ID NO: 586321
gggaauugugguuacucuu

SEQ ID NO: 709181 - RNA, 19 nt, Artificial Sequence
  Description of Artificial Sequence: Synthetic oligonucleotide
  Antisense strand to SEQ ID NO: 709180
aagaguaaccacaauuccc

SEQ ID NO: 709182 - RNA, 19 nt, Artificial Sequence
  Description of Artificial Sequence: Synthetic oligonucleotide
  Sense strand starting at position 3158 of SEQ ID NO: 586321
ggacuaauuaauugggucu

SEQ ID NO: 709183 - RNA, 19 nt, Artificial Sequence
  Description of Artificial Sequence: Synthetic oligonucleotide
  Antisense strand to SEQ ID NO: 709182
agacccaauuaauuagucc

SEQ ID NO: 709184 - RNA, 19 nt, Artificial Sequence
  Description of Artificial Sequence: Synthetic oligonucleotide
  Sense strand starting at position 3218 of SEQ ID NO: 586321
aaaugagucgauuauagca

SEQ ID NO: 709185 - RNA, 19 nt, Artificial Sequence
  Description of Artificial Sequence: Synthetic oligonucleotide
  Antisense strand to SEQ ID NO: 709184
ugcuauaaucgacucauuu

SEQ ID NO: 709186 - RNA, 19 nt, Artificial Sequence
  Description of Artificial Sequence: Synthetic oligonucleotide
  Sense strand starting at position 3289 of SEQ ID NO: 586321
ccagaaucagcucagucua

SEQ ID NO: 709187 - RNA, 19 nt, Artificial Sequence
  Description of Artificial Sequence: Synthetic oligonucleotide
  Antisense strand to SEQ ID NO: 709186
uagacugagcugauucugg

SEQ ID NO: 709188 - RNA, 19 nt, Artificial Sequence
  Description of Artificial Sequence: Synthetic oligonucleotide
  Sense strand starting at position 3291 of SEQ ID NO: 586321
agaaucagcucagucuaau

SEQ ID NO: 709189 - RNA, 19 nt, Artificial Sequence
  Description of Artificial Sequence: Synthetic oligonucleotide
  Antisense strand to SEQ ID NO: 709188
auuagacugagcugauucu

SEQ ID NO: 709190 - RNA, 19 nt, Artificial Sequence
  Description of Artificial Sequence: Synthetic oligonucleotide
  Sense strand starting at position 3409 of SEQ ID NO: 586321
cuuugugaacucuggauac

SEQ ID NO: 709191 - RNA, 19 nt, Artificial Sequence
  Description of Artificial Sequence: Synthetic oligonucleotide
  Antisense strand to SEQ ID NO: 709190
guauccagaguucacaaag

SEQ ID NO: 709192 - RNA, 19 nt, Artificial Sequence
  Description of Artificial Sequence: Synthetic oligonucleotide
  Sense strand starting at position 3960 of SEQ ID NO: 586321
uaagaauugugagauuucu

SEQ ID NO: 709193 - RNA, 19 nt, Artificial Sequence
  Description of Artificial Sequence: Synthetic oligonucleotide
  Antisense strand to SEQ ID NO: 709192
agaaaucucacaauucuua

SEQ ID NO: 709194 - RNA, 19 nt, Artificial Sequence
  Description of Artificial Sequence: Synthetic oligonucleotide
  Sense strand starting at position 3966 of SEQ ID NO: 586321
uugugagauuucuaaauug

SEQ ID NO: 709195 - RNA, 19 nt, Artificial Sequence
  Description of Artificial Sequence: Synthetic oligonucleotide
  Antisense strand to SEQ ID NO: 709194
caauuuagaaaucucacaa

SEQ ID NO: 709196 - RNA, 19 nt, Artificial Sequence
  Description of Artificial Sequence: Synthetic oligonucleotide
  Sense strand starting at position 3981 of SEQ ID NO: 586321
auuggaauccaggguguga

SEQ ID NO: 709197 - RNA, 19 nt, Artificial Sequence
  Description of Artificial Sequence: Synthetic oligonucleotide
  Antisense strand to SEQ ID NO: 709196
ucacacccuggauuccaau

SEQ ID NO: 709198 - RNA, 19 nt, Artificial Sequence
  Description of Artificial Sequence: Synthetic oligonucleotide
  Sense strand starting at position 72 of SEQ ID NO: 586322
uuuacacuugacuauguua

SEQ ID NO: 709199 - RNA, 19 nt, Artificial Sequence
  Description of Artificial Sequence: Synthetic oligonucleotide
  Antisense strand to SEQ ID NO: 709198
uaacauagucaaguguaaa

SEQ ID NO: 709200 - RNA, 19 nt, Artificial Sequence
  Description of Artificial Sequence: Synthetic oligonucleotide
  Sense strand starting at position 87 of SEQ ID NO: 586322
guuacaggucauuauauua

SEQ ID NO: 709201 - RNA, 19 nt, Artificial Sequence
  Description of Artificial Sequence: Synthetic oligonucleotide
  Antisense strand to SEQ ID NO: 709200
uaauauaaugaccuguaac

SEQ ID NO: 709202 - RNA, 19 nt, Artificial Sequence
  Description of Artificial Sequence: Synthetic oligonucleotide
  Sense strand starting at position 94 of SEQ ID NO: 586322
gucauuauauuacugauag

SEQ ID NO: 709203 - RNA, 19 nt, Artificial Sequence
  Description of Artificial Sequence: Synthetic oligonucleotide
  Antisense strand to SEQ ID NO: 709202
cuaucaguaauauaaugac

SEQ ID NO: 709204 - RNA, 19 nt, Artificial Sequence
  Description of Artificial Sequence: Synthetic oligonucleotide
  Sense strand starting at position 113 of SEQ ID NO: 586322
gcaugaggagagugguaua

SEQ ID NO: 709205 - RNA, 19 nt, Artificial Sequence
  Description of Artificial Sequence: Synthetic oligonucleotide
  Antisense strand to SEQ ID NO: 709204
uauaccacucuccucaugc

SEQ ID NO: 709206 - RNA, 19 nt, Artificial Sequence
  Description of Artificial Sequence: Synthetic oligonucleotide
  Sense strand starting at position 137 of SEQ ID NO: 586322
auagaaauccuguguuacu

SEQ ID NO: 709207 - RNA, 19 nt, Artificial Sequence
  Description of Artificial Sequence: Synthetic oligonucleotide
  Antisense strand to SEQ ID NO: 709206
aguaacacaggauuucuau

SEQ ID NO: 709208 - RNA, 19 nt, Artificial Sequence
  Description of Artificial Sequence: Synthetic oligonucleotide
  Sense strand starting at position 190 of SEQ ID NO: 586322
caaguaagauuaguaaguu

SEQ ID NO: 709209 - RNA, 19 nt, Artificial Sequence
  Description of Artificial Sequence: Synthetic oligonucleotide
  Antisense strand to SEQ ID NO: 709208
aacuuacuaaucuuacuug

SEQ ID NO: 709210 - RNA, 19 nt, Artificial Sequence
  Description of Artificial Sequence: Synthetic oligonucleotide
  Sense strand starting at position 236 of SEQ ID NO: 586322
ucuguauuucccugauccu

SEQ ID NO: 709211 - RNA, 19 nt, Artificial Sequence
  Description of Artificial Sequence: Synthetic oligonucleotide
  Antisense strand to SEQ ID NO: 709210
aggaucagggaaauacaga

SEQ ID NO: 709212 - RNA, 19 nt, Artificial Sequence
  Description of Artificial Sequence: Synthetic oligonucleotide
  Sense strand starting at position 340 of SEQ ID NO: 586322
uuagaaauguggucaccaa

SEQ ID NO: 709213 - RNA, 19 nt, Artificial Sequence
  Description of Artificial Sequence: Synthetic oligonucleotide
  Antisense strand to SEQ ID NO: 709212
uuggugaccacauuucuaa

SEQ ID NO: 709214 - RNA, 19 nt, Artificial Sequence
  Description of Artificial Sequence: Synthetic oligonucleotide
  Sense strand starting at position 393 of SEQ ID NO: 586322
uuuggagaaucuuugaguc

SEQ ID NO: 709215 - RNA, 19 nt, Artificial Sequence
  Description of Artificial Sequence: Synthetic oligonucleotide
  Antisense strand to SEQ ID NO: 709214
gacucaaagauucuccaaa

SEQ ID NO: 709216 - RNA, 19 nt, Artificial Sequence
  Description of Artificial Sequence: Synthetic oligonucleotide
  Sense strand starting at position 397 of SEQ ID NO: 586322
gagaaucuuugagucugga

SEQ ID NO: 709217 - RNA, 19 nt, Artificial Sequence
  Description of Artificial Sequence: Synthetic oligonucleotide
  Antisense strand to SEQ ID NO: 709216
uccagacucaaagauucuc

SEQ ID NO: 709218 - RNA, 19 nt, Artificial Sequence
  Description of Artificial Sequence: Synthetic oligonucleotide
  Sense strand starting at position 400 of SEQ ID NO: 586322
aaucuuugagucuggaaug

SEQ ID NO: 709219 - RNA, 19 nt, Artificial Sequence
  Description of Artificial Sequence: Synthetic oligonucleotide
  Antisense strand to SEQ ID NO: 709218
cauuccagacucaaagauu

SEQ ID NO: 709220 - RNA, 19 nt, Artificial Sequence
  Description of Artificial Sequence: Synthetic oligonucleotide
  Sense strand starting at position 430 of SEQ ID NO: 586322
cauacugacugccuugaga

SEQ ID NO: 709221 - RNA, 19 nt, Artificial Sequence
  Description of Artificial Sequence: Synthetic oligonucleotide
  Antisense strand to SEQ ID NO: 709220
ucucaaggcagucaguaug

SEQ ID NO: 709222 - RNA, 19 nt, Artificial Sequence
  Description of Artificial Sequence: Synthetic oligonucleotide
  Sense strand starting at position 451 of SEQ ID NO: 586322
agagacacucaagguuuau

SEQ ID NO: 709223 - RNA, 19 nt, Artificial Sequence
  Description of Artificial Sequence: Synthetic oligonucleotide
  Antisense strand to SEQ ID NO: 709222
auaaaccuugagugucucu

SEQ ID NO: 709224 - RNA, 19 nt, Artificial Sequence
  Description of Artificial Sequence: Synthetic oligonucleotide
  Sense strand starting at position 457 of SEQ ID NO: 586322
acucaagguuuaucaaagu

SEQ ID NO: 709225 - RNA, 19 nt, Artificial Sequence
  Description of Artificial Sequence: Synthetic oligonucleotide
  Antisense strand to SEQ ID NO: 709224
acuuugauaaaccuugagu

SEQ ID NO: 709226 - RNA, 19 nt, Artificial Sequence
  Description of Artificial Sequence: Synthetic oligonucleotide
  Sense strand starting at position 655 of SEQ ID NO: 586322
gaaguugaagcuuauguaa

SEQ ID NO: 709227 - RNA, 19 nt, Artificial Sequence
  Description of Artificial Sequence: Synthetic oligonucleotide
  Antisense strand to SEQ ID NO: 709226
uuacauaagcuucaacuuc

SEQ ID NO: 709228 - RNA, 19 nt, Artificial Sequence
  Description of Artificial Sequence: Synthetic oligonucleotide
  Sense strand starting at position 815 of SEQ ID NO: 586322
augagagucuuaccuuucu

SEQ ID NO: 709229 - RNA, 19 nt, Artificial Sequence
  Description of Artificial Sequence: Synthetic oligonucleotide
  Antisense strand to SEQ ID NO: 709228
agaaagguaagacucucau

SEQ ID NO: 709230 - RNA, 19 nt, Artificial Sequence
  Description of Artificial Sequence: Synthetic oligonucleotide
  Sense strand starting at position 1298 of SEQ ID NO: 586322
aguggaugaccugaguuua

SEQ ID NO: 709231 - RNA, 19 nt, Artificial Sequence
  Description of Artificial Sequence: Synthetic oligonucleotide
  Antisense strand to SEQ ID NO: 709230
uaaacucaggucauccacu

SEQ ID NO: 709232 - RNA, 19 nt, Artificial Sequence
  Description of Artificial Sequence: Synthetic oligonucleotide
  Sense strand starting at position 1345 of SEQ ID NO: 586322
aacgaauaaccugagugua

SEQ ID NO: 709233 - RNA, 19 nt, Artificial Sequence
  Description of Artificial Sequence: Synthetic oligonucleotide
  Antisense strand to SEQ ID NO: 709232
uacacucagguuauucguu

SEQ ID NO: 709234 - RNA, 19 nt, Artificial Sequence
  Description of Artificial Sequence: Synthetic oligonucleotide
  Sense strand starting at position 1445 of SEQ ID NO: 586322
ucagcuuugcaggaagaga

SEQ ID NO: 709235 - RNA, 19 nt, Artificial Sequence
  Description of Artificial Sequence: Synthetic oligonucleotide
  Antisense strand to SEQ ID NO: 709234
ucucuuccugcaaagcuga

SEQ ID NO: 709236 - RNA, 19 nt, Artificial Sequence
  Description of Artificial Sequence: Synthetic oligonucleotide
  Sense strand starting at position 2256 of SEQ ID NO: 586322
ggugacaaaggucgagaau

SEQ ID NO: 709237 - RNA, 19 nt, Artificial Sequence
  Description of Artificial Sequence: Synthetic oligonucleotide
  Antisense strand to SEQ ID NO: 709236
auucucgaccuuugucacc

SEQ ID NO: 709238 - RNA, 19 nt, Artificial Sequence
  Description of Artificial Sequence: Synthetic oligonucleotide
  Sense strand starting at position 2282 of SEQ ID NO: 586322
aagugaacuccaugaguga

SEQ ID NO: 709239 - RNA, 19 nt, Artificial Sequence
  Description of Artificial Sequence: Synthetic oligonucleotide
  Antisense strand to SEQ ID NO: 709238
ucacucauggaguucacuu

SEQ ID NO: 709240 - RNA, 19 nt, Artificial Sequence
  Description of Artificial Sequence: Synthetic oligonucleotide
  Sense strand starting at position 2285 of SEQ ID NO: 586322
ugaacuccaugagugaauu

SEQ ID NO: 709241 - RNA, 19 nt, Artificial Sequence
  Description of Artificial Sequence: Synthetic oligonucleotide
  Antisense strand to SEQ ID NO: 709240
aauucacucauggaguuca

SEQ ID NO: 709242 - RNA, 19 nt, Artificial Sequence
  Description of Artificial Sequence: Synthetic oligonucleotide
  Sense strand starting at position 2321 of SEQ ID NO: 586322
agggaauugugguuacucu

SEQ ID NO: 709243 - RNA, 19 nt, Artificial Sequence
  Description of Artificial Sequence: Synthetic oligonucleotide
  Antisense strand to SEQ ID NO: 709242
agaguaaccacaauucccu

SEQ ID NO: 709244 - RNA, 19 nt, Artificial Sequence
  Description of Artificial Sequence: Synthetic oligonucleotide
  Sense strand starting at position 2322 of SEQ ID NO: 586322
gggaauugugguuacucuu

SEQ ID NO: 709245 - RNA, 19 nt, Artificial Sequence
  Description of Artificial Sequence: Synthetic oligonucleotide
  Antisense strand to SEQ ID NO: 709244
aagaguaaccacaauuccc

SEQ ID NO: 709246 - RNA, 19 nt, Artificial Sequence
  Description of Artificial Sequence: Synthetic oligonucleotide
  Sense strand starting at position 2464 of SEQ ID NO: 586322
ggacuaauuaauugggucu

SEQ ID NO: 709247 - RNA, 19 nt, Artificial Sequence
  Description of Artificial Sequence: Synthetic oligonucleotide
  Antisense strand to SEQ ID NO: 709246
agacccaauuaauuagucc

SEQ ID NO: 709248 - RNA, 19 nt, Artificial Sequence
  Description of Artificial Sequence: Synthetic oligonucleotide
  Sense strand starting at position 2524 of SEQ ID NO: 586322
aaaugagucgauuauagca

SEQ ID NO: 709249 - RNA, 19 nt, Artificial Sequence
  Description of Artificial Sequence: Synthetic oligonucleotide
  Antisense strand to SEQ ID NO: 709248
ugcuauaaucgacucauuu

SEQ ID NO: 709250 - RNA, 19 nt, Artificial Sequence
  Description of Artificial Sequence: Synthetic oligonucleotide
  Sense strand starting at position 2595 of SEQ ID NO: 586322
ccagaaucagcucagucua

SEQ ID NO: 709251 - RNA, 19 nt, Artificial Sequence
  Description of Artificial Sequence: Synthetic oligonucleotide
  Antisense strand to SEQ ID NO: 709250
uagacugagcugauucugg

SEQ ID NO: 709252 - RNA, 19 nt, Artificial Sequence
  Description of Artificial Sequence: Synthetic oligonucleotide
  Sense strand starting at position 2597 of SEQ ID NO: 586322
agaaucagcucagucuaau

SEQ ID NO: 709253 - RNA, 19 nt, Artificial Sequence
  Description of Artificial Sequence: Synthetic oligonucleotide
  Antisense strand to SEQ ID NO: 709252
auuagacugagcugauucu

SEQ ID NO: 709254 - RNA, 19 nt, Artificial Sequence
  Description of Artificial Sequence: Synthetic oligonucleotide
  Sense strand starting at position 2715 of SEQ ID NO: 586322
cuuugugaacucuggauac

SEQ ID NO: 709255 - RNA, 19 nt, Artificial Sequence
  Description of Artificial Sequence: Synthetic oligonucleotide
  Antisense strand to SEQ ID NO: 709254
guauccagaguucacaaag

SEQ ID NO: 709256 - RNA, 19 nt, Artificial Sequence
  Description of Artificial Sequence: Synthetic oligonucleotide
  Sense strand starting at position 3266 of SEQ ID NO: 586322
uaagaauugugagauuucu

SEQ ID NO: 709257 - RNA, 19 nt, Artificial Sequence
  Description of Artificial Sequence: Synthetic oligonucleotide
  Antisense strand to SEQ ID NO: 709256
agaaaucucacaauucuua

SEQ ID NO: 709258 - RNA, 19 nt, Artificial Sequence
  Description of Artificial Sequence: Synthetic oligonucleotide
  Sense strand starting at position 3287 of SEQ ID NO: 586322
auuggaauccaggguguga

SEQ ID NO: 709259 - RNA, 19 nt, Artificial Sequence
  Description of Artificial Sequence: Synthetic oligonucleotide
  Antisense strand to SEQ ID NO: 709258
ucacacccuggauuccaau

SEQ ID NO: 709260 - RNA, 19 nt, Artificial Sequence
  Description of Artificial Sequence: Synthetic oligonucleotide
  Sense strand starting at position 3291 of SEQ ID NO: 586322
gaauccagggugugacaau

SEQ ID NO: 709261 - RNA, 19 nt, Artificial Sequence
  Description of Artificial Sequence: Synthetic oligonucleotide
  Antisense strand to SEQ ID NO: 709260
auugucacacccuggauuc

SEQ ID NO: 709262 - RNA, 19 nt, Artificial Sequence
  Description of Artificial Sequence: Synthetic oligonucleotide
  Sense strand starting at position 3355 of SEQ ID NO: 586322
cuguuaaggcaagaagucu

SEQ ID NO: 709263 - RNA, 19 nt, Artificial Sequence
  Description of Artificial Sequence: Synthetic oligonucleotide
  Antisense strand to SEQ ID NO: 709262
agacuucuugccuuaacag

SEQ ID NO: 709264 - RNA, 19 nt, Artificial Sequence
  Description of Artificial Sequence: Synthetic oligonucleotide
  Sense strand starting at position 3835 of SEQ ID NO: 586322
aaacaagugguuugaccaa

SEQ ID NO: 709265 - RNA, 19 nt, Artificial Sequence
  Description of Artificial Sequence: Synthetic oligonucleotide
  Antisense strand to SEQ ID NO: 709264
uuggucaaaccacuuguuu

SEQ ID NO: 709266 - RNA, 19 nt, Artificial Sequence
  Description of Artificial Sequence: Synthetic oligonucleotide
  Sense strand starting at position 3864 of SEQ ID NO: 586322
uuccucauucgugauauaa

SEQ ID NO: 709267 - RNA, 19 nt, Artificial Sequence
  Description of Artificial Sequence: Synthetic oligonucleotide
  Antisense strand to SEQ ID NO: 709266
uuauaucacgaaugaggaa

SEQ ID NO: 709268 - RNA, 19 nt, Artificial Sequence
  Description of Artificial Sequence: Synthetic oligonucleotide
  Sense strand starting at position 3868 of SEQ ID NO: 586322
ucauucgugauauaaggau

SEQ ID NO: 709269 - RNA, 19 nt, Artificial Sequence
  Description of Artificial Sequence: Synthetic oligonucleotide
  Antisense strand to SEQ ID NO: 709268
auccuuauaucacgaauga

SEQ ID NO: 709270 - RNA, 19 nt, Artificial Sequence
  Description of Artificial Sequence: Synthetic oligonucleotide
  Sense strand starting at position 3883 of SEQ ID NO: 586322
ggauacuaauguuuccuuu

SEQ ID NO: 709271 - RNA, 19 nt, Artificial Sequence
  Description of Artificial Sequence: Synthetic oligonucleotide
  Antisense strand to SEQ ID NO: 709270
aaaggaaacauuaguaucc

SEQ ID NO: 709272 - RNA, 19 nt, Artificial Sequence
  Description of Artificial Sequence: Synthetic oligonucleotide
  Sense strand starting at position 3887 of SEQ ID NO: 586322
acuaauguuuccuuugaag

SEQ ID NO: 709273 - RNA, 19 nt, Artificial Sequence
  Description of Artificial Sequence: Synthetic oligonucleotide
  Antisense strand to SEQ ID NO: 709272
cuucaaaggaaacauuagu

SEQ ID NO: 709274 - RNA, 19 nt, Artificial Sequence
  Description of Artificial Sequence: Synthetic oligonucleotide
  Sense strand starting at position 3912 of SEQ ID NO: 586322
ugguacaacuaguugagau

SEQ ID NO: 709275 - RNA, 19 nt, Artificial Sequence
  Description of Artificial Sequence: Synthetic oligonucleotide
  Antisense strand to SEQ ID NO: 709274
aucucaacuaguuguacca

SEQ ID NO: 709276 - RNA, 19 nt, Artificial Sequence
  Description of Artificial Sequence: Synthetic oligonucleotide
  Sense strand starting at position 3913 of SEQ ID NO: 586322
gguacaacuaguugagaua

SEQ ID NO: 709277 - RNA, 19 nt, Artificial Sequence
  Description of Artificial Sequence: Synthetic oligonucleotide
  Antisense strand to SEQ ID NO: 709276
uaucucaacuaguuguacc

SEQ ID NO: 709278 - RNA, 19 nt, Artificial Sequence
  Description of Artificial Sequence: Synthetic oligonucleotide
  Sense strand starting at position 6 of SEQ ID NO: 586323
ccacaugugcagggaugau

SEQ ID NO: 709279 - RNA, 19 nt, Artificial Sequence
  Description of Artificial Sequence: Synthetic oligonucleotide
  Antisense strand to SEQ ID NO: 709278
aucaucccugcacaugugg

SEQ ID NO: 709280 - RNA, 19 nt, Artificial Sequence
  Description of Artificial Sequence: Synthetic oligonucleotide
  Sense strand starting at position 88 of SEQ ID NO: 586323
gggaguguacaguggugau

SEQ ID NO: 709281 - RNA, 19 nt, Artificial Sequence
  Description of Artificial Sequence: Synthetic oligonucleotide
  Antisense strand to SEQ ID NO: 709280
aucaccacuguacacuccc

SEQ ID NO: 709282 - RNA, 19 nt, Artificial Sequence
  Description of Artificial Sequence: Synthetic oligonucleotide
  Sense strand starting at position 108 of SEQ ID NO: 586323
guguuugugccugugucaa

SEQ ID NO: 709283 - RNA, 19 nt, Artificial Sequence
  Description of Artificial Sequence: Synthetic oligonucleotide
  Antisense strand to SEQ ID NO: 709282
uugacacaggcacaaacac

SEQ ID NO: 709284 - RNA, 19 nt, Artificial Sequence
  Description of Artificial Sequence: Synthetic oligonucleotide
  Sense strand starting at position 122 of SEQ ID NO: 586323
gucaaauaggguggucuga

SEQ ID NO: 709285 - RNA, 19 nt, Artificial Sequence
  Description of Artificial Sequence: Synthetic oligonucleotide
  Antisense strand to SEQ ID NO: 709284
ucagaccacccuauuugac

SEQ ID NO: 709286 - RNA, 19 nt, Artificial Sequence
  Description of Artificial Sequence: Synthetic oligonucleotide
  Sense strand starting at position 135 of SEQ ID NO: 586323
gucugaugaugucuccuua

SEQ ID NO: 709287 - RNA, 19 nt, Artificial Sequence
  Description of Artificial Sequence: Synthetic oligonucleotide
  Antisense strand to SEQ ID NO: 709286
uaaggagacaucaucagac

SEQ ID NO: 709288 - RNA, 19 nt, Artificial Sequence
  Description of Artificial Sequence: Synthetic oligonucleotide
  Sense strand starting at position 139 of SEQ ID NO: 586323
gaugaugucuccuuauaag

SEQ ID NO: 709289 - RNA, 19 nt, Artificial Sequence
  Description of Artificial Sequence: Synthetic oligonucleotide
  Antisense strand to SEQ ID NO: 709288
cuuauaaggagacaucauc

SEQ ID NO: 709290 - RNA, 19 nt, Artificial Sequence
  Description of Artificial Sequence: Synthetic oligonucleotide
  Sense strand starting at position 163 of SEQ ID NO: 586323
ucuugucuucuugaagacu

SEQ ID NO: 709291 - RNA, 19 nt, Artificial Sequence
  Description of Artificial Sequence: Synthetic oligonucleotide
  Antisense strand to SEQ ID NO: 709290
agucuucaagaagacaaga

SEQ ID NO: 709292 - RNA, 19 nt, Artificial Sequence
  Description of Artificial Sequence: Synthetic oligonucleotide
  Sense strand starting at position 376 of SEQ ID NO: 586323
ugggaaacaugaugaaaua

SEQ ID NO: 709293 - RNA, 19 nt, Artificial Sequence
  Description of Artificial Sequence: Synthetic oligonucleotide
  Antisense strand to SEQ ID NO: 709292
uauuucaucauguuuccca

SEQ ID NO: 709294 - RNA, 19 nt, Artificial Sequence
  Description of Artificial Sequence: Synthetic oligonucleotide
  Sense strand starting at position 622 of SEQ ID NO: 586323
aggucacaugugcaugaga

SEQ ID NO: 709295 - RNA, 19 nt, Artificial Sequence
  Description of Artificial Sequence: Synthetic oligonucleotide
  Antisense strand to SEQ ID NO: 709294
ucucaugcacaugugaccu

SEQ ID NO: 709296 - RNA, 19 nt, Artificial Sequence
  Description of Artificial Sequence: Synthetic oligonucleotide
  Sense strand starting at position 624 of SEQ ID NO: 586323
gucacaugugcaugagaag

SEQ ID NO: 709297 - RNA, 19 nt, Artificial Sequence
  Description of Artificial Sequence: Synthetic oligonucleotide
  Antisense strand to SEQ ID NO: 709296
cuucucaugcacaugugac

SEQ ID NO: 709298 - RNA, 19 nt, Artificial Sequence
  Description of Artificial Sequence: Synthetic oligonucleotide
  Sense strand starting at position 740 of SEQ ID NO: 586323
ucugcuaugcacugaguga

SEQ ID NO: 709299 - RNA, 19 nt, Artificial Sequence
  Description of Artificial Sequence: Synthetic oligonucleotide
  Antisense strand to SEQ ID NO: 709298
ucacucagugcauagcaga

SEQ ID NO: 709300 - RNA, 19 nt, Artificial Sequence
  Description of Artificial Sequence: Synthetic oligonucleotide
  Sense strand starting at position 741 of SEQ ID NO: 586323
cugcuaugcacugagugau

SEQ ID NO: 709301 - RNA, 19 nt, Artificial Sequence
  Description of Artificial Sequence: Synthetic oligonucleotide
  Antisense strand to SEQ ID NO: 709300
aucacucagugcauagcag

SEQ ID NO: 709302 - RNA, 19 nt, Artificial Sequence
  Description of Artificial Sequence: Synthetic oligonucleotide
  Sense strand starting at position 744 of SEQ ID NO: 586323
cuaugcacugagugauugu

SEQ ID NO: 709303 - RNA, 19 nt, Artificial Sequence
  Description of Artificial Sequence: Synthetic oligonucleotide
  Antisense strand to SEQ ID NO: 709302
acaaucacucagugcauag

SEQ ID NO: 709304 - RNA, 19 nt, Artificial Sequence
  Description of Artificial Sequence: Synthetic oligonucleotide
  Sense strand starting at position 753 of SEQ ID NO: 586323
gagugauugucagcaaguc

SEQ ID NO: 709305 - RNA, 19 nt, Artificial Sequence
  Description of Artificial Sequence: Synthetic oligonucleotide
  Antisense strand to SEQ ID NO: 709304
gacuugcugacaaucacuc

SEQ ID NO: 709306 - RNA, 19 nt, Artificial Sequence
  Description of Artificial Sequence: Synthetic oligonucleotide
  Sense strand starting at position 808 of SEQ ID NO: 586323
gauugaacucagugacuuc

SEQ ID NO: 709307 - RNA, 19 nt, Artificial Sequence
  Description of Artificial Sequence: Synthetic oligonucleotide
  Antisense strand to SEQ ID NO: 709306
gaagucacugaguucaauc

SEQ ID NO: 709308 - RNA, 19 nt, Artificial Sequence
  Description of Artificial Sequence: Synthetic oligonucleotide
  Sense strand starting at position 924 of SEQ ID NO: 586323
aagauaucccaccgaguag

SEQ ID NO: 709309 - RNA, 19 nt, Artificial Sequence
  Description of Artificial Sequence: Synthetic oligonucleotide
  Antisense strand to SEQ ID NO: 709308
cuacucggugggauaucuu

SEQ ID NO: 709310 - RNA, 19 nt, Artificial Sequence
  Description of Artificial Sequence: Synthetic oligonucleotide
  Sense strand starting at position 1100 of SEQ ID NO: 586323
gaguccuagaagggaguuu

SEQ ID NO: 709311 - RNA, 19 nt, Artificial Sequence
  Description of Artificial Sequence: Synthetic oligonucleotide
  Antisense strand to SEQ ID NO: 709310
aaacucccuucuaggacuc

SEQ ID NO: 709312 - RNA, 19 nt, Artificial Sequence
  Description of Artificial Sequence: Synthetic oligonucleotide
  Sense strand starting at position 1132 of SEQ ID NO: 586323
gggucuccuacagaaaggu

SEQ ID NO: 709313 - RNA, 19 nt, Artificial Sequence
  Description of Artificial Sequence: Synthetic oligonucleotide
  Antisense strand to SEQ ID NO: 709312
accuuucuguaggagaccc

SEQ ID NO: 709314 - RNA, 19 nt, Artificial Sequence
  Description of Artificial Sequence: Synthetic oligonucleotide
  Sense strand starting at position 1201 of SEQ ID NO: 586323
agaagagacgcucaacgua

SEQ ID NO: 709315 - RNA, 19 nt, Artificial Sequence
  Description of Artificial Sequence: Synthetic oligonucleotide
  Antisense strand to SEQ ID NO: 709314
uacguugagcgucucuucu

SEQ ID NO: 709316 - RNA, 19 nt, Artificial Sequence
  Description of Artificial Sequence: Synthetic oligonucleotide
  Sense strand starting at position 1253 of SEQ ID NO: 586323
gggagaguguugagggaga

SEQ ID NO: 709317 - RNA, 19 nt, Artificial Sequence
  Description of Artificial Sequence: Synthetic oligonucleotide
  Antisense strand to SEQ ID NO: 709316
ucucccucaacacucuccc

SEQ ID NO: 709318 - RNA, 19 nt, Artificial Sequence
  Description of Artificial Sequence: Synthetic oligonucleotide
  Sense strand starting at position 1255 of SEQ ID NO: 586323
gagaguguugagggagagu

SEQ ID NO: 709319 - RNA, 19 nt, Artificial Sequence
  Description of Artificial Sequence: Synthetic oligonucleotide
  Antisense strand to SEQ ID NO: 709318
acucucccucaacacucuc

SEQ ID NO: 709320 - RNA, 19 nt, Artificial Sequence
  Description of Artificial Sequence: Synthetic oligonucleotide
  Sense strand starting at position 1264 of SEQ ID NO: 586323
gagggagaguuccaaucca

SEQ ID NO: 709321 - RNA, 19 nt, Artificial Sequence
  Description of Artificial Sequence: Synthetic oligonucleotide
  Antisense strand to SEQ ID NO: 709320
uggauuggaacucucccuc

SEQ ID NO: 709322 - RNA, 19 nt, Artificial Sequence
  Description of Artificial Sequence: Synthetic oligonucleotide
  Sense strand starting at position 1533 of SEQ ID NO: 586323
gagggaguucgguaacuaa

SEQ ID NO: 709323 - RNA, 19 nt, Artificial Sequence
  Description of Artificial Sequence: Synthetic oligonucleotide
  Antisense strand to SEQ ID NO: 709322
uuaguuaccgaacucccuc

SEQ ID NO: 709324 - RNA, 19 nt, Artificial Sequence
  Description of Artificial Sequence: Synthetic oligonucleotide
  Sense strand starting at position 1605 of SEQ ID NO: 586323
ggaggaguccugcgaccaa

SEQ ID NO: 709325 - RNA, 19 nt, Artificial Sequence
  Description of Artificial Sequence: Synthetic oligonucleotide
  Antisense strand to SEQ ID NO: 709324
uuggucgcaggacuccucc

SEQ ID NO: 709326 - RNA, 19 nt, Artificial Sequence
  Description of Artificial Sequence: Synthetic oligonucleotide
  Sense strand starting at position 2251 of SEQ ID NO: 586323
ugaguuccugugugauccu

SEQ ID NO: 709327 - RNA, 19 nt, Artificial Sequence
  Description of Artificial Sequence: Synthetic oligonucleotide
  Antisense strand to SEQ ID NO: 709326
aggaucacacaggaacuca

SEQ ID NO: 709328 - RNA, 19 nt, Artificial Sequence
  Description of Artificial Sequence: Synthetic oligonucleotide
  Sense strand starting at position 2536 of SEQ ID NO: 586323
gcagucaacuucucagacu

SEQ ID NO: 709329 - RNA, 19 nt, Artificial Sequence
  Description of Artificial Sequence: Synthetic oligonucleotide
  Antisense strand to SEQ ID NO: 709328
agucugagaaguugacugc

SEQ ID NO: 709330 - RNA, 19 nt, Artificial Sequence
  Description of Artificial Sequence: Synthetic oligonucleotide
  Sense strand starting at position 2826 of SEQ ID NO: 586323
ggguaaugagcuuguguag

SEQ ID NO: 709331 - RNA, 19 nt, Artificial Sequence
  Description of Artificial Sequence: Synthetic oligonucleotide
  Antisense strand to SEQ ID NO: 709330
cuacacaagcucauuaccc

SEQ ID NO: 709332 - RNA, 19 nt, Artificial Sequence
  Description of Artificial Sequence: Synthetic oligonucleotide
  Sense strand starting at position 2832 of SEQ ID NO: 586323
ugagcuuguguaggaacaa

SEQ ID NO: 709333 - RNA, 19 nt, Artificial Sequence
  Description of Artificial Sequence: Synthetic oligonucleotide
  Antisense strand to SEQ ID NO: 709332
uuguuccuacacaagcuca

SEQ ID NO: 709334 - RNA, 19 nt, Artificial Sequence
  Description of Artificial Sequence: Synthetic oligonucleotide
  Sense strand starting at position 2870 of SEQ ID NO: 586323
cuaugugaaguauagcauu

SEQ ID NO: 709335 - RNA, 19 nt, Artificial Sequence
  Description of Artificial Sequence: Synthetic oligonucleotide
  Antisense strand to SEQ ID NO: 709334
aaugcuauacuucacauag

SEQ ID NO: 709336 - RNA, 19 nt, Artificial Sequence
  Description of Artificial Sequence: Synthetic oligonucleotide
  Sense strand starting at position 2913 of SEQ ID NO: 586323
cuuagcagugccugaaacu

SEQ ID NO: 709337 - RNA, 19 nt, Artificial Sequence
  Description of Artificial Sequence: Synthetic oligonucleotide
  Antisense strand to SEQ ID NO: 709336
aguuucaggcacugcuaag

SEQ ID NO: 709338 - RNA, 19 nt, Artificial Sequence
  Description of Artificial Sequence: Synthetic oligonucleotide
  Sense strand starting at position 2930 of SEQ ID NO: 586323
cugugagggugaguguaaa

SEQ ID NO: 709339 - RNA, 19 nt, Artificial Sequence
  Description of Artificial Sequence: Synthetic oligonucleotide
  Antisense strand to SEQ ID NO: 709338
uuuacacucacccucacag

SEQ ID NO: 709340 - RNA, 19 nt, Artificial Sequence
  Description of Artificial Sequence: Synthetic oligonucleotide
  Sense strand starting at position 2943 of SEQ ID NO: 586323
uguaaaugauaguuccaga

SEQ ID NO: 709341 - RNA, 19 nt, Artificial Sequence
  Description of Artificial Sequence: Synthetic oligonucleotide
  Antisense strand to SEQ ID NO: 709340
ucuggaacuaucauuuaca

SEQ ID NO: 709342 - RNA, 19 nt, Artificial Sequence
  Description of Artificial Sequence: Synthetic oligonucleotide
  Sense strand starting at position 3160 of SEQ ID NO: 586323
gaggcaugagcauggcuua

SEQ ID NO: 709343 - RNA, 19 nt, Artificial Sequence
  Description of Artificial Sequence: Synthetic oligonucleotide
  Antisense strand to SEQ ID NO: 709342
uaagccaugcucaugccuc

SEQ ID NO: 709344 - RNA, 19 nt, Artificial Sequence
  Description of Artificial Sequence: Synthetic oligonucleotide
  Sense strand starting at position 3283 of SEQ ID NO: 586323
gugguaucuuaagcuguca

SEQ ID NO: 709345 - RNA, 19 nt, Artificial Sequence
  Description of Artificial Sequence: Synthetic oligonucleotide
  Antisense strand to SEQ ID NO: 709344
ugacagcuuaagauaccac

SEQ ID NO: 709346 - RNA, 19 nt, Artificial Sequence
  Description of Artificial Sequence: Synthetic oligonucleotide
  Sense strand starting at position 3294 of SEQ ID NO: 586323
agcugucacuuacauuuau

SEQ ID NO: 709347 - RNA, 19 nt, Artificial Sequence
  Description of Artificial Sequence: Synthetic oligonucleotide
  Antisense strand to SEQ ID NO: 709346
auaaauguaagugacagcu

SEQ ID NO: 709348 - RNA, 19 nt, Artificial Sequence
  Description of Artificial Sequence: Synthetic oligonucleotide
  Sense strand starting at position 3318 of SEQ ID NO: 586323
cuuugaaauuaugauagag

SEQ ID NO: 709349 - RNA, 19 nt, Artificial Sequence
  Description of Artificial Sequence: Synthetic oligonucleotide
  Antisense strand to SEQ ID NO: 709348
cucuaucauaauuucaaag

SEQ ID NO: 709350 - RNA, 19 nt, Artificial Sequence
  Description of Artificial Sequence: Synthetic oligonucleotide
  Sense strand starting at position 3320 of SEQ ID NO: 586323
uugaaauuaugauagaguc

SEQ ID NO: 709351 - RNA, 19 nt, Artificial Sequence
  Description of Artificial Sequence: Synthetic oligonucleotide
  Antisense strand to SEQ ID NO: 709350
gacucuaucauaauuucaa

SEQ ID NO: 709352 - RNA, 19 nt, Artificial Sequence
  Description of Artificial Sequence: Synthetic oligonucleotide
  Sense strand starting at position 3741 of SEQ ID NO: 586323
uuuguaauucuguguauug

SEQ ID NO: 709353 - RNA, 19 nt, Artificial Sequence
  Description of Artificial Sequence: Synthetic oligonucleotide
  Antisense strand to SEQ ID NO: 709352
caauacacagaauuacaaa

SEQ ID NO: 709354 - RNA, 19 nt, Artificial Sequence
  Description of Artificial Sequence: Synthetic oligonucleotide
  Sense strand starting at position 3743 of SEQ ID NO: 586323
uguaauucuguguauugua

SEQ ID NO: 709355 - RNA, 19 nt, Artificial Sequence
  Description of Artificial Sequence: Synthetic oligonucleotide
  Antisense strand to SEQ ID NO: 709354
uacaauacacagaauuaca

SEQ ID NO: 709356 - RNA, 19 nt, Artificial Sequence
  Description of Artificial Sequence: Synthetic oligonucleotide
  Sense strand starting at position 3935 of SEQ ID NO: 586323
aguagugcuaguuaauuga

SEQ ID NO: 709357 - RNA, 19 nt, Artificial Sequence
  Description of Artificial Sequence: Synthetic oligonucleotide
  Antisense strand to SEQ ID NO: 709356
ucaauuaacuagcacuacu

SEQ ID NO: 709358 - RNA, 19 nt, Artificial Sequence
  Description of Artificial Sequence: Synthetic oligonucleotide
  Sense strand starting at position 29 of SEQ ID NO: 586324
aagaaugggucauuacuau

SEQ ID NO: 709359 - RNA, 19 nt, Artificial Sequence
  Description of Artificial Sequence: Synthetic oligonucleotide
  Antisense strand to SEQ ID NO: 709358
auaguaaugacccauucuu

SEQ ID NO: 709360 - RNA, 19 nt, Artificial Sequence
  Description of Artificial Sequence: Synthetic oligonucleotide
  Sense strand starting at position 54 of SEQ ID NO: 586324
ugaguauuugggugcuaau

SEQ ID NO: 709361 - RNA, 19 nt, Artificial Sequence
  Description of Artificial Sequence: Synthetic oligonucleotide
  Antisense strand to SEQ ID NO: 709360
auuagcacccaaauacuca

SEQ ID NO: 709362 - RNA, 19 nt, Artificial Sequence
  Description of Artificial Sequence: Synthetic oligonucleotide
  Sense strand starting at position 118 of SEQ ID NO: 586324
cucucauugccuuaguucu

SEQ ID NO: 709363 - RNA, 19 nt, Artificial Sequence
  Description of Artificial Sequence: Synthetic oligonucleotide
  Antisense strand to SEQ ID NO: 709362
agaacuaaggcaaugagag

SEQ ID NO: 709364 - RNA, 19 nt, Artificial Sequence
  Description of Artificial Sequence: Synthetic oligonucleotide
  Sense strand starting at position 162 of SEQ ID NO: 586324
cucaguguuuccucugaca

SEQ ID NO: 709365 - RNA, 19 nt, Artificial Sequence
  Description of Artificial Sequence: Synthetic oligonucleotide
  Antisense strand to SEQ ID NO: 709364
ugucagaggaaacacugag

SEQ ID NO: 709366 - RNA, 19 nt, Artificial Sequence
  Description of Artificial Sequence: Synthetic oligonucleotide
  Sense strand starting at position 272 of SEQ ID NO: 586324
ugguaaacccaguggacuu

SEQ ID NO: 709367 - RNA, 19 nt, Artificial Sequence
  Description of Artificial Sequence: Synthetic oligonucleotide
  Antisense strand to SEQ ID NO: 709366
aaguccacuggguuuacca

SEQ ID NO: 709368 - RNA, 19 nt, Artificial Sequence
  Description of Artificial Sequence: Synthetic oligonucleotide
  Sense strand starting at position 459 of SEQ ID NO: 586324
gguuaagaacacugacacu

SEQ ID NO: 709369 - RNA, 19 nt, Artificial Sequence
  Description of Artificial Sequence: Synthetic oligonucleotide
  Antisense strand to SEQ ID NO: 709368
agugucaguguucuuaacc

SEQ ID NO: 709370 - RNA, 19 nt, Artificial Sequence
  Description of Artificial Sequence: Synthetic oligonucleotide
  Sense strand starting at position 502 of SEQ ID NO: 586324
cuuagacuagcaugaggua

SEQ ID NO: 709371 - RNA, 19 nt, Artificial Sequence
  Description of Artificial Sequence: Synthetic oligonucleotide
  Antisense strand to SEQ ID NO: 709370
uaccucaugcuagucuaag

SEQ ID NO: 709372 - RNA, 19 nt, Artificial Sequence
  Description of Artificial Sequence: Synthetic oligonucleotide
  Sense strand starting at position 669 of SEQ ID NO: 586324
auguauucucaauggacuu

SEQ ID NO: 709373 - RNA, 19 nt, Artificial Sequence
  Description of Artificial Sequence: Synthetic oligonucleotide
  Antisense strand to SEQ ID NO: 709372
aaguccauugagaauacau

SEQ ID NO: 709374 - RNA, 19 nt, Artificial Sequence
  Description of Artificial Sequence: Synthetic oligonucleotide
  Sense strand starting at position 822 of SEQ ID NO: 586324
ggcuguggaagauaaguua

SEQ ID NO: 709375 - RNA, 19 nt, Artificial Sequence
  Description of Artificial Sequence: Synthetic oligonucleotide
  Antisense strand to SEQ ID NO: 709374
uaacuuaucuuccacagcc

SEQ ID NO: 709376 - RNA, 19 nt, Artificial Sequence
  Description of Artificial Sequence: Synthetic oligonucleotide
  Sense strand starting at position 849 of SEQ ID NO: 586324
augucauccaaguagugga

SEQ ID NO: 709377 - RNA, 19 nt, Artificial Sequence
  Description of Artificial Sequence: Synthetic oligonucleotide
  Antisense strand to SEQ ID NO: 709376
uccacuacuuggaugacau

SEQ ID NO: 709378 - RNA, 19 nt, Artificial Sequence
  Description of Artificial Sequence: Synthetic oligonucleotide
  Sense strand starting at position 995 of SEQ ID NO: 586324
gucauuauauggccagagu

SEQ ID NO: 709379 - RNA, 19 nt, Artificial Sequence
  Description of Artificial Sequence: Synthetic oligonucleotide
  Antisense strand to SEQ ID NO: 709378
acucuggccauauaaugac

SEQ ID NO: 709380 - RNA, 19 nt, Artificial Sequence
  Description of Artificial Sequence: Synthetic oligonucleotide
  Sense strand starting at position 996 of SEQ ID NO: 586324
ucauuauauggccagaguu

SEQ ID NO: 709381 - RNA, 19 nt, Artificial Sequence
  Description of Artificial Sequence: Synthetic oligonucleotide
  Antisense strand to SEQ ID NO: 709380
aacucuggccauauaauga

SEQ ID NO: 709382 - RNA, 19 nt, Artificial Sequence
  Description of Artificial Sequence: Synthetic oligonucleotide
  Sense strand starting at position 1203 of SEQ ID NO: 586324
ugagguuuaguaggcuuaa

SEQ ID NO: 709383 - RNA, 19 nt, Artificial Sequence
  Description of Artificial Sequence: Synthetic oligonucleotide
  Antisense strand to SEQ ID NO: 709382
uuaagccuacuaaaccuca

SEQ ID NO: 709384 - RNA, 19 nt, Artificial Sequence
  Description of Artificial Sequence: Synthetic oligonucleotide
  Sense strand starting at position 1204 of SEQ ID NO: 586324
gagguuuaguaggcuuaaa

SEQ ID NO: 709385 - RNA, 19 nt, Artificial Sequence
  Description of Artificial Sequence: Synthetic oligonucleotide
  Antisense strand to SEQ ID NO: 709384
uuuaagccuacuaaaccuc

SEQ ID NO: 709386 - RNA, 19 nt, Artificial Sequence
  Description of Artificial Sequence: Synthetic oligonucleotide
  Sense strand starting at position 1223 of SEQ ID NO: 586324
uaauuugcccgaggucacu

SEQ ID NO: 709387 - RNA, 19 nt, Artificial Sequence
  Description of Artificial Sequence: Synthetic oligonucleotide
  Antisense strand to SEQ ID NO: 709386
agugaccucgggcaaauua

SEQ ID NO: 709388 - RNA, 19 nt, Artificial Sequence
  Description of Artificial Sequence: Synthetic oligonucleotide
  Sense strand starting at position 1348 of SEQ ID NO: 586324
gguuucugcuaauccuaca

SEQ ID NO: 709389 - RNA, 19 nt, Artificial Sequence
  Description of Artificial Sequence: Synthetic oligonucleotide
  Antisense strand to SEQ ID NO: 709388
uguaggauuagcagaaacc

SEQ ID NO: 709390 - RNA, 19 nt, Artificial Sequence
  Description of Artificial Sequence: Synthetic oligonucleotide
  Sense strand starting at position 1614 of SEQ ID NO: 586324
ggcuucuagccuggaagaa

SEQ ID NO: 709391 - RNA, 19 nt, Artificial Sequence
  Description of Artificial Sequence: Synthetic oligonucleotide
  Antisense strand to SEQ ID NO: 709390
uucuuccaggcuagaagcc

SEQ ID NO: 709392 - RNA, 19 nt, Artificial Sequence
  Description of Artificial Sequence: Synthetic oligonucleotide
  Sense strand starting at position 1644 of SEQ ID NO: 586324
acaguugugccaggaaacu

SEQ ID NO: 709393 - RNA, 19 nt, Artificial Sequence
  Description of Artificial Sequence: Synthetic oligonucleotide
  Antisense strand to SEQ ID NO: 709392
aguuuccuggcacaacugu

SEQ ID NO: 709394 - RNA, 19 nt, Artificial Sequence
  Description of Artificial Sequence: Synthetic oligonucleotide
  Sense strand starting at position 2299 of SEQ ID NO: 586324
uucugcacucuaggacuua

SEQ ID NO: 709395 - RNA, 19 nt, Artificial Sequence
  Description of Artificial Sequence: Synthetic oligonucleotide
  Antisense strand to SEQ ID NO: 709394
uaaguccuagagugcagaa

SEQ ID NO: 709396 - RNA, 19 nt, Artificial Sequence
  Description of Artificial Sequence: Synthetic oligonucleotide
  Sense strand starting at position 2497 of SEQ ID NO: 586324
ugauguguucuguaccauu

SEQ ID NO: 709397 - RNA, 19 nt, Artificial Sequence
  Description of Artificial Sequence: Synthetic oligonucleotide
  Antisense strand to SEQ ID NO: 709396
aaugguacagaacacauca

SEQ ID NO: 709398 - RNA, 19 nt, Artificial Sequence
  Description of Artificial Sequence: Synthetic oligonucleotide
  Sense strand starting at position 2570 of SEQ ID NO: 586324
agggucacauugcuuguaa

SEQ ID NO: 709399 - RNA, 19 nt, Artificial Sequence
  Description of Artificial Sequence: Synthetic oligonucleotide
  Antisense strand to SEQ ID NO: 709398
uuacaagcaaugugacccu

SEQ ID NO: 709400 - RNA, 19 nt, Artificial Sequence
  Description of Artificial Sequence: Synthetic oligonucleotide
  Sense strand starting at position 2571 of SEQ ID NO: 586324
gggucacauugcuuguaag

SEQ ID NO: 709401 - RNA, 19 nt, Artificial Sequence
  Description of Artificial Sequence: Synthetic oligonucleotide
  Antisense strand to SEQ ID NO: 709400
cuuacaagcaaugugaccc

SEQ ID NO: 709402 - RNA, 19 nt, Artificial Sequence
  Description of Artificial Sequence: Synthetic oligonucleotide
  Sense strand starting at position 2587 of SEQ ID NO: 586324
aagugaccugaguguauau

SEQ ID NO: 709403 - RNA, 19 nt, Artificial Sequence
  Description of Artificial Sequence: Synthetic oligonucleotide
  Antisense strand to SEQ ID NO: 709402
auauacacucaggucacuu

SEQ ID NO: 709404 - RNA, 19 nt, Artificial Sequence
  Description of Artificial Sequence: Synthetic oligonucleotide
  Sense strand starting at position 2589 of SEQ ID NO: 586324
gugaccugaguguauauua

SEQ ID NO: 709405 - RNA, 19 nt, Artificial Sequence
  Description of Artificial Sequence: Synthetic oligonucleotide
  Antisense strand to SEQ ID NO: 709404
uaauauacacucaggucac

SEQ ID NO: 709406 - RNA, 19 nt, Artificial Sequence
  Description of Artificial Sequence: Synthetic oligonucleotide
  Sense strand starting at position 2596 of SEQ ID NO: 586324
gaguguauauuauuagcca

SEQ ID NO: 709407 - RNA, 19 nt, Artificial Sequence
  Description of Artificial Sequence: Synthetic oligonucleotide
  Antisense strand to SEQ ID NO: 709406
uggcuaauaauauacacuc

SEQ ID NO: 709408 - RNA, 19 nt, Artificial Sequence
  Description of Artificial Sequence: Synthetic oligonucleotide
  Sense strand starting at position 2678 of SEQ ID NO: 586324
ugcaauggcaaguagauaa

SEQ ID NO: 709409 - RNA, 19 nt, Artificial Sequence
  Description of Artificial Sequence: Synthetic oligonucleotide
  Antisense strand to SEQ ID NO: 709408
uuaucuacuugccauugca

SEQ ID NO: 709410 - RNA, 19 nt, Artificial Sequence
  Description of Artificial Sequence: Synthetic oligonucleotide
  Sense strand starting at position 2711 of SEQ ID NO: 586324
gggucaucauuaucagcaa

SEQ ID NO: 709411 - RNA, 19 nt, Artificial Sequence
  Description of Artificial Sequence: Synthetic oligonucleotide
  Antisense strand to SEQ ID NO: 709410
uugcugauaaugaugaccc

SEQ ID NO: 709412 - RNA, 19 nt, Artificial Sequence
  Description of Artificial Sequence: Synthetic oligonucleotide
  Sense strand starting at position 3061 of SEQ ID NO: 586324
caaaguaugugcucaguga

SEQ ID NO: 709413 - RNA, 19 nt, Artificial Sequence
  Description of Artificial Sequence: Synthetic oligonucleotide
  Antisense strand to SEQ ID NO: 709412
ucacugagcacauacuuug

SEQ ID NO: 709414 - RNA, 19 nt, Artificial Sequence
  Description of Artificial Sequence: Synthetic oligonucleotide
  Sense strand starting at position 3062 of SEQ ID NO: 586324
aaaguaugugcucagugac

SEQ ID NO: 709415 - RNA, 19 nt, Artificial Sequence
  Description of Artificial Sequence: Synthetic oligonucleotide
  Antisense strand to SEQ ID NO: 709414
gucacugagcacauacuuu

SEQ ID NO: 709416 - RNA, 19 nt, Artificial Sequence
  Description of Artificial Sequence: Synthetic oligonucleotide
  Sense strand starting at position 3084 of SEQ ID NO: 586324
agucauucuuugcuaucau

SEQ ID NO: 709417 - RNA, 19 nt, Artificial Sequence
  Description of Artificial Sequence: Synthetic oligonucleotide
  Antisense strand to SEQ ID NO: 709416
augauagcaaagaaugacu

SEQ ID NO: 709418 - RNA, 19 nt, Artificial Sequence
  Description of Artificial Sequence: Synthetic oligonucleotide
  Sense strand starting at position 3129 of SEQ ID NO: 586324
ccaccuagcucuuuaagga

SEQ ID NO: 709419 - RNA, 19 nt, Artificial Sequence
  Description of Artificial Sequence: Synthetic oligonucleotide
  Antisense strand to SEQ ID NO: 709418
uccuuaaagagcuaggugg

SEQ ID NO: 709420 - RNA, 19 nt, Artificial Sequence
  Description of Artificial Sequence: Synthetic oligonucleotide
  Sense strand starting at position 3235 of SEQ ID NO: 586324
cagagaucuguaggccaga

SEQ ID NO: 709421 - RNA, 19 nt, Artificial Sequence
  Description of Artificial Sequence: Synthetic oligonucleotide
  Antisense strand to SEQ ID NO: 709420
ucuggccuacagaucucug

SEQ ID NO: 709422 - RNA, 19 nt, Artificial Sequence
  Description of Artificial Sequence: Synthetic oligonucleotide
  Sense strand starting at position 3236 of SEQ ID NO: 586324
agagaucuguaggccagau

SEQ ID NO: 709423 - RNA, 19 nt, Artificial Sequence
  Description of Artificial Sequence: Synthetic oligonucleotide
  Antisense strand to SEQ ID NO: 709422
aucuggccuacagaucucu

SEQ ID NO: 709424 - RNA, 19 nt, Artificial Sequence
  Description of Artificial Sequence: Synthetic oligonucleotide
  Sense strand starting at position 3370 of SEQ ID NO: 586324
uuuggaugaucugcacuua

SEQ ID NO: 709425 - RNA, 19 nt, Artificial Sequence
  Description of Artificial Sequence: Synthetic oligonucleotide
  Antisense strand to SEQ ID NO: 709424
uaagugcagaucauccaaa

SEQ ID NO: 709426 - RNA, 19 nt, Artificial Sequence
  Description of Artificial Sequence: Synthetic oligonucleotide
  Sense strand starting at position 3371 of SEQ ID NO: 586324
uuggaugaucugcacuuaa

SEQ ID NO: 709427 - RNA, 19 nt, Artificial Sequence
  Description of Artificial Sequence: Synthetic oligonucleotide
  Antisense strand to SEQ ID NO: 709426
uuaagugcagaucauccaa

SEQ ID NO: 709428 - RNA, 19 nt, Artificial Sequence
  Description of Artificial Sequence: Synthetic oligonucleotide
  Sense strand starting at position 3663 of SEQ ID NO: 586324
aagugugggcccuggacaa

SEQ ID NO: 709429 - RNA, 19 nt, Artificial Sequence
  Description of Artificial Sequence: Synthetic oligonucleotide
  Antisense strand to SEQ ID NO: 709428
uuguccagggcccacacuu

SEQ ID NO: 709430 - RNA, 19 nt, Artificial Sequence
  Description of Artificial Sequence: Synthetic oligonucleotide
  Sense strand starting at position 3684 of SEQ ID NO: 586324
gcuccuugggucuaaguau

SEQ ID NO: 709431 - RNA, 19 nt, Artificial Sequence
  Description of Artificial Sequence: Synthetic oligonucleotide
  Antisense strand to SEQ ID NO: 709430
auacuuagacccaaggagc

SEQ ID NO: 709432 - RNA, 19 nt, Artificial Sequence
  Description of Artificial Sequence: Synthetic oligonucleotide
  Sense strand starting at position 3785 of SEQ ID NO: 586324
ggagccaugcuguaagcau

SEQ ID NO: 709433 - RNA, 19 nt, Artificial Sequence
  Description of Artificial Sequence: Synthetic oligonucleotide
  Antisense strand to SEQ ID NO: 709432
augcuuacagcauggcucc

SEQ ID NO: 709434 - RNA, 19 nt, Artificial Sequence
  Description of Artificial Sequence: Synthetic oligonucleotide
  Sense strand starting at position 3882 of SEQ ID NO: 586324
agaacaccauuugaaaguu

SEQ ID NO: 709435 - RNA, 19 nt, Artificial Sequence
  Description of Artificial Sequence: Synthetic oligonucleotide
  Antisense strand to SEQ ID NO: 709434
aacuuucaaaugguguucu

SEQ ID NO: 709436 - RNA, 19 nt, Artificial Sequence
  Description of Artificial Sequence: Synthetic oligonucleotide
  Sense strand starting at position 3970 of SEQ ID NO: 586324
cugagugaaauauggcaua

SEQ ID NO: 709437 - RNA, 19 nt, Artificial Sequence
  Description of Artificial Sequence: Synthetic oligonucleotide
  Antisense strand to SEQ ID NO: 709436
uaugccauauuucacucag

SEQ ID NO: 709438 - RNA, 19 nt, Artificial Sequence
  Description of Artificial Sequence: Synthetic oligonucleotide
  Sense strand starting at position 6 of SEQ ID NO: 586325
cccguagaccagugaggau

SEQ ID NO: 709439 - RNA, 19 nt, Artificial Sequence
  Description of Artificial Sequence: Synthetic oligonucleotide
  Antisense strand to SEQ ID NO: 709438
auccucacuggucuacggg

SEQ ID NO: 709440 - RNA, 19 nt, Artificial Sequence
  Description of Artificial Sequence: Synthetic oligonucleotide
  Sense strand starting at position 156 of SEQ ID NO: 586325
ucucuaaagcaggguugua

SEQ ID NO: 709441 - RNA, 19 nt, Artificial Sequence
  Description of Artificial Sequence: Synthetic oligonucleotide
  Antisense strand to SEQ ID NO: 709440
uacaacccugcuuuagaga

SEQ ID NO: 709442 - RNA, 19 nt, Artificial Sequence
  Description of Artificial Sequence: Synthetic oligonucleotide
  Sense strand starting at position 169 of SEQ ID NO: 586325
guuguaugcucacaggaaa

SEQ ID NO: 709443 - RNA, 19 nt, Artificial Sequence
  Description of Artificial Sequence: Synthetic oligonucleotide
  Antisense strand to SEQ ID NO: 709442
uuuccugugagcauacaac

SEQ ID NO: 709444 - RNA, 19 nt, Artificial Sequence
  Description of Artificial Sequence: Synthetic oligonucleotide
  Sense strand starting at position 215 of SEQ ID NO: 586325
aaugauggcuuggacuaga

SEQ ID NO: 709445 - RNA, 19 nt, Artificial Sequence
  Description of Artificial Sequence: Synthetic oligonucleotide
  Antisense strand to SEQ ID NO: 709444
ucuaguccaagccaucauu

SEQ ID NO: 709446 - RNA, 19 nt, Artificial Sequence
  Description of Artificial Sequence: Synthetic oligonucleotide
  Sense strand starting at position 218 of SEQ ID NO: 586325
gauggcuuggacuagagua

SEQ ID NO: 709447 - RNA, 19 nt, Artificial Sequence
  Description of Artificial Sequence: Synthetic oligonucleotide
  Antisense strand to SEQ ID NO: 709446
uacucuaguccaagccauc

SEQ ID NO: 709448 - RNA, 19 nt, Artificial Sequence
  Description of Artificial Sequence: Synthetic oligonucleotide
  Sense strand starting at position 255 of SEQ ID NO: 586325
uuagguugcagaugaaauc

SEQ ID NO: 709449 - RNA, 19 nt, Artificial Sequence
  Description of Artificial Sequence: Synthetic oligonucleotide
  Antisense strand to SEQ ID NO: 709448
gauuucaucugcaaccuaa

SEQ ID NO: 709450 - RNA, 19 nt, Artificial Sequence
  Description of Artificial Sequence: Synthetic oligonucleotide
  Sense strand starting at position 627 of SEQ ID NO: 586325
uagacaauaugagagugua

SEQ ID NO: 709451 - RNA, 19 nt, Artificial Sequence
  Description of Artificial Sequence: Synthetic oligonucleotide
  Antisense strand to SEQ ID NO: 709450
uacacucucauauugucua

SEQ ID NO: 709452 - RNA, 19 nt, Artificial Sequence
  Description of Artificial Sequence: Synthetic oligonucleotide
  Sense strand starting at position 637 of SEQ ID NO: 586325
gagaguguacgccacacau

SEQ ID NO: 709453 - RNA, 19 nt, Artificial Sequence
  Description of Artificial Sequence: Synthetic oligonucleotide
  Antisense strand to SEQ ID NO: 709452
auguguggcguacacucuc

SEQ ID NO: 709454 - RNA, 19 nt, Artificial Sequence
  Description of Artificial Sequence: Synthetic oligonucleotide
  Sense strand starting at position 639 of SEQ ID NO: 586325
gaguguacgccacacauua

SEQ ID NO: 709455 - RNA, 19 nt, Artificial Sequence
  Description of Artificial Sequence: Synthetic oligonucleotide
  Antisense strand to SEQ ID NO: 709454
uaauguguggcguacacuc

SEQ ID NO: 709456 - RNA, 19 nt, Artificial Sequence
  Description of Artificial Sequence: Synthetic oligonucleotide
  Sense strand starting at position 687 of SEQ ID NO: 586325
acagacauauuguguuuaa

SEQ ID NO: 709457 - RNA, 19 nt, Artificial Sequence
  Description of Artificial Sequence: Synthetic oligonucleotide
  Antisense strand to SEQ ID NO: 709456
uuaaacacaauaugucugu

SEQ ID NO: 709458 - RNA, 19 nt, Artificial Sequence
  Description of Artificial Sequence: Synthetic oligonucleotide
  Sense strand starting at position 751 of SEQ ID NO: 586325
ccaggacuuugggaguaca

SEQ ID NO: 709459 - RNA, 19 nt, Artificial Sequence
  Description of Artificial Sequence: Synthetic oligonucleotide
  Antisense strand to SEQ ID NO: 709458
uguacucccaaaguccugg

SEQ ID NO: 709460 - RNA, 19 nt, Artificial Sequence
  Description of Artificial Sequence: Synthetic oligonucleotide
  Sense strand starting at position 1025 of SEQ ID NO: 586325
ugugaaaugccauaguaca

SEQ ID NO: 709461 - RNA, 19 nt, Artificial Sequence
  Description of Artificial Sequence: Synthetic oligonucleotide
  Antisense strand to SEQ ID NO: 709460
uguacuauggcauuucaca

SEQ ID NO: 709462 - RNA, 19 nt, Artificial Sequence
  Description of Artificial Sequence: Synthetic oligonucleotide
  Sense strand starting at position 1077 of SEQ ID NO: 586325
aggaaacuguaucaaauaa

SEQ ID NO: 709463 - RNA, 19 nt, Artificial Sequence
  Description of Artificial Sequence: Synthetic oligonucleotide
  Antisense strand to SEQ ID NO: 709462
uuauuugauacaguuuccu

SEQ ID NO: 709464 - RNA, 19 nt, Artificial Sequence
  Description of Artificial Sequence: Synthetic oligonucleotide
  Sense strand starting at position 1784 of SEQ ID NO: 586325
ucagcucucagcggucaaa

SEQ ID NO: 709465 - RNA, 19 nt, Artificial Sequence
  Description of Artificial Sequence: Synthetic oligonucleotide
  Antisense strand to SEQ ID NO: 709464
uuugaccgcugagagcuga

SEQ ID NO: 709466 - RNA, 19 nt, Artificial Sequence
  Description of Artificial Sequence: Synthetic oligonucleotide
  Sense strand starting at position 2100 of SEQ ID NO: 586325
agcguuugcggacaggauu

SEQ ID NO: 709467 - RNA, 19 nt, Artificial Sequence
  Description of Artificial Sequence: Synthetic oligonucleotide
  Antisense strand to SEQ ID NO: 709466
aauccuguccgcaaacgcu

SEQ ID NO: 709468 - RNA, 19 nt, Artificial Sequence
  Description of Artificial Sequence: Synthetic oligonucleotide
  Sense strand starting at position 2101 of SEQ ID NO: 586325
gcguuugcggacaggauua

SEQ ID NO: 709469 - RNA, 19 nt, Artificial Sequence
  Description of Artificial Sequence: Synthetic oligonucleotide
  Antisense strand to SEQ ID NO: 709468
uaauccuguccgcaaacgc

SEQ ID NO: 709470 - RNA, 19 nt, Artificial Sequence
  Description of Artificial Sequence: Synthetic oligonucleotide
  Sense strand starting at position 2769 of SEQ ID NO: 586325
aucagcugaaguugugaga

SEQ ID NO: 709471 - RNA, 19 nt, Artificial Sequence
  Description of Artificial Sequence: Synthetic oligonucleotide
  Antisense strand to SEQ ID NO: 709470
ucucacaacuucagcugau

SEQ ID NO: 709472 - RNA, 19 nt, Artificial Sequence
  Description of Artificial Sequence: Synthetic oligonucleotide
  Sense strand starting at position 2773 of SEQ ID NO: 586325
gcugaaguugugagacgug

SEQ ID NO: 709473 - RNA, 19 nt, Artificial Sequence
  Description of Artificial Sequence: Synthetic oligonucleotide
  Antisense strand to SEQ ID NO: 709472
cacgucucacaacuucagc

SEQ ID NO: 709474 - RNA, 19 nt, Artificial Sequence
  Description of Artificial Sequence: Synthetic oligonucleotide
  Sense strand starting at position 2776 of SEQ ID NO: 586325
gaaguugugagacgugauc

SEQ ID NO: 709475 - RNA, 19 nt, Artificial Sequence
  Description of Artificial Sequence: Synthetic oligonucleotide
  Antisense strand to SEQ ID NO: 709474
gaucacgucucacaacuuc

SEQ ID NO: 709476 - RNA, 19 nt, Artificial Sequence
  Description of Artificial Sequence: Synthetic oligonucleotide
  Sense strand starting at position 2782 of SEQ ID NO: 586325
gugagacgugaucggguua

SEQ ID NO: 709477 - RNA, 19 nt, Artificial Sequence
  Description of Artificial Sequence: Synthetic oligonucleotide
  Antisense strand to SEQ ID NO: 709476
uaacccgaucacgucucac

SEQ ID NO: 709478 - RNA, 19 nt, Artificial Sequence
  Description of Artificial Sequence: Synthetic oligonucleotide
  Sense strand starting at position 2802 of SEQ ID NO: 586325
ugggccuuugcauguuaaa

SEQ ID NO: 709479 - RNA, 19 nt, Artificial Sequence
  Description of Artificial Sequence: Synthetic oligonucleotide
  Antisense strand to SEQ ID NO: 709478
uuuaacaugcaaaggccca

SEQ ID NO: 709480 - RNA, 19 nt, Artificial Sequence
  Description of Artificial Sequence: Synthetic oligonucleotide
  Sense strand starting at position 2865 of SEQ ID NO: 586325
ccagaaacauugcaguuua

SEQ ID NO: 709481 - RNA, 19 nt, Artificial Sequence
  Description of Artificial Sequence: Synthetic oligonucleotide
  Antisense strand to SEQ ID NO: 709480
uaaacugcaauguuucugg

SEQ ID NO: 709482 - RNA, 19 nt, Artificial Sequence
  Description of Artificial Sequence: Synthetic oligonucleotide
  Sense strand starting at position 3091 of SEQ ID NO: 586325
agaucagucucacucuguu

SEQ ID NO: 709483 - RNA, 19 nt, Artificial Sequence
  Description of Artificial Sequence: Synthetic oligonucleotide
  Antisense strand to SEQ ID NO: 709482
aacagagugagacugaucu

SEQ ID NO: 709484 - RNA, 19 nt, Artificial Sequence
  Description of Artificial Sequence: Synthetic oligonucleotide
  Sense strand starting at position 3405 of SEQ ID NO: 586325
uccaaagagucagcuacaa

SEQ ID NO: 709485 - RNA, 19 nt, Artificial Sequence
  Description of Artificial Sequence: Synthetic oligonucleotide
  Antisense strand to SEQ ID NO: 709484
uuguagcugacucuuugga

SEQ ID NO: 709486 - RNA, 19 nt, Artificial Sequence
  Description of Artificial Sequence: Synthetic oligonucleotide
  Sense strand starting at position 3562 of SEQ ID NO: 586325
uguugccuacuuuguaaau

SEQ ID NO: 709487 - RNA, 19 nt, Artificial Sequence
  Description of Artificial Sequence: Synthetic oligonucleotide
  Antisense strand to SEQ ID NO: 709486
auuuacaaaguaggcaaca

SEQ ID NO: 709488 - RNA, 19 nt, Artificial Sequence
  Description of Artificial Sequence: Synthetic oligonucleotide
  Sense strand starting at position 3563 of SEQ ID NO: 586325
guugccuacuuuguaaaua

SEQ ID NO: 709489 - RNA, 19 nt, Artificial Sequence
  Description of Artificial Sequence: Synthetic oligonucleotide
  Antisense strand to SEQ ID NO: 709488
uauuuacaaaguaggcaac

SEQ ID NO: 709490 - RNA, 19 nt, Artificial Sequence
  Description of Artificial Sequence: Synthetic oligonucleotide
  Sense strand starting at position 3575 of SEQ ID NO: 586325
guaaauaauaaggguguua

SEQ ID NO: 709491 - RNA, 19 nt, Artificial Sequence
  Description of Artificial Sequence: Synthetic oligonucleotide
  Antisense strand to SEQ ID NO: 709490
uaacacccuuauuauuuac

SEQ ID NO: 709492 - RNA, 19 nt, Artificial Sequence
  Description of Artificial Sequence: Synthetic oligonucleotide
  Sense strand starting at position 3587 of SEQ ID NO: 586325
gguguuaaauaauccuuau

SEQ ID NO: 709493 - RNA, 19 nt, Artificial Sequence
  Description of Artificial Sequence: Synthetic oligonucleotide
  Antisense strand to SEQ ID NO: 709492
auaaggauuauuuaacacc

SEQ ID NO: 709494 - RNA, 19 nt, Artificial Sequence
  Description of Artificial Sequence: Synthetic oligonucleotide
  Sense strand starting at position 3623 of SEQ ID NO: 586325
auuaauuacuguggcaaua

SEQ ID NO: 709495 - RNA, 19 nt, Artificial Sequence
  Description of Artificial Sequence: Synthetic oligonucleotide
  Antisense strand to SEQ ID NO: 709494
uauugccacaguaauuaau

SEQ ID NO: 709496 - RNA, 19 nt, Artificial Sequence
  Description of Artificial Sequence: Synthetic oligonucleotide
  Sense strand starting at position 3646 of SEQ ID NO: 586325
caugacucucuaugaggua

SEQ ID NO: 709497 - RNA, 19 nt, Artificial Sequence
  Description of Artificial Sequence: Synthetic oligonucleotide
  Antisense strand to SEQ ID NO: 709496
uaccucauagagagucaug

SEQ ID NO: 709498 - RNA, 19 nt, Artificial Sequence
  Description of Artificial Sequence: Synthetic oligonucleotide
  Sense strand starting at position 3649 of SEQ ID NO: 586325
gacucucuaugagguacau

SEQ ID NO: 709499 - RNA, 19 nt, Artificial Sequence
  Description of Artificial Sequence: Synthetic oligonucleotide
  Antisense strand to SEQ ID NO: 709498
auguaccucauagagaguc

SEQ ID NO: 709500 - RNA, 19 nt, Artificial Sequence
  Description of Artificial Sequence: Synthetic oligonucleotide
  Sense strand starting at position 3658 of SEQ ID NO: 586325
ugagguacauugcauuauu

SEQ ID NO: 709501 - RNA, 19 nt, Artificial Sequence
  Description of Artificial Sequence: Synthetic oligonucleotide
  Antisense strand to SEQ ID NO: 709500
aauaaugcaauguaccuca

SEQ ID NO: 709502 - RNA, 19 nt, Artificial Sequence
  Description of Artificial Sequence: Synthetic oligonucleotide
  Sense strand starting at position 3661 of SEQ ID NO: 586325
gguacauugcauuauuauu

SEQ ID NO: 709503 - RNA, 19 nt, Artificial Sequence
  Description of Artificial Sequence: Synthetic oligonucleotide
  Antisense strand to SEQ ID NO: 709502
aauaauaaugcaauguacc

SEQ ID NO: 709504 - RNA, 19 nt, Artificial Sequence
  Description of Artificial Sequence: Synthetic oligonucleotide
  Sense strand starting at position 3703 of SEQ ID NO: 586325
gaggcagacuuggagagau

SEQ ID NO: 709505 - RNA, 19 nt, Artificial Sequence
  Description of Artificial Sequence: Synthetic oligonucleotide
  Antisense strand to SEQ ID NO: 709504
aucucuccaagucugccuc

SEQ ID NO: 709506 - RNA, 19 nt, Artificial Sequence
  Description of Artificial Sequence: Synthetic oligonucleotide
  Sense strand starting at position 3713 of SEQ ID NO: 586325
uggagagauuaugauuuac

SEQ ID NO: 709507 - RNA, 19 nt, Artificial Sequence
  Description of Artificial Sequence: Synthetic oligonucleotide
  Antisense strand to SEQ ID NO: 709506
guaaaucauaaucucucca

SEQ ID NO: 709508 - RNA, 19 nt, Artificial Sequence
  Description of Artificial Sequence: Synthetic oligonucleotide
  Sense strand starting at position 3737 of SEQ ID NO: 586325
gucacucaucuaggaaguu

SEQ ID NO: 709509 - RNA, 19 nt, Artificial Sequence
  Description of Artificial Sequence: Synthetic oligonucleotide
  Antisense strand to SEQ ID NO: 709508
aacuuccuagaugagugac

SEQ ID NO: 709510 - RNA, 19 nt, Artificial Sequence
  Description of Artificial Sequence: Synthetic oligonucleotide
  Sense strand starting at position 3750 of SEQ ID NO: 586325
gaaguuguccaguggguau

SEQ ID NO: 709511 - RNA, 19 nt, Artificial Sequence
  Description of Artificial Sequence: Synthetic oligonucleotide
  Antisense strand to SEQ ID NO: 709510
auacccacuggacaacuuc

SEQ ID NO: 709512 - RNA, 19 nt, Artificial Sequence
  Description of Artificial Sequence: Synthetic oligonucleotide
  Sense strand starting at position 3754 of SEQ ID NO: 586325
uuguccaguggguauugaa

SEQ ID NO: 709513 - RNA, 19 nt, Artificial Sequence
  Description of Artificial Sequence: Synthetic oligonucleotide
  Antisense strand to SEQ ID NO: 709512
uucaauacccacuggacaa

SEQ ID NO: 709514 - RNA, 19 nt, Artificial Sequence
  Description of Artificial Sequence: Synthetic oligonucleotide
  Sense strand starting at position 3838 of SEQ ID NO: 586325
ugugcuacauuugugcaau

SEQ ID NO: 709515 - RNA, 19 nt, Artificial Sequence
  Description of Artificial Sequence: Synthetic oligonucleotide
  Antisense strand to SEQ ID NO: 709514
auugcacaaauguagcaca

SEQ ID NO: 709516 - RNA, 19 nt, Artificial Sequence
  Description of Artificial Sequence: Synthetic oligonucleotide
  Sense strand starting at position 3839 of SEQ ID NO: 586325
gugcuacauuugugcaaug

SEQ ID NO: 709517 - RNA, 19 nt, Artificial Sequence
  Description of Artificial Sequence: Synthetic oligonucleotide
  Antisense strand to SEQ ID NO: 709516
cauugcacaaauguagcac

SEQ ID NO: 709518 - RNA, 19 nt, Artificial Sequence
  Description of Artificial Sequence: Synthetic oligonucleotide
  Sense strand starting at position 122 of SEQ ID NO: 586326
guagccugucaguagaaac

SEQ ID NO: 709519 - RNA, 19 nt, Artificial Sequence
  Description of Artificial Sequence: Synthetic oligonucleotide
  Antisense strand to SEQ ID NO: 709518
guuucuacugacaggcuac

SEQ ID NO: 709520 - RNA, 19 nt, Artificial Sequence
  Description of Artificial Sequence: Synthetic oligonucleotide
  Sense strand starting at position 187 of SEQ ID NO: 586326
ccaaguucuuuacugagga

SEQ ID NO: 709521 - RNA, 19 nt, Artificial Sequence
  Description of Artificial Sequence: Synthetic oligonucleotide
  Antisense strand to SEQ ID NO: 709520
uccucaguaaagaacuugg

SEQ ID NO: 709522 - RNA, 19 nt, Artificial Sequence
  Description of Artificial Sequence: Synthetic oligonucleotide
  Sense strand starting at position 384 of SEQ ID NO: 586326
acaaauacuucggugggaa

SEQ ID NO: 709523 - RNA, 19 nt, Artificial Sequence
  Description of Artificial Sequence: Synthetic oligonucleotide
  Antisense strand to SEQ ID NO: 709522
uucccaccgaaguauuugu

SEQ ID NO: 709524 - RNA, 19 nt, Artificial Sequence
  Description of Artificial Sequence: Synthetic oligonucleotide
  Sense strand starting at position 385 of SEQ ID NO: 586326
caaauacuucggugggaau

SEQ ID NO: 709525 - RNA, 19 nt, Artificial Sequence
  Description of Artificial Sequence: Synthetic oligonucleotide
  Antisense strand to SEQ ID NO: 709524
auucccaccgaaguauuug

SEQ ID NO: 709526 - RNA, 19 nt, Artificial Sequence
  Description of Artificial Sequence: Synthetic oligonucleotide
  Sense strand starting at position 387 of SEQ ID NO: 586326
aauacuucggugggaauca

SEQ ID NO: 709527 - RNA, 19 nt, Artificial Sequence
  Description of Artificial Sequence: Synthetic oligonucleotide
  Antisense strand to SEQ ID NO: 709526
ugauucccaccgaaguauu

SEQ ID NO: 709528 - RNA, 19 nt, Artificial Sequence
  Description of Artificial Sequence: Synthetic oligonucleotide
  Sense strand starting at position 436 of SEQ ID NO: 586326
uaacgucagccagagucaa

SEQ ID NO: 709529 - RNA, 19 nt, Artificial Sequence
  Description of Artificial Sequence: Synthetic oligonucleotide
  Antisense strand to SEQ ID NO: 709528
uugacucuggcugacguua

SEQ ID NO: 709530 - RNA, 19 nt, Artificial Sequence
  Description of Artificial Sequence: Synthetic oligonucleotide
  Sense strand starting at position 496 of SEQ ID NO: 586326
ucaaauaucuugguacuga

SEQ ID NO: 709531 - RNA, 19 nt, Artificial Sequence
  Description of Artificial Sequence: Synthetic oligonucleotide
  Antisense strand to SEQ ID NO: 709530
ucaguaccaagauauuuga

SEQ ID NO: 709532 - RNA, 19 nt, Artificial Sequence
  Description of Artificial Sequence: Synthetic oligonucleotide
  Sense strand starting at position 602 of SEQ ID NO: 586326
uacaaacgucugcauggau

SEQ ID NO: 709533 - RNA, 19 nt, Artificial Sequence
  Description of Artificial Sequence: Synthetic oligonucleotide
  Antisense strand to SEQ ID NO: 709532
auccaugcagacguuugua

SEQ ID NO: 709534 - RNA, 19 nt, Artificial Sequence
  Description of Artificial Sequence: Synthetic oligonucleotide
  Sense strand starting at position 634 of SEQ ID NO: 586326
agagaucuugcauaaaguc

SEQ ID NO: 709535 - RNA, 19 nt, Artificial Sequence
  Description of Artificial Sequence: Synthetic oligonucleotide
  Antisense strand to SEQ ID NO: 709534
gacuuuaugcaagaucucu

SEQ ID NO: 709536 - RNA, 19 nt, Artificial Sequence
  Description of Artificial Sequence: Synthetic oligonucleotide
  Sense strand starting at position 658 of SEQ ID NO: 586326
aucagugcuggcuauugaa

SEQ ID NO: 709537 - RNA, 19 nt, Artificial Sequence
  Description of Artificial Sequence: Synthetic oligonucleotide
  Antisense strand to SEQ ID NO: 709536
uucaauagccagcacugau

SEQ ID NO: 709538 - RNA, 19 nt, Artificial Sequence
  Description of Artificial Sequence: Synthetic oligonucleotide
  Sense strand starting at position 766 of SEQ ID NO: 586326
ccaagagaucucugaggca

SEQ ID NO: 709539 - RNA, 19 nt, Artificial Sequence
  Description of Artificial Sequence: Synthetic oligonucleotide
  Antisense strand to SEQ ID NO: 709538
ugccucagagaucucuugg

SEQ ID NO: 709540 - RNA, 19 nt, Artificial Sequence
  Description of Artificial Sequence: Synthetic oligonucleotide
  Sense strand starting at position 771 of SEQ ID NO: 586326
agaucucugaggcauuagu

SEQ ID NO: 709541 - RNA, 19 nt, Artificial Sequence
  Description of Artificial Sequence: Synthetic oligonucleotide
  Antisense strand to SEQ ID NO: 709540
acuaaugccucagagaucu

SEQ ID NO: 709542 - RNA, 19 nt, Artificial Sequence
  Description of Artificial Sequence: Synthetic oligonucleotide
  Sense strand starting at position 846 of SEQ ID NO: 586326
auaugcaacugucucagau

SEQ ID NO: 709543 - RNA, 19 nt, Artificial Sequence
  Description of Artificial Sequence: Synthetic oligonucleotide
  Antisense strand to SEQ ID NO: 709542
aucugagacaguugcauau

SEQ ID NO: 709544 - RNA, 19 nt, Artificial Sequence
  Description of Artificial Sequence: Synthetic oligonucleotide
  Sense strand starting at position 907 of SEQ ID NO: 586326
aggagacuucuuggucgua

SEQ ID NO: 709545 - RNA, 19 nt, Artificial Sequence
  Description of Artificial Sequence: Synthetic oligonucleotide
  Antisense strand to SEQ ID NO: 709544
uacgaccaagaagucuccu

SEQ ID NO: 709546 - RNA, 19 nt, Artificial Sequence
  Description of Artificial Sequence: Synthetic oligonucleotide
  Sense strand starting at position 919 of SEQ ID NO: 586326
ggucguacaguuuaagaaa

SEQ ID NO: 709547 - RNA, 19 nt, Artificial Sequence
  Description of Artificial Sequence: Synthetic oligonucleotide
  Antisense strand to SEQ ID NO: 709546
uuucuuaaacuguacgacc

SEQ ID NO: 709548 - RNA, 19 nt, Artificial Sequence
  Description of Artificial Sequence: Synthetic oligonucleotide
  Sense strand starting at position 1102 of SEQ ID NO: 586326
aggaaaugcuacuuaaucu

SEQ ID NO: 709549 - RNA, 19 nt, Artificial Sequence
  Description of Artificial Sequence: Synthetic oligonucleotide
  Antisense strand to SEQ ID NO: 709548
agauuaaguagcauuuccu

SEQ ID NO: 709550 - RNA, 19 nt, Artificial Sequence
  Description of Artificial Sequence: Synthetic oligonucleotide
  Sense strand starting at position 1168 of SEQ ID NO: 586326
ggaggcauguuauucucaa

SEQ ID NO: 709551 - RNA, 19 nt, Artificial Sequence
  Description of Artificial Sequence: Synthetic oligonucleotide
  Antisense strand to SEQ ID NO: 709550
uugagaauaacaugccucc

SEQ ID NO: 709552 - RNA, 19 nt, Artificial Sequence
  Description of Artificial Sequence: Synthetic oligonucleotide
  Sense strand starting at position 1169 of SEQ ID NO: 586326
gaggcauguuauucucaaa

SEQ ID NO: 709553 - RNA, 19 nt, Artificial Sequence
  Description of Artificial Sequence: Synthetic oligonucleotide
  Antisense strand to SEQ ID NO: 709552
uuugagaauaacaugccuc

SEQ ID NO: 709554 - RNA, 19 nt, Artificial Sequence
  Description of Artificial Sequence: Synthetic oligonucleotide
  Sense strand starting at position 1344 of SEQ ID NO: 586326
cugcucagacauuaaagua

SEQ ID NO: 709555 - RNA, 19 nt, Artificial Sequence
  Description of Artificial Sequence: Synthetic oligonucleotide
  Antisense strand to SEQ ID NO: 709554
uacuuuaaugucugagcag

SEQ ID NO: 709556 - RNA, 19 nt, Artificial Sequence
  Description of Artificial Sequence: Synthetic oligonucleotide
  Sense strand starting at position 1436 of SEQ ID NO: 586326
gcugcuccucgcgugacaa

SEQ ID NO: 709557 - RNA, 19 nt, Artificial Sequence
  Description of Artificial Sequence: Synthetic oligonucleotide
  Antisense strand to SEQ ID NO: 709556
uugucacgcgaggagcagc

SEQ ID NO: 709558 - RNA, 19 nt, Artificial Sequence
  Description of Artificial Sequence: Synthetic oligonucleotide
  Sense strand starting at position 2288 of SEQ ID NO: 586326
agguacagccaaugaaaua

SEQ ID NO: 709559 - RNA, 19 nt, Artificial Sequence
  Description of Artificial Sequence: Synthetic oligonucleotide
  Antisense strand to SEQ ID NO: 709558
uauuucauuggcuguaccu

SEQ ID NO: 709560 - RNA, 19 nt, Artificial Sequence
  Description of Artificial Sequence: Synthetic oligonucleotide
  Sense strand starting at position 2345 of SEQ ID NO: 586326
ucaguccucuugcugagaa

SEQ ID NO: 709561 - RNA, 19 nt, Artificial Sequence
  Description of Artificial Sequence: Synthetic oligonucleotide
  Antisense strand to SEQ ID NO: 709560
uucucagcaagaggacuga

SEQ ID NO: 709562 - RNA, 19 nt, Artificial Sequence
  Description of Artificial Sequence: Synthetic oligonucleotide
  Sense strand starting at position 2347 of SEQ ID NO: 586326
aguccucuugcugagaauc

SEQ ID NO: 709563 - RNA, 19 nt, Artificial Sequence
  Description of Artificial Sequence: Synthetic oligonucleotide
  Antisense strand to SEQ ID NO: 709562
gauucucagcaagaggacu

SEQ ID NO: 709564 - RNA, 19 nt, Artificial Sequence
  Description of Artificial Sequence: Synthetic oligonucleotide
  Sense strand starting at position 2355 of SEQ ID NO: 586326
ugcugagaauccucagaaa

SEQ ID NO: 709565 - RNA, 19 nt, Artificial Sequence
  Description of Artificial Sequence: Synthetic oligonucleotide
  Antisense strand to SEQ ID NO: 709564
uuucugaggauucucagca

SEQ ID NO: 709566 - RNA, 19 nt, Artificial Sequence
  Description of Artificial Sequence: Synthetic oligonucleotide
  Sense strand starting at position 2358 of SEQ ID NO: 586326
ugagaauccucagaaauuu

SEQ ID NO: 709567 - RNA, 19 nt, Artificial Sequence
  Description of Artificial Sequence: Synthetic oligonucleotide
  Antisense strand to SEQ ID NO: 709566
aaauuucugaggauucuca

SEQ ID NO: 709568 - RNA, 19 nt, Artificial Sequence
  Description of Artificial Sequence: Synthetic oligonucleotide
  Sense strand starting at position 2539 of SEQ ID NO: 586326
aggaaauugucauuguucu

SEQ ID NO: 709569 - RNA, 19 nt, Artificial Sequence
  Description of Artificial Sequence: Synthetic oligonucleotide
  Antisense strand to SEQ ID NO: 709568
agaacaaugacaauuuccu

SEQ ID NO: 709570 - RNA, 19 nt, Artificial Sequence
  Description of Artificial Sequence: Synthetic oligonucleotide
  Sense strand starting at position 2540 of SEQ ID NO: 586326
ggaaauugucauuguucuu

SEQ ID NO: 709571 - RNA, 19 nt, Artificial Sequence
  Description of Artificial Sequence: Synthetic oligonucleotide
  Antisense strand to SEQ ID NO: 709570
aagaacaaugacaauuucc

SEQ ID NO: 709572 - RNA, 19 nt, Artificial Sequence
  Description of Artificial Sequence: Synthetic oligonucleotide
  Sense strand starting at position 2679 of SEQ ID NO: 586326
ugagcccaguccuugaauu

SEQ ID NO: 709573 - RNA, 19 nt, Artificial Sequence
  Description of Artificial Sequence: Synthetic oligonucleotide
  Antisense strand to SEQ ID NO: 709572
aauucaaggacugggcuca

SEQ ID NO: 709574 - RNA, 19 nt, Artificial Sequence
  Description of Artificial Sequence: Synthetic oligonucleotide
  Sense strand starting at position 2680 of SEQ ID NO: 586326
gagcccaguccuugaauuc

SEQ ID NO: 709575 - RNA, 19 nt, Artificial Sequence
  Description of Artificial Sequence: Synthetic oligonucleotide
  Antisense strand to SEQ ID NO: 709574
gaauucaaggacugggcuc

SEQ ID NO: 709576 - RNA, 19 nt, Artificial Sequence
  Description of Artificial Sequence: Synthetic oligonucleotide
  Sense strand starting at position 2837 of SEQ ID NO: 586326
cagggaaguucuuccuaaa

SEQ ID NO: 709577 - RNA, 19 nt, Artificial Sequence
  Description of Artificial Sequence: Synthetic oligonucleotide
  Antisense strand to SEQ ID NO: 709576
uuuaggaagaacuucccug

SEQ ID NO: 709578 - RNA, 19 nt, Artificial Sequence
  Description of Artificial Sequence: Synthetic oligonucleotide
  Sense strand starting at position 3113 of SEQ ID NO: 586326
caguuagcucuagaaguuu

SEQ ID NO: 709579 - RNA, 19 nt, Artificial Sequence
  Description of Artificial Sequence: Synthetic oligonucleotide
  Antisense strand to SEQ ID NO: 709578
aaacuucuagagcuaacug

SEQ ID NO: 709580 - RNA, 19 nt, Artificial Sequence
  Description of Artificial Sequence: Synthetic oligonucleotide
  Sense strand starting at position 3151 of SEQ ID NO: 586326
guauuagcuauuguguugu

SEQ ID NO: 709581 - RNA, 19 nt, Artificial Sequence
  Description of Artificial Sequence: Synthetic oligonucleotide
  Antisense strand to SEQ ID NO: 709580
acaacacaauagcuaauac

SEQ ID NO: 709582 - RNA, 19 nt, Artificial Sequence
  Description of Artificial Sequence: Synthetic oligonucleotide
  Sense strand starting at position 3194 of SEQ ID NO: 586326
gguggagacaaaugucuuu

SEQ ID NO: 709583 - RNA, 19 nt, Artificial Sequence
  Description of Artificial Sequence: Synthetic oligonucleotide
  Antisense strand to SEQ ID NO: 709582
aaagacauuugucuccacc

SEQ ID NO: 709584 - RNA, 19 nt, Artificial Sequence
  Description of Artificial Sequence: Synthetic oligonucleotide
  Sense strand starting at position 3199 of SEQ ID NO: 586326
agacaaaugucuuugaacu

SEQ ID NO: 709585 - RNA, 19 nt, Artificial Sequence
  Description of Artificial Sequence: Synthetic oligonucleotide
  Antisense strand to SEQ ID NO: 709584
aguucaaagacauuugucu

SEQ ID NO: 709586 - RNA, 19 nt, Artificial Sequence
  Description of Artificial Sequence: Synthetic oligonucleotide
  Sense strand starting at position 3218 of SEQ ID NO: 586326
cuauguugucuuuaaagca

SEQ ID NO: 709587 - RNA, 19 nt, Artificial Sequence
  Description of Artificial Sequence: Synthetic oligonucleotide
  Antisense strand to SEQ ID NO: 709586
ugcuuuaaagacaacauag

SEQ ID NO: 709588 - RNA, 19 nt, Artificial Sequence
  Description of Artificial Sequence: Synthetic oligonucleotide
  Sense strand starting at position 3226 of SEQ ID NO: 586326
ucuuuaaagcagcaguuua

SEQ ID NO: 709589 - RNA, 19 nt, Artificial Sequence
  Description of Artificial Sequence: Synthetic oligonucleotide
  Antisense strand to SEQ ID NO: 709588
uaaacugcugcuuuaaaga

SEQ ID NO: 709590 - RNA, 19 nt, Artificial Sequence
  Description of Artificial Sequence: Synthetic oligonucleotide
  Sense strand starting at position 3259 of SEQ ID NO: 586326
gcauuugucugguccuauc

SEQ ID NO: 709591 - RNA, 19 nt, Artificial Sequence
  Description of Artificial Sequence: Synthetic oligonucleotide
  Antisense strand to SEQ ID NO: 709590
gauaggaccagacaaaugc

SEQ ID NO: 709592 - RNA, 19 nt, Artificial Sequence
  Description of Artificial Sequence: Synthetic oligonucleotide
  Sense strand starting at position 3784 of SEQ ID NO: 586326
ucugucacucaauguacaa

SEQ ID NO: 709593 - RNA, 19 nt, Artificial Sequence
  Description of Artificial Sequence: Synthetic oligonucleotide
  Antisense strand to SEQ ID NO: 709592
uuguacauugagugacaga

SEQ ID NO: 709594 - RNA, 19 nt, Artificial Sequence
  Description of Artificial Sequence: Synthetic oligonucleotide
  Sense strand starting at position 3791 of SEQ ID NO: 586326
cucaauguacaaugggauu

SEQ ID NO: 709595 - RNA, 19 nt, Artificial Sequence
  Description of Artificial Sequence: Synthetic oligonucleotide
  Antisense strand to SEQ ID NO: 709594
aaucccauuguacauugag

SEQ ID NO: 709596 - RNA, 19 nt, Artificial Sequence
  Description of Artificial Sequence: Synthetic oligonucleotide
  Sense strand starting at position 3905 of SEQ ID NO: 586326
acccuaagaugugcucaga

SEQ ID NO: 709597 - RNA, 19 nt, Artificial Sequence
  Description of Artificial Sequence: Synthetic oligonucleotide
  Antisense strand to SEQ ID NO: 709596
ucugagcacaucuuagggu

SEQ ID NO: 709598 - RNA, 19 nt, Artificial Sequence
  Description of Artificial Sequence: Synthetic oligonucleotide
  Sense strand starting at position 61 of SEQ ID NO: 586327
gcuaaauacucuguagcaa

SEQ ID NO: 709599 - RNA, 19 nt, Artificial Sequence
  Description of Artificial Sequence: Synthetic oligonucleotide
  Antisense strand to SEQ ID NO: 709598
uugcuacagaguauuuagc

SEQ ID NO: 709600 - RNA, 19 nt, Artificial Sequence
  Description of Artificial Sequence: Synthetic oligonucleotide
  Sense strand starting at position 110 of SEQ ID NO: 586327
gaacuuucgaguggaaaga

SEQ ID NO: 709601 - RNA, 19 nt, Artificial Sequence
  Description of Artificial Sequence: Synthetic oligonucleotide
  Antisense strand to SEQ ID NO: 709600
ucuuuccacucgaaaguuc

SEQ ID NO: 709602 - RNA, 19 nt, Artificial Sequence
  Description of Artificial Sequence: Synthetic oligonucleotide
  Sense strand starting at position 192 of SEQ ID NO: 586327
uuuccugcucuuuagagua

SEQ ID NO: 709603 - RNA, 19 nt, Artificial Sequence
  Description of Artificial Sequence: Synthetic oligonucleotide
  Antisense strand to SEQ ID NO: 709602
uacucuaaagagcaggaaa

SEQ ID NO: 709604 - RNA, 19 nt, Artificial Sequence
  Description of Artificial Sequence: Synthetic oligonucleotide
  Sense strand starting at position 512 of SEQ ID NO: 586327
aaguguuugcccucuuguu

SEQ ID NO: 709605 - RNA, 19 nt, Artificial Sequence
  Description of Artificial Sequence: Synthetic oligonucleotide
  Antisense strand to SEQ ID NO: 709604
aacaagagggcaaacacuu

SEQ ID NO: 709606 - RNA, 19 nt, Artificial Sequence
  Description of Artificial Sequence: Synthetic oligonucleotide
  Sense strand starting at position 513 of SEQ ID NO: 586327
aguguuugcccucuuguuu

SEQ ID NO: 709607 - RNA, 19 nt, Artificial Sequence
  Description of Artificial Sequence: Synthetic oligonucleotide
  Antisense strand to SEQ ID NO: 709606
aaacaagagggcaaacacu

SEQ ID NO: 709608 - RNA, 19 nt, Artificial Sequence
  Description of Artificial Sequence: Synthetic oligonucleotide
  Sense strand starting at position 860 of SEQ ID NO: 586327
uaaagauagcaccggauua

SEQ ID NO: 709609 - RNA, 19 nt, Artificial Sequence
  Description of Artificial Sequence: Synthetic oligonucleotide
  Antisense strand to SEQ ID NO: 709608
uaauccggugcuaucuuua

SEQ ID NO: 709610 - RNA, 19 nt, Artificial Sequence
  Description of Artificial Sequence: Synthetic oligonucleotide
  Sense strand starting at position 874 of SEQ ID NO: 586327
gauuaauuagcacguggaa

SEQ ID NO: 709611 - RNA, 19 nt, Artificial Sequence
  Description of Artificial Sequence: Synthetic oligonucleotide
  Antisense strand to SEQ ID NO: 709610
uuccacgugcuaauuaauc

SEQ ID NO: 709612 - RNA, 19 nt, Artificial Sequence
  Description of Artificial Sequence: Synthetic oligonucleotide
  Sense strand starting at position 876 of SEQ ID NO: 586327
uuaauuagcacguggaaca

SEQ ID NO: 709613 - RNA, 19 nt, Artificial Sequence
  Description of Artificial Sequence: Synthetic oligonucleotide
  Antisense strand to SEQ ID NO: 709612
uguuccacgugcuaauuaa

SEQ ID NO: 709614 - RNA, 19 nt, Artificial Sequence
  Description of Artificial Sequence: Synthetic oligonucleotide
  Sense strand starting at position 1294 of SEQ ID NO: 586327
aaaggagcgucugugaaua

SEQ ID NO: 709615 - RNA, 19 nt, Artificial Sequence
  Description of Artificial Sequence: Synthetic oligonucleotide
  Antisense strand to SEQ ID NO: 709614
uauucacagacgcuccuuu

SEQ ID NO: 709616 - RNA, 19 nt, Artificial Sequence
  Description of Artificial Sequence: Synthetic oligonucleotide
  Sense strand starting at position 1302 of SEQ ID NO: 586327
gucugugaauaauuagaga

SEQ ID NO: 709617 - RNA, 19 nt, Artificial Sequence
  Description of Artificial Sequence: Synthetic oligonucleotide
  Antisense strand to SEQ ID NO: 709616
ucucuaauuauucacagac

SEQ ID NO: 709618 - RNA, 19 nt, Artificial Sequence
  Description of Artificial Sequence: Synthetic oligonucleotide
  Sense strand starting at position 1336 of SEQ ID NO: 586327
gguuacagucacugcaauu

SEQ ID NO: 709619 - RNA, 19 nt, Artificial Sequence
  Description of Artificial Sequence: Synthetic oligonucleotide
  Antisense strand to SEQ ID NO: 709618
aauugcagugacuguaacc

SEQ ID NO: 709620 - RNA, 19 nt, Artificial Sequence
  Description of Artificial Sequence: Synthetic oligonucleotide
  Sense strand starting at position 1438 of SEQ ID NO: 586327
cgguucuugcauuacauca

SEQ ID NO: 709621 - RNA, 19 nt, Artificial Sequence
  Description of Artificial Sequence: Synthetic oligonucleotide
  Antisense strand to SEQ ID NO: 709620
ugauguaaugcaagaaccg

SEQ ID NO: 709622 - RNA, 19 nt, Artificial Sequence
  Description of Artificial Sequence: Synthetic oligonucleotide
  Sense strand starting at position 1527 of SEQ ID NO: 586327
aaagaaacuucgcccgagu

SEQ ID NO: 709623 - RNA, 19 nt, Artificial Sequence
  Description of Artificial Sequence: Synthetic oligonucleotide
  Antisense strand to SEQ ID NO: 709622
acucgggcgaaguuucuuu

SEQ ID NO: 709624 - RNA, 19 nt, Artificial Sequence
  Description of Artificial Sequence: Synthetic oligonucleotide
  Sense strand starting at position 1554 of SEQ ID NO: 586327
ucucgcuucgcucuuuauu

SEQ ID NO: 709625 - RNA, 19 nt, Artificial Sequence
  Description of Artificial Sequence: Synthetic oligonucleotide
  Antisense strand to SEQ ID NO: 709624
aauaaagagcgaagcgaga

SEQ ID NO: 709626 - RNA, 19 nt, Artificial Sequence
  Description of Artificial Sequence: Synthetic oligonucleotide
  Sense strand starting at position 1660 of SEQ ID NO: 586327
ucaggucucugugcuagaa

SEQ ID NO: 709627 - RNA, 19 nt, Artificial Sequence
  Description of Artificial Sequence: Synthetic oligonucleotide
  Antisense strand to SEQ ID NO: 709626
uucuagcacagagaccuga

SEQ ID NO: 709628 - RNA, 19 nt, Artificial Sequence
  Description of Artificial Sequence: Synthetic oligonucleotide
  Sense strand starting at position 1664 of SEQ ID NO: 586327
gucucugugcuagaacaaa

SEQ ID NO: 709629 - RNA, 19 nt, Artificial Sequence
  Description of Artificial Sequence: Synthetic oligonucleotide
  Antisense strand to SEQ ID NO: 709628
uuuguucuagcacagagac

SEQ ID NO: 709630 - RNA, 19 nt, Artificial Sequence
  Description of Artificial Sequence: Synthetic oligonucleotide
  Sense strand starting at position 1992 of SEQ ID NO: 586327
aagcuuaacuagcuugagu

SEQ ID NO: 709631 - RNA, 19 nt, Artificial Sequence
  Description of Artificial Sequence: Synthetic oligonucleotide
  Antisense strand to SEQ ID NO: 709630
acucaagcuaguuaagcuu

SEQ ID NO: 709632 - RNA, 19 nt, Artificial Sequence
  Description of Artificial Sequence: Synthetic oligonucleotide
  Sense strand starting at position 1994 of SEQ ID NO: 586327
gcuuaacuagcuugaguga

SEQ ID NO: 709633 - RNA, 19 nt, Artificial Sequence
  Description of Artificial Sequence: Synthetic oligonucleotide
  Antisense strand to SEQ ID NO: 709632
ucacucaagcuaguuaagc

SEQ ID NO: 709634 - RNA, 19 nt, Artificial Sequence
  Description of Artificial Sequence: Synthetic oligonucleotide
  Sense strand starting at position 1999 of SEQ ID NO: 586327
acuagcuugagugagucau

SEQ ID NO: 709635 - RNA, 19 nt, Artificial Sequence
  Description of Artificial Sequence: Synthetic oligonucleotide
  Antisense strand to SEQ ID NO: 709634
augacucacucaagcuagu

SEQ ID NO: 709636 - RNA, 19 nt, Artificial Sequence
  Description of Artificial Sequence: Synthetic oligonucleotide
  Sense strand starting at position 2001 of SEQ ID NO: 586327
uagcuugagugagucauau

SEQ ID NO: 709637 - RNA, 19 nt, Artificial Sequence
  Description of Artificial Sequence: Synthetic oligonucleotide
  Antisense strand to SEQ ID NO: 709636
auaugacucacucaagcua

SEQ ID NO: 709638 - RNA, 19 nt, Artificial Sequence
  Description of Artificial Sequence: Synthetic oligonucleotide
  Sense strand starting at position 2010 of SEQ ID NO: 586327
ugagucauauccuucccau

SEQ ID NO: 709639 - RNA, 19 nt, Artificial Sequence
  Description of Artificial Sequence: Synthetic oligonucleotide
  Antisense strand to SEQ ID NO: 709638
augggaaggauaugacuca

SEQ ID NO: 709640 - RNA, 19 nt, Artificial Sequence
  Description of Artificial Sequence: Synthetic oligonucleotide
  Sense strand starting at position 2037 of SEQ ID NO: 586327
aggccaagcgaugauguaa

SEQ ID NO: 709641 - RNA, 19 nt, Artificial Sequence
  Description of Artificial Sequence: Synthetic oligonucleotide
  Antisense strand to SEQ ID NO: 709640
uuacaucaucgcuuggccu

SEQ ID NO: 709642 - RNA, 19 nt, Artificial Sequence
  Description of Artificial Sequence: Synthetic oligonucleotide
  Sense strand starting at position 2164 of SEQ ID NO: 586327
cucagugcuagugaaguca

SEQ ID NO: 709643 - RNA, 19 nt, Artificial Sequence
  Description of Artificial Sequence: Synthetic oligonucleotide
  Antisense strand to SEQ ID NO: 709642
ugacuucacuagcacugag

SEQ ID NO: 709644 - RNA, 19 nt, Artificial Sequence
  Description of Artificial Sequence: Synthetic oligonucleotide
  Sense strand starting at position 2271 of SEQ ID NO: 586327
ugcacuugcccuuagaaac

SEQ ID NO: 709645 - RNA, 19 nt, Artificial Sequence
  Description of Artificial Sequence: Synthetic oligonucleotide
  Antisense strand to SEQ ID NO: 709644
guuucuaagggcaagugca

SEQ ID NO: 709646 - RNA, 19 nt, Artificial Sequence
  Description of Artificial Sequence: Synthetic oligonucleotide
  Sense strand starting at position 2278 of SEQ ID NO: 586327
gcccuuagaaacggguaaa

SEQ ID NO: 709647 - RNA, 19 nt, Artificial Sequence
  Description of Artificial Sequence: Synthetic oligonucleotide
  Antisense strand to SEQ ID NO: 709646
uuuacccguuucuaagggc

SEQ ID NO: 709648 - RNA, 19 nt, Artificial Sequence
  Description of Artificial Sequence: Synthetic oligonucleotide
  Sense strand starting at position 2386 of SEQ ID NO: 586327
gcugguucugcuggaaaca

SEQ ID NO: 709649 - RNA, 19 nt, Artificial Sequence
  Description of Artificial Sequence: Synthetic oligonucleotide
  Antisense strand to SEQ ID NO: 709648
uguuuccagcagaaccagc

SEQ ID NO: 709650 - RNA, 19 nt, Artificial Sequence
  Description of Artificial Sequence: Synthetic oligonucleotide
  Sense strand starting at position 2387 of SEQ ID NO: 586327
cugguucugcuggaaacaa

SEQ ID NO: 709651 - RNA, 19 nt, Artificial Sequence
  Description of Artificial Sequence: Synthetic oligonucleotide
  Antisense strand to SEQ ID NO: 709650
uuguuuccagcagaaccag

SEQ ID NO: 709652 - RNA, 19 nt, Artificial Sequence
  Description of Artificial Sequence: Synthetic oligonucleotide
  Sense strand starting at position 2473 of SEQ ID NO: 586327
ucaagacacguguagagau

SEQ ID NO: 709653 - RNA, 19 nt, Artificial Sequence
  Description of Artificial Sequence: Synthetic oligonucleotide
  Antisense strand to SEQ ID NO: 709652
aucucuacacgugucuuga

SEQ ID NO: 709654 - RNA, 19 nt, Artificial Sequence
  Description of Artificial Sequence: Synthetic oligonucleotide
  Sense strand starting at position 2746 of SEQ ID NO: 586327
caccaagggcugugaaauc

SEQ ID NO: 709655 - RNA, 19 nt, Artificial Sequence
  Description of Artificial Sequence: Synthetic oligonucleotide
  Antisense strand to SEQ ID NO: 709654
gauuucacagcccuuggug

SEQ ID NO: 709656 - RNA, 19 nt, Artificial Sequence
  Description of Artificial Sequence: Synthetic oligonucleotide
  Sense strand starting at position 3290 of SEQ ID NO: 586327
augggaaguucgcuagaau

SEQ ID NO: 709657 - RNA, 19 nt, Artificial Sequence
  Description of Artificial Sequence: Synthetic oligonucleotide
  Antisense strand to SEQ ID NO: 709656
auucuagcgaacuucccau

SEQ ID NO: 709658 - RNA, 19 nt, Artificial Sequence
  Description of Artificial Sequence: Synthetic oligonucleotide
  Sense strand starting at position 3291 of SEQ ID NO: 586327
ugggaaguucgcuagaauu

SEQ ID NO: 709659 - RNA, 19 nt, Artificial Sequence
  Description of Artificial Sequence: Synthetic oligonucleotide
  Antisense strand to SEQ ID NO: 709658
aauucuagcgaacuuccca

SEQ ID NO: 709660 - RNA, 19 nt, Artificial Sequence
  Description of Artificial Sequence: Synthetic oligonucleotide
  Sense strand starting at position 3452 of SEQ ID NO: 586327
ugucucugcacguugcaaa

SEQ ID NO: 709661 - RNA, 19 nt, Artificial Sequence
  Description of Artificial Sequence: Synthetic oligonucleotide
  Antisense strand to SEQ ID NO: 709660
uuugcaacgugcagagaca

SEQ ID NO: 709662 - RNA, 19 nt, Artificial Sequence
  Description of Artificial Sequence: Synthetic oligonucleotide
  Sense strand starting at position 3523 of SEQ ID NO: 586327
auuaaagacguccacugau

SEQ ID NO: 709663 - RNA, 19 nt, Artificial Sequence
  Description of Artificial Sequence: Synthetic oligonucleotide
  Antisense strand to SEQ ID NO: 709662
aucaguggacgucuuuaau

SEQ ID NO: 709664 - RNA, 19 nt, Artificial Sequence
  Description of Artificial Sequence: Synthetic oligonucleotide
  Sense strand starting at position 3678 of SEQ ID NO: 586327
gugcuuucuccagcaagcu

SEQ ID NO: 709665 - RNA, 19 nt, Artificial Sequence
  Description of Artificial Sequence: Synthetic oligonucleotide
  Antisense strand to SEQ ID NO: 709664
agcuugcuggagaaagcac

SEQ ID NO: 709666 - RNA, 19 nt, Artificial Sequence
  Description of Artificial Sequence: Synthetic oligonucleotide
  Sense strand starting at position 3705 of SEQ ID NO: 586327
gcuugacauccucaauuga

SEQ ID NO: 709667 - RNA, 19 nt, Artificial Sequence
  Description of Artificial Sequence: Synthetic oligonucleotide
  Antisense strand to SEQ ID NO: 709666
ucaauugaggaugucaagc

SEQ ID NO: 709668 - RNA, 19 nt, Artificial Sequence
  Description of Artificial Sequence: Synthetic oligonucleotide
  Sense strand starting at position 3772 of SEQ ID NO: 586327
cucugaauuagaggugauc

SEQ ID NO: 709669 - RNA, 19 nt, Artificial Sequence
  Description of Artificial Sequence: Synthetic oligonucleotide
  Antisense strand to SEQ ID NO: 709668
gaucaccucuaauucagag

SEQ ID NO: 709670 - RNA, 19 nt, Artificial Sequence
  Description of Artificial Sequence: Synthetic oligonucleotide
  Sense strand starting at position 3784 of SEQ ID NO: 586327
ggugaucagccauaauuac

SEQ ID NO: 709671 - RNA, 19 nt, Artificial Sequence
  Description of Artificial Sequence: Synthetic oligonucleotide
  Antisense strand to SEQ ID NO: 709670
guaauuauggcugaucacc

SEQ ID NO: 709672 - RNA, 19 nt, Artificial Sequence
  Description of Artificial Sequence: Synthetic oligonucleotide
  Sense strand starting at position 3834 of SEQ ID NO: 586327
gcggcaaaugugguuguua

SEQ ID NO: 709673 - RNA, 19 nt, Artificial Sequence
  Description of Artificial Sequence: Synthetic oligonucleotide
  Antisense strand to SEQ ID NO: 709672
uaacaaccacauuugccgc

SEQ ID NO: 709674 - RNA, 19 nt, Artificial Sequence
  Description of Artificial Sequence: Synthetic oligonucleotide
  Sense strand starting at position 3871 of SEQ ID NO: 586327
gucaguggccuguauaacu

SEQ ID NO: 709675 - RNA, 19 nt, Artificial Sequence
  Description of Artificial Sequence: Synthetic oligonucleotide
  Antisense strand to SEQ ID NO: 709674
aguuauacaggccacugac

SEQ ID NO: 709676 - RNA, 19 nt, Artificial Sequence
  Description of Artificial Sequence: Synthetic oligonucleotide
  Sense strand starting at position 3880 of SEQ ID NO: 586327
cuguauaacucauuuacgu

SEQ ID NO: 709677 - RNA, 19 nt, Artificial Sequence
  Description of Artificial Sequence: Synthetic oligonucleotide
  Antisense strand to SEQ ID NO: 709676
acguaaaugaguuauacag

SEQ ID NO: 709678 - RNA, 19 nt, Artificial Sequence
  Description of Artificial Sequence: Synthetic oligonucleotide
  Sense strand starting at position 186 of SEQ ID NO: 586328
augaaauggugaucucucu

SEQ ID NO: 709679 - RNA, 19 nt, Artificial Sequence
  Description of Artificial Sequence: Synthetic oligonucleotide
  Antisense strand to SEQ ID NO: 709678
agagagaucaccauuucau

SEQ ID NO: 709680 - RNA, 19 nt, Artificial Sequence
  Description of Artificial Sequence: Synthetic oligonucleotide
  Sense strand starting at position 288 of SEQ ID NO: 586328
cugcaugaucuugaguaaa

SEQ ID NO: 709681 - RNA, 19 nt, Artificial Sequence
  Description of Artificial Sequence: Synthetic oligonucleotide
  Antisense strand to SEQ ID NO: 709680
uuuacucaagaucaugcag

SEQ ID NO: 709682 - RNA, 19 nt, Artificial Sequence
  Description of Artificial Sequence: Synthetic oligonucleotide
  Sense strand starting at position 330 of SEQ ID NO: 586328
guuuccucagcagaacaga

SEQ ID NO: 709683 - RNA, 19 nt, Artificial Sequence
  Description of Artificial Sequence: Synthetic oligonucleotide
  Antisense strand to SEQ ID NO: 709682
ucuguucugcugaggaaac

SEQ ID NO: 709684 - RNA, 19 nt, Artificial Sequence
  Description of Artificial Sequence: Synthetic oligonucleotide
  Sense strand starting at position 537 of SEQ ID NO: 586328
agcugaguucucuaaggga

SEQ ID NO: 709685 - RNA, 19 nt, Artificial Sequence
  Description of Artificial Sequence: Synthetic oligonucleotide
  Antisense strand to SEQ ID NO: 709684
ucccuuagagaacucagcu

SEQ ID NO: 709686 - RNA, 19 nt, Artificial Sequence
  Description of Artificial Sequence: Synthetic oligonucleotide
  Sense strand starting at position 796 of SEQ ID NO: 586328
aaucaaauggugugaaaug

SEQ ID NO: 709687 - RNA, 19 nt, Artificial Sequence
  Description of Artificial Sequence: Synthetic oligonucleotide
  Antisense strand to SEQ ID NO: 709686
cauuucacaccauuugauu

SEQ ID NO: 709688 - RNA, 19 nt, Artificial Sequence
  Description of Artificial Sequence: Synthetic oligonucleotide
  Sense strand starting at position 946 of SEQ ID NO: 586328
uggaaauuguacuuguuua

SEQ ID NO: 709689 - RNA, 19 nt, Artificial Sequence
  Description of Artificial Sequence: Synthetic oligonucleotide
  Antisense strand to SEQ ID NO: 709688
uaaacaaguacaauuucca

SEQ ID NO: 709690 - RNA, 19 nt, Artificial Sequence
  Description of Artificial Sequence: Synthetic oligonucleotide
  Sense strand starting at position 947 of SEQ ID NO: 586328
ggaaauuguacuuguuuag

SEQ ID NO: 709691 - RNA, 19 nt, Artificial Sequence
  Description of Artificial Sequence: Synthetic oligonucleotide
  Antisense strand to SEQ ID NO: 709690
cuaaacaaguacaauuucc

SEQ ID NO: 709692 - RNA, 19 nt, Artificial Sequence
  Description of Artificial Sequence: Synthetic oligonucleotide
  Sense strand starting at position 951 of SEQ ID NO: 586328
auuguacuuguuuaggaaa

SEQ ID NO: 709693 - RNA, 19 nt, Artificial Sequence
  Description of Artificial Sequence: Synthetic oligonucleotide
  Antisense strand to SEQ ID NO: 709692
uuuccuaaacaaguacaau

SEQ ID NO: 709694 - RNA, 19 nt, Artificial Sequence
  Description of Artificial Sequence: Synthetic oligonucleotide
  Sense strand starting at position 1028 of SEQ ID NO: 586328
uugcacuugguauaguuaa

SEQ ID NO: 709695 - RNA, 19 nt, Artificial Sequence
  Description of Artificial Sequence: Synthetic oligonucleotide
  Antisense strand to SEQ ID NO: 709694
uuaacuauaccaagugcaa

SEQ ID NO: 709696 - RNA, 19 nt, Artificial Sequence
  Description of Artificial Sequence: Synthetic oligonucleotide
  Sense strand starting at position 1335 of SEQ ID NO: 586328
aggccauaugcacaaaugu

SEQ ID NO: 709697 - RNA, 19 nt, Artificial Sequence
  Description of Artificial Sequence: Synthetic oligonucleotide
  Antisense strand to SEQ ID NO: 709696
acauuugugcauauggccu

SEQ ID NO: 709698 - RNA, 19 nt, Artificial Sequence
  Description of Artificial Sequence: Synthetic oligonucleotide
  Sense strand starting at position 1807 of SEQ ID NO: 586328
acaagugagcaauggcaga

SEQ ID NO: 709699 - RNA, 19 nt, Artificial Sequence
  Description of Artificial Sequence: Synthetic oligonucleotide
  Antisense strand to SEQ ID NO: 709698
ucugccauugcucacuugu

SEQ ID NO: 709700 - RNA, 19 nt, Artificial Sequence
  Description of Artificial Sequence: Synthetic oligonucleotide
  Sense strand starting at position 1812 of SEQ ID NO: 586328
ugagcaauggcagaaaugu

SEQ ID NO: 709701 - RNA, 19 nt, Artificial Sequence
  Description of Artificial Sequence: Synthetic oligonucleotide
  Antisense strand to SEQ ID NO: 709700
acauuucugccauugcuca

SEQ ID NO: 709702 - RNA, 19 nt, Artificial Sequence
  Description of Artificial Sequence: Synthetic oligonucleotide
  Sense strand starting at position 1893 of SEQ ID NO: 586328
cugucacacgaguauuaua

SEQ ID NO: 709703 - RNA, 19 nt, Artificial Sequence
  Description of Artificial Sequence: Synthetic oligonucleotide
  Antisense strand to SEQ ID NO: 709702
uauaauacucgugugacag

SEQ ID NO: 709704 - RNA, 19 nt, Artificial Sequence
  Description of Artificial Sequence: Synthetic oligonucleotide
  Sense strand starting at position 2028 of SEQ ID NO: 586328
uuugaaauguuucuccuga

SEQ ID NO: 709705 - RNA, 19 nt, Artificial Sequence
  Description of Artificial Sequence: Synthetic oligonucleotide
  Antisense strand to SEQ ID NO: 709704
ucaggagaaacauuucaaa

SEQ ID NO: 709706 - RNA, 19 nt, Artificial Sequence
  Description of Artificial Sequence: Synthetic oligonucleotide
  Sense strand starting at position 2029 of SEQ ID NO: 586328
uugaaauguuucuccugau

SEQ ID NO: 709707 - RNA, 19 nt, Artificial Sequence
  Description of Artificial Sequence: Synthetic oligonucleotide
  Antisense strand to SEQ ID NO: 709706
aucaggagaaacauuucaa

SEQ ID NO: 709708 - RNA, 19 nt, Artificial Sequence
  Description of Artificial Sequence: Synthetic oligonucleotide
  Sense strand starting at position 2030 of SEQ ID NO: 586328
ugaaauguuucuccugaug

SEQ ID NO: 709709 - RNA, 19 nt, Artificial Sequence
  Description of Artificial Sequence: Synthetic oligonucleotide
  Antisense strand to SEQ ID NO: 709708
caucaggagaaacauuuca

SEQ ID NO: 709710 - RNA, 19 nt, Artificial Sequence
  Description of Artificial Sequence: Synthetic oligonucleotide
  Sense strand starting at position 2050 of SEQ ID NO: 586328
agaugaugcagcugacacu

SEQ ID NO: 709711 - RNA, 19 nt, Artificial Sequence
  Description of Artificial Sequence: Synthetic oligonucleotide
  Antisense strand to SEQ ID NO: 709710
agugucagcugcaucaucu

SEQ ID NO: 709712 - RNA, 19 nt, Artificial Sequence
  Description of Artificial Sequence: Synthetic oligonucleotide
  Sense strand starting at position 2074 of SEQ ID NO: 586328
uuaagaggcugguuauaug

SEQ ID NO: 709713 - RNA, 19 nt, Artificial Sequence
  Description of Artificial Sequence: Synthetic oligonucleotide
  Antisense strand to SEQ ID NO: 709712
cauauaaccagccucuuaa

SEQ ID NO: 709714 - RNA, 19 nt, Artificial Sequence
  Description of Artificial Sequence: Synthetic oligonucleotide
  Sense strand starting at position 2145 of SEQ ID NO: 586328
ggaaacgucugaucauaac

SEQ ID NO: 709715 - RNA, 19 nt, Artificial Sequence
  Description of Artificial Sequence: Synthetic oligonucleotide
  Antisense strand to SEQ ID NO: 709714
guuaugaucagacguuucc

SEQ ID NO: 709716 - RNA, 19 nt, Artificial Sequence
  Description of Artificial Sequence: Synthetic oligonucleotide
  Sense strand starting at position 2182 of SEQ ID NO: 586328
agcucuuaucaguaugcaa

SEQ ID NO: 709717 - RNA, 19 nt, Artificial Sequence
  Description of Artificial Sequence: Synthetic oligonucleotide
  Antisense strand to SEQ ID NO: 709716
uugcauacugauaagagcu

SEQ ID NO: 709718 - RNA, 19 nt, Artificial Sequence
  Description of Artificial Sequence: Synthetic oligonucleotide
  Sense strand starting at position 2385 of SEQ ID NO: 586328
ucagaacagccuuguaaau

SEQ ID NO: 709719 - RNA, 19 nt, Artificial Sequence
  Description of Artificial Sequence: Synthetic oligonucleotide
  Antisense strand to SEQ ID NO: 709718
auuuacaaggcuguucuga

SEQ ID NO: 709720 - RNA, 19 nt, Artificial Sequence
  Description of Artificial Sequence: Synthetic oligonucleotide
  Sense strand starting at position 2410 of SEQ ID NO: 586328
agguaucauuucguuguuu

SEQ ID NO: 709721 - RNA, 19 nt, Artificial Sequence
  Description of Artificial Sequence: Synthetic oligonucleotide
  Antisense strand to SEQ ID NO: 709720
aaacaacgaaaugauaccu

SEQ ID NO: 709722 - RNA, 19 nt, Artificial Sequence
  Description of Artificial Sequence: Synthetic oligonucleotide
  Sense strand starting at position 2411 of SEQ ID NO: 586328
gguaucauuucguuguuua

SEQ ID NO: 709723 - RNA, 19 nt, Artificial Sequence
  Description of Artificial Sequence: Synthetic oligonucleotide
  Antisense strand to SEQ ID NO: 709722
uaaacaacgaaaugauacc

SEQ ID NO: 709724 - RNA, 19 nt, Artificial Sequence
  Description of Artificial Sequence: Synthetic oligonucleotide
  Sense strand starting at position 2412 of SEQ ID NO: 586328
guaucauuucguuguuuau

SEQ ID NO: 709725 - RNA, 19 nt, Artificial Sequence
  Description of Artificial Sequence: Synthetic oligonucleotide
  Antisense strand to SEQ ID NO: 709724
auaaacaacgaaaugauac

SEQ ID NO: 709726 - RNA, 19 nt, Artificial Sequence
  Description of Artificial Sequence: Synthetic oligonucleotide
  Sense strand starting at position 2415 of SEQ ID NO: 586328
ucauuucguuguuuauaga

SEQ ID NO: 709727 - RNA, 19 nt, Artificial Sequence
  Description of Artificial Sequence: Synthetic oligonucleotide
  Antisense strand to SEQ ID NO: 709726
ucuauaaacaacgaaauga

SEQ ID NO: 709728 - RNA, 19 nt, Artificial Sequence
  Description of Artificial Sequence: Synthetic oligonucleotide
  Sense strand starting at position 2423 of SEQ ID NO: 586328
uuguuuauagauugggaaa

SEQ ID NO: 709729 - RNA, 19 nt, Artificial Sequence
  Description of Artificial Sequence: Synthetic oligonucleotide
  Antisense strand to SEQ ID NO: 709728
uuucccaaucuauaaacaa

SEQ ID NO: 709730 - RNA, 19 nt, Artificial Sequence
  Description of Artificial Sequence: Synthetic oligonucleotide
  Sense strand starting at position 2424 of SEQ ID NO: 586328
uguuuauagauugggaaac

SEQ ID NO: 709731 - RNA, 19 nt, Artificial Sequence
  Description of Artificial Sequence: Synthetic oligonucleotide
  Antisense strand to SEQ ID NO: 709730
guuucccaaucuauaaaca

SEQ ID NO: 709732 - RNA, 19 nt, Artificial Sequence
  Description of Artificial Sequence: Synthetic oligonucleotide
  Sense strand starting at position 2529 of SEQ ID NO: 586328
gguggccuaggugauaauu

SEQ ID NO: 709733 - RNA, 19 nt, Artificial Sequence
  Description of Artificial Sequence: Synthetic oligonucleotide
  Antisense strand to SEQ ID NO: 709732
aauuaucaccuaggccacc

SEQ ID NO: 709734 - RNA, 19 nt, Artificial Sequence
  Description of Artificial Sequence: Synthetic oligonucleotide
  Sense strand starting at position 2741 of SEQ ID NO: 586328
uucuaugaaucuguggaau

SEQ ID NO: 709735 - RNA, 19 nt, Artificial Sequence
  Description of Artificial Sequence: Synthetic oligonucleotide
  Antisense strand to SEQ ID NO: 709734
auuccacagauucauagaa

SEQ ID NO: 709736 - RNA, 19 nt, Artificial Sequence
  Description of Artificial Sequence: Synthetic oligonucleotide
  Sense strand starting at position 2880 of SEQ ID NO: 586328
gcugaauaucuagguaaac

SEQ ID NO: 709737 - RNA, 19 nt, Artificial Sequence
  Description of Artificial Sequence: Synthetic oligonucleotide
  Antisense strand to SEQ ID NO: 709736
guuuaccuagauauucagc

SEQ ID NO: 709738 - RNA, 19 nt, Artificial Sequence
  Description of Artificial Sequence: Synthetic oligonucleotide
  Sense strand starting at position 2881 of SEQ ID NO: 586328
cugaauaucuagguaaacu

SEQ ID NO: 709739 - RNA, 19 nt, Artificial Sequence
  Description of Artificial Sequence: Synthetic oligonucleotide
  Antisense strand to SEQ ID NO: 709738
aguuuaccuagauauucag

SEQ ID NO: 709740 - RNA, 19 nt, Artificial Sequence
  Description of Artificial Sequence: Synthetic oligonucleotide
  Sense strand starting at position 2889 of SEQ ID NO: 586328
cuagguaaacuguaauagu

SEQ ID NO: 709741 - RNA, 19 nt, Artificial Sequence
  Description of Artificial Sequence: Synthetic oligonucleotide
  Antisense strand to SEQ ID NO: 709740
acuauuacaguuuaccuag

SEQ ID NO: 709742 - RNA, 19 nt, Artificial Sequence
  Description of Artificial Sequence: Synthetic oligonucleotide
  Sense strand starting at position 3452 of SEQ ID NO: 586328
aaugucagauaccuggaau

SEQ ID NO: 709743 - RNA, 19 nt, Artificial Sequence
  Description of Artificial Sequence: Synthetic oligonucleotide
  Antisense strand to SEQ ID NO: 709742
auuccagguaucugacauu

SEQ ID NO: 709744 - RNA, 19 nt, Artificial Sequence
  Description of Artificial Sequence: Synthetic oligonucleotide
  Sense strand starting at position 3517 of SEQ ID NO: 586328
cggaaucaggaaggucauu

SEQ ID NO: 709745 - RNA, 19 nt, Artificial Sequence
  Description of Artificial Sequence: Synthetic oligonucleotide
  Antisense strand to SEQ ID NO: 709744
aaugaccuuccugauuccg

SEQ ID NO: 709746 - RNA, 19 nt, Artificial Sequence
  Description of Artificial Sequence: Synthetic oligonucleotide
  Sense strand starting at position 3522 of SEQ ID NO: 586328
ucaggaaggucauuaguua

SEQ ID NO: 709747 - RNA, 19 nt, Artificial Sequence
  Description of Artificial Sequence: Synthetic oligonucleotide
  Antisense strand to SEQ ID NO: 709746
uaacuaaugaccuuccuga

SEQ ID NO: 709748 - RNA, 19 nt, Artificial Sequence
  Description of Artificial Sequence: Synthetic oligonucleotide
  Sense strand starting at position 3526 of SEQ ID NO: 586328
gaaggucauuaguuaaaug

SEQ ID NO: 709749 - RNA, 19 nt, Artificial Sequence
  Description of Artificial Sequence: Synthetic oligonucleotide
  Antisense strand to SEQ ID NO: 709748
cauuuaacuaaugaccuuc

SEQ ID NO: 709750 - RNA, 19 nt, Artificial Sequence
  Description of Artificial Sequence: Synthetic oligonucleotide
  Sense strand starting at position 3675 of SEQ ID NO: 586328
aguugaguaaagugagaua

SEQ ID NO: 709751 - RNA, 19 nt, Artificial Sequence
  Description of Artificial Sequence: Synthetic oligonucleotide
  Antisense strand to SEQ ID NO: 709750
uaucucacuuuacucaacu

SEQ ID NO: 709752 - RNA, 19 nt, Artificial Sequence
  Description of Artificial Sequence: Synthetic oligonucleotide
  Sense strand starting at position 3686 of SEQ ID NO: 586328
gugagauaaguagaagucu

SEQ ID NO: 709753 - RNA, 19 nt, Artificial Sequence
  Description of Artificial Sequence: Synthetic oligonucleotide
  Antisense strand to SEQ ID NO: 709752
agacuucuacuuaucucac

SEQ ID NO: 709754 - RNA, 19 nt, Artificial Sequence
  Description of Artificial Sequence: Synthetic oligonucleotide
  Sense strand starting at position 3692 of SEQ ID NO: 586328
uaaguagaagucuggaucu

SEQ ID NO: 709755 - RNA, 19 nt, Artificial Sequence
  Description of Artificial Sequence: Synthetic oligonucleotide
  Antisense strand to SEQ ID NO: 709754
agauccagacuucuacuua

SEQ ID NO: 709756 - RNA, 19 nt, Artificial Sequence
  Description of Artificial Sequence: Synthetic oligonucleotide
  Sense strand starting at position 3694 of SEQ ID NO: 586328
aguagaagucuggaucuuu

SEQ ID NO: 709757 - RNA, 19 nt, Artificial Sequence
  Description of Artificial Sequence: Synthetic oligonucleotide
  Antisense strand to SEQ ID NO: 709756
aaagauccagacuucuacu

SEQ ID NO: 709758 - RNA, 19 nt, Artificial Sequence
  Description of Artificial Sequence: Synthetic oligonucleotide
  Sense strand starting at position 88 of SEQ ID NO: 586329
gagaaauagucauagauuu

SEQ ID NO: 709759 - RNA, 19 nt, Artificial Sequence
  Description of Artificial Sequence: Synthetic oligonucleotide
  Antisense strand to SEQ ID NO: 709758
aaaucuaugacuauuucuc

SEQ ID NO: 709760 - RNA, 19 nt, Artificial Sequence
  Description of Artificial Sequence: Synthetic oligonucleotide
  Sense strand starting at position 120 of SEQ ID NO: 586329
cuaauuaagcauugguuga

SEQ ID NO: 709761 - RNA, 19 nt, Artificial Sequence
  Description of Artificial Sequence: Synthetic oligonucleotide
  Antisense strand to SEQ ID NO: 709760
ucaaccaaugcuuaauuag

SEQ ID NO: 709762 - RNA, 19 nt, Artificial Sequence
  Description of Artificial Sequence: Synthetic oligonucleotide
  Sense strand starting at position 122 of SEQ ID NO: 586329
aauuaagcauugguugauu

SEQ ID NO: 709763 - RNA, 19 nt, Artificial Sequence
  Description of Artificial Sequence: Synthetic oligonucleotide
  Antisense strand to SEQ ID NO: 709762
aaucaaccaaugcuuaauu

SEQ ID NO: 709764 - RNA, 19 nt, Artificial Sequence
  Description of Artificial Sequence: Synthetic oligonucleotide
  Sense strand starting at position 130 of SEQ ID NO: 586329
auugguugauucccauaau

SEQ ID NO: 709765 - RNA, 19 nt, Artificial Sequence
  Description of Artificial Sequence: Synthetic oligonucleotide
  Antisense strand to SEQ ID NO: 709764
auuaugggaaucaaccaau

SEQ ID NO: 709766 - RNA, 19 nt, Artificial Sequence
  Description of Artificial Sequence: Synthetic oligonucleotide
  Sense strand starting at position 184 of SEQ ID NO: 586329
gacugagaucacuguucca

SEQ ID NO: 709767 - RNA, 19 nt, Artificial Sequence
  Description of Artificial Sequence: Synthetic oligonucleotide
  Antisense strand to SEQ ID NO: 709766
uggaacagugaucucaguc

SEQ ID NO: 709768 - RNA, 19 nt, Artificial Sequence
  Description of Artificial Sequence: Synthetic oligonucleotide
  Sense strand starting at position 187 of SEQ ID NO: 586329
ugagaucacuguuccaucu

SEQ ID NO: 709769 - RNA, 19 nt, Artificial Sequence
  Description of Artificial Sequence: Synthetic oligonucleotide
  Antisense strand to SEQ ID NO: 709768
agauggaacagugaucuca

SEQ ID NO: 709770 - RNA, 19 nt, Artificial Sequence
  Description of Artificial Sequence: Synthetic oligonucleotide
  Sense strand starting at position 239 of SEQ ID NO: 586329
gaccuuaaauugcuguaga

SEQ ID NO: 709771 - RNA, 19 nt, Artificial Sequence
  Description of Artificial Sequence: Synthetic oligonucleotide
  Antisense strand to SEQ ID NO: 709770
ucuacagcaauuuaagguc

SEQ ID NO: 709772 - RNA, 19 nt, Artificial Sequence
  Description of Artificial Sequence: Synthetic oligonucleotide
  Sense strand starting at position 242 of SEQ ID NO: 586329
cuuaaauugcuguagaaau

SEQ ID NO: 709773 - RNA, 19 nt, Artificial Sequence
  Description of Artificial Sequence: Synthetic oligonucleotide
  Antisense strand to SEQ ID NO: 709772
auuucuacagcaauuuaag

SEQ ID NO: 709774 - RNA, 19 nt, Artificial Sequence
  Description of Artificial Sequence: Synthetic oligonucleotide
  Sense strand starting at position 260 of SEQ ID NO: 586329
uccaauuuguaagaagcaa

SEQ ID NO: 709775 - RNA, 19 nt, Artificial Sequence
  Description of Artificial Sequence: Synthetic oligonucleotide
  Antisense strand to SEQ ID NO: 709774
uugcuucuuacaaauugga

SEQ ID NO: 709776 - RNA, 19 nt, Artificial Sequence
  Description of Artificial Sequence: Synthetic oligonucleotide
  Sense strand starting at position 329 of SEQ ID NO: 586329
cuaacugcauugcuuagaa

SEQ ID NO: 709777 - RNA, 19 nt, Artificial Sequence
  Description of Artificial Sequence: Synthetic oligonucleotide
  Antisense strand to SEQ ID NO: 709776
uucuaagcaaugcaguuag

SEQ ID NO: 709778 - RNA, 19 nt, Artificial Sequence
  Description of Artificial Sequence: Synthetic oligonucleotide
  Sense strand starting at position 469 of SEQ ID NO: 586329
acaucuuagugaucuagug

SEQ ID NO: 709779 - RNA, 19 nt, Artificial Sequence
  Description of Artificial Sequence: Synthetic oligonucleotide
  Antisense strand to SEQ ID NO: 709778
cacuagaucacuaagaugu

SEQ ID NO: 709780 - RNA, 19 nt, Artificial Sequence
  Description of Artificial Sequence: Synthetic oligonucleotide
  Sense strand starting at position 562 of SEQ ID NO: 586329
ugugauaccucauugcuaa

SEQ ID NO: 709781 - RNA, 19 nt, Artificial Sequence
  Description of Artificial Sequence: Synthetic oligonucleotide
  Antisense strand to SEQ ID NO: 709780
uuagcaaugagguaucaca

SEQ ID NO: 709782 - RNA, 19 nt, Artificial Sequence
  Description of Artificial Sequence: Synthetic oligonucleotide
  Sense strand starting at position 563 of SEQ ID NO: 586329
gugauaccucauugcuaaa

SEQ ID NO: 709783 - RNA, 19 nt, Artificial Sequence
  Description of Artificial Sequence: Synthetic oligonucleotide
  Antisense strand to SEQ ID NO: 709782
uuuagcaaugagguaucac

SEQ ID NO: 709784 - RNA, 19 nt, Artificial Sequence
  Description of Artificial Sequence: Synthetic oligonucleotide
  Sense strand starting at position 633 of SEQ ID NO: 586329
cuccaugauugauugguuu

SEQ ID NO: 709785 - RNA, 19 nt, Artificial Sequence
  Description of Artificial Sequence: Synthetic oligonucleotide
  Antisense strand to SEQ ID NO: 709784
aaaccaaucaaucauggag

SEQ ID NO: 709786 - RNA, 19 nt, Artificial Sequence
  Description of Artificial Sequence: Synthetic oligonucleotide
  Sense strand starting at position 881 of SEQ ID NO: 586329
acgacugaccgcuaauuga

SEQ ID NO: 709787 - RNA, 19 nt, Artificial Sequence
  Description of Artificial Sequence: Synthetic oligonucleotide
  Antisense strand to SEQ ID NO: 709786
ucaauuagcggucagucgu

SEQ ID NO: 709788 - RNA, 19 nt, Artificial Sequence
  Description of Artificial Sequence: Synthetic oligonucleotide
  Sense strand starting at position 935 of SEQ ID NO: 586329
aauagugggcuuggagaua

SEQ ID NO: 709789 - RNA, 19 nt, Artificial Sequence
  Description of Artificial Sequence: Synthetic oligonucleotide
  Antisense strand to SEQ ID NO: 709788
uaucuccaagcccacuauu

SEQ ID NO: 709790 - RNA, 19 nt, Artificial Sequence
  Description of Artificial Sequence: Synthetic oligonucleotide
  Sense strand starting at position 1075 of SEQ ID NO: 586329
gggagacacaagugaguuu

SEQ ID NO: 709791 - RNA, 19 nt, Artificial Sequence
  Description of Artificial Sequence: Synthetic oligonucleotide
  Antisense strand to SEQ ID NO: 709790
aaacucacuugugucuccc

SEQ ID NO: 709792 - RNA, 19 nt, Artificial Sequence
  Description of Artificial Sequence: Synthetic oligonucleotide
  Sense strand starting at position 1170 of SEQ ID NO: 586329
auacacaucuagguuugaa

SEQ ID NO: 709793 - RNA, 19 nt, Artificial Sequence
  Description of Artificial Sequence: Synthetic oligonucleotide
  Antisense strand to SEQ ID NO: 709792
uucaaaccuagauguguau

SEQ ID NO: 709794 - RNA, 19 nt, Artificial Sequence
  Description of Artificial Sequence: Synthetic oligonucleotide
  Sense strand starting at position 1381 of SEQ ID NO: 586329
gggaaauaauagucuuauu

SEQ ID NO: 709795 - RNA, 19 nt, Artificial Sequence
  Description of Artificial Sequence: Synthetic oligonucleotide
  Antisense strand to SEQ ID NO: 709794
aauaagacuauuauuuccc

SEQ ID NO: 709796 - RNA, 19 nt, Artificial Sequence
  Description of Artificial Sequence: Synthetic oligonucleotide
  Sense strand starting at position 1451 of SEQ ID NO: 586329
cuauaagucccaggaaacu

SEQ ID NO: 709797 - RNA, 19 nt, Artificial Sequence
  Description of Artificial Sequence: Synthetic oligonucleotide
  Antisense strand to SEQ ID NO: 709796
aguuuccugggacuuauag

SEQ ID NO: 709798 - RNA, 19 nt, Artificial Sequence
  Description of Artificial Sequence: Synthetic oligonucleotide
  Sense strand starting at position 1990 of SEQ ID NO: 586329
guuguaaauguugaagaac

SEQ ID NO: 709799 - RNA, 19 nt, Artificial Sequence
  Description of Artificial Sequence: Synthetic oligonucleotide
  Antisense strand to SEQ ID NO: 709798
guucuucaacauuuacaac

SEQ ID NO: 709800 - RNA, 19 nt, Artificial Sequence
  Description of Artificial Sequence: Synthetic oligonucleotide
  Sense strand starting at position 2071 of SEQ ID NO: 586329
aacagugcgccaucuaguu

SEQ ID NO: 709801 - RNA, 19 nt, Artificial Sequence
  Description of Artificial Sequence: Synthetic oligonucleotide
  Antisense strand to SEQ ID NO: 709800
aacuagauggcgcacuguu

SEQ ID NO: 709802 - RNA, 19 nt, Artificial Sequence
  Description of Artificial Sequence: Synthetic oligonucleotide
  Sense strand starting at position 2166 of SEQ ID NO: 586329
gcucuaaagguccaauugu

SEQ ID NO: 709803 - RNA, 19 nt, Artificial Sequence
  Description of Artificial Sequence: Synthetic oligonucleotide
  Antisense strand to SEQ ID NO: 709802
acaauuggaccuuuagagc

SEQ ID NO: 709804 - RNA, 19 nt, Artificial Sequence
  Description of Artificial Sequence: Synthetic oligonucleotide
  Sense strand starting at position 2336 of SEQ ID NO: 586329
agagcuuauuauucugaag

SEQ ID NO: 709805 - RNA, 19 nt, Artificial Sequence
  Description of Artificial Sequence: Synthetic oligonucleotide
  Antisense strand to SEQ ID NO: 709804
cuucagaauaauaagcucu

SEQ ID NO: 709806 - RNA, 19 nt, Artificial Sequence
  Description of Artificial Sequence: Synthetic oligonucleotide
  Sense strand starting at position 2435 of SEQ ID NO: 586329
aucuaaagagccuguuaau

SEQ ID NO: 709807 - RNA, 19 nt, Artificial Sequence
  Description of Artificial Sequence: Synthetic oligonucleotide
  Antisense strand to SEQ ID NO: 709806
auuaacaggcucuuuagau

SEQ ID NO: 709808 - RNA, 19 nt, Artificial Sequence
  Description of Artificial Sequence: Synthetic oligonucleotide
  Sense strand starting at position 2469 of SEQ ID NO: 586329
ucuggucagagguaacagu

SEQ ID NO: 709809 - RNA, 19 nt, Artificial Sequence
  Description of Artificial Sequence: Synthetic oligonucleotide
  Antisense strand to SEQ ID NO: 709808
acuguuaccucugaccaga

SEQ ID NO: 709810 - RNA, 19 nt, Artificial Sequence
  Description of Artificial Sequence: Synthetic oligonucleotide
  Sense strand starting at position 2477 of SEQ ID NO: 586329
gagguaacaguuugaauaa

SEQ ID NO: 709811 - RNA, 19 nt, Artificial Sequence
  Description of Artificial Sequence: Synthetic oligonucleotide
  Antisense strand to SEQ ID NO: 709810
uuauucaaacuguuaccuc

SEQ ID NO: 709812 - RNA, 19 nt, Artificial Sequence
  Description of Artificial Sequence: Synthetic oligonucleotide
  Sense strand starting at position 2619 of SEQ ID NO: 586329
acauauauuguguggaggu

SEQ ID NO: 709813 - RNA, 19 nt, Artificial Sequence
  Description of Artificial Sequence: Synthetic oligonucleotide
  Antisense strand to SEQ ID NO: 709812
accuccacacaauauaugu

SEQ ID NO: 709814 - RNA, 19 nt, Artificial Sequence
  Description of Artificial Sequence: Synthetic oligonucleotide
  Sense strand starting at position 2621 of SEQ ID NO: 586329
auauauuguguggagguua

SEQ ID NO: 709815 - RNA, 19 nt, Artificial Sequence
  Description of Artificial Sequence: Synthetic oligonucleotide
  Antisense strand to SEQ ID NO: 709814
uaaccuccacacaauauau

SEQ ID NO: 709816 - RNA, 19 nt, Artificial Sequence
  Description of Artificial Sequence: Synthetic oligonucleotide
  Sense strand starting at position 2752 of SEQ ID NO: 586329
uuucgcuuugaagaaagua

SEQ ID NO: 709817 - RNA, 19 nt, Artificial Sequence
  Description of Artificial Sequence: Synthetic oligonucleotide
  Antisense strand to SEQ ID NO: 709816
uacuuucuucaaagcgaaa

SEQ ID NO: 709818 - RNA, 19 nt, Artificial Sequence
  Description of Artificial Sequence: Synthetic oligonucleotide
  Sense strand starting at position 3190 of SEQ ID NO: 586329
aaaugaaacguuuagucuu

SEQ ID NO: 709819 - RNA, 19 nt, Artificial Sequence
  Description of Artificial Sequence: Synthetic oligonucleotide
  Antisense strand to SEQ ID NO: 709818
aagacuaaacguuucauuu

SEQ ID NO: 709820 - RNA, 19 nt, Artificial Sequence
  Description of Artificial Sequence: Synthetic oligonucleotide
  Sense strand starting at position 3352 of SEQ ID NO: 586329
gcaaacauuuccugauuug

SEQ ID NO: 709821 - RNA, 19 nt, Artificial Sequence
  Description of Artificial Sequence: Synthetic oligonucleotide
  Antisense strand to SEQ ID NO: 709820
caaaucaggaaauguuugc

SEQ ID NO: 709822 - RNA, 19 nt, Artificial Sequence
  Description of Artificial Sequence: Synthetic oligonucleotide
  Sense strand starting at position 3447 of SEQ ID NO: 586329
gcggauugcgcgcugauca

SEQ ID NO: 709823 - RNA, 19 nt, Artificial Sequence
  Description of Artificial Sequence: Synthetic oligonucleotide
  Antisense strand to SEQ ID NO: 709822
ugaucagcgcgcaauccgc

SEQ ID NO: 709824 - RNA, 19 nt, Artificial Sequence
  Description of Artificial Sequence: Synthetic oligonucleotide
  Sense strand starting at position 3562 of SEQ ID NO: 586329
gagugauaacgguguagac

SEQ ID NO: 709825 - RNA, 19 nt, Artificial Sequence
  Description of Artificial Sequence: Synthetic oligonucleotide
  Antisense strand to SEQ ID NO: 709824
gucuacaccguuaucacuc

SEQ ID NO: 709826 - RNA, 19 nt, Artificial Sequence
  Description of Artificial Sequence: Synthetic oligonucleotide
  Sense strand starting at position 3729 of SEQ ID NO: 586329
agcucaagccguuaaucaa

SEQ ID NO: 709827 - RNA, 19 nt, Artificial Sequence
  Description of Artificial Sequence: Synthetic oligonucleotide
  Antisense strand to SEQ ID NO: 709826
uugauuaacggcuugagcu

SEQ ID NO: 709828 - RNA, 19 nt, Artificial Sequence
  Description of Artificial Sequence: Synthetic oligonucleotide
  Sense strand starting at position 3761 of SEQ ID NO: 586329
ugcagaaugacguaaugga

SEQ ID NO: 709829 - RNA, 19 nt, Artificial Sequence
  Description of Artificial Sequence: Synthetic oligonucleotide
  Antisense strand to SEQ ID NO: 709828
uccauuacgucauucugca

SEQ ID NO: 709830 - RNA, 19 nt, Artificial Sequence
  Description of Artificial Sequence: Synthetic oligonucleotide
  Sense strand starting at position 3789 of SEQ ID NO: 586329
agucuuuauuccuugacac

SEQ ID NO: 709831 - RNA, 19 nt, Artificial Sequence
  Description of Artificial Sequence: Synthetic oligonucleotide
  Antisense strand to SEQ ID NO: 709830
gugucaaggaauaaagacu

SEQ ID NO: 709832 - RNA, 19 nt, Artificial Sequence
  Description of Artificial Sequence: Synthetic oligonucleotide
  Sense strand starting at position 3790 of SEQ ID NO: 586329
gucuuuauuccuugacaca

SEQ ID NO: 709833 - RNA, 19 nt, Artificial Sequence
  Description of Artificial Sequence: Synthetic oligonucleotide
  Antisense strand to SEQ ID NO: 709832
ugugucaaggaauaaagac

SEQ ID NO: 709834 - RNA, 19 nt, Artificial Sequence
  Description of Artificial Sequence: Synthetic oligonucleotide
  Sense strand starting at position 3849 of SEQ ID NO: 586329
gcagacugacaacgaaaua

SEQ ID NO: 709835 - RNA, 19 nt, Artificial Sequence
  Description of Artificial Sequence: Synthetic oligonucleotide
  Antisense strand to SEQ ID NO: 709834
uauuucguugucagucugc

SEQ ID NO: 709836 - RNA, 19 nt, Artificial Sequence
  Description of Artificial Sequence: Synthetic oligonucleotide
  Sense strand starting at position 3966 of SEQ ID NO: 586329
ggucuagggcuuuaucuac

SEQ ID NO: 709837 - RNA, 19 nt, Artificial Sequence
  Description of Artificial Sequence: Synthetic oligonucleotide
  Antisense strand to SEQ ID NO: 709836
guagauaaagcccuagacc

SEQ ID NO: 709838 - RNA, 19 nt, Artificial Sequence
  Description of Artificial Sequence: Synthetic oligonucleotide
  Sense strand starting at position 27 of SEQ ID NO: 586330
agucuagagugaguggauu

SEQ ID NO: 709839 - RNA, 19 nt, Artificial Sequence
  Description of Artificial Sequence: Synthetic oligonucleotide
  Antisense strand to SEQ ID NO: 709838
aauccacucacucuagacu

SEQ ID NO: 709840 - RNA, 19 nt, Artificial Sequence
  Description of Artificial Sequence: Synthetic oligonucleotide
  Sense strand starting at position 57 of SEQ ID NO: 586330
guacuugaaacgcaugaaa

SEQ ID NO: 709841 - RNA, 19 nt, Artificial Sequence
  Description of Artificial Sequence: Synthetic oligonucleotide
  Antisense strand to SEQ ID NO: 709840
uuucaugcguuucaaguac

SEQ ID NO: 709842 - RNA, 19 nt, Artificial Sequence
  Description of Artificial Sequence: Synthetic oligonucleotide
  Sense strand starting at position 482 of SEQ ID NO: 586330
ggaguuggcccugaagagu

SEQ ID NO: 709843 - RNA, 19 nt, Artificial Sequence
  Description of Artificial Sequence: Synthetic oligonucleotide
  Antisense strand to SEQ ID NO: 709842
acucuucagggccaacucc

SEQ ID NO: 709844 - RNA, 19 nt, Artificial Sequence
  Description of Artificial Sequence: Synthetic oligonucleotide
  Sense strand starting at position 488 of SEQ ID NO: 586330
ggcccugaagaguaguauu

SEQ ID NO: 709845 - RNA, 19 nt, Artificial Sequence
  Description of Artificial Sequence: Synthetic oligonucleotide
  Antisense strand to SEQ ID NO: 709844
aauacuacucuucagggcc

SEQ ID NO: 709846 - RNA, 19 nt, Artificial Sequence
  Description of Artificial Sequence: Synthetic oligonucleotide
  Sense strand starting at position 707 of SEQ ID NO: 586330
ggaaauguucacugggauu

SEQ ID NO: 709847 - RNA, 19 nt, Artificial Sequence
  Description of Artificial Sequence: Synthetic oligonucleotide
  Antisense strand to SEQ ID NO: 709846
aaucccagugaacauuucc

SEQ ID NO: 709848 - RNA, 19 nt, Artificial Sequence
  Description of Artificial Sequence: Synthetic oligonucleotide
  Sense strand starting at position 825 of SEQ ID NO: 586330
gggcauggcacauagacau

SEQ ID NO: 709849 - RNA, 19 nt, Artificial Sequence
  Description of Artificial Sequence: Synthetic oligonucleotide
  Antisense strand to SEQ ID NO: 709848
augucuaugugccaugccc

SEQ ID NO: 709850 - RNA, 19 nt, Artificial Sequence
  Description of Artificial Sequence: Synthetic oligonucleotide
  Sense strand starting at position 867 of SEQ ID NO: 586330
cuguuuauuguccacccaa

SEQ ID NO: 709851 - RNA, 19 nt, Artificial Sequence
  Description of Artificial Sequence: Synthetic oligonucleotide
  Antisense strand to SEQ ID NO: 709850
uuggguggacaauaaacag

SEQ ID NO: 709852 - RNA, 19 nt, Artificial Sequence
  Description of Artificial Sequence: Synthetic oligonucleotide
  Sense strand starting at position 1186 of SEQ ID NO: 586330
cucccuguaugagugaaau

SEQ ID NO: 709853 - RNA, 19 nt, Artificial Sequence
  Description of Artificial Sequence: Synthetic oligonucleotide
  Antisense strand to SEQ ID NO: 709852
auuucacucauacagggag

SEQ ID NO: 709854 - RNA, 19 nt, Artificial Sequence
  Description of Artificial Sequence: Synthetic oligonucleotide
  Sense strand starting at position 1387 of SEQ ID NO: 586330
aucuuagugguauagauug

SEQ ID NO: 709855 - RNA, 19 nt, Artificial Sequence
  Description of Artificial Sequence: Synthetic oligonucleotide
  Antisense strand to SEQ ID NO: 709854
caaucuauaccacuaagau

SEQ ID NO: 709856 - RNA, 19 nt, Artificial Sequence
  Description of Artificial Sequence: Synthetic oligonucleotide
  Sense strand starting at position 1389 of SEQ ID NO: 586330
cuuagugguauagauugau

SEQ ID NO: 709857 - RNA, 19 nt, Artificial Sequence
  Description of Artificial Sequence: Synthetic oligonucleotide
  Antisense strand to SEQ ID NO: 709856
aucaaucuauaccacuaag

SEQ ID NO: 709858 - RNA, 19 nt, Artificial Sequence
  Description of Artificial Sequence: Synthetic oligonucleotide
  Sense strand starting at position 1392 of SEQ ID NO: 586330
agugguauagauugauucu

SEQ ID NO: 709859 - RNA, 19 nt, Artificial Sequence
  Description of Artificial Sequence: Synthetic oligonucleotide
  Antisense strand to SEQ ID NO: 709858
agaaucaaucuauaccacu

SEQ ID NO: 709860 - RNA, 19 nt, Artificial Sequence
  Description of Artificial Sequence: Synthetic oligonucleotide
  Sense strand starting at position 1393 of SEQ ID NO: 586330
gugguauagauugauucuu

SEQ ID NO: 709861 - RNA, 19 nt, Artificial Sequence
  Description of Artificial Sequence: Synthetic oligonucleotide
  Antisense strand to SEQ ID NO: 709860
aagaaucaaucuauaccac

SEQ ID NO: 709862 - RNA, 19 nt, Artificial Sequence
  Description of Artificial Sequence: Synthetic oligonucleotide
  Sense strand starting at position 1395 of SEQ ID NO: 586330
gguauagauugauucuuac

SEQ ID NO: 709863 - RNA, 19 nt, Artificial Sequence
  Description of Artificial Sequence: Synthetic oligonucleotide
  Antisense strand to SEQ ID NO: 709862
guaagaaucaaucuauacc

SEQ ID NO: 709864 - RNA, 19 nt, Artificial Sequence
  Description of Artificial Sequence: Synthetic oligonucleotide
  Sense strand starting at position 1404 of SEQ ID NO: 586330
ugauucuuacaauacgcaa

SEQ ID NO: 709865 - RNA, 19 nt, Artificial Sequence
  Description of Artificial Sequence: Synthetic oligonucleotide
  Antisense strand to SEQ ID NO: 709864
uugcguauuguaagaauca

SEQ ID NO: 709866 - RNA, 19 nt, Artificial Sequence
  Description of Artificial Sequence: Synthetic oligonucleotide
  Sense strand starting at position 1448 of SEQ ID NO: 586330
guugauguccaucaaacac

SEQ ID NO: 709867 - RNA, 19 nt, Artificial Sequence
  Description of Artificial Sequence: Synthetic oligonucleotide
  Antisense strand to SEQ ID NO: 709866
guguuugauggacaucaac

SEQ ID NO: 709868 - RNA, 19 nt, Artificial Sequence
  Description of Artificial Sequence: Synthetic oligonucleotide
  Sense strand starting at position 1470 of SEQ ID NO: 586330
auccaauguguauauuagu

SEQ ID NO: 709869 - RNA, 19 nt, Artificial Sequence
  Description of Artificial Sequence: Synthetic oligonucleotide
  Antisense strand to SEQ ID NO: 709868
acuaauauacacauuggau

SEQ ID NO: 709870 - RNA, 19 nt, Artificial Sequence
  Description of Artificial Sequence: Synthetic oligonucleotide
  Sense strand starting at position 1582 of SEQ ID NO: 586330
ggucacauugcacaaucaa

SEQ ID NO: 709871 - RNA, 19 nt, Artificial Sequence
  Description of Artificial Sequence: Synthetic oligonucleotide
  Antisense strand to SEQ ID NO: 709870
uugauugugcaaugugacc

SEQ ID NO: 709872 - RNA, 19 nt, Artificial Sequence
  Description of Artificial Sequence: Synthetic oligonucleotide
  Sense strand starting at position 1652 of SEQ ID NO: 586330
uccaguauuugucuauucu

SEQ ID NO: 709873 - RNA, 19 nt, Artificial Sequence
  Description of Artificial Sequence: Synthetic oligonucleotide
  Antisense strand to SEQ ID NO: 709872
agaauagacaaauacugga

SEQ ID NO: 709874 - RNA, 19 nt, Artificial Sequence
  Description of Artificial Sequence: Synthetic oligonucleotide
  Sense strand starting at position 1713 of SEQ ID NO: 586330
gcuuucugcaaugagggaa

SEQ ID NO: 709875 - RNA, 19 nt, Artificial Sequence
  Description of Artificial Sequence: Synthetic oligonucleotide
  Antisense strand to SEQ ID NO: 709874
uucccucauugcagaaagc

SEQ ID NO: 709876 - RNA, 19 nt, Artificial Sequence
  Description of Artificial Sequence: Synthetic oligonucleotide
  Sense strand starting at position 1741 of SEQ ID NO: 586330
aucuguauuguacaauaug

SEQ ID NO: 709877 - RNA, 19 nt, Artificial Sequence
  Description of Artificial Sequence: Synthetic oligonucleotide
  Antisense strand to SEQ ID NO: 709876
cauauuguacaauacagau

SEQ ID NO: 709878 - RNA, 19 nt, Artificial Sequence
  Description of Artificial Sequence: Synthetic oligonucleotide
  Sense strand starting at position 1744 of SEQ ID NO: 586330
uguauuguacaauauggua

SEQ ID NO: 709879 - RNA, 19 nt, Artificial Sequence
  Description of Artificial Sequence: Synthetic oligonucleotide
  Antisense strand to SEQ ID NO: 709878
uaccauauuguacaauaca

SEQ ID NO: 709880 - RNA, 19 nt, Artificial Sequence
  Description of Artificial Sequence: Synthetic oligonucleotide
  Sense strand starting at position 2058 of SEQ ID NO: 586330
agaggcuuccaaugugaaa

SEQ ID NO: 709881 - RNA, 19 nt, Artificial Sequence
  Description of Artificial Sequence: Synthetic oligonucleotide
  Antisense strand to SEQ ID NO: 709880
uuucacauuggaagccucu

SEQ ID NO: 709882 - RNA, 19 nt, Artificial Sequence
  Description of Artificial Sequence: Synthetic oligonucleotide
  Sense strand starting at position 2309 of SEQ ID NO: 586330
cugcaccgucaggaugaua

SEQ ID NO: 709883 - RNA, 19 nt, Artificial Sequence
  Description of Artificial Sequence: Synthetic oligonucleotide
  Antisense strand to SEQ ID NO: 709882
uaucauccugacggugcag

SEQ ID NO: 709884 - RNA, 19 nt, Artificial Sequence
  Description of Artificial Sequence: Synthetic oligonucleotide
  Sense strand starting at position 2449 of SEQ ID NO: 586330
ccuuucucagaaggaauau

SEQ ID NO: 709885 - RNA, 19 nt, Artificial Sequence
  Description of Artificial Sequence: Synthetic oligonucleotide
  Antisense strand to SEQ ID NO: 709884
auauuccuucugagaaagg

SEQ ID NO: 709886 - RNA, 19 nt, Artificial Sequence
  Description of Artificial Sequence: Synthetic oligonucleotide
  Sense strand starting at position 2517 of SEQ ID NO: 586330
uccagaagauugucucuga

SEQ ID NO: 709887 - RNA, 19 nt, Artificial Sequence
  Description of Artificial Sequence: Synthetic oligonucleotide
  Antisense strand to SEQ ID NO: 709886
ucagagacaaucuucugga

SEQ ID NO: 709888 - RNA, 19 nt, Artificial Sequence
  Description of Artificial Sequence: Synthetic oligonucleotide
  Sense strand starting at position 2518 of SEQ ID NO: 586330
ccagaagauugucucugaa

SEQ ID NO: 709889 - RNA, 19 nt, Artificial Sequence
  Description of Artificial Sequence: Synthetic oligonucleotide
  Antisense strand to SEQ ID NO: 709888
uucagagacaaucuucugg

SEQ ID NO: 709890 - RNA, 19 nt, Artificial Sequence
  Description of Artificial Sequence: Synthetic oligonucleotide
  Sense strand starting at position 2520 of SEQ ID NO: 586330
agaagauugucucugaauu

SEQ ID NO: 709891 - RNA, 19 nt, Artificial Sequence
  Description of Artificial Sequence: Synthetic oligonucleotide
  Antisense strand to SEQ ID NO: 709890
aauucagagacaaucuucu

SEQ ID NO: 709892 - RNA, 19 nt, Artificial Sequence
  Description of Artificial Sequence: Synthetic oligonucleotide
  Sense strand starting at position 2521 of SEQ ID NO: 586330
gaagauugucucugaauuc

SEQ ID NO: 709893 - RNA, 19 nt, Artificial Sequence
  Description of Artificial Sequence: Synthetic oligonucleotide
  Antisense strand to SEQ ID NO: 709892
gaauucagagacaaucuuc

SEQ ID NO: 709894 - RNA, 19 nt, Artificial Sequence
  Description of Artificial Sequence: Synthetic oligonucleotide
  Sense strand starting at position 2622 of SEQ ID NO: 586330
cuuugccuuugauuaagaa

SEQ ID NO: 709895 - RNA, 19 nt, Artificial Sequence
  Description of Artificial Sequence: Synthetic oligonucleotide
  Antisense strand to SEQ ID NO: 709894
uucuuaaucaaaggcaaag

SEQ ID NO: 709896 - RNA, 19 nt, Artificial Sequence
  Description of Artificial Sequence: Synthetic oligonucleotide
  Sense strand starting at position 2623 of SEQ ID NO: 586330
uuugccuuugauuaagaau

SEQ ID NO: 709897 - RNA, 19 nt, Artificial Sequence
  Description of Artificial Sequence: Synthetic oligonucleotide
  Antisense strand to SEQ ID NO: 709896
auucuuaaucaaaggcaaa

SEQ ID NO: 709898 - RNA, 19 nt, Artificial Sequence
  Description of Artificial Sequence: Synthetic oligonucleotide
  Sense strand starting at position 2658 of SEQ ID NO: 586330
uuuagugagccagaaacau

SEQ ID NO: 709899 - RNA, 19 nt, Artificial Sequence
  Description of Artificial Sequence: Synthetic oligonucleotide
  Antisense strand to SEQ ID NO: 709898
auguuucuggcucacuaaa

SEQ ID NO: 709900 - RNA, 19 nt, Artificial Sequence
  Description of Artificial Sequence: Synthetic oligonucleotide
  Sense strand starting at position 2669 of SEQ ID NO: 586330
agaaacauuugguaacauc

SEQ ID NO: 709901 - RNA, 19 nt, Artificial Sequence
  Description of Artificial Sequence: Synthetic oligonucleotide
  Antisense strand to SEQ ID NO: 709900
gauguuaccaaauguuucu

SEQ ID NO: 709902 - RNA, 19 nt, Artificial Sequence
  Description of Artificial Sequence: Synthetic oligonucleotide
  Sense strand starting at position 2720 of SEQ ID NO: 586330
aaaucaaacgcagauguau

SEQ ID NO: 709903 - RNA, 19 nt, Artificial Sequence
  Description of Artificial Sequence: Synthetic oligonucleotide
  Antisense strand to SEQ ID NO: 709902
auacaucugcguuugauuu

SEQ ID NO: 709904 - RNA, 19 nt, Artificial Sequence
  Description of Artificial Sequence: Synthetic oligonucleotide
  Sense strand starting at position 2880 of SEQ ID NO: 586330
ccuagacuacacuguuaca

SEQ ID NO: 709905 - RNA, 19 nt, Artificial Sequence
  Description of Artificial Sequence: Synthetic oligonucleotide
  Antisense strand to SEQ ID NO: 709904
uguaacaguguagucuagg

SEQ ID NO: 709906 - RNA, 19 nt, Artificial Sequence
  Description of Artificial Sequence: Synthetic oligonucleotide
  Sense strand starting at position 2895 of SEQ ID NO: 586330
uacagaauuguguguagga

SEQ ID NO: 709907 - RNA, 19 nt, Artificial Sequence
  Description of Artificial Sequence: Synthetic oligonucleotide
  Antisense strand to SEQ ID NO: 709906
uccuacacacaauucugua

SEQ ID NO: 709908 - RNA, 19 nt, Artificial Sequence
  Description of Artificial Sequence: Synthetic oligonucleotide
  Sense strand starting at position 2896 of SEQ ID NO: 586330
acagaauuguguguaggau

SEQ ID NO: 709909 - RNA, 19 nt, Artificial Sequence
  Description of Artificial Sequence: Synthetic oligonucleotide
  Antisense strand to SEQ ID NO: 709908
auccuacacacaauucugu

SEQ ID NO: 709910 - RNA, 19 nt, Artificial Sequence
  Description of Artificial Sequence: Synthetic oligonucleotide
  Sense strand starting at position 2897 of SEQ ID NO: 586330
cagaauuguguguaggauu

SEQ ID NO: 709911 - RNA, 19 nt, Artificial Sequence
  Description of Artificial Sequence: Synthetic oligonucleotide
  Antisense strand to SEQ ID NO: 709910
aauccuacacacaauucug

SEQ ID NO: 709912 - RNA, 19 nt, Artificial Sequence
  Description of Artificial Sequence: Synthetic oligonucleotide
  Sense strand starting at position 3364 of SEQ ID NO: 586330
cuaaguuuggcagagaauc

SEQ ID NO: 709913 - RNA, 19 nt, Artificial Sequence
  Description of Artificial Sequence: Synthetic oligonucleotide
  Antisense strand to SEQ ID NO: 709912
gauucucugccaaacuuag

SEQ ID NO: 709914 - RNA, 19 nt, Artificial Sequence
  Description of Artificial Sequence: Synthetic oligonucleotide
  Sense strand starting at position 3385 of SEQ ID NO: 586330
gcuggagcucaagaucuaa

SEQ ID NO: 709915 - RNA, 19 nt, Artificial Sequence
  Description of Artificial Sequence: Synthetic oligonucleotide
  Antisense strand to SEQ ID NO: 709914
uuagaucuugagcuccagc

SEQ ID NO: 709916 - RNA, 19 nt, Artificial Sequence
  Description of Artificial Sequence: Synthetic oligonucleotide
  Sense strand starting at position 3589 of SEQ ID NO: 586330
ccagauuggcacuagguaa

SEQ ID NO: 709917 - RNA, 19 nt, Artificial Sequence
  Description of Artificial Sequence: Synthetic oligonucleotide
  Antisense strand to SEQ ID NO: 709916
uuaccuagugccaaucugg

SEQ ID NO: 709918 - RNA, 19 nt, Artificial Sequence
  Description of Artificial Sequence: Synthetic oligonucleotide
  Sense strand starting at position 71 of SEQ ID NO: 586331
gucagaaaggccgagguuu

SEQ ID NO: 709919 - RNA, 19 nt, Artificial Sequence
  Description of Artificial Sequence: Synthetic oligonucleotide
  Antisense strand to SEQ ID NO: 709918
aaaccucggccuuucugac

SEQ ID NO: 709920 - RNA, 19 nt, Artificial Sequence
  Description of Artificial Sequence: Synthetic oligonucleotide
  Sense strand starting at position 73 of SEQ ID NO: 586331
cagaaaggccgagguuuaa

SEQ ID NO: 709921 - RNA, 19 nt, Artificial Sequence
  Description of Artificial Sequence: Synthetic oligonucleotide
  Antisense strand to SEQ ID NO: 709920
uuaaaccucggccuuucug

SEQ ID NO: 709922 - RNA, 19 nt, Artificial Sequence
  Description of Artificial Sequence: Synthetic oligonucleotide
  Sense strand starting at position 86 of SEQ ID NO: 586331
guuuaagugcucuccagcu

SEQ ID NO: 709923 - RNA, 19 nt, Artificial Sequence
  Description of Artificial Sequence: Synthetic oligonucleotide
  Antisense strand to SEQ ID NO: 709922
agcuggagagcacuuaaac

SEQ ID NO: 709924 - RNA, 19 nt, Artificial Sequence
  Description of Artificial Sequence: Synthetic oligonucleotide
  Sense strand starting at position 128 of SEQ ID NO: 586331
guaaguaacuggucucuau

SEQ ID NO: 709925 - RNA, 19 nt, Artificial Sequence
  Description of Artificial Sequence: Synthetic oligonucleotide
  Antisense strand to SEQ ID NO: 709924
auagagaccaguuacuuac

SEQ ID NO: 709926 - RNA, 19 nt, Artificial Sequence
  Description of Artificial Sequence: Synthetic oligonucleotide
  Sense strand starting at position 132 of SEQ ID NO: 586331
guaacuggucucuauccca

SEQ ID NO: 709927 - RNA, 19 nt, Artificial Sequence
  Description of Artificial Sequence: Synthetic oligonucleotide
  Antisense strand to SEQ ID NO: 709926
ugggauagagaccaguuac

SEQ ID NO: 709928 - RNA, 19 nt, Artificial Sequence
  Description of Artificial Sequence: Synthetic oligonucleotide
  Sense strand starting at position 214 of SEQ ID NO: 586331
caguguugcccugagaauc

SEQ ID NO: 709929 - RNA, 19 nt, Artificial Sequence
  Description of Artificial Sequence: Synthetic oligonucleotide
  Antisense strand to SEQ ID NO: 709928
gauucucagggcaacacug

SEQ ID NO: 709930 - RNA, 19 nt, Artificial Sequence
  Description of Artificial Sequence: Synthetic oligonucleotide
  Sense strand starting at position 340 of SEQ ID NO: 586331
acacuuggaucuccuggaa

SEQ ID NO: 709931 - RNA, 19 nt, Artificial Sequence
  Description of Artificial Sequence: Synthetic oligonucleotide
  Antisense strand to SEQ ID NO: 709930
uuccaggagauccaagugu

SEQ ID NO: 709932 - RNA, 19 nt, Artificial Sequence
  Description of Artificial Sequence: Synthetic oligonucleotide
  Sense strand starting at position 356 of SEQ ID NO: 586331
gaaggcaccuaucuggaaa

SEQ ID NO: 709933 - RNA, 19 nt, Artificial Sequence
  Description of Artificial Sequence: Synthetic oligonucleotide
  Antisense strand to SEQ ID NO: 709932
uuuccagauaggugccuuc

SEQ ID NO: 709934 - RNA, 19 nt, Artificial Sequence
  Description of Artificial Sequence: Synthetic oligonucleotide
  Sense strand starting at position 511 of SEQ ID NO: 586331
gggccaucugccuaucgga

SEQ ID NO: 709935 - RNA, 19 nt, Artificial Sequence
  Description of Artificial Sequence: Synthetic oligonucleotide
  Antisense strand to SEQ ID NO: 709934
uccgauaggcagauggccc

SEQ ID NO: 709936 - RNA, 19 nt, Artificial Sequence
  Description of Artificial Sequence: Synthetic oligonucleotide
  Sense strand starting at position 706 of SEQ ID NO: 586331
cuuguauuaccucaauguu

SEQ ID NO: 709937 - RNA, 19 nt, Artificial Sequence
  Description of Artificial Sequence: Synthetic oligonucleotide
  Antisense strand to SEQ ID NO: 709936
aacauugagguaauacaag

SEQ ID NO: 709938 - RNA, 19 nt, Artificial Sequence
  Description of Artificial Sequence: Synthetic oligonucleotide
  Sense strand starting at position 709 of SEQ ID NO: 586331
guauuaccucaauguuccu

SEQ ID NO: 709939 - RNA, 19 nt, Artificial Sequence
  Description of Artificial Sequence: Synthetic oligonucleotide
  Antisense strand to SEQ ID NO: 709938
aggaacauugagguaauac

SEQ ID NO: 709940 - RNA, 19 nt, Artificial Sequence
  Description of Artificial Sequence: Synthetic oligonucleotide
  Sense strand starting at position 793 of SEQ ID NO: 586331
ugaguaaccuguccaaggu

SEQ ID NO: 709941 - RNA, 19 nt, Artificial Sequence
  Description of Artificial Sequence: Synthetic oligonucleotide
  Antisense strand to SEQ ID NO: 709940
accuuggacagguuacuca

SEQ ID NO: 709942 - RNA, 19 nt, Artificial Sequence
  Description of Artificial Sequence: Synthetic oligonucleotide
  Sense strand starting at position 851 of SEQ ID NO: 586331
guaggcaauuaucuguuga

SEQ ID NO: 709943 - RNA, 19 nt, Artificial Sequence
  Description of Artificial Sequence: Synthetic oligonucleotide
  Antisense strand to SEQ ID NO: 709942
ucaacagauaauugccuac

SEQ ID NO: 709944 - RNA, 19 nt, Artificial Sequence
  Description of Artificial Sequence: Synthetic oligonucleotide
  Sense strand starting at position 853 of SEQ ID NO: 586331
aggcaauuaucuguugaau

SEQ ID NO: 709945 - RNA, 19 nt, Artificial Sequence
  Description of Artificial Sequence: Synthetic oligonucleotide
  Antisense strand to SEQ ID NO: 709944
auucaacagauaauugccu

SEQ ID NO: 709946 - RNA, 19 nt, Artificial Sequence
  Description of Artificial Sequence: Synthetic oligonucleotide
  Sense strand starting at position 867 of SEQ ID NO: 586331
ugaauuacuguugaaugua

SEQ ID NO: 709947 - RNA, 19 nt, Artificial Sequence
  Description of Artificial Sequence: Synthetic oligonucleotide
  Antisense strand to SEQ ID NO: 709946
uacauucaacaguaauuca

SEQ ID NO: 709948 - RNA, 19 nt, Artificial Sequence
  Description of Artificial Sequence: Synthetic oligonucleotide
  Sense strand starting at position 883 of SEQ ID NO: 586331
guauuauccuccuuauacg

SEQ ID NO: 709949 - RNA, 19 nt, Artificial Sequence
  Description of Artificial Sequence: Synthetic oligonucleotide
  Antisense strand to SEQ ID NO: 709948
cguauaaggaggauaauac

SEQ ID NO: 709950 - RNA, 19 nt, Artificial Sequence
  Description of Artificial Sequence: Synthetic oligonucleotide
  Sense strand starting at position 986 of SEQ ID NO: 586331
aggcacuacuuuccagauu

SEQ ID NO: 709951 - RNA, 19 nt, Artificial Sequence
  Description of Artificial Sequence: Synthetic oligonucleotide
  Antisense strand to SEQ ID NO: 709950
aaucuggaaaguagugccu

SEQ ID NO: 709952 - RNA, 19 nt, Artificial Sequence
  Description of Artificial Sequence: Synthetic oligonucleotide
  Sense strand starting at position 1001 of SEQ ID NO: 586331
gauugugaggccuaggaca

SEQ ID NO: 709953 - RNA, 19 nt, Artificial Sequence
  Description of Artificial Sequence: Synthetic oligonucleotide
  Antisense strand to SEQ ID NO: 709952
uguccuaggccucacaauc

SEQ ID NO: 709954 - RNA, 19 nt, Artificial Sequence
  Description of Artificial Sequence: Synthetic oligonucleotide
  Sense strand starting at position 1475 of SEQ ID NO: 586331
aaucuuggacccugaggua

SEQ ID NO: 709955 - RNA, 19 nt, Artificial Sequence
  Description of Artificial Sequence: Synthetic oligonucleotide
  Antisense strand to SEQ ID NO: 709954
uaccucaggguccaagauu

SEQ ID NO: 709956 - RNA, 19 nt, Artificial Sequence
  Description of Artificial Sequence: Synthetic oligonucleotide
  Sense strand starting at position 1493 of SEQ ID NO: 586331
agucaaguucuggaugcua

SEQ ID NO: 709957 - RNA, 19 nt, Artificial Sequence
  Description of Artificial Sequence: Synthetic oligonucleotide
  Antisense strand to SEQ ID NO: 709956
uagcauccagaacuugacu

SEQ ID NO: 709958 - RNA, 19 nt, Artificial Sequence
  Description of Artificial Sequence: Synthetic oligonucleotide
  Sense strand starting at position 2354 of SEQ ID NO: 586331
caccuaucugaggagcuuu

SEQ ID NO: 709959 - RNA, 19 nt, Artificial Sequence
  Description of Artificial Sequence: Synthetic oligonucleotide
  Antisense strand to SEQ ID NO: 709958
aaagcuccucagauaggug

SEQ ID NO: 709960 - RNA, 19 nt, Artificial Sequence
  Description of Artificial Sequence: Synthetic oligonucleotide
  Sense strand starting at position 2413 of SEQ ID NO: 586331
uguggaugcuggguuagau

SEQ ID NO: 709961 - RNA, 19 nt, Artificial Sequence
  Description of Artificial Sequence: Synthetic oligonucleotide
  Antisense strand to SEQ ID NO: 709960
aucuaacccagcauccaca

SEQ ID NO: 709962 - RNA, 19 nt, Artificial Sequence
  Description of Artificial Sequence: Synthetic oligonucleotide
  Sense strand starting at position 2491 of SEQ ID NO: 586331
auguucucauucuuggaaa

SEQ ID NO: 709963 - RNA, 19 nt, Artificial Sequence
  Description of Artificial Sequence: Synthetic oligonucleotide
  Antisense strand to SEQ ID NO: 709962
uuuccaagaaugagaacau

SEQ ID NO: 709964 - RNA, 19 nt, Artificial Sequence
  Description of Artificial Sequence: Synthetic oligonucleotide
  Sense strand starting at position 2531 of SEQ ID NO: 586331
ggcaccauguuuccaacau

SEQ ID NO: 709965 - RNA, 19 nt, Artificial Sequence
  Description of Artificial Sequence: Synthetic oligonucleotide
  Antisense strand to SEQ ID NO: 709964
auguuggaaacauggugcc

SEQ ID NO: 709966 - RNA, 19 nt, Artificial Sequence
  Description of Artificial Sequence: Synthetic oligonucleotide
  Sense strand starting at position 2619 of SEQ ID NO: 586331
uguaaauuguugguaaauc

SEQ ID NO: 709967 - RNA, 19 nt, Artificial Sequence
  Description of Artificial Sequence: Synthetic oligonucleotide
  Antisense strand to SEQ ID NO: 709966
gauuuaccaacaauuuaca

SEQ ID NO: 709968 - RNA, 19 nt, Artificial Sequence
  Description of Artificial Sequence: Synthetic oligonucleotide
  Sense strand starting at position 2652 of SEQ ID NO: 586331
auggauaugcuuuggauca

SEQ ID NO: 709969 - RNA, 19 nt, Artificial Sequence
  Description of Artificial Sequence: Synthetic oligonucleotide
  Antisense strand to SEQ ID NO: 709968
ugauccaaagcauauccau

SEQ ID NO: 709970 - RNA, 19 nt, Artificial Sequence
  Description of Artificial Sequence: Synthetic oligonucleotide
  Sense strand starting at position 2865 of SEQ ID NO: 586331
ccugauaucagguggcuga

SEQ ID NO: 709971 - RNA, 19 nt, Artificial Sequence
  Description of Artificial Sequence: Synthetic oligonucleotide
  Antisense strand to SEQ ID NO: 709970
ucagccaccugauaucagg

SEQ ID NO: 709972 - RNA, 19 nt, Artificial Sequence
  Description of Artificial Sequence: Synthetic oligonucleotide
  Sense strand starting at position 2937 of SEQ ID NO: 586331
ugaggugaggucuguucuu

SEQ ID NO: 709973 - RNA, 19 nt, Artificial Sequence
  Description of Artificial Sequence: Synthetic oligonucleotide
  Antisense strand to SEQ ID NO: 709972
aagaacagaccucaccuca

SEQ ID NO: 709974 - RNA, 19 nt, Artificial Sequence
  Description of Artificial Sequence: Synthetic oligonucleotide
  Sense strand starting at position 2942 of SEQ ID NO: 586331
ugaggucuguucuuccaga

SEQ ID NO: 709975 - RNA, 19 nt, Artificial Sequence
  Description of Artificial Sequence: Synthetic oligonucleotide
  Antisense strand to SEQ ID NO: 709974
ucuggaagaacagaccuca

SEQ ID NO: 709976 - RNA, 19 nt, Artificial Sequence
  Description of Artificial Sequence: Synthetic oligonucleotide
  Sense strand starting at position 2979 of SEQ ID NO: 586331
ggagcuguuccugacaggu

SEQ ID NO: 709977 - RNA, 19 nt, Artificial Sequence
  Description of Artificial Sequence: Synthetic oligonucleotide
  Antisense strand to SEQ ID NO: 709976
accugucaggaacagcucc

SEQ ID NO: 709978 - RNA, 19 nt, Artificial Sequence
  Description of Artificial Sequence: Synthetic oligonucleotide
  Sense strand starting at position 3070 of SEQ ID NO: 586331
gcaugugaggaaugugauu

SEQ ID NO: 709979 - RNA, 19 nt, Artificial Sequence
  Description of Artificial Sequence: Synthetic oligonucleotide
  Antisense strand to SEQ ID NO: 709978
aaucacauuccucacaugc

SEQ ID NO: 709980 - RNA, 19 nt, Artificial Sequence
  Description of Artificial Sequence: Synthetic oligonucleotide
  Sense strand starting at position 3072 of SEQ ID NO: 586331
augugaggaaugugauuag

SEQ ID NO: 709981 - RNA, 19 nt, Artificial Sequence
  Description of Artificial Sequence: Synthetic oligonucleotide
  Antisense strand to SEQ ID NO: 709980
cuaaucacauuccucacau

SEQ ID NO: 709982 - RNA, 19 nt, Artificial Sequence
  Description of Artificial Sequence: Synthetic oligonucleotide
  Sense strand starting at position 3446 of SEQ ID NO: 586331
uacagagcuuagucucagu

SEQ ID NO: 709983 - RNA, 19 nt, Artificial Sequence
  Description of Artificial Sequence: Synthetic oligonucleotide
  Antisense strand to SEQ ID NO: 709982
acugagacuaagcucugua

SEQ ID NO: 709984 - RNA, 19 nt, Artificial Sequence
  Description of Artificial Sequence: Synthetic oligonucleotide
  Sense strand starting at position 3459 of SEQ ID NO: 586331
cucagugguacagggaaau

SEQ ID NO: 709985 - RNA, 19 nt, Artificial Sequence
  Description of Artificial Sequence: Synthetic oligonucleotide
  Antisense strand to SEQ ID NO: 709984
auuucccuguaccacugag

SEQ ID NO: 709986 - RNA, 19 nt, Artificial Sequence
  Description of Artificial Sequence: Synthetic oligonucleotide
  Sense strand starting at position 3471 of SEQ ID NO: 586331
gggaaaucuuuauaggaaa

SEQ ID NO: 709987 - RNA, 19 nt, Artificial Sequence
  Description of Artificial Sequence: Synthetic oligonucleotide
  Antisense strand to SEQ ID NO: 709986
uuuccuauaaagauuuccc

SEQ ID NO: 709988 - RNA, 19 nt, Artificial Sequence
  Description of Artificial Sequence: Synthetic oligonucleotide
  Sense strand starting at position 3590 of SEQ ID NO: 586331
ccagaugggcuuggucaga

SEQ ID NO: 709989 - RNA, 19 nt, Artificial Sequence
  Description of Artificial Sequence: Synthetic oligonucleotide
  Antisense strand to SEQ ID NO: 709988
ucugaccaagcccaucugg

SEQ ID NO: 709990 - RNA, 19 nt, Artificial Sequence
  Description of Artificial Sequence: Synthetic oligonucleotide
  Sense strand starting at position 3685 of SEQ ID NO: 586331
cugaaagauggcugggaca

SEQ ID NO: 709991 - RNA, 19 nt, Artificial Sequence
  Description of Artificial Sequence: Synthetic oligonucleotide
  Antisense strand to SEQ ID NO: 709990
ugucccagccaucuuucag

SEQ ID NO: 709992 - RNA, 19 nt, Artificial Sequence
  Description of Artificial Sequence: Synthetic oligonucleotide
  Sense strand starting at position 3687 of SEQ ID NO: 586331
gaaagauggcugggacagu

SEQ ID NO: 709993 - RNA, 19 nt, Artificial Sequence
  Description of Artificial Sequence: Synthetic oligonucleotide
  Antisense strand to SEQ ID NO: 709992
acugucccagccaucuuuc

SEQ ID NO: 709994 - RNA, 19 nt, Artificial Sequence
  Description of Artificial Sequence: Synthetic oligonucleotide
  Sense strand starting at position 3955 of SEQ ID NO: 586331
gggagacccuuacugcaaa

SEQ ID NO: 709995 - RNA, 19 nt, Artificial Sequence
  Description of Artificial Sequence: Synthetic oligonucleotide
  Antisense strand to SEQ ID NO: 709994
uuugcaguaagggucuccc

SEQ ID NO: 709996 - RNA, 19 nt, Artificial Sequence
  Description of Artificial Sequence: Synthetic oligonucleotide
  Sense strand starting at position 3978 of SEQ ID NO: 586331
gaagucuccugagcagaag

SEQ ID NO: 709997 - RNA, 19 nt, Artificial Sequence
  Description of Artificial Sequence: Synthetic oligonucleotide
  Antisense strand to SEQ ID NO: 709996
cuucugcucaggagacuuc

SEQ ID NO: 709998 - RNA, 19 nt, Artificial Sequence
  Description of Artificial Sequence: Synthetic oligonucleotide
  Sense strand starting at position 71 of SEQ ID NO: 586332
ggaaaucauuccuucugcu

SEQ ID NO: 709999 - RNA, 19 nt, Artificial Sequence
  Description of Artificial Sequence: Synthetic oligonucleotide
  Antisense strand to SEQ ID NO: 709998
agcagaaggaaugauuucc

SEQ ID NO: 710000 - RNA, 19 nt, Artificial Sequence
  Description of Artificial Sequence: Synthetic oligonucleotide
  Sense strand starting at position 378 of SEQ ID NO: 586332
ugaggauguuuccaggaug

SEQ ID NO: 710001 - RNA, 19 nt, Artificial Sequence
  Description of Artificial Sequence: Synthetic oligonucleotide
  Antisense strand to SEQ ID NO: 710000
cauccuggaaacauccuca

SEQ ID NO: 710002 - RNA, 19 nt, Artificial Sequence
  Description of Artificial Sequence: Synthetic oligonucleotide
  Sense strand starting at position 425 of SEQ ID NO: 586332
ggucucagcgugcuugaca

SEQ ID NO: 710003 - RNA, 19 nt, Artificial Sequence
  Description of Artificial Sequence: Synthetic oligonucleotide
  Antisense strand to SEQ ID NO: 710002
ugucaagcacgcugagacc

SEQ ID NO: 710004 - RNA, 19 nt, Artificial Sequence
  Description of Artificial Sequence: Synthetic oligonucleotide
  Sense strand starting at position 426 of SEQ ID NO: 586332
gucucagcgugcuugacaa

SEQ ID NO: 710005 - RNA, 19 nt, Artificial Sequence
  Description of Artificial Sequence: Synthetic oligonucleotide
  Antisense strand to SEQ ID NO: 710004
uugucaagcacgcugagac

SEQ ID NO: 710006 - RNA, 19 nt, Artificial Sequence
  Description of Artificial Sequence: Synthetic oligonucleotide
  Sense strand starting at position 700 of SEQ ID NO: 586332
gguuguucuccuugagaga

SEQ ID NO: 710007 - RNA, 19 nt, Artificial Sequence
  Description of Artificial Sequence: Synthetic oligonucleotide
  Antisense strand to SEQ ID NO: 710006
ucucucaaggagaacaacc

SEQ ID NO: 710008 - RNA, 19 nt, Artificial Sequence
  Description of Artificial Sequence: Synthetic oligonucleotide
  Sense strand starting at position 701 of SEQ ID NO: 586332
guuguucuccuugagagau

SEQ ID NO: 710009 - RNA, 19 nt, Artificial Sequence
  Description of Artificial Sequence: Synthetic oligonucleotide
  Antisense strand to SEQ ID NO: 710008
aucucucaaggagaacaac

SEQ ID NO: 710010 - RNA, 19 nt, Artificial Sequence
  Description of Artificial Sequence: Synthetic oligonucleotide
  Sense strand starting at position 707 of SEQ ID NO: 586332
cuccuugagagaugguguu

SEQ ID NO: 710011 - RNA, 19 nt, Artificial Sequence
  Description of Artificial Sequence: Synthetic oligonucleotide
  Antisense strand to SEQ ID NO: 710010
aacaccaucucucaaggag

SEQ ID NO: 710012 - RNA, 19 nt, Artificial Sequence
  Description of Artificial Sequence: Synthetic oligonucleotide
  Sense strand starting at position 1165 of SEQ ID NO: 586332
acgggaauugugggcaaau

SEQ ID NO: 710013 - RNA, 19 nt, Artificial Sequence
  Description of Artificial Sequence: Synthetic oligonucleotide
  Antisense strand to SEQ ID NO: 710012
auuugcccacaauucccgu

SEQ ID NO: 710014 - RNA, 19 nt, Artificial Sequence
  Description of Artificial Sequence: Synthetic oligonucleotide
  Sense strand starting at position 1166 of SEQ ID NO: 586332
cgggaauugugggcaaauc

SEQ ID NO: 710015 - RNA, 19 nt, Artificial Sequence
  Description of Artificial Sequence: Synthetic oligonucleotide
  Antisense strand to SEQ ID NO: 710014
gauuugcccacaauucccg

SEQ ID NO: 710016 - RNA, 19 nt, Artificial Sequence
  Description of Artificial Sequence: Synthetic oligonucleotide
  Sense strand starting at position 1175 of SEQ ID NO: 586332
ugggcaaaucacuggcuua

SEQ ID NO: 710017 - RNA, 19 nt, Artificial Sequence
  Description of Artificial Sequence: Synthetic oligonucleotide
  Antisense strand to SEQ ID NO: 710016
uaagccagugauuugccca

SEQ ID NO: 710018 - RNA, 19 nt, Artificial Sequence
  Description of Artificial Sequence: Synthetic oligonucleotide
  Sense strand starting at position 1176 of SEQ ID NO: 586332
gggcaaaucacuggcuuac

SEQ ID NO: 710019 - RNA, 19 nt, Artificial Sequence
  Description of Artificial Sequence: Synthetic oligonucleotide
  Antisense strand to SEQ ID NO: 710018
guaagccagugauuugccc

SEQ ID NO: 710020 - RNA, 19 nt, Artificial Sequence
  Description of Artificial Sequence: Synthetic oligonucleotide
  Sense strand starting at position 1182 of SEQ ID NO: 586332
aucacuggcuuacugagau

SEQ ID NO: 710021 - RNA, 19 nt, Artificial Sequence
  Description of Artificial Sequence: Synthetic oligonucleotide
  Antisense strand to SEQ ID NO: 710020
aucucaguaagccagugau

SEQ ID NO: 710022 - RNA, 19 nt, Artificial Sequence
  Description of Artificial Sequence: Synthetic oligonucleotide
  Sense strand starting at position 1186 of SEQ ID NO: 586332
cuggcuuacugagauuaga

SEQ ID NO: 710023 - RNA, 19 nt, Artificial Sequence
  Description of Artificial Sequence: Synthetic oligonucleotide
  Antisense strand to SEQ ID NO: 710022
ucuaaucucaguaagccag

SEQ ID NO: 710024 - RNA, 19 nt, Artificial Sequence
  Description of Artificial Sequence: Synthetic oligonucleotide
  Sense strand starting at position 1196 of SEQ ID NO: 586332
gagauuagacgcuguauug

SEQ ID NO: 710025 - RNA, 19 nt, Artificial Sequence
  Description of Artificial Sequence: Synthetic oligonucleotide
  Antisense strand to SEQ ID NO: 710024
caauacagcgucuaaucuc

SEQ ID NO: 710026 - RNA, 19 nt, Artificial Sequence
  Description of Artificial Sequence: Synthetic oligonucleotide
  Sense strand starting at position 1402 of SEQ ID NO: 586332
acuugacgccguugaagua

SEQ ID NO: 710027 - RNA, 19 nt, Artificial Sequence
  Description of Artificial Sequence: Synthetic oligonucleotide
  Antisense strand to SEQ ID NO: 710026
uacuucaacggcgucaagu

SEQ ID NO: 710028 - RNA, 19 nt, Artificial Sequence
  Description of Artificial Sequence: Synthetic oligonucleotide
  Sense strand starting at position 1491 of SEQ ID NO: 586332
gucguguugcaguaggagu

SEQ ID NO: 710029 - RNA, 19 nt, Artificial Sequence
  Description of Artificial Sequence: Synthetic oligonucleotide
  Antisense strand to SEQ ID NO: 710028
acuccuacugcaacacgac

SEQ ID NO: 710030 - RNA, 19 nt, Artificial Sequence
  Description of Artificial Sequence: Synthetic oligonucleotide
  Sense strand starting at position 2295 of SEQ ID NO: 586332
cagcuuuccgccugagcuu

SEQ ID NO: 710031 - RNA, 19 nt, Artificial Sequence
  Description of Artificial Sequence: Synthetic oligonucleotide
  Antisense strand to SEQ ID NO: 710030
aagcucaggcggaaagcug

SEQ ID NO: 710032 - RNA, 19 nt, Artificial Sequence
  Description of Artificial Sequence: Synthetic oligonucleotide
  Sense strand starting at position 2438 of SEQ ID NO: 586332
gggagacacccaugagucu

SEQ ID NO: 710033 - RNA, 19 nt, Artificial Sequence
  Description of Artificial Sequence: Synthetic oligonucleotide
  Antisense strand to SEQ ID NO: 710032
agacucaugggugucuccc

SEQ ID NO: 710034 - RNA, 19 nt, Artificial Sequence
  Description of Artificial Sequence: Synthetic oligonucleotide
  Sense strand starting at position 2447 of SEQ ID NO: 586332
ccaugagucuaaugagauc

SEQ ID NO: 710035 - RNA, 19 nt, Artificial Sequence
  Description of Artificial Sequence: Synthetic oligonucleotide
  Antisense strand to SEQ ID NO: 710034
gaucucauuagacucaugg

SEQ ID NO: 710036 - RNA, 19 nt, Artificial Sequence
  Description of Artificial Sequence: Synthetic oligonucleotide
  Sense strand starting at position 2480 of SEQ ID NO: 586332
gguugaaguccuuggauca

SEQ ID NO: 710037 - RNA, 19 nt, Artificial Sequence
  Description of Artificial Sequence: Synthetic oligonucleotide
  Antisense strand to SEQ ID NO: 710036
ugauccaaggacuucaacc

SEQ ID NO: 710038 - RNA, 19 nt, Artificial Sequence
  Description of Artificial Sequence: Synthetic oligonucleotide
  Sense strand starting at position 2481 of SEQ ID NO: 586332
guugaaguccuuggaucag

SEQ ID NO: 710039 - RNA, 19 nt, Artificial Sequence
  Description of Artificial Sequence: Synthetic oligonucleotide
  Antisense strand to SEQ ID NO: 710038
cugauccaaggacuucaac

SEQ ID NO: 710040 - RNA, 19 nt, Artificial Sequence
  Description of Artificial Sequence: Synthetic oligonucleotide
  Sense strand starting at position 2611 of SEQ ID NO: 586332
aggucuccugcuugaguga

SEQ ID NO: 710041 - RNA, 19 nt, Artificial Sequence
  Description of Artificial Sequence: Synthetic oligonucleotide
  Antisense strand to SEQ ID NO: 710040
ucacucaagcaggagaccu

SEQ ID NO: 710042 - RNA, 19 nt, Artificial Sequence
  Description of Artificial Sequence: Synthetic oligonucleotide
  Sense strand starting at position 2676 of SEQ ID NO: 586332
gcugaaauuaucuggaagg

SEQ ID NO: 710043 - RNA, 19 nt, Artificial Sequence
  Description of Artificial Sequence: Synthetic oligonucleotide
  Antisense strand to SEQ ID NO: 710042
ccuuccagauaauuucagc

SEQ ID NO: 710044 - RNA, 19 nt, Artificial Sequence
  Description of Artificial Sequence: Synthetic oligonucleotide
  Sense strand starting at position 2754 of SEQ ID NO: 586332
augugucucucuuccucaa

SEQ ID NO: 710045 - RNA, 19 nt, Artificial Sequence
  Description of Artificial Sequence: Synthetic oligonucleotide
  Antisense strand to SEQ ID NO: 710044
uugaggaagagagacacau

SEQ ID NO: 710046 - RNA, 19 nt, Artificial Sequence
  Description of Artificial Sequence: Synthetic oligonucleotide
  Sense strand starting at position 2914 of SEQ ID NO: 586332
cagaaugccuccuugguga

SEQ ID NO: 710047 - RNA, 19 nt, Artificial Sequence
  Description of Artificial Sequence: Synthetic oligonucleotide
  Antisense strand to SEQ ID NO: 710046
ucaccaaggaggcauucug

SEQ ID NO: 710048 - RNA, 19 nt, Artificial Sequence
  Description of Artificial Sequence: Synthetic oligonucleotide
  Sense strand starting at position 3119 of SEQ ID NO: 586332
uggagcuuucuccaucagu

SEQ ID NO: 710049 - RNA, 19 nt, Artificial Sequence
  Description of Artificial Sequence: Synthetic oligonucleotide
  Antisense strand to SEQ ID NO: 710048
acugauggagaaagcucca

SEQ ID NO: 710050 - RNA, 19 nt, Artificial Sequence
  Description of Artificial Sequence: Synthetic oligonucleotide
  Sense strand starting at position 3122 of SEQ ID NO: 586332
agcuuucuccaucagugaa

SEQ ID NO: 710051 - RNA, 19 nt, Artificial Sequence
  Description of Artificial Sequence: Synthetic oligonucleotide
  Antisense strand to SEQ ID NO: 710050
uucacugauggagaaagcu

SEQ ID NO: 710052 - RNA, 19 nt, Artificial Sequence
  Description of Artificial Sequence: Synthetic oligonucleotide
  Sense strand starting at position 3172 of SEQ ID NO: 586332
cucucugguucugaguuau

SEQ ID NO: 710053 - RNA, 19 nt, Artificial Sequence
  Description of Artificial Sequence: Synthetic oligonucleotide
  Antisense strand to SEQ ID NO: 710052
auaacucagaaccagagag

SEQ ID NO: 710054 - RNA, 19 nt, Artificial Sequence
  Description of Artificial Sequence: Synthetic oligonucleotide
  Sense strand starting at position 3183 of SEQ ID NO: 586332
ugaguuaugagacggagag

SEQ ID NO: 710055 - RNA, 19 nt, Artificial Sequence
  Description of Artificial Sequence: Synthetic oligonucleotide
  Antisense strand to SEQ ID NO: 710054
cucuccgucucauaacuca

SEQ ID NO: 710056 - RNA, 19 nt, Artificial Sequence
  Description of Artificial Sequence: Synthetic oligonucleotide
  Sense strand starting at position 3184 of SEQ ID NO: 586332
gaguuaugagacggagagu

SEQ ID NO: 710057 - RNA, 19 nt, Artificial Sequence
  Description of Artificial Sequence: Synthetic oligonucleotide
  Antisense strand to SEQ ID NO: 710056
acucuccgucucauaacuc

SEQ ID NO: 710058 - RNA, 19 nt, Artificial Sequence
  Description of Artificial Sequence: Synthetic oligonucleotide
  Sense strand starting at position 3207 of SEQ ID NO: 586332
ggaagacauacaugugugu

SEQ ID NO: 710059 - RNA, 19 nt, Artificial Sequence
  Description of Artificial Sequence: Synthetic oligonucleotide
  Antisense strand to SEQ ID NO: 710058
acacacauguaugucuucc

SEQ ID NO: 710060 - RNA, 19 nt, Artificial Sequence
  Description of Artificial Sequence: Synthetic oligonucleotide
  Sense strand starting at position 3227 of SEQ ID NO: 586332
guguguuguuuguuucuau

SEQ ID NO: 710061 - RNA, 19 nt, Artificial Sequence
  Description of Artificial Sequence: Synthetic oligonucleotide
  Antisense strand to SEQ ID NO: 710060
auagaaacaaacaacacac

SEQ ID NO: 710062 - RNA, 19 nt, Artificial Sequence
  Description of Artificial Sequence: Synthetic oligonucleotide
  Sense strand starting at position 3234 of SEQ ID NO: 586332
guuuguuucuaucuuuaga

SEQ ID NO: 710063 - RNA, 19 nt, Artificial Sequence
  Description of Artificial Sequence: Synthetic oligonucleotide
  Antisense strand to SEQ ID NO: 710062
ucuaaagauagaaacaaac

SEQ ID NO: 710064 - RNA, 19 nt, Artificial Sequence
  Description of Artificial Sequence: Synthetic oligonucleotide
  Sense strand starting at position 3264 of SEQ ID NO: 586332
gcuggaaccuagucucaga

SEQ ID NO: 710065 - RNA, 19 nt, Artificial Sequence
  Description of Artificial Sequence: Synthetic oligonucleotide
  Antisense strand to SEQ ID NO: 710064
ucugagacuagguuccagc

SEQ ID NO: 710066 - RNA, 19 nt, Artificial Sequence
  Description of Artificial Sequence: Synthetic oligonucleotide
  Sense strand starting at position 3615 of SEQ ID NO: 586332
gguagagguuccuuggucu

SEQ ID NO: 710067 - RNA, 19 nt, Artificial Sequence
  Description of Artificial Sequence: Synthetic oligonucleotide
  Antisense strand to SEQ ID NO: 710066
agaccaaggaaccucuacc

SEQ ID NO: 710068 - RNA, 19 nt, Artificial Sequence
  Description of Artificial Sequence: Synthetic oligonucleotide
  Sense strand starting at position 3766 of SEQ ID NO: 586332
gggcaauagugucccucau

SEQ ID NO: 710069 - RNA, 19 nt, Artificial Sequence
  Description of Artificial Sequence: Synthetic oligonucleotide
  Antisense strand to SEQ ID NO: 710068
augagggacacuauugccc

SEQ ID NO: 710070 - RNA, 19 nt, Artificial Sequence
  Description of Artificial Sequence: Synthetic oligonucleotide
  Sense strand starting at position 3768 of SEQ ID NO: 586332
gcaauagugucccucauau

SEQ ID NO: 710071 - RNA, 19 nt, Artificial Sequence
  Description of Artificial Sequence: Synthetic oligonucleotide
  Antisense strand to SEQ ID NO: 710070
auaugagggacacuauugc

SEQ ID NO: 710072 - RNA, 19 nt, Artificial Sequence
  Description of Artificial Sequence: Synthetic oligonucleotide
  Sense strand starting at position 3843 of SEQ ID NO: 586332
agccaagcuuaaguuauua

SEQ ID NO: 710073 - RNA, 19 nt, Artificial Sequence
  Description of Artificial Sequence: Synthetic oligonucleotide
  Antisense strand to SEQ ID NO: 710072
uaauaacuuaagcuuggcu

SEQ ID NO: 710074 - RNA, 19 nt, Artificial Sequence
  Description of Artificial Sequence: Synthetic oligonucleotide
  Sense strand starting at position 3912 of SEQ ID NO: 586332
agaugcagcuaugucaaga

SEQ ID NO: 710075 - RNA, 19 nt, Artificial Sequence
  Description of Artificial Sequence: Synthetic oligonucleotide
  Antisense strand to SEQ ID NO: 710074
ucuugacauagcugcaucu

SEQ ID NO: 710076 - RNA, 19 nt, Artificial Sequence
  Description of Artificial Sequence: Synthetic oligonucleotide
  Sense strand starting at position 3959 of SEQ ID NO: 586332
agggacuucucaucucaug

SEQ ID NO: 710077 - RNA, 19 nt, Artificial Sequence
  Description of Artificial Sequence: Synthetic oligonucleotide
  Antisense strand to SEQ ID NO: 710076
caugagaugagaagucccu

SEQ ID NO: 710078 - RNA, 19 nt, Artificial Sequence
  Description of Artificial Sequence: Synthetic oligonucleotide
  Sense strand starting at position 117 of SEQ ID NO: 586333
uggguuuguaccuaaugga

SEQ ID NO: 710079 - RNA, 19 nt, Artificial Sequence
  Description of Artificial Sequence: Synthetic oligonucleotide
  Antisense strand to SEQ ID NO: 710078
uccauuagguacaaaccca

SEQ ID NO: 710080 - RNA, 19 nt, Artificial Sequence
  Description of Artificial Sequence: Synthetic oligonucleotide
  Sense strand starting at position 219 of SEQ ID NO: 586333
aucuuagagugguuaauca

SEQ ID NO: 710081 - RNA, 19 nt, Artificial Sequence
  Description of Artificial Sequence: Synthetic oligonucleotide
  Antisense strand to SEQ ID NO: 710080
ugauuaaccacucuaagau

SEQ ID NO: 710082 - RNA, 19 nt, Artificial Sequence
  Description of Artificial Sequence: Synthetic oligonucleotide
  Sense strand starting at position 223 of SEQ ID NO: 586333
uagagugguuaaucauaca

SEQ ID NO: 710083 - RNA, 19 nt, Artificial Sequence
  Description of Artificial Sequence: Synthetic oligonucleotide
  Antisense strand to SEQ ID NO: 710082
uguaugauuaaccacucua

SEQ ID NO: 710084 - RNA, 19 nt, Artificial Sequence
  Description of Artificial Sequence: Synthetic oligonucleotide
  Sense strand starting at position 244 of SEQ ID NO: 586333
ucaauaaagucagaauuug

SEQ ID NO: 710085 - RNA, 19 nt, Artificial Sequence
  Description of Artificial Sequence: Synthetic oligonucleotide
  Antisense strand to SEQ ID NO: 710084
caaauucugacuuuauuga

SEQ ID NO: 710086 - RNA, 19 nt, Artificial Sequence
  Description of Artificial Sequence: Synthetic oligonucleotide
  Sense strand starting at position 386 of SEQ ID NO: 586333
ugcgaauauggugagauca

SEQ ID NO: 710087 - RNA, 19 nt, Artificial Sequence
  Description of Artificial Sequence: Synthetic oligonucleotide
  Antisense strand to SEQ ID NO: 710086
ugaucucaccauauucgca

SEQ ID NO: 710088 - RNA, 19 nt, Artificial Sequence
  Description of Artificial Sequence: Synthetic oligonucleotide
  Sense strand starting at position 394 of SEQ ID NO: 586333
uggugagaucauuacuccu

SEQ ID NO: 710089 - RNA, 19 nt, Artificial Sequence
  Description of Artificial Sequence: Synthetic oligonucleotide
  Antisense strand to SEQ ID NO: 710088
aggaguaaugaucucacca

SEQ ID NO: 710090 - RNA, 19 nt, Artificial Sequence
  Description of Artificial Sequence: Synthetic oligonucleotide
  Sense strand starting at position 417 of SEQ ID NO: 586333
uugugauauucucuacaga

SEQ ID NO: 710091 - RNA, 19 nt, Artificial Sequence
  Description of Artificial Sequence: Synthetic oligonucleotide
  Antisense strand to SEQ ID NO: 710090
ucuguagagaauaucacaa

SEQ ID NO: 710092 - RNA, 19 nt, Artificial Sequence
  Description of Artificial Sequence: Synthetic oligonucleotide
  Sense strand starting at position 538 of SEQ ID NO: 586333
gcuuuaaugcuugagaagg

SEQ ID NO: 710093 - RNA, 19 nt, Artificial Sequence
  Description of Artificial Sequence: Synthetic oligonucleotide
  Antisense strand to SEQ ID NO: 710092
ccuucucaagcauuaaagc

SEQ ID NO: 710094 - RNA, 19 nt, Artificial Sequence
  Description of Artificial Sequence: Synthetic oligonucleotide
  Sense strand starting at position 577 of SEQ ID NO: 586333
ugcagauggccuuaaagaa

SEQ ID NO: 710095 - RNA, 19 nt, Artificial Sequence
  Description of Artificial Sequence: Synthetic oligonucleotide
  Antisense strand to SEQ ID NO: 710094
uucuuuaaggccaucugca

SEQ ID NO: 710096 - RNA, 19 nt, Artificial Sequence
  Description of Artificial Sequence: Synthetic oligonucleotide
  Sense strand starting at position 625 of SEQ ID NO: 586333
aggauauagaaaugucagu

SEQ ID NO: 710097 - RNA, 19 nt, Artificial Sequence
  Description of Artificial Sequence: Synthetic oligonucleotide
  Antisense strand to SEQ ID NO: 710096
acugacauuucuauauccu

SEQ ID NO: 710098 - RNA, 19 nt, Artificial Sequence
  Description of Artificial Sequence: Synthetic oligonucleotide
  Sense strand starting at position 630 of SEQ ID NO: 586333
auagaaaugucagugugaa

SEQ ID NO: 710099 - RNA, 19 nt, Artificial Sequence
  Description of Artificial Sequence: Synthetic oligonucleotide
  Antisense strand to SEQ ID NO: 710098
uucacacugacauuucuau

SEQ ID NO: 710100 - RNA, 19 nt, Artificial Sequence
  Description of Artificial Sequence: Synthetic oligonucleotide
  Sense strand starting at position 631 of SEQ ID NO: 586333
uagaaaugucagugugaau

SEQ ID NO: 710101 - RNA, 19 nt, Artificial Sequence
  Description of Artificial Sequence: Synthetic oligonucleotide
  Antisense strand to SEQ ID NO: 710100
auucacacugacauuucua

SEQ ID NO: 710102 - RNA, 19 nt, Artificial Sequence
  Description of Artificial Sequence: Synthetic oligonucleotide
  Sense strand starting at position 828 of SEQ ID NO: 586333
auuguugcauuuguguaau

SEQ ID NO: 710103 - RNA, 19 nt, Artificial Sequence
  Description of Artificial Sequence: Synthetic oligonucleotide
  Antisense strand to SEQ ID NO: 710102
auuacacaaaugcaacaau

SEQ ID NO: 710104 - RNA, 19 nt, Artificial Sequence
  Description of Artificial Sequence: Synthetic oligonucleotide
  Sense strand starting at position 834 of SEQ ID NO: 586333
gcauuuguguaauugguua

SEQ ID NO: 710105 - RNA, 19 nt, Artificial Sequence
  Description of Artificial Sequence: Synthetic oligonucleotide
  Antisense strand to SEQ ID NO: 710104
uaaccaauuacacaaaugc

SEQ ID NO: 710106 - RNA, 19 nt, Artificial Sequence
  Description of Artificial Sequence: Synthetic oligonucleotide
  Sense strand starting at position 1014 of SEQ ID NO: 586333
auuggauucuuucuugaag

SEQ ID NO: 710107 - RNA, 19 nt, Artificial Sequence
  Description of Artificial Sequence: Synthetic oligonucleotide
  Antisense strand to SEQ ID NO: 710106
cuucaagaaagaauccaau

SEQ ID NO: 710108 - RNA, 19 nt, Artificial Sequence
  Description of Artificial Sequence: Synthetic oligonucleotide
  Sense strand starting at position 1065 of SEQ ID NO: 586333
guuaaauaagaugguucca

SEQ ID NO: 710109 - RNA, 19 nt, Artificial Sequence
  Description of Artificial Sequence: Synthetic oligonucleotide
  Antisense strand to SEQ ID NO: 710108
uggaaccaucuuauuuaac

SEQ ID NO: 710110 - RNA, 19 nt, Artificial Sequence
  Description of Artificial Sequence: Synthetic oligonucleotide
  Sense strand starting at position 1175 of SEQ ID NO: 586333
acgaacaauacgugaagga

SEQ ID NO: 710111 - RNA, 19 nt, Artificial Sequence
  Description of Artificial Sequence: Synthetic oligonucleotide
  Antisense strand to SEQ ID NO: 710110
uccuucacguauuguucgu

SEQ ID NO: 710112 - RNA, 19 nt, Artificial Sequence
  Description of Artificial Sequence: Synthetic oligonucleotide
  Sense strand starting at position 1184 of SEQ ID NO: 586333
acgugaaggaauugucaca

SEQ ID NO: 710113 - RNA, 19 nt, Artificial Sequence
  Description of Artificial Sequence: Synthetic oligonucleotide
  Antisense strand to SEQ ID NO: 710112
ugugacaauuccuucacgu

SEQ ID NO: 710114 - RNA, 19 nt, Artificial Sequence
  Description of Artificial Sequence: Synthetic oligonucleotide
  Sense strand starting at position 1453 of SEQ ID NO: 586333
gcuagagagcaggaguaaa

SEQ ID NO: 710115 - RNA, 19 nt, Artificial Sequence
  Description of Artificial Sequence: Synthetic oligonucleotide
  Antisense strand to SEQ ID NO: 710114
uuuacuccugcucucuagc

SEQ ID NO: 710116 - RNA, 19 nt, Artificial Sequence
  Description of Artificial Sequence: Synthetic oligonucleotide
  Sense strand starting at position 1659 of SEQ ID NO: 586333
gaggccaucaagugagaga

SEQ ID NO: 710117 - RNA, 19 nt, Artificial Sequence
  Description of Artificial Sequence: Synthetic oligonucleotide
  Antisense strand to SEQ ID NO: 710116
ucucucacuugauggccuc

SEQ ID NO: 710118 - RNA, 19 nt, Artificial Sequence
  Description of Artificial Sequence: Synthetic oligonucleotide
  Sense strand starting at position 2730 of SEQ ID NO: 586333
uggaaucuuuaaccagagu

SEQ ID NO: 710119 - RNA, 19 nt, Artificial Sequence
  Description of Artificial Sequence: Synthetic oligonucleotide
  Antisense strand to SEQ ID NO: 710118
acucugguuaaagauucca

SEQ ID NO: 710120 - RNA, 19 nt, Artificial Sequence
  Description of Artificial Sequence: Synthetic oligonucleotide
  Sense strand starting at position 2771 of SEQ ID NO: 586333
aucauaaugugauugacuu

SEQ ID NO: 710121 - RNA, 19 nt, Artificial Sequence
  Description of Artificial Sequence: Synthetic oligonucleotide
  Antisense strand to SEQ ID NO: 710120
aagucaaucacauuaugau

SEQ ID NO: 710122 - RNA, 19 nt, Artificial Sequence
  Description of Artificial Sequence: Synthetic oligonucleotide
  Sense strand starting at position 2772 of SEQ ID NO: 586333
ucauaaugugauugacuua

SEQ ID NO: 710123 - RNA, 19 nt, Artificial Sequence
  Description of Artificial Sequence: Synthetic oligonucleotide
  Antisense strand to SEQ ID NO: 710122
uaagucaaucacauuauga

SEQ ID NO: 710124 - RNA, 19 nt, Artificial Sequence
  Description of Artificial Sequence: Synthetic oligonucleotide
  Sense strand starting at position 2978 of SEQ ID NO: 586333
uugucugucguuucuaacu

SEQ ID NO: 710125 - RNA, 19 nt, Artificial Sequence
  Description of Artificial Sequence: Synthetic oligonucleotide
  Antisense strand to SEQ ID NO: 710124
aguuagaaacgacagacaa

SEQ ID NO: 710126 - RNA, 19 nt, Artificial Sequence
  Description of Artificial Sequence: Synthetic oligonucleotide
  Sense strand starting at position 3005 of SEQ ID NO: 586333
aguaaaguuugaccugaag

SEQ ID NO: 710127 - RNA, 19 nt, Artificial Sequence
  Description of Artificial Sequence: Synthetic oligonucleotide
  Antisense strand to SEQ ID NO: 710126
cuucaggucaaacuuuacu

SEQ ID NO: 710128 - RNA, 19 nt, Artificial Sequence
  Description of Artificial Sequence: Synthetic oligonucleotide
  Sense strand starting at position 3029 of SEQ ID NO: 586333
ugaggcuauguguaacuga

SEQ ID NO: 710129 - RNA, 19 nt, Artificial Sequence
  Description of Artificial Sequence: Synthetic oligonucleotide
  Antisense strand to SEQ ID NO: 710128
ucaguuacacauagccuca

SEQ ID NO: 710130 - RNA, 19 nt, Artificial Sequence
  Description of Artificial Sequence: Synthetic oligonucleotide
  Sense strand starting at position 3344 of SEQ ID NO: 586333
agaaaccuucguuguauuu

SEQ ID NO: 710131 - RNA, 19 nt, Artificial Sequence
  Description of Artificial Sequence: Synthetic oligonucleotide
  Antisense strand to SEQ ID NO: 710130
aaauacaacgaagguuucu

SEQ ID NO: 710132 - RNA, 19 nt, Artificial Sequence
  Description of Artificial Sequence: Synthetic oligonucleotide
  Sense strand starting at position 3490 of SEQ ID NO: 586333
gaaacaagauguuucugua

SEQ ID NO: 710133 - RNA, 19 nt, Artificial Sequence
  Description of Artificial Sequence: Synthetic oligonucleotide
  Antisense strand to SEQ ID NO: 710132
uacagaaacaucuuguuuc

SEQ ID NO: 710134 - RNA, 19 nt, Artificial Sequence
  Description of Artificial Sequence: Synthetic oligonucleotide
  Sense strand starting at position 3494 of SEQ ID NO: 586333
caagauguuucuguaaaga

SEQ ID NO: 710135 - RNA, 19 nt, Artificial Sequence
  Description of Artificial Sequence: Synthetic oligonucleotide
  Antisense strand to SEQ ID NO: 710134
ucuuuacagaaacaucuug

SEQ ID NO: 710136 - RNA, 19 nt, Artificial Sequence
  Description of Artificial Sequence: Synthetic oligonucleotide
  Sense strand starting at position 3504 of SEQ ID NO: 586333
cuguaaagauuccugaauu

SEQ ID NO: 710137 - RNA, 19 nt, Artificial Sequence
  Description of Artificial Sequence: Synthetic oligonucleotide
  Antisense strand to SEQ ID NO: 710136
aauucaggaaucuuuacag

SEQ ID NO: 710138 - RNA, 19 nt, Artificial Sequence
  Description of Artificial Sequence: Synthetic oligonucleotide
  Sense strand starting at position 3512 of SEQ ID NO: 586333
auuccugaauuaucggaua

SEQ ID NO: 710139 - RNA, 19 nt, Artificial Sequence
  Description of Artificial Sequence: Synthetic oligonucleotide
  Antisense strand to SEQ ID NO: 710138
uauccgauaauucaggaau

SEQ ID NO: 710140 - RNA, 19 nt, Artificial Sequence
  Description of Artificial Sequence: Synthetic oligonucleotide
  Sense strand starting at position 3514 of SEQ ID NO: 586333
uccugaauuaucggauaga

SEQ ID NO: 710141 - RNA, 19 nt, Artificial Sequence
  Description of Artificial Sequence: Synthetic oligonucleotide
  Antisense strand to SEQ ID NO: 710140
ucuauccgauaauucagga

SEQ ID NO: 710142 - RNA, 19 nt, Artificial Sequence
  Description of Artificial Sequence: Synthetic oligonucleotide
  Sense strand starting at position 3719 of SEQ ID NO: 586333
ucagguuaaacuugaacga

SEQ ID NO: 710143 - RNA, 19 nt, Artificial Sequence
  Description of Artificial Sequence: Synthetic oligonucleotide
  Antisense strand to SEQ ID NO: 710142
ucguucaaguuuaaccuga

SEQ ID NO: 710144 - RNA, 19 nt, Artificial Sequence
  Description of Artificial Sequence: Synthetic oligonucleotide
  Sense strand starting at position 3729 of SEQ ID NO: 586333
cuugaacgaguuugcauuu

SEQ ID NO: 710145 - RNA, 19 nt, Artificial Sequence
  Description of Artificial Sequence: Synthetic oligonucleotide
  Antisense strand to SEQ ID NO: 710144
aaaugcaaacucguucaag

SEQ ID NO: 710146 - RNA, 19 nt, Artificial Sequence
  Description of Artificial Sequence: Synthetic oligonucleotide
  Sense strand starting at position 3761 of SEQ ID NO: 586333
gggagauauuggcugguaa

SEQ ID NO: 710147 - RNA, 19 nt, Artificial Sequence
  Description of Artificial Sequence: Synthetic oligonucleotide
  Antisense strand to SEQ ID NO: 710146
uuaccagccaauaucuccc

SEQ ID NO: 710148 - RNA, 19 nt, Artificial Sequence
  Description of Artificial Sequence: Synthetic oligonucleotide
  Sense strand starting at position 3762 of SEQ ID NO: 586333
ggagauauuggcugguaag

SEQ ID NO: 710149 - RNA, 19 nt, Artificial Sequence
  Description of Artificial Sequence: Synthetic oligonucleotide
  Antisense strand to SEQ ID NO: 710148
cuuaccagccaauaucucc

SEQ ID NO: 710150 - RNA, 19 nt, Artificial Sequence
  Description of Artificial Sequence: Synthetic oligonucleotide
  Sense strand starting at position 3763 of SEQ ID NO: 586333
gagauauuggcugguaagg

SEQ ID NO: 710151 - RNA, 19 nt, Artificial Sequence
  Description of Artificial Sequence: Synthetic oligonucleotide
  Antisense strand to SEQ ID NO: 710150
ccuuaccagccaauaucuc

SEQ ID NO: 710152 - RNA, 19 nt, Artificial Sequence
  Description of Artificial Sequence: Synthetic oligonucleotide
  Sense strand starting at position 3807 of SEQ ID NO: 586333
uugugauagcaagaaguug

SEQ ID NO: 710153 - RNA, 19 nt, Artificial Sequence
  Description of Artificial Sequence: Synthetic oligonucleotide
  Antisense strand to SEQ ID NO: 710152
caacuucuugcuaucacaa

SEQ ID NO: 710154 - RNA, 19 nt, Artificial Sequence
  Description of Artificial Sequence: Synthetic oligonucleotide
  Sense strand starting at position 3885 of SEQ ID NO: 586333
aguacaaguggugauaauu

SEQ ID NO: 710155 - RNA, 19 nt, Artificial Sequence
  Description of Artificial Sequence: Synthetic oligonucleotide
  Antisense strand to SEQ ID NO: 710154
aauuaucaccacuuguacu

SEQ ID NO: 710156 - RNA, 19 nt, Artificial Sequence
  Description of Artificial Sequence: Synthetic oligonucleotide
  Sense strand starting at position 3982 of SEQ ID NO: 586333
cuuuauagauaagucuaga

SEQ ID NO: 710157 - RNA, 19 nt, Artificial Sequence
  Description of Artificial Sequence: Synthetic oligonucleotide
  Antisense strand to SEQ ID NO: 710156
ucuagacuuaucuauaaag

SEQ ID NO: 710158 - RNA, 19 nt, Artificial Sequence
  Description of Artificial Sequence: Synthetic oligonucleotide
  Sense strand starting at position 156 of SEQ ID NO: 586334
gguccuggaaguugucaca

SEQ ID NO: 710159 - RNA, 19 nt, Artificial Sequence
  Description of Artificial Sequence: Synthetic oligonucleotide
  Antisense strand to SEQ ID NO: 710158
ugugacaacuuccaggacc

SEQ ID NO: 710160 - RNA, 19 nt, Artificial Sequence
  Description of Artificial Sequence: Synthetic oligonucleotide
  Sense strand starting at position 192 of SEQ ID NO: 586334
gcuucugcccugugaagug

SEQ ID NO: 710161 - RNA, 19 nt, Artificial Sequence
  Description of Artificial Sequence: Synthetic oligonucleotide
  Antisense strand to SEQ ID NO: 710160
cacuucacagggcagaagc

SEQ ID NO: 710162 - RNA, 19 nt, Artificial Sequence
  Description of Artificial Sequence: Synthetic oligonucleotide
  Sense strand starting at position 366 of SEQ ID NO: 586334
guaggugcccaacacuauu

SEQ ID NO: 710163 - RNA, 19 nt, Artificial Sequence
  Description of Artificial Sequence: Synthetic oligonucleotide
  Antisense strand to SEQ ID NO: 710162
aauaguguugggcaccuac

SEQ ID NO: 710164 - RNA, 19 nt, Artificial Sequence
  Description of Artificial Sequence: Synthetic oligonucleotide
  Sense strand starting at position 596 of SEQ ID NO: 586334
agccgauaauaacauuaaa

SEQ ID NO: 710165 - RNA, 19 nt, Artificial Sequence
  Description of Artificial Sequence: Synthetic oligonucleotide
  Antisense strand to SEQ ID NO: 710164
uuuaauguuauuaucggcu

SEQ ID NO: 710166 - RNA, 19 nt, Artificial Sequence
  Description of Artificial Sequence: Synthetic oligonucleotide
  Sense strand starting at position 657 of SEQ ID NO: 586334
augguaacccagcauauau

SEQ ID NO: 710167 - RNA, 19 nt, Artificial Sequence
  Description of Artificial Sequence: Synthetic oligonucleotide
  Antisense strand to SEQ ID NO: 710166
auauaugcuggguuaccau

SEQ ID NO: 710168 - RNA, 19 nt, Artificial Sequence
  Description of Artificial Sequence: Synthetic oligonucleotide
  Sense strand starting at position 678 of SEQ ID NO: 586334
ugcagaaauucggguuccu

SEQ ID NO: 710169 - RNA, 19 nt, Artificial Sequence
  Description of Artificial Sequence: Synthetic oligonucleotide
  Antisense strand to SEQ ID NO: 710168
aggaacccgaauuucugca

SEQ ID NO: 710170 - RNA, 19 nt, Artificial Sequence
  Description of Artificial Sequence: Synthetic oligonucleotide
  Sense strand starting at position 747 of SEQ ID NO: 586334
gggccuggcucgggauuaa

SEQ ID NO: 710171 - RNA, 19 nt, Artificial Sequence
  Description of Artificial Sequence: Synthetic oligonucleotide
  Antisense strand to SEQ ID NO: 710170
uuaaucccgagccaggccc

SEQ ID NO: 710172 - RNA, 19 nt, Artificial Sequence
  Description of Artificial Sequence: Synthetic oligonucleotide
  Sense strand starting at position 757 of SEQ ID NO: 586334
cgggauuaauguucgcaaa

SEQ ID NO: 710173 - RNA, 19 nt, Artificial Sequence
  Description of Artificial Sequence: Synthetic oligonucleotide
  Antisense strand to SEQ ID NO: 710172
uuugcgaacauuaaucccg

SEQ ID NO: 710174 - RNA, 19 nt, Artificial Sequence
  Description of Artificial Sequence: Synthetic oligonucleotide
  Sense strand starting at position 831 of SEQ ID NO: 586334
guagcaggcauguaucaga

SEQ ID NO: 710175 - RNA, 19 nt, Artificial Sequence
  Description of Artificial Sequence: Synthetic oligonucleotide
  Antisense strand to SEQ ID NO: 710174
ucugauacaugccugcuac

SEQ ID NO: 710176 - RNA, 19 nt, Artificial Sequence
  Description of Artificial Sequence: Synthetic oligonucleotide
  Sense strand starting at position 834 of SEQ ID NO: 586334
gcaggcauguaucagaucu

SEQ ID NO: 710177 - RNA, 19 nt, Artificial Sequence
  Description of Artificial Sequence: Synthetic oligonucleotide
  Antisense strand to SEQ ID NO: 710176
agaucugauacaugccugc

SEQ ID NO: 710178 - RNA, 19 nt, Artificial Sequence
  Description of Artificial Sequence: Synthetic oligonucleotide
  Sense strand starting at position 879 of SEQ ID NO: 586334
cagacaucgugucuuauag

SEQ ID NO: 710179 - RNA, 19 nt, Artificial Sequence
  Description of Artificial Sequence: Synthetic oligonucleotide
  Antisense strand to SEQ ID NO: 710178
cuauaagacacgaugucug

SEQ ID NO: 710180 - RNA, 19 nt, Artificial Sequence
  Description of Artificial Sequence: Synthetic oligonucleotide
  Sense strand starting at position 881 of SEQ ID NO: 586334
gacaucgugucuuauagcu

SEQ ID NO: 710181 - RNA, 19 nt, Artificial Sequence
  Description of Artificial Sequence: Synthetic oligonucleotide
  Antisense strand to SEQ ID NO: 710180
agcuauaagacacgauguc

SEQ ID NO: 710182 - RNA, 19 nt, Artificial Sequence
  Description of Artificial Sequence: Synthetic oligonucleotide
  Sense strand starting at position 889 of SEQ ID NO: 586334
gucuuauagcuacguggca

SEQ ID NO: 710183 - RNA, 19 nt, Artificial Sequence
  Description of Artificial Sequence: Synthetic oligonucleotide
  Antisense strand to SEQ ID NO: 710182
ugccacguagcuauaagac

SEQ ID NO: 710184 - RNA, 19 nt, Artificial Sequence
  Description of Artificial Sequence: Synthetic oligonucleotide
  Sense strand starting at position 914 of SEQ ID NO: 586334
gguuguccuugucccgaaa

SEQ ID NO: 710185 - RNA, 19 nt, Artificial Sequence
  Description of Artificial Sequence: Synthetic oligonucleotide
  Antisense strand to SEQ ID NO: 710184
uuucgggacaaggacaacc

SEQ ID NO: 710186 - RNA, 19 nt, Artificial Sequence
  Description of Artificial Sequence: Synthetic oligonucleotide
  Sense strand starting at position 916 of SEQ ID NO: 586334
uuguccuugucccgaaaca

SEQ ID NO: 710187 - RNA, 19 nt, Artificial Sequence
  Description of Artificial Sequence: Synthetic oligonucleotide
  Antisense strand to SEQ ID NO: 710186
uguuucgggacaaggacaa

SEQ ID NO: 710188 - RNA, 19 nt, Artificial Sequence
  Description of Artificial Sequence: Synthetic oligonucleotide
  Sense strand starting at position 966 of SEQ ID NO: 586334
cucauuuccugcuguggaa

SEQ ID NO: 710189 - RNA, 19 nt, Artificial Sequence
  Description of Artificial Sequence: Synthetic oligonucleotide
  Antisense strand to SEQ ID NO: 710188
uuccacagcaggaaaugag

SEQ ID NO: 710190 - RNA, 19 nt, Artificial Sequence
  Description of Artificial Sequence: Synthetic oligonucleotide
  Sense strand starting at position 1048 of SEQ ID NO: 586334
gccagagugcagugauguu

SEQ ID NO: 710191 - RNA, 19 nt, Artificial Sequence
  Description of Artificial Sequence: Synthetic oligonucleotide
  Antisense strand to SEQ ID NO: 710190
aacaucacugcacucuggc

SEQ ID NO: 710192 - RNA, 19 nt, Artificial Sequence
  Description of Artificial Sequence: Synthetic oligonucleotide
  Sense strand starting at position 1167 of SEQ ID NO: 586334
augcguucaccggaaagga

SEQ ID NO: 710193 - RNA, 19 nt, Artificial Sequence
  Description of Artificial Sequence: Synthetic oligonucleotide
  Antisense strand to SEQ ID NO: 710192
uccuuuccggugaacgcau

SEQ ID NO: 710194 - RNA, 19 nt, Artificial Sequence
  Description of Artificial Sequence: Synthetic oligonucleotide
  Sense strand starting at position 1225 of SEQ ID NO: 586334
gcccuuuguuacugaagca

SEQ ID NO: 710195 - RNA, 19 nt, Artificial Sequence
  Description of Artificial Sequence: Synthetic oligonucleotide
  Antisense strand to SEQ ID NO: 710194
ugcuucaguaacaaagggc

SEQ ID NO: 710196 - RNA, 19 nt, Artificial Sequence
  Description of Artificial Sequence: Synthetic oligonucleotide
  Sense strand starting at position 1492 of SEQ ID NO: 586334
cccuaagugucccugaaga

SEQ ID NO: 710197 - RNA, 19 nt, Artificial Sequence
  Description of Artificial Sequence: Synthetic oligonucleotide
  Antisense strand to SEQ ID NO: 710196
ucuucagggacacuuaggg

SEQ ID NO: 710198 - RNA, 19 nt, Artificial Sequence
  Description of Artificial Sequence: Synthetic oligonucleotide
  Sense strand starting at position 1692 of SEQ ID NO: 586334
uggagaccuuccuauccau

SEQ ID NO: 710199 - RNA, 19 nt, Artificial Sequence
  Description of Artificial Sequence: Synthetic oligonucleotide
  Antisense strand to SEQ ID NO: 710198
auggauaggaaggucucca

SEQ ID NO: 710200 - RNA, 19 nt, Artificial Sequence
  Description of Artificial Sequence: Synthetic oligonucleotide
  Sense strand starting at position 2366 of SEQ ID NO: 586334
guuugucuccacgaggaug

SEQ ID NO: 710201 - RNA, 19 nt, Artificial Sequence
  Description of Artificial Sequence: Synthetic oligonucleotide
  Antisense strand to SEQ ID NO: 710200
cauccucguggagacaaac

SEQ ID NO: 710202 - RNA, 19 nt, Artificial Sequence
  Description of Artificial Sequence: Synthetic oligonucleotide
  Sense strand starting at position 2601 of SEQ ID NO: 586334
gucccucucuccuugaaga

SEQ ID NO: 710203 - RNA, 19 nt, Artificial Sequence
  Description of Artificial Sequence: Synthetic oligonucleotide
  Antisense strand to SEQ ID NO: 710202
ucuucaaggagagagggac

SEQ ID NO: 710204 - RNA, 19 nt, Artificial Sequence
  Description of Artificial Sequence: Synthetic oligonucleotide
  Sense strand starting at position 2807 of SEQ ID NO: 586334
cucagagauuguggaguga

SEQ ID NO: 710205 - RNA, 19 nt, Artificial Sequence
  Description of Artificial Sequence: Synthetic oligonucleotide
  Antisense strand to SEQ ID NO: 710204
ucacuccacaaucucugag

SEQ ID NO: 710206 - RNA, 19 nt, Artificial Sequence
  Description of Artificial Sequence: Synthetic oligonucleotide
  Sense strand starting at position 3276 of SEQ ID NO: 586334
uccaauguuucucucugga

SEQ ID NO: 710207 - RNA, 19 nt, Artificial Sequence
  Description of Artificial Sequence: Synthetic oligonucleotide
  Antisense strand to SEQ ID NO: 710206
uccagagagaaacauugga

SEQ ID NO: 710208 - RNA, 19 nt, Artificial Sequence
  Description of Artificial Sequence: Synthetic oligonucleotide
  Sense strand starting at position 3349 of SEQ ID NO: 586334
aaacuucuccacgaaggua

SEQ ID NO: 710209 - RNA, 19 nt, Artificial Sequence
  Description of Artificial Sequence: Synthetic oligonucleotide
  Antisense strand to SEQ ID NO: 710208
uaccuucguggagaaguuu

SEQ ID NO: 710210 - RNA, 19 nt, Artificial Sequence
  Description of Artificial Sequence: Synthetic oligonucleotide
  Sense strand starting at position 3410 of SEQ ID NO: 586334
uggaaugcgaucugcauca

SEQ ID NO: 710211 - RNA, 19 nt, Artificial Sequence
  Description of Artificial Sequence: Synthetic oligonucleotide
  Antisense strand to SEQ ID NO: 710210
ugaugcagaucgcauucca

SEQ ID NO: 710212 - RNA, 19 nt, Artificial Sequence
  Description of Artificial Sequence: Synthetic oligonucleotide
  Sense strand starting at position 3592 of SEQ ID NO: 586334
aagucaggcuucuuaggaa

SEQ ID NO: 710213 - RNA, 19 nt, Artificial Sequence
  Description of Artificial Sequence: Synthetic oligonucleotide
  Antisense strand to SEQ ID NO: 710212
uuccuaagaagccugacuu

SEQ ID NO: 710214 - RNA, 19 nt, Artificial Sequence
  Description of Artificial Sequence: Synthetic oligonucleotide
  Sense strand starting at position 3625 of SEQ ID NO: 586334
ggcacuuacuccuugaugu

SEQ ID NO: 710215 - RNA, 19 nt, Artificial Sequence
  Description of Artificial Sequence: Synthetic oligonucleotide
  Antisense strand to SEQ ID NO: 710214
acaucaaggaguaagugcc

SEQ ID NO: 710216 - RNA, 19 nt, Artificial Sequence
  Description of Artificial Sequence: Synthetic oligonucleotide
  Sense strand starting at position 3626 of SEQ ID NO: 586334
gcacuuacuccuugauguc

SEQ ID NO: 710217 - RNA, 19 nt, Artificial Sequence
  Description of Artificial Sequence: Synthetic oligonucleotide
  Antisense strand to SEQ ID NO: 710216
gacaucaaggaguaagugc

SEQ ID NO: 710218 - RNA, 19 nt, Artificial Sequence
  Description of Artificial Sequence: Synthetic oligonucleotide
  Sense strand starting at position 3632 of SEQ ID NO: 586334
acuccuugaugucaagacu

SEQ ID NO: 710219 - RNA, 19 nt, Artificial Sequence
  Description of Artificial Sequence: Synthetic oligonucleotide
  Antisense strand to SEQ ID NO: 710218
agucuugacaucaaggagu

SEQ ID NO: 710220 - RNA, 19 nt, Artificial Sequence
  Description of Artificial Sequence: Synthetic oligonucleotide
  Sense strand starting at position 3671 of SEQ ID NO: 586334
acaugacugaguuguuaga

SEQ ID NO: 710221 - RNA, 19 nt, Artificial Sequence
  Description of Artificial Sequence: Synthetic oligonucleotide
  Antisense strand to SEQ ID NO: 710220
ucuaacaacucagucaugu

SEQ ID NO: 710222 - RNA, 19 nt, Artificial Sequence
  Description of Artificial Sequence: Synthetic oligonucleotide
  Sense strand starting at position 3673 of SEQ ID NO: 586334
augacugaguuguuagacu

SEQ ID NO: 710223 - RNA, 19 nt, Artificial Sequence
  Description of Artificial Sequence: Synthetic oligonucleotide
  Antisense strand to SEQ ID NO: 710222
agucuaacaacucagucau

SEQ ID NO: 710224 - RNA, 19 nt, Artificial Sequence
  Description of Artificial Sequence: Synthetic oligonucleotide
  Sense strand starting at position 3680 of SEQ ID NO: 586334
aguuguuagacuggcaaga

SEQ ID NO: 710225 - RNA, 19 nt, Artificial Sequence
  Description of Artificial Sequence: Synthetic oligonucleotide
  Antisense strand to SEQ ID NO: 710224
ucuugccagucuaacaacu

SEQ ID NO: 710226 - RNA, 19 nt, Artificial Sequence
  Description of Artificial Sequence: Synthetic oligonucleotide
  Sense strand starting at position 3691 of SEQ ID NO: 586334
uggcaagaggcuuguuuag

SEQ ID NO: 710227 - RNA, 19 nt, Artificial Sequence
  Description of Artificial Sequence: Synthetic oligonucleotide
  Antisense strand to SEQ ID NO: 710226
cuaaacaagccucuugcca

SEQ ID NO: 710228 - RNA, 19 nt, Artificial Sequence
  Description of Artificial Sequence: Synthetic oligonucleotide
  Sense strand starting at position 3697 of SEQ ID NO: 586334
gaggcuuguuuagccauua

SEQ ID NO: 710229 - RNA, 19 nt, Artificial Sequence
  Description of Artificial Sequence: Synthetic oligonucleotide
  Antisense strand to SEQ ID NO: 710228
uaauggcuaaacaagccuc

SEQ ID NO: 710230 - RNA, 19 nt, Artificial Sequence
  Description of Artificial Sequence: Synthetic oligonucleotide
  Sense strand starting at position 3698 of SEQ ID NO: 586334
aggcuuguuuagccauuaa

SEQ ID NO: 710231 - RNA, 19 nt, Artificial Sequence
  Description of Artificial Sequence: Synthetic oligonucleotide
  Antisense strand to SEQ ID NO: 710230
uuaauggcuaaacaagccu

SEQ ID NO: 710232 - RNA, 19 nt, Artificial Sequence
  Description of Artificial Sequence: Synthetic oligonucleotide
  Sense strand starting at position 3776 of SEQ ID NO: 586334
agggaagccucuucccuua

SEQ ID NO: 710233 - RNA, 19 nt, Artificial Sequence
  Description of Artificial Sequence: Synthetic oligonucleotide
  Antisense strand to SEQ ID NO: 710232
uaagggaagaggcuucccu

SEQ ID NO: 710234 - RNA, 19 nt, Artificial Sequence
  Description of Artificial Sequence: Synthetic oligonucleotide
  Sense strand starting at position 3778 of SEQ ID NO: 586334
ggaagccucuucccuuauu

SEQ ID NO: 710235 - RNA, 19 nt, Artificial Sequence
  Description of Artificial Sequence: Synthetic oligonucleotide
  Antisense strand to SEQ ID NO: 710234
aauaagggaagaggcuucc

SEQ ID NO: 710236 - RNA, 19 nt, Artificial Sequence
  Description of Artificial Sequence: Synthetic oligonucleotide
  Sense strand starting at position 2596 of SEQ ID NO: 586335
auugauacuuuagugcaua

SEQ ID NO: 710237 - RNA, 19 nt, Artificial Sequence
  Description of Artificial Sequence: Synthetic oligonucleotide
  Antisense strand to SEQ ID NO: 710236
uaugcacuaaaguaucaau

SEQ ID NO: 710238 - RNA, 19 nt, Artificial Sequence
  Description of Artificial Sequence: Synthetic oligonucleotide
  Sense strand starting at position 2607 of SEQ ID NO: 586335
agugcauaagccugacagu

SEQ ID NO: 710239 - RNA, 19 nt, Artificial Sequence
  Description of Artificial Sequence: Synthetic oligonucleotide
  Antisense strand to SEQ ID NO: 710238
acugucaggcuuaugcacu

SEQ ID NO: 710240 - RNA, 19 nt, Artificial Sequence
  Description of Artificial Sequence: Synthetic oligonucleotide
  Sense strand starting at position 2608 of SEQ ID NO: 586335
gugcauaagccugacaguu

SEQ ID NO: 710241 - RNA, 19 nt, Artificial Sequence
  Description of Artificial Sequence: Synthetic oligonucleotide
  Antisense strand to SEQ ID NO: 710240
aacugucaggcuuaugcac

SEQ ID NO: 710242 - RNA, 19 nt, Artificial Sequence
  Description of Artificial Sequence: Synthetic oligonucleotide
  Sense strand starting at position 2666 of SEQ ID NO: 586335
ucaugacuuucuguggguu

SEQ ID NO: 710243 - RNA, 19 nt, Artificial Sequence
  Description of Artificial Sequence: Synthetic oligonucleotide
  Antisense strand to SEQ ID NO: 710242
aacccacagaaagucauga

SEQ ID NO: 710244 - RNA, 19 nt, Artificial Sequence
  Description of Artificial Sequence: Synthetic oligonucleotide
  Sense strand starting at position 2669 of SEQ ID NO: 586335
ugacuuucuguggguuauu

SEQ ID NO: 710245 - RNA, 19 nt, Artificial Sequence
  Description of Artificial Sequence: Synthetic oligonucleotide
  Antisense strand to SEQ ID NO: 710244
aauaacccacagaaaguca

SEQ ID NO: 710246 - RNA, 19 nt, Artificial Sequence
  Description of Artificial Sequence: Synthetic oligonucleotide
  Sense strand starting at position 2725 of SEQ ID NO: 586335
guguuuaugauguaucuuc

SEQ ID NO: 710247 - RNA, 19 nt, Artificial Sequence
  Description of Artificial Sequence: Synthetic oligonucleotide
  Antisense strand to SEQ ID NO: 710246
gaagauacaucauaaacac

SEQ ID NO: 710248 - RNA, 19 nt, Artificial Sequence
  Description of Artificial Sequence: Synthetic oligonucleotide
  Sense strand starting at position 2772 of SEQ ID NO: 586335
uagcuuagugguuguucua

SEQ ID NO: 710249 - RNA, 19 nt, Artificial Sequence
  Description of Artificial Sequence: Synthetic oligonucleotide
  Antisense strand to SEQ ID NO: 710248
uagaacaaccacuaagcua

SEQ ID NO: 710250 - RNA, 19 nt, Artificial Sequence
  Description of Artificial Sequence: Synthetic oligonucleotide
  Sense strand starting at position 2775 of SEQ ID NO: 586335
cuuagugguuguucuagau

SEQ ID NO: 710251 - RNA, 19 nt, Artificial Sequence
  Description of Artificial Sequence: Synthetic oligonucleotide
  Antisense strand to SEQ ID NO: 710250
aucuagaacaaccacuaag

SEQ ID NO: 710252 - RNA, 19 nt, Artificial Sequence
  Description of Artificial Sequence: Synthetic oligonucleotide
  Sense strand starting at position 2779 of SEQ ID NO: 586335
gugguuguucuagauauuc

SEQ ID NO: 710253 - RNA, 19 nt, Artificial Sequence
  Description of Artificial Sequence: Synthetic oligonucleotide
  Antisense strand to SEQ ID NO: 710252
gaauaucuagaacaaccac

SEQ ID NO: 710254 - RNA, 19 nt, Artificial Sequence
  Description of Artificial Sequence: Synthetic oligonucleotide
  Sense strand starting at position 2784 of SEQ ID NO: 586335
uguucuagauauuccuuua

SEQ ID NO: 710255 - RNA, 19 nt, Artificial Sequence
  Description of Artificial Sequence: Synthetic oligonucleotide
  Antisense strand to SEQ ID NO: 710254
uaaaggaauaucuagaaca

SEQ ID NO: 710256 - RNA, 19 nt, Artificial Sequence
  Description of Artificial Sequence: Synthetic oligonucleotide
  Sense strand starting at position 2823 of SEQ ID NO: 586335
auuggugucaucuguauuc

SEQ ID NO: 710257 - RNA, 19 nt, Artificial Sequence
  Description of Artificial Sequence: Synthetic oligonucleotide
  Antisense strand to SEQ ID NO: 710256
gaauacagaugacaccaau

SEQ ID NO: 710258 - RNA, 19 nt, Artificial Sequence
  Description of Artificial Sequence: Synthetic oligonucleotide
  Sense strand starting at position 2825 of SEQ ID NO: 586335
uggugucaucuguauucca

SEQ ID NO: 710259 - RNA, 19 nt, Artificial Sequence
  Description of Artificial Sequence: Synthetic oligonucleotide
  Antisense strand to SEQ ID NO: 710258
uggaauacagaugacacca

SEQ ID NO: 710260 - RNA, 19 nt, Artificial Sequence
  Description of Artificial Sequence: Synthetic oligonucleotide
  Sense strand starting at position 2828 of SEQ ID NO: 586335
ugucaucuguauuccaguu

SEQ ID NO: 710261 - RNA, 19 nt, Artificial Sequence
  Description of Artificial Sequence: Synthetic oligonucleotide
  Antisense strand to SEQ ID NO: 710260
aacuggaauacagaugaca

SEQ ID NO: 710262 - RNA, 19 nt, Artificial Sequence
  Description of Artificial Sequence: Synthetic oligonucleotide
  Sense strand starting at position 2841 of SEQ ID NO: 586335
ccaguuugaguguaguaua

SEQ ID NO: 710263 - RNA, 19 nt, Artificial Sequence
  Description of Artificial Sequence: Synthetic oligonucleotide
  Antisense strand to SEQ ID NO: 710262
uauacuacacucaaacugg

SEQ ID NO: 710264 - RNA, 19 nt, Artificial Sequence
  Description of Artificial Sequence: Synthetic oligonucleotide
  Sense strand starting at position 2902 of SEQ ID NO: 586335
auaguaucauugucuuaca

SEQ ID NO: 710265 - RNA, 19 nt, Artificial Sequence
  Description of Artificial Sequence: Synthetic oligonucleotide
  Antisense strand to SEQ ID NO: 710264
uguaagacaaugauacuau

SEQ ID NO: 710266 - RNA, 19 nt, Artificial Sequence
  Description of Artificial Sequence: Synthetic oligonucleotide
  Sense strand starting at position 2936 of SEQ ID NO: 586335
accagacaaugcuaugauu

SEQ ID NO: 710267 - RNA, 19 nt, Artificial Sequence
  Description of Artificial Sequence: Synthetic oligonucleotide
  Antisense strand to SEQ ID NO: 710266
aaucauagcauugucuggu

SEQ ID NO: 710268 - RNA, 19 nt, Artificial Sequence
  Description of Artificial Sequence: Synthetic oligonucleotide
  Sense strand starting at position 2986 of SEQ ID NO: 586335
aucgaaaucuaugccaaua

SEQ ID NO: 710269 - RNA, 19 nt, Artificial Sequence
  Description of Artificial Sequence: Synthetic oligonucleotide
  Antisense strand to SEQ ID NO: 710268
uauuggcauagauuucgau

SEQ ID NO: 710270 - RNA, 19 nt, Artificial Sequence
  Description of Artificial Sequence: Synthetic oligonucleotide
  Sense strand starting at position 2988 of SEQ ID NO: 586335
cgaaaucuaugccaauaaa

SEQ ID NO: 710271 - RNA, 19 nt, Artificial Sequence
  Description of Artificial Sequence: Synthetic oligonucleotide
  Antisense strand to SEQ ID NO: 710270
uuuauuggcauagauuucg

SEQ ID NO: 710272 - RNA, 19 nt, Artificial Sequence
  Description of Artificial Sequence: Synthetic oligonucleotide
  Sense strand starting at position 3090 of SEQ ID NO: 586335
gaucauagauauuaugaug

SEQ ID NO: 710273 - RNA, 19 nt, Artificial Sequence
  Description of Artificial Sequence: Synthetic oligonucleotide
  Antisense strand to SEQ ID NO: 710272
caucauaauaucuaugauc

SEQ ID NO: 710274 - RNA, 19 nt, Artificial Sequence
  Description of Artificial Sequence: Synthetic oligonucleotide
  Sense strand starting at position 3224 of SEQ ID NO: 586335
uaugcugaguuucuggaua

SEQ ID NO: 710275 - RNA, 19 nt, Artificial Sequence
  Description of Artificial Sequence: Synthetic oligonucleotide
  Antisense strand to SEQ ID NO: 710274
uauccagaaacucagcaua

SEQ ID NO: 710276 - RNA, 19 nt, Artificial Sequence
  Description of Artificial Sequence: Synthetic oligonucleotide
  Sense strand starting at position 3232 of SEQ ID NO: 586335
guuucuggauaauaugaua

SEQ ID NO: 710277 - RNA, 19 nt, Artificial Sequence
  Description of Artificial Sequence: Synthetic oligonucleotide
  Antisense strand to SEQ ID NO: 710276
uaucauauuauccagaaac

SEQ ID NO: 710278 - RNA, 19 nt, Artificial Sequence
  Description of Artificial Sequence: Synthetic oligonucleotide
  Sense strand starting at position 3281 of SEQ ID NO: 586335
cuggacagauguuauauua

SEQ ID NO: 710279 - RNA, 19 nt, Artificial Sequence
  Description of Artificial Sequence: Synthetic oligonucleotide
  Antisense strand to SEQ ID NO: 710278
uaauauaacaucuguccag

SEQ ID NO: 710280 - RNA, 19 nt, Artificial Sequence
  Description of Artificial Sequence: Synthetic oligonucleotide
  Sense strand starting at position 3289 of SEQ ID NO: 586335
auguuauauuaccugcaga

SEQ ID NO: 710281 - RNA, 19 nt, Artificial Sequence
  Description of Artificial Sequence: Synthetic oligonucleotide
  Antisense strand to SEQ ID NO: 710280
ucugcagguaauauaacau

SEQ ID NO: 710282 - RNA, 19 nt, Artificial Sequence
  Description of Artificial Sequence: Synthetic oligonucleotide
  Sense strand starting at position 3336 of SEQ ID NO: 586335
uaagcugugcuaugguaau

SEQ ID NO: 710283 - RNA, 19 nt, Artificial Sequence
  Description of Artificial Sequence: Synthetic oligonucleotide
  Antisense strand to SEQ ID NO: 710282
auuaccauagcacagcuua

SEQ ID NO: 710284 - RNA, 19 nt, Artificial Sequence
  Description of Artificial Sequence: Synthetic oligonucleotide
  Sense strand starting at position 3375 of SEQ ID NO: 586335
ggacauaugccuuacuccu

SEQ ID NO: 710285 - RNA, 19 nt, Artificial Sequence
  Description of Artificial Sequence: Synthetic oligonucleotide
  Antisense strand to SEQ ID NO: 710284
aggaguaaggcauaugucc

SEQ ID NO: 710286 - RNA, 19 nt, Artificial Sequence
  Description of Artificial Sequence: Synthetic oligonucleotide
  Sense strand starting at position 3381 of SEQ ID NO: 586335
augccuuacuccuaggaua

SEQ ID NO: 710287 - RNA, 19 nt, Artificial Sequence
  Description of Artificial Sequence: Synthetic oligonucleotide
  Antisense strand to SEQ ID NO: 710286
uauccuaggaguaaggcau

SEQ ID NO: 710288 - RNA, 19 nt, Artificial Sequence
  Description of Artificial Sequence: Synthetic oligonucleotide
  Sense strand starting at position 3383 of SEQ ID NO: 586335
gccuuacuccuaggauacu

SEQ ID NO: 710289 - RNA, 19 nt, Artificial Sequence
  Description of Artificial Sequence: Synthetic oligonucleotide
  Antisense strand to SEQ ID NO: 710288
aguauccuaggaguaaggc

SEQ ID NO: 710290 - RNA, 19 nt, Artificial Sequence
  Description of Artificial Sequence: Synthetic oligonucleotide
  Sense strand starting at position 3400 of SEQ ID NO: 586335
cuguaccucuccuuagaca

SEQ ID NO: 710291 - RNA, 19 nt, Artificial Sequence
  Description of Artificial Sequence: Synthetic oligonucleotide
  Antisense strand to SEQ ID NO: 710290
ugucuaaggagagguacag

SEQ ID NO: 710292 - RNA, 19 nt, Artificial Sequence
  Description of Artificial Sequence: Synthetic oligonucleotide
  Sense strand starting at position 3413 of SEQ ID NO: 586335
uagacagaaucuuuagggu

SEQ ID NO: 710293 - RNA, 19 nt, Artificial Sequence
  Description of Artificial Sequence: Synthetic oligonucleotide
  Antisense strand to SEQ ID NO: 710292
acccuaaagauucugucua

SEQ ID NO: 710294 - RNA, 19 nt, Artificial Sequence
  Description of Artificial Sequence: Synthetic oligonucleotide
  Sense strand starting at position 3437 of SEQ ID NO: 586335
cuggguuucucaguuguuu

SEQ ID NO: 710295 - RNA, 19 nt, Artificial Sequence
  Description of Artificial Sequence: Synthetic oligonucleotide
  Antisense strand to SEQ ID NO: 710294
aaacaacugagaaacccag

SEQ ID NO: 710296 - RNA, 19 nt, Artificial Sequence
  Description of Artificial Sequence: Synthetic oligonucleotide
  Sense strand starting at position 3439 of SEQ ID NO: 586335
ggguuucucaguuguuuac

SEQ ID NO: 710297 - RNA, 19 nt, Artificial Sequence
  Description of Artificial Sequence: Synthetic oligonucleotide
  Antisense strand to SEQ ID NO: 710296
guaaacaacugagaaaccc

SEQ ID NO: 710298 - RNA, 19 nt, Artificial Sequence
  Description of Artificial Sequence: Synthetic oligonucleotide
  Sense strand starting at position 3441 of SEQ ID NO: 586335
guuucucaguuguuuacca

SEQ ID NO: 710299 - RNA, 19 nt, Artificial Sequence
  Description of Artificial Sequence: Synthetic oligonucleotide
  Antisense strand to SEQ ID NO: 710298
ugguaaacaacugagaaac

SEQ ID NO: 710300 - RNA, 19 nt, Artificial Sequence
  Description of Artificial Sequence: Synthetic oligonucleotide
  Sense strand starting at position 3442 of SEQ ID NO: 586335
uuucucaguuguuuaccaa

SEQ ID NO: 710301 - RNA, 19 nt, Artificial Sequence
  Description of Artificial Sequence: Synthetic oligonucleotide
  Antisense strand to SEQ ID NO: 710300
uugguaaacaacugagaaa

SEQ ID NO: 710302 - RNA, 19 nt, Artificial Sequence
  Description of Artificial Sequence: Synthetic oligonucleotide
  Sense strand starting at position 3445 of SEQ ID NO: 586335
cucaguuguuuaccaacau

SEQ ID NO: 710303 - RNA, 19 nt, Artificial Sequence
  Description of Artificial Sequence: Synthetic oligonucleotide
  Antisense strand to SEQ ID NO: 710302
auguugguaaacaacugag

SEQ ID NO: 710304 - RNA, 19 nt, Artificial Sequence
  Description of Artificial Sequence: Synthetic oligonucleotide
  Sense strand starting at position 3446 of SEQ ID NO: 586335
ucaguuguuuaccaacauu

SEQ ID NO: 710305 - RNA, 19 nt, Artificial Sequence
  Description of Artificial Sequence: Synthetic oligonucleotide
  Antisense strand to SEQ ID NO: 710304
aauguugguaaacaacuga

SEQ ID NO: 710306 - RNA, 19 nt, Artificial Sequence
  Description of Artificial Sequence: Synthetic oligonucleotide
  Sense strand starting at position 3481 of SEQ ID NO: 586335
ucugaaacccaguagguuu

SEQ ID NO: 710307 - RNA, 19 nt, Artificial Sequence
  Description of Artificial Sequence: Synthetic oligonucleotide
  Antisense strand to SEQ ID NO: 710306
aaaccuacuggguuucaga

SEQ ID NO: 710308 - RNA, 19 nt, Artificial Sequence
  Description of Artificial Sequence: Synthetic oligonucleotide
  Sense strand starting at position 3488 of SEQ ID NO: 586335
cccaguagguuuccaggaa

SEQ ID NO: 710309 - RNA, 19 nt, Artificial Sequence
  Description of Artificial Sequence: Synthetic oligonucleotide
  Antisense strand to SEQ ID NO: 710308
uuccuggaaaccuacuggg

SEQ ID NO: 710310 - RNA, 19 nt, Artificial Sequence
  Description of Artificial Sequence: Synthetic oligonucleotide
  Sense strand starting at position 3489 of SEQ ID NO: 586335
ccaguagguuuccaggaaa

SEQ ID NO: 710311 - RNA, 19 nt, Artificial Sequence
  Description of Artificial Sequence: Synthetic oligonucleotide
  Antisense strand to SEQ ID NO: 710310
uuuccuggaaaccuacugg

SEQ ID NO: 710312 - RNA, 19 nt, Artificial Sequence
  Description of Artificial Sequence: Synthetic oligonucleotide
  Sense strand starting at position 3686 of SEQ ID NO: 586335
ccagcuuauuagcuuugaa

SEQ ID NO: 710313 - RNA, 19 nt, Artificial Sequence
  Description of Artificial Sequence: Synthetic oligonucleotide
  Antisense strand to SEQ ID NO: 710312
uucaaagcuaauaagcugg

SEQ ID NO: 710314 - RNA, 19 nt, Artificial Sequence
  Description of Artificial Sequence: Synthetic oligonucleotide
  Sense strand starting at position 3848 of SEQ ID NO: 586335
ucucauaccugacuuggua

SEQ ID NO: 710315 - RNA, 19 nt, Artificial Sequence
  Description of Artificial Sequence: Synthetic oligonucleotide
  Antisense strand to SEQ ID NO: 710314
uaccaagucagguaugaga

SEQ ID NO: 710316 - RNA, 19 nt, Artificial Sequence
  Description of Artificial Sequence: Synthetic oligonucleotide
  Sense strand starting at position 2574 of SEQ ID NO: 586336
augcguaagccugacauuu

SEQ ID NO: 710317 - RNA, 19 nt, Artificial Sequence
  Description of Artificial Sequence: Synthetic oligonucleotide
  Antisense strand to SEQ ID NO: 710316
aaaugucaggcuuacgcau

SEQ ID NO: 710318 - RNA, 19 nt, Artificial Sequence
  Description of Artificial Sequence: Synthetic oligonucleotide
  Sense strand starting at position 2609 of SEQ ID NO: 586336
auucuuguuucucugcuua

SEQ ID NO: 710319 - RNA, 19 nt, Artificial Sequence
  Description of Artificial Sequence: Synthetic oligonucleotide
  Antisense strand to SEQ ID NO: 710318
uaagcagagaaacaagaau

SEQ ID NO: 710320 - RNA, 19 nt, Artificial Sequence
  Description of Artificial Sequence: Synthetic oligonucleotide
  Sense strand starting at position 2611 of SEQ ID NO: 586336
ucuuguuucucugcuuauu

SEQ ID NO: 710321 - RNA, 19 nt, Artificial Sequence
  Description of Artificial Sequence: Synthetic oligonucleotide
  Antisense strand to SEQ ID NO: 710320
aauaagcagagaaacaaga

SEQ ID NO: 710322 - RNA, 19 nt, Artificial Sequence
  Description of Artificial Sequence: Synthetic oligonucleotide
  Sense strand starting at position 2738 of SEQ ID NO: 586336
auagcuuagugguugcauu

SEQ ID NO: 710323 - RNA, 19 nt, Artificial Sequence
  Description of Artificial Sequence: Synthetic oligonucleotide
  Antisense strand to SEQ ID NO: 710322
aaugcaaccacuaagcuau

SEQ ID NO: 710324 - RNA, 19 nt, Artificial Sequence
  Description of Artificial Sequence: Synthetic oligonucleotide
  Sense strand starting at position 2739 of SEQ ID NO: 586336
uagcuuagugguugcauuu

SEQ ID NO: 710325 - RNA, 19 nt, Artificial Sequence
  Description of Artificial Sequence: Synthetic oligonucleotide
  Antisense strand to SEQ ID NO: 710324
aaaugcaaccacuaagcua

SEQ ID NO: 710326 - RNA, 19 nt, Artificial Sequence
  Description of Artificial Sequence: Synthetic oligonucleotide
  Sense strand starting at position 2798 of SEQ ID NO: 586336
gucaauugguaucaucuuu

SEQ ID NO: 710327 - RNA, 19 nt, Artificial Sequence
  Description of Artificial Sequence: Synthetic oligonucleotide
  Antisense strand to SEQ ID NO: 710326
aaagaugauaccaauugac

SEQ ID NO: 710328 - RNA, 19 nt, Artificial Sequence
  Description of Artificial Sequence: Synthetic oligonucleotide
  Sense strand starting at position 2804 of SEQ ID NO: 586336
ugguaucaucuuuauucca

SEQ ID NO: 710329 - RNA, 19 nt, Artificial Sequence
  Description of Artificial Sequence: Synthetic oligonucleotide
  Antisense strand to SEQ ID NO: 710328
uggaauaaagaugauacca

SEQ ID NO: 710330 - RNA, 19 nt, Artificial Sequence
  Description of Artificial Sequence: Synthetic oligonucleotide
  Sense strand starting at position 2806 of SEQ ID NO: 586336
guaucaucuuuauuccagu

SEQ ID NO: 710331 - RNA, 19 nt, Artificial Sequence
  Description of Artificial Sequence: Synthetic oligonucleotide
  Antisense strand to SEQ ID NO: 710330
acuggaauaaagaugauac

SEQ ID NO: 710332 - RNA, 19 nt, Artificial Sequence
  Description of Artificial Sequence: Synthetic oligonucleotide
  Sense strand starting at position 2815 of SEQ ID NO: 586336
uuauuccagucugagugaa

SEQ ID NO: 710333 - RNA, 19 nt, Artificial Sequence
  Description of Artificial Sequence: Synthetic oligonucleotide
  Antisense strand to SEQ ID NO: 710332
uucacucagacuggaauaa

SEQ ID NO: 710334 - RNA, 19 nt, Artificial Sequence
  Description of Artificial Sequence: Synthetic oligonucleotide
  Sense strand starting at position 2817 of SEQ ID NO: 586336
auuccagucugagugaagu

SEQ ID NO: 710335 - RNA, 19 nt, Artificial Sequence
  Description of Artificial Sequence: Synthetic oligonucleotide
  Antisense strand to SEQ ID NO: 710334
acuucacucagacuggaau

SEQ ID NO: 710336 - RNA, 19 nt, Artificial Sequence
  Description of Artificial Sequence: Synthetic oligonucleotide
  Sense strand starting at position 2819 of SEQ ID NO: 586336
uccagucugagugaaguau

SEQ ID NO: 710337 - RNA, 19 nt, Artificial Sequence
  Description of Artificial Sequence: Synthetic oligonucleotide
  Antisense strand to SEQ ID NO: 710336
auacuucacucagacugga

SEQ ID NO: 710338 - RNA, 19 nt, Artificial Sequence
  Description of Artificial Sequence: Synthetic oligonucleotide
  Sense strand starting at position 2823 of SEQ ID NO: 586336
gucugagugaaguauagca

SEQ ID NO: 710339 - RNA, 19 nt, Artificial Sequence
  Description of Artificial Sequence: Synthetic oligonucleotide
  Antisense strand to SEQ ID NO: 710338
ugcuauacuucacucagac

SEQ ID NO: 710340 - RNA, 19 nt, Artificial Sequence
  Description of Artificial Sequence: Synthetic oligonucleotide
  Sense strand starting at position 2828 of SEQ ID NO: 586336
agugaaguauagcaaccuu

SEQ ID NO: 710341 - RNA, 19 nt, Artificial Sequence
  Description of Artificial Sequence: Synthetic oligonucleotide
  Antisense strand to SEQ ID NO: 710340
aagguugcuauacuucacu

SEQ ID NO: 710342 - RNA, 19 nt, Artificial Sequence
  Description of Artificial Sequence: Synthetic oligonucleotide
  Sense strand starting at position 2849 of SEQ ID NO: 586336
gucauauuaugucucuuua

SEQ ID NO: 710343 - RNA, 19 nt, Artificial Sequence
  Description of Artificial Sequence: Synthetic oligonucleotide
  Antisense strand to SEQ ID NO: 710342
uaaagagacauaauaugac

SEQ ID NO: 710344 - RNA, 19 nt, Artificial Sequence
  Description of Artificial Sequence: Synthetic oligonucleotide
  Sense strand starting at position 2881 of SEQ ID NO: 586336
guaguauaauugucuuaca

SEQ ID NO: 710345 - RNA, 19 nt, Artificial Sequence
  Description of Artificial Sequence: Synthetic oligonucleotide
  Antisense strand to SEQ ID NO: 710344
uguaagacaauuauacuac

SEQ ID NO: 710346 - RNA, 19 nt, Artificial Sequence
  Description of Artificial Sequence: Synthetic oligonucleotide
  Sense strand starting at position 2884 of SEQ ID NO: 586336
guauaauugucuuacaucc

SEQ ID NO: 710347 - RNA, 19 nt, Artificial Sequence
  Description of Artificial Sequence: Synthetic oligonucleotide
  Antisense strand to SEQ ID NO: 710346
ggauguaagacaauuauac

SEQ ID NO: 710348 - RNA, 19 nt, Artificial Sequence
  Description of Artificial Sequence: Synthetic oligonucleotide
  Sense strand starting at position 3065 of SEQ ID NO: 586336
caucauagauguuaugaug

SEQ ID NO: 710349 - RNA, 19 nt, Artificial Sequence
  Description of Artificial Sequence: Synthetic oligonucleotide
  Antisense strand to SEQ ID NO: 710348
caucauaacaucuaugaug

SEQ ID NO: 710350 - RNA, 19 nt, Artificial Sequence
  Description of Artificial Sequence: Synthetic oligonucleotide
  Sense strand starting at position 3106 of SEQ ID NO: 586336
cuggauuaucuaugaguuu

SEQ ID NO: 710351 - RNA, 19 nt, Artificial Sequence
  Description of Artificial Sequence: Synthetic oligonucleotide
  Antisense strand to SEQ ID NO: 710350
aaacucauagauaauccag

SEQ ID NO: 710352 - RNA, 19 nt, Artificial Sequence
  Description of Artificial Sequence: Synthetic oligonucleotide
  Sense strand starting at position 3107 of SEQ ID NO: 586336
uggauuaucuaugaguuug

SEQ ID NO: 710353 - RNA, 19 nt, Artificial Sequence
  Description of Artificial Sequence: Synthetic oligonucleotide
  Antisense strand to SEQ ID NO: 710352
caaacucauagauaaucca

SEQ ID NO: 710354 - RNA, 19 nt, Artificial Sequence
  Description of Artificial Sequence: Synthetic oligonucleotide
  Sense strand starting at position 3109 of SEQ ID NO: 586336
gauuaucuaugaguuuguu

SEQ ID NO: 710355 - RNA, 19 nt, Artificial Sequence
  Description of Artificial Sequence: Synthetic oligonucleotide
  Antisense strand to SEQ ID NO: 710354
aacaaacucauagauaauc

SEQ ID NO: 710356 - RNA, 19 nt, Artificial Sequence
  Description of Artificial Sequence: Synthetic oligonucleotide
  Sense strand starting at position 3201 of SEQ ID NO: 586336
ugcugaauuuauggauaau

SEQ ID NO: 710357 - RNA, 19 nt, Artificial Sequence
  Description of Artificial Sequence: Synthetic oligonucleotide
  Antisense strand to SEQ ID NO: 710356
auuauccauaaauucagca

SEQ ID NO: 710358 - RNA, 19 nt, Artificial Sequence
  Description of Artificial Sequence: Synthetic oligonucleotide
  Sense strand starting at position 3360 of SEQ ID NO: 586336
gccucacuccugggauacu

SEQ ID NO: 710359 - RNA, 19 nt, Artificial Sequence
  Description of Artificial Sequence: Synthetic oligonucleotide
  Antisense strand to SEQ ID NO: 710358
aguaucccaggagugaggc

SEQ ID NO: 710360 - RNA, 19 nt, Artificial Sequence
  Description of Artificial Sequence: Synthetic oligonucleotide
  Sense strand starting at position 3377 of SEQ ID NO: 586336
cugcaccucuccuaagaga

SEQ ID NO: 710361 - RNA, 19 nt, Artificial Sequence
  Description of Artificial Sequence: Synthetic oligonucleotide
  Antisense strand to SEQ ID NO: 710360
ucucuuaggagaggugcag

SEQ ID NO: 710362 - RNA, 19 nt, Artificial Sequence
  Description of Artificial Sequence: Synthetic oligonucleotide
  Sense strand starting at position 3408 of SEQ ID NO: 586336
ccaacugaguuucucaguu

SEQ ID NO: 710363 - RNA, 19 nt, Artificial Sequence
  Description of Artificial Sequence: Synthetic oligonucleotide
  Antisense strand to SEQ ID NO: 710362
aacugagaaacucaguugg

SEQ ID NO: 710364 - RNA, 19 nt, Artificial Sequence
  Description of Artificial Sequence: Synthetic oligonucleotide
  Sense strand starting at position 3412 of SEQ ID NO: 586336
cugaguuucucaguuguuu

SEQ ID NO: 710365 - RNA, 19 nt, Artificial Sequence
  Description of Artificial Sequence: Synthetic oligonucleotide
  Antisense strand to SEQ ID NO: 710364
aaacaacugagaaacucag

SEQ ID NO: 710366 - RNA, 19 nt, Artificial Sequence
  Description of Artificial Sequence: Synthetic oligonucleotide
  Sense strand starting at position 3417 of SEQ ID NO: 586336
uuucucaguuguuugccaa

SEQ ID NO: 710367 - RNA, 19 nt, Artificial Sequence
  Description of Artificial Sequence: Synthetic oligonucleotide
  Antisense strand to SEQ ID NO: 710366
uuggcaaacaacugagaaa

SEQ ID NO: 710368 - RNA, 19 nt, Artificial Sequence
  Description of Artificial Sequence: Synthetic oligonucleotide
  Sense strand starting at position 3420 of SEQ ID NO: 586336
cucaguuguuugccaacau

SEQ ID NO: 710369 - RNA, 19 nt, Artificial Sequence
  Description of Artificial Sequence: Synthetic oligonucleotide
  Antisense strand to SEQ ID NO: 710368
auguuggcaaacaacugag

SEQ ID NO: 710370 - RNA, 19 nt, Artificial Sequence
  Description of Artificial Sequence: Synthetic oligonucleotide
  Sense strand starting at position 3456 of SEQ ID NO: 586336
ucugaacuccaguagcuuu

SEQ ID NO: 710371 - RNA, 19 nt, Artificial Sequence
  Description of Artificial Sequence: Synthetic oligonucleotide
  Antisense strand to SEQ ID NO: 710370
aaagcuacuggaguucaga

SEQ ID NO: 710372 - RNA, 19 nt, Artificial Sequence
  Description of Artificial Sequence: Synthetic oligonucleotide
  Sense strand starting at position 3463 of SEQ ID NO: 586336
uccaguagcuuuccaggaa

SEQ ID NO: 710373 - RNA, 19 nt, Artificial Sequence
  Description of Artificial Sequence: Synthetic oligonucleotide
  Antisense strand to SEQ ID NO: 710372
uuccuggaaagcuacugga

SEQ ID NO: 710374 - RNA, 19 nt, Artificial Sequence
  Description of Artificial Sequence: Synthetic oligonucleotide
  Sense strand starting at position 3466 of SEQ ID NO: 586336
aguagcuuuccaggaaguu

SEQ ID NO: 710375 - RNA, 19 nt, Artificial Sequence
  Description of Artificial Sequence: Synthetic oligonucleotide
  Antisense strand to SEQ ID NO: 710374
aacuuccuggaaagcuacu

SEQ ID NO: 710376 - RNA, 19 nt, Artificial Sequence
  Description of Artificial Sequence: Synthetic oligonucleotide
  Sense strand starting at position 3467 of SEQ ID NO: 586336
guagcuuuccaggaaguuu

SEQ ID NO: 710377 - RNA, 19 nt, Artificial Sequence
  Description of Artificial Sequence: Synthetic oligonucleotide
  Antisense strand to SEQ ID NO: 710376
aaacuuccuggaaagcuac

SEQ ID NO: 710378 - RNA, 19 nt, Artificial Sequence
  Description of Artificial Sequence: Synthetic oligonucleotide
  Sense strand starting at position 3921 of SEQ ID NO: 586336
gcauaauucccacauguag

SEQ ID NO: 710379 - RNA, 19 nt, Artificial Sequence
  Description of Artificial Sequence: Synthetic oligonucleotide
  Antisense strand to SEQ ID NO: 710378
cuacaugugggaauuaugc

SEQ ID NO: 710380 - RNA, 19 nt, Artificial Sequence
  Description of Artificial Sequence: Synthetic oligonucleotide
  Sense strand starting at position 1179 of SEQ ID NO: 586337
acuuguucugcgugcacuu

SEQ ID NO: 710381 - RNA, 19 nt, Artificial Sequence
  Description of Artificial Sequence: Synthetic oligonucleotide
  Antisense strand to SEQ ID NO: 710380
aagugcacgcagaacaagu

SEQ ID NO: 710382 - RNA, 19 nt, Artificial Sequence
  Description of Artificial Sequence: Synthetic oligonucleotide
  Sense strand starting at position 2883 of SEQ ID NO: 586337
guauaauugucuuacaucc

SEQ ID NO: 710383 - RNA, 19 nt, Artificial Sequence
  Description of Artificial Sequence: Synthetic oligonucleotide
  Antisense strand to SEQ ID NO: 710382
ggauguaagacaauuauac

SEQ ID NO: 710384 - RNA, 19 nt, Artificial Sequence
  Description of Artificial Sequence: Synthetic oligonucleotide
  Sense strand starting at position 3064 of SEQ ID NO: 586337
caucauagauguuaugaug

SEQ ID NO: 710385 - RNA, 19 nt, Artificial Sequence
  Description of Artificial Sequence: Synthetic oligonucleotide
  Antisense strand to SEQ ID NO: 710384
caucauaacaucuaugaug

SEQ ID NO: 710386 - RNA, 19 nt, Artificial Sequence
  Description of Artificial Sequence: Synthetic oligonucleotide
  Sense strand starting at position 3376 of SEQ ID NO: 586337
cugcaucucuccuaagaga

SEQ ID NO: 710387 - RNA, 19 nt, Artificial Sequence
  Description of Artificial Sequence: Synthetic oligonucleotide
  Antisense strand to SEQ ID NO: 710386
ucucuuaggagagaugcag

SEQ ID NO: 710388 - RNA, 19 nt, Artificial Sequence
  Description of Artificial Sequence: Synthetic oligonucleotide
  Sense strand starting at position 3462 of SEQ ID NO: 586337
uccaguagcuuuccaggaa

SEQ ID NO: 710389 - RNA, 19 nt, Artificial Sequence
  Description of Artificial Sequence: Synthetic oligonucleotide
  Antisense strand to SEQ ID NO: 710388
uuccuggaaagcuacugga

SEQ ID NO: 710390 - RNA, 19 nt, Artificial Sequence
  Description of Artificial Sequence: Synthetic oligonucleotide
  Sense strand starting at position 3465 of SEQ ID NO: 586337
aguagcuuuccaggaaguu

SEQ ID NO: 710391 - RNA, 19 nt, Artificial Sequence
  Description of Artificial Sequence: Synthetic oligonucleotide
  Antisense strand to SEQ ID NO: 710390
aacuuccuggaaagcuacu

SEQ ID NO: 710392 - RNA, 19 nt, Artificial Sequence
  Description of Artificial Sequence: Synthetic oligonucleotide
  Sense strand starting at position 3466 of SEQ ID NO: 586337
guagcuuuccaggaaguuu

SEQ ID NO: 710393 - RNA, 19 nt, Artificial Sequence
  Description of Artificial Sequence: Synthetic oligonucleotide
  Antisense strand to SEQ ID NO: 710392
aaacuuccuggaaagcuac

SEQ ID NO: 710394 - RNA, 19 nt, Artificial Sequence
  Description of Artificial Sequence: Synthetic oligonucleotide
  Sense strand starting at position 3701 of SEQ ID NO: 586337
uuugguucccaagaccauu

SEQ ID NO: 710395 - RNA, 19 nt, Artificial Sequence
  Description of Artificial Sequence: Synthetic oligonucleotide
  Antisense strand to SEQ ID NO: 710394
aauggucuugggaaccaaa

SEQ ID NO: 710396 - RNA, 19 nt, Artificial Sequence
  Description of Artificial Sequence: Synthetic oligonucleotide
  Sense strand starting at position 26 of SEQ ID NO: 586338
cugucuucccuuugaggag

SEQ ID NO: 710397 - RNA, 19 nt, Artificial Sequence
  Description of Artificial Sequence: Synthetic oligonucleotide
  Antisense strand to SEQ ID NO: 710396
cuccucaaagggaagacag

SEQ ID NO: 710398 - RNA, 19 nt, Artificial Sequence
  Description of Artificial Sequence: Synthetic oligonucleotide
  Sense strand starting at position 699 of SEQ ID NO: 586338
cuguuaauuuccuauagag

SEQ ID NO: 710399 - RNA, 19 nt, Artificial Sequence
  Description of Artificial Sequence: Synthetic oligonucleotide
  Antisense strand to SEQ ID NO: 710398
cucuauaggaaauuaacag

SEQ ID NO: 710400 - RNA, 19 nt, Artificial Sequence
  Description of Artificial Sequence: Synthetic oligonucleotide
  Sense strand starting at position 808 of SEQ ID NO: 586338
uugcaaagauucuuguuga

SEQ ID NO: 710401 - RNA, 19 nt, Artificial Sequence
  Description of Artificial Sequence: Synthetic oligonucleotide
  Antisense strand to SEQ ID NO: 710400
ucaacaagaaucuuugcaa

SEQ ID NO: 710402 - RNA, 19 nt, Artificial Sequence
  Description of Artificial Sequence: Synthetic oligonucleotide
  Sense strand starting at position 811 of SEQ ID NO: 586338
caaagauucuuguugaguc

SEQ ID NO: 710403 - RNA, 19 nt, Artificial Sequence
  Description of Artificial Sequence: Synthetic oligonucleotide
  Antisense strand to SEQ ID NO: 710402
gacucaacaagaaucuuug

SEQ ID NO: 710404 - RNA, 19 nt, Artificial Sequence
  Description of Artificial Sequence: Synthetic oligonucleotide
  Sense strand starting at position 815 of SEQ ID NO: 586338
gauucuuguugagucugaa

SEQ ID NO: 710405 - RNA, 19 nt, Artificial Sequence
  Description of Artificial Sequence: Synthetic oligonucleotide
  Antisense strand to SEQ ID NO: 710404
uucagacucaacaagaauc

SEQ ID NO: 710406 - RNA, 19 nt, Artificial Sequence
  Description of Artificial Sequence: Synthetic oligonucleotide
  Sense strand starting at position 818 of SEQ ID NO: 586338
ucuuguugagucugaagau

SEQ ID NO: 710407 - RNA, 19 nt, Artificial Sequence
  Description of Artificial Sequence: Synthetic oligonucleotide
  Antisense strand to SEQ ID NO: 710406
aucuucagacucaacaaga

SEQ ID NO: 710408 - RNA, 19 nt, Artificial Sequence
  Description of Artificial Sequence: Synthetic oligonucleotide
  Sense strand starting at position 2516 of SEQ ID NO: 586338
auugauacuuuagugcaua

SEQ ID NO: 710409 - RNA, 19 nt, Artificial Sequence
  Description of Artificial Sequence: Synthetic oligonucleotide
  Antisense strand to SEQ ID NO: 710408
uaugcacuaaaguaucaau

SEQ ID NO: 710410 - RNA, 19 nt, Artificial Sequence
  Description of Artificial Sequence: Synthetic oligonucleotide
  Sense strand starting at position 2527 of SEQ ID NO: 586338
agugcauaagccugacagu

SEQ ID NO: 710411 - RNA, 19 nt, Artificial Sequence
  Description of Artificial Sequence: Synthetic oligonucleotide
  Antisense strand to SEQ ID NO: 710410
acugucaggcuuaugcacu

SEQ ID NO: 710412 - RNA, 19 nt, Artificial Sequence
  Description of Artificial Sequence: Synthetic oligonucleotide
  Sense strand starting at position 2528 of SEQ ID NO: 586338
gugcauaagccugacaguu

SEQ ID NO: 710413 - RNA, 19 nt, Artificial Sequence
  Description of Artificial Sequence: Synthetic oligonucleotide
  Antisense strand to SEQ ID NO: 710412
aacugucaggcuuaugcac

SEQ ID NO: 710414 - RNA, 19 nt, Artificial Sequence
  Description of Artificial Sequence: Synthetic oligonucleotide
  Sense strand starting at position 2586 of SEQ ID NO: 586338
ucaugacuuucuguggguu

SEQ ID NO: 710415 - RNA, 19 nt, Artificial Sequence
  Description of Artificial Sequence: Synthetic oligonucleotide
  Antisense strand to SEQ ID NO: 710414
aacccacagaaagucauga

SEQ ID NO: 710416 - RNA, 19 nt, Artificial Sequence
  Description of Artificial Sequence: Synthetic oligonucleotide
  Sense strand starting at position 2587 of SEQ ID NO: 586338
caugacuuucuguggguua

SEQ ID NO: 710417 - RNA, 19 nt, Artificial Sequence
  Description of Artificial Sequence: Synthetic oligonucleotide
  Antisense strand to SEQ ID NO: 710416
uaacccacagaaagucaug

SEQ ID NO: 710418 - RNA, 19 nt, Artificial Sequence
  Description of Artificial Sequence: Synthetic oligonucleotide
  Sense strand starting at position 2589 of SEQ ID NO: 586338
ugacuuucuguggguuauu

SEQ ID NO: 710419 - RNA, 19 nt, Artificial Sequence
  Description of Artificial Sequence: Synthetic oligonucleotide
  Antisense strand to SEQ ID NO: 710418
aauaacccacagaaaguca

SEQ ID NO: 710420 - RNA, 19 nt, Artificial Sequence
  Description of Artificial Sequence: Synthetic oligonucleotide
  Sense strand starting at position 2645 of SEQ ID NO: 586338
guguuuaugauguaucuuc

SEQ ID NO: 710421 - RNA, 19 nt, Artificial Sequence
  Description of Artificial Sequence: Synthetic oligonucleotide
  Antisense strand to SEQ ID NO: 710420
gaagauacaucauaaacac

SEQ ID NO: 710422 - RNA, 19 nt, Artificial Sequence
  Description of Artificial Sequence: Synthetic oligonucleotide
  Sense strand starting at position 2695 of SEQ ID NO: 586338
cuuagugguuguucuagau

SEQ ID NO: 710423 - RNA, 19 nt, Artificial Sequence
  Description of Artificial Sequence: Synthetic oligonucleotide
  Antisense strand to SEQ ID NO: 710422
aucuagaacaaccacuaag

SEQ ID NO: 710424 - RNA, 19 nt, Artificial Sequence
  Description of Artificial Sequence: Synthetic oligonucleotide
  Sense strand starting at position 2699 of SEQ ID NO: 586338
gugguuguucuagauauuc

SEQ ID NO: 710425 - RNA, 19 nt, Artificial Sequence
  Description of Artificial Sequence: Synthetic oligonucleotide
  Antisense strand to SEQ ID NO: 710424
gaauaucuagaacaaccac

SEQ ID NO: 710426 - RNA, 19 nt, Artificial Sequence
  Description of Artificial Sequence: Synthetic oligonucleotide
  Sense strand starting at position 2704 of SEQ ID NO: 586338
uguucuagauauuccuuua

SEQ ID NO: 710427 - RNA, 19 nt, Artificial Sequence
  Description of Artificial Sequence: Synthetic oligonucleotide
  Antisense strand to SEQ ID NO: 710426
uaaaggaauaucuagaaca

SEQ ID NO: 710428 - RNA, 19 nt, Artificial Sequence
  Description of Artificial Sequence: Synthetic oligonucleotide
  Sense strand starting at position 2743 of SEQ ID NO: 586338
auuggugucaucuguauuc

SEQ ID NO: 710429 - RNA, 19 nt, Artificial Sequence
  Description of Artificial Sequence: Synthetic oligonucleotide
  Antisense strand to SEQ ID NO: 710428
gaauacagaugacaccaau

SEQ ID NO: 710430 - RNA, 19 nt, Artificial Sequence
  Description of Artificial Sequence: Synthetic oligonucleotide
  Sense strand starting at position 2748 of SEQ ID NO: 586338
ugucaucuguauuccaguu

SEQ ID NO: 710431 - RNA, 19 nt, Artificial Sequence
  Description of Artificial Sequence: Synthetic oligonucleotide
  Antisense strand to SEQ ID NO: 710430
aacuggaauacagaugaca

SEQ ID NO: 710432 - RNA, 19 nt, Artificial Sequence
  Description of Artificial Sequence: Synthetic oligonucleotide
  Sense strand starting at position 2761 of SEQ ID NO: 586338
ccaguuugaguguaguaua

SEQ ID NO: 710433 - RNA, 19 nt, Artificial Sequence
  Description of Artificial Sequence: Synthetic oligonucleotide
  Antisense strand to SEQ ID NO: 710432
uauacuacacucaaacugg

SEQ ID NO: 710434 - RNA, 19 nt, Artificial Sequence
  Description of Artificial Sequence: Synthetic oligonucleotide
  Sense strand starting at position 2777 of SEQ ID NO: 586338
auagcaacccugugucauu

SEQ ID NO: 710435 - RNA, 19 nt, Artificial Sequence
  Description of Artificial Sequence: Synthetic oligonucleotide
  Antisense strand to SEQ ID NO: 710434
aaugacacaggguugcuau

SEQ ID NO: 710436 - RNA, 19 nt, Artificial Sequence
  Description of Artificial Sequence: Synthetic oligonucleotide
  Sense strand starting at position 2822 of SEQ ID NO: 586338
auaguaucauugucuuaca

SEQ ID NO: 710437 - RNA, 19 nt, Artificial Sequence
  Description of Artificial Sequence: Synthetic oligonucleotide
  Antisense strand to SEQ ID NO: 710436
uguaagacaaugauacuau

SEQ ID NO: 710438 - RNA, 19 nt, Artificial Sequence
  Description of Artificial Sequence: Synthetic oligonucleotide
  Sense strand starting at position 2906 of SEQ ID NO: 586338
aucgaaaucuaugccaaua

SEQ ID NO: 710439 - RNA, 19 nt, Artificial Sequence
  Description of Artificial Sequence: Synthetic oligonucleotide
  Antisense strand to SEQ ID NO: 710438
uauuggcauagauuucgau

SEQ ID NO: 710440 - RNA, 19 nt, Artificial Sequence
  Description of Artificial Sequence: Synthetic oligonucleotide
  Sense strand starting at position 3050 of SEQ ID NO: 586338
ucuggauuaucugugaauu

SEQ ID NO: 710441 - RNA, 19 nt, Artificial Sequence
  Description of Artificial Sequence: Synthetic oligonucleotide
  Antisense strand to SEQ ID NO: 710440
aauucacagauaauccaga

SEQ ID NO: 710442 - RNA, 19 nt, Artificial Sequence
  Description of Artificial Sequence: Synthetic oligonucleotide
  Sense strand starting at position 3052 of SEQ ID NO: 586338
uggauuaucugugaauuug

SEQ ID NO: 710443 - RNA, 19 nt, Artificial Sequence
  Description of Artificial Sequence: Synthetic oligonucleotide
  Antisense strand to SEQ ID NO: 710442
caaauucacagauaaucca

SEQ ID NO: 710444 - RNA, 19 nt, Artificial Sequence
  Description of Artificial Sequence: Synthetic oligonucleotide
  Sense strand starting at position 3144 of SEQ ID NO: 586338
uaugcugaguuucuggaua

SEQ ID NO: 710445 - RNA, 19 nt, Artificial Sequence
  Description of Artificial Sequence: Synthetic oligonucleotide
  Antisense strand to SEQ ID NO: 710444
uauccagaaacucagcaua

SEQ ID NO: 710446 - RNA, 19 nt, Artificial Sequence
  Description of Artificial Sequence: Synthetic oligonucleotide
  Sense strand starting at position 3209 of SEQ ID NO: 586338
auguuauauuaccugcaga

SEQ ID NO: 710447 - RNA, 19 nt, Artificial Sequence
  Description of Artificial Sequence: Synthetic oligonucleotide
  Antisense strand to SEQ ID NO: 710446
ucugcagguaauauaacau

SEQ ID NO: 710448 - RNA, 19 nt, Artificial Sequence
  Description of Artificial Sequence: Synthetic oligonucleotide
  Sense strand starting at position 3295 of SEQ ID NO: 586338
ggacauaugccuuacuccu

SEQ ID NO: 710449 - RNA, 19 nt, Artificial Sequence
  Description of Artificial Sequence: Synthetic oligonucleotide
  Antisense strand to SEQ ID NO: 710448
aggaguaaggcauaugucc

SEQ ID NO: 710450 - RNA, 19 nt, Artificial Sequence
  Description of Artificial Sequence: Synthetic oligonucleotide
  Sense strand starting at position 3303 of SEQ ID NO: 586338
gccuuacuccuaggauacu

SEQ ID NO: 710451 - RNA, 19 nt, Artificial Sequence
  Description of Artificial Sequence: Synthetic oligonucleotide
  Antisense strand to SEQ ID NO: 710450
aguauccuaggaguaaggc

SEQ ID NO: 710452 - RNA, 19 nt, Artificial Sequence
  Description of Artificial Sequence: Synthetic oligonucleotide
  Sense strand starting at position 3320 of SEQ ID NO: 586338
cuguaccucuccuuagaca

SEQ ID NO: 710453 - RNA, 19 nt, Artificial Sequence
  Description of Artificial Sequence: Synthetic oligonucleotide
  Antisense strand to SEQ ID NO: 710452
ugucuaaggagagguacag

SEQ ID NO: 710454 - RNA, 19 nt, Artificial Sequence
  Description of Artificial Sequence: Synthetic oligonucleotide
  Sense strand starting at position 3333 of SEQ ID NO: 586338
uagacagaaucuuuagggu

SEQ ID NO: 710455 - RNA, 19 nt, Artificial Sequence
  Description of Artificial Sequence: Synthetic oligonucleotide
  Antisense strand to SEQ ID NO: 710454
acccuaaagauucugucua

SEQ ID NO: 710456 - RNA, 19 nt, Artificial Sequence
  Description of Artificial Sequence: Synthetic oligonucleotide
  Sense strand starting at position 3359 of SEQ ID NO: 586338
ggguuucucaguuguuuac

SEQ ID NO: 710457 - RNA, 19 nt, Artificial Sequence
  Description of Artificial Sequence: Synthetic oligonucleotide
  Antisense strand to SEQ ID NO: 710456
guaaacaacugagaaaccc

SEQ ID NO: 710458 - RNA, 19 nt, Artificial Sequence
  Description of Artificial Sequence: Synthetic oligonucleotide
  Sense strand starting at position 3361 of SEQ ID NO: 586338
guuucucaguuguuuacca

SEQ ID NO: 710459 - RNA, 19 nt, Artificial Sequence
  Description of Artificial Sequence: Synthetic oligonucleotide
  Antisense strand to SEQ ID NO: 710458
ugguaaacaacugagaaac

SEQ ID NO: 710460 - RNA, 19 nt, Artificial Sequence
  Description of Artificial Sequence: Synthetic oligonucleotide
  Sense strand starting at position 3362 of SEQ ID NO: 586338
uuucucaguuguuuaccaa

SEQ ID NO: 710461 - RNA, 19 nt, Artificial Sequence
  Description of Artificial Sequence: Synthetic oligonucleotide
  Antisense strand to SEQ ID NO: 710460
uugguaaacaacugagaaa

SEQ ID NO: 710462 - RNA, 19 nt, Artificial Sequence
  Description of Artificial Sequence: Synthetic oligonucleotide
  Sense strand starting at position 3365 of SEQ ID NO: 586338
cucaguuguuuaccaacau

SEQ ID NO: 710463 - RNA, 19 nt, Artificial Sequence
  Description of Artificial Sequence: Synthetic oligonucleotide
  Antisense strand to SEQ ID NO: 710462
auguugguaaacaacugag

SEQ ID NO: 710464 - RNA, 19 nt, Artificial Sequence
  Description of Artificial Sequence: Synthetic oligonucleotide
  Sense strand starting at position 3401 of SEQ ID NO: 586338
ucugaaacccaguagguuu

SEQ ID NO: 710465 - RNA, 19 nt, Artificial Sequence
  Description of Artificial Sequence: Synthetic oligonucleotide
  Antisense strand to SEQ ID NO: 710464
aaaccuacuggguuucaga

SEQ ID NO: 710466 - RNA, 19 nt, Artificial Sequence
  Description of Artificial Sequence: Synthetic oligonucleotide
  Sense strand starting at position 3408 of SEQ ID NO: 586338
cccaguagguuuccaggaa

SEQ ID NO: 710467 - RNA, 19 nt, Artificial Sequence
  Description of Artificial Sequence: Synthetic oligonucleotide
  Antisense strand to SEQ ID NO: 710466
uuccuggaaaccuacuggg

SEQ ID NO: 710468 - RNA, 19 nt, Artificial Sequence
  Description of Artificial Sequence: Synthetic oligonucleotide
  Sense strand starting at position 3606 of SEQ ID NO: 586338
ccagcuuauuagcuuugaa

SEQ ID NO: 710469 - RNA, 19 nt, Artificial Sequence
  Description of Artificial Sequence: Synthetic oligonucleotide
  Antisense strand to SEQ ID NO: 710468
uucaaagcuaauaagcugg

SEQ ID NO: 710470 - RNA, 19 nt, Artificial Sequence
  Description of Artificial Sequence: Synthetic oligonucleotide
  Sense strand starting at position 3609 of SEQ ID NO: 586338
gcuuauuagcuuugaacuc

SEQ ID NO: 710471 - RNA, 19 nt, Artificial Sequence
  Description of Artificial Sequence: Synthetic oligonucleotide
  Antisense strand to SEQ ID NO: 710470
gaguucaaagcuaauaagc

SEQ ID NO: 710472 - RNA, 19 nt, Artificial Sequence
  Description of Artificial Sequence: Synthetic oligonucleotide
  Sense strand starting at position 3768 of SEQ ID NO: 586338
ucucauaccugacuuggua

SEQ ID NO: 710473 - RNA, 19 nt, Artificial Sequence
  Description of Artificial Sequence: Synthetic oligonucleotide
  Antisense strand to SEQ ID NO: 710472
uaccaagucagguaugaga

SEQ ID NO: 710474 - RNA, 19 nt, Artificial Sequence
  Description of Artificial Sequence: Synthetic oligonucleotide
  Sense strand starting at position 3911 of SEQ ID NO: 586338
gugagagguaauugaguca

SEQ ID NO: 710475 - RNA, 19 nt, Artificial Sequence
  Description of Artificial Sequence: Synthetic oligonucleotide
  Antisense strand to SEQ ID NO: 710474
ugacucaauuaccucucac

SEQ ID NO: 710476 - RNA, 19 nt, Artificial Sequence
  Description of Artificial Sequence: Synthetic oligonucleotide
  Sense strand starting at position 2089 of SEQ ID NO: 586339
augcguaagccugacauuu

SEQ ID NO: 710477 - RNA, 19 nt, Artificial Sequence
  Description of Artificial Sequence: Synthetic oligonucleotide
  Antisense strand to SEQ ID NO: 710476
aaaugucaggcuuacgcau

SEQ ID NO: 710478 - RNA, 19 nt, Artificial Sequence
  Description of Artificial Sequence: Synthetic oligonucleotide
  Sense strand starting at position 2124 of SEQ ID NO: 586339
auucuuguuucucugcuua

SEQ ID NO: 710479 - RNA, 19 nt, Artificial Sequence
  Description of Artificial Sequence: Synthetic oligonucleotide
  Antisense strand to SEQ ID NO: 710478
uaagcagagaaacaagaau

SEQ ID NO: 710480 - RNA, 19 nt, Artificial Sequence
  Description of Artificial Sequence: Synthetic oligonucleotide
  Sense strand starting at position 2126 of SEQ ID NO: 586339
ucuuguuucucugcuuauu

SEQ ID NO: 710481 - RNA, 19 nt, Artificial Sequence
  Description of Artificial Sequence: Synthetic oligonucleotide
  Antisense strand to SEQ ID NO: 710480
aauaagcagagaaacaaga

SEQ ID NO: 710482 - RNA, 19 nt, Artificial Sequence
  Description of Artificial Sequence: Synthetic oligonucleotide
  Sense strand starting at position 2253 of SEQ ID NO: 586339
auagcuuagugguugcauu

SEQ ID NO: 710483 - RNA, 19 nt, Artificial Sequence
  Description of Artificial Sequence: Synthetic oligonucleotide
  Antisense strand to SEQ ID NO: 710482
aaugcaaccacuaagcuau

SEQ ID NO: 710484 - RNA, 19 nt, Artificial Sequence
  Description of Artificial Sequence: Synthetic oligonucleotide
  Sense strand starting at position 2254 of SEQ ID NO: 586339
uagcuuagugguugcauuu

SEQ ID NO: 710485 - RNA, 19 nt, Artificial Sequence
  Description of Artificial Sequence: Synthetic oligonucleotide
  Antisense strand to SEQ ID NO: 710484
aaaugcaaccacuaagcua

SEQ ID NO: 710486 - RNA, 19 nt, Artificial Sequence
  Description of Artificial Sequence: Synthetic oligonucleotide
  Sense strand starting at position 2319 of SEQ ID NO: 586339
ugguaucaucuuuauucca

SEQ ID NO: 710487 - RNA, 19 nt, Artificial Sequence
  Description of Artificial Sequence: Synthetic oligonucleotide
  Antisense strand to SEQ ID NO: 710486
uggaauaaagaugauacca

SEQ ID NO: 710488 - RNA, 19 nt, Artificial Sequence
  Description of Artificial Sequence: Synthetic oligonucleotide
  Sense strand starting at position 2321 of SEQ ID NO: 586339
guaucaucuuuauuccagu

SEQ ID NO: 710489 - RNA, 19 nt, Artificial Sequence
  Description of Artificial Sequence: Synthetic oligonucleotide
  Antisense strand to SEQ ID NO: 710488
acuggaauaaagaugauac

SEQ ID NO: 710490 - RNA, 19 nt, Artificial Sequence
  Description of Artificial Sequence: Synthetic oligonucleotide
  Sense strand starting at position 2330 of SEQ ID NO: 586339
uuauuccagucugagugaa

SEQ ID NO: 710491 - RNA, 19 nt, Artificial Sequence
  Description of Artificial Sequence: Synthetic oligonucleotide
  Antisense strand to SEQ ID NO: 710490
uucacucagacuggaauaa

SEQ ID NO: 710492 - RNA, 19 nt, Artificial Sequence
  Description of Artificial Sequence: Synthetic oligonucleotide
  Sense strand starting at position 2332 of SEQ ID NO: 586339
auuccagucugagugaagu

SEQ ID NO: 710493 - RNA, 19 nt, Artificial Sequence
  Description of Artificial Sequence: Synthetic oligonucleotide
  Antisense strand to SEQ ID NO: 710492
acuucacucagacuggaau

SEQ ID NO: 710494 - RNA, 19 nt, Artificial Sequence
  Description of Artificial Sequence: Synthetic oligonucleotide
  Sense strand starting at position 2334 of SEQ ID NO: 586339
uccagucugagugaaguau

SEQ ID NO: 710495 - RNA, 19 nt, Artificial Sequence
  Description of Artificial Sequence: Synthetic oligonucleotide
  Antisense strand to SEQ ID NO: 710494
auacuucacucagacugga

SEQ ID NO: 710496 - RNA, 19 nt, Artificial Sequence
  Description of Artificial Sequence: Synthetic oligonucleotide
  Sense strand starting at position 2338 of SEQ ID NO: 586339
gucugagugaaguauagca

SEQ ID NO: 710497 - RNA, 19 nt, Artificial Sequence
  Description of Artificial Sequence: Synthetic oligonucleotide
  Antisense strand to SEQ ID NO: 710496
ugcuauacuucacucagac

SEQ ID NO: 710498 - RNA, 19 nt, Artificial Sequence
  Description of Artificial Sequence: Synthetic oligonucleotide
  Sense strand starting at position 2343 of SEQ ID NO: 586339
agugaaguauagcaaccuu

SEQ ID NO: 710499 - RNA, 19 nt, Artificial Sequence
  Description of Artificial Sequence: Synthetic oligonucleotide
  Antisense strand to SEQ ID NO: 710498
aagguugcuauacuucacu

SEQ ID NO: 710500 - RNA, 19 nt, Artificial Sequence
  Description of Artificial Sequence: Synthetic oligonucleotide
  Sense strand starting at position 2364 of SEQ ID NO: 586339
gucauauuaugucucuuua

SEQ ID NO: 710501 - RNA, 19 nt, Artificial Sequence
  Description of Artificial Sequence: Synthetic oligonucleotide
  Antisense strand to SEQ ID NO: 710500
uaaagagacauaauaugac

SEQ ID NO: 710502 - RNA, 19 nt, Artificial Sequence
  Description of Artificial Sequence: Synthetic oligonucleotide
  Sense strand starting at position 2396 of SEQ ID NO: 586339
guaguauaauugucuuaca

SEQ ID NO: 710503 - RNA, 19 nt, Artificial Sequence
  Description of Artificial Sequence: Synthetic oligonucleotide
  Antisense strand to SEQ ID NO: 710502
uguaagacaauuauacuac

SEQ ID NO: 710504 - RNA, 19 nt, Artificial Sequence
  Description of Artificial Sequence: Synthetic oligonucleotide
  Sense strand starting at position 2580 of SEQ ID NO: 586339
caucauagauguuaugaug

SEQ ID NO: 710505 - RNA, 19 nt, Artificial Sequence
  Description of Artificial Sequence: Synthetic oligonucleotide
  Antisense strand to SEQ ID NO: 710504
caucauaacaucuaugaug

SEQ ID NO: 710506 - RNA, 19 nt, Artificial Sequence
  Description of Artificial Sequence: Synthetic oligonucleotide
  Sense strand starting at position 2621 of SEQ ID NO: 586339
cuggauuaucuaugaguuu

SEQ ID NO: 710507 - RNA, 19 nt, Artificial Sequence
  Description of Artificial Sequence: Synthetic oligonucleotide
  Antisense strand to SEQ ID NO: 710506
aaacucauagauaauccag

SEQ ID NO: 710508 - RNA, 19 nt, Artificial Sequence
  Description of Artificial Sequence: Synthetic oligonucleotide
  Sense strand starting at position 2622 of SEQ ID NO: 586339
uggauuaucuaugaguuug

SEQ ID NO: 710509 - RNA, 19 nt, Artificial Sequence
  Description of Artificial Sequence: Synthetic oligonucleotide
  Antisense strand to SEQ ID NO: 710508
caaacucauagauaaucca

SEQ ID NO: 710510 - RNA, 19 nt, Artificial Sequence
  Description of Artificial Sequence: Synthetic oligonucleotide
  Sense strand starting at position 2624 of SEQ ID NO: 586339
gauuaucuaugaguuuguu

SEQ ID NO: 710511 - RNA, 19 nt, Artificial Sequence
  Description of Artificial Sequence: Synthetic oligonucleotide
  Antisense strand to SEQ ID NO: 710510
aacaaacucauagauaauc

SEQ ID NO: 710512 - RNA, 19 nt, Artificial Sequence
  Description of Artificial Sequence: Synthetic oligonucleotide
  Sense strand starting at position 2716 of SEQ ID NO: 586339
ugcugaauuuauggauaau

SEQ ID NO: 710513 - RNA, 19 nt, Artificial Sequence
  Description of Artificial Sequence: Synthetic oligonucleotide
  Antisense strand to SEQ ID NO: 710512
auuauccauaaauucagca

SEQ ID NO: 710514 - RNA, 19 nt, Artificial Sequence
  Description of Artificial Sequence: Synthetic oligonucleotide
  Sense strand starting at position 2875 of SEQ ID NO: 586339
gccucacuccugggauacu

SEQ ID NO: 710515 - RNA, 19 nt, Artificial Sequence
  Description of Artificial Sequence: Synthetic oligonucleotide
  Antisense strand to SEQ ID NO: 710514
aguaucccaggagugaggc

SEQ ID NO: 710516 - RNA, 19 nt, Artificial Sequence
  Description of Artificial Sequence: Synthetic oligonucleotide
  Sense strand starting at position 2892 of SEQ ID NO: 586339
cugcaccucuccuaagaga

SEQ ID NO: 710517 - RNA, 19 nt, Artificial Sequence
  Description of Artificial Sequence: Synthetic oligonucleotide
  Antisense strand to SEQ ID NO: 710516
ucucuuaggagaggugcag

SEQ ID NO: 710518 - RNA, 19 nt, Artificial Sequence
  Description of Artificial Sequence: Synthetic oligonucleotide
  Sense strand starting at position 2923 of SEQ ID NO: 586339
ccaacugaguuucucaguu

SEQ ID NO: 710519 - RNA, 19 nt, Artificial Sequence
  Description of Artificial Sequence: Synthetic oligonucleotide
  Antisense strand to SEQ ID NO: 710518
aacugagaaacucaguugg

SEQ ID NO: 710520 - RNA, 19 nt, Artificial Sequence
  Description of Artificial Sequence: Synthetic oligonucleotide
  Sense strand starting at position 2927 of SEQ ID NO: 586339
cugaguuucucaguuguuu

SEQ ID NO: 710521 - RNA, 19 nt, Artificial Sequence
  Description of Artificial Sequence: Synthetic oligonucleotide
  Antisense strand to SEQ ID NO: 710520
aaacaacugagaaacucag

SEQ ID NO: 710522 - RNA, 19 nt, Artificial Sequence
  Description of Artificial Sequence: Synthetic oligonucleotide
  Sense strand starting at position 2932 of SEQ ID NO: 586339
uuucucaguuguuugccaa

SEQ ID NO: 710523 - RNA, 19 nt, Artificial Sequence
  Description of Artificial Sequence: Synthetic oligonucleotide
  Antisense strand to SEQ ID NO: 710522
uuggcaaacaacugagaaa

SEQ ID NO: 710524 - RNA, 19 nt, Artificial Sequence
  Description of Artificial Sequence: Synthetic oligonucleotide
  Sense strand starting at position 2935 of SEQ ID NO: 586339
cucaguuguuugccaacau

SEQ ID NO: 710525 - RNA, 19 nt, Artificial Sequence
  Description of Artificial Sequence: Synthetic oligonucleotide
  Antisense strand to SEQ ID NO: 710524
auguuggcaaacaacugag

SEQ ID NO: 710526 - RNA, 19 nt, Artificial Sequence
  Description of Artificial Sequence: Synthetic oligonucleotide
  Sense strand starting at position 2971 of SEQ ID NO: 586339
ucugaacuccaguagcuuu

SEQ ID NO: 710527 - RNA, 19 nt, Artificial Sequence
  Description of Artificial Sequence: Synthetic oligonucleotide
  Antisense strand to SEQ ID NO: 710526
aaagcuacuggaguucaga

SEQ ID NO: 710528 - RNA, 19 nt, Artificial Sequence
  Description of Artificial Sequence: Synthetic oligonucleotide
  Sense strand starting at position 2978 of SEQ ID NO: 586339
uccaguagcuuuccaggaa

SEQ ID NO: 710529 - RNA, 19 nt, Artificial Sequence
  Description of Artificial Sequence: Synthetic oligonucleotide
  Antisense strand to SEQ ID NO: 710528
uuccuggaaagcuacugga

SEQ ID NO: 710530 - RNA, 19 nt, Artificial Sequence
  Description of Artificial Sequence: Synthetic oligonucleotide
  Sense strand starting at position 2981 of SEQ ID NO: 586339
aguagcuuuccaggaaguu

SEQ ID NO: 710531 - RNA, 19 nt, Artificial Sequence
  Description of Artificial Sequence: Synthetic oligonucleotide
  Antisense strand to SEQ ID NO: 710530
aacuuccuggaaagcuacu

SEQ ID NO: 710532 - RNA, 19 nt, Artificial Sequence
  Description of Artificial Sequence: Synthetic oligonucleotide
  Sense strand starting at position 2982 of SEQ ID NO: 586339
guagcuuuccaggaaguuu

SEQ ID NO: 710533 - RNA, 19 nt, Artificial Sequence
  Description of Artificial Sequence: Synthetic oligonucleotide
  Antisense strand to SEQ ID NO: 710532
aaacuuccuggaaagcuac

SEQ ID NO: 710534 - RNA, 19 nt, Artificial Sequence
  Description of Artificial Sequence: Synthetic oligonucleotide
  Sense strand starting at position 3436 of SEQ ID NO: 586339
gcauaauucccacauguag

SEQ ID NO: 710535 - RNA, 19 nt, Artificial Sequence
  Description of Artificial Sequence: Synthetic oligonucleotide
  Antisense strand to SEQ ID NO: 710534
cuacaugugggaauuaugc

SEQ ID NO: 710536 - RNA, 19 nt, Artificial Sequence
  Description of Artificial Sequence: Synthetic oligonucleotide
  Sense strand starting at position 3821 of SEQ ID NO: 586339
gagggugaaucugacacaa

SEQ ID NO: 710537 - RNA, 19 nt, Artificial Sequence
  Description of Artificial Sequence: Synthetic oligonucleotide
  Antisense strand to SEQ ID NO: 710536
uugugucagauucacccuc

SEQ ID NO: 710538 - RNA, 19 nt, Artificial Sequence
  Description of Artificial Sequence: Synthetic oligonucleotide
  Sense strand starting at position 3837 of SEQ ID NO: 586339
caagcuauuuggugucaag

SEQ ID NO: 710539 - RNA, 19 nt, Artificial Sequence
  Description of Artificial Sequence: Synthetic oligonucleotide
  Antisense strand to SEQ ID NO: 710538
cuugacaccaaauagcuug

SEQ ID NO: 710540 - RNA, 19 nt, Artificial Sequence
  Description of Artificial Sequence: Synthetic oligonucleotide
  Sense strand starting at position 3840 of SEQ ID NO: 586339
gcuauuuggugucaaguag

SEQ ID NO: 710541 - RNA, 19 nt, Artificial Sequence
  Description of Artificial Sequence: Synthetic oligonucleotide
  Antisense strand to SEQ ID NO: 710540
cuacuugacaccaaauagc

SEQ ID NO: 710542 - RNA, 19 nt, Artificial Sequence
  Description of Artificial Sequence: Synthetic oligonucleotide
  Sense strand starting at position 2579 of SEQ ID NO: 586340
caucauagauguuaugaug

SEQ ID NO: 710543 - RNA, 19 nt, Artificial Sequence
  Description of Artificial Sequence: Synthetic oligonucleotide
  Antisense strand to SEQ ID NO: 710542
caucauaacaucuaugaug

SEQ ID NO: 710544 - RNA, 19 nt, Artificial Sequence
  Description of Artificial Sequence: Synthetic oligonucleotide
  Sense strand starting at position 2891 of SEQ ID NO: 586340
cugcaucucuccuaagaga

SEQ ID NO: 710545 - RNA, 19 nt, Artificial Sequence
  Description of Artificial Sequence: Synthetic oligonucleotide
  Antisense strand to SEQ ID NO: 710544
ucucuuaggagagaugcag

SEQ ID NO: 710546 - RNA, 19 nt, Artificial Sequence
  Description of Artificial Sequence: Synthetic oligonucleotide
  Sense strand starting at position 2977 of SEQ ID NO: 586340
uccaguagcuuuccaggaa

SEQ ID NO: 710547 - RNA, 19 nt, Artificial Sequence
  Description of Artificial Sequence: Synthetic oligonucleotide
  Antisense strand to SEQ ID NO: 710546
uuccuggaaagcuacugga

SEQ ID NO: 710548 - RNA, 19 nt, Artificial Sequence
  Description of Artificial Sequence: Synthetic oligonucleotide
  Sense strand starting at position 2980 of SEQ ID NO: 586340
aguagcuuuccaggaaguu

SEQ ID NO: 710549 - RNA, 19 nt, Artificial Sequence
  Description of Artificial Sequence: Synthetic oligonucleotide
  Antisense strand to SEQ ID NO: 710548
aacuuccuggaaagcuacu

SEQ ID NO: 710550 - RNA, 19 nt, Artificial Sequence
  Description of Artificial Sequence: Synthetic oligonucleotide
  Sense strand starting at position 2981 of SEQ ID NO: 586340
guagcuuuccaggaaguuu

SEQ ID NO: 710551 - RNA, 19 nt, Artificial Sequence
  Description of Artificial Sequence: Synthetic oligonucleotide
  Antisense strand to SEQ ID NO: 710550
aaacuuccuggaaagcuac

SEQ ID NO: 710552 - RNA, 19 nt, Artificial Sequence
  Description of Artificial Sequence: Synthetic oligonucleotide
  Sense strand starting at position 3216 of SEQ ID NO: 586340
uuugguucccaagaccauu

SEQ ID NO: 710553 - RNA, 19 nt, Artificial Sequence
  Description of Artificial Sequence: Synthetic oligonucleotide
  Antisense strand to SEQ ID NO: 710552
aauggucuugggaaccaaa

SEQ ID NO: 710554 - RNA, 19 nt, Artificial Sequence
  Description of Artificial Sequence: Synthetic oligonucleotide
  Sense strand starting at position 3601 of SEQ ID NO: 586340
ucuugucuaccauguaaga

SEQ ID NO: 710555 - RNA, 19 nt, Artificial Sequence
  Description of Artificial Sequence: Synthetic oligonucleotide
  Antisense strand to SEQ ID NO: 710554
ucuuacaugguagacaaga

SEQ ID NO: 710556 - RNA, 19 nt, Artificial Sequence
  Description of Artificial Sequence: Synthetic oligonucleotide
  Sense strand starting at position 21 of SEQ ID NO: 586341
cccaacuaucagcagugaa

SEQ ID NO: 710557 - RNA, 19 nt, Artificial Sequence
  Description of Artificial Sequence: Synthetic oligonucleotide
  Antisense strand to SEQ ID NO: 710556
uucacugcugauaguuggg

SEQ ID NO: 710558 - RNA, 19 nt, Artificial Sequence
  Description of Artificial Sequence: Synthetic oligonucleotide
  Sense strand starting at position 164 of SEQ ID NO: 586341
ccaucagucagauguuugu

SEQ ID NO: 710559 - RNA, 19 nt, Artificial Sequence
  Description of Artificial Sequence: Synthetic oligonucleotide
  Antisense strand to SEQ ID NO: 710558
acaaacaucugacugaugg

SEQ ID NO: 710560 - RNA, 19 nt, Artificial Sequence
  Description of Artificial Sequence: Synthetic oligonucleotide
  Sense strand starting at position 227 of SEQ ID NO: 586341
aacccauucugaguggauu

SEQ ID NO: 710561 - RNA, 19 nt, Artificial Sequence
  Description of Artificial Sequence: Synthetic oligonucleotide
  Antisense strand to SEQ ID NO: 710560
aauccacucagaauggguu

SEQ ID NO: 710562 - RNA, 19 nt, Artificial Sequence
  Description of Artificial Sequence: Synthetic oligonucleotide
  Sense strand starting at position 228 of SEQ ID NO: 586341
acccauucugaguggauua

SEQ ID NO: 710563 - RNA, 19 nt, Artificial Sequence
  Description of Artificial Sequence: Synthetic oligonucleotide
  Antisense strand to SEQ ID NO: 710562
uaauccacucagaaugggu

SEQ ID NO: 710564 - RNA, 19 nt, Artificial Sequence
  Description of Artificial Sequence: Synthetic oligonucleotide
  Sense strand starting at position 438 of SEQ ID NO: 586341
gccagagagccuugucuca

SEQ ID NO: 710565 - RNA, 19 nt, Artificial Sequence
  Description of Artificial Sequence: Synthetic oligonucleotide
  Antisense strand to SEQ ID NO: 710564
ugagacaaggcucucuggc

SEQ ID NO: 710566 - RNA, 19 nt, Artificial Sequence
  Description of Artificial Sequence: Synthetic oligonucleotide
  Sense strand starting at position 440 of SEQ ID NO: 586341
cagagagccuugucucaau

SEQ ID NO: 710567 - RNA, 19 nt, Artificial Sequence
  Description of Artificial Sequence: Synthetic oligonucleotide
  Antisense strand to SEQ ID NO: 710566
auugagacaaggcucucug

SEQ ID NO: 710568 - RNA, 19 nt, Artificial Sequence
  Description of Artificial Sequence: Synthetic oligonucleotide
  Sense strand starting at position 783 of SEQ ID NO: 586341
cacugauucugcucagguc

SEQ ID NO: 710569 - RNA, 19 nt, Artificial Sequence
  Description of Artificial Sequence: Synthetic oligonucleotide
  Antisense strand to SEQ ID NO: 710568
gaccugagcagaaucagug

SEQ ID NO: 710570 - RNA, 19 nt, Artificial Sequence
  Description of Artificial Sequence: Synthetic oligonucleotide
  Sense strand starting at position 792 of SEQ ID NO: 586341
ugcucaggucuugauagga

SEQ ID NO: 710571 - RNA, 19 nt, Artificial Sequence
  Description of Artificial Sequence: Synthetic oligonucleotide
  Antisense strand to SEQ ID NO: 710570
uccuaucaagaccugagca

SEQ ID NO: 710572 - RNA, 19 nt, Artificial Sequence
  Description of Artificial Sequence: Synthetic oligonucleotide
  Sense strand starting at position 868 of SEQ ID NO: 586341
gccagaucuggccaagagu

SEQ ID NO: 710573 - RNA, 19 nt, Artificial Sequence
  Description of Artificial Sequence: Synthetic oligonucleotide
  Antisense strand to SEQ ID NO: 710572
acucuuggccagaucuggc

SEQ ID NO: 710574 - RNA, 19 nt, Artificial Sequence
  Description of Artificial Sequence: Synthetic oligonucleotide
  Sense strand starting at position 1025 of SEQ ID NO: 586341
gagucucuacaccggaaua

SEQ ID NO: 710575 - RNA, 19 nt, Artificial Sequence
  Description of Artificial Sequence: Synthetic oligonucleotide
  Antisense strand to SEQ ID NO: 710574
uauuccgguguagagacuc

SEQ ID NO: 710576 - RNA, 19 nt, Artificial Sequence
  Description of Artificial Sequence: Synthetic oligonucleotide
  Sense strand starting at position 1027 of SEQ ID NO: 586341
gucucuacaccggaauauu

SEQ ID NO: 710577 - RNA, 19 nt, Artificial Sequence
  Description of Artificial Sequence: Synthetic oligonucleotide
  Antisense strand to SEQ ID NO: 710576
aauauuccgguguagagac

SEQ ID NO: 710578 - RNA, 19 nt, Artificial Sequence
  Description of Artificial Sequence: Synthetic oligonucleotide
  Sense strand starting at position 1080 of SEQ ID NO: 586341
agcgcauucggccucuaga

SEQ ID NO: 710579 - RNA, 19 nt, Artificial Sequence
  Description of Artificial Sequence: Synthetic oligonucleotide
  Antisense strand to SEQ ID NO: 710578
ucuagaggccgaaugcgcu

SEQ ID NO: 710580 - RNA, 19 nt, Artificial Sequence
  Description of Artificial Sequence: Synthetic oligonucleotide
  Sense strand starting at position 1154 of SEQ ID NO: 586341
gagcaucgucucgggaaga

SEQ ID NO: 710581 - RNA, 19 nt, Artificial Sequence
  Description of Artificial Sequence: Synthetic oligonucleotide
  Antisense strand to SEQ ID NO: 710580
ucuucccgagacgaugcuc

SEQ ID NO: 710582 - RNA, 19 nt, Artificial Sequence
  Description of Artificial Sequence: Synthetic oligonucleotide
  Sense strand starting at position 1459 of SEQ ID NO: 586341
gggucaaauucgccaggaa

SEQ ID NO: 710583 - RNA, 19 nt, Artificial Sequence
  Description of Artificial Sequence: Synthetic oligonucleotide
  Antisense strand to SEQ ID NO: 710582
uuccuggcgaauuugaccc

SEQ ID NO: 710584 - RNA, 19 nt, Artificial Sequence
  Description of Artificial Sequence: Synthetic oligonucleotide
  Sense strand starting at position 1460 of SEQ ID NO: 586341
ggucaaauucgccaggaaa

SEQ ID NO: 710585 - RNA, 19 nt, Artificial Sequence
  Description of Artificial Sequence: Synthetic oligonucleotide
  Antisense strand to SEQ ID NO: 710584
uuuccuggcgaauuugacc

SEQ ID NO: 710586 - RNA, 19 nt, Artificial Sequence
  Description of Artificial Sequence: Synthetic oligonucleotide
  Sense strand starting at position 1462 of SEQ ID NO: 586341
ucaaauucgccaggaaaca

SEQ ID NO: 710587 - RNA, 19 nt, Artificial Sequence
  Description of Artificial Sequence: Synthetic oligonucleotide
  Antisense strand to SEQ ID NO: 710586
uguuuccuggcgaauuuga

SEQ ID NO: 710588 - RNA, 19 nt, Artificial Sequence
  Description of Artificial Sequence: Synthetic oligonucleotide
  Sense strand starting at position 2254 of SEQ ID NO: 586341
gcccgaggagcguugcauu

SEQ ID NO: 710589 - RNA, 19 nt, Artificial Sequence
  Description of Artificial Sequence: Synthetic oligonucleotide
  Antisense strand to SEQ ID NO: 710588
aaugcaacgcuccucgggc

SEQ ID NO: 710590 - RNA, 19 nt, Artificial Sequence
  Description of Artificial Sequence: Synthetic oligonucleotide
  Sense strand starting at position 2261 of SEQ ID NO: 586341
gagcguugcauuccgcaga

SEQ ID NO: 710591 - RNA, 19 nt, Artificial Sequence
  Description of Artificial Sequence: Synthetic oligonucleotide
  Antisense strand to SEQ ID NO: 710590
ucugcggaaugcaacgcuc

SEQ ID NO: 710592 - RNA, 19 nt, Artificial Sequence
  Description of Artificial Sequence: Synthetic oligonucleotide
  Sense strand starting at position 2293 of SEQ ID NO: 586341
cggagaaauccgugcacag

SEQ ID NO: 710593 - RNA, 19 nt, Artificial Sequence
  Description of Artificial Sequence: Synthetic oligonucleotide
  Antisense strand to SEQ ID NO: 710592
cugugcacggauuucuccg

SEQ ID NO: 710594 - RNA, 19 nt, Artificial Sequence
  Description of Artificial Sequence: Synthetic oligonucleotide
  Sense strand starting at position 2295 of SEQ ID NO: 586341
gagaaauccgugcacagac

SEQ ID NO: 710595 - RNA, 19 nt, Artificial Sequence
  Description of Artificial Sequence: Synthetic oligonucleotide
  Antisense strand to SEQ ID NO: 710594
gucugugcacggauuucuc

SEQ ID NO: 710596 - RNA, 19 nt, Artificial Sequence
  Description of Artificial Sequence: Synthetic oligonucleotide
  Sense strand starting at position 2490 of SEQ ID NO: 586341
acaccuggcucugauuuau

SEQ ID NO: 710597 - RNA, 19 nt, Artificial Sequence
  Description of Artificial Sequence: Synthetic oligonucleotide
  Antisense strand to SEQ ID NO: 710596
auaaaucagagccaggugu

SEQ ID NO: 710598 - RNA, 19 nt, Artificial Sequence
  Description of Artificial Sequence: Synthetic oligonucleotide
  Sense strand starting at position 2505 of SEQ ID NO: 586341
uuauucuaucguugacucu

SEQ ID NO: 710599 - RNA, 19 nt, Artificial Sequence
  Description of Artificial Sequence: Synthetic oligonucleotide
  Antisense strand to SEQ ID NO: 710598
agagucaacgauagaauaa

SEQ ID NO: 710600 - RNA, 19 nt, Artificial Sequence
  Description of Artificial Sequence: Synthetic oligonucleotide
  Sense strand starting at position 2511 of SEQ ID NO: 586341
uaucguugacucuaguguu

SEQ ID NO: 710601 - RNA, 19 nt, Artificial Sequence
  Description of Artificial Sequence: Synthetic oligonucleotide
  Antisense strand to SEQ ID NO: 710600
aacacuagagucaacgaua

SEQ ID NO: 710602 - RNA, 19 nt, Artificial Sequence
  Description of Artificial Sequence: Synthetic oligonucleotide
  Sense strand starting at position 2519 of SEQ ID NO: 586341
acucuaguguuucuccaaa

SEQ ID NO: 710603 - RNA, 19 nt, Artificial Sequence
  Description of Artificial Sequence: Synthetic oligonucleotide
  Antisense strand to SEQ ID NO: 710602
uuuggagaaacacuagagu

SEQ ID NO: 710604 - RNA, 19 nt, Artificial Sequence
  Description of Artificial Sequence: Synthetic oligonucleotide
  Sense strand starting at position 2554 of SEQ ID NO: 586341
aaacgauuugucuguccug

SEQ ID NO: 710605 - RNA, 19 nt, Artificial Sequence
  Description of Artificial Sequence: Synthetic oligonucleotide
  Antisense strand to SEQ ID NO: 710604
caggacagacaaaucguuu

SEQ ID NO: 710606 - RNA, 19 nt, Artificial Sequence
  Description of Artificial Sequence: Synthetic oligonucleotide
  Sense strand starting at position 2557 of SEQ ID NO: 586341
cgauuugucuguccuguuu

SEQ ID NO: 710607 - RNA, 19 nt, Artificial Sequence
  Description of Artificial Sequence: Synthetic oligonucleotide
  Antisense strand to SEQ ID NO: 710606
aaacaggacagacaaaucg

SEQ ID NO: 710608 - RNA, 19 nt, Artificial Sequence
  Description of Artificial Sequence: Synthetic oligonucleotide
  Sense strand starting at position 2775 of SEQ ID NO: 586341
aauuacucccuacguguga

SEQ ID NO: 710609 - RNA, 19 nt, Artificial Sequence
  Description of Artificial Sequence: Synthetic oligonucleotide
  Antisense strand to SEQ ID NO: 710608
ucacacguagggaguaauu

SEQ ID NO: 710610 - RNA, 19 nt, Artificial Sequence
  Description of Artificial Sequence: Synthetic oligonucleotide
  Sense strand starting at position 2791 of SEQ ID NO: 586341
ugaggacacguguacauau

SEQ ID NO: 710611 - RNA, 19 nt, Artificial Sequence
  Description of Artificial Sequence: Synthetic oligonucleotide
  Antisense strand to SEQ ID NO: 710610
auauguacacguguccuca

SEQ ID NO: 710612 - RNA, 19 nt, Artificial Sequence
  Description of Artificial Sequence: Synthetic oligonucleotide
  Sense strand starting at position 2857 of SEQ ID NO: 586341
augggaauuacacgucuca

SEQ ID NO: 710613 - RNA, 19 nt, Artificial Sequence
  Description of Artificial Sequence: Synthetic oligonucleotide
  Antisense strand to SEQ ID NO: 710612
ugagacguguaauucccau

SEQ ID NO: 710614 - RNA, 19 nt, Artificial Sequence
  Description of Artificial Sequence: Synthetic oligonucleotide
  Sense strand starting at position 2904 of SEQ ID NO: 586341
ggcccaaacgcuuaaucuu

SEQ ID NO: 710615 - RNA, 19 nt, Artificial Sequence
  Description of Artificial Sequence: Synthetic oligonucleotide
  Antisense strand to SEQ ID NO: 710614
aagauuaagcguuugggcc

SEQ ID NO: 710616 - RNA, 19 nt, Artificial Sequence
  Description of Artificial Sequence: Synthetic oligonucleotide
  Sense strand starting at position 3038 of SEQ ID NO: 586341
aaaugugucgaaugcauaa

SEQ ID NO: 710617 - RNA, 19 nt, Artificial Sequence
  Description of Artificial Sequence: Synthetic oligonucleotide
  Antisense strand to SEQ ID NO: 710616
uuaugcauucgacacauuu

SEQ ID NO: 710618 - RNA, 19 nt, Artificial Sequence
  Description of Artificial Sequence: Synthetic oligonucleotide
  Sense strand starting at position 3078 of SEQ ID NO: 586341
cugugucucaaagacguaa

SEQ ID NO: 710619 - RNA, 19 nt, Artificial Sequence
  Description of Artificial Sequence: Synthetic oligonucleotide
  Antisense strand to SEQ ID NO: 710618
uuacgucuuugagacacag

SEQ ID NO: 710620 - RNA, 19 nt, Artificial Sequence
  Description of Artificial Sequence: Synthetic oligonucleotide
  Sense strand starting at position 3345 of SEQ ID NO: 586341
gggauugauuaauaaacug

SEQ ID NO: 710621 - RNA, 19 nt, Artificial Sequence
  Description of Artificial Sequence: Synthetic oligonucleotide
  Antisense strand to SEQ ID NO: 710620
caguuuauuaaucaauccc

SEQ ID NO: 710622 - RNA, 19 nt, Artificial Sequence
  Description of Artificial Sequence: Synthetic oligonucleotide
  Sense strand starting at position 3450 of SEQ ID NO: 586341
cagguuauccugugaguac

SEQ ID NO: 710623 - RNA, 19 nt, Artificial Sequence
  Description of Artificial Sequence: Synthetic oligonucleotide
  Antisense strand to SEQ ID NO: 710622
guacucacaggauaaccug

SEQ ID NO: 710624 - RNA, 19 nt, Artificial Sequence
  Description of Artificial Sequence: Synthetic oligonucleotide
  Sense strand starting at position 3499 of SEQ ID NO: 586341
uuauauuggcucugauagu

SEQ ID NO: 710625 - RNA, 19 nt, Artificial Sequence
  Description of Artificial Sequence: Synthetic oligonucleotide
  Antisense strand to SEQ ID NO: 710624
acuaucagagccaauauaa

SEQ ID NO: 710626 - RNA, 19 nt, Artificial Sequence
  Description of Artificial Sequence: Synthetic oligonucleotide
  Sense strand starting at position 3509 of SEQ ID NO: 586341
ucugauaguuacucccuca

SEQ ID NO: 710627 - RNA, 19 nt, Artificial Sequence
  Description of Artificial Sequence: Synthetic oligonucleotide
  Antisense strand to SEQ ID NO: 710626
ugagggaguaacuaucaga

SEQ ID NO: 710628 - RNA, 19 nt, Artificial Sequence
  Description of Artificial Sequence: Synthetic oligonucleotide
  Sense strand starting at position 3762 of SEQ ID NO: 586341
guugaauacuucucaagca

SEQ ID NO: 710629 - RNA, 19 nt, Artificial Sequence
  Description of Artificial Sequence: Synthetic oligonucleotide
  Antisense strand to SEQ ID NO: 710628
ugcuugagaaguauucaac

SEQ ID NO: 710630 - RNA, 19 nt, Artificial Sequence
  Description of Artificial Sequence: Synthetic oligonucleotide
  Sense strand starting at position 3821 of SEQ ID NO: 586341
uuuacucaggguuaagagu

SEQ ID NO: 710631 - RNA, 19 nt, Artificial Sequence
  Description of Artificial Sequence: Synthetic oligonucleotide
  Antisense strand to SEQ ID NO: 710630
acucuuaacccugaguaaa

SEQ ID NO: 710632 - RNA, 19 nt, Artificial Sequence
  Description of Artificial Sequence: Synthetic oligonucleotide
  Sense strand starting at position 3959 of SEQ ID NO: 586341
aggaucauguuacaaggaa

SEQ ID NO: 710633 - RNA, 19 nt, Artificial Sequence
  Description of Artificial Sequence: Synthetic oligonucleotide
  Antisense strand to SEQ ID NO: 710632
uuccuuguaacaugauccu

SEQ ID NO: 710634 - RNA, 19 nt, Artificial Sequence
  Description of Artificial Sequence: Synthetic oligonucleotide
  Sense strand starting at position 3974 of SEQ ID NO: 586341
ggaaaucaguccuugccca

SEQ ID NO: 710635 - RNA, 19 nt, Artificial Sequence
  Description of Artificial Sequence: Synthetic oligonucleotide
  Antisense strand to SEQ ID NO: 710634
ugggcaaggacugauuucc

SEQ ID NO: 710636 - RNA, 19 nt, Artificial Sequence
  Description of Artificial Sequence: Synthetic oligonucleotide
  Sense strand starting at position 127 of SEQ ID NO: 586342
cccucucaagcuuaaggaa

SEQ ID NO: 710637 - RNA, 19 nt, Artificial Sequence
  Description of Artificial Sequence: Synthetic oligonucleotide
  Antisense strand to SEQ ID NO: 710636
uuccuuaagcuugagaggg

SEQ ID NO: 710638 - RNA, 19 nt, Artificial Sequence
  Description of Artificial Sequence: Synthetic oligonucleotide
  Sense strand starting at position 193 of SEQ ID NO: 586342
gccagucuuguguuugcau

SEQ ID NO: 710639 - RNA, 19 nt, Artificial Sequence
  Description of Artificial Sequence: Synthetic oligonucleotide
  Antisense strand to SEQ ID NO: 710638
augcaaacacaagacuggc

SEQ ID NO: 710640 - RNA, 19 nt, Artificial Sequence
  Description of Artificial Sequence: Synthetic oligonucleotide
  Sense strand starting at position 404 of SEQ ID NO: 586342
guaauacacucuccaggau

SEQ ID NO: 710641 - RNA, 19 nt, Artificial Sequence
  Description of Artificial Sequence: Synthetic oligonucleotide
  Antisense strand to SEQ ID NO: 710640
auccuggagaguguauuac

SEQ ID NO: 710642 - RNA, 19 nt, Artificial Sequence
  Description of Artificial Sequence: Synthetic oligonucleotide
  Sense strand starting at position 444 of SEQ ID NO: 586342
ucgggugcaccaugaaaug

SEQ ID NO: 710643 - RNA, 19 nt, Artificial Sequence
  Description of Artificial Sequence: Synthetic oligonucleotide
  Antisense strand to SEQ ID NO: 710642
cauuucauggugcacccga

SEQ ID NO: 710644 - RNA, 19 nt, Artificial Sequence
  Description of Artificial Sequence: Synthetic oligonucleotide
  Sense strand starting at position 487 of SEQ ID NO: 586342
cacuucugcgaggcguuaa

SEQ ID NO: 710645 - RNA, 19 nt, Artificial Sequence
  Description of Artificial Sequence: Synthetic oligonucleotide
  Antisense strand to SEQ ID NO: 710644
uuaacgccucgcagaagug

SEQ ID NO: 710646 - RNA, 19 nt, Artificial Sequence
  Description of Artificial Sequence: Synthetic oligonucleotide
  Sense strand starting at position 492 of SEQ ID NO: 586342
cugcgaggcguuaagcuau

SEQ ID NO: 710647 - RNA, 19 nt, Artificial Sequence
  Description of Artificial Sequence: Synthetic oligonucleotide
  Antisense strand to SEQ ID NO: 710646
auagcuuaacgccucgcag

SEQ ID NO: 710648 - RNA, 19 nt, Artificial Sequence
  Description of Artificial Sequence: Synthetic oligonucleotide
  Sense strand starting at position 524 of SEQ ID NO: 586342
aagcucauggcuugaagua

SEQ ID NO: 710649 - RNA, 19 nt, Artificial Sequence
  Description of Artificial Sequence: Synthetic oligonucleotide
  Antisense strand to SEQ ID NO: 710648
uacuucaagccaugagcuu

SEQ ID NO: 710650 - RNA, 19 nt, Artificial Sequence
  Description of Artificial Sequence: Synthetic oligonucleotide
  Sense strand starting at position 525 of SEQ ID NO: 586342
agcucauggcuugaaguaa

SEQ ID NO: 710651 - RNA, 19 nt, Artificial Sequence
  Description of Artificial Sequence: Synthetic oligonucleotide
  Antisense strand to SEQ ID NO: 710650
uuacuucaagccaugagcu

SEQ ID NO: 710652 - RNA, 19 nt, Artificial Sequence
  Description of Artificial Sequence: Synthetic oligonucleotide
  Sense strand starting at position 561 of SEQ ID NO: 586342
ucuucugccgcuucguuaa

SEQ ID NO: 710653 - RNA, 19 nt, Artificial Sequence
  Description of Artificial Sequence: Synthetic oligonucleotide
  Antisense strand to SEQ ID NO: 710652
uuaacgaagcggcagaaga

SEQ ID NO: 710654 - RNA, 19 nt, Artificial Sequence
  Description of Artificial Sequence: Synthetic oligonucleotide
  Sense strand starting at position 693 of SEQ ID NO: 586342
ucaguauuugcgcacuuac

SEQ ID NO: 710655 - RNA, 19 nt, Artificial Sequence
  Description of Artificial Sequence: Synthetic oligonucleotide
  Antisense strand to SEQ ID NO: 710654
guaagugcgcaaauacuga

SEQ ID NO: 710656 - RNA, 19 nt, Artificial Sequence
  Description of Artificial Sequence: Synthetic oligonucleotide
  Sense strand starting at position 862 of SEQ ID NO: 586342
augucugcgcuacacaaua

SEQ ID NO: 710657 - RNA, 19 nt, Artificial Sequence
  Description of Artificial Sequence: Synthetic oligonucleotide
  Antisense strand to SEQ ID NO: 710656
uauuguguagcgcagacau

SEQ ID NO: 710658 - RNA, 19 nt, Artificial Sequence
  Description of Artificial Sequence: Synthetic oligonucleotide
  Sense strand starting at position 1056 of SEQ ID NO: 586342
gcccgacuagcgagcgaua

SEQ ID NO: 710659 - RNA, 19 nt, Artificial Sequence
  Description of Artificial Sequence: Synthetic oligonucleotide
  Antisense strand to SEQ ID NO: 710658
uaucgcucgcuagucgggc

SEQ ID NO: 710660 - RNA, 19 nt, Artificial Sequence
  Description of Artificial Sequence: Synthetic oligonucleotide
  Sense strand starting at position 1168 of SEQ ID NO: 586342
gggcgacuguuacccaaua

SEQ ID NO: 710661 - RNA, 19 nt, Artificial Sequence
  Description of Artificial Sequence: Synthetic oligonucleotide
  Antisense strand to SEQ ID NO: 710660
uauuggguaacagucgccc

SEQ ID NO: 710662 - RNA, 19 nt, Artificial Sequence
  Description of Artificial Sequence: Synthetic oligonucleotide
  Sense strand starting at position 1169 of SEQ ID NO: 586342
ggcgacuguuacccaauaa

SEQ ID NO: 710663 - RNA, 19 nt, Artificial Sequence
  Description of Artificial Sequence: Synthetic oligonucleotide
  Antisense strand to SEQ ID NO: 710662
uuauuggguaacagucgcc

SEQ ID NO: 710664 - RNA, 19 nt, Artificial Sequence
  Description of Artificial Sequence: Synthetic oligonucleotide
  Sense strand starting at position 1516 of SEQ ID NO: 586342
gcgcgaugaaucgugcuuu

SEQ ID NO: 710665 - RNA, 19 nt, Artificial Sequence
  Description of Artificial Sequence: Synthetic oligonucleotide
  Antisense strand to SEQ ID NO: 710664
aaagcacgauucaucgcgc

SEQ ID NO: 710666 - RNA, 19 nt, Artificial Sequence
  Description of Artificial Sequence: Synthetic oligonucleotide
  Sense strand starting at position 2664 of SEQ ID NO: 586342
cgaggaaccucagccaauu

SEQ ID NO: 710667 - RNA, 19 nt, Artificial Sequence
  Description of Artificial Sequence: Synthetic oligonucleotide
  Antisense strand to SEQ ID NO: 710666
aauuggcugagguuccucg

SEQ ID NO: 710668 - RNA, 19 nt, Artificial Sequence
  Description of Artificial Sequence: Synthetic oligonucleotide
  Sense strand starting at position 2699 of SEQ ID NO: 586342
ccugcaaggccuuaggaau

SEQ ID NO: 710669 - RNA, 19 nt, Artificial Sequence
  Description of Artificial Sequence: Synthetic oligonucleotide
  Antisense strand to SEQ ID NO: 710668
auuccuaaggccuugcagg

SEQ ID NO: 710670 - RNA, 19 nt, Artificial Sequence
  Description of Artificial Sequence: Synthetic oligonucleotide
  Sense strand starting at position 2722 of SEQ ID NO: 586342
uccagaaagcucgagcuua

SEQ ID NO: 710671 - RNA, 19 nt, Artificial Sequence
  Description of Artificial Sequence: Synthetic oligonucleotide
  Antisense strand to SEQ ID NO: 710670
uaagcucgagcuuucugga

SEQ ID NO: 710672 - RNA, 19 nt, Artificial Sequence
  Description of Artificial Sequence: Synthetic oligonucleotide
  Sense strand starting at position 2809 of SEQ ID NO: 586342
aguaacuccuguuuggcaa

SEQ ID NO: 710673 - RNA, 19 nt, Artificial Sequence
  Description of Artificial Sequence: Synthetic oligonucleotide
  Antisense strand to SEQ ID NO: 710672
uugccaaacaggaguuacu

SEQ ID NO: 710674 - RNA, 19 nt, Artificial Sequence
  Description of Artificial Sequence: Synthetic oligonucleotide
  Sense strand starting at position 2810 of SEQ ID NO: 586342
guaacuccuguuuggcaaa

SEQ ID NO: 710675 - RNA, 19 nt, Artificial Sequence
  Description of Artificial Sequence: Synthetic oligonucleotide
  Antisense strand to SEQ ID NO: 710674
uuugccaaacaggaguuac

SEQ ID NO: 710676 - RNA, 19 nt, Artificial Sequence
  Description of Artificial Sequence: Synthetic oligonucleotide
  Sense strand starting at position 2851 of SEQ ID NO: 586342
cgucuuuguaaggacauau

SEQ ID NO: 710677 - RNA, 19 nt, Artificial Sequence
  Description of Artificial Sequence: Synthetic oligonucleotide
  Antisense strand to SEQ ID NO: 710676
auauguccuuacaaagacg

SEQ ID NO: 710678 - RNA, 19 nt, Artificial Sequence
  Description of Artificial Sequence: Synthetic oligonucleotide
  Sense strand starting at position 2875 of SEQ ID NO: 586342
cuuagaaggcuuugauuac

SEQ ID NO: 710679 - RNA, 19 nt, Artificial Sequence
  Description of Artificial Sequence: Synthetic oligonucleotide
  Antisense strand to SEQ ID NO: 710678
guaaucaaagccuucuaag

SEQ ID NO: 710680 - RNA, 19 nt, Artificial Sequence
  Description of Artificial Sequence: Synthetic oligonucleotide
  Sense strand starting at position 2901 of SEQ ID NO: 586342
gauggcaugagucgugaua

SEQ ID NO: 710681 - RNA, 19 nt, Artificial Sequence
  Description of Artificial Sequence: Synthetic oligonucleotide
  Antisense strand to SEQ ID NO: 710680
uaucacgacucaugccauc

SEQ ID NO: 710682 - RNA, 19 nt, Artificial Sequence
  Description of Artificial Sequence: Synthetic oligonucleotide
  Sense strand starting at position 3079 of SEQ ID NO: 586342
ugauuaauaccacggcuca

SEQ ID NO: 710683 - RNA, 19 nt, Artificial Sequence
  Description of Artificial Sequence: Synthetic oligonucleotide
  Antisense strand to SEQ ID NO: 710682
ugagccgugguauuaauca

SEQ ID NO: 710684 - RNA, 19 nt, Artificial Sequence
  Description of Artificial Sequence: Synthetic oligonucleotide
  Sense strand starting at position 3111 of SEQ ID NO: 586342
cggcucauuccaugaacaa

SEQ ID NO: 710685 - RNA, 19 nt, Artificial Sequence
  Description of Artificial Sequence: Synthetic oligonucleotide
  Antisense strand to SEQ ID NO: 710684
uuguucauggaaugagccg

SEQ ID NO: 710686 - RNA, 19 nt, Artificial Sequence
  Description of Artificial Sequence: Synthetic oligonucleotide
  Sense strand starting at position 3112 of SEQ ID NO: 586342
ggcucauuccaugaacaac

SEQ ID NO: 710687 - RNA, 19 nt, Artificial Sequence
  Description of Artificial Sequence: Synthetic oligonucleotide
  Antisense strand to SEQ ID NO: 710686
guuguucauggaaugagcc

SEQ ID NO: 710688 - RNA, 19 nt, Artificial Sequence
  Description of Artificial Sequence: Synthetic oligonucleotide
  Sense strand starting at position 3166 of SEQ ID NO: 586342
agaugugaugaguguaacu

SEQ ID NO: 710689 - RNA, 19 nt, Artificial Sequence
  Description of Artificial Sequence: Synthetic oligonucleotide
  Antisense strand to SEQ ID NO: 710688
aguuacacucaucacaucu

SEQ ID NO: 710690 - RNA, 19 nt, Artificial Sequence
  Description of Artificial Sequence: Synthetic oligonucleotide
  Sense strand starting at position 3168 of SEQ ID NO: 586342
augugaugaguguaacuuc

SEQ ID NO: 710691 - RNA, 19 nt, Artificial Sequence
  Description of Artificial Sequence: Synthetic oligonucleotide
  Antisense strand to SEQ ID NO: 710690
gaaguuacacucaucacau

SEQ ID NO: 710692 - RNA, 19 nt, Artificial Sequence
  Description of Artificial Sequence: Synthetic oligonucleotide
  Sense strand starting at position 3225 of SEQ ID NO: 586342
accgcucugggacagaaau

SEQ ID NO: 710693 - RNA, 19 nt, Artificial Sequence
  Description of Artificial Sequence: Synthetic oligonucleotide
  Antisense strand to SEQ ID NO: 710692
auuucugucccagagcggu

SEQ ID NO: 710694 - RNA, 19 nt, Artificial Sequence
  Description of Artificial Sequence: Synthetic oligonucleotide
  Sense strand starting at position 3275 of SEQ ID NO: 586342
ccacacuguuuccugcaua

SEQ ID NO: 710695 - RNA, 19 nt, Artificial Sequence
  Description of Artificial Sequence: Synthetic oligonucleotide
  Antisense strand to SEQ ID NO: 710694
uaugcaggaaacagugugg

SEQ ID NO: 710696 - RNA, 19 nt, Artificial Sequence
  Description of Artificial Sequence: Synthetic oligonucleotide
  Sense strand starting at position 3290 of SEQ ID NO: 586342
cauaaaguggguuaucuca

SEQ ID NO: 710697 - RNA, 19 nt, Artificial Sequence
  Description of Artificial Sequence: Synthetic oligonucleotide
  Antisense strand to SEQ ID NO: 710696
ugagauaacccacuuuaug

SEQ ID NO: 710698 - RNA, 19 nt, Artificial Sequence
  Description of Artificial Sequence: Synthetic oligonucleotide
  Sense strand starting at position 3367 of SEQ ID NO: 586342
aucuaaguaucucuagaag

SEQ ID NO: 710699 - RNA, 19 nt, Artificial Sequence
  Description of Artificial Sequence: Synthetic oligonucleotide
  Antisense strand to SEQ ID NO: 710698
cuucuagagauacuuagau

SEQ ID NO: 710700 - RNA, 19 nt, Artificial Sequence
  Description of Artificial Sequence: Synthetic oligonucleotide
  Sense strand starting at position 3398 of SEQ ID NO: 586342
auguacuugucacucagau

SEQ ID NO: 710701 - RNA, 19 nt, Artificial Sequence
  Description of Artificial Sequence: Synthetic oligonucleotide
  Antisense strand to SEQ ID NO: 710700
aucugagugacaaguacau

SEQ ID NO: 710702 - RNA, 19 nt, Artificial Sequence
  Description of Artificial Sequence: Synthetic oligonucleotide
  Sense strand starting at position 3534 of SEQ ID NO: 586342
caugguaagguuggaagua

SEQ ID NO: 710703 - RNA, 19 nt, Artificial Sequence
  Description of Artificial Sequence: Synthetic oligonucleotide
  Antisense strand to SEQ ID NO: 710702
uacuuccaaccuuaccaug

SEQ ID NO: 710704 - RNA, 19 nt, Artificial Sequence
  Description of Artificial Sequence: Synthetic oligonucleotide
  Sense strand starting at position 3753 of SEQ ID NO: 586342
ggcugagugggucaaccuu

SEQ ID NO: 710705 - RNA, 19 nt, Artificial Sequence
  Description of Artificial Sequence: Synthetic oligonucleotide
  Antisense strand to SEQ ID NO: 710704
aagguugacccacucagcc

SEQ ID NO: 710706 - RNA, 19 nt, Artificial Sequence
  Description of Artificial Sequence: Synthetic oligonucleotide
  Sense strand starting at position 3761 of SEQ ID NO: 586342
gggucaaccuucccuguau

SEQ ID NO: 710707 - RNA, 19 nt, Artificial Sequence
  Description of Artificial Sequence: Synthetic oligonucleotide
  Antisense strand to SEQ ID NO: 710706
auacagggaagguugaccc

SEQ ID NO: 710708 - RNA, 19 nt, Artificial Sequence
  Description of Artificial Sequence: Synthetic oligonucleotide
  Sense strand starting at position 3762 of SEQ ID NO: 586342
ggucaaccuucccuguauu

SEQ ID NO: 710709 - RNA, 19 nt, Artificial Sequence
  Description of Artificial Sequence: Synthetic oligonucleotide
  Antisense strand to SEQ ID NO: 710708
aauacagggaagguugacc

SEQ ID NO: 710710 - RNA, 19 nt, Artificial Sequence
  Description of Artificial Sequence: Synthetic oligonucleotide
  Sense strand starting at position 3911 of SEQ ID NO: 586342
cgaucauucuuagcagcaa

SEQ ID NO: 710711 - RNA, 19 nt, Artificial Sequence
  Description of Artificial Sequence: Synthetic oligonucleotide
  Antisense strand to SEQ ID NO: 710710
uugcugcuaagaaugaucg

SEQ ID NO: 710712 - RNA, 19 nt, Artificial Sequence
  Description of Artificial Sequence: Synthetic oligonucleotide
  Sense strand starting at position 3970 of SEQ ID NO: 586342
ugcauuuacuuugcgcaga

SEQ ID NO: 710713 - RNA, 19 nt, Artificial Sequence
  Description of Artificial Sequence: Synthetic oligonucleotide
  Antisense strand to SEQ ID NO: 710712
ucugcgcaaaguaaaugca

SEQ ID NO: 710714 - RNA, 19 nt, Artificial Sequence
  Description of Artificial Sequence: Synthetic oligonucleotide
  Sense strand starting at position 3972 of SEQ ID NO: 586342
cauuuacuuugcgcagaua

SEQ ID NO: 710715 - RNA, 19 nt, Artificial Sequence
  Description of Artificial Sequence: Synthetic oligonucleotide
  Antisense strand to SEQ ID NO: 710714
uaucugcgcaaaguaaaug

SEQ ID NO: 710716 - RNA, 19 nt, Artificial Sequence
  Description of Artificial Sequence: Synthetic oligonucleotide
  Sense strand starting at position 9 of SEQ ID NO: 586343
ucaccaguccuccagguua

SEQ ID NO: 710717 - RNA, 19 nt, Artificial Sequence
  Description of Artificial Sequence: Synthetic oligonucleotide
  Antisense strand to SEQ ID NO: 710716
uaaccuggaggacugguga

SEQ ID NO: 710718 - RNA, 19 nt, Artificial Sequence
  Description of Artificial Sequence: Synthetic oligonucleotide
  Sense strand starting at position 502 of SEQ ID NO: 586343
gggcucugcuuucgagaac

SEQ ID NO: 710719 - RNA, 19 nt, Artificial Sequence
  Description of Artificial Sequence: Synthetic oligonucleotide
  Antisense strand to SEQ ID NO: 710718
guucucgaaagcagagccc

SEQ ID NO: 710720 - RNA, 19 nt, Artificial Sequence
  Description of Artificial Sequence: Synthetic oligonucleotide
  Sense strand starting at position 1576 of SEQ ID NO: 586343
ugggcugaucgaugaauug

SEQ ID NO: 710721 - RNA, 19 nt, Artificial Sequence
  Description of Artificial Sequence: Synthetic oligonucleotide
  Antisense strand to SEQ ID NO: 710720
caauucaucgaucagccca

SEQ ID NO: 710722 - RNA, 19 nt, Artificial Sequence
  Description of Artificial Sequence: Synthetic oligonucleotide
  Sense strand starting at position 1602 of SEQ ID NO: 586343
aggaucaauuuccgaucaa

SEQ ID NO: 710723 - RNA, 19 nt, Artificial Sequence
  Description of Artificial Sequence: Synthetic oligonucleotide
  Antisense strand to SEQ ID NO: 710722
uugaucggaaauugauccu

SEQ ID NO: 710724 - RNA, 19 nt, Artificial Sequence
  Description of Artificial Sequence: Synthetic oligonucleotide
  Sense strand starting at position 1603 of SEQ ID NO: 586343
ggaucaauuuccgaucaag

SEQ ID NO: 710725 - RNA, 19 nt, Artificial Sequence
  Description of Artificial Sequence: Synthetic oligonucleotide
  Antisense strand to SEQ ID NO: 710724
cuugaucggaaauugaucc

SEQ ID NO: 710726 - RNA, 19 nt, Artificial Sequence
  Description of Artificial Sequence: Synthetic oligonucleotide
  Sense strand starting at position 1611 of SEQ ID NO: 586343
uuccgaucaagcgagugau

SEQ ID NO: 710727 - RNA, 19 nt, Artificial Sequence
  Description of Artificial Sequence: Synthetic oligonucleotide
  Antisense strand to SEQ ID NO: 710726
aucacucgcuugaucggaa

SEQ ID NO: 710728 - RNA, 19 nt, Artificial Sequence
  Description of Artificial Sequence: Synthetic oligonucleotide
  Sense strand starting at position 1614 of SEQ ID NO: 586343
cgaucaagcgagugaucaa

SEQ ID NO: 710729 - RNA, 19 nt, Artificial Sequence
  Description of Artificial Sequence: Synthetic oligonucleotide
  Antisense strand to SEQ ID NO: 710728
uugaucacucgcuugaucg

SEQ ID NO: 710730 - RNA, 19 nt, Artificial Sequence
  Description of Artificial Sequence: Synthetic oligonucleotide
  Sense strand starting at position 2395 of SEQ ID NO: 586343
cccuguagugguuagugua

SEQ ID NO: 710731 - RNA, 19 nt, Artificial Sequence
  Description of Artificial Sequence: Synthetic oligonucleotide
  Antisense strand to SEQ ID NO: 710730
uacacuaaccacuacaggg

SEQ ID NO: 710732 - RNA, 19 nt, Artificial Sequence
  Description of Artificial Sequence: Synthetic oligonucleotide
  Sense strand starting at position 2584 of SEQ ID NO: 586343
guggcauguuuggaggagu

SEQ ID NO: 710733 - RNA, 19 nt, Artificial Sequence
  Description of Artificial Sequence: Synthetic oligonucleotide
  Antisense strand to SEQ ID NO: 710732
acuccuccaaacaugccac

SEQ ID NO: 710734 - RNA, 19 nt, Artificial Sequence
  Description of Artificial Sequence: Synthetic oligonucleotide
  Sense strand starting at position 2587 of SEQ ID NO: 586343
gcauguuuggaggagugga

SEQ ID NO: 710735 - RNA, 19 nt, Artificial Sequence
  Description of Artificial Sequence: Synthetic oligonucleotide
  Antisense strand to SEQ ID NO: 710734
uccacuccuccaaacaugc

SEQ ID NO: 710736 - RNA, 19 nt, Artificial Sequence
  Description of Artificial Sequence: Synthetic oligonucleotide
  Sense strand starting at position 2828 of SEQ ID NO: 586343
ccaagaaacuuccuguggu

SEQ ID NO: 710737 - RNA, 19 nt, Artificial Sequence
  Description of Artificial Sequence: Synthetic oligonucleotide
  Antisense strand to SEQ ID NO: 710736
accacaggaaguuucuugg

SEQ ID NO: 710738 - RNA, 19 nt, Artificial Sequence
  Description of Artificial Sequence: Synthetic oligonucleotide
  Sense strand starting at position 2829 of SEQ ID NO: 586343
caagaaacuuccugugguu

SEQ ID NO: 710739 - RNA, 19 nt, Artificial Sequence
  Description of Artificial Sequence: Synthetic oligonucleotide
  Antisense strand to SEQ ID NO: 710738
aaccacaggaaguuucuug

SEQ ID NO: 710740 - RNA, 19 nt, Artificial Sequence
  Description of Artificial Sequence: Synthetic oligonucleotide
  Sense strand starting at position 2926 of SEQ ID NO: 586343
gucccaaguuuacagaaau

SEQ ID NO: 710741 - RNA, 19 nt, Artificial Sequence
  Description of Artificial Sequence: Synthetic oligonucleotide
  Antisense strand to SEQ ID NO: 710740
auuucuguaaacuugggac

SEQ ID NO: 710742 - RNA, 19 nt, Artificial Sequence
  Description of Artificial Sequence: Synthetic oligonucleotide
  Sense strand starting at position 2978 of SEQ ID NO: 586343
ugauuucucuccucgcgga

SEQ ID NO: 710743 - RNA, 19 nt, Artificial Sequence
  Description of Artificial Sequence: Synthetic oligonucleotide
  Antisense strand to SEQ ID NO: 710742
uccgcgaggagagaaauca

SEQ ID NO: 710744 - RNA, 19 nt, Artificial Sequence
  Description of Artificial Sequence: Synthetic oligonucleotide
  Sense strand starting at position 2979 of SEQ ID NO: 586343
gauuucucuccucgcggaa

SEQ ID NO: 710745 - RNA, 19 nt, Artificial Sequence
  Description of Artificial Sequence: Synthetic oligonucleotide
  Antisense strand to SEQ ID NO: 710744
uuccgcgaggagagaaauc

SEQ ID NO: 710746 - RNA, 19 nt, Artificial Sequence
  Description of Artificial Sequence: Synthetic oligonucleotide
  Sense strand starting at position 3038 of SEQ ID NO: 586343
ugauuauacacacguguga

SEQ ID NO: 710747 - RNA, 19 nt, Artificial Sequence
  Description of Artificial Sequence: Synthetic oligonucleotide
  Antisense strand to SEQ ID NO: 710746
ucacacguguguauaauca

SEQ ID NO: 710748 - RNA, 19 nt, Artificial Sequence
  Description of Artificial Sequence: Synthetic oligonucleotide
  Sense strand starting at position 3047 of SEQ ID NO: 586343
acacgugugacuuggaguu

SEQ ID NO: 710749 - RNA, 19 nt, Artificial Sequence
  Description of Artificial Sequence: Synthetic oligonucleotide
  Antisense strand to SEQ ID NO: 710748
aacuccaagucacacgugu

SEQ ID NO: 710750 - RNA, 19 nt, Artificial Sequence
  Description of Artificial Sequence: Synthetic oligonucleotide
  Sense strand starting at position 3059 of SEQ ID NO: 586343
uggaguuuccaguaggaau

SEQ ID NO: 710751 - RNA, 19 nt, Artificial Sequence
  Description of Artificial Sequence: Synthetic oligonucleotide
  Antisense strand to SEQ ID NO: 710750
auuccuacuggaaacucca

SEQ ID NO: 710752 - RNA, 19 nt, Artificial Sequence
  Description of Artificial Sequence: Synthetic oligonucleotide
  Sense strand starting at position 3061 of SEQ ID NO: 586343
gaguuuccaguaggaauac

SEQ ID NO: 710753 - RNA, 19 nt, Artificial Sequence
  Description of Artificial Sequence: Synthetic oligonucleotide
  Antisense strand to SEQ ID NO: 710752
guauuccuacuggaaacuc

SEQ ID NO: 710754 - RNA, 19 nt, Artificial Sequence
  Description of Artificial Sequence: Synthetic oligonucleotide
  Sense strand starting at position 3073 of SEQ ID NO: 586343
ggaauacuguucuuugacu

SEQ ID NO: 710755 - RNA, 19 nt, Artificial Sequence
  Description of Artificial Sequence: Synthetic oligonucleotide
  Antisense strand to SEQ ID NO: 710754
agucaaagaacaguauucc

SEQ ID NO: 710756 - RNA, 19 nt, Artificial Sequence
  Description of Artificial Sequence: Synthetic oligonucleotide
  Sense strand starting at position 3105 of SEQ ID NO: 586343
cugaacgaguaauuaguua

SEQ ID NO: 710757 - RNA, 19 nt, Artificial Sequence
  Description of Artificial Sequence: Synthetic oligonucleotide
  Antisense strand to SEQ ID NO: 710756
uaacuaauuacucguucag

SEQ ID NO: 710758 - RNA, 19 nt, Artificial Sequence
  Description of Artificial Sequence: Synthetic oligonucleotide
  Sense strand starting at position 3220 of SEQ ID NO: 586343
ucaagugaguucgaggguu

SEQ ID NO: 710759 - RNA, 19 nt, Artificial Sequence
  Description of Artificial Sequence: Synthetic oligonucleotide
  Antisense strand to SEQ ID NO: 710758
aacccucgaacucacuuga

SEQ ID NO: 710760 - RNA, 19 nt, Artificial Sequence
  Description of Artificial Sequence: Synthetic oligonucleotide
  Sense strand starting at position 3231 of SEQ ID NO: 586343
cgaggguuggcgcagugaa

SEQ ID NO: 710761 - RNA, 19 nt, Artificial Sequence
  Description of Artificial Sequence: Synthetic oligonucleotide
  Antisense strand to SEQ ID NO: 710760
uucacugcgccaacccucg

SEQ ID NO: 710762 - RNA, 19 nt, Artificial Sequence
  Description of Artificial Sequence: Synthetic oligonucleotide
  Sense strand starting at position 3232 of SEQ ID NO: 586343
gaggguuggcgcagugaau

SEQ ID NO: 710763 - RNA, 19 nt, Artificial Sequence
  Description of Artificial Sequence: Synthetic oligonucleotide
  Antisense strand to SEQ ID NO: 710762
auucacugcgccaacccuc

SEQ ID NO: 710764 - RNA, 19 nt, Artificial Sequence
  Description of Artificial Sequence: Synthetic oligonucleotide
  Sense strand starting at position 3241 of SEQ ID NO: 586343
cgcagugaauucggcauuu

SEQ ID NO: 710765 - RNA, 19 nt, Artificial Sequence
  Description of Artificial Sequence: Synthetic oligonucleotide
  Antisense strand to SEQ ID NO: 710764
aaaugccgaauucacugcg

SEQ ID NO: 710766 - RNA, 19 nt, Artificial Sequence
  Description of Artificial Sequence: Synthetic oligonucleotide
  Sense strand starting at position 3286 of SEQ ID NO: 586343
ucccaagauuuagagaaca

SEQ ID NO: 710767 - RNA, 19 nt, Artificial Sequence
  Description of Artificial Sequence: Synthetic oligonucleotide
  Antisense strand to SEQ ID NO: 710766
uguucucuaaaucuuggga

SEQ ID NO: 710768 - RNA, 19 nt, Artificial Sequence
  Description of Artificial Sequence: Synthetic oligonucleotide
  Sense strand starting at position 3760 of SEQ ID NO: 586343
aaaugcgacuucuaaggau

SEQ ID NO: 710769 - RNA, 19 nt, Artificial Sequence
  Description of Artificial Sequence: Synthetic oligonucleotide
  Antisense strand to SEQ ID NO: 710768
auccuuagaagucgcauuu

SEQ ID NO: 710770 - RNA, 19 nt, Artificial Sequence
  Description of Artificial Sequence: Synthetic oligonucleotide
  Sense strand starting at position 3841 of SEQ ID NO: 586343
gucuauuucugcgguggca

SEQ ID NO: 710771 - RNA, 19 nt, Artificial Sequence
  Description of Artificial Sequence: Synthetic oligonucleotide
  Antisense strand to SEQ ID NO: 710770
ugccaccgcagaaauagac

SEQ ID NO: 710772 - RNA, 19 nt, Artificial Sequence
  Description of Artificial Sequence: Synthetic oligonucleotide
  Sense strand starting at position 3861 of SEQ ID NO: 586343
gcaggcgagaccuaggaau

SEQ ID NO: 710773 - RNA, 19 nt, Artificial Sequence
  Description of Artificial Sequence: Synthetic oligonucleotide
  Antisense strand to SEQ ID NO: 710772
auuccuaggucucgccugc

SEQ ID NO: 710774 - RNA, 19 nt, Artificial Sequence
  Description of Artificial Sequence: Synthetic oligonucleotide
  Sense strand starting at position 3873 of SEQ ID NO: 586343
uaggaauugcgcuaaaggu

SEQ ID NO: 710775 - RNA, 19 nt, Artificial Sequence
  Description of Artificial Sequence: Synthetic oligonucleotide
  Antisense strand to SEQ ID NO: 710774
accuuuagcgcaauuccua

SEQ ID NO: 710776 - RNA, 19 nt, Artificial Sequence
  Description of Artificial Sequence: Synthetic oligonucleotide
  Sense strand starting at position 3883 of SEQ ID NO: 586343
gcuaaagguggcuagacaa

SEQ ID NO: 710777 - RNA, 19 nt, Artificial Sequence
  Description of Artificial Sequence: Synthetic oligonucleotide
  Antisense strand to SEQ ID NO: 710776
uugucuagccaccuuuagc

SEQ ID NO: 710778 - RNA, 19 nt, Artificial Sequence
  Description of Artificial Sequence: Synthetic oligonucleotide
  Sense strand starting at position 3953 of SEQ ID NO: 586343
aaggaaggaucagggaaau

SEQ ID NO: 710779 - RNA, 19 nt, Artificial Sequence
  Description of Artificial Sequence: Synthetic oligonucleotide
  Antisense strand to SEQ ID NO: 710778
auuucccugauccuuccuu

SEQ ID NO: 710780 - RNA, 19 nt, Artificial Sequence
  Description of Artificial Sequence: Synthetic oligonucleotide
  Sense strand starting at position 3965 of SEQ ID NO: 586343
gggaaaugguuuggauuug

SEQ ID NO: 710781 - RNA, 19 nt, Artificial Sequence
  Description of Artificial Sequence: Synthetic oligonucleotide
  Antisense strand to SEQ ID NO: 710780
caaauccaaaccauuuccc

SEQ ID NO: 710782 - RNA, 19 nt, Artificial Sequence
  Description of Artificial Sequence: Synthetic oligonucleotide
  Sense strand starting at position 3966 of SEQ ID NO: 586343
ggaaaugguuuggauuuga

SEQ ID NO: 710783 - RNA, 19 nt, Artificial Sequence
  Description of Artificial Sequence: Synthetic oligonucleotide
  Antisense strand to SEQ ID NO: 710782
ucaaauccaaaccauuucc

SEQ ID NO: 710784 - RNA, 19 nt, Artificial Sequence
  Description of Artificial Sequence: Synthetic oligonucleotide
  Sense strand starting at position 3982 of SEQ ID NO: 586343
ugaugcagauguucucaau

SEQ ID NO: 710785 - RNA, 19 nt, Artificial Sequence
  Description of Artificial Sequence: Synthetic oligonucleotide
  Antisense strand to SEQ ID NO: 710784
auugagaacaucugcauca

SEQ ID NO: 710786 - RNA, 19 nt, Artificial Sequence
  Description of Artificial Sequence: Synthetic oligonucleotide
  Sense strand starting at position 12 of SEQ ID NO: 586344
guugucagauuccauuuaa

SEQ ID NO: 710787 - RNA, 19 nt, Artificial Sequence
  Description of Artificial Sequence: Synthetic oligonucleotide
  Antisense strand to SEQ ID NO: 710786
uuaaauggaaucugacaac

SEQ ID NO: 710788 - RNA, 19 nt, Artificial Sequence
  Description of Artificial Sequence: Synthetic oligonucleotide
  Sense strand starting at position 44 of SEQ ID NO: 586344
caacccgcuucguuugaua

SEQ ID NO: 710789 - RNA, 19 nt, Artificial Sequence
  Description of Artificial Sequence: Synthetic oligonucleotide
  Antisense strand to SEQ ID NO: 710788
uaucaaacgaagcggguug

SEQ ID NO: 710790 - RNA, 19 nt, Artificial Sequence
  Description of Artificial Sequence: Synthetic oligonucleotide
  Sense strand starting at position 46 of SEQ ID NO: 586344
acccgcuucguuugauaca

SEQ ID NO: 710791 - RNA, 19 nt, Artificial Sequence
  Description of Artificial Sequence: Synthetic oligonucleotide
  Antisense strand to SEQ ID NO: 710790
uguaucaaacgaagcgggu

SEQ ID NO: 710792 - RNA, 19 nt, Artificial Sequence
  Description of Artificial Sequence: Synthetic oligonucleotide
  Sense strand starting at position 47 of SEQ ID NO: 586344
cccgcuucguuugauacaa

SEQ ID NO: 710793 - RNA, 19 nt, Artificial Sequence
  Description of Artificial Sequence: Synthetic oligonucleotide
  Antisense strand to SEQ ID NO: 710792
uuguaucaaacgaagcggg

SEQ ID NO: 710794 - RNA, 19 nt, Artificial Sequence
  Description of Artificial Sequence: Synthetic oligonucleotide
  Sense strand starting at position 77 of SEQ ID NO: 586344
gagcuuugcucccaaaggu

SEQ ID NO: 710795 - RNA, 19 nt, Artificial Sequence
  Description of Artificial Sequence: Synthetic oligonucleotide
  Antisense strand to SEQ ID NO: 710794
accuuugggagcaaagcuc

SEQ ID NO: 710796 - RNA, 19 nt, Artificial Sequence
  Description of Artificial Sequence: Synthetic oligonucleotide
  Sense strand starting at position 91 of SEQ ID NO: 586344
aagguauugcgguagguca

SEQ ID NO: 710797 - RNA, 19 nt, Artificial Sequence
  Description of Artificial Sequence: Synthetic oligonucleotide
  Antisense strand to SEQ ID NO: 710796
ugaccuaccgcaauaccuu

SEQ ID NO: 710798 - RNA, 19 nt, Artificial Sequence
  Description of Artificial Sequence: Synthetic oligonucleotide
  Sense strand starting at position 113 of SEQ ID NO: 586344
ucaccaguccuccagguua

SEQ ID NO: 710799 - RNA, 19 nt, Artificial Sequence
  Description of Artificial Sequence: Synthetic oligonucleotide
  Antisense strand to SEQ ID NO: 710798
uaaccuggaggacugguga

SEQ ID NO: 710800 - RNA, 19 nt, Artificial Sequence
  Description of Artificial Sequence: Synthetic oligonucleotide
  Sense strand starting at position 606 of SEQ ID NO: 586344
gggcucugcuuucgagaac

SEQ ID NO: 710801 - RNA, 19 nt, Artificial Sequence
  Description of Artificial Sequence: Synthetic oligonucleotide
  Antisense strand to SEQ ID NO: 710800
guucucgaaagcagagccc

SEQ ID NO: 710802 - RNA, 19 nt, Artificial Sequence
  Description of Artificial Sequence: Synthetic oligonucleotide
  Sense strand starting at position 1680 of SEQ ID NO: 586344
ugggcugaucgaugaauug

SEQ ID NO: 710803 - RNA, 19 nt, Artificial Sequence
  Description of Artificial Sequence: Synthetic oligonucleotide
  Antisense strand to SEQ ID NO: 710802
caauucaucgaucagccca

SEQ ID NO: 710804 - RNA, 19 nt, Artificial Sequence
  Description of Artificial Sequence: Synthetic oligonucleotide
  Sense strand starting at position 1706 of SEQ ID NO: 586344
aggaucaauuuccgaucaa

SEQ ID NO: 710805 - RNA, 19 nt, Artificial Sequence
  Description of Artificial Sequence: Synthetic oligonucleotide
  Antisense strand to SEQ ID NO: 710804
uugaucggaaauugauccu

SEQ ID NO: 710806 - RNA, 19 nt, Artificial Sequence
  Description of Artificial Sequence: Synthetic oligonucleotide
  Sense strand starting at position 1707 of SEQ ID NO: 586344
ggaucaauuuccgaucaag

SEQ ID NO: 710807 - RNA, 19 nt, Artificial Sequence
  Description of Artificial Sequence: Synthetic oligonucleotide
  Antisense strand to SEQ ID NO: 710806
cuugaucggaaauugaucc

SEQ ID NO: 710808 - RNA, 19 nt, Artificial Sequence
  Description of Artificial Sequence: Synthetic oligonucleotide
  Sense strand starting at position 1715 of SEQ ID NO: 586344
uuccgaucaagcgagugau

SEQ ID NO: 710809 - RNA, 19 nt, Artificial Sequence
  Description of Artificial Sequence: Synthetic oligonucleotide
  Antisense strand to SEQ ID NO: 710808
aucacucgcuugaucggaa

SEQ ID NO: 710810 - RNA, 19 nt, Artificial Sequence
  Description of Artificial Sequence: Synthetic oligonucleotide
  Sense strand starting at position 1718 of SEQ ID NO: 586344
cgaucaagcgagugaucaa

SEQ ID NO: 710811 - RNA, 19 nt, Artificial Sequence
  Description of Artificial Sequence: Synthetic oligonucleotide
  Antisense strand to SEQ ID NO: 710810
uugaucacucgcuugaucg

SEQ ID NO: 710812 - RNA, 19 nt, Artificial Sequence
  Description of Artificial Sequence: Synthetic oligonucleotide
  Sense strand starting at position 2499 of SEQ ID NO: 586344
cccuguagugguuagugua

SEQ ID NO: 710813 - RNA, 19 nt, Artificial Sequence
  Description of Artificial Sequence: Synthetic oligonucleotide
  Antisense strand to SEQ ID NO: 710812
uacacuaaccacuacaggg

SEQ ID NO: 710814 - RNA, 19 nt, Artificial Sequence
  Description of Artificial Sequence: Synthetic oligonucleotide
  Sense strand starting at position 2688 of SEQ ID NO: 586344
guggcauguuuggaggagu

SEQ ID NO: 710815 - RNA, 19 nt, Artificial Sequence
  Description of Artificial Sequence: Synthetic oligonucleotide
  Antisense strand to SEQ ID NO: 710814
acuccuccaaacaugccac

SEQ ID NO: 710816 - RNA, 19 nt, Artificial Sequence
  Description of Artificial Sequence: Synthetic oligonucleotide
  Sense strand starting at position 2691 of SEQ ID NO: 586344
gcauguuuggaggagugga

SEQ ID NO: 710817 - RNA, 19 nt, Artificial Sequence
  Description of Artificial Sequence: Synthetic oligonucleotide
  Antisense strand to SEQ ID NO: 710816
uccacuccuccaaacaugc

SEQ ID NO: 710818 - RNA, 19 nt, Artificial Sequence
  Description of Artificial Sequence: Synthetic oligonucleotide
  Sense strand starting at position 2932 of SEQ ID NO: 586344
ccaagaaacuuccuguggu

SEQ ID NO: 710819 - RNA, 19 nt, Artificial Sequence
  Description of Artificial Sequence: Synthetic oligonucleotide
  Antisense strand to SEQ ID NO: 710818
accacaggaaguuucuugg

SEQ ID NO: 710820 - RNA, 19 nt, Artificial Sequence
  Description of Artificial Sequence: Synthetic oligonucleotide
  Sense strand starting at position 2933 of SEQ ID NO: 586344
caagaaacuuccugugguu

SEQ ID NO: 710821 - RNA, 19 nt, Artificial Sequence
  Description of Artificial Sequence: Synthetic oligonucleotide
  Antisense strand to SEQ ID NO: 710820
aaccacaggaaguuucuug

SEQ ID NO: 710822 - RNA, 19 nt, Artificial Sequence
  Description of Artificial Sequence: Synthetic oligonucleotide
  Sense strand starting at position 3030 of SEQ ID NO: 586344
gucccaaguuuacagaaau

SEQ ID NO: 710823 - RNA, 19 nt, Artificial Sequence
  Description of Artificial Sequence: Synthetic oligonucleotide
  Antisense strand to SEQ ID NO: 710822
auuucuguaaacuugggac

SEQ ID NO: 710824 - RNA, 19 nt, Artificial Sequence
  Description of Artificial Sequence: Synthetic oligonucleotide
  Sense strand starting at position 3082 of SEQ ID NO: 586344
ugauuucucuccucgcgga

SEQ ID NO: 710825 - RNA, 19 nt, Artificial Sequence
  Description of Artificial Sequence: Synthetic oligonucleotide
  Antisense strand to SEQ ID NO: 710824
uccgcgaggagagaaauca

SEQ ID NO: 710826 - RNA, 19 nt, Artificial Sequence
  Description of Artificial Sequence: Synthetic oligonucleotide
  Sense strand starting at position 3083 of SEQ ID NO: 586344
gauuucucuccucgcggaa

SEQ ID NO: 710827 - RNA, 19 nt, Artificial Sequence
  Description of Artificial Sequence: Synthetic oligonucleotide
  Antisense strand to SEQ ID NO: 710826
uuccgcgaggagagaaauc

SEQ ID NO: 710828 - RNA, 19 nt, Artificial Sequence
  Description of Artificial Sequence: Synthetic oligonucleotide
  Sense strand starting at position 3142 of SEQ ID NO: 586344
ugauuauacacacguguga

SEQ ID NO: 710829 - RNA, 19 nt, Artificial Sequence
  Description of Artificial Sequence: Synthetic oligonucleotide
  Antisense strand to SEQ ID NO: 710828
ucacacguguguauaauca

SEQ ID NO: 710830 - RNA, 19 nt, Artificial Sequence
  Description of Artificial Sequence: Synthetic oligonucleotide
  Sense strand starting at position 3151 of SEQ ID NO: 586344
acacgugugacuuggaguu

SEQ ID NO: 710831 - RNA, 19 nt, Artificial Sequence
  Description of Artificial Sequence: Synthetic oligonucleotide
  Antisense strand to SEQ ID NO: 710830
aacuccaagucacacgugu

SEQ ID NO: 710832 - RNA, 19 nt, Artificial Sequence
  Description of Artificial Sequence: Synthetic oligonucleotide
  Sense strand starting at position 3163 of SEQ ID NO: 586344
uggaguuuccaguaggaau

SEQ ID NO: 710833 - RNA, 19 nt, Artificial Sequence
  Description of Artificial Sequence: Synthetic oligonucleotide
  Antisense strand to SEQ ID NO: 710832
auuccuacuggaaacucca

SEQ ID NO: 710834 - RNA, 19 nt, Artificial Sequence
  Description of Artificial Sequence: Synthetic oligonucleotide
  Sense strand starting at position 3165 of SEQ ID NO: 586344
gaguuuccaguaggaauac

SEQ ID NO: 710835 - RNA, 19 nt, Artificial Sequence
  Description of Artificial Sequence: Synthetic oligonucleotide
  Antisense strand to SEQ ID NO: 710834
guauuccuacuggaaacuc

SEQ ID NO: 710836 - RNA, 19 nt, Artificial Sequence
  Description of Artificial Sequence: Synthetic oligonucleotide
  Sense strand starting at position 3177 of SEQ ID NO: 586344
ggaauacuguucuuugacu

SEQ ID NO: 710837 - RNA, 19 nt, Artificial Sequence
  Description of Artificial Sequence: Synthetic oligonucleotide
  Antisense strand to SEQ ID NO: 710836
agucaaagaacaguauucc

SEQ ID NO: 710838 - RNA, 19 nt, Artificial Sequence
  Description of Artificial Sequence: Synthetic oligonucleotide
  Sense strand starting at position 3209 of SEQ ID NO: 586344
cugaacgaguaauuaguua

SEQ ID NO: 710839 - RNA, 19 nt, Artificial Sequence
  Description of Artificial Sequence: Synthetic oligonucleotide
  Antisense strand to SEQ ID NO: 710838
uaacuaauuacucguucag

SEQ ID NO: 710840 - RNA, 19 nt, Artificial Sequence
  Description of Artificial Sequence: Synthetic oligonucleotide
  Sense strand starting at position 3324 of SEQ ID NO: 586344
ucaagugaguucgaggguu

SEQ ID NO: 710841 - RNA, 19 nt, Artificial Sequence
  Description of Artificial Sequence: Synthetic oligonucleotide
  Antisense strand to SEQ ID NO: 710840
aacccucgaacucacuuga

SEQ ID NO: 710842 - RNA, 19 nt, Artificial Sequence
  Description of Artificial Sequence: Synthetic oligonucleotide
  Sense strand starting at position 3335 of SEQ ID NO: 586344
cgaggguuggcgcagugaa

SEQ ID NO: 710843 - RNA, 19 nt, Artificial Sequence
  Description of Artificial Sequence: Synthetic oligonucleotide
  Antisense strand to SEQ ID NO: 710842
uucacugcgccaacccucg

SEQ ID NO: 710844 - RNA, 19 nt, Artificial Sequence
  Description of Artificial Sequence: Synthetic oligonucleotide
  Sense strand starting at position 3336 of SEQ ID NO: 586344
gaggguuggcgcagugaau

SEQ ID NO: 710845 - RNA, 19 nt, Artificial Sequence
  Description of Artificial Sequence: Synthetic oligonucleotide
  Antisense strand to SEQ ID NO: 710844
auucacugcgccaacccuc

SEQ ID NO: 710846 - RNA, 19 nt, Artificial Sequence
  Description of Artificial Sequence: Synthetic oligonucleotide
  Sense strand starting at position 3345 of SEQ ID NO: 586344
cgcagugaauucggcauuu

SEQ ID NO: 710847 - RNA, 19 nt, Artificial Sequence
  Description of Artificial Sequence: Synthetic oligonucleotide
  Antisense strand to SEQ ID NO: 710846
aaaugccgaauucacugcg

SEQ ID NO: 710848 - RNA, 19 nt, Artificial Sequence
  Description of Artificial Sequence: Synthetic oligonucleotide
  Sense strand starting at position 3390 of SEQ ID NO: 586344
ucccaagauuuagagaaca

SEQ ID NO: 710849 - RNA, 19 nt, Artificial Sequence
  Description of Artificial Sequence: Synthetic oligonucleotide
  Antisense strand to SEQ ID NO: 710848
uguucucuaaaucuuggga

SEQ ID NO: 710850 - RNA, 19 nt, Artificial Sequence
  Description of Artificial Sequence: Synthetic oligonucleotide
  Sense strand starting at position 3864 of SEQ ID NO: 586344
aaaugcgacuucuaaggau

SEQ ID NO: 710851 - RNA, 19 nt, Artificial Sequence
  Description of Artificial Sequence: Synthetic oligonucleotide
  Antisense strand to SEQ ID NO: 710850
auccuuagaagucgcauuu

SEQ ID NO: 710852 - RNA, 19 nt, Artificial Sequence
  Description of Artificial Sequence: Synthetic oligonucleotide
  Sense strand starting at position 3945 of SEQ ID NO: 586344
gucuauuucugcgguggca

SEQ ID NO: 710853 - RNA, 19 nt, Artificial Sequence
  Description of Artificial Sequence: Synthetic oligonucleotide
  Antisense strand to SEQ ID NO: 710852
ugccaccgcagaaauagac

SEQ ID NO: 710854 - RNA, 19 nt, Artificial Sequence
  Description of Artificial Sequence: Synthetic oligonucleotide
  Sense strand starting at position 3965 of SEQ ID NO: 586344
gcaggcgagaccuaggaau

SEQ ID NO: 710855 - RNA, 19 nt, Artificial Sequence
  Description of Artificial Sequence: Synthetic oligonucleotide
  Antisense strand to SEQ ID NO: 710854
auuccuaggucucgccugc

SEQ ID NO: 710856 - RNA, 19 nt, Artificial Sequence
  Description of Artificial Sequence: Synthetic oligonucleotide
  Sense strand starting at position 3977 of SEQ ID NO: 586344
uaggaauugcgcuaaaggu

SEQ ID NO: 710857 - RNA, 19 nt, Artificial Sequence
  Description of Artificial Sequence: Synthetic oligonucleotide
  Antisense strand to SEQ ID NO: 710856
accuuuagcgcaauuccua

SEQ ID NO: 710858 - RNA, 19 nt, Artificial Sequence
  Description of Artificial Sequence: Synthetic oligonucleotide
  Sense strand starting at position 35 of SEQ ID NO: 586345
cuggacagccaguaacaua

SEQ ID NO: 710859 - RNA, 19 nt, Artificial Sequence
  Description of Artificial Sequence: Synthetic oligonucleotide
  Antisense strand to SEQ ID NO: 710858
uauguuacuggcuguccag

SEQ ID NO: 710860 - RNA, 19 nt, Artificial Sequence
  Description of Artificial Sequence: Synthetic oligonucleotide
  Sense strand starting at position 270 of SEQ ID NO: 586345
uacagagugccaugagcuu

SEQ ID NO: 710861 - RNA, 19 nt, Artificial Sequence
  Description of Artificial Sequence: Synthetic oligonucleotide
  Antisense strand to SEQ ID NO: 710860
aagcucauggcacucugua

SEQ ID NO: 710862 - RNA, 19 nt, Artificial Sequence
  Description of Artificial Sequence: Synthetic oligonucleotide
  Sense strand starting at position 276 of SEQ ID NO: 586345
gugccaugagcuuugucuu

SEQ ID NO: 710863 - RNA, 19 nt, Artificial Sequence
  Description of Artificial Sequence: Synthetic oligonucleotide
  Antisense strand to SEQ ID NO: 710862
aagacaaagcucauggcac

SEQ ID NO: 710864 - RNA, 19 nt, Artificial Sequence
  Description of Artificial Sequence: Synthetic oligonucleotide
  Sense strand starting at position 277 of SEQ ID NO: 586345
ugccaugagcuuugucuua

SEQ ID NO: 710865 - RNA, 19 nt, Artificial Sequence
  Description of Artificial Sequence: Synthetic oligonucleotide
  Antisense strand to SEQ ID NO: 710864
uaagacaaagcucauggca

SEQ ID NO: 710866 - RNA, 19 nt, Artificial Sequence
  Description of Artificial Sequence: Synthetic oligonucleotide
  Sense strand starting at position 279 of SEQ ID NO: 586345
ccaugagcuuugucuuaga

SEQ ID NO: 710867 - RNA, 19 nt, Artificial Sequence
  Description of Artificial Sequence: Synthetic oligonucleotide
  Antisense strand to SEQ ID NO: 710866
ucuaagacaaagcucaugg

SEQ ID NO: 710868 - RNA, 19 nt, Artificial Sequence
  Description of Artificial Sequence: Synthetic oligonucleotide
  Sense strand starting at position 292 of SEQ ID NO: 586345
cuuagaaaguguccuccuu

SEQ ID NO: 710869 - RNA, 19 nt, Artificial Sequence
  Description of Artificial Sequence: Synthetic oligonucleotide
  Antisense strand to SEQ ID NO: 710868
aaggaggacacuuucuaag

SEQ ID NO: 710870 - RNA, 19 nt, Artificial Sequence
  Description of Artificial Sequence: Synthetic oligonucleotide
  Sense strand starting at position 384 of SEQ ID NO: 586345
uuacaagucugagauagga

SEQ ID NO: 710871 - RNA, 19 nt, Artificial Sequence
  Description of Artificial Sequence: Synthetic oligonucleotide
  Antisense strand to SEQ ID NO: 710870
uccuaucucagacuuguaa

SEQ ID NO: 710872 - RNA, 19 nt, Artificial Sequence
  Description of Artificial Sequence: Synthetic oligonucleotide
  Sense strand starting at position 458 of SEQ ID NO: 586345
acaagccuuugggacuaaa

SEQ ID NO: 710873 - RNA, 19 nt, Artificial Sequence
  Description of Artificial Sequence: Synthetic oligonucleotide
  Antisense strand to SEQ ID NO: 710872
uuuagucccaaaggcuugu

SEQ ID NO: 710874 - RNA, 19 nt, Artificial Sequence
  Description of Artificial Sequence: Synthetic oligonucleotide
  Sense strand starting at position 780 of SEQ ID NO: 586345
cacugacuaucggugggaa

SEQ ID NO: 710875 - RNA, 19 nt, Artificial Sequence
  Description of Artificial Sequence: Synthetic oligonucleotide
  Antisense strand to SEQ ID NO: 710874
uucccaccgauagucagug

SEQ ID NO: 710876 - RNA, 19 nt, Artificial Sequence
  Description of Artificial Sequence: Synthetic oligonucleotide
  Sense strand starting at position 781 of SEQ ID NO: 586345
acugacuaucggugggaau

SEQ ID NO: 710877 - RNA, 19 nt, Artificial Sequence
  Description of Artificial Sequence: Synthetic oligonucleotide
  Antisense strand to SEQ ID NO: 710876
auucccaccgauagucagu

SEQ ID NO: 710878 - RNA, 19 nt, Artificial Sequence
  Description of Artificial Sequence: Synthetic oligonucleotide
  Sense strand starting at position 782 of SEQ ID NO: 586345
cugacuaucggugggaauu

SEQ ID NO: 710879 - RNA, 19 nt, Artificial Sequence
  Description of Artificial Sequence: Synthetic oligonucleotide
  Antisense strand to SEQ ID NO: 710878
aauucccaccgauagucag

SEQ ID NO: 710880 - RNA, 19 nt, Artificial Sequence
  Description of Artificial Sequence: Synthetic oligonucleotide
  Sense strand starting at position 783 of SEQ ID NO: 586345
ugacuaucggugggaauua

SEQ ID NO: 710881 - RNA, 19 nt, Artificial Sequence
  Description of Artificial Sequence: Synthetic oligonucleotide
  Antisense strand to SEQ ID NO: 710880
uaauucccaccgauaguca

SEQ ID NO: 710882 - RNA, 19 nt, Artificial Sequence
  Description of Artificial Sequence: Synthetic oligonucleotide
  Sense strand starting at position 846 of SEQ ID NO: 586345
accagauuggccugagacu

SEQ ID NO: 710883 - RNA, 19 nt, Artificial Sequence
  Description of Artificial Sequence: Synthetic oligonucleotide
  Antisense strand to SEQ ID NO: 710882
agucucaggccaaucuggu

SEQ ID NO: 710884 - RNA, 19 nt, Artificial Sequence
  Description of Artificial Sequence: Synthetic oligonucleotide
  Sense strand starting at position 847 of SEQ ID NO: 586345
ccagauuggccugagacuu

SEQ ID NO: 710885 - RNA, 19 nt, Artificial Sequence
  Description of Artificial Sequence: Synthetic oligonucleotide
  Antisense strand to SEQ ID NO: 710884
aagucucaggccaaucugg

SEQ ID NO: 710886 - RNA, 19 nt, Artificial Sequence
  Description of Artificial Sequence: Synthetic oligonucleotide
  Sense strand starting at position 853 of SEQ ID NO: 586345
uggccugagacuugaacuu

SEQ ID NO: 710887 - RNA, 19 nt, Artificial Sequence
  Description of Artificial Sequence: Synthetic oligonucleotide
  Antisense strand to SEQ ID NO: 710886
aaguucaagucucaggcca

SEQ ID NO: 710888 - RNA, 19 nt, Artificial Sequence
  Description of Artificial Sequence: Synthetic oligonucleotide
  Sense strand starting at position 860 of SEQ ID NO: 586345
agacuugaacuuugacauu

SEQ ID NO: 710889 - RNA, 19 nt, Artificial Sequence
  Description of Artificial Sequence: Synthetic oligonucleotide
  Antisense strand to SEQ ID NO: 710888
aaugucaaaguucaagucu

SEQ ID NO: 710890 - RNA, 19 nt, Artificial Sequence
  Description of Artificial Sequence: Synthetic oligonucleotide
  Sense strand starting at position 870 of SEQ ID NO: 586345
uuugacauuccguauucga

SEQ ID NO: 710891 - RNA, 19 nt, Artificial Sequence
  Description of Artificial Sequence: Synthetic oligonucleotide
  Antisense strand to SEQ ID NO: 710890
ucgaauacggaaugucaaa

SEQ ID NO: 710892 - RNA, 19 nt, Artificial Sequence
  Description of Artificial Sequence: Synthetic oligonucleotide
  Sense strand starting at position 873 of SEQ ID NO: 586345
gacauuccguauucgacua

SEQ ID NO: 710893 - RNA, 19 nt, Artificial Sequence
  Description of Artificial Sequence: Synthetic oligonucleotide
  Antisense strand to SEQ ID NO: 710892
uagucgaauacggaauguc

SEQ ID NO: 710894 - RNA, 19 nt, Artificial Sequence
  Description of Artificial Sequence: Synthetic oligonucleotide
  Sense strand starting at position 878 of SEQ ID NO: 586345
uccguauucgacuaaaguu

SEQ ID NO: 710895 - RNA, 19 nt, Artificial Sequence
  Description of Artificial Sequence: Synthetic oligonucleotide
  Antisense strand to SEQ ID NO: 710894
aacuuuagucgaauacgga

SEQ ID NO: 710896 - RNA, 19 nt, Artificial Sequence
  Description of Artificial Sequence: Synthetic oligonucleotide
  Sense strand starting at position 920 of SEQ ID NO: 586345
aaggccaaaucguuagcaa

SEQ ID NO: 710897 - RNA, 19 nt, Artificial Sequence
  Description of Artificial Sequence: Synthetic oligonucleotide
  Antisense strand to SEQ ID NO: 710896
uugcuaacgauuuggccuu

SEQ ID NO: 710898 - RNA, 19 nt, Artificial Sequence
  Description of Artificial Sequence: Synthetic oligonucleotide
  Sense strand starting at position 921 of SEQ ID NO: 586345
aggccaaaucguuagcaac

SEQ ID NO: 710899 - RNA, 19 nt, Artificial Sequence
  Description of Artificial Sequence: Synthetic oligonucleotide
  Antisense strand to SEQ ID NO: 710898
guugcuaacgauuuggccu

SEQ ID NO: 710900 - RNA, 19 nt, Artificial Sequence
  Description of Artificial Sequence: Synthetic oligonucleotide
  Sense strand starting at position 923 of SEQ ID NO: 586345
gccaaaucguuagcaacca

SEQ ID NO: 710901 - RNA, 19 nt, Artificial Sequence
  Description of Artificial Sequence: Synthetic oligonucleotide
  Antisense strand to SEQ ID NO: 710900
ugguugcuaacgauuuggc

SEQ ID NO: 710902 - RNA, 19 nt, Artificial Sequence
  Description of Artificial Sequence: Synthetic oligonucleotide
  Sense strand starting at position 1048 of SEQ ID NO: 586345
auggaaacuuucgauggaa

SEQ ID NO: 710903 - RNA, 19 nt, Artificial Sequence
  Description of Artificial Sequence: Synthetic oligonucleotide
  Antisense strand to SEQ ID NO: 710902
uuccaucgaaaguuuccau

SEQ ID NO: 710904 - RNA, 19 nt, Artificial Sequence
  Description of Artificial Sequence: Synthetic oligonucleotide
  Sense strand starting at position 1412 of SEQ ID NO: 586345
auagacacuuuggaguaau

SEQ ID NO: 710905 - RNA, 19 nt, Artificial Sequence
  Description of Artificial Sequence: Synthetic oligonucleotide
  Antisense strand to SEQ ID NO: 710904
auuacuccaaagugucuau

SEQ ID NO: 710906 - RNA, 19 nt, Artificial Sequence
  Description of Artificial Sequence: Synthetic oligonucleotide
  Sense strand starting at position 1468 of SEQ ID NO: 586345
uuaaucuuaucggaaauac

SEQ ID NO: 710907 - RNA, 19 nt, Artificial Sequence
  Description of Artificial Sequence: Synthetic oligonucleotide
  Antisense strand to SEQ ID NO: 710906
guauuuccgauaagauuaa

SEQ ID NO: 710908 - RNA, 19 nt, Artificial Sequence
  Description of Artificial Sequence: Synthetic oligonucleotide
  Sense strand starting at position 1496 of SEQ ID NO: 586345
auagucuucuuccuaguua

SEQ ID NO: 710909 - RNA, 19 nt, Artificial Sequence
  Description of Artificial Sequence: Synthetic oligonucleotide
  Antisense strand to SEQ ID NO: 710908
uaacuaggaagaagacuau

SEQ ID NO: 710910 - RNA, 19 nt, Artificial Sequence
  Description of Artificial Sequence: Synthetic oligonucleotide
  Sense strand starting at position 1504 of SEQ ID NO: 586345
cuuccuaguuaagcgagaa

SEQ ID NO: 710911 - RNA, 19 nt, Artificial Sequence
  Description of Artificial Sequence: Synthetic oligonucleotide
  Antisense strand to SEQ ID NO: 710910
uucucgcuuaacuaggaag

SEQ ID NO: 710912 - RNA, 19 nt, Artificial Sequence
  Description of Artificial Sequence: Synthetic oligonucleotide
  Sense strand starting at position 1505 of SEQ ID NO: 586345
uuccuaguuaagcgagaaa

SEQ ID NO: 710913 - RNA, 19 nt, Artificial Sequence
  Description of Artificial Sequence: Synthetic oligonucleotide
  Antisense strand to SEQ ID NO: 710912
uuucucgcuuaacuaggaa

SEQ ID NO: 710914 - RNA, 19 nt, Artificial Sequence
  Description of Artificial Sequence: Synthetic oligonucleotide
  Sense strand starting at position 1542 of SEQ ID NO: 586345
cgacuaugacucggcuuua

SEQ ID NO: 710915 - RNA, 19 nt, Artificial Sequence
  Description of Artificial Sequence: Synthetic oligonucleotide
  Antisense strand to SEQ ID NO: 710914
uaaagccgagucauagucg

SEQ ID NO: 710916 - RNA, 19 nt, Artificial Sequence
  Description of Artificial Sequence: Synthetic oligonucleotide
  Sense strand starting at position 1543 of SEQ ID NO: 586345
gacuaugacucggcuuuau

SEQ ID NO: 710917 - RNA, 19 nt, Artificial Sequence
  Description of Artificial Sequence: Synthetic oligonucleotide
  Antisense strand to SEQ ID NO: 710916
auaaagccgagucauaguc

SEQ ID NO: 710918 - RNA, 19 nt, Artificial Sequence
  Description of Artificial Sequence: Synthetic oligonucleotide
  Sense strand starting at position 1551 of SEQ ID NO: 586345
cucggcuuuaucguucuua

SEQ ID NO: 710919 - RNA, 19 nt, Artificial Sequence
  Description of Artificial Sequence: Synthetic oligonucleotide
  Antisense strand to SEQ ID NO: 710918
uaagaacgauaaagccgag

SEQ ID NO: 710920 - RNA, 19 nt, Artificial Sequence
  Description of Artificial Sequence: Synthetic oligonucleotide
  Sense strand starting at position 1553 of SEQ ID NO: 586345
cggcuuuaucguucuuagu

SEQ ID NO: 710921 - RNA, 19 nt, Artificial Sequence
  Description of Artificial Sequence: Synthetic oligonucleotide
  Antisense strand to SEQ ID NO: 710920
acuaagaacgauaaagccg

SEQ ID NO: 710922 - RNA, 19 nt, Artificial Sequence
  Description of Artificial Sequence: Synthetic oligonucleotide
  Sense strand starting at position 1606 of SEQ ID NO: 586345
guugucagauuccauuuaa

SEQ ID NO: 710923 - RNA, 19 nt, Artificial Sequence
  Description of Artificial Sequence: Synthetic oligonucleotide
  Antisense strand to SEQ ID NO: 710922
uuaaauggaaucugacaac

SEQ ID NO: 710924 - RNA, 19 nt, Artificial Sequence
  Description of Artificial Sequence: Synthetic oligonucleotide
  Sense strand starting at position 1685 of SEQ ID NO: 586345
aagguauugcgguagguca

SEQ ID NO: 710925 - RNA, 19 nt, Artificial Sequence
  Description of Artificial Sequence: Synthetic oligonucleotide
  Antisense strand to SEQ ID NO: 710924
ugaccuaccgcaauaccuu

SEQ ID NO: 710926 - RNA, 19 nt, Artificial Sequence
  Description of Artificial Sequence: Synthetic oligonucleotide
  Sense strand starting at position 1707 of SEQ ID NO: 586345
ucaccaguccuccagguua

SEQ ID NO: 710927 - RNA, 19 nt, Artificial Sequence
  Description of Artificial Sequence: Synthetic oligonucleotide
  Antisense strand to SEQ ID NO: 710926
uaaccuggaggacugguga

SEQ ID NO: 710928 - RNA, 19 nt, Artificial Sequence
  Description of Artificial Sequence: Synthetic oligonucleotide
  Sense strand starting at position 3274 of SEQ ID NO: 586345
ugggcugaucgaugaauug

SEQ ID NO: 710929 - RNA, 19 nt, Artificial Sequence
  Description of Artificial Sequence: Synthetic oligonucleotide
  Antisense strand to SEQ ID NO: 710928
caauucaucgaucagccca

SEQ ID NO: 710930 - RNA, 19 nt, Artificial Sequence
  Description of Artificial Sequence: Synthetic oligonucleotide
  Sense strand starting at position 3300 of SEQ ID NO: 586345
aggaucaauuuccgaucaa

SEQ ID NO: 710931 - RNA, 19 nt, Artificial Sequence
  Description of Artificial Sequence: Synthetic oligonucleotide
  Antisense strand to SEQ ID NO: 710930
uugaucggaaauugauccu

SEQ ID NO: 710932 - RNA, 19 nt, Artificial Sequence
  Description of Artificial Sequence: Synthetic oligonucleotide
  Sense strand starting at position 3301 of SEQ ID NO: 586345
ggaucaauuuccgaucaag

SEQ ID NO: 710933 - RNA, 19 nt, Artificial Sequence
  Description of Artificial Sequence: Synthetic oligonucleotide
  Antisense strand to SEQ ID NO: 710932
cuugaucggaaauugaucc

SEQ ID NO: 710934 - RNA, 19 nt, Artificial Sequence
  Description of Artificial Sequence: Synthetic oligonucleotide
  Sense strand starting at position 3309 of SEQ ID NO: 586345
uuccgaucaagcgagugau

SEQ ID NO: 710935 - RNA, 19 nt, Artificial Sequence
  Description of Artificial Sequence: Synthetic oligonucleotide
  Antisense strand to SEQ ID NO: 710934
aucacucgcuugaucggaa

SEQ ID NO: 710936 - RNA, 19 nt, Artificial Sequence
  Description of Artificial Sequence: Synthetic oligonucleotide
  Sense strand starting at position 3312 of SEQ ID NO: 586345
cgaucaagcgagugaucaa

SEQ ID NO: 710937 - RNA, 19 nt, Artificial Sequence
  Description of Artificial Sequence: Synthetic oligonucleotide
  Antisense strand to SEQ ID NO: 710936
uugaucacucgcuugaucg

SEQ ID NO: 710938 - RNA, 19 nt, Artificial Sequence
  Description of Artificial Sequence: Synthetic oligonucleotide
  Sense strand starting at position 265 of SEQ ID NO: 586346
ucuauuaaaggaugguaca

SEQ ID NO: 710939 - RNA, 19 nt, Artificial Sequence
  Description of Artificial Sequence: Synthetic oligonucleotide
  Antisense strand to SEQ ID NO: 710938
uguaccauccuuuaauaga

SEQ ID NO: 710940 - RNA, 19 nt, Artificial Sequence
  Description of Artificial Sequence: Synthetic oligonucleotide
  Sense strand starting at position 396 of SEQ ID NO: 586346
ucuuaaugccgacaaagau

SEQ ID NO: 710941 - RNA, 19 nt, Artificial Sequence
  Description of Artificial Sequence: Synthetic oligonucleotide
  Antisense strand to SEQ ID NO: 710940
aucuuugucggcauuaaga

SEQ ID NO: 710942 - RNA, 19 nt, Artificial Sequence
  Description of Artificial Sequence: Synthetic oligonucleotide
  Sense strand starting at position 477 of SEQ ID NO: 586346
cccagaugaugccuaaaca

SEQ ID NO: 710943 - RNA, 19 nt, Artificial Sequence
  Description of Artificial Sequence: Synthetic oligonucleotide
  Antisense strand to SEQ ID NO: 710942
uguuuaggcaucaucuggg

SEQ ID NO: 710944 - RNA, 19 nt, Artificial Sequence
  Description of Artificial Sequence: Synthetic oligonucleotide
  Sense strand starting at position 497 of SEQ ID NO: 586346
gaaagaaugcaucgguuau

SEQ ID NO: 710945 - RNA, 19 nt, Artificial Sequence
  Description of Artificial Sequence: Synthetic oligonucleotide
  Antisense strand to SEQ ID NO: 710944
auaaccgaugcauucuuuc

SEQ ID NO: 710946 - RNA, 19 nt, Artificial Sequence
  Description of Artificial Sequence: Synthetic oligonucleotide
  Sense strand starting at position 523 of SEQ ID NO: 586346
uccugauaguuugccacau

SEQ ID NO: 710947 - RNA, 19 nt, Artificial Sequence
  Description of Artificial Sequence: Synthetic oligonucleotide
  Antisense strand to SEQ ID NO: 710946
auguggcaaacuaucagga

SEQ ID NO: 710948 - RNA, 19 nt, Artificial Sequence
  Description of Artificial Sequence: Synthetic oligonucleotide
  Sense strand starting at position 527 of SEQ ID NO: 586346
gauaguuugccacauguua

SEQ ID NO: 710949 - RNA, 19 nt, Artificial Sequence
  Description of Artificial Sequence: Synthetic oligonucleotide
  Antisense strand to SEQ ID NO: 710948
uaacauguggcaaacuauc

SEQ ID NO: 710950 - RNA, 19 nt, Artificial Sequence
  Description of Artificial Sequence: Synthetic oligonucleotide
  Sense strand starting at position 979 of SEQ ID NO: 586346
guguguauacgugaaggaa

SEQ ID NO: 710951 - RNA, 19 nt, Artificial Sequence
  Description of Artificial Sequence: Synthetic oligonucleotide
  Antisense strand to SEQ ID NO: 710950
uuccuucacguauacacac

SEQ ID NO: 710952 - RNA, 19 nt, Artificial Sequence
  Description of Artificial Sequence: Synthetic oligonucleotide
  Sense strand starting at position 1049 of SEQ ID NO: 586346
agacaaucauggucacgaa

SEQ ID NO: 710953 - RNA, 19 nt, Artificial Sequence
  Description of Artificial Sequence: Synthetic oligonucleotide
  Antisense strand to SEQ ID NO: 710952
uucgugaccaugauugucu

SEQ ID NO: 710954 - RNA, 19 nt, Artificial Sequence
  Description of Artificial Sequence: Synthetic oligonucleotide
  Sense strand starting at position 1167 of SEQ ID NO: 586346
gccaccucucccugaggau

SEQ ID NO: 710955 - RNA, 19 nt, Artificial Sequence
  Description of Artificial Sequence: Synthetic oligonucleotide
  Antisense strand to SEQ ID NO: 710954
auccucagggagagguggc

SEQ ID NO: 710956 - RNA, 19 nt, Artificial Sequence
  Description of Artificial Sequence: Synthetic oligonucleotide
  Sense strand starting at position 1244 of SEQ ID NO: 586346
acaggaguagcuugacacu

SEQ ID NO: 710957 - RNA, 19 nt, Artificial Sequence
  Description of Artificial Sequence: Synthetic oligonucleotide
  Antisense strand to SEQ ID NO: 710956
agugucaagcuacuccugu

SEQ ID NO: 710958 - RNA, 19 nt, Artificial Sequence
  Description of Artificial Sequence: Synthetic oligonucleotide
  Sense strand starting at position 1370 of SEQ ID NO: 586346
cgguuucaaggugauugau

SEQ ID NO: 710959 - RNA, 19 nt, Artificial Sequence
  Description of Artificial Sequence: Synthetic oligonucleotide
  Antisense strand to SEQ ID NO: 710958
aucaaucaccuugaaaccg

SEQ ID NO: 710960 - RNA, 19 nt, Artificial Sequence
  Description of Artificial Sequence: Synthetic oligonucleotide
  Sense strand starting at position 1372 of SEQ ID NO: 586346
guuucaaggugauugauga

SEQ ID NO: 710961 - RNA, 19 nt, Artificial Sequence
  Description of Artificial Sequence: Synthetic oligonucleotide
  Antisense strand to SEQ ID NO: 710960
ucaucaaucaccuugaaac

SEQ ID NO: 710962 - RNA, 19 nt, Artificial Sequence
  Description of Artificial Sequence: Synthetic oligonucleotide
  Sense strand starting at position 1393 of SEQ ID NO: 586346
cuccuucuaggaugucaga

SEQ ID NO: 710963 - RNA, 19 nt, Artificial Sequence
  Description of Artificial Sequence: Synthetic oligonucleotide
  Antisense strand to SEQ ID NO: 710962
ucugacauccuagaaggag

SEQ ID NO: 710964 - RNA, 19 nt, Artificial Sequence
  Description of Artificial Sequence: Synthetic oligonucleotide
  Sense strand starting at position 1425 of SEQ ID NO: 586346
gaaacaugugcccacgaaa

SEQ ID NO: 710965 - RNA, 19 nt, Artificial Sequence
  Description of Artificial Sequence: Synthetic oligonucleotide
  Antisense strand to SEQ ID NO: 710964
uuucgugggcacauguuuc

SEQ ID NO: 710966 - RNA, 19 nt, Artificial Sequence
  Description of Artificial Sequence: Synthetic oligonucleotide
  Sense strand starting at position 1511 of SEQ ID NO: 586346
ucggcuuuccaggagggaa

SEQ ID NO: 710967 - RNA, 19 nt, Artificial Sequence
  Description of Artificial Sequence: Synthetic oligonucleotide
  Antisense strand to SEQ ID NO: 710966
uucccuccuggaaagccga

SEQ ID NO: 710968 - RNA, 19 nt, Artificial Sequence
  Description of Artificial Sequence: Synthetic oligonucleotide
  Sense strand starting at position 1524 of SEQ ID NO: 586346
agggaagucuugccuauca

SEQ ID NO: 710969 - RNA, 19 nt, Artificial Sequence
  Description of Artificial Sequence: Synthetic oligonucleotide
  Antisense strand to SEQ ID NO: 710968
ugauaggcaagacuucccu

SEQ ID NO: 710970 - RNA, 19 nt, Artificial Sequence
  Description of Artificial Sequence: Synthetic oligonucleotide
  Sense strand starting at position 1526 of SEQ ID NO: 586346
ggaagucuugccuaucauu

SEQ ID NO: 710971 - RNA, 19 nt, Artificial Sequence
  Description of Artificial Sequence: Synthetic oligonucleotide
  Antisense strand to SEQ ID NO: 710970
aaugauaggcaagacuucc

SEQ ID NO: 710972 - RNA, 19 nt, Artificial Sequence
  Description of Artificial Sequence: Synthetic oligonucleotide
  Sense strand starting at position 1629 of SEQ ID NO: 586346
ccauaccugucccuaguua

SEQ ID NO: 710973 - RNA, 19 nt, Artificial Sequence
  Description of Artificial Sequence: Synthetic oligonucleotide
  Antisense strand to SEQ ID NO: 710972
uaacuagggacagguaugg

SEQ ID NO: 710974 - RNA, 19 nt, Artificial Sequence
  Description of Artificial Sequence: Synthetic oligonucleotide
  Sense strand starting at position 1914 of SEQ ID NO: 586346
gccgguccgcgcuuaagua

SEQ ID NO: 710975 - RNA, 19 nt, Artificial Sequence
  Description of Artificial Sequence: Synthetic oligonucleotide
  Antisense strand to SEQ ID NO: 710974
uacuuaagcgcggaccggc

SEQ ID NO: 710976 - RNA, 19 nt, Artificial Sequence
  Description of Artificial Sequence: Synthetic oligonucleotide
  Sense strand starting at position 2252 of SEQ ID NO: 586346
gugcguugcccugcuaaag

SEQ ID NO: 710977 - RNA, 19 nt, Artificial Sequence
  Description of Artificial Sequence: Synthetic oligonucleotide
  Antisense strand to SEQ ID NO: 710976
cuuuagcagggcaacgcac

SEQ ID NO: 710978 - RNA, 19 nt, Artificial Sequence
  Description of Artificial Sequence: Synthetic oligonucleotide
  Sense strand starting at position 2253 of SEQ ID NO: 586346
ugcguugcccugcuaaagu

SEQ ID NO: 710979 - RNA, 19 nt, Artificial Sequence
  Description of Artificial Sequence: Synthetic oligonucleotide
  Antisense strand to SEQ ID NO: 710978
acuuuagcagggcaacgca

SEQ ID NO: 710980 - RNA, 19 nt, Artificial Sequence
  Description of Artificial Sequence: Synthetic oligonucleotide
  Sense strand starting at position 2287 of SEQ ID NO: 586346
uggugauguaaugagcuuu

SEQ ID NO: 710981 - RNA, 19 nt, Artificial Sequence
  Description of Artificial Sequence: Synthetic oligonucleotide
  Antisense strand to SEQ ID NO: 710980
aaagcucauuacaucacca

SEQ ID NO: 710982 - RNA, 19 nt, Artificial Sequence
  Description of Artificial Sequence: Synthetic oligonucleotide
  Sense strand starting at position 2359 of SEQ ID NO: 586346
gaggucuccuagcuaccau

SEQ ID NO: 710983 - RNA, 19 nt, Artificial Sequence
  Description of Artificial Sequence: Synthetic oligonucleotide
  Antisense strand to SEQ ID NO: 710982
augguagcuaggagaccuc

SEQ ID NO: 710984 - RNA, 19 nt, Artificial Sequence
  Description of Artificial Sequence: Synthetic oligonucleotide
  Sense strand starting at position 2399 of SEQ ID NO: 586346
cccagacucuguccuacua

SEQ ID NO: 710985 - RNA, 19 nt, Artificial Sequence
  Description of Artificial Sequence: Synthetic oligonucleotide
  Antisense strand to SEQ ID NO: 710984
uaguaggacagagucuggg

SEQ ID NO: 710986 - RNA, 19 nt, Artificial Sequence
  Description of Artificial Sequence: Synthetic oligonucleotide
  Sense strand starting at position 2588 of SEQ ID NO: 586346
gcggcagagacaggauuau

SEQ ID NO: 710987 - RNA, 19 nt, Artificial Sequence
  Description of Artificial Sequence: Synthetic oligonucleotide
  Antisense strand to SEQ ID NO: 710986
auaauccugucucugccgc

SEQ ID NO: 710988 - RNA, 19 nt, Artificial Sequence
  Description of Artificial Sequence: Synthetic oligonucleotide
  Sense strand starting at position 2597 of SEQ ID NO: 586346
acaggauuaucccucugga

SEQ ID NO: 710989 - RNA, 19 nt, Artificial Sequence
  Description of Artificial Sequence: Synthetic oligonucleotide
  Antisense strand to SEQ ID NO: 710988
uccagagggauaauccugu

SEQ ID NO: 710990 - RNA, 19 nt, Artificial Sequence
  Description of Artificial Sequence: Synthetic oligonucleotide
  Sense strand starting at position 2600 of SEQ ID NO: 586346
ggauuaucccucuggaacu

SEQ ID NO: 710991 - RNA, 19 nt, Artificial Sequence
  Description of Artificial Sequence: Synthetic oligonucleotide
  Antisense strand to SEQ ID NO: 710990
aguuccagagggauaaucc

SEQ ID NO: 710992 - RNA, 19 nt, Artificial Sequence
  Description of Artificial Sequence: Synthetic oligonucleotide
  Sense strand starting at position 2679 of SEQ ID NO: 586346
guacgaaguagguaaauau

SEQ ID NO: 710993 - RNA, 19 nt, Artificial Sequence
  Description of Artificial Sequence: Synthetic oligonucleotide
  Antisense strand to SEQ ID NO: 710992
auauuuaccuacuucguac

SEQ ID NO: 710994 - RNA, 19 nt, Artificial Sequence
  Description of Artificial Sequence: Synthetic oligonucleotide
  Sense strand starting at position 2764 of SEQ ID NO: 586346
ggguaaacggucuauccau

SEQ ID NO: 710995 - RNA, 19 nt, Artificial Sequence
  Description of Artificial Sequence: Synthetic oligonucleotide
  Antisense strand to SEQ ID NO: 710994
auggauagaccguuuaccc

SEQ ID NO: 710996 - RNA, 19 nt, Artificial Sequence
  Description of Artificial Sequence: Synthetic oligonucleotide
  Sense strand starting at position 2881 of SEQ ID NO: 586346
guuguauuacuagaccuua

SEQ ID NO: 710997 - RNA, 19 nt, Artificial Sequence
  Description of Artificial Sequence: Synthetic oligonucleotide
  Antisense strand to SEQ ID NO: 710996
uaaggucuaguaauacaac

SEQ ID NO: 710998 - RNA, 19 nt, Artificial Sequence
  Description of Artificial Sequence: Synthetic oligonucleotide
  Sense strand starting at position 3306 of SEQ ID NO: 586346
uugauaaguuagguuaauc

SEQ ID NO: 710999 - RNA, 19 nt, Artificial Sequence
  Description of Artificial Sequence: Synthetic oligonucleotide
  Antisense strand to SEQ ID NO: 710998
gauuaaccuaacuuaucaa

SEQ ID NO: 711000 - RNA, 19 nt, Artificial Sequence
  Description of Artificial Sequence: Synthetic oligonucleotide
  Sense strand starting at position 3314 of SEQ ID NO: 586346
uuagguuaaucucuaaguc

SEQ ID NO: 711001 - RNA, 19 nt, Artificial Sequence
  Description of Artificial Sequence: Synthetic oligonucleotide
  Antisense strand to SEQ ID NO: 711000
gacuuagagauuaaccuaa

SEQ ID NO: 711002 - RNA, 19 nt, Artificial Sequence
  Description of Artificial Sequence: Synthetic oligonucleotide
  Sense strand starting at position 3436 of SEQ ID NO: 586346
guuucuuauugcuuacgaa

SEQ ID NO: 711003 - RNA, 19 nt, Artificial Sequence
  Description of Artificial Sequence: Synthetic oligonucleotide
  Antisense strand to SEQ ID NO: 711002
uucguaagcaauaagaaac

SEQ ID NO: 711004 - RNA, 19 nt, Artificial Sequence
  Description of Artificial Sequence: Synthetic oligonucleotide
  Sense strand starting at position 3437 of SEQ ID NO: 586346
uuucuuauugcuuacgaau

SEQ ID NO: 711005 - RNA, 19 nt, Artificial Sequence
  Description of Artificial Sequence: Synthetic oligonucleotide
  Antisense strand to SEQ ID NO: 711004
auucguaagcaauaagaaa

SEQ ID NO: 711006 - RNA, 19 nt, Artificial Sequence
  Description of Artificial Sequence: Synthetic oligonucleotide
  Sense strand starting at position 3533 of SEQ ID NO: 586346
uucuguuugccugggaaag

SEQ ID NO: 711007 - RNA, 19 nt, Artificial Sequence
  Description of Artificial Sequence: Synthetic oligonucleotide
  Antisense strand to SEQ ID NO: 711006
cuuucccaggcaaacagaa

SEQ ID NO: 711008 - RNA, 19 nt, Artificial Sequence
  Description of Artificial Sequence: Synthetic oligonucleotide
  Sense strand starting at position 3534 of SEQ ID NO: 586346
ucuguuugccugggaaagu

SEQ ID NO: 711009 - RNA, 19 nt, Artificial Sequence
  Description of Artificial Sequence: Synthetic oligonucleotide
  Antisense strand to SEQ ID NO: 711008
acuuucccaggcaaacaga

SEQ ID NO: 711010 - RNA, 19 nt, Artificial Sequence
  Description of Artificial Sequence: Synthetic oligonucleotide
  Sense strand starting at position 3565 of SEQ ID NO: 586346
cucacaucugaaggauauu

SEQ ID NO: 711011 - RNA, 19 nt, Artificial Sequence
  Description of Artificial Sequence: Synthetic oligonucleotide
  Antisense strand to SEQ ID NO: 711010
aauauccuucagaugugag

SEQ ID NO: 711012 - RNA, 19 nt, Artificial Sequence
  Description of Artificial Sequence: Synthetic oligonucleotide
  Sense strand starting at position 3685 of SEQ ID NO: 586346
cugccagacuuauuagaac

SEQ ID NO: 711013 - RNA, 19 nt, Artificial Sequence
  Description of Artificial Sequence: Synthetic oligonucleotide
  Antisense strand to SEQ ID NO: 711012
guucuaauaagucuggcag

SEQ ID NO: 711014 - RNA, 19 nt, Artificial Sequence
  Description of Artificial Sequence: Synthetic oligonucleotide
  Sense strand starting at position 3888 of SEQ ID NO: 586346
gucauuaucucgcugaaua

SEQ ID NO: 711015 - RNA, 19 nt, Artificial Sequence
  Description of Artificial Sequence: Synthetic oligonucleotide
  Antisense strand to SEQ ID NO: 711014
uauucagcgagauaaugac

SEQ ID NO: 711016 - RNA, 19 nt, Artificial Sequence
  Description of Artificial Sequence: Synthetic oligonucleotide
  Sense strand starting at position 3889 of SEQ ID NO: 586346
ucauuaucucgcugaauaa

SEQ ID NO: 711017 - RNA, 19 nt, Artificial Sequence
  Description of Artificial Sequence: Synthetic oligonucleotide
  Antisense strand to SEQ ID NO: 711016
uuauucagcgagauaauga

SEQ ID NO: 711018 - RNA, 19 nt, Artificial Sequence
  Description of Artificial Sequence: Synthetic oligonucleotide
  Sense strand starting at position 404 of SEQ ID NO: 586347
cccucuugacuugggauga

SEQ ID NO: 711019 - RNA, 19 nt, Artificial Sequence
  Description of Artificial Sequence: Synthetic oligonucleotide
  Antisense strand to SEQ ID NO: 711018
ucaucccaagucaagaggg

SEQ ID NO: 711020 - RNA, 19 nt, Artificial Sequence
  Description of Artificial Sequence: Synthetic oligonucleotide
  Sense strand starting at position 1418 of SEQ ID NO: 586347
ggaaguguuugcuguugaa

SEQ ID NO: 711021 - RNA, 19 nt, Artificial Sequence
  Description of Artificial Sequence: Synthetic oligonucleotide
  Antisense strand to SEQ ID NO: 711020
uucaacagcaaacacuucc

SEQ ID NO: 711022 - RNA, 19 nt, Artificial Sequence
  Description of Artificial Sequence: Synthetic oligonucleotide
  Sense strand starting at position 1421 of SEQ ID NO: 586347
aguguuugcuguugaacac

SEQ ID NO: 711023 - RNA, 19 nt, Artificial Sequence
  Description of Artificial Sequence: Synthetic oligonucleotide
  Antisense strand to SEQ ID NO: 711022
guguucaacagcaaacacu

SEQ ID NO: 711024 - RNA, 19 nt, Artificial Sequence
  Description of Artificial Sequence: Synthetic oligonucleotide
  Sense strand starting at position 2236 of SEQ ID NO: 586347
caugucuccuggccagaga

SEQ ID NO: 711025 - RNA, 19 nt, Artificial Sequence
  Description of Artificial Sequence: Synthetic oligonucleotide
  Antisense strand to SEQ ID NO: 711024
ucucuggccaggagacaug

SEQ ID NO: 711026 - RNA, 19 nt, Artificial Sequence
  Description of Artificial Sequence: Synthetic oligonucleotide
  Sense strand starting at position 2718 of SEQ ID NO: 586347
guccaucugucuccuaaac

SEQ ID NO: 711027 - RNA, 19 nt, Artificial Sequence
  Description of Artificial Sequence: Synthetic oligonucleotide
  Antisense strand to SEQ ID NO: 711026
guuuaggagacagauggac

SEQ ID NO: 711028 - RNA, 19 nt, Artificial Sequence
  Description of Artificial Sequence: Synthetic oligonucleotide
  Sense strand starting at position 3053 of SEQ ID NO: 586347
gagggagugccucauacca

SEQ ID NO: 711029 - RNA, 19 nt, Artificial Sequence
  Description of Artificial Sequence: Synthetic oligonucleotide
  Antisense strand to SEQ ID NO: 711028
ugguaugaggcacucccuc

SEQ ID NO: 711030 - RNA, 19 nt, Artificial Sequence
  Description of Artificial Sequence: Synthetic oligonucleotide
  Sense strand starting at position 3197 of SEQ ID NO: 586347
ggauuaccgugcugugagu

SEQ ID NO: 711031 - RNA, 19 nt, Artificial Sequence
  Description of Artificial Sequence: Synthetic oligonucleotide
  Antisense strand to SEQ ID NO: 711030
acucacagcacgguaaucc

SEQ ID NO: 711032 - RNA, 19 nt, Artificial Sequence
  Description of Artificial Sequence: Synthetic oligonucleotide
  Sense strand starting at position 56 of SEQ ID NO: 586348
cuaggugaaugucuagacu

SEQ ID NO: 711033 - RNA, 19 nt, Artificial Sequence
  Description of Artificial Sequence: Synthetic oligonucleotide
  Antisense strand to SEQ ID NO: 711032
agucuagacauucaccuag

SEQ ID NO: 711034 - RNA, 19 nt, Artificial Sequence
  Description of Artificial Sequence: Synthetic oligonucleotide
  Sense strand starting at position 59 of SEQ ID NO: 586348
ggugaaugucuagacucac

SEQ ID NO: 711035 - RNA, 19 nt, Artificial Sequence
  Description of Artificial Sequence: Synthetic oligonucleotide
  Antisense strand to SEQ ID NO: 711034
gugagucuagacauucacc

SEQ ID NO: 711036 - RNA, 19 nt, Artificial Sequence
  Description of Artificial Sequence: Synthetic oligonucleotide
  Sense strand starting at position 233 of SEQ ID NO: 586348
gggcauugucugcacuaca

SEQ ID NO: 711037 - RNA, 19 nt, Artificial Sequence
  Description of Artificial Sequence: Synthetic oligonucleotide
  Antisense strand to SEQ ID NO: 711036
uguagugcagacaaugccc

SEQ ID NO: 711038 - RNA, 19 nt, Artificial Sequence
  Description of Artificial Sequence: Synthetic oligonucleotide
  Sense strand starting at position 467 of SEQ ID NO: 586348
ggaguucuacccugaggga

SEQ ID NO: 711039 - RNA, 19 nt, Artificial Sequence
  Description of Artificial Sequence: Synthetic oligonucleotide
  Antisense strand to SEQ ID NO: 711038
ucccucaggguagaacucc

SEQ ID NO: 711040 - RNA, 19 nt, Artificial Sequence
  Description of Artificial Sequence: Synthetic oligonucleotide
  Sense strand starting at position 594 of SEQ ID NO: 586348
uaagcagguuuguuugaaa

SEQ ID NO: 711041 - RNA, 19 nt, Artificial Sequence
  Description of Artificial Sequence: Synthetic oligonucleotide
  Antisense strand to SEQ ID NO: 711040
uuucaaacaaaccugcuua

SEQ ID NO: 711042 - RNA, 19 nt, Artificial Sequence
  Description of Artificial Sequence: Synthetic oligonucleotide
  Sense strand starting at position 628 of SEQ ID NO: 586348
gaacguugggaagguauau

SEQ ID NO: 711043 - RNA, 19 nt, Artificial Sequence
  Description of Artificial Sequence: Synthetic oligonucleotide
  Antisense strand to SEQ ID NO: 711042
auauaccuucccaacguuc

SEQ ID NO: 711044 - RNA, 19 nt, Artificial Sequence
  Description of Artificial Sequence: Synthetic oligonucleotide
  Sense strand starting at position 669 of SEQ ID NO: 586348
gucauagaguuauacauuu

SEQ ID NO: 711045 - RNA, 19 nt, Artificial Sequence
  Description of Artificial Sequence: Synthetic oligonucleotide
  Antisense strand to SEQ ID NO: 711044
aaauguauaacucuaugac

SEQ ID NO: 711046 - RNA, 19 nt, Artificial Sequence
  Description of Artificial Sequence: Synthetic oligonucleotide
  Sense strand starting at position 676 of SEQ ID NO: 586348
aguuauacauuugugcauu

SEQ ID NO: 711047 - RNA, 19 nt, Artificial Sequence
  Description of Artificial Sequence: Synthetic oligonucleotide
  Antisense strand to SEQ ID NO: 711046
aaugcacaaauguauaacu

SEQ ID NO: 711048 - RNA, 19 nt, Artificial Sequence
  Description of Artificial Sequence: Synthetic oligonucleotide
  Sense strand starting at position 772 of SEQ ID NO: 586348
agcccucauuugucaccua

SEQ ID NO: 711049 - RNA, 19 nt, Artificial Sequence
  Description of Artificial Sequence: Synthetic oligonucleotide
  Antisense strand to SEQ ID NO: 711048
uaggugacaaaugagggcu

SEQ ID NO: 711050 - RNA, 19 nt, Artificial Sequence
  Description of Artificial Sequence: Synthetic oligonucleotide
  Sense strand starting at position 855 of SEQ ID NO: 586348
ccauaucaauuaguguuaa

SEQ ID NO: 711051 - RNA, 19 nt, Artificial Sequence
  Description of Artificial Sequence: Synthetic oligonucleotide
  Antisense strand to SEQ ID NO: 711050
uuaacacuaauugauaugg

SEQ ID NO: 711052 - RNA, 19 nt, Artificial Sequence
  Description of Artificial Sequence: Synthetic oligonucleotide
  Sense strand starting at position 917 of SEQ ID NO: 586348
ucuaaccuuucugugaaag

SEQ ID NO: 711053 - RNA, 19 nt, Artificial Sequence
  Description of Artificial Sequence: Synthetic oligonucleotide
  Antisense strand to SEQ ID NO: 711052
cuuucacagaaagguuaga

SEQ ID NO: 711054 - RNA, 19 nt, Artificial Sequence
  Description of Artificial Sequence: Synthetic oligonucleotide
  Sense strand starting at position 918 of SEQ ID NO: 586348
cuaaccuuucugugaaaga

SEQ ID NO: 711055 - RNA, 19 nt, Artificial Sequence
  Description of Artificial Sequence: Synthetic oligonucleotide
  Antisense strand to SEQ ID NO: 711054
ucuuucacagaaagguuag

SEQ ID NO: 711056 - RNA, 19 nt, Artificial Sequence
  Description of Artificial Sequence: Synthetic oligonucleotide
  Sense strand starting at position 980 of SEQ ID NO: 586348
ucccaaaucuuaguaagag

SEQ ID NO: 711057 - RNA, 19 nt, Artificial Sequence
  Description of Artificial Sequence: Synthetic oligonucleotide
  Antisense strand to SEQ ID NO: 711056
cucuuacuaagauuuggga

SEQ ID NO: 711058 - RNA, 19 nt, Artificial Sequence
  Description of Artificial Sequence: Synthetic oligonucleotide
  Sense strand starting at position 1009 of SEQ ID NO: 586348
guagaagugaaaugugaca

SEQ ID NO: 711059 - RNA, 19 nt, Artificial Sequence
  Description of Artificial Sequence: Synthetic oligonucleotide
  Antisense strand to SEQ ID NO: 711058
ugucacauuucacuucuac

SEQ ID NO: 711060 - RNA, 19 nt, Artificial Sequence
  Description of Artificial Sequence: Synthetic oligonucleotide
  Sense strand starting at position 1016 of SEQ ID NO: 586348
ugaaaugugacaugugaga

SEQ ID NO: 711061 - RNA, 19 nt, Artificial Sequence
  Description of Artificial Sequence: Synthetic oligonucleotide
  Antisense strand to SEQ ID NO: 711060
ucucacaugucacauuuca

SEQ ID NO: 711062 - RNA, 19 nt, Artificial Sequence
  Description of Artificial Sequence: Synthetic oligonucleotide
  Sense strand starting at position 1055 of SEQ ID NO: 586348
gggagugacucuucucucu

SEQ ID NO: 711063 - RNA, 19 nt, Artificial Sequence
  Description of Artificial Sequence: Synthetic oligonucleotide
  Antisense strand to SEQ ID NO: 711062
agagagaagagucacuccc

SEQ ID NO: 711064 - RNA, 19 nt, Artificial Sequence
  Description of Artificial Sequence: Synthetic oligonucleotide
  Sense strand starting at position 1153 of SEQ ID NO: 586348
uccaaauucuaguuuagua

SEQ ID NO: 711065 - RNA, 19 nt, Artificial Sequence
  Description of Artificial Sequence: Synthetic oligonucleotide
  Antisense strand to SEQ ID NO: 711064
uacuaaacuagaauuugga

SEQ ID NO: 711066 - RNA, 19 nt, Artificial Sequence
  Description of Artificial Sequence: Synthetic oligonucleotide
  Sense strand starting at position 1157 of SEQ ID NO: 586348
aauucuaguuuaguaagga

SEQ ID NO: 711067 - RNA, 19 nt, Artificial Sequence
  Description of Artificial Sequence: Synthetic oligonucleotide
  Antisense strand to SEQ ID NO: 711066
uccuuacuaaacuagaauu

SEQ ID NO: 711068 - RNA, 19 nt, Artificial Sequence
  Description of Artificial Sequence: Synthetic oligonucleotide
  Sense strand starting at position 1194 of SEQ ID NO: 586348
ccaaguuuggaaugagauc

SEQ ID NO: 711069 - RNA, 19 nt, Artificial Sequence
  Description of Artificial Sequence: Synthetic oligonucleotide
  Antisense strand to SEQ ID NO: 711068
gaucucauuccaaacuugg

SEQ ID NO: 711070 - RNA, 19 nt, Artificial Sequence
  Description of Artificial Sequence: Synthetic oligonucleotide
  Sense strand starting at position 1201 of SEQ ID NO: 586348
uggaaugagauccgucacu

SEQ ID NO: 711071 - RNA, 19 nt, Artificial Sequence
  Description of Artificial Sequence: Synthetic oligonucleotide
  Antisense strand to SEQ ID NO: 711070
agugacggaucucauucca

SEQ ID NO: 711072 - RNA, 19 nt, Artificial Sequence
  Description of Artificial Sequence: Synthetic oligonucleotide
  Sense strand starting at position 1206 of SEQ ID NO: 586348
ugagauccgucacuacuuu

SEQ ID NO: 711073 - RNA, 19 nt, Artificial Sequence
  Description of Artificial Sequence: Synthetic oligonucleotide
  Antisense strand to SEQ ID NO: 711072
aaaguagugacggaucuca

SEQ ID NO: 711074 - RNA, 19 nt, Artificial Sequence
  Description of Artificial Sequence: Synthetic oligonucleotide
  Sense strand starting at position 1245 of SEQ ID NO: 586348
uccaaacuauugucaagua

SEQ ID NO: 711075 - RNA, 19 nt, Artificial Sequence
  Description of Artificial Sequence: Synthetic oligonucleotide
  Antisense strand to SEQ ID NO: 711074
uacuugacaauaguuugga

SEQ ID NO: 711076 - RNA, 19 nt, Artificial Sequence
  Description of Artificial Sequence: Synthetic oligonucleotide
  Sense strand starting at position 1339 of SEQ ID NO: 586348
uuuauagagcugcauaaga

SEQ ID NO: 711077 - RNA, 19 nt, Artificial Sequence
  Description of Artificial Sequence: Synthetic oligonucleotide
  Antisense strand to SEQ ID NO: 711076
ucuuaugcagcucuauaaa

SEQ ID NO: 711078 - RNA, 19 nt, Artificial Sequence
  Description of Artificial Sequence: Synthetic oligonucleotide
  Sense strand starting at position 2015 of SEQ ID NO: 586348
gauuguuuauaugcuagag

SEQ ID NO: 711079 - RNA, 19 nt, Artificial Sequence
  Description of Artificial Sequence: Synthetic oligonucleotide
  Antisense strand to SEQ ID NO: 711078
cucuagcauauaaacaauc

SEQ ID NO: 711080 - RNA, 19 nt, Artificial Sequence
  Description of Artificial Sequence: Synthetic oligonucleotide
  Sense strand starting at position 2560 of SEQ ID NO: 586348
gccuguuucccugaacaga

SEQ ID NO: 711081 - RNA, 19 nt, Artificial Sequence
  Description of Artificial Sequence: Synthetic oligonucleotide
  Antisense strand to SEQ ID NO: 711080
ucuguucagggaaacaggc

SEQ ID NO: 711082 - RNA, 19 nt, Artificial Sequence
  Description of Artificial Sequence: Synthetic oligonucleotide
  Sense strand starting at position 2677 of SEQ ID NO: 586348
ggaguugacuuagcugaga

SEQ ID NO: 711083 - RNA, 19 nt, Artificial Sequence
  Description of Artificial Sequence: Synthetic oligonucleotide
  Antisense strand to SEQ ID NO: 711082
ucucagcuaagucaacucc

SEQ ID NO: 711084 - RNA, 19 nt, Artificial Sequence
  Description of Artificial Sequence: Synthetic oligonucleotide
  Sense strand starting at position 2679 of SEQ ID NO: 586348
aguugacuuagcugagauu

SEQ ID NO: 711085 - RNA, 19 nt, Artificial Sequence
  Description of Artificial Sequence: Synthetic oligonucleotide
  Antisense strand to SEQ ID NO: 711084
aaucucagcuaagucaacu

SEQ ID NO: 711086 - RNA, 19 nt, Artificial Sequence
  Description of Artificial Sequence: Synthetic oligonucleotide
  Sense strand starting at position 2726 of SEQ ID NO: 586348
acuuucuggugacuucuua

SEQ ID NO: 711087 - RNA, 19 nt, Artificial Sequence
  Description of Artificial Sequence: Synthetic oligonucleotide
  Antisense strand to SEQ ID NO: 711086
uaagaagucaccagaaagu

SEQ ID NO: 711088 - RNA, 19 nt, Artificial Sequence
  Description of Artificial Sequence: Synthetic oligonucleotide
  Sense strand starting at position 2734 of SEQ ID NO: 586348
gugacuucuuaggucauua

SEQ ID NO: 711089 - RNA, 19 nt, Artificial Sequence
  Description of Artificial Sequence: Synthetic oligonucleotide
  Antisense strand to SEQ ID NO: 711088
uaaugaccuaagaagucac

SEQ ID NO: 711090 - RNA, 19 nt, Artificial Sequence
  Description of Artificial Sequence: Synthetic oligonucleotide
  Sense strand starting at position 2870 of SEQ ID NO: 586348
agcugauggcuugguggaa

SEQ ID NO: 711091 - RNA, 19 nt, Artificial Sequence
  Description of Artificial Sequence: Synthetic oligonucleotide
  Antisense strand to SEQ ID NO: 711090
uuccaccaagccaucagcu

SEQ ID NO: 711092 - RNA, 19 nt, Artificial Sequence
  Description of Artificial Sequence: Synthetic oligonucleotide
  Sense strand starting at position 2874 of SEQ ID NO: 586348
gauggcuugguggaauagu

SEQ ID NO: 711093 - RNA, 19 nt, Artificial Sequence
  Description of Artificial Sequence: Synthetic oligonucleotide
  Antisense strand to SEQ ID NO: 711092
acuauuccaccaagccauc

SEQ ID NO: 711094 - RNA, 19 nt, Artificial Sequence
  Description of Artificial Sequence: Synthetic oligonucleotide
  Sense strand starting at position 2883 of SEQ ID NO: 586348
guggaauaguaucaauuug

SEQ ID NO: 711095 - RNA, 19 nt, Artificial Sequence
  Description of Artificial Sequence: Synthetic oligonucleotide
  Antisense strand to SEQ ID NO: 711094
caaauugauacuauuccac

SEQ ID NO: 711096 - RNA, 19 nt, Artificial Sequence
  Description of Artificial Sequence: Synthetic oligonucleotide
  Sense strand starting at position 2891 of SEQ ID NO: 586348
guaucaauuugugcugcuu

SEQ ID NO: 711097 - RNA, 19 nt, Artificial Sequence
  Description of Artificial Sequence: Synthetic oligonucleotide
  Antisense strand to SEQ ID NO: 711096
aagcagcacaaauugauac

SEQ ID NO: 711098 - RNA, 19 nt, Artificial Sequence
  Description of Artificial Sequence: Synthetic oligonucleotide
  Sense strand starting at position 3028 of SEQ ID NO: 586348
gagaacagcugcccagaua

SEQ ID NO: 711099 - RNA, 19 nt, Artificial Sequence
  Description of Artificial Sequence: Synthetic oligonucleotide
  Antisense strand to SEQ ID NO: 711098
uaucugggcagcuguucuc

SEQ ID NO: 711100 - RNA, 19 nt, Artificial Sequence
  Description of Artificial Sequence: Synthetic oligonucleotide
  Sense strand starting at position 3238 of SEQ ID NO: 586348
agaugaggccuguaauagc

SEQ ID NO: 711101 - RNA, 19 nt, Artificial Sequence
  Description of Artificial Sequence: Synthetic oligonucleotide
  Antisense strand to SEQ ID NO: 711100
gcuauuacaggccucaucu

SEQ ID NO: 711102 - RNA, 19 nt, Artificial Sequence
  Description of Artificial Sequence: Synthetic oligonucleotide
  Sense strand starting at position 3368 of SEQ ID NO: 586348
ucugccuggccugaugaau

SEQ ID NO: 711103 - RNA, 19 nt, Artificial Sequence
  Description of Artificial Sequence: Synthetic oligonucleotide
  Antisense strand to SEQ ID NO: 711102
auucaucaggccaggcaga

SEQ ID NO: 711104 - RNA, 19 nt, Artificial Sequence
  Description of Artificial Sequence: Synthetic oligonucleotide
  Sense strand starting at position 3376 of SEQ ID NO: 586348
gccugaugaauggauugca

SEQ ID NO: 711105 - RNA, 19 nt, Artificial Sequence
  Description of Artificial Sequence: Synthetic oligonucleotide
  Antisense strand to SEQ ID NO: 711104
ugcaauccauucaucaggc

SEQ ID NO: 711106 - RNA, 19 nt, Artificial Sequence
  Description of Artificial Sequence: Synthetic oligonucleotide
  Sense strand starting at position 3379 of SEQ ID NO: 586348
ugaugaauggauugcauga

SEQ ID NO: 711107 - RNA, 19 nt, Artificial Sequence
  Description of Artificial Sequence: Synthetic oligonucleotide
  Antisense strand to SEQ ID NO: 711106
ucaugcaauccauucauca

SEQ ID NO: 711108 - RNA, 19 nt, Artificial Sequence
  Description of Artificial Sequence: Synthetic oligonucleotide
  Sense strand starting at position 3428 of SEQ ID NO: 586348
auagaaauaggcgauguuu

SEQ ID NO: 711109 - RNA, 19 nt, Artificial Sequence
  Description of Artificial Sequence: Synthetic oligonucleotide
  Antisense strand to SEQ ID NO: 711108
aaacaucgccuauuucuau

SEQ ID NO: 711110 - RNA, 19 nt, Artificial Sequence
  Description of Artificial Sequence: Synthetic oligonucleotide
  Sense strand starting at position 3430 of SEQ ID NO: 586348
agaaauaggcgauguuuaa

SEQ ID NO: 711111 - RNA, 19 nt, Artificial Sequence
  Description of Artificial Sequence: Synthetic oligonucleotide
  Antisense strand to SEQ ID NO: 711110
uuaaacaucgccuauuucu

SEQ ID NO: 711112 - RNA, 19 nt, Artificial Sequence
  Description of Artificial Sequence: Synthetic oligonucleotide
  Sense strand starting at position 75 of SEQ ID NO: 586349
uacuaaagcugaguugaug

SEQ ID NO: 711113 - RNA, 19 nt, Artificial Sequence
  Description of Artificial Sequence: Synthetic oligonucleotide
  Antisense strand to SEQ ID NO: 711112
caucaacucagcuuuagua

SEQ ID NO: 711114 - RNA, 19 nt, Artificial Sequence
  Description of Artificial Sequence: Synthetic oligonucleotide
  Sense strand starting at position 126 of SEQ ID NO: 586349
gucgcaaggaaucacauua

SEQ ID NO: 711115 - RNA, 19 nt, Artificial Sequence
  Description of Artificial Sequence: Synthetic oligonucleotide
  Antisense strand to SEQ ID NO: 711114
uaaugugauuccuugcgac

SEQ ID NO: 711116 - RNA, 19 nt, Artificial Sequence
  Description of Artificial Sequence: Synthetic oligonucleotide
  Sense strand starting at position 228 of SEQ ID NO: 586349
gucugcugucaugaaagau

SEQ ID NO: 711117 - RNA, 19 nt, Artificial Sequence
  Description of Artificial Sequence: Synthetic oligonucleotide
  Antisense strand to SEQ ID NO: 711116
aucuuucaugacagcagac

SEQ ID NO: 711118 - RNA, 19 nt, Artificial Sequence
  Description of Artificial Sequence: Synthetic oligonucleotide
  Sense strand starting at position 232 of SEQ ID NO: 586349
gcugucaugaaagauaggu

SEQ ID NO: 711119 - RNA, 19 nt, Artificial Sequence
  Description of Artificial Sequence: Synthetic oligonucleotide
  Antisense strand to SEQ ID NO: 711118
accuaucuuucaugacagc

SEQ ID NO: 711120 - RNA, 19 nt, Artificial Sequence
  Description of Artificial Sequence: Synthetic oligonucleotide
  Sense strand starting at position 236 of SEQ ID NO: 586349
ucaugaaagauaggucugu

SEQ ID NO: 711121 - RNA, 19 nt, Artificial Sequence
  Description of Artificial Sequence: Synthetic oligonucleotide
  Antisense strand to SEQ ID NO: 711120
acagaccuaucuuucauga

SEQ ID NO: 711122 - RNA, 19 nt, Artificial Sequence
  Description of Artificial Sequence: Synthetic oligonucleotide
  Sense strand starting at position 237 of SEQ ID NO: 586349
caugaaagauaggucugua

SEQ ID NO: 711123 - RNA, 19 nt, Artificial Sequence
  Description of Artificial Sequence: Synthetic oligonucleotide
  Antisense strand to SEQ ID NO: 711122
uacagaccuaucuuucaug

SEQ ID NO: 711124 - RNA, 19 nt, Artificial Sequence
  Description of Artificial Sequence: Synthetic oligonucleotide
  Sense strand starting at position 240 of SEQ ID NO: 586349
gaaagauaggucuguauau

SEQ ID NO: 711125 - RNA, 19 nt, Artificial Sequence
  Description of Artificial Sequence: Synthetic oligonucleotide
  Antisense strand to SEQ ID NO: 711124
auauacagaccuaucuuuc

SEQ ID NO: 711126 - RNA, 19 nt, Artificial Sequence
  Description of Artificial Sequence: Synthetic oligonucleotide
  Sense strand starting at position 241 of SEQ ID NO: 586349
aaagauaggucuguauaug

SEQ ID NO: 711127 - RNA, 19 nt, Artificial Sequence
  Description of Artificial Sequence: Synthetic oligonucleotide
  Antisense strand to SEQ ID NO: 711126
cauauacagaccuaucuuu

SEQ ID NO: 711128 - RNA, 19 nt, Artificial Sequence
  Description of Artificial Sequence: Synthetic oligonucleotide
  Sense strand starting at position 328 of SEQ ID NO: 586349
uuagcagacuaguuucuga

SEQ ID NO: 711129 - RNA, 19 nt, Artificial Sequence
  Description of Artificial Sequence: Synthetic oligonucleotide
  Antisense strand to SEQ ID NO: 711128
ucagaaacuagucugcuaa

SEQ ID NO: 711130 - RNA, 19 nt, Artificial Sequence
  Description of Artificial Sequence: Synthetic oligonucleotide
  Sense strand starting at position 411 of SEQ ID NO: 586349
agagguaggcaauggugau

SEQ ID NO: 711131 - RNA, 19 nt, Artificial Sequence
  Description of Artificial Sequence: Synthetic oligonucleotide
  Antisense strand to SEQ ID NO: 711130
aucaccauugccuaccucu

SEQ ID NO: 711132 - RNA, 19 nt, Artificial Sequence
  Description of Artificial Sequence: Synthetic oligonucleotide
  Sense strand starting at position 417 of SEQ ID NO: 586349
aggcaauggugaucugaca

SEQ ID NO: 711133 - RNA, 19 nt, Artificial Sequence
  Description of Artificial Sequence: Synthetic oligonucleotide
  Antisense strand to SEQ ID NO: 711132
ugucagaucaccauugccu

SEQ ID NO: 711134 - RNA, 19 nt, Artificial Sequence
  Description of Artificial Sequence: Synthetic oligonucleotide
  Sense strand starting at position 490 of SEQ ID NO: 586349
guugcaauuucucuggagu

SEQ ID NO: 711135 - RNA, 19 nt, Artificial Sequence
  Description of Artificial Sequence: Synthetic oligonucleotide
  Antisense strand to SEQ ID NO: 711134
acuccagagaaauugcaac

SEQ ID NO: 711136 - RNA, 19 nt, Artificial Sequence
  Description of Artificial Sequence: Synthetic oligonucleotide
  Sense strand starting at position 491 of SEQ ID NO: 586349
uugcaauuucucuggaguc

SEQ ID NO: 711137 - RNA, 19 nt, Artificial Sequence
  Description of Artificial Sequence: Synthetic oligonucleotide
  Antisense strand to SEQ ID NO: 711136
gacuccagagaaauugcaa

SEQ ID NO: 711138 - RNA, 19 nt, Artificial Sequence
  Description of Artificial Sequence: Synthetic oligonucleotide
  Sense strand starting at position 503 of SEQ ID NO: 586349
uggagucugcucuaucaca

SEQ ID NO: 711139 - RNA, 19 nt, Artificial Sequence
  Description of Artificial Sequence: Synthetic oligonucleotide
  Antisense strand to SEQ ID NO: 711138
ugugauagagcagacucca

SEQ ID NO: 711140 - RNA, 19 nt, Artificial Sequence
  Description of Artificial Sequence: Synthetic oligonucleotide
  Sense strand starting at position 642 of SEQ ID NO: 586349
ggguacauguucuuaagac

SEQ ID NO: 711141 - RNA, 19 nt, Artificial Sequence
  Description of Artificial Sequence: Synthetic oligonucleotide
  Antisense strand to SEQ ID NO: 711140
gucuuaagaacauguaccc

SEQ ID NO: 711142 - RNA, 19 nt, Artificial Sequence
  Description of Artificial Sequence: Synthetic oligonucleotide
  Sense strand starting at position 719 of SEQ ID NO: 586349
ucaaguauuguacagaguu

SEQ ID NO: 711143 - RNA, 19 nt, Artificial Sequence
  Description of Artificial Sequence: Synthetic oligonucleotide
  Antisense strand to SEQ ID NO: 711142
aacucuguacaauacuuga

SEQ ID NO: 711144 - RNA, 19 nt, Artificial Sequence
  Description of Artificial Sequence: Synthetic oligonucleotide
  Sense strand starting at position 829 of SEQ ID NO: 586349
ugaaucucuugggugguua

SEQ ID NO: 711145 - RNA, 19 nt, Artificial Sequence
  Description of Artificial Sequence: Synthetic oligonucleotide
  Antisense strand to SEQ ID NO: 711144
uaaccacccaagagauuca

SEQ ID NO: 711146 - RNA, 19 nt, Artificial Sequence
  Description of Artificial Sequence: Synthetic oligonucleotide
  Sense strand starting at position 884 of SEQ ID NO: 586349
gcuggaggcccacaauaua

SEQ ID NO: 711147 - RNA, 19 nt, Artificial Sequence
  Description of Artificial Sequence: Synthetic oligonucleotide
  Antisense strand to SEQ ID NO: 711146
uauauugugggccuccagc

SEQ ID NO: 711148 - RNA, 19 nt, Artificial Sequence
  Description of Artificial Sequence: Synthetic oligonucleotide
  Sense strand starting at position 1051 of SEQ ID NO: 586349
gagauaaagucucucaggu

SEQ ID NO: 711149 - RNA, 19 nt, Artificial Sequence
  Description of Artificial Sequence: Synthetic oligonucleotide
  Antisense strand to SEQ ID NO: 711148
accugagagacuuuaucuc

SEQ ID NO: 711150 - RNA, 19 nt, Artificial Sequence
  Description of Artificial Sequence: Synthetic oligonucleotide
  Sense strand starting at position 1176 of SEQ ID NO: 586349
uuuggaagaucuucccuua

SEQ ID NO: 711151 - RNA, 19 nt, Artificial Sequence
  Description of Artificial Sequence: Synthetic oligonucleotide
  Antisense strand to SEQ ID NO: 711150
uaagggaagaucuuccaaa

SEQ ID NO: 711152 - RNA, 19 nt, Artificial Sequence
  Description of Artificial Sequence: Synthetic oligonucleotide
  Sense strand starting at position 1179 of SEQ ID NO: 586349
ggaagaucuucccuuaguc

SEQ ID NO: 711153 - RNA, 19 nt, Artificial Sequence
  Description of Artificial Sequence: Synthetic oligonucleotide
  Antisense strand to SEQ ID NO: 711152
gacuaagggaagaucuucc

SEQ ID NO: 711154 - RNA, 19 nt, Artificial Sequence
  Description of Artificial Sequence: Synthetic oligonucleotide
  Sense strand starting at position 1184 of SEQ ID NO: 586349
aucuucccuuagucagaua

SEQ ID NO: 711155 - RNA, 19 nt, Artificial Sequence
  Description of Artificial Sequence: Synthetic oligonucleotide
  Antisense strand to SEQ ID NO: 711154
uaucugacuaagggaagau

SEQ ID NO: 711156 - RNA, 19 nt, Artificial Sequence
  Description of Artificial Sequence: Synthetic oligonucleotide
  Sense strand starting at position 2021 of SEQ ID NO: 586349
gcgauauuuaugugcugga

SEQ ID NO: 711157 - RNA, 19 nt, Artificial Sequence
  Description of Artificial Sequence: Synthetic oligonucleotide
  Antisense strand to SEQ ID NO: 711156
uccagcacauaaauaucgc

SEQ ID NO: 711158 - RNA, 19 nt, Artificial Sequence
  Description of Artificial Sequence: Synthetic oligonucleotide
  Sense strand starting at position 2162 of SEQ ID NO: 586349
ggccuccuuugauuuccua

SEQ ID NO: 711159 - RNA, 19 nt, Artificial Sequence
  Description of Artificial Sequence: Synthetic oligonucleotide
  Antisense strand to SEQ ID NO: 711158
uaggaaaucaaaggaggcc

SEQ ID NO: 711160 - RNA, 19 nt, Artificial Sequence
  Description of Artificial Sequence: Synthetic oligonucleotide
  Sense strand starting at position 2184 of SEQ ID NO: 586349
ugugaacaaucaguaaaca

SEQ ID NO: 711161 - RNA, 19 nt, Artificial Sequence
  Description of Artificial Sequence: Synthetic oligonucleotide
  Antisense strand to SEQ ID NO: 711160
uguuuacugauuguucaca

SEQ ID NO: 711162 - RNA, 19 nt, Artificial Sequence
  Description of Artificial Sequence: Synthetic oligonucleotide
  Sense strand starting at position 2232 of SEQ ID NO: 586349
gguuauagauucucaggaa

SEQ ID NO: 711163 - RNA, 19 nt, Artificial Sequence
  Description of Artificial Sequence: Synthetic oligonucleotide
  Antisense strand to SEQ ID NO: 711162
uuccugagaaucuauaacc

SEQ ID NO: 711164 - RNA, 19 nt, Artificial Sequence
  Description of Artificial Sequence: Synthetic oligonucleotide
  Sense strand starting at position 2414 of SEQ ID NO: 586349
ccugaauaagcacauaguu

SEQ ID NO: 711165 - RNA, 19 nt, Artificial Sequence
  Description of Artificial Sequence: Synthetic oligonucleotide
  Antisense strand to SEQ ID NO: 711164
aacuaugugcuuauucagg

SEQ ID NO: 711166 - RNA, 19 nt, Artificial Sequence
  Description of Artificial Sequence: Synthetic oligonucleotide
  Sense strand starting at position 2694 of SEQ ID NO: 586349
aaaucuguaccugggaauu

SEQ ID NO: 711167 - RNA, 19 nt, Artificial Sequence
  Description of Artificial Sequence: Synthetic oligonucleotide
  Antisense strand to SEQ ID NO: 711166
aauucccagguacagauuu

SEQ ID NO: 711168 - RNA, 19 nt, Artificial Sequence
  Description of Artificial Sequence: Synthetic oligonucleotide
  Sense strand starting at position 2774 of SEQ ID NO: 586349
uuaagagacaugugacuug

SEQ ID NO: 711169 - RNA, 19 nt, Artificial Sequence
  Description of Artificial Sequence: Synthetic oligonucleotide
  Antisense strand to SEQ ID NO: 711168
caagucacaugucucuuaa

SEQ ID NO: 711170 - RNA, 19 nt, Artificial Sequence
  Description of Artificial Sequence: Synthetic oligonucleotide
  Sense strand starting at position 2796 of SEQ ID NO: 586349
cuuaaaggcugucuaauca

SEQ ID NO: 711171 - RNA, 19 nt, Artificial Sequence
  Description of Artificial Sequence: Synthetic oligonucleotide
  Antisense strand to SEQ ID NO: 711170
ugauuagacagccuuuaag

SEQ ID NO: 711172 - RNA, 19 nt, Artificial Sequence
  Description of Artificial Sequence: Synthetic oligonucleotide
  Sense strand starting at position 2939 of SEQ ID NO: 586349
cccucuguccuccacagau

SEQ ID NO: 711173 - RNA, 19 nt, Artificial Sequence
  Description of Artificial Sequence: Synthetic oligonucleotide
  Antisense strand to SEQ ID NO: 711172
aucuguggaggacagaggg

SEQ ID NO: 711174 - RNA, 19 nt, Artificial Sequence
  Description of Artificial Sequence: Synthetic oligonucleotide
  Sense strand starting at position 3150 of SEQ ID NO: 586349
ggaugaggucuugaggucu

SEQ ID NO: 711175 - RNA, 19 nt, Artificial Sequence
  Description of Artificial Sequence: Synthetic oligonucleotide
  Antisense strand to SEQ ID NO: 711174
agaccucaagaccucaucc

SEQ ID NO: 711176 - RNA, 19 nt, Artificial Sequence
  Description of Artificial Sequence: Synthetic oligonucleotide
  Sense strand starting at position 3368 of SEQ ID NO: 586349
aggugagggcuaugcauaa

SEQ ID NO: 711177 - RNA, 19 nt, Artificial Sequence
  Description of Artificial Sequence: Synthetic oligonucleotide
  Antisense strand to SEQ ID NO: 711176
uuaugcauagcccucaccu

SEQ ID NO: 711178 - RNA, 19 nt, Artificial Sequence
  Description of Artificial Sequence: Synthetic oligonucleotide
  Sense strand starting at position 3372 of SEQ ID NO: 586349
gagggcuaugcauaaccua

SEQ ID NO: 711179 - RNA, 19 nt, Artificial Sequence
  Description of Artificial Sequence: Synthetic oligonucleotide
  Antisense strand to SEQ ID NO: 711178
uagguuaugcauagcccuc

SEQ ID NO: 711180 - RNA, 19 nt, Artificial Sequence
  Description of Artificial Sequence: Synthetic oligonucleotide
  Sense strand starting at position 3379 of SEQ ID NO: 586349
augcauaaccuagguccua

SEQ ID NO: 711181 - RNA, 19 nt, Artificial Sequence
  Description of Artificial Sequence: Synthetic oligonucleotide
  Antisense strand to SEQ ID NO: 711180
uaggaccuagguuaugcau

SEQ ID NO: 711182 - RNA, 19 nt, Artificial Sequence
  Description of Artificial Sequence: Synthetic oligonucleotide
  Sense strand starting at position 3497 of SEQ ID NO: 586349
aagguaaaggcucgacaga

SEQ ID NO: 711183 - RNA, 19 nt, Artificial Sequence
  Description of Artificial Sequence: Synthetic oligonucleotide
  Antisense strand to SEQ ID NO: 711182
ucugucgagccuuuaccuu

SEQ ID NO: 711184 - RNA, 19 nt, Artificial Sequence
  Description of Artificial Sequence: Synthetic oligonucleotide
  Sense strand starting at position 3549 of SEQ ID NO: 586349
cgaagcaugcaaugaggau

SEQ ID NO: 711185 - RNA, 19 nt, Artificial Sequence
  Description of Artificial Sequence: Synthetic oligonucleotide
  Antisense strand to SEQ ID NO: 711184
auccucauugcaugcuucg

SEQ ID NO: 711186 - RNA, 19 nt, Artificial Sequence
  Description of Artificial Sequence: Synthetic oligonucleotide
  Sense strand starting at position 3681 of SEQ ID NO: 586349
agaguuaacccaugucuca

SEQ ID NO: 711187 - RNA, 19 nt, Artificial Sequence
  Description of Artificial Sequence: Synthetic oligonucleotide
  Antisense strand to SEQ ID NO: 711186
ugagacauggguuaacucu

SEQ ID NO: 711188 - RNA, 19 nt, Artificial Sequence
  Description of Artificial Sequence: Synthetic oligonucleotide
  Sense strand starting at position 3730 of SEQ ID NO: 586349
uggagagucccauaucuuc

SEQ ID NO: 711189 - RNA, 19 nt, Artificial Sequence
  Description of Artificial Sequence: Synthetic oligonucleotide
  Antisense strand to SEQ ID NO: 711188
gaagauaugggacucucca

SEQ ID NO: 711190 - RNA, 19 nt, Artificial Sequence
  Description of Artificial Sequence: Synthetic oligonucleotide
  Sense strand starting at position 3798 of SEQ ID NO: 586349
ugucuuugucuggaacauu

SEQ ID NO: 711191 - RNA, 19 nt, Artificial Sequence
  Description of Artificial Sequence: Synthetic oligonucleotide
  Antisense strand to SEQ ID NO: 711190
aauguuccagacaaagaca

SEQ ID NO: 711192 - RNA, 19 nt, Artificial Sequence
  Description of Artificial Sequence: Synthetic oligonucleotide
  Sense strand starting at position 495 of SEQ ID NO: 586350
agguauacauuugugcauu

SEQ ID NO: 711193 - RNA, 19 nt, Artificial Sequence
  Description of Artificial Sequence: Synthetic oligonucleotide
  Antisense strand to SEQ ID NO: 711192
aaugcacaaauguauaccu

SEQ ID NO: 711194 - RNA, 19 nt, Artificial Sequence
  Description of Artificial Sequence: Synthetic oligonucleotide
  Sense strand starting at position 931 of SEQ ID NO: 586350
ccuccuguacuguaacaua

SEQ ID NO: 711195 - RNA, 19 nt, Artificial Sequence
  Description of Artificial Sequence: Synthetic oligonucleotide
  Antisense strand to SEQ ID NO: 711194
uauguuacaguacaggagg

SEQ ID NO: 711196 - RNA, 19 nt, Artificial Sequence
  Description of Artificial Sequence: Synthetic oligonucleotide
  Sense strand starting at position 1011 of SEQ ID NO: 586350
guagauucccauuagguga

SEQ ID NO: 711197 - RNA, 19 nt, Artificial Sequence
  Description of Artificial Sequence: Synthetic oligonucleotide
  Antisense strand to SEQ ID NO: 711196
ucaccuaaugggaaucuac

SEQ ID NO: 711198 - RNA, 19 nt, Artificial Sequence
  Description of Artificial Sequence: Synthetic oligonucleotide
  Sense strand starting at position 1100 of SEQ ID NO: 586350
cucgaaacuuccuccaggu

SEQ ID NO: 711199 - RNA, 19 nt, Artificial Sequence
  Description of Artificial Sequence: Synthetic oligonucleotide
  Antisense strand to SEQ ID NO: 711198
accuggaggaaguuucgag

SEQ ID NO: 711200 - RNA, 19 nt, Artificial Sequence
  Description of Artificial Sequence: Synthetic oligonucleotide
  Sense strand starting at position 1118 of SEQ ID NO: 586350
ucuccuuugcucuagaggu

SEQ ID NO: 711201 - RNA, 19 nt, Artificial Sequence
  Description of Artificial Sequence: Synthetic oligonucleotide
  Antisense strand to SEQ ID NO: 711200
accucuagagcaaaggaga

SEQ ID NO: 711202 - RNA, 19 nt, Artificial Sequence
  Description of Artificial Sequence: Synthetic oligonucleotide
  Sense strand starting at position 1120 of SEQ ID NO: 586350
uccuuugcucuagagguua

SEQ ID NO: 711203 - RNA, 19 nt, Artificial Sequence
  Description of Artificial Sequence: Synthetic oligonucleotide
  Antisense strand to SEQ ID NO: 711202
uaaccucuagagcaaagga

SEQ ID NO: 711204 - RNA, 19 nt, Artificial Sequence
  Description of Artificial Sequence: Synthetic oligonucleotide
  Sense strand starting at position 1125 of SEQ ID NO: 586350
ugcucuagagguuaaucau

SEQ ID NO: 711205 - RNA, 19 nt, Artificial Sequence
  Description of Artificial Sequence: Synthetic oligonucleotide
  Antisense strand to SEQ ID NO: 711204
augauuaaccucuagagca

SEQ ID NO: 711206 - RNA, 19 nt, Artificial Sequence
  Description of Artificial Sequence: Synthetic oligonucleotide
  Sense strand starting at position 1131 of SEQ ID NO: 586350
agagguuaaucauugcaag

SEQ ID NO: 711207 - RNA, 19 nt, Artificial Sequence
  Description of Artificial Sequence: Synthetic oligonucleotide
  Antisense strand to SEQ ID NO: 711206
cuugcaaugauuaaccucu

SEQ ID NO: 711208 - RNA, 19 nt, Artificial Sequence
  Description of Artificial Sequence: Synthetic oligonucleotide
  Sense strand starting at position 1132 of SEQ ID NO: 586350
gagguuaaucauugcaaga

SEQ ID NO: 711209 - RNA, 19 nt, Artificial Sequence
  Description of Artificial Sequence: Synthetic oligonucleotide
  Antisense strand to SEQ ID NO: 711208
ucuugcaaugauuaaccuc

SEQ ID NO: 711210 - RNA, 19 nt, Artificial Sequence
  Description of Artificial Sequence: Synthetic oligonucleotide
  Sense strand starting at position 1244 of SEQ ID NO: 586350
gacagcuucccaugaaguc

SEQ ID NO: 711211 - RNA, 19 nt, Artificial Sequence
  Description of Artificial Sequence: Synthetic oligonucleotide
  Antisense strand to SEQ ID NO: 711210
gacuucaugggaagcuguc

SEQ ID NO: 711212 - RNA, 19 nt, Artificial Sequence
  Description of Artificial Sequence: Synthetic oligonucleotide
  Sense strand starting at position 1288 of SEQ ID NO: 586350
aaugauauccuggguugga

SEQ ID NO: 711213 - RNA, 19 nt, Artificial Sequence
  Description of Artificial Sequence: Synthetic oligonucleotide
  Antisense strand to SEQ ID NO: 711212
uccaacccaggauaucauu

SEQ ID NO: 711214 - RNA, 19 nt, Artificial Sequence
  Description of Artificial Sequence: Synthetic oligonucleotide
  Sense strand starting at position 1289 of SEQ ID NO: 586350
augauauccuggguuggaa

SEQ ID NO: 711215 - RNA, 19 nt, Artificial Sequence
  Description of Artificial Sequence: Synthetic oligonucleotide
  Antisense strand to SEQ ID NO: 711214
uuccaacccaggauaucau

SEQ ID NO: 711216 - RNA, 19 nt, Artificial Sequence
  Description of Artificial Sequence: Synthetic oligonucleotide
  Sense strand starting at position 1456 of SEQ ID NO: 586350
ggaucacacuguccaucau

SEQ ID NO: 711217 - RNA, 19 nt, Artificial Sequence
  Description of Artificial Sequence: Synthetic oligonucleotide
  Antisense strand to SEQ ID NO: 711216
augauggacagugugaucc

SEQ ID NO: 711218 - RNA, 19 nt, Artificial Sequence
  Description of Artificial Sequence: Synthetic oligonucleotide
  Sense strand starting at position 1515 of SEQ ID NO: 586350
auuagucuucgucagaucu

SEQ ID NO: 711219 - RNA, 19 nt, Artificial Sequence
  Description of Artificial Sequence: Synthetic oligonucleotide
  Antisense strand to SEQ ID NO: 711218
agaucugacgaagacuaau

SEQ ID NO: 711220 - RNA, 19 nt, Artificial Sequence
  Description of Artificial Sequence: Synthetic oligonucleotide
  Sense strand starting at position 1597 of SEQ ID NO: 586350
gaagguggaugggagaaau

SEQ ID NO: 711221 - RNA, 19 nt, Artificial Sequence
  Description of Artificial Sequence: Synthetic oligonucleotide
  Antisense strand to SEQ ID NO: 711220
auuucucccauccaccuuc

SEQ ID NO: 711222 - RNA, 19 nt, Artificial Sequence
  Description of Artificial Sequence: Synthetic oligonucleotide
  Sense strand starting at position 1664 of SEQ ID NO: 586350
gcguuuguagcguccaaca

SEQ ID NO: 711223 - RNA, 19 nt, Artificial Sequence
  Description of Artificial Sequence: Synthetic oligonucleotide
  Antisense strand to SEQ ID NO: 711222
uguuggacgcuacaaacgc

SEQ ID NO: 711224 - RNA, 19 nt, Artificial Sequence
  Description of Artificial Sequence: Synthetic oligonucleotide
  Sense strand starting at position 1978 of SEQ ID NO: 586350
agccaagcugcugaaagau

SEQ ID NO: 711225 - RNA, 19 nt, Artificial Sequence
  Description of Artificial Sequence: Synthetic oligonucleotide
  Antisense strand to SEQ ID NO: 711224
aucuuucagcagcuuggcu

SEQ ID NO: 711226 - RNA, 19 nt, Artificial Sequence
  Description of Artificial Sequence: Synthetic oligonucleotide
  Sense strand starting at position 2166 of SEQ ID NO: 586350
gagccauuggcaugaaauc

SEQ ID NO: 711227 - RNA, 19 nt, Artificial Sequence
  Description of Artificial Sequence: Synthetic oligonucleotide
  Antisense strand to SEQ ID NO: 711226
gauuucaugccaauggcuc

SEQ ID NO: 711228 - RNA, 19 nt, Artificial Sequence
  Description of Artificial Sequence: Synthetic oligonucleotide
  Sense strand starting at position 2167 of SEQ ID NO: 586350
agccauuggcaugaaaucu

SEQ ID NO: 711229 - RNA, 19 nt, Artificial Sequence
  Description of Artificial Sequence: Synthetic oligonucleotide
  Antisense strand to SEQ ID NO: 711228
agauuucaugccaauggcu

SEQ ID NO: 711230 - RNA, 19 nt, Artificial Sequence
  Description of Artificial Sequence: Synthetic oligonucleotide
  Sense strand starting at position 2304 of SEQ ID NO: 586350
accugugcccucuagauga

SEQ ID NO: 711231 - RNA, 19 nt, Artificial Sequence
  Description of Artificial Sequence: Synthetic oligonucleotide
  Antisense strand to SEQ ID NO: 711230
ucaucuagagggcacaggu

SEQ ID NO: 711232 - RNA, 19 nt, Artificial Sequence
  Description of Artificial Sequence: Synthetic oligonucleotide
  Sense strand starting at position 2469 of SEQ ID NO: 586350
ccaccauuguaaguuucua

SEQ ID NO: 711233 - RNA, 19 nt, Artificial Sequence
  Description of Artificial Sequence: Synthetic oligonucleotide
  Antisense strand to SEQ ID NO: 711232
uagaaacuuacaauggugg

SEQ ID NO: 711234 - RNA, 19 nt, Artificial Sequence
  Description of Artificial Sequence: Synthetic oligonucleotide
  Sense strand starting at position 2584 of SEQ ID NO: 586350
guggguaaccaggaauguu

SEQ ID NO: 711235 - RNA, 19 nt, Artificial Sequence
  Description of Artificial Sequence: Synthetic oligonucleotide
  Antisense strand to SEQ ID NO: 711234
aacauuccugguuacccac

SEQ ID NO: 711236 - RNA, 19 nt, Artificial Sequence
  Description of Artificial Sequence: Synthetic oligonucleotide
  Sense strand starting at position 2592 of SEQ ID NO: 586350
ccaggaauguugguggagu

SEQ ID NO: 711237 - RNA, 19 nt, Artificial Sequence
  Description of Artificial Sequence: Synthetic oligonucleotide
  Antisense strand to SEQ ID NO: 711236
acuccaccaacauuccugg

SEQ ID NO: 711238 - RNA, 19 nt, Artificial Sequence
  Description of Artificial Sequence: Synthetic oligonucleotide
  Sense strand starting at position 2595 of SEQ ID NO: 586350
ggaauguugguggaguugu

SEQ ID NO: 711239 - RNA, 19 nt, Artificial Sequence
  Description of Artificial Sequence: Synthetic oligonucleotide
  Antisense strand to SEQ ID NO: 711238
acaacuccaccaacauucc

SEQ ID NO: 711240 - RNA, 19 nt, Artificial Sequence
  Description of Artificial Sequence: Synthetic oligonucleotide
  Sense strand starting at position 2669 of SEQ ID NO: 586350
gacuaaugguugcuuggga

SEQ ID NO: 711241 - RNA, 19 nt, Artificial Sequence
  Description of Artificial Sequence: Synthetic oligonucleotide
  Antisense strand to SEQ ID NO: 711240
ucccaagcaaccauuaguc

SEQ ID NO: 711242 - RNA, 19 nt, Artificial Sequence
  Description of Artificial Sequence: Synthetic oligonucleotide
  Sense strand starting at position 2815 of SEQ ID NO: 586350
gagaguuguacugaaucug

SEQ ID NO: 711243 - RNA, 19 nt, Artificial Sequence
  Description of Artificial Sequence: Synthetic oligonucleotide
  Antisense strand to SEQ ID NO: 711242
cagauucaguacaacucuc

SEQ ID NO: 711244 - RNA, 19 nt, Artificial Sequence
  Description of Artificial Sequence: Synthetic oligonucleotide
  Sense strand starting at position 2838 of SEQ ID NO: 586350
ggaagauacuguguaucag

SEQ ID NO: 711245 - RNA, 19 nt, Artificial Sequence
  Description of Artificial Sequence: Synthetic oligonucleotide
  Antisense strand to SEQ ID NO: 711244
cugauacacaguaucuucc

SEQ ID NO: 711246 - RNA, 19 nt, Artificial Sequence
  Description of Artificial Sequence: Synthetic oligonucleotide
  Sense strand starting at position 2938 of SEQ ID NO: 586350
ccaguacuuggguacaaca

SEQ ID NO: 711247 - RNA, 19 nt, Artificial Sequence
  Description of Artificial Sequence: Synthetic oligonucleotide
  Antisense strand to SEQ ID NO: 711246
uguuguacccaaguacugg

SEQ ID NO: 711248 - RNA, 19 nt, Artificial Sequence
  Description of Artificial Sequence: Synthetic oligonucleotide
  Sense strand starting at position 2969 of SEQ ID NO: 586350
cagacauuagcucaguugu

SEQ ID NO: 711249 - RNA, 19 nt, Artificial Sequence
  Description of Artificial Sequence: Synthetic oligonucleotide
  Antisense strand to SEQ ID NO: 711248
acaacugagcuaaugucug

SEQ ID NO: 711250 - RNA, 19 nt, Artificial Sequence
  Description of Artificial Sequence: Synthetic oligonucleotide
  Sense strand starting at position 3015 of SEQ ID NO: 586350
gagaacuugcaauaucugu

SEQ ID NO: 711251 - RNA, 19 nt, Artificial Sequence
  Description of Artificial Sequence: Synthetic oligonucleotide
  Antisense strand to SEQ ID NO: 711250
acagauauugcaaguucuc

SEQ ID NO: 711252 - RNA, 19 nt, Artificial Sequence
  Description of Artificial Sequence: Synthetic oligonucleotide
  Sense strand starting at position 3138 of SEQ ID NO: 586350
cauuguguauaauuggagu

SEQ ID NO: 711253 - RNA, 19 nt, Artificial Sequence
  Description of Artificial Sequence: Synthetic oligonucleotide
  Antisense strand to SEQ ID NO: 711252
acuccaauuauacacaaug

SEQ ID NO: 711254 - RNA, 19 nt, Artificial Sequence
  Description of Artificial Sequence: Synthetic oligonucleotide
  Sense strand starting at position 3144 of SEQ ID NO: 586350
guauaauuggaguacuuuc

SEQ ID NO: 711255 - RNA, 19 nt, Artificial Sequence
  Description of Artificial Sequence: Synthetic oligonucleotide
  Antisense strand to SEQ ID NO: 711254
gaaaguacuccaauuauac

SEQ ID NO: 711256 - RNA, 19 nt, Artificial Sequence
  Description of Artificial Sequence: Synthetic oligonucleotide
  Sense strand starting at position 3152 of SEQ ID NO: 586350
ggaguacuuucuuuaucca

SEQ ID NO: 711257 - RNA, 19 nt, Artificial Sequence
  Description of Artificial Sequence: Synthetic oligonucleotide
  Antisense strand to SEQ ID NO: 711256
uggauaaagaaaguacucc

SEQ ID NO: 711258 - RNA, 19 nt, Artificial Sequence
  Description of Artificial Sequence: Synthetic oligonucleotide
  Sense strand starting at position 3226 of SEQ ID NO: 586350
ggcuauugugaauauugga

SEQ ID NO: 711259 - RNA, 19 nt, Artificial Sequence
  Description of Artificial Sequence: Synthetic oligonucleotide
  Antisense strand to SEQ ID NO: 711258
uccaauauucacaauagcc

SEQ ID NO: 711260 - RNA, 19 nt, Artificial Sequence
  Description of Artificial Sequence: Synthetic oligonucleotide
  Sense strand starting at position 3234 of SEQ ID NO: 586350
ugaauauuggagugauguu

SEQ ID NO: 711261 - RNA, 19 nt, Artificial Sequence
  Description of Artificial Sequence: Synthetic oligonucleotide
  Antisense strand to SEQ ID NO: 711260
aacaucacuccaauauuca

SEQ ID NO: 711262 - RNA, 19 nt, Artificial Sequence
  Description of Artificial Sequence: Synthetic oligonucleotide
  Sense strand starting at position 3272 of SEQ ID NO: 586350
uccuuucuuccagguauau

SEQ ID NO: 711263 - RNA, 19 nt, Artificial Sequence
  Description of Artificial Sequence: Synthetic oligonucleotide
  Antisense strand to SEQ ID NO: 711262
auauaccuggaagaaagga

SEQ ID NO: 711264 - RNA, 19 nt, Artificial Sequence
  Description of Artificial Sequence: Synthetic oligonucleotide
  Sense strand starting at position 3649 of SEQ ID NO: 586350
guuguuugagcgcuucaug

SEQ ID NO: 711265 - RNA, 19 nt, Artificial Sequence
  Description of Artificial Sequence: Synthetic oligonucleotide
  Antisense strand to SEQ ID NO: 711264
caugaagcgcucaaacaac

SEQ ID NO: 711266 - RNA, 19 nt, Artificial Sequence
  Description of Artificial Sequence: Synthetic oligonucleotide
  Sense strand starting at position 3650 of SEQ ID NO: 586350
uuguuugagcgcuucaugu

SEQ ID NO: 711267 - RNA, 19 nt, Artificial Sequence
  Description of Artificial Sequence: Synthetic oligonucleotide
  Antisense strand to SEQ ID NO: 711266
acaugaagcgcucaaacaa

SEQ ID NO: 711268 - RNA, 19 nt, Artificial Sequence
  Description of Artificial Sequence: Synthetic oligonucleotide
  Sense strand starting at position 3665 of SEQ ID NO: 586350
auguauucuggcuauuaau

SEQ ID NO: 711269 - RNA, 19 nt, Artificial Sequence
  Description of Artificial Sequence: Synthetic oligonucleotide
  Antisense strand to SEQ ID NO: 711268
auuaauagccagaauacau

SEQ ID NO: 711270 - RNA, 19 nt, Artificial Sequence
  Description of Artificial Sequence: Synthetic oligonucleotide
  Sense strand starting at position 3689 of SEQ ID NO: 586350
gucagagugugacuuugaa

SEQ ID NO: 711271 - RNA, 19 nt, Artificial Sequence
  Description of Artificial Sequence: Synthetic oligonucleotide
  Antisense strand to SEQ ID NO: 711270
uucaaagucacacucugac

SEQ ID NO: 711272 - RNA, 19 nt, Artificial Sequence
  Description of Artificial Sequence: Synthetic oligonucleotide
  Sense strand starting at position 108 of SEQ ID NO: 586351
cuaggugagugucuagauu

SEQ ID NO: 711273 - RNA, 19 nt, Artificial Sequence
  Description of Artificial Sequence: Synthetic oligonucleotide
  Antisense strand to SEQ ID NO: 711272
aaucuagacacucaccuag

SEQ ID NO: 711274 - RNA, 19 nt, Artificial Sequence
  Description of Artificial Sequence: Synthetic oligonucleotide
  Sense strand starting at position 285 of SEQ ID NO: 586351
gggcauggucuacacuaua

SEQ ID NO: 711275 - RNA, 19 nt, Artificial Sequence
  Description of Artificial Sequence: Synthetic oligonucleotide
  Antisense strand to SEQ ID NO: 711274
uauaguguagaccaugccc

SEQ ID NO: 711276 - RNA, 19 nt, Artificial Sequence
  Description of Artificial Sequence: Synthetic oligonucleotide
  Sense strand starting at position 450 of SEQ ID NO: 586351
augagaugccaacauguuu

SEQ ID NO: 711277 - RNA, 19 nt, Artificial Sequence
  Description of Artificial Sequence: Synthetic oligonucleotide
  Antisense strand to SEQ ID NO: 711276
aaacauguuggcaucucau

SEQ ID NO: 711278 - RNA, 19 nt, Artificial Sequence
  Description of Artificial Sequence: Synthetic oligonucleotide
  Sense strand starting at position 642 of SEQ ID NO: 586351
cugcuaagcagguguauuu

SEQ ID NO: 711279 - RNA, 19 nt, Artificial Sequence
  Description of Artificial Sequence: Synthetic oligonucleotide
  Antisense strand to SEQ ID NO: 711278
aaauacaccugcuuagcag

SEQ ID NO: 711280 - RNA, 19 nt, Artificial Sequence
  Description of Artificial Sequence: Synthetic oligonucleotide
  Sense strand starting at position 716 of SEQ ID NO: 586351
agucuuguccuagagauau

SEQ ID NO: 711281 - RNA, 19 nt, Artificial Sequence
  Description of Artificial Sequence: Synthetic oligonucleotide
  Antisense strand to SEQ ID NO: 711280
auaucucuaggacaagacu

SEQ ID NO: 711282 - RNA, 19 nt, Artificial Sequence
  Description of Artificial Sequence: Synthetic oligonucleotide
  Sense strand starting at position 758 of SEQ ID NO: 586351
uccugacauuauucuggaa

SEQ ID NO: 711283 - RNA, 19 nt, Artificial Sequence
  Description of Artificial Sequence: Synthetic oligonucleotide
  Antisense strand to SEQ ID NO: 711282
uuccagaauaaugucagga

SEQ ID NO: 711284 - RNA, 19 nt, Artificial Sequence
  Description of Artificial Sequence: Synthetic oligonucleotide
  Sense strand starting at position 777 of SEQ ID NO: 586351
aggugagguuaucuuauac

SEQ ID NO: 711285 - RNA, 19 nt, Artificial Sequence
  Description of Artificial Sequence: Synthetic oligonucleotide
  Antisense strand to SEQ ID NO: 711284
guauaagauaaccucaccu

SEQ ID NO: 711286 - RNA, 19 nt, Artificial Sequence
  Description of Artificial Sequence: Synthetic oligonucleotide
  Sense strand starting at position 937 of SEQ ID NO: 586351
gauggaaacuauguuacca

SEQ ID NO: 711287 - RNA, 19 nt, Artificial Sequence
  Description of Artificial Sequence: Synthetic oligonucleotide
  Antisense strand to SEQ ID NO: 711286
ugguaacauaguuuccauc

SEQ ID NO: 711288 - RNA, 19 nt, Artificial Sequence
  Description of Artificial Sequence: Synthetic oligonucleotide
  Sense strand starting at position 1014 of SEQ ID NO: 586351
guuuccaugugaccaugau

SEQ ID NO: 711289 - RNA, 19 nt, Artificial Sequence
  Description of Artificial Sequence: Synthetic oligonucleotide
  Antisense strand to SEQ ID NO: 711288
aucauggucacauggaaac

SEQ ID NO: 711290 - RNA, 19 nt, Artificial Sequence
  Description of Artificial Sequence: Synthetic oligonucleotide
  Sense strand starting at position 1015 of SEQ ID NO: 586351
uuuccaugugaccaugauu

SEQ ID NO: 711291 - RNA, 19 nt, Artificial Sequence
  Description of Artificial Sequence: Synthetic oligonucleotide
  Antisense strand to SEQ ID NO: 711290
aaucauggucacauggaaa

SEQ ID NO: 711292 - RNA, 19 nt, Artificial Sequence
  Description of Artificial Sequence: Synthetic oligonucleotide
  Sense strand starting at position 1018 of SEQ ID NO: 586351
ccaugugaccaugauuccu

SEQ ID NO: 711293 - RNA, 19 nt, Artificial Sequence
  Description of Artificial Sequence: Synthetic oligonucleotide
  Antisense strand to SEQ ID NO: 711292
aggaaucauggucacaugg

SEQ ID NO: 711294 - RNA, 19 nt, Artificial Sequence
  Description of Artificial Sequence: Synthetic oligonucleotide
  Sense strand starting at position 1020 of SEQ ID NO: 586351
augugaccaugauuccuua

SEQ ID NO: 711295 - RNA, 19 nt, Artificial Sequence
  Description of Artificial Sequence: Synthetic oligonucleotide
  Antisense strand to SEQ ID NO: 711294
uaaggaaucauggucacau

SEQ ID NO: 711296 - RNA, 19 nt, Artificial Sequence
  Description of Artificial Sequence: Synthetic oligonucleotide
  Sense strand starting at position 1049 of SEQ ID NO: 586351
cugugaaauugaguuagaa

SEQ ID NO: 711297 - RNA, 19 nt, Artificial Sequence
  Description of Artificial Sequence: Synthetic oligonucleotide
  Antisense strand to SEQ ID NO: 711296
uucuaacucaauuucacag

SEQ ID NO: 711298 - RNA, 19 nt, Artificial Sequence
  Description of Artificial Sequence: Synthetic oligonucleotide
  Sense strand starting at position 1051 of SEQ ID NO: 586351
gugaaauugaguuagaagu

SEQ ID NO: 711299 - RNA, 19 nt, Artificial Sequence
  Description of Artificial Sequence: Synthetic oligonucleotide
  Antisense strand to SEQ ID NO: 711298
acuucuaacucaauuucac

SEQ ID NO: 711300 - RNA, 19 nt, Artificial Sequence
  Description of Artificial Sequence: Synthetic oligonucleotide
  Sense strand starting at position 1206 of SEQ ID NO: 586351
uccaaauucugguuuggua

SEQ ID NO: 711301 - RNA, 19 nt, Artificial Sequence
  Description of Artificial Sequence: Synthetic oligonucleotide
  Antisense strand to SEQ ID NO: 711300
uaccaaaccagaauuugga

SEQ ID NO: 711302 - RNA, 19 nt, Artificial Sequence
  Description of Artificial Sequence: Synthetic oligonucleotide
  Sense strand starting at position 1208 of SEQ ID NO: 586351
caaauucugguuugguaag

SEQ ID NO: 711303 - RNA, 19 nt, Artificial Sequence
  Description of Artificial Sequence: Synthetic oligonucleotide
  Antisense strand to SEQ ID NO: 711302
cuuaccaaaccagaauuug

SEQ ID NO: 711304 - RNA, 19 nt, Artificial Sequence
  Description of Artificial Sequence: Synthetic oligonucleotide
  Sense strand starting at position 1219 of SEQ ID NO: 586351
uugguaagcuggguacaaa

SEQ ID NO: 711305 - RNA, 19 nt, Artificial Sequence
  Description of Artificial Sequence: Synthetic oligonucleotide
  Antisense strand to SEQ ID NO: 711304
uuuguacccagcuuaccaa

SEQ ID NO: 711306 - RNA, 19 nt, Artificial Sequence
  Description of Artificial Sequence: Synthetic oligonucleotide
  Sense strand starting at position 1230 of SEQ ID NO: 586351
gguacaaaccauugucuau

SEQ ID NO: 711307 - RNA, 19 nt, Artificial Sequence
  Description of Artificial Sequence: Synthetic oligonucleotide
  Antisense strand to SEQ ID NO: 711306
auagacaaugguuuguacc

SEQ ID NO: 711308 - RNA, 19 nt, Artificial Sequence
  Description of Artificial Sequence: Synthetic oligonucleotide
  Sense strand starting at position 1807 of SEQ ID NO: 586351
cugaacaguuacucacaga

SEQ ID NO: 711309 - RNA, 19 nt, Artificial Sequence
  Description of Artificial Sequence: Synthetic oligonucleotide
  Antisense strand to SEQ ID NO: 711308
ucugugaguaacuguucag

SEQ ID NO: 711310 - RNA, 19 nt, Artificial Sequence
  Description of Artificial Sequence: Synthetic oligonucleotide
  Sense strand starting at position 1872 of SEQ ID NO: 586351
ccaaguuugggaugagauc

SEQ ID NO: 711311 - RNA, 19 nt, Artificial Sequence
  Description of Artificial Sequence: Synthetic oligonucleotide
  Antisense strand to SEQ ID NO: 711310
gaucucaucccaaacuugg

SEQ ID NO: 711312 - RNA, 19 nt, Artificial Sequence
  Description of Artificial Sequence: Synthetic oligonucleotide
  Sense strand starting at position 2018 of SEQ ID NO: 586351
uguuuauaugcuggagaag

SEQ ID NO: 711313 - RNA, 19 nt, Artificial Sequence
  Description of Artificial Sequence: Synthetic oligonucleotide
  Antisense strand to SEQ ID NO: 711312
cuucuccagcauauaaaca

SEQ ID NO: 711314 - RNA, 19 nt, Artificial Sequence
  Description of Artificial Sequence: Synthetic oligonucleotide
  Sense strand starting at position 2145 of SEQ ID NO: 586351
acugaccuccauugaguua

SEQ ID NO: 711315 - RNA, 19 nt, Artificial Sequence
  Description of Artificial Sequence: Synthetic oligonucleotide
  Antisense strand to SEQ ID NO: 711314
uaacucaauggaggucagu

SEQ ID NO: 711316 - RNA, 19 nt, Artificial Sequence
  Description of Artificial Sequence: Synthetic oligonucleotide
  Sense strand starting at position 2539 of SEQ ID NO: 586351
guguguuuccaggccuguu

SEQ ID NO: 711317 - RNA, 19 nt, Artificial Sequence
  Description of Artificial Sequence: Synthetic oligonucleotide
  Antisense strand to SEQ ID NO: 711316
aacaggccuggaaacacac

SEQ ID NO: 711318 - RNA, 19 nt, Artificial Sequence
  Description of Artificial Sequence: Synthetic oligonucleotide
  Sense strand starting at position 2594 of SEQ ID NO: 586351
uggucuuacucacucucau

SEQ ID NO: 711319 - RNA, 19 nt, Artificial Sequence
  Description of Artificial Sequence: Synthetic oligonucleotide
  Antisense strand to SEQ ID NO: 711318
augagagugaguaagacca

SEQ ID NO: 711320 - RNA, 19 nt, Artificial Sequence
  Description of Artificial Sequence: Synthetic oligonucleotide
  Sense strand starting at position 2667 of SEQ ID NO: 586351
ggaguugacuuggcugaga

SEQ ID NO: 711321 - RNA, 19 nt, Artificial Sequence
  Description of Artificial Sequence: Synthetic oligonucleotide
  Antisense strand to SEQ ID NO: 711320
ucucagccaagucaacucc

SEQ ID NO: 711322 - RNA, 19 nt, Artificial Sequence
  Description of Artificial Sequence: Synthetic oligonucleotide
  Sense strand starting at position 2669 of SEQ ID NO: 586351
aguugacuuggcugagauu

SEQ ID NO: 711323 - RNA, 19 nt, Artificial Sequence
  Description of Artificial Sequence: Synthetic oligonucleotide
  Antisense strand to SEQ ID NO: 711322
aaucucagccaagucaacu

SEQ ID NO: 711324 - RNA, 19 nt, Artificial Sequence
  Description of Artificial Sequence: Synthetic oligonucleotide
  Sense strand starting at position 2733 of SEQ ID NO: 586351
ccaucuucuuaggucauua

SEQ ID NO: 711325 - RNA, 19 nt, Artificial Sequence
  Description of Artificial Sequence: Synthetic oligonucleotide
  Antisense strand to SEQ ID NO: 711324
uaaugaccuaagaagaugg

SEQ ID NO: 711326 - RNA, 19 nt, Artificial Sequence
  Description of Artificial Sequence: Synthetic oligonucleotide
  Sense strand starting at position 2803 of SEQ ID NO: 586351
auuuguccucugugauucu

SEQ ID NO: 711327 - RNA, 19 nt, Artificial Sequence
  Description of Artificial Sequence: Synthetic oligonucleotide
  Antisense strand to SEQ ID NO: 711326
agaaucacagaggacaaau

SEQ ID NO: 711328 - RNA, 19 nt, Artificial Sequence
  Description of Artificial Sequence: Synthetic oligonucleotide
  Sense strand starting at position 2890 of SEQ ID NO: 586351
gcaucaauuugugcuucuu

SEQ ID NO: 711329 - RNA, 19 nt, Artificial Sequence
  Description of Artificial Sequence: Synthetic oligonucleotide
  Antisense strand to SEQ ID NO: 711328
aagaagcacaaauugaugc

SEQ ID NO: 711330 - RNA, 19 nt, Artificial Sequence
  Description of Artificial Sequence: Synthetic oligonucleotide
  Sense strand starting at position 2926 of SEQ ID NO: 586351
aguccugccguagauagaa

SEQ ID NO: 711331 - RNA, 19 nt, Artificial Sequence
  Description of Artificial Sequence: Synthetic oligonucleotide
  Antisense strand to SEQ ID NO: 711330
uucuaucuacggcaggacu

SEQ ID NO: 711332 - RNA, 19 nt, Artificial Sequence
  Description of Artificial Sequence: Synthetic oligonucleotide
  Sense strand starting at position 3141 of SEQ ID NO: 586351
gccucuugaggguggaauu

SEQ ID NO: 711333 - RNA, 19 nt, Artificial Sequence
  Description of Artificial Sequence: Synthetic oligonucleotide
  Antisense strand to SEQ ID NO: 711332
aauuccacccucaagaggc

SEQ ID NO: 711334 - RNA, 19 nt, Artificial Sequence
  Description of Artificial Sequence: Synthetic oligonucleotide
  Sense strand starting at position 3358 of SEQ ID NO: 586351
ccaaguucugugucugcuu

SEQ ID NO: 711335 - RNA, 19 nt, Artificial Sequence
  Description of Artificial Sequence: Synthetic oligonucleotide
  Antisense strand to SEQ ID NO: 711334
aagcagacacagaacuugg

SEQ ID NO: 711336 - RNA, 19 nt, Artificial Sequence
  Description of Artificial Sequence: Synthetic oligonucleotide
  Sense strand starting at position 3370 of SEQ ID NO: 586351
ucugcuuggccugagaaau

SEQ ID NO: 711337 - RNA, 19 nt, Artificial Sequence
  Description of Artificial Sequence: Synthetic oligonucleotide
  Antisense strand to SEQ ID NO: 711336
auuucucaggccaagcaga

SEQ ID NO: 711338 - RNA, 19 nt, Artificial Sequence
  Description of Artificial Sequence: Synthetic oligonucleotide
  Sense strand starting at position 3429 of SEQ ID NO: 586351
aguagaaacagaugauguu

SEQ ID NO: 711339 - RNA, 19 nt, Artificial Sequence
  Description of Artificial Sequence: Synthetic oligonucleotide
  Antisense strand to SEQ ID NO: 711338
aacaucaucuguuucuacu

SEQ ID NO: 711340 - RNA, 19 nt, Artificial Sequence
  Description of Artificial Sequence: Synthetic oligonucleotide
  Sense strand starting at position 3435 of SEQ ID NO: 586351
aacagaugauguuuaagcu

SEQ ID NO: 711341 - RNA, 19 nt, Artificial Sequence
  Description of Artificial Sequence: Synthetic oligonucleotide
  Antisense strand to SEQ ID NO: 711340
agcuuaaacaucaucuguu

SEQ ID NO: 711342 - RNA, 19 nt, Artificial Sequence
  Description of Artificial Sequence: Synthetic oligonucleotide
  Sense strand starting at position 3651 of SEQ ID NO: 586351
ugcaguguugugccaggua

SEQ ID NO: 711343 - RNA, 19 nt, Artificial Sequence
  Description of Artificial Sequence: Synthetic oligonucleotide
  Antisense strand to SEQ ID NO: 711342
uaccuggcacaacacugca

SEQ ID NO: 711344 - RNA, 19 nt, Artificial Sequence
  Description of Artificial Sequence: Synthetic oligonucleotide
  Sense strand starting at position 3731 of SEQ ID NO: 586351
cuuggauggagguaugcau

SEQ ID NO: 711345 - RNA, 19 nt, Artificial Sequence
  Description of Artificial Sequence: Synthetic oligonucleotide
  Antisense strand to SEQ ID NO: 711344
augcauaccuccauccaag

SEQ ID NO: 711346 - RNA, 19 nt, Artificial Sequence
  Description of Artificial Sequence: Synthetic oligonucleotide
  Sense strand starting at position 3888 of SEQ ID NO: 586351
agggaauucugguacauuu

SEQ ID NO: 711347 - RNA, 19 nt, Artificial Sequence
  Description of Artificial Sequence: Synthetic oligonucleotide
  Antisense strand to SEQ ID NO: 711346
aaauguaccagaauucccu

SEQ ID NO: 711348 - RNA, 19 nt, Artificial Sequence
  Description of Artificial Sequence: Synthetic oligonucleotide
  Sense strand starting at position 3899 of SEQ ID NO: 586351
guacauuucugucuccuuu

SEQ ID NO: 711349 - RNA, 19 nt, Artificial Sequence
  Description of Artificial Sequence: Synthetic oligonucleotide
  Antisense strand to SEQ ID NO: 711348
aaaggagacagaaauguac

SEQ ID NO: 711350 - RNA, 19 nt, Artificial Sequence
  Description of Artificial Sequence: Synthetic oligonucleotide
  Sense strand starting at position 3924 of SEQ ID NO: 586351
cuucgcugagcacauuaaa

SEQ ID NO: 711351 - RNA, 19 nt, Artificial Sequence
  Description of Artificial Sequence: Synthetic oligonucleotide
  Antisense strand to SEQ ID NO: 711350
uuuaaugugcucagcgaag

SEQ ID NO: 711352 - RNA, 19 nt, Artificial Sequence
  Description of Artificial Sequence: Synthetic oligonucleotide
  Sense strand starting at position 99 of SEQ ID NO: 586352
aggaaagaucuaggugagu

SEQ ID NO: 711353 - RNA, 19 nt, Artificial Sequence
  Description of Artificial Sequence: Synthetic oligonucleotide
  Antisense strand to SEQ ID NO: 711352
acucaccuagaucuuuccu

SEQ ID NO: 711354 - RNA, 19 nt, Artificial Sequence
  Description of Artificial Sequence: Synthetic oligonucleotide
  Sense strand starting at position 285 of SEQ ID NO: 586352
gggcauggucuacacuaua

SEQ ID NO: 711355 - RNA, 19 nt, Artificial Sequence
  Description of Artificial Sequence: Synthetic oligonucleotide
  Antisense strand to SEQ ID NO: 711354
uauaguguagaccaugccc

SEQ ID NO: 711356 - RNA, 19 nt, Artificial Sequence
  Description of Artificial Sequence: Synthetic oligonucleotide
  Sense strand starting at position 450 of SEQ ID NO: 586352
augagaugccaacauguuu

SEQ ID NO: 711357 - RNA, 19 nt, Artificial Sequence
  Description of Artificial Sequence: Synthetic oligonucleotide
  Antisense strand to SEQ ID NO: 711356
aaacauguuggcaucucau

SEQ ID NO: 711358 - RNA, 19 nt, Artificial Sequence
  Description of Artificial Sequence: Synthetic oligonucleotide
  Sense strand starting at position 642 of SEQ ID NO: 586352
cugcuaagcagguguauuu

SEQ ID NO: 711359 - RNA, 19 nt, Artificial Sequence
  Description of Artificial Sequence: Synthetic oligonucleotide
  Antisense strand to SEQ ID NO: 711358
aaauacaccugcuuagcag

SEQ ID NO: 711360 - RNA, 19 nt, Artificial Sequence
  Description of Artificial Sequence: Synthetic oligonucleotide
  Sense strand starting at position 716 of SEQ ID NO: 586352
agucuuguccuagagauau

SEQ ID NO: 711361 - RNA, 19 nt, Artificial Sequence
  Description of Artificial Sequence: Synthetic oligonucleotide
  Antisense strand to SEQ ID NO: 711360
auaucucuaggacaagacu

SEQ ID NO: 711362 - RNA, 19 nt, Artificial Sequence
  Description of Artificial Sequence: Synthetic oligonucleotide
  Sense strand starting at position 758 of SEQ ID NO: 586352
uccugacauuauucuggaa

SEQ ID NO: 711363 - RNA, 19 nt, Artificial Sequence
  Description of Artificial Sequence: Synthetic oligonucleotide
  Antisense strand to SEQ ID NO: 711362
uuccagaauaaugucagga

SEQ ID NO: 711364 - RNA, 19 nt, Artificial Sequence
  Description of Artificial Sequence: Synthetic oligonucleotide
  Sense strand starting at position 777 of SEQ ID NO: 586352
aggugagguuaucuuauac

SEQ ID NO: 711365 - RNA, 19 nt, Artificial Sequence
  Description of Artificial Sequence: Synthetic oligonucleotide
  Antisense strand to SEQ ID NO: 711364
guauaagauaaccucaccu

SEQ ID NO: 711366 - RNA, 19 nt, Artificial Sequence
  Description of Artificial Sequence: Synthetic oligonucleotide
  Sense strand starting at position 937 of SEQ ID NO: 586352
gauggaaacuauguuacca

SEQ ID NO: 711367 - RNA, 19 nt, Artificial Sequence
  Description of Artificial Sequence: Synthetic oligonucleotide
  Antisense strand to SEQ ID NO: 711366
ugguaacauaguuuccauc

SEQ ID NO: 711368 - RNA, 19 nt, Artificial Sequence
  Description of Artificial Sequence: Synthetic oligonucleotide
  Sense strand starting at position 1014 of SEQ ID NO: 586352
guuuccaugugaccaugau

SEQ ID NO: 711369 - RNA, 19 nt, Artificial Sequence
  Description of Artificial Sequence: Synthetic oligonucleotide
  Antisense strand to SEQ ID NO: 711368
aucauggucacauggaaac

SEQ ID NO: 711370 - RNA, 19 nt, Artificial Sequence
  Description of Artificial Sequence: Synthetic oligonucleotide
  Sense strand starting at position 1015 of SEQ ID NO: 586352
uuuccaugugaccaugauu

SEQ ID NO: 711371 - RNA, 19 nt, Artificial Sequence
  Description of Artificial Sequence: Synthetic oligonucleotide
  Antisense strand to SEQ ID NO: 711370
aaucauggucacauggaaa

SEQ ID NO: 711372 - RNA, 19 nt, Artificial Sequence
  Description of Artificial Sequence: Synthetic oligonucleotide
  Sense strand starting at position 1018 of SEQ ID NO: 586352
ccaugugaccaugauuccu

SEQ ID NO: 711373 - RNA, 19 nt, Artificial Sequence
  Description of Artificial Sequence: Synthetic oligonucleotide
  Antisense strand to SEQ ID NO: 711372
aggaaucauggucacaugg

SEQ ID NO: 711374 - RNA, 19 nt, Artificial Sequence
  Description of Artificial Sequence: Synthetic oligonucleotide
  Sense strand starting at position 1020 of SEQ ID NO: 586352
augugaccaugauuccuua

SEQ ID NO: 711375 - RNA, 19 nt, Artificial Sequence
  Description of Artificial Sequence: Synthetic oligonucleotide
  Antisense strand to SEQ ID NO: 711374
uaaggaaucauggucacau

SEQ ID NO: 711376 - RNA, 19 nt, Artificial Sequence
  Description of Artificial Sequence: Synthetic oligonucleotide
  Sense strand starting at position 1049 of SEQ ID NO: 586352
cugugaaauugaguuagaa

SEQ ID NO: 711377 - RNA, 19 nt, Artificial Sequence
  Description of Artificial Sequence: Synthetic oligonucleotide
  Antisense strand to SEQ ID NO: 711376
uucuaacucaauuucacag

SEQ ID NO: 711378 - RNA, 19 nt, Artificial Sequence
  Description of Artificial Sequence: Synthetic oligonucleotide
  Sense strand starting at position 1051 of SEQ ID NO: 586352
gugaaauugaguuagaagu

SEQ ID NO: 711379 - RNA, 19 nt, Artificial Sequence
  Description of Artificial Sequence: Synthetic oligonucleotide
  Antisense strand to SEQ ID NO: 711378
acuucuaacucaauuucac

SEQ ID NO: 711380 - RNA, 19 nt, Artificial Sequence
  Description of Artificial Sequence: Synthetic oligonucleotide
  Sense strand starting at position 1206 of SEQ ID NO: 586352
uccaaauucugguuuggua

SEQ ID NO: 711381 - RNA, 19 nt, Artificial Sequence
  Description of Artificial Sequence: Synthetic oligonucleotide
  Antisense strand to SEQ ID NO: 711380
uaccaaaccagaauuugga

SEQ ID NO: 711382 - RNA, 19 nt, Artificial Sequence
  Description of Artificial Sequence: Synthetic oligonucleotide
  Sense strand starting at position 1208 of SEQ ID NO: 586352
caaauucugguuugguaag

SEQ ID NO: 711383 - RNA, 19 nt, Artificial Sequence
  Description of Artificial Sequence: Synthetic oligonucleotide
  Antisense strand to SEQ ID NO: 711382
cuuaccaaaccagaauuug

SEQ ID NO: 711384 - RNA, 19 nt, Artificial Sequence
  Description of Artificial Sequence: Synthetic oligonucleotide
  Sense strand starting at position 1219 of SEQ ID NO: 586352
uugguaagcuggguacaaa

SEQ ID NO: 711385 - RNA, 19 nt, Artificial Sequence
  Description of Artificial Sequence: Synthetic oligonucleotide
  Antisense strand to SEQ ID NO: 711384
uuuguacccagcuuaccaa

SEQ ID NO: 711386 - RNA, 19 nt, Artificial Sequence
  Description of Artificial Sequence: Synthetic oligonucleotide
  Sense strand starting at position 1230 of SEQ ID NO: 586352
gguacaaaccauugucuau

SEQ ID NO: 711387 - RNA, 19 nt, Artificial Sequence
  Description of Artificial Sequence: Synthetic oligonucleotide
  Antisense strand to SEQ ID NO: 711386
auagacaaugguuuguacc

SEQ ID NO: 711388 - RNA, 19 nt, Artificial Sequence
  Description of Artificial Sequence: Synthetic oligonucleotide
  Sense strand starting at position 1807 of SEQ ID NO: 586352
cugaacaguuacucacaga

SEQ ID NO: 711389 - RNA, 19 nt, Artificial Sequence
  Description of Artificial Sequence: Synthetic oligonucleotide
  Antisense strand to SEQ ID NO: 711388
ucugugaguaacuguucag

SEQ ID NO: 711390 - RNA, 19 nt, Artificial Sequence
  Description of Artificial Sequence: Synthetic oligonucleotide
  Sense strand starting at position 1872 of SEQ ID NO: 586352
ccaaguuugggaugagauc

SEQ ID NO: 711391 - RNA, 19 nt, Artificial Sequence
  Description of Artificial Sequence: Synthetic oligonucleotide
  Antisense strand to SEQ ID NO: 711390
gaucucaucccaaacuugg

SEQ ID NO: 711392 - RNA, 19 nt, Artificial Sequence
  Description of Artificial Sequence: Synthetic oligonucleotide
  Sense strand starting at position 2018 of SEQ ID NO: 586352
uguuuauaugcuggagaag

SEQ ID NO: 711393 - RNA, 19 nt, Artificial Sequence
  Description of Artificial Sequence: Synthetic oligonucleotide
  Antisense strand to SEQ ID NO: 711392
cuucuccagcauauaaaca

SEQ ID NO: 711394 - RNA, 19 nt, Artificial Sequence
  Description of Artificial Sequence: Synthetic oligonucleotide
  Sense strand starting at position 2145 of SEQ ID NO: 586352
acugaccuccauugaguua

SEQ ID NO: 711395 - RNA, 19 nt, Artificial Sequence
  Description of Artificial Sequence: Synthetic oligonucleotide
  Antisense strand to SEQ ID NO: 711394
uaacucaauggaggucagu

SEQ ID NO: 711396 - RNA, 19 nt, Artificial Sequence
  Description of Artificial Sequence: Synthetic oligonucleotide
  Sense strand starting at position 2539 of SEQ ID NO: 586352
guguguuuccaggccuguu

SEQ ID NO: 711397 - RNA, 19 nt, Artificial Sequence
  Description of Artificial Sequence: Synthetic oligonucleotide
  Antisense strand to SEQ ID NO: 711396
aacaggccuggaaacacac

SEQ ID NO: 711398 - RNA, 19 nt, Artificial Sequence
  Description of Artificial Sequence: Synthetic oligonucleotide
  Sense strand starting at position 2594 of SEQ ID NO: 586352
uggucuuacucacucucau

SEQ ID NO: 711399 - RNA, 19 nt, Artificial Sequence
  Description of Artificial Sequence: Synthetic oligonucleotide
  Antisense strand to SEQ ID NO: 711398
augagagugaguaagacca

SEQ ID NO: 711400 - RNA, 19 nt, Artificial Sequence
  Description of Artificial Sequence: Synthetic oligonucleotide
  Sense strand starting at position 2667 of SEQ ID NO: 586352
ggaguugacuuggcugaga

SEQ ID NO: 711401 - RNA, 19 nt, Artificial Sequence
  Description of Artificial Sequence: Synthetic oligonucleotide
  Antisense strand to SEQ ID NO: 711400
ucucagccaagucaacucc

SEQ ID NO: 711402 - RNA, 19 nt, Artificial Sequence
  Description of Artificial Sequence: Synthetic oligonucleotide
  Sense strand starting at position 2669 of SEQ ID NO: 586352
aguugacuuggcugagauu

SEQ ID NO: 711403 - RNA, 19 nt, Artificial Sequence
  Description of Artificial Sequence: Synthetic oligonucleotide
  Antisense strand to SEQ ID NO: 711402
aaucucagccaagucaacu

SEQ ID NO: 711404 - RNA, 19 nt, Artificial Sequence
  Description of Artificial Sequence: Synthetic oligonucleotide
  Sense strand starting at position 2733 of SEQ ID NO: 586352
ccaucuucuuaggucauua

SEQ ID NO: 711405 - RNA, 19 nt, Artificial Sequence
  Description of Artificial Sequence: Synthetic oligonucleotide
  Antisense strand to SEQ ID NO: 711404
uaaugaccuaagaagaugg

SEQ ID NO: 711406 - RNA, 19 nt, Artificial Sequence
  Description of Artificial Sequence: Synthetic oligonucleotide
  Sense strand starting at position 2803 of SEQ ID NO: 586352
auuuguccucugugauucu

SEQ ID NO: 711407 - RNA, 19 nt, Artificial Sequence
  Description of Artificial Sequence: Synthetic oligonucleotide
  Antisense strand to SEQ ID NO: 711406
agaaucacagaggacaaau

SEQ ID NO: 711408 - RNA, 19 nt, Artificial Sequence
  Description of Artificial Sequence: Synthetic oligonucleotide
  Sense strand starting at position 2890 of SEQ ID NO: 586352
gcaucaauuugugcuucuu

SEQ ID NO: 711409 - RNA, 19 nt, Artificial Sequence
  Description of Artificial Sequence: Synthetic oligonucleotide
  Antisense strand to SEQ ID NO: 711408
aagaagcacaaauugaugc

SEQ ID NO: 711410 - RNA, 19 nt, Artificial Sequence
  Description of Artificial Sequence: Synthetic oligonucleotide
  Sense strand starting at position 2926 of SEQ ID NO: 586352
aguccugccguagauagaa

SEQ ID NO: 711411 - RNA, 19 nt, Artificial Sequence
  Description of Artificial Sequence: Synthetic oligonucleotide
  Antisense strand to SEQ ID NO: 711410
uucuaucuacggcaggacu

SEQ ID NO: 711412 - RNA, 19 nt, Artificial Sequence
  Description of Artificial Sequence: Synthetic oligonucleotide
  Sense strand starting at position 3141 of SEQ ID NO: 586352
gccucuugaggguggaauu

SEQ ID NO: 711413 - RNA, 19 nt, Artificial Sequence
  Description of Artificial Sequence: Synthetic oligonucleotide
  Antisense strand to SEQ ID NO: 711412
aauuccacccucaagaggc

SEQ ID NO: 711414 - RNA, 19 nt, Artificial Sequence
  Description of Artificial Sequence: Synthetic oligonucleotide
  Sense strand starting at position 3358 of SEQ ID NO: 586352
ccaaguucugugucugcuu

SEQ ID NO: 711415 - RNA, 19 nt, Artificial Sequence
  Description of Artificial Sequence: Synthetic oligonucleotide
  Antisense strand to SEQ ID NO: 711414
aagcagacacagaacuugg

SEQ ID NO: 711416 - RNA, 19 nt, Artificial Sequence
  Description of Artificial Sequence: Synthetic oligonucleotide
  Sense strand starting at position 3370 of SEQ ID NO: 586352
ucugcuuggccugagaaau

SEQ ID NO: 711417 - RNA, 19 nt, Artificial Sequence
  Description of Artificial Sequence: Synthetic oligonucleotide
  Antisense strand to SEQ ID NO: 711416
auuucucaggccaagcaga

SEQ ID NO: 711418 - RNA, 19 nt, Artificial Sequence
  Description of Artificial Sequence: Synthetic oligonucleotide
  Sense strand starting at position 3429 of SEQ ID NO: 586352
aguagaaacagaugauguu

SEQ ID NO: 711419 - RNA, 19 nt, Artificial Sequence
  Description of Artificial Sequence: Synthetic oligonucleotide
  Antisense strand to SEQ ID NO: 711418
aacaucaucuguuucuacu

SEQ ID NO: 711420 - RNA, 19 nt, Artificial Sequence
  Description of Artificial Sequence: Synthetic oligonucleotide
  Sense strand starting at position 3435 of SEQ ID NO: 586352
aacagaugauguuuaagcu

SEQ ID NO: 711421 - RNA, 19 nt, Artificial Sequence
  Description of Artificial Sequence: Synthetic oligonucleotide
  Antisense strand to SEQ ID NO: 711420
agcuuaaacaucaucuguu

SEQ ID NO: 711422 - RNA, 19 nt, Artificial Sequence
  Description of Artificial Sequence: Synthetic oligonucleotide
  Sense strand starting at position 3651 of SEQ ID NO: 586352
ugcaguguugugccaggua

SEQ ID NO: 711423 - RNA, 19 nt, Artificial Sequence
  Description of Artificial Sequence: Synthetic oligonucleotide
  Antisense strand to SEQ ID NO: 711422
uaccuggcacaacacugca

SEQ ID NO: 711424 - RNA, 19 nt, Artificial Sequence
  Description of Artificial Sequence: Synthetic oligonucleotide
  Sense strand starting at position 3731 of SEQ ID NO: 586352
cuuggauggagguaugcau

SEQ ID NO: 711425 - RNA, 19 nt, Artificial Sequence
  Description of Artificial Sequence: Synthetic oligonucleotide
  Antisense strand to SEQ ID NO: 711424
augcauaccuccauccaag

SEQ ID NO: 711426 - RNA, 19 nt, Artificial Sequence
  Description of Artificial Sequence: Synthetic oligonucleotide
  Sense strand starting at position 3888 of SEQ ID NO: 586352
agggaauucugguacauuu

SEQ ID NO: 711427 - RNA, 19 nt, Artificial Sequence
  Description of Artificial Sequence: Synthetic oligonucleotide
  Antisense strand to SEQ ID NO: 711426
aaauguaccagaauucccu

SEQ ID NO: 711428 - RNA, 19 nt, Artificial Sequence
  Description of Artificial Sequence: Synthetic oligonucleotide
  Sense strand starting at position 3899 of SEQ ID NO: 586352
guacauuucugucuccuuu

SEQ ID NO: 711429 - RNA, 19 nt, Artificial Sequence
  Description of Artificial Sequence: Synthetic oligonucleotide
  Antisense strand to SEQ ID NO: 711428
aaaggagacagaaauguac

SEQ ID NO: 711430 - RNA, 19 nt, Artificial Sequence
  Description of Artificial Sequence: Synthetic oligonucleotide
  Sense strand starting at position 3924 of SEQ ID NO: 586352
cuucgcugagcacauuaaa

SEQ ID NO: 711431 - RNA, 19 nt, Artificial Sequence
  Description of Artificial Sequence: Synthetic oligonucleotide
  Antisense strand to SEQ ID NO: 711430
uuuaaugugcucagcgaag

SEQ ID NO: 711432 - RNA, 19 nt, Artificial Sequence
  Description of Artificial Sequence: Synthetic oligonucleotide
  Sense strand starting at position 80 of SEQ ID NO: 586353
cccagauacuugcuuaaag

SEQ ID NO: 711433 - RNA, 19 nt, Artificial Sequence
  Description of Artificial Sequence: Synthetic oligonucleotide
  Antisense strand to SEQ ID NO: 711432
cuuuaagcaaguaucuggg

SEQ ID NO: 711434 - RNA, 19 nt, Artificial Sequence
  Description of Artificial Sequence: Synthetic oligonucleotide
  Sense strand starting at position 81 of SEQ ID NO: 586353
ccagauacuugcuuaaaga

SEQ ID NO: 711435 - RNA, 19 nt, Artificial Sequence
  Description of Artificial Sequence: Synthetic oligonucleotide
  Antisense strand to SEQ ID NO: 711434
ucuuuaagcaaguaucugg

SEQ ID NO: 711436 - RNA, 19 nt, Artificial Sequence
  Description of Artificial Sequence: Synthetic oligonucleotide
  Sense strand starting at position 120 of SEQ ID NO: 586353
aguaacuuguaguauagaa

SEQ ID NO: 711437 - RNA, 19 nt, Artificial Sequence
  Description of Artificial Sequence: Synthetic oligonucleotide
  Antisense strand to SEQ ID NO: 711436
uucuauacuacaaguuacu

SEQ ID NO: 711438 - RNA, 19 nt, Artificial Sequence
  Description of Artificial Sequence: Synthetic oligonucleotide
  Sense strand starting at position 144 of SEQ ID NO: 586353
ggaaauguuuaagaagcua

SEQ ID NO: 711439 - RNA, 19 nt, Artificial Sequence
  Description of Artificial Sequence: Synthetic oligonucleotide
  Antisense strand to SEQ ID NO: 711438
uagcuucuuaaacauuucc

SEQ ID NO: 711440 - RNA, 19 nt, Artificial Sequence
  Description of Artificial Sequence: Synthetic oligonucleotide
  Sense strand starting at position 247 of SEQ ID NO: 586353
guagaucagcucuagcaag

SEQ ID NO: 711441 - RNA, 19 nt, Artificial Sequence
  Description of Artificial Sequence: Synthetic oligonucleotide
  Antisense strand to SEQ ID NO: 711440
cuugcuagagcugaucuac

SEQ ID NO: 711442 - RNA, 19 nt, Artificial Sequence
  Description of Artificial Sequence: Synthetic oligonucleotide
  Sense strand starting at position 366 of SEQ ID NO: 586353
ggguaauacuccucaauuc

SEQ ID NO: 711443 - RNA, 19 nt, Artificial Sequence
  Description of Artificial Sequence: Synthetic oligonucleotide
  Antisense strand to SEQ ID NO: 711442
gaauugaggaguauuaccc

SEQ ID NO: 711444 - RNA, 19 nt, Artificial Sequence
  Description of Artificial Sequence: Synthetic oligonucleotide
  Sense strand starting at position 381 of SEQ ID NO: 586353
auucucugguggucucaaa

SEQ ID NO: 711445 - RNA, 19 nt, Artificial Sequence
  Description of Artificial Sequence: Synthetic oligonucleotide
  Antisense strand to SEQ ID NO: 711444
uuugagaccaccagagaau

SEQ ID NO: 711446 - RNA, 19 nt, Artificial Sequence
  Description of Artificial Sequence: Synthetic oligonucleotide
  Sense strand starting at position 464 of SEQ ID NO: 586353
guaacuuugucuucccaga

SEQ ID NO: 711447 - RNA, 19 nt, Artificial Sequence
  Description of Artificial Sequence: Synthetic oligonucleotide
  Antisense strand to SEQ ID NO: 711446
ucugggaagacaaaguuac

SEQ ID NO: 711448 - RNA, 19 nt, Artificial Sequence
  Description of Artificial Sequence: Synthetic oligonucleotide
  Sense strand starting at position 604 of SEQ ID NO: 586353
uguacauugcauugucagu

SEQ ID NO: 711449 - RNA, 19 nt, Artificial Sequence
  Description of Artificial Sequence: Synthetic oligonucleotide
  Antisense strand to SEQ ID NO: 711448
acugacaaugcaauguaca

SEQ ID NO: 711450 - RNA, 19 nt, Artificial Sequence
  Description of Artificial Sequence: Synthetic oligonucleotide
  Sense strand starting at position 643 of SEQ ID NO: 586353
cuacuuauugcugacugua

SEQ ID NO: 711451 - RNA, 19 nt, Artificial Sequence
  Description of Artificial Sequence: Synthetic oligonucleotide
  Antisense strand to SEQ ID NO: 711450
uacagucagcaauaaguag

SEQ ID NO: 711452 - RNA, 19 nt, Artificial Sequence
  Description of Artificial Sequence: Synthetic oligonucleotide
  Sense strand starting at position 645 of SEQ ID NO: 586353
acuuauugcugacuguaaa

SEQ ID NO: 711453 - RNA, 19 nt, Artificial Sequence
  Description of Artificial Sequence: Synthetic oligonucleotide
  Antisense strand to SEQ ID NO: 711452
uuuacagucagcaauaagu

SEQ ID NO: 711454 - RNA, 19 nt, Artificial Sequence
  Description of Artificial Sequence: Synthetic oligonucleotide
  Sense strand starting at position 689 of SEQ ID NO: 586353
gauugaaagcuagguuaau

SEQ ID NO: 711455 - RNA, 19 nt, Artificial Sequence
  Description of Artificial Sequence: Synthetic oligonucleotide
  Antisense strand to SEQ ID NO: 711454
auuaaccuagcuuucaauc

SEQ ID NO: 711456 - RNA, 19 nt, Artificial Sequence
  Description of Artificial Sequence: Synthetic oligonucleotide
  Sense strand starting at position 690 of SEQ ID NO: 586353
auugaaagcuagguuaaua

SEQ ID NO: 711457 - RNA, 19 nt, Artificial Sequence
  Description of Artificial Sequence: Synthetic oligonucleotide
  Antisense strand to SEQ ID NO: 711456
uauuaaccuagcuuucaau

SEQ ID NO: 711458 - RNA, 19 nt, Artificial Sequence
  Description of Artificial Sequence: Synthetic oligonucleotide
  Sense strand starting at position 701 of SEQ ID NO: 586353
gguuaauaaggcuguuaaa

SEQ ID NO: 711459 - RNA, 19 nt, Artificial Sequence
  Description of Artificial Sequence: Synthetic oligonucleotide
  Antisense strand to SEQ ID NO: 711458
uuuaacagccuuauuaacc

SEQ ID NO: 711460 - RNA, 19 nt, Artificial Sequence
  Description of Artificial Sequence: Synthetic oligonucleotide
  Sense strand starting at position 1039 of SEQ ID NO: 586353
ccgagaaacuguuacauua

SEQ ID NO: 711461 - RNA, 19 nt, Artificial Sequence
  Description of Artificial Sequence: Synthetic oligonucleotide
  Antisense strand to SEQ ID NO: 711460
uaauguaacaguuucucgg

SEQ ID NO: 711462 - RNA, 19 nt, Artificial Sequence
  Description of Artificial Sequence: Synthetic oligonucleotide
  Sense strand starting at position 1121 of SEQ ID NO: 586353
uccuuaauauggguauaaa

SEQ ID NO: 711463 - RNA, 19 nt, Artificial Sequence
  Description of Artificial Sequence: Synthetic oligonucleotide
  Antisense strand to SEQ ID NO: 711462
uuuauacccauauuaagga

SEQ ID NO: 711464 - RNA, 19 nt, Artificial Sequence
  Description of Artificial Sequence: Synthetic oligonucleotide
  Sense strand starting at position 2571 of SEQ ID NO: 586353
ccaugaaguuaacaaaugu

SEQ ID NO: 711465 - RNA, 19 nt, Artificial Sequence
  Description of Artificial Sequence: Synthetic oligonucleotide
  Antisense strand to SEQ ID NO: 711464
acauuuguuaacuucaugg

SEQ ID NO: 711466 - RNA, 19 nt, Artificial Sequence
  Description of Artificial Sequence: Synthetic oligonucleotide
  Sense strand starting at position 2584 of SEQ ID NO: 586353
aaauguuggugauuaagua

SEQ ID NO: 711467 - RNA, 19 nt, Artificial Sequence
  Description of Artificial Sequence: Synthetic oligonucleotide
  Antisense strand to SEQ ID NO: 711466
uacuuaaucaccaacauuu

SEQ ID NO: 711468 - RNA, 19 nt, Artificial Sequence
  Description of Artificial Sequence: Synthetic oligonucleotide
  Sense strand starting at position 2585 of SEQ ID NO: 586353
aauguuggugauuaaguau

SEQ ID NO: 711469 - RNA, 19 nt, Artificial Sequence
  Description of Artificial Sequence: Synthetic oligonucleotide
  Antisense strand to SEQ ID NO: 711468
auacuuaaucaccaacauu

SEQ ID NO: 711470 - RNA, 19 nt, Artificial Sequence
  Description of Artificial Sequence: Synthetic oligonucleotide
  Sense strand starting at position 2592 of SEQ ID NO: 586353
gugauuaaguaugcuaggu

SEQ ID NO: 711471 - RNA, 19 nt, Artificial Sequence
  Description of Artificial Sequence: Synthetic oligonucleotide
  Antisense strand to SEQ ID NO: 711470
accuagcauacuuaaucac

SEQ ID NO: 711472 - RNA, 19 nt, Artificial Sequence
  Description of Artificial Sequence: Synthetic oligonucleotide
  Sense strand starting at position 2691 of SEQ ID NO: 586353
gccacuuagucuguagguu

SEQ ID NO: 711473 - RNA, 19 nt, Artificial Sequence
  Description of Artificial Sequence: Synthetic oligonucleotide
  Antisense strand to SEQ ID NO: 711472
aaccuacagacuaaguggc

SEQ ID NO: 711474 - RNA, 19 nt, Artificial Sequence
  Description of Artificial Sequence: Synthetic oligonucleotide
  Sense strand starting at position 2692 of SEQ ID NO: 586353
ccacuuagucuguagguuu

SEQ ID NO: 711475 - RNA, 19 nt, Artificial Sequence
  Description of Artificial Sequence: Synthetic oligonucleotide
  Antisense strand to SEQ ID NO: 711474
aaaccuacagacuaagugg

SEQ ID NO: 711476 - RNA, 19 nt, Artificial Sequence
  Description of Artificial Sequence: Synthetic oligonucleotide
  Sense strand starting at position 2705 of SEQ ID NO: 586353
agguuuagcggcuagaaag

SEQ ID NO: 711477 - RNA, 19 nt, Artificial Sequence
  Description of Artificial Sequence: Synthetic oligonucleotide
  Antisense strand to SEQ ID NO: 711476
cuuucuagccgcuaaaccu

SEQ ID NO: 711478 - RNA, 19 nt, Artificial Sequence
  Description of Artificial Sequence: Synthetic oligonucleotide
  Sense strand starting at position 2935 of SEQ ID NO: 586353
gggaauuaguaggaauauc

SEQ ID NO: 711479 - RNA, 19 nt, Artificial Sequence
  Description of Artificial Sequence: Synthetic oligonucleotide
  Antisense strand to SEQ ID NO: 711478
gauauuccuacuaauuccc

SEQ ID NO: 711480 - RNA, 19 nt, Artificial Sequence
  Description of Artificial Sequence: Synthetic oligonucleotide
  Sense strand starting at position 3063 of SEQ ID NO: 586353
agaguauauuaacugcuua

SEQ ID NO: 711481 - RNA, 19 nt, Artificial Sequence
  Description of Artificial Sequence: Synthetic oligonucleotide
  Antisense strand to SEQ ID NO: 711480
uaagcaguuaauauacucu

SEQ ID NO: 711482 - RNA, 19 nt, Artificial Sequence
  Description of Artificial Sequence: Synthetic oligonucleotide
  Sense strand starting at position 3095 of SEQ ID NO: 586353
cguggagaggcuuaucugu

SEQ ID NO: 711483 - RNA, 19 nt, Artificial Sequence
  Description of Artificial Sequence: Synthetic oligonucleotide
  Antisense strand to SEQ ID NO: 711482
acagauaagccucuccacg

SEQ ID NO: 711484 - RNA, 19 nt, Artificial Sequence
  Description of Artificial Sequence: Synthetic oligonucleotide
  Sense strand starting at position 3097 of SEQ ID NO: 586353
uggagaggcuuaucugugu

SEQ ID NO: 711485 - RNA, 19 nt, Artificial Sequence
  Description of Artificial Sequence: Synthetic oligonucleotide
  Antisense strand to SEQ ID NO: 711484
acacagauaagccucucca

SEQ ID NO: 711486 - RNA, 19 nt, Artificial Sequence
  Description of Artificial Sequence: Synthetic oligonucleotide
  Sense strand starting at position 3161 of SEQ ID NO: 586353
ucccuagcgcugcuguaaa

SEQ ID NO: 711487 - RNA, 19 nt, Artificial Sequence
  Description of Artificial Sequence: Synthetic oligonucleotide
  Antisense strand to SEQ ID NO: 711486
uuuacagcagcgcuaggga

SEQ ID NO: 711488 - RNA, 19 nt, Artificial Sequence
  Description of Artificial Sequence: Synthetic oligonucleotide
  Sense strand starting at position 3213 of SEQ ID NO: 586353
auguauucccaaggacgua

SEQ ID NO: 711489 - RNA, 19 nt, Artificial Sequence
  Description of Artificial Sequence: Synthetic oligonucleotide
  Antisense strand to SEQ ID NO: 711488
uacguccuugggaauacau

SEQ ID NO: 711490 - RNA, 19 nt, Artificial Sequence
  Description of Artificial Sequence: Synthetic oligonucleotide
  Sense strand starting at position 3214 of SEQ ID NO: 586353
uguauucccaaggacguaa

SEQ ID NO: 711491 - RNA, 19 nt, Artificial Sequence
  Description of Artificial Sequence: Synthetic oligonucleotide
  Antisense strand to SEQ ID NO: 711490
uuacguccuugggaauaca

SEQ ID NO: 711492 - RNA, 19 nt, Artificial Sequence
  Description of Artificial Sequence: Synthetic oligonucleotide
  Sense strand starting at position 3227 of SEQ ID NO: 586353
acguaagacauauggugua

SEQ ID NO: 711493 - RNA, 19 nt, Artificial Sequence
  Description of Artificial Sequence: Synthetic oligonucleotide
  Antisense strand to SEQ ID NO: 711492
uacaccauaugucuuacgu

SEQ ID NO: 711494 - RNA, 19 nt, Artificial Sequence
  Description of Artificial Sequence: Synthetic oligonucleotide
  Sense strand starting at position 3239 of SEQ ID NO: 586353
ugguguaacaaauguaaga

SEQ ID NO: 711495 - RNA, 19 nt, Artificial Sequence
  Description of Artificial Sequence: Synthetic oligonucleotide
  Antisense strand to SEQ ID NO: 711494
ucuuacauuuguuacacca

SEQ ID NO: 711496 - RNA, 19 nt, Artificial Sequence
  Description of Artificial Sequence: Synthetic oligonucleotide
  Sense strand starting at position 3241 of SEQ ID NO: 586353
guguaacaaauguaagagu

SEQ ID NO: 711497 - RNA, 19 nt, Artificial Sequence
  Description of Artificial Sequence: Synthetic oligonucleotide
  Antisense strand to SEQ ID NO: 711496
acucuuacauuuguuacac

SEQ ID NO: 711498 - RNA, 19 nt, Artificial Sequence
  Description of Artificial Sequence: Synthetic oligonucleotide
  Sense strand starting at position 3258 of SEQ ID NO: 586353
guaauuuacugccuuuguu

SEQ ID NO: 711499 - RNA, 19 nt, Artificial Sequence
  Description of Artificial Sequence: Synthetic oligonucleotide
  Antisense strand to SEQ ID NO: 711498
aacaaaggcaguaaauuac

SEQ ID NO: 711500 - RNA, 19 nt, Artificial Sequence
  Description of Artificial Sequence: Synthetic oligonucleotide
  Sense strand starting at position 3391 of SEQ ID NO: 586353
cggugaucaccuuaauaau

SEQ ID NO: 711501 - RNA, 19 nt, Artificial Sequence
  Description of Artificial Sequence: Synthetic oligonucleotide
  Antisense strand to SEQ ID NO: 711500
auuauuaaggugaucaccg

SEQ ID NO: 711502 - RNA, 19 nt, Artificial Sequence
  Description of Artificial Sequence: Synthetic oligonucleotide
  Sense strand starting at position 3434 of SEQ ID NO: 586353
gucucucccgucuaugauu

SEQ ID NO: 711503 - RNA, 19 nt, Artificial Sequence
  Description of Artificial Sequence: Synthetic oligonucleotide
  Antisense strand to SEQ ID NO: 711502
aaucauagacgggagagac

SEQ ID NO: 711504 - RNA, 19 nt, Artificial Sequence
  Description of Artificial Sequence: Synthetic oligonucleotide
  Sense strand starting at position 3443 of SEQ ID NO: 586353
gucuaugauuugucccgca

SEQ ID NO: 711505 - RNA, 19 nt, Artificial Sequence
  Description of Artificial Sequence: Synthetic oligonucleotide
  Antisense strand to SEQ ID NO: 711504
ugcgggacaaaucauagac

SEQ ID NO: 711506 - RNA, 19 nt, Artificial Sequence
  Description of Artificial Sequence: Synthetic oligonucleotide
  Sense strand starting at position 3563 of SEQ ID NO: 586353
cuccuauaaugccugugaa

SEQ ID NO: 711507 - RNA, 19 nt, Artificial Sequence
  Description of Artificial Sequence: Synthetic oligonucleotide
  Antisense strand to SEQ ID NO: 711506
uucacaggcauuauaggag

SEQ ID NO: 711508 - RNA, 19 nt, Artificial Sequence
  Description of Artificial Sequence: Synthetic oligonucleotide
  Sense strand starting at position 3564 of SEQ ID NO: 586353
uccuauaaugccugugaag

SEQ ID NO: 711509 - RNA, 19 nt, Artificial Sequence
  Description of Artificial Sequence: Synthetic oligonucleotide
  Antisense strand to SEQ ID NO: 711508
cuucacaggcauuauagga

SEQ ID NO: 711510 - RNA, 19 nt, Artificial Sequence
  Description of Artificial Sequence: Synthetic oligonucleotide
  Sense strand starting at position 3566 of SEQ ID NO: 586353
cuauaaugccugugaagaa

SEQ ID NO: 711511 - RNA, 19 nt, Artificial Sequence
  Description of Artificial Sequence: Synthetic oligonucleotide
  Antisense strand to SEQ ID NO: 711510
uucuucacaggcauuauag

SEQ ID NO: 711512 - RNA, 19 nt, Artificial Sequence
  Description of Artificial Sequence: Synthetic oligonucleotide
  Sense strand starting at position 28 of SEQ ID NO: 586354
guagaucagcucuagcaag

SEQ ID NO: 711513 - RNA, 19 nt, Artificial Sequence
  Description of Artificial Sequence: Synthetic oligonucleotide
  Antisense strand to SEQ ID NO: 711512
cuugcuagagcugaucuac

SEQ ID NO: 711514 - RNA, 19 nt, Artificial Sequence
  Description of Artificial Sequence: Synthetic oligonucleotide
  Sense strand starting at position 147 of SEQ ID NO: 586354
ggguaauacuccucaauuc

SEQ ID NO: 711515 - RNA, 19 nt, Artificial Sequence
  Description of Artificial Sequence: Synthetic oligonucleotide
  Antisense strand to SEQ ID NO: 711514
gaauugaggaguauuaccc

SEQ ID NO: 711516 - RNA, 19 nt, Artificial Sequence
  Description of Artificial Sequence: Synthetic oligonucleotide
  Sense strand starting at position 162 of SEQ ID NO: 586354
auucucugguggucucaaa

SEQ ID NO: 711517 - RNA, 19 nt, Artificial Sequence
  Description of Artificial Sequence: Synthetic oligonucleotide
  Antisense strand to SEQ ID NO: 711516
uuugagaccaccagagaau

SEQ ID NO: 711518 - RNA, 19 nt, Artificial Sequence
  Description of Artificial Sequence: Synthetic oligonucleotide
  Sense strand starting at position 245 of SEQ ID NO: 586354
guaacuuugucuucccaga

SEQ ID NO: 711519 - RNA, 19 nt, Artificial Sequence
  Description of Artificial Sequence: Synthetic oligonucleotide
  Antisense strand to SEQ ID NO: 711518
ucugggaagacaaaguuac

SEQ ID NO: 711520 - RNA, 19 nt, Artificial Sequence
  Description of Artificial Sequence: Synthetic oligonucleotide
  Sense strand starting at position 385 of SEQ ID NO: 586354
uguacauugcauugucagu

SEQ ID NO: 711521 - RNA, 19 nt, Artificial Sequence
  Description of Artificial Sequence: Synthetic oligonucleotide
  Antisense strand to SEQ ID NO: 711520
acugacaaugcaauguaca

SEQ ID NO: 711522 - RNA, 19 nt, Artificial Sequence
  Description of Artificial Sequence: Synthetic oligonucleotide
  Sense strand starting at position 424 of SEQ ID NO: 586354
cuacuuauugcugacugua

SEQ ID NO: 711523 - RNA, 19 nt, Artificial Sequence
  Description of Artificial Sequence: Synthetic oligonucleotide
  Antisense strand to SEQ ID NO: 711522
uacagucagcaauaaguag

SEQ ID NO: 711524 - RNA, 19 nt, Artificial Sequence
  Description of Artificial Sequence: Synthetic oligonucleotide
  Sense strand starting at position 426 of SEQ ID NO: 586354
acuuauugcugacuguaaa

SEQ ID NO: 711525 - RNA, 19 nt, Artificial Sequence
  Description of Artificial Sequence: Synthetic oligonucleotide
  Antisense strand to SEQ ID NO: 711524
uuuacagucagcaauaagu

SEQ ID NO: 711526 - RNA, 19 nt, Artificial Sequence
  Description of Artificial Sequence: Synthetic oligonucleotide
  Sense strand starting at position 470 of SEQ ID NO: 586354
gauugaaagcuagguuaau

SEQ ID NO: 711527 - RNA, 19 nt, Artificial Sequence
  Description of Artificial Sequence: Synthetic oligonucleotide
  Antisense strand to SEQ ID NO: 711526
auuaaccuagcuuucaauc

SEQ ID NO: 711528 - RNA, 19 nt, Artificial Sequence
  Description of Artificial Sequence: Synthetic oligonucleotide
  Sense strand starting at position 471 of SEQ ID NO: 586354
auugaaagcuagguuaaua

SEQ ID NO: 711529 - RNA, 19 nt, Artificial Sequence
  Description of Artificial Sequence: Synthetic oligonucleotide
  Antisense strand to SEQ ID NO: 711528
uauuaaccuagcuuucaau

SEQ ID NO: 711530 - RNA, 19 nt, Artificial Sequence
  Description of Artificial Sequence: Synthetic oligonucleotide
  Sense strand starting at position 482 of SEQ ID NO: 586354
gguuaauaaggcuguuaaa

SEQ ID NO: 711531 - RNA, 19 nt, Artificial Sequence
  Description of Artificial Sequence: Synthetic oligonucleotide
  Antisense strand to SEQ ID NO: 711530
uuuaacagccuuauuaacc

SEQ ID NO: 711532 - RNA, 19 nt, Artificial Sequence
  Description of Artificial Sequence: Synthetic oligonucleotide
  Sense strand starting at position 820 of SEQ ID NO: 586354
ccgagaaacuguuacauua

SEQ ID NO: 711533 - RNA, 19 nt, Artificial Sequence
  Description of Artificial Sequence: Synthetic oligonucleotide
  Antisense strand to SEQ ID NO: 711532
uaauguaacaguuucucgg

SEQ ID NO: 711534 - RNA, 19 nt, Artificial Sequence
  Description of Artificial Sequence: Synthetic oligonucleotide
  Sense strand starting at position 902 of SEQ ID NO: 586354
uccuuaauauggguauaaa

SEQ ID NO: 711535 - RNA, 19 nt, Artificial Sequence
  Description of Artificial Sequence: Synthetic oligonucleotide
  Antisense strand to SEQ ID NO: 711534
uuuauacccauauuaagga

SEQ ID NO: 711536 - RNA, 19 nt, Artificial Sequence
  Description of Artificial Sequence: Synthetic oligonucleotide
  Sense strand starting at position 2352 of SEQ ID NO: 586354
ccaugaaguuaacaaaugu

SEQ ID NO: 711537 - RNA, 19 nt, Artificial Sequence
  Description of Artificial Sequence: Synthetic oligonucleotide
  Antisense strand to SEQ ID NO: 711536
acauuuguuaacuucaugg

SEQ ID NO: 711538 - RNA, 19 nt, Artificial Sequence
  Description of Artificial Sequence: Synthetic oligonucleotide
  Sense strand starting at position 2365 of SEQ ID NO: 586354
aaauguuggugauuaagua

SEQ ID NO: 711539 - RNA, 19 nt, Artificial Sequence
  Description of Artificial Sequence: Synthetic oligonucleotide
  Antisense strand to SEQ ID NO: 711538
uacuuaaucaccaacauuu

SEQ ID NO: 711540 - RNA, 19 nt, Artificial Sequence
  Description of Artificial Sequence: Synthetic oligonucleotide
  Sense strand starting at position 2366 of SEQ ID NO: 586354
aauguuggugauuaaguau

SEQ ID NO: 711541 - RNA, 19 nt, Artificial Sequence
  Description of Artificial Sequence: Synthetic oligonucleotide
  Antisense strand to SEQ ID NO: 711540
auacuuaaucaccaacauu

SEQ ID NO: 711542 - RNA, 19 nt, Artificial Sequence
  Description of Artificial Sequence: Synthetic oligonucleotide
  Sense strand starting at position 2373 of SEQ ID NO: 586354
gugauuaaguaugcuaggu

SEQ ID NO: 711543 - RNA, 19 nt, Artificial Sequence
  Description of Artificial Sequence: Synthetic oligonucleotide
  Antisense strand to SEQ ID NO: 711542
accuagcauacuuaaucac

SEQ ID NO: 711544 - RNA, 19 nt, Artificial Sequence
  Description of Artificial Sequence: Synthetic oligonucleotide
  Sense strand starting at position 2472 of SEQ ID NO: 586354
gccacuuagucuguagguu

SEQ ID NO: 711545 - RNA, 19 nt, Artificial Sequence
  Description of Artificial Sequence: Synthetic oligonucleotide
  Antisense strand to SEQ ID NO: 711544
aaccuacagacuaaguggc

SEQ ID NO: 711546 - RNA, 19 nt, Artificial Sequence
  Description of Artificial Sequence: Synthetic oligonucleotide
  Sense strand starting at position 2473 of SEQ ID NO: 586354
ccacuuagucuguagguuu

SEQ ID NO: 711547 - RNA, 19 nt, Artificial Sequence
  Description of Artificial Sequence: Synthetic oligonucleotide
  Antisense strand to SEQ ID NO: 711546
aaaccuacagacuaagugg

SEQ ID NO: 711548 - RNA, 19 nt, Artificial Sequence
  Description of Artificial Sequence: Synthetic oligonucleotide
  Sense strand starting at position 2486 of SEQ ID NO: 586354
agguuuagcggcuagaaag

SEQ ID NO: 711549 - RNA, 19 nt, Artificial Sequence
  Description of Artificial Sequence: Synthetic oligonucleotide
  Antisense strand to SEQ ID NO: 711548
cuuucuagccgcuaaaccu

SEQ ID NO: 711550 - RNA, 19 nt, Artificial Sequence
  Description of Artificial Sequence: Synthetic oligonucleotide
  Sense strand starting at position 2716 of SEQ ID NO: 586354
gggaauuaguaggaauauc

SEQ ID NO: 711551 - RNA, 19 nt, Artificial Sequence
  Description of Artificial Sequence: Synthetic oligonucleotide
  Antisense strand to SEQ ID NO: 711550
gauauuccuacuaauuccc

SEQ ID NO: 711552 - RNA, 19 nt, Artificial Sequence
  Description of Artificial Sequence: Synthetic oligonucleotide
  Sense strand starting at position 2800 of SEQ ID NO: 586354
gguagaauguaauauagca

SEQ ID NO: 711553 - RNA, 19 nt, Artificial Sequence
  Description of Artificial Sequence: Synthetic oligonucleotide
  Antisense strand to SEQ ID NO: 711552
ugcuauauuacauucuacc

SEQ ID NO: 711554 - RNA, 19 nt, Artificial Sequence
  Description of Artificial Sequence: Synthetic oligonucleotide
  Sense strand starting at position 2844 of SEQ ID NO: 586354
agaguauauuaacugcuua

SEQ ID NO: 711555 - RNA, 19 nt, Artificial Sequence
  Description of Artificial Sequence: Synthetic oligonucleotide
  Antisense strand to SEQ ID NO: 711554
uaagcaguuaauauacucu

SEQ ID NO: 711556 - RNA, 19 nt, Artificial Sequence
  Description of Artificial Sequence: Synthetic oligonucleotide
  Sense strand starting at position 2876 of SEQ ID NO: 586354
cguggagaggcuuaucugu

SEQ ID NO: 711557 - RNA, 19 nt, Artificial Sequence
  Description of Artificial Sequence: Synthetic oligonucleotide
  Antisense strand to SEQ ID NO: 711556
acagauaagccucuccacg

SEQ ID NO: 711558 - RNA, 19 nt, Artificial Sequence
  Description of Artificial Sequence: Synthetic oligonucleotide
  Sense strand starting at position 2878 of SEQ ID NO: 586354
uggagaggcuuaucugugu

SEQ ID NO: 711559 - RNA, 19 nt, Artificial Sequence
  Description of Artificial Sequence: Synthetic oligonucleotide
  Antisense strand to SEQ ID NO: 711558
acacagauaagccucucca

SEQ ID NO: 711560 - RNA, 19 nt, Artificial Sequence
  Description of Artificial Sequence: Synthetic oligonucleotide
  Sense strand starting at position 2942 of SEQ ID NO: 586354
ucccuagcgcugcuguaaa

SEQ ID NO: 711561 - RNA, 19 nt, Artificial Sequence
  Description of Artificial Sequence: Synthetic oligonucleotide
  Antisense strand to SEQ ID NO: 711560
uuuacagcagcgcuaggga

SEQ ID NO: 711562 - RNA, 19 nt, Artificial Sequence
  Description of Artificial Sequence: Synthetic oligonucleotide
  Sense strand starting at position 2994 of SEQ ID NO: 586354
auguauucccaaggacgua

SEQ ID NO: 711563 - RNA, 19 nt, Artificial Sequence
  Description of Artificial Sequence: Synthetic oligonucleotide
  Antisense strand to SEQ ID NO: 711562
uacguccuugggaauacau

SEQ ID NO: 711564 - RNA, 19 nt, Artificial Sequence
  Description of Artificial Sequence: Synthetic oligonucleotide
  Sense strand starting at position 2995 of SEQ ID NO: 586354
uguauucccaaggacguaa

SEQ ID NO: 711565 - RNA, 19 nt, Artificial Sequence
  Description of Artificial Sequence: Synthetic oligonucleotide
  Antisense strand to SEQ ID NO: 711564
uuacguccuugggaauaca

SEQ ID NO: 711566 - RNA, 19 nt, Artificial Sequence
  Description of Artificial Sequence: Synthetic oligonucleotide
  Sense strand starting at position 3008 of SEQ ID NO: 586354
acguaagacauauggugua

SEQ ID NO: 711567 - RNA, 19 nt, Artificial Sequence
  Description of Artificial Sequence: Synthetic oligonucleotide
  Antisense strand to SEQ ID NO: 711566
uacaccauaugucuuacgu

SEQ ID NO: 711568 - RNA, 19 nt, Artificial Sequence
  Description of Artificial Sequence: Synthetic oligonucleotide
  Sense strand starting at position 3020 of SEQ ID NO: 586354
ugguguaacaaauguaaga

SEQ ID NO: 711569 - RNA, 19 nt, Artificial Sequence
  Description of Artificial Sequence: Synthetic oligonucleotide
  Antisense strand to SEQ ID NO: 711568
ucuuacauuuguuacacca

SEQ ID NO: 711570 - RNA, 19 nt, Artificial Sequence
  Description of Artificial Sequence: Synthetic oligonucleotide
  Sense strand starting at position 3022 of SEQ ID NO: 586354
guguaacaaauguaagagu

SEQ ID NO: 711571 - RNA, 19 nt, Artificial Sequence
  Description of Artificial Sequence: Synthetic oligonucleotide
  Antisense strand to SEQ ID NO: 711570
acucuuacauuuguuacac

SEQ ID NO: 711572 - RNA, 19 nt, Artificial Sequence
  Description of Artificial Sequence: Synthetic oligonucleotide
  Sense strand starting at position 3039 of SEQ ID NO: 586354
guaauuuacugccuuuguu

SEQ ID NO: 711573 - RNA, 19 nt, Artificial Sequence
  Description of Artificial Sequence: Synthetic oligonucleotide
  Antisense strand to SEQ ID NO: 711572
aacaaaggcaguaaauuac

SEQ ID NO: 711574 - RNA, 19 nt, Artificial Sequence
  Description of Artificial Sequence: Synthetic oligonucleotide
  Sense strand starting at position 3172 of SEQ ID NO: 586354
cggugaucaccuuaauaau

SEQ ID NO: 711575 - RNA, 19 nt, Artificial Sequence
  Description of Artificial Sequence: Synthetic oligonucleotide
  Antisense strand to SEQ ID NO: 711574
auuauuaaggugaucaccg

SEQ ID NO: 711576 - RNA, 19 nt, Artificial Sequence
  Description of Artificial Sequence: Synthetic oligonucleotide
  Sense strand starting at position 3215 of SEQ ID NO: 586354
gucucucccgucuaugauu

SEQ ID NO: 711577 - RNA, 19 nt, Artificial Sequence
  Description of Artificial Sequence: Synthetic oligonucleotide
  Antisense strand to SEQ ID NO: 711576
aaucauagacgggagagac

SEQ ID NO: 711578 - RNA, 19 nt, Artificial Sequence
  Description of Artificial Sequence: Synthetic oligonucleotide
  Sense strand starting at position 3224 of SEQ ID NO: 586354
gucuaugauuugucccgca

SEQ ID NO: 711579 - RNA, 19 nt, Artificial Sequence
  Description of Artificial Sequence: Synthetic oligonucleotide
  Antisense strand to SEQ ID NO: 711578
ugcgggacaaaucauagac

SEQ ID NO: 711580 - RNA, 19 nt, Artificial Sequence
  Description of Artificial Sequence: Synthetic oligonucleotide
  Sense strand starting at position 3227 of SEQ ID NO: 586354
uaugauuugucccgcaaca

SEQ ID NO: 711581 - RNA, 19 nt, Artificial Sequence
  Description of Artificial Sequence: Synthetic oligonucleotide
  Antisense strand to SEQ ID NO: 711580
uguugcgggacaaaucaua

SEQ ID NO: 711582 - RNA, 19 nt, Artificial Sequence
  Description of Artificial Sequence: Synthetic oligonucleotide
  Sense strand starting at position 3344 of SEQ ID NO: 586354
cuccuauaaugccugugaa

SEQ ID NO: 711583 - RNA, 19 nt, Artificial Sequence
  Description of Artificial Sequence: Synthetic oligonucleotide
  Antisense strand to SEQ ID NO: 711582
uucacaggcauuauaggag

SEQ ID NO: 711584 - RNA, 19 nt, Artificial Sequence
  Description of Artificial Sequence: Synthetic oligonucleotide
  Sense strand starting at position 3345 of SEQ ID NO: 586354
uccuauaaugccugugaag

SEQ ID NO: 711585 - RNA, 19 nt, Artificial Sequence
  Description of Artificial Sequence: Synthetic oligonucleotide
  Antisense strand to SEQ ID NO: 711584
cuucacaggcauuauagga

SEQ ID NO: 711586 - RNA, 19 nt, Artificial Sequence
  Description of Artificial Sequence: Synthetic oligonucleotide
  Sense strand starting at position 3347 of SEQ ID NO: 586354
cuauaaugccugugaagaa

SEQ ID NO: 711587 - RNA, 19 nt, Artificial Sequence
  Description of Artificial Sequence: Synthetic oligonucleotide
  Antisense strand to SEQ ID NO: 711586
uucuucacaggcauuauag

SEQ ID NO: 711588 - RNA, 19 nt, Artificial Sequence
  Description of Artificial Sequence: Synthetic oligonucleotide
  Sense strand starting at position 3822 of SEQ ID NO: 586354
aaugcuacguggucacaaa

SEQ ID NO: 711589 - RNA, 19 nt, Artificial Sequence
  Description of Artificial Sequence: Synthetic oligonucleotide
  Antisense strand to SEQ ID NO: 711588
uuugugaccacguagcauu

SEQ ID NO: 711590 - RNA, 19 nt, Artificial Sequence
  Description of Artificial Sequence: Synthetic oligonucleotide
  Sense strand starting at position 3947 of SEQ ID NO: 586354
cuaagugagagcuaagcua

SEQ ID NO: 711591 - RNA, 19 nt, Artificial Sequence
  Description of Artificial Sequence: Synthetic oligonucleotide
  Antisense strand to SEQ ID NO: 711590
uagcuuagcucucacuuag

SEQ ID NO: 711592 - RNA, 19 nt, Artificial Sequence
  Description of Artificial Sequence: Synthetic oligonucleotide
  Sense strand starting at position 46 of SEQ ID NO: 586355
ggcguugcuguuuccaauu

SEQ ID NO: 711593 - RNA, 19 nt, Artificial Sequence
  Description of Artificial Sequence: Synthetic oligonucleotide
  Antisense strand to SEQ ID NO: 711592
aauuggaaacagcaacgcc

SEQ ID NO: 711594 - RNA, 19 nt, Artificial Sequence
  Description of Artificial Sequence: Synthetic oligonucleotide
  Sense strand starting at position 132 of SEQ ID NO: 586355
ugugauauauucccagaag

SEQ ID NO: 711595 - RNA, 19 nt, Artificial Sequence
  Description of Artificial Sequence: Synthetic oligonucleotide
  Antisense strand to SEQ ID NO: 711594
cuucugggaauauaucaca

SEQ ID NO: 711596 - RNA, 19 nt, Artificial Sequence
  Description of Artificial Sequence: Synthetic oligonucleotide
  Sense strand starting at position 195 of SEQ ID NO: 586355
auaucauccuuuguuauag

SEQ ID NO: 711597 - RNA, 19 nt, Artificial Sequence
  Description of Artificial Sequence: Synthetic oligonucleotide
  Antisense strand to SEQ ID NO: 711596
cuauaacaaaggaugauau

SEQ ID NO: 711598 - RNA, 19 nt, Artificial Sequence
  Description of Artificial Sequence: Synthetic oligonucleotide
  Sense strand starting at position 205 of SEQ ID NO: 586355
uuguuauaguacucaagac

SEQ ID NO: 711599 - RNA, 19 nt, Artificial Sequence
  Description of Artificial Sequence: Synthetic oligonucleotide
  Antisense strand to SEQ ID NO: 711598
gucuugaguacuauaacaa

SEQ ID NO: 711600 - RNA, 19 nt, Artificial Sequence
  Description of Artificial Sequence: Synthetic oligonucleotide
  Sense strand starting at position 230 of SEQ ID NO: 586355
auugcuggagcacauuaaa

SEQ ID NO: 711601 - RNA, 19 nt, Artificial Sequence
  Description of Artificial Sequence: Synthetic oligonucleotide
  Antisense strand to SEQ ID NO: 711600
uuuaaugugcuccagcaau

SEQ ID NO: 711602 - RNA, 19 nt, Artificial Sequence
  Description of Artificial Sequence: Synthetic oligonucleotide
  Sense strand starting at position 461 of SEQ ID NO: 586355
ggaacccauuccuuaggau

SEQ ID NO: 711603 - RNA, 19 nt, Artificial Sequence
  Description of Artificial Sequence: Synthetic oligonucleotide
  Antisense strand to SEQ ID NO: 711602
auccuaaggaauggguucc

SEQ ID NO: 711604 - RNA, 19 nt, Artificial Sequence
  Description of Artificial Sequence: Synthetic oligonucleotide
  Sense strand starting at position 647 of SEQ ID NO: 586355
ggcugcaucgcgucuuuca

SEQ ID NO: 711605 - RNA, 19 nt, Artificial Sequence
  Description of Artificial Sequence: Synthetic oligonucleotide
  Antisense strand to SEQ ID NO: 711604
ugaaagacgcgaugcagcc

SEQ ID NO: 711606 - RNA, 19 nt, Artificial Sequence
  Description of Artificial Sequence: Synthetic oligonucleotide
  Sense strand starting at position 774 of SEQ ID NO: 586355
accggcagccuguaauuaa

SEQ ID NO: 711607 - RNA, 19 nt, Artificial Sequence
  Description of Artificial Sequence: Synthetic oligonucleotide
  Antisense strand to SEQ ID NO: 711606
uuaauuacaggcugccggu

SEQ ID NO: 711608 - RNA, 19 nt, Artificial Sequence
  Description of Artificial Sequence: Synthetic oligonucleotide
  Sense strand starting at position 777 of SEQ ID NO: 586355
ggcagccuguaauuaagau

SEQ ID NO: 711609 - RNA, 19 nt, Artificial Sequence
  Description of Artificial Sequence: Synthetic oligonucleotide
  Antisense strand to SEQ ID NO: 711608
aucuuaauuacaggcugcc

SEQ ID NO: 711610 - RNA, 19 nt, Artificial Sequence
  Description of Artificial Sequence: Synthetic oligonucleotide
  Sense strand starting at position 823 of SEQ ID NO: 586355
ggguucugaugauucugau

SEQ ID NO: 711611 - RNA, 19 nt, Artificial Sequence
  Description of Artificial Sequence: Synthetic oligonucleotide
  Antisense strand to SEQ ID NO: 711610
aucagaaucaucagaaccc

SEQ ID NO: 711612 - RNA, 19 nt, Artificial Sequence
  Description of Artificial Sequence: Synthetic oligonucleotide
  Sense strand starting at position 829 of SEQ ID NO: 586355
ugaugauucugaugauuuc

SEQ ID NO: 711613 - RNA, 19 nt, Artificial Sequence
  Description of Artificial Sequence: Synthetic oligonucleotide
  Antisense strand to SEQ ID NO: 711612
gaaaucaucagaaucauca

SEQ ID NO: 711614 - RNA, 19 nt, Artificial Sequence
  Description of Artificial Sequence: Synthetic oligonucleotide
  Sense strand starting at position 838 of SEQ ID NO: 586355
ugaugauuucucugucagc

SEQ ID NO: 711615 - RNA, 19 nt, Artificial Sequence
  Description of Artificial Sequence: Synthetic oligonucleotide
  Antisense strand to SEQ ID NO: 711614
gcugacagagaaaucauca

SEQ ID NO: 711616 - RNA, 19 nt, Artificial Sequence
  Description of Artificial Sequence: Synthetic oligonucleotide
  Sense strand starting at position 839 of SEQ ID NO: 586355
gaugauuucucugucagcu

SEQ ID NO: 711617 - RNA, 19 nt, Artificial Sequence
  Description of Artificial Sequence: Synthetic oligonucleotide
  Antisense strand to SEQ ID NO: 711616
agcugacagagaaaucauc

SEQ ID NO: 711618 - RNA, 19 nt, Artificial Sequence
  Description of Artificial Sequence: Synthetic oligonucleotide
  Sense strand starting at position 1055 of SEQ ID NO: 586355
acacgauuccuccagcaag

SEQ ID NO: 711619 - RNA, 19 nt, Artificial Sequence
  Description of Artificial Sequence: Synthetic oligonucleotide
  Antisense strand to SEQ ID NO: 711618
cuugcuggaggaaucgugu

SEQ ID NO: 711620 - RNA, 19 nt, Artificial Sequence
  Description of Artificial Sequence: Synthetic oligonucleotide
  Sense strand starting at position 1244 of SEQ ID NO: 586355
gcgucugccguuuccuaaa

SEQ ID NO: 711621 - RNA, 19 nt, Artificial Sequence
  Description of Artificial Sequence: Synthetic oligonucleotide
  Antisense strand to SEQ ID NO: 711620
uuuaggaaacggcagacgc

SEQ ID NO: 711622 - RNA, 19 nt, Artificial Sequence
  Description of Artificial Sequence: Synthetic oligonucleotide
  Sense strand starting at position 1319 of SEQ ID NO: 586355
gaccguuucugacccaaag

SEQ ID NO: 711623 - RNA, 19 nt, Artificial Sequence
  Description of Artificial Sequence: Synthetic oligonucleotide
  Antisense strand to SEQ ID NO: 711622
cuuugggucagaaacgguc

SEQ ID NO: 711624 - RNA, 19 nt, Artificial Sequence
  Description of Artificial Sequence: Synthetic oligonucleotide
  Sense strand starting at position 2402 of SEQ ID NO: 586355
guauuccaauacuuugaga

SEQ ID NO: 711625 - RNA, 19 nt, Artificial Sequence
  Description of Artificial Sequence: Synthetic oligonucleotide
  Antisense strand to SEQ ID NO: 711624
ucucaaaguauuggaauac

SEQ ID NO: 711626 - RNA, 19 nt, Artificial Sequence
  Description of Artificial Sequence: Synthetic oligonucleotide
  Sense strand starting at position 2667 of SEQ ID NO: 586355
cuaagacaugcaugucaga

SEQ ID NO: 711627 - RNA, 19 nt, Artificial Sequence
  Description of Artificial Sequence: Synthetic oligonucleotide
  Antisense strand to SEQ ID NO: 711626
ucugacaugcaugucuuag

SEQ ID NO: 711628 - RNA, 19 nt, Artificial Sequence
  Description of Artificial Sequence: Synthetic oligonucleotide
  Sense strand starting at position 2767 of SEQ ID NO: 586355
aaaugcagggcuuguaaau

SEQ ID NO: 711629 - RNA, 19 nt, Artificial Sequence
  Description of Artificial Sequence: Synthetic oligonucleotide
  Antisense strand to SEQ ID NO: 711628
auuuacaagcccugcauuu

SEQ ID NO: 711630 - RNA, 19 nt, Artificial Sequence
  Description of Artificial Sequence: Synthetic oligonucleotide
  Sense strand starting at position 2773 of SEQ ID NO: 586355
agggcuuguaaaugaaugu

SEQ ID NO: 711631 - RNA, 19 nt, Artificial Sequence
  Description of Artificial Sequence: Synthetic oligonucleotide
  Antisense strand to SEQ ID NO: 711630
acauucauuuacaagcccu

SEQ ID NO: 711632 - RNA, 19 nt, Artificial Sequence
  Description of Artificial Sequence: Synthetic oligonucleotide
  Sense strand starting at position 2779 of SEQ ID NO: 586355
uguaaaugaauguggucau

SEQ ID NO: 711633 - RNA, 19 nt, Artificial Sequence
  Description of Artificial Sequence: Synthetic oligonucleotide
  Antisense strand to SEQ ID NO: 711632
augaccacauucauuuaca

SEQ ID NO: 711634 - RNA, 19 nt, Artificial Sequence
  Description of Artificial Sequence: Synthetic oligonucleotide
  Sense strand starting at position 2782 of SEQ ID NO: 586355
aaaugaauguggucaugag

SEQ ID NO: 711635 - RNA, 19 nt, Artificial Sequence
  Description of Artificial Sequence: Synthetic oligonucleotide
  Antisense strand to SEQ ID NO: 711634
cucaugaccacauucauuu

SEQ ID NO: 711636 - RNA, 19 nt, Artificial Sequence
  Description of Artificial Sequence: Synthetic oligonucleotide
  Sense strand starting at position 2899 of SEQ ID NO: 586355
gccagucuuccuuggagag

SEQ ID NO: 711637 - RNA, 19 nt, Artificial Sequence
  Description of Artificial Sequence: Synthetic oligonucleotide
  Antisense strand to SEQ ID NO: 711636
cucuccaaggaagacuggc

SEQ ID NO: 711638 - RNA, 19 nt, Artificial Sequence
  Description of Artificial Sequence: Synthetic oligonucleotide
  Sense strand starting at position 2920 of SEQ ID NO: 586355
gccagcuguccuggauuua

SEQ ID NO: 711639 - RNA, 19 nt, Artificial Sequence
  Description of Artificial Sequence: Synthetic oligonucleotide
  Antisense strand to SEQ ID NO: 711638
uaaauccaggacagcuggc

SEQ ID NO: 711640 - RNA, 19 nt, Artificial Sequence
  Description of Artificial Sequence: Synthetic oligonucleotide
  Sense strand starting at position 3076 of SEQ ID NO: 586355
ccaguaacuccugaagcau

SEQ ID NO: 711641 - RNA, 19 nt, Artificial Sequence
  Description of Artificial Sequence: Synthetic oligonucleotide
  Antisense strand to SEQ ID NO: 711640
augcuucaggaguuacugg

SEQ ID NO: 711642 - RNA, 19 nt, Artificial Sequence
  Description of Artificial Sequence: Synthetic oligonucleotide
  Sense strand starting at position 3110 of SEQ ID NO: 586355
ccaagccuuucuguuggaa

SEQ ID NO: 711643 - RNA, 19 nt, Artificial Sequence
  Description of Artificial Sequence: Synthetic oligonucleotide
  Antisense strand to SEQ ID NO: 711642
uuccaacagaaaggcuugg

SEQ ID NO: 711644 - RNA, 19 nt, Artificial Sequence
  Description of Artificial Sequence: Synthetic oligonucleotide
  Sense strand starting at position 3166 of SEQ ID NO: 586355
ggagauagcucaucucuaa

SEQ ID NO: 711645 - RNA, 19 nt, Artificial Sequence
  Description of Artificial Sequence: Synthetic oligonucleotide
  Antisense strand to SEQ ID NO: 711644
uuagagaugagcuaucucc

SEQ ID NO: 711646 - RNA, 19 nt, Artificial Sequence
  Description of Artificial Sequence: Synthetic oligonucleotide
  Sense strand starting at position 3212 of SEQ ID NO: 586355
uuacaagcuguccauugaa

SEQ ID NO: 711647 - RNA, 19 nt, Artificial Sequence
  Description of Artificial Sequence: Synthetic oligonucleotide
  Antisense strand to SEQ ID NO: 711646
uucaauggacagcuuguaa

SEQ ID NO: 711648 - RNA, 19 nt, Artificial Sequence
  Description of Artificial Sequence: Synthetic oligonucleotide
  Sense strand starting at position 3430 of SEQ ID NO: 586355
ucgagugauccucacacuu

SEQ ID NO: 711649 - RNA, 19 nt, Artificial Sequence
  Description of Artificial Sequence: Synthetic oligonucleotide
  Antisense strand to SEQ ID NO: 711648
aagugugaggaucacucga

SEQ ID NO: 711650 - RNA, 19 nt, Artificial Sequence
  Description of Artificial Sequence: Synthetic oligonucleotide
  Sense strand starting at position 3772 of SEQ ID NO: 586355
cuuugucaucuuggagaua

SEQ ID NO: 711651 - RNA, 19 nt, Artificial Sequence
  Description of Artificial Sequence: Synthetic oligonucleotide
  Antisense strand to SEQ ID NO: 711650
uaucuccaagaugacaaag

SEQ ID NO: 711652 - RNA, 19 nt, Artificial Sequence
  Description of Artificial Sequence: Synthetic oligonucleotide
  Sense strand starting at position 3786 of SEQ ID NO: 586355
agauaagagcaucguuacu

SEQ ID NO: 711653 - RNA, 19 nt, Artificial Sequence
  Description of Artificial Sequence: Synthetic oligonucleotide
  Antisense strand to SEQ ID NO: 711652
aguaacgaugcucuuaucu

SEQ ID NO: 711654 - RNA, 19 nt, Artificial Sequence
  Description of Artificial Sequence: Synthetic oligonucleotide
  Sense strand starting at position 3788 of SEQ ID NO: 586355
auaagagcaucguuacuga

SEQ ID NO: 711655 - RNA, 19 nt, Artificial Sequence
  Description of Artificial Sequence: Synthetic oligonucleotide
  Antisense strand to SEQ ID NO: 711654
ucaguaacgaugcucuuau

SEQ ID NO: 711656 - RNA, 19 nt, Artificial Sequence
  Description of Artificial Sequence: Synthetic oligonucleotide
  Sense strand starting at position 3791 of SEQ ID NO: 586355
agagcaucguuacugagaa

SEQ ID NO: 711657 - RNA, 19 nt, Artificial Sequence
  Description of Artificial Sequence: Synthetic oligonucleotide
  Antisense strand to SEQ ID NO: 711656
uucucaguaacgaugcucu

SEQ ID NO: 711658 - RNA, 19 nt, Artificial Sequence
  Description of Artificial Sequence: Synthetic oligonucleotide
  Sense strand starting at position 3839 of SEQ ID NO: 586355
augagauaugcagagcuuu

SEQ ID NO: 711659 - RNA, 19 nt, Artificial Sequence
  Description of Artificial Sequence: Synthetic oligonucleotide
  Antisense strand to SEQ ID NO: 711658
aaagcucugcauaucucau

SEQ ID NO: 711660 - RNA, 19 nt, Artificial Sequence
  Description of Artificial Sequence: Synthetic oligonucleotide
  Sense strand starting at position 3900 of SEQ ID NO: 586355
aucuuaauucuuuaggugu

SEQ ID NO: 711661 - RNA, 19 nt, Artificial Sequence
  Description of Artificial Sequence: Synthetic oligonucleotide
  Antisense strand to SEQ ID NO: 711660
acaccuaaagaauuaagau

SEQ ID NO: 711662 - RNA, 19 nt, Artificial Sequence
  Description of Artificial Sequence: Synthetic oligonucleotide
  Sense strand starting at position 3907 of SEQ ID NO: 586355
uucuuuaggugucuuagaa

SEQ ID NO: 711663 - RNA, 19 nt, Artificial Sequence
  Description of Artificial Sequence: Synthetic oligonucleotide
  Antisense strand to SEQ ID NO: 711662
uucuaagacaccuaaagaa

SEQ ID NO: 711664 - RNA, 19 nt, Artificial Sequence
  Description of Artificial Sequence: Synthetic oligonucleotide
  Sense strand starting at position 3914 of SEQ ID NO: 586355
ggugucuuagaaugugauc

SEQ ID NO: 711665 - RNA, 19 nt, Artificial Sequence
  Description of Artificial Sequence: Synthetic oligonucleotide
  Antisense strand to SEQ ID NO: 711664
gaucacauucuaagacacc

SEQ ID NO: 711666 - RNA, 19 nt, Artificial Sequence
  Description of Artificial Sequence: Synthetic oligonucleotide
  Sense strand starting at position 3919 of SEQ ID NO: 586355
cuuagaaugugauccacag

SEQ ID NO: 711667 - RNA, 19 nt, Artificial Sequence
  Description of Artificial Sequence: Synthetic oligonucleotide
  Antisense strand to SEQ ID NO: 711666
cuguggaucacauucuaag

SEQ ID NO: 711668 - RNA, 19 nt, Artificial Sequence
  Description of Artificial Sequence: Synthetic oligonucleotide
  Sense strand starting at position 3962 of SEQ ID NO: 586355
gaaaguggcuucucugauc

SEQ ID NO: 711669 - RNA, 19 nt, Artificial Sequence
  Description of Artificial Sequence: Synthetic oligonucleotide
  Antisense strand to SEQ ID NO: 711668
gaucagagaagccacuuuc

SEQ ID NO: 711670 - RNA, 19 nt, Artificial Sequence
  Description of Artificial Sequence: Synthetic oligonucleotide
  Sense strand starting at position 3967 of SEQ ID NO: 586355
uggcuucucugaucuccau

SEQ ID NO: 711671 - RNA, 19 nt, Artificial Sequence
  Description of Artificial Sequence: Synthetic oligonucleotide
  Antisense strand to SEQ ID NO: 711670
auggagaucagagaagcca

SEQ ID NO: 711672 - RNA, 19 nt, Artificial Sequence
  Description of Artificial Sequence: Synthetic oligonucleotide
  Sense strand starting at position 10 of SEQ ID NO: 586356
ucaaguaacugcugagcaa

SEQ ID NO: 711673 - RNA, 19 nt, Artificial Sequence
  Description of Artificial Sequence: Synthetic oligonucleotide
  Antisense strand to SEQ ID NO: 711672
uugcucagcaguuacuuga

SEQ ID NO: 711674 - RNA, 19 nt, Artificial Sequence
  Description of Artificial Sequence: Synthetic oligonucleotide
  Sense strand starting at position 46 of SEQ ID NO: 586356
ccagcuuuccucugugcau

SEQ ID NO: 711675 - RNA, 19 nt, Artificial Sequence
  Description of Artificial Sequence: Synthetic oligonucleotide
  Antisense strand to SEQ ID NO: 711674
augcacagaggaaagcugg

SEQ ID NO: 711676 - RNA, 19 nt, Artificial Sequence
  Description of Artificial Sequence: Synthetic oligonucleotide
  Sense strand starting at position 48 of SEQ ID NO: 586356
agcuuuccucugugcauga

SEQ ID NO: 711677 - RNA, 19 nt, Artificial Sequence
  Description of Artificial Sequence: Synthetic oligonucleotide
  Antisense strand to SEQ ID NO: 711676
ucaugcacagaggaaagcu

SEQ ID NO: 711678 - RNA, 19 nt, Artificial Sequence
  Description of Artificial Sequence: Synthetic oligonucleotide
  Sense strand starting at position 50 of SEQ ID NO: 586356
cuuuccucugugcaugaga

SEQ ID NO: 711679 - RNA, 19 nt, Artificial Sequence
  Description of Artificial Sequence: Synthetic oligonucleotide
  Antisense strand to SEQ ID NO: 711678
ucucaugcacagaggaaag

SEQ ID NO: 711680 - RNA, 19 nt, Artificial Sequence
  Description of Artificial Sequence: Synthetic oligonucleotide
  Sense strand starting at position 52 of SEQ ID NO: 586356
uuccucugugcaugagaua

SEQ ID NO: 711681 - RNA, 19 nt, Artificial Sequence
  Description of Artificial Sequence: Synthetic oligonucleotide
  Antisense strand to SEQ ID NO: 711680
uaucucaugcacagaggaa

SEQ ID NO: 711682 - RNA, 19 nt, Artificial Sequence
  Description of Artificial Sequence: Synthetic oligonucleotide
  Sense strand starting at position 55 of SEQ ID NO: 586356
cucugugcaugagauacaa

SEQ ID NO: 711683 - RNA, 19 nt, Artificial Sequence
  Description of Artificial Sequence: Synthetic oligonucleotide
  Antisense strand to SEQ ID NO: 711682
uuguaucucaugcacagag

SEQ ID NO: 711684 - RNA, 19 nt, Artificial Sequence
  Description of Artificial Sequence: Synthetic oligonucleotide
  Sense strand starting at position 109 of SEQ ID NO: 586356
agggaagggucagaaauga

SEQ ID NO: 711685 - RNA, 19 nt, Artificial Sequence
  Description of Artificial Sequence: Synthetic oligonucleotide
  Antisense strand to SEQ ID NO: 711684
ucauuucugacccuucccu

SEQ ID NO: 711686 - RNA, 19 nt, Artificial Sequence
  Description of Artificial Sequence: Synthetic oligonucleotide
  Sense strand starting at position 135 of SEQ ID NO: 586356
ggagcugcuguguagaaca

SEQ ID NO: 711687 - RNA, 19 nt, Artificial Sequence
  Description of Artificial Sequence: Synthetic oligonucleotide
  Antisense strand to SEQ ID NO: 711686
uguucuacacagcagcucc

SEQ ID NO: 711688 - RNA, 19 nt, Artificial Sequence
  Description of Artificial Sequence: Synthetic oligonucleotide
  Sense strand starting at position 140 of SEQ ID NO: 586356
ugcuguguagaacaugaua

SEQ ID NO: 711689 - RNA, 19 nt, Artificial Sequence
  Description of Artificial Sequence: Synthetic oligonucleotide
  Antisense strand to SEQ ID NO: 711688
uaucauguucuacacagca

SEQ ID NO: 711690 - RNA, 19 nt, Artificial Sequence
  Description of Artificial Sequence: Synthetic oligonucleotide
  Sense strand starting at position 449 of SEQ ID NO: 586356
auaugagacuccgucucaa

SEQ ID NO: 711691 - RNA, 19 nt, Artificial Sequence
  Description of Artificial Sequence: Synthetic oligonucleotide
  Antisense strand to SEQ ID NO: 711690
uugagacggagucucauau

SEQ ID NO: 711692 - RNA, 19 nt, Artificial Sequence
  Description of Artificial Sequence: Synthetic oligonucleotide
  Sense strand starting at position 674 of SEQ ID NO: 586356
gcaccuggccuggaauaua

SEQ ID NO: 711693 - RNA, 19 nt, Artificial Sequence
  Description of Artificial Sequence: Synthetic oligonucleotide
  Antisense strand to SEQ ID NO: 711692
uauauuccaggccaggugc

SEQ ID NO: 711694 - RNA, 19 nt, Artificial Sequence
  Description of Artificial Sequence: Synthetic oligonucleotide
  Sense strand starting at position 682 of SEQ ID NO: 586356
ccuggaauauaauugccaa

SEQ ID NO: 711695 - RNA, 19 nt, Artificial Sequence
  Description of Artificial Sequence: Synthetic oligonucleotide
  Antisense strand to SEQ ID NO: 711694
uuggcaauuauauuccagg

SEQ ID NO: 711696 - RNA, 19 nt, Artificial Sequence
  Description of Artificial Sequence: Synthetic oligonucleotide
  Sense strand starting at position 783 of SEQ ID NO: 586356
gcacaagaguuggacacua

SEQ ID NO: 711697 - RNA, 19 nt, Artificial Sequence
  Description of Artificial Sequence: Synthetic oligonucleotide
  Antisense strand to SEQ ID NO: 711696
uaguguccaacucuugugc

SEQ ID NO: 711698 - RNA, 19 nt, Artificial Sequence
  Description of Artificial Sequence: Synthetic oligonucleotide
  Sense strand starting at position 1082 of SEQ ID NO: 586356
cucucaaugugcugagaua

SEQ ID NO: 711699 - RNA, 19 nt, Artificial Sequence
  Description of Artificial Sequence: Synthetic oligonucleotide
  Antisense strand to SEQ ID NO: 711698
uaucucagcacauugagag

SEQ ID NO: 711700 - RNA, 19 nt, Artificial Sequence
  Description of Artificial Sequence: Synthetic oligonucleotide
  Sense strand starting at position 1083 of SEQ ID NO: 586356
ucucaaugugcugagauaa

SEQ ID NO: 711701 - RNA, 19 nt, Artificial Sequence
  Description of Artificial Sequence: Synthetic oligonucleotide
  Antisense strand to SEQ ID NO: 711700
uuaucucagcacauugaga

SEQ ID NO: 711702 - RNA, 19 nt, Artificial Sequence
  Description of Artificial Sequence: Synthetic oligonucleotide
  Sense strand starting at position 1251 of SEQ ID NO: 586356
ccugucugcuucucacgaa

SEQ ID NO: 711703 - RNA, 19 nt, Artificial Sequence
  Description of Artificial Sequence: Synthetic oligonucleotide
  Antisense strand to SEQ ID NO: 711702
uucgugagaagcagacagg

SEQ ID NO: 711704 - RNA, 19 nt, Artificial Sequence
  Description of Artificial Sequence: Synthetic oligonucleotide
  Sense strand starting at position 1252 of SEQ ID NO: 586356
cugucugcuucucacgaaa

SEQ ID NO: 711705 - RNA, 19 nt, Artificial Sequence
  Description of Artificial Sequence: Synthetic oligonucleotide
  Antisense strand to SEQ ID NO: 711704
uuucgugagaagcagacag

SEQ ID NO: 711706 - RNA, 19 nt, Artificial Sequence
  Description of Artificial Sequence: Synthetic oligonucleotide
  Sense strand starting at position 1535 of SEQ ID NO: 586356
uucgguuugucauccguca

SEQ ID NO: 711707 - RNA, 19 nt, Artificial Sequence
  Description of Artificial Sequence: Synthetic oligonucleotide
  Antisense strand to SEQ ID NO: 711706
ugacggaugacaaaccgaa

SEQ ID NO: 711708 - RNA, 19 nt, Artificial Sequence
  Description of Artificial Sequence: Synthetic oligonucleotide
  Sense strand starting at position 1536 of SEQ ID NO: 586356
ucgguuugucauccgucaa

SEQ ID NO: 711709 - RNA, 19 nt, Artificial Sequence
  Description of Artificial Sequence: Synthetic oligonucleotide
  Antisense strand to SEQ ID NO: 711708
uugacggaugacaaaccga

SEQ ID NO: 711710 - RNA, 19 nt, Artificial Sequence
  Description of Artificial Sequence: Synthetic oligonucleotide
  Sense strand starting at position 1537 of SEQ ID NO: 586356
cgguuugucauccgucaaa

SEQ ID NO: 711711 - RNA, 19 nt, Artificial Sequence
  Description of Artificial Sequence: Synthetic oligonucleotide
  Antisense strand to SEQ ID NO: 711710
uuugacggaugacaaaccg

SEQ ID NO: 711712 - RNA, 19 nt, Artificial Sequence
  Description of Artificial Sequence: Synthetic oligonucleotide
  Sense strand starting at position 1872 of SEQ ID NO: 586356
gccguucaccgagaacaaa

SEQ ID NO: 711713 - RNA, 19 nt, Artificial Sequence
  Description of Artificial Sequence: Synthetic oligonucleotide
  Antisense strand to SEQ ID NO: 711712
uuuguucucggugaacggc

SEQ ID NO: 711714 - RNA, 19 nt, Artificial Sequence
  Description of Artificial Sequence: Synthetic oligonucleotide
  Sense strand starting at position 1914 of SEQ ID NO: 586356
ccaaauuaucggcgcucaa

SEQ ID NO: 711715 - RNA, 19 nt, Artificial Sequence
  Description of Artificial Sequence: Synthetic oligonucleotide
  Antisense strand to SEQ ID NO: 711714
uugagcgccgauaauuugg

SEQ ID NO: 711716 - RNA, 19 nt, Artificial Sequence
  Description of Artificial Sequence: Synthetic oligonucleotide
  Sense strand starting at position 2100 of SEQ ID NO: 586356
gaaauccguucugguauuu

SEQ ID NO: 711717 - RNA, 19 nt, Artificial Sequence
  Description of Artificial Sequence: Synthetic oligonucleotide
  Antisense strand to SEQ ID NO: 711716
aaauaccagaacggauuuc

SEQ ID NO: 711718 - RNA, 19 nt, Artificial Sequence
  Description of Artificial Sequence: Synthetic oligonucleotide
  Sense strand starting at position 2131 of SEQ ID NO: 586356
ucgugaagagugcagugau

SEQ ID NO: 711719 - RNA, 19 nt, Artificial Sequence
  Description of Artificial Sequence: Synthetic oligonucleotide
  Antisense strand to SEQ ID NO: 711718
aucacugcacucuucacga

SEQ ID NO: 711720 - RNA, 19 nt, Artificial Sequence
  Description of Artificial Sequence: Synthetic oligonucleotide
  Sense strand starting at position 2132 of SEQ ID NO: 586356
cgugaagagugcagugaua

SEQ ID NO: 711721 - RNA, 19 nt, Artificial Sequence
  Description of Artificial Sequence: Synthetic oligonucleotide
  Antisense strand to SEQ ID NO: 711720
uaucacugcacucuucacg

SEQ ID NO: 711722 - RNA, 19 nt, Artificial Sequence
  Description of Artificial Sequence: Synthetic oligonucleotide
  Sense strand starting at position 2134 of SEQ ID NO: 586356
ugaagagugcagugauauc

SEQ ID NO: 711723 - RNA, 19 nt, Artificial Sequence
  Description of Artificial Sequence: Synthetic oligonucleotide
  Antisense strand to SEQ ID NO: 711722
gauaucacugcacucuuca

SEQ ID NO: 711724 - RNA, 19 nt, Artificial Sequence
  Description of Artificial Sequence: Synthetic oligonucleotide
  Sense strand starting at position 2147 of SEQ ID NO: 586356
gauauccguucuggugaua

SEQ ID NO: 711725 - RNA, 19 nt, Artificial Sequence
  Description of Artificial Sequence: Synthetic oligonucleotide
  Antisense strand to SEQ ID NO: 711724
uaucaccagaacggauauc

SEQ ID NO: 711726 - RNA, 19 nt, Artificial Sequence
  Description of Artificial Sequence: Synthetic oligonucleotide
  Sense strand starting at position 2506 of SEQ ID NO: 586356
guuuguuuaaggcagcgua

SEQ ID NO: 711727 - RNA, 19 nt, Artificial Sequence
  Description of Artificial Sequence: Synthetic oligonucleotide
  Antisense strand to SEQ ID NO: 711726
uacgcugccuuaaacaaac

SEQ ID NO: 711728 - RNA, 19 nt, Artificial Sequence
  Description of Artificial Sequence: Synthetic oligonucleotide
  Sense strand starting at position 2595 of SEQ ID NO: 586356
cgccuugaauuccuggauu

SEQ ID NO: 711729 - RNA, 19 nt, Artificial Sequence
  Description of Artificial Sequence: Synthetic oligonucleotide
  Antisense strand to SEQ ID NO: 711728
aauccaggaauucaaggcg

SEQ ID NO: 711730 - RNA, 19 nt, Artificial Sequence
  Description of Artificial Sequence: Synthetic oligonucleotide
  Sense strand starting at position 3033 of SEQ ID NO: 586356
acuacaccugaccgaaauu

SEQ ID NO: 711731 - RNA, 19 nt, Artificial Sequence
  Description of Artificial Sequence: Synthetic oligonucleotide
  Antisense strand to SEQ ID NO: 711730
aauuucggucagguguagu

SEQ ID NO: 711732 - RNA, 19 nt, Artificial Sequence
  Description of Artificial Sequence: Synthetic oligonucleotide
  Sense strand starting at position 3083 of SEQ ID NO: 586356
ggaggaauuagcuagccua

SEQ ID NO: 711733 - RNA, 19 nt, Artificial Sequence
  Description of Artificial Sequence: Synthetic oligonucleotide
  Antisense strand to SEQ ID NO: 711732
uaggcuagcuaauuccucc

SEQ ID NO: 711734 - RNA, 19 nt, Artificial Sequence
  Description of Artificial Sequence: Synthetic oligonucleotide
  Sense strand starting at position 3086 of SEQ ID NO: 586356
ggaauuagcuagccuagag

SEQ ID NO: 711735 - RNA, 19 nt, Artificial Sequence
  Description of Artificial Sequence: Synthetic oligonucleotide
  Antisense strand to SEQ ID NO: 711734
cucuaggcuagcuaauucc

SEQ ID NO: 711736 - RNA, 19 nt, Artificial Sequence
  Description of Artificial Sequence: Synthetic oligonucleotide
  Sense strand starting at position 3146 of SEQ ID NO: 586356
cugugagacuugcaagcau

SEQ ID NO: 711737 - RNA, 19 nt, Artificial Sequence
  Description of Artificial Sequence: Synthetic oligonucleotide
  Antisense strand to SEQ ID NO: 711736
augcuugcaagucucacag

SEQ ID NO: 711738 - RNA, 19 nt, Artificial Sequence
  Description of Artificial Sequence: Synthetic oligonucleotide
  Sense strand starting at position 3157 of SEQ ID NO: 586356
gcaagcaugggacaacauu

SEQ ID NO: 711739 - RNA, 19 nt, Artificial Sequence
  Description of Artificial Sequence: Synthetic oligonucleotide
  Antisense strand to SEQ ID NO: 711738
aauguugucccaugcuugc

SEQ ID NO: 711740 - RNA, 19 nt, Artificial Sequence
  Description of Artificial Sequence: Synthetic oligonucleotide
  Sense strand starting at position 3165 of SEQ ID NO: 586356
gggacaacauugcuuccau

SEQ ID NO: 711741 - RNA, 19 nt, Artificial Sequence
  Description of Artificial Sequence: Synthetic oligonucleotide
  Antisense strand to SEQ ID NO: 711740
auggaagcaauguuguccc

SEQ ID NO: 711742 - RNA, 19 nt, Artificial Sequence
  Description of Artificial Sequence: Synthetic oligonucleotide
  Sense strand starting at position 3196 of SEQ ID NO: 586356
cuguaaggagcccguguua

SEQ ID NO: 711743 - RNA, 19 nt, Artificial Sequence
  Description of Artificial Sequence: Synthetic oligonucleotide
  Antisense strand to SEQ ID NO: 711742
uaacacgggcuccuuacag

SEQ ID NO: 711744 - RNA, 19 nt, Artificial Sequence
  Description of Artificial Sequence: Synthetic oligonucleotide
  Sense strand starting at position 3221 of SEQ ID NO: 586356
ccucgaguucagggucuga

SEQ ID NO: 711745 - RNA, 19 nt, Artificial Sequence
  Description of Artificial Sequence: Synthetic oligonucleotide
  Antisense strand to SEQ ID NO: 711744
ucagacccugaacucgagg

SEQ ID NO: 711746 - RNA, 19 nt, Artificial Sequence
  Description of Artificial Sequence: Synthetic oligonucleotide
  Sense strand starting at position 3260 of SEQ ID NO: 586356
gguggagucugagcgcuuu

SEQ ID NO: 711747 - RNA, 19 nt, Artificial Sequence
  Description of Artificial Sequence: Synthetic oligonucleotide
  Antisense strand to SEQ ID NO: 711746
aaagcgcucagacuccacc

SEQ ID NO: 711748 - RNA, 19 nt, Artificial Sequence
  Description of Artificial Sequence: Synthetic oligonucleotide
  Sense strand starting at position 3384 of SEQ ID NO: 586356
gggugacuuugugaaccuu

SEQ ID NO: 711749 - RNA, 19 nt, Artificial Sequence
  Description of Artificial Sequence: Synthetic oligonucleotide
  Antisense strand to SEQ ID NO: 711748
aagguucacaaagucaccc

SEQ ID NO: 711750 - RNA, 19 nt, Artificial Sequence
  Description of Artificial Sequence: Synthetic oligonucleotide
  Sense strand starting at position 3439 of SEQ ID NO: 586356
gcugcacuuugugcauaaa

SEQ ID NO: 711751 - RNA, 19 nt, Artificial Sequence
  Description of Artificial Sequence: Synthetic oligonucleotide
  Antisense strand to SEQ ID NO: 711750
uuuaugcacaaagugcagc

SEQ ID NO: 711752 - RNA, 19 nt, Artificial Sequence
  Description of Artificial Sequence: Synthetic oligonucleotide
  Sense strand starting at position 274 of SEQ ID NO: 586357
acccuaccaguuuaaguua

SEQ ID NO: 711753 - RNA, 19 nt, Artificial Sequence
  Description of Artificial Sequence: Synthetic oligonucleotide
  Antisense strand to SEQ ID NO: 711752
uaacuuaaacugguagggu

SEQ ID NO: 711754 - RNA, 19 nt, Artificial Sequence
  Description of Artificial Sequence: Synthetic oligonucleotide
  Sense strand starting at position 277 of SEQ ID NO: 586357
cuaccaguuuaaguuauua

SEQ ID NO: 711755 - RNA, 19 nt, Artificial Sequence
  Description of Artificial Sequence: Synthetic oligonucleotide
  Antisense strand to SEQ ID NO: 711754
uaauaacuuaaacugguag

SEQ ID NO: 711756 - RNA, 19 nt, Artificial Sequence
  Description of Artificial Sequence: Synthetic oligonucleotide
  Sense strand starting at position 288 of SEQ ID NO: 586357
aguuauuagcauugaaaug

SEQ ID NO: 711757 - RNA, 19 nt, Artificial Sequence
  Description of Artificial Sequence: Synthetic oligonucleotide
  Antisense strand to SEQ ID NO: 711756
cauuucaaugcuaauaacu

SEQ ID NO: 711758 - RNA, 19 nt, Artificial Sequence
  Description of Artificial Sequence: Synthetic oligonucleotide
  Sense strand starting at position 381 of SEQ ID NO: 586357
auaguugacucagcaagaa

SEQ ID NO: 711759 - RNA, 19 nt, Artificial Sequence
  Description of Artificial Sequence: Synthetic oligonucleotide
  Antisense strand to SEQ ID NO: 711758
uucuugcugagucaacuau

SEQ ID NO: 711760 - RNA, 19 nt, Artificial Sequence
  Description of Artificial Sequence: Synthetic oligonucleotide
  Sense strand starting at position 517 of SEQ ID NO: 586357
ugccauucugcugaacauu

SEQ ID NO: 711761 - RNA, 19 nt, Artificial Sequence
  Description of Artificial Sequence: Synthetic oligonucleotide
  Antisense strand to SEQ ID NO: 711760
aauguucagcagaauggca

SEQ ID NO: 711762 - RNA, 19 nt, Artificial Sequence
  Description of Artificial Sequence: Synthetic oligonucleotide
  Sense strand starting at position 567 of SEQ ID NO: 586357
gaaagaauccucuguuacg

SEQ ID NO: 711763 - RNA, 19 nt, Artificial Sequence
  Description of Artificial Sequence: Synthetic oligonucleotide
  Antisense strand to SEQ ID NO: 711762
cguaacagaggauucuuuc

SEQ ID NO: 711764 - RNA, 19 nt, Artificial Sequence
  Description of Artificial Sequence: Synthetic oligonucleotide
  Sense strand starting at position 576 of SEQ ID NO: 586357
cucuguuacgcagaauaac

SEQ ID NO: 711765 - RNA, 19 nt, Artificial Sequence
  Description of Artificial Sequence: Synthetic oligonucleotide
  Antisense strand to SEQ ID NO: 711764
guuauucugcguaacagag

SEQ ID NO: 711766 - RNA, 19 nt, Artificial Sequence
  Description of Artificial Sequence: Synthetic oligonucleotide
  Sense strand starting at position 682 of SEQ ID NO: 586357
acaauuugucuacguauua

SEQ ID NO: 711767 - RNA, 19 nt, Artificial Sequence
  Description of Artificial Sequence: Synthetic oligonucleotide
  Antisense strand to SEQ ID NO: 711766
uaauacguagacaaauugu

SEQ ID NO: 711768 - RNA, 19 nt, Artificial Sequence
  Description of Artificial Sequence: Synthetic oligonucleotide
  Sense strand starting at position 695 of SEQ ID NO: 586357
guauuaagaacuuaacggu

SEQ ID NO: 711769 - RNA, 19 nt, Artificial Sequence
  Description of Artificial Sequence: Synthetic oligonucleotide
  Antisense strand to SEQ ID NO: 711768
accguuaaguucuuaauac

SEQ ID NO: 711770 - RNA, 19 nt, Artificial Sequence
  Description of Artificial Sequence: Synthetic oligonucleotide
  Sense strand starting at position 921 of SEQ ID NO: 586357
guuuguaauguugaaacca

SEQ ID NO: 711771 - RNA, 19 nt, Artificial Sequence
  Description of Artificial Sequence: Synthetic oligonucleotide
  Antisense strand to SEQ ID NO: 711770
ugguuucaacauuacaaac

SEQ ID NO: 711772 - RNA, 19 nt, Artificial Sequence
  Description of Artificial Sequence: Synthetic oligonucleotide
  Sense strand starting at position 1065 of SEQ ID NO: 586357
gcgcgucugacuuuaaauu

SEQ ID NO: 711773 - RNA, 19 nt, Artificial Sequence
  Description of Artificial Sequence: Synthetic oligonucleotide
  Antisense strand to SEQ ID NO: 711772
aauuuaaagucagacgcgc

SEQ ID NO: 711774 - RNA, 19 nt, Artificial Sequence
  Description of Artificial Sequence: Synthetic oligonucleotide
  Sense strand starting at position 1367 of SEQ ID NO: 586357
gcgggagaagucugaagaa

SEQ ID NO: 711775 - RNA, 19 nt, Artificial Sequence
  Description of Artificial Sequence: Synthetic oligonucleotide
  Antisense strand to SEQ ID NO: 711774
uucuucagacuucucccgc

SEQ ID NO: 711776 - RNA, 19 nt, Artificial Sequence
  Description of Artificial Sequence: Synthetic oligonucleotide
  Sense strand starting at position 1442 of SEQ ID NO: 586357
ggcuucuuacccuggaaau

SEQ ID NO: 711777 - RNA, 19 nt, Artificial Sequence
  Description of Artificial Sequence: Synthetic oligonucleotide
  Antisense strand to SEQ ID NO: 711776
auuuccaggguaagaagcc

SEQ ID NO: 711778 - RNA, 19 nt, Artificial Sequence
  Description of Artificial Sequence: Synthetic oligonucleotide
  Sense strand starting at position 1443 of SEQ ID NO: 586357
gcuucuuacccuggaaaug

SEQ ID NO: 711779 - RNA, 19 nt, Artificial Sequence
  Description of Artificial Sequence: Synthetic oligonucleotide
  Antisense strand to SEQ ID NO: 711778
cauuuccaggguaagaagc

SEQ ID NO: 711780 - RNA, 19 nt, Artificial Sequence
  Description of Artificial Sequence: Synthetic oligonucleotide
  Sense strand starting at position 1444 of SEQ ID NO: 586357
cuucuuacccuggaaaugu

SEQ ID NO: 711781 - RNA, 19 nt, Artificial Sequence
  Description of Artificial Sequence: Synthetic oligonucleotide
  Antisense strand to SEQ ID NO: 711780
acauuuccaggguaagaag

SEQ ID NO: 711782 - RNA, 19 nt, Artificial Sequence
  Description of Artificial Sequence: Synthetic oligonucleotide
  Sense strand starting at position 2483 of SEQ ID NO: 586357
ugcgcuguccuguugacuu

SEQ ID NO: 711783 - RNA, 19 nt, Artificial Sequence
  Description of Artificial Sequence: Synthetic oligonucleotide
  Antisense strand to SEQ ID NO: 711782
aagucaacaggacagcgca

SEQ ID NO: 711784 - RNA, 19 nt, Artificial Sequence
  Description of Artificial Sequence: Synthetic oligonucleotide
  Sense strand starting at position 2945 of SEQ ID NO: 586357
ggcgacagucauggaacua

SEQ ID NO: 711785 - RNA, 19 nt, Artificial Sequence
  Description of Artificial Sequence: Synthetic oligonucleotide
  Antisense strand to SEQ ID NO: 711784
uaguuccaugacugucgcc

SEQ ID NO: 711786 - RNA, 19 nt, Artificial Sequence
  Description of Artificial Sequence: Synthetic oligonucleotide
  Sense strand starting at position 2946 of SEQ ID NO: 586357
gcgacagucauggaacuau

SEQ ID NO: 711787 - RNA, 19 nt, Artificial Sequence
  Description of Artificial Sequence: Synthetic oligonucleotide
  Antisense strand to SEQ ID NO: 711786
auaguuccaugacugucgc

SEQ ID NO: 711788 - RNA, 19 nt, Artificial Sequence
  Description of Artificial Sequence: Synthetic oligonucleotide
  Sense strand starting at position 2976 of SEQ ID NO: 586357
aguuaaagauguuuaugac

SEQ ID NO: 711789 - RNA, 19 nt, Artificial Sequence
  Description of Artificial Sequence: Synthetic oligonucleotide
  Antisense strand to SEQ ID NO: 711788
gucauaaacaucuuuaacu

SEQ ID NO: 711790 - RNA, 19 nt, Artificial Sequence
  Description of Artificial Sequence: Synthetic oligonucleotide
  Sense strand starting at position 2977 of SEQ ID NO: 586357
guuaaagauguuuaugacu

SEQ ID NO: 711791 - RNA, 19 nt, Artificial Sequence
  Description of Artificial Sequence: Synthetic oligonucleotide
  Antisense strand to SEQ ID NO: 711790
agucauaaacaucuuuaac

SEQ ID NO: 711792 - RNA, 19 nt, Artificial Sequence
  Description of Artificial Sequence: Synthetic oligonucleotide
  Sense strand starting at position 2982 of SEQ ID NO: 586357
agauguuuaugacucgaga

SEQ ID NO: 711793 - RNA, 19 nt, Artificial Sequence
  Description of Artificial Sequence: Synthetic oligonucleotide
  Antisense strand to SEQ ID NO: 711792
ucucgagucauaaacaucu

SEQ ID NO: 711794 - RNA, 19 nt, Artificial Sequence
  Description of Artificial Sequence: Synthetic oligonucleotide
  Sense strand starting at position 2984 of SEQ ID NO: 586357
auguuuaugacucgagaga

SEQ ID NO: 711795 - RNA, 19 nt, Artificial Sequence
  Description of Artificial Sequence: Synthetic oligonucleotide
  Antisense strand to SEQ ID NO: 711794
ucucucgagucauaaacau

SEQ ID NO: 711796 - RNA, 19 nt, Artificial Sequence
  Description of Artificial Sequence: Synthetic oligonucleotide
  Sense strand starting at position 3038 of SEQ ID NO: 586357
agagauugauuugauaucu

SEQ ID NO: 711797 - RNA, 19 nt, Artificial Sequence
  Description of Artificial Sequence: Synthetic oligonucleotide
  Antisense strand to SEQ ID NO: 711796
agauaucaaaucaaucucu

SEQ ID NO: 711798 - RNA, 19 nt, Artificial Sequence
  Description of Artificial Sequence: Synthetic oligonucleotide
  Sense strand starting at position 3074 of SEQ ID NO: 586357
ugcaucaaggucuauugau

SEQ ID NO: 711799 - RNA, 19 nt, Artificial Sequence
  Description of Artificial Sequence: Synthetic oligonucleotide
  Antisense strand to SEQ ID NO: 711798
aucaauagaccuugaugca

SEQ ID NO: 711800 - RNA, 19 nt, Artificial Sequence
  Description of Artificial Sequence: Synthetic oligonucleotide
  Sense strand starting at position 3123 of SEQ ID NO: 586357
acagaucuugaguggugga

SEQ ID NO: 711801 - RNA, 19 nt, Artificial Sequence
  Description of Artificial Sequence: Synthetic oligonucleotide
  Antisense strand to SEQ ID NO: 711800
uccaccacucaagaucugu

SEQ ID NO: 711802 - RNA, 19 nt, Artificial Sequence
  Description of Artificial Sequence: Synthetic oligonucleotide
  Sense strand starting at position 3124 of SEQ ID NO: 586357
cagaucuugagugguggaa

SEQ ID NO: 711803 - RNA, 19 nt, Artificial Sequence
  Description of Artificial Sequence: Synthetic oligonucleotide
  Antisense strand to SEQ ID NO: 711802
uuccaccacucaagaucug

SEQ ID NO: 711804 - RNA, 19 nt, Artificial Sequence
  Description of Artificial Sequence: Synthetic oligonucleotide
  Sense strand starting at position 3141 of SEQ ID NO: 586357
aaggaaguguaguuugaac

SEQ ID NO: 711805 - RNA, 19 nt, Artificial Sequence
  Description of Artificial Sequence: Synthetic oligonucleotide
  Antisense strand to SEQ ID NO: 711804
guucaaacuacacuuccuu

SEQ ID NO: 711806 - RNA, 19 nt, Artificial Sequence
  Description of Artificial Sequence: Synthetic oligonucleotide
  Sense strand starting at position 3143 of SEQ ID NO: 586357
ggaaguguaguuugaacaa

SEQ ID NO: 711807 - RNA, 19 nt, Artificial Sequence
  Description of Artificial Sequence: Synthetic oligonucleotide
  Antisense strand to SEQ ID NO: 711806
uuguucaaacuacacuucc

SEQ ID NO: 711808 - RNA, 19 nt, Artificial Sequence
  Description of Artificial Sequence: Synthetic oligonucleotide
  Sense strand starting at position 3172 of SEQ ID NO: 586357
uauuguaauuucuauggga

SEQ ID NO: 711809 - RNA, 19 nt, Artificial Sequence
  Description of Artificial Sequence: Synthetic oligonucleotide
  Antisense strand to SEQ ID NO: 711808
ucccauagaaauuacaaua

SEQ ID NO: 711810 - RNA, 19 nt, Artificial Sequence
  Description of Artificial Sequence: Synthetic oligonucleotide
  Sense strand starting at position 3347 of SEQ ID NO: 586357
auaagcgucguugaugaaa

SEQ ID NO: 711811 - RNA, 19 nt, Artificial Sequence
  Description of Artificial Sequence: Synthetic oligonucleotide
  Antisense strand to SEQ ID NO: 711810
uuucaucaacgacgcuuau

SEQ ID NO: 711812 - RNA, 19 nt, Artificial Sequence
  Description of Artificial Sequence: Synthetic oligonucleotide
  Sense strand starting at position 3416 of SEQ ID NO: 586357
auuggaaucauaugggcuu

SEQ ID NO: 711813 - RNA, 19 nt, Artificial Sequence
  Description of Artificial Sequence: Synthetic oligonucleotide
  Antisense strand to SEQ ID NO: 711812
aagcccauaugauuccaau

SEQ ID NO: 711814 - RNA, 19 nt, Artificial Sequence
  Description of Artificial Sequence: Synthetic oligonucleotide
  Sense strand starting at position 3444 of SEQ ID NO: 586357
cuuggccucuggguaauuu

SEQ ID NO: 711815 - RNA, 19 nt, Artificial Sequence
  Description of Artificial Sequence: Synthetic oligonucleotide
  Antisense strand to SEQ ID NO: 711814
aaauuacccagaggccaag

SEQ ID NO: 711816 - RNA, 19 nt, Artificial Sequence
  Description of Artificial Sequence: Synthetic oligonucleotide
  Sense strand starting at position 3495 of SEQ ID NO: 586357
aguacuucucagggauguu

SEQ ID NO: 711817 - RNA, 19 nt, Artificial Sequence
  Description of Artificial Sequence: Synthetic oligonucleotide
  Antisense strand to SEQ ID NO: 711816
aacaucccugagaaguacu

SEQ ID NO: 711818 - RNA, 19 nt, Artificial Sequence
  Description of Artificial Sequence: Synthetic oligonucleotide
  Sense strand starting at position 3496 of SEQ ID NO: 586357
guacuucucagggauguug

SEQ ID NO: 711819 - RNA, 19 nt, Artificial Sequence
  Description of Artificial Sequence: Synthetic oligonucleotide
  Antisense strand to SEQ ID NO: 711818
caacaucccugagaaguac

SEQ ID NO: 711820 - RNA, 19 nt, Artificial Sequence
  Description of Artificial Sequence: Synthetic oligonucleotide
  Sense strand starting at position 3694 of SEQ ID NO: 586357
gguuuccuuaaggguaauu

SEQ ID NO: 711821 - RNA, 19 nt, Artificial Sequence
  Description of Artificial Sequence: Synthetic oligonucleotide
  Antisense strand to SEQ ID NO: 711820
aauuacccuuaaggaaacc

SEQ ID NO: 711822 - RNA, 19 nt, Artificial Sequence
  Description of Artificial Sequence: Synthetic oligonucleotide
  Sense strand starting at position 3716 of SEQ ID NO: 586357
guagguggcagagauaagu

SEQ ID NO: 711823 - RNA, 19 nt, Artificial Sequence
  Description of Artificial Sequence: Synthetic oligonucleotide
  Antisense strand to SEQ ID NO: 711822
acuuaucucugccaccuac

SEQ ID NO: 711824 - RNA, 19 nt, Artificial Sequence
  Description of Artificial Sequence: Synthetic oligonucleotide
  Sense strand starting at position 3880 of SEQ ID NO: 586357
gcuucuauugaggaacuuu

SEQ ID NO: 711825 - RNA, 19 nt, Artificial Sequence
  Description of Artificial Sequence: Synthetic oligonucleotide
  Antisense strand to SEQ ID NO: 711824
aaaguuccucaauagaagc

SEQ ID NO: 711826 - RNA, 19 nt, Artificial Sequence
  Description of Artificial Sequence: Synthetic oligonucleotide
  Sense strand starting at position 3928 of SEQ ID NO: 586357
ucuugugaaagaugaauug

SEQ ID NO: 711827 - RNA, 19 nt, Artificial Sequence
  Description of Artificial Sequence: Synthetic oligonucleotide
  Antisense strand to SEQ ID NO: 711826
caauucaucuuucacaaga

SEQ ID NO: 711828 - RNA, 19 nt, Artificial Sequence
  Description of Artificial Sequence: Synthetic oligonucleotide
  Sense strand starting at position 3948 of SEQ ID NO: 586357
gugucuuauuugccgugaa

SEQ ID NO: 711829 - RNA, 19 nt, Artificial Sequence
  Description of Artificial Sequence: Synthetic oligonucleotide
  Antisense strand to SEQ ID NO: 711828
uucacggcaaauaagacac

SEQ ID NO: 711830 - RNA, 19 nt, Artificial Sequence
  Description of Artificial Sequence: Synthetic oligonucleotide
  Sense strand starting at position 3951 of SEQ ID NO: 586357
ucuuauuugccgugaagag

SEQ ID NO: 711831 - RNA, 19 nt, Artificial Sequence
  Description of Artificial Sequence: Synthetic oligonucleotide
  Antisense strand to SEQ ID NO: 711830
cucuucacggcaaauaaga

SEQ ID NO: 711832 - RNA, 19 nt, Artificial Sequence
  Description of Artificial Sequence: Synthetic oligonucleotide
  Sense strand starting at position 47 of SEQ ID NO: 586358
agaugaguccagugagaug

SEQ ID NO: 711833 - RNA, 19 nt, Artificial Sequence
  Description of Artificial Sequence: Synthetic oligonucleotide
  Antisense strand to SEQ ID NO: 711832
caucucacuggacucaucu

SEQ ID NO: 711834 - RNA, 19 nt, Artificial Sequence
  Description of Artificial Sequence: Synthetic oligonucleotide
  Sense strand starting at position 266 of SEQ ID NO: 586358
cagugaugguuccugagaa

SEQ ID NO: 711835 - RNA, 19 nt, Artificial Sequence
  Description of Artificial Sequence: Synthetic oligonucleotide
  Antisense strand to SEQ ID NO: 711834
uucucaggaaccaucacug

SEQ ID NO: 711836 - RNA, 19 nt, Artificial Sequence
  Description of Artificial Sequence: Synthetic oligonucleotide
  Sense strand starting at position 367 of SEQ ID NO: 586358
agugaucaagagcauguua

SEQ ID NO: 711837 - RNA, 19 nt, Artificial Sequence
  Description of Artificial Sequence: Synthetic oligonucleotide
  Antisense strand to SEQ ID NO: 711836
uaacaugcucuugaucacu

SEQ ID NO: 711838 - RNA, 19 nt, Artificial Sequence
  Description of Artificial Sequence: Synthetic oligonucleotide
  Sense strand starting at position 369 of SEQ ID NO: 586358
ugaucaagagcauguuaag

SEQ ID NO: 711839 - RNA, 19 nt, Artificial Sequence
  Description of Artificial Sequence: Synthetic oligonucleotide
  Antisense strand to SEQ ID NO: 711838
cuuaacaugcucuugauca

SEQ ID NO: 711840 - RNA, 19 nt, Artificial Sequence
  Description of Artificial Sequence: Synthetic oligonucleotide
  Sense strand starting at position 422 of SEQ ID NO: 586358
ggcaaagauucuucugggu

SEQ ID NO: 711841 - RNA, 19 nt, Artificial Sequence
  Description of Artificial Sequence: Synthetic oligonucleotide
  Antisense strand to SEQ ID NO: 711840
acccagaagaaucuuugcc

SEQ ID NO: 711842 - RNA, 19 nt, Artificial Sequence
  Description of Artificial Sequence: Synthetic oligonucleotide
  Sense strand starting at position 426 of SEQ ID NO: 586358
aagauucuucuggguucua

SEQ ID NO: 711843 - RNA, 19 nt, Artificial Sequence
  Description of Artificial Sequence: Synthetic oligonucleotide
  Antisense strand to SEQ ID NO: 711842
uagaacccagaagaaucuu

SEQ ID NO: 711844 - RNA, 19 nt, Artificial Sequence
  Description of Artificial Sequence: Synthetic oligonucleotide
  Sense strand starting at position 451 of SEQ ID NO: 586358
agugguaugauguggacau

SEQ ID NO: 711845 - RNA, 19 nt, Artificial Sequence
  Description of Artificial Sequence: Synthetic oligonucleotide
  Antisense strand to SEQ ID NO: 711844
auguccacaucauaccacu

SEQ ID NO: 711846 - RNA, 19 nt, Artificial Sequence
  Description of Artificial Sequence: Synthetic oligonucleotide
  Sense strand starting at position 479 of SEQ ID NO: 586358
gcacucauugcagagauac

SEQ ID NO: 711847 - RNA, 19 nt, Artificial Sequence
  Description of Artificial Sequence: Synthetic oligonucleotide
  Antisense strand to SEQ ID NO: 711846
guaucucugcaaugagugc

SEQ ID NO: 711848 - RNA, 19 nt, Artificial Sequence
  Description of Artificial Sequence: Synthetic oligonucleotide
  Sense strand starting at position 499 of SEQ ID NO: 586358
uuugacuggguuugaagua

SEQ ID NO: 711849 - RNA, 19 nt, Artificial Sequence
  Description of Artificial Sequence: Synthetic oligonucleotide
  Antisense strand to SEQ ID NO: 711848
uacuucaaacccagucaaa

SEQ ID NO: 711850 - RNA, 19 nt, Artificial Sequence
  Description of Artificial Sequence: Synthetic oligonucleotide
  Sense strand starting at position 608 of SEQ ID NO: 586358
cugacugacguggguaaau

SEQ ID NO: 711851 - RNA, 19 nt, Artificial Sequence
  Description of Artificial Sequence: Synthetic oligonucleotide
  Antisense strand to SEQ ID NO: 711850
auuuacccacgucagucag

SEQ ID NO: 711852 - RNA, 19 nt, Artificial Sequence
  Description of Artificial Sequence: Synthetic oligonucleotide
  Sense strand starting at position 610 of SEQ ID NO: 586358
gacugacguggguaaaucu

SEQ ID NO: 711853 - RNA, 19 nt, Artificial Sequence
  Description of Artificial Sequence: Synthetic oligonucleotide
  Antisense strand to SEQ ID NO: 711852
agauuuacccacgucaguc

SEQ ID NO: 711854 - RNA, 19 nt, Artificial Sequence
  Description of Artificial Sequence: Synthetic oligonucleotide
  Sense strand starting at position 673 of SEQ ID NO: 586358
agauauccuucuuuagaug

SEQ ID NO: 711855 - RNA, 19 nt, Artificial Sequence
  Description of Artificial Sequence: Synthetic oligonucleotide
  Antisense strand to SEQ ID NO: 711854
caucuaaagaaggauaucu

SEQ ID NO: 711856 - RNA, 19 nt, Artificial Sequence
  Description of Artificial Sequence: Synthetic oligonucleotide
  Sense strand starting at position 1039 of SEQ ID NO: 586358
cccaaaguuggucaccuua

SEQ ID NO: 711857 - RNA, 19 nt, Artificial Sequence
  Description of Artificial Sequence: Synthetic oligonucleotide
  Antisense strand to SEQ ID NO: 711856
uaaggugaccaacuuuggg

SEQ ID NO: 711858 - RNA, 19 nt, Artificial Sequence
  Description of Artificial Sequence: Synthetic oligonucleotide
  Sense strand starting at position 1072 of SEQ ID NO: 586358
gcauauuucucagaacugg

SEQ ID NO: 711859 - RNA, 19 nt, Artificial Sequence
  Description of Artificial Sequence: Synthetic oligonucleotide
  Antisense strand to SEQ ID NO: 711858
ccaguucugagaaauaugc

SEQ ID NO: 711860 - RNA, 19 nt, Artificial Sequence
  Description of Artificial Sequence: Synthetic oligonucleotide
  Sense strand starting at position 1138 of SEQ ID NO: 586358
ugaggauaucuuggguggu

SEQ ID NO: 711861 - RNA, 19 nt, Artificial Sequence
  Description of Artificial Sequence: Synthetic oligonucleotide
  Antisense strand to SEQ ID NO: 711860
accacccaagauauccuca

SEQ ID NO: 711862 - RNA, 19 nt, Artificial Sequence
  Description of Artificial Sequence: Synthetic oligonucleotide
  Sense strand starting at position 1141 of SEQ ID NO: 586358
ggauaucuugggugguaga

SEQ ID NO: 711863 - RNA, 19 nt, Artificial Sequence
  Description of Artificial Sequence: Synthetic oligonucleotide
  Antisense strand to SEQ ID NO: 711862
ucuaccacccaagauaucc

SEQ ID NO: 711864 - RNA, 19 nt, Artificial Sequence
  Description of Artificial Sequence: Synthetic oligonucleotide
  Sense strand starting at position 2137 of SEQ ID NO: 586358
uucuguuuguccucaggga

SEQ ID NO: 711865 - RNA, 19 nt, Artificial Sequence
  Description of Artificial Sequence: Synthetic oligonucleotide
  Antisense strand to SEQ ID NO: 711864
ucccugaggacaaacagaa

SEQ ID NO: 711866 - RNA, 19 nt, Artificial Sequence
  Description of Artificial Sequence: Synthetic oligonucleotide
  Sense strand starting at position 2282 of SEQ ID NO: 586358
uucuaaaucuuguuauguc

SEQ ID NO: 711867 - RNA, 19 nt, Artificial Sequence
  Description of Artificial Sequence: Synthetic oligonucleotide
  Antisense strand to SEQ ID NO: 711866
gacauaacaagauuuagaa

SEQ ID NO: 711868 - RNA, 19 nt, Artificial Sequence
  Description of Artificial Sequence: Synthetic oligonucleotide
  Sense strand starting at position 2292 of SEQ ID NO: 586358
uguuaugucgaugcgcuua

SEQ ID NO: 711869 - RNA, 19 nt, Artificial Sequence
  Description of Artificial Sequence: Synthetic oligonucleotide
  Antisense strand to SEQ ID NO: 711868
uaagcgcaucgacauaaca

SEQ ID NO: 711870 - RNA, 19 nt, Artificial Sequence
  Description of Artificial Sequence: Synthetic oligonucleotide
  Sense strand starting at position 2297 of SEQ ID NO: 586358
ugucgaugcgcuuauuuga

SEQ ID NO: 711871 - RNA, 19 nt, Artificial Sequence
  Description of Artificial Sequence: Synthetic oligonucleotide
  Antisense strand to SEQ ID NO: 711870
ucaaauaagcgcaucgaca

SEQ ID NO: 711872 - RNA, 19 nt, Artificial Sequence
  Description of Artificial Sequence: Synthetic oligonucleotide
  Sense strand starting at position 2305 of SEQ ID NO: 586358
cgcuuauuugaacgaucuu

SEQ ID NO: 711873 - RNA, 19 nt, Artificial Sequence
  Description of Artificial Sequence: Synthetic oligonucleotide
  Antisense strand to SEQ ID NO: 711872
aagaucguucaaauaagcg

SEQ ID NO: 711874 - RNA, 19 nt, Artificial Sequence
  Description of Artificial Sequence: Synthetic oligonucleotide
  Sense strand starting at position 2376 of SEQ ID NO: 586358
ucaacaguuugaucuguga

SEQ ID NO: 711875 - RNA, 19 nt, Artificial Sequence
  Description of Artificial Sequence: Synthetic oligonucleotide
  Antisense strand to SEQ ID NO: 711874
ucacagaucaaacuguuga

SEQ ID NO: 711876 - RNA, 19 nt, Artificial Sequence
  Description of Artificial Sequence: Synthetic oligonucleotide
  Sense strand starting at position 2379 of SEQ ID NO: 586358
acaguuugaucugugaaag

SEQ ID NO: 711877 - RNA, 19 nt, Artificial Sequence
  Description of Artificial Sequence: Synthetic oligonucleotide
  Antisense strand to SEQ ID NO: 711876
cuuucacagaucaaacugu

SEQ ID NO: 711878 - RNA, 19 nt, Artificial Sequence
  Description of Artificial Sequence: Synthetic oligonucleotide
  Sense strand starting at position 2380 of SEQ ID NO: 586358
caguuugaucugugaaaga

SEQ ID NO: 711879 - RNA, 19 nt, Artificial Sequence
  Description of Artificial Sequence: Synthetic oligonucleotide
  Antisense strand to SEQ ID NO: 711878
ucuuucacagaucaaacug

SEQ ID NO: 711880 - RNA, 19 nt, Artificial Sequence
  Description of Artificial Sequence: Synthetic oligonucleotide
  Sense strand starting at position 2403 of SEQ ID NO: 586358
ugcauaaauguaugaauac

SEQ ID NO: 711881 - RNA, 19 nt, Artificial Sequence
  Description of Artificial Sequence: Synthetic oligonucleotide
  Antisense strand to SEQ ID NO: 711880
guauucauacauuuaugca

SEQ ID NO: 711882 - RNA, 19 nt, Artificial Sequence
  Description of Artificial Sequence: Synthetic oligonucleotide
  Sense strand starting at position 2422 of SEQ ID NO: 586358
acgaauaaaugagugcuaa

SEQ ID NO: 711883 - RNA, 19 nt, Artificial Sequence
  Description of Artificial Sequence: Synthetic oligonucleotide
  Antisense strand to SEQ ID NO: 711882
uuagcacucauuuauucgu

SEQ ID NO: 711884 - RNA, 19 nt, Artificial Sequence
  Description of Artificial Sequence: Synthetic oligonucleotide
  Sense strand starting at position 2423 of SEQ ID NO: 586358
cgaauaaaugagugcuaag

SEQ ID NO: 711885 - RNA, 19 nt, Artificial Sequence
  Description of Artificial Sequence: Synthetic oligonucleotide
  Antisense strand to SEQ ID NO: 711884
cuuagcacucauuuauucg

SEQ ID NO: 711886 - RNA, 19 nt, Artificial Sequence
  Description of Artificial Sequence: Synthetic oligonucleotide
  Sense strand starting at position 2434 of SEQ ID NO: 586358
gugcuaagugacgaucaca

SEQ ID NO: 711887 - RNA, 19 nt, Artificial Sequence
  Description of Artificial Sequence: Synthetic oligonucleotide
  Antisense strand to SEQ ID NO: 711886
ugugaucgucacuuagcac

SEQ ID NO: 711888 - RNA, 19 nt, Artificial Sequence
  Description of Artificial Sequence: Synthetic oligonucleotide
  Sense strand starting at position 2603 of SEQ ID NO: 586358
gucaguaauuccucaaucu

SEQ ID NO: 711889 - RNA, 19 nt, Artificial Sequence
  Description of Artificial Sequence: Synthetic oligonucleotide
  Antisense strand to SEQ ID NO: 711888
agauugaggaauuacugac

SEQ ID NO: 711890 - RNA, 19 nt, Artificial Sequence
  Description of Artificial Sequence: Synthetic oligonucleotide
  Sense strand starting at position 2686 of SEQ ID NO: 586358
gcuucuuaucuguaugaua

SEQ ID NO: 711891 - RNA, 19 nt, Artificial Sequence
  Description of Artificial Sequence: Synthetic oligonucleotide
  Antisense strand to SEQ ID NO: 711890
uaucauacagauaagaagc

SEQ ID NO: 711892 - RNA, 19 nt, Artificial Sequence
  Description of Artificial Sequence: Synthetic oligonucleotide
  Sense strand starting at position 2688 of SEQ ID NO: 586358
uucuuaucuguaugauaga

SEQ ID NO: 711893 - RNA, 19 nt, Artificial Sequence
  Description of Artificial Sequence: Synthetic oligonucleotide
  Antisense strand to SEQ ID NO: 711892
ucuaucauacagauaagaa

SEQ ID NO: 711894 - RNA, 19 nt, Artificial Sequence
  Description of Artificial Sequence: Synthetic oligonucleotide
  Sense strand starting at position 3137 of SEQ ID NO: 586358
acacauaguguauauguau

SEQ ID NO: 711895 - RNA, 19 nt, Artificial Sequence
  Description of Artificial Sequence: Synthetic oligonucleotide
  Antisense strand to SEQ ID NO: 711894
auacauauacacuaugugu

SEQ ID NO: 711896 - RNA, 19 nt, Artificial Sequence
  Description of Artificial Sequence: Synthetic oligonucleotide
  Sense strand starting at position 3196 of SEQ ID NO: 586358
uaugcauauguauagguau

SEQ ID NO: 711897 - RNA, 19 nt, Artificial Sequence
  Description of Artificial Sequence: Synthetic oligonucleotide
  Antisense strand to SEQ ID NO: 711896
auaccuauacauaugcaua

SEQ ID NO: 711898 - RNA, 19 nt, Artificial Sequence
  Description of Artificial Sequence: Synthetic oligonucleotide
  Sense strand starting at position 3199 of SEQ ID NO: 586358
gcauauguauagguauaca

SEQ ID NO: 711899 - RNA, 19 nt, Artificial Sequence
  Description of Artificial Sequence: Synthetic oligonucleotide
  Antisense strand to SEQ ID NO: 711898
uguauaccuauacauaugc

SEQ ID NO: 711900 - RNA, 19 nt, Artificial Sequence
  Description of Artificial Sequence: Synthetic oligonucleotide
  Sense strand starting at position 3793 of SEQ ID NO: 586358
cauguauguccuggguaag

SEQ ID NO: 711901 - RNA, 19 nt, Artificial Sequence
  Description of Artificial Sequence: Synthetic oligonucleotide
  Antisense strand to SEQ ID NO: 711900
cuuacccaggacauacaug

SEQ ID NO: 711902 - RNA, 19 nt, Artificial Sequence
  Description of Artificial Sequence: Synthetic oligonucleotide
  Sense strand starting at position 3804 of SEQ ID NO: 586358
uggguaagcccuuaucaca

SEQ ID NO: 711903 - RNA, 19 nt, Artificial Sequence
  Description of Artificial Sequence: Synthetic oligonucleotide
  Antisense strand to SEQ ID NO: 711902
ugugauaagggcuuaccca

SEQ ID NO: 711904 - RNA, 19 nt, Artificial Sequence
  Description of Artificial Sequence: Synthetic oligonucleotide
  Sense strand starting at position 3866 of SEQ ID NO: 586358
cugugauaugugugaauaa

SEQ ID NO: 711905 - RNA, 19 nt, Artificial Sequence
  Description of Artificial Sequence: Synthetic oligonucleotide
  Antisense strand to SEQ ID NO: 711904
uuauucacacauaucacag

SEQ ID NO: 711906 - RNA, 19 nt, Artificial Sequence
  Description of Artificial Sequence: Synthetic oligonucleotide
  Sense strand starting at position 3873 of SEQ ID NO: 586358
augugugaauaaucagcua

SEQ ID NO: 711907 - RNA, 19 nt, Artificial Sequence
  Description of Artificial Sequence: Synthetic oligonucleotide
  Antisense strand to SEQ ID NO: 711906
uagcugauuauucacacau

SEQ ID NO: 711908 - RNA, 19 nt, Artificial Sequence
  Description of Artificial Sequence: Synthetic oligonucleotide
  Sense strand starting at position 3876 of SEQ ID NO: 586358
ugugaauaaucagcuaagu

SEQ ID NO: 711909 - RNA, 19 nt, Artificial Sequence
  Description of Artificial Sequence: Synthetic oligonucleotide
  Antisense strand to SEQ ID NO: 711908
acuuagcugauuauucaca

SEQ ID NO: 711910 - RNA, 19 nt, Artificial Sequence
  Description of Artificial Sequence: Synthetic oligonucleotide
  Sense strand starting at position 3895 of SEQ ID NO: 586358
gugugauaugugugaauaa

SEQ ID NO: 711911 - RNA, 19 nt, Artificial Sequence
  Description of Artificial Sequence: Synthetic oligonucleotide
  Antisense strand to SEQ ID NO: 711910
uuauucacacauaucacac

SEQ ID NO: 711912 - RNA, 19 nt, Artificial Sequence
  Description of Artificial Sequence: Synthetic oligonucleotide
  Sense strand starting at position 15 of SEQ ID NO: 586359
guguaagcccuuuaccuau

SEQ ID NO: 711913 - RNA, 19 nt, Artificial Sequence
  Description of Artificial Sequence: Synthetic oligonucleotide
  Antisense strand to SEQ ID NO: 711912
auagguaaagggcuuacac

SEQ ID NO: 711914 - RNA, 19 nt, Artificial Sequence
  Description of Artificial Sequence: Synthetic oligonucleotide
  Sense strand starting at position 49 of SEQ ID NO: 586359
acaucagcucugcaaagua

SEQ ID NO: 711915 - RNA, 19 nt, Artificial Sequence
  Description of Artificial Sequence: Synthetic oligonucleotide
  Antisense strand to SEQ ID NO: 711914
uacuuugcagagcugaugu

SEQ ID NO: 711916 - RNA, 19 nt, Artificial Sequence
  Description of Artificial Sequence: Synthetic oligonucleotide
  Sense strand starting at position 139 of SEQ ID NO: 586359
gcccgcacagcucagaaau

SEQ ID NO: 711917 - RNA, 19 nt, Artificial Sequence
  Description of Artificial Sequence: Synthetic oligonucleotide
  Antisense strand to SEQ ID NO: 711916
auuucugagcugugcgggc

SEQ ID NO: 711918 - RNA, 19 nt, Artificial Sequence
  Description of Artificial Sequence: Synthetic oligonucleotide
  Sense strand starting at position 209 of SEQ ID NO: 586359
cucucaacacagugggauu

SEQ ID NO: 711919 - RNA, 19 nt, Artificial Sequence
  Description of Artificial Sequence: Synthetic oligonucleotide
  Antisense strand to SEQ ID NO: 711918
aaucccacuguguugagag

SEQ ID NO: 711920 - RNA, 19 nt, Artificial Sequence
  Description of Artificial Sequence: Synthetic oligonucleotide
  Sense strand starting at position 295 of SEQ ID NO: 586359
cugaaugucuuccuccaga

SEQ ID NO: 711921 - RNA, 19 nt, Artificial Sequence
  Description of Artificial Sequence: Synthetic oligonucleotide
  Antisense strand to SEQ ID NO: 711920
ucuggaggaagacauucag

SEQ ID NO: 711922 - RNA, 19 nt, Artificial Sequence
  Description of Artificial Sequence: Synthetic oligonucleotide
  Sense strand starting at position 700 of SEQ ID NO: 586359
agagccguucccuaaacuu

SEQ ID NO: 711923 - RNA, 19 nt, Artificial Sequence
  Description of Artificial Sequence: Synthetic oligonucleotide
  Antisense strand to SEQ ID NO: 711922
aaguuuagggaacggcucu

SEQ ID NO: 711924 - RNA, 19 nt, Artificial Sequence
  Description of Artificial Sequence: Synthetic oligonucleotide
  Sense strand starting at position 727 of SEQ ID NO: 586359
acucaaguugagugucuga

SEQ ID NO: 711925 - RNA, 19 nt, Artificial Sequence
  Description of Artificial Sequence: Synthetic oligonucleotide
  Antisense strand to SEQ ID NO: 711924
ucagacacucaacuugagu

SEQ ID NO: 711926 - RNA, 19 nt, Artificial Sequence
  Description of Artificial Sequence: Synthetic oligonucleotide
  Sense strand starting at position 730 of SEQ ID NO: 586359
caaguugagugucugaaag

SEQ ID NO: 711927 - RNA, 19 nt, Artificial Sequence
  Description of Artificial Sequence: Synthetic oligonucleotide
  Antisense strand to SEQ ID NO: 711926
cuuucagacacucaacuug

SEQ ID NO: 711928 - RNA, 19 nt, Artificial Sequence
  Description of Artificial Sequence: Synthetic oligonucleotide
  Sense strand starting at position 732 of SEQ ID NO: 586359
aguugagugucugaaagua

SEQ ID NO: 711929 - RNA, 19 nt, Artificial Sequence
  Description of Artificial Sequence: Synthetic oligonucleotide
  Antisense strand to SEQ ID NO: 711928
uacuuucagacacucaacu

SEQ ID NO: 711930 - RNA, 19 nt, Artificial Sequence
  Description of Artificial Sequence: Synthetic oligonucleotide
  Sense strand starting at position 810 of SEQ ID NO: 586359
ggcuaucucuuugaauuug

SEQ ID NO: 711931 - RNA, 19 nt, Artificial Sequence
  Description of Artificial Sequence: Synthetic oligonucleotide
  Antisense strand to SEQ ID NO: 711930
caaauucaaagagauagcc

SEQ ID NO: 711932 - RNA, 19 nt, Artificial Sequence
  Description of Artificial Sequence: Synthetic oligonucleotide
  Sense strand starting at position 932 of SEQ ID NO: 586359
ugcugagaauggcuugauu

SEQ ID NO: 711933 - RNA, 19 nt, Artificial Sequence
  Description of Artificial Sequence: Synthetic oligonucleotide
  Antisense strand to SEQ ID NO: 711932
aaucaagccauucucagca

SEQ ID NO: 711934 - RNA, 19 nt, Artificial Sequence
  Description of Artificial Sequence: Synthetic oligonucleotide
  Sense strand starting at position 1005 of SEQ ID NO: 586359
ccaggaugccuguguucua

SEQ ID NO: 711935 - RNA, 19 nt, Artificial Sequence
  Description of Artificial Sequence: Synthetic oligonucleotide
  Antisense strand to SEQ ID NO: 711934
uagaacacaggcauccugg

SEQ ID NO: 711936 - RNA, 19 nt, Artificial Sequence
  Description of Artificial Sequence: Synthetic oligonucleotide
  Sense strand starting at position 1149 of SEQ ID NO: 586359
gggaaacucugcuuaucug

SEQ ID NO: 711937 - RNA, 19 nt, Artificial Sequence
  Description of Artificial Sequence: Synthetic oligonucleotide
  Antisense strand to SEQ ID NO: 711936
cagauaagcagaguuuccc

SEQ ID NO: 711938 - RNA, 19 nt, Artificial Sequence
  Description of Artificial Sequence: Synthetic oligonucleotide
  Sense strand starting at position 1150 of SEQ ID NO: 586359
ggaaacucugcuuaucuga

SEQ ID NO: 711939 - RNA, 19 nt, Artificial Sequence
  Description of Artificial Sequence: Synthetic oligonucleotide
  Antisense strand to SEQ ID NO: 711938
ucagauaagcagaguuucc

SEQ ID NO: 711940 - RNA, 19 nt, Artificial Sequence
  Description of Artificial Sequence: Synthetic oligonucleotide
  Sense strand starting at position 1158 of SEQ ID NO: 586359
ugcuuaucugaaugagaaa

SEQ ID NO: 711941 - RNA, 19 nt, Artificial Sequence
  Description of Artificial Sequence: Synthetic oligonucleotide
  Antisense strand to SEQ ID NO: 711940
uuucucauucagauaagca

SEQ ID NO: 711942 - RNA, 19 nt, Artificial Sequence
  Description of Artificial Sequence: Synthetic oligonucleotide
  Sense strand starting at position 1248 of SEQ ID NO: 586359
gccugaauuucgcuuggaa

SEQ ID NO: 711943 - RNA, 19 nt, Artificial Sequence
  Description of Artificial Sequence: Synthetic oligonucleotide
  Antisense strand to SEQ ID NO: 711942
uuccaagcgaaauucaggc

SEQ ID NO: 711944 - RNA, 19 nt, Artificial Sequence
  Description of Artificial Sequence: Synthetic oligonucleotide
  Sense strand starting at position 1429 of SEQ ID NO: 586359
ggaggaugcuguuaauuag

SEQ ID NO: 711945 - RNA, 19 nt, Artificial Sequence
  Description of Artificial Sequence: Synthetic oligonucleotide
  Antisense strand to SEQ ID NO: 711944
cuaauuaacagcauccucc

SEQ ID NO: 711946 - RNA, 19 nt, Artificial Sequence
  Description of Artificial Sequence: Synthetic oligonucleotide
  Sense strand starting at position 1605 of SEQ ID NO: 586359
ccacucacuuaguuauguu

SEQ ID NO: 711947 - RNA, 19 nt, Artificial Sequence
  Description of Artificial Sequence: Synthetic oligonucleotide
  Antisense strand to SEQ ID NO: 711946
aacauaacuaagugagugg

SEQ ID NO: 711948 - RNA, 19 nt, Artificial Sequence
  Description of Artificial Sequence: Synthetic oligonucleotide
  Sense strand starting at position 1613 of SEQ ID NO: 586359
uuaguuauguugcugucau

SEQ ID NO: 711949 - RNA, 19 nt, Artificial Sequence
  Description of Artificial Sequence: Synthetic oligonucleotide
  Antisense strand to SEQ ID NO: 711948
augacagcaacauaacuaa

SEQ ID NO: 711950 - RNA, 19 nt, Artificial Sequence
  Description of Artificial Sequence: Synthetic oligonucleotide
  Sense strand starting at position 1625 of SEQ ID NO: 586359
cugucauggcucuaggaau

SEQ ID NO: 711951 - RNA, 19 nt, Artificial Sequence
  Description of Artificial Sequence: Synthetic oligonucleotide
  Antisense strand to SEQ ID NO: 711950
auuccuagagccaugacag

SEQ ID NO: 711952 - RNA, 19 nt, Artificial Sequence
  Description of Artificial Sequence: Synthetic oligonucleotide
  Sense strand starting at position 1683 of SEQ ID NO: 586359
ugaccuguugcuugcagau

SEQ ID NO: 711953 - RNA, 19 nt, Artificial Sequence
  Description of Artificial Sequence: Synthetic oligonucleotide
  Antisense strand to SEQ ID NO: 711952
aucugcaagcaacagguca

SEQ ID NO: 711954 - RNA, 19 nt, Artificial Sequence
  Description of Artificial Sequence: Synthetic oligonucleotide
  Sense strand starting at position 1752 of SEQ ID NO: 586359
uccuguaaacccuguguca

SEQ ID NO: 711955 - RNA, 19 nt, Artificial Sequence
  Description of Artificial Sequence: Synthetic oligonucleotide
  Antisense strand to SEQ ID NO: 711954
ugacacaggguuuacagga

SEQ ID NO: 711956 - RNA, 19 nt, Artificial Sequence
  Description of Artificial Sequence: Synthetic oligonucleotide
  Sense strand starting at position 2004 of SEQ ID NO: 586359
aggcacagaagaugugauu

SEQ ID NO: 711957 - RNA, 19 nt, Artificial Sequence
  Description of Artificial Sequence: Synthetic oligonucleotide
  Antisense strand to SEQ ID NO: 711956
aaucacaucuucugugccu

SEQ ID NO: 711958 - RNA, 19 nt, Artificial Sequence
  Description of Artificial Sequence: Synthetic oligonucleotide
  Sense strand starting at position 2010 of SEQ ID NO: 586359
agaagaugugauugccauu

SEQ ID NO: 711959 - RNA, 19 nt, Artificial Sequence
  Description of Artificial Sequence: Synthetic oligonucleotide
  Antisense strand to SEQ ID NO: 711958
aauggcaaucacaucuucu

SEQ ID NO: 711960 - RNA, 19 nt, Artificial Sequence
  Description of Artificial Sequence: Synthetic oligonucleotide
  Sense strand starting at position 2013 of SEQ ID NO: 586359
agaugugauugccauuuau

SEQ ID NO: 711961 - RNA, 19 nt, Artificial Sequence
  Description of Artificial Sequence: Synthetic oligonucleotide
  Antisense strand to SEQ ID NO: 711960
auaaauggcaaucacaucu

SEQ ID NO: 711962 - RNA, 19 nt, Artificial Sequence
  Description of Artificial Sequence: Synthetic oligonucleotide
  Sense strand starting at position 2275 of SEQ ID NO: 586359
ggacucucccagcaacuuu

SEQ ID NO: 711963 - RNA, 19 nt, Artificial Sequence
  Description of Artificial Sequence: Synthetic oligonucleotide
  Antisense strand to SEQ ID NO: 711962
aaaguugcugggagagucc

SEQ ID NO: 711964 - RNA, 19 nt, Artificial Sequence
  Description of Artificial Sequence: Synthetic oligonucleotide
  Sense strand starting at position 2370 of SEQ ID NO: 586359
ccuucugugagggacuauu

SEQ ID NO: 711965 - RNA, 19 nt, Artificial Sequence
  Description of Artificial Sequence: Synthetic oligonucleotide
  Antisense strand to SEQ ID NO: 711964
aauagucccucacagaagg

SEQ ID NO: 711966 - RNA, 19 nt, Artificial Sequence
  Description of Artificial Sequence: Synthetic oligonucleotide
  Sense strand starting at position 2384 of SEQ ID NO: 586359
cuauuaggacccugugaua

SEQ ID NO: 711967 - RNA, 19 nt, Artificial Sequence
  Description of Artificial Sequence: Synthetic oligonucleotide
  Antisense strand to SEQ ID NO: 711966
uaucacaggguccuaauag

SEQ ID NO: 711968 - RNA, 19 nt, Artificial Sequence
  Description of Artificial Sequence: Synthetic oligonucleotide
  Sense strand starting at position 2446 of SEQ ID NO: 586359
agugaagugagauguagau

SEQ ID NO: 711969 - RNA, 19 nt, Artificial Sequence
  Description of Artificial Sequence: Synthetic oligonucleotide
  Antisense strand to SEQ ID NO: 711968
aucuacaucucacuucacu

SEQ ID NO: 711970 - RNA, 19 nt, Artificial Sequence
  Description of Artificial Sequence: Synthetic oligonucleotide
  Sense strand starting at position 2456 of SEQ ID NO: 586359
gauguagauuagguguuga

SEQ ID NO: 711971 - RNA, 19 nt, Artificial Sequence
  Description of Artificial Sequence: Synthetic oligonucleotide
  Antisense strand to SEQ ID NO: 711970
ucaacaccuaaucuacauc

SEQ ID NO: 711972 - RNA, 19 nt, Artificial Sequence
  Description of Artificial Sequence: Synthetic oligonucleotide
  Sense strand starting at position 2467 of SEQ ID NO: 586359
gguguugagccgcaugcau

SEQ ID NO: 711973 - RNA, 19 nt, Artificial Sequence
  Description of Artificial Sequence: Synthetic oligonucleotide
  Antisense strand to SEQ ID NO: 711972
augcaugcggcucaacacc

SEQ ID NO: 711974 - RNA, 19 nt, Artificial Sequence
  Description of Artificial Sequence: Synthetic oligonucleotide
  Sense strand starting at position 2487 of SEQ ID NO: 586359
ucaaacuccugugcuguua

SEQ ID NO: 711975 - RNA, 19 nt, Artificial Sequence
  Description of Artificial Sequence: Synthetic oligonucleotide
  Antisense strand to SEQ ID NO: 711974
uaacagcacaggaguuuga

SEQ ID NO: 711976 - RNA, 19 nt, Artificial Sequence
  Description of Artificial Sequence: Synthetic oligonucleotide
  Sense strand starting at position 2615 of SEQ ID NO: 586359
ccugguugaugggugcaau

SEQ ID NO: 711977 - RNA, 19 nt, Artificial Sequence
  Description of Artificial Sequence: Synthetic oligonucleotide
  Antisense strand to SEQ ID NO: 711976
auugcacccaucaaccagg

SEQ ID NO: 711978 - RNA, 19 nt, Artificial Sequence
  Description of Artificial Sequence: Synthetic oligonucleotide
  Sense strand starting at position 2616 of SEQ ID NO: 586359
cugguugaugggugcaaua

SEQ ID NO: 711979 - RNA, 19 nt, Artificial Sequence
  Description of Artificial Sequence: Synthetic oligonucleotide
  Antisense strand to SEQ ID NO: 711978
uauugcacccaucaaccag

SEQ ID NO: 711980 - RNA, 19 nt, Artificial Sequence
  Description of Artificial Sequence: Synthetic oligonucleotide
  Sense strand starting at position 2669 of SEQ ID NO: 586359
cgcagagucaugugaagcu

SEQ ID NO: 711981 - RNA, 19 nt, Artificial Sequence
  Description of Artificial Sequence: Synthetic oligonucleotide
  Antisense strand to SEQ ID NO: 711980
agcuucacaugacucugcg

SEQ ID NO: 711982 - RNA, 19 nt, Artificial Sequence
  Description of Artificial Sequence: Synthetic oligonucleotide
  Sense strand starting at position 2701 of SEQ ID NO: 586359
gggcuuugcagaggaggaa

SEQ ID NO: 711983 - RNA, 19 nt, Artificial Sequence
  Description of Artificial Sequence: Synthetic oligonucleotide
  Antisense strand to SEQ ID NO: 711982
uuccuccucugcaaagccc

SEQ ID NO: 711984 - RNA, 19 nt, Artificial Sequence
  Description of Artificial Sequence: Synthetic oligonucleotide
  Sense strand starting at position 2838 of SEQ ID NO: 586359
augcaugcauguuuauaca

SEQ ID NO: 711985 - RNA, 19 nt, Artificial Sequence
  Description of Artificial Sequence: Synthetic oligonucleotide
  Antisense strand to SEQ ID NO: 711984
uguauaaacaugcaugcau

SEQ ID NO: 711986 - RNA, 19 nt, Artificial Sequence
  Description of Artificial Sequence: Synthetic oligonucleotide
  Sense strand starting at position 3182 of SEQ ID NO: 586359
ggucucagccugugcauaa

SEQ ID NO: 711987 - RNA, 19 nt, Artificial Sequence
  Description of Artificial Sequence: Synthetic oligonucleotide
  Antisense strand to SEQ ID NO: 711986
uuaugcacaggcugagacc

SEQ ID NO: 711988 - RNA, 19 nt, Artificial Sequence
  Description of Artificial Sequence: Synthetic oligonucleotide
  Sense strand starting at position 3465 of SEQ ID NO: 586359
ggcacuucuugagcugaaa

SEQ ID NO: 711989 - RNA, 19 nt, Artificial Sequence
  Description of Artificial Sequence: Synthetic oligonucleotide
  Antisense strand to SEQ ID NO: 711988
uuucagcucaagaagugcc

SEQ ID NO: 711990 - RNA, 19 nt, Artificial Sequence
  Description of Artificial Sequence: Synthetic oligonucleotide
  Sense strand starting at position 3526 of SEQ ID NO: 586359
uggcaaugcacccaugaga

SEQ ID NO: 711991 - RNA, 19 nt, Artificial Sequence
  Description of Artificial Sequence: Synthetic oligonucleotide
  Antisense strand to SEQ ID NO: 711990
ucucaugggugcauugcca

SEQ ID NO: 711992 - RNA, 19 nt, Artificial Sequence
  Description of Artificial Sequence: Synthetic oligonucleotide
  Sense strand starting at position 32 of SEQ ID NO: 586360
guugauuucucuccauagu

SEQ ID NO: 711993 - RNA, 19 nt, Artificial Sequence
  Description of Artificial Sequence: Synthetic oligonucleotide
  Antisense strand to SEQ ID NO: 711992
acuauggagagaaaucaac

SEQ ID NO: 711994 - RNA, 19 nt, Artificial Sequence
  Description of Artificial Sequence: Synthetic oligonucleotide
  Sense strand starting at position 106 of SEQ ID NO: 586360
auauucuuggcagaguaaa

SEQ ID NO: 711995 - RNA, 19 nt, Artificial Sequence
  Description of Artificial Sequence: Synthetic oligonucleotide
  Antisense strand to SEQ ID NO: 711994
uuuacucugccaagaauau

SEQ ID NO: 711996 - RNA, 19 nt, Artificial Sequence
  Description of Artificial Sequence: Synthetic oligonucleotide
  Sense strand starting at position 474 of SEQ ID NO: 586360
uugaguugauuacucaauu

SEQ ID NO: 711997 - RNA, 19 nt, Artificial Sequence
  Description of Artificial Sequence: Synthetic oligonucleotide
  Antisense strand to SEQ ID NO: 711996
aauugaguaaucaacucaa

SEQ ID NO: 711998 - RNA, 19 nt, Artificial Sequence
  Description of Artificial Sequence: Synthetic oligonucleotide
  Sense strand starting at position 475 of SEQ ID NO: 586360
ugaguugauuacucaauug

SEQ ID NO: 711999 - RNA, 19 nt, Artificial Sequence
  Description of Artificial Sequence: Synthetic oligonucleotide
  Antisense strand to SEQ ID NO: 711998
caauugaguaaucaacuca

SEQ ID NO: 712000 - RNA, 19 nt, Artificial Sequence
  Description of Artificial Sequence: Synthetic oligonucleotide
  Sense strand starting at position 732 of SEQ ID NO: 586360
ccaggacuuccaggguaga

SEQ ID NO: 712001 - RNA, 19 nt, Artificial Sequence
  Description of Artificial Sequence: Synthetic oligonucleotide
  Antisense strand to SEQ ID NO: 712000
ucuacccuggaaguccugg

SEQ ID NO: 712002 - RNA, 19 nt, Artificial Sequence
  Description of Artificial Sequence: Synthetic oligonucleotide
  Sense strand starting at position 735 of SEQ ID NO: 586360
ggacuuccaggguagaguu

SEQ ID NO: 712003 - RNA, 19 nt, Artificial Sequence
  Description of Artificial Sequence: Synthetic oligonucleotide
  Antisense strand to SEQ ID NO: 712002
aacucuacccuggaagucc

SEQ ID NO: 712004 - RNA, 19 nt, Artificial Sequence
  Description of Artificial Sequence: Synthetic oligonucleotide
  Sense strand starting at position 745 of SEQ ID NO: 586360
gguagaguucuauaggguc

SEQ ID NO: 712005 - RNA, 19 nt, Artificial Sequence
  Description of Artificial Sequence: Synthetic oligonucleotide
  Antisense strand to SEQ ID NO: 712004
gacccuauagaacucuacc

SEQ ID NO: 712006 - RNA, 19 nt, Artificial Sequence
  Description of Artificial Sequence: Synthetic oligonucleotide
  Sense strand starting at position 996 of SEQ ID NO: 586360
ggaugugacuggaggugaa

SEQ ID NO: 712007 - RNA, 19 nt, Artificial Sequence
  Description of Artificial Sequence: Synthetic oligonucleotide
  Antisense strand to SEQ ID NO: 712006
uucaccuccagucacaucc

SEQ ID NO: 712008 - RNA, 19 nt, Artificial Sequence
  Description of Artificial Sequence: Synthetic oligonucleotide
  Sense strand starting at position 1079 of SEQ ID NO: 586360
acgcaugauggagagcaau

SEQ ID NO: 712009 - RNA, 19 nt, Artificial Sequence
  Description of Artificial Sequence: Synthetic oligonucleotide
  Antisense strand to SEQ ID NO: 712008
auugcucuccaucaugcgu

SEQ ID NO: 712010 - RNA, 19 nt, Artificial Sequence
  Description of Artificial Sequence: Synthetic oligonucleotide
  Sense strand starting at position 1177 of SEQ ID NO: 586360
ucgauaaccgaacaauucu

SEQ ID NO: 712011 - RNA, 19 nt, Artificial Sequence
  Description of Artificial Sequence: Synthetic oligonucleotide
  Antisense strand to SEQ ID NO: 712010
agaauuguucgguuaucga

SEQ ID NO: 712012 - RNA, 19 nt, Artificial Sequence
  Description of Artificial Sequence: Synthetic oligonucleotide
  Sense strand starting at position 1202 of SEQ ID NO: 586360
agaaauuccuauccgcaua

SEQ ID NO: 712013 - RNA, 19 nt, Artificial Sequence
  Description of Artificial Sequence: Synthetic oligonucleotide
  Antisense strand to SEQ ID NO: 712012
uaugcggauaggaauuucu

SEQ ID NO: 712014 - RNA, 19 nt, Artificial Sequence
  Description of Artificial Sequence: Synthetic oligonucleotide
  Sense strand starting at position 1231 of SEQ ID NO: 586360
ugggaauuguacucagcau

SEQ ID NO: 712015 - RNA, 19 nt, Artificial Sequence
  Description of Artificial Sequence: Synthetic oligonucleotide
  Antisense strand to SEQ ID NO: 712014
augcugaguacaauuccca

SEQ ID NO: 712016 - RNA, 19 nt, Artificial Sequence
  Description of Artificial Sequence: Synthetic oligonucleotide
  Sense strand starting at position 1232 of SEQ ID NO: 586360
gggaauuguacucagcaug

SEQ ID NO: 712017 - RNA, 19 nt, Artificial Sequence
  Description of Artificial Sequence: Synthetic oligonucleotide
  Antisense strand to SEQ ID NO: 712016
caugcugaguacaauuccc

SEQ ID NO: 712018 - RNA, 19 nt, Artificial Sequence
  Description of Artificial Sequence: Synthetic oligonucleotide
  Sense strand starting at position 1565 of SEQ ID NO: 586360
ugagccagucaugaaauca

SEQ ID NO: 712019 - RNA, 19 nt, Artificial Sequence
  Description of Artificial Sequence: Synthetic oligonucleotide
  Antisense strand to SEQ ID NO: 712018
ugauuucaugacuggcuca

SEQ ID NO: 712020 - RNA, 19 nt, Artificial Sequence
  Description of Artificial Sequence: Synthetic oligonucleotide
  Sense strand starting at position 1599 of SEQ ID NO: 586360
aaacaugugucacuggagu

SEQ ID NO: 712021 - RNA, 19 nt, Artificial Sequence
  Description of Artificial Sequence: Synthetic oligonucleotide
  Antisense strand to SEQ ID NO: 712020
acuccagugacacauguuu

SEQ ID NO: 712022 - RNA, 19 nt, Artificial Sequence
  Description of Artificial Sequence: Synthetic oligonucleotide
  Sense strand starting at position 1720 of SEQ ID NO: 586360
ugaguuaaccuuuaagcaa

SEQ ID NO: 712023 - RNA, 19 nt, Artificial Sequence
  Description of Artificial Sequence: Synthetic oligonucleotide
  Antisense strand to SEQ ID NO: 712022
uugcuuaaagguuaacuca

SEQ ID NO: 712024 - RNA, 19 nt, Artificial Sequence
  Description of Artificial Sequence: Synthetic oligonucleotide
  Sense strand starting at position 1792 of SEQ ID NO: 586360
acuacaaucugaguaggua

SEQ ID NO: 712025 - RNA, 19 nt, Artificial Sequence
  Description of Artificial Sequence: Synthetic oligonucleotide
  Antisense strand to SEQ ID NO: 712024
uaccuacucagauuguagu

SEQ ID NO: 712026 - RNA, 19 nt, Artificial Sequence
  Description of Artificial Sequence: Synthetic oligonucleotide
  Sense strand starting at position 1793 of SEQ ID NO: 586360
cuacaaucugaguagguau

SEQ ID NO: 712027 - RNA, 19 nt, Artificial Sequence
  Description of Artificial Sequence: Synthetic oligonucleotide
  Antisense strand to SEQ ID NO: 712026
auaccuacucagauuguag

SEQ ID NO: 712028 - RNA, 19 nt, Artificial Sequence
  Description of Artificial Sequence: Synthetic oligonucleotide
  Sense strand starting at position 1795 of SEQ ID NO: 586360
acaaucugaguagguauaa

SEQ ID NO: 712029 - RNA, 19 nt, Artificial Sequence
  Description of Artificial Sequence: Synthetic oligonucleotide
  Antisense strand to SEQ ID NO: 712028
uuauaccuacucagauugu

SEQ ID NO: 712030 - RNA, 19 nt, Artificial Sequence
  Description of Artificial Sequence: Synthetic oligonucleotide
  Sense strand starting at position 1796 of SEQ ID NO: 586360
caaucugaguagguauaaa

SEQ ID NO: 712031 - RNA, 19 nt, Artificial Sequence
  Description of Artificial Sequence: Synthetic oligonucleotide
  Antisense strand to SEQ ID NO: 712030
uuuauaccuacucagauug

SEQ ID NO: 712032 - RNA, 19 nt, Artificial Sequence
  Description of Artificial Sequence: Synthetic oligonucleotide
  Sense strand starting at position 1855 of SEQ ID NO: 586360
gcuacucuccuugauggga

SEQ ID NO: 712033 - RNA, 19 nt, Artificial Sequence
  Description of Artificial Sequence: Synthetic oligonucleotide
  Antisense strand to SEQ ID NO: 712032
ucccaucaaggagaguagc

SEQ ID NO: 712034 - RNA, 19 nt, Artificial Sequence
  Description of Artificial Sequence: Synthetic oligonucleotide
  Sense strand starting at position 2010 of SEQ ID NO: 586360
uuaauuccugauggugaca

SEQ ID NO: 712035 - RNA, 19 nt, Artificial Sequence
  Description of Artificial Sequence: Synthetic oligonucleotide
  Antisense strand to SEQ ID NO: 712034
ugucaccaucaggaauuaa

SEQ ID NO: 712036 - RNA, 19 nt, Artificial Sequence
  Description of Artificial Sequence: Synthetic oligonucleotide
  Sense strand starting at position 2036 of SEQ ID NO: 586360
aggaaaucuugagaaauag

SEQ ID NO: 712037 - RNA, 19 nt, Artificial Sequence
  Description of Artificial Sequence: Synthetic oligonucleotide
  Antisense strand to SEQ ID NO: 712036
cuauuucucaagauuuccu

SEQ ID NO: 712038 - RNA, 19 nt, Artificial Sequence
  Description of Artificial Sequence: Synthetic oligonucleotide
  Sense strand starting at position 2101 of SEQ ID NO: 586360
uuccaaauccuggaagcuu

SEQ ID NO: 712039 - RNA, 19 nt, Artificial Sequence
  Description of Artificial Sequence: Synthetic oligonucleotide
  Antisense strand to SEQ ID NO: 712038
aagcuuccaggauuuggaa

SEQ ID NO: 712040 - RNA, 19 nt, Artificial Sequence
  Description of Artificial Sequence: Synthetic oligonucleotide
  Sense strand starting at position 2301 of SEQ ID NO: 586360
cucagcaauauggguaaga

SEQ ID NO: 712041 - RNA, 19 nt, Artificial Sequence
  Description of Artificial Sequence: Synthetic oligonucleotide
  Antisense strand to SEQ ID NO: 712040
ucuuacccauauugcugag

SEQ ID NO: 712042 - RNA, 19 nt, Artificial Sequence
  Description of Artificial Sequence: Synthetic oligonucleotide
  Sense strand starting at position 2302 of SEQ ID NO: 586360
ucagcaauauggguaagau

SEQ ID NO: 712043 - RNA, 19 nt, Artificial Sequence
  Description of Artificial Sequence: Synthetic oligonucleotide
  Antisense strand to SEQ ID NO: 712042
aucuuacccauauugcuga

SEQ ID NO: 712044 - RNA, 19 nt, Artificial Sequence
  Description of Artificial Sequence: Synthetic oligonucleotide
  Sense strand starting at position 2386 of SEQ ID NO: 586360
aguugagaugcaugaaaca

SEQ ID NO: 712045 - RNA, 19 nt, Artificial Sequence
  Description of Artificial Sequence: Synthetic oligonucleotide
  Antisense strand to SEQ ID NO: 712044
uguuucaugcaucucaacu

SEQ ID NO: 712046 - RNA, 19 nt, Artificial Sequence
  Description of Artificial Sequence: Synthetic oligonucleotide
  Sense strand starting at position 2402 of SEQ ID NO: 586360
acaauacucugaguggaau

SEQ ID NO: 712047 - RNA, 19 nt, Artificial Sequence
  Description of Artificial Sequence: Synthetic oligonucleotide
  Antisense strand to SEQ ID NO: 712046
auuccacucagaguauugu

SEQ ID NO: 712048 - RNA, 19 nt, Artificial Sequence
  Description of Artificial Sequence: Synthetic oligonucleotide
  Sense strand starting at position 2403 of SEQ ID NO: 586360
caauacucugaguggaauu

SEQ ID NO: 712049 - RNA, 19 nt, Artificial Sequence
  Description of Artificial Sequence: Synthetic oligonucleotide
  Antisense strand to SEQ ID NO: 712048
aauuccacucagaguauug

SEQ ID NO: 712050 - RNA, 19 nt, Artificial Sequence
  Description of Artificial Sequence: Synthetic oligonucleotide
  Sense strand starting at position 2760 of SEQ ID NO: 586360
uauuguuaggacuggaacu

SEQ ID NO: 712051 - RNA, 19 nt, Artificial Sequence
  Description of Artificial Sequence: Synthetic oligonucleotide
  Antisense strand to SEQ ID NO: 712050
aguuccaguccuaacaaua

SEQ ID NO: 712052 - RNA, 19 nt, Artificial Sequence
  Description of Artificial Sequence: Synthetic oligonucleotide
  Sense strand starting at position 3091 of SEQ ID NO: 586360
cacguuacguaauuuguau

SEQ ID NO: 712053 - RNA, 19 nt, Artificial Sequence
  Description of Artificial Sequence: Synthetic oligonucleotide
  Antisense strand to SEQ ID NO: 712052
auacaaauuacguaacgug

SEQ ID NO: 712054 - RNA, 19 nt, Artificial Sequence
  Description of Artificial Sequence: Synthetic oligonucleotide
  Sense strand starting at position 3132 of SEQ ID NO: 586360
auugaaguguuucuagaaa

SEQ ID NO: 712055 - RNA, 19 nt, Artificial Sequence
  Description of Artificial Sequence: Synthetic oligonucleotide
  Antisense strand to SEQ ID NO: 712054
uuucuagaaacacuucaau

SEQ ID NO: 712056 - RNA, 19 nt, Artificial Sequence
  Description of Artificial Sequence: Synthetic oligonucleotide
  Sense strand starting at position 3143 of SEQ ID NO: 586360
ucuagaaagcaguaaccuu

SEQ ID NO: 712057 - RNA, 19 nt, Artificial Sequence
  Description of Artificial Sequence: Synthetic oligonucleotide
  Antisense strand to SEQ ID NO: 712056
aagguuacugcuuucuaga

SEQ ID NO: 712058 - RNA, 19 nt, Artificial Sequence
  Description of Artificial Sequence: Synthetic oligonucleotide
  Sense strand starting at position 3165 of SEQ ID NO: 586360
uuacuuaugguuuaagauc

SEQ ID NO: 712059 - RNA, 19 nt, Artificial Sequence
  Description of Artificial Sequence: Synthetic oligonucleotide
  Antisense strand to SEQ ID NO: 712058
gaucuuaaaccauaaguaa

SEQ ID NO: 712060 - RNA, 19 nt, Artificial Sequence
  Description of Artificial Sequence: Synthetic oligonucleotide
  Sense strand starting at position 3456 of SEQ ID NO: 586360
acgacuacccagugaugaa

SEQ ID NO: 712061 - RNA, 19 nt, Artificial Sequence
  Description of Artificial Sequence: Synthetic oligonucleotide
  Antisense strand to SEQ ID NO: 712060
uucaucacuggguagucgu

SEQ ID NO: 712062 - RNA, 19 nt, Artificial Sequence
  Description of Artificial Sequence: Synthetic oligonucleotide
  Sense strand starting at position 3611 of SEQ ID NO: 586360
ugagauguccaguacagcu

SEQ ID NO: 712063 - RNA, 19 nt, Artificial Sequence
  Description of Artificial Sequence: Synthetic oligonucleotide
  Antisense strand to SEQ ID NO: 712062
agcuguacuggacaucuca

SEQ ID NO: 712064 - RNA, 19 nt, Artificial Sequence
  Description of Artificial Sequence: Synthetic oligonucleotide
  Sense strand starting at position 3656 of SEQ ID NO: 586360
aaaguuauggguugaaagu

SEQ ID NO: 712065 - RNA, 19 nt, Artificial Sequence
  Description of Artificial Sequence: Synthetic oligonucleotide
  Antisense strand to SEQ ID NO: 712064
acuuucaacccauaacuuu

SEQ ID NO: 712066 - RNA, 19 nt, Artificial Sequence
  Description of Artificial Sequence: Synthetic oligonucleotide
  Sense strand starting at position 3657 of SEQ ID NO: 586360
aaguuauggguugaaagug

SEQ ID NO: 712067 - RNA, 19 nt, Artificial Sequence
  Description of Artificial Sequence: Synthetic oligonucleotide
  Antisense strand to SEQ ID NO: 712066
cacuuucaacccauaacuu

SEQ ID NO: 712068 - RNA, 19 nt, Artificial Sequence
  Description of Artificial Sequence: Synthetic oligonucleotide
  Sense strand starting at position 3665 of SEQ ID NO: 586360
gguugaaaguguuuagaug

SEQ ID NO: 712069 - RNA, 19 nt, Artificial Sequence
  Description of Artificial Sequence: Synthetic oligonucleotide
  Antisense strand to SEQ ID NO: 712068
caucuaaacacuuucaacc

SEQ ID NO: 712070 - RNA, 19 nt, Artificial Sequence
  Description of Artificial Sequence: Synthetic oligonucleotide
  Sense strand starting at position 3666 of SEQ ID NO: 586360
guugaaaguguuuagauga

SEQ ID NO: 712071 - RNA, 19 nt, Artificial Sequence
  Description of Artificial Sequence: Synthetic oligonucleotide
  Antisense strand to SEQ ID NO: 712070
ucaucuaaacacuuucaac

SEQ ID NO: 712072 - RNA, 19 nt, Artificial Sequence
  Description of Artificial Sequence: Synthetic oligonucleotide
  Sense strand starting at position 140 of SEQ ID NO: 586361
cugcaaguggcuuaauaug

SEQ ID NO: 712073 - RNA, 19 nt, Artificial Sequence
  Description of Artificial Sequence: Synthetic oligonucleotide
  Antisense strand to SEQ ID NO: 712072
cauauuaagccacuugcag

SEQ ID NO: 712074 - RNA, 19 nt, Artificial Sequence
  Description of Artificial Sequence: Synthetic oligonucleotide
  Sense strand starting at position 226 of SEQ ID NO: 586361
caguaucaggcagaaugua

SEQ ID NO: 712075 - RNA, 19 nt, Artificial Sequence
  Description of Artificial Sequence: Synthetic oligonucleotide
  Antisense strand to SEQ ID NO: 712074
uacauucugccugauacug

SEQ ID NO: 712076 - RNA, 19 nt, Artificial Sequence
  Description of Artificial Sequence: Synthetic oligonucleotide
  Sense strand starting at position 503 of SEQ ID NO: 586361
ccggaccugucuguaagaa

SEQ ID NO: 712077 - RNA, 19 nt, Artificial Sequence
  Description of Artificial Sequence: Synthetic oligonucleotide
  Antisense strand to SEQ ID NO: 712076
uucuuacagacagguccgg

SEQ ID NO: 712078 - RNA, 19 nt, Artificial Sequence
  Description of Artificial Sequence: Synthetic oligonucleotide
  Sense strand starting at position 504 of SEQ ID NO: 586361
cggaccugucuguaagaau

SEQ ID NO: 712079 - RNA, 19 nt, Artificial Sequence
  Description of Artificial Sequence: Synthetic oligonucleotide
  Antisense strand to SEQ ID NO: 712078
auucuuacagacagguccg

SEQ ID NO: 712080 - RNA, 19 nt, Artificial Sequence
  Description of Artificial Sequence: Synthetic oligonucleotide
  Sense strand starting at position 621 of SEQ ID NO: 586361
guacuuugaucaucuauca

SEQ ID NO: 712081 - RNA, 19 nt, Artificial Sequence
  Description of Artificial Sequence: Synthetic oligonucleotide
  Antisense strand to SEQ ID NO: 712080
ugauagaugaucaaaguac

SEQ ID NO: 712082 - RNA, 19 nt, Artificial Sequence
  Description of Artificial Sequence: Synthetic oligonucleotide
  Sense strand starting at position 699 of SEQ ID NO: 586361
agaauaacguacucugaug

SEQ ID NO: 712083 - RNA, 19 nt, Artificial Sequence
  Description of Artificial Sequence: Synthetic oligonucleotide
  Antisense strand to SEQ ID NO: 712082
caucagaguacguuauucu

SEQ ID NO: 712084 - RNA, 19 nt, Artificial Sequence
  Description of Artificial Sequence: Synthetic oligonucleotide
  Sense strand starting at position 707 of SEQ ID NO: 586361
guacucugauguuuaugaa

SEQ ID NO: 712085 - RNA, 19 nt, Artificial Sequence
  Description of Artificial Sequence: Synthetic oligonucleotide
  Antisense strand to SEQ ID NO: 712084
uucauaaacaucagaguac

SEQ ID NO: 712086 - RNA, 19 nt, Artificial Sequence
  Description of Artificial Sequence: Synthetic oligonucleotide
  Sense strand starting at position 1068 of SEQ ID NO: 586361
gcagcaucggaauagcaua

SEQ ID NO: 712087 - RNA, 19 nt, Artificial Sequence
  Description of Artificial Sequence: Synthetic oligonucleotide
  Antisense strand to SEQ ID NO: 712086
uaugcuauuccgaugcugc

SEQ ID NO: 712088 - RNA, 19 nt, Artificial Sequence
  Description of Artificial Sequence: Synthetic oligonucleotide
  Sense strand starting at position 1223 of SEQ ID NO: 586361
gcgguuuaagcggcgugaa

SEQ ID NO: 712089 - RNA, 19 nt, Artificial Sequence
  Description of Artificial Sequence: Synthetic oligonucleotide
  Antisense strand to SEQ ID NO: 712088
uucacgccgcuuaaaccgc

SEQ ID NO: 712090 - RNA, 19 nt, Artificial Sequence
  Description of Artificial Sequence: Synthetic oligonucleotide
  Sense strand starting at position 1739 of SEQ ID NO: 586361
ggcacaucacccuaugaau

SEQ ID NO: 712091 - RNA, 19 nt, Artificial Sequence
  Description of Artificial Sequence: Synthetic oligonucleotide
  Antisense strand to SEQ ID NO: 712090
auucauagggugaugugcc

SEQ ID NO: 712092 - RNA, 19 nt, Artificial Sequence
  Description of Artificial Sequence: Synthetic oligonucleotide
  Sense strand starting at position 1783 of SEQ ID NO: 586361
aggagaaccgguuggaaua

SEQ ID NO: 712093 - RNA, 19 nt, Artificial Sequence
  Description of Artificial Sequence: Synthetic oligonucleotide
  Antisense strand to SEQ ID NO: 712092
uauuccaaccgguucuccu

SEQ ID NO: 712094 - RNA, 19 nt, Artificial Sequence
  Description of Artificial Sequence: Synthetic oligonucleotide
  Sense strand starting at position 1784 of SEQ ID NO: 586361
ggagaaccgguuggaauaa

SEQ ID NO: 712095 - RNA, 19 nt, Artificial Sequence
  Description of Artificial Sequence: Synthetic oligonucleotide
  Antisense strand to SEQ ID NO: 712094
uuauuccaaccgguucucc

SEQ ID NO: 712096 - RNA, 19 nt, Artificial Sequence
  Description of Artificial Sequence: Synthetic oligonucleotide
  Sense strand starting at position 2105 of SEQ ID NO: 586361
gcgcgaucucaggcucaag

SEQ ID NO: 712097 - RNA, 19 nt, Artificial Sequence
  Description of Artificial Sequence: Synthetic oligonucleotide
  Antisense strand to SEQ ID NO: 712096
cuugagccugagaucgcgc

SEQ ID NO: 712098 - RNA, 19 nt, Artificial Sequence
  Description of Artificial Sequence: Synthetic oligonucleotide
  Sense strand starting at position 2136 of SEQ ID NO: 586361
cucagucuccuggaaagcu

SEQ ID NO: 712099 - RNA, 19 nt, Artificial Sequence
  Description of Artificial Sequence: Synthetic oligonucleotide
  Antisense strand to SEQ ID NO: 712098
agcuuuccaggagacugag

SEQ ID NO: 712100 - RNA, 19 nt, Artificial Sequence
  Description of Artificial Sequence: Synthetic oligonucleotide
  Sense strand starting at position 2180 of SEQ ID NO: 586361
uccaguuagcguguaugua

SEQ ID NO: 712101 - RNA, 19 nt, Artificial Sequence
  Description of Artificial Sequence: Synthetic oligonucleotide
  Antisense strand to SEQ ID NO: 712100
uacauacacgcuaacugga

SEQ ID NO: 712102 - RNA, 19 nt, Artificial Sequence
  Description of Artificial Sequence: Synthetic oligonucleotide
  Sense strand starting at position 2514 of SEQ ID NO: 586361
ggaaacaaccuuugugauu

SEQ ID NO: 712103 - RNA, 19 nt, Artificial Sequence
  Description of Artificial Sequence: Synthetic oligonucleotide
  Antisense strand to SEQ ID NO: 712102
aaucacaaagguuguuucc

SEQ ID NO: 712104 - RNA, 19 nt, Artificial Sequence
  Description of Artificial Sequence: Synthetic oligonucleotide
  Sense strand starting at position 2572 of SEQ ID NO: 586361
acagucaucugauuagcaa

SEQ ID NO: 712105 - RNA, 19 nt, Artificial Sequence
  Description of Artificial Sequence: Synthetic oligonucleotide
  Antisense strand to SEQ ID NO: 712104
uugcuaaucagaugacugu

SEQ ID NO: 712106 - RNA, 19 nt, Artificial Sequence
  Description of Artificial Sequence: Synthetic oligonucleotide
  Sense strand starting at position 2604 of SEQ ID NO: 586361
ugucauguuagguaacaua

SEQ ID NO: 712107 - RNA, 19 nt, Artificial Sequence
  Description of Artificial Sequence: Synthetic oligonucleotide
  Antisense strand to SEQ ID NO: 712106
uauguuaccuaacaugaca

SEQ ID NO: 712108 - RNA, 19 nt, Artificial Sequence
  Description of Artificial Sequence: Synthetic oligonucleotide
  Sense strand starting at position 2638 of SEQ ID NO: 586361
gugguaggccauuauucua

SEQ ID NO: 712109 - RNA, 19 nt, Artificial Sequence
  Description of Artificial Sequence: Synthetic oligonucleotide
  Antisense strand to SEQ ID NO: 712108
uagaauaauggccuaccac

SEQ ID NO: 712110 - RNA, 19 nt, Artificial Sequence
  Description of Artificial Sequence: Synthetic oligonucleotide
  Sense strand starting at position 2698 of SEQ ID NO: 586361
cugaguguugcacaggaau

SEQ ID NO: 712111 - RNA, 19 nt, Artificial Sequence
  Description of Artificial Sequence: Synthetic oligonucleotide
  Antisense strand to SEQ ID NO: 712110
auuccugugcaacacucag

SEQ ID NO: 712112 - RNA, 19 nt, Artificial Sequence
  Description of Artificial Sequence: Synthetic oligonucleotide
  Sense strand starting at position 2701 of SEQ ID NO: 586361
aguguugcacaggaaucua

SEQ ID NO: 712113 - RNA, 19 nt, Artificial Sequence
  Description of Artificial Sequence: Synthetic oligonucleotide
  Antisense strand to SEQ ID NO: 712112
uagauuccugugcaacacu

SEQ ID NO: 712114 - RNA, 19 nt, Artificial Sequence
  Description of Artificial Sequence: Synthetic oligonucleotide
  Sense strand starting at position 2767 of SEQ ID NO: 586361
ccagcaucugaguaccaga

SEQ ID NO: 712115 - RNA, 19 nt, Artificial Sequence
  Description of Artificial Sequence: Synthetic oligonucleotide
  Antisense strand to SEQ ID NO: 712114
ucugguacucagaugcugg

SEQ ID NO: 712116 - RNA, 19 nt, Artificial Sequence
  Description of Artificial Sequence: Synthetic oligonucleotide
  Sense strand starting at position 2811 of SEQ ID NO: 586361
gagagaucagcucaugcac

SEQ ID NO: 712117 - RNA, 19 nt, Artificial Sequence
  Description of Artificial Sequence: Synthetic oligonucleotide
  Antisense strand to SEQ ID NO: 712116
gugcaugagcugaucucuc

SEQ ID NO: 712118 - RNA, 19 nt, Artificial Sequence
  Description of Artificial Sequence: Synthetic oligonucleotide
  Sense strand starting at position 2980 of SEQ ID NO: 586361
ggagaaggcuguuugguaa

SEQ ID NO: 712119 - RNA, 19 nt, Artificial Sequence
  Description of Artificial Sequence: Synthetic oligonucleotide
  Antisense strand to SEQ ID NO: 712118
uuaccaaacagccuucucc

SEQ ID NO: 712120 - RNA, 19 nt, Artificial Sequence
  Description of Artificial Sequence: Synthetic oligonucleotide
  Sense strand starting at position 2983 of SEQ ID NO: 586361
gaaggcuguuugguaagga

SEQ ID NO: 712121 - RNA, 19 nt, Artificial Sequence
  Description of Artificial Sequence: Synthetic oligonucleotide
  Antisense strand to SEQ ID NO: 712120
uccuuaccaaacagccuuc

SEQ ID NO: 712122 - RNA, 19 nt, Artificial Sequence
  Description of Artificial Sequence: Synthetic oligonucleotide
  Sense strand starting at position 2986 of SEQ ID NO: 586361
ggcuguuugguaaggaugu

SEQ ID NO: 712123 - RNA, 19 nt, Artificial Sequence
  Description of Artificial Sequence: Synthetic oligonucleotide
  Antisense strand to SEQ ID NO: 712122
acauccuuaccaaacagcc

SEQ ID NO: 712124 - RNA, 19 nt, Artificial Sequence
  Description of Artificial Sequence: Synthetic oligonucleotide
  Sense strand starting at position 3002 of SEQ ID NO: 586361
uguuguaaacucugagaaa

SEQ ID NO: 712125 - RNA, 19 nt, Artificial Sequence
  Description of Artificial Sequence: Synthetic oligonucleotide
  Antisense strand to SEQ ID NO: 712124
uuucucagaguuuacaaca

SEQ ID NO: 712126 - RNA, 19 nt, Artificial Sequence
  Description of Artificial Sequence: Synthetic oligonucleotide
  Sense strand starting at position 3431 of SEQ ID NO: 586361
gucacaaccuaucuguaaa

SEQ ID NO: 712127 - RNA, 19 nt, Artificial Sequence
  Description of Artificial Sequence: Synthetic oligonucleotide
  Antisense strand to SEQ ID NO: 712126
uuuacagauagguugugac

SEQ ID NO: 712128 - RNA, 19 nt, Artificial Sequence
  Description of Artificial Sequence: Synthetic oligonucleotide
  Sense strand starting at position 3529 of SEQ ID NO: 586361
ccugccuuaucaguggaaa

SEQ ID NO: 712129 - RNA, 19 nt, Artificial Sequence
  Description of Artificial Sequence: Synthetic oligonucleotide
  Antisense strand to SEQ ID NO: 712128
uuuccacugauaaggcagg

SEQ ID NO: 712130 - RNA, 19 nt, Artificial Sequence
  Description of Artificial Sequence: Synthetic oligonucleotide
  Sense strand starting at position 3530 of SEQ ID NO: 586361
cugccuuaucaguggaaag

SEQ ID NO: 712131 - RNA, 19 nt, Artificial Sequence
  Description of Artificial Sequence: Synthetic oligonucleotide
  Antisense strand to SEQ ID NO: 712130
cuuuccacugauaaggcag

SEQ ID NO: 712132 - RNA, 19 nt, Artificial Sequence
  Description of Artificial Sequence: Synthetic oligonucleotide
  Sense strand starting at position 3531 of SEQ ID NO: 586361
ugccuuaucaguggaaagg

SEQ ID NO: 712133 - RNA, 19 nt, Artificial Sequence
  Description of Artificial Sequence: Synthetic oligonucleotide
  Antisense strand to SEQ ID NO: 712132
ccuuuccacugauaaggca

SEQ ID NO: 712134 - RNA, 19 nt, Artificial Sequence
  Description of Artificial Sequence: Synthetic oligonucleotide
  Sense strand starting at position 3532 of SEQ ID NO: 586361
gccuuaucaguggaaaggu

SEQ ID NO: 712135 - RNA, 19 nt, Artificial Sequence
  Description of Artificial Sequence: Synthetic oligonucleotide
  Antisense strand to SEQ ID NO: 712134
accuuuccacugauaaggc

SEQ ID NO: 712136 - RNA, 19 nt, Artificial Sequence
  Description of Artificial Sequence: Synthetic oligonucleotide
  Sense strand starting at position 3723 of SEQ ID NO: 586361
uagucugauuugcuggcua

SEQ ID NO: 712137 - RNA, 19 nt, Artificial Sequence
  Description of Artificial Sequence: Synthetic oligonucleotide
  Antisense strand to SEQ ID NO: 712136
uagccagcaaaucagacua

SEQ ID NO: 712138 - RNA, 19 nt, Artificial Sequence
  Description of Artificial Sequence: Synthetic oligonucleotide
  Sense strand starting at position 3725 of SEQ ID NO: 586361
gucugauuugcuggcuaga

SEQ ID NO: 712139 - RNA, 19 nt, Artificial Sequence
  Description of Artificial Sequence: Synthetic oligonucleotide
  Antisense strand to SEQ ID NO: 712138
ucuagccagcaaaucagac

SEQ ID NO: 712140 - RNA, 19 nt, Artificial Sequence
  Description of Artificial Sequence: Synthetic oligonucleotide
  Sense strand starting at position 3727 of SEQ ID NO: 586361
cugauuugcuggcuagauu

SEQ ID NO: 712141 - RNA, 19 nt, Artificial Sequence
  Description of Artificial Sequence: Synthetic oligonucleotide
  Antisense strand to SEQ ID NO: 712140
aaucuagccagcaaaucag

SEQ ID NO: 712142 - RNA, 19 nt, Artificial Sequence
  Description of Artificial Sequence: Synthetic oligonucleotide
  Sense strand starting at position 3766 of SEQ ID NO: 586361
agaaaugugucccuuccca

SEQ ID NO: 712143 - RNA, 19 nt, Artificial Sequence
  Description of Artificial Sequence: Synthetic oligonucleotide
  Antisense strand to SEQ ID NO: 712142
ugggaagggacacauuucu

SEQ ID NO: 712144 - RNA, 19 nt, Artificial Sequence
  Description of Artificial Sequence: Synthetic oligonucleotide
  Sense strand starting at position 3774 of SEQ ID NO: 586361
gucccuucccaauauguca

SEQ ID NO: 712145 - RNA, 19 nt, Artificial Sequence
  Description of Artificial Sequence: Synthetic oligonucleotide
  Antisense strand to SEQ ID NO: 712144
ugacauauugggaagggac

SEQ ID NO: 712146 - RNA, 19 nt, Artificial Sequence
  Description of Artificial Sequence: Synthetic oligonucleotide
  Sense strand starting at position 3814 of SEQ ID NO: 586361
gccagaaguccacaacaug

SEQ ID NO: 712147 - RNA, 19 nt, Artificial Sequence
  Description of Artificial Sequence: Synthetic oligonucleotide
  Antisense strand to SEQ ID NO: 712146
cauguuguggacuucuggc

SEQ ID NO: 712148 - RNA, 19 nt, Artificial Sequence
  Description of Artificial Sequence: Synthetic oligonucleotide
  Sense strand starting at position 3934 of SEQ ID NO: 586361
accuuacuggaguguuaca

SEQ ID NO: 712149 - RNA, 19 nt, Artificial Sequence
  Description of Artificial Sequence: Synthetic oligonucleotide
  Antisense strand to SEQ ID NO: 712148
uguaacacuccaguaaggu

SEQ ID NO: 712150 - RNA, 19 nt, Artificial Sequence
  Description of Artificial Sequence: Synthetic oligonucleotide
  Sense strand starting at position 3947 of SEQ ID NO: 586361
guuacacugucauccagau

SEQ ID NO: 712151 - RNA, 19 nt, Artificial Sequence
  Description of Artificial Sequence: Synthetic oligonucleotide
  Antisense strand to SEQ ID NO: 712150
aucuggaugacaguguaac

SEQ ID NO: 712152 - RNA, 19 nt, Artificial Sequence
  Description of Artificial Sequence: Synthetic oligonucleotide
  Sense strand starting at position 222 of SEQ ID NO: 586362
ucuagauuaguggguauca

SEQ ID NO: 712153 - RNA, 19 nt, Artificial Sequence
  Description of Artificial Sequence: Synthetic oligonucleotide
  Antisense strand to SEQ ID NO: 712152
ugauacccacuaaucuaga

SEQ ID NO: 712154 - RNA, 19 nt, Artificial Sequence
  Description of Artificial Sequence: Synthetic oligonucleotide
  Sense strand starting at position 223 of SEQ ID NO: 586362
cuagauuaguggguaucaa

SEQ ID NO: 712155 - RNA, 19 nt, Artificial Sequence
  Description of Artificial Sequence: Synthetic oligonucleotide
  Antisense strand to SEQ ID NO: 712154
uugauacccacuaaucuag

SEQ ID NO: 712156 - RNA, 19 nt, Artificial Sequence
  Description of Artificial Sequence: Synthetic oligonucleotide
  Sense strand starting at position 267 of SEQ ID NO: 586362
acuagagauuaaguugcaa

SEQ ID NO: 712157 - RNA, 19 nt, Artificial Sequence
  Description of Artificial Sequence: Synthetic oligonucleotide
  Antisense strand to SEQ ID NO: 712156
uugcaacuuaaucucuagu

SEQ ID NO: 712158 - RNA, 19 nt, Artificial Sequence
  Description of Artificial Sequence: Synthetic oligonucleotide
  Sense strand starting at position 414 of SEQ ID NO: 586362
gaggcuucgagagguuaga

SEQ ID NO: 712159 - RNA, 19 nt, Artificial Sequence
  Description of Artificial Sequence: Synthetic oligonucleotide
  Antisense strand to SEQ ID NO: 712158
ucuaaccucucgaagccuc

SEQ ID NO: 712160 - RNA, 19 nt, Artificial Sequence
  Description of Artificial Sequence: Synthetic oligonucleotide
  Sense strand starting at position 429 of SEQ ID NO: 586362
uagauaacuuguuuaaggu

SEQ ID NO: 712161 - RNA, 19 nt, Artificial Sequence
  Description of Artificial Sequence: Synthetic oligonucleotide
  Antisense strand to SEQ ID NO: 712160
accuuaaacaaguuaucua

SEQ ID NO: 712162 - RNA, 19 nt, Artificial Sequence
  Description of Artificial Sequence: Synthetic oligonucleotide
  Sense strand starting at position 460 of SEQ ID NO: 586362
cacugauagggccagugua

SEQ ID NO: 712163 - RNA, 19 nt, Artificial Sequence
  Description of Artificial Sequence: Synthetic oligonucleotide
  Antisense strand to SEQ ID NO: 712162
uacacuggcccuaucagug

SEQ ID NO: 712164 - RNA, 19 nt, Artificial Sequence
  Description of Artificial Sequence: Synthetic oligonucleotide
  Sense strand starting at position 542 of SEQ ID NO: 586362
gacugccaggguuaacaua

SEQ ID NO: 712165 - RNA, 19 nt, Artificial Sequence
  Description of Artificial Sequence: Synthetic oligonucleotide
  Antisense strand to SEQ ID NO: 712164
uauguuaacccuggcaguc

SEQ ID NO: 712166 - RNA, 19 nt, Artificial Sequence
  Description of Artificial Sequence: Synthetic oligonucleotide
  Sense strand starting at position 789 of SEQ ID NO: 586362
acgguuaugaugggacaca

SEQ ID NO: 712167 - RNA, 19 nt, Artificial Sequence
  Description of Artificial Sequence: Synthetic oligonucleotide
  Antisense strand to SEQ ID NO: 712166
ugugucccaucauaaccgu

SEQ ID NO: 712168 - RNA, 19 nt, Artificial Sequence
  Description of Artificial Sequence: Synthetic oligonucleotide
  Sense strand starting at position 862 of SEQ ID NO: 586362
uguggucugcacuggauuu

SEQ ID NO: 712169 - RNA, 19 nt, Artificial Sequence
  Description of Artificial Sequence: Synthetic oligonucleotide
  Antisense strand to SEQ ID NO: 712168
aaauccagugcagaccaca

SEQ ID NO: 712170 - RNA, 19 nt, Artificial Sequence
  Description of Artificial Sequence: Synthetic oligonucleotide
  Sense strand starting at position 1054 of SEQ ID NO: 586362
uuggcagaggguugaugaa

SEQ ID NO: 712171 - RNA, 19 nt, Artificial Sequence
  Description of Artificial Sequence: Synthetic oligonucleotide
  Antisense strand to SEQ ID NO: 712170
uucaucaacccucugccaa

SEQ ID NO: 712172 - RNA, 19 nt, Artificial Sequence
  Description of Artificial Sequence: Synthetic oligonucleotide
  Sense strand starting at position 1297 of SEQ ID NO: 586362
aguaacaagucccugguaa

SEQ ID NO: 712173 - RNA, 19 nt, Artificial Sequence
  Description of Artificial Sequence: Synthetic oligonucleotide
  Antisense strand to SEQ ID NO: 712172
uuaccagggacuuguuacu

SEQ ID NO: 712174 - RNA, 19 nt, Artificial Sequence
  Description of Artificial Sequence: Synthetic oligonucleotide
  Sense strand starting at position 1350 of SEQ ID NO: 586362
gccugcucgaguuucuuga

SEQ ID NO: 712175 - RNA, 19 nt, Artificial Sequence
  Description of Artificial Sequence: Synthetic oligonucleotide
  Antisense strand to SEQ ID NO: 712174
ucaagaaacucgagcaggc

SEQ ID NO: 712176 - RNA, 19 nt, Artificial Sequence
  Description of Artificial Sequence: Synthetic oligonucleotide
  Sense strand starting at position 1915 of SEQ ID NO: 586362
ccugaucagucucuaggaa

SEQ ID NO: 712177 - RNA, 19 nt, Artificial Sequence
  Description of Artificial Sequence: Synthetic oligonucleotide
  Antisense strand to SEQ ID NO: 712176
uuccuagagacugaucagg

SEQ ID NO: 712178 - RNA, 19 nt, Artificial Sequence
  Description of Artificial Sequence: Synthetic oligonucleotide
  Sense strand starting at position 2327 of SEQ ID NO: 586362
gaaggagcaaucggguuua

SEQ ID NO: 712179 - RNA, 19 nt, Artificial Sequence
  Description of Artificial Sequence: Synthetic oligonucleotide
  Antisense strand to SEQ ID NO: 712178
uaaacccgauugcuccuuc

SEQ ID NO: 712180 - RNA, 19 nt, Artificial Sequence
  Description of Artificial Sequence: Synthetic oligonucleotide
  Sense strand starting at position 2343 of SEQ ID NO: 586362
uuaggagucagauaggcuu

SEQ ID NO: 712181 - RNA, 19 nt, Artificial Sequence
  Description of Artificial Sequence: Synthetic oligonucleotide
  Antisense strand to SEQ ID NO: 712180
aagccuaucugacuccuaa

SEQ ID NO: 712182 - RNA, 19 nt, Artificial Sequence
  Description of Artificial Sequence: Synthetic oligonucleotide
  Sense strand starting at position 2403 of SEQ ID NO: 586362
guuuaaguccucuaaaccu

SEQ ID NO: 712183 - RNA, 19 nt, Artificial Sequence
  Description of Artificial Sequence: Synthetic oligonucleotide
  Antisense strand to SEQ ID NO: 712182
agguuuagaggacuuaaac

SEQ ID NO: 712184 - RNA, 19 nt, Artificial Sequence
  Description of Artificial Sequence: Synthetic oligonucleotide
  Sense strand starting at position 2675 of SEQ ID NO: 586362
cagagauugcaguaaacuu

SEQ ID NO: 712185 - RNA, 19 nt, Artificial Sequence
  Description of Artificial Sequence: Synthetic oligonucleotide
  Antisense strand to SEQ ID NO: 712184
aaguuuacugcaaucucug

SEQ ID NO: 712186 - RNA, 19 nt, Artificial Sequence
  Description of Artificial Sequence: Synthetic oligonucleotide
  Sense strand starting at position 2867 of SEQ ID NO: 586362
aucacaagucaugaaguuu

SEQ ID NO: 712187 - RNA, 19 nt, Artificial Sequence
  Description of Artificial Sequence: Synthetic oligonucleotide
  Antisense strand to SEQ ID NO: 712186
aaacuucaugacuugugau

SEQ ID NO: 712188 - RNA, 19 nt, Artificial Sequence
  Description of Artificial Sequence: Synthetic oligonucleotide
  Sense strand starting at position 2900 of SEQ ID NO: 586362
cuugacaaauugucugauu

SEQ ID NO: 712189 - RNA, 19 nt, Artificial Sequence
  Description of Artificial Sequence: Synthetic oligonucleotide
  Antisense strand to SEQ ID NO: 712188
aaucagacaauuugucaag

SEQ ID NO: 712190 - RNA, 19 nt, Artificial Sequence
  Description of Artificial Sequence: Synthetic oligonucleotide
  Sense strand starting at position 2901 of SEQ ID NO: 586362
uugacaaauugucugauuc

SEQ ID NO: 712191 - RNA, 19 nt, Artificial Sequence
  Description of Artificial Sequence: Synthetic oligonucleotide
  Antisense strand to SEQ ID NO: 712190
gaaucagacaauuugucaa

SEQ ID NO: 712192 - RNA, 19 nt, Artificial Sequence
  Description of Artificial Sequence: Synthetic oligonucleotide
  Sense strand starting at position 3086 of SEQ ID NO: 586362
gggagaguugguggucaau

SEQ ID NO: 712193 - RNA, 19 nt, Artificial Sequence
  Description of Artificial Sequence: Synthetic oligonucleotide
  Antisense strand to SEQ ID NO: 712192
auugaccaccaacucuccc

SEQ ID NO: 712194 - RNA, 19 nt, Artificial Sequence
  Description of Artificial Sequence: Synthetic oligonucleotide
  Sense strand starting at position 3088 of SEQ ID NO: 586362
gagaguugguggucaauaa

SEQ ID NO: 712195 - RNA, 19 nt, Artificial Sequence
  Description of Artificial Sequence: Synthetic oligonucleotide
  Antisense strand to SEQ ID NO: 712194
uuauugaccaccaacucuc

SEQ ID NO: 712196 - RNA, 19 nt, Artificial Sequence
  Description of Artificial Sequence: Synthetic oligonucleotide
  Sense strand starting at position 3089 of SEQ ID NO: 586362
agaguugguggucaauaaa

SEQ ID NO: 712197 - RNA, 19 nt, Artificial Sequence
  Description of Artificial Sequence: Synthetic oligonucleotide
  Antisense strand to SEQ ID NO: 712196
uuuauugaccaccaacucu

SEQ ID NO: 712198 - RNA, 19 nt, Artificial Sequence
  Description of Artificial Sequence: Synthetic oligonucleotide
  Sense strand starting at position 3105 of SEQ ID NO: 586362
aaauaucuggugcaugaau

SEQ ID NO: 712199 - RNA, 19 nt, Artificial Sequence
  Description of Artificial Sequence: Synthetic oligonucleotide
  Antisense strand to SEQ ID NO: 712198
auucaugcaccagauauuu

SEQ ID NO: 712200 - RNA, 19 nt, Artificial Sequence
  Description of Artificial Sequence: Synthetic oligonucleotide
  Sense strand starting at position 3107 of SEQ ID NO: 586362
auaucuggugcaugaauga

SEQ ID NO: 712201 - RNA, 19 nt, Artificial Sequence
  Description of Artificial Sequence: Synthetic oligonucleotide
  Antisense strand to SEQ ID NO: 712200
ucauucaugcaccagauau

SEQ ID NO: 712202 - RNA, 19 nt, Artificial Sequence
  Description of Artificial Sequence: Synthetic oligonucleotide
  Sense strand starting at position 3155 of SEQ ID NO: 586362
ucacacuuggcuuagaaau

SEQ ID NO: 712203 - RNA, 19 nt, Artificial Sequence
  Description of Artificial Sequence: Synthetic oligonucleotide
  Antisense strand to SEQ ID NO: 712202
auuucuaagccaaguguga

SEQ ID NO: 712204 - RNA, 19 nt, Artificial Sequence
  Description of Artificial Sequence: Synthetic oligonucleotide
  Sense strand starting at position 3263 of SEQ ID NO: 586362
gccacaugucaaggacuca

SEQ ID NO: 712205 - RNA, 19 nt, Artificial Sequence
  Description of Artificial Sequence: Synthetic oligonucleotide
  Antisense strand to SEQ ID NO: 712204
ugaguccuugacauguggc

SEQ ID NO: 712206 - RNA, 19 nt, Artificial Sequence
  Description of Artificial Sequence: Synthetic oligonucleotide
  Sense strand starting at position 3461 of SEQ ID NO: 586362
gucuaacaagaaugagagu

SEQ ID NO: 712207 - RNA, 19 nt, Artificial Sequence
  Description of Artificial Sequence: Synthetic oligonucleotide
  Antisense strand to SEQ ID NO: 712206
acucucauucuuguuagac

SEQ ID NO: 712208 - RNA, 19 nt, Artificial Sequence
  Description of Artificial Sequence: Synthetic oligonucleotide
  Sense strand starting at position 3516 of SEQ ID NO: 586362
aaagguuaugacugaguac

SEQ ID NO: 712209 - RNA, 19 nt, Artificial Sequence
  Description of Artificial Sequence: Synthetic oligonucleotide
  Antisense strand to SEQ ID NO: 712208
guacucagucauaaccuuu

SEQ ID NO: 712210 - RNA, 19 nt, Artificial Sequence
  Description of Artificial Sequence: Synthetic oligonucleotide
  Sense strand starting at position 3525 of SEQ ID NO: 586362
gacugaguacagugacuuu

SEQ ID NO: 712211 - RNA, 19 nt, Artificial Sequence
  Description of Artificial Sequence: Synthetic oligonucleotide
  Antisense strand to SEQ ID NO: 712210
aaagucacuguacucaguc

SEQ ID NO: 712212 - RNA, 19 nt, Artificial Sequence
  Description of Artificial Sequence: Synthetic oligonucleotide
  Sense strand starting at position 3594 of SEQ ID NO: 586362
uagaucugaccgcauggaa

SEQ ID NO: 712213 - RNA, 19 nt, Artificial Sequence
  Description of Artificial Sequence: Synthetic oligonucleotide
  Antisense strand to SEQ ID NO: 712212
uuccaugcggucagaucua

SEQ ID NO: 712214 - RNA, 19 nt, Artificial Sequence
  Description of Artificial Sequence: Synthetic oligonucleotide
  Sense strand starting at position 3597 of SEQ ID NO: 586362
aucugaccgcauggaaauu

SEQ ID NO: 712215 - RNA, 19 nt, Artificial Sequence
  Description of Artificial Sequence: Synthetic oligonucleotide
  Antisense strand to SEQ ID NO: 712214
aauuuccaugcggucagau

SEQ ID NO: 712216 - RNA, 19 nt, Artificial Sequence
  Description of Artificial Sequence: Synthetic oligonucleotide
  Sense strand starting at position 3629 of SEQ ID NO: 586362
uaagguucaccgugaggga

SEQ ID NO: 712217 - RNA, 19 nt, Artificial Sequence
  Description of Artificial Sequence: Synthetic oligonucleotide
  Antisense strand to SEQ ID NO: 712216
ucccucacggugaaccuua

SEQ ID NO: 712218 - RNA, 19 nt, Artificial Sequence
  Description of Artificial Sequence: Synthetic oligonucleotide
  Sense strand starting at position 3630 of SEQ ID NO: 586362
aagguucaccgugagggau

SEQ ID NO: 712219 - RNA, 19 nt, Artificial Sequence
  Description of Artificial Sequence: Synthetic oligonucleotide
  Antisense strand to SEQ ID NO: 712218
aucccucacggugaaccuu

SEQ ID NO: 712220 - RNA, 19 nt, Artificial Sequence
  Description of Artificial Sequence: Synthetic oligonucleotide
  Sense strand starting at position 3636 of SEQ ID NO: 586362
caccgugagggaugaauaa

SEQ ID NO: 712221 - RNA, 19 nt, Artificial Sequence
  Description of Artificial Sequence: Synthetic oligonucleotide
  Antisense strand to SEQ ID NO: 712220
uuauucaucccucacggug

SEQ ID NO: 712222 - RNA, 19 nt, Artificial Sequence
  Description of Artificial Sequence: Synthetic oligonucleotide
  Sense strand starting at position 3667 of SEQ ID NO: 586362
ugcauccuguuacuauuua

SEQ ID NO: 712223 - RNA, 19 nt, Artificial Sequence
  Description of Artificial Sequence: Synthetic oligonucleotide
  Antisense strand to SEQ ID NO: 712222
uaaauaguaacaggaugca

SEQ ID NO: 712224 - RNA, 19 nt, Artificial Sequence
  Description of Artificial Sequence: Synthetic oligonucleotide
  Sense strand starting at position 3671 of SEQ ID NO: 586362
uccuguuacuauuuagcuu

SEQ ID NO: 712225 - RNA, 19 nt, Artificial Sequence
  Description of Artificial Sequence: Synthetic oligonucleotide
  Antisense strand to SEQ ID NO: 712224
aagcuaaauaguaacagga

SEQ ID NO: 712226 - RNA, 19 nt, Artificial Sequence
  Description of Artificial Sequence: Synthetic oligonucleotide
  Sense strand starting at position 3675 of SEQ ID NO: 586362
guuacuauuuagcuuucua

SEQ ID NO: 712227 - RNA, 19 nt, Artificial Sequence
  Description of Artificial Sequence: Synthetic oligonucleotide
  Antisense strand to SEQ ID NO: 712226
uagaaagcuaaauaguaac

SEQ ID NO: 712228 - RNA, 19 nt, Artificial Sequence
  Description of Artificial Sequence: Synthetic oligonucleotide
  Sense strand starting at position 3717 of SEQ ID NO: 586362
accucuuccucaguggaga

SEQ ID NO: 712229 - RNA, 19 nt, Artificial Sequence
  Description of Artificial Sequence: Synthetic oligonucleotide
  Antisense strand to SEQ ID NO: 712228
ucuccacugaggaagaggu

SEQ ID NO: 712230 - RNA, 19 nt, Artificial Sequence
  Description of Artificial Sequence: Synthetic oligonucleotide
  Sense strand starting at position 3982 of SEQ ID NO: 586362
uguuaucucacugaggguu

SEQ ID NO: 712231 - RNA, 19 nt, Artificial Sequence
  Description of Artificial Sequence: Synthetic oligonucleotide
  Antisense strand to SEQ ID NO: 712230
aacccucagugagauaaca

SEQ ID NO: 712232 - RNA, 19 nt, Artificial Sequence
  Description of Artificial Sequence: Synthetic oligonucleotide
  Sense strand starting at position 177 of SEQ ID NO: 586363
cauagagaaucagugcuga

SEQ ID NO: 712233 - RNA, 19 nt, Artificial Sequence
  Description of Artificial Sequence: Synthetic oligonucleotide
  Antisense strand to SEQ ID NO: 712232
ucagcacugauucucuaug

SEQ ID NO: 712234 - RNA, 19 nt, Artificial Sequence
  Description of Artificial Sequence: Synthetic oligonucleotide
  Sense strand starting at position 288 of SEQ ID NO: 586363
uaaugugggccucauauga

SEQ ID NO: 712235 - RNA, 19 nt, Artificial Sequence
  Description of Artificial Sequence: Synthetic oligonucleotide
  Antisense strand to SEQ ID NO: 712234
ucauaugaggcccacauua

SEQ ID NO: 712236 - RNA, 19 nt, Artificial Sequence
  Description of Artificial Sequence: Synthetic oligonucleotide
  Sense strand starting at position 299 of SEQ ID NO: 586363
ucauaugacucauucugua

SEQ ID NO: 712237 - RNA, 19 nt, Artificial Sequence
  Description of Artificial Sequence: Synthetic oligonucleotide
  Antisense strand to SEQ ID NO: 712236
uacagaaugagucauauga

SEQ ID NO: 712238 - RNA, 19 nt, Artificial Sequence
  Description of Artificial Sequence: Synthetic oligonucleotide
  Sense strand starting at position 320 of SEQ ID NO: 586363
auaagaaagugcccuugaa

SEQ ID NO: 712239 - RNA, 19 nt, Artificial Sequence
  Description of Artificial Sequence: Synthetic oligonucleotide
  Antisense strand to SEQ ID NO: 712238
uucaagggcacuuucuuau

SEQ ID NO: 712240 - RNA, 19 nt, Artificial Sequence
  Description of Artificial Sequence: Synthetic oligonucleotide
  Sense strand starting at position 388 of SEQ ID NO: 586363
ugugucauuuccuuucuau

SEQ ID NO: 712241 - RNA, 19 nt, Artificial Sequence
  Description of Artificial Sequence: Synthetic oligonucleotide
  Antisense strand to SEQ ID NO: 712240
auagaaaggaaaugacaca

SEQ ID NO: 712242 - RNA, 19 nt, Artificial Sequence
  Description of Artificial Sequence: Synthetic oligonucleotide
  Sense strand starting at position 417 of SEQ ID NO: 586363
gaaacauggcuguacuugu

SEQ ID NO: 712243 - RNA, 19 nt, Artificial Sequence
  Description of Artificial Sequence: Synthetic oligonucleotide
  Antisense strand to SEQ ID NO: 712242
acaaguacagccauguuuc

SEQ ID NO: 712244 - RNA, 19 nt, Artificial Sequence
  Description of Artificial Sequence: Synthetic oligonucleotide
  Sense strand starting at position 442 of SEQ ID NO: 586363
gucucauuguuagcaauuu

SEQ ID NO: 712245 - RNA, 19 nt, Artificial Sequence
  Description of Artificial Sequence: Synthetic oligonucleotide
  Antisense strand to SEQ ID NO: 712244
aaauugcuaacaaugagac

SEQ ID NO: 712246 - RNA, 19 nt, Artificial Sequence
  Description of Artificial Sequence: Synthetic oligonucleotide
  Sense strand starting at position 502 of SEQ ID NO: 586363
ugcaauugggucuauuaaa

SEQ ID NO: 712247 - RNA, 19 nt, Artificial Sequence
  Description of Artificial Sequence: Synthetic oligonucleotide
  Antisense strand to SEQ ID NO: 712246
uuuaauagacccaauugca

SEQ ID NO: 712248 - RNA, 19 nt, Artificial Sequence
  Description of Artificial Sequence: Synthetic oligonucleotide
  Sense strand starting at position 640 of SEQ ID NO: 586363
gaacgcaaugauggucaua

SEQ ID NO: 712249 - RNA, 19 nt, Artificial Sequence
  Description of Artificial Sequence: Synthetic oligonucleotide
  Antisense strand to SEQ ID NO: 712248
uaugaccaucauugcguuc

SEQ ID NO: 712250 - RNA, 19 nt, Artificial Sequence
  Description of Artificial Sequence: Synthetic oligonucleotide
  Sense strand starting at position 643 of SEQ ID NO: 586363
cgcaaugauggucauaaga

SEQ ID NO: 712251 - RNA, 19 nt, Artificial Sequence
  Description of Artificial Sequence: Synthetic oligonucleotide
  Antisense strand to SEQ ID NO: 712250
ucuuaugaccaucauugcg

SEQ ID NO: 712252 - RNA, 19 nt, Artificial Sequence
  Description of Artificial Sequence: Synthetic oligonucleotide
  Sense strand starting at position 730 of SEQ ID NO: 586363
gagggcagucuggguaaga

SEQ ID NO: 712253 - RNA, 19 nt, Artificial Sequence
  Description of Artificial Sequence: Synthetic oligonucleotide
  Antisense strand to SEQ ID NO: 712252
ucuuacccagacugcccuc

SEQ ID NO: 712254 - RNA, 19 nt, Artificial Sequence
  Description of Artificial Sequence: Synthetic oligonucleotide
  Sense strand starting at position 731 of SEQ ID NO: 586363
agggcagucuggguaagaa

SEQ ID NO: 712255 - RNA, 19 nt, Artificial Sequence
  Description of Artificial Sequence: Synthetic oligonucleotide
  Antisense strand to SEQ ID NO: 712254
uucuuacccagacugcccu

SEQ ID NO: 712256 - RNA, 19 nt, Artificial Sequence
  Description of Artificial Sequence: Synthetic oligonucleotide
  Sense strand starting at position 1392 of SEQ ID NO: 586363
cuaggagcucucuagauac

SEQ ID NO: 712257 - RNA, 19 nt, Artificial Sequence
  Description of Artificial Sequence: Synthetic oligonucleotide
  Antisense strand to SEQ ID NO: 712256
guaucuagagagcuccuag

SEQ ID NO: 712258 - RNA, 19 nt, Artificial Sequence
  Description of Artificial Sequence: Synthetic oligonucleotide
  Sense strand starting at position 1449 of SEQ ID NO: 586363
gacugaacuccguaucugu

SEQ ID NO: 712259 - RNA, 19 nt, Artificial Sequence
  Description of Artificial Sequence: Synthetic oligonucleotide
  Antisense strand to SEQ ID NO: 712258
acagauacggaguucaguc

SEQ ID NO: 712260 - RNA, 19 nt, Artificial Sequence
  Description of Artificial Sequence: Synthetic oligonucleotide
  Sense strand starting at position 2402 of SEQ ID NO: 586363
acgguucaaccaggaaagu

SEQ ID NO: 712261 - RNA, 19 nt, Artificial Sequence
  Description of Artificial Sequence: Synthetic oligonucleotide
  Antisense strand to SEQ ID NO: 712260
acuuuccugguugaaccgu

SEQ ID NO: 712262 - RNA, 19 nt, Artificial Sequence
  Description of Artificial Sequence: Synthetic oligonucleotide
  Sense strand starting at position 2589 of SEQ ID NO: 586363
gugcucaacgaauacugaa

SEQ ID NO: 712263 - RNA, 19 nt, Artificial Sequence
  Description of Artificial Sequence: Synthetic oligonucleotide
  Antisense strand to SEQ ID NO: 712262
uucaguauucguugagcac

SEQ ID NO: 712264 - RNA, 19 nt, Artificial Sequence
  Description of Artificial Sequence: Synthetic oligonucleotide
  Sense strand starting at position 2610 of SEQ ID NO: 586363
agggaaucucagcauagcu

SEQ ID NO: 712265 - RNA, 19 nt, Artificial Sequence
  Description of Artificial Sequence: Synthetic oligonucleotide
  Antisense strand to SEQ ID NO: 712264
agcuaugcugagauucccu

SEQ ID NO: 712266 - RNA, 19 nt, Artificial Sequence
  Description of Artificial Sequence: Synthetic oligonucleotide
  Sense strand starting at position 2641 of SEQ ID NO: 586363
uugcuuucugaugaacuga

SEQ ID NO: 712267 - RNA, 19 nt, Artificial Sequence
  Description of Artificial Sequence: Synthetic oligonucleotide
  Antisense strand to SEQ ID NO: 712266
ucaguucaucagaaagcaa

SEQ ID NO: 712268 - RNA, 19 nt, Artificial Sequence
  Description of Artificial Sequence: Synthetic oligonucleotide
  Sense strand starting at position 2695 of SEQ ID NO: 586363
gcugaaaccgauuaaccau

SEQ ID NO: 712269 - RNA, 19 nt, Artificial Sequence
  Description of Artificial Sequence: Synthetic oligonucleotide
  Antisense strand to SEQ ID NO: 712268
augguuaaucgguuucagc

SEQ ID NO: 712270 - RNA, 19 nt, Artificial Sequence
  Description of Artificial Sequence: Synthetic oligonucleotide
  Sense strand starting at position 2709 of SEQ ID NO: 586363
accauuacuuaaguuguua

SEQ ID NO: 712271 - RNA, 19 nt, Artificial Sequence
  Description of Artificial Sequence: Synthetic oligonucleotide
  Antisense strand to SEQ ID NO: 712270
uaacaacuuaaguaauggu

SEQ ID NO: 712272 - RNA, 19 nt, Artificial Sequence
  Description of Artificial Sequence: Synthetic oligonucleotide
  Sense strand starting at position 2721 of SEQ ID NO: 586363
guuguuacagcgaggcaga

SEQ ID NO: 712273 - RNA, 19 nt, Artificial Sequence
  Description of Artificial Sequence: Synthetic oligonucleotide
  Antisense strand to SEQ ID NO: 712272
ucugccucgcuguaacaac

SEQ ID NO: 712274 - RNA, 19 nt, Artificial Sequence
  Description of Artificial Sequence: Synthetic oligonucleotide
  Sense strand starting at position 2766 of SEQ ID NO: 586363
agggaaagcuuucuaauug

SEQ ID NO: 712275 - RNA, 19 nt, Artificial Sequence
  Description of Artificial Sequence: Synthetic oligonucleotide
  Antisense strand to SEQ ID NO: 712274
caauuagaaagcuuucccu

SEQ ID NO: 712276 - RNA, 19 nt, Artificial Sequence
  Description of Artificial Sequence: Synthetic oligonucleotide
  Sense strand starting at position 2912 of SEQ ID NO: 586363
guugacuggcaauagaagu

SEQ ID NO: 712277 - RNA, 19 nt, Artificial Sequence
  Description of Artificial Sequence: Synthetic oligonucleotide
  Antisense strand to SEQ ID NO: 712276
acuucuauugccagucaac

SEQ ID NO: 712278 - RNA, 19 nt, Artificial Sequence
  Description of Artificial Sequence: Synthetic oligonucleotide
  Sense strand starting at position 3033 of SEQ ID NO: 586363
ugcaaugcucucuacuaag

SEQ ID NO: 712279 - RNA, 19 nt, Artificial Sequence
  Description of Artificial Sequence: Synthetic oligonucleotide
  Antisense strand to SEQ ID NO: 712278
cuuaguagagagcauugca

SEQ ID NO: 712280 - RNA, 19 nt, Artificial Sequence
  Description of Artificial Sequence: Synthetic oligonucleotide
  Sense strand starting at position 3078 of SEQ ID NO: 586363
aaauuucugcccugcgaga

SEQ ID NO: 712281 - RNA, 19 nt, Artificial Sequence
  Description of Artificial Sequence: Synthetic oligonucleotide
  Antisense strand to SEQ ID NO: 712280
ucucgcagggcagaaauuu

SEQ ID NO: 712282 - RNA, 19 nt, Artificial Sequence
  Description of Artificial Sequence: Synthetic oligonucleotide
  Sense strand starting at position 3438 of SEQ ID NO: 586363
aguuuaggauuugacacau

SEQ ID NO: 712283 - RNA, 19 nt, Artificial Sequence
  Description of Artificial Sequence: Synthetic oligonucleotide
  Antisense strand to SEQ ID NO: 712282
augugucaaauccuaaacu

SEQ ID NO: 712284 - RNA, 19 nt, Artificial Sequence
  Description of Artificial Sequence: Synthetic oligonucleotide
  Sense strand starting at position 3458 of SEQ ID NO: 586363
guagcuauccaguaaauaa

SEQ ID NO: 712285 - RNA, 19 nt, Artificial Sequence
  Description of Artificial Sequence: Synthetic oligonucleotide
  Antisense strand to SEQ ID NO: 712284
uuauuuacuggauagcuac

SEQ ID NO: 712286 - RNA, 19 nt, Artificial Sequence
  Description of Artificial Sequence: Synthetic oligonucleotide
  Sense strand starting at position 3577 of SEQ ID NO: 586363
gugguuauuggaugaagaa

SEQ ID NO: 712287 - RNA, 19 nt, Artificial Sequence
  Description of Artificial Sequence: Synthetic oligonucleotide
  Antisense strand to SEQ ID NO: 712286
uucuucauccaauaaccac

SEQ ID NO: 712288 - RNA, 19 nt, Artificial Sequence
  Description of Artificial Sequence: Synthetic oligonucleotide
  Sense strand starting at position 3590 of SEQ ID NO: 586363
gaagaagugguucgaaaug

SEQ ID NO: 712289 - RNA, 19 nt, Artificial Sequence
  Description of Artificial Sequence: Synthetic oligonucleotide
  Antisense strand to SEQ ID NO: 712288
cauuucgaaccacuucuuc

SEQ ID NO: 712290 - RNA, 19 nt, Artificial Sequence
  Description of Artificial Sequence: Synthetic oligonucleotide
  Sense strand starting at position 3633 of SEQ ID NO: 586363
ugcuaaugugaugagaugu

SEQ ID NO: 712291 - RNA, 19 nt, Artificial Sequence
  Description of Artificial Sequence: Synthetic oligonucleotide
  Antisense strand to SEQ ID NO: 712290
acaucucaucacauuagca

SEQ ID NO: 712292 - RNA, 19 nt, Artificial Sequence
  Description of Artificial Sequence: Synthetic oligonucleotide
  Sense strand starting at position 3641 of SEQ ID NO: 586363
ugaugagauguuggacgaa

SEQ ID NO: 712293 - RNA, 19 nt, Artificial Sequence
  Description of Artificial Sequence: Synthetic oligonucleotide
  Antisense strand to SEQ ID NO: 712292
uucguccaacaucucauca

SEQ ID NO: 712294 - RNA, 19 nt, Artificial Sequence
  Description of Artificial Sequence: Synthetic oligonucleotide
  Sense strand starting at position 3644 of SEQ ID NO: 586363
ugagauguuggacgaaaga

SEQ ID NO: 712295 - RNA, 19 nt, Artificial Sequence
  Description of Artificial Sequence: Synthetic oligonucleotide
  Antisense strand to SEQ ID NO: 712294
ucuuucguccaacaucuca

SEQ ID NO: 712296 - RNA, 19 nt, Artificial Sequence
  Description of Artificial Sequence: Synthetic oligonucleotide
  Sense strand starting at position 3806 of SEQ ID NO: 586363
acagcauacucaucagguu

SEQ ID NO: 712297 - RNA, 19 nt, Artificial Sequence
  Description of Artificial Sequence: Synthetic oligonucleotide
  Antisense strand to SEQ ID NO: 712296
aaccugaugaguaugcugu

SEQ ID NO: 712298 - RNA, 19 nt, Artificial Sequence
  Description of Artificial Sequence: Synthetic oligonucleotide
  Sense strand starting at position 3841 of SEQ ID NO: 586363
ccaguccucuaucuagaua

SEQ ID NO: 712299 - RNA, 19 nt, Artificial Sequence
  Description of Artificial Sequence: Synthetic oligonucleotide
  Antisense strand to SEQ ID NO: 712298
uaucuagauagaggacugg

SEQ ID NO: 712300 - RNA, 19 nt, Artificial Sequence
  Description of Artificial Sequence: Synthetic oligonucleotide
  Sense strand starting at position 3844 of SEQ ID NO: 586363
guccucuaucuagauaguu

SEQ ID NO: 712301 - RNA, 19 nt, Artificial Sequence
  Description of Artificial Sequence: Synthetic oligonucleotide
  Antisense strand to SEQ ID NO: 712300
aacuaucuagauagaggac

SEQ ID NO: 712302 - RNA, 19 nt, Artificial Sequence
  Description of Artificial Sequence: Synthetic oligonucleotide
  Sense strand starting at position 3869 of SEQ ID NO: 586363
uguaauucagaguggguga

SEQ ID NO: 712303 - RNA, 19 nt, Artificial Sequence
  Description of Artificial Sequence: Synthetic oligonucleotide
  Antisense strand to SEQ ID NO: 712302
ucacccacucugaauuaca

SEQ ID NO: 712304 - RNA, 19 nt, Artificial Sequence
  Description of Artificial Sequence: Synthetic oligonucleotide
  Sense strand starting at position 3874 of SEQ ID NO: 586363
uucagagugggugaacuuu

SEQ ID NO: 712305 - RNA, 19 nt, Artificial Sequence
  Description of Artificial Sequence: Synthetic oligonucleotide
  Antisense strand to SEQ ID NO: 712304
aaaguucacccacucugaa

SEQ ID NO: 712306 - RNA, 19 nt, Artificial Sequence
  Description of Artificial Sequence: Synthetic oligonucleotide
  Sense strand starting at position 3958 of SEQ ID NO: 586363
uaauuaaaugcccgaggaa

SEQ ID NO: 712307 - RNA, 19 nt, Artificial Sequence
  Description of Artificial Sequence: Synthetic oligonucleotide
  Antisense strand to SEQ ID NO: 712306
uuccucgggcauuuaauua

SEQ ID NO: 712308 - RNA, 19 nt, Artificial Sequence
  Description of Artificial Sequence: Synthetic oligonucleotide
  Sense strand starting at position 3961 of SEQ ID NO: 586363
uuaaaugcccgaggaagau

SEQ ID NO: 712309 - RNA, 19 nt, Artificial Sequence
  Description of Artificial Sequence: Synthetic oligonucleotide
  Antisense strand to SEQ ID NO: 712308
aucuuccucgggcauuuaa

SEQ ID NO: 712310 - RNA, 19 nt, Artificial Sequence
  Description of Artificial Sequence: Synthetic oligonucleotide
  Sense strand starting at position 3967 of SEQ ID NO: 586363
gcccgaggaagauaguaau

SEQ ID NO: 712311 - RNA, 19 nt, Artificial Sequence
  Description of Artificial Sequence: Synthetic oligonucleotide
  Antisense strand to SEQ ID NO: 712310
auuacuaucuuccucgggc

SEQ ID NO: 712312 - RNA, 19 nt, Artificial Sequence
  Description of Artificial Sequence: Synthetic oligonucleotide
  Sense strand starting at position 84 of SEQ ID NO: 586364
gaacgcaaugauggucaua

SEQ ID NO: 712313 - RNA, 19 nt, Artificial Sequence
  Description of Artificial Sequence: Synthetic oligonucleotide
  Antisense strand to SEQ ID NO: 712312
uaugaccaucauugcguuc

SEQ ID NO: 712314 - RNA, 19 nt, Artificial Sequence
  Description of Artificial Sequence: Synthetic oligonucleotide
  Sense strand starting at position 87 of SEQ ID NO: 586364
cgcaaugauggucauaaga

SEQ ID NO: 712315 - RNA, 19 nt, Artificial Sequence
  Description of Artificial Sequence: Synthetic oligonucleotide
  Antisense strand to SEQ ID NO: 712314
ucuuaugaccaucauugcg

SEQ ID NO: 712316 - RNA, 19 nt, Artificial Sequence
  Description of Artificial Sequence: Synthetic oligonucleotide
  Sense strand starting at position 174 of SEQ ID NO: 586364
gagggcagucuggguaaga

SEQ ID NO: 712317 - RNA, 19 nt, Artificial Sequence
  Description of Artificial Sequence: Synthetic oligonucleotide
  Antisense strand to SEQ ID NO: 712316
ucuuacccagacugcccuc

SEQ ID NO: 712318 - RNA, 19 nt, Artificial Sequence
  Description of Artificial Sequence: Synthetic oligonucleotide
  Sense strand starting at position 175 of SEQ ID NO: 586364
agggcagucuggguaagaa

SEQ ID NO: 712319 - RNA, 19 nt, Artificial Sequence
  Description of Artificial Sequence: Synthetic oligonucleotide
  Antisense strand to SEQ ID NO: 712318
uucuuacccagacugcccu

SEQ ID NO: 712320 - RNA, 19 nt, Artificial Sequence
  Description of Artificial Sequence: Synthetic oligonucleotide
  Sense strand starting at position 408 of SEQ ID NO: 586364
ccuaauggucugggcucaa

SEQ ID NO: 712321 - RNA, 19 nt, Artificial Sequence
  Description of Artificial Sequence: Synthetic oligonucleotide
  Antisense strand to SEQ ID NO: 712320
uugagcccagaccauuagg

SEQ ID NO: 712322 - RNA, 19 nt, Artificial Sequence
  Description of Artificial Sequence: Synthetic oligonucleotide
  Sense strand starting at position 419 of SEQ ID NO: 586364
gggcucaacuucuccuuua

SEQ ID NO: 712323 - RNA, 19 nt, Artificial Sequence
  Description of Artificial Sequence: Synthetic oligonucleotide
  Antisense strand to SEQ ID NO: 712322
uaaaggagaaguugagccc

SEQ ID NO: 712324 - RNA, 19 nt, Artificial Sequence
  Description of Artificial Sequence: Synthetic oligonucleotide
  Sense strand starting at position 836 of SEQ ID NO: 586364
cuaggagcucucuagauac

SEQ ID NO: 712325 - RNA, 19 nt, Artificial Sequence
  Description of Artificial Sequence: Synthetic oligonucleotide
  Antisense strand to SEQ ID NO: 712324
guaucuagagagcuccuag

SEQ ID NO: 712326 - RNA, 19 nt, Artificial Sequence
  Description of Artificial Sequence: Synthetic oligonucleotide
  Sense strand starting at position 893 of SEQ ID NO: 586364
gacugaacuccguaucugu

SEQ ID NO: 712327 - RNA, 19 nt, Artificial Sequence
  Description of Artificial Sequence: Synthetic oligonucleotide
  Antisense strand to SEQ ID NO: 712326
acagauacggaguucaguc

SEQ ID NO: 712328 - RNA, 19 nt, Artificial Sequence
  Description of Artificial Sequence: Synthetic oligonucleotide
  Sense strand starting at position 1846 of SEQ ID NO: 586364
acgguucaaccaggaaagu

SEQ ID NO: 712329 - RNA, 19 nt, Artificial Sequence
  Description of Artificial Sequence: Synthetic oligonucleotide
  Antisense strand to SEQ ID NO: 712328
acuuuccugguugaaccgu

SEQ ID NO: 712330 - RNA, 19 nt, Artificial Sequence
  Description of Artificial Sequence: Synthetic oligonucleotide
  Sense strand starting at position 2033 of SEQ ID NO: 586364
gugcucaacgaauacugaa

SEQ ID NO: 712331 - RNA, 19 nt, Artificial Sequence
  Description of Artificial Sequence: Synthetic oligonucleotide
  Antisense strand to SEQ ID NO: 712330
uucaguauucguugagcac

SEQ ID NO: 712332 - RNA, 19 nt, Artificial Sequence
  Description of Artificial Sequence: Synthetic oligonucleotide
  Sense strand starting at position 2054 of SEQ ID NO: 586364
agggaaucucagcauagcu

SEQ ID NO: 712333 - RNA, 19 nt, Artificial Sequence
  Description of Artificial Sequence: Synthetic oligonucleotide
  Antisense strand to SEQ ID NO: 712332
agcuaugcugagauucccu

SEQ ID NO: 712334 - RNA, 19 nt, Artificial Sequence
  Description of Artificial Sequence: Synthetic oligonucleotide
  Sense strand starting at position 2085 of SEQ ID NO: 586364
uugcuuucugaugaacuga

SEQ ID NO: 712335 - RNA, 19 nt, Artificial Sequence
  Description of Artificial Sequence: Synthetic oligonucleotide
  Antisense strand to SEQ ID NO: 712334
ucaguucaucagaaagcaa

SEQ ID NO: 712336 - RNA, 19 nt, Artificial Sequence
  Description of Artificial Sequence: Synthetic oligonucleotide
  Sense strand starting at position 2139 of SEQ ID NO: 586364
gcugaaaccgauuaaccau

SEQ ID NO: 712337 - RNA, 19 nt, Artificial Sequence
  Description of Artificial Sequence: Synthetic oligonucleotide
  Antisense strand to SEQ ID NO: 712336
augguuaaucgguuucagc

SEQ ID NO: 712338 - RNA, 19 nt, Artificial Sequence
  Description of Artificial Sequence: Synthetic oligonucleotide
  Sense strand starting at position 2153 of SEQ ID NO: 586364
accauuacuuaaguuguua

SEQ ID NO: 712339 - RNA, 19 nt, Artificial Sequence
  Description of Artificial Sequence: Synthetic oligonucleotide
  Antisense strand to SEQ ID NO: 712338
uaacaacuuaaguaauggu

SEQ ID NO: 712340 - RNA, 19 nt, Artificial Sequence
  Description of Artificial Sequence: Synthetic oligonucleotide
  Sense strand starting at position 2165 of SEQ ID NO: 586364
guuguuacagcgaggcaga

SEQ ID NO: 712341 - RNA, 19 nt, Artificial Sequence
  Description of Artificial Sequence: Synthetic oligonucleotide
  Antisense strand to SEQ ID NO: 712340
ucugccucgcuguaacaac

SEQ ID NO: 712342 - RNA, 19 nt, Artificial Sequence
  Description of Artificial Sequence: Synthetic oligonucleotide
  Sense strand starting at position 2210 of SEQ ID NO: 586364
agggaaagcuuucuaauug

SEQ ID NO: 712343 - RNA, 19 nt, Artificial Sequence
  Description of Artificial Sequence: Synthetic oligonucleotide
  Antisense strand to SEQ ID NO: 712342
caauuagaaagcuuucccu

SEQ ID NO: 712344 - RNA, 19 nt, Artificial Sequence
  Description of Artificial Sequence: Synthetic oligonucleotide
  Sense strand starting at position 2356 of SEQ ID NO: 586364
guugacuggcaauagaagu

SEQ ID NO: 712345 - RNA, 19 nt, Artificial Sequence
  Description of Artificial Sequence: Synthetic oligonucleotide
  Antisense strand to SEQ ID NO: 712344
acuucuauugccagucaac

SEQ ID NO: 712346 - RNA, 19 nt, Artificial Sequence
  Description of Artificial Sequence: Synthetic oligonucleotide
  Sense strand starting at position 2477 of SEQ ID NO: 586364
ugcaaugcucucuacuaag

SEQ ID NO: 712347 - RNA, 19 nt, Artificial Sequence
  Description of Artificial Sequence: Synthetic oligonucleotide
  Antisense strand to SEQ ID NO: 712346
cuuaguagagagcauugca

SEQ ID NO: 712348 - RNA, 19 nt, Artificial Sequence
  Description of Artificial Sequence: Synthetic oligonucleotide
  Sense strand starting at position 2522 of SEQ ID NO: 586364
aaauuucugcccugcgaga

SEQ ID NO: 712349 - RNA, 19 nt, Artificial Sequence
  Description of Artificial Sequence: Synthetic oligonucleotide
  Antisense strand to SEQ ID NO: 712348
ucucgcagggcagaaauuu

SEQ ID NO: 712350 - RNA, 19 nt, Artificial Sequence
  Description of Artificial Sequence: Synthetic oligonucleotide
  Sense strand starting at position 2882 of SEQ ID NO: 586364
aguuuaggauuugacacau

SEQ ID NO: 712351 - RNA, 19 nt, Artificial Sequence
  Description of Artificial Sequence: Synthetic oligonucleotide
  Antisense strand to SEQ ID NO: 712350
augugucaaauccuaaacu

SEQ ID NO: 712352 - RNA, 19 nt, Artificial Sequence
  Description of Artificial Sequence: Synthetic oligonucleotide
  Sense strand starting at position 2902 of SEQ ID NO: 586364
guagcuauccaguaaauaa

SEQ ID NO: 712353 - RNA, 19 nt, Artificial Sequence
  Description of Artificial Sequence: Synthetic oligonucleotide
  Antisense strand to SEQ ID NO: 712352
uuauuuacuggauagcuac

SEQ ID NO: 712354 - RNA, 19 nt, Artificial Sequence
  Description of Artificial Sequence: Synthetic oligonucleotide
  Sense strand starting at position 3021 of SEQ ID NO: 586364
gugguuauuggaugaagaa

SEQ ID NO: 712355 - RNA, 19 nt, Artificial Sequence
  Description of Artificial Sequence: Synthetic oligonucleotide
  Antisense strand to SEQ ID NO: 712354
uucuucauccaauaaccac

SEQ ID NO: 712356 - RNA, 19 nt, Artificial Sequence
  Description of Artificial Sequence: Synthetic oligonucleotide
  Sense strand starting at position 3034 of SEQ ID NO: 586364
gaagaagugguucgaaaug

SEQ ID NO: 712357 - RNA, 19 nt, Artificial Sequence
  Description of Artificial Sequence: Synthetic oligonucleotide
  Antisense strand to SEQ ID NO: 712356
cauuucgaaccacuucuuc

SEQ ID NO: 712358 - RNA, 19 nt, Artificial Sequence
  Description of Artificial Sequence: Synthetic oligonucleotide
  Sense strand starting at position 3074 of SEQ ID NO: 586364
auuugcuaaugugaugaga

SEQ ID NO: 712359 - RNA, 19 nt, Artificial Sequence
  Description of Artificial Sequence: Synthetic oligonucleotide
  Antisense strand to SEQ ID NO: 712358
ucucaucacauuagcaaau

SEQ ID NO: 712360 - RNA, 19 nt, Artificial Sequence
  Description of Artificial Sequence: Synthetic oligonucleotide
  Sense strand starting at position 3077 of SEQ ID NO: 586364
ugcuaaugugaugagaugu

SEQ ID NO: 712361 - RNA, 19 nt, Artificial Sequence
  Description of Artificial Sequence: Synthetic oligonucleotide
  Antisense strand to SEQ ID NO: 712360
acaucucaucacauuagca

SEQ ID NO: 712362 - RNA, 19 nt, Artificial Sequence
  Description of Artificial Sequence: Synthetic oligonucleotide
  Sense strand starting at position 3085 of SEQ ID NO: 586364
ugaugagauguuggacgaa

SEQ ID NO: 712363 - RNA, 19 nt, Artificial Sequence
  Description of Artificial Sequence: Synthetic oligonucleotide
  Antisense strand to SEQ ID NO: 712362
uucguccaacaucucauca

SEQ ID NO: 712364 - RNA, 19 nt, Artificial Sequence
  Description of Artificial Sequence: Synthetic oligonucleotide
  Sense strand starting at position 3088 of SEQ ID NO: 586364
ugagauguuggacgaaaga

SEQ ID NO: 712365 - RNA, 19 nt, Artificial Sequence
  Description of Artificial Sequence: Synthetic oligonucleotide
  Antisense strand to SEQ ID NO: 712364
ucuuucguccaacaucuca

SEQ ID NO: 712366 - RNA, 19 nt, Artificial Sequence
  Description of Artificial Sequence: Synthetic oligonucleotide
  Sense strand starting at position 3250 of SEQ ID NO: 586364
acagcauacucaucagguu

SEQ ID NO: 712367 - RNA, 19 nt, Artificial Sequence
  Description of Artificial Sequence: Synthetic oligonucleotide
  Antisense strand to SEQ ID NO: 712366
aaccugaugaguaugcugu

SEQ ID NO: 712368 - RNA, 19 nt, Artificial Sequence
  Description of Artificial Sequence: Synthetic oligonucleotide
  Sense strand starting at position 3285 of SEQ ID NO: 586364
ccaguccucuaucuagaua

SEQ ID NO: 712369 - RNA, 19 nt, Artificial Sequence
  Description of Artificial Sequence: Synthetic oligonucleotide
  Antisense strand to SEQ ID NO: 712368
uaucuagauagaggacugg

SEQ ID NO: 712370 - RNA, 19 nt, Artificial Sequence
  Description of Artificial Sequence: Synthetic oligonucleotide
  Sense strand starting at position 3288 of SEQ ID NO: 586364
guccucuaucuagauaguu

SEQ ID NO: 712371 - RNA, 19 nt, Artificial Sequence
  Description of Artificial Sequence: Synthetic oligonucleotide
  Antisense strand to SEQ ID NO: 712370
aacuaucuagauagaggac

SEQ ID NO: 712372 - RNA, 19 nt, Artificial Sequence
  Description of Artificial Sequence: Synthetic oligonucleotide
  Sense strand starting at position 3313 of SEQ ID NO: 586364
uguaauucagaguggguga

SEQ ID NO: 712373 - RNA, 19 nt, Artificial Sequence
  Description of Artificial Sequence: Synthetic oligonucleotide
  Antisense strand to SEQ ID NO: 712372
ucacccacucugaauuaca

SEQ ID NO: 712374 - RNA, 19 nt, Artificial Sequence
  Description of Artificial Sequence: Synthetic oligonucleotide
  Sense strand starting at position 3318 of SEQ ID NO: 586364
uucagagugggugaacuuu

SEQ ID NO: 712375 - RNA, 19 nt, Artificial Sequence
  Description of Artificial Sequence: Synthetic oligonucleotide
  Antisense strand to SEQ ID NO: 712374
aaaguucacccacucugaa

SEQ ID NO: 712376 - RNA, 19 nt, Artificial Sequence
  Description of Artificial Sequence: Synthetic oligonucleotide
  Sense strand starting at position 3402 of SEQ ID NO: 586364
uaauuaaaugcccgaggaa

SEQ ID NO: 712377 - RNA, 19 nt, Artificial Sequence
  Description of Artificial Sequence: Synthetic oligonucleotide
  Antisense strand to SEQ ID NO: 712376
uuccucgggcauuuaauua

SEQ ID NO: 712378 - RNA, 19 nt, Artificial Sequence
  Description of Artificial Sequence: Synthetic oligonucleotide
  Sense strand starting at position 3405 of SEQ ID NO: 586364
uuaaaugcccgaggaagau

SEQ ID NO: 712379 - RNA, 19 nt, Artificial Sequence
  Description of Artificial Sequence: Synthetic oligonucleotide
  Antisense strand to SEQ ID NO: 712378
aucuuccucgggcauuuaa

SEQ ID NO: 712380 - RNA, 19 nt, Artificial Sequence
  Description of Artificial Sequence: Synthetic oligonucleotide
  Sense strand starting at position 3411 of SEQ ID NO: 586364
gcccgaggaagauaguaau

SEQ ID NO: 712381 - RNA, 19 nt, Artificial Sequence
  Description of Artificial Sequence: Synthetic oligonucleotide
  Antisense strand to SEQ ID NO: 712380
auuacuaucuuccucgggc

SEQ ID NO: 712382 - RNA, 19 nt, Artificial Sequence
  Description of Artificial Sequence: Synthetic oligonucleotide
  Sense strand starting at position 3436 of SEQ ID NO: 586364
agcugcuauuauuuaugua

SEQ ID NO: 712383 - RNA, 19 nt, Artificial Sequence
  Description of Artificial Sequence: Synthetic oligonucleotide
  Antisense strand to SEQ ID NO: 712382
uacauaaauaauagcagcu

SEQ ID NO: 712384 - RNA, 19 nt, Artificial Sequence
  Description of Artificial Sequence: Synthetic oligonucleotide
  Sense strand starting at position 3464 of SEQ ID NO: 586364
gucuacugucaccaagcau

SEQ ID NO: 712385 - RNA, 19 nt, Artificial Sequence
  Description of Artificial Sequence: Synthetic oligonucleotide
  Antisense strand to SEQ ID NO: 712384
augcuuggugacaguagac

SEQ ID NO: 712386 - RNA, 19 nt, Artificial Sequence
  Description of Artificial Sequence: Synthetic oligonucleotide
  Sense strand starting at position 3500 of SEQ ID NO: 586364
augcaaugauuggcucauu

SEQ ID NO: 712387 - RNA, 19 nt, Artificial Sequence
  Description of Artificial Sequence: Synthetic oligonucleotide
  Antisense strand to SEQ ID NO: 712386
aaugagccaaucauugcau

SEQ ID NO: 712388 - RNA, 19 nt, Artificial Sequence
  Description of Artificial Sequence: Synthetic oligonucleotide
  Sense strand starting at position 3501 of SEQ ID NO: 586364
ugcaaugauuggcucauuu

SEQ ID NO: 712389 - RNA, 19 nt, Artificial Sequence
  Description of Artificial Sequence: Synthetic oligonucleotide
  Antisense strand to SEQ ID NO: 712388
aaaugagccaaucauugca

SEQ ID NO: 712390 - RNA, 19 nt, Artificial Sequence
  Description of Artificial Sequence: Synthetic oligonucleotide
  Sense strand starting at position 3660 of SEQ ID NO: 586364
aggguagacucuccagaac

SEQ ID NO: 712391 - RNA, 19 nt, Artificial Sequence
  Description of Artificial Sequence: Synthetic oligonucleotide
  Antisense strand to SEQ ID NO: 712390
guucuggagagucuacccu

SEQ ID NO: 712392 - RNA, 19 nt, Artificial Sequence
  Description of Artificial Sequence: Synthetic oligonucleotide
  Sense strand starting at position 282 of SEQ ID NO: 586365
gagugugagaaccauaagu

SEQ ID NO: 712393 - RNA, 19 nt, Artificial Sequence
  Description of Artificial Sequence: Synthetic oligonucleotide
  Antisense strand to SEQ ID NO: 712392
acuuaugguucucacacuc

SEQ ID NO: 712394 - RNA, 19 nt, Artificial Sequence
  Description of Artificial Sequence: Synthetic oligonucleotide
  Sense strand starting at position 284 of SEQ ID NO: 586365
gugugagaaccauaaguua

SEQ ID NO: 712395 - RNA, 19 nt, Artificial Sequence
  Description of Artificial Sequence: Synthetic oligonucleotide
  Antisense strand to SEQ ID NO: 712394
uaacuuaugguucucacac

SEQ ID NO: 712396 - RNA, 19 nt, Artificial Sequence
  Description of Artificial Sequence: Synthetic oligonucleotide
  Sense strand starting at position 354 of SEQ ID NO: 586365
ugacucagucaauagucau

SEQ ID NO: 712397 - RNA, 19 nt, Artificial Sequence
  Description of Artificial Sequence: Synthetic oligonucleotide
  Antisense strand to SEQ ID NO: 712396
augacuauugacugaguca

SEQ ID NO: 712398 - RNA, 19 nt, Artificial Sequence
  Description of Artificial Sequence: Synthetic oligonucleotide
  Sense strand starting at position 357 of SEQ ID NO: 586365
cucagucaauagucauaga

SEQ ID NO: 712399 - RNA, 19 nt, Artificial Sequence
  Description of Artificial Sequence: Synthetic oligonucleotide
  Antisense strand to SEQ ID NO: 712398
ucuaugacuauugacugag

SEQ ID NO: 712400 - RNA, 19 nt, Artificial Sequence
  Description of Artificial Sequence: Synthetic oligonucleotide
  Sense strand starting at position 565 of SEQ ID NO: 586365
uaauuaaugugagugauag

SEQ ID NO: 712401 - RNA, 19 nt, Artificial Sequence
  Description of Artificial Sequence: Synthetic oligonucleotide
  Antisense strand to SEQ ID NO: 712400
cuaucacucacauuaauua

SEQ ID NO: 712402 - RNA, 19 nt, Artificial Sequence
  Description of Artificial Sequence: Synthetic oligonucleotide
  Sense strand starting at position 566 of SEQ ID NO: 586365
aauuaaugugagugauagu

SEQ ID NO: 712403 - RNA, 19 nt, Artificial Sequence
  Description of Artificial Sequence: Synthetic oligonucleotide
  Antisense strand to SEQ ID NO: 712402
acuaucacucacauuaauu

SEQ ID NO: 712404 - RNA, 19 nt, Artificial Sequence
  Description of Artificial Sequence: Synthetic oligonucleotide
  Sense strand starting at position 567 of SEQ ID NO: 586365
auuaaugugagugauagua

SEQ ID NO: 712405 - RNA, 19 nt, Artificial Sequence
  Description of Artificial Sequence: Synthetic oligonucleotide
  Antisense strand to SEQ ID NO: 712404
uacuaucacucacauuaau

SEQ ID NO: 712406 - RNA, 19 nt, Artificial Sequence
  Description of Artificial Sequence: Synthetic oligonucleotide
  Sense strand starting at position 974 of SEQ ID NO: 586365
aguugaaagucacuuuaug

SEQ ID NO: 712407 - RNA, 19 nt, Artificial Sequence
  Description of Artificial Sequence: Synthetic oligonucleotide
  Antisense strand to SEQ ID NO: 712406
cauaaagugacuuucaacu

SEQ ID NO: 712408 - RNA, 19 nt, Artificial Sequence
  Description of Artificial Sequence: Synthetic oligonucleotide
  Sense strand starting at position 1147 of SEQ ID NO: 586365
aguugugcgguccuaacuu

SEQ ID NO: 712409 - RNA, 19 nt, Artificial Sequence
  Description of Artificial Sequence: Synthetic oligonucleotide
  Antisense strand to SEQ ID NO: 712408
aaguuaggaccgcacaacu

SEQ ID NO: 712410 - RNA, 19 nt, Artificial Sequence
  Description of Artificial Sequence: Synthetic oligonucleotide
  Sense strand starting at position 1314 of SEQ ID NO: 586365
ucuugauaucuaugaguca

SEQ ID NO: 712411 - RNA, 19 nt, Artificial Sequence
  Description of Artificial Sequence: Synthetic oligonucleotide
  Antisense strand to SEQ ID NO: 712410
ugacucauagauaucaaga

SEQ ID NO: 712412 - RNA, 19 nt, Artificial Sequence
  Description of Artificial Sequence: Synthetic oligonucleotide
  Sense strand starting at position 1317 of SEQ ID NO: 586365
ugauaucuaugagucagac

SEQ ID NO: 712413 - RNA, 19 nt, Artificial Sequence
  Description of Artificial Sequence: Synthetic oligonucleotide
  Antisense strand to SEQ ID NO: 712412
gucugacucauagauauca

SEQ ID NO: 712414 - RNA, 19 nt, Artificial Sequence
  Description of Artificial Sequence: Synthetic oligonucleotide
  Sense strand starting at position 1477 of SEQ ID NO: 586365
cuauuacagcuagaguguu

SEQ ID NO: 712415 - RNA, 19 nt, Artificial Sequence
  Description of Artificial Sequence: Synthetic oligonucleotide
  Antisense strand to SEQ ID NO: 712414
aacacucuagcuguaauag

SEQ ID NO: 712416 - RNA, 19 nt, Artificial Sequence
  Description of Artificial Sequence: Synthetic oligonucleotide
  Sense strand starting at position 1686 of SEQ ID NO: 586365
ugauacuuugucuagcaca

SEQ ID NO: 712417 - RNA, 19 nt, Artificial Sequence
  Description of Artificial Sequence: Synthetic oligonucleotide
  Antisense strand to SEQ ID NO: 712416
ugugcuagacaaaguauca

SEQ ID NO: 712418 - RNA, 19 nt, Artificial Sequence
  Description of Artificial Sequence: Synthetic oligonucleotide
  Sense strand starting at position 1940 of SEQ ID NO: 586365
augcaaucuguccacauga

SEQ ID NO: 712419 - RNA, 19 nt, Artificial Sequence
  Description of Artificial Sequence: Synthetic oligonucleotide
  Antisense strand to SEQ ID NO: 712418
ucauguggacagauugcau

SEQ ID NO: 712420 - RNA, 19 nt, Artificial Sequence
  Description of Artificial Sequence: Synthetic oligonucleotide
  Sense strand starting at position 1942 of SEQ ID NO: 586365
gcaaucuguccacaugaaa

SEQ ID NO: 712421 - RNA, 19 nt, Artificial Sequence
  Description of Artificial Sequence: Synthetic oligonucleotide
  Antisense strand to SEQ ID NO: 712420
uuucauguggacagauugc

SEQ ID NO: 712422 - RNA, 19 nt, Artificial Sequence
  Description of Artificial Sequence: Synthetic oligonucleotide
  Sense strand starting at position 1953 of SEQ ID NO: 586365
acaugaaacugcuuuggau

SEQ ID NO: 712423 - RNA, 19 nt, Artificial Sequence
  Description of Artificial Sequence: Synthetic oligonucleotide
  Antisense strand to SEQ ID NO: 712422
auccaaagcaguuucaugu

SEQ ID NO: 712424 - RNA, 19 nt, Artificial Sequence
  Description of Artificial Sequence: Synthetic oligonucleotide
  Sense strand starting at position 2032 of SEQ ID NO: 586365
agauuaacaugauugcaca

SEQ ID NO: 712425 - RNA, 19 nt, Artificial Sequence
  Description of Artificial Sequence: Synthetic oligonucleotide
  Antisense strand to SEQ ID NO: 712424
ugugcaaucauguuaaucu

SEQ ID NO: 712426 - RNA, 19 nt, Artificial Sequence
  Description of Artificial Sequence: Synthetic oligonucleotide
  Sense strand starting at position 2065 of SEQ ID NO: 586365
caagguguugaauguuaaa

SEQ ID NO: 712427 - RNA, 19 nt, Artificial Sequence
  Description of Artificial Sequence: Synthetic oligonucleotide
  Antisense strand to SEQ ID NO: 712426
uuuaacauucaacaccuug

SEQ ID NO: 712428 - RNA, 19 nt, Artificial Sequence
  Description of Artificial Sequence: Synthetic oligonucleotide
  Sense strand starting at position 2182 of SEQ ID NO: 586365
uccacauuccacgaguaga

SEQ ID NO: 712429 - RNA, 19 nt, Artificial Sequence
  Description of Artificial Sequence: Synthetic oligonucleotide
  Antisense strand to SEQ ID NO: 712428
ucuacucguggaaugugga

SEQ ID NO: 712430 - RNA, 19 nt, Artificial Sequence
  Description of Artificial Sequence: Synthetic oligonucleotide
  Sense strand starting at position 2214 of SEQ ID NO: 586365
uuuaucagucuguaccaau

SEQ ID NO: 712431 - RNA, 19 nt, Artificial Sequence
  Description of Artificial Sequence: Synthetic oligonucleotide
  Antisense strand to SEQ ID NO: 712430
auugguacagacugauaaa

SEQ ID NO: 712432 - RNA, 19 nt, Artificial Sequence
  Description of Artificial Sequence: Synthetic oligonucleotide
  Sense strand starting at position 2324 of SEQ ID NO: 586365
gcuaguuuacaguauagac

SEQ ID NO: 712433 - RNA, 19 nt, Artificial Sequence
  Description of Artificial Sequence: Synthetic oligonucleotide
  Antisense strand to SEQ ID NO: 712432
gucuauacuguaaacuagc

SEQ ID NO: 712434 - RNA, 19 nt, Artificial Sequence
  Description of Artificial Sequence: Synthetic oligonucleotide
  Sense strand starting at position 2345 of SEQ ID NO: 586365
ccaauaauugcuuggaaug

SEQ ID NO: 712435 - RNA, 19 nt, Artificial Sequence
  Description of Artificial Sequence: Synthetic oligonucleotide
  Antisense strand to SEQ ID NO: 712434
cauuccaagcaauuauugg

SEQ ID NO: 712436 - RNA, 19 nt, Artificial Sequence
  Description of Artificial Sequence: Synthetic oligonucleotide
  Sense strand starting at position 2513 of SEQ ID NO: 586365
gucugaaagacuuguguaa

SEQ ID NO: 712437 - RNA, 19 nt, Artificial Sequence
  Description of Artificial Sequence: Synthetic oligonucleotide
  Antisense strand to SEQ ID NO: 712436
uuacacaagucuuucagac

SEQ ID NO: 712438 - RNA, 19 nt, Artificial Sequence
  Description of Artificial Sequence: Synthetic oligonucleotide
  Sense strand starting at position 2526 of SEQ ID NO: 586365
guguaaugacaguagauga

SEQ ID NO: 712439 - RNA, 19 nt, Artificial Sequence
  Description of Artificial Sequence: Synthetic oligonucleotide
  Antisense strand to SEQ ID NO: 712438
ucaucuacugucauuacac

SEQ ID NO: 712440 - RNA, 19 nt, Artificial Sequence
  Description of Artificial Sequence: Synthetic oligonucleotide
  Sense strand starting at position 2533 of SEQ ID NO: 586365
gacaguagaugauucuauu

SEQ ID NO: 712441 - RNA, 19 nt, Artificial Sequence
  Description of Artificial Sequence: Synthetic oligonucleotide
  Antisense strand to SEQ ID NO: 712440
aauagaaucaucuacuguc

SEQ ID NO: 712442 - RNA, 19 nt, Artificial Sequence
  Description of Artificial Sequence: Synthetic oligonucleotide
  Sense strand starting at position 2569 of SEQ ID NO: 586365
auaaaucucuagguuguca

SEQ ID NO: 712443 - RNA, 19 nt, Artificial Sequence
  Description of Artificial Sequence: Synthetic oligonucleotide
  Antisense strand to SEQ ID NO: 712442
ugacaaccuagagauuuau

SEQ ID NO: 712444 - RNA, 19 nt, Artificial Sequence
  Description of Artificial Sequence: Synthetic oligonucleotide
  Sense strand starting at position 2573 of SEQ ID NO: 586365
aucucuagguugucaugga

SEQ ID NO: 712445 - RNA, 19 nt, Artificial Sequence
  Description of Artificial Sequence: Synthetic oligonucleotide
  Antisense strand to SEQ ID NO: 712444
uccaugacaaccuagagau

SEQ ID NO: 712446 - RNA, 19 nt, Artificial Sequence
  Description of Artificial Sequence: Synthetic oligonucleotide
  Sense strand starting at position 2577 of SEQ ID NO: 586365
cuagguugucauggaccua

SEQ ID NO: 712447 - RNA, 19 nt, Artificial Sequence
  Description of Artificial Sequence: Synthetic oligonucleotide
  Antisense strand to SEQ ID NO: 712446
uagguccaugacaaccuag

SEQ ID NO: 712448 - RNA, 19 nt, Artificial Sequence
  Description of Artificial Sequence: Synthetic oligonucleotide
  Sense strand starting at position 2678 of SEQ ID NO: 586365
gcucaauaaucagccagau

SEQ ID NO: 712449 - RNA, 19 nt, Artificial Sequence
  Description of Artificial Sequence: Synthetic oligonucleotide
  Antisense strand to SEQ ID NO: 712448
aucuggcugauuauugagc

SEQ ID NO: 712450 - RNA, 19 nt, Artificial Sequence
  Description of Artificial Sequence: Synthetic oligonucleotide
  Sense strand starting at position 2783 of SEQ ID NO: 586365
agaugucauuacuuaaagu

SEQ ID NO: 712451 - RNA, 19 nt, Artificial Sequence
  Description of Artificial Sequence: Synthetic oligonucleotide
  Antisense strand to SEQ ID NO: 712450
acuuuaaguaaugacaucu

SEQ ID NO: 712452 - RNA, 19 nt, Artificial Sequence
  Description of Artificial Sequence: Synthetic oligonucleotide
  Sense strand starting at position 2886 of SEQ ID NO: 586365
ccaggaccucacugucaaa

SEQ ID NO: 712453 - RNA, 19 nt, Artificial Sequence
  Description of Artificial Sequence: Synthetic oligonucleotide
  Antisense strand to SEQ ID NO: 712452
uuugacagugagguccugg

SEQ ID NO: 712454 - RNA, 19 nt, Artificial Sequence
  Description of Artificial Sequence: Synthetic oligonucleotide
  Sense strand starting at position 3012 of SEQ ID NO: 586365
uauugaugugcucacagag

SEQ ID NO: 712455 - RNA, 19 nt, Artificial Sequence
  Description of Artificial Sequence: Synthetic oligonucleotide
  Antisense strand to SEQ ID NO: 712454
cucugugagcacaucaaua

SEQ ID NO: 712456 - RNA, 19 nt, Artificial Sequence
  Description of Artificial Sequence: Synthetic oligonucleotide
  Sense strand starting at position 3227 of SEQ ID NO: 586365
gugggacugugaaaugaug

SEQ ID NO: 712457 - RNA, 19 nt, Artificial Sequence
  Description of Artificial Sequence: Synthetic oligonucleotide
  Antisense strand to SEQ ID NO: 712456
caucauuucacagucccac

SEQ ID NO: 712458 - RNA, 19 nt, Artificial Sequence
  Description of Artificial Sequence: Synthetic oligonucleotide
  Sense strand starting at position 3274 of SEQ ID NO: 586365
acagaugauucugucacau

SEQ ID NO: 712459 - RNA, 19 nt, Artificial Sequence
  Description of Artificial Sequence: Synthetic oligonucleotide
  Antisense strand to SEQ ID NO: 712458
augugacagaaucaucugu

SEQ ID NO: 712460 - RNA, 19 nt, Artificial Sequence
  Description of Artificial Sequence: Synthetic oligonucleotide
  Sense strand starting at position 3286 of SEQ ID NO: 586365
gucacauuggcacauuaca

SEQ ID NO: 712461 - RNA, 19 nt, Artificial Sequence
  Description of Artificial Sequence: Synthetic oligonucleotide
  Antisense strand to SEQ ID NO: 712460
uguaaugugccaaugugac

SEQ ID NO: 712462 - RNA, 19 nt, Artificial Sequence
  Description of Artificial Sequence: Synthetic oligonucleotide
  Sense strand starting at position 3320 of SEQ ID NO: 586365
gcuuuaaauguugagugga

SEQ ID NO: 712463 - RNA, 19 nt, Artificial Sequence
  Description of Artificial Sequence: Synthetic oligonucleotide
  Antisense strand to SEQ ID NO: 712462
uccacucaacauuuaaagc

SEQ ID NO: 712464 - RNA, 19 nt, Artificial Sequence
  Description of Artificial Sequence: Synthetic oligonucleotide
  Sense strand starting at position 3322 of SEQ ID NO: 586365
uuuaaauguugaguggagu

SEQ ID NO: 712465 - RNA, 19 nt, Artificial Sequence
  Description of Artificial Sequence: Synthetic oligonucleotide
  Antisense strand to SEQ ID NO: 712464
acuccacucaacauuuaaa

SEQ ID NO: 712466 - RNA, 19 nt, Artificial Sequence
  Description of Artificial Sequence: Synthetic oligonucleotide
  Sense strand starting at position 3325 of SEQ ID NO: 586365
aaauguugaguggagugau

SEQ ID NO: 712467 - RNA, 19 nt, Artificial Sequence
  Description of Artificial Sequence: Synthetic oligonucleotide
  Antisense strand to SEQ ID NO: 712466
aucacuccacucaacauuu

SEQ ID NO: 712468 - RNA, 19 nt, Artificial Sequence
  Description of Artificial Sequence: Synthetic oligonucleotide
  Sense strand starting at position 3393 of SEQ ID NO: 586365
ggauacucauuccugucua

SEQ ID NO: 712469 - RNA, 19 nt, Artificial Sequence
  Description of Artificial Sequence: Synthetic oligonucleotide
  Antisense strand to SEQ ID NO: 712468
uagacaggaaugaguaucc

SEQ ID NO: 712470 - RNA, 19 nt, Artificial Sequence
  Description of Artificial Sequence: Synthetic oligonucleotide
  Sense strand starting at position 3432 of SEQ ID NO: 586365
uugucacuuccagaagcuu

SEQ ID NO: 712471 - RNA, 19 nt, Artificial Sequence
  Description of Artificial Sequence: Synthetic oligonucleotide
  Antisense strand to SEQ ID NO: 712470
aagcuucuggaagugacaa

SEQ ID NO: 712472 - RNA, 19 nt, Artificial Sequence
  Description of Artificial Sequence: Synthetic oligonucleotide
  Sense strand starting at position 51 of SEQ ID NO: 586366
cuccuaaauuaggcugaau

SEQ ID NO: 712473 - RNA, 19 nt, Artificial Sequence
  Description of Artificial Sequence: Synthetic oligonucleotide
  Antisense strand to SEQ ID NO: 712472
auucagccuaauuuaggag

SEQ ID NO: 712474 - RNA, 19 nt, Artificial Sequence
  Description of Artificial Sequence: Synthetic oligonucleotide
  Sense strand starting at position 53 of SEQ ID NO: 586366
ccuaaauuaggcugaaugu

SEQ ID NO: 712475 - RNA, 19 nt, Artificial Sequence
  Description of Artificial Sequence: Synthetic oligonucleotide
  Antisense strand to SEQ ID NO: 712474
acauucagccuaauuuagg

SEQ ID NO: 712476 - RNA, 19 nt, Artificial Sequence
  Description of Artificial Sequence: Synthetic oligonucleotide
  Sense strand starting at position 54 of SEQ ID NO: 586366
cuaaauuaggcugaaugua

SEQ ID NO: 712477 - RNA, 19 nt, Artificial Sequence
  Description of Artificial Sequence: Synthetic oligonucleotide
  Antisense strand to SEQ ID NO: 712476
uacauucagccuaauuuag

SEQ ID NO: 712478 - RNA, 19 nt, Artificial Sequence
  Description of Artificial Sequence: Synthetic oligonucleotide
  Sense strand starting at position 98 of SEQ ID NO: 586366
gggccaucauaacuaggaa

SEQ ID NO: 712479 - RNA, 19 nt, Artificial Sequence
  Description of Artificial Sequence: Synthetic oligonucleotide
  Antisense strand to SEQ ID NO: 712478
uuccuaguuaugauggccc

SEQ ID NO: 712480 - RNA, 19 nt, Artificial Sequence
  Description of Artificial Sequence: Synthetic oligonucleotide
  Sense strand starting at position 118 of SEQ ID NO: 586366
uagaacugccaguguccua

SEQ ID NO: 712481 - RNA, 19 nt, Artificial Sequence
  Description of Artificial Sequence: Synthetic oligonucleotide
  Antisense strand to SEQ ID NO: 712480
uaggacacuggcaguucua

SEQ ID NO: 712482 - RNA, 19 nt, Artificial Sequence
  Description of Artificial Sequence: Synthetic oligonucleotide
  Sense strand starting at position 215 of SEQ ID NO: 586366
ggaccugaucugugugagu

SEQ ID NO: 712483 - RNA, 19 nt, Artificial Sequence
  Description of Artificial Sequence: Synthetic oligonucleotide
  Antisense strand to SEQ ID NO: 712482
acucacacagaucaggucc

SEQ ID NO: 712484 - RNA, 19 nt, Artificial Sequence
  Description of Artificial Sequence: Synthetic oligonucleotide
  Sense strand starting at position 217 of SEQ ID NO: 586366
accugaucugugugaguaa

SEQ ID NO: 712485 - RNA, 19 nt, Artificial Sequence
  Description of Artificial Sequence: Synthetic oligonucleotide
  Antisense strand to SEQ ID NO: 712484
uuacucacacagaucaggu

SEQ ID NO: 712486 - RNA, 19 nt, Artificial Sequence
  Description of Artificial Sequence: Synthetic oligonucleotide
  Sense strand starting at position 220 of SEQ ID NO: 586366
ugaucugugugaguaacua

SEQ ID NO: 712487 - RNA, 19 nt, Artificial Sequence
  Description of Artificial Sequence: Synthetic oligonucleotide
  Antisense strand to SEQ ID NO: 712486
uaguuacucacacagauca

SEQ ID NO: 712488 - RNA, 19 nt, Artificial Sequence
  Description of Artificial Sequence: Synthetic oligonucleotide
  Sense strand starting at position 477 of SEQ ID NO: 586366
cugucaucugcguuugcuu

SEQ ID NO: 712489 - RNA, 19 nt, Artificial Sequence
  Description of Artificial Sequence: Synthetic oligonucleotide
  Antisense strand to SEQ ID NO: 712488
aagcaaacgcagaugacag

SEQ ID NO: 712490 - RNA, 19 nt, Artificial Sequence
  Description of Artificial Sequence: Synthetic oligonucleotide
  Sense strand starting at position 478 of SEQ ID NO: 586366
ugucaucugcguuugcuua

SEQ ID NO: 712491 - RNA, 19 nt, Artificial Sequence
  Description of Artificial Sequence: Synthetic oligonucleotide
  Antisense strand to SEQ ID NO: 712490
uaagcaaacgcagaugaca

SEQ ID NO: 712492 - RNA, 19 nt, Artificial Sequence
  Description of Artificial Sequence: Synthetic oligonucleotide
  Sense strand starting at position 507 of SEQ ID NO: 586366
cauggugugacaggcuuaa

SEQ ID NO: 712493 - RNA, 19 nt, Artificial Sequence
  Description of Artificial Sequence: Synthetic oligonucleotide
  Antisense strand to SEQ ID NO: 712492
uuaagccugucacaccaug

SEQ ID NO: 712494 - RNA, 19 nt, Artificial Sequence
  Description of Artificial Sequence: Synthetic oligonucleotide
  Sense strand starting at position 511 of SEQ ID NO: 586366
gugugacaggcuuaauacu

SEQ ID NO: 712495 - RNA, 19 nt, Artificial Sequence
  Description of Artificial Sequence: Synthetic oligonucleotide
  Antisense strand to SEQ ID NO: 712494
aguauuaagccugucacac

SEQ ID NO: 712496 - RNA, 19 nt, Artificial Sequence
  Description of Artificial Sequence: Synthetic oligonucleotide
  Sense strand starting at position 628 of SEQ ID NO: 586366
aguguacaucuuuguaaac

SEQ ID NO: 712497 - RNA, 19 nt, Artificial Sequence
  Description of Artificial Sequence: Synthetic oligonucleotide
  Antisense strand to SEQ ID NO: 712496
guuuacaaagauguacacu

SEQ ID NO: 712498 - RNA, 19 nt, Artificial Sequence
  Description of Artificial Sequence: Synthetic oligonucleotide
  Sense strand starting at position 641 of SEQ ID NO: 586366
guaaaccuaugcuugcaua

SEQ ID NO: 712499 - RNA, 19 nt, Artificial Sequence
  Description of Artificial Sequence: Synthetic oligonucleotide
  Antisense strand to SEQ ID NO: 712498
uaugcaagcauagguuuac

SEQ ID NO: 712500 - RNA, 19 nt, Artificial Sequence
  Description of Artificial Sequence: Synthetic oligonucleotide
  Sense strand starting at position 654 of SEQ ID NO: 586366
ugcauaucaccucgaccuu

SEQ ID NO: 712501 - RNA, 19 nt, Artificial Sequence
  Description of Artificial Sequence: Synthetic oligonucleotide
  Antisense strand to SEQ ID NO: 712500
aaggucgaggugauaugca

SEQ ID NO: 712502 - RNA, 19 nt, Artificial Sequence
  Description of Artificial Sequence: Synthetic oligonucleotide
  Sense strand starting at position 655 of SEQ ID NO: 586366
gcauaucaccucgaccuuu

SEQ ID NO: 712503 - RNA, 19 nt, Artificial Sequence
  Description of Artificial Sequence: Synthetic oligonucleotide
  Antisense strand to SEQ ID NO: 712502
aaaggucgaggugauaugc

SEQ ID NO: 712504 - RNA, 19 nt, Artificial Sequence
  Description of Artificial Sequence: Synthetic oligonucleotide
  Sense strand starting at position 715 of SEQ ID NO: 586366
accugucaaugucuuuauu

SEQ ID NO: 712505 - RNA, 19 nt, Artificial Sequence
  Description of Artificial Sequence: Synthetic oligonucleotide
  Antisense strand to SEQ ID NO: 712504
aauaaagacauugacaggu

SEQ ID NO: 712506 - RNA, 19 nt, Artificial Sequence
  Description of Artificial Sequence: Synthetic oligonucleotide
  Sense strand starting at position 717 of SEQ ID NO: 586366
cugucaaugucuuuauucu

SEQ ID NO: 712507 - RNA, 19 nt, Artificial Sequence
  Description of Artificial Sequence: Synthetic oligonucleotide
  Antisense strand to SEQ ID NO: 712506
agaauaaagacauugacag

SEQ ID NO: 712508 - RNA, 19 nt, Artificial Sequence
  Description of Artificial Sequence: Synthetic oligonucleotide
  Sense strand starting at position 846 of SEQ ID NO: 586366
ccacacuguccuugucuua

SEQ ID NO: 712509 - RNA, 19 nt, Artificial Sequence
  Description of Artificial Sequence: Synthetic oligonucleotide
  Antisense strand to SEQ ID NO: 712508
uaagacaaggacagugugg

SEQ ID NO: 712510 - RNA, 19 nt, Artificial Sequence
  Description of Artificial Sequence: Synthetic oligonucleotide
  Sense strand starting at position 1001 of SEQ ID NO: 586366
ggcgcaucuacagacauaa

SEQ ID NO: 712511 - RNA, 19 nt, Artificial Sequence
  Description of Artificial Sequence: Synthetic oligonucleotide
  Antisense strand to SEQ ID NO: 712510
uuaugucuguagaugcgcc

SEQ ID NO: 712512 - RNA, 19 nt, Artificial Sequence
  Description of Artificial Sequence: Synthetic oligonucleotide
  Sense strand starting at position 1102 of SEQ ID NO: 586366
gccugucggagugaucuca

SEQ ID NO: 712513 - RNA, 19 nt, Artificial Sequence
  Description of Artificial Sequence: Synthetic oligonucleotide
  Antisense strand to SEQ ID NO: 712512
ugagaucacuccgacaggc

SEQ ID NO: 712514 - RNA, 19 nt, Artificial Sequence
  Description of Artificial Sequence: Synthetic oligonucleotide
  Sense strand starting at position 1111 of SEQ ID NO: 586366
agugaucucagcugucaag

SEQ ID NO: 712515 - RNA, 19 nt, Artificial Sequence
  Description of Artificial Sequence: Synthetic oligonucleotide
  Antisense strand to SEQ ID NO: 712514
cuugacagcugagaucacu

SEQ ID NO: 712516 - RNA, 19 nt, Artificial Sequence
  Description of Artificial Sequence: Synthetic oligonucleotide
  Sense strand starting at position 1169 of SEQ ID NO: 586366
gggaagggugguugaagau

SEQ ID NO: 712517 - RNA, 19 nt, Artificial Sequence
  Description of Artificial Sequence: Synthetic oligonucleotide
  Antisense strand to SEQ ID NO: 712516
aucuucaaccacccuuccc

SEQ ID NO: 712518 - RNA, 19 nt, Artificial Sequence
  Description of Artificial Sequence: Synthetic oligonucleotide
  Sense strand starting at position 2026 of SEQ ID NO: 586366
gugggaaacuccgcucacu

SEQ ID NO: 712519 - RNA, 19 nt, Artificial Sequence
  Description of Artificial Sequence: Synthetic oligonucleotide
  Antisense strand to SEQ ID NO: 712518
agugagcggaguuucccac

SEQ ID NO: 712520 - RNA, 19 nt, Artificial Sequence
  Description of Artificial Sequence: Synthetic oligonucleotide
  Sense strand starting at position 2131 of SEQ ID NO: 586366
uuccuaaaucccgagcgaa

SEQ ID NO: 712521 - RNA, 19 nt, Artificial Sequence
  Description of Artificial Sequence: Synthetic oligonucleotide
  Antisense strand to SEQ ID NO: 712520
uucgcucgggauuuaggaa

SEQ ID NO: 712522 - RNA, 19 nt, Artificial Sequence
  Description of Artificial Sequence: Synthetic oligonucleotide
  Sense strand starting at position 2642 of SEQ ID NO: 586366
gcagcagacccucgguaaa

SEQ ID NO: 712523 - RNA, 19 nt, Artificial Sequence
  Description of Artificial Sequence: Synthetic oligonucleotide
  Antisense strand to SEQ ID NO: 712522
uuuaccgagggucugcugc

SEQ ID NO: 712524 - RNA, 19 nt, Artificial Sequence
  Description of Artificial Sequence: Synthetic oligonucleotide
  Sense strand starting at position 2664 of SEQ ID NO: 586366
cgguuaauucgauggaauc

SEQ ID NO: 712525 - RNA, 19 nt, Artificial Sequence
  Description of Artificial Sequence: Synthetic oligonucleotide
  Antisense strand to SEQ ID NO: 712524
gauuccaucgaauuaaccg

SEQ ID NO: 712526 - RNA, 19 nt, Artificial Sequence
  Description of Artificial Sequence: Synthetic oligonucleotide
  Sense strand starting at position 2886 of SEQ ID NO: 586366
uguuucuaagauuaucgaa

SEQ ID NO: 712527 - RNA, 19 nt, Artificial Sequence
  Description of Artificial Sequence: Synthetic oligonucleotide
  Antisense strand to SEQ ID NO: 712526
uucgauaaucuuagaaaca

SEQ ID NO: 712528 - RNA, 19 nt, Artificial Sequence
  Description of Artificial Sequence: Synthetic oligonucleotide
  Sense strand starting at position 3003 of SEQ ID NO: 586366
aggaacuaucuaugguuaa

SEQ ID NO: 712529 - RNA, 19 nt, Artificial Sequence
  Description of Artificial Sequence: Synthetic oligonucleotide
  Antisense strand to SEQ ID NO: 712528
uuaaccauagauaguuccu

SEQ ID NO: 712530 - RNA, 19 nt, Artificial Sequence
  Description of Artificial Sequence: Synthetic oligonucleotide
  Sense strand starting at position 3029 of SEQ ID NO: 586366
ugguguucguaaccaaacu

SEQ ID NO: 712531 - RNA, 19 nt, Artificial Sequence
  Description of Artificial Sequence: Synthetic oligonucleotide
  Antisense strand to SEQ ID NO: 712530
aguuugguuacgaacacca

SEQ ID NO: 712532 - RNA, 19 nt, Artificial Sequence
  Description of Artificial Sequence: Synthetic oligonucleotide
  Sense strand starting at position 3030 of SEQ ID NO: 586366
gguguucguaaccaaacua

SEQ ID NO: 712533 - RNA, 19 nt, Artificial Sequence
  Description of Artificial Sequence: Synthetic oligonucleotide
  Antisense strand to SEQ ID NO: 712532
uaguuugguuacgaacacc

SEQ ID NO: 712534 - RNA, 19 nt, Artificial Sequence
  Description of Artificial Sequence: Synthetic oligonucleotide
  Sense strand starting at position 3054 of SEQ ID NO: 586366
cuacauauacgagguggua

SEQ ID NO: 712535 - RNA, 19 nt, Artificial Sequence
  Description of Artificial Sequence: Synthetic oligonucleotide
  Antisense strand to SEQ ID NO: 712534
uaccaccucguauauguag

SEQ ID NO: 712536 - RNA, 19 nt, Artificial Sequence
  Description of Artificial Sequence: Synthetic oligonucleotide
  Sense strand starting at position 3106 of SEQ ID NO: 586366
cguggugugcccgugaaca

SEQ ID NO: 712537 - RNA, 19 nt, Artificial Sequence
  Description of Artificial Sequence: Synthetic oligonucleotide
  Antisense strand to SEQ ID NO: 712536
uguucacgggcacaccacg

SEQ ID NO: 712538 - RNA, 19 nt, Artificial Sequence
  Description of Artificial Sequence: Synthetic oligonucleotide
  Sense strand starting at position 3108 of SEQ ID NO: 586366
uggugugcccgugaacaaa

SEQ ID NO: 712539 - RNA, 19 nt, Artificial Sequence
  Description of Artificial Sequence: Synthetic oligonucleotide
  Antisense strand to SEQ ID NO: 712538
uuuguucacgggcacacca

SEQ ID NO: 712540 - RNA, 19 nt, Artificial Sequence
  Description of Artificial Sequence: Synthetic oligonucleotide
  Sense strand starting at position 3226 of SEQ ID NO: 586366
acccauguucuguaacucu

SEQ ID NO: 712541 - RNA, 19 nt, Artificial Sequence
  Description of Artificial Sequence: Synthetic oligonucleotide
  Antisense strand to SEQ ID NO: 712540
agaguuacagaacaugggu

SEQ ID NO: 712542 - RNA, 19 nt, Artificial Sequence
  Description of Artificial Sequence: Synthetic oligonucleotide
  Sense strand starting at position 3245 of SEQ ID NO: 586366
ccucguauguaccuuauaa

SEQ ID NO: 712543 - RNA, 19 nt, Artificial Sequence
  Description of Artificial Sequence: Synthetic oligonucleotide
  Antisense strand to SEQ ID NO: 712542
uuauaagguacauacgagg

SEQ ID NO: 712544 - RNA, 19 nt, Artificial Sequence
  Description of Artificial Sequence: Synthetic oligonucleotide
  Sense strand starting at position 3247 of SEQ ID NO: 586366
ucguauguaccuuauaaua

SEQ ID NO: 712545 - RNA, 19 nt, Artificial Sequence
  Description of Artificial Sequence: Synthetic oligonucleotide
  Antisense strand to SEQ ID NO: 712544
uauuauaagguacauacga

SEQ ID NO: 712546 - RNA, 19 nt, Artificial Sequence
  Description of Artificial Sequence: Synthetic oligonucleotide
  Sense strand starting at position 3730 of SEQ ID NO: 586366
ucauauugccguuagggua

SEQ ID NO: 712547 - RNA, 19 nt, Artificial Sequence
  Description of Artificial Sequence: Synthetic oligonucleotide
  Antisense strand to SEQ ID NO: 712546
uacccuaacggcaauauga

SEQ ID NO: 712548 - RNA, 19 nt, Artificial Sequence
  Description of Artificial Sequence: Synthetic oligonucleotide
  Sense strand starting at position 3822 of SEQ ID NO: 586366
cugucaugacagugagguu

SEQ ID NO: 712549 - RNA, 19 nt, Artificial Sequence
  Description of Artificial Sequence: Synthetic oligonucleotide
  Antisense strand to SEQ ID NO: 712548
aaccucacugucaugacag

SEQ ID NO: 712550 - RNA, 19 nt, Artificial Sequence
  Description of Artificial Sequence: Synthetic oligonucleotide
  Sense strand starting at position 3842 of SEQ ID NO: 586366
ugaacuguucuuugugcaa

SEQ ID NO: 712551 - RNA, 19 nt, Artificial Sequence
  Description of Artificial Sequence: Synthetic oligonucleotide
  Antisense strand to SEQ ID NO: 712550
uugcacaaagaacaguuca

SEQ ID NO: 712552 - RNA, 19 nt, Artificial Sequence
  Description of Artificial Sequence: Synthetic oligonucleotide
  Sense strand starting at position 1 of SEQ ID NO: 586367
guaucaagcgaggauuauu

SEQ ID NO: 712553 - RNA, 19 nt, Artificial Sequence
  Description of Artificial Sequence: Synthetic oligonucleotide
  Antisense strand to SEQ ID NO: 712552
aauaauccucgcuugauac

SEQ ID NO: 712554 - RNA, 19 nt, Artificial Sequence
  Description of Artificial Sequence: Synthetic oligonucleotide
  Sense strand starting at position 12 of SEQ ID NO: 586367
ggauuauuaguguaucuuc

SEQ ID NO: 712555 - RNA, 19 nt, Artificial Sequence
  Description of Artificial Sequence: Synthetic oligonucleotide
  Antisense strand to SEQ ID NO: 712554
gaagauacacuaauaaucc

SEQ ID NO: 712556 - RNA, 19 nt, Artificial Sequence
  Description of Artificial Sequence: Synthetic oligonucleotide
  Sense strand starting at position 221 of SEQ ID NO: 586367
uuauuagugccagggauca

SEQ ID NO: 712557 - RNA, 19 nt, Artificial Sequence
  Description of Artificial Sequence: Synthetic oligonucleotide
  Antisense strand to SEQ ID NO: 712556
ugaucccuggcacuaauaa

SEQ ID NO: 712558 - RNA, 19 nt, Artificial Sequence
  Description of Artificial Sequence: Synthetic oligonucleotide
  Sense strand starting at position 223 of SEQ ID NO: 586367
auuagugccagggaucauu

SEQ ID NO: 712559 - RNA, 19 nt, Artificial Sequence
  Description of Artificial Sequence: Synthetic oligonucleotide
  Antisense strand to SEQ ID NO: 712558
aaugaucccuggcacuaau

SEQ ID NO: 712560 - RNA, 19 nt, Artificial Sequence
  Description of Artificial Sequence: Synthetic oligonucleotide
  Sense strand starting at position 653 of SEQ ID NO: 586367
cucuaagcuagcguguaua

SEQ ID NO: 712561 - RNA, 19 nt, Artificial Sequence
  Description of Artificial Sequence: Synthetic oligonucleotide
  Antisense strand to SEQ ID NO: 712560
uauacacgcuagcuuagag

SEQ ID NO: 712562 - RNA, 19 nt, Artificial Sequence
  Description of Artificial Sequence: Synthetic oligonucleotide
  Sense strand starting at position 667 of SEQ ID NO: 586367
guauauacaguccguauuu

SEQ ID NO: 712563 - RNA, 19 nt, Artificial Sequence
  Description of Artificial Sequence: Synthetic oligonucleotide
  Antisense strand to SEQ ID NO: 712562
aaauacggacuguauauac

SEQ ID NO: 712564 - RNA, 19 nt, Artificial Sequence
  Description of Artificial Sequence: Synthetic oligonucleotide
  Sense strand starting at position 676 of SEQ ID NO: 586367
guccguauuuacuuagaac

SEQ ID NO: 712565 - RNA, 19 nt, Artificial Sequence
  Description of Artificial Sequence: Synthetic oligonucleotide
  Antisense strand to SEQ ID NO: 712564
guucuaaguaaauacggac

SEQ ID NO: 712566 - RNA, 19 nt, Artificial Sequence
  Description of Artificial Sequence: Synthetic oligonucleotide
  Sense strand starting at position 790 of SEQ ID NO: 586367
gcuacuacaguuugacaaa

SEQ ID NO: 712567 - RNA, 19 nt, Artificial Sequence
  Description of Artificial Sequence: Synthetic oligonucleotide
  Antisense strand to SEQ ID NO: 712566
uuugucaaacuguaguagc

SEQ ID NO: 712568 - RNA, 19 nt, Artificial Sequence
  Description of Artificial Sequence: Synthetic oligonucleotide
  Sense strand starting at position 1051 of SEQ ID NO: 586367
gcaugacuugcagaauguu

SEQ ID NO: 712569 - RNA, 19 nt, Artificial Sequence
  Description of Artificial Sequence: Synthetic oligonucleotide
  Antisense strand to SEQ ID NO: 712568
aacauucugcaagucaugc

SEQ ID NO: 712570 - RNA, 19 nt, Artificial Sequence
  Description of Artificial Sequence: Synthetic oligonucleotide
  Sense strand starting at position 1054 of SEQ ID NO: 586367
ugacuugcagaauguuaca

SEQ ID NO: 712571 - RNA, 19 nt, Artificial Sequence
  Description of Artificial Sequence: Synthetic oligonucleotide
  Antisense strand to SEQ ID NO: 712570
uguaacauucugcaaguca

SEQ ID NO: 712572 - RNA, 19 nt, Artificial Sequence
  Description of Artificial Sequence: Synthetic oligonucleotide
  Sense strand starting at position 1193 of SEQ ID NO: 586367
guaucugguaagcagauua

SEQ ID NO: 712573 - RNA, 19 nt, Artificial Sequence
  Description of Artificial Sequence: Synthetic oligonucleotide
  Antisense strand to SEQ ID NO: 712572
uaaucugcuuaccagauac

SEQ ID NO: 712574 - RNA, 19 nt, Artificial Sequence
  Description of Artificial Sequence: Synthetic oligonucleotide
  Sense strand starting at position 1213 of SEQ ID NO: 586367
aaaggagaguuguucugau

SEQ ID NO: 712575 - RNA, 19 nt, Artificial Sequence
  Description of Artificial Sequence: Synthetic oligonucleotide
  Antisense strand to SEQ ID NO: 712574
aucagaacaacucuccuuu

SEQ ID NO: 712576 - RNA, 19 nt, Artificial Sequence
  Description of Artificial Sequence: Synthetic oligonucleotide
  Sense strand starting at position 1260 of SEQ ID NO: 586367
ccaggaagucgugagagau

SEQ ID NO: 712577 - RNA, 19 nt, Artificial Sequence
  Description of Artificial Sequence: Synthetic oligonucleotide
  Antisense strand to SEQ ID NO: 712576
aucucucacgacuuccugg

SEQ ID NO: 712578 - RNA, 19 nt, Artificial Sequence
  Description of Artificial Sequence: Synthetic oligonucleotide
  Sense strand starting at position 1325 of SEQ ID NO: 586367
gggaauuccgagggcuauc

SEQ ID NO: 712579 - RNA, 19 nt, Artificial Sequence
  Description of Artificial Sequence: Synthetic oligonucleotide
  Antisense strand to SEQ ID NO: 712578
gauagcccucggaauuccc

SEQ ID NO: 712580 - RNA, 19 nt, Artificial Sequence
  Description of Artificial Sequence: Synthetic oligonucleotide
  Sense strand starting at position 2126 of SEQ ID NO: 586367
guauucuuauacuuagaag

SEQ ID NO: 712581 - RNA, 19 nt, Artificial Sequence
  Description of Artificial Sequence: Synthetic oligonucleotide
  Antisense strand to SEQ ID NO: 712580
cuucuaaguauaagaauac

SEQ ID NO: 712582 - RNA, 19 nt, Artificial Sequence
  Description of Artificial Sequence: Synthetic oligonucleotide
  Sense strand starting at position 2180 of SEQ ID NO: 586367
gcacauuaucgacaguaaa

SEQ ID NO: 712583 - RNA, 19 nt, Artificial Sequence
  Description of Artificial Sequence: Synthetic oligonucleotide
  Antisense strand to SEQ ID NO: 712582
uuuacugucgauaaugugc

SEQ ID NO: 712584 - RNA, 19 nt, Artificial Sequence
  Description of Artificial Sequence: Synthetic oligonucleotide
  Sense strand starting at position 2191 of SEQ ID NO: 586367
acaguaaagcgugacaagu

SEQ ID NO: 712585 - RNA, 19 nt, Artificial Sequence
  Description of Artificial Sequence: Synthetic oligonucleotide
  Antisense strand to SEQ ID NO: 712584
acuugucacgcuuuacugu

SEQ ID NO: 712586 - RNA, 19 nt, Artificial Sequence
  Description of Artificial Sequence: Synthetic oligonucleotide
  Sense strand starting at position 2242 of SEQ ID NO: 586367
cggcacuuccuacagacau

SEQ ID NO: 712587 - RNA, 19 nt, Artificial Sequence
  Description of Artificial Sequence: Synthetic oligonucleotide
  Antisense strand to SEQ ID NO: 712586
augucuguaggaagugccg

SEQ ID NO: 712588 - RNA, 19 nt, Artificial Sequence
  Description of Artificial Sequence: Synthetic oligonucleotide
  Sense strand starting at position 2302 of SEQ ID NO: 586367
auuuccauuucuuggauga

SEQ ID NO: 712589 - RNA, 19 nt, Artificial Sequence
  Description of Artificial Sequence: Synthetic oligonucleotide
  Antisense strand to SEQ ID NO: 712588
ucauccaagaaauggaaau

SEQ ID NO: 712590 - RNA, 19 nt, Artificial Sequence
  Description of Artificial Sequence: Synthetic oligonucleotide
  Sense strand starting at position 2304 of SEQ ID NO: 586367
uuccauuucuuggaugaga

SEQ ID NO: 712591 - RNA, 19 nt, Artificial Sequence
  Description of Artificial Sequence: Synthetic oligonucleotide
  Antisense strand to SEQ ID NO: 712590
ucucauccaagaaauggaa

SEQ ID NO: 712592 - RNA, 19 nt, Artificial Sequence
  Description of Artificial Sequence: Synthetic oligonucleotide
  Sense strand starting at position 2471 of SEQ ID NO: 586367
agcauucugcucuaauuag

SEQ ID NO: 712593 - RNA, 19 nt, Artificial Sequence
  Description of Artificial Sequence: Synthetic oligonucleotide
  Antisense strand to SEQ ID NO: 712592
cuaauuagagcagaaugcu

SEQ ID NO: 712594 - RNA, 19 nt, Artificial Sequence
  Description of Artificial Sequence: Synthetic oligonucleotide
  Sense strand starting at position 2635 of SEQ ID NO: 586367
caagauugagcacgaaagu

SEQ ID NO: 712595 - RNA, 19 nt, Artificial Sequence
  Description of Artificial Sequence: Synthetic oligonucleotide
  Antisense strand to SEQ ID NO: 712594
acuuucgugcucaaucuug

SEQ ID NO: 712596 - RNA, 19 nt, Artificial Sequence
  Description of Artificial Sequence: Synthetic oligonucleotide
  Sense strand starting at position 2673 of SEQ ID NO: 586367
uugcaauaagucuauauag

SEQ ID NO: 712597 - RNA, 19 nt, Artificial Sequence
  Description of Artificial Sequence: Synthetic oligonucleotide
  Antisense strand to SEQ ID NO: 712596
cuauauagacuuauugcaa

SEQ ID NO: 712598 - RNA, 19 nt, Artificial Sequence
  Description of Artificial Sequence: Synthetic oligonucleotide
  Sense strand starting at position 2675 of SEQ ID NO: 586367
gcaauaagucuauauagug

SEQ ID NO: 712599 - RNA, 19 nt, Artificial Sequence
  Description of Artificial Sequence: Synthetic oligonucleotide
  Antisense strand to SEQ ID NO: 712598
cacuauauagacuuauugc

SEQ ID NO: 712600 - RNA, 19 nt, Artificial Sequence
  Description of Artificial Sequence: Synthetic oligonucleotide
  Sense strand starting at position 2682 of SEQ ID NO: 586367
gucuauauagugugaauaa

SEQ ID NO: 712601 - RNA, 19 nt, Artificial Sequence
  Description of Artificial Sequence: Synthetic oligonucleotide
  Antisense strand to SEQ ID NO: 712600
uuauucacacuauauagac

SEQ ID NO: 712602 - RNA, 19 nt, Artificial Sequence
  Description of Artificial Sequence: Synthetic oligonucleotide
  Sense strand starting at position 2747 of SEQ ID NO: 586367
gggcuaaacacugguuaga

SEQ ID NO: 712603 - RNA, 19 nt, Artificial Sequence
  Description of Artificial Sequence: Synthetic oligonucleotide
  Antisense strand to SEQ ID NO: 712602
ucuaaccaguguuuagccc

SEQ ID NO: 712604 - RNA, 19 nt, Artificial Sequence
  Description of Artificial Sequence: Synthetic oligonucleotide
  Sense strand starting at position 2749 of SEQ ID NO: 586367
gcuaaacacugguuagaaa

SEQ ID NO: 712605 - RNA, 19 nt, Artificial Sequence
  Description of Artificial Sequence: Synthetic oligonucleotide
  Antisense strand to SEQ ID NO: 712604
uuucuaaccaguguuuagc

SEQ ID NO: 712606 - RNA, 19 nt, Artificial Sequence
  Description of Artificial Sequence: Synthetic oligonucleotide
  Sense strand starting at position 2812 of SEQ ID NO: 586367
guuuguuauagagacggua

SEQ ID NO: 712607 - RNA, 19 nt, Artificial Sequence
  Description of Artificial Sequence: Synthetic oligonucleotide
  Antisense strand to SEQ ID NO: 712606
uaccgucucuauaacaaac

SEQ ID NO: 712608 - RNA, 19 nt, Artificial Sequence
  Description of Artificial Sequence: Synthetic oligonucleotide
  Sense strand starting at position 2880 of SEQ ID NO: 586367
ugacucugccaucaucaga

SEQ ID NO: 712609 - RNA, 19 nt, Artificial Sequence
  Description of Artificial Sequence: Synthetic oligonucleotide
  Antisense strand to SEQ ID NO: 712608
ucugaugauggcagaguca

SEQ ID NO: 712610 - RNA, 19 nt, Artificial Sequence
  Description of Artificial Sequence: Synthetic oligonucleotide
  Sense strand starting at position 3021 of SEQ ID NO: 586367
cugagugccuaacugaaau

SEQ ID NO: 712611 - RNA, 19 nt, Artificial Sequence
  Description of Artificial Sequence: Synthetic oligonucleotide
  Antisense strand to SEQ ID NO: 712610
auuucaguuaggcacucag

SEQ ID NO: 712612 - RNA, 19 nt, Artificial Sequence
  Description of Artificial Sequence: Synthetic oligonucleotide
  Sense strand starting at position 3142 of SEQ ID NO: 586367
uuugacaucuggucuagga

SEQ ID NO: 712613 - RNA, 19 nt, Artificial Sequence
  Description of Artificial Sequence: Synthetic oligonucleotide
  Antisense strand to SEQ ID NO: 712612
uccuagaccagaugucaaa

SEQ ID NO: 712614 - RNA, 19 nt, Artificial Sequence
  Description of Artificial Sequence: Synthetic oligonucleotide
  Sense strand starting at position 3144 of SEQ ID NO: 586367
ugacaucuggucuaggagu

SEQ ID NO: 712615 - RNA, 19 nt, Artificial Sequence
  Description of Artificial Sequence: Synthetic oligonucleotide
  Antisense strand to SEQ ID NO: 712614
acuccuagaccagauguca

SEQ ID NO: 712616 - RNA, 19 nt, Artificial Sequence
  Description of Artificial Sequence: Synthetic oligonucleotide
  Sense strand starting at position 3146 of SEQ ID NO: 586367
acaucuggucuaggaguua

SEQ ID NO: 712617 - RNA, 19 nt, Artificial Sequence
  Description of Artificial Sequence: Synthetic oligonucleotide
  Antisense strand to SEQ ID NO: 712616
uaacuccuagaccagaugu

SEQ ID NO: 712618 - RNA, 19 nt, Artificial Sequence
  Description of Artificial Sequence: Synthetic oligonucleotide
  Sense strand starting at position 3315 of SEQ ID NO: 586367
ggcucaacccaguaugaga

SEQ ID NO: 712619 - RNA, 19 nt, Artificial Sequence
  Description of Artificial Sequence: Synthetic oligonucleotide
  Antisense strand to SEQ ID NO: 712618
ucucauacuggguugagcc

SEQ ID NO: 712620 - RNA, 19 nt, Artificial Sequence
  Description of Artificial Sequence: Synthetic oligonucleotide
  Sense strand starting at position 3437 of SEQ ID NO: 586367
agccacaacgcauauaaau

SEQ ID NO: 712621 - RNA, 19 nt, Artificial Sequence
  Description of Artificial Sequence: Synthetic oligonucleotide
  Antisense strand to SEQ ID NO: 712620
auuuauaugcguuguggcu

SEQ ID NO: 712622 - RNA, 19 nt, Artificial Sequence
  Description of Artificial Sequence: Synthetic oligonucleotide
  Sense strand starting at position 3482 of SEQ ID NO: 586367
gagcgaugucaacaaugga

SEQ ID NO: 712623 - RNA, 19 nt, Artificial Sequence
  Description of Artificial Sequence: Synthetic oligonucleotide
  Antisense strand to SEQ ID NO: 712622
uccauuguugacaucgcuc

SEQ ID NO: 712624 - RNA, 19 nt, Artificial Sequence
  Description of Artificial Sequence: Synthetic oligonucleotide
  Sense strand starting at position 3777 of SEQ ID NO: 586367
guucguggucucgcuagau

SEQ ID NO: 712625 - RNA, 19 nt, Artificial Sequence
  Description of Artificial Sequence: Synthetic oligonucleotide
  Antisense strand to SEQ ID NO: 712624
aucuagcgagaccacgaac

SEQ ID NO: 712626 - RNA, 19 nt, Artificial Sequence
  Description of Artificial Sequence: Synthetic oligonucleotide
  Sense strand starting at position 3780 of SEQ ID NO: 586367
cguggucucgcuagaucag

SEQ ID NO: 712627 - RNA, 19 nt, Artificial Sequence
  Description of Artificial Sequence: Synthetic oligonucleotide
  Antisense strand to SEQ ID NO: 712626
cugaucuagcgagaccacg

SEQ ID NO: 712628 - RNA, 19 nt, Artificial Sequence
  Description of Artificial Sequence: Synthetic oligonucleotide
  Sense strand starting at position 3787 of SEQ ID NO: 586367
ucgcuagaucaggagugaa

SEQ ID NO: 712629 - RNA, 19 nt, Artificial Sequence
  Description of Artificial Sequence: Synthetic oligonucleotide
  Antisense strand to SEQ ID NO: 712628
uucacuccugaucuagcga

SEQ ID NO: 712630 - RNA, 19 nt, Artificial Sequence
  Description of Artificial Sequence: Synthetic oligonucleotide
  Sense strand starting at position 3920 of SEQ ID NO: 586367
cgcuguguuacagcucaua

SEQ ID NO: 712631 - RNA, 19 nt, Artificial Sequence
  Description of Artificial Sequence: Synthetic oligonucleotide
  Antisense strand to SEQ ID NO: 712630
uaugagcuguaacacagcg

SEQ ID NO: 712632 - RNA, 19 nt, Artificial Sequence
  Description of Artificial Sequence: Synthetic oligonucleotide
  Sense strand starting at position 14 of SEQ ID NO: 586368
aaccgaggucuccaaaguu

SEQ ID NO: 712633 - RNA, 19 nt, Artificial Sequence
  Description of Artificial Sequence: Synthetic oligonucleotide
  Antisense strand to SEQ ID NO: 712632
aacuuuggagaccucgguu

SEQ ID NO: 712634 - RNA, 19 nt, Artificial Sequence
  Description of Artificial Sequence: Synthetic oligonucleotide
  Sense strand starting at position 90 of SEQ ID NO: 586368
cagacagagggucgauuau

SEQ ID NO: 712635 - RNA, 19 nt, Artificial Sequence
  Description of Artificial Sequence: Synthetic oligonucleotide
  Antisense strand to SEQ ID NO: 712634
auaaucgacccucugucug

SEQ ID NO: 712636 - RNA, 19 nt, Artificial Sequence
  Description of Artificial Sequence: Synthetic oligonucleotide
  Sense strand starting at position 220 of SEQ ID NO: 586368
uccacuuaugcacggaaua

SEQ ID NO: 712637 - RNA, 19 nt, Artificial Sequence
  Description of Artificial Sequence: Synthetic oligonucleotide
  Antisense strand to SEQ ID NO: 712636
uauuccgugcauaagugga

SEQ ID NO: 712638 - RNA, 19 nt, Artificial Sequence
  Description of Artificial Sequence: Synthetic oligonucleotide
  Sense strand starting at position 363 of SEQ ID NO: 586368
augagauucucacugucau

SEQ ID NO: 712639 - RNA, 19 nt, Artificial Sequence
  Description of Artificial Sequence: Synthetic oligonucleotide
  Antisense strand to SEQ ID NO: 712638
augacagugagaaucucau

SEQ ID NO: 712640 - RNA, 19 nt, Artificial Sequence
  Description of Artificial Sequence: Synthetic oligonucleotide
  Sense strand starting at position 364 of SEQ ID NO: 586368
ugagauucucacugucaug

SEQ ID NO: 712641 - RNA, 19 nt, Artificial Sequence
  Description of Artificial Sequence: Synthetic oligonucleotide
  Antisense strand to SEQ ID NO: 712640
caugacagugagaaucuca

SEQ ID NO: 712642 - RNA, 19 nt, Artificial Sequence
  Description of Artificial Sequence: Synthetic oligonucleotide
  Sense strand starting at position 542 of SEQ ID NO: 586368
ugucaaguuccagggagaa

SEQ ID NO: 712643 - RNA, 19 nt, Artificial Sequence
  Description of Artificial Sequence: Synthetic oligonucleotide
  Antisense strand to SEQ ID NO: 712642
uucucccuggaacuugaca

SEQ ID NO: 712644 - RNA, 19 nt, Artificial Sequence
  Description of Artificial Sequence: Synthetic oligonucleotide
  Sense strand starting at position 606 of SEQ ID NO: 586368
augcuaauauuagcaggau

SEQ ID NO: 712645 - RNA, 19 nt, Artificial Sequence
  Description of Artificial Sequence: Synthetic oligonucleotide
  Antisense strand to SEQ ID NO: 712644
auccugcuaauauuagcau

SEQ ID NO: 712646 - RNA, 19 nt, Artificial Sequence
  Description of Artificial Sequence: Synthetic oligonucleotide
  Sense strand starting at position 609 of SEQ ID NO: 586368
cuaauauuagcaggauuau

SEQ ID NO: 712647 - RNA, 19 nt, Artificial Sequence
  Description of Artificial Sequence: Synthetic oligonucleotide
  Antisense strand to SEQ ID NO: 712646
auaauccugcuaauauuag

SEQ ID NO: 712648 - RNA, 19 nt, Artificial Sequence
  Description of Artificial Sequence: Synthetic oligonucleotide
  Sense strand starting at position 625 of SEQ ID NO: 586368
uauuaaugugcugguggga

SEQ ID NO: 712649 - RNA, 19 nt, Artificial Sequence
  Description of Artificial Sequence: Synthetic oligonucleotide
  Antisense strand to SEQ ID NO: 712648
ucccaccagcacauuaaua

SEQ ID NO: 712650 - RNA, 19 nt, Artificial Sequence
  Description of Artificial Sequence: Synthetic oligonucleotide
  Sense strand starting at position 979 of SEQ ID NO: 586368
gcuuguggcggcucucaaa

SEQ ID NO: 712651 - RNA, 19 nt, Artificial Sequence
  Description of Artificial Sequence: Synthetic oligonucleotide
  Antisense strand to SEQ ID NO: 712650
uuugagagccgccacaagc

SEQ ID NO: 712652 - RNA, 19 nt, Artificial Sequence
  Description of Artificial Sequence: Synthetic oligonucleotide
  Sense strand starting at position 997 of SEQ ID NO: 586368
acuaauccugacugaguuu

SEQ ID NO: 712653 - RNA, 19 nt, Artificial Sequence
  Description of Artificial Sequence: Synthetic oligonucleotide
  Antisense strand to SEQ ID NO: 712652
aaacucagucaggauuagu

SEQ ID NO: 712654 - RNA, 19 nt, Artificial Sequence
  Description of Artificial Sequence: Synthetic oligonucleotide
  Sense strand starting at position 1175 of SEQ ID NO: 586368
cugggaauucagcgacuga

SEQ ID NO: 712655 - RNA, 19 nt, Artificial Sequence
  Description of Artificial Sequence: Synthetic oligonucleotide
  Antisense strand to SEQ ID NO: 712654
ucagucgcugaauucccag

SEQ ID NO: 712656 - RNA, 19 nt, Artificial Sequence
  Description of Artificial Sequence: Synthetic oligonucleotide
  Sense strand starting at position 1278 of SEQ ID NO: 586368
ccgagaaacucucuuuguu

SEQ ID NO: 712657 - RNA, 19 nt, Artificial Sequence
  Description of Artificial Sequence: Synthetic oligonucleotide
  Antisense strand to SEQ ID NO: 712656
aacaaagagaguuucucgg

SEQ ID NO: 712658 - RNA, 19 nt, Artificial Sequence
  Description of Artificial Sequence: Synthetic oligonucleotide
  Sense strand starting at position 1281 of SEQ ID NO: 586368
agaaacucucuuuguugga

SEQ ID NO: 712659 - RNA, 19 nt, Artificial Sequence
  Description of Artificial Sequence: Synthetic oligonucleotide
  Antisense strand to SEQ ID NO: 712658
uccaacaaagagaguuucu

SEQ ID NO: 712660 - RNA, 19 nt, Artificial Sequence
  Description of Artificial Sequence: Synthetic oligonucleotide
  Sense strand starting at position 1584 of SEQ ID NO: 586368
agagcuuugccauaggaag

SEQ ID NO: 712661 - RNA, 19 nt, Artificial Sequence
  Description of Artificial Sequence: Synthetic oligonucleotide
  Antisense strand to SEQ ID NO: 712660
cuuccuauggcaaagcucu

SEQ ID NO: 712662 - RNA, 19 nt, Artificial Sequence
  Description of Artificial Sequence: Synthetic oligonucleotide
  Sense strand starting at position 1645 of SEQ ID NO: 586368
ggcuguaguagucagaauc

SEQ ID NO: 712663 - RNA, 19 nt, Artificial Sequence
  Description of Artificial Sequence: Synthetic oligonucleotide
  Antisense strand to SEQ ID NO: 712662
gauucugacuacuacagcc

SEQ ID NO: 712664 - RNA, 19 nt, Artificial Sequence
  Description of Artificial Sequence: Synthetic oligonucleotide
  Sense strand starting at position 1667 of SEQ ID NO: 586368
agcugaagacucgggcaaa

SEQ ID NO: 712665 - RNA, 19 nt, Artificial Sequence
  Description of Artificial Sequence: Synthetic oligonucleotide
  Antisense strand to SEQ ID NO: 712664
uuugcccgagucuucagcu

SEQ ID NO: 712666 - RNA, 19 nt, Artificial Sequence
  Description of Artificial Sequence: Synthetic oligonucleotide
  Sense strand starting at position 1670 of SEQ ID NO: 586368
ugaagacucgggcaaaguu

SEQ ID NO: 712667 - RNA, 19 nt, Artificial Sequence
  Description of Artificial Sequence: Synthetic oligonucleotide
  Antisense strand to SEQ ID NO: 712666
aacuuugcccgagucuuca

SEQ ID NO: 712668 - RNA, 19 nt, Artificial Sequence
  Description of Artificial Sequence: Synthetic oligonucleotide
  Sense strand starting at position 2021 of SEQ ID NO: 586368
uugguuaaauccuuaauug

SEQ ID NO: 712669 - RNA, 19 nt, Artificial Sequence
  Description of Artificial Sequence: Synthetic oligonucleotide
  Antisense strand to SEQ ID NO: 712668
caauuaaggauuuaaccaa

SEQ ID NO: 712670 - RNA, 19 nt, Artificial Sequence
  Description of Artificial Sequence: Synthetic oligonucleotide
  Sense strand starting at position 2270 of SEQ ID NO: 586368
uuccaaagacaucgcagaa

SEQ ID NO: 712671 - RNA, 19 nt, Artificial Sequence
  Description of Artificial Sequence: Synthetic oligonucleotide
  Antisense strand to SEQ ID NO: 712670
uucugcgaugucuuuggaa

SEQ ID NO: 712672 - RNA, 19 nt, Artificial Sequence
  Description of Artificial Sequence: Synthetic oligonucleotide
  Sense strand starting at position 2317 of SEQ ID NO: 586368
gggacaauguguuccaauc

SEQ ID NO: 712673 - RNA, 19 nt, Artificial Sequence
  Description of Artificial Sequence: Synthetic oligonucleotide
  Antisense strand to SEQ ID NO: 712672
gauuggaacacauuguccc

SEQ ID NO: 712674 - RNA, 19 nt, Artificial Sequence
  Description of Artificial Sequence: Synthetic oligonucleotide
  Sense strand starting at position 2554 of SEQ ID NO: 586368
ugggaagcaaguuguaacu

SEQ ID NO: 712675 - RNA, 19 nt, Artificial Sequence
  Description of Artificial Sequence: Synthetic oligonucleotide
  Antisense strand to SEQ ID NO: 712674
aguuacaacuugcuuccca

SEQ ID NO: 712676 - RNA, 19 nt, Artificial Sequence
  Description of Artificial Sequence: Synthetic oligonucleotide
  Sense strand starting at position 2716 of SEQ ID NO: 586368
gcccaaaguccuuauaaug

SEQ ID NO: 712677 - RNA, 19 nt, Artificial Sequence
  Description of Artificial Sequence: Synthetic oligonucleotide
  Antisense strand to SEQ ID NO: 712676
cauuauaaggacuuugggc

SEQ ID NO: 712678 - RNA, 19 nt, Artificial Sequence
  Description of Artificial Sequence: Synthetic oligonucleotide
  Sense strand starting at position 2907 of SEQ ID NO: 586368
ggugaauggauccauguau

SEQ ID NO: 712679 - RNA, 19 nt, Artificial Sequence
  Description of Artificial Sequence: Synthetic oligonucleotide
  Antisense strand to SEQ ID NO: 712678
auacauggauccauucacc

SEQ ID NO: 712680 - RNA, 19 nt, Artificial Sequence
  Description of Artificial Sequence: Synthetic oligonucleotide
  Sense strand starting at position 2931 of SEQ ID NO: 586368
gccauaccuccaggaaaga

SEQ ID NO: 712681 - RNA, 19 nt, Artificial Sequence
  Description of Artificial Sequence: Synthetic oligonucleotide
  Antisense strand to SEQ ID NO: 712680
ucuuuccuggagguauggc

SEQ ID NO: 712682 - RNA, 19 nt, Artificial Sequence
  Description of Artificial Sequence: Synthetic oligonucleotide
  Sense strand starting at position 3002 of SEQ ID NO: 586368
gucagaugaugcucauuga

SEQ ID NO: 712683 - RNA, 19 nt, Artificial Sequence
  Description of Artificial Sequence: Synthetic oligonucleotide
  Antisense strand to SEQ ID NO: 712682
ucaaugagcaucaucugac

SEQ ID NO: 712684 - RNA, 19 nt, Artificial Sequence
  Description of Artificial Sequence: Synthetic oligonucleotide
  Sense strand starting at position 3003 of SEQ ID NO: 586368
ucagaugaugcucauugau

SEQ ID NO: 712685 - RNA, 19 nt, Artificial Sequence
  Description of Artificial Sequence: Synthetic oligonucleotide
  Antisense strand to SEQ ID NO: 712684
aucaaugagcaucaucuga

SEQ ID NO: 712686 - RNA, 19 nt, Artificial Sequence
  Description of Artificial Sequence: Synthetic oligonucleotide
  Sense strand starting at position 3026 of SEQ ID NO: 586368
cccuccuggcuccaugaau

SEQ ID NO: 712687 - RNA, 19 nt, Artificial Sequence
  Description of Artificial Sequence: Synthetic oligonucleotide
  Antisense strand to SEQ ID NO: 712686
auucauggagccaggaggg

SEQ ID NO: 712688 - RNA, 19 nt, Artificial Sequence
  Description of Artificial Sequence: Synthetic oligonucleotide
  Sense strand starting at position 3127 of SEQ ID NO: 586368
cucguaugcaagggaagaa

SEQ ID NO: 712689 - RNA, 19 nt, Artificial Sequence
  Description of Artificial Sequence: Synthetic oligonucleotide
  Antisense strand to SEQ ID NO: 712688
uucuucccuugcauacgag

SEQ ID NO: 712690 - RNA, 19 nt, Artificial Sequence
  Description of Artificial Sequence: Synthetic oligonucleotide
  Sense strand starting at position 3162 of SEQ ID NO: 586368
ucaguugauacacgagauc

SEQ ID NO: 712691 - RNA, 19 nt, Artificial Sequence
  Description of Artificial Sequence: Synthetic oligonucleotide
  Antisense strand to SEQ ID NO: 712690
gaucucguguaucaacuga

SEQ ID NO: 712692 - RNA, 19 nt, Artificial Sequence
  Description of Artificial Sequence: Synthetic oligonucleotide
  Sense strand starting at position 3365 of SEQ ID NO: 586368
cugggaguuccacaggcua

SEQ ID NO: 712693 - RNA, 19 nt, Artificial Sequence
  Description of Artificial Sequence: Synthetic oligonucleotide
  Antisense strand to SEQ ID NO: 712692
uagccuguggaacucccag

SEQ ID NO: 712694 - RNA, 19 nt, Artificial Sequence
  Description of Artificial Sequence: Synthetic oligonucleotide
  Sense strand starting at position 3367 of SEQ ID NO: 586368
gggaguuccacaggcuauc

SEQ ID NO: 712695 - RNA, 19 nt, Artificial Sequence
  Description of Artificial Sequence: Synthetic oligonucleotide
  Antisense strand to SEQ ID NO: 712694
gauagccuguggaacuccc

SEQ ID NO: 712696 - RNA, 19 nt, Artificial Sequence
  Description of Artificial Sequence: Synthetic oligonucleotide
  Sense strand starting at position 3376 of SEQ ID NO: 586368
acaggcuaucuaggguuau

SEQ ID NO: 712697 - RNA, 19 nt, Artificial Sequence
  Description of Artificial Sequence: Synthetic oligonucleotide
  Antisense strand to SEQ ID NO: 712696
auaacccuagauagccugu

SEQ ID NO: 712698 - RNA, 19 nt, Artificial Sequence
  Description of Artificial Sequence: Synthetic oligonucleotide
  Sense strand starting at position 3440 of SEQ ID NO: 586368
guguuaguugugucuagua

SEQ ID NO: 712699 - RNA, 19 nt, Artificial Sequence
  Description of Artificial Sequence: Synthetic oligonucleotide
  Antisense strand to SEQ ID NO: 712698
uacuagacacaacuaacac

SEQ ID NO: 712700 - RNA, 19 nt, Artificial Sequence
  Description of Artificial Sequence: Synthetic oligonucleotide
  Sense strand starting at position 3830 of SEQ ID NO: 586368
cuguuaaccgucuagaugu

SEQ ID NO: 712701 - RNA, 19 nt, Artificial Sequence
  Description of Artificial Sequence: Synthetic oligonucleotide
  Antisense strand to SEQ ID NO: 712700
acaucuagacgguuaacag

SEQ ID NO: 712702 - RNA, 19 nt, Artificial Sequence
  Description of Artificial Sequence: Synthetic oligonucleotide
  Sense strand starting at position 3899 of SEQ ID NO: 586368
ggcucugcucuggagaagu

SEQ ID NO: 712703 - RNA, 19 nt, Artificial Sequence
  Description of Artificial Sequence: Synthetic oligonucleotide
  Antisense strand to SEQ ID NO: 712702
acuucuccagagcagagcc

SEQ ID NO: 712704 - RNA, 19 nt, Artificial Sequence
  Description of Artificial Sequence: Synthetic oligonucleotide
  Sense strand starting at position 3901 of SEQ ID NO: 586368
cucugcucuggagaaguua

SEQ ID NO: 712705 - RNA, 19 nt, Artificial Sequence
  Description of Artificial Sequence: Synthetic oligonucleotide
  Antisense strand to SEQ ID NO: 712704
uaacuucuccagagcagag

SEQ ID NO: 712706 - RNA, 19 nt, Artificial Sequence
  Description of Artificial Sequence: Synthetic oligonucleotide
  Sense strand starting at position 3926 of SEQ ID NO: 586368
cccaucgagucaccugaua

SEQ ID NO: 712707 - RNA, 19 nt, Artificial Sequence
  Description of Artificial Sequence: Synthetic oligonucleotide
  Antisense strand to SEQ ID NO: 712706
uaucaggugacucgauggg

SEQ ID NO: 712708 - RNA, 19 nt, Artificial Sequence
  Description of Artificial Sequence: Synthetic oligonucleotide
  Sense strand starting at position 3964 of SEQ ID NO: 586368
agaaaucgcuuccucagau

SEQ ID NO: 712709 - RNA, 19 nt, Artificial Sequence
  Description of Artificial Sequence: Synthetic oligonucleotide
  Antisense strand to SEQ ID NO: 712708
aucugaggaagcgauuucu

SEQ ID NO: 712710 - RNA, 19 nt, Artificial Sequence
  Description of Artificial Sequence: Synthetic oligonucleotide
  Sense strand starting at position 3980 of SEQ ID NO: 586368
gaucaaugccaaggacagu

SEQ ID NO: 712711 - RNA, 19 nt, Artificial Sequence
  Description of Artificial Sequence: Synthetic oligonucleotide
  Antisense strand to SEQ ID NO: 712710
acuguccuuggcauugauc

SEQ ID NO: 712712 - RNA, 19 nt, Artificial Sequence
  Description of Artificial Sequence: Synthetic oligonucleotide
  Sense strand starting at position 3 of SEQ ID NO: 586369
agugcauaacuggagcaaa

SEQ ID NO: 712713 - RNA, 19 nt, Artificial Sequence
  Description of Artificial Sequence: Synthetic oligonucleotide
  Antisense strand to SEQ ID NO: 712712
uuugcuccaguuaugcacu

SEQ ID NO: 712714 - RNA, 19 nt, Artificial Sequence
  Description of Artificial Sequence: Synthetic oligonucleotide
  Sense strand starting at position 53 of SEQ ID NO: 586369
gguugacuaggccaacaau

SEQ ID NO: 712715 - RNA, 19 nt, Artificial Sequence
  Description of Artificial Sequence: Synthetic oligonucleotide
  Antisense strand to SEQ ID NO: 712714
auuguuggccuagucaacc

SEQ ID NO: 712716 - RNA, 19 nt, Artificial Sequence
  Description of Artificial Sequence: Synthetic oligonucleotide
  Sense strand starting at position 91 of SEQ ID NO: 586369
gcccgaucugcaagcggua

SEQ ID NO: 712717 - RNA, 19 nt, Artificial Sequence
  Description of Artificial Sequence: Synthetic oligonucleotide
  Antisense strand to SEQ ID NO: 712716
uaccgcuugcagaucgggc

SEQ ID NO: 712718 - RNA, 19 nt, Artificial Sequence
  Description of Artificial Sequence: Synthetic oligonucleotide
  Sense strand starting at position 129 of SEQ ID NO: 586369
ugggcuucucgggaauuac

SEQ ID NO: 712719 - RNA, 19 nt, Artificial Sequence
  Description of Artificial Sequence: Synthetic oligonucleotide
  Antisense strand to SEQ ID NO: 712718
guaauucccgagaagccca

SEQ ID NO: 712720 - RNA, 19 nt, Artificial Sequence
  Description of Artificial Sequence: Synthetic oligonucleotide
  Sense strand starting at position 137 of SEQ ID NO: 586369
ucgggaauuaccuguguuu

SEQ ID NO: 712721 - RNA, 19 nt, Artificial Sequence
  Description of Artificial Sequence: Synthetic oligonucleotide
  Antisense strand to SEQ ID NO: 712720
aaacacagguaauucccga

SEQ ID NO: 712722 - RNA, 19 nt, Artificial Sequence
  Description of Artificial Sequence: Synthetic oligonucleotide
  Sense strand starting at position 139 of SEQ ID NO: 586369
gggaauuaccuguguuugu

SEQ ID NO: 712723 - RNA, 19 nt, Artificial Sequence
  Description of Artificial Sequence: Synthetic oligonucleotide
  Antisense strand to SEQ ID NO: 712722
acaaacacagguaauuccc

SEQ ID NO: 712724 - RNA, 19 nt, Artificial Sequence
  Description of Artificial Sequence: Synthetic oligonucleotide
  Sense strand starting at position 140 of SEQ ID NO: 586369
ggaauuaccuguguuugug

SEQ ID NO: 712725 - RNA, 19 nt, Artificial Sequence
  Description of Artificial Sequence: Synthetic oligonucleotide
  Antisense strand to SEQ ID NO: 712724
cacaaacacagguaauucc

SEQ ID NO: 712726 - RNA, 19 nt, Artificial Sequence
  Description of Artificial Sequence: Synthetic oligonucleotide
  Sense strand starting at position 333 of SEQ ID NO: 586369
uuuguugaucuguaagcaa

SEQ ID NO: 712727 - RNA, 19 nt, Artificial Sequence
  Description of Artificial Sequence: Synthetic oligonucleotide
  Antisense strand to SEQ ID NO: 712726
uugcuuacagaucaacaaa

SEQ ID NO: 712728 - RNA, 19 nt, Artificial Sequence
  Description of Artificial Sequence: Synthetic oligonucleotide
  Sense strand starting at position 336 of SEQ ID NO: 586369
guugaucuguaagcaaaua

SEQ ID NO: 712729 - RNA, 19 nt, Artificial Sequence
  Description of Artificial Sequence: Synthetic oligonucleotide
  Antisense strand to SEQ ID NO: 712728
uauuugcuuacagaucaac

SEQ ID NO: 712730 - RNA, 19 nt, Artificial Sequence
  Description of Artificial Sequence: Synthetic oligonucleotide
  Sense strand starting at position 437 of SEQ ID NO: 586369
caauaaggguuaccucgaa

SEQ ID NO: 712731 - RNA, 19 nt, Artificial Sequence
  Description of Artificial Sequence: Synthetic oligonucleotide
  Antisense strand to SEQ ID NO: 712730
uucgagguaacccuuauug

SEQ ID NO: 712732 - RNA, 19 nt, Artificial Sequence
  Description of Artificial Sequence: Synthetic oligonucleotide
  Sense strand starting at position 515 of SEQ ID NO: 586369
gcguaaucuccuugaccca

SEQ ID NO: 712733 - RNA, 19 nt, Artificial Sequence
  Description of Artificial Sequence: Synthetic oligonucleotide
  Antisense strand to SEQ ID NO: 712732
ugggucaaggagauuacgc

SEQ ID NO: 712734 - RNA, 19 nt, Artificial Sequence
  Description of Artificial Sequence: Synthetic oligonucleotide
  Sense strand starting at position 744 of SEQ ID NO: 586369
gccaguugacuugauguca

SEQ ID NO: 712735 - RNA, 19 nt, Artificial Sequence
  Description of Artificial Sequence: Synthetic oligonucleotide
  Antisense strand to SEQ ID NO: 712734
ugacaucaagucaacuggc

SEQ ID NO: 712736 - RNA, 19 nt, Artificial Sequence
  Description of Artificial Sequence: Synthetic oligonucleotide
  Sense strand starting at position 919 of SEQ ID NO: 586369
gaaccaucagcccgagguu

SEQ ID NO: 712737 - RNA, 19 nt, Artificial Sequence
  Description of Artificial Sequence: Synthetic oligonucleotide
  Antisense strand to SEQ ID NO: 712736
aaccucgggcugaugguuc

SEQ ID NO: 712738 - RNA, 19 nt, Artificial Sequence
  Description of Artificial Sequence: Synthetic oligonucleotide
  Sense strand starting at position 1040 of SEQ ID NO: 586369
uggaaagagccugacuguu

SEQ ID NO: 712739 - RNA, 19 nt, Artificial Sequence
  Description of Artificial Sequence: Synthetic oligonucleotide
  Antisense strand to SEQ ID NO: 712738
aacagucaggcucuuucca

SEQ ID NO: 712740 - RNA, 19 nt, Artificial Sequence
  Description of Artificial Sequence: Synthetic oligonucleotide
  Sense strand starting at position 1060 of SEQ ID NO: 586369
cuaguuuaaccagagcgaa

SEQ ID NO: 712741 - RNA, 19 nt, Artificial Sequence
  Description of Artificial Sequence: Synthetic oligonucleotide
  Antisense strand to SEQ ID NO: 712740
uucgcucugguuaaacuag

SEQ ID NO: 712742 - RNA, 19 nt, Artificial Sequence
  Description of Artificial Sequence: Synthetic oligonucleotide
  Sense strand starting at position 1180 of SEQ ID NO: 586369
ccaguuccggcccagaaau

SEQ ID NO: 712743 - RNA, 19 nt, Artificial Sequence
  Description of Artificial Sequence: Synthetic oligonucleotide
  Antisense strand to SEQ ID NO: 712742
auuucugggccggaacugg

SEQ ID NO: 712744 - RNA, 19 nt, Artificial Sequence
  Description of Artificial Sequence: Synthetic oligonucleotide
  Sense strand starting at position 1209 of SEQ ID NO: 586369
gggucaaacguggguuaca

SEQ ID NO: 712745 - RNA, 19 nt, Artificial Sequence
  Description of Artificial Sequence: Synthetic oligonucleotide
  Antisense strand to SEQ ID NO: 712744
uguaacccacguuugaccc

SEQ ID NO: 712746 - RNA, 19 nt, Artificial Sequence
  Description of Artificial Sequence: Synthetic oligonucleotide
  Sense strand starting at position 1286 of SEQ ID NO: 586369
uguggacuaacucgucgaa

SEQ ID NO: 712747 - RNA, 19 nt, Artificial Sequence
  Description of Artificial Sequence: Synthetic oligonucleotide
  Antisense strand to SEQ ID NO: 712746
uucgacgaguuaguccaca

SEQ ID NO: 712748 - RNA, 19 nt, Artificial Sequence
  Description of Artificial Sequence: Synthetic oligonucleotide
  Sense strand starting at position 1289 of SEQ ID NO: 586369
ggacuaacucgucgaacga

SEQ ID NO: 712749 - RNA, 19 nt, Artificial Sequence
  Description of Artificial Sequence: Synthetic oligonucleotide
  Antisense strand to SEQ ID NO: 712748
ucguucgacgaguuagucc

SEQ ID NO: 712750 - RNA, 19 nt, Artificial Sequence
  Description of Artificial Sequence: Synthetic oligonucleotide
  Sense strand starting at position 1290 of SEQ ID NO: 586369
gacuaacucgucgaacgaa

SEQ ID NO: 712751 - RNA, 19 nt, Artificial Sequence
  Description of Artificial Sequence: Synthetic oligonucleotide
  Antisense strand to SEQ ID NO: 712750
uucguucgacgaguuaguc

SEQ ID NO: 712752 - RNA, 19 nt, Artificial Sequence
  Description of Artificial Sequence: Synthetic oligonucleotide
  Sense strand starting at position 1987 of SEQ ID NO: 586369
agucauggucaucaucaaa

SEQ ID NO: 712753 - RNA, 19 nt, Artificial Sequence
  Description of Artificial Sequence: Synthetic oligonucleotide
  Antisense strand to SEQ ID NO: 712752
uuugaugaugaccaugacu

SEQ ID NO: 712754 - RNA, 19 nt, Artificial Sequence
  Description of Artificial Sequence: Synthetic oligonucleotide
  Sense strand starting at position 2096 of SEQ ID NO: 586369
cucuuuggauccuugcaaa

SEQ ID NO: 712755 - RNA, 19 nt, Artificial Sequence
  Description of Artificial Sequence: Synthetic oligonucleotide
  Antisense strand to SEQ ID NO: 712754
uuugcaaggauccaaagag

SEQ ID NO: 712756 - RNA, 19 nt, Artificial Sequence
  Description of Artificial Sequence: Synthetic oligonucleotide
  Sense strand starting at position 2341 of SEQ ID NO: 586369
ugcaguuuaaggcagagau

SEQ ID NO: 712757 - RNA, 19 nt, Artificial Sequence
  Description of Artificial Sequence: Synthetic oligonucleotide
  Antisense strand to SEQ ID NO: 712756
aucucugccuuaaacugca

SEQ ID NO: 712758 - RNA, 19 nt, Artificial Sequence
  Description of Artificial Sequence: Synthetic oligonucleotide
  Sense strand starting at position 2377 of SEQ ID NO: 586369
gaaaguugcgcgucugcuu

SEQ ID NO: 712759 - RNA, 19 nt, Artificial Sequence
  Description of Artificial Sequence: Synthetic oligonucleotide
  Antisense strand to SEQ ID NO: 712758
aagcagacgcgcaacuuuc

SEQ ID NO: 712760 - RNA, 19 nt, Artificial Sequence
  Description of Artificial Sequence: Synthetic oligonucleotide
  Sense strand starting at position 2384 of SEQ ID NO: 586369
gcgcgucugcuuucagacu

SEQ ID NO: 712761 - RNA, 19 nt, Artificial Sequence
  Description of Artificial Sequence: Synthetic oligonucleotide
  Antisense strand to SEQ ID NO: 712760
agucugaaagcagacgcgc

SEQ ID NO: 712762 - RNA, 19 nt, Artificial Sequence
  Description of Artificial Sequence: Synthetic oligonucleotide
  Sense strand starting at position 2421 of SEQ ID NO: 586369
ucgaaugguuugucuccaa

SEQ ID NO: 712763 - RNA, 19 nt, Artificial Sequence
  Description of Artificial Sequence: Synthetic oligonucleotide
  Antisense strand to SEQ ID NO: 712762
uuggagacaaaccauucga

SEQ ID NO: 712764 - RNA, 19 nt, Artificial Sequence
  Description of Artificial Sequence: Synthetic oligonucleotide
  Sense strand starting at position 2680 of SEQ ID NO: 586369
gccaauaucucagccuuga

SEQ ID NO: 712765 - RNA, 19 nt, Artificial Sequence
  Description of Artificial Sequence: Synthetic oligonucleotide
  Antisense strand to SEQ ID NO: 712764
ucaaggcugagauauuggc

SEQ ID NO: 712766 - RNA, 19 nt, Artificial Sequence
  Description of Artificial Sequence: Synthetic oligonucleotide
  Sense strand starting at position 3160 of SEQ ID NO: 586369
gcaaaugauacaugcgguu

SEQ ID NO: 712767 - RNA, 19 nt, Artificial Sequence
  Description of Artificial Sequence: Synthetic oligonucleotide
  Antisense strand to SEQ ID NO: 712766
aaccgcauguaucauuugc

SEQ ID NO: 712768 - RNA, 19 nt, Artificial Sequence
  Description of Artificial Sequence: Synthetic oligonucleotide
  Sense strand starting at position 3173 of SEQ ID NO: 586369
gcgguuagugguuuggcaa

SEQ ID NO: 712769 - RNA, 19 nt, Artificial Sequence
  Description of Artificial Sequence: Synthetic oligonucleotide
  Antisense strand to SEQ ID NO: 712768
uugccaaaccacuaaccgc

SEQ ID NO: 712770 - RNA, 19 nt, Artificial Sequence
  Description of Artificial Sequence: Synthetic oligonucleotide
  Sense strand starting at position 3176 of SEQ ID NO: 586369
guuagugguuuggcaaauc

SEQ ID NO: 712771 - RNA, 19 nt, Artificial Sequence
  Description of Artificial Sequence: Synthetic oligonucleotide
  Antisense strand to SEQ ID NO: 712770
gauuugccaaaccacuaac

SEQ ID NO: 712772 - RNA, 19 nt, Artificial Sequence
  Description of Artificial Sequence: Synthetic oligonucleotide
  Sense strand starting at position 3185 of SEQ ID NO: 586369
uuggcaaaucuugauuaca

SEQ ID NO: 712773 - RNA, 19 nt, Artificial Sequence
  Description of Artificial Sequence: Synthetic oligonucleotide
  Antisense strand to SEQ ID NO: 712772
uguaaucaagauuugccaa

SEQ ID NO: 712774 - RNA, 19 nt, Artificial Sequence
  Description of Artificial Sequence: Synthetic oligonucleotide
  Sense strand starting at position 3187 of SEQ ID NO: 586369
ggcaaaucuugauuacaau

SEQ ID NO: 712775 - RNA, 19 nt, Artificial Sequence
  Description of Artificial Sequence: Synthetic oligonucleotide
  Antisense strand to SEQ ID NO: 712774
auuguaaucaagauuugcc

SEQ ID NO: 712776 - RNA, 19 nt, Artificial Sequence
  Description of Artificial Sequence: Synthetic oligonucleotide
  Sense strand starting at position 3242 of SEQ ID NO: 586369
uugucucucgauuacaauu

SEQ ID NO: 712777 - RNA, 19 nt, Artificial Sequence
  Description of Artificial Sequence: Synthetic oligonucleotide
  Antisense strand to SEQ ID NO: 712776
aauuguaaucgagagacaa

SEQ ID NO: 712778 - RNA, 19 nt, Artificial Sequence
  Description of Artificial Sequence: Synthetic oligonucleotide
  Sense strand starting at position 3279 of SEQ ID NO: 586369
uugucaacauuguuaauga

SEQ ID NO: 712779 - RNA, 19 nt, Artificial Sequence
  Description of Artificial Sequence: Synthetic oligonucleotide
  Antisense strand to SEQ ID NO: 712778
ucauuaacaauguugacaa

SEQ ID NO: 712780 - RNA, 19 nt, Artificial Sequence
  Description of Artificial Sequence: Synthetic oligonucleotide
  Sense strand starting at position 3436 of SEQ ID NO: 586369
gccuguaaugauuauggac

SEQ ID NO: 712781 - RNA, 19 nt, Artificial Sequence
  Description of Artificial Sequence: Synthetic oligonucleotide
  Antisense strand to SEQ ID NO: 712780
guccauaaucauuacaggc

SEQ ID NO: 712782 - RNA, 19 nt, Artificial Sequence
  Description of Artificial Sequence: Synthetic oligonucleotide
  Sense strand starting at position 3444 of SEQ ID NO: 586369
ugauuauggacuggguuua

SEQ ID NO: 712783 - RNA, 19 nt, Artificial Sequence
  Description of Artificial Sequence: Synthetic oligonucleotide
  Antisense strand to SEQ ID NO: 712782
uaaacccaguccauaauca

SEQ ID NO: 712784 - RNA, 19 nt, Artificial Sequence
  Description of Artificial Sequence: Synthetic oligonucleotide
  Sense strand starting at position 3445 of SEQ ID NO: 586369
gauuauggacuggguuuau

SEQ ID NO: 712785 - RNA, 19 nt, Artificial Sequence
  Description of Artificial Sequence: Synthetic oligonucleotide
  Antisense strand to SEQ ID NO: 712784
auaaacccaguccauaauc

SEQ ID NO: 712786 - RNA, 19 nt, Artificial Sequence
  Description of Artificial Sequence: Synthetic oligonucleotide
  Sense strand starting at position 3706 of SEQ ID NO: 586369
gaaagacauuaaguucgga

SEQ ID NO: 712787 - RNA, 19 nt, Artificial Sequence
  Description of Artificial Sequence: Synthetic oligonucleotide
  Antisense strand to SEQ ID NO: 712786
uccgaacuuaaugucuuuc

SEQ ID NO: 712788 - RNA, 19 nt, Artificial Sequence
  Description of Artificial Sequence: Synthetic oligonucleotide
  Sense strand starting at position 3953 of SEQ ID NO: 586369
cuuccagaggcuugagauu

SEQ ID NO: 712789 - RNA, 19 nt, Artificial Sequence
  Description of Artificial Sequence: Synthetic oligonucleotide
  Antisense strand to SEQ ID NO: 712788
aaucucaagccucuggaag

SEQ ID NO: 712790 - RNA, 19 nt, Artificial Sequence
  Description of Artificial Sequence: Synthetic oligonucleotide
  Sense strand starting at position 3974 of SEQ ID NO: 586369
guggacgagaccugaagau

SEQ ID NO: 712791 - RNA, 19 nt, Artificial Sequence
  Description of Artificial Sequence: Synthetic oligonucleotide
  Antisense strand to SEQ ID NO: 712790
aucuucaggucucguccac

SEQ ID NO: 712792 - RNA, 19 nt, Artificial Sequence
  Description of Artificial Sequence: Synthetic oligonucleotide
  Sense strand starting at position 19 of SEQ ID NO: 586370
gcaccuaguaucgagaguu

SEQ ID NO: 712793 - RNA, 19 nt, Artificial Sequence
  Description of Artificial Sequence: Synthetic oligonucleotide
  Antisense strand to SEQ ID NO: 712792
aacucucgauacuaggugc

SEQ ID NO: 712794 - RNA, 19 nt, Artificial Sequence
  Description of Artificial Sequence: Synthetic oligonucleotide
  Sense strand starting at position 126 of SEQ ID NO: 586370
uugugcuuucuguauggaa

SEQ ID NO: 712795 - RNA, 19 nt, Artificial Sequence
  Description of Artificial Sequence: Synthetic oligonucleotide
  Antisense strand to SEQ ID NO: 712794
uuccauacagaaagcacaa

SEQ ID NO: 712796 - RNA, 19 nt, Artificial Sequence
  Description of Artificial Sequence: Synthetic oligonucleotide
  Sense strand starting at position 130 of SEQ ID NO: 586370
gcuuucuguauggaagaaa

SEQ ID NO: 712797 - RNA, 19 nt, Artificial Sequence
  Description of Artificial Sequence: Synthetic oligonucleotide
  Antisense strand to SEQ ID NO: 712796
uuucuuccauacagaaagc

SEQ ID NO: 712798 - RNA, 19 nt, Artificial Sequence
  Description of Artificial Sequence: Synthetic oligonucleotide
  Sense strand starting at position 171 of SEQ ID NO: 586370
ggauucucucagcaugaca

SEQ ID NO: 712799 - RNA, 19 nt, Artificial Sequence
  Description of Artificial Sequence: Synthetic oligonucleotide
  Antisense strand to SEQ ID NO: 712798
ugucaugcugagagaaucc

SEQ ID NO: 712800 - RNA, 19 nt, Artificial Sequence
  Description of Artificial Sequence: Synthetic oligonucleotide
  Sense strand starting at position 269 of SEQ ID NO: 586370
augaaauccugucucuaag

SEQ ID NO: 712801 - RNA, 19 nt, Artificial Sequence
  Description of Artificial Sequence: Synthetic oligonucleotide
  Antisense strand to SEQ ID NO: 712800
cuuagagacaggauuucau

SEQ ID NO: 712802 - RNA, 19 nt, Artificial Sequence
  Description of Artificial Sequence: Synthetic oligonucleotide
  Sense strand starting at position 345 of SEQ ID NO: 586370
uguuaaagugauggcaaau

SEQ ID NO: 712803 - RNA, 19 nt, Artificial Sequence
  Description of Artificial Sequence: Synthetic oligonucleotide
  Antisense strand to SEQ ID NO: 712802
auuugccaucacuuuaaca

SEQ ID NO: 712804 - RNA, 19 nt, Artificial Sequence
  Description of Artificial Sequence: Synthetic oligonucleotide
  Sense strand starting at position 591 of SEQ ID NO: 586370
uccaaauggcgucacuuua

SEQ ID NO: 712805 - RNA, 19 nt, Artificial Sequence
  Description of Artificial Sequence: Synthetic oligonucleotide
  Antisense strand to SEQ ID NO: 712804
uaaagugacgccauuugga

SEQ ID NO: 712806 - RNA, 19 nt, Artificial Sequence
  Description of Artificial Sequence: Synthetic oligonucleotide
  Sense strand starting at position 743 of SEQ ID NO: 586370
agaugaaugaguugcgaaa

SEQ ID NO: 712807 - RNA, 19 nt, Artificial Sequence
  Description of Artificial Sequence: Synthetic oligonucleotide
  Antisense strand to SEQ ID NO: 712806
uuucgcaacucauucaucu

SEQ ID NO: 712808 - RNA, 19 nt, Artificial Sequence
  Description of Artificial Sequence: Synthetic oligonucleotide
  Sense strand starting at position 914 of SEQ ID NO: 586370
ucaaaucugcucuggagau

SEQ ID NO: 712809 - RNA, 19 nt, Artificial Sequence
  Description of Artificial Sequence: Synthetic oligonucleotide
  Antisense strand to SEQ ID NO: 712808
aucuccagagcagauuuga

SEQ ID NO: 712810 - RNA, 19 nt, Artificial Sequence
  Description of Artificial Sequence: Synthetic oligonucleotide
  Sense strand starting at position 1015 of SEQ ID NO: 586370
uuaagaacuuucucggaac

SEQ ID NO: 712811 - RNA, 19 nt, Artificial Sequence
  Description of Artificial Sequence: Synthetic oligonucleotide
  Antisense strand to SEQ ID NO: 712810
guuccgagaaaguucuuaa

SEQ ID NO: 712812 - RNA, 19 nt, Artificial Sequence
  Description of Artificial Sequence: Synthetic oligonucleotide
  Sense strand starting at position 1026 of SEQ ID NO: 586370
cucggaacucggcacaaua

SEQ ID NO: 712813 - RNA, 19 nt, Artificial Sequence
  Description of Artificial Sequence: Synthetic oligonucleotide
  Antisense strand to SEQ ID NO: 712812
uauugugccgaguuccgag

SEQ ID NO: 712814 - RNA, 19 nt, Artificial Sequence
  Description of Artificial Sequence: Synthetic oligonucleotide
  Sense strand starting at position 1434 of SEQ ID NO: 586370
ggcccaguucucuacucaa

SEQ ID NO: 712815 - RNA, 19 nt, Artificial Sequence
  Description of Artificial Sequence: Synthetic oligonucleotide
  Antisense strand to SEQ ID NO: 712814
uugaguagagaacugggcc

SEQ ID NO: 712816 - RNA, 19 nt, Artificial Sequence
  Description of Artificial Sequence: Synthetic oligonucleotide
  Sense strand starting at position 2132 of SEQ ID NO: 586370
ugacuaucccacugcugau

SEQ ID NO: 712817 - RNA, 19 nt, Artificial Sequence
  Description of Artificial Sequence: Synthetic oligonucleotide
  Antisense strand to SEQ ID NO: 712816
aucagcagugggauaguca

SEQ ID NO: 712818 - RNA, 19 nt, Artificial Sequence
  Description of Artificial Sequence: Synthetic oligonucleotide
  Sense strand starting at position 2159 of SEQ ID NO: 586370
agagguccuucugcuauga

SEQ ID NO: 712819 - RNA, 19 nt, Artificial Sequence
  Description of Artificial Sequence: Synthetic oligonucleotide
  Antisense strand to SEQ ID NO: 712818
ucauagcagaaggaccucu

SEQ ID NO: 712820 - RNA, 19 nt, Artificial Sequence
  Description of Artificial Sequence: Synthetic oligonucleotide
  Sense strand starting at position 2280 of SEQ ID NO: 586370
gggaaccagugaucucagu

SEQ ID NO: 712821 - RNA, 19 nt, Artificial Sequence
  Description of Artificial Sequence: Synthetic oligonucleotide
  Antisense strand to SEQ ID NO: 712820
acugagaucacugguuccc

SEQ ID NO: 712822 - RNA, 19 nt, Artificial Sequence
  Description of Artificial Sequence: Synthetic oligonucleotide
  Sense strand starting at position 2331 of SEQ ID NO: 586370
cuugauuugccuuaccgca

SEQ ID NO: 712823 - RNA, 19 nt, Artificial Sequence
  Description of Artificial Sequence: Synthetic oligonucleotide
  Antisense strand to SEQ ID NO: 712822
ugcgguaaggcaaaucaag

SEQ ID NO: 712824 - RNA, 19 nt, Artificial Sequence
  Description of Artificial Sequence: Synthetic oligonucleotide
  Sense strand starting at position 2379 of SEQ ID NO: 586370
uaagucguucuugaugaaa

SEQ ID NO: 712825 - RNA, 19 nt, Artificial Sequence
  Description of Artificial Sequence: Synthetic oligonucleotide
  Antisense strand to SEQ ID NO: 712824
uuucaucaagaacgacuua

SEQ ID NO: 712826 - RNA, 19 nt, Artificial Sequence
  Description of Artificial Sequence: Synthetic oligonucleotide
  Sense strand starting at position 2602 of SEQ ID NO: 586370
guaugugacagguaaaugu

SEQ ID NO: 712827 - RNA, 19 nt, Artificial Sequence
  Description of Artificial Sequence: Synthetic oligonucleotide
  Antisense strand to SEQ ID NO: 712826
acauuuaccugucacauac

SEQ ID NO: 712828 - RNA, 19 nt, Artificial Sequence
  Description of Artificial Sequence: Synthetic oligonucleotide
  Sense strand starting at position 2716 of SEQ ID NO: 586370
agugaaggaauguguccaa

SEQ ID NO: 712829 - RNA, 19 nt, Artificial Sequence
  Description of Artificial Sequence: Synthetic oligonucleotide
  Antisense strand to SEQ ID NO: 712828
uuggacacauuccuucacu

SEQ ID NO: 712830 - RNA, 19 nt, Artificial Sequence
  Description of Artificial Sequence: Synthetic oligonucleotide
  Sense strand starting at position 2877 of SEQ ID NO: 586370
cuuugcuuuacuggaggau

SEQ ID NO: 712831 - RNA, 19 nt, Artificial Sequence
  Description of Artificial Sequence: Synthetic oligonucleotide
  Antisense strand to SEQ ID NO: 712830
auccuccaguaaagcaaag

SEQ ID NO: 712832 - RNA, 19 nt, Artificial Sequence
  Description of Artificial Sequence: Synthetic oligonucleotide
  Sense strand starting at position 2880 of SEQ ID NO: 586370
ugcuuuacuggaggaucga

SEQ ID NO: 712833 - RNA, 19 nt, Artificial Sequence
  Description of Artificial Sequence: Synthetic oligonucleotide
  Antisense strand to SEQ ID NO: 712832
ucgauccuccaguaaagca

SEQ ID NO: 712834 - RNA, 19 nt, Artificial Sequence
  Description of Artificial Sequence: Synthetic oligonucleotide
  Sense strand starting at position 2889 of SEQ ID NO: 586370
ggaggaucgacauguuuga

SEQ ID NO: 712835 - RNA, 19 nt, Artificial Sequence
  Description of Artificial Sequence: Synthetic oligonucleotide
  Antisense strand to SEQ ID NO: 712834
ucaaacaugucgauccucc

SEQ ID NO: 712836 - RNA, 19 nt, Artificial Sequence
  Description of Artificial Sequence: Synthetic oligonucleotide
  Sense strand starting at position 2893 of SEQ ID NO: 586370
gaucgacauguuugacuaa

SEQ ID NO: 712837 - RNA, 19 nt, Artificial Sequence
  Description of Artificial Sequence: Synthetic oligonucleotide
  Antisense strand to SEQ ID NO: 712836
uuagucaaacaugucgauc

SEQ ID NO: 712838 - RNA, 19 nt, Artificial Sequence
  Description of Artificial Sequence: Synthetic oligonucleotide
  Sense strand starting at position 2989 of SEQ ID NO: 586370
guuggaguuaagccgugua

SEQ ID NO: 712839 - RNA, 19 nt, Artificial Sequence
  Description of Artificial Sequence: Synthetic oligonucleotide
  Antisense strand to SEQ ID NO: 712838
uacacggcuuaacuccaac

SEQ ID NO: 712840 - RNA, 19 nt, Artificial Sequence
  Description of Artificial Sequence: Synthetic oligonucleotide
  Sense strand starting at position 3093 of SEQ ID NO: 586370
gucagaccugagugugaau

SEQ ID NO: 712841 - RNA, 19 nt, Artificial Sequence
  Description of Artificial Sequence: Synthetic oligonucleotide
  Antisense strand to SEQ ID NO: 712840
auucacacucaggucugac

SEQ ID NO: 712842 - RNA, 19 nt, Artificial Sequence
  Description of Artificial Sequence: Synthetic oligonucleotide
  Sense strand starting at position 3159 of SEQ ID NO: 586370
cuuuguuuacuuuaggagu

SEQ ID NO: 712843 - RNA, 19 nt, Artificial Sequence
  Description of Artificial Sequence: Synthetic oligonucleotide
  Antisense strand to SEQ ID NO: 712842
acuccuaaaguaaacaaag

SEQ ID NO: 712844 - RNA, 19 nt, Artificial Sequence
  Description of Artificial Sequence: Synthetic oligonucleotide
  Sense strand starting at position 3173 of SEQ ID NO: 586370
ggaguaauaagauguaccu

SEQ ID NO: 712845 - RNA, 19 nt, Artificial Sequence
  Description of Artificial Sequence: Synthetic oligonucleotide
  Antisense strand to SEQ ID NO: 712844
agguacaucuuauuacucc

SEQ ID NO: 712846 - RNA, 19 nt, Artificial Sequence
  Description of Artificial Sequence: Synthetic oligonucleotide
  Sense strand starting at position 3196 of SEQ ID NO: 586370
gaauauuguagacagcgua

SEQ ID NO: 712847 - RNA, 19 nt, Artificial Sequence
  Description of Artificial Sequence: Synthetic oligonucleotide
  Antisense strand to SEQ ID NO: 712846
uacgcugucuacaauauuc

SEQ ID NO: 712848 - RNA, 19 nt, Artificial Sequence
  Description of Artificial Sequence: Synthetic oligonucleotide
  Sense strand starting at position 3222 of SEQ ID NO: 586370
uggaaucugacguguauua

SEQ ID NO: 712849 - RNA, 19 nt, Artificial Sequence
  Description of Artificial Sequence: Synthetic oligonucleotide
  Antisense strand to SEQ ID NO: 712848
uaauacacgucagauucca

SEQ ID NO: 712850 - RNA, 19 nt, Artificial Sequence
  Description of Artificial Sequence: Synthetic oligonucleotide
  Sense strand starting at position 3224 of SEQ ID NO: 586370
gaaucugacguguauuaag

SEQ ID NO: 712851 - RNA, 19 nt, Artificial Sequence
  Description of Artificial Sequence: Synthetic oligonucleotide
  Antisense strand to SEQ ID NO: 712850
cuuaauacacgucagauuc

SEQ ID NO: 712852 - RNA, 19 nt, Artificial Sequence
  Description of Artificial Sequence: Synthetic oligonucleotide
  Sense strand starting at position 3352 of SEQ ID NO: 586370
uugauaaggugguuccuaa

SEQ ID NO: 712853 - RNA, 19 nt, Artificial Sequence
  Description of Artificial Sequence: Synthetic oligonucleotide
  Antisense strand to SEQ ID NO: 712852
uuaggaaccaccuuaucaa

SEQ ID NO: 712854 - RNA, 19 nt, Artificial Sequence
  Description of Artificial Sequence: Synthetic oligonucleotide
  Sense strand starting at position 3362 of SEQ ID NO: 586370
gguuccuaaugagccauau

SEQ ID NO: 712855 - RNA, 19 nt, Artificial Sequence
  Description of Artificial Sequence: Synthetic oligonucleotide
  Antisense strand to SEQ ID NO: 712854
auauggcucauuaggaacc

SEQ ID NO: 712856 - RNA, 19 nt, Artificial Sequence
  Description of Artificial Sequence: Synthetic oligonucleotide
  Sense strand starting at position 3438 of SEQ ID NO: 586370
auaaauuauagucgggcua

SEQ ID NO: 712857 - RNA, 19 nt, Artificial Sequence
  Description of Artificial Sequence: Synthetic oligonucleotide
  Antisense strand to SEQ ID NO: 712856
uagcccgacuauaauuuau

SEQ ID NO: 712858 - RNA, 19 nt, Artificial Sequence
  Description of Artificial Sequence: Synthetic oligonucleotide
  Sense strand starting at position 3712 of SEQ ID NO: 586370
acuugauuccuagagcaau

SEQ ID NO: 712859 - RNA, 19 nt, Artificial Sequence
  Description of Artificial Sequence: Synthetic oligonucleotide
  Antisense strand to SEQ ID NO: 712858
auugcucuaggaaucaagu

SEQ ID NO: 712860 - RNA, 19 nt, Artificial Sequence
  Description of Artificial Sequence: Synthetic oligonucleotide
  Sense strand starting at position 3753 of SEQ ID NO: 586370
uuauccguaccucauuauu

SEQ ID NO: 712861 - RNA, 19 nt, Artificial Sequence
  Description of Artificial Sequence: Synthetic oligonucleotide
  Antisense strand to SEQ ID NO: 712860
aauaaugagguacggauaa

SEQ ID NO: 712862 - RNA, 19 nt, Artificial Sequence
  Description of Artificial Sequence: Synthetic oligonucleotide
  Sense strand starting at position 3767 of SEQ ID NO: 586370
uuauuuagucaauguguac

SEQ ID NO: 712863 - RNA, 19 nt, Artificial Sequence
  Description of Artificial Sequence: Synthetic oligonucleotide
  Antisense strand to SEQ ID NO: 712862
guacacauugacuaaauaa

SEQ ID NO: 712864 - RNA, 19 nt, Artificial Sequence
  Description of Artificial Sequence: Synthetic oligonucleotide
  Sense strand starting at position 3957 of SEQ ID NO: 586370
acuccaggugucuauaaca

SEQ ID NO: 712865 - RNA, 19 nt, Artificial Sequence
  Description of Artificial Sequence: Synthetic oligonucleotide
  Antisense strand to SEQ ID NO: 712864
uguuauagacaccuggagu

SEQ ID NO: 712866 - RNA, 19 nt, Artificial Sequence
  Description of Artificial Sequence: Synthetic oligonucleotide
  Sense strand starting at position 3979 of SEQ ID NO: 586370
uugugaaccucaucaguga

SEQ ID NO: 712867 - RNA, 19 nt, Artificial Sequence
  Description of Artificial Sequence: Synthetic oligonucleotide
  Antisense strand to SEQ ID NO: 712866
ucacugaugagguucacaa

SEQ ID NO: 712868 - RNA, 19 nt, Artificial Sequence
  Description of Artificial Sequence: Synthetic oligonucleotide
  Sense strand starting at position 3980 of SEQ ID NO: 586370
ugugaaccucaucagugau

SEQ ID NO: 712869 - RNA, 19 nt, Artificial Sequence
  Description of Artificial Sequence: Synthetic oligonucleotide
  Antisense strand to SEQ ID NO: 712868
aucacugaugagguucaca

SEQ ID NO: 712870 - RNA, 19 nt, Artificial Sequence
  Description of Artificial Sequence: Synthetic oligonucleotide
  Sense strand starting at position 3983 of SEQ ID NO: 586370
gaaccucaucagugauuga

SEQ ID NO: 712871 - RNA, 19 nt, Artificial Sequence
  Description of Artificial Sequence: Synthetic oligonucleotide
  Antisense strand to SEQ ID NO: 712870
ucaaucacugaugagguuc

SEQ ID NO: 712872 - RNA, 19 nt, Artificial Sequence
  Description of Artificial Sequence: Synthetic oligonucleotide
  Sense strand starting at position 18 of SEQ ID NO: 586371
aguacuuacugauuaaaug

SEQ ID NO: 712873 - RNA, 19 nt, Artificial Sequence
  Description of Artificial Sequence: Synthetic oligonucleotide
  Antisense strand to SEQ ID NO: 712872
cauuuaaucaguaaguacu

SEQ ID NO: 712874 - RNA, 19 nt, Artificial Sequence
  Description of Artificial Sequence: Synthetic oligonucleotide
  Sense strand starting at position 19 of SEQ ID NO: 586371
guacuuacugauuaaaugu

SEQ ID NO: 712875 - RNA, 19 nt, Artificial Sequence
  Description of Artificial Sequence: Synthetic oligonucleotide
  Antisense strand to SEQ ID NO: 712874
acauuuaaucaguaaguac

SEQ ID NO: 712876 - RNA, 19 nt, Artificial Sequence
  Description of Artificial Sequence: Synthetic oligonucleotide
  Sense strand starting at position 212 of SEQ ID NO: 586371
gcaccuaguaucgagaguu

SEQ ID NO: 712877 - RNA, 19 nt, Artificial Sequence
  Description of Artificial Sequence: Synthetic oligonucleotide
  Antisense strand to SEQ ID NO: 712876
aacucucgauacuaggugc

SEQ ID NO: 712878 - RNA, 19 nt, Artificial Sequence
  Description of Artificial Sequence: Synthetic oligonucleotide
  Sense strand starting at position 319 of SEQ ID NO: 586371
uugugcuuucuguauggaa

SEQ ID NO: 712879 - RNA, 19 nt, Artificial Sequence
  Description of Artificial Sequence: Synthetic oligonucleotide
  Antisense strand to SEQ ID NO: 712878
uuccauacagaaagcacaa

SEQ ID NO: 712880 - RNA, 19 nt, Artificial Sequence
  Description of Artificial Sequence: Synthetic oligonucleotide
  Sense strand starting at position 323 of SEQ ID NO: 586371
gcuuucuguauggaagaaa

SEQ ID NO: 712881 - RNA, 19 nt, Artificial Sequence
  Description of Artificial Sequence: Synthetic oligonucleotide
  Antisense strand to SEQ ID NO: 712880
uuucuuccauacagaaagc

SEQ ID NO: 712882 - RNA, 19 nt, Artificial Sequence
  Description of Artificial Sequence: Synthetic oligonucleotide
  Sense strand starting at position 364 of SEQ ID NO: 586371
ggauucucucagcaugaca

SEQ ID NO: 712883 - RNA, 19 nt, Artificial Sequence
  Description of Artificial Sequence: Synthetic oligonucleotide
  Antisense strand to SEQ ID NO: 712882
ugucaugcugagagaaucc

SEQ ID NO: 712884 - RNA, 19 nt, Artificial Sequence
  Description of Artificial Sequence: Synthetic oligonucleotide
  Sense strand starting at position 462 of SEQ ID NO: 586371
augaaauccugucucuaag

SEQ ID NO: 712885 - RNA, 19 nt, Artificial Sequence
  Description of Artificial Sequence: Synthetic oligonucleotide
  Antisense strand to SEQ ID NO: 712884
cuuagagacaggauuucau

SEQ ID NO: 712886 - RNA, 19 nt, Artificial Sequence
  Description of Artificial Sequence: Synthetic oligonucleotide
  Sense strand starting at position 538 of SEQ ID NO: 586371
uguuaaagugauggcaaau

SEQ ID NO: 712887 - RNA, 19 nt, Artificial Sequence
  Description of Artificial Sequence: Synthetic oligonucleotide
  Antisense strand to SEQ ID NO: 712886
auuugccaucacuuuaaca

SEQ ID NO: 712888 - RNA, 19 nt, Artificial Sequence
  Description of Artificial Sequence: Synthetic oligonucleotide
  Sense strand starting at position 784 of SEQ ID NO: 586371
uccaaauggcgucacuuua

SEQ ID NO: 712889 - RNA, 19 nt, Artificial Sequence
  Description of Artificial Sequence: Synthetic oligonucleotide
  Antisense strand to SEQ ID NO: 712888
uaaagugacgccauuugga

SEQ ID NO: 712890 - RNA, 19 nt, Artificial Sequence
  Description of Artificial Sequence: Synthetic oligonucleotide
  Sense strand starting at position 936 of SEQ ID NO: 586371
agaugaaugaguugcgaaa

SEQ ID NO: 712891 - RNA, 19 nt, Artificial Sequence
  Description of Artificial Sequence: Synthetic oligonucleotide
  Antisense strand to SEQ ID NO: 712890
uuucgcaacucauucaucu

SEQ ID NO: 712892 - RNA, 19 nt, Artificial Sequence
  Description of Artificial Sequence: Synthetic oligonucleotide
  Sense strand starting at position 1025 of SEQ ID NO: 586371
ccuuaucuacaccgaguau

SEQ ID NO: 712893 - RNA, 19 nt, Artificial Sequence
  Description of Artificial Sequence: Synthetic oligonucleotide
  Antisense strand to SEQ ID NO: 712892
auacucgguguagauaagg

SEQ ID NO: 712894 - RNA, 19 nt, Artificial Sequence
  Description of Artificial Sequence: Synthetic oligonucleotide
  Sense strand starting at position 1107 of SEQ ID NO: 586371
ucaaaucugcucuggagau

SEQ ID NO: 712895 - RNA, 19 nt, Artificial Sequence
  Description of Artificial Sequence: Synthetic oligonucleotide
  Antisense strand to SEQ ID NO: 712894
aucuccagagcagauuuga

SEQ ID NO: 712896 - RNA, 19 nt, Artificial Sequence
  Description of Artificial Sequence: Synthetic oligonucleotide
  Sense strand starting at position 1208 of SEQ ID NO: 586371
uuaagaacuuucucggaac

SEQ ID NO: 712897 - RNA, 19 nt, Artificial Sequence
  Description of Artificial Sequence: Synthetic oligonucleotide
  Antisense strand to SEQ ID NO: 712896
guuccgagaaaguucuuaa

SEQ ID NO: 712898 - RNA, 19 nt, Artificial Sequence
  Description of Artificial Sequence: Synthetic oligonucleotide
  Sense strand starting at position 1219 of SEQ ID NO: 586371
cucggaacucggcacaaua

SEQ ID NO: 712899 - RNA, 19 nt, Artificial Sequence
  Description of Artificial Sequence: Synthetic oligonucleotide
  Antisense strand to SEQ ID NO: 712898
uauugugccgaguuccgag

SEQ ID NO: 712900 - RNA, 19 nt, Artificial Sequence
  Description of Artificial Sequence: Synthetic oligonucleotide
  Sense strand starting at position 1627 of SEQ ID NO: 586371
ggcccaguucucuacucaa

SEQ ID NO: 712901 - RNA, 19 nt, Artificial Sequence
  Description of Artificial Sequence: Synthetic oligonucleotide
  Antisense strand to SEQ ID NO: 712900
uugaguagagaacugggcc

SEQ ID NO: 712902 - RNA, 19 nt, Artificial Sequence
  Description of Artificial Sequence: Synthetic oligonucleotide
  Sense strand starting at position 2325 of SEQ ID NO: 586371
ugacuaucccacugcugau

SEQ ID NO: 712903 - RNA, 19 nt, Artificial Sequence
  Description of Artificial Sequence: Synthetic oligonucleotide
  Antisense strand to SEQ ID NO: 712902
aucagcagugggauaguca

SEQ ID NO: 712904 - RNA, 19 nt, Artificial Sequence
  Description of Artificial Sequence: Synthetic oligonucleotide
  Sense strand starting at position 2352 of SEQ ID NO: 586371
agagguccuucugcuauga

SEQ ID NO: 712905 - RNA, 19 nt, Artificial Sequence
  Description of Artificial Sequence: Synthetic oligonucleotide
  Antisense strand to SEQ ID NO: 712904
ucauagcagaaggaccucu

SEQ ID NO: 712906 - RNA, 19 nt, Artificial Sequence
  Description of Artificial Sequence: Synthetic oligonucleotide
  Sense strand starting at position 2473 of SEQ ID NO: 586371
gggaaccagugaucucagu

SEQ ID NO: 712907 - RNA, 19 nt, Artificial Sequence
  Description of Artificial Sequence: Synthetic oligonucleotide
  Antisense strand to SEQ ID NO: 712906
acugagaucacugguuccc

SEQ ID NO: 712908 - RNA, 19 nt, Artificial Sequence
  Description of Artificial Sequence: Synthetic oligonucleotide
  Sense strand starting at position 2524 of SEQ ID NO: 586371
cuugauuugccuuaccgca

SEQ ID NO: 712909 - RNA, 19 nt, Artificial Sequence
  Description of Artificial Sequence: Synthetic oligonucleotide
  Antisense strand to SEQ ID NO: 712908
ugcgguaaggcaaaucaag

SEQ ID NO: 712910 - RNA, 19 nt, Artificial Sequence
  Description of Artificial Sequence: Synthetic oligonucleotide
  Sense strand starting at position 2551 of SEQ ID NO: 586371
auaugagauaucugggcgu

SEQ ID NO: 712911 - RNA, 19 nt, Artificial Sequence
  Description of Artificial Sequence: Synthetic oligonucleotide
  Antisense strand to SEQ ID NO: 712910
acgcccagauaucucauau

SEQ ID NO: 712912 - RNA, 19 nt, Artificial Sequence
  Description of Artificial Sequence: Synthetic oligonucleotide
  Sense strand starting at position 2572 of SEQ ID NO: 586371
uaagucguucuugaugaaa

SEQ ID NO: 712913 - RNA, 19 nt, Artificial Sequence
  Description of Artificial Sequence: Synthetic oligonucleotide
  Antisense strand to SEQ ID NO: 712912
uuucaucaagaacgacuua

SEQ ID NO: 712914 - RNA, 19 nt, Artificial Sequence
  Description of Artificial Sequence: Synthetic oligonucleotide
  Sense strand starting at position 2795 of SEQ ID NO: 586371
guaugugacagguaaaugu

SEQ ID NO: 712915 - RNA, 19 nt, Artificial Sequence
  Description of Artificial Sequence: Synthetic oligonucleotide
  Antisense strand to SEQ ID NO: 712914
acauuuaccugucacauac

SEQ ID NO: 712916 - RNA, 19 nt, Artificial Sequence
  Description of Artificial Sequence: Synthetic oligonucleotide
  Sense strand starting at position 2909 of SEQ ID NO: 586371
agugaaggaauguguccaa

SEQ ID NO: 712917 - RNA, 19 nt, Artificial Sequence
  Description of Artificial Sequence: Synthetic oligonucleotide
  Antisense strand to SEQ ID NO: 712916
uuggacacauuccuucacu

SEQ ID NO: 712918 - RNA, 19 nt, Artificial Sequence
  Description of Artificial Sequence: Synthetic oligonucleotide
  Sense strand starting at position 3070 of SEQ ID NO: 586371
cuuugcuuuacuggaggau

SEQ ID NO: 712919 - RNA, 19 nt, Artificial Sequence
  Description of Artificial Sequence: Synthetic oligonucleotide
  Antisense strand to SEQ ID NO: 712918
auccuccaguaaagcaaag

SEQ ID NO: 712920 - RNA, 19 nt, Artificial Sequence
  Description of Artificial Sequence: Synthetic oligonucleotide
  Sense strand starting at position 3073 of SEQ ID NO: 586371
ugcuuuacuggaggaucga

SEQ ID NO: 712921 - RNA, 19 nt, Artificial Sequence
  Description of Artificial Sequence: Synthetic oligonucleotide
  Antisense strand to SEQ ID NO: 712920
ucgauccuccaguaaagca

SEQ ID NO: 712922 - RNA, 19 nt, Artificial Sequence
  Description of Artificial Sequence: Synthetic oligonucleotide
  Sense strand starting at position 3082 of SEQ ID NO: 586371
ggaggaucgacauguuuga

SEQ ID NO: 712923 - RNA, 19 nt, Artificial Sequence
  Description of Artificial Sequence: Synthetic oligonucleotide
  Antisense strand to SEQ ID NO: 712922
ucaaacaugucgauccucc

SEQ ID NO: 712924 - RNA, 19 nt, Artificial Sequence
  Description of Artificial Sequence: Synthetic oligonucleotide
  Sense strand starting at position 3086 of SEQ ID NO: 586371
gaucgacauguuugacuaa

SEQ ID NO: 712925 - RNA, 19 nt, Artificial Sequence
  Description of Artificial Sequence: Synthetic oligonucleotide
  Antisense strand to SEQ ID NO: 712924
uuagucaaacaugucgauc

SEQ ID NO: 712926 - RNA, 19 nt, Artificial Sequence
  Description of Artificial Sequence: Synthetic oligonucleotide
  Sense strand starting at position 3182 of SEQ ID NO: 586371
guuggaguuaagccgugua

SEQ ID NO: 712927 - RNA, 19 nt, Artificial Sequence
  Description of Artificial Sequence: Synthetic oligonucleotide
  Antisense strand to SEQ ID NO: 712926
uacacggcuuaacuccaac

SEQ ID NO: 712928 - RNA, 19 nt, Artificial Sequence
  Description of Artificial Sequence: Synthetic oligonucleotide
  Sense strand starting at position 3286 of SEQ ID NO: 586371
gucagaccugagugugaau

SEQ ID NO: 712929 - RNA, 19 nt, Artificial Sequence
  Description of Artificial Sequence: Synthetic oligonucleotide
  Antisense strand to SEQ ID NO: 712928
auucacacucaggucugac

SEQ ID NO: 712930 - RNA, 19 nt, Artificial Sequence
  Description of Artificial Sequence: Synthetic oligonucleotide
  Sense strand starting at position 3352 of SEQ ID NO: 586371
cuuuguuuacuuuaggagu

SEQ ID NO: 712931 - RNA, 19 nt, Artificial Sequence
  Description of Artificial Sequence: Synthetic oligonucleotide
  Antisense strand to SEQ ID NO: 712930
acuccuaaaguaaacaaag

SEQ ID NO: 712932 - RNA, 19 nt, Artificial Sequence
  Description of Artificial Sequence: Synthetic oligonucleotide
  Sense strand starting at position 3366 of SEQ ID NO: 586371
ggaguaauaagauguaccu

SEQ ID NO: 712933 - RNA, 19 nt, Artificial Sequence
  Description of Artificial Sequence: Synthetic oligonucleotide
  Antisense strand to SEQ ID NO: 712932
agguacaucuuauuacucc

SEQ ID NO: 712934 - RNA, 19 nt, Artificial Sequence
  Description of Artificial Sequence: Synthetic oligonucleotide
  Sense strand starting at position 3389 of SEQ ID NO: 586371
gaauauuguagacagcgua

SEQ ID NO: 712935 - RNA, 19 nt, Artificial Sequence
  Description of Artificial Sequence: Synthetic oligonucleotide
  Antisense strand to SEQ ID NO: 712934
uacgcugucuacaauauuc

SEQ ID NO: 712936 - RNA, 19 nt, Artificial Sequence
  Description of Artificial Sequence: Synthetic oligonucleotide
  Sense strand starting at position 3415 of SEQ ID NO: 586371
uggaaucugacguguauua

SEQ ID NO: 712937 - RNA, 19 nt, Artificial Sequence
  Description of Artificial Sequence: Synthetic oligonucleotide
  Antisense strand to SEQ ID NO: 712936
uaauacacgucagauucca

SEQ ID NO: 712938 - RNA, 19 nt, Artificial Sequence
  Description of Artificial Sequence: Synthetic oligonucleotide
  Sense strand starting at position 3417 of SEQ ID NO: 586371
gaaucugacguguauuaag

SEQ ID NO: 712939 - RNA, 19 nt, Artificial Sequence
  Description of Artificial Sequence: Synthetic oligonucleotide
  Antisense strand to SEQ ID NO: 712938
cuuaauacacgucagauuc

SEQ ID NO: 712940 - RNA, 19 nt, Artificial Sequence
  Description of Artificial Sequence: Synthetic oligonucleotide
  Sense strand starting at position 3545 of SEQ ID NO: 586371
uugauaaggugguuccuaa

SEQ ID NO: 712941 - RNA, 19 nt, Artificial Sequence
  Description of Artificial Sequence: Synthetic oligonucleotide
  Antisense strand to SEQ ID NO: 712940
uuaggaaccaccuuaucaa

SEQ ID NO: 712942 - RNA, 19 nt, Artificial Sequence
  Description of Artificial Sequence: Synthetic oligonucleotide
  Sense strand starting at position 3555 of SEQ ID NO: 586371
gguuccuaaugagccauau

SEQ ID NO: 712943 - RNA, 19 nt, Artificial Sequence
  Description of Artificial Sequence: Synthetic oligonucleotide
  Antisense strand to SEQ ID NO: 712942
auauggcucauuaggaacc

SEQ ID NO: 712944 - RNA, 19 nt, Artificial Sequence
  Description of Artificial Sequence: Synthetic oligonucleotide
  Sense strand starting at position 3631 of SEQ ID NO: 586371
auaaauuauagucgggcua

SEQ ID NO: 712945 - RNA, 19 nt, Artificial Sequence
  Description of Artificial Sequence: Synthetic oligonucleotide
  Antisense strand to SEQ ID NO: 712944
uagcccgacuauaauuuau

SEQ ID NO: 712946 - RNA, 19 nt, Artificial Sequence
  Description of Artificial Sequence: Synthetic oligonucleotide
  Sense strand starting at position 3905 of SEQ ID NO: 586371
acuugauuccuagagcaau

SEQ ID NO: 712947 - RNA, 19 nt, Artificial Sequence
  Description of Artificial Sequence: Synthetic oligonucleotide
  Antisense strand to SEQ ID NO: 712946
auugcucuaggaaucaagu

SEQ ID NO: 712948 - RNA, 19 nt, Artificial Sequence
  Description of Artificial Sequence: Synthetic oligonucleotide
  Sense strand starting at position 3946 of SEQ ID NO: 586371
uuauccguaccucauuauu

SEQ ID NO: 712949 - RNA, 19 nt, Artificial Sequence
  Description of Artificial Sequence: Synthetic oligonucleotide
  Antisense strand to SEQ ID NO: 712948
aauaaugagguacggauaa

SEQ ID NO: 712950 - RNA, 19 nt, Artificial Sequence
  Description of Artificial Sequence: Synthetic oligonucleotide
  Sense strand starting at position 3960 of SEQ ID NO: 586371
uuauuuagucaauguguac

SEQ ID NO: 712951 - RNA, 19 nt, Artificial Sequence
  Description of Artificial Sequence: Synthetic oligonucleotide
  Antisense strand to SEQ ID NO: 712950
guacacauugacuaaauaa

SEQ ID NO: 712952 - RNA, 19 nt, Artificial Sequence
  Description of Artificial Sequence: Synthetic oligonucleotide
  Sense strand starting at position 65 of SEQ ID NO: 586372
uagggaagugguugaggau

SEQ ID NO: 712953 - RNA, 19 nt, Artificial Sequence
  Description of Artificial Sequence: Synthetic oligonucleotide
  Antisense strand to SEQ ID NO: 712952
auccucaaccacuucccua

SEQ ID NO: 712954 - RNA, 19 nt, Artificial Sequence
  Description of Artificial Sequence: Synthetic oligonucleotide
  Sense strand starting at position 68 of SEQ ID NO: 586372
ggaagugguugaggaugaa

SEQ ID NO: 712955 - RNA, 19 nt, Artificial Sequence
  Description of Artificial Sequence: Synthetic oligonucleotide
  Antisense strand to SEQ ID NO: 712954
uucauccucaaccacuucc

SEQ ID NO: 712956 - RNA, 19 nt, Artificial Sequence
  Description of Artificial Sequence: Synthetic oligonucleotide
  Sense strand starting at position 107 of SEQ ID NO: 586372
aggaauucucaauggccau

SEQ ID NO: 712957 - RNA, 19 nt, Artificial Sequence
  Description of Artificial Sequence: Synthetic oligonucleotide
  Antisense strand to SEQ ID NO: 712956
auggccauugagaauuccu

SEQ ID NO: 712958 - RNA, 19 nt, Artificial Sequence
  Description of Artificial Sequence: Synthetic oligonucleotide
  Sense strand starting at position 162 of SEQ ID NO: 586372
ggaguucuggaccauguga

SEQ ID NO: 712959 - RNA, 19 nt, Artificial Sequence
  Description of Artificial Sequence: Synthetic oligonucleotide
  Antisense strand to SEQ ID NO: 712958
ucacaugguccagaacucc

SEQ ID NO: 712960 - RNA, 19 nt, Artificial Sequence
  Description of Artificial Sequence: Synthetic oligonucleotide
  Sense strand starting at position 164 of SEQ ID NO: 586372
aguucuggaccaugugaaa

SEQ ID NO: 712961 - RNA, 19 nt, Artificial Sequence
  Description of Artificial Sequence: Synthetic oligonucleotide
  Antisense strand to SEQ ID NO: 712960
uuucacaugguccagaacu

SEQ ID NO: 712962 - RNA, 19 nt, Artificial Sequence
  Description of Artificial Sequence: Synthetic oligonucleotide
  Sense strand starting at position 186 of SEQ ID NO: 586372
aaaguuaaccaacguggaa

SEQ ID NO: 712963 - RNA, 19 nt, Artificial Sequence
  Description of Artificial Sequence: Synthetic oligonucleotide
  Antisense strand to SEQ ID NO: 712962
uuccacguugguuaacuuu

SEQ ID NO: 712964 - RNA, 19 nt, Artificial Sequence
  Description of Artificial Sequence: Synthetic oligonucleotide
  Sense strand starting at position 188 of SEQ ID NO: 586372
aguuaaccaacguggaaau

SEQ ID NO: 712965 - RNA, 19 nt, Artificial Sequence
  Description of Artificial Sequence: Synthetic oligonucleotide
  Antisense strand to SEQ ID NO: 712964
auuuccacguugguuaacu

SEQ ID NO: 712966 - RNA, 19 nt, Artificial Sequence
  Description of Artificial Sequence: Synthetic oligonucleotide
  Sense strand starting at position 198 of SEQ ID NO: 586372
cguggaaaucucggcauuu

SEQ ID NO: 712967 - RNA, 19 nt, Artificial Sequence
  Description of Artificial Sequence: Synthetic oligonucleotide
  Antisense strand to SEQ ID NO: 712966
aaaugccgagauuuccacg

SEQ ID NO: 712968 - RNA, 19 nt, Artificial Sequence
  Description of Artificial Sequence: Synthetic oligonucleotide
  Sense strand starting at position 199 of SEQ ID NO: 586372
guggaaaucucggcauuuc

SEQ ID NO: 712969 - RNA, 19 nt, Artificial Sequence
  Description of Artificial Sequence: Synthetic oligonucleotide
  Antisense strand to SEQ ID NO: 712968
gaaaugccgagauuuccac

SEQ ID NO: 712970 - RNA, 19 nt, Artificial Sequence
  Description of Artificial Sequence: Synthetic oligonucleotide
  Sense strand starting at position 245 of SEQ ID NO: 586372
ggaaucuauucuccacgca

SEQ ID NO: 712971 - RNA, 19 nt, Artificial Sequence
  Description of Artificial Sequence: Synthetic oligonucleotide
  Antisense strand to SEQ ID NO: 712970
ugcguggagaauagauucc

SEQ ID NO: 712972 - RNA, 19 nt, Artificial Sequence
  Description of Artificial Sequence: Synthetic oligonucleotide
  Sense strand starting at position 292 of SEQ ID NO: 586372
ucgggucuaucacuucuau

SEQ ID NO: 712973 - RNA, 19 nt, Artificial Sequence
  Description of Artificial Sequence: Synthetic oligonucleotide
  Antisense strand to SEQ ID NO: 712972
auagaagugauagacccga

SEQ ID NO: 712974 - RNA, 19 nt, Artificial Sequence
  Description of Artificial Sequence: Synthetic oligonucleotide
  Sense strand starting at position 415 of SEQ ID NO: 586372
acggauuuauagcaucagu

SEQ ID NO: 712975 - RNA, 19 nt, Artificial Sequence
  Description of Artificial Sequence: Synthetic oligonucleotide
  Antisense strand to SEQ ID NO: 712974
acugaugcuauaaauccgu

SEQ ID NO: 712976 - RNA, 19 nt, Artificial Sequence
  Description of Artificial Sequence: Synthetic oligonucleotide
  Sense strand starting at position 426 of SEQ ID NO: 586372
gcaucaguguucccuccuu

SEQ ID NO: 712977 - RNA, 19 nt, Artificial Sequence
  Description of Artificial Sequence: Synthetic oligonucleotide
  Antisense strand to SEQ ID NO: 712976
aaggagggaacacugaugc

SEQ ID NO: 712978 - RNA, 19 nt, Artificial Sequence
  Description of Artificial Sequence: Synthetic oligonucleotide
  Sense strand starting at position 431 of SEQ ID NO: 586372
aguguucccuccuucggaa

SEQ ID NO: 712979 - RNA, 19 nt, Artificial Sequence
  Description of Artificial Sequence: Synthetic oligonucleotide
  Antisense strand to SEQ ID NO: 712978
uuccgaaggagggaacacu

SEQ ID NO: 712980 - RNA, 19 nt, Artificial Sequence
  Description of Artificial Sequence: Synthetic oligonucleotide
  Sense strand starting at position 808 of SEQ ID NO: 586372
caggaauuucugcgguggu

SEQ ID NO: 712981 - RNA, 19 nt, Artificial Sequence
  Description of Artificial Sequence: Synthetic oligonucleotide
  Antisense strand to SEQ ID NO: 712980
accaccgcagaaauuccug

SEQ ID NO: 712982 - RNA, 19 nt, Artificial Sequence
  Description of Artificial Sequence: Synthetic oligonucleotide
  Sense strand starting at position 2022 of SEQ ID NO: 586372
gcgacucucagcgcagauu

SEQ ID NO: 712983 - RNA, 19 nt, Artificial Sequence
  Description of Artificial Sequence: Synthetic oligonucleotide
  Antisense strand to SEQ ID NO: 712982
aaucugcgcugagagucgc

SEQ ID NO: 712984 - RNA, 19 nt, Artificial Sequence
  Description of Artificial Sequence: Synthetic oligonucleotide
  Sense strand starting at position 2023 of SEQ ID NO: 586372
cgacucucagcgcagauua

SEQ ID NO: 712985 - RNA, 19 nt, Artificial Sequence
  Description of Artificial Sequence: Synthetic oligonucleotide
  Antisense strand to SEQ ID NO: 712984
uaaucugcgcugagagucg

SEQ ID NO: 712986 - RNA, 19 nt, Artificial Sequence
  Description of Artificial Sequence: Synthetic oligonucleotide
  Sense strand starting at position 2482 of SEQ ID NO: 586372
gcagccugucauuagaucu

SEQ ID NO: 712987 - RNA, 19 nt, Artificial Sequence
  Description of Artificial Sequence: Synthetic oligonucleotide
  Antisense strand to SEQ ID NO: 712986
agaucuaaugacaggcugc

SEQ ID NO: 712988 - RNA, 19 nt, Artificial Sequence
  Description of Artificial Sequence: Synthetic oligonucleotide
  Sense strand starting at position 2512 of SEQ ID NO: 586372
gcccaauagguucgccuua

SEQ ID NO: 712989 - RNA, 19 nt, Artificial Sequence
  Description of Artificial Sequence: Synthetic oligonucleotide
  Antisense strand to SEQ ID NO: 712988
uaaggcgaaccuauugggc

SEQ ID NO: 712990 - RNA, 19 nt, Artificial Sequence
  Description of Artificial Sequence: Synthetic oligonucleotide
  Sense strand starting at position 2514 of SEQ ID NO: 586372
ccaauagguucgccuuacu

SEQ ID NO: 712991 - RNA, 19 nt, Artificial Sequence
  Description of Artificial Sequence: Synthetic oligonucleotide
  Antisense strand to SEQ ID NO: 712990
aguaaggcgaaccuauugg

SEQ ID NO: 712992 - RNA, 19 nt, Artificial Sequence
  Description of Artificial Sequence: Synthetic oligonucleotide
  Sense strand starting at position 2581 of SEQ ID NO: 586372
gaguuuaaugcaugcagaa

SEQ ID NO: 712993 - RNA, 19 nt, Artificial Sequence
  Description of Artificial Sequence: Synthetic oligonucleotide
  Antisense strand to SEQ ID NO: 712992
uucugcaugcauuaaacuc

SEQ ID NO: 712994 - RNA, 19 nt, Artificial Sequence
  Description of Artificial Sequence: Synthetic oligonucleotide
  Sense strand starting at position 2651 of SEQ ID NO: 586372
ggagcuuuauugcucaaac

SEQ ID NO: 712995 - RNA, 19 nt, Artificial Sequence
  Description of Artificial Sequence: Synthetic oligonucleotide
  Antisense strand to SEQ ID NO: 712994
guuugagcaauaaagcucc

SEQ ID NO: 712996 - RNA, 19 nt, Artificial Sequence
  Description of Artificial Sequence: Synthetic oligonucleotide
  Sense strand starting at position 2691 of SEQ ID NO: 586372
ugggucaucuaaggauaau

SEQ ID NO: 712997 - RNA, 19 nt, Artificial Sequence
  Description of Artificial Sequence: Synthetic oligonucleotide
  Antisense strand to SEQ ID NO: 712996
auuauccuuagaugaccca

SEQ ID NO: 712998 - RNA, 19 nt, Artificial Sequence
  Description of Artificial Sequence: Synthetic oligonucleotide
  Sense strand starting at position 2701 of SEQ ID NO: 586372
aaggauaauuaggcaggua

SEQ ID NO: 712999 - RNA, 19 nt, Artificial Sequence
  Description of Artificial Sequence: Synthetic oligonucleotide
  Antisense strand to SEQ ID NO: 712998
uaccugccuaauuauccuu

SEQ ID NO: 713000 - RNA, 19 nt, Artificial Sequence
  Description of Artificial Sequence: Synthetic oligonucleotide
  Sense strand starting at position 2728 of SEQ ID NO: 586372
gggagagggcagugcuuau

SEQ ID NO: 713001 - RNA, 19 nt, Artificial Sequence
  Description of Artificial Sequence: Synthetic oligonucleotide
  Antisense strand to SEQ ID NO: 713000
auaagcacugcccucuccc

SEQ ID NO: 713002 - RNA, 19 nt, Artificial Sequence
  Description of Artificial Sequence: Synthetic oligonucleotide
  Sense strand starting at position 2826 of SEQ ID NO: 586372
cugguugagccagauuagu

SEQ ID NO: 713003 - RNA, 19 nt, Artificial Sequence
  Description of Artificial Sequence: Synthetic oligonucleotide
  Antisense strand to SEQ ID NO: 713002
acuaaucuggcucaaccag

SEQ ID NO: 713004 - RNA, 19 nt, Artificial Sequence
  Description of Artificial Sequence: Synthetic oligonucleotide
  Sense strand starting at position 2914 of SEQ ID NO: 586372
guugaugauagugguguua

SEQ ID NO: 713005 - RNA, 19 nt, Artificial Sequence
  Description of Artificial Sequence: Synthetic oligonucleotide
  Antisense strand to SEQ ID NO: 713004
uaacaccacuaucaucaac

SEQ ID NO: 713006 - RNA, 19 nt, Artificial Sequence
  Description of Artificial Sequence: Synthetic oligonucleotide
  Sense strand starting at position 3158 of SEQ ID NO: 586372
caaggcagcuuggaaauua

SEQ ID NO: 713007 - RNA, 19 nt, Artificial Sequence
  Description of Artificial Sequence: Synthetic oligonucleotide
  Antisense strand to SEQ ID NO: 713006
uaauuuccaagcugccuug

SEQ ID NO: 713008 - RNA, 19 nt, Artificial Sequence
  Description of Artificial Sequence: Synthetic oligonucleotide
  Sense strand starting at position 3215 of SEQ ID NO: 586372
ggacuugaguggagacaga

SEQ ID NO: 713009 - RNA, 19 nt, Artificial Sequence
  Description of Artificial Sequence: Synthetic oligonucleotide
  Antisense strand to SEQ ID NO: 713008
ucugucuccacucaagucc

SEQ ID NO: 713010 - RNA, 19 nt, Artificial Sequence
  Description of Artificial Sequence: Synthetic oligonucleotide
  Sense strand starting at position 3335 of SEQ ID NO: 586372
aggcacuucucaucuguga

SEQ ID NO: 713011 - RNA, 19 nt, Artificial Sequence
  Description of Artificial Sequence: Synthetic oligonucleotide
  Antisense strand to SEQ ID NO: 713010
ucacagaugagaagugccu

SEQ ID NO: 713012 - RNA, 19 nt, Artificial Sequence
  Description of Artificial Sequence: Synthetic oligonucleotide
  Sense strand starting at position 3339 of SEQ ID NO: 586372
acuucucaucugugaccau

SEQ ID NO: 713013 - RNA, 19 nt, Artificial Sequence
  Description of Artificial Sequence: Synthetic oligonucleotide
  Antisense strand to SEQ ID NO: 713012
auggucacagaugagaagu

SEQ ID NO: 713014 - RNA, 19 nt, Artificial Sequence
  Description of Artificial Sequence: Synthetic oligonucleotide
  Sense strand starting at position 3350 of SEQ ID NO: 586372
gugaccaugcacugaguuu

SEQ ID NO: 713015 - RNA, 19 nt, Artificial Sequence
  Description of Artificial Sequence: Synthetic oligonucleotide
  Antisense strand to SEQ ID NO: 713014
aaacucagugcauggucac

SEQ ID NO: 713016 - RNA, 19 nt, Artificial Sequence
  Description of Artificial Sequence: Synthetic oligonucleotide
  Sense strand starting at position 3373 of SEQ ID NO: 586372
aaggcagaauguguguaau

SEQ ID NO: 713017 - RNA, 19 nt, Artificial Sequence
  Description of Artificial Sequence: Synthetic oligonucleotide
  Antisense strand to SEQ ID NO: 713016
auuacacacauucugccuu

SEQ ID NO: 713018 - RNA, 19 nt, Artificial Sequence
  Description of Artificial Sequence: Synthetic oligonucleotide
  Sense strand starting at position 3375 of SEQ ID NO: 586372
ggcagaauguguguaauuu

SEQ ID NO: 713019 - RNA, 19 nt, Artificial Sequence
  Description of Artificial Sequence: Synthetic oligonucleotide
  Antisense strand to SEQ ID NO: 713018
aaauuacacacauucugcc

SEQ ID NO: 713020 - RNA, 19 nt, Artificial Sequence
  Description of Artificial Sequence: Synthetic oligonucleotide
  Sense strand starting at position 3430 of SEQ ID NO: 586372
guugaucuucguguugcaa

SEQ ID NO: 713021 - RNA, 19 nt, Artificial Sequence
  Description of Artificial Sequence: Synthetic oligonucleotide
  Antisense strand to SEQ ID NO: 713020
uugcaacacgaagaucaac

SEQ ID NO: 713022 - RNA, 19 nt, Artificial Sequence
  Description of Artificial Sequence: Synthetic oligonucleotide
  Sense strand starting at position 3767 of SEQ ID NO: 586372
gcccaucaguacuucugaa

SEQ ID NO: 713023 - RNA, 19 nt, Artificial Sequence
  Description of Artificial Sequence: Synthetic oligonucleotide
  Antisense strand to SEQ ID NO: 713022
uucagaaguacugaugggc

SEQ ID NO: 713024 - RNA, 19 nt, Artificial Sequence
  Description of Artificial Sequence: Synthetic oligonucleotide
  Sense strand starting at position 3838 of SEQ ID NO: 586372
gcauuuguuugaccaggca

SEQ ID NO: 713025 - RNA, 19 nt, Artificial Sequence
  Description of Artificial Sequence: Synthetic oligonucleotide
  Antisense strand to SEQ ID NO: 713024
ugccuggucaaacaaaugc

SEQ ID NO: 713026 - RNA, 19 nt, Artificial Sequence
  Description of Artificial Sequence: Synthetic oligonucleotide
  Sense strand starting at position 3878 of SEQ ID NO: 586372
ggaugacaaugauguagaa

SEQ ID NO: 713027 - RNA, 19 nt, Artificial Sequence
  Description of Artificial Sequence: Synthetic oligonucleotide
  Antisense strand to SEQ ID NO: 713026
uucuacaucauugucaucc

SEQ ID NO: 713028 - RNA, 19 nt, Artificial Sequence
  Description of Artificial Sequence: Synthetic oligonucleotide
  Sense strand starting at position 3930 of SEQ ID NO: 586372
ggucuugcaggaugagaua

SEQ ID NO: 713029 - RNA, 19 nt, Artificial Sequence
  Description of Artificial Sequence: Synthetic oligonucleotide
  Antisense strand to SEQ ID NO: 713028
uaucucauccugcaagacc

SEQ ID NO: 713030 - RNA, 19 nt, Artificial Sequence
  Description of Artificial Sequence: Synthetic oligonucleotide
  Sense strand starting at position 3969 of SEQ ID NO: 586372
uuaguauguguuuaaccgu

SEQ ID NO: 713031 - RNA, 19 nt, Artificial Sequence
  Description of Artificial Sequence: Synthetic oligonucleotide
  Antisense strand to SEQ ID NO: 713030
acgguuaaacacauacuaa

SEQ ID NO: 713032 - RNA, 19 nt, Artificial Sequence
  Description of Artificial Sequence: Synthetic oligonucleotide
  Sense strand starting at position 59 of SEQ ID NO: 586373
accaguaccucaucaagga

SEQ ID NO: 713033 - RNA, 19 nt, Artificial Sequence
  Description of Artificial Sequence: Synthetic oligonucleotide
  Antisense strand to SEQ ID NO: 713032
uccuugaugagguacuggu

SEQ ID NO: 713034 - RNA, 19 nt, Artificial Sequence
  Description of Artificial Sequence: Synthetic oligonucleotide
  Sense strand starting at position 415 of SEQ ID NO: 586373
gcauuacugguguggaaau

SEQ ID NO: 713035 - RNA, 19 nt, Artificial Sequence
  Description of Artificial Sequence: Synthetic oligonucleotide
  Antisense strand to SEQ ID NO: 713034
auuuccacaccaguaaugc

SEQ ID NO: 713036 - RNA, 19 nt, Artificial Sequence
  Description of Artificial Sequence: Synthetic oligonucleotide
  Sense strand starting at position 515 of SEQ ID NO: 586373
cacguaggcauguagaaau

SEQ ID NO: 713037 - RNA, 19 nt, Artificial Sequence
  Description of Artificial Sequence: Synthetic oligonucleotide
  Antisense strand to SEQ ID NO: 713036
auuucuacaugccuacgug

SEQ ID NO: 713038 - RNA, 19 nt, Artificial Sequence
  Description of Artificial Sequence: Synthetic oligonucleotide
  Sense strand starting at position 564 of SEQ ID NO: 586373
ucuucucugguuuggaaau

SEQ ID NO: 713039 - RNA, 19 nt, Artificial Sequence
  Description of Artificial Sequence: Synthetic oligonucleotide
  Antisense strand to SEQ ID NO: 713038
auuuccaaaccagagaaga

SEQ ID NO: 713040 - RNA, 19 nt, Artificial Sequence
  Description of Artificial Sequence: Synthetic oligonucleotide
  Sense strand starting at position 612 of SEQ ID NO: 586373
gagguuaauuuguauuucu

SEQ ID NO: 713041 - RNA, 19 nt, Artificial Sequence
  Description of Artificial Sequence: Synthetic oligonucleotide
  Antisense strand to SEQ ID NO: 713040
agaaauacaaauuaaccuc

SEQ ID NO: 713042 - RNA, 19 nt, Artificial Sequence
  Description of Artificial Sequence: Synthetic oligonucleotide
  Sense strand starting at position 677 of SEQ ID NO: 586373
acuacugagucauuccauu

SEQ ID NO: 713043 - RNA, 19 nt, Artificial Sequence
  Description of Artificial Sequence: Synthetic oligonucleotide
  Antisense strand to SEQ ID NO: 713042
aauggaaugacucaguagu

SEQ ID NO: 713044 - RNA, 19 nt, Artificial Sequence
  Description of Artificial Sequence: Synthetic oligonucleotide
  Sense strand starting at position 720 of SEQ ID NO: 586373
uagguaauacuagaguugu

SEQ ID NO: 713045 - RNA, 19 nt, Artificial Sequence
  Description of Artificial Sequence: Synthetic oligonucleotide
  Antisense strand to SEQ ID NO: 713044
acaacucuaguauuaccua

SEQ ID NO: 713046 - RNA, 19 nt, Artificial Sequence
  Description of Artificial Sequence: Synthetic oligonucleotide
  Sense strand starting at position 733 of SEQ ID NO: 586373
aguuguguucuaucgccuu

SEQ ID NO: 713047 - RNA, 19 nt, Artificial Sequence
  Description of Artificial Sequence: Synthetic oligonucleotide
  Antisense strand to SEQ ID NO: 713046
aaggcgauagaacacaacu

SEQ ID NO: 713048 - RNA, 19 nt, Artificial Sequence
  Description of Artificial Sequence: Synthetic oligonucleotide
  Sense strand starting at position 738 of SEQ ID NO: 586373
uguucuaucgccuugucua

SEQ ID NO: 713049 - RNA, 19 nt, Artificial Sequence
  Description of Artificial Sequence: Synthetic oligonucleotide
  Antisense strand to SEQ ID NO: 713048
uagacaaggcgauagaaca

SEQ ID NO: 713050 - RNA, 19 nt, Artificial Sequence
  Description of Artificial Sequence: Synthetic oligonucleotide
  Sense strand starting at position 950 of SEQ ID NO: 586373
uugugaaucuugcuccaaa

SEQ ID NO: 713051 - RNA, 19 nt, Artificial Sequence
  Description of Artificial Sequence: Synthetic oligonucleotide
  Antisense strand to SEQ ID NO: 713050
uuuggagcaagauucacaa

SEQ ID NO: 713052 - RNA, 19 nt, Artificial Sequence
  Description of Artificial Sequence: Synthetic oligonucleotide
  Sense strand starting at position 951 of SEQ ID NO: 586373
ugugaaucuugcuccaaac

SEQ ID NO: 713053 - RNA, 19 nt, Artificial Sequence
  Description of Artificial Sequence: Synthetic oligonucleotide
  Antisense strand to SEQ ID NO: 713052
guuuggagcaagauucaca

SEQ ID NO: 713054 - RNA, 19 nt, Artificial Sequence
  Description of Artificial Sequence: Synthetic oligonucleotide
  Sense strand starting at position 1032 of SEQ ID NO: 586373
guggacaaaucaucgaaau

SEQ ID NO: 713055 - RNA, 19 nt, Artificial Sequence
  Description of Artificial Sequence: Synthetic oligonucleotide
  Antisense strand to SEQ ID NO: 713054
auuucgaugauuuguccac

SEQ ID NO: 713056 - RNA, 19 nt, Artificial Sequence
  Description of Artificial Sequence: Synthetic oligonucleotide
  Sense strand starting at position 1082 of SEQ ID NO: 586373
agggaacuguucccucuaa

SEQ ID NO: 713057 - RNA, 19 nt, Artificial Sequence
  Description of Artificial Sequence: Synthetic oligonucleotide
  Antisense strand to SEQ ID NO: 713056
uuagagggaacaguucccu

SEQ ID NO: 713058 - RNA, 19 nt, Artificial Sequence
  Description of Artificial Sequence: Synthetic oligonucleotide
  Sense strand starting at position 1083 of SEQ ID NO: 586373
gggaacuguucccucuaaa

SEQ ID NO: 713059 - RNA, 19 nt, Artificial Sequence
  Description of Artificial Sequence: Synthetic oligonucleotide
  Antisense strand to SEQ ID NO: 713058
uuuagagggaacaguuccc

SEQ ID NO: 713060 - RNA, 19 nt, Artificial Sequence
  Description of Artificial Sequence: Synthetic oligonucleotide
  Sense strand starting at position 1213 of SEQ ID NO: 586373
guuacaugcgcucugccaa

SEQ ID NO: 713061 - RNA, 19 nt, Artificial Sequence
  Description of Artificial Sequence: Synthetic oligonucleotide
  Antisense strand to SEQ ID NO: 713060
uuggcagagcgcauguaac

SEQ ID NO: 713062 - RNA, 19 nt, Artificial Sequence
  Description of Artificial Sequence: Synthetic oligonucleotide
  Sense strand starting at position 1358 of SEQ ID NO: 586373
ggguuauccuggucgaaca

SEQ ID NO: 713063 - RNA, 19 nt, Artificial Sequence
  Description of Artificial Sequence: Synthetic oligonucleotide
  Antisense strand to SEQ ID NO: 713062
uguucgaccaggauaaccc

SEQ ID NO: 713064 - RNA, 19 nt, Artificial Sequence
  Description of Artificial Sequence: Synthetic oligonucleotide
  Sense strand starting at position 1387 of SEQ ID NO: 586373
gggauucucggucagauac

SEQ ID NO: 713065 - RNA, 19 nt, Artificial Sequence
  Description of Artificial Sequence: Synthetic oligonucleotide
  Antisense strand to SEQ ID NO: 713064
guaucugaccgagaauccc

SEQ ID NO: 713066 - RNA, 19 nt, Artificial Sequence
  Description of Artificial Sequence: Synthetic oligonucleotide
  Sense strand starting at position 1497 of SEQ ID NO: 586373
ucaagccaaguuuguuaaa

SEQ ID NO: 713067 - RNA, 19 nt, Artificial Sequence
  Description of Artificial Sequence: Synthetic oligonucleotide
  Antisense strand to SEQ ID NO: 713066
uuuaacaaacuuggcuuga

SEQ ID NO: 713068 - RNA, 19 nt, Artificial Sequence
  Description of Artificial Sequence: Synthetic oligonucleotide
  Sense strand starting at position 2407 of SEQ ID NO: 586373
uggagaucccagcauuggu

SEQ ID NO: 713069 - RNA, 19 nt, Artificial Sequence
  Description of Artificial Sequence: Synthetic oligonucleotide
  Antisense strand to SEQ ID NO: 713068
accaaugcugggaucucca

SEQ ID NO: 713070 - RNA, 19 nt, Artificial Sequence
  Description of Artificial Sequence: Synthetic oligonucleotide
  Sense strand starting at position 2423 of SEQ ID NO: 586373
gguuaagugcucuggauga

SEQ ID NO: 713071 - RNA, 19 nt, Artificial Sequence
  Description of Artificial Sequence: Synthetic oligonucleotide
  Antisense strand to SEQ ID NO: 713070
ucauccagagcacuuaacc

SEQ ID NO: 713072 - RNA, 19 nt, Artificial Sequence
  Description of Artificial Sequence: Synthetic oligonucleotide
  Sense strand starting at position 2425 of SEQ ID NO: 586373
uuaagugcucuggaugaag

SEQ ID NO: 713073 - RNA, 19 nt, Artificial Sequence
  Description of Artificial Sequence: Synthetic oligonucleotide
  Antisense strand to SEQ ID NO: 713072
cuucauccagagcacuuaa

SEQ ID NO: 713074 - RNA, 19 nt, Artificial Sequence
  Description of Artificial Sequence: Synthetic oligonucleotide
  Sense strand starting at position 2474 of SEQ ID NO: 586373
aucucuuaccuugacuagu

SEQ ID NO: 713075 - RNA, 19 nt, Artificial Sequence
  Description of Artificial Sequence: Synthetic oligonucleotide
  Antisense strand to SEQ ID NO: 713074
acuagucaagguaagagau

SEQ ID NO: 713076 - RNA, 19 nt, Artificial Sequence
  Description of Artificial Sequence: Synthetic oligonucleotide
  Sense strand starting at position 2491 of SEQ ID NO: 586373
guugacauaauccguagaa

SEQ ID NO: 713077 - RNA, 19 nt, Artificial Sequence
  Description of Artificial Sequence: Synthetic oligonucleotide
  Antisense strand to SEQ ID NO: 713076
uucuacggauuaugucaac

SEQ ID NO: 713078 - RNA, 19 nt, Artificial Sequence
  Description of Artificial Sequence: Synthetic oligonucleotide
  Sense strand starting at position 2492 of SEQ ID NO: 586373
uugacauaauccguagaaa

SEQ ID NO: 713079 - RNA, 19 nt, Artificial Sequence
  Description of Artificial Sequence: Synthetic oligonucleotide
  Antisense strand to SEQ ID NO: 713078
uuucuacggauuaugucaa

SEQ ID NO: 713080 - RNA, 19 nt, Artificial Sequence
  Description of Artificial Sequence: Synthetic oligonucleotide
  Sense strand starting at position 2593 of SEQ ID NO: 586373
caaguugaaggcuguuauu

SEQ ID NO: 713081 - RNA, 19 nt, Artificial Sequence
  Description of Artificial Sequence: Synthetic oligonucleotide
  Antisense strand to SEQ ID NO: 713080
aauaacagccuucaacuug

SEQ ID NO: 713082 - RNA, 19 nt, Artificial Sequence
  Description of Artificial Sequence: Synthetic oligonucleotide
  Sense strand starting at position 2617 of SEQ ID NO: 586373
uucccaagguguccaaaua

SEQ ID NO: 713083 - RNA, 19 nt, Artificial Sequence
  Description of Artificial Sequence: Synthetic oligonucleotide
  Antisense strand to SEQ ID NO: 713082
uauuuggacaccuugggaa

SEQ ID NO: 713084 - RNA, 19 nt, Artificial Sequence
  Description of Artificial Sequence: Synthetic oligonucleotide
  Sense strand starting at position 2618 of SEQ ID NO: 586373
ucccaagguguccaaauau

SEQ ID NO: 713085 - RNA, 19 nt, Artificial Sequence
  Description of Artificial Sequence: Synthetic oligonucleotide
  Antisense strand to SEQ ID NO: 713084
auauuuggacaccuuggga

SEQ ID NO: 713086 - RNA, 19 nt, Artificial Sequence
  Description of Artificial Sequence: Synthetic oligonucleotide
  Sense strand starting at position 2689 of SEQ ID NO: 586373
agaucuaaguauucgaagu

SEQ ID NO: 713087 - RNA, 19 nt, Artificial Sequence
  Description of Artificial Sequence: Synthetic oligonucleotide
  Antisense strand to SEQ ID NO: 713086
acuucgaauacuuagaucu

SEQ ID NO: 713088 - RNA, 19 nt, Artificial Sequence
  Description of Artificial Sequence: Synthetic oligonucleotide
  Sense strand starting at position 3066 of SEQ ID NO: 586373
gaaggacuguugcccacaa

SEQ ID NO: 713089 - RNA, 19 nt, Artificial Sequence
  Description of Artificial Sequence: Synthetic oligonucleotide
  Antisense strand to SEQ ID NO: 713088
uugugggcaacaguccuuc

SEQ ID NO: 713090 - RNA, 19 nt, Artificial Sequence
  Description of Artificial Sequence: Synthetic oligonucleotide
  Sense strand starting at position 3068 of SEQ ID NO: 586373
aggacuguugcccacaaua

SEQ ID NO: 713091 - RNA, 19 nt, Artificial Sequence
  Description of Artificial Sequence: Synthetic oligonucleotide
  Antisense strand to SEQ ID NO: 713090
uauugugggcaacaguccu

SEQ ID NO: 713092 - RNA, 19 nt, Artificial Sequence
  Description of Artificial Sequence: Synthetic oligonucleotide
  Sense strand starting at position 3180 of SEQ ID NO: 586373
aucgacaaguuuccaguua

SEQ ID NO: 713093 - RNA, 19 nt, Artificial Sequence
  Description of Artificial Sequence: Synthetic oligonucleotide
  Antisense strand to SEQ ID NO: 713092
uaacuggaaacuugucgau

SEQ ID NO: 713094 - RNA, 19 nt, Artificial Sequence
  Description of Artificial Sequence: Synthetic oligonucleotide
  Sense strand starting at position 3192 of SEQ ID NO: 586373
ccaguuaugugaucagaau

SEQ ID NO: 713095 - RNA, 19 nt, Artificial Sequence
  Description of Artificial Sequence: Synthetic oligonucleotide
  Antisense strand to SEQ ID NO: 713094
auucugaucacauaacugg

SEQ ID NO: 713096 - RNA, 19 nt, Artificial Sequence
  Description of Artificial Sequence: Synthetic oligonucleotide
  Sense strand starting at position 3193 of SEQ ID NO: 586373
caguuaugugaucagaauc

SEQ ID NO: 713097 - RNA, 19 nt, Artificial Sequence
  Description of Artificial Sequence: Synthetic oligonucleotide
  Antisense strand to SEQ ID NO: 713096
gauucugaucacauaacug

SEQ ID NO: 713098 - RNA, 19 nt, Artificial Sequence
  Description of Artificial Sequence: Synthetic oligonucleotide
  Sense strand starting at position 3500 of SEQ ID NO: 586373
uuaacuauguaacucgaaa

SEQ ID NO: 713099 - RNA, 19 nt, Artificial Sequence
  Description of Artificial Sequence: Synthetic oligonucleotide
  Antisense strand to SEQ ID NO: 713098
uuucgaguuacauaguuaa

SEQ ID NO: 713100 - RNA, 19 nt, Artificial Sequence
  Description of Artificial Sequence: Synthetic oligonucleotide
  Sense strand starting at position 3581 of SEQ ID NO: 586373
guaaguuccaaggacaguu

SEQ ID NO: 713101 - RNA, 19 nt, Artificial Sequence
  Description of Artificial Sequence: Synthetic oligonucleotide
  Antisense strand to SEQ ID NO: 713100
aacuguccuuggaacuuac

SEQ ID NO: 713102 - RNA, 19 nt, Artificial Sequence
  Description of Artificial Sequence: Synthetic oligonucleotide
  Sense strand starting at position 3786 of SEQ ID NO: 586373
ugagacuucgaucaguagu

SEQ ID NO: 713103 - RNA, 19 nt, Artificial Sequence
  Description of Artificial Sequence: Synthetic oligonucleotide
  Antisense strand to SEQ ID NO: 713102
acuacugaucgaagucuca

SEQ ID NO: 713104 - RNA, 19 nt, Artificial Sequence
  Description of Artificial Sequence: Synthetic oligonucleotide
  Sense strand starting at position 3789 of SEQ ID NO: 586373
gacuucgaucaguaguagu

SEQ ID NO: 713105 - RNA, 19 nt, Artificial Sequence
  Description of Artificial Sequence: Synthetic oligonucleotide
  Antisense strand to SEQ ID NO: 713104
acuacuacugaucgaaguc

SEQ ID NO: 713106 - RNA, 19 nt, Artificial Sequence
  Description of Artificial Sequence: Synthetic oligonucleotide
  Sense strand starting at position 3802 of SEQ ID NO: 586373
aguaguuaaugaguccaaa

SEQ ID NO: 713107 - RNA, 19 nt, Artificial Sequence
  Description of Artificial Sequence: Synthetic oligonucleotide
  Antisense strand to SEQ ID NO: 713106
uuuggacucauuaacuacu

SEQ ID NO: 713108 - RNA, 19 nt, Artificial Sequence
  Description of Artificial Sequence: Synthetic oligonucleotide
  Sense strand starting at position 3888 of SEQ ID NO: 586373
agugaaugaacauggcuuu

SEQ ID NO: 713109 - RNA, 19 nt, Artificial Sequence
  Description of Artificial Sequence: Synthetic oligonucleotide
  Antisense strand to SEQ ID NO: 713108
aaagccauguucauucacu

SEQ ID NO: 713110 - RNA, 19 nt, Artificial Sequence
  Description of Artificial Sequence: Synthetic oligonucleotide
  Sense strand starting at position 3948 of SEQ ID NO: 586373
agcuaacauugaucaagua

SEQ ID NO: 713111 - RNA, 19 nt, Artificial Sequence
  Description of Artificial Sequence: Synthetic oligonucleotide
  Antisense strand to SEQ ID NO: 713110
uacuugaucaauguuagcu

SEQ ID NO: 713112 - RNA, 19 nt, Artificial Sequence
  Description of Artificial Sequence: Synthetic oligonucleotide
  Sense strand starting at position 85 of SEQ ID NO: 586374
agcucugcccucuggaauu

SEQ ID NO: 713113 - RNA, 19 nt, Artificial Sequence
  Description of Artificial Sequence: Synthetic oligonucleotide
  Antisense strand to SEQ ID NO: 713112
aauuccagagggcagagcu

SEQ ID NO: 713114 - RNA, 19 nt, Artificial Sequence
  Description of Artificial Sequence: Synthetic oligonucleotide
  Sense strand starting at position 296 of SEQ ID NO: 586374
cccuuuaucacggaaggca

SEQ ID NO: 713115 - RNA, 19 nt, Artificial Sequence
  Description of Artificial Sequence: Synthetic oligonucleotide
  Antisense strand to SEQ ID NO: 713114
ugccuuccgugauaaaggg

SEQ ID NO: 713116 - RNA, 19 nt, Artificial Sequence
  Description of Artificial Sequence: Synthetic oligonucleotide
  Sense strand starting at position 437 of SEQ ID NO: 586374
aggcgaucacuuuagguca

SEQ ID NO: 713117 - RNA, 19 nt, Artificial Sequence
  Description of Artificial Sequence: Synthetic oligonucleotide
  Antisense strand to SEQ ID NO: 713116
ugaccuaaagugaucgccu

SEQ ID NO: 713118 - RNA, 19 nt, Artificial Sequence
  Description of Artificial Sequence: Synthetic oligonucleotide
  Sense strand starting at position 440 of SEQ ID NO: 586374
cgaucacuuuaggucauaa

SEQ ID NO: 713119 - RNA, 19 nt, Artificial Sequence
  Description of Artificial Sequence: Synthetic oligonucleotide
  Antisense strand to SEQ ID NO: 713118
uuaugaccuaaagugaucg

SEQ ID NO: 713120 - RNA, 19 nt, Artificial Sequence
  Description of Artificial Sequence: Synthetic oligonucleotide
  Sense strand starting at position 442 of SEQ ID NO: 586374
aucacuuuaggucauaagu

SEQ ID NO: 713121 - RNA, 19 nt, Artificial Sequence
  Description of Artificial Sequence: Synthetic oligonucleotide
  Antisense strand to SEQ ID NO: 713120
acuuaugaccuaaagugau

SEQ ID NO: 713122 - RNA, 19 nt, Artificial Sequence
  Description of Artificial Sequence: Synthetic oligonucleotide
  Sense strand starting at position 732 of SEQ ID NO: 586374
gaguaaggcggcugcauau

SEQ ID NO: 713123 - RNA, 19 nt, Artificial Sequence
  Description of Artificial Sequence: Synthetic oligonucleotide
  Antisense strand to SEQ ID NO: 713122
auaugcagccgccuuacuc

SEQ ID NO: 713124 - RNA, 19 nt, Artificial Sequence
  Description of Artificial Sequence: Synthetic oligonucleotide
  Sense strand starting at position 764 of SEQ ID NO: 586374
aaucaugaaucguucugau

SEQ ID NO: 713125 - RNA, 19 nt, Artificial Sequence
  Description of Artificial Sequence: Synthetic oligonucleotide
  Antisense strand to SEQ ID NO: 713124
aucagaacgauucaugauu

SEQ ID NO: 713126 - RNA, 19 nt, Artificial Sequence
  Description of Artificial Sequence: Synthetic oligonucleotide
  Sense strand starting at position 826 of SEQ ID NO: 586374
gcaaucaagcuuuaauggu

SEQ ID NO: 713127 - RNA, 19 nt, Artificial Sequence
  Description of Artificial Sequence: Synthetic oligonucleotide
  Antisense strand to SEQ ID NO: 713126
accauuaaagcuugauugc

SEQ ID NO: 713128 - RNA, 19 nt, Artificial Sequence
  Description of Artificial Sequence: Synthetic oligonucleotide
  Sense strand starting at position 832 of SEQ ID NO: 586374
aagcuuuaaugguuaacgu

SEQ ID NO: 713129 - RNA, 19 nt, Artificial Sequence
  Description of Artificial Sequence: Synthetic oligonucleotide
  Antisense strand to SEQ ID NO: 713128
acguuaaccauuaaagcuu

SEQ ID NO: 713130 - RNA, 19 nt, Artificial Sequence
  Description of Artificial Sequence: Synthetic oligonucleotide
  Sense strand starting at position 915 of SEQ ID NO: 586374
agcgacaaauccuuacuaa

SEQ ID NO: 713131 - RNA, 19 nt, Artificial Sequence
  Description of Artificial Sequence: Synthetic oligonucleotide
  Antisense strand to SEQ ID NO: 713130
uuaguaaggauuugucgcu

SEQ ID NO: 713132 - RNA, 19 nt, Artificial Sequence
  Description of Artificial Sequence: Synthetic oligonucleotide
  Sense strand starting at position 916 of SEQ ID NO: 586374
gcgacaaauccuuacuaaa

SEQ ID NO: 713133 - RNA, 19 nt, Artificial Sequence
  Description of Artificial Sequence: Synthetic oligonucleotide
  Antisense strand to SEQ ID NO: 713132
uuuaguaaggauuugucgc

SEQ ID NO: 713134 - RNA, 19 nt, Artificial Sequence
  Description of Artificial Sequence: Synthetic oligonucleotide
  Sense strand starting at position 1083 of SEQ ID NO: 586374
gugagaaguuagcacagaa

SEQ ID NO: 713135 - RNA, 19 nt, Artificial Sequence
  Description of Artificial Sequence: Synthetic oligonucleotide
  Antisense strand to SEQ ID NO: 713134
uucugugcuaacuucucac

SEQ ID NO: 713136 - RNA, 19 nt, Artificial Sequence
  Description of Artificial Sequence: Synthetic oligonucleotide
  Sense strand starting at position 1099 of SEQ ID NO: 586374
gaaguuuacgucugacuag

SEQ ID NO: 713137 - RNA, 19 nt, Artificial Sequence
  Description of Artificial Sequence: Synthetic oligonucleotide
  Antisense strand to SEQ ID NO: 713136
cuagucagacguaaacuuc

SEQ ID NO: 713138 - RNA, 19 nt, Artificial Sequence
  Description of Artificial Sequence: Synthetic oligonucleotide
  Sense strand starting at position 1102 of SEQ ID NO: 586374
guuuacgucugacuagcaa

SEQ ID NO: 713139 - RNA, 19 nt, Artificial Sequence
  Description of Artificial Sequence: Synthetic oligonucleotide
  Antisense strand to SEQ ID NO: 713138
uugcuagucagacguaaac

SEQ ID NO: 713140 - RNA, 19 nt, Artificial Sequence
  Description of Artificial Sequence: Synthetic oligonucleotide
  Sense strand starting at position 1200 of SEQ ID NO: 586374
acugaccuuccuuagguaa

SEQ ID NO: 713141 - RNA, 19 nt, Artificial Sequence
  Description of Artificial Sequence: Synthetic oligonucleotide
  Antisense strand to SEQ ID NO: 713140
uuaccuaaggaaggucagu

SEQ ID NO: 713142 - RNA, 19 nt, Artificial Sequence
  Description of Artificial Sequence: Synthetic oligonucleotide
  Sense strand starting at position 1207 of SEQ ID NO: 586374
uuccuuagguaagaguuaa

SEQ ID NO: 713143 - RNA, 19 nt, Artificial Sequence
  Description of Artificial Sequence: Synthetic oligonucleotide
  Antisense strand to SEQ ID NO: 713142
uuaacucuuaccuaaggaa

SEQ ID NO: 713144 - RNA, 19 nt, Artificial Sequence
  Description of Artificial Sequence: Synthetic oligonucleotide
  Sense strand starting at position 1293 of SEQ ID NO: 586374
agacaaacauucugaguga

SEQ ID NO: 713145 - RNA, 19 nt, Artificial Sequence
  Description of Artificial Sequence: Synthetic oligonucleotide
  Antisense strand to SEQ ID NO: 713144
ucacucagaauguuugucu

SEQ ID NO: 713146 - RNA, 19 nt, Artificial Sequence
  Description of Artificial Sequence: Synthetic oligonucleotide
  Sense strand starting at position 1294 of SEQ ID NO: 586374
gacaaacauucugagugag

SEQ ID NO: 713147 - RNA, 19 nt, Artificial Sequence
  Description of Artificial Sequence: Synthetic oligonucleotide
  Antisense strand to SEQ ID NO: 713146
cucacucagaauguuuguc

SEQ ID NO: 713148 - RNA, 19 nt, Artificial Sequence
  Description of Artificial Sequence: Synthetic oligonucleotide
  Sense strand starting at position 1342 of SEQ ID NO: 586374
gaacaauccguccggaguu

SEQ ID NO: 713149 - RNA, 19 nt, Artificial Sequence
  Description of Artificial Sequence: Synthetic oligonucleotide
  Antisense strand to SEQ ID NO: 713148
aacuccggacggauuguuc

SEQ ID NO: 713150 - RNA, 19 nt, Artificial Sequence
  Description of Artificial Sequence: Synthetic oligonucleotide
  Sense strand starting at position 1456 of SEQ ID NO: 586374
ucugguuucagacgcgagu

SEQ ID NO: 713151 - RNA, 19 nt, Artificial Sequence
  Description of Artificial Sequence: Synthetic oligonucleotide
  Antisense strand to SEQ ID NO: 713150
acucgcgucugaaaccaga

SEQ ID NO: 713152 - RNA, 19 nt, Artificial Sequence
  Description of Artificial Sequence: Synthetic oligonucleotide
  Sense strand starting at position 2299 of SEQ ID NO: 586374
acuuauuguugggccagaa

SEQ ID NO: 713153 - RNA, 19 nt, Artificial Sequence
  Description of Artificial Sequence: Synthetic oligonucleotide
  Antisense strand to SEQ ID NO: 713152
uucuggcccaacaauaagu

SEQ ID NO: 713154 - RNA, 19 nt, Artificial Sequence
  Description of Artificial Sequence: Synthetic oligonucleotide
  Sense strand starting at position 2611 of SEQ ID NO: 586374
uggagacuucgccagggaa

SEQ ID NO: 713155 - RNA, 19 nt, Artificial Sequence
  Description of Artificial Sequence: Synthetic oligonucleotide
  Antisense strand to SEQ ID NO: 713154
uucccuggcgaagucucca

SEQ ID NO: 713156 - RNA, 19 nt, Artificial Sequence
  Description of Artificial Sequence: Synthetic oligonucleotide
  Sense strand starting at position 2613 of SEQ ID NO: 586374
gagacuucgccagggaaua

SEQ ID NO: 713157 - RNA, 19 nt, Artificial Sequence
  Description of Artificial Sequence: Synthetic oligonucleotide
  Antisense strand to SEQ ID NO: 713156
uauucccuggcgaagucuc

SEQ ID NO: 713158 - RNA, 19 nt, Artificial Sequence
  Description of Artificial Sequence: Synthetic oligonucleotide
  Sense strand starting at position 2614 of SEQ ID NO: 586374
agacuucgccagggaauag

SEQ ID NO: 713159 - RNA, 19 nt, Artificial Sequence
  Description of Artificial Sequence: Synthetic oligonucleotide
  Antisense strand to SEQ ID NO: 713158
cuauucccuggcgaagucu

SEQ ID NO: 713160 - RNA, 19 nt, Artificial Sequence
  Description of Artificial Sequence: Synthetic oligonucleotide
  Sense strand starting at position 2615 of SEQ ID NO: 586374
gacuucgccagggaauagu

SEQ ID NO: 713161 - RNA, 19 nt, Artificial Sequence
  Description of Artificial Sequence: Synthetic oligonucleotide
  Antisense strand to SEQ ID NO: 713160
acuauucccuggcgaaguc

SEQ ID NO: 713162 - RNA, 19 nt, Artificial Sequence
  Description of Artificial Sequence: Synthetic oligonucleotide
  Sense strand starting at position 2686 of SEQ ID NO: 586374
agguuaaaucguggcagua

SEQ ID NO: 713163 - RNA, 19 nt, Artificial Sequence
  Description of Artificial Sequence: Synthetic oligonucleotide
  Antisense strand to SEQ ID NO: 713162
uacugccacgauuuaaccu

SEQ ID NO: 713164 - RNA, 19 nt, Artificial Sequence
  Description of Artificial Sequence: Synthetic oligonucleotide
  Sense strand starting at position 2812 of SEQ ID NO: 586374
acaccacaugcguguagau

SEQ ID NO: 713165 - RNA, 19 nt, Artificial Sequence
  Description of Artificial Sequence: Synthetic oligonucleotide
  Antisense strand to SEQ ID NO: 713164
aucuacacgcauguggugu

SEQ ID NO: 713166 - RNA, 19 nt, Artificial Sequence
  Description of Artificial Sequence: Synthetic oligonucleotide
  Sense strand starting at position 2990 of SEQ ID NO: 586374
cagccagauguuugcuacu

SEQ ID NO: 713167 - RNA, 19 nt, Artificial Sequence
  Description of Artificial Sequence: Synthetic oligonucleotide
  Antisense strand to SEQ ID NO: 713166
aguagcaaacaucuggcug

SEQ ID NO: 713168 - RNA, 19 nt, Artificial Sequence
  Description of Artificial Sequence: Synthetic oligonucleotide
  Sense strand starting at position 2992 of SEQ ID NO: 586374
gccagauguuugcuacugu

SEQ ID NO: 713169 - RNA, 19 nt, Artificial Sequence
  Description of Artificial Sequence: Synthetic oligonucleotide
  Antisense strand to SEQ ID NO: 713168
acaguagcaaacaucuggc

SEQ ID NO: 713170 - RNA, 19 nt, Artificial Sequence
  Description of Artificial Sequence: Synthetic oligonucleotide
  Sense strand starting at position 3447 of SEQ ID NO: 586374
acuaacaacgcuuaugaau

SEQ ID NO: 713171 - RNA, 19 nt, Artificial Sequence
  Description of Artificial Sequence: Synthetic oligonucleotide
  Antisense strand to SEQ ID NO: 713170
auucauaagcguuguuagu

SEQ ID NO: 713172 - RNA, 19 nt, Artificial Sequence
  Description of Artificial Sequence: Synthetic oligonucleotide
  Sense strand starting at position 3455 of SEQ ID NO: 586374
cgcuuaugaauucgugauc

SEQ ID NO: 713173 - RNA, 19 nt, Artificial Sequence
  Description of Artificial Sequence: Synthetic oligonucleotide
  Antisense strand to SEQ ID NO: 713172
gaucacgaauucauaagcg

SEQ ID NO: 713174 - RNA, 19 nt, Artificial Sequence
  Description of Artificial Sequence: Synthetic oligonucleotide
  Sense strand starting at position 3458 of SEQ ID NO: 586374
uuaugaauucgugaucguu

SEQ ID NO: 713175 - RNA, 19 nt, Artificial Sequence
  Description of Artificial Sequence: Synthetic oligonucleotide
  Antisense strand to SEQ ID NO: 713174
aacgaucacgaauucauaa

SEQ ID NO: 713176 - RNA, 19 nt, Artificial Sequence
  Description of Artificial Sequence: Synthetic oligonucleotide
  Sense strand starting at position 3460 of SEQ ID NO: 586374
augaauucgugaucguuua

SEQ ID NO: 713177 - RNA, 19 nt, Artificial Sequence
  Description of Artificial Sequence: Synthetic oligonucleotide
  Antisense strand to SEQ ID NO: 713176
uaaacgaucacgaauucau

SEQ ID NO: 713178 - RNA, 19 nt, Artificial Sequence
  Description of Artificial Sequence: Synthetic oligonucleotide
  Sense strand starting at position 3461 of SEQ ID NO: 586374
ugaauucgugaucguuuaa

SEQ ID NO: 713179 - RNA, 19 nt, Artificial Sequence
  Description of Artificial Sequence: Synthetic oligonucleotide
  Antisense strand to SEQ ID NO: 713178
uuaaacgaucacgaauuca

SEQ ID NO: 713180 - RNA, 19 nt, Artificial Sequence
  Description of Artificial Sequence: Synthetic oligonucleotide
  Sense strand starting at position 3473 of SEQ ID NO: 586374
cguuuaagccugggagaua

SEQ ID NO: 713181 - RNA, 19 nt, Artificial Sequence
  Description of Artificial Sequence: Synthetic oligonucleotide
  Antisense strand to SEQ ID NO: 713180
uaucucccaggcuuaaacg

SEQ ID NO: 713182 - RNA, 19 nt, Artificial Sequence
  Description of Artificial Sequence: Synthetic oligonucleotide
  Sense strand starting at position 3474 of SEQ ID NO: 586374
guuuaagccugggagauau

SEQ ID NO: 713183 - RNA, 19 nt, Artificial Sequence
  Description of Artificial Sequence: Synthetic oligonucleotide
  Antisense strand to SEQ ID NO: 713182
auaucucccaggcuuaaac

SEQ ID NO: 713184 - RNA, 19 nt, Artificial Sequence
  Description of Artificial Sequence: Synthetic oligonucleotide
  Sense strand starting at position 3536 of SEQ ID NO: 586374
aauagcucguuaguaauga

SEQ ID NO: 713185 - RNA, 19 nt, Artificial Sequence
  Description of Artificial Sequence: Synthetic oligonucleotide
  Antisense strand to SEQ ID NO: 713184
ucauuacuaacgagcuauu

SEQ ID NO: 713186 - RNA, 19 nt, Artificial Sequence
  Description of Artificial Sequence: Synthetic oligonucleotide
  Sense strand starting at position 3630 of SEQ ID NO: 586374
uuaguaugcccucaaacug

SEQ ID NO: 713187 - RNA, 19 nt, Artificial Sequence
  Description of Artificial Sequence: Synthetic oligonucleotide
  Antisense strand to SEQ ID NO: 713186
caguuugagggcauacuaa

SEQ ID NO: 713188 - RNA, 19 nt, Artificial Sequence
  Description of Artificial Sequence: Synthetic oligonucleotide
  Sense strand starting at position 3942 of SEQ ID NO: 586374
uccagaucucacuggauuc

SEQ ID NO: 713189 - RNA, 19 nt, Artificial Sequence
  Description of Artificial Sequence: Synthetic oligonucleotide
  Antisense strand to SEQ ID NO: 713188
gaauccagugagaucugga

SEQ ID NO: 713190 - RNA, 19 nt, Artificial Sequence
  Description of Artificial Sequence: Synthetic oligonucleotide
  Sense strand starting at position 3969 of SEQ ID NO: 586374
ccuaguacauguuauagau

SEQ ID NO: 713191 - RNA, 19 nt, Artificial Sequence
  Description of Artificial Sequence: Synthetic oligonucleotide
  Antisense strand to SEQ ID NO: 713190
aucuauaacauguacuagg

SEQ ID NO: 713192 - RNA, 19 nt, Artificial Sequence
  Description of Artificial Sequence: Synthetic oligonucleotide
  Sense strand starting at position 86 of SEQ ID NO: 586375
agcucugcccucuggaauu

SEQ ID NO: 713193 - RNA, 19 nt, Artificial Sequence
  Description of Artificial Sequence: Synthetic oligonucleotide
  Antisense strand to SEQ ID NO: 713192
aauuccagagggcagagcu

SEQ ID NO: 713194 - RNA, 19 nt, Artificial Sequence
  Description of Artificial Sequence: Synthetic oligonucleotide
  Sense strand starting at position 297 of SEQ ID NO: 586375
cccuuuaucacggaaggca

SEQ ID NO: 713195 - RNA, 19 nt, Artificial Sequence
  Description of Artificial Sequence: Synthetic oligonucleotide
  Antisense strand to SEQ ID NO: 713194
ugccuuccgugauaaaggg

SEQ ID NO: 713196 - RNA, 19 nt, Artificial Sequence
  Description of Artificial Sequence: Synthetic oligonucleotide
  Sense strand starting at position 438 of SEQ ID NO: 586375
aggcgaucacuuuagguca

SEQ ID NO: 713197 - RNA, 19 nt, Artificial Sequence
  Description of Artificial Sequence: Synthetic oligonucleotide
  Antisense strand to SEQ ID NO: 713196
ugaccuaaagugaucgccu

SEQ ID NO: 713198 - RNA, 19 nt, Artificial Sequence
  Description of Artificial Sequence: Synthetic oligonucleotide
  Sense strand starting at position 441 of SEQ ID NO: 586375
cgaucacuuuaggucauaa

SEQ ID NO: 713199 - RNA, 19 nt, Artificial Sequence
  Description of Artificial Sequence: Synthetic oligonucleotide
  Antisense strand to SEQ ID NO: 713198
uuaugaccuaaagugaucg

SEQ ID NO: 713200 - RNA, 19 nt, Artificial Sequence
  Description of Artificial Sequence: Synthetic oligonucleotide
  Sense strand starting at position 443 of SEQ ID NO: 586375
aucacuuuaggucauaagu

SEQ ID NO: 713201 - RNA, 19 nt, Artificial Sequence
  Description of Artificial Sequence: Synthetic oligonucleotide
  Antisense strand to SEQ ID NO: 713200
acuuaugaccuaaagugau

SEQ ID NO: 713202 - RNA, 19 nt, Artificial Sequence
  Description of Artificial Sequence: Synthetic oligonucleotide
  Sense strand starting at position 733 of SEQ ID NO: 586375
gaguaaggcggcugcauau

SEQ ID NO: 713203 - RNA, 19 nt, Artificial Sequence
  Description of Artificial Sequence: Synthetic oligonucleotide
  Antisense strand to SEQ ID NO: 713202
auaugcagccgccuuacuc

SEQ ID NO: 713204 - RNA, 19 nt, Artificial Sequence
  Description of Artificial Sequence: Synthetic oligonucleotide
  Sense strand starting at position 765 of SEQ ID NO: 586375
aaucaugaaucguucugau

SEQ ID NO: 713205 - RNA, 19 nt, Artificial Sequence
  Description of Artificial Sequence: Synthetic oligonucleotide
  Antisense strand to SEQ ID NO: 713204
aucagaacgauucaugauu

SEQ ID NO: 713206 - RNA, 19 nt, Artificial Sequence
  Description of Artificial Sequence: Synthetic oligonucleotide
  Sense strand starting at position 827 of SEQ ID NO: 586375
gcaaucaagcuuuaauggu

SEQ ID NO: 713207 - RNA, 19 nt, Artificial Sequence
  Description of Artificial Sequence: Synthetic oligonucleotide
  Antisense strand to SEQ ID NO: 713206
accauuaaagcuugauugc

SEQ ID NO: 713208 - RNA, 19 nt, Artificial Sequence
  Description of Artificial Sequence: Synthetic oligonucleotide
  Sense strand starting at position 833 of SEQ ID NO: 586375
aagcuuuaaugguuaacgu

SEQ ID NO: 713209 - RNA, 19 nt, Artificial Sequence
  Description of Artificial Sequence: Synthetic oligonucleotide
  Antisense strand to SEQ ID NO: 713208
acguuaaccauuaaagcuu

SEQ ID NO: 713210 - RNA, 19 nt, Artificial Sequence
  Description of Artificial Sequence: Synthetic oligonucleotide
  Sense strand starting at position 916 of SEQ ID NO: 586375
agcgacaaauccuuacuaa

SEQ ID NO: 713211 - RNA, 19 nt, Artificial Sequence
  Description of Artificial Sequence: Synthetic oligonucleotide
  Antisense strand to SEQ ID NO: 713210
uuaguaaggauuugucgcu

SEQ ID NO: 713212 - RNA, 19 nt, Artificial Sequence
  Description of Artificial Sequence: Synthetic oligonucleotide
  Sense strand starting at position 917 of SEQ ID NO: 586375
gcgacaaauccuuacuaaa

SEQ ID NO: 713213 - RNA, 19 nt, Artificial Sequence
  Description of Artificial Sequence: Synthetic oligonucleotide
  Antisense strand to SEQ ID NO: 713212
uuuaguaaggauuugucgc

SEQ ID NO: 713214 - RNA, 19 nt, Artificial Sequence
  Description of Artificial Sequence: Synthetic oligonucleotide
  Sense strand starting at position 1084 of SEQ ID NO: 586375
gugagaaguuagcacagaa

SEQ ID NO: 713215 - RNA, 19 nt, Artificial Sequence
  Description of Artificial Sequence: Synthetic oligonucleotide
  Antisense strand to SEQ ID NO: 713214
uucugugcuaacuucucac

SEQ ID NO: 713216 - RNA, 19 nt, Artificial Sequence
  Description of Artificial Sequence: Synthetic oligonucleotide
  Sense strand starting at position 1100 of SEQ ID NO: 586375
gaaguuuacgucugacuag

SEQ ID NO: 713217 - RNA, 19 nt, Artificial Sequence
  Description of Artificial Sequence: Synthetic oligonucleotide
  Antisense strand to SEQ ID NO: 713216
cuagucagacguaaacuuc

SEQ ID NO: 713218 - RNA, 19 nt, Artificial Sequence
  Description of Artificial Sequence: Synthetic oligonucleotide
  Sense strand starting at position 1103 of SEQ ID NO: 586375
guuuacgucugacuagcaa

SEQ ID NO: 713219 - RNA, 19 nt, Artificial Sequence
  Description of Artificial Sequence: Synthetic oligonucleotide
  Antisense strand to SEQ ID NO: 713218
uugcuagucagacguaaac

SEQ ID NO: 713220 - RNA, 19 nt, Artificial Sequence
  Description of Artificial Sequence: Synthetic oligonucleotide
  Sense strand starting at position 1201 of SEQ ID NO: 586375
acugaccuuccuuagguaa

SEQ ID NO: 713221 - RNA, 19 nt, Artificial Sequence
  Description of Artificial Sequence: Synthetic oligonucleotide
  Antisense strand to SEQ ID NO: 713220
uuaccuaaggaaggucagu

SEQ ID NO: 713222 - RNA, 19 nt, Artificial Sequence
  Description of Artificial Sequence: Synthetic oligonucleotide
  Sense strand starting at position 1208 of SEQ ID NO: 586375
uuccuuagguaagaguuaa

SEQ ID NO: 713223 - RNA, 19 nt, Artificial Sequence
  Description of Artificial Sequence: Synthetic oligonucleotide
  Antisense strand to SEQ ID NO: 713222
uuaacucuuaccuaaggaa

SEQ ID NO: 713224 - RNA, 19 nt, Artificial Sequence
  Description of Artificial Sequence: Synthetic oligonucleotide
  Sense strand starting at position 1294 of SEQ ID NO: 586375
agacaaacauucugaguga

SEQ ID NO: 713225 - RNA, 19 nt, Artificial Sequence
  Description of Artificial Sequence: Synthetic oligonucleotide
  Antisense strand to SEQ ID NO: 713224
ucacucagaauguuugucu

SEQ ID NO: 713226 - RNA, 19 nt, Artificial Sequence
  Description of Artificial Sequence: Synthetic oligonucleotide
  Sense strand starting at position 1295 of SEQ ID NO: 586375
gacaaacauucugagugag

SEQ ID NO: 713227 - RNA, 19 nt, Artificial Sequence
  Description of Artificial Sequence: Synthetic oligonucleotide
  Antisense strand to SEQ ID NO: 713226
cucacucagaauguuuguc

SEQ ID NO: 713228 - RNA, 19 nt, Artificial Sequence
  Description of Artificial Sequence: Synthetic oligonucleotide
  Sense strand starting at position 1343 of SEQ ID NO: 586375
gaacaauccguccggaguu

SEQ ID NO: 713229 - RNA, 19 nt, Artificial Sequence
  Description of Artificial Sequence: Synthetic oligonucleotide
  Antisense strand to SEQ ID NO: 713228
aacuccggacggauuguuc

SEQ ID NO: 713230 - RNA, 19 nt, Artificial Sequence
  Description of Artificial Sequence: Synthetic oligonucleotide
  Sense strand starting at position 1457 of SEQ ID NO: 586375
ucugguuucagacgcgagu

SEQ ID NO: 713231 - RNA, 19 nt, Artificial Sequence
  Description of Artificial Sequence: Synthetic oligonucleotide
  Antisense strand to SEQ ID NO: 713230
acucgcgucugaaaccaga

SEQ ID NO: 713232 - RNA, 19 nt, Artificial Sequence
  Description of Artificial Sequence: Synthetic oligonucleotide
  Sense strand starting at position 2300 of SEQ ID NO: 586375
acuuauuguugggccagaa

SEQ ID NO: 713233 - RNA, 19 nt, Artificial Sequence
  Description of Artificial Sequence: Synthetic oligonucleotide
  Antisense strand to SEQ ID NO: 713232
uucuggcccaacaauaagu

SEQ ID NO: 713234 - RNA, 19 nt, Artificial Sequence
  Description of Artificial Sequence: Synthetic oligonucleotide
  Sense strand starting at position 2612 of SEQ ID NO: 586375
uggagacuucgccagggaa

SEQ ID NO: 713235 - RNA, 19 nt, Artificial Sequence
  Description of Artificial Sequence: Synthetic oligonucleotide
  Antisense strand to SEQ ID NO: 713234
uucccuggcgaagucucca

SEQ ID NO: 713236 - RNA, 19 nt, Artificial Sequence
  Description of Artificial Sequence: Synthetic oligonucleotide
  Sense strand starting at position 2614 of SEQ ID NO: 586375
gagacuucgccagggaaua

SEQ ID NO: 713237 - RNA, 19 nt, Artificial Sequence
  Description of Artificial Sequence: Synthetic oligonucleotide
  Antisense strand to SEQ ID NO: 713236
uauucccuggcgaagucuc

SEQ ID NO: 713238 - RNA, 19 nt, Artificial Sequence
  Description of Artificial Sequence: Synthetic oligonucleotide
  Sense strand starting at position 2615 of SEQ ID NO: 586375
agacuucgccagggaauag

SEQ ID NO: 713239 - RNA, 19 nt, Artificial Sequence
  Description of Artificial Sequence: Synthetic oligonucleotide
  Antisense strand to SEQ ID NO: 713238
cuauucccuggcgaagucu

SEQ ID NO: 713240 - RNA, 19 nt, Artificial Sequence
  Description of Artificial Sequence: Synthetic oligonucleotide
  Sense strand starting at position 2616 of SEQ ID NO: 586375
gacuucgccagggaauagu

SEQ ID NO: 713241 - RNA, 19 nt, Artificial Sequence
  Description of Artificial Sequence: Synthetic oligonucleotide
  Antisense strand to SEQ ID NO: 713240
acuauucccuggcgaaguc

SEQ ID NO: 713242 - RNA, 19 nt, Artificial Sequence
  Description of Artificial Sequence: Synthetic oligonucleotide
  Sense strand starting at position 2687 of SEQ ID NO: 586375
agguuaaaucguggcagua

SEQ ID NO: 713243 - RNA, 19 nt, Artificial Sequence
  Description of Artificial Sequence: Synthetic oligonucleotide
  Antisense strand to SEQ ID NO: 713242
uacugccacgauuuaaccu

SEQ ID NO: 713244 - RNA, 19 nt, Artificial Sequence
  Description of Artificial Sequence: Synthetic oligonucleotide
  Sense strand starting at position 2813 of SEQ ID NO: 586375
acaccacaugcguguagau

SEQ ID NO: 713245 - RNA, 19 nt, Artificial Sequence
  Description of Artificial Sequence: Synthetic oligonucleotide
  Antisense strand to SEQ ID NO: 713244
aucuacacgcauguggugu

SEQ ID NO: 713246 - RNA, 19 nt, Artificial Sequence
  Description of Artificial Sequence: Synthetic oligonucleotide
  Sense strand starting at position 2991 of SEQ ID NO: 586375
cagccagauguuugcuacu

SEQ ID NO: 713247 - RNA, 19 nt, Artificial Sequence
  Description of Artificial Sequence: Synthetic oligonucleotide
  Antisense strand to SEQ ID NO: 713246
aguagcaaacaucuggcug

SEQ ID NO: 713248 - RNA, 19 nt, Artificial Sequence
  Description of Artificial Sequence: Synthetic oligonucleotide
  Sense strand starting at position 2993 of SEQ ID NO: 586375
gccagauguuugcuacugu

SEQ ID NO: 713249 - RNA, 19 nt, Artificial Sequence
  Description of Artificial Sequence: Synthetic oligonucleotide
  Antisense strand to SEQ ID NO: 713248
acaguagcaaacaucuggc

SEQ ID NO: 713250 - RNA, 19 nt, Artificial Sequence
  Description of Artificial Sequence: Synthetic oligonucleotide
  Sense strand starting at position 3448 of SEQ ID NO: 586375
acuaacaacgcuuaugaau

SEQ ID NO: 713251 - RNA, 19 nt, Artificial Sequence
  Description of Artificial Sequence: Synthetic oligonucleotide
  Antisense strand to SEQ ID NO: 713250
auucauaagcguuguuagu

SEQ ID NO: 713252 - RNA, 19 nt, Artificial Sequence
  Description of Artificial Sequence: Synthetic oligonucleotide
  Sense strand starting at position 3456 of SEQ ID NO: 586375
cgcuuaugaauucgugauc

SEQ ID NO: 713253 - RNA, 19 nt, Artificial Sequence
  Description of Artificial Sequence: Synthetic oligonucleotide
  Antisense strand to SEQ ID NO: 713252
gaucacgaauucauaagcg

SEQ ID NO: 713254 - RNA, 19 nt, Artificial Sequence
  Description of Artificial Sequence: Synthetic oligonucleotide
  Sense strand starting at position 3459 of SEQ ID NO: 586375
uuaugaauucgugaucguu

SEQ ID NO: 713255 - RNA, 19 nt, Artificial Sequence
  Description of Artificial Sequence: Synthetic oligonucleotide
  Antisense strand to SEQ ID NO: 713254
aacgaucacgaauucauaa

SEQ ID NO: 713256 - RNA, 19 nt, Artificial Sequence
  Description of Artificial Sequence: Synthetic oligonucleotide
  Sense strand starting at position 3461 of SEQ ID NO: 586375
augaauucgugaucguuua

SEQ ID NO: 713257 - RNA, 19 nt, Artificial Sequence
  Description of Artificial Sequence: Synthetic oligonucleotide
  Antisense strand to SEQ ID NO: 713256
uaaacgaucacgaauucau

SEQ ID NO: 713258 - RNA, 19 nt, Artificial Sequence
  Description of Artificial Sequence: Synthetic oligonucleotide
  Sense strand starting at position 3462 of SEQ ID NO: 586375
ugaauucgugaucguuuaa

SEQ ID NO: 713259 - RNA, 19 nt, Artificial Sequence
  Description of Artificial Sequence: Synthetic oligonucleotide
  Antisense strand to SEQ ID NO: 713258
uuaaacgaucacgaauuca

SEQ ID NO: 713260 - RNA, 19 nt, Artificial Sequence
  Description of Artificial Sequence: Synthetic oligonucleotide
  Sense strand starting at position 3474 of SEQ ID NO: 586375
cguuuaagccugggagaua

SEQ ID NO: 713261 - RNA, 19 nt, Artificial Sequence
  Description of Artificial Sequence: Synthetic oligonucleotide
  Antisense strand to SEQ ID NO: 713260
uaucucccaggcuuaaacg

SEQ ID NO: 713262 - RNA, 19 nt, Artificial Sequence
  Description of Artificial Sequence: Synthetic oligonucleotide
  Sense strand starting at position 3475 of SEQ ID NO: 586375
guuuaagccugggagauau

SEQ ID NO: 713263 - RNA, 19 nt, Artificial Sequence
  Description of Artificial Sequence: Synthetic oligonucleotide
  Antisense strand to SEQ ID NO: 713262
auaucucccaggcuuaaac

SEQ ID NO: 713264 - RNA, 19 nt, Artificial Sequence
  Description of Artificial Sequence: Synthetic oligonucleotide
  Sense strand starting at position 3537 of SEQ ID NO: 586375
aauagcucguuaguaauga

SEQ ID NO: 713265 - RNA, 19 nt, Artificial Sequence
  Description of Artificial Sequence: Synthetic oligonucleotide
  Antisense strand to SEQ ID NO: 713264
ucauuacuaacgagcuauu

SEQ ID NO: 713266 - RNA, 19 nt, Artificial Sequence
  Description of Artificial Sequence: Synthetic oligonucleotide
  Sense strand starting at position 3631 of SEQ ID NO: 586375
uuaguaugcccucaaacug

SEQ ID NO: 713267 - RNA, 19 nt, Artificial Sequence
  Description of Artificial Sequence: Synthetic oligonucleotide
  Antisense strand to SEQ ID NO: 713266
caguuugagggcauacuaa

SEQ ID NO: 713268 - RNA, 19 nt, Artificial Sequence
  Description of Artificial Sequence: Synthetic oligonucleotide
  Sense strand starting at position 3943 of SEQ ID NO: 586375
uccagaucucacuggauuc

SEQ ID NO: 713269 - RNA, 19 nt, Artificial Sequence
  Description of Artificial Sequence: Synthetic oligonucleotide
  Antisense strand to SEQ ID NO: 713268
gaauccagugagaucugga

SEQ ID NO: 713270 - RNA, 19 nt, Artificial Sequence
  Description of Artificial Sequence: Synthetic oligonucleotide
  Sense strand starting at position 3970 of SEQ ID NO: 586375
ccuaguacauguuauagau

SEQ ID NO: 713271 - RNA, 19 nt, Artificial Sequence
  Description of Artificial Sequence: Synthetic oligonucleotide
  Antisense strand to SEQ ID NO: 713270
aucuauaacauguacuagg

SEQ ID NO: 713272 - RNA, 19 nt, Artificial Sequence
  Description of Artificial Sequence: Synthetic oligonucleotide
  Sense strand starting at position 50 of SEQ ID NO: 586376
aaauguuauggauggagcu

SEQ ID NO: 713273 - RNA, 19 nt, Artificial Sequence
  Description of Artificial Sequence: Synthetic oligonucleotide
  Antisense strand to SEQ ID NO: 713272
agcuccauccauaacauuu

SEQ ID NO: 713274 - RNA, 19 nt, Artificial Sequence
  Description of Artificial Sequence: Synthetic oligonucleotide
  Sense strand starting at position 51 of SEQ ID NO: 586376
aauguuauggauggagcua

SEQ ID NO: 713275 - RNA, 19 nt, Artificial Sequence
  Description of Artificial Sequence: Synthetic oligonucleotide
  Antisense strand to SEQ ID NO: 713274
uagcuccauccauaacauu

SEQ ID NO: 713276 - RNA, 19 nt, Artificial Sequence
  Description of Artificial Sequence: Synthetic oligonucleotide
  Sense strand starting at position 135 of SEQ ID NO: 586376
guaagcauacaguaucuau

SEQ ID NO: 713277 - RNA, 19 nt, Artificial Sequence
  Description of Artificial Sequence: Synthetic oligonucleotide
  Antisense strand to SEQ ID NO: 713276
auagauacuguaugcuuac

SEQ ID NO: 713278 - RNA, 19 nt, Artificial Sequence
  Description of Artificial Sequence: Synthetic oligonucleotide
  Sense strand starting at position 152 of SEQ ID NO: 586376
auuaccuguccacauguaa

SEQ ID NO: 713279 - RNA, 19 nt, Artificial Sequence
  Description of Artificial Sequence: Synthetic oligonucleotide
  Antisense strand to SEQ ID NO: 713278
uuacauguggacagguaau

SEQ ID NO: 713280 - RNA, 19 nt, Artificial Sequence
  Description of Artificial Sequence: Synthetic oligonucleotide
  Sense strand starting at position 201 of SEQ ID NO: 586376
ggcuuaaccuuauugagaa

SEQ ID NO: 713281 - RNA, 19 nt, Artificial Sequence
  Description of Artificial Sequence: Synthetic oligonucleotide
  Antisense strand to SEQ ID NO: 713280
uucucaauaagguuaagcc

SEQ ID NO: 713282 - RNA, 19 nt, Artificial Sequence
  Description of Artificial Sequence: Synthetic oligonucleotide
  Sense strand starting at position 328 of SEQ ID NO: 586376
auaugcaagcauuguaaga

SEQ ID NO: 713283 - RNA, 19 nt, Artificial Sequence
  Description of Artificial Sequence: Synthetic oligonucleotide
  Antisense strand to SEQ ID NO: 713282
ucuuacaaugcuugcauau

SEQ ID NO: 713284 - RNA, 19 nt, Artificial Sequence
  Description of Artificial Sequence: Synthetic oligonucleotide
  Sense strand starting at position 470 of SEQ ID NO: 586376
agguaaauagcccaguaua

SEQ ID NO: 713285 - RNA, 19 nt, Artificial Sequence
  Description of Artificial Sequence: Synthetic oligonucleotide
  Antisense strand to SEQ ID NO: 713284
uauacugggcuauuuaccu

SEQ ID NO: 713286 - RNA, 19 nt, Artificial Sequence
  Description of Artificial Sequence: Synthetic oligonucleotide
  Sense strand starting at position 638 of SEQ ID NO: 586376
auguuuaaccaggaagcau

SEQ ID NO: 713287 - RNA, 19 nt, Artificial Sequence
  Description of Artificial Sequence: Synthetic oligonucleotide
  Antisense strand to SEQ ID NO: 713286
augcuuccugguuaaacau

SEQ ID NO: 713288 - RNA, 19 nt, Artificial Sequence
  Description of Artificial Sequence: Synthetic oligonucleotide
  Sense strand starting at position 647 of SEQ ID NO: 586376
caggaagcauggcuaaaua

SEQ ID NO: 713289 - RNA, 19 nt, Artificial Sequence
  Description of Artificial Sequence: Synthetic oligonucleotide
  Antisense strand to SEQ ID NO: 713288
uauuuagccaugcuuccug

SEQ ID NO: 713290 - RNA, 19 nt, Artificial Sequence
  Description of Artificial Sequence: Synthetic oligonucleotide
  Sense strand starting at position 724 of SEQ ID NO: 586376
gaacuuugauaguuuguac

SEQ ID NO: 713291 - RNA, 19 nt, Artificial Sequence
  Description of Artificial Sequence: Synthetic oligonucleotide
  Antisense strand to SEQ ID NO: 713290
guacaaacuaucaaaguuc

SEQ ID NO: 713292 - RNA, 19 nt, Artificial Sequence
  Description of Artificial Sequence: Synthetic oligonucleotide
  Sense strand starting at position 744 of SEQ ID NO: 586376
gugguuaaggcagauucuu

SEQ ID NO: 713293 - RNA, 19 nt, Artificial Sequence
  Description of Artificial Sequence: Synthetic oligonucleotide
  Antisense strand to SEQ ID NO: 713292
aagaaucugccuuaaccac

SEQ ID NO: 713294 - RNA, 19 nt, Artificial Sequence
  Description of Artificial Sequence: Synthetic oligonucleotide
  Sense strand starting at position 903 of SEQ ID NO: 586376
ccaccagaguccuuaguaa

SEQ ID NO: 713295 - RNA, 19 nt, Artificial Sequence
  Description of Artificial Sequence: Synthetic oligonucleotide
  Antisense strand to SEQ ID NO: 713294
uuacuaaggacucuggugg

SEQ ID NO: 713296 - RNA, 19 nt, Artificial Sequence
  Description of Artificial Sequence: Synthetic oligonucleotide
  Sense strand starting at position 910 of SEQ ID NO: 586376
aguccuuaguaaccuauaa

SEQ ID NO: 713297 - RNA, 19 nt, Artificial Sequence
  Description of Artificial Sequence: Synthetic oligonucleotide
  Antisense strand to SEQ ID NO: 713296
uuauagguuacuaaggacu

SEQ ID NO: 713298 - RNA, 19 nt, Artificial Sequence
  Description of Artificial Sequence: Synthetic oligonucleotide
  Sense strand starting at position 931 of SEQ ID NO: 586376
ccauaauaaggcugacgaa

SEQ ID NO: 713299 - RNA, 19 nt, Artificial Sequence
  Description of Artificial Sequence: Synthetic oligonucleotide
  Antisense strand to SEQ ID NO: 713298
uucgucagccuuauuaugg

SEQ ID NO: 713300 - RNA, 19 nt, Artificial Sequence
  Description of Artificial Sequence: Synthetic oligonucleotide
  Sense strand starting at position 952 of SEQ ID NO: 586376
acacuacgguuuguggaaa

SEQ ID NO: 713301 - RNA, 19 nt, Artificial Sequence
  Description of Artificial Sequence: Synthetic oligonucleotide
  Antisense strand to SEQ ID NO: 713300
uuuccacaaaccguagugu

SEQ ID NO: 713302 - RNA, 19 nt, Artificial Sequence
  Description of Artificial Sequence: Synthetic oligonucleotide
  Sense strand starting at position 1025 of SEQ ID NO: 586376
auuacuuauuuccagagag

SEQ ID NO: 713303 - RNA, 19 nt, Artificial Sequence
  Description of Artificial Sequence: Synthetic oligonucleotide
  Antisense strand to SEQ ID NO: 713302
cucucuggaaauaaguaau

SEQ ID NO: 713304 - RNA, 19 nt, Artificial Sequence
  Description of Artificial Sequence: Synthetic oligonucleotide
  Sense strand starting at position 1074 of SEQ ID NO: 586376
gaaccacuucucgguuuaa

SEQ ID NO: 713305 - RNA, 19 nt, Artificial Sequence
  Description of Artificial Sequence: Synthetic oligonucleotide
  Antisense strand to SEQ ID NO: 713304
uuaaaccgagaagugguuc

SEQ ID NO: 713306 - RNA, 19 nt, Artificial Sequence
  Description of Artificial Sequence: Synthetic oligonucleotide
  Sense strand starting at position 1078 of SEQ ID NO: 586376
cacuucucgguuuaaggaa

SEQ ID NO: 713307 - RNA, 19 nt, Artificial Sequence
  Description of Artificial Sequence: Synthetic oligonucleotide
  Antisense strand to SEQ ID NO: 713306
uuccuuaaaccgagaagug

SEQ ID NO: 713308 - RNA, 19 nt, Artificial Sequence
  Description of Artificial Sequence: Synthetic oligonucleotide
  Sense strand starting at position 1132 of SEQ ID NO: 586376
cagguugcucccuagucaa

SEQ ID NO: 713309 - RNA, 19 nt, Artificial Sequence
  Description of Artificial Sequence: Synthetic oligonucleotide
  Antisense strand to SEQ ID NO: 713308
uugacuagggagcaaccug

SEQ ID NO: 713310 - RNA, 19 nt, Artificial Sequence
  Description of Artificial Sequence: Synthetic oligonucleotide
  Sense strand starting at position 2047 of SEQ ID NO: 586376
gcggcuuucccggcagaau

SEQ ID NO: 713311 - RNA, 19 nt, Artificial Sequence
  Description of Artificial Sequence: Synthetic oligonucleotide
  Antisense strand to SEQ ID NO: 713310
auucugccgggaaagccgc

SEQ ID NO: 713312 - RNA, 19 nt, Artificial Sequence
  Description of Artificial Sequence: Synthetic oligonucleotide
  Sense strand starting at position 2183 of SEQ ID NO: 586376
cgcuauugcgcagcgauuu

SEQ ID NO: 713313 - RNA, 19 nt, Artificial Sequence
  Description of Artificial Sequence: Synthetic oligonucleotide
  Antisense strand to SEQ ID NO: 713312
aaaucgcugcgcaauagcg

SEQ ID NO: 713314 - RNA, 19 nt, Artificial Sequence
  Description of Artificial Sequence: Synthetic oligonucleotide
  Sense strand starting at position 2403 of SEQ ID NO: 586376
gcgcuaguucaguuuagcu

SEQ ID NO: 713315 - RNA, 19 nt, Artificial Sequence
  Description of Artificial Sequence: Synthetic oligonucleotide
  Antisense strand to SEQ ID NO: 713314
agcuaaacugaacuagcgc

SEQ ID NO: 713316 - RNA, 19 nt, Artificial Sequence
  Description of Artificial Sequence: Synthetic oligonucleotide
  Sense strand starting at position 2713 of SEQ ID NO: 586376
gguaaccgaccuugaaagu

SEQ ID NO: 713317 - RNA, 19 nt, Artificial Sequence
  Description of Artificial Sequence: Synthetic oligonucleotide
  Antisense strand to SEQ ID NO: 713316
acuuucaaggucgguuacc

SEQ ID NO: 713318 - RNA, 19 nt, Artificial Sequence
  Description of Artificial Sequence: Synthetic oligonucleotide
  Sense strand starting at position 2714 of SEQ ID NO: 586376
guaaccgaccuugaaaguu

SEQ ID NO: 713319 - RNA, 19 nt, Artificial Sequence
  Description of Artificial Sequence: Synthetic oligonucleotide
  Antisense strand to SEQ ID NO: 713318
aacuuucaaggucgguuac

SEQ ID NO: 713320 - RNA, 19 nt, Artificial Sequence
  Description of Artificial Sequence: Synthetic oligonucleotide
  Sense strand starting at position 2735 of SEQ ID NO: 586376
gugucagagccagaauuau

SEQ ID NO: 713321 - RNA, 19 nt, Artificial Sequence
  Description of Artificial Sequence: Synthetic oligonucleotide
  Antisense strand to SEQ ID NO: 713320
auaauucuggcucugacac

SEQ ID NO: 713322 - RNA, 19 nt, Artificial Sequence
  Description of Artificial Sequence: Synthetic oligonucleotide
  Sense strand starting at position 2777 of SEQ ID NO: 586376
guagauacucugcggagaa

SEQ ID NO: 713323 - RNA, 19 nt, Artificial Sequence
  Description of Artificial Sequence: Synthetic oligonucleotide
  Antisense strand to SEQ ID NO: 713322
uucuccgcagaguaucuac

SEQ ID NO: 713324 - RNA, 19 nt, Artificial Sequence
  Description of Artificial Sequence: Synthetic oligonucleotide
  Sense strand starting at position 2821 of SEQ ID NO: 586376
uuacuagagccacgauaua

SEQ ID NO: 713325 - RNA, 19 nt, Artificial Sequence
  Description of Artificial Sequence: Synthetic oligonucleotide
  Antisense strand to SEQ ID NO: 713324
uauaucguggcucuaguaa

SEQ ID NO: 713326 - RNA, 19 nt, Artificial Sequence
  Description of Artificial Sequence: Synthetic oligonucleotide
  Sense strand starting at position 2939 of SEQ ID NO: 586376
uccacuauucuguagcuua

SEQ ID NO: 713327 - RNA, 19 nt, Artificial Sequence
  Description of Artificial Sequence: Synthetic oligonucleotide
  Antisense strand to SEQ ID NO: 713326
uaagcuacagaauagugga

SEQ ID NO: 713328 - RNA, 19 nt, Artificial Sequence
  Description of Artificial Sequence: Synthetic oligonucleotide
  Sense strand starting at position 2956 of SEQ ID NO: 586376
uaaugaccucuuggaaagu

SEQ ID NO: 713329 - RNA, 19 nt, Artificial Sequence
  Description of Artificial Sequence: Synthetic oligonucleotide
  Antisense strand to SEQ ID NO: 713328
acuuuccaagaggucauua

SEQ ID NO: 713330 - RNA, 19 nt, Artificial Sequence
  Description of Artificial Sequence: Synthetic oligonucleotide
  Sense strand starting at position 3007 of SEQ ID NO: 586376
guaacauggagauguuaau

SEQ ID NO: 713331 - RNA, 19 nt, Artificial Sequence
  Description of Artificial Sequence: Synthetic oligonucleotide
  Antisense strand to SEQ ID NO: 713330
auuaacaucuccauguuac

SEQ ID NO: 713332 - RNA, 19 nt, Artificial Sequence
  Description of Artificial Sequence: Synthetic oligonucleotide
  Sense strand starting at position 3019 of SEQ ID NO: 586376
uguuaauaguacucacaug

SEQ ID NO: 713333 - RNA, 19 nt, Artificial Sequence
  Description of Artificial Sequence: Synthetic oligonucleotide
  Antisense strand to SEQ ID NO: 713332
caugugaguacuauuaaca

SEQ ID NO: 713334 - RNA, 19 nt, Artificial Sequence
  Description of Artificial Sequence: Synthetic oligonucleotide
  Sense strand starting at position 3566 of SEQ ID NO: 586376
uggcaauauuuccaggauu

SEQ ID NO: 713335 - RNA, 19 nt, Artificial Sequence
  Description of Artificial Sequence: Synthetic oligonucleotide
  Antisense strand to SEQ ID NO: 713334
aauccuggaaauauugcca

SEQ ID NO: 713336 - RNA, 19 nt, Artificial Sequence
  Description of Artificial Sequence: Synthetic oligonucleotide
  Sense strand starting at position 3577 of SEQ ID NO: 586376
ccaggauugucucccuuga

SEQ ID NO: 713337 - RNA, 19 nt, Artificial Sequence
  Description of Artificial Sequence: Synthetic oligonucleotide
  Antisense strand to SEQ ID NO: 713336
ucaagggagacaauccugg

SEQ ID NO: 713338 - RNA, 19 nt, Artificial Sequence
  Description of Artificial Sequence: Synthetic oligonucleotide
  Sense strand starting at position 3579 of SEQ ID NO: 586376
aggauugucucccuugaag

SEQ ID NO: 713339 - RNA, 19 nt, Artificial Sequence
  Description of Artificial Sequence: Synthetic oligonucleotide
  Antisense strand to SEQ ID NO: 713338
cuucaagggagacaauccu

SEQ ID NO: 713340 - RNA, 19 nt, Artificial Sequence
  Description of Artificial Sequence: Synthetic oligonucleotide
  Sense strand starting at position 3682 of SEQ ID NO: 586376
auggcucuaucucugagaa

SEQ ID NO: 713341 - RNA, 19 nt, Artificial Sequence
  Description of Artificial Sequence: Synthetic oligonucleotide
  Antisense strand to SEQ ID NO: 713340
uucucagagauagagccau

SEQ ID NO: 713342 - RNA, 19 nt, Artificial Sequence
  Description of Artificial Sequence: Synthetic oligonucleotide
  Sense strand starting at position 3683 of SEQ ID NO: 586376
uggcucuaucucugagaau

SEQ ID NO: 713343 - RNA, 19 nt, Artificial Sequence
  Description of Artificial Sequence: Synthetic oligonucleotide
  Antisense strand to SEQ ID NO: 713342
auucucagagauagagcca

SEQ ID NO: 713344 - RNA, 19 nt, Artificial Sequence
  Description of Artificial Sequence: Synthetic oligonucleotide
  Sense strand starting at position 3694 of SEQ ID NO: 586376
cugagaauguuuguagcaa

SEQ ID NO: 713345 - RNA, 19 nt, Artificial Sequence
  Description of Artificial Sequence: Synthetic oligonucleotide
  Antisense strand to SEQ ID NO: 713344
uugcuacaaacauucucag

SEQ ID NO: 713346 - RNA, 19 nt, Artificial Sequence
  Description of Artificial Sequence: Synthetic oligonucleotide
  Sense strand starting at position 3761 of SEQ ID NO: 586376
gccuuugauauuggagaug

SEQ ID NO: 713347 - RNA, 19 nt, Artificial Sequence
  Description of Artificial Sequence: Synthetic oligonucleotide
  Antisense strand to SEQ ID NO: 713346
caucuccaauaucaaaggc

SEQ ID NO: 713348 - RNA, 19 nt, Artificial Sequence
  Description of Artificial Sequence: Synthetic oligonucleotide
  Sense strand starting at position 3854 of SEQ ID NO: 586376
augcaagugaauuguaaag

SEQ ID NO: 713349 - RNA, 19 nt, Artificial Sequence
  Description of Artificial Sequence: Synthetic oligonucleotide
  Antisense strand to SEQ ID NO: 713348
cuuuacaauucacuugcau

SEQ ID NO: 713350 - RNA, 19 nt, Artificial Sequence
  Description of Artificial Sequence: Synthetic oligonucleotide
  Sense strand starting at position 3906 of SEQ ID NO: 586376
guuguauuauuucuagggu

SEQ ID NO: 713351 - RNA, 19 nt, Artificial Sequence
  Description of Artificial Sequence: Synthetic oligonucleotide
  Antisense strand to SEQ ID NO: 713350
acccuagaaauaauacaac

SEQ ID NO: 713352 - RNA, 19 nt, Artificial Sequence
  Description of Artificial Sequence: Synthetic oligonucleotide
  Sense strand starting at position 65 of SEQ ID NO: 586377
agugauaaauugucacgaa

SEQ ID NO: 713353 - RNA, 19 nt, Artificial Sequence
  Description of Artificial Sequence: Synthetic oligonucleotide
  Antisense strand to SEQ ID NO: 713352
uucgugacaauuuaucacu

SEQ ID NO: 713354 - RNA, 19 nt, Artificial Sequence
  Description of Artificial Sequence: Synthetic oligonucleotide
  Sense strand starting at position 530 of SEQ ID NO: 586377
augggaauuuacuaaugca

SEQ ID NO: 713355 - RNA, 19 nt, Artificial Sequence
  Description of Artificial Sequence: Synthetic oligonucleotide
  Antisense strand to SEQ ID NO: 713354
ugcauuaguaaauucccau

SEQ ID NO: 713356 - RNA, 19 nt, Artificial Sequence
  Description of Artificial Sequence: Synthetic oligonucleotide
  Sense strand starting at position 600 of SEQ ID NO: 586377
uuagacuaggucugacagu

SEQ ID NO: 713357 - RNA, 19 nt, Artificial Sequence
  Description of Artificial Sequence: Synthetic oligonucleotide
  Antisense strand to SEQ ID NO: 713356
acugucagaccuagucuaa

SEQ ID NO: 713358 - RNA, 19 nt, Artificial Sequence
  Description of Artificial Sequence: Synthetic oligonucleotide
  Sense strand starting at position 617 of SEQ ID NO: 586377
guggcuaugugaccugaaa

SEQ ID NO: 713359 - RNA, 19 nt, Artificial Sequence
  Description of Artificial Sequence: Synthetic oligonucleotide
  Antisense strand to SEQ ID NO: 713358
uuucaggucacauagccac

SEQ ID NO: 713360 - RNA, 19 nt, Artificial Sequence
  Description of Artificial Sequence: Synthetic oligonucleotide
  Sense strand starting at position 619 of SEQ ID NO: 586377
ggcuaugugaccugaaaug

SEQ ID NO: 713361 - RNA, 19 nt, Artificial Sequence
  Description of Artificial Sequence: Synthetic oligonucleotide
  Antisense strand to SEQ ID NO: 713360
cauuucaggucacauagcc

SEQ ID NO: 713362 - RNA, 19 nt, Artificial Sequence
  Description of Artificial Sequence: Synthetic oligonucleotide
  Sense strand starting at position 739 of SEQ ID NO: 586377
acuuguaguaaagguauca

SEQ ID NO: 713363 - RNA, 19 nt, Artificial Sequence
  Description of Artificial Sequence: Synthetic oligonucleotide
  Antisense strand to SEQ ID NO: 713362
ugauaccuuuacuacaagu

SEQ ID NO: 713364 - RNA, 19 nt, Artificial Sequence
  Description of Artificial Sequence: Synthetic oligonucleotide
  Sense strand starting at position 755 of SEQ ID NO: 586377
ucaucuauuccugggaagu

SEQ ID NO: 713365 - RNA, 19 nt, Artificial Sequence
  Description of Artificial Sequence: Synthetic oligonucleotide
  Antisense strand to SEQ ID NO: 713364
acuucccaggaauagauga

SEQ ID NO: 713366 - RNA, 19 nt, Artificial Sequence
  Description of Artificial Sequence: Synthetic oligonucleotide
  Sense strand starting at position 756 of SEQ ID NO: 586377
caucuauuccugggaagug

SEQ ID NO: 713367 - RNA, 19 nt, Artificial Sequence
  Description of Artificial Sequence: Synthetic oligonucleotide
  Antisense strand to SEQ ID NO: 713366
cacuucccaggaauagaug

SEQ ID NO: 713368 - RNA, 19 nt, Artificial Sequence
  Description of Artificial Sequence: Synthetic oligonucleotide
  Sense strand starting at position 777 of SEQ ID NO: 586377
gguaaaucacuguacaugu

SEQ ID NO: 713369 - RNA, 19 nt, Artificial Sequence
  Description of Artificial Sequence: Synthetic oligonucleotide
  Antisense strand to SEQ ID NO: 713368
acauguacagugauuuacc

SEQ ID NO: 713370 - RNA, 19 nt, Artificial Sequence
  Description of Artificial Sequence: Synthetic oligonucleotide
  Sense strand starting at position 785 of SEQ ID NO: 586377
acuguacauguguauacua

SEQ ID NO: 713371 - RNA, 19 nt, Artificial Sequence
  Description of Artificial Sequence: Synthetic oligonucleotide
  Antisense strand to SEQ ID NO: 713370
uaguauacacauguacagu

SEQ ID NO: 713372 - RNA, 19 nt, Artificial Sequence
  Description of Artificial Sequence: Synthetic oligonucleotide
  Sense strand starting at position 1034 of SEQ ID NO: 586377
ugugacuggcuaugggaau

SEQ ID NO: 713373 - RNA, 19 nt, Artificial Sequence
  Description of Artificial Sequence: Synthetic oligonucleotide
  Antisense strand to SEQ ID NO: 713372
auucccauagccagucaca

SEQ ID NO: 713374 - RNA, 19 nt, Artificial Sequence
  Description of Artificial Sequence: Synthetic oligonucleotide
  Sense strand starting at position 1041 of SEQ ID NO: 586377
ggcuaugggaauuacugua

SEQ ID NO: 713375 - RNA, 19 nt, Artificial Sequence
  Description of Artificial Sequence: Synthetic oligonucleotide
  Antisense strand to SEQ ID NO: 713374
uacaguaauucccauagcc

SEQ ID NO: 713376 - RNA, 19 nt, Artificial Sequence
  Description of Artificial Sequence: Synthetic oligonucleotide
  Sense strand starting at position 1098 of SEQ ID NO: 586377
augacuguccugggccaua

SEQ ID NO: 713377 - RNA, 19 nt, Artificial Sequence
  Description of Artificial Sequence: Synthetic oligonucleotide
  Antisense strand to SEQ ID NO: 713376
uauggcccaggacagucau

SEQ ID NO: 713378 - RNA, 19 nt, Artificial Sequence
  Description of Artificial Sequence: Synthetic oligonucleotide
  Sense strand starting at position 1191 of SEQ ID NO: 586377
gcagcacagucuuugaaca

SEQ ID NO: 713379 - RNA, 19 nt, Artificial Sequence
  Description of Artificial Sequence: Synthetic oligonucleotide
  Antisense strand to SEQ ID NO: 713378
uguucaaagacugugcugc

SEQ ID NO: 713380 - RNA, 19 nt, Artificial Sequence
  Description of Artificial Sequence: Synthetic oligonucleotide
  Sense strand starting at position 1199 of SEQ ID NO: 586377
gucuuugaacaccgaguau

SEQ ID NO: 713381 - RNA, 19 nt, Artificial Sequence
  Description of Artificial Sequence: Synthetic oligonucleotide
  Antisense strand to SEQ ID NO: 713380
auacucgguguucaaagac

SEQ ID NO: 713382 - RNA, 19 nt, Artificial Sequence
  Description of Artificial Sequence: Synthetic oligonucleotide
  Sense strand starting at position 1273 of SEQ ID NO: 586377
gagggagaaaguuguuuaa

SEQ ID NO: 713383 - RNA, 19 nt, Artificial Sequence
  Description of Artificial Sequence: Synthetic oligonucleotide
  Antisense strand to SEQ ID NO: 713382
uuaaacaacuuucucccuc

SEQ ID NO: 713384 - RNA, 19 nt, Artificial Sequence
  Description of Artificial Sequence: Synthetic oligonucleotide
  Sense strand starting at position 1416 of SEQ ID NO: 586377
ccgaaaugcucagcccaau

SEQ ID NO: 713385 - RNA, 19 nt, Artificial Sequence
  Description of Artificial Sequence: Synthetic oligonucleotide
  Antisense strand to SEQ ID NO: 713384
auugggcugagcauuucgg

SEQ ID NO: 713386 - RNA, 19 nt, Artificial Sequence
  Description of Artificial Sequence: Synthetic oligonucleotide
  Sense strand starting at position 1678 of SEQ ID NO: 586377
gcacuuaccagaggucaga

SEQ ID NO: 713387 - RNA, 19 nt, Artificial Sequence
  Description of Artificial Sequence: Synthetic oligonucleotide
  Antisense strand to SEQ ID NO: 713386
ucugaccucugguaagugc

SEQ ID NO: 713388 - RNA, 19 nt, Artificial Sequence
  Description of Artificial Sequence: Synthetic oligonucleotide
  Sense strand starting at position 1895 of SEQ ID NO: 586377
aagcacuuccgggauggau

SEQ ID NO: 713389 - RNA, 19 nt, Artificial Sequence
  Description of Artificial Sequence: Synthetic oligonucleotide
  Antisense strand to SEQ ID NO: 713388
auccaucccggaagugcuu

SEQ ID NO: 713390 - RNA, 19 nt, Artificial Sequence
  Description of Artificial Sequence: Synthetic oligonucleotide
  Sense strand starting at position 1976 of SEQ ID NO: 586377
guucuauacugacugagau

SEQ ID NO: 713391 - RNA, 19 nt, Artificial Sequence
  Description of Artificial Sequence: Synthetic oligonucleotide
  Antisense strand to SEQ ID NO: 713390
aucucagucaguauagaac

SEQ ID NO: 713392 - RNA, 19 nt, Artificial Sequence
  Description of Artificial Sequence: Synthetic oligonucleotide
  Sense strand starting at position 1977 of SEQ ID NO: 586377
uucuauacugacugagauc

SEQ ID NO: 713393 - RNA, 19 nt, Artificial Sequence
  Description of Artificial Sequence: Synthetic oligonucleotide
  Antisense strand to SEQ ID NO: 713392
gaucucagucaguauagaa

SEQ ID NO: 713394 - RNA, 19 nt, Artificial Sequence
  Description of Artificial Sequence: Synthetic oligonucleotide
  Sense strand starting at position 2153 of SEQ ID NO: 586377
aucugaaccuaaucaguga

SEQ ID NO: 713395 - RNA, 19 nt, Artificial Sequence
  Description of Artificial Sequence: Synthetic oligonucleotide
  Antisense strand to SEQ ID NO: 713394
ucacugauuagguucagau

SEQ ID NO: 713396 - RNA, 19 nt, Artificial Sequence
  Description of Artificial Sequence: Synthetic oligonucleotide
  Sense strand starting at position 2226 of SEQ ID NO: 586377
aguaucgacgacuaguaua

SEQ ID NO: 713397 - RNA, 19 nt, Artificial Sequence
  Description of Artificial Sequence: Synthetic oligonucleotide
  Antisense strand to SEQ ID NO: 713396
uauacuagucgucgauacu

SEQ ID NO: 713398 - RNA, 19 nt, Artificial Sequence
  Description of Artificial Sequence: Synthetic oligonucleotide
  Sense strand starting at position 2231 of SEQ ID NO: 586377
cgacgacuaguauauacau

SEQ ID NO: 713399 - RNA, 19 nt, Artificial Sequence
  Description of Artificial Sequence: Synthetic oligonucleotide
  Antisense strand to SEQ ID NO: 713398
auguauauacuagucgucg

SEQ ID NO: 713400 - RNA, 19 nt, Artificial Sequence
  Description of Artificial Sequence: Synthetic oligonucleotide
  Sense strand starting at position 2257 of SEQ ID NO: 586377
gaauuacguacguguauuu

SEQ ID NO: 713401 - RNA, 19 nt, Artificial Sequence
  Description of Artificial Sequence: Synthetic oligonucleotide
  Antisense strand to SEQ ID NO: 713400
aaauacacguacguaauuc

SEQ ID NO: 713402 - RNA, 19 nt, Artificial Sequence
  Description of Artificial Sequence: Synthetic oligonucleotide
  Sense strand starting at position 2264 of SEQ ID NO: 586377
guacguguauuugugauac

SEQ ID NO: 713403 - RNA, 19 nt, Artificial Sequence
  Description of Artificial Sequence: Synthetic oligonucleotide
  Antisense strand to SEQ ID NO: 713402
guaucacaaauacacguac

SEQ ID NO: 713404 - RNA, 19 nt, Artificial Sequence
  Description of Artificial Sequence: Synthetic oligonucleotide
  Sense strand starting at position 2274 of SEQ ID NO: 586377
uugugauacauuuguguuu

SEQ ID NO: 713405 - RNA, 19 nt, Artificial Sequence
  Description of Artificial Sequence: Synthetic oligonucleotide
  Antisense strand to SEQ ID NO: 713404
aaacacaaauguaucacaa

SEQ ID NO: 713406 - RNA, 19 nt, Artificial Sequence
  Description of Artificial Sequence: Synthetic oligonucleotide
  Sense strand starting at position 2275 of SEQ ID NO: 586377
ugugauacauuuguguuua

SEQ ID NO: 713407 - RNA, 19 nt, Artificial Sequence
  Description of Artificial Sequence: Synthetic oligonucleotide
  Antisense strand to SEQ ID NO: 713406
uaaacacaaauguaucaca

SEQ ID NO: 713408 - RNA, 19 nt, Artificial Sequence
  Description of Artificial Sequence: Synthetic oligonucleotide
  Sense strand starting at position 2286 of SEQ ID NO: 586377
uguguuuaacuugaugaug

SEQ ID NO: 713409 - RNA, 19 nt, Artificial Sequence
  Description of Artificial Sequence: Synthetic oligonucleotide
  Antisense strand to SEQ ID NO: 713408
caucaucaaguuaaacaca

SEQ ID NO: 713410 - RNA, 19 nt, Artificial Sequence
  Description of Artificial Sequence: Synthetic oligonucleotide
  Sense strand starting at position 2359 of SEQ ID NO: 586377
uuaauacucgcuuggagaa

SEQ ID NO: 713411 - RNA, 19 nt, Artificial Sequence
  Description of Artificial Sequence: Synthetic oligonucleotide
  Antisense strand to SEQ ID NO: 713410
uucuccaagcgaguauuaa

SEQ ID NO: 713412 - RNA, 19 nt, Artificial Sequence
  Description of Artificial Sequence: Synthetic oligonucleotide
  Sense strand starting at position 2396 of SEQ ID NO: 586377
guuagauuguauuccaagg

SEQ ID NO: 713413 - RNA, 19 nt, Artificial Sequence
  Description of Artificial Sequence: Synthetic oligonucleotide
  Antisense strand to SEQ ID NO: 713412
ccuuggaauacaaucuaac

SEQ ID NO: 713414 - RNA, 19 nt, Artificial Sequence
  Description of Artificial Sequence: Synthetic oligonucleotide
  Sense strand starting at position 2535 of SEQ ID NO: 586377
cuucuaagacugcagucaa

SEQ ID NO: 713415 - RNA, 19 nt, Artificial Sequence
  Description of Artificial Sequence: Synthetic oligonucleotide
  Antisense strand to SEQ ID NO: 713414
uugacugcagucuuagaag

SEQ ID NO: 713416 - RNA, 19 nt, Artificial Sequence
  Description of Artificial Sequence: Synthetic oligonucleotide
  Sense strand starting at position 2894 of SEQ ID NO: 586377
uuuaauuggucuguauauc

SEQ ID NO: 713417 - RNA, 19 nt, Artificial Sequence
  Description of Artificial Sequence: Synthetic oligonucleotide
  Antisense strand to SEQ ID NO: 713416
gauauacagaccaauuaaa

SEQ ID NO: 713418 - RNA, 19 nt, Artificial Sequence
  Description of Artificial Sequence: Synthetic oligonucleotide
  Sense strand starting at position 2895 of SEQ ID NO: 586377
uuaauuggucuguauaucu

SEQ ID NO: 713419 - RNA, 19 nt, Artificial Sequence
  Description of Artificial Sequence: Synthetic oligonucleotide
  Antisense strand to SEQ ID NO: 713418
agauauacagaccaauuaa

SEQ ID NO: 713420 - RNA, 19 nt, Artificial Sequence
  Description of Artificial Sequence: Synthetic oligonucleotide
  Sense strand starting at position 2906 of SEQ ID NO: 586377
guauaucugcugcaugaua

SEQ ID NO: 713421 - RNA, 19 nt, Artificial Sequence
  Description of Artificial Sequence: Synthetic oligonucleotide
  Antisense strand to SEQ ID NO: 713420
uaucaugcagcagauauac

SEQ ID NO: 713422 - RNA, 19 nt, Artificial Sequence
  Description of Artificial Sequence: Synthetic oligonucleotide
  Sense strand starting at position 2908 of SEQ ID NO: 586377
auaucugcugcaugauaaa

SEQ ID NO: 713423 - RNA, 19 nt, Artificial Sequence
  Description of Artificial Sequence: Synthetic oligonucleotide
  Antisense strand to SEQ ID NO: 713422
uuuaucaugcagcagauau

SEQ ID NO: 713424 - RNA, 19 nt, Artificial Sequence
  Description of Artificial Sequence: Synthetic oligonucleotide
  Sense strand starting at position 3600 of SEQ ID NO: 586377
acaugaaauuuacgaucuu

SEQ ID NO: 713425 - RNA, 19 nt, Artificial Sequence
  Description of Artificial Sequence: Synthetic oligonucleotide
  Antisense strand to SEQ ID NO: 713424
aagaucguaaauuucaugu

SEQ ID NO: 713426 - RNA, 19 nt, Artificial Sequence
  Description of Artificial Sequence: Synthetic oligonucleotide
  Sense strand starting at position 3781 of SEQ ID NO: 586377
ucuacuuugucuuuaggaa

SEQ ID NO: 713427 - RNA, 19 nt, Artificial Sequence
  Description of Artificial Sequence: Synthetic oligonucleotide
  Antisense strand to SEQ ID NO: 713426
uuccuaaagacaaaguaga

SEQ ID NO: 713428 - RNA, 19 nt, Artificial Sequence
  Description of Artificial Sequence: Synthetic oligonucleotide
  Sense strand starting at position 3782 of SEQ ID NO: 586377
cuacuuugucuuuaggaau

SEQ ID NO: 713429 - RNA, 19 nt, Artificial Sequence
  Description of Artificial Sequence: Synthetic oligonucleotide
  Antisense strand to SEQ ID NO: 713428
auuccuaaagacaaaguag

SEQ ID NO: 713430 - RNA, 19 nt, Artificial Sequence
  Description of Artificial Sequence: Synthetic oligonucleotide
  Sense strand starting at position 3898 of SEQ ID NO: 586377
uguguuguagcuuauacua

SEQ ID NO: 713431 - RNA, 19 nt, Artificial Sequence
  Description of Artificial Sequence: Synthetic oligonucleotide
  Antisense strand to SEQ ID NO: 713430
uaguauaagcuacaacaca

SEQ ID NO: 713432 - RNA, 19 nt, Artificial Sequence
  Description of Artificial Sequence: Synthetic oligonucleotide
  Sense strand starting at position 12 of SEQ ID NO: 586378
ugugauaagcacugcaagu

SEQ ID NO: 713433 - RNA, 19 nt, Artificial Sequence
  Description of Artificial Sequence: Synthetic oligonucleotide
  Antisense strand to SEQ ID NO: 713432
acuugcagugcuuaucaca

SEQ ID NO: 713434 - RNA, 19 nt, Artificial Sequence
  Description of Artificial Sequence: Synthetic oligonucleotide
  Sense strand starting at position 14 of SEQ ID NO: 586378
ugauaagcacugcaaguua

SEQ ID NO: 713435 - RNA, 19 nt, Artificial Sequence
  Description of Artificial Sequence: Synthetic oligonucleotide
  Antisense strand to SEQ ID NO: 713434
uaacuugcagugcuuauca

SEQ ID NO: 713436 - RNA, 19 nt, Artificial Sequence
  Description of Artificial Sequence: Synthetic oligonucleotide
  Sense strand starting at position 44 of SEQ ID NO: 586378
gggacuuaagugcagaguu

SEQ ID NO: 713437 - RNA, 19 nt, Artificial Sequence
  Description of Artificial Sequence: Synthetic oligonucleotide
  Antisense strand to SEQ ID NO: 713436
aacucugcacuuaaguccc

SEQ ID NO: 713438 - RNA, 19 nt, Artificial Sequence
  Description of Artificial Sequence: Synthetic oligonucleotide
  Sense strand starting at position 185 of SEQ ID NO: 586378
ugcuguaaucccuguggau

SEQ ID NO: 713439 - RNA, 19 nt, Artificial Sequence
  Description of Artificial Sequence: Synthetic oligonucleotide
  Antisense strand to SEQ ID NO: 713438
auccacagggauuacagca

SEQ ID NO: 713440 - RNA, 19 nt, Artificial Sequence
  Description of Artificial Sequence: Synthetic oligonucleotide
  Sense strand starting at position 187 of SEQ ID NO: 586378
cuguaaucccuguggauua

SEQ ID NO: 713441 - RNA, 19 nt, Artificial Sequence
  Description of Artificial Sequence: Synthetic oligonucleotide
  Antisense strand to SEQ ID NO: 713440
uaauccacagggauuacag

SEQ ID NO: 713442 - RNA, 19 nt, Artificial Sequence
  Description of Artificial Sequence: Synthetic oligonucleotide
  Sense strand starting at position 189 of SEQ ID NO: 586378
guaaucccuguggauuaga

SEQ ID NO: 713443 - RNA, 19 nt, Artificial Sequence
  Description of Artificial Sequence: Synthetic oligonucleotide
  Antisense strand to SEQ ID NO: 713442
ucuaauccacagggauuac

SEQ ID NO: 713444 - RNA, 19 nt, Artificial Sequence
  Description of Artificial Sequence: Synthetic oligonucleotide
  Sense strand starting at position 592 of SEQ ID NO: 586378
cugucaugccuacagagua

SEQ ID NO: 713445 - RNA, 19 nt, Artificial Sequence
  Description of Artificial Sequence: Synthetic oligonucleotide
  Antisense strand to SEQ ID NO: 713444
uacucuguaggcaugacag

SEQ ID NO: 713446 - RNA, 19 nt, Artificial Sequence
  Description of Artificial Sequence: Synthetic oligonucleotide
  Sense strand starting at position 812 of SEQ ID NO: 586378
aagacaaguuucguacaac

SEQ ID NO: 713447 - RNA, 19 nt, Artificial Sequence
  Description of Artificial Sequence: Synthetic oligonucleotide
  Antisense strand to SEQ ID NO: 713446
guuguacgaaacuugucuu

SEQ ID NO: 713448 - RNA, 19 nt, Artificial Sequence
  Description of Artificial Sequence: Synthetic oligonucleotide
  Sense strand starting at position 852 of SEQ ID NO: 586378
gucaacaauuggucacauu

SEQ ID NO: 713449 - RNA, 19 nt, Artificial Sequence
  Description of Artificial Sequence: Synthetic oligonucleotide
  Antisense strand to SEQ ID NO: 713448
aaugugaccaauuguugac

SEQ ID NO: 713450 - RNA, 19 nt, Artificial Sequence
  Description of Artificial Sequence: Synthetic oligonucleotide
  Sense strand starting at position 953 of SEQ ID NO: 586378
uacagcgaguguuccagaa

SEQ ID NO: 713451 - RNA, 19 nt, Artificial Sequence
  Description of Artificial Sequence: Synthetic oligonucleotide
  Antisense strand to SEQ ID NO: 713450
uucuggaacacucgcugua

SEQ ID NO: 713452 - RNA, 19 nt, Artificial Sequence
  Description of Artificial Sequence: Synthetic oligonucleotide
  Sense strand starting at position 957 of SEQ ID NO: 586378
gcgaguguuccagaaguug

SEQ ID NO: 713453 - RNA, 19 nt, Artificial Sequence
  Description of Artificial Sequence: Synthetic oligonucleotide
  Antisense strand to SEQ ID NO: 713452
caacuucuggaacacucgc

SEQ ID NO: 713454 - RNA, 19 nt, Artificial Sequence
  Description of Artificial Sequence: Synthetic oligonucleotide
  Sense strand starting at position 994 of SEQ ID NO: 586378
aagacagacucuggaagaa

SEQ ID NO: 713455 - RNA, 19 nt, Artificial Sequence
  Description of Artificial Sequence: Synthetic oligonucleotide
  Antisense strand to SEQ ID NO: 713454
uucuuccagagucugucuu

SEQ ID NO: 713456 - RNA, 19 nt, Artificial Sequence
  Description of Artificial Sequence: Synthetic oligonucleotide
  Sense strand starting at position 1171 of SEQ ID NO: 586378
gaguacaguuccuucggau

SEQ ID NO: 713457 - RNA, 19 nt, Artificial Sequence
  Description of Artificial Sequence: Synthetic oligonucleotide
  Antisense strand to SEQ ID NO: 713456
auccgaaggaacuguacuc

SEQ ID NO: 713458 - RNA, 19 nt, Artificial Sequence
  Description of Artificial Sequence: Synthetic oligonucleotide
  Sense strand starting at position 1200 of SEQ ID NO: 586378
guagacuaucaauggccaa

SEQ ID NO: 713459 - RNA, 19 nt, Artificial Sequence
  Description of Artificial Sequence: Synthetic oligonucleotide
  Antisense strand to SEQ ID NO: 713458
uuggccauugauagucuac

SEQ ID NO: 713460 - RNA, 19 nt, Artificial Sequence
  Description of Artificial Sequence: Synthetic oligonucleotide
  Sense strand starting at position 1456 of SEQ ID NO: 586378
cguagugggccugguagaa

SEQ ID NO: 713461 - RNA, 19 nt, Artificial Sequence
  Description of Artificial Sequence: Synthetic oligonucleotide
  Antisense strand to SEQ ID NO: 713460
uucuaccaggcccacuacg

SEQ ID NO: 713462 - RNA, 19 nt, Artificial Sequence
  Description of Artificial Sequence: Synthetic oligonucleotide
  Sense strand starting at position 1465 of SEQ ID NO: 586378
ccugguagaaggcgucaaa

SEQ ID NO: 713463 - RNA, 19 nt, Artificial Sequence
  Description of Artificial Sequence: Synthetic oligonucleotide
  Antisense strand to SEQ ID NO: 713462
uuugacgccuucuaccagg

SEQ ID NO: 713464 - RNA, 19 nt, Artificial Sequence
  Description of Artificial Sequence: Synthetic oligonucleotide
  Sense strand starting at position 1468 of SEQ ID NO: 586378
gguagaaggcgucaaaguu

SEQ ID NO: 713465 - RNA, 19 nt, Artificial Sequence
  Description of Artificial Sequence: Synthetic oligonucleotide
  Antisense strand to SEQ ID NO: 713464
aacuuugacgccuucuacc

SEQ ID NO: 713466 - RNA, 19 nt, Artificial Sequence
  Description of Artificial Sequence: Synthetic oligonucleotide
  Sense strand starting at position 1474 of SEQ ID NO: 586378
aggcgucaaaguugaacau

SEQ ID NO: 713467 - RNA, 19 nt, Artificial Sequence
  Description of Artificial Sequence: Synthetic oligonucleotide
  Antisense strand to SEQ ID NO: 713466
auguucaacuuugacgccu

SEQ ID NO: 713468 - RNA, 19 nt, Artificial Sequence
  Description of Artificial Sequence: Synthetic oligonucleotide
  Sense strand starting at position 1627 of SEQ ID NO: 586378
ugaguaggccgcgaucaua

SEQ ID NO: 713469 - RNA, 19 nt, Artificial Sequence
  Description of Artificial Sequence: Synthetic oligonucleotide
  Antisense strand to SEQ ID NO: 713468
uaugaucgcggccuacuca

SEQ ID NO: 713470 - RNA, 19 nt, Artificial Sequence
  Description of Artificial Sequence: Synthetic oligonucleotide
  Sense strand starting at position 1763 of SEQ ID NO: 586378
guaguaagccgccuugauu

SEQ ID NO: 713471 - RNA, 19 nt, Artificial Sequence
  Description of Artificial Sequence: Synthetic oligonucleotide
  Antisense strand to SEQ ID NO: 713470
aaucaaggcggcuuacuac

SEQ ID NO: 713472 - RNA, 19 nt, Artificial Sequence
  Description of Artificial Sequence: Synthetic oligonucleotide
  Sense strand starting at position 1843 of SEQ ID NO: 586378
agcagucgcccugggaaua

SEQ ID NO: 713473 - RNA, 19 nt, Artificial Sequence
  Description of Artificial Sequence: Synthetic oligonucleotide
  Antisense strand to SEQ ID NO: 713472
uauucccagggcgacugcu

SEQ ID NO: 713474 - RNA, 19 nt, Artificial Sequence
  Description of Artificial Sequence: Synthetic oligonucleotide
  Sense strand starting at position 1844 of SEQ ID NO: 586378
gcagucgcccugggaauaa

SEQ ID NO: 713475 - RNA, 19 nt, Artificial Sequence
  Description of Artificial Sequence: Synthetic oligonucleotide
  Antisense strand to SEQ ID NO: 713474
uuauucccagggcgacugc

SEQ ID NO: 713476 - RNA, 19 nt, Artificial Sequence
  Description of Artificial Sequence: Synthetic oligonucleotide
  Sense strand starting at position 1856 of SEQ ID NO: 586378
ggaauaaguccucgcuccu

SEQ ID NO: 713477 - RNA, 19 nt, Artificial Sequence
  Description of Artificial Sequence: Synthetic oligonucleotide
  Antisense strand to SEQ ID NO: 713476
aggagcgaggacuuauucc

SEQ ID NO: 713478 - RNA, 19 nt, Artificial Sequence
  Description of Artificial Sequence: Synthetic oligonucleotide
  Sense strand starting at position 2079 of SEQ ID NO: 586378
guggaacaugcguauuacu

SEQ ID NO: 713479 - RNA, 19 nt, Artificial Sequence
  Description of Artificial Sequence: Synthetic oligonucleotide
  Antisense strand to SEQ ID NO: 713478
aguaauacgcauguuccac

SEQ ID NO: 713480 - RNA, 19 nt, Artificial Sequence
  Description of Artificial Sequence: Synthetic oligonucleotide
  Sense strand starting at position 2554 of SEQ ID NO: 586378
gggugaucgcgcuugcuuu

SEQ ID NO: 713481 - RNA, 19 nt, Artificial Sequence
  Description of Artificial Sequence: Synthetic oligonucleotide
  Antisense strand to SEQ ID NO: 713480
aaagcaagcgcgaucaccc

SEQ ID NO: 713482 - RNA, 19 nt, Artificial Sequence
  Description of Artificial Sequence: Synthetic oligonucleotide
  Sense strand starting at position 2590 of SEQ ID NO: 586378
agucgaaugugacaauuug

SEQ ID NO: 713483 - RNA, 19 nt, Artificial Sequence
  Description of Artificial Sequence: Synthetic oligonucleotide
  Antisense strand to SEQ ID NO: 713482
caaauugucacauucgacu

SEQ ID NO: 713484 - RNA, 19 nt, Artificial Sequence
  Description of Artificial Sequence: Synthetic oligonucleotide
  Sense strand starting at position 2606 of SEQ ID NO: 586378
uuguccuaaacauguggua

SEQ ID NO: 713485 - RNA, 19 nt, Artificial Sequence
  Description of Artificial Sequence: Synthetic oligonucleotide
  Antisense strand to SEQ ID NO: 713484
uaccacauguuuaggacaa

SEQ ID NO: 713486 - RNA, 19 nt, Artificial Sequence
  Description of Artificial Sequence: Synthetic oligonucleotide
  Sense strand starting at position 2678 of SEQ ID NO: 586378
ggaaguaauggccguagga

SEQ ID NO: 713487 - RNA, 19 nt, Artificial Sequence
  Description of Artificial Sequence: Synthetic oligonucleotide
  Antisense strand to SEQ ID NO: 713486
uccuacggccauuacuucc

SEQ ID NO: 713488 - RNA, 19 nt, Artificial Sequence
  Description of Artificial Sequence: Synthetic oligonucleotide
  Sense strand starting at position 2680 of SEQ ID NO: 586378
aaguaauggccguaggaug

SEQ ID NO: 713489 - RNA, 19 nt, Artificial Sequence
  Description of Artificial Sequence: Synthetic oligonucleotide
  Antisense strand to SEQ ID NO: 713488
cauccuacggccauuacuu

SEQ ID NO: 713490 - RNA, 19 nt, Artificial Sequence
  Description of Artificial Sequence: Synthetic oligonucleotide
  Sense strand starting at position 2744 of SEQ ID NO: 586378
gguguauuauugucugaau

SEQ ID NO: 713491 - RNA, 19 nt, Artificial Sequence
  Description of Artificial Sequence: Synthetic oligonucleotide
  Antisense strand to SEQ ID NO: 713490
auucagacaauaauacacc

SEQ ID NO: 713492 - RNA, 19 nt, Artificial Sequence
  Description of Artificial Sequence: Synthetic oligonucleotide
  Sense strand starting at position 2745 of SEQ ID NO: 586378
guguauuauugucugaauu

SEQ ID NO: 713493 - RNA, 19 nt, Artificial Sequence
  Description of Artificial Sequence: Synthetic oligonucleotide
  Antisense strand to SEQ ID NO: 713492
aauucagacaauaauacac

SEQ ID NO: 713494 - RNA, 19 nt, Artificial Sequence
  Description of Artificial Sequence: Synthetic oligonucleotide
  Sense strand starting at position 2747 of SEQ ID NO: 586378
guauuauugucugaauuuc

SEQ ID NO: 713495 - RNA, 19 nt, Artificial Sequence
  Description of Artificial Sequence: Synthetic oligonucleotide
  Antisense strand to SEQ ID NO: 713494
gaaauucagacaauaauac

SEQ ID NO: 713496 - RNA, 19 nt, Artificial Sequence
  Description of Artificial Sequence: Synthetic oligonucleotide
  Sense strand starting at position 2765 of SEQ ID NO: 586378
cauagaggguaguuuguau

SEQ ID NO: 713497 - RNA, 19 nt, Artificial Sequence
  Description of Artificial Sequence: Synthetic oligonucleotide
  Antisense strand to SEQ ID NO: 713496
auacaaacuacccucuaug

SEQ ID NO: 713498 - RNA, 19 nt, Artificial Sequence
  Description of Artificial Sequence: Synthetic oligonucleotide
  Sense strand starting at position 2779 of SEQ ID NO: 586378
uguauaacuacugaguugu

SEQ ID NO: 713499 - RNA, 19 nt, Artificial Sequence
  Description of Artificial Sequence: Synthetic oligonucleotide
  Antisense strand to SEQ ID NO: 713498
acaacucaguaguuauaca

SEQ ID NO: 713500 - RNA, 19 nt, Artificial Sequence
  Description of Artificial Sequence: Synthetic oligonucleotide
  Sense strand starting at position 2918 of SEQ ID NO: 586378
cgucuccgcaaguaauaaa

SEQ ID NO: 713501 - RNA, 19 nt, Artificial Sequence
  Description of Artificial Sequence: Synthetic oligonucleotide
  Antisense strand to SEQ ID NO: 713500
uuuauuacuugcggagacg

SEQ ID NO: 713502 - RNA, 19 nt, Artificial Sequence
  Description of Artificial Sequence: Synthetic oligonucleotide
  Sense strand starting at position 3528 of SEQ ID NO: 586378
gugcucucucacugagaga

SEQ ID NO: 713503 - RNA, 19 nt, Artificial Sequence
  Description of Artificial Sequence: Synthetic oligonucleotide
  Antisense strand to SEQ ID NO: 713502
ucucucagugagagagcac

SEQ ID NO: 713504 - RNA, 19 nt, Artificial Sequence
  Description of Artificial Sequence: Synthetic oligonucleotide
  Sense strand starting at position 3539 of SEQ ID NO: 586378
cugagagacuagcccuauu

SEQ ID NO: 713505 - RNA, 19 nt, Artificial Sequence
  Description of Artificial Sequence: Synthetic oligonucleotide
  Antisense strand to SEQ ID NO: 713504
aauagggcuagucucucag

SEQ ID NO: 713506 - RNA, 19 nt, Artificial Sequence
  Description of Artificial Sequence: Synthetic oligonucleotide
  Sense strand starting at position 3579 of SEQ ID NO: 586378
ggcgcuauggcucauacca

SEQ ID NO: 713507 - RNA, 19 nt, Artificial Sequence
  Description of Artificial Sequence: Synthetic oligonucleotide
  Antisense strand to SEQ ID NO: 713506
ugguaugagccauagcgcc

SEQ ID NO: 713508 - RNA, 19 nt, Artificial Sequence
  Description of Artificial Sequence: Synthetic oligonucleotide
  Sense strand starting at position 3702 of SEQ ID NO: 586378
cagauauuagccgggccua

SEQ ID NO: 713509 - RNA, 19 nt, Artificial Sequence
  Description of Artificial Sequence: Synthetic oligonucleotide
  Antisense strand to SEQ ID NO: 713508
uaggcccggcuaauaucug

SEQ ID NO: 713510 - RNA, 19 nt, Artificial Sequence
  Description of Artificial Sequence: Synthetic oligonucleotide
  Sense strand starting at position 3872 of SEQ ID NO: 586378
gggacagggucucucuauu

SEQ ID NO: 713511 - RNA, 19 nt, Artificial Sequence
  Description of Artificial Sequence: Synthetic oligonucleotide
  Antisense strand to SEQ ID NO: 713510
aauagagagacccuguccc

SEQ ID NO: 713512 - RNA, 19 nt, Artificial Sequence
  Description of Artificial Sequence: Synthetic oligonucleotide
  Sense strand starting at position 48 of SEQ ID NO: 586379
ccuagcaaggguuaaucua

SEQ ID NO: 713513 - RNA, 19 nt, Artificial Sequence
  Description of Artificial Sequence: Synthetic oligonucleotide
  Antisense strand to SEQ ID NO: 713512
uagauuaacccuugcuagg

SEQ ID NO: 713514 - RNA, 19 nt, Artificial Sequence
  Description of Artificial Sequence: Synthetic oligonucleotide
  Sense strand starting at position 56 of SEQ ID NO: 586379
ggguuaaucuaccucccaa

SEQ ID NO: 713515 - RNA, 19 nt, Artificial Sequence
  Description of Artificial Sequence: Synthetic oligonucleotide
  Antisense strand to SEQ ID NO: 713514
uugggagguagauuaaccc

SEQ ID NO: 713516 - RNA, 19 nt, Artificial Sequence
  Description of Artificial Sequence: Synthetic oligonucleotide
  Sense strand starting at position 120 of SEQ ID NO: 586379
acuccuugccaguaaagag

SEQ ID NO: 713517 - RNA, 19 nt, Artificial Sequence
  Description of Artificial Sequence: Synthetic oligonucleotide
  Antisense strand to SEQ ID NO: 713516
cucuuuacuggcaaggagu

SEQ ID NO: 713518 - RNA, 19 nt, Artificial Sequence
  Description of Artificial Sequence: Synthetic oligonucleotide
  Sense strand starting at position 142 of SEQ ID NO: 586379
ggcaaagacuccucugaca

SEQ ID NO: 713519 - RNA, 19 nt, Artificial Sequence
  Description of Artificial Sequence: Synthetic oligonucleotide
  Antisense strand to SEQ ID NO: 713518
ugucagaggagucuuugcc

SEQ ID NO: 713520 - RNA, 19 nt, Artificial Sequence
  Description of Artificial Sequence: Synthetic oligonucleotide
  Sense strand starting at position 197 of SEQ ID NO: 586379
guggguucaggucaaacua

SEQ ID NO: 713521 - RNA, 19 nt, Artificial Sequence
  Description of Artificial Sequence: Synthetic oligonucleotide
  Antisense strand to SEQ ID NO: 713520
uaguuugaccugaacccac

SEQ ID NO: 713522 - RNA, 19 nt, Artificial Sequence
  Description of Artificial Sequence: Synthetic oligonucleotide
  Sense strand starting at position 208 of SEQ ID NO: 586379
ucaaacuauugucuuggua

SEQ ID NO: 713523 - RNA, 19 nt, Artificial Sequence
  Description of Artificial Sequence: Synthetic oligonucleotide
  Antisense strand to SEQ ID NO: 713522
uaccaagacaauaguuuga

SEQ ID NO: 713524 - RNA, 19 nt, Artificial Sequence
  Description of Artificial Sequence: Synthetic oligonucleotide
  Sense strand starting at position 212 of SEQ ID NO: 586379
acuauugucuugguaauua

SEQ ID NO: 713525 - RNA, 19 nt, Artificial Sequence
  Description of Artificial Sequence: Synthetic oligonucleotide
  Antisense strand to SEQ ID NO: 713524
uaauuaccaagacaauagu

SEQ ID NO: 713526 - RNA, 19 nt, Artificial Sequence
  Description of Artificial Sequence: Synthetic oligonucleotide
  Sense strand starting at position 220 of SEQ ID NO: 586379
cuugguaauuagucacaau

SEQ ID NO: 713527 - RNA, 19 nt, Artificial Sequence
  Description of Artificial Sequence: Synthetic oligonucleotide
  Antisense strand to SEQ ID NO: 713526
auugugacuaauuaccaag

SEQ ID NO: 713528 - RNA, 19 nt, Artificial Sequence
  Description of Artificial Sequence: Synthetic oligonucleotide
  Sense strand starting at position 246 of SEQ ID NO: 586379
ggaagcuaacgugaaaugu

SEQ ID NO: 713529 - RNA, 19 nt, Artificial Sequence
  Description of Artificial Sequence: Synthetic oligonucleotide
  Antisense strand to SEQ ID NO: 713528
acauuucacguuagcuucc

SEQ ID NO: 713530 - RNA, 19 nt, Artificial Sequence
  Description of Artificial Sequence: Synthetic oligonucleotide
  Sense strand starting at position 252 of SEQ ID NO: 586379
uaacgugaaaugugggaau

SEQ ID NO: 713531 - RNA, 19 nt, Artificial Sequence
  Description of Artificial Sequence: Synthetic oligonucleotide
  Antisense strand to SEQ ID NO: 713530
auucccacauuucacguua

SEQ ID NO: 713532 - RNA, 19 nt, Artificial Sequence
  Description of Artificial Sequence: Synthetic oligonucleotide
  Sense strand starting at position 254 of SEQ ID NO: 586379
acgugaaaugugggaauga

SEQ ID NO: 713533 - RNA, 19 nt, Artificial Sequence
  Description of Artificial Sequence: Synthetic oligonucleotide
  Antisense strand to SEQ ID NO: 713532
ucauucccacauuucacgu

SEQ ID NO: 713534 - RNA, 19 nt, Artificial Sequence
  Description of Artificial Sequence: Synthetic oligonucleotide
  Sense strand starting at position 276 of SEQ ID NO: 586379
uguugaauccuacaguccu

SEQ ID NO: 713535 - RNA, 19 nt, Artificial Sequence
  Description of Artificial Sequence: Synthetic oligonucleotide
  Antisense strand to SEQ ID NO: 713534
aggacuguaggauucaaca

SEQ ID NO: 713536 - RNA, 19 nt, Artificial Sequence
  Description of Artificial Sequence: Synthetic oligonucleotide
  Sense strand starting at position 535 of SEQ ID NO: 586379
ggaaauaaagaguguuagu

SEQ ID NO: 713537 - RNA, 19 nt, Artificial Sequence
  Description of Artificial Sequence: Synthetic oligonucleotide
  Antisense strand to SEQ ID NO: 713536
acuaacacucuuuauuucc

SEQ ID NO: 713538 - RNA, 19 nt, Artificial Sequence
  Description of Artificial Sequence: Synthetic oligonucleotide
  Sense strand starting at position 559 of SEQ ID NO: 586379
ccauaaugcuuucuguuag

SEQ ID NO: 713539 - RNA, 19 nt, Artificial Sequence
  Description of Artificial Sequence: Synthetic oligonucleotide
  Antisense strand to SEQ ID NO: 713538
cuaacagaaagcauuaugg

SEQ ID NO: 713540 - RNA, 19 nt, Artificial Sequence
  Description of Artificial Sequence: Synthetic oligonucleotide
  Sense strand starting at position 577 of SEQ ID NO: 586379
gaccuucugggagguuaua

SEQ ID NO: 713541 - RNA, 19 nt, Artificial Sequence
  Description of Artificial Sequence: Synthetic oligonucleotide
  Antisense strand to SEQ ID NO: 713540
uauaaccucccagaagguc

SEQ ID NO: 713542 - RNA, 19 nt, Artificial Sequence
  Description of Artificial Sequence: Synthetic oligonucleotide
  Sense strand starting at position 772 of SEQ ID NO: 586379
acauuaauguccuuuguug

SEQ ID NO: 713543 - RNA, 19 nt, Artificial Sequence
  Description of Artificial Sequence: Synthetic oligonucleotide
  Antisense strand to SEQ ID NO: 713542
caacaaaggacauuaaugu

SEQ ID NO: 713544 - RNA, 19 nt, Artificial Sequence
  Description of Artificial Sequence: Synthetic oligonucleotide
  Sense strand starting at position 1009 of SEQ ID NO: 586379
acccguucuucuccaaaga

SEQ ID NO: 713545 - RNA, 19 nt, Artificial Sequence
  Description of Artificial Sequence: Synthetic oligonucleotide
  Antisense strand to SEQ ID NO: 713544
ucuuuggagaagaacgggu

SEQ ID NO: 713546 - RNA, 19 nt, Artificial Sequence
  Description of Artificial Sequence: Synthetic oligonucleotide
  Sense strand starting at position 1092 of SEQ ID NO: 586379
ccauaaauccgggaucgca

SEQ ID NO: 713547 - RNA, 19 nt, Artificial Sequence
  Description of Artificial Sequence: Synthetic oligonucleotide
  Antisense strand to SEQ ID NO: 713546
ugcgaucccggauuuaugg

SEQ ID NO: 713548 - RNA, 19 nt, Artificial Sequence
  Description of Artificial Sequence: Synthetic oligonucleotide
  Sense strand starting at position 1720 of SEQ ID NO: 586379
agguauccacauggcuaaa

SEQ ID NO: 713549 - RNA, 19 nt, Artificial Sequence
  Description of Artificial Sequence: Synthetic oligonucleotide
  Antisense strand to SEQ ID NO: 713548
uuuagccauguggauaccu

SEQ ID NO: 713550 - RNA, 19 nt, Artificial Sequence
  Description of Artificial Sequence: Synthetic oligonucleotide
  Sense strand starting at position 1971 of SEQ ID NO: 586379
ggcgcagucauuguucuga

SEQ ID NO: 713551 - RNA, 19 nt, Artificial Sequence
  Description of Artificial Sequence: Synthetic oligonucleotide
  Antisense strand to SEQ ID NO: 713550
ucagaacaaugacugcgcc

SEQ ID NO: 713552 - RNA, 19 nt, Artificial Sequence
  Description of Artificial Sequence: Synthetic oligonucleotide
  Sense strand starting at position 2433 of SEQ ID NO: 586379
ugucuuccuuucucuauga

SEQ ID NO: 713553 - RNA, 19 nt, Artificial Sequence
  Description of Artificial Sequence: Synthetic oligonucleotide
  Antisense strand to SEQ ID NO: 713552
ucauagagaaaggaagaca

SEQ ID NO: 713554 - RNA, 19 nt, Artificial Sequence
  Description of Artificial Sequence: Synthetic oligonucleotide
  Sense strand starting at position 2717 of SEQ ID NO: 586379
guggguuugguucagaucu

SEQ ID NO: 713555 - RNA, 19 nt, Artificial Sequence
  Description of Artificial Sequence: Synthetic oligonucleotide
  Antisense strand to SEQ ID NO: 713554
agaucugaaccaaacccac

SEQ ID NO: 713556 - RNA, 19 nt, Artificial Sequence
  Description of Artificial Sequence: Synthetic oligonucleotide
  Sense strand starting at position 2994 of SEQ ID NO: 586379
guauguggagccugagaga

SEQ ID NO: 713557 - RNA, 19 nt, Artificial Sequence
  Description of Artificial Sequence: Synthetic oligonucleotide
  Antisense strand to SEQ ID NO: 713556
ucucucaggcuccacauac

SEQ ID NO: 713558 - RNA, 19 nt, Artificial Sequence
  Description of Artificial Sequence: Synthetic oligonucleotide
  Sense strand starting at position 3021 of SEQ ID NO: 586379
gucucuggguccuuagaga

SEQ ID NO: 713559 - RNA, 19 nt, Artificial Sequence
  Description of Artificial Sequence: Synthetic oligonucleotide
  Antisense strand to SEQ ID NO: 713558
ucucuaaggacccagagac

SEQ ID NO: 713560 - RNA, 19 nt, Artificial Sequence
  Description of Artificial Sequence: Synthetic oligonucleotide
  Sense strand starting at position 3044 of SEQ ID NO: 586379
aaaggaaagugauagauaa

SEQ ID NO: 713561 - RNA, 19 nt, Artificial Sequence
  Description of Artificial Sequence: Synthetic oligonucleotide
  Antisense strand to SEQ ID NO: 713560
uuaucuaucacuuuccuuu

SEQ ID NO: 713562 - RNA, 19 nt, Artificial Sequence
  Description of Artificial Sequence: Synthetic oligonucleotide
  Sense strand starting at position 3137 of SEQ ID NO: 586379
cagguuguccucugaucca

SEQ ID NO: 713563 - RNA, 19 nt, Artificial Sequence
  Description of Artificial Sequence: Synthetic oligonucleotide
  Antisense strand to SEQ ID NO: 713562
uggaucagaggacaaccug

SEQ ID NO: 713564 - RNA, 19 nt, Artificial Sequence
  Description of Artificial Sequence: Synthetic oligonucleotide
  Sense strand starting at position 3191 of SEQ ID NO: 586379
gguggauuguguuuaggac

SEQ ID NO: 713565 - RNA, 19 nt, Artificial Sequence
  Description of Artificial Sequence: Synthetic oligonucleotide
  Antisense strand to SEQ ID NO: 713564
guccuaaacacaauccacc

SEQ ID NO: 713566 - RNA, 19 nt, Artificial Sequence
  Description of Artificial Sequence: Synthetic oligonucleotide
  Sense strand starting at position 3192 of SEQ ID NO: 586379
guggauuguguuuaggacu

SEQ ID NO: 713567 - RNA, 19 nt, Artificial Sequence
  Description of Artificial Sequence: Synthetic oligonucleotide
  Antisense strand to SEQ ID NO: 713566
aguccuaaacacaauccac

SEQ ID NO: 713568 - RNA, 19 nt, Artificial Sequence
  Description of Artificial Sequence: Synthetic oligonucleotide
  Sense strand starting at position 3256 of SEQ ID NO: 586379
uugucuugauguguaauuu

SEQ ID NO: 713569 - RNA, 19 nt, Artificial Sequence
  Description of Artificial Sequence: Synthetic oligonucleotide
  Antisense strand to SEQ ID NO: 713568
aaauuacacaucaagacaa

SEQ ID NO: 713570 - RNA, 19 nt, Artificial Sequence
  Description of Artificial Sequence: Synthetic oligonucleotide
  Sense strand starting at position 3260 of SEQ ID NO: 586379
cuugauguguaauuuagca

SEQ ID NO: 713571 - RNA, 19 nt, Artificial Sequence
  Description of Artificial Sequence: Synthetic oligonucleotide
  Antisense strand to SEQ ID NO: 713570
ugcuaaauuacacaucaag

SEQ ID NO: 713572 - RNA, 19 nt, Artificial Sequence
  Description of Artificial Sequence: Synthetic oligonucleotide
  Sense strand starting at position 3504 of SEQ ID NO: 586379
guagucuccugaguuaaau

SEQ ID NO: 713573 - RNA, 19 nt, Artificial Sequence
  Description of Artificial Sequence: Synthetic oligonucleotide
  Antisense strand to SEQ ID NO: 713572
auuuaacucaggagacuac

SEQ ID NO: 713574 - RNA, 19 nt, Artificial Sequence
  Description of Artificial Sequence: Synthetic oligonucleotide
  Sense strand starting at position 3558 of SEQ ID NO: 586379
ugguuauauauugggcuau

SEQ ID NO: 713575 - RNA, 19 nt, Artificial Sequence
  Description of Artificial Sequence: Synthetic oligonucleotide
  Antisense strand to SEQ ID NO: 713574
auagcccaauauauaacca

SEQ ID NO: 713576 - RNA, 19 nt, Artificial Sequence
  Description of Artificial Sequence: Synthetic oligonucleotide
  Sense strand starting at position 3560 of SEQ ID NO: 586379
guuauauauugggcuaucu

SEQ ID NO: 713577 - RNA, 19 nt, Artificial Sequence
  Description of Artificial Sequence: Synthetic oligonucleotide
  Antisense strand to SEQ ID NO: 713576
agauagcccaauauauaac

SEQ ID NO: 713578 - RNA, 19 nt, Artificial Sequence
  Description of Artificial Sequence: Synthetic oligonucleotide
  Sense strand starting at position 3562 of SEQ ID NO: 586379
uauauauugggcuaucuga

SEQ ID NO: 713579 - RNA, 19 nt, Artificial Sequence
  Description of Artificial Sequence: Synthetic oligonucleotide
  Antisense strand to SEQ ID NO: 713578
ucagauagcccaauauaua

SEQ ID NO: 713580 - RNA, 19 nt, Artificial Sequence
  Description of Artificial Sequence: Synthetic oligonucleotide
  Sense strand starting at position 3570 of SEQ ID NO: 586379
gggcuaucugaugguaaca

SEQ ID NO: 713581 - RNA, 19 nt, Artificial Sequence
  Description of Artificial Sequence: Synthetic oligonucleotide
  Antisense strand to SEQ ID NO: 713580
uguuaccaucagauagccc

SEQ ID NO: 713582 - RNA, 19 nt, Artificial Sequence
  Description of Artificial Sequence: Synthetic oligonucleotide
  Sense strand starting at position 3591 of SEQ ID NO: 586379
cuauuacgguuuccuagau

SEQ ID NO: 713583 - RNA, 19 nt, Artificial Sequence
  Description of Artificial Sequence: Synthetic oligonucleotide
  Antisense strand to SEQ ID NO: 713582
aucuaggaaaccguaauag

SEQ ID NO: 713584 - RNA, 19 nt, Artificial Sequence
  Description of Artificial Sequence: Synthetic oligonucleotide
  Sense strand starting at position 3592 of SEQ ID NO: 586379
uauuacgguuuccuagauu

SEQ ID NO: 713585 - RNA, 19 nt, Artificial Sequence
  Description of Artificial Sequence: Synthetic oligonucleotide
  Antisense strand to SEQ ID NO: 713584
aaucuaggaaaccguaaua

SEQ ID NO: 713586 - RNA, 19 nt, Artificial Sequence
  Description of Artificial Sequence: Synthetic oligonucleotide
  Sense strand starting at position 3625 of SEQ ID NO: 586379
gggcuaccaguuuaagauc

SEQ ID NO: 713587 - RNA, 19 nt, Artificial Sequence
  Description of Artificial Sequence: Synthetic oligonucleotide
  Antisense strand to SEQ ID NO: 713586
gaucuuaaacugguagccc

SEQ ID NO: 713588 - RNA, 19 nt, Artificial Sequence
  Description of Artificial Sequence: Synthetic oligonucleotide
  Sense strand starting at position 3640 of SEQ ID NO: 586379
gaucuaaacuggugaauuu

SEQ ID NO: 713589 - RNA, 19 nt, Artificial Sequence
  Description of Artificial Sequence: Synthetic oligonucleotide
  Antisense strand to SEQ ID NO: 713588
aaauucaccaguuuagauc

SEQ ID NO: 713590 - RNA, 19 nt, Artificial Sequence
  Description of Artificial Sequence: Synthetic oligonucleotide
  Sense strand starting at position 3906 of SEQ ID NO: 586379
uguggugagccaugaucca

SEQ ID NO: 713591 - RNA, 19 nt, Artificial Sequence
  Description of Artificial Sequence: Synthetic oligonucleotide
  Antisense strand to SEQ ID NO: 713590
uggaucauggcucaccaca

SEQ ID NO: 713592 - RNA, 19 nt, Artificial Sequence
  Description of Artificial Sequence: Synthetic oligonucleotide
  Sense strand starting at position 151 of SEQ ID NO: 586380
ugcuuaaagcgagaucuca

SEQ ID NO: 713593 - RNA, 19 nt, Artificial Sequence
  Description of Artificial Sequence: Synthetic oligonucleotide
  Antisense strand to SEQ ID NO: 713592
ugagaucucgcuuuaagca

SEQ ID NO: 713594 - RNA, 19 nt, Artificial Sequence
  Description of Artificial Sequence: Synthetic oligonucleotide
  Sense strand starting at position 309 of SEQ ID NO: 586380
ugcaaaucugcagaaccuu

SEQ ID NO: 713595 - RNA, 19 nt, Artificial Sequence
  Description of Artificial Sequence: Synthetic oligonucleotide
  Antisense strand to SEQ ID NO: 713594
aagguucugcagauuugca

SEQ ID NO: 713596 - RNA, 19 nt, Artificial Sequence
  Description of Artificial Sequence: Synthetic oligonucleotide
  Sense strand starting at position 415 of SEQ ID NO: 586380
aagggaccgucagaggauu

SEQ ID NO: 713597 - RNA, 19 nt, Artificial Sequence
  Description of Artificial Sequence: Synthetic oligonucleotide
  Antisense strand to SEQ ID NO: 713596
aauccucugacggucccuu

SEQ ID NO: 713598 - RNA, 19 nt, Artificial Sequence
  Description of Artificial Sequence: Synthetic oligonucleotide
  Sense strand starting at position 426 of SEQ ID NO: 586380
agaggauucuucucagacc

SEQ ID NO: 713599 - RNA, 19 nt, Artificial Sequence
  Description of Artificial Sequence: Synthetic oligonucleotide
  Antisense strand to SEQ ID NO: 713598
ggucugagaagaauccucu

SEQ ID NO: 713600 - RNA, 19 nt, Artificial Sequence
  Description of Artificial Sequence: Synthetic oligonucleotide
  Sense strand starting at position 427 of SEQ ID NO: 586380
gaggauucuucucagacca

SEQ ID NO: 713601 - RNA, 19 nt, Artificial Sequence
  Description of Artificial Sequence: Synthetic oligonucleotide
  Antisense strand to SEQ ID NO: 713600
uggucugagaagaauccuc

SEQ ID NO: 713602 - RNA, 19 nt, Artificial Sequence
  Description of Artificial Sequence: Synthetic oligonucleotide
  Sense strand starting at position 429 of SEQ ID NO: 586380
ggauucuucucagaccaug

SEQ ID NO: 713603 - RNA, 19 nt, Artificial Sequence
  Description of Artificial Sequence: Synthetic oligonucleotide
  Antisense strand to SEQ ID NO: 713602
cauggucugagaagaaucc

SEQ ID NO: 713604 - RNA, 19 nt, Artificial Sequence
  Description of Artificial Sequence: Synthetic oligonucleotide
  Sense strand starting at position 669 of SEQ ID NO: 586380
uuagaaaguuauccgugca

SEQ ID NO: 713605 - RNA, 19 nt, Artificial Sequence
  Description of Artificial Sequence: Synthetic oligonucleotide
  Antisense strand to SEQ ID NO: 713604
ugcacggauaacuuucuaa

SEQ ID NO: 713606 - RNA, 19 nt, Artificial Sequence
  Description of Artificial Sequence: Synthetic oligonucleotide
  Sense strand starting at position 672 of SEQ ID NO: 586380
gaaaguuauccgugcagaa

SEQ ID NO: 713607 - RNA, 19 nt, Artificial Sequence
  Description of Artificial Sequence: Synthetic oligonucleotide
  Antisense strand to SEQ ID NO: 713606
uucugcacggauaacuuuc

SEQ ID NO: 713608 - RNA, 19 nt, Artificial Sequence
  Description of Artificial Sequence: Synthetic oligonucleotide
  Sense strand starting at position 674 of SEQ ID NO: 586380
aaguuauccgugcagaacu

SEQ ID NO: 713609 - RNA, 19 nt, Artificial Sequence
  Description of Artificial Sequence: Synthetic oligonucleotide
  Antisense strand to SEQ ID NO: 713608
aguucugcacggauaacuu

SEQ ID NO: 713610 - RNA, 19 nt, Artificial Sequence
  Description of Artificial Sequence: Synthetic oligonucleotide
  Sense strand starting at position 1154 of SEQ ID NO: 586380
aguugcaauuugcaaagaa

SEQ ID NO: 713611 - RNA, 19 nt, Artificial Sequence
  Description of Artificial Sequence: Synthetic oligonucleotide
  Antisense strand to SEQ ID NO: 713610
uucuuugcaaauugcaacu

SEQ ID NO: 713612 - RNA, 19 nt, Artificial Sequence
  Description of Artificial Sequence: Synthetic oligonucleotide
  Sense strand starting at position 2043 of SEQ ID NO: 586380
agcgcaaacuguuugggua

SEQ ID NO: 713613 - RNA, 19 nt, Artificial Sequence
  Description of Artificial Sequence: Synthetic oligonucleotide
  Antisense strand to SEQ ID NO: 713612
uacccaaacaguuugcgcu

SEQ ID NO: 713614 - RNA, 19 nt, Artificial Sequence
  Description of Artificial Sequence: Synthetic oligonucleotide
  Sense strand starting at position 2047 of SEQ ID NO: 586380
caaacuguuuggguaacga

SEQ ID NO: 713615 - RNA, 19 nt, Artificial Sequence
  Description of Artificial Sequence: Synthetic oligonucleotide
  Antisense strand to SEQ ID NO: 713614
ucguuacccaaacaguuug

SEQ ID NO: 713616 - RNA, 19 nt, Artificial Sequence
  Description of Artificial Sequence: Synthetic oligonucleotide
  Sense strand starting at position 2204 of SEQ ID NO: 586380
ccggguguuaacuauugau

SEQ ID NO: 713617 - RNA, 19 nt, Artificial Sequence
  Description of Artificial Sequence: Synthetic oligonucleotide
  Antisense strand to SEQ ID NO: 713616
aucaauaguuaacacccgg

SEQ ID NO: 713618 - RNA, 19 nt, Artificial Sequence
  Description of Artificial Sequence: Synthetic oligonucleotide
  Sense strand starting at position 2785 of SEQ ID NO: 586380
cgcuguucccaucaaucau

SEQ ID NO: 713619 - RNA, 19 nt, Artificial Sequence
  Description of Artificial Sequence: Synthetic oligonucleotide
  Antisense strand to SEQ ID NO: 713618
augauugaugggaacagcg

SEQ ID NO: 713620 - RNA, 19 nt, Artificial Sequence
  Description of Artificial Sequence: Synthetic oligonucleotide
  Sense strand starting at position 2864 of SEQ ID NO: 586380
cgcagagguuggucaaauu

SEQ ID NO: 713621 - RNA, 19 nt, Artificial Sequence
  Description of Artificial Sequence: Synthetic oligonucleotide
  Antisense strand to SEQ ID NO: 713620
aauuugaccaaccucugcg

SEQ ID NO: 713622 - RNA, 19 nt, Artificial Sequence
  Description of Artificial Sequence: Synthetic oligonucleotide
  Sense strand starting at position 3129 of SEQ ID NO: 586380
aguagaugauucuaaguaa

SEQ ID NO: 713623 - RNA, 19 nt, Artificial Sequence
  Description of Artificial Sequence: Synthetic oligonucleotide
  Antisense strand to SEQ ID NO: 713622
uuacuuagaaucaucuacu

SEQ ID NO: 713624 - RNA, 19 nt, Artificial Sequence
  Description of Artificial Sequence: Synthetic oligonucleotide
  Sense strand starting at position 3132 of SEQ ID NO: 586380
agaugauucuaaguaauug

SEQ ID NO: 713625 - RNA, 19 nt, Artificial Sequence
  Description of Artificial Sequence: Synthetic oligonucleotide
  Antisense strand to SEQ ID NO: 713624
caauuacuuagaaucaucu

SEQ ID NO: 713626 - RNA, 19 nt, Artificial Sequence
  Description of Artificial Sequence: Synthetic oligonucleotide
  Sense strand starting at position 3162 of SEQ ID NO: 586380
acauguaaguuauccacaa

SEQ ID NO: 713627 - RNA, 19 nt, Artificial Sequence
  Description of Artificial Sequence: Synthetic oligonucleotide
  Antisense strand to SEQ ID NO: 713626
uuguggauaacuuacaugu

SEQ ID NO: 713628 - RNA, 19 nt, Artificial Sequence
  Description of Artificial Sequence: Synthetic oligonucleotide
  Sense strand starting at position 3241 of SEQ ID NO: 586380
aggacaugugcacgagcaa

SEQ ID NO: 713629 - RNA, 19 nt, Artificial Sequence
  Description of Artificial Sequence: Synthetic oligonucleotide
  Antisense strand to SEQ ID NO: 713628
uugcucgugcacauguccu

SEQ ID NO: 713630 - RNA, 19 nt, Artificial Sequence
  Description of Artificial Sequence: Synthetic oligonucleotide
  Sense strand starting at position 3242 of SEQ ID NO: 586380
ggacaugugcacgagcaau

SEQ ID NO: 713631 - RNA, 19 nt, Artificial Sequence
  Description of Artificial Sequence: Synthetic oligonucleotide
  Antisense strand to SEQ ID NO: 713630
auugcucgugcacaugucc

SEQ ID NO: 713632 - RNA, 19 nt, Artificial Sequence
  Description of Artificial Sequence: Synthetic oligonucleotide
  Sense strand starting at position 3250 of SEQ ID NO: 586380
gcacgagcaauugguuaca

SEQ ID NO: 713633 - RNA, 19 nt, Artificial Sequence
  Description of Artificial Sequence: Synthetic oligonucleotide
  Antisense strand to SEQ ID NO: 713632
uguaaccaauugcucgugc

SEQ ID NO: 713634 - RNA, 19 nt, Artificial Sequence
  Description of Artificial Sequence: Synthetic oligonucleotide
  Sense strand starting at position 3253 of SEQ ID NO: 586380
cgagcaauugguuacaagu

SEQ ID NO: 713635 - RNA, 19 nt, Artificial Sequence
  Description of Artificial Sequence: Synthetic oligonucleotide
  Antisense strand to SEQ ID NO: 713634
acuuguaaccaauugcucg

SEQ ID NO: 713636 - RNA, 19 nt, Artificial Sequence
  Description of Artificial Sequence: Synthetic oligonucleotide
  Sense strand starting at position 3261 of SEQ ID NO: 586380
ugguuacaaguguaaacua

SEQ ID NO: 713637 - RNA, 19 nt, Artificial Sequence
  Description of Artificial Sequence: Synthetic oligonucleotide
  Antisense strand to SEQ ID NO: 713636
uaguuuacacuuguaacca

SEQ ID NO: 713638 - RNA, 19 nt, Artificial Sequence
  Description of Artificial Sequence: Synthetic oligonucleotide
  Sense strand starting at position 3269 of SEQ ID NO: 586380
aguguaaacuaaugauuug

SEQ ID NO: 713639 - RNA, 19 nt, Artificial Sequence
  Description of Artificial Sequence: Synthetic oligonucleotide
  Antisense strand to SEQ ID NO: 713638
caaaucauuaguuuacacu

SEQ ID NO: 713640 - RNA, 19 nt, Artificial Sequence
  Description of Artificial Sequence: Synthetic oligonucleotide
  Sense strand starting at position 3361 of SEQ ID NO: 586380
uggaucaggcuuugcuaga

SEQ ID NO: 713641 - RNA, 19 nt, Artificial Sequence
  Description of Artificial Sequence: Synthetic oligonucleotide
  Antisense strand to SEQ ID NO: 713640
ucuagcaaagccugaucca

SEQ ID NO: 713642 - RNA, 19 nt, Artificial Sequence
  Description of Artificial Sequence: Synthetic oligonucleotide
  Sense strand starting at position 3362 of SEQ ID NO: 586380
ggaucaggcuuugcuagaa

SEQ ID NO: 713643 - RNA, 19 nt, Artificial Sequence
  Description of Artificial Sequence: Synthetic oligonucleotide
  Antisense strand to SEQ ID NO: 713642
uucuagcaaagccugaucc

SEQ ID NO: 713644 - RNA, 19 nt, Artificial Sequence
  Description of Artificial Sequence: Synthetic oligonucleotide
  Sense strand starting at position 3366 of SEQ ID NO: 586380
caggcuuugcuagaaagug

SEQ ID NO: 713645 - RNA, 19 nt, Artificial Sequence
  Description of Artificial Sequence: Synthetic oligonucleotide
  Antisense strand to SEQ ID NO: 713644
cacuuucuagcaaagccug

SEQ ID NO: 713646 - RNA, 19 nt, Artificial Sequence
  Description of Artificial Sequence: Synthetic oligonucleotide
  Sense strand starting at position 3409 of SEQ ID NO: 586380
gcacucuucucuguuggga

SEQ ID NO: 713647 - RNA, 19 nt, Artificial Sequence
  Description of Artificial Sequence: Synthetic oligonucleotide
  Antisense strand to SEQ ID NO: 713646
ucccaacagagaagagugc

SEQ ID NO: 713648 - RNA, 19 nt, Artificial Sequence
  Description of Artificial Sequence: Synthetic oligonucleotide
  Sense strand starting at position 3418 of SEQ ID NO: 586380
ucuguugggauuugucuua

SEQ ID NO: 713649 - RNA, 19 nt, Artificial Sequence
  Description of Artificial Sequence: Synthetic oligonucleotide
  Antisense strand to SEQ ID NO: 713648
uaagacaaaucccaacaga

SEQ ID NO: 713650 - RNA, 19 nt, Artificial Sequence
  Description of Artificial Sequence: Synthetic oligonucleotide
  Sense strand starting at position 3423 of SEQ ID NO: 586380
ugggauuugucuuacuguc

SEQ ID NO: 713651 - RNA, 19 nt, Artificial Sequence
  Description of Artificial Sequence: Synthetic oligonucleotide
  Antisense strand to SEQ ID NO: 713650
gacaguaagacaaauccca

SEQ ID NO: 713652 - RNA, 19 nt, Artificial Sequence
  Description of Artificial Sequence: Synthetic oligonucleotide
  Sense strand starting at position 3425 of SEQ ID NO: 586380
ggauuugucuuacugucuu

SEQ ID NO: 713653 - RNA, 19 nt, Artificial Sequence
  Description of Artificial Sequence: Synthetic oligonucleotide
  Antisense strand to SEQ ID NO: 713652
aagacaguaagacaaaucc

SEQ ID NO: 713654 - RNA, 19 nt, Artificial Sequence
  Description of Artificial Sequence: Synthetic oligonucleotide
  Sense strand starting at position 3436 of SEQ ID NO: 586380
acugucuucuggcugugau

SEQ ID NO: 713655 - RNA, 19 nt, Artificial Sequence
  Description of Artificial Sequence: Synthetic oligonucleotide
  Antisense strand to SEQ ID NO: 713654
aucacagccagaagacagu

SEQ ID NO: 713656 - RNA, 19 nt, Artificial Sequence
  Description of Artificial Sequence: Synthetic oligonucleotide
  Sense strand starting at position 3437 of SEQ ID NO: 586380
cugucuucuggcugugaua

SEQ ID NO: 713657 - RNA, 19 nt, Artificial Sequence
  Description of Artificial Sequence: Synthetic oligonucleotide
  Antisense strand to SEQ ID NO: 713656
uaucacagccagaagacag

SEQ ID NO: 713658 - RNA, 19 nt, Artificial Sequence
  Description of Artificial Sequence: Synthetic oligonucleotide
  Sense strand starting at position 3439 of SEQ ID NO: 586380
gucuucuggcugugauaac

SEQ ID NO: 713659 - RNA, 19 nt, Artificial Sequence
  Description of Artificial Sequence: Synthetic oligonucleotide
  Antisense strand to SEQ ID NO: 713658
guuaucacagccagaagac

SEQ ID NO: 713660 - RNA, 19 nt, Artificial Sequence
  Description of Artificial Sequence: Synthetic oligonucleotide
  Sense strand starting at position 3558 of SEQ ID NO: 586380
uggugagaaucugauuucu

SEQ ID NO: 713661 - RNA, 19 nt, Artificial Sequence
  Description of Artificial Sequence: Synthetic oligonucleotide
  Antisense strand to SEQ ID NO: 713660
agaaaucagauucucacca

SEQ ID NO: 713662 - RNA, 19 nt, Artificial Sequence
  Description of Artificial Sequence: Synthetic oligonucleotide
  Sense strand starting at position 3606 of SEQ ID NO: 586380
aucacauggugugaggaaa

SEQ ID NO: 713663 - RNA, 19 nt, Artificial Sequence
  Description of Artificial Sequence: Synthetic oligonucleotide
  Antisense strand to SEQ ID NO: 713662
uuuccucacaccaugugau

SEQ ID NO: 713664 - RNA, 19 nt, Artificial Sequence
  Description of Artificial Sequence: Synthetic oligonucleotide
  Sense strand starting at position 3826 of SEQ ID NO: 586380
ggucacuuacacuguugaa

SEQ ID NO: 713665 - RNA, 19 nt, Artificial Sequence
  Description of Artificial Sequence: Synthetic oligonucleotide
  Antisense strand to SEQ ID NO: 713664
uucaacaguguaagugacc

SEQ ID NO: 713666 - RNA, 19 nt, Artificial Sequence
  Description of Artificial Sequence: Synthetic oligonucleotide
  Sense strand starting at position 3889 of SEQ ID NO: 586380
ucuaaauccgauuguaagc

SEQ ID NO: 713667 - RNA, 19 nt, Artificial Sequence
  Description of Artificial Sequence: Synthetic oligonucleotide
  Antisense strand to SEQ ID NO: 713666
gcuuacaaucggauuuaga

SEQ ID NO: 713668 - RNA, 19 nt, Artificial Sequence
  Description of Artificial Sequence: Synthetic oligonucleotide
  Sense strand starting at position 3898 of SEQ ID NO: 586380
gauuguaagcaggguuaau

SEQ ID NO: 713669 - RNA, 19 nt, Artificial Sequence
  Description of Artificial Sequence: Synthetic oligonucleotide
  Antisense strand to SEQ ID NO: 713668
auuaacccugcuuacaauc

SEQ ID NO: 713670 - RNA, 19 nt, Artificial Sequence
  Description of Artificial Sequence: Synthetic oligonucleotide
  Sense strand starting at position 3942 of SEQ ID NO: 586380
agcggcauucguucaucua

SEQ ID NO: 713671 - RNA, 19 nt, Artificial Sequence
  Description of Artificial Sequence: Synthetic oligonucleotide
  Antisense strand to SEQ ID NO: 713670
uagaugaacgaaugccgcu

SEQ ID NO: 713672 - RNA, 19 nt, Artificial Sequence
  Description of Artificial Sequence: Synthetic oligonucleotide
  Sense strand starting at position 34 of SEQ ID NO: 586381
agagcaaauuuguacagga

SEQ ID NO: 713673 - RNA, 19 nt, Artificial Sequence
  Description of Artificial Sequence: Synthetic oligonucleotide
  Antisense strand to SEQ ID NO: 713672
uccuguacaaauuugcucu

SEQ ID NO: 713674 - RNA, 19 nt, Artificial Sequence
  Description of Artificial Sequence: Synthetic oligonucleotide
  Sense strand starting at position 116 of SEQ ID NO: 586381
gguguagaccuaugaacag

SEQ ID NO: 713675 - RNA, 19 nt, Artificial Sequence
  Description of Artificial Sequence: Synthetic oligonucleotide
  Antisense strand to SEQ ID NO: 713674
cuguucauaggucuacacc

SEQ ID NO: 713676 - RNA, 19 nt, Artificial Sequence
  Description of Artificial Sequence: Synthetic oligonucleotide
  Sense strand starting at position 316 of SEQ ID NO: 586381
agcaaauauucuguggaau

SEQ ID NO: 713677 - RNA, 19 nt, Artificial Sequence
  Description of Artificial Sequence: Synthetic oligonucleotide
  Antisense strand to SEQ ID NO: 713676
auuccacagaauauuugcu

SEQ ID NO: 713678 - RNA, 19 nt, Artificial Sequence
  Description of Artificial Sequence: Synthetic oligonucleotide
  Sense strand starting at position 317 of SEQ ID NO: 586381
gcaaauauucuguggaauu

SEQ ID NO: 713679 - RNA, 19 nt, Artificial Sequence
  Description of Artificial Sequence: Synthetic oligonucleotide
  Antisense strand to SEQ ID NO: 713678
aauuccacagaauauuugc

SEQ ID NO: 713680 - RNA, 19 nt, Artificial Sequence
  Description of Artificial Sequence: Synthetic oligonucleotide
  Sense strand starting at position 379 of SEQ ID NO: 586381
agcuauacugagcaucaau

SEQ ID NO: 713681 - RNA, 19 nt, Artificial Sequence
  Description of Artificial Sequence: Synthetic oligonucleotide
  Antisense strand to SEQ ID NO: 713680
auugaugcucaguauagcu

SEQ ID NO: 713682 - RNA, 19 nt, Artificial Sequence
  Description of Artificial Sequence: Synthetic oligonucleotide
  Sense strand starting at position 450 of SEQ ID NO: 586381
agaaucuucuucccagaug

SEQ ID NO: 713683 - RNA, 19 nt, Artificial Sequence
  Description of Artificial Sequence: Synthetic oligonucleotide
  Antisense strand to SEQ ID NO: 713682
caucugggaagaagauucu

SEQ ID NO: 713684 - RNA, 19 nt, Artificial Sequence
  Description of Artificial Sequence: Synthetic oligonucleotide
  Sense strand starting at position 605 of SEQ ID NO: 586381
aagaguuggcauggaauuc

SEQ ID NO: 713685 - RNA, 19 nt, Artificial Sequence
  Description of Artificial Sequence: Synthetic oligonucleotide
  Antisense strand to SEQ ID NO: 713684
gaauuccaugccaacucuu

SEQ ID NO: 713686 - RNA, 19 nt, Artificial Sequence
  Description of Artificial Sequence: Synthetic oligonucleotide
  Sense strand starting at position 754 of SEQ ID NO: 586381
guugauuuaccacgcuuga

SEQ ID NO: 713687 - RNA, 19 nt, Artificial Sequence
  Description of Artificial Sequence: Synthetic oligonucleotide
  Antisense strand to SEQ ID NO: 713686
ucaagcgugguaaaucaac

SEQ ID NO: 713688 - RNA, 19 nt, Artificial Sequence
  Description of Artificial Sequence: Synthetic oligonucleotide
  Sense strand starting at position 817 of SEQ ID NO: 586381
uaaugaucugccugaggug

SEQ ID NO: 713689 - RNA, 19 nt, Artificial Sequence
  Description of Artificial Sequence: Synthetic oligonucleotide
  Antisense strand to SEQ ID NO: 713688
caccucaggcagaucauua

SEQ ID NO: 713690 - RNA, 19 nt, Artificial Sequence
  Description of Artificial Sequence: Synthetic oligonucleotide
  Sense strand starting at position 818 of SEQ ID NO: 586381
aaugaucugccugagguga

SEQ ID NO: 713691 - RNA, 19 nt, Artificial Sequence
  Description of Artificial Sequence: Synthetic oligonucleotide
  Antisense strand to SEQ ID NO: 713690
ucaccucaggcagaucauu

SEQ ID NO: 713692 - RNA, 19 nt, Artificial Sequence
  Description of Artificial Sequence: Synthetic oligonucleotide
  Sense strand starting at position 834 of SEQ ID NO: 586381
ugaacugagcaaugauuaa

SEQ ID NO: 713693 - RNA, 19 nt, Artificial Sequence
  Description of Artificial Sequence: Synthetic oligonucleotide
  Antisense strand to SEQ ID NO: 713692
uuaaucauugcucaguuca

SEQ ID NO: 713694 - RNA, 19 nt, Artificial Sequence
  Description of Artificial Sequence: Synthetic oligonucleotide
  Sense strand starting at position 882 of SEQ ID NO: 586381
agggaauuacgaugucuac

SEQ ID NO: 713695 - RNA, 19 nt, Artificial Sequence
  Description of Artificial Sequence: Synthetic oligonucleotide
  Antisense strand to SEQ ID NO: 713694
guagacaucguaauucccu

SEQ ID NO: 713696 - RNA, 19 nt, Artificial Sequence
  Description of Artificial Sequence: Synthetic oligonucleotide
  Sense strand starting at position 1031 of SEQ ID NO: 586381
cgcggucagcccuuuaaac

SEQ ID NO: 713697 - RNA, 19 nt, Artificial Sequence
  Description of Artificial Sequence: Synthetic oligonucleotide
  Antisense strand to SEQ ID NO: 713696
guuuaaagggcugaccgcg

SEQ ID NO: 713698 - RNA, 19 nt, Artificial Sequence
  Description of Artificial Sequence: Synthetic oligonucleotide
  Sense strand starting at position 1111 of SEQ ID NO: 586381
gggacaguuugcucuugag

SEQ ID NO: 713699 - RNA, 19 nt, Artificial Sequence
  Description of Artificial Sequence: Synthetic oligonucleotide
  Antisense strand to SEQ ID NO: 713698
cucaagagcaaacuguccc

SEQ ID NO: 713700 - RNA, 19 nt, Artificial Sequence
  Description of Artificial Sequence: Synthetic oligonucleotide
  Sense strand starting at position 1115 of SEQ ID NO: 586381
caguuugcucuugagggaa

SEQ ID NO: 713701 - RNA, 19 nt, Artificial Sequence
  Description of Artificial Sequence: Synthetic oligonucleotide
  Antisense strand to SEQ ID NO: 713700
uucccucaagagcaaacug

SEQ ID NO: 713702 - RNA, 19 nt, Artificial Sequence
  Description of Artificial Sequence: Synthetic oligonucleotide
  Sense strand starting at position 1189 of SEQ ID NO: 586381
uucuuugacuugucuuaga

SEQ ID NO: 713703 - RNA, 19 nt, Artificial Sequence
  Description of Artificial Sequence: Synthetic oligonucleotide
  Antisense strand to SEQ ID NO: 713702
ucuaagacaagucaaagaa

SEQ ID NO: 713704 - RNA, 19 nt, Artificial Sequence
  Description of Artificial Sequence: Synthetic oligonucleotide
  Sense strand starting at position 1233 of SEQ ID NO: 586381
ucagaauacgcugauguuu

SEQ ID NO: 713705 - RNA, 19 nt, Artificial Sequence
  Description of Artificial Sequence: Synthetic oligonucleotide
  Antisense strand to SEQ ID NO: 713704
aaacaucagcguauucuga

SEQ ID NO: 713706 - RNA, 19 nt, Artificial Sequence
  Description of Artificial Sequence: Synthetic oligonucleotide
  Sense strand starting at position 1304 of SEQ ID NO: 586381
cagggaacucguuagaucu

SEQ ID NO: 713707 - RNA, 19 nt, Artificial Sequence
  Description of Artificial Sequence: Synthetic oligonucleotide
  Antisense strand to SEQ ID NO: 713706
agaucuaacgaguucccug

SEQ ID NO: 713708 - RNA, 19 nt, Artificial Sequence
  Description of Artificial Sequence: Synthetic oligonucleotide
  Sense strand starting at position 1366 of SEQ ID NO: 586381
ucaaguuuaccuugacaga

SEQ ID NO: 713709 - RNA, 19 nt, Artificial Sequence
  Description of Artificial Sequence: Synthetic oligonucleotide
  Antisense strand to SEQ ID NO: 713708
ucugucaagguaaacuuga

SEQ ID NO: 713710 - RNA, 19 nt, Artificial Sequence
  Description of Artificial Sequence: Synthetic oligonucleotide
  Sense strand starting at position 1998 of SEQ ID NO: 586381
augauaacugcuuagcaac

SEQ ID NO: 713711 - RNA, 19 nt, Artificial Sequence
  Description of Artificial Sequence: Synthetic oligonucleotide
  Antisense strand to SEQ ID NO: 713710
guugcuaagcaguuaucau

SEQ ID NO: 713712 - RNA, 19 nt, Artificial Sequence
  Description of Artificial Sequence: Synthetic oligonucleotide
  Sense strand starting at position 2456 of SEQ ID NO: 586381
cuguuugcccaguggauuu

SEQ ID NO: 713713 - RNA, 19 nt, Artificial Sequence
  Description of Artificial Sequence: Synthetic oligonucleotide
  Antisense strand to SEQ ID NO: 713712
aaauccacugggcaaacag

SEQ ID NO: 713714 - RNA, 19 nt, Artificial Sequence
  Description of Artificial Sequence: Synthetic oligonucleotide
  Sense strand starting at position 2478 of SEQ ID NO: 586381
aggaacacugguuguugaa

SEQ ID NO: 713715 - RNA, 19 nt, Artificial Sequence
  Description of Artificial Sequence: Synthetic oligonucleotide
  Antisense strand to SEQ ID NO: 713714
uucaacaaccaguguuccu

SEQ ID NO: 713716 - RNA, 19 nt, Artificial Sequence
  Description of Artificial Sequence: Synthetic oligonucleotide
  Sense strand starting at position 2480 of SEQ ID NO: 586381
gaacacugguuguugaaau

SEQ ID NO: 713717 - RNA, 19 nt, Artificial Sequence
  Description of Artificial Sequence: Synthetic oligonucleotide
  Antisense strand to SEQ ID NO: 713716
auuucaacaaccaguguuc

SEQ ID NO: 713718 - RNA, 19 nt, Artificial Sequence
  Description of Artificial Sequence: Synthetic oligonucleotide
  Sense strand starting at position 2534 of SEQ ID NO: 586381
auguuccaucguuagaauc

SEQ ID NO: 713719 - RNA, 19 nt, Artificial Sequence
  Description of Artificial Sequence: Synthetic oligonucleotide
  Antisense strand to SEQ ID NO: 713718
gauucuaacgauggaacau

SEQ ID NO: 713720 - RNA, 19 nt, Artificial Sequence
  Description of Artificial Sequence: Synthetic oligonucleotide
  Sense strand starting at position 2593 of SEQ ID NO: 586381
aaggguguuuguccauuaa

SEQ ID NO: 713721 - RNA, 19 nt, Artificial Sequence
  Description of Artificial Sequence: Synthetic oligonucleotide
  Antisense strand to SEQ ID NO: 713720
uuaauggacaaacacccuu

SEQ ID NO: 713722 - RNA, 19 nt, Artificial Sequence
  Description of Artificial Sequence: Synthetic oligonucleotide
  Sense strand starting at position 2699 of SEQ ID NO: 586381
uccugagcucaaggagaaa

SEQ ID NO: 713723 - RNA, 19 nt, Artificial Sequence
  Description of Artificial Sequence: Synthetic oligonucleotide
  Antisense strand to SEQ ID NO: 713722
uuucuccuugagcucagga

SEQ ID NO: 713724 - RNA, 19 nt, Artificial Sequence
  Description of Artificial Sequence: Synthetic oligonucleotide
  Sense strand starting at position 2894 of SEQ ID NO: 586381
gucauuugcaggugggagu

SEQ ID NO: 713725 - RNA, 19 nt, Artificial Sequence
  Description of Artificial Sequence: Synthetic oligonucleotide
  Antisense strand to SEQ ID NO: 713724
acucccaccugcaaaugac

SEQ ID NO: 713726 - RNA, 19 nt, Artificial Sequence
  Description of Artificial Sequence: Synthetic oligonucleotide
  Sense strand starting at position 3145 of SEQ ID NO: 586381
cugaaucagucacucuagu

SEQ ID NO: 713727 - RNA, 19 nt, Artificial Sequence
  Description of Artificial Sequence: Synthetic oligonucleotide
  Antisense strand to SEQ ID NO: 713726
acuagagugacugauucag

SEQ ID NO: 713728 - RNA, 19 nt, Artificial Sequence
  Description of Artificial Sequence: Synthetic oligonucleotide
  Sense strand starting at position 3172 of SEQ ID NO: 586381
cucugugaugcccaguaua

SEQ ID NO: 713729 - RNA, 19 nt, Artificial Sequence
  Description of Artificial Sequence: Synthetic oligonucleotide
  Antisense strand to SEQ ID NO: 713728
uauacugggcaucacagag

SEQ ID NO: 713730 - RNA, 19 nt, Artificial Sequence
  Description of Artificial Sequence: Synthetic oligonucleotide
  Sense strand starting at position 3183 of SEQ ID NO: 586381
ccaguauaguuccuuacag

SEQ ID NO: 713731 - RNA, 19 nt, Artificial Sequence
  Description of Artificial Sequence: Synthetic oligonucleotide
  Antisense strand to SEQ ID NO: 713730
cuguaaggaacuauacugg

SEQ ID NO: 713732 - RNA, 19 nt, Artificial Sequence
  Description of Artificial Sequence: Synthetic oligonucleotide
  Sense strand starting at position 3185 of SEQ ID NO: 586381
aguauaguuccuuacagaa

SEQ ID NO: 713733 - RNA, 19 nt, Artificial Sequence
  Description of Artificial Sequence: Synthetic oligonucleotide
  Antisense strand to SEQ ID NO: 713732
uucuguaaggaacuauacu

SEQ ID NO: 713734 - RNA, 19 nt, Artificial Sequence
  Description of Artificial Sequence: Synthetic oligonucleotide
  Sense strand starting at position 3348 of SEQ ID NO: 586381
uuuggaauugauggcugaa

SEQ ID NO: 713735 - RNA, 19 nt, Artificial Sequence
  Description of Artificial Sequence: Synthetic oligonucleotide
  Antisense strand to SEQ ID NO: 713734
uucagccaucaauuccaaa

SEQ ID NO: 713736 - RNA, 19 nt, Artificial Sequence
  Description of Artificial Sequence: Synthetic oligonucleotide
  Sense strand starting at position 3397 of SEQ ID NO: 586381
cuaccauggccugaacuua

SEQ ID NO: 713737 - RNA, 19 nt, Artificial Sequence
  Description of Artificial Sequence: Synthetic oligonucleotide
  Antisense strand to SEQ ID NO: 713736
uaaguucaggccaugguag

SEQ ID NO: 713738 - RNA, 19 nt, Artificial Sequence
  Description of Artificial Sequence: Synthetic oligonucleotide
  Sense strand starting at position 3411 of SEQ ID NO: 586381
acuuaauucuggucugagu

SEQ ID NO: 713739 - RNA, 19 nt, Artificial Sequence
  Description of Artificial Sequence: Synthetic oligonucleotide
  Antisense strand to SEQ ID NO: 713738
acucagaccagaauuaagu

SEQ ID NO: 713740 - RNA, 19 nt, Artificial Sequence
  Description of Artificial Sequence: Synthetic oligonucleotide
  Sense strand starting at position 3413 of SEQ ID NO: 586381
uuaauucuggucugaguac

SEQ ID NO: 713741 - RNA, 19 nt, Artificial Sequence
  Description of Artificial Sequence: Synthetic oligonucleotide
  Antisense strand to SEQ ID NO: 713740
guacucagaccagaauuaa

SEQ ID NO: 713742 - RNA, 19 nt, Artificial Sequence
  Description of Artificial Sequence: Synthetic oligonucleotide
  Sense strand starting at position 3425 of SEQ ID NO: 586381
ugaguacguauuuggcaga

SEQ ID NO: 713743 - RNA, 19 nt, Artificial Sequence
  Description of Artificial Sequence: Synthetic oligonucleotide
  Antisense strand to SEQ ID NO: 713742
ucugccaaauacguacuca

SEQ ID NO: 713744 - RNA, 19 nt, Artificial Sequence
  Description of Artificial Sequence: Synthetic oligonucleotide
  Sense strand starting at position 3446 of SEQ ID NO: 586381
cuaagaagucuggguagau

SEQ ID NO: 713745 - RNA, 19 nt, Artificial Sequence
  Description of Artificial Sequence: Synthetic oligonucleotide
  Antisense strand to SEQ ID NO: 713744
aucuacccagacuucuuag

SEQ ID NO: 713746 - RNA, 19 nt, Artificial Sequence
  Description of Artificial Sequence: Synthetic oligonucleotide
  Sense strand starting at position 3447 of SEQ ID NO: 586381
uaagaagucuggguagaug

SEQ ID NO: 713747 - RNA, 19 nt, Artificial Sequence
  Description of Artificial Sequence: Synthetic oligonucleotide
  Antisense strand to SEQ ID NO: 713746
caucuacccagacuucuua

SEQ ID NO: 713748 - RNA, 19 nt, Artificial Sequence
  Description of Artificial Sequence: Synthetic oligonucleotide
  Sense strand starting at position 3660 of SEQ ID NO: 586381
cuaggaaccuaaguucuua

SEQ ID NO: 713749 - RNA, 19 nt, Artificial Sequence
  Description of Artificial Sequence: Synthetic oligonucleotide
  Antisense strand to SEQ ID NO: 713748
uaagaacuuagguuccuag

SEQ ID NO: 713750 - RNA, 19 nt, Artificial Sequence
  Description of Artificial Sequence: Synthetic oligonucleotide
  Sense strand starting at position 3806 of SEQ ID NO: 586381
guguaaggucaccaagcaa

SEQ ID NO: 713751 - RNA, 19 nt, Artificial Sequence
  Description of Artificial Sequence: Synthetic oligonucleotide
  Antisense strand to SEQ ID NO: 713750
uugcuuggugaccuuacac

SEQ ID NO: 713752 - RNA, 19 nt, Artificial Sequence
  Description of Artificial Sequence: Synthetic oligonucleotide
  Sense strand starting at position 45 of SEQ ID NO: 586382
cauaguaucuggcaauuag

SEQ ID NO: 713753 - RNA, 19 nt, Artificial Sequence
  Description of Artificial Sequence: Synthetic oligonucleotide
  Antisense strand to SEQ ID NO: 713752
cuaauugccagauacuaug

SEQ ID NO: 713754 - RNA, 19 nt, Artificial Sequence
  Description of Artificial Sequence: Synthetic oligonucleotide
  Sense strand starting at position 49 of SEQ ID NO: 586382
guaucuggcaauuaggaau

SEQ ID NO: 713755 - RNA, 19 nt, Artificial Sequence
  Description of Artificial Sequence: Synthetic oligonucleotide
  Antisense strand to SEQ ID NO: 713754
auuccuaauugccagauac

SEQ ID NO: 713756 - RNA, 19 nt, Artificial Sequence
  Description of Artificial Sequence: Synthetic oligonucleotide
  Sense strand starting at position 61 of SEQ ID NO: 586382
uaggaauugucccugggaa

SEQ ID NO: 713757 - RNA, 19 nt, Artificial Sequence
  Description of Artificial Sequence: Synthetic oligonucleotide
  Antisense strand to SEQ ID NO: 713756
uucccagggacaauuccua

SEQ ID NO: 713758 - RNA, 19 nt, Artificial Sequence
  Description of Artificial Sequence: Synthetic oligonucleotide
  Sense strand starting at position 63 of SEQ ID NO: 586382
ggaauugucccugggaaau

SEQ ID NO: 713759 - RNA, 19 nt, Artificial Sequence
  Description of Artificial Sequence: Synthetic oligonucleotide
  Antisense strand to SEQ ID NO: 713758
auuucccagggacaauucc

SEQ ID NO: 713760 - RNA, 19 nt, Artificial Sequence
  Description of Artificial Sequence: Synthetic oligonucleotide
  Sense strand starting at position 65 of SEQ ID NO: 586382
aauugucccugggaaauca

SEQ ID NO: 713761 - RNA, 19 nt, Artificial Sequence
  Description of Artificial Sequence: Synthetic oligonucleotide
  Antisense strand to SEQ ID NO: 713760
ugauuucccagggacaauu

SEQ ID NO: 713762 - RNA, 19 nt, Artificial Sequence
  Description of Artificial Sequence: Synthetic oligonucleotide
  Sense strand starting at position 209 of SEQ ID NO: 586382
aauguacugcccuggguau

SEQ ID NO: 713763 - RNA, 19 nt, Artificial Sequence
  Description of Artificial Sequence: Synthetic oligonucleotide
  Antisense strand to SEQ ID NO: 713762
auacccagggcaguacauu

SEQ ID NO: 713764 - RNA, 19 nt, Artificial Sequence
  Description of Artificial Sequence: Synthetic oligonucleotide
  Sense strand starting at position 220 of SEQ ID NO: 586382
cuggguaugucaggguaga

SEQ ID NO: 713765 - RNA, 19 nt, Artificial Sequence
  Description of Artificial Sequence: Synthetic oligonucleotide
  Antisense strand to SEQ ID NO: 713764
ucuacccugacauacccag

SEQ ID NO: 713766 - RNA, 19 nt, Artificial Sequence
  Description of Artificial Sequence: Synthetic oligonucleotide
  Sense strand starting at position 285 of SEQ ID NO: 586382
uugugaaacuccucaaagg

SEQ ID NO: 713767 - RNA, 19 nt, Artificial Sequence
  Description of Artificial Sequence: Synthetic oligonucleotide
  Antisense strand to SEQ ID NO: 713766
ccuuugaggaguuucacaa

SEQ ID NO: 713768 - RNA, 19 nt, Artificial Sequence
  Description of Artificial Sequence: Synthetic oligonucleotide
  Sense strand starting at position 332 of SEQ ID NO: 586382
cagccuagcuguuauaaga

SEQ ID NO: 713769 - RNA, 19 nt, Artificial Sequence
  Description of Artificial Sequence: Synthetic oligonucleotide
  Antisense strand to SEQ ID NO: 713768
ucuuauaacagcuaggcug

SEQ ID NO: 713770 - RNA, 19 nt, Artificial Sequence
  Description of Artificial Sequence: Synthetic oligonucleotide
  Sense strand starting at position 367 of SEQ ID NO: 586382
cagaccuguuucucugaga

SEQ ID NO: 713771 - RNA, 19 nt, Artificial Sequence
  Description of Artificial Sequence: Synthetic oligonucleotide
  Antisense strand to SEQ ID NO: 713770
ucucagagaaacaggucug

SEQ ID NO: 713772 - RNA, 19 nt, Artificial Sequence
  Description of Artificial Sequence: Synthetic oligonucleotide
  Sense strand starting at position 368 of SEQ ID NO: 586382
agaccuguuucucugagag

SEQ ID NO: 713773 - RNA, 19 nt, Artificial Sequence
  Description of Artificial Sequence: Synthetic oligonucleotide
  Antisense strand to SEQ ID NO: 713772
cucucagagaaacaggucu

SEQ ID NO: 713774 - RNA, 19 nt, Artificial Sequence
  Description of Artificial Sequence: Synthetic oligonucleotide
  Sense strand starting at position 470 of SEQ ID NO: 586382
cccucugcauccuugaaag

SEQ ID NO: 713775 - RNA, 19 nt, Artificial Sequence
  Description of Artificial Sequence: Synthetic oligonucleotide
  Antisense strand to SEQ ID NO: 713774
cuuucaaggaugcagaggg

SEQ ID NO: 713776 - RNA, 19 nt, Artificial Sequence
  Description of Artificial Sequence: Synthetic oligonucleotide
  Sense strand starting at position 501 of SEQ ID NO: 586382
ggugguuaaacgcauccau

SEQ ID NO: 713777 - RNA, 19 nt, Artificial Sequence
  Description of Artificial Sequence: Synthetic oligonucleotide
  Antisense strand to SEQ ID NO: 713776
auggaugcguuuaaccacc

SEQ ID NO: 713778 - RNA, 19 nt, Artificial Sequence
  Description of Artificial Sequence: Synthetic oligonucleotide
  Sense strand starting at position 532 of SEQ ID NO: 586382
uccuguccugcaugaguca

SEQ ID NO: 713779 - RNA, 19 nt, Artificial Sequence
  Description of Artificial Sequence: Synthetic oligonucleotide
  Antisense strand to SEQ ID NO: 713778
ugacucaugcaggacagga

SEQ ID NO: 713780 - RNA, 19 nt, Artificial Sequence
  Description of Artificial Sequence: Synthetic oligonucleotide
  Sense strand starting at position 539 of SEQ ID NO: 586382
cugcaugagucauugguua

SEQ ID NO: 713781 - RNA, 19 nt, Artificial Sequence
  Description of Artificial Sequence: Synthetic oligonucleotide
  Antisense strand to SEQ ID NO: 713780
uaaccaaugacucaugcag

SEQ ID NO: 713782 - RNA, 19 nt, Artificial Sequence
  Description of Artificial Sequence: Synthetic oligonucleotide
  Sense strand starting at position 541 of SEQ ID NO: 586382
gcaugagucauugguuacu

SEQ ID NO: 713783 - RNA, 19 nt, Artificial Sequence
  Description of Artificial Sequence: Synthetic oligonucleotide
  Antisense strand to SEQ ID NO: 713782
aguaaccaaugacucaugc

SEQ ID NO: 713784 - RNA, 19 nt, Artificial Sequence
  Description of Artificial Sequence: Synthetic oligonucleotide
  Sense strand starting at position 615 of SEQ ID NO: 586382
uaggaaaugugcucucgga

SEQ ID NO: 713785 - RNA, 19 nt, Artificial Sequence
  Description of Artificial Sequence: Synthetic oligonucleotide
  Antisense strand to SEQ ID NO: 713784
uccgagagcacauuuccua

SEQ ID NO: 713786 - RNA, 19 nt, Artificial Sequence
  Description of Artificial Sequence: Synthetic oligonucleotide
  Sense strand starting at position 622 of SEQ ID NO: 586382
ugugcucucggagaaguuu

SEQ ID NO: 713787 - RNA, 19 nt, Artificial Sequence
  Description of Artificial Sequence: Synthetic oligonucleotide
  Antisense strand to SEQ ID NO: 713786
aaacuucuccgagagcaca

SEQ ID NO: 713788 - RNA, 19 nt, Artificial Sequence
  Description of Artificial Sequence: Synthetic oligonucleotide
  Sense strand starting at position 748 of SEQ ID NO: 586382
gggcucagaugccaguauu

SEQ ID NO: 713789 - RNA, 19 nt, Artificial Sequence
  Description of Artificial Sequence: Synthetic oligonucleotide
  Antisense strand to SEQ ID NO: 713788
aauacuggcaucugagccc

SEQ ID NO: 713790 - RNA, 19 nt, Artificial Sequence
  Description of Artificial Sequence: Synthetic oligonucleotide
  Sense strand starting at position 951 of SEQ ID NO: 586382
cuguguucccggagcacga

SEQ ID NO: 713791 - RNA, 19 nt, Artificial Sequence
  Description of Artificial Sequence: Synthetic oligonucleotide
  Antisense strand to SEQ ID NO: 713790
ucgugcuccgggaacacag

SEQ ID NO: 713792 - RNA, 19 nt, Artificial Sequence
  Description of Artificial Sequence: Synthetic oligonucleotide
  Sense strand starting at position 1010 of SEQ ID NO: 586382
cgaauucucuccuuaggaa

SEQ ID NO: 713793 - RNA, 19 nt, Artificial Sequence
  Description of Artificial Sequence: Synthetic oligonucleotide
  Antisense strand to SEQ ID NO: 713792
uuccuaaggagagaauucg

SEQ ID NO: 713794 - RNA, 19 nt, Artificial Sequence
  Description of Artificial Sequence: Synthetic oligonucleotide
  Sense strand starting at position 1079 of SEQ ID NO: 586382
aggcgaauuccagauccca

SEQ ID NO: 713795 - RNA, 19 nt, Artificial Sequence
  Description of Artificial Sequence: Synthetic oligonucleotide
  Antisense strand to SEQ ID NO: 713794
ugggaucuggaauucgccu

SEQ ID NO: 713796 - RNA, 19 nt, Artificial Sequence
  Description of Artificial Sequence: Synthetic oligonucleotide
  Sense strand starting at position 2717 of SEQ ID NO: 586382
gcgacuccauucucauuau

SEQ ID NO: 713797 - RNA, 19 nt, Artificial Sequence
  Description of Artificial Sequence: Synthetic oligonucleotide
  Antisense strand to SEQ ID NO: 713796
auaaugagaauggagucgc

SEQ ID NO: 713798 - RNA, 19 nt, Artificial Sequence
  Description of Artificial Sequence: Synthetic oligonucleotide
  Sense strand starting at position 2727 of SEQ ID NO: 586382
ucucauuaucaugaacgca

SEQ ID NO: 713799 - RNA, 19 nt, Artificial Sequence
  Description of Artificial Sequence: Synthetic oligonucleotide
  Antisense strand to SEQ ID NO: 713798
ugcguucaugauaaugaga

SEQ ID NO: 713800 - RNA, 19 nt, Artificial Sequence
  Description of Artificial Sequence: Synthetic oligonucleotide
  Sense strand starting at position 3432 of SEQ ID NO: 586382
acuggaugccggugaacaa

SEQ ID NO: 713801 - RNA, 19 nt, Artificial Sequence
  Description of Artificial Sequence: Synthetic oligonucleotide
  Antisense strand to SEQ ID NO: 713800
uuguucaccggcauccagu

SEQ ID NO: 713802 - RNA, 19 nt, Artificial Sequence
  Description of Artificial Sequence: Synthetic oligonucleotide
  Sense strand starting at position 3445 of SEQ ID NO: 586382
gaacaagucuccugggaag

SEQ ID NO: 713803 - RNA, 19 nt, Artificial Sequence
  Description of Artificial Sequence: Synthetic oligonucleotide
  Antisense strand to SEQ ID NO: 713802
cuucccaggagacuuguuc

SEQ ID NO: 713804 - RNA, 19 nt, Artificial Sequence
  Description of Artificial Sequence: Synthetic oligonucleotide
  Sense strand starting at position 3448 of SEQ ID NO: 586382
caagucuccugggaagaga

SEQ ID NO: 713805 - RNA, 19 nt, Artificial Sequence
  Description of Artificial Sequence: Synthetic oligonucleotide
  Antisense strand to SEQ ID NO: 713804
ucucuucccaggagacuug

SEQ ID NO: 713806 - RNA, 19 nt, Artificial Sequence
  Description of Artificial Sequence: Synthetic oligonucleotide
  Sense strand starting at position 3551 of SEQ ID NO: 586382
cgcucaucuucuguuuacu

SEQ ID NO: 713807 - RNA, 19 nt, Artificial Sequence
  Description of Artificial Sequence: Synthetic oligonucleotide
  Antisense strand to SEQ ID NO: 713806
aguaaacagaagaugagcg

SEQ ID NO: 713808 - RNA, 19 nt, Artificial Sequence
  Description of Artificial Sequence: Synthetic oligonucleotide
  Sense strand starting at position 3559 of SEQ ID NO: 586382
uucuguuuacuccacagua

SEQ ID NO: 713809 - RNA, 19 nt, Artificial Sequence
  Description of Artificial Sequence: Synthetic oligonucleotide
  Antisense strand to SEQ ID NO: 713808
uacuguggaguaaacagaa

SEQ ID NO: 713810 - RNA, 19 nt, Artificial Sequence
  Description of Artificial Sequence: Synthetic oligonucleotide
  Sense strand starting at position 3561 of SEQ ID NO: 586382
cuguuuacuccacaguagu

SEQ ID NO: 713811 - RNA, 19 nt, Artificial Sequence
  Description of Artificial Sequence: Synthetic oligonucleotide
  Antisense strand to SEQ ID NO: 713810
acuacuguggaguaaacag

SEQ ID NO: 713812 - RNA, 19 nt, Artificial Sequence
  Description of Artificial Sequence: Synthetic oligonucleotide
  Sense strand starting at position 3575 of SEQ ID NO: 586382
guaguuacccuuuacuaug

SEQ ID NO: 713813 - RNA, 19 nt, Artificial Sequence
  Description of Artificial Sequence: Synthetic oligonucleotide
  Antisense strand to SEQ ID NO: 713812
cauaguaaaggguaacuac

SEQ ID NO: 713814 - RNA, 19 nt, Artificial Sequence
  Description of Artificial Sequence: Synthetic oligonucleotide
  Sense strand starting at position 3672 of SEQ ID NO: 586382
aaacuugcugcaugggaga

SEQ ID NO: 713815 - RNA, 19 nt, Artificial Sequence
  Description of Artificial Sequence: Synthetic oligonucleotide
  Antisense strand to SEQ ID NO: 713814
ucucccaugcagcaaguuu

SEQ ID NO: 713816 - RNA, 19 nt, Artificial Sequence
  Description of Artificial Sequence: Synthetic oligonucleotide
  Sense strand starting at position 3733 of SEQ ID NO: 586382
ccauuugacuuugaagaca

SEQ ID NO: 713817 - RNA, 19 nt, Artificial Sequence
  Description of Artificial Sequence: Synthetic oligonucleotide
  Antisense strand to SEQ ID NO: 713816
ugucuucaaagucaaaugg

SEQ ID NO: 713818 - RNA, 19 nt, Artificial Sequence
  Description of Artificial Sequence: Synthetic oligonucleotide
  Sense strand starting at position 3947 of SEQ ID NO: 586382
caguuagggucccacuuau

SEQ ID NO: 713819 - RNA, 19 nt, Artificial Sequence
  Description of Artificial Sequence: Synthetic oligonucleotide
  Antisense strand to SEQ ID NO: 713818
auaagugggacccuaacug

SEQ ID NO: 713820 - RNA, 19 nt, Artificial Sequence
  Description of Artificial Sequence: Synthetic oligonucleotide
  Sense strand starting at position 3953 of SEQ ID NO: 586382
gggucccacuuauguaaua

SEQ ID NO: 713821 - RNA, 19 nt, Artificial Sequence
  Description of Artificial Sequence: Synthetic oligonucleotide
  Antisense strand to SEQ ID NO: 713820
uauuacauaagugggaccc

SEQ ID NO: 713822 - RNA, 19 nt, Artificial Sequence
  Description of Artificial Sequence: Synthetic oligonucleotide
  Sense strand starting at position 3954 of SEQ ID NO: 586382
ggucccacuuauguaauau

SEQ ID NO: 713823 - RNA, 19 nt, Artificial Sequence
  Description of Artificial Sequence: Synthetic oligonucleotide
  Antisense strand to SEQ ID NO: 713822
auauuacauaagugggacc

SEQ ID NO: 713824 - RNA, 19 nt, Artificial Sequence
  Description of Artificial Sequence: Synthetic oligonucleotide
  Sense strand starting at position 3975 of SEQ ID NO: 586382
auacgcuaucuaugaaaua

SEQ ID NO: 713825 - RNA, 19 nt, Artificial Sequence
  Description of Artificial Sequence: Synthetic oligonucleotide
  Antisense strand to SEQ ID NO: 713824
uauuucauagauagcguau

SEQ ID NO: 713826 - RNA, 19 nt, Artificial Sequence
  Description of Artificial Sequence: Synthetic oligonucleotide
  Sense strand starting at position 11 of SEQ ID NO: 586383
uacagagaugacuggcuuu

SEQ ID NO: 713827 - RNA, 19 nt, Artificial Sequence
  Description of Artificial Sequence: Synthetic oligonucleotide
  Antisense strand to SEQ ID NO: 713826
aaagccagucaucucugua

SEQ ID NO: 713828 - RNA, 19 nt, Artificial Sequence
  Description of Artificial Sequence: Synthetic oligonucleotide
  Sense strand starting at position 46 of SEQ ID NO: 586383
uuuauuuguggcugugauc

SEQ ID NO: 713829 - RNA, 19 nt, Artificial Sequence
  Description of Artificial Sequence: Synthetic oligonucleotide
  Antisense strand to SEQ ID NO: 713828
gaucacagccacaaauaaa

SEQ ID NO: 713830 - RNA, 19 nt, Artificial Sequence
  Description of Artificial Sequence: Synthetic oligonucleotide
  Sense strand starting at position 74 of SEQ ID NO: 586383
gccaauuugcuguguccua

SEQ ID NO: 713831 - RNA, 19 nt, Artificial Sequence
  Description of Artificial Sequence: Synthetic oligonucleotide
  Antisense strand to SEQ ID NO: 713830
uaggacacagcaaauuggc

SEQ ID NO: 713832 - RNA, 19 nt, Artificial Sequence
  Description of Artificial Sequence: Synthetic oligonucleotide
  Sense strand starting at position 75 of SEQ ID NO: 586383
ccaauuugcuguguccuau

SEQ ID NO: 713833 - RNA, 19 nt, Artificial Sequence
  Description of Artificial Sequence: Synthetic oligonucleotide
  Antisense strand to SEQ ID NO: 713832
auaggacacagcaaauugg

SEQ ID NO: 713834 - RNA, 19 nt, Artificial Sequence
  Description of Artificial Sequence: Synthetic oligonucleotide
  Sense strand starting at position 86 of SEQ ID NO: 586383
uguccuauuccuugacuua

SEQ ID NO: 713835 - RNA, 19 nt, Artificial Sequence
  Description of Artificial Sequence: Synthetic oligonucleotide
  Antisense strand to SEQ ID NO: 713834
uaagucaaggaauaggaca

SEQ ID NO: 713836 - RNA, 19 nt, Artificial Sequence
  Description of Artificial Sequence: Synthetic oligonucleotide
  Sense strand starting at position 87 of SEQ ID NO: 586383
guccuauuccuugacuuau

SEQ ID NO: 713837 - RNA, 19 nt, Artificial Sequence
  Description of Artificial Sequence: Synthetic oligonucleotide
  Antisense strand to SEQ ID NO: 713836
auaagucaaggaauaggac

SEQ ID NO: 713838 - RNA, 19 nt, Artificial Sequence
  Description of Artificial Sequence: Synthetic oligonucleotide
  Sense strand starting at position 348 of SEQ ID NO: 586383
gaaacauacgaaugcguca

SEQ ID NO: 713839 - RNA, 19 nt, Artificial Sequence
  Description of Artificial Sequence: Synthetic oligonucleotide
  Antisense strand to SEQ ID NO: 713838
ugacgcauucguauguuuc

SEQ ID NO: 713840 - RNA, 19 nt, Artificial Sequence
  Description of Artificial Sequence: Synthetic oligonucleotide
  Sense strand starting at position 353 of SEQ ID NO: 586383
auacgaaugcgucaacuuu

SEQ ID NO: 713841 - RNA, 19 nt, Artificial Sequence
  Description of Artificial Sequence: Synthetic oligonucleotide
  Antisense strand to SEQ ID NO: 713840
aaaguugacgcauucguau

SEQ ID NO: 713842 - RNA, 19 nt, Artificial Sequence
  Description of Artificial Sequence: Synthetic oligonucleotide
  Sense strand starting at position 556 of SEQ ID NO: 586383
gcguuugcggccaggaaga

SEQ ID NO: 713843 - RNA, 19 nt, Artificial Sequence
  Description of Artificial Sequence: Synthetic oligonucleotide
  Antisense strand to SEQ ID NO: 713842
ucuuccuggccgcaaacgc

SEQ ID NO: 713844 - RNA, 19 nt, Artificial Sequence
  Description of Artificial Sequence: Synthetic oligonucleotide
  Sense strand starting at position 637 of SEQ ID NO: 586383
ugcuuugagcuccacggaa

SEQ ID NO: 713845 - RNA, 19 nt, Artificial Sequence
  Description of Artificial Sequence: Synthetic oligonucleotide
  Antisense strand to SEQ ID NO: 713844
uuccguggagcucaaagca

SEQ ID NO: 713846 - RNA, 19 nt, Artificial Sequence
  Description of Artificial Sequence: Synthetic oligonucleotide
  Sense strand starting at position 2091 of SEQ ID NO: 586383
caguguggucgcgcaacuu

SEQ ID NO: 713847 - RNA, 19 nt, Artificial Sequence
  Description of Artificial Sequence: Synthetic oligonucleotide
  Antisense strand to SEQ ID NO: 713846
aaguugcgcgaccacacug

SEQ ID NO: 713848 - RNA, 19 nt, Artificial Sequence
  Description of Artificial Sequence: Synthetic oligonucleotide
  Sense strand starting at position 2333 of SEQ ID NO: 586383
guaaccuuguugcuuaaua

SEQ ID NO: 713849 - RNA, 19 nt, Artificial Sequence
  Description of Artificial Sequence: Synthetic oligonucleotide
  Antisense strand to SEQ ID NO: 713848
uauuaagcaacaagguuac

SEQ ID NO: 713850 - RNA, 19 nt, Artificial Sequence
  Description of Artificial Sequence: Synthetic oligonucleotide
  Sense strand starting at position 2362 of SEQ ID NO: 586383
aaacuuggcguugauaaga

SEQ ID NO: 713851 - RNA, 19 nt, Artificial Sequence
  Description of Artificial Sequence: Synthetic oligonucleotide
  Antisense strand to SEQ ID NO: 713850
ucuuaucaacgccaaguuu

SEQ ID NO: 713852 - RNA, 19 nt, Artificial Sequence
  Description of Artificial Sequence: Synthetic oligonucleotide
  Sense strand starting at position 2418 of SEQ ID NO: 586383
agcagaaugcacgaguaaa

SEQ ID NO: 713853 - RNA, 19 nt, Artificial Sequence
  Description of Artificial Sequence: Synthetic oligonucleotide
  Antisense strand to SEQ ID NO: 713852
uuuacucgugcauucugcu

SEQ ID NO: 713854 - RNA, 19 nt, Artificial Sequence
  Description of Artificial Sequence: Synthetic oligonucleotide
  Sense strand starting at position 2432 of SEQ ID NO: 586383
guaaauuaaacccgggaaa

SEQ ID NO: 713855 - RNA, 19 nt, Artificial Sequence
  Description of Artificial Sequence: Synthetic oligonucleotide
  Antisense strand to SEQ ID NO: 713854
uuucccggguuuaauuuac

SEQ ID NO: 713856 - RNA, 19 nt, Artificial Sequence
  Description of Artificial Sequence: Synthetic oligonucleotide
  Sense strand starting at position 2452 of SEQ ID NO: 586383
uuuagaaacccagguagau

SEQ ID NO: 713857 - RNA, 19 nt, Artificial Sequence
  Description of Artificial Sequence: Synthetic oligonucleotide
  Antisense strand to SEQ ID NO: 713856
aucuaccuggguuucuaaa

SEQ ID NO: 713858 - RNA, 19 nt, Artificial Sequence
  Description of Artificial Sequence: Synthetic oligonucleotide
  Sense strand starting at position 2510 of SEQ ID NO: 586383
cuuacaacagcauggauua

SEQ ID NO: 713859 - RNA, 19 nt, Artificial Sequence
  Description of Artificial Sequence: Synthetic oligonucleotide
  Antisense strand to SEQ ID NO: 713858
uaauccaugcuguuguaag

SEQ ID NO: 713860 - RNA, 19 nt, Artificial Sequence
  Description of Artificial Sequence: Synthetic oligonucleotide
  Sense strand starting at position 2523 of SEQ ID NO: 586383
ggauuacaacugggagguu

SEQ ID NO: 713861 - RNA, 19 nt, Artificial Sequence
  Description of Artificial Sequence: Synthetic oligonucleotide
  Antisense strand to SEQ ID NO: 713860
aaccucccaguuguaaucc

SEQ ID NO: 713862 - RNA, 19 nt, Artificial Sequence
  Description of Artificial Sequence: Synthetic oligonucleotide
  Sense strand starting at position 2619 of SEQ ID NO: 586383
ucugcuuaucucuauugua

SEQ ID NO: 713863 - RNA, 19 nt, Artificial Sequence
  Description of Artificial Sequence: Synthetic oligonucleotide
  Antisense strand to SEQ ID NO: 713862
uacaauagagauaagcaga

SEQ ID NO: 713864 - RNA, 19 nt, Artificial Sequence
  Description of Artificial Sequence: Synthetic oligonucleotide
  Sense strand starting at position 2632 of SEQ ID NO: 586383
auuguaauuccagggacuu

SEQ ID NO: 713865 - RNA, 19 nt, Artificial Sequence
  Description of Artificial Sequence: Synthetic oligonucleotide
  Antisense strand to SEQ ID NO: 713864
aagucccuggaauuacaau

SEQ ID NO: 713866 - RNA, 19 nt, Artificial Sequence
  Description of Artificial Sequence: Synthetic oligonucleotide
  Sense strand starting at position 2633 of SEQ ID NO: 586383
uuguaauuccagggacuuc

SEQ ID NO: 713867 - RNA, 19 nt, Artificial Sequence
  Description of Artificial Sequence: Synthetic oligonucleotide
  Antisense strand to SEQ ID NO: 713866
gaagucccuggaauuacaa

SEQ ID NO: 713868 - RNA, 19 nt, Artificial Sequence
  Description of Artificial Sequence: Synthetic oligonucleotide
  Sense strand starting at position 2671 of SEQ ID NO: 586383
uguuucuuugcccagugau

SEQ ID NO: 713869 - RNA, 19 nt, Artificial Sequence
  Description of Artificial Sequence: Synthetic oligonucleotide
  Antisense strand to SEQ ID NO: 713868
aucacugggcaaagaaaca

SEQ ID NO: 713870 - RNA, 19 nt, Artificial Sequence
  Description of Artificial Sequence: Synthetic oligonucleotide
  Sense strand starting at position 2794 of SEQ ID NO: 586383
cccugucuaguuuaugaau

SEQ ID NO: 713871 - RNA, 19 nt, Artificial Sequence
  Description of Artificial Sequence: Synthetic oligonucleotide
  Antisense strand to SEQ ID NO: 713870
auucauaaacuagacaggg

SEQ ID NO: 713872 - RNA, 19 nt, Artificial Sequence
  Description of Artificial Sequence: Synthetic oligonucleotide
  Sense strand starting at position 2820 of SEQ ID NO: 586383
uuccaaugucuuuauugga

SEQ ID NO: 713873 - RNA, 19 nt, Artificial Sequence
  Description of Artificial Sequence: Synthetic oligonucleotide
  Antisense strand to SEQ ID NO: 713872
uccaauaaagacauuggaa

SEQ ID NO: 713874 - RNA, 19 nt, Artificial Sequence
  Description of Artificial Sequence: Synthetic oligonucleotide
  Sense strand starting at position 2915 of SEQ ID NO: 586383
aacauugugucagcugaac

SEQ ID NO: 713875 - RNA, 19 nt, Artificial Sequence
  Description of Artificial Sequence: Synthetic oligonucleotide
  Antisense strand to SEQ ID NO: 713874
guucagcugacacaauguu

SEQ ID NO: 713876 - RNA, 19 nt, Artificial Sequence
  Description of Artificial Sequence: Synthetic oligonucleotide
  Sense strand starting at position 2937 of SEQ ID NO: 586383
augcuaccucugggauuaa

SEQ ID NO: 713877 - RNA, 19 nt, Artificial Sequence
  Description of Artificial Sequence: Synthetic oligonucleotide
  Antisense strand to SEQ ID NO: 713876
uuaaucccagagguagcau

SEQ ID NO: 713878 - RNA, 19 nt, Artificial Sequence
  Description of Artificial Sequence: Synthetic oligonucleotide
  Sense strand starting at position 2941 of SEQ ID NO: 586383
uaccucugggauuaauguu

SEQ ID NO: 713879 - RNA, 19 nt, Artificial Sequence
  Description of Artificial Sequence: Synthetic oligonucleotide
  Antisense strand to SEQ ID NO: 713878
aacauuaaucccagaggua

SEQ ID NO: 713880 - RNA, 19 nt, Artificial Sequence
  Description of Artificial Sequence: Synthetic oligonucleotide
  Sense strand starting at position 3116 of SEQ ID NO: 586383
uggugaaccucuguuucua

SEQ ID NO: 713881 - RNA, 19 nt, Artificial Sequence
  Description of Artificial Sequence: Synthetic oligonucleotide
  Antisense strand to SEQ ID NO: 713880
uagaaacagagguucacca

SEQ ID NO: 713882 - RNA, 19 nt, Artificial Sequence
  Description of Artificial Sequence: Synthetic oligonucleotide
  Sense strand starting at position 3118 of SEQ ID NO: 586383
gugaaccucuguuucuaau

SEQ ID NO: 713883 - RNA, 19 nt, Artificial Sequence
  Description of Artificial Sequence: Synthetic oligonucleotide
  Antisense strand to SEQ ID NO: 713882
auuagaaacagagguucac

SEQ ID NO: 713884 - RNA, 19 nt, Artificial Sequence
  Description of Artificial Sequence: Synthetic oligonucleotide
  Sense strand starting at position 3399 of SEQ ID NO: 586383
gugugucuacuuuauguga

SEQ ID NO: 713885 - RNA, 19 nt, Artificial Sequence
  Description of Artificial Sequence: Synthetic oligonucleotide
  Antisense strand to SEQ ID NO: 713884
ucacauaaaguagacacac

SEQ ID NO: 713886 - RNA, 19 nt, Artificial Sequence
  Description of Artificial Sequence: Synthetic oligonucleotide
  Sense strand starting at position 3413 of SEQ ID NO: 586383
ugugauaggcccugaauuc

SEQ ID NO: 713887 - RNA, 19 nt, Artificial Sequence
  Description of Artificial Sequence: Synthetic oligonucleotide
  Antisense strand to SEQ ID NO: 713886
gaauucagggccuaucaca

SEQ ID NO: 713888 - RNA, 19 nt, Artificial Sequence
  Description of Artificial Sequence: Synthetic oligonucleotide
  Sense strand starting at position 3560 of SEQ ID NO: 586383
ggcagugugagguauuagu

SEQ ID NO: 713889 - RNA, 19 nt, Artificial Sequence
  Description of Artificial Sequence: Synthetic oligonucleotide
  Antisense strand to SEQ ID NO: 713888
acuaauaccucacacugcc

SEQ ID NO: 713890 - RNA, 19 nt, Artificial Sequence
  Description of Artificial Sequence: Synthetic oligonucleotide
  Sense strand starting at position 3607 of SEQ ID NO: 586383
uuucuuaaacacggucaau

SEQ ID NO: 713891 - RNA, 19 nt, Artificial Sequence
  Description of Artificial Sequence: Synthetic oligonucleotide
  Antisense strand to SEQ ID NO: 713890
auugaccguguuuaagaaa

SEQ ID NO: 713892 - RNA, 19 nt, Artificial Sequence
  Description of Artificial Sequence: Synthetic oligonucleotide
  Sense strand starting at position 3663 of SEQ ID NO: 586383
agccuugaccaagguauua

SEQ ID NO: 713893 - RNA, 19 nt, Artificial Sequence
  Description of Artificial Sequence: Synthetic oligonucleotide
  Antisense strand to SEQ ID NO: 713892
uaauaccuuggucaaggcu

SEQ ID NO: 713894 - RNA, 19 nt, Artificial Sequence
  Description of Artificial Sequence: Synthetic oligonucleotide
  Sense strand starting at position 3678 of SEQ ID NO: 586383
auuauaccucuuugagucu

SEQ ID NO: 713895 - RNA, 19 nt, Artificial Sequence
  Description of Artificial Sequence: Synthetic oligonucleotide
  Antisense strand to SEQ ID NO: 713894
agacucaaagagguauaau

SEQ ID NO: 713896 - RNA, 19 nt, Artificial Sequence
  Description of Artificial Sequence: Synthetic oligonucleotide
  Sense strand starting at position 3798 of SEQ ID NO: 586383
caaguaguugcucagugaa

SEQ ID NO: 713897 - RNA, 19 nt, Artificial Sequence
  Description of Artificial Sequence: Synthetic oligonucleotide
  Antisense strand to SEQ ID NO: 713896
uucacugagcaacuacuug

SEQ ID NO: 713898 - RNA, 19 nt, Artificial Sequence
  Description of Artificial Sequence: Synthetic oligonucleotide
  Sense strand starting at position 3836 of SEQ ID NO: 586383
uugguaguugcucaauaag

SEQ ID NO: 713899 - RNA, 19 nt, Artificial Sequence
  Description of Artificial Sequence: Synthetic oligonucleotide
  Antisense strand to SEQ ID NO: 713898
cuuauugagcaacuaccaa

SEQ ID NO: 713900 - RNA, 19 nt, Artificial Sequence
  Description of Artificial Sequence: Synthetic oligonucleotide
  Sense strand starting at position 3975 of SEQ ID NO: 586383
agaacagccacgugaucuu

SEQ ID NO: 713901 - RNA, 19 nt, Artificial Sequence
  Description of Artificial Sequence: Synthetic oligonucleotide
  Antisense strand to SEQ ID NO: 713900
aagaucacguggcuguucu

SEQ ID NO: 713902 - RNA, 19 nt, Artificial Sequence
  Description of Artificial Sequence: Synthetic oligonucleotide
  Sense strand starting at position 3978 of SEQ ID NO: 586383
acagccacgugaucuuuaa

SEQ ID NO: 713903 - RNA, 19 nt, Artificial Sequence
  Description of Artificial Sequence: Synthetic oligonucleotide
  Antisense strand to SEQ ID NO: 713902
uuaaagaucacguggcugu

SEQ ID NO: 713904 - RNA, 19 nt, Artificial Sequence
  Description of Artificial Sequence: Synthetic oligonucleotide
  Sense strand starting at position 3982 of SEQ ID NO: 586383
ccacgugaucuuuaagcca

SEQ ID NO: 713905 - RNA, 19 nt, Artificial Sequence
  Description of Artificial Sequence: Synthetic oligonucleotide
  Antisense strand to SEQ ID NO: 713904
uggcuuaaagaucacgugg

SEQ ID NO: 713906 - RNA, 19 nt, Artificial Sequence
  Description of Artificial Sequence: Synthetic oligonucleotide
  Sense strand starting at position 400 of SEQ ID NO: 586385
ucugcuaucuuucucaguu

SEQ ID NO: 713907 - RNA, 19 nt, Artificial Sequence
  Description of Artificial Sequence: Synthetic oligonucleotide
  Antisense strand to SEQ ID NO: 713906
aacugagaaagauagcaga

SEQ ID NO: 713908 - RNA, 19 nt, Artificial Sequence
  Description of Artificial Sequence: Synthetic oligonucleotide
  Sense strand starting at position 402 of SEQ ID NO: 586385
ugcuaucuuucucaguuga

SEQ ID NO: 713909 - RNA, 19 nt, Artificial Sequence
  Description of Artificial Sequence: Synthetic oligonucleotide
  Antisense strand to SEQ ID NO: 713908
ucaacugagaaagauagca

SEQ ID NO: 713910 - RNA, 19 nt, Artificial Sequence
  Description of Artificial Sequence: Synthetic oligonucleotide
  Sense strand starting at position 404 of SEQ ID NO: 586385
cuaucuuucucaguugacu

SEQ ID NO: 713911 - RNA, 19 nt, Artificial Sequence
  Description of Artificial Sequence: Synthetic oligonucleotide
  Antisense strand to SEQ ID NO: 713910
agucaacugagaaagauag

SEQ ID NO: 713912 - RNA, 19 nt, Artificial Sequence
  Description of Artificial Sequence: Synthetic oligonucleotide
  Sense strand starting at position 3821 of SEQ ID NO: 586385
cugcaaugccaguguuuag

SEQ ID NO: 713913 - RNA, 19 nt, Artificial Sequence
  Description of Artificial Sequence: Synthetic oligonucleotide
  Antisense strand to SEQ ID NO: 713912
cuaaacacuggcauugcag

SEQ ID NO: 713914 - RNA, 19 nt, Artificial Sequence
  Description of Artificial Sequence: Synthetic oligonucleotide
  Sense strand starting at position 15 of SEQ ID NO: 586386
gcaacaaggucauuaguga

SEQ ID NO: 713915 - RNA, 19 nt, Artificial Sequence
  Description of Artificial Sequence: Synthetic oligonucleotide
  Antisense strand to SEQ ID NO: 713914
ucacuaaugaccuuguugc

SEQ ID NO: 713916 - RNA, 19 nt, Artificial Sequence
  Description of Artificial Sequence: Synthetic oligonucleotide
  Sense strand starting at position 655 of SEQ ID NO: 586386
uuguuuaaauggguuccua

SEQ ID NO: 713917 - RNA, 19 nt, Artificial Sequence
  Description of Artificial Sequence: Synthetic oligonucleotide
  Antisense strand to SEQ ID NO: 713916
uaggaacccauuuaaacaa

SEQ ID NO: 713918 - RNA, 19 nt, Artificial Sequence
  Description of Artificial Sequence: Synthetic oligonucleotide
  Sense strand starting at position 694 of SEQ ID NO: 586386
uagaauauggauugagucu

SEQ ID NO: 713919 - RNA, 19 nt, Artificial Sequence
  Description of Artificial Sequence: Synthetic oligonucleotide
  Antisense strand to SEQ ID NO: 713918
agacucaauccauauucua

SEQ ID NO: 713920 - RNA, 19 nt, Artificial Sequence
  Description of Artificial Sequence: Synthetic oligonucleotide
  Sense strand starting at position 755 of SEQ ID NO: 586386
aaacuuucgcuguaugaau

SEQ ID NO: 713921 - RNA, 19 nt, Artificial Sequence
  Description of Artificial Sequence: Synthetic oligonucleotide
  Antisense strand to SEQ ID NO: 713920
auucauacagcgaaaguuu

SEQ ID NO: 713922 - RNA, 19 nt, Artificial Sequence
  Description of Artificial Sequence: Synthetic oligonucleotide
  Sense strand starting at position 762 of SEQ ID NO: 586386
cgcuguaugaaugaauauu

SEQ ID NO: 713923 - RNA, 19 nt, Artificial Sequence
  Description of Artificial Sequence: Synthetic oligonucleotide
  Antisense strand to SEQ ID NO: 713922
aauauucauucauacagcg

SEQ ID NO: 713924 - RNA, 19 nt, Artificial Sequence
  Description of Artificial Sequence: Synthetic oligonucleotide
  Sense strand starting at position 933 of SEQ ID NO: 586386
ugcaguguagcauaagacu

SEQ ID NO: 713925 - RNA, 19 nt, Artificial Sequence
  Description of Artificial Sequence: Synthetic oligonucleotide
  Antisense strand to SEQ ID NO: 713924
agucuuaugcuacacugca

SEQ ID NO: 713926 - RNA, 19 nt, Artificial Sequence
  Description of Artificial Sequence: Synthetic oligonucleotide
  Sense strand starting at position 944 of SEQ ID NO: 586386
auaagacuugcuuaccuga

SEQ ID NO: 713927 - RNA, 19 nt, Artificial Sequence
  Description of Artificial Sequence: Synthetic oligonucleotide
  Antisense strand to SEQ ID NO: 713926
ucagguaagcaagucuuau

SEQ ID NO: 713928 - RNA, 19 nt, Artificial Sequence
  Description of Artificial Sequence: Synthetic oligonucleotide
  Sense strand starting at position 962 of SEQ ID NO: 586386
agguguuaugaguaugaaa

SEQ ID NO: 713929 - RNA, 19 nt, Artificial Sequence
  Description of Artificial Sequence: Synthetic oligonucleotide
  Antisense strand to SEQ ID NO: 713928
uuucauacucauaacaccu

SEQ ID NO: 713930 - RNA, 19 nt, Artificial Sequence
  Description of Artificial Sequence: Synthetic oligonucleotide
  Sense strand starting at position 964 of SEQ ID NO: 586386
guguuaugaguaugaaaug

SEQ ID NO: 713931 - RNA, 19 nt, Artificial Sequence
  Description of Artificial Sequence: Synthetic oligonucleotide
  Antisense strand to SEQ ID NO: 713930
cauuucauacucauaacac

SEQ ID NO: 713932 - RNA, 19 nt, Artificial Sequence
  Description of Artificial Sequence: Synthetic oligonucleotide
  Sense strand starting at position 974 of SEQ ID NO: 586386
uaugaaaugcauugaguua

SEQ ID NO: 713933 - RNA, 19 nt, Artificial Sequence
  Description of Artificial Sequence: Synthetic oligonucleotide
  Antisense strand to SEQ ID NO: 713932
uaacucaaugcauuucaua

SEQ ID NO: 713934 - RNA, 19 nt, Artificial Sequence
  Description of Artificial Sequence: Synthetic oligonucleotide
  Sense strand starting at position 1007 of SEQ ID NO: 586386
cagcgauaagcacaggaua

SEQ ID NO: 713935 - RNA, 19 nt, Artificial Sequence
  Description of Artificial Sequence: Synthetic oligonucleotide
  Antisense strand to SEQ ID NO: 713934
uauccugugcuuaucgcug

SEQ ID NO: 713936 - RNA, 19 nt, Artificial Sequence
  Description of Artificial Sequence: Synthetic oligonucleotide
  Sense strand starting at position 1086 of SEQ ID NO: 586386
auugguuuccuggauacau

SEQ ID NO: 713937 - RNA, 19 nt, Artificial Sequence
  Description of Artificial Sequence: Synthetic oligonucleotide
  Antisense strand to SEQ ID NO: 713936
auguauccaggaaaccaau

SEQ ID NO: 713938 - RNA, 19 nt, Artificial Sequence
  Description of Artificial Sequence: Synthetic oligonucleotide
  Sense strand starting at position 1088 of SEQ ID NO: 586386
ugguuuccuggauacauac

SEQ ID NO: 713939 - RNA, 19 nt, Artificial Sequence
  Description of Artificial Sequence: Synthetic oligonucleotide
  Antisense strand to SEQ ID NO: 713938
guauguauccaggaaacca

SEQ ID NO: 713940 - RNA, 19 nt, Artificial Sequence
  Description of Artificial Sequence: Synthetic oligonucleotide
  Sense strand starting at position 1147 of SEQ ID NO: 586386
ugcgaagaagcuuaagacu

SEQ ID NO: 713941 - RNA, 19 nt, Artificial Sequence
  Description of Artificial Sequence: Synthetic oligonucleotide
  Antisense strand to SEQ ID NO: 713940
agucuuaagcuucuucgca

SEQ ID NO: 713942 - RNA, 19 nt, Artificial Sequence
  Description of Artificial Sequence: Synthetic oligonucleotide
  Sense strand starting at position 1689 of SEQ ID NO: 586386
uguucugagguuuaauacu

SEQ ID NO: 713943 - RNA, 19 nt, Artificial Sequence
  Description of Artificial Sequence: Synthetic oligonucleotide
  Antisense strand to SEQ ID NO: 713942
aguauuaaaccucagaaca

SEQ ID NO: 713944 - RNA, 19 nt, Artificial Sequence
  Description of Artificial Sequence: Synthetic oligonucleotide
  Sense strand starting at position 2419 of SEQ ID NO: 586386
uccagcuucccugaaguuu

SEQ ID NO: 713945 - RNA, 19 nt, Artificial Sequence
  Description of Artificial Sequence: Synthetic oligonucleotide
  Antisense strand to SEQ ID NO: 713944
aaacuucagggaagcugga

SEQ ID NO: 713946 - RNA, 19 nt, Artificial Sequence
  Description of Artificial Sequence: Synthetic oligonucleotide
  Sense strand starting at position 2508 of SEQ ID NO: 586386
agcguucgagcucuucaaa

SEQ ID NO: 713947 - RNA, 19 nt, Artificial Sequence
  Description of Artificial Sequence: Synthetic oligonucleotide
  Antisense strand to SEQ ID NO: 713946
uuugaagagcucgaacgcu

SEQ ID NO: 713948 - RNA, 19 nt, Artificial Sequence
  Description of Artificial Sequence: Synthetic oligonucleotide
  Sense strand starting at position 2526 of SEQ ID NO: 586386
aaguguaagcucuagaaca

SEQ ID NO: 713949 - RNA, 19 nt, Artificial Sequence
  Description of Artificial Sequence: Synthetic oligonucleotide
  Antisense strand to SEQ ID NO: 713948
uguucuagagcuuacacuu

SEQ ID NO: 713950 - RNA, 19 nt, Artificial Sequence
  Description of Artificial Sequence: Synthetic oligonucleotide
  Sense strand starting at position 2528 of SEQ ID NO: 586386
guguaagcucuagaacaga

SEQ ID NO: 713951 - RNA, 19 nt, Artificial Sequence
  Description of Artificial Sequence: Synthetic oligonucleotide
  Antisense strand to SEQ ID NO: 713950
ucuguucuagagcuuacac

SEQ ID NO: 713952 - RNA, 19 nt, Artificial Sequence
  Description of Artificial Sequence: Synthetic oligonucleotide
  Sense strand starting at position 2546 of SEQ ID NO: 586386
acggcagacgcauaaugaa

SEQ ID NO: 713953 - RNA, 19 nt, Artificial Sequence
  Description of Artificial Sequence: Synthetic oligonucleotide
  Antisense strand to SEQ ID NO: 713952
uucauuaugcgucugccgu

SEQ ID NO: 713954 - RNA, 19 nt, Artificial Sequence
  Description of Artificial Sequence: Synthetic oligonucleotide
  Sense strand starting at position 2591 of SEQ ID NO: 586386
ggaaacgcuuacuccuuua

SEQ ID NO: 713955 - RNA, 19 nt, Artificial Sequence
  Description of Artificial Sequence: Synthetic oligonucleotide
  Antisense strand to SEQ ID NO: 713954
uaaaggaguaagcguuucc

SEQ ID NO: 713956 - RNA, 19 nt, Artificial Sequence
  Description of Artificial Sequence: Synthetic oligonucleotide
  Sense strand starting at position 2668 of SEQ ID NO: 586386
gaggcaguuaucuacagug

SEQ ID NO: 713957 - RNA, 19 nt, Artificial Sequence
  Description of Artificial Sequence: Synthetic oligonucleotide
  Antisense strand to SEQ ID NO: 713956
cacuguagauaacugccuc

SEQ ID NO: 713958 - RNA, 19 nt, Artificial Sequence
  Description of Artificial Sequence: Synthetic oligonucleotide
  Sense strand starting at position 2670 of SEQ ID NO: 586386
ggcaguuaucuacagugac

SEQ ID NO: 713959 - RNA, 19 nt, Artificial Sequence
  Description of Artificial Sequence: Synthetic oligonucleotide
  Antisense strand to SEQ ID NO: 713958
gucacuguagauaacugcc

SEQ ID NO: 713960 - RNA, 19 nt, Artificial Sequence
  Description of Artificial Sequence: Synthetic oligonucleotide
  Sense strand starting at position 2711 of SEQ ID NO: 586386
uuuguucagguugggauua

SEQ ID NO: 713961 - RNA, 19 nt, Artificial Sequence
  Description of Artificial Sequence: Synthetic oligonucleotide
  Antisense strand to SEQ ID NO: 713960
uaaucccaaccugaacaaa

SEQ ID NO: 713962 - RNA, 19 nt, Artificial Sequence
  Description of Artificial Sequence: Synthetic oligonucleotide
  Sense strand starting at position 3035 of SEQ ID NO: 586386
ugugaauagcaguaucuug

SEQ ID NO: 713963 - RNA, 19 nt, Artificial Sequence
  Description of Artificial Sequence: Synthetic oligonucleotide
  Antisense strand to SEQ ID NO: 713962
caagauacugcuauucaca

SEQ ID NO: 713964 - RNA, 19 nt, Artificial Sequence
  Description of Artificial Sequence: Synthetic oligonucleotide
  Sense strand starting at position 3427 of SEQ ID NO: 586386
ucuuguagacuauaaaggu

SEQ ID NO: 713965 - RNA, 19 nt, Artificial Sequence
  Description of Artificial Sequence: Synthetic oligonucleotide
  Antisense strand to SEQ ID NO: 713964
accuuuauagucuacaaga

SEQ ID NO: 713966 - RNA, 19 nt, Artificial Sequence
  Description of Artificial Sequence: Synthetic oligonucleotide
  Sense strand starting at position 3447 of SEQ ID NO: 586386
ggugcuguaauauagugau

SEQ ID NO: 713967 - RNA, 19 nt, Artificial Sequence
  Description of Artificial Sequence: Synthetic oligonucleotide
  Antisense strand to SEQ ID NO: 713966
aucacuauauuacagcacc

SEQ ID NO: 713968 - RNA, 19 nt, Artificial Sequence
  Description of Artificial Sequence: Synthetic oligonucleotide
  Sense strand starting at position 3460 of SEQ ID NO: 586386
agugauguaagauagcagu

SEQ ID NO: 713969 - RNA, 19 nt, Artificial Sequence
  Description of Artificial Sequence: Synthetic oligonucleotide
  Antisense strand to SEQ ID NO: 713968
acugcuaucuuacaucacu

SEQ ID NO: 713970 - RNA, 19 nt, Artificial Sequence
  Description of Artificial Sequence: Synthetic oligonucleotide
  Sense strand starting at position 3466 of SEQ ID NO: 586386
guaagauagcaguaggauu

SEQ ID NO: 713971 - RNA, 19 nt, Artificial Sequence
  Description of Artificial Sequence: Synthetic oligonucleotide
  Antisense strand to SEQ ID NO: 713970
aauccuacugcuaucuuac

SEQ ID NO: 713972 - RNA, 19 nt, Artificial Sequence
  Description of Artificial Sequence: Synthetic oligonucleotide
  Sense strand starting at position 3485 of SEQ ID NO: 586386
gcauauaaaguagagcauu

SEQ ID NO: 713973 - RNA, 19 nt, Artificial Sequence
  Description of Artificial Sequence: Synthetic oligonucleotide
  Antisense strand to SEQ ID NO: 713972
aaugcucuacuuuauaugc

SEQ ID NO: 713974 - RNA, 19 nt, Artificial Sequence
  Description of Artificial Sequence: Synthetic oligonucleotide
  Sense strand starting at position 3530 of SEQ ID NO: 586386
guuggaaacugguuaggaa

SEQ ID NO: 713975 - RNA, 19 nt, Artificial Sequence
  Description of Artificial Sequence: Synthetic oligonucleotide
  Antisense strand to SEQ ID NO: 713974
uuccuaaccaguuuccaac

SEQ ID NO: 713976 - RNA, 19 nt, Artificial Sequence
  Description of Artificial Sequence: Synthetic oligonucleotide
  Sense strand starting at position 3538 of SEQ ID NO: 586386
cugguuaggaaaugucaga

SEQ ID NO: 713977 - RNA, 19 nt, Artificial Sequence
  Description of Artificial Sequence: Synthetic oligonucleotide
  Antisense strand to SEQ ID NO: 713976
ucugacauuuccuaaccag

SEQ ID NO: 713978 - RNA, 19 nt, Artificial Sequence
  Description of Artificial Sequence: Synthetic oligonucleotide
  Sense strand starting at position 3558 of SEQ ID NO: 586386
aaggcuuucuagguggaga

SEQ ID NO: 713979 - RNA, 19 nt, Artificial Sequence
  Description of Artificial Sequence: Synthetic oligonucleotide
  Antisense strand to SEQ ID NO: 713978
ucuccaccuagaaagccuu

SEQ ID NO: 713980 - RNA, 19 nt, Artificial Sequence
  Description of Artificial Sequence: Synthetic oligonucleotide
  Sense strand starting at position 3651 of SEQ ID NO: 586386
caggaauuguaaucaguuc

SEQ ID NO: 713981 - RNA, 19 nt, Artificial Sequence
  Description of Artificial Sequence: Synthetic oligonucleotide
  Antisense strand to SEQ ID NO: 713980
gaacugauuacaauuccug

SEQ ID NO: 713982 - RNA, 19 nt, Artificial Sequence
  Description of Artificial Sequence: Synthetic oligonucleotide
  Sense strand starting at position 3663 of SEQ ID NO: 586386
ucaguucuuggacgguaaa

SEQ ID NO: 713983 - RNA, 19 nt, Artificial Sequence
  Description of Artificial Sequence: Synthetic oligonucleotide
  Antisense strand to SEQ ID NO: 713982
uuuaccguccaagaacuga

SEQ ID NO: 713984 - RNA, 19 nt, Artificial Sequence
  Description of Artificial Sequence: Synthetic oligonucleotide
  Sense strand starting at position 3664 of SEQ ID NO: 586386
caguucuuggacgguaaau

SEQ ID NO: 713985 - RNA, 19 nt, Artificial Sequence
  Description of Artificial Sequence: Synthetic oligonucleotide
  Antisense strand to SEQ ID NO: 713984
auuuaccguccaagaacug

SEQ ID NO: 713986 - RNA, 19 nt, Artificial Sequence
  Description of Artificial Sequence: Synthetic oligonucleotide
  Sense strand starting at position 3666 of SEQ ID NO: 586386
guucuuggacgguaaauac

SEQ ID NO: 713987 - RNA, 19 nt, Artificial Sequence
  Description of Artificial Sequence: Synthetic oligonucleotide
  Antisense strand to SEQ ID NO: 713986
guauuuaccguccaagaac

SEQ ID NO: 713988 - RNA, 19 nt, Artificial Sequence
  Description of Artificial Sequence: Synthetic oligonucleotide
  Sense strand starting at position 3724 of SEQ ID NO: 586386
ugccauucuccacagugau

SEQ ID NO: 713989 - RNA, 19 nt, Artificial Sequence
  Description of Artificial Sequence: Synthetic oligonucleotide
  Antisense strand to SEQ ID NO: 713988
aucacuguggagaauggca

SEQ ID NO: 713990 - RNA, 19 nt, Artificial Sequence
  Description of Artificial Sequence: Synthetic oligonucleotide
  Sense strand starting at position 3731 of SEQ ID NO: 586386
cuccacagugauuguuuaa

SEQ ID NO: 713991 - RNA, 19 nt, Artificial Sequence
  Description of Artificial Sequence: Synthetic oligonucleotide
  Antisense strand to SEQ ID NO: 713990
uuaaacaaucacuguggag

SEQ ID NO: 713992 - RNA, 19 nt, Artificial Sequence
  Description of Artificial Sequence: Synthetic oligonucleotide
  Sense strand starting at position 3824 of SEQ ID NO: 586386
ggauccaucagaugugaac

SEQ ID NO: 713993 - RNA, 19 nt, Artificial Sequence
  Description of Artificial Sequence: Synthetic oligonucleotide
  Antisense strand to SEQ ID NO: 713992
guucacaucugauggaucc

SEQ ID NO: 713994 - RNA, 19 nt, Artificial Sequence
  Description of Artificial Sequence: Synthetic oligonucleotide
  Sense strand starting at position 192 of SEQ ID NO: 586387
guaucugaggccugagaca

SEQ ID NO: 713995 - RNA, 19 nt, Artificial Sequence
  Description of Artificial Sequence: Synthetic oligonucleotide
  Antisense strand to SEQ ID NO: 713994
ugucucaggccucagauac

SEQ ID NO: 713996 - RNA, 19 nt, Artificial Sequence
  Description of Artificial Sequence: Synthetic oligonucleotide
  Sense strand starting at position 387 of SEQ ID NO: 586387
auucgagaguuaguucuua

SEQ ID NO: 713997 - RNA, 19 nt, Artificial Sequence
  Description of Artificial Sequence: Synthetic oligonucleotide
  Antisense strand to SEQ ID NO: 713996
uaagaacuaacucucgaau

SEQ ID NO: 713998 - RNA, 19 nt, Artificial Sequence
  Description of Artificial Sequence: Synthetic oligonucleotide
  Sense strand starting at position 391 of SEQ ID NO: 586387
gagaguuaguucuuaugaa

SEQ ID NO: 713999 - RNA, 19 nt, Artificial Sequence
  Description of Artificial Sequence: Synthetic oligonucleotide
  Antisense strand to SEQ ID NO: 713998
uucauaagaacuaacucuc

SEQ ID NO: 714000 - RNA, 19 nt, Artificial Sequence
  Description of Artificial Sequence: Synthetic oligonucleotide
  Sense strand starting at position 577 of SEQ ID NO: 586387
ugcaaauugcacugaauau

SEQ ID NO: 714001 - RNA, 19 nt, Artificial Sequence
  Description of Artificial Sequence: Synthetic oligonucleotide
  Antisense strand to SEQ ID NO: 714000
auauucagugcaauuugca

SEQ ID NO: 714002 - RNA, 19 nt, Artificial Sequence
  Description of Artificial Sequence: Synthetic oligonucleotide
  Sense strand starting at position 674 of SEQ ID NO: 586387
acccaugucuguguuaaca

SEQ ID NO: 714003 - RNA, 19 nt, Artificial Sequence
  Description of Artificial Sequence: Synthetic oligonucleotide
  Antisense strand to SEQ ID NO: 714002
uguuaacacagacaugggu

SEQ ID NO: 714004 - RNA, 19 nt, Artificial Sequence
  Description of Artificial Sequence: Synthetic oligonucleotide
  Sense strand starting at position 747 of SEQ ID NO: 586387
uuugcuaaucuggaauauu

SEQ ID NO: 714005 - RNA, 19 nt, Artificial Sequence
  Description of Artificial Sequence: Synthetic oligonucleotide
  Antisense strand to SEQ ID NO: 714004
aauauuccagauuagcaaa

SEQ ID NO: 714006 - RNA, 19 nt, Artificial Sequence
  Description of Artificial Sequence: Synthetic oligonucleotide
  Sense strand starting at position 871 of SEQ ID NO: 586387
aggauuaguagaggccaga

SEQ ID NO: 714007 - RNA, 19 nt, Artificial Sequence
  Description of Artificial Sequence: Synthetic oligonucleotide
  Antisense strand to SEQ ID NO: 714006
ucuggccucuacuaauccu

SEQ ID NO: 714008 - RNA, 19 nt, Artificial Sequence
  Description of Artificial Sequence: Synthetic oligonucleotide
  Sense strand starting at position 921 of SEQ ID NO: 586387
uugagucucugaucuccua

SEQ ID NO: 714009 - RNA, 19 nt, Artificial Sequence
  Description of Artificial Sequence: Synthetic oligonucleotide
  Antisense strand to SEQ ID NO: 714008
uaggagaucagagacucaa

SEQ ID NO: 714010 - RNA, 19 nt, Artificial Sequence
  Description of Artificial Sequence: Synthetic oligonucleotide
  Sense strand starting at position 941 of SEQ ID NO: 586387
guaauuuccuguccugauc

SEQ ID NO: 714011 - RNA, 19 nt, Artificial Sequence
  Description of Artificial Sequence: Synthetic oligonucleotide
  Antisense strand to SEQ ID NO: 714010
gaucaggacaggaaauuac

SEQ ID NO: 714012 - RNA, 19 nt, Artificial Sequence
  Description of Artificial Sequence: Synthetic oligonucleotide
  Sense strand starting at position 977 of SEQ ID NO: 586387
cuuauuagccaagguacaa

SEQ ID NO: 714013 - RNA, 19 nt, Artificial Sequence
  Description of Artificial Sequence: Synthetic oligonucleotide
  Antisense strand to SEQ ID NO: 714012
uuguaccuuggcuaauaag

SEQ ID NO: 714014 - RNA, 19 nt, Artificial Sequence
  Description of Artificial Sequence: Synthetic oligonucleotide
  Sense strand starting at position 1039 of SEQ ID NO: 586387
gaucacugcccuuaugaug

SEQ ID NO: 714015 - RNA, 19 nt, Artificial Sequence
  Description of Artificial Sequence: Synthetic oligonucleotide
  Antisense strand to SEQ ID NO: 714014
caucauaagggcagugauc

SEQ ID NO: 714016 - RNA, 19 nt, Artificial Sequence
  Description of Artificial Sequence: Synthetic oligonucleotide
  Sense strand starting at position 1065 of SEQ ID NO: 586387
acggauuuauaaggccaga

SEQ ID NO: 714017 - RNA, 19 nt, Artificial Sequence
  Description of Artificial Sequence: Synthetic oligonucleotide
  Antisense strand to SEQ ID NO: 714016
ucuggccuuauaaauccgu

SEQ ID NO: 714018 - RNA, 19 nt, Artificial Sequence
  Description of Artificial Sequence: Synthetic oligonucleotide
  Sense strand starting at position 1070 of SEQ ID NO: 586387
uuuauaaggccagagcgau

SEQ ID NO: 714019 - RNA, 19 nt, Artificial Sequence
  Description of Artificial Sequence: Synthetic oligonucleotide
  Antisense strand to SEQ ID NO: 714018
aucgcucuggccuuauaaa

SEQ ID NO: 714020 - RNA, 19 nt, Artificial Sequence
  Description of Artificial Sequence: Synthetic oligonucleotide
  Sense strand starting at position 1123 of SEQ ID NO: 586387
ccgugaagguguuuaccaa

SEQ ID NO: 714021 - RNA, 19 nt, Artificial Sequence
  Description of Artificial Sequence: Synthetic oligonucleotide
  Antisense strand to SEQ ID NO: 714020
uugguaaacaccuucacgg

SEQ ID NO: 714022 - RNA, 19 nt, Artificial Sequence
  Description of Artificial Sequence: Synthetic oligonucleotide
  Sense strand starting at position 1124 of SEQ ID NO: 586387
cgugaagguguuuaccaaa

SEQ ID NO: 714023 - RNA, 19 nt, Artificial Sequence
  Description of Artificial Sequence: Synthetic oligonucleotide
  Antisense strand to SEQ ID NO: 714022
uuugguaaacaccuucacg

SEQ ID NO: 714024 - RNA, 19 nt, Artificial Sequence
  Description of Artificial Sequence: Synthetic oligonucleotide
  Sense strand starting at position 1279 of SEQ ID NO: 586387
ugcagacagcucgaaaugu

SEQ ID NO: 714025 - RNA, 19 nt, Artificial Sequence
  Description of Artificial Sequence: Synthetic oligonucleotide
  Antisense strand to SEQ ID NO: 714024
acauuucgagcugucugca

SEQ ID NO: 714026 - RNA, 19 nt, Artificial Sequence
  Description of Artificial Sequence: Synthetic oligonucleotide
  Sense strand starting at position 1288 of SEQ ID NO: 586387
cucgaaauguaaucaaaca

SEQ ID NO: 714027 - RNA, 19 nt, Artificial Sequence
  Description of Artificial Sequence: Synthetic oligonucleotide
  Antisense strand to SEQ ID NO: 714026
uguuugauuacauuucgag

SEQ ID NO: 714028 - RNA, 19 nt, Artificial Sequence
  Description of Artificial Sequence: Synthetic oligonucleotide
  Sense strand starting at position 1712 of SEQ ID NO: 586387
gcgacaucccgcuccaguu

SEQ ID NO: 714029 - RNA, 19 nt, Artificial Sequence
  Description of Artificial Sequence: Synthetic oligonucleotide
  Antisense strand to SEQ ID NO: 714028
aacuggagcgggaugucgc

SEQ ID NO: 714030 - RNA, 19 nt, Artificial Sequence
  Description of Artificial Sequence: Synthetic oligonucleotide
  Sense strand starting at position 2100 of SEQ ID NO: 586387
ggucaauucgucuaucccu

SEQ ID NO: 714031 - RNA, 19 nt, Artificial Sequence
  Description of Artificial Sequence: Synthetic oligonucleotide
  Antisense strand to SEQ ID NO: 714030
agggauagacgaauugacc

SEQ ID NO: 714032 - RNA, 19 nt, Artificial Sequence
  Description of Artificial Sequence: Synthetic oligonucleotide
  Sense strand starting at position 2273 of SEQ ID NO: 586387
uguuguacacaaugacuua

SEQ ID NO: 714033 - RNA, 19 nt, Artificial Sequence
  Description of Artificial Sequence: Synthetic oligonucleotide
  Antisense strand to SEQ ID NO: 714032
uaagucauuguguacaaca

SEQ ID NO: 714034 - RNA, 19 nt, Artificial Sequence
  Description of Artificial Sequence: Synthetic oligonucleotide
  Sense strand starting at position 2283 of SEQ ID NO: 586387
aaugacuuauaggucugau

SEQ ID NO: 714035 - RNA, 19 nt, Artificial Sequence
  Description of Artificial Sequence: Synthetic oligonucleotide
  Antisense strand to SEQ ID NO: 714034
aucagaccuauaagucauu

SEQ ID NO: 714036 - RNA, 19 nt, Artificial Sequence
  Description of Artificial Sequence: Synthetic oligonucleotide
  Sense strand starting at position 2286 of SEQ ID NO: 586387
gacuuauaggucugauuga

SEQ ID NO: 714037 - RNA, 19 nt, Artificial Sequence
  Description of Artificial Sequence: Synthetic oligonucleotide
  Antisense strand to SEQ ID NO: 714036
ucaaucagaccuauaaguc

SEQ ID NO: 714038 - RNA, 19 nt, Artificial Sequence
  Description of Artificial Sequence: Synthetic oligonucleotide
  Sense strand starting at position 2293 of SEQ ID NO: 586387
aggucugauugaucccaau

SEQ ID NO: 714039 - RNA, 19 nt, Artificial Sequence
  Description of Artificial Sequence: Synthetic oligonucleotide
  Antisense strand to SEQ ID NO: 714038
auugggaucaaucagaccu

SEQ ID NO: 714040 - RNA, 19 nt, Artificial Sequence
  Description of Artificial Sequence: Synthetic oligonucleotide
  Sense strand starting at position 2753 of SEQ ID NO: 586387
ggguaacuauuauuggacu

SEQ ID NO: 714041 - RNA, 19 nt, Artificial Sequence
  Description of Artificial Sequence: Synthetic oligonucleotide
  Antisense strand to SEQ ID NO: 714040
aguccaauaauaguuaccc

SEQ ID NO: 714042 - RNA, 19 nt, Artificial Sequence
  Description of Artificial Sequence: Synthetic oligonucleotide
  Sense strand starting at position 2985 of SEQ ID NO: 586387
gauauauaauggguacuca

SEQ ID NO: 714043 - RNA, 19 nt, Artificial Sequence
  Description of Artificial Sequence: Synthetic oligonucleotide
  Antisense strand to SEQ ID NO: 714042
ugaguacccauuauauauc

SEQ ID NO: 714044 - RNA, 19 nt, Artificial Sequence
  Description of Artificial Sequence: Synthetic oligonucleotide
  Sense strand starting at position 3154 of SEQ ID NO: 586387
uuguaacuauggcuagaaa

SEQ ID NO: 714045 - RNA, 19 nt, Artificial Sequence
  Description of Artificial Sequence: Synthetic oligonucleotide
  Antisense strand to SEQ ID NO: 714044
uuucuagccauaguuacaa

SEQ ID NO: 714046 - RNA, 19 nt, Artificial Sequence
  Description of Artificial Sequence: Synthetic oligonucleotide
  Sense strand starting at position 3155 of SEQ ID NO: 586387
uguaacuauggcuagaaau

SEQ ID NO: 714047 - RNA, 19 nt, Artificial Sequence
  Description of Artificial Sequence: Synthetic oligonucleotide
  Antisense strand to SEQ ID NO: 714046
auuucuagccauaguuaca

SEQ ID NO: 714048 - RNA, 19 nt, Artificial Sequence
  Description of Artificial Sequence: Synthetic oligonucleotide
  Sense strand starting at position 3177 of SEQ ID NO: 586387
gagguuaaaugucuaggua

SEQ ID NO: 714049 - RNA, 19 nt, Artificial Sequence
  Description of Artificial Sequence: Synthetic oligonucleotide
  Antisense strand to SEQ ID NO: 714048
uaccuagacauuuaaccuc

SEQ ID NO: 714050 - RNA, 19 nt, Artificial Sequence
  Description of Artificial Sequence: Synthetic oligonucleotide
  Sense strand starting at position 3178 of SEQ ID NO: 586387
agguuaaaugucuagguag

SEQ ID NO: 714051 - RNA, 19 nt, Artificial Sequence
  Description of Artificial Sequence: Synthetic oligonucleotide
  Antisense strand to SEQ ID NO: 714050
cuaccuagacauuuaaccu

SEQ ID NO: 714052 - RNA, 19 nt, Artificial Sequence
  Description of Artificial Sequence: Synthetic oligonucleotide
  Sense strand starting at position 3180 of SEQ ID NO: 586387
guuaaaugucuagguagaa

SEQ ID NO: 714053 - RNA, 19 nt, Artificial Sequence
  Description of Artificial Sequence: Synthetic oligonucleotide
  Antisense strand to SEQ ID NO: 714052
uucuaccuagacauuuaac

SEQ ID NO: 714054 - RNA, 19 nt, Artificial Sequence
  Description of Artificial Sequence: Synthetic oligonucleotide
  Sense strand starting at position 3181 of SEQ ID NO: 586387
uuaaaugucuagguagaag

SEQ ID NO: 714055 - RNA, 19 nt, Artificial Sequence
  Description of Artificial Sequence: Synthetic oligonucleotide
  Antisense strand to SEQ ID NO: 714054
cuucuaccuagacauuuaa

SEQ ID NO: 714056 - RNA, 19 nt, Artificial Sequence
  Description of Artificial Sequence: Synthetic oligonucleotide
  Sense strand starting at position 3192 of SEQ ID NO: 586387
gguagaagguauucaaggu

SEQ ID NO: 714057 - RNA, 19 nt, Artificial Sequence
  Description of Artificial Sequence: Synthetic oligonucleotide
  Antisense strand to SEQ ID NO: 714056
accuugaauaccuucuacc

SEQ ID NO: 714058 - RNA, 19 nt, Artificial Sequence
  Description of Artificial Sequence: Synthetic oligonucleotide
  Sense strand starting at position 3246 of SEQ ID NO: 586387
ccacuaccgugacugaaua

SEQ ID NO: 714059 - RNA, 19 nt, Artificial Sequence
  Description of Artificial Sequence: Synthetic oligonucleotide
  Antisense strand to SEQ ID NO: 714058
uauucagucacgguagugg

SEQ ID NO: 714060 - RNA, 19 nt, Artificial Sequence
  Description of Artificial Sequence: Synthetic oligonucleotide
  Sense strand starting at position 3391 of SEQ ID NO: 586387
uuccauaaccacugaguga

SEQ ID NO: 714061 - RNA, 19 nt, Artificial Sequence
  Description of Artificial Sequence: Synthetic oligonucleotide
  Antisense strand to SEQ ID NO: 714060
ucacucagugguuauggaa

SEQ ID NO: 714062 - RNA, 19 nt, Artificial Sequence
  Description of Artificial Sequence: Synthetic oligonucleotide
  Sense strand starting at position 3395 of SEQ ID NO: 586387
auaaccacugagugaucua

SEQ ID NO: 714063 - RNA, 19 nt, Artificial Sequence
  Description of Artificial Sequence: Synthetic oligonucleotide
  Antisense strand to SEQ ID NO: 714062
uagaucacucagugguuau

SEQ ID NO: 714064 - RNA, 19 nt, Artificial Sequence
  Description of Artificial Sequence: Synthetic oligonucleotide
  Sense strand starting at position 3407 of SEQ ID NO: 586387
ugaucuagcugagauuuga

SEQ ID NO: 714065 - RNA, 19 nt, Artificial Sequence
  Description of Artificial Sequence: Synthetic oligonucleotide
  Antisense strand to SEQ ID NO: 714064
ucaaaucucagcuagauca

SEQ ID NO: 714066 - RNA, 19 nt, Artificial Sequence
  Description of Artificial Sequence: Synthetic oligonucleotide
  Sense strand starting at position 3469 of SEQ ID NO: 586387
uggucuuuccaacauggca

SEQ ID NO: 714067 - RNA, 19 nt, Artificial Sequence
  Description of Artificial Sequence: Synthetic oligonucleotide
  Antisense strand to SEQ ID NO: 714066
ugccauguuggaaagacca

SEQ ID NO: 714068 - RNA, 19 nt, Artificial Sequence
  Description of Artificial Sequence: Synthetic oligonucleotide
  Sense strand starting at position 3910 of SEQ ID NO: 586387
ggcagcuuuccauaagaga

SEQ ID NO: 714069 - RNA, 19 nt, Artificial Sequence
  Description of Artificial Sequence: Synthetic oligonucleotide
  Antisense strand to SEQ ID NO: 714068
ucucuuauggaaagcugcc

SEQ ID NO: 714070 - RNA, 19 nt, Artificial Sequence
  Description of Artificial Sequence: Synthetic oligonucleotide
  Sense strand starting at position 3921 of SEQ ID NO: 586387
auaagagaugcucaccagu

SEQ ID NO: 714071 - RNA, 19 nt, Artificial Sequence
  Description of Artificial Sequence: Synthetic oligonucleotide
  Antisense strand to SEQ ID NO: 714070
acuggugagcaucucuuau

SEQ ID NO: 714072 - RNA, 19 nt, Artificial Sequence
  Description of Artificial Sequence: Synthetic oligonucleotide
  Sense strand starting at position 3923 of SEQ ID NO: 586387
aagagaugcucaccagugu

SEQ ID NO: 714073 - RNA, 19 nt, Artificial Sequence
  Description of Artificial Sequence: Synthetic oligonucleotide
  Antisense strand to SEQ ID NO: 714072
acacuggugagcaucucuu

SEQ ID NO: 714074 - RNA, 19 nt, Artificial Sequence
  Description of Artificial Sequence: Synthetic oligonucleotide
  Sense strand starting at position 1164 of SEQ ID NO: 586388
gugcuagaguuaguaacca

SEQ ID NO: 714075 - RNA, 19 nt, Artificial Sequence
  Description of Artificial Sequence: Synthetic oligonucleotide
  Antisense strand to SEQ ID NO: 714074
ugguuacuaacucuagcac

SEQ ID NO: 714076 - RNA, 19 nt, Artificial Sequence
  Description of Artificial Sequence: Synthetic oligonucleotide
  Sense strand starting at position 1169 of SEQ ID NO: 586388
agaguuaguaaccaggagu

SEQ ID NO: 714077 - RNA, 19 nt, Artificial Sequence
  Description of Artificial Sequence: Synthetic oligonucleotide
  Antisense strand to SEQ ID NO: 714076
acuccugguuacuaacucu

SEQ ID NO: 714078 - RNA, 19 nt, Artificial Sequence
  Description of Artificial Sequence: Synthetic oligonucleotide
  Sense strand starting at position 1307 of SEQ ID NO: 586388
gccgcuucucuugggaaga

SEQ ID NO: 714079 - RNA, 19 nt, Artificial Sequence
  Description of Artificial Sequence: Synthetic oligonucleotide
  Antisense strand to SEQ ID NO: 714078
ucuucccaagagaagcggc

SEQ ID NO: 714080 - RNA, 19 nt, Artificial Sequence
  Description of Artificial Sequence: Synthetic oligonucleotide
  Sense strand starting at position 2552 of SEQ ID NO: 586388
acugguugugccugguaga

SEQ ID NO: 714081 - RNA, 19 nt, Artificial Sequence
  Description of Artificial Sequence: Synthetic oligonucleotide
  Antisense strand to SEQ ID NO: 714080
ucuaccaggcacaaccagu

SEQ ID NO: 714082 - RNA, 19 nt, Artificial Sequence
  Description of Artificial Sequence: Synthetic oligonucleotide
  Sense strand starting at position 2565 of SEQ ID NO: 586388
gguagaggcuguuuaggau

SEQ ID NO: 714083 - RNA, 19 nt, Artificial Sequence
  Description of Artificial Sequence: Synthetic oligonucleotide
  Antisense strand to SEQ ID NO: 714082
auccuaaacagccucuacc

SEQ ID NO: 714084 - RNA, 19 nt, Artificial Sequence
  Description of Artificial Sequence: Synthetic oligonucleotide
  Sense strand starting at position 2577 of SEQ ID NO: 586388
uuaggauugcccgaggcga

SEQ ID NO: 714085 - RNA, 19 nt, Artificial Sequence
  Description of Artificial Sequence: Synthetic oligonucleotide
  Antisense strand to SEQ ID NO: 714084
ucgccucgggcaauccuaa

SEQ ID NO: 714086 - RNA, 19 nt, Artificial Sequence
  Description of Artificial Sequence: Synthetic oligonucleotide
  Sense strand starting at position 2656 of SEQ ID NO: 586388
cugagagugcaucgcugua

SEQ ID NO: 714087 - RNA, 19 nt, Artificial Sequence
  Description of Artificial Sequence: Synthetic oligonucleotide
  Antisense strand to SEQ ID NO: 714086
uacagcgaugcacucucag

SEQ ID NO: 714088 - RNA, 19 nt, Artificial Sequence
  Description of Artificial Sequence: Synthetic oligonucleotide
  Sense strand starting at position 2701 of SEQ ID NO: 586388
gaacguuccagaggagacu

SEQ ID NO: 714089 - RNA, 19 nt, Artificial Sequence
  Description of Artificial Sequence: Synthetic oligonucleotide
  Antisense strand to SEQ ID NO: 714088
agucuccucuggaacguuc

SEQ ID NO: 714090 - RNA, 19 nt, Artificial Sequence
  Description of Artificial Sequence: Synthetic oligonucleotide
  Sense strand starting at position 2717 of SEQ ID NO: 586388
acugaaugggaucgucuua

SEQ ID NO: 714091 - RNA, 19 nt, Artificial Sequence
  Description of Artificial Sequence: Synthetic oligonucleotide
  Antisense strand to SEQ ID NO: 714090
uaagacgaucccauucagu

SEQ ID NO: 714092 - RNA, 19 nt, Artificial Sequence
  Description of Artificial Sequence: Synthetic oligonucleotide
  Sense strand starting at position 2722 of SEQ ID NO: 586388
augggaucgucuuaauuuc

SEQ ID NO: 714093 - RNA, 19 nt, Artificial Sequence
  Description of Artificial Sequence: Synthetic oligonucleotide
  Antisense strand to SEQ ID NO: 714092
gaaauuaagacgaucccau

SEQ ID NO: 714094 - RNA, 19 nt, Artificial Sequence
  Description of Artificial Sequence: Synthetic oligonucleotide
  Sense strand starting at position 2765 of SEQ ID NO: 586388
uucuuccaccaguguauua

SEQ ID NO: 714095 - RNA, 19 nt, Artificial Sequence
  Description of Artificial Sequence: Synthetic oligonucleotide
  Antisense strand to SEQ ID NO: 714094
uaauacacugguggaagaa

SEQ ID NO: 714096 - RNA, 19 nt, Artificial Sequence
  Description of Artificial Sequence: Synthetic oligonucleotide
  Sense strand starting at position 2782 of SEQ ID NO: 586388
uaccuuugcuccgcucaga

SEQ ID NO: 714097 - RNA, 19 nt, Artificial Sequence
  Description of Artificial Sequence: Synthetic oligonucleotide
  Antisense strand to SEQ ID NO: 714096
ucugagcggagcaaaggua

SEQ ID NO: 714098 - RNA, 19 nt, Artificial Sequence
  Description of Artificial Sequence: Synthetic oligonucleotide
  Sense strand starting at position 2826 of SEQ ID NO: 586388
acgcauugugcuccuagca

SEQ ID NO: 714099 - RNA, 19 nt, Artificial Sequence
  Description of Artificial Sequence: Synthetic oligonucleotide
  Antisense strand to SEQ ID NO: 714098
ugcuaggagcacaaugcgu

SEQ ID NO: 714100 - RNA, 19 nt, Artificial Sequence
  Description of Artificial Sequence: Synthetic oligonucleotide
  Sense strand starting at position 2866 of SEQ ID NO: 586388
guguguucgcauaggucaa

SEQ ID NO: 714101 - RNA, 19 nt, Artificial Sequence
  Description of Artificial Sequence: Synthetic oligonucleotide
  Antisense strand to SEQ ID NO: 714100
uugaccuaugcgaacacac

SEQ ID NO: 714102 - RNA, 19 nt, Artificial Sequence
  Description of Artificial Sequence: Synthetic oligonucleotide
  Sense strand starting at position 2867 of SEQ ID NO: 586388
uguguucgcauaggucaaa

SEQ ID NO: 714103 - RNA, 19 nt, Artificial Sequence
  Description of Artificial Sequence: Synthetic oligonucleotide
  Antisense strand to SEQ ID NO: 714102
uuugaccuaugcgaacaca

SEQ ID NO: 714104 - RNA, 19 nt, Artificial Sequence
  Description of Artificial Sequence: Synthetic oligonucleotide
  Sense strand starting at position 2868 of SEQ ID NO: 586388
guguucgcauaggucaaau

SEQ ID NO: 714105 - RNA, 19 nt, Artificial Sequence
  Description of Artificial Sequence: Synthetic oligonucleotide
  Antisense strand to SEQ ID NO: 714104
auuugaccuaugcgaacac

SEQ ID NO: 714106 - RNA, 19 nt, Artificial Sequence
  Description of Artificial Sequence: Synthetic oligonucleotide
  Sense strand starting at position 2891 of SEQ ID NO: 586388
guuugcuccuuugcacauu

SEQ ID NO: 714107 - RNA, 19 nt, Artificial Sequence
  Description of Artificial Sequence: Synthetic oligonucleotide
  Antisense strand to SEQ ID NO: 714106
aaugugcaaaggagcaaac

SEQ ID NO: 714108 - RNA, 19 nt, Artificial Sequence
  Description of Artificial Sequence: Synthetic oligonucleotide
  Sense strand starting at position 2904 of SEQ ID NO: 586388
cacauuuagcgcugugagu

SEQ ID NO: 714109 - RNA, 19 nt, Artificial Sequence
  Description of Artificial Sequence: Synthetic oligonucleotide
  Antisense strand to SEQ ID NO: 714108
acucacagcgcuaaaugug

SEQ ID NO: 714110 - RNA, 19 nt, Artificial Sequence
  Description of Artificial Sequence: Synthetic oligonucleotide
  Sense strand starting at position 2906 of SEQ ID NO: 586388
cauuuagcgcugugaguaa

SEQ ID NO: 714111 - RNA, 19 nt, Artificial Sequence
  Description of Artificial Sequence: Synthetic oligonucleotide
  Antisense strand to SEQ ID NO: 714110
uuacucacagcgcuaaaug

SEQ ID NO: 714112 - RNA, 19 nt, Artificial Sequence
  Description of Artificial Sequence: Synthetic oligonucleotide
  Sense strand starting at position 2910 of SEQ ID NO: 586388
uagcgcugugaguaaacaa

SEQ ID NO: 714113 - RNA, 19 nt, Artificial Sequence
  Description of Artificial Sequence: Synthetic oligonucleotide
  Antisense strand to SEQ ID NO: 714112
uuguuuacucacagcgcua

SEQ ID NO: 714114 - RNA, 19 nt, Artificial Sequence
  Description of Artificial Sequence: Synthetic oligonucleotide
  Sense strand starting at position 3071 of SEQ ID NO: 586388
uaccuagagcuagaguauu

SEQ ID NO: 714115 - RNA, 19 nt, Artificial Sequence
  Description of Artificial Sequence: Synthetic oligonucleotide
  Antisense strand to SEQ ID NO: 714114
aauacucuagcucuaggua

SEQ ID NO: 714116 - RNA, 19 nt, Artificial Sequence
  Description of Artificial Sequence: Synthetic oligonucleotide
  Sense strand starting at position 3077 of SEQ ID NO: 586388
gagcuagaguauucgauua

SEQ ID NO: 714117 - RNA, 19 nt, Artificial Sequence
  Description of Artificial Sequence: Synthetic oligonucleotide
  Antisense strand to SEQ ID NO: 714116
uaaucgaauacucuagcuc

SEQ ID NO: 714118 - RNA, 19 nt, Artificial Sequence
  Description of Artificial Sequence: Synthetic oligonucleotide
  Sense strand starting at position 3082 of SEQ ID NO: 586388
agaguauucgauuaagcaa

SEQ ID NO: 714119 - RNA, 19 nt, Artificial Sequence
  Description of Artificial Sequence: Synthetic oligonucleotide
  Antisense strand to SEQ ID NO: 714118
uugcuuaaucgaauacucu

SEQ ID NO: 714120 - RNA, 19 nt, Artificial Sequence
  Description of Artificial Sequence: Synthetic oligonucleotide
  Sense strand starting at position 3098 of SEQ ID NO: 586388
caaaucaugcggugauauc

SEQ ID NO: 714121 - RNA, 19 nt, Artificial Sequence
  Description of Artificial Sequence: Synthetic oligonucleotide
  Antisense strand to SEQ ID NO: 714120
gauaucaccgcaugauuug

SEQ ID NO: 714122 - RNA, 19 nt, Artificial Sequence
  Description of Artificial Sequence: Synthetic oligonucleotide
  Sense strand starting at position 3107 of SEQ ID NO: 586388
cggugauaucguugaauac

SEQ ID NO: 714123 - RNA, 19 nt, Artificial Sequence
  Description of Artificial Sequence: Synthetic oligonucleotide
  Antisense strand to SEQ ID NO: 714122
guauucaacgauaucaccg

SEQ ID NO: 714124 - RNA, 19 nt, Artificial Sequence
  Description of Artificial Sequence: Synthetic oligonucleotide
  Sense strand starting at position 3108 of SEQ ID NO: 586388
ggugauaucguugaauacu

SEQ ID NO: 714125 - RNA, 19 nt, Artificial Sequence
  Description of Artificial Sequence: Synthetic oligonucleotide
  Antisense strand to SEQ ID NO: 714124
aguauucaacgauaucacc

SEQ ID NO: 714126 - RNA, 19 nt, Artificial Sequence
  Description of Artificial Sequence: Synthetic oligonucleotide
  Sense strand starting at position 3116 of SEQ ID NO: 586388
cguugaauacuuugacccu

SEQ ID NO: 714127 - RNA, 19 nt, Artificial Sequence
  Description of Artificial Sequence: Synthetic oligonucleotide
  Antisense strand to SEQ ID NO: 714126
agggucaaaguauucaacg

SEQ ID NO: 714128 - RNA, 19 nt, Artificial Sequence
  Description of Artificial Sequence: Synthetic oligonucleotide
  Sense strand starting at position 3136 of SEQ ID NO: 586388
gacguuuaguguucucuga

SEQ ID NO: 714129 - RNA, 19 nt, Artificial Sequence
  Description of Artificial Sequence: Synthetic oligonucleotide
  Antisense strand to SEQ ID NO: 714128
ucagagaacacuaaacguc

SEQ ID NO: 714130 - RNA, 19 nt, Artificial Sequence
  Description of Artificial Sequence: Synthetic oligonucleotide
  Sense strand starting at position 3138 of SEQ ID NO: 586388
cguuuaguguucucugaag

SEQ ID NO: 714131 - RNA, 19 nt, Artificial Sequence
  Description of Artificial Sequence: Synthetic oligonucleotide
  Antisense strand to SEQ ID NO: 714130
cuucagagaacacuaaacg

SEQ ID NO: 714132 - RNA, 19 nt, Artificial Sequence
  Description of Artificial Sequence: Synthetic oligonucleotide
  Sense strand starting at position 3140 of SEQ ID NO: 586388
uuuaguguucucugaaguu

SEQ ID NO: 714133 - RNA, 19 nt, Artificial Sequence
  Description of Artificial Sequence: Synthetic oligonucleotide
  Antisense strand to SEQ ID NO: 714132
aacuucagagaacacuaaa

SEQ ID NO: 714134 - RNA, 19 nt, Artificial Sequence
  Description of Artificial Sequence: Synthetic oligonucleotide
  Sense strand starting at position 3239 of SEQ ID NO: 586388
gaagguacuuugguuguaa

SEQ ID NO: 714135 - RNA, 19 nt, Artificial Sequence
  Description of Artificial Sequence: Synthetic oligonucleotide
  Antisense strand to SEQ ID NO: 714134
uuacaaccaaaguaccuuc

SEQ ID NO: 714136 - RNA, 19 nt, Artificial Sequence
  Description of Artificial Sequence: Synthetic oligonucleotide
  Sense strand starting at position 3240 of SEQ ID NO: 586388
aagguacuuugguuguaaa

SEQ ID NO: 714137 - RNA, 19 nt, Artificial Sequence
  Description of Artificial Sequence: Synthetic oligonucleotide
  Antisense strand to SEQ ID NO: 714136
uuuacaaccaaaguaccuu

SEQ ID NO: 714138 - RNA, 19 nt, Artificial Sequence
  Description of Artificial Sequence: Synthetic oligonucleotide
  Sense strand starting at position 3420 of SEQ ID NO: 586388
ggaaucuuaccucaagucu

SEQ ID NO: 714139 - RNA, 19 nt, Artificial Sequence
  Description of Artificial Sequence: Synthetic oligonucleotide
  Antisense strand to SEQ ID NO: 714138
agacuugagguaagauucc

SEQ ID NO: 714140 - RNA, 19 nt, Artificial Sequence
  Description of Artificial Sequence: Synthetic oligonucleotide
  Sense strand starting at position 3502 of SEQ ID NO: 586388
gcuccacgguucucuuuau

SEQ ID NO: 714141 - RNA, 19 nt, Artificial Sequence
  Description of Artificial Sequence: Synthetic oligonucleotide
  Antisense strand to SEQ ID NO: 714140
auaaagagaaccguggagc

SEQ ID NO: 714142 - RNA, 19 nt, Artificial Sequence
  Description of Artificial Sequence: Synthetic oligonucleotide
  Sense strand starting at position 3536 of SEQ ID NO: 586388
gcaagcuauuugcacuuga

SEQ ID NO: 714143 - RNA, 19 nt, Artificial Sequence
  Description of Artificial Sequence: Synthetic oligonucleotide
  Antisense strand to SEQ ID NO: 714142
ucaagugcaaauagcuugc

SEQ ID NO: 714144 - RNA, 19 nt, Artificial Sequence
  Description of Artificial Sequence: Synthetic oligonucleotide
  Sense strand starting at position 3543 of SEQ ID NO: 586388
auuugcacuugaucgcaaa

SEQ ID NO: 714145 - RNA, 19 nt, Artificial Sequence
  Description of Artificial Sequence: Synthetic oligonucleotide
  Antisense strand to SEQ ID NO: 714144
uuugcgaucaagugcaaau

SEQ ID NO: 714146 - RNA, 19 nt, Artificial Sequence
  Description of Artificial Sequence: Synthetic oligonucleotide
  Sense strand starting at position 3677 of SEQ ID NO: 586388
aaacucuucguugagcaga

SEQ ID NO: 714147 - RNA, 19 nt, Artificial Sequence
  Description of Artificial Sequence: Synthetic oligonucleotide
  Antisense strand to SEQ ID NO: 714146
ucugcucaacgaagaguuu

SEQ ID NO: 714148 - RNA, 19 nt, Artificial Sequence
  Description of Artificial Sequence: Synthetic oligonucleotide
  Sense strand starting at position 3679 of SEQ ID NO: 586388
acucuucguugagcagaau

SEQ ID NO: 714149 - RNA, 19 nt, Artificial Sequence
  Description of Artificial Sequence: Synthetic oligonucleotide
  Antisense strand to SEQ ID NO: 714148
auucugcucaacgaagagu

SEQ ID NO: 714150 - RNA, 19 nt, Artificial Sequence
  Description of Artificial Sequence: Synthetic oligonucleotide
  Sense strand starting at position 3962 of SEQ ID NO: 586388
augcaaugagaugguuaac

SEQ ID NO: 714151 - RNA, 19 nt, Artificial Sequence
  Description of Artificial Sequence: Synthetic oligonucleotide
  Antisense strand to SEQ ID NO: 714150
guuaaccaucucauugcau

SEQ ID NO: 714152 - RNA, 19 nt, Artificial Sequence
  Description of Artificial Sequence: Synthetic oligonucleotide
  Sense strand starting at position 3968 of SEQ ID NO: 586388
ugagaugguuaacuuuaaa

SEQ ID NO: 714153 - RNA, 19 nt, Artificial Sequence
  Description of Artificial Sequence: Synthetic oligonucleotide
  Antisense strand to SEQ ID NO: 714152
uuuaaaguuaaccaucuca

SEQ ID NO: 714154 - RNA, 19 nt, Artificial Sequence
  Description of Artificial Sequence: Synthetic oligonucleotide
  Sense strand starting at position 306 of SEQ ID NO: 586389
guuggaauugugcaauuaa

SEQ ID NO: 714155 - RNA, 19 nt, Artificial Sequence
  Description of Artificial Sequence: Synthetic oligonucleotide
  Antisense strand to SEQ ID NO: 714154
uuaauugcacaauuccaac

SEQ ID NO: 714156 - RNA, 19 nt, Artificial Sequence
  Description of Artificial Sequence: Synthetic oligonucleotide
  Sense strand starting at position 468 of SEQ ID NO: 586389
guguguaagacagguuuaa

SEQ ID NO: 714157 - RNA, 19 nt, Artificial Sequence
  Description of Artificial Sequence: Synthetic oligonucleotide
  Antisense strand to SEQ ID NO: 714156
uuaaaccugucuuacacac

SEQ ID NO: 714158 - RNA, 19 nt, Artificial Sequence
  Description of Artificial Sequence: Synthetic oligonucleotide
  Sense strand starting at position 534 of SEQ ID NO: 586389
gaaagaaagucuccggguu

SEQ ID NO: 714159 - RNA, 19 nt, Artificial Sequence
  Description of Artificial Sequence: Synthetic oligonucleotide
  Antisense strand to SEQ ID NO: 714158
aacccggagacuuucuuuc

SEQ ID NO: 714160 - RNA, 19 nt, Artificial Sequence
  Description of Artificial Sequence: Synthetic oligonucleotide
  Sense strand starting at position 535 of SEQ ID NO: 586389
aaagaaagucuccggguuu

SEQ ID NO: 714161 - RNA, 19 nt, Artificial Sequence
  Description of Artificial Sequence: Synthetic oligonucleotide
  Antisense strand to SEQ ID NO: 714160
aaacccggagacuuucuuu

SEQ ID NO: 714162 - RNA, 19 nt, Artificial Sequence
  Description of Artificial Sequence: Synthetic oligonucleotide
  Sense strand starting at position 822 of SEQ ID NO: 586389
ggcacucuuggauaggcaa

SEQ ID NO: 714163 - RNA, 19 nt, Artificial Sequence
  Description of Artificial Sequence: Synthetic oligonucleotide
  Antisense strand to SEQ ID NO: 714162
uugccuauccaagagugcc

SEQ ID NO: 714164 - RNA, 19 nt, Artificial Sequence
  Description of Artificial Sequence: Synthetic oligonucleotide
  Sense strand starting at position 1531 of SEQ ID NO: 586389
agcugaucucaaggaaaca

SEQ ID NO: 714165 - RNA, 19 nt, Artificial Sequence
  Description of Artificial Sequence: Synthetic oligonucleotide
  Antisense strand to SEQ ID NO: 714164
uguuuccuugagaucagcu

SEQ ID NO: 714166 - RNA, 19 nt, Artificial Sequence
  Description of Artificial Sequence: Synthetic oligonucleotide
  Sense strand starting at position 2235 of SEQ ID NO: 586389
gcgggugcccugaggaguu

SEQ ID NO: 714167 - RNA, 19 nt, Artificial Sequence
  Description of Artificial Sequence: Synthetic oligonucleotide
  Antisense strand to SEQ ID NO: 714166
aacuccucagggcacccgc

SEQ ID NO: 714168 - RNA, 19 nt, Artificial Sequence
  Description of Artificial Sequence: Synthetic oligonucleotide
  Sense strand starting at position 2248 of SEQ ID NO: 586389
ggaguuaauuuccgagagg

SEQ ID NO: 714169 - RNA, 19 nt, Artificial Sequence
  Description of Artificial Sequence: Synthetic oligonucleotide
  Antisense strand to SEQ ID NO: 714168
ccucucggaaauuaacucc

SEQ ID NO: 714170 - RNA, 19 nt, Artificial Sequence
  Description of Artificial Sequence: Synthetic oligonucleotide
  Sense strand starting at position 2249 of SEQ ID NO: 586389
gaguuaauuuccgagaggg

SEQ ID NO: 714171 - RNA, 19 nt, Artificial Sequence
  Description of Artificial Sequence: Synthetic oligonucleotide
  Antisense strand to SEQ ID NO: 714170
cccucucggaaauuaacuc

SEQ ID NO: 714172 - RNA, 19 nt, Artificial Sequence
  Description of Artificial Sequence: Synthetic oligonucleotide
  Sense strand starting at position 2459 of SEQ ID NO: 586389
ggaaacugcuccuuuauuc

SEQ ID NO: 714173 - RNA, 19 nt, Artificial Sequence
  Description of Artificial Sequence: Synthetic oligonucleotide
  Antisense strand to SEQ ID NO: 714172
gaauaaaggagcaguuucc

SEQ ID NO: 714174 - RNA, 19 nt, Artificial Sequence
  Description of Artificial Sequence: Synthetic oligonucleotide
  Sense strand starting at position 2600 of SEQ ID NO: 586389
guccgaggguccuucagau

SEQ ID NO: 714175 - RNA, 19 nt, Artificial Sequence
  Description of Artificial Sequence: Synthetic oligonucleotide
  Antisense strand to SEQ ID NO: 714174
aucugaaggacccucggac

SEQ ID NO: 714176 - RNA, 19 nt, Artificial Sequence
  Description of Artificial Sequence: Synthetic oligonucleotide
  Sense strand starting at position 2715 of SEQ ID NO: 586389
cuuugaagccaauguguga

SEQ ID NO: 714177 - RNA, 19 nt, Artificial Sequence
  Description of Artificial Sequence: Synthetic oligonucleotide
  Antisense strand to SEQ ID NO: 714176
ucacacauuggcuucaaag

SEQ ID NO: 714178 - RNA, 19 nt, Artificial Sequence
  Description of Artificial Sequence: Synthetic oligonucleotide
  Sense strand starting at position 2752 of SEQ ID NO: 586389
agugaagcucuuggaauaa

SEQ ID NO: 714179 - RNA, 19 nt, Artificial Sequence
  Description of Artificial Sequence: Synthetic oligonucleotide
  Antisense strand to SEQ ID NO: 714178
uuauuccaagagcuucacu

SEQ ID NO: 714180 - RNA, 19 nt, Artificial Sequence
  Description of Artificial Sequence: Synthetic oligonucleotide
  Sense strand starting at position 2855 of SEQ ID NO: 586389
gggaaacucgcggaagcuu

SEQ ID NO: 714181 - RNA, 19 nt, Artificial Sequence
  Description of Artificial Sequence: Synthetic oligonucleotide
  Antisense strand to SEQ ID NO: 714180
aagcuuccgcgaguuuccc

SEQ ID NO: 714182 - RNA, 19 nt, Artificial Sequence
  Description of Artificial Sequence: Synthetic oligonucleotide
  Sense strand starting at position 2914 of SEQ ID NO: 586389
gagcuauauuccuuuggca

SEQ ID NO: 714183 - RNA, 19 nt, Artificial Sequence
  Description of Artificial Sequence: Synthetic oligonucleotide
  Antisense strand to SEQ ID NO: 714182
ugccaaaggaauauagcuc

SEQ ID NO: 714184 - RNA, 19 nt, Artificial Sequence
  Description of Artificial Sequence: Synthetic oligonucleotide
  Sense strand starting at position 2916 of SEQ ID NO: 586389
gcuauauuccuuuggcaag

SEQ ID NO: 714185 - RNA, 19 nt, Artificial Sequence
  Description of Artificial Sequence: Synthetic oligonucleotide
  Antisense strand to SEQ ID NO: 714184
cuugccaaaggaauauagc

SEQ ID NO: 714186 - RNA, 19 nt, Artificial Sequence
  Description of Artificial Sequence: Synthetic oligonucleotide
  Sense strand starting at position 2977 of SEQ ID NO: 586389
ccucuagguccauguuaca

SEQ ID NO: 714187 - RNA, 19 nt, Artificial Sequence
  Description of Artificial Sequence: Synthetic oligonucleotide
  Antisense strand to SEQ ID NO: 714186
uguaacauggaccuagagg

SEQ ID NO: 714188 - RNA, 19 nt, Artificial Sequence
  Description of Artificial Sequence: Synthetic oligonucleotide
  Sense strand starting at position 3266 of SEQ ID NO: 586389
ccuggaacuucccugugaa

SEQ ID NO: 714189 - RNA, 19 nt, Artificial Sequence
  Description of Artificial Sequence: Synthetic oligonucleotide
  Antisense strand to SEQ ID NO: 714188
uucacagggaaguuccagg

SEQ ID NO: 714190 - RNA, 19 nt, Artificial Sequence
  Description of Artificial Sequence: Synthetic oligonucleotide
  Sense strand starting at position 3267 of SEQ ID NO: 586389
cuggaacuucccugugaau

SEQ ID NO: 714191 - RNA, 19 nt, Artificial Sequence
  Description of Artificial Sequence: Synthetic oligonucleotide
  Antisense strand to SEQ ID NO: 714190
auucacagggaaguuccag

SEQ ID NO: 714192 - RNA, 19 nt, Artificial Sequence
  Description of Artificial Sequence: Synthetic oligonucleotide
  Sense strand starting at position 3269 of SEQ ID NO: 586389
ggaacuucccugugaauua

SEQ ID NO: 714193 - RNA, 19 nt, Artificial Sequence
  Description of Artificial Sequence: Synthetic oligonucleotide
  Antisense strand to SEQ ID NO: 714192
uaauucacagggaaguucc

SEQ ID NO: 714194 - RNA, 19 nt, Artificial Sequence
  Description of Artificial Sequence: Synthetic oligonucleotide
  Sense strand starting at position 3288 of SEQ ID NO: 586389
ggagaaguaaucuguuccu

SEQ ID NO: 714195 - RNA, 19 nt, Artificial Sequence
  Description of Artificial Sequence: Synthetic oligonucleotide
  Antisense strand to SEQ ID NO: 714194
aggaacagauuacuucucc

SEQ ID NO: 714196 - RNA, 19 nt, Artificial Sequence
  Description of Artificial Sequence: Synthetic oligonucleotide
  Sense strand starting at position 3291 of SEQ ID NO: 586389
gaaguaaucuguuccuuug

SEQ ID NO: 714197 - RNA, 19 nt, Artificial Sequence
  Description of Artificial Sequence: Synthetic oligonucleotide
  Antisense strand to SEQ ID NO: 714196
caaaggaacagauuacuuc

SEQ ID NO: 714198 - RNA, 19 nt, Artificial Sequence
  Description of Artificial Sequence: Synthetic oligonucleotide
  Sense strand starting at position 3342 of SEQ ID NO: 586389
aagucaugcccugaaugca

SEQ ID NO: 714199 - RNA, 19 nt, Artificial Sequence
  Description of Artificial Sequence: Synthetic oligonucleotide
  Antisense strand to SEQ ID NO: 714198
ugcauucagggcaugacuu

SEQ ID NO: 714200 - RNA, 19 nt, Artificial Sequence
  Description of Artificial Sequence: Synthetic oligonucleotide
  Sense strand starting at position 3410 of SEQ ID NO: 586389
cugagagcaguccguagaa

SEQ ID NO: 714201 - RNA, 19 nt, Artificial Sequence
  Description of Artificial Sequence: Synthetic oligonucleotide
  Antisense strand to SEQ ID NO: 714200
uucuacggacugcucucag

SEQ ID NO: 714202 - RNA, 19 nt, Artificial Sequence
  Description of Artificial Sequence: Synthetic oligonucleotide
  Sense strand starting at position 3412 of SEQ ID NO: 586389
gagagcaguccguagaaac

SEQ ID NO: 714203 - RNA, 19 nt, Artificial Sequence
  Description of Artificial Sequence: Synthetic oligonucleotide
  Antisense strand to SEQ ID NO: 714202
guuucuacggacugcucuc

SEQ ID NO: 714204 - RNA, 19 nt, Artificial Sequence
  Description of Artificial Sequence: Synthetic oligonucleotide
  Sense strand starting at position 3592 of SEQ ID NO: 586389
gggaaugugaccugugugu

SEQ ID NO: 714205 - RNA, 19 nt, Artificial Sequence
  Description of Artificial Sequence: Synthetic oligonucleotide
  Antisense strand to SEQ ID NO: 714204
acacacaggucacauuccc

SEQ ID NO: 714206 - RNA, 19 nt, Artificial Sequence
  Description of Artificial Sequence: Synthetic oligonucleotide
  Sense strand starting at position 3598 of SEQ ID NO: 586389
gugaccuguguguacaagu

SEQ ID NO: 714207 - RNA, 19 nt, Artificial Sequence
  Description of Artificial Sequence: Synthetic oligonucleotide
  Antisense strand to SEQ ID NO: 714206
acuuguacacacaggucac

SEQ ID NO: 714208 - RNA, 19 nt, Artificial Sequence
  Description of Artificial Sequence: Synthetic oligonucleotide
  Sense strand starting at position 3605 of SEQ ID NO: 586389
guguguacaagucacaaca

SEQ ID NO: 714209 - RNA, 19 nt, Artificial Sequence
  Description of Artificial Sequence: Synthetic oligonucleotide
  Antisense strand to SEQ ID NO: 714208
uguugugacuuguacacac

SEQ ID NO: 714210 - RNA, 19 nt, Artificial Sequence
  Description of Artificial Sequence: Synthetic oligonucleotide
  Sense strand starting at position 3640 of SEQ ID NO: 586389
acaacugauuuguaagacu

SEQ ID NO: 714211 - RNA, 19 nt, Artificial Sequence
  Description of Artificial Sequence: Synthetic oligonucleotide
  Antisense strand to SEQ ID NO: 714210
agucuuacaaaucaguugu

SEQ ID NO: 714212 - RNA, 19 nt, Artificial Sequence
  Description of Artificial Sequence: Synthetic oligonucleotide
  Sense strand starting at position 3643 of SEQ ID NO: 586389
acugauuuguaagacugua

SEQ ID NO: 714213 - RNA, 19 nt, Artificial Sequence
  Description of Artificial Sequence: Synthetic oligonucleotide
  Antisense strand to SEQ ID NO: 714212
uacagucuuacaaaucagu

SEQ ID NO: 714214 - RNA, 19 nt, Artificial Sequence
  Description of Artificial Sequence: Synthetic oligonucleotide
  Sense strand starting at position 3696 of SEQ ID NO: 586389
guaagaacaucaguucuca

SEQ ID NO: 714215 - RNA, 19 nt, Artificial Sequence
  Description of Artificial Sequence: Synthetic oligonucleotide
  Antisense strand to SEQ ID NO: 714214
ugagaacugauguucuuac

SEQ ID NO: 714216 - RNA, 19 nt, Artificial Sequence
  Description of Artificial Sequence: Synthetic oligonucleotide
  Sense strand starting at position 3704 of SEQ ID NO: 586389
aucaguucucacuacguua

SEQ ID NO: 714217 - RNA, 19 nt, Artificial Sequence
  Description of Artificial Sequence: Synthetic oligonucleotide
  Antisense strand to SEQ ID NO: 714216
uaacguagugagaacugau

SEQ ID NO: 714218 - RNA, 19 nt, Artificial Sequence
  Description of Artificial Sequence: Synthetic oligonucleotide
  Sense strand starting at position 3715 of SEQ ID NO: 586389
cuacguuaggacuauauga

SEQ ID NO: 714219 - RNA, 19 nt, Artificial Sequence
  Description of Artificial Sequence: Synthetic oligonucleotide
  Antisense strand to SEQ ID NO: 714218
ucauauaguccuaacguag

SEQ ID NO: 714220 - RNA, 19 nt, Artificial Sequence
  Description of Artificial Sequence: Synthetic oligonucleotide
  Sense strand starting at position 3720 of SEQ ID NO: 586389
uuaggacuauaugagacaa

SEQ ID NO: 714221 - RNA, 19 nt, Artificial Sequence
  Description of Artificial Sequence: Synthetic oligonucleotide
  Antisense strand to SEQ ID NO: 714220
uugucucauauaguccuaa

SEQ ID NO: 714222 - RNA, 19 nt, Artificial Sequence
  Description of Artificial Sequence: Synthetic oligonucleotide
  Sense strand starting at position 3722 of SEQ ID NO: 586389
aggacuauaugagacaaca

SEQ ID NO: 714223 - RNA, 19 nt, Artificial Sequence
  Description of Artificial Sequence: Synthetic oligonucleotide
  Antisense strand to SEQ ID NO: 714222
uguugucucauauaguccu

SEQ ID NO: 714224 - RNA, 19 nt, Artificial Sequence
  Description of Artificial Sequence: Synthetic oligonucleotide
  Sense strand starting at position 3843 of SEQ ID NO: 586389
ugggauggauuccagggaa

SEQ ID NO: 714225 - RNA, 19 nt, Artificial Sequence
  Description of Artificial Sequence: Synthetic oligonucleotide
  Antisense strand to SEQ ID NO: 714224
uucccuggaauccauccca

SEQ ID NO: 714226 - RNA, 19 nt, Artificial Sequence
  Description of Artificial Sequence: Synthetic oligonucleotide
  Sense strand starting at position 3866 of SEQ ID NO: 586389
gaagaauggguuugcugaa

SEQ ID NO: 714227 - RNA, 19 nt, Artificial Sequence
  Description of Artificial Sequence: Synthetic oligonucleotide
  Antisense strand to SEQ ID NO: 714226
uucagcaaacccauucuuc

SEQ ID NO: 714228 - RNA, 19 nt, Artificial Sequence
  Description of Artificial Sequence: Synthetic oligonucleotide
  Sense strand starting at position 3893 of SEQ ID NO: 586389
ugggacaucuauguaaagu

SEQ ID NO: 714229 - RNA, 19 nt, Artificial Sequence
  Description of Artificial Sequence: Synthetic oligonucleotide
  Antisense strand to SEQ ID NO: 714228
acuuuacauagauguccca

SEQ ID NO: 714230 - RNA, 19 nt, Artificial Sequence
  Description of Artificial Sequence: Synthetic oligonucleotide
  Sense strand starting at position 3901 of SEQ ID NO: 586389
cuauguaaaguuugaguuu

SEQ ID NO: 714231 - RNA, 19 nt, Artificial Sequence
  Description of Artificial Sequence: Synthetic oligonucleotide
  Antisense strand to SEQ ID NO: 714230
aaacucaaacuuuacauag

SEQ ID NO: 714232 - RNA, 19 nt, Artificial Sequence
  Description of Artificial Sequence: Synthetic oligonucleotide
  Sense strand starting at position 3910 of SEQ ID NO: 586389
guuugaguuucuccuuuga

SEQ ID NO: 714233 - RNA, 19 nt, Artificial Sequence
  Description of Artificial Sequence: Synthetic oligonucleotide
  Antisense strand to SEQ ID NO: 714232
ucaaaggagaaacucaaac

SEQ ID NO: 714234 - RNA, 19 nt, Artificial Sequence
  Description of Artificial Sequence: Synthetic oligonucleotide
  Sense strand starting at position 137 of SEQ ID NO: 586390
ugcuuucucuuacaggaau

SEQ ID NO: 714235 - RNA, 19 nt, Artificial Sequence
  Description of Artificial Sequence: Synthetic oligonucleotide
  Antisense strand to SEQ ID NO: 714234
auuccuguaagagaaagca

SEQ ID NO: 714236 - RNA, 19 nt, Artificial Sequence
  Description of Artificial Sequence: Synthetic oligonucleotide
  Sense strand starting at position 150 of SEQ ID NO: 586390
aggaauaacuuguagcuuu

SEQ ID NO: 714237 - RNA, 19 nt, Artificial Sequence
  Description of Artificial Sequence: Synthetic oligonucleotide
  Antisense strand to SEQ ID NO: 714236
aaagcuacaaguuauuccu

SEQ ID NO: 714238 - RNA, 19 nt, Artificial Sequence
  Description of Artificial Sequence: Synthetic oligonucleotide
  Sense strand starting at position 212 of SEQ ID NO: 586390
aguguauucucugcaguca

SEQ ID NO: 714239 - RNA, 19 nt, Artificial Sequence
  Description of Artificial Sequence: Synthetic oligonucleotide
  Antisense strand to SEQ ID NO: 714238
ugacugcagagaauacacu

SEQ ID NO: 714240 - RNA, 19 nt, Artificial Sequence
  Description of Artificial Sequence: Synthetic oligonucleotide
  Sense strand starting at position 213 of SEQ ID NO: 586390
guguauucucugcagucau

SEQ ID NO: 714241 - RNA, 19 nt, Artificial Sequence
  Description of Artificial Sequence: Synthetic oligonucleotide
  Antisense strand to SEQ ID NO: 714240
augacugcagagaauacac

SEQ ID NO: 714242 - RNA, 19 nt, Artificial Sequence
  Description of Artificial Sequence: Synthetic oligonucleotide
  Sense strand starting at position 263 of SEQ ID NO: 586390
ccugaaucgugcucacuuc

SEQ ID NO: 714243 - RNA, 19 nt, Artificial Sequence
  Description of Artificial Sequence: Synthetic oligonucleotide
  Antisense strand to SEQ ID NO: 714242
gaagugagcacgauucagg

SEQ ID NO: 714244 - RNA, 19 nt, Artificial Sequence
  Description of Artificial Sequence: Synthetic oligonucleotide
  Sense strand starting at position 801 of SEQ ID NO: 586390
ccuaguuagagucaauguu

SEQ ID NO: 714245 - RNA, 19 nt, Artificial Sequence
  Description of Artificial Sequence: Synthetic oligonucleotide
  Antisense strand to SEQ ID NO: 714244
aacauugacucuaacuagg

SEQ ID NO: 714246 - RNA, 19 nt, Artificial Sequence
  Description of Artificial Sequence: Synthetic oligonucleotide
  Sense strand starting at position 860 of SEQ ID NO: 586390
cguaucuccuaguaaacaa

SEQ ID NO: 714247 - RNA, 19 nt, Artificial Sequence
  Description of Artificial Sequence: Synthetic oligonucleotide
  Antisense strand to SEQ ID NO: 714246
uuguuuacuaggagauacg

SEQ ID NO: 714248 - RNA, 19 nt, Artificial Sequence
  Description of Artificial Sequence: Synthetic oligonucleotide
  Sense strand starting at position 1239 of SEQ ID NO: 586390
gcugccucacuauaagaaa

SEQ ID NO: 714249 - RNA, 19 nt, Artificial Sequence
  Description of Artificial Sequence: Synthetic oligonucleotide
  Antisense strand to SEQ ID NO: 714248
uuucuuauagugaggcagc

SEQ ID NO: 714250 - RNA, 19 nt, Artificial Sequence
  Description of Artificial Sequence: Synthetic oligonucleotide
  Sense strand starting at position 1357 of SEQ ID NO: 586390
agcguauaguuugcaaagu

SEQ ID NO: 714251 - RNA, 19 nt, Artificial Sequence
  Description of Artificial Sequence: Synthetic oligonucleotide
  Antisense strand to SEQ ID NO: 714250
acuuugcaaacuauacgcu

SEQ ID NO: 714252 - RNA, 19 nt, Artificial Sequence
  Description of Artificial Sequence: Synthetic oligonucleotide
  Sense strand starting at position 1368 of SEQ ID NO: 586390
ugcaaagucuccuugcagu

SEQ ID NO: 714253 - RNA, 19 nt, Artificial Sequence
  Description of Artificial Sequence: Synthetic oligonucleotide
  Antisense strand to SEQ ID NO: 714252
acugcaaggagacuuugca

SEQ ID NO: 714254 - RNA, 19 nt, Artificial Sequence
  Description of Artificial Sequence: Synthetic oligonucleotide
  Sense strand starting at position 1374 of SEQ ID NO: 586390
gucuccuugcaguaaugaa

SEQ ID NO: 714255 - RNA, 19 nt, Artificial Sequence
  Description of Artificial Sequence: Synthetic oligonucleotide
  Antisense strand to SEQ ID NO: 714254
uucauuacugcaaggagac

SEQ ID NO: 714256 - RNA, 19 nt, Artificial Sequence
  Description of Artificial Sequence: Synthetic oligonucleotide
  Sense strand starting at position 1390 of SEQ ID NO: 586390
gaaagaagaucguucucaa

SEQ ID NO: 714257 - RNA, 19 nt, Artificial Sequence
  Description of Artificial Sequence: Synthetic oligonucleotide
  Antisense strand to SEQ ID NO: 714256
uugagaacgaucuucuuuc

SEQ ID NO: 714258 - RNA, 19 nt, Artificial Sequence
  Description of Artificial Sequence: Synthetic oligonucleotide
  Sense strand starting at position 1393 of SEQ ID NO: 586390
agaagaucguucucaacca

SEQ ID NO: 714259 - RNA, 19 nt, Artificial Sequence
  Description of Artificial Sequence: Synthetic oligonucleotide
  Antisense strand to SEQ ID NO: 714258
ugguugagaacgaucuucu

SEQ ID NO: 714260 - RNA, 19 nt, Artificial Sequence
  Description of Artificial Sequence: Synthetic oligonucleotide
  Sense strand starting at position 2015 of SEQ ID NO: 586390
gacuccgcccuuuaucaga

SEQ ID NO: 714261 - RNA, 19 nt, Artificial Sequence
  Description of Artificial Sequence: Synthetic oligonucleotide
  Antisense strand to SEQ ID NO: 714260
ucugauaaagggcggaguc

SEQ ID NO: 714262 - RNA, 19 nt, Artificial Sequence
  Description of Artificial Sequence: Synthetic oligonucleotide
  Sense strand starting at position 2020 of SEQ ID NO: 586390
cgcccuuuaucagacaaga

SEQ ID NO: 714263 - RNA, 19 nt, Artificial Sequence
  Description of Artificial Sequence: Synthetic oligonucleotide
  Antisense strand to SEQ ID NO: 714262
ucuugucugauaaagggcg

SEQ ID NO: 714264 - RNA, 19 nt, Artificial Sequence
  Description of Artificial Sequence: Synthetic oligonucleotide
  Sense strand starting at position 2191 of SEQ ID NO: 586390
acucgaaugucaguguaag

SEQ ID NO: 714265 - RNA, 19 nt, Artificial Sequence
  Description of Artificial Sequence: Synthetic oligonucleotide
  Antisense strand to SEQ ID NO: 714264
cuuacacugacauucgagu

SEQ ID NO: 714266 - RNA, 19 nt, Artificial Sequence
  Description of Artificial Sequence: Synthetic oligonucleotide
  Sense strand starting at position 2192 of SEQ ID NO: 586390
cucgaaugucaguguaaga

SEQ ID NO: 714267 - RNA, 19 nt, Artificial Sequence
  Description of Artificial Sequence: Synthetic oligonucleotide
  Antisense strand to SEQ ID NO: 714266
ucuuacacugacauucgag

SEQ ID NO: 714268 - RNA, 19 nt, Artificial Sequence
  Description of Artificial Sequence: Synthetic oligonucleotide
  Sense strand starting at position 2203 of SEQ ID NO: 586390
guguaagaaucaggugucu

SEQ ID NO: 714269 - RNA, 19 nt, Artificial Sequence
  Description of Artificial Sequence: Synthetic oligonucleotide
  Antisense strand to SEQ ID NO: 714268
agacaccugauucuuacac

SEQ ID NO: 714270 - RNA, 19 nt, Artificial Sequence
  Description of Artificial Sequence: Synthetic oligonucleotide
  Sense strand starting at position 2215 of SEQ ID NO: 586390
ggugucugcaaagacuaau

SEQ ID NO: 714271 - RNA, 19 nt, Artificial Sequence
  Description of Artificial Sequence: Synthetic oligonucleotide
  Antisense strand to SEQ ID NO: 714270
auuagucuuugcagacacc

SEQ ID NO: 714272 - RNA, 19 nt, Artificial Sequence
  Description of Artificial Sequence: Synthetic oligonucleotide
  Sense strand starting at position 2221 of SEQ ID NO: 586390
ugcaaagacuaaucgaaac

SEQ ID NO: 714273 - RNA, 19 nt, Artificial Sequence
  Description of Artificial Sequence: Synthetic oligonucleotide
  Antisense strand to SEQ ID NO: 714272
guuucgauuagucuuugca

SEQ ID NO: 714274 - RNA, 19 nt, Artificial Sequence
  Description of Artificial Sequence: Synthetic oligonucleotide
  Sense strand starting at position 2260 of SEQ ID NO: 586390
cagcaaugacuuuggucau

SEQ ID NO: 714275 - RNA, 19 nt, Artificial Sequence
  Description of Artificial Sequence: Synthetic oligonucleotide
  Antisense strand to SEQ ID NO: 714274
augaccaaagucauugcug

SEQ ID NO: 714276 - RNA, 19 nt, Artificial Sequence
  Description of Artificial Sequence: Synthetic oligonucleotide
  Sense strand starting at position 2261 of SEQ ID NO: 586390
agcaaugacuuuggucauu

SEQ ID NO: 714277 - RNA, 19 nt, Artificial Sequence
  Description of Artificial Sequence: Synthetic oligonucleotide
  Antisense strand to SEQ ID NO: 714276
aaugaccaaagucauugcu

SEQ ID NO: 714278 - RNA, 19 nt, Artificial Sequence
  Description of Artificial Sequence: Synthetic oligonucleotide
  Sense strand starting at position 2266 of SEQ ID NO: 586390
ugacuuuggucauuuguuu

SEQ ID NO: 714279 - RNA, 19 nt, Artificial Sequence
  Description of Artificial Sequence: Synthetic oligonucleotide
  Antisense strand to SEQ ID NO: 714278
aaacaaaugaccaaaguca

SEQ ID NO: 714280 - RNA, 19 nt, Artificial Sequence
  Description of Artificial Sequence: Synthetic oligonucleotide
  Sense strand starting at position 2348 of SEQ ID NO: 586390
ggucaacuguuaugccaca

SEQ ID NO: 714281 - RNA, 19 nt, Artificial Sequence
  Description of Artificial Sequence: Synthetic oligonucleotide
  Antisense strand to SEQ ID NO: 714280
uguggcauaacaguugacc

SEQ ID NO: 714282 - RNA, 19 nt, Artificial Sequence
  Description of Artificial Sequence: Synthetic oligonucleotide
  Sense strand starting at position 2854 of SEQ ID NO: 586390
caucuacuauggguugaaa

SEQ ID NO: 714283 - RNA, 19 nt, Artificial Sequence
  Description of Artificial Sequence: Synthetic oligonucleotide
  Antisense strand to SEQ ID NO: 714282
uuucaacccauaguagaug

SEQ ID NO: 714284 - RNA, 19 nt, Artificial Sequence
  Description of Artificial Sequence: Synthetic oligonucleotide
  Sense strand starting at position 3288 of SEQ ID NO: 586390
agugguauuguuuaagaau

SEQ ID NO: 714285 - RNA, 19 nt, Artificial Sequence
  Description of Artificial Sequence: Synthetic oligonucleotide
  Antisense strand to SEQ ID NO: 714284
auucuuaaacaauaccacu

SEQ ID NO: 714286 - RNA, 19 nt, Artificial Sequence
  Description of Artificial Sequence: Synthetic oligonucleotide
  Sense strand starting at position 3291 of SEQ ID NO: 586390
gguauuguuuaagaauucu

SEQ ID NO: 714287 - RNA, 19 nt, Artificial Sequence
  Description of Artificial Sequence: Synthetic oligonucleotide
  Antisense strand to SEQ ID NO: 714286
agaauucuuaaacaauacc

SEQ ID NO: 714288 - RNA, 19 nt, Artificial Sequence
  Description of Artificial Sequence: Synthetic oligonucleotide
  Sense strand starting at position 3332 of SEQ ID NO: 586390
cagucauacuuggaugcau

SEQ ID NO: 714289 - RNA, 19 nt, Artificial Sequence
  Description of Artificial Sequence: Synthetic oligonucleotide
  Antisense strand to SEQ ID NO: 714288
augcauccaaguaugacug

SEQ ID NO: 714290 - RNA, 19 nt, Artificial Sequence
  Description of Artificial Sequence: Synthetic oligonucleotide
  Sense strand starting at position 3364 of SEQ ID NO: 586390
ggcaauuaaagguguaguu

SEQ ID NO: 714291 - RNA, 19 nt, Artificial Sequence
  Description of Artificial Sequence: Synthetic oligonucleotide
  Antisense strand to SEQ ID NO: 714290
aacuacaccuuuaauugcc

SEQ ID NO: 714292 - RNA, 19 nt, Artificial Sequence
  Description of Artificial Sequence: Synthetic oligonucleotide
  Sense strand starting at position 3366 of SEQ ID NO: 586390
caauuaaagguguaguucu

SEQ ID NO: 714293 - RNA, 19 nt, Artificial Sequence
  Description of Artificial Sequence: Synthetic oligonucleotide
  Antisense strand to SEQ ID NO: 714292
agaacuacaccuuuaauug

SEQ ID NO: 714294 - RNA, 19 nt, Artificial Sequence
  Description of Artificial Sequence: Synthetic oligonucleotide
  Sense strand starting at position 3373 of SEQ ID NO: 586390
agguguaguucucuuaaac

SEQ ID NO: 714295 - RNA, 19 nt, Artificial Sequence
  Description of Artificial Sequence: Synthetic oligonucleotide
  Antisense strand to SEQ ID NO: 714294
guuuaagagaacuacaccu

SEQ ID NO: 714296 - RNA, 19 nt, Artificial Sequence
  Description of Artificial Sequence: Synthetic oligonucleotide
  Sense strand starting at position 3447 of SEQ ID NO: 586390
aagguauaguucuccagau

SEQ ID NO: 714297 - RNA, 19 nt, Artificial Sequence
  Description of Artificial Sequence: Synthetic oligonucleotide
  Antisense strand to SEQ ID NO: 714296
aucuggagaacuauaccuu

SEQ ID NO: 714298 - RNA, 19 nt, Artificial Sequence
  Description of Artificial Sequence: Synthetic oligonucleotide
  Sense strand starting at position 3448 of SEQ ID NO: 586390
agguauaguucuccagaua
